United States Patent Application Publication US 2024/0066150 A1 - sequence listing, part 4

SEQ ID NO: 31291 - DNA, 20 bp, synthetic construct
  misc_feature 1..20: note = Description of Artificial Sequence: Synthetic oligonucleotide
  misc_feature 1..20: note = Target: SCN10A; (+) strand; PAM type: NRG; PAM sequence: AGG
  source 1..20: mol_type = other DNA
ttcctggaatatgggtgaag

SEQ ID NO: 31292 - DNA, 20 bp, synthetic construct
  misc_feature 1..20: note = Description of Artificial Sequence: Synthetic oligonucleotide
  misc_feature 1..20: note = Target: SCN10A; (+) strand; PAM type: NRG; PAM sequence: GGG
  source 1..20: mol_type = other DNA
tcctggaatatgggtgaaga

SEQ ID NO: 31293 - DNA, 20 bp, synthetic construct
  misc_feature 1..20: note = Description of Artificial Sequence: Synthetic oligonucleotide
  misc_feature 1..20: note = Target: SCN10A; (+) strand; PAM type: NRG; PAM sequence: GGG
  source 1..20: mol_type = other DNA
cctggaatatgggtgaagag

SEQ ID NO: 31294 - DNA, 20 bp, synthetic construct
  misc_feature 1..20: note = Description of Artificial Sequence: Synthetic oligonucleotide
  misc_feature 1..20: note = Target: SCN10A; (+) strand; PAM type: NRG; PAM sequence: CAG
  source 1..20: mol_type = other DNA
gggtgaagaggggtcccttc

SEQ ID NO: 31295 - DNA, 20 bp, synthetic construct
  misc_feature 1..20: note = Description of Artificial Sequence: Synthetic oligonucleotide
  misc_feature 1..20: note = Target: SCN10A; (+) strand; PAM type: NRG; PAM sequence: AGG
  source 1..20: mol_type = other DNA
ggtgaagaggggtcccttcc

SEQ ID NO: 31296 - DNA, 20 bp, synthetic construct
  misc_feature 1..20: note = Description of Artificial Sequence: Synthetic oligonucleotide
  misc_feature 1..20: note = Target: SCN10A; (+) strand; PAM type: NRG; PAM sequence: GGG
  source 1..20: mol_type = other DNA
gtgaagaggggtcccttcca

SEQ ID NO: 31297 - DNA, 20 bp, synthetic construct
  misc_feature 1..20: note = Description of Artificial Sequence: Synthetic oligonucleotide
  misc_feature 1..20: note = Target: SCN10A; (+) strand; PAM type: NRG; PAM sequence: GAG
  source 1..20: mol_type = other DNA
gaagaggggtcccttccagg

SEQ ID NO: 31298 - DNA, 20 bp, synthetic construct
  misc_feature 1..20: note = Description of Artificial Sequence: Synthetic oligonucleotide
  misc_feature 1..20: note = Target: SCN10A; (+) strand; PAM type: NRG; PAM sequence: CAG
  source 1..20: mol_type = other DNA
ttccagggagtccctcaatc

SEQ ID NO: 31299 - DNA, 20 bp, synthetic construct
  misc_feature 1..20: note = Description of Artificial Sequence: Synthetic oligonucleotide
  misc_feature 1..20: note = Target: SCN10A; (+) strand; PAM type: NRG; PAM sequence: CAG
  source 1..20: mol_type = other DNA
agtccctcaatccagaccaa

SEQ ID NO: 31300 - DNA, 20 bp, synthetic construct
  misc_feature 1..20: note = Description of Artificial Sequence: Synthetic oligonucleotide
  misc_feature 1..20: note = Target: SCN10A; (+) strand; PAM type: NRG; PAM sequence: AGG
  source 1..20: mol_type = other DNA
gtccctcaatccagaccaac

SEQ ID NO: 31301 - DNA, 20 bp, synthetic construct
  misc_feature 1..20: note = Description of Artificial Sequence: Synthetic oligonucleotide
  misc_feature 1..20: note = Target: SCN10A; (+) strand; PAM type: NRG; PAM sequence: CAG
  source 1..20: mol_type = other DNA
caggtgttcctctccatcat

SEQ ID NO: 31302 - DNA, 20 bp, synthetic construct
  misc_feature 1..20: note = Description of Artificial Sequence: Synthetic oligonucleotide
  misc_feature 1..20: note = Target: SCN10A; (+) strand; PAM type: NRG; PAM sequence: TAG
  source 1..20: mol_type = other DNA
gcccactctgatgtttttcc

SEQ ID NO: 31303 - DNA, 20 bp, synthetic construct
  misc_feature 1..20: note = Description of Artificial Sequence: Synthetic oligonucleotide
  misc_feature 1..20: note = Target: SCN10A; (+) strand; PAM type: NRG; PAM sequence: CAG
  source 1..20: mol_type = other DNA
tcctagccatatccttctta

SEQ ID NO: 31304 - DNA, 20 bp, synthetic construct
  misc_feature 1..20: note = Description of Artificial Sequence: Synthetic oligonucleotide
  misc_feature 1..20: note = Target: SCN10A; (+) strand; PAM type: NRG; PAM sequence: CAG
  source 1..20: mol_type = other DNA
atccttcttacagatgacac

SEQ ID NO: 31305 - DNA, 20 bp, synthetic construct
  misc_feature 1..20: note = Description of Artificial Sequence: Synthetic oligonucleotide
  misc_feature 1..20: note = Target: SCN10A; (+) strand; PAM type: NRG; PAM sequence: TGG
  source 1..20: mol_type = other DNA
cttcttacagatgacaccag

SEQ ID NO: 31306 - DNA, 20 bp, synthetic construct
  misc_feature 1..20: note = Description of Artificial Sequence: Synthetic oligonucleotide
  misc_feature 1..20: note = Target: SCN10A; (+) strand; PAM type: NRG; PAM sequence: TGG
  source 1..20: mol_type = other DNA
tccttctgcccacctatacc

SEQ ID NO: 31307 - DNA, 20 bp, synthetic construct
  misc_feature 1..20: note = Description of Artificial Sequence: Synthetic oligonucleotide
  misc_feature 1..20: note = Target: SCN10A; (+) strand; PAM type: NRG; PAM sequence: CAG
  source 1..20: mol_type = other DNA
gcccacctatacctggaaaa

SEQ ID NO: 31308 - DNA, 20 bp, synthetic construct
  misc_feature 1..20: note = Description of Artificial Sequence: Synthetic oligonucleotide
  misc_feature 1..20: note = Target: SCN10A; (+) strand; PAM type: NRG; PAM sequence: AAG
  source 1..20: mol_type = other DNA
cctatacctggaaaacagac

SEQ ID NO: 31309 - DNA, 20 bp, synthetic construct
  misc_feature 1..20: note = Description of Artificial Sequence: Synthetic oligonucleotide
  misc_feature 1..20: note = Target: SCN10A; (+) strand; PAM type: NRG; PAM sequence: CGG
  source 1..20: mol_type = other DNA
cctggaaaacagacaagcta

SEQ ID NO: 31310 - DNA, 20 bp, synthetic construct
  misc_feature 1..20: note = Description of Artificial Sequence: Synthetic oligonucleotide
  misc_feature 1..20: note = Target: SCN10A; (+) strand; PAM type: NRG; PAM sequence: GAG
  source 1..20: mol_type = other DNA
acagacaagctacggcgtat

SEQ ID NO: 31311 - DNA, 20 bp, synthetic construct
  misc_feature 1..20: note = Description of Artificial Sequence: Synthetic oligonucleotide
  misc_feature 1..20: note = Target: SCN10A; (+) strand; PAM type: NRG; PAM sequence: TGG
  source 1..20: mol_type = other DNA
caagctacggcgtatgagcc

SEQ ID NO: 31312 - DNA, 20 bp, synthetic construct
  misc_feature 1..20: note = Description of Artificial Sequence: Synthetic oligonucleotide
  misc_feature 1..20: note = Target: SCN10A; (+) strand; PAM type: NRG; PAM sequence: GGG
  source 1..20: mol_type = other DNA
aagctacggcgtatgagcct

SEQ ID NO: 31313 - DNA, 20 bp, synthetic construct
  misc_feature 1..20: note = Description of Artificial Sequence: Synthetic oligonucleotide
  misc_feature 1..20: note = Target: SCN10A; (+) strand; PAM type: NRG; PAM sequence: GGG
  source 1..20: mol_type = other DNA
agctacggcgtatgagcctg

SEQ ID NO: 31314 - DNA, 20 bp, synthetic construct
  misc_feature 1..20: note = Description of Artificial Sequence: Synthetic oligonucleotide
  misc_feature 1..20: note = Target: SCN10A; (+) strand; PAM type: NRG; PAM sequence: GGG
  source 1..20: mol_type = other DNA
gctacggcgtatgagcctgg

SEQ ID NO: 31315 - DNA, 20 bp, synthetic construct
  misc_feature 1..20: note = Description of Artificial Sequence: Synthetic oligonucleotide
  misc_feature 1..20: note = Target: SCN10A; (+) strand; PAM type: NRG; PAM sequence: GAG
  source 1..20: mol_type = other DNA
gtatgagcctgggggtgcct

SEQ ID NO: 31316 - DNA, 20 bp, synthetic construct
  misc_feature 1..20: note = Description of Artificial Sequence: Synthetic oligonucleotide
  misc_feature 1..20: note = Target: SCN10A; (+) strand; PAM type: NRG; PAM sequence: AGG
  source 1..20: mol_type = other DNA
tatgagcctgggggtgcctg

SEQ ID NO: 31317 - DNA, 20 bp, synthetic construct
  misc_feature 1..20: note = Description of Artificial Sequence: Synthetic oligonucleotide
  misc_feature 1..20: note = Target: SCN10A; (+) strand; PAM type: NRG; PAM sequence: GGG
  source 1..20: mol_type = other DNA
atgagcctgggggtgcctga

SEQ ID NO: 31318 - DNA, 20 bp, synthetic construct
  misc_feature 1..20: note = Description of Artificial Sequence: Synthetic oligonucleotide
  misc_feature 1..20: note = Target: SCN10A; (+) strand; PAM type: NRG; PAM sequence: GGG
  source 1..20: mol_type = other DNA
tgagcctgggggtgcctgag

SEQ ID NO: 31319 - DNA, 20 bp, synthetic construct
  misc_feature 1..20: note = Description of Artificial Sequence: Synthetic oligonucleotide
  misc_feature 1..20: note = Target: SCN10A; (+) strand; PAM type: NRG; PAM sequence: GGG
  source 1..20: mol_type = other DNA
gagcctgggggtgcctgagg

SEQ ID NO: 31320 - DNA, 20 bp, synthetic construct
  misc_feature 1..20: note = Description of Artificial Sequence: Synthetic oligonucleotide
  misc_feature 1..20: note = Target: SCN10A; (+) strand; PAM type: NRG; PAM sequence: AAG
  source 1..20: mol_type = other DNA
gcctgagggggatatgctcc

SEQ ID NO: 31321 - DNA, 20 bp, synthetic construct
  misc_feature 1..20: note = Description of Artificial Sequence: Synthetic oligonucleotide
  misc_feature 1..20: note = Target: SCN10A; (+) strand; PAM type: NRG; PAM sequence: AAG
  source 1..20: mol_type = other DNA
gggggatatgctccaagccc

SEQ ID NO: 31322 - DNA, 20 bp, synthetic construct
  misc_feature 1..20: note = Description of Artificial Sequence: Synthetic oligonucleotide
  misc_feature 1..20: note = Target: SCN10A; (+) strand; PAM type: NRG; PAM sequence: GAG
  source 1..20: mol_type = other DNA
ctccaagcccaagctgaact

SEQ ID NO: 31323 - DNA, 20 bp, synthetic construct
  misc_feature 1..20: note = Description of Artificial Sequence: Synthetic oligonucleotide
  misc_feature 1..20: note = Target: SCN10A; (+) strand; PAM type: NRG; PAM sequence: AGG
  source 1..20: mol_type = other DNA
tccaagcccaagctgaactg

SEQ ID NO: 31324 - DNA, 20 bp, synthetic construct
  misc_feature 1..20: note = Description of Artificial Sequence: Synthetic oligonucleotide
  misc_feature 1..20: note = Target: SCN10A; (+) strand; PAM type: NRG; PAM sequence: GGG
  source 1..20: mol_type = other DNA
ccaagcccaagctgaactga

SEQ ID NO: 31325 - DNA, 20 bp, synthetic construct
  misc_feature 1..20: note = Description of Artificial Sequence: Synthetic oligonucleotide
  misc_feature 1..20: note = Target: SCN10A; (+) strand; PAM type: NRG; PAM sequence: TGG
  source 1..20: mol_type = other DNA
ctgaactgagggccacgacg

SEQ ID NO: 31326 - DNA, 20 bp, synthetic construct
  misc_feature 1..20: note = Description of Artificial Sequence: Synthetic oligonucleotide
  misc_feature 1..20: note = Target: SCN10A; (+) strand; PAM type: NRG; PAM sequence: TGG
  source 1..20: mol_type = other DNA
actgagggccacgacgtggc

SEQ ID NO: 31327 - DNA, 20 bp, synthetic construct
  misc_feature 1..20: note = Description of Artificial Sequence: Synthetic oligonucleotide
  misc_feature 1..20: note = Target: SCN10A; (+) strand; PAM type: NRG; PAM sequence: GGG
  source 1..20: mol_type = other DNA
ctgagggccacgacgtggct

SEQ ID NO: 31328 - DNA, 20 bp, synthetic construct
  misc_feature 1..20: note = Description of Artificial Sequence: Synthetic oligonucleotide
  misc_feature 1..20: note = Target: SCN10A; (+) strand; PAM type: NRG; PAM sequence: TGG
  source 1..20: mol_type = other DNA
gggccacgacgtggctggga

SEQ ID NO: 31329 - DNA, 20 bp, synthetic construct
  misc_feature 1..20: note = Description of Artificial Sequence: Synthetic oligonucleotide
  misc_feature 1..20: note = Target: SCN10A; (+) strand; PAM type: NRG; PAM sequence: GGG
  source 1..20: mol_type = other DNA
ggccacgacgtggctgggat

SEQ ID NO: 31330 - DNA, 20 bp, synthetic construct
  misc_feature 1..20: note = Description of Artificial Sequence: Synthetic oligonucleotide
  misc_feature 1..20: note = Target: SCN10A; (+) strand; PAM type: NRG; PAM sequence: GGG
  source 1..20: mol_type = other DNA
gccacgacgtggctgggatg

SEQ ID NO: 31331 - DNA, 20 bp, synthetic construct
  misc_feature 1..20: note = Description of Artificial Sequence: Synthetic oligonucleotide
  misc_feature 1..20: note = Target: SCN10A; (+) strand; PAM type: NRG; PAM sequence: TGG
  source 1..20: mol_type = other DNA
gacgtggctgggatggggat

SEQ ID NO: 31332 - DNA, 20 bp, synthetic construct
  misc_feature 1..20: note = Description of Artificial Sequence: Synthetic oligonucleotide
  misc_feature 1..20: note = Target: SCN10A; (+) strand; PAM type: NRG; PAM sequence: GGG
  source 1..20: mol_type = other DNA
acgtggctgggatggggatt

SEQ ID NO: 31333 - DNA, 20 bp, synthetic construct
  misc_feature 1..20: note = Description of Artificial Sequence: Synthetic oligonucleotide
  misc_feature 1..20: note = Target: SCN10A; (+) strand; PAM type: NRG; PAM sequence: CAG
  source 1..20: mol_type = other DNA
gctgggatggggattgggtc

SEQ ID NO: 31334 - DNA, 20 bp, synthetic construct
  misc_feature 1..20: note = Description of Artificial Sequence: Synthetic oligonucleotide
  misc_feature 1..20: note = Target: SCN10A; (+) strand; PAM type: NRG; PAM sequence: CAG
  source 1..20: mol_type = other DNA
gatggggattgggtccagcc

SEQ ID NO: 31335 - DNA, 20 bp, synthetic construct
  misc_feature 1..20: note = Description of Artificial Sequence: Synthetic oligonucleotide
  misc_feature 1..20: note = Target: SCN10A; (+) strand; PAM type: NRG; PAM sequence: CAG
  source 1..20: mol_type = other DNA
ggattgggtccagcccagct

SEQ ID NO: 31336 - DNA, 20 bp, synthetic construct
  misc_feature 1..20: note = Description of Artificial Sequence: Synthetic oligonucleotide
  misc_feature 1..20: note = Target: SCN10A; (+) strand; PAM type: NRG; PAM sequence: CAG
  source 1..20: mol_type = other DNA
gggtccagcccagctcagcc

SEQ ID NO: 31337 - DNA, 20 bp, synthetic construct
  misc_feature 1..20: note = Description of Artificial Sequence: Synthetic oligonucleotide
  misc_feature 1..20: note = Target: SCN10A; (+) strand; PAM type: NRG; PAM sequence: CAG
  source 1..20: mol_type = other DNA
cagcccagctcagcccagcc

SEQ ID NO: 31338 - DNA, 20 bp, synthetic construct
  misc_feature 1..20: note = Description of Artificial Sequence: Synthetic oligonucleotide
  misc_feature 1..20: note = Target: SCN10A; (+) strand; PAM type: NRG; PAM sequence: AGG
  source 1..20: mol_type = other DNA
agcccagctcagcccagccc

SEQ ID NO: 31339 - DNA, 20 bp, synthetic construct
  misc_feature 1..20: note = Description of Artificial Sequence: Synthetic oligonucleotide
  misc_feature 1..20: note = Target: SCN10A; (+) strand; PAM type: NRG; PAM sequence: GGG
  source 1..20: mol_type = other DNA
gcccagctcagcccagccca

SEQ ID NO: 31340 - DNA, 20 bp, synthetic construct
  misc_feature 1..20: note = Description of Artificial Sequence: Synthetic oligonucleotide
  misc_feature 1..20: note = Target: SCN10A; (+) strand; PAM type: NRG; PAM sequence: AAG
  source 1..20: mol_type = other DNA
aaaactattaataaaaactc

SEQ ID NO: 31341 - DNA, 20 bp, synthetic construct
  misc_feature 1..20: note = Description of Artificial Sequence: Synthetic oligonucleotide
  misc_feature 1..20: note = Target: SCN10A; (+) strand; PAM type: NRG; PAM sequence: TAG
  source 1..20: mol_type = other DNA
aaaatttttctttgtatttt

SEQ ID NO: 31342 - DNA, 20 bp, synthetic construct
  misc_feature 1..20: note = Description of Artificial Sequence: Synthetic oligonucleotide
  misc_feature 1..20: note = Target: SCN10A; (+) strand; PAM type: NRG; PAM sequence: AAG
  source 1..20: mol_type = other DNA
tttttctttgtatttttaga

SEQ ID NO: 31343 - DNA, 20 bp, synthetic construct
  misc_feature 1..20: note = Description of Artificial Sequence: Synthetic oligonucleotide
  misc_feature 1..20: note = Target: SCN10A; (+) strand; PAM type: NRG; PAM sequence: GAG
  source 1..20: mol_type = other DNA
ttgtatttttagaaagcatt

SEQ ID NO: 31344 - DNA, 20 bp, synthetic construct
  misc_feature 1..20: note = Description of Artificial Sequence: Synthetic oligonucleotide
  misc_feature 1..20: note = Target: SCN10A; (+) strand; PAM type: NRG; PAM sequence: AGG
  source 1..20: mol_type = other DNA
tgtatttttagaaagcattg

SEQ ID NO: 31345 - DNA, 20 bp, synthetic construct
  misc_feature 1..20: note = Description of Artificial Sequence: Synthetic oligonucleotide
  misc_feature 1..20: note = Target: SCN10A; (+) strand; PAM type: NRG; PAM sequence: TAG
  source 1..20: mol_type = other DNA
tgaggccacaattcccttta

SEQ ID NO: 31346 - DNA, 20 bp, synthetic construct
  misc_feature 1..20: note = Description of Artificial Sequence: Synthetic oligonucleotide
  misc_feature 1..20: note = Target: SCN10A; (+) strand; PAM type: NRG; PAM sequence: TGG
  source 1..20: mol_type = other DNA
ccacaattccctttatagaa

SEQ ID NO: 31347 - DNA, 20 bp, synthetic construct
  misc_feature 1..20: note = Description of Artificial Sequence: Synthetic oligonucleotide
  misc_feature 1..20: note = Target: SCN10A; (+) strand; PAM type: NRG; PAM sequence: GAG
  source 1..20: mol_type = other DNA
tcattgcacaaatatttatt

SEQ ID NO: 31348 - DNA, 20 bp, synthetic construct
  misc_feature 1..20: note = Description of Artificial Sequence: Synthetic oligonucleotide
  misc_feature 1..20: note = Target: SCN10A; (+) strand; PAM type: NRG; PAM sequence: GAG
  source 1..20: mol_type = other DNA
gcctcactgttctaaacact

SEQ ID NO: 31349 - DNA, 20 bp, synthetic construct
  misc_feature 1..20: note = Description of Artificial Sequence: Synthetic oligonucleotide
  misc_feature 1..20: note = Target: SCN10A; (+) strand; PAM type: NRG; PAM sequence: GAG
  source 1..20: mol_type = other DNA
ctcactgttctaaacactga

SEQ ID NO: 31350 - DNA, 20 bp, synthetic construct
  misc_feature 1..20: note = Description of Artificial Sequence: Synthetic oligonucleotide
  misc_feature 1..20: note = Target: SCN10A; (+) strand; PAM type: NRG; PAM sequence: AGG
  source 1..20: mol_type = other DNA
tcactgttctaaacactgag

SEQ ID NO: 31351 - DNA, 20 bp, synthetic construct
  misc_feature 1..20: note = Description of Artificial Sequence: Synthetic oligonucleotide
  misc_feature 1..20: note = Target: SCN10A; (+) strand; PAM type: NRG; PAM sequence: AAG
  source 1..20: mol_type = other DNA
tgttctaaacactgagagga

SEQ ID NO: 31352 - DNA, 20 bp, synthetic construct
  misc_feature 1..20: note = Description of Artificial Sequence: Synthetic oligonucleotide
  misc_feature 1..20: note = Target: SCN10A; (+) strand; PAM type: NRG; PAM sequence: AAG
  source 1..20: mol_type = other DNA
cactgagaggaaagatgact

SEQ ID NO: 31353 - DNA, 20 bp, synthetic construct
  misc_feature 1..20: note = Description of Artificial Sequence: Synthetic oligonucleotide
  misc_feature 1..20: note = Target: SCN10A; (+) strand; PAM type: NRG; PAM sequence: CAG
  source 1..20: mol_type = other DNA
gaggaaagatgactaagaca

SEQ ID NO: 31354 - DNA, 20 bp, synthetic construct
  misc_feature 1..20: note = Description of Artificial Sequence: Synthetic oligonucleotide
  misc_feature 1..20: note = Target: SCN10A; (+) strand; PAM type: NRG; PAM sequence: AGG
  source 1..20: mol_type = other DNA
aggaaagatgactaagacac

SEQ ID NO: 31355 - DNA, 20 bp, synthetic construct
  misc_feature 1..20: note = Description of Artificial Sequence: Synthetic oligonucleotide
  misc_feature 1..20: note = Target: SCN10A; (+) strand; PAM type: NRG; PAM sequence: GAG
  source 1..20: mol_type = other DNA
aagacacaggttctgctttt

SEQ ID NO: 31356 - DNA, 20 bp, synthetic construct
  misc_feature 1..20: note = Description of Artificial Sequence: Synthetic oligonucleotide
  misc_feature 1..20: note = Target: SCN10A; (+) strand; PAM type: NRG; PAM sequence: GAG
  source 1..20: mol_type = other DNA
gacacaggttctgcttttga

SEQ ID NO: 31357 - DNA, 20 bp, synthetic construct
  misc_feature 1..20: note = Description of Artificial Sequence: Synthetic oligonucleotide
  misc_feature 1..20: note = Target: SCN10A; (+) strand; PAM type: NRG; PAM sequence: AAG
  source 1..20: mol_type = other DNA
tgcttttgagagctaaacaa

SEQ ID NO: 31358 - DNA, 20 bp, synthetic construct
  misc_feature 1..20: note = Description of Artificial Sequence: Synthetic oligonucleotide
  misc_feature 1..20: note = Target: SCN10A; (+) strand; PAM type: NRG; PAM sequence: GAG
  source 1..20: mol_type = other DNA
tgagagctaaacaaaagatt

SEQ ID NO: 31359 - DNA, 20 bp, synthetic construct
  misc_feature 1..20: note = Description of Artificial Sequence: Synthetic oligonucleotide
  misc_feature 1..20: note = Target: SCN10A; (+) strand; PAM type: NRG; PAM sequence: AGG
  source 1..20: mol_type = other DNA
gagagctaaacaaaagattg

SEQ ID NO: 31360 - DNA, 20 bp, synthetic construct
  misc_feature 1..20: note = Description of Artificial Sequence: Synthetic oligonucleotide
  misc_feature 1..20: note = Target: SCN10A; (+) strand; PAM type: NRG; PAM sequence: GGG
  source 1..20: mol_type = other DNA
agagctaaacaaaagattga

SEQ ID NO: 31361 - DNA, 20 bp, synthetic construct
  misc_feature 1..20: note = Description of Artificial Sequence: Synthetic oligonucleotide
  misc_feature 1..20: note = Target: SCN10A; (+) strand; PAM type: NRG; PAM sequence: AAG
  source 1..20: mol_type = other DNA
gctaaacaaaagattgaggg

SEQ ID NO: 31362 - DNA, 20 bp, synthetic construct
  misc_feature 1..20: note = Description of Artificial Sequence: Synthetic oligonucleotide
  misc_feature 1..20: note = Target: SCN10A; (+) strand; PAM type: NRG; PAM sequence: CAG
  source 1..20: mol_type = other DNA
aaacaaaagattgagggaag

SEQ ID NO: 31363 - DNA, 20 bp, synthetic construct
  misc_feature 1..20: note = Description of Artificial Sequence: Synthetic oligonucleotide
  misc_feature 1..20: note = Target: SCN10A; (+) strand; PAM type: NRG; PAM sequence: TGG
  source 1..20: mol_type = other DNA
tgagggaagcagatacatca

SEQ ID NO: 31364 - DNA, 20 bp, synthetic construct
  misc_feature 1..20: note = Description of Artificial Sequence: Synthetic oligonucleotide
  misc_feature 1..20: note = Target: SCN10A; (+) strand; PAM type: NRG; PAM sequence: TGG
  source 1..20: mol_type = other DNA
gatacatcatggccttcctc

SEQ ID NO: 31365 - DNA, 20 bp, synthetic construct
  misc_feature 1..20: note = Description of Artificial Sequence: Synthetic oligonucleotide
  misc_feature 1..20: note = Target: SCN10A; (+) strand; PAM type: NRG; PAM sequence: GGG
  source 1..20: mol_type = other DNA
atacatcatggccttcctct

SEQ ID NO: 31366 - DNA, 20 bp, synthetic construct
  misc_feature 1..20: note = Description of Artificial Sequence: Synthetic oligonucleotide
  misc_feature 1..20: note = Target: SCN10A; (+) strand; PAM type: NRG; PAM sequence: TGG
  source 1..20: mol_type = other DNA
gccttcctctgggtccttca

SEQ ID NO: 31367 - DNA, 20 bp, synthetic construct
  misc_feature 1..20: note = Description of Artificial Sequence: Synthetic oligonucleotide
  misc_feature 1..20: note = Target: SCN10A; (+) strand; PAM type: NRG; PAM sequence: AAG
  source 1..20: mol_type = other DNA
ggtccttcatggtccaaatc

SEQ ID NO: 31368 - DNA, 20 bp, synthetic construct
  misc_feature 1..20: note = Description of Artificial Sequence: Synthetic oligonucleotide
  misc_feature 1..20: note = Target: SCN10A; (+) strand; PAM type: NRG; PAM sequence: GAG
  source 1..20: mol_type = other DNA
tccttcatggtccaaatcaa

SEQ ID NO: 31369 - DNA, 20 bp, synthetic construct
  misc_feature 1..20: note = Description of Artificial Sequence: Synthetic oligonucleotide
  misc_feature 1..20: note = Target: SCN10A; (+) strand; PAM type: NRG; PAM sequence: CAG
  source 1..20: mol_type = other DNA
tggtccaaatcaagagtttt

SEQ ID NO: 31370 - DNA, 20 bp, synthetic construct
  misc_feature 1..20: note = Description of Artificial Sequence: Synthetic oligonucleotide
  misc_feature 1..20: note = Target: SCN10A; (+) strand; PAM type: NRG; PAM sequence: TGG
  source 1..20: mol_type = other DNA
tccaaatcaagagttttcag

SEQ ID NO: 31371 - DNA, 20 bp, synthetic construct
  misc_feature 1..20: note = Description of Artificial Sequence: Synthetic oligonucleotide
  misc_feature 1..20: note = Target: SCN10A; (+) strand; PAM type: NRG; PAM sequence: TGG
  source 1..20: mol_type = other DNA
agagttttcagtggtgttta

SEQ ID NO: 31372 - DNA, 20 bp, synthetic construct
  misc_feature 1..20: note = Description of Artificial Sequence: Synthetic oligonucleotide
  misc_feature 1..20: note = Target: SCN10A; (+) strand; PAM type: NRG; PAM sequence: TGG
  source 1..20: mol_type = other DNA
gttttcagtggtgtttatgg

SEQ ID NO: 31373 - DNA, 20 bp, synthetic construct
  misc_feature 1..20: note = Description of Artificial Sequence: Synthetic oligonucleotide
  misc_feature 1..20: note = Target: SCN10A; (+) strand; PAM type: NRG; PAM sequence: AAG
  source 1..20: mol_type = other DNA
acgtttccccctttcaactc

SEQ ID NO: 31374 - DNA, 20 bp, synthetic construct
  misc_feature 1..20: note = Description of Artificial Sequence: Synthetic oligonucleotide
  misc_feature 1..20: note = Target: SCN10A; (+) strand; PAM type: NRG; PAM sequence: GAG
  source 1..20: mol_type = other DNA
gtttccccctttcaactcaa

SEQ ID NO: 31375 - DNA, 20 bp, synthetic construct
  misc_feature 1..20: note = Description of Artificial Sequence: Synthetic oligonucleotide
  misc_feature 1..20: note = Target: SCN10A; (+) strand; PAM type: NRG; PAM sequence: AGG
  source 1..20: mol_type = other DNA
tttccccctttcaactcaag

SEQ ID NO: 31376 - DNA, 20 bp, synthetic construct
  misc_feature 1..20: note = Description of Artificial Sequence: Synthetic oligonucleotide
  misc_feature 1..20: note = Target: SCN10A; (+) strand; PAM type: NRG; PAM sequence: GGG
  source 1..20: mol_type = other DNA
ttccccctttcaactcaaga

SEQ ID NO: 31377 - DNA, 20 bp, synthetic construct
  misc_feature 1..20: note = Description of Artificial Sequence: Synthetic oligonucleotide
  misc_feature 1..20: note = Target: SCN10A; (+) strand; PAM type: NRG; PAM sequence: TGG
  source 1..20: mol_type = other DNA
ccctttcaactcaagagggc

SEQ ID NO: 31378 - DNA, 20 bp, synthetic construct
  misc_feature 1..20: note = Description of Artificial Sequence: Synthetic oligonucleotide
  misc_feature 1..20: note = Target: SCN10A; (+) strand; PAM type: NRG; PAM sequence: TAG
  source 1..20: mol_type = other DNA
tcaactcaagagggctggtt

SEQ ID NO: 31379 - DNA, 20 bp, synthetic construct
  misc_feature 1..20: note = Description of Artificial Sequence: Synthetic oligonucleotide
  misc_feature 1..20: note = Target: SCN10A; (+) strand; PAM type: NRG; PAM sequence: CGG
  source 1..20: mol_type = other DNA
gagggctggtttagaactca

SEQ ID NO: 31380 - DNA, 20 bp, synthetic construct
  misc_feature 1..20: note = Description of Artificial Sequence: Synthetic oligonucleotide
  misc_feature 1..20: note = Target: SCN10A; (+) strand; PAM type: NRG; PAM sequence: GAG
  source 1..20: mol_type = other DNA
gggctggtttagaactcacg

SEQ ID NO: 31381 - DNA, 20 bp, synthetic construct
  misc_feature 1..20: note = Description of Artificial Sequence: Synthetic oligonucleotide
  misc_feature 1..20: note = Target: SCN10A; (+) strand; PAM type: NRG; PAM sequence: AGG
  source 1..20: mol_type = other DNA
ggctggtttagaactcacgg

SEQ ID NO: 31382 - DNA, 20 bp, synthetic construct
  misc_feature 1..20: note = Description of Artificial Sequence: Synthetic oligonucleotide
  misc_feature 1..20: note = Target: SCN10A; (+) strand; PAM type: NRG; PAM sequence: GGG
  source 1..20: mol_type = other DNA
gctggtttagaactcacgga

SEQ ID NO: 31383 - DNA, 20 bp, synthetic construct
  misc_feature 1..20: note = Description of Artificial Sequence: Synthetic oligonucleotide
  misc_feature 1..20: note = Target: SCN10A; (+) strand; PAM type: NRG; PAM sequence: GGG
  source 1..20: mol_type = other DNA
ctggtttagaactcacggag

SEQ ID NO: 31384 - DNA, 20 bp, synthetic construct
  misc_feature 1..20: note = Description of Artificial Sequence: Synthetic oligonucleotide
  misc_feature 1..20: note = Target: SCN10A; (+) strand; PAM type: NRG; PAM sequence: GAG
  source 1..20: mol_type = other DNA
gaactcacggaggggttttt

SEQ ID NO: 31385 - DNA, 20 bp, synthetic construct
  misc_feature 1..20: note = Description of Artificial Sequence: Synthetic oligonucleotide
  misc_feature 1..20: note = Target: SCN10A; (+) strand; PAM type: NRG; PAM sequence: AGG
  source 1..20: mol_type = other DNA
aactcacggaggggtttttg

SEQ ID NO: 31386 - DNA, 20 bp, synthetic construct
  misc_feature 1..20: note = Description of Artificial Sequence: Synthetic oligonucleotide
  misc_feature 1..20: note = Target: SCN10A; (+) strand; PAM type: NRG; PAM sequence: GGG
  source 1..20: mol_type = other DNA
actcacggaggggtttttga

SEQ ID NO: 31387 - DNA, 20 bp, synthetic construct
  misc_feature 1..20: note = Description of Artificial Sequence: Synthetic oligonucleotide
  misc_feature 1..20: note = Target: SCN10A; (+) strand; PAM type: NRG; PAM sequence: AAG
  source 1..20: mol_type = other DNA
cggaggggtttttgagggta

SEQ ID NO: 31388 - DNA, 20 bp, synthetic construct
  misc_feature 1..20: note = Description of Artificial Sequence: Synthetic oligonucleotide
  misc_feature 1..20: note = Target: SCN10A; (+) strand; PAM type: NRG; PAM sequence: GAG
  source 1..20: mol_type = other DNA
gaggggtttttgagggtaaa

SEQ ID NO: 31389 - DNA, 20 bp, synthetic construct
  misc_feature 1..20: note = Description of Artificial Sequence: Synthetic oligonucleotide
  misc_feature 1..20: note = Target: SCN10A; (+) strand; PAM type: NRG; PAM sequence: AGG
  source 1..20: mol_type = other DNA
aggggtttttgagggtaaag

SEQ ID NO: 31390 - DNA, 20 bp, synthetic construct
  misc_feature 1..20: note = Description of Artificial Sequence: Synthetic oligonucleotide
  misc_feature 1..20: note = Target: SCN10A; (+) strand; PAM type: NRG; PAM sequence: AAG
  source 1..20: mol_type = other DNA
ggtttttgagggtaaagagg

SEQ ID NO: 31391 - DNA, 20 bp, synthetic construct
  misc_feature 1..20: note = Description of Artificial Sequence: Synthetic oligonucleotide
  misc_feature 1..20: note = Target: SCN10A; (+) strand; PAM type: NRG; PAM sequence: AGG
  source 1..20: mol_type = other DNA
gtttttgagggtaaagagga

SEQ ID NO: 31392 - DNA, 20 bp, synthetic construct
  misc_feature 1..20: note = Description of Artificial Sequence: Synthetic oligonucleotide
  misc_feature 1..20: note = Target: SCN10A; (+) strand; PAM type: NRG; PAM sequence: TAG
  source 1..20: mol_type = other DNA
ggaaggcccacgtctctccg

SEQ ID NO: 31393 - DNA, 20 bp, synthetic construct
  misc_feature 1..20: note = Description of Artificial Sequence: Synthetic oligonucleotide
  misc_feature 1..20: note = Target: SCN10A; (+) strand; PAM type: NRG; PAM sequence: TAG
  source 1..20: mol_type = other DNA
cgtctctccgtagtgtctga

SEQ ID NO: 31394 - DNA, 20 bp, synthetic construct
  misc_feature 1..20: note = Description of Artificial Sequence: Synthetic oligonucleotide
  misc_feature 1..20: note = Target: SCN10A; (+) strand; PAM type: NRG; PAM sequence: AGG
  source 1..20: mol_type = other DNA
gtctctccgtagtgtctgat

SEQ ID NO: 31395 - DNA, 20 bp, synthetic construct
  misc_feature 1..20: note = Description of Artificial Sequence: Synthetic oligonucleotide
  misc_feature 1..20: note = Target: SCN10A; (+) strand; PAM type: NRG; PAM sequence: GGG
  source 1..20: mol_type = other DNA
tctctccgtagtgtctgata

SEQ ID NO: 31396 - DNA, 20 bp, synthetic construct
  misc_feature 1..20: note = Description of Artificial Sequence: Synthetic oligonucleotide
  misc_feature 1..20: note = Target: SCN10A; (+) strand; PAM type: NRG; PAM sequence: GAG
  source 1..20: mol_type = other DNA
cgtagtgtctgatagggcat

SEQ ID NO: 31397 - DNA, 20 bp, synthetic construct
  misc_feature 1..20: note = Description of Artificial Sequence: Synthetic oligonucleotide
  misc_feature 1..20: note = Target: SCN10A; (+) strand; PAM type: NRG; PAM sequence: CAG
  source 1..20: mol_type = other DNA
gtctgatagggcatgagatg

SEQ ID NO: 31398 - DNA, 20 bp, synthetic construct
  misc_feature 1..20: note = Description of Artificial Sequence: Synthetic oligonucleotide
  misc_feature 1..20: note = Target: SCN10A; (+) strand; PAM type: NRG; PAM sequence: CGG
  source 1..20: mol_type = other DNA
ggcatgagatgcagatacca

SEQ ID NO: 31399 - DNA, 20 bp, synthetic construct
  misc_feature 1..20: note = Description of Artificial Sequence: Synthetic oligonucleotide
  misc_feature 1..20: note = Target: SCN10A; (+) strand; PAM type: NRG; PAM sequence: CAG
  source 1..20: mol_type = other DNA
tgagatgcagataccacggc

SEQ ID NO: 31400 - DNA, 20 bp, synthetic construct
  misc_feature 1..20: note = Description of Artificial Sequence: Synthetic oligonucleotide
  misc_feature 1..20: note = Target: SCN10A; (+) strand; PAM type: NRG; PAM sequence: AGG
  source 1..20: mol_type = other DNA
gagatgcagataccacggcc

SEQ ID NO: 31401 - DNA, 20 bp, synthetic construct
  misc_feature 1..20: note = Description of Artificial Sequence: Synthetic oligonucleotide
  misc_feature 1..20: note = Target: SCN10A; (+) strand; PAM type: NRG; PAM sequence: TGG
  source 1..20: mol_type = other DNA
acggccaggctgctgccacc

SEQ ID NO: 31402 - DNA, 20 bp, synthetic construct
  misc_feature 1..20: note = Description of Artificial Sequence: Synthetic oligonucleotide
  misc_feature 1..20: note = Target: SCN10A; (+) strand; PAM type: NRG; PAM sequence: GGG
  source 1..20: mol_type = other DNA
cggccaggctgctgccacct

SEQ ID NO: 31403 - DNA, 20 bp, synthetic construct
  misc_feature 1..20: note = Description of Artificial Sequence: Synthetic oligonucleotide
  misc_feature 1..20: note = Target: SCN10A; (+) strand; PAM type: NRG; PAM sequence: GGG
  source 1..20: mol_type = other DNA
ggccaggctgctgccacctg

SEQ ID NO: 31404 - DNA, 20 bp, synthetic construct
  misc_feature 1..20: note = Description of Artificial Sequence: Synthetic oligonucleotide
  misc_feature 1..20: note = Target: SCN10A; (+) strand; PAM type: NRG; PAM sequence: CGG
  source 1..20: mol_type = other DNA
tggggcatgtgtgtctgatg

SEQ ID NO: 31405 - DNA, 20 bp, synthetic construct
  misc_feature 1..20: note = Description of Artificial Sequence: Synthetic oligonucleotide
  misc_feature 1..20: note = Target: SCN10A; (+) strand; PAM type: NRG; PAM sequence: GGG
  source 1..20: mol_type = other DNA
ggggcatgtgtgtctgatgc

SEQ ID NO: 31406 - DNA, 20 bp, synthetic construct
  misc_feature 1..20: note = Description of Artificial Sequence: Synthetic oligonucleotide
  misc_feature 1..20: note = Target: SCN10A; (+) strand; PAM type: NRG; PAM sequence: AAG
  source 1..20: mol_type = other DNA
tgtctgatgcgggcgccctc

SEQ ID NO: 31407 - DNA, 20 bp, synthetic construct
  misc_feature 1..20: note = Description of Artificial Sequence: Synthetic oligonucleotide
  misc_feature 1..20: note = Target: SCN10A; (+) strand; PAM type: NRG; PAM sequence: TGG
  source 1..20: mol_type = other DNA
gatgcgggcgccctcaagcc

SEQ ID NO: 31408 - DNA, 20 bp, synthetic construct
  misc_feature 1..20: note = Description of Artificial Sequence: Synthetic oligonucleotide
  misc_feature 1..20: note = Target: SCN10A; (+) strand; PAM type: NRG; PAM sequence: GGG
  source 1..20: mol_type = other DNA
atgcgggcgccctcaagcct

SEQ ID NO: 31409 - DNA, 20 bp, synthetic construct
  misc_feature 1..20: note = Description of Artificial Sequence: Synthetic oligonucleotide
  misc_feature 1..20: note = Target: SCN10A; (+) strand; PAM type: NRG; PAM sequence: GAG
  source 1..20: mol_type = other DNA
gcgggcgccctcaagcctgg

SEQ ID NO: 31410 - DNA, 20 bp, synthetic construct
  misc_feature 1..20: note = Description of Artificial Sequence: Synthetic oligonucleotide
  misc_feature 1..20: note = Target: SCN10A; (+) strand; PAM type: NRG; PAM sequence: GAG
  source 1..20: mol_type = other DNA
gcgccctcaagcctgggagt

SEQ ID NO: 31411 - DNA, 20 bp, synthetic construct
  misc_feature 1..20: note = Description of Artificial Sequence: Synthetic oligonucleotide
  misc_feature 1..20: note = Target: SCN10A; (+) strand; PAM type: NRG; PAM sequence: AGG
  source 1..20: mol_type = other DNA
cgccctcaagcctgggagtg

SEQ ID NO: 31412 - DNA, 20 bp, synthetic construct
  misc_feature 1..20: note = Description of Artificial Sequence: Synthetic oligonucleotide
  misc_feature 1..20: note = Target: SCN10A; (+) strand; PAM type: NRG; PAM sequence: CAG
  source 1..20: mol_type = other DNA
cctcaagcctgggagtgagg

SEQ ID NO: 31413 - DNA, 20 bp, synthetic construct
  misc_feature 1..20: note = Description of Artificial Sequence: Synthetic oligonucleotide
  misc_feature 1..20: note = Target: SCN10A; (+) strand; PAM type: NRG; PAM sequence: AAG
  source 1..20: mol_type = other DNA
aagcctgggagtgaggcagc

SEQ ID NO: 31414 - DNA, 20 bp, synthetic construct
  misc_feature 1..20: note = Description of Artificial Sequence: Synthetic oligonucleotide
  misc_feature 1..20: note = Target: SCN10A; (+) strand; PAM type: NRG; PAM sequence: TGG
  source 1..20: mol_type = other DNA
cctgggagtgaggcagcaag

SEQ ID NO: 31415 - DNA, 20 bp, synthetic construct
  misc_feature 1..20: note = Description of Artificial Sequence: Synthetic oligonucleotide
  misc_feature 1..20: note = Target: SCN10A; (+) strand; PAM type: NRG; PAM sequence: GGG
  source 1..20: mol_type = other DNA
ctgggagtgaggcagcaagt

SEQ ID NO: 31416 - DNA, 20 bp, synthetic construct
  misc_feature 1..20: note = Description of Artificial Sequence: Synthetic oligonucleotide
  misc_feature 1..20: note = Target: SCN10A; (+) strand; PAM type: NRG; PAM sequence: CAG
  source 1..20: mol_type = other DNA
agtgaggcagcaagtgggca

SEQ ID NO: 31417 - DNA, 20 bp, synthetic construct
  misc_feature 1..20: note = Description of Artificial Sequence: Synthetic oligonucleotide
  misc_feature 1..20: note = Target: SCN10A; (+) strand; PAM type: NRG; PAM sequence: TGG
  source 1..20: mol_type = other DNA
cacagcttgtttgtcttctg

SEQ ID NO: 31418 - DNA, 20 bp, synthetic construct
  misc_feature 1..20: note = Description of Artificial Sequence: Synthetic oligonucleotide
  misc_feature 1..20: note = Target: SCN10A; (+) strand; PAM type: NRG; PAM sequence: CAG
  source 1..20: mol_type = other DNA
tgtttgtcttctgtggatcc

SEQ ID NO: 31419 - DNA, 20 bp, synthetic construct
  misc_feature 1..20: note = Description of Artificial Sequence: Synthetic oligonucleotide
  misc_feature 1..20: note = Target: SCN10A; (+) strand; PAM type: NRG; PAM sequence: AGG
  source 1..20: mol_type = other DNA
gtttgtcttctgtggatccc

SEQ ID NO: 31420 - DNA, 20 bp, synthetic construct
  misc_feature 1..20: note = Description of Artificial Sequence: Synthetic oligonucleotide
  misc_feature 1..20: note = Target: SCN10A; (+) strand; PAM type: NRG; PAM sequence: GAG
  source 1..20: mol_type = other DNA
gtcttctgtggatcccaggt

SEQ ID NO: 31421 - DNA, 20 bp, synthetic construct
  misc_feature 1..20: note = Description of Artificial Sequence: Synthetic oligonucleotide
  misc_feature 1..20: note = Target: SCN10A; (+) strand; PAM type: NRG; PAM sequence: TGG
  source 1..20: mol_type = other DNA
caggtgagtgttcgctcaac

SEQ ID NO: 31422 - DNA, 20 bp, synthetic construct
  misc_feature 1..20: note = Description of Artificial Sequence: Synthetic oligonucleotide
  misc_feature 1..20: note = Target: SCN10A; (+) strand; PAM type: NRG; PAM sequence: TGG
  source 1..20: mol_type = other DNA
gtgttcgctcaactggattc

SEQ ID NO: 31423 - DNA, 20 bp, synthetic construct
  misc_feature 1..20: note = Description of Artificial Sequence: Synthetic oligonucleotide
  misc_feature 1..20: note = Target: SCN10A; (+) strand; PAM type: NRG; PAM sequence: CAG
  source 1..20: mol_type = other DNA
attctggccctaattaacat

SEQ ID NO: 31424 - DNA, 20 bp, synthetic construct
  misc_feature 1..20: note = Description of Artificial Sequence: Synthetic oligonucleotide
  misc_feature 1..20: note = Target: SCN10A; (+) strand; PAM type: NRG; PAM sequence: GAG
  source 1..20: mol_type = other DNA
gccctaattaacatcagtgt

SEQ ID NO: 31425 - DNA, 20 bp, synthetic construct
  misc_feature 1..20: note = Description of Artificial Sequence: Synthetic oligonucleotide
  misc_feature 1..20: note = Target: SCN10A; (+) strand; PAM type: NRG; PAM sequence: AGG
  source 1..20: mol_type = other DNA
ccctaattaacatcagtgtg

SEQ ID NO: 31426 - DNA, 20 bp, synthetic construct
  misc_feature 1..20: note = Description of Artificial Sequence: Synthetic oligonucleotide
  misc_feature 1..20: note = Target: SCN10A; (+) strand; PAM type: NRG; PAM sequence: GGG
  source 1..20: mol_type = other DNA
cctaattaacatcagtgtga

SEQ ID NO: 31427 - DNA, 20 bp, synthetic construct
  misc_feature 1..20: note = Description of Artificial Sequence: Synthetic oligonucleotide
  misc_feature 1..20: note = Target: SCN10A; (+) strand; PAM type: NRG; PAM sequence: GGG
  source 1..20: mol_type = other DNA
ctaattaacatcagtgtgag

SEQ ID NO: 31428 - DNA, 20 bp, synthetic construct
  misc_feature 1..20: note = Description of Artificial Sequence: Synthetic oligonucleotide
  misc_feature 1..20: note = Target: SCN10A; (+) strand; PAM type: NRG; PAM sequence: GGG
  source 1..20: mol_type = other DNA
taattaacatcagtgtgagg

SEQ ID NO: 31429 - DNA, 20 bp, synthetic construct
  misc_feature 1..20: note = Description of Artificial Sequence: Synthetic oligonucleotide
  misc_feature 1..20: note = Target: SCN10A; (+) strand; PAM type: NRG; PAM sequence: TGG
  source 1..20: mol_type = other DNA
catcagtgtgagggggcctg

SEQ ID NO: 31430 - DNA, 20 bp, synthetic construct
  misc_feature 1..20: note = Description of Artificial Sequence: Synthetic oligonucleotide
  misc_feature 1..20: note = Target: SCN10A; (+) strand; PAM type: NRG; PAM sequence: AAG
  source 1..20: mol_type = other DNA
ctgtcccttcaccttctgtg

SEQ ID NO: 31431 - DNA, 20 bp, synthetic construct
  misc_feature 1..20: note = Description of Artificial Sequence: Synthetic oligonucleotide
  misc_feature 1..20: note = Target: SCN10A; (+) strand; PAM type: NRG; PAM sequence: CAG
  source 1..20: mol_type = other DNA
tcccttcaccttctgtgaag

SEQ ID NO: 31432 - DNA, 20 bp, synthetic construct
  misc_feature 1..20: note = Description of Artificial Sequence: Synthetic oligonucleotide
  misc_feature 1..20: note = Target: SCN10A; (+) strand; PAM type: NRG; PAM sequence: TGG
  source 1..20: mol_type = other DNA
ccttctgtgaagcagtcatc

SEQ ID NO: 31433 - DNA, 20 bp, synthetic construct
  misc_feature 1..20: note = Description of Artificial Sequence: Synthetic oligonucleotide
  misc_feature 1..20: note = Target: SCN10A; (+) strand; PAM type: NRG; PAM sequence: CAG
  source 1..20: mol_type = other DNA
aagcagtcatctggttcttc

SEQ ID NO: 31434 - DNA, 20 bp, synthetic construct
  misc_feature 1..20: note = Description of Artificial Sequence: Synthetic oligonucleotide
  misc_feature 1..20: note = Target: SCN10A; (+) strand; PAM type: NRG; PAM sequence: AGG
  source 1..20: mol_type = other DNA
agcagtcatctggttcttcc

SEQ ID NO: 31435 - DNA, 20 bp, synthetic construct
  misc_feature 1..20: note = Description of Artificial Sequence: Synthetic oligonucleotide
  misc_feature 1..20: note = Target: SCN10A; (+) strand; PAM type: NRG; PAM sequence: CAG
  source 1..20: mol_type = other DNA
ggttcttccaggtcatctgc

SEQ ID NO: 31436 - DNA, 20 bp, synthetic construct
  misc_feature 1..20: note = Description of Artificial Sequence: Synthetic oligonucleotide
  misc_feature 1..20: note = Target: SCN10A; (+) strand; PAM type: NRG; PAM sequence: CAG
  source 1..20: mol_type = other DNA
ttccaggtcatctgccagct

SEQ ID NO: 31437 - DNA, 20 bp, synthetic construct
  misc_feature 1..20: note = Description of Artificial Sequence: Synthetic oligonucleotide
  misc_feature 1..20: note = Target: SCN10A; (+) strand; PAM type: NRG; PAM sequence: AGG
  source 1..20: mol_type = other DNA
tccaggtcatctgccagctc

SEQ ID NO: 31438 - DNA, 20 bp, synthetic construct
  misc_feature 1..20: note = Description of Artificial Sequence: Synthetic oligonucleotide
  misc_feature 1..20: note = Target: SCN10A; (+) strand; PAM type: NRG; PAM sequence: GGG
  source 1..20: mol_type = other DNA
ccaggtcatctgccagctca

SEQ ID NO: 31439 - DNA, 20 bp, synthetic construct
  misc_feature 1..20: note = Description of Artificial Sequence: Synthetic oligonucleotide
  misc_feature 1..20: note = Target: SCN10A; (+) strand; PAM type: NRG; PAM sequence: CAG
  source 1..20: mol_type = other DNA
gccagctcagggatcttcct

SEQ ID NO: 31440 - DNA, 20 bp, synthetic construct
  misc_feature 1..20: note = Description of Artificial Sequence: Synthetic oligonucleotide
  misc_feature 1..20: note = Target: SCN10A; (+) strand; PAM type: NRG; PAM sequence: AGG
  source 1..20: mol_type = other DNA
ccagctcagggatcttcctc

SEQ ID NO: 31441 - DNA, 20 bp, synthetic construct
  misc_feature 1..20: note = Description of Artificial Sequence: Synthetic oligonucleotide
  misc_feature 1..20: note = Target: SCN10A; (+) strand; PAM type: NRG; PAM sequence: CAG
  source 1..20: mol_type = other DNA
gatcttcctcaggatttcct

SEQ ID NO: 31442 - DNA, 20 bp, synthetic construct
  misc_feature 1..20: note = Description of Artificial Sequence: Synthetic oligonucleotide
  misc_feature 1..20: note = Target: SCN10A; (+) strand; PAM type: NRG; PAM sequence: AGG
  source 1..20: mol_type = other DNA
atcttcctcaggatttcctc

SEQ ID NO: 31443 - DNA, 20 bp, synthetic construct
  misc_feature 1..20: note = Description of Artificial Sequence: Synthetic oligonucleotide
  misc_feature 1..20: note = Target: SCN10A; (+) strand; PAM type: NRG; PAM sequence: TAG
  source 1..20: mol_type = other DNA
ctcaggatttcctcaggatc

SEQ ID NO: 31444 - DNA, 20 bp, synthetic construct
  misc_feature 1..20: note = Description of Artificial Sequence: Synthetic oligonucleotide
  misc_feature 1..20: note = Target: SCN10A; (+) strand; PAM type: NRG; PAM sequence: AGG
  source 1..20: mol_type = other DNA
tcaggatttcctcaggatct

SEQ ID NO: 31445 - DNA, 20 bp, synthetic construct
  misc_feature 1..20: note = Description of Artificial Sequence: Synthetic oligonucleotide
  misc_feature 1..20: note = Target: SCN10A; (+) strand; PAM type: NRG; PAM sequence: CAG
  source 1..20: mol_type = other DNA
ggatttcctcaggatctagg

SEQ ID NO: 31446 - DNA, 20 bp, synthetic construct
  misc_feature 1..20: note = Description of Artificial Sequence: Synthetic oligonucleotide
  misc_feature 1..20: note = Target: SCN10A; (+) strand; PAM type: NRG; PAM sequence: CAG
  source 1..20: mol_type = other DNA
gcagtccaccgtgctgccct

SEQ ID NO: 31447 - DNA, 20 bp, synthetic construct
  misc_feature 1..20: note = Description of Artificial Sequence: Synthetic oligonucleotide
  misc_feature 1..20: note = Target: SCN10A; (+) strand; PAM type: NRG; PAM sequence: GAG
  source 1..20: mol_type = other DNA
agtccaccgtgctgccctca

SEQ ID NO: 31448 - DNA, 20 bp, synthetic construct
  misc_feature 1..20: note = Description of Artificial Sequence: Synthetic oligonucleotide
  misc_feature 1..20: note = Target: SCN10A; (+) strand; PAM type: NRG; PAM sequence: AGG
  source 1..20: mol_type = other DNA
gtccaccgtgctgccctcag

SEQ ID NO: 31449 - DNA, 20 bp, synthetic construct
  misc_feature 1..20: note = Description of Artificial Sequence: Synthetic oligonucleotide
  misc_feature 1..20: note = Target: SCN10A; (+) strand; PAM type: NRG; PAM sequence: GAG
  source 1..20: mol_type = other DNA
ccaccgtgctgccctcagag

SEQ ID NO: 31450 - DNA, 20 bp, synthetic construct
  misc_feature 1..20: note = Description of Artificial Sequence: Synthetic oligonucleotide
  misc_feature 1..20: note = Target: SCN10A; (+) strand; PAM type: NRG; PAM sequence: CAG
  source 1..20: mol_type = other DNA
cttgtgtcgtccactccctg

SEQ ID NO: 31451 - DNA, 20 bp, synthetic construct
  misc_feature 1..20: note = Description of Artificial Sequence: Synthetic oligonucleotide
  misc_feature 1..20: note = Target: SCN10A; (+) strand; PAM type: NRG; PAM sequence: AGG
  source 1..20: mol_type = other DNA
ttgtgtcgtccactccctgc

SEQ ID NO: 31452 - DNA, 20 bp, synthetic construct
  misc_feature 1..20: note = Description of Artificial Sequence: Synthetic oligonucleotide
  misc_feature 1..20: note = Target: SCN10A; (+) strand; PAM type: NRG; PAM sequence: GGG
  source 1..20: mol_type = other DNA
tgtgtcgtccactccctgca

SEQ ID NO: 31453 - DNA, 20 bp, synthetic construct
  misc_feature 1..20: note = Description of Artificial Sequence: Synthetic oligonucleotide
  misc_feature 1..20: note = Target: SCN10A; (+) strand; PAM type: NRG; PAM sequence: GGG
  source 1..20: mol_type = other DNA
gtgtcgtccactccctgcag

SEQ ID NO: 31454 - DNA, 20 bp, synthetic construct
  misc_feature 1..20: note = Description of Artificial Sequence: Synthetic oligonucleotide
  misc_feature 1..20: note = Target: SCN10A; (+) strand; PAM type: NRG; PAM sequence: GAG
  source 1..20: mol_type = other DNA
gtcgtccactccctgcaggg

SEQ ID NO: 31455 - DNA, 20 bp, synthetic construct
  misc_feature 1..20: note = Description of Artificial Sequence: Synthetic oligonucleotide
  misc_feature 1..20: note = Target: SCN10A; (+) strand; PAM type: NRG; PAM sequence: AAG
  source 1..20: mol_type = other DNA
gtccactccctgcaggggag

SEQ ID NO: 31456 - DNA, 20 bp, synthetic construct
  misc_feature 1..20: note = Description of Artificial Sequence: Synthetic oligonucleotide
  misc_feature 1..20: note = Target: SCN10A; (+) strand; PAM type: NRG; PAM sequence: CAG
  source 1..20: mol_type = other DNA
ctccctgcaggggagaagcc

SEQ ID NO: 31457 - DNA, 20 bp, synthetic construct
  misc_feature 1..20: note = Description of Artificial Sequence: Synthetic oligonucleotide
  misc_feature 1..20: note = Target: SCN10A; (+) strand; PAM type: NRG; PAM sequence: AGG
  source 1..20: mol_type = other DNA
tccctgcaggggagaagccc

SEQ ID NO: 31458 - DNA, 20 bp, synthetic construct
  misc_feature 1..20: note = Description of Artificial Sequence: Synthetic oligonucleotide
  misc_feature 1..20: note = Target: SCN10A; (+) strand; PAM type: NRG; PAM sequence: GGG
  source 1..20: mol_type = other DNA
ccctgcaggggagaagccca

SEQ ID NO: 31459 - DNA, 20 bp, synthetic construct
  misc_feature 1..20: note = Description of Artificial Sequence: Synthetic oligonucleotide
  misc_feature 1..20: note = Target: SCN10A; (+) strand; PAM type: NRG; PAM sequence: CAG
  source 1..20: mol_type = other DNA
tgcaggggagaagcccaggg

SEQ ID NO: 31460 - DNA, 20 bp, synthetic construct
  misc_feature 1..20: note = Description of Artificial Sequence: Synthetic oligonucleotide
  misc_feature 1..20: note = Target: SCN10A; (+) strand; PAM type: NRG; PAM sequence: CGG
  source 1..20: mol_type = other DNA
gcagtgaactcgtctctccg

SEQ ID NO: 31461 - DNA, 20 bp, synthetic construct
  misc_feature 1..20: note = Description of Artificial Sequence: Synthetic oligonucleotide
  misc_feature 1..20: note = Target: SCN10A; (+) strand; PAM type: NRG; PAM sequence: GGG
  source 1..20: mol_type = other DNA
cagtgaactcgtctctccgc

SEQ ID NO: 31462 - DNA, 20 bp, synthetic construct
  misc_feature 1..20: note = Description of Artificial Sequence: Synthetic oligonucleotide
  misc_feature 1..20: note = Target: SCN10A; (+) strand; PAM type: NRG; PAM sequence: GGG
  source 1..20: mol_type = other DNA
agtgaactcgtctctccgcg

SEQ ID NO: 31463 - DNA, 20 bp, synthetic construct
  misc_feature 1..20: note = Description of Artificial Sequence: Synthetic oligonucleotide
  misc_feature 1..20: note = Target: SCN10A; (+) strand; PAM type: NRG; PAM sequence: CGG
  source 1..20: mol_type = other DNA
actcgtctctccgcggggcc

SEQ ID NO: 31464 - DNA, 20 bp, synthetic construct
  misc_feature 1..20: note = Description of Artificial Sequence: Synthetic oligonucleotide
  misc_feature 1..20: note = Target: SCN10A; (+) strand; PAM type: NRG; PAM sequence: GGG
  source 1..20: mol_type = other DNA
ctcgtctctccgcggggccc

SEQ ID NO: 31465 - DNA, 20 bp, synthetic construct
  misc_feature 1..20: note = Description of Artificial Sequence: Synthetic oligonucleotide
  misc_feature 1..20: note = Target: SCN10A; (+) strand; PAM type: NRG; PAM sequence: GGG
  source 1..20: mol_type = other DNA
tcgtctctccgcggggcccg

SEQ ID NO: 31466 - DNA, 20 bp, synthetic construct
  misc_feature 1..20: note = Description of Artificial Sequence: Synthetic oligonucleotide
  misc_feature 1..20: note = Target: SCN10A; (+) strand; PAM type: NRG; PAM sequence: CGG
  source 1..20: mol_type = other DNA
ggggcccggggaattgcaca

SEQ ID NO: 31467 - DNA, 20 bp, synthetic construct
  misc_feature 1..20: note = Description of Artificial Sequence: Synthetic oligonucleotide
  misc_feature 1..20: note = Target: SCN10A; (+) strand; PAM type: NRG; PAM sequence: CAG
  source 1..20: mol_type = other DNA
ggaattgcacacggtcactg

SEQ ID NO: 31468 - DNA, 20 bp, synthetic construct
  misc_feature 1..20: note = Description of Artificial Sequence: Synthetic oligonucleotide
  misc_feature 1..20: note = Target: SCN10A; (+) strand; PAM type: NRG; PAM sequence: AGG
  source 1..20: mol_type = other DNA
gaattgcacacggtcactgc

SEQ ID NO: 31469 - DNA, 20 bp, synthetic construct
  misc_feature 1..20: note = Description of Artificial Sequence: Synthetic oligonucleotide
  misc_feature 1..20: note = Target: SCN10A; (+) strand; PAM type: NRG; PAM sequence: TGG
  source 1..20: mol_type = other DNA
ggttcaactgcacccatgtt

SEQ ID NO: 31470 - DNA, 20 bp, synthetic construct
  misc_feature 1..20: note = Description of Artificial Sequence: Synthetic oligonucleotide
  misc_feature 1..20: note = Target: SCN10A; (+) strand; PAM type: NRG; PAM sequence: CAG
  source 1..20: mol_type = other DNA
acccatgtttggtgcctcgc

SEQ ID NO: 31471 - DNA, 20 bp, synthetic construct
  misc_feature 1..20: note = Description of Artificial Sequence: Synthetic oligonucleotide
  misc_feature 1..20: note = Target: SCN10A; (+) strand; PAM type: NRG; PAM sequence: GAG
  source 1..20: mol_type = other DNA
tgtttggtgcctcgccagct

SEQ ID NO: 31472 - DNA, 20 bp, synthetic construct
  misc_feature 1..20: note = Description of Artificial Sequence: Synthetic oligonucleotide
  misc_feature 1..20: note = Target: SCN10A; (+) strand; PAM type: NRG; PAM sequence: AGG
  source 1..20: mol_type = other DNA
gtttggtgcctcgccagctg

SEQ ID NO: 31473 - DNA, 20 bp, synthetic construct
  misc_feature 1..20: note = Description of Artificial Sequence: Synthetic oligonucleotide
  misc_feature 1..20: note = Target: SCN10A; (+) strand; PAM type: NRG; PAM sequence: TGG
  source 1..20: mol_type = other DNA
gtgcctcgccagctgaggcc

SEQ ID NO: 31474 - DNA, 20 bp, synthetic construct
  misc_feature 1..20: note = Description of Artificial Sequence: Synthetic oligonucleotide
  misc_feature 1..20: note = Target: SCN10A; (+) strand; PAM type: NRG; PAM sequence: TGG
  source 1..20: mol_type = other DNA
tggaacactgctcttctccc

SEQ ID NO: 31475 - DNA, 20 bp, synthetic construct
  misc_feature 1..20: note = Description of Artificial Sequence: Synthetic oligonucleotide
  misc_feature 1..20: note = Target: SCN10A; (+) strand; PAM type: NRG; PAM sequence: GAG
  source 1..20: mol_type = other DNA
gaacactgctcttctccctg

SEQ ID NO: 31476 - DNA, 20 bp, synthetic construct
  misc_feature 1..20: note = Description of Artificial Sequence: Synthetic oligonucleotide
  misc_feature 1..20: note = Target: SCN10A; (+) strand; PAM type: NRG; PAM sequence: CAG
  source 1..20: mol_type = other DNA
tgctcttctccctggagccc

SEQ ID NO: 31477 - DNA, 20 bp, synthetic construct
  misc_feature 1..20: note = Description of Artificial Sequence: Synthetic oligonucleotide
  misc_feature 1..20: note = Target: SCN10A; (+) strand; PAM type: NRG; PAM sequence: GAG
  source 1..20: mol_type = other DNA
ctcttctccctggagcccca

SEQ ID NO: 31478 - DNA, 20 bp, synthetic construct
  misc_feature 1..20: note = Description of Artificial Sequence: Synthetic oligonucleotide
  misc_feature 1..20: note = Target: SCN10A; (+) strand; PAM type: NRG; PAM sequence: AGG
  source 1..20: mol_type = other DNA
tcttctccctggagccccag

SEQ ID NO: 31479 - DNA, 20 bp, synthetic construct
  misc_feature 1..20: note = Description of Artificial Sequence: Synthetic oligonucleotide
  misc_feature 1..20: note = Target: SCN10A; (+) strand; PAM type: NRG; PAM sequence: TAG
  source 1..20: mol_type = other DNA
tccctggagccccagaggct

SEQ ID NO: 31480 - DNA, 20 bp, synthetic construct
  misc_feature 1..20: note = Description of Artificial Sequence: Synthetic oligonucleotide
  misc_feature 1..20: note = Target: SCN10A; (+) strand; PAM type: NRG; PAM sequence: GAG
  source 1..20: mol_type = other DNA
ccccagaggcttagctgtgt

SEQ ID NO: 31481 - DNA, 20 bp, synthetic construct
  misc_feature 1..20: note = Description of Artificial Sequence: Synthetic oligonucleotide
  misc_feature 1..20: note = Target: SCN10A; (+) strand; PAM type: NRG; PAM sequence: CGG
  source 1..20: mol_type = other DNA
tgtgtgagactgtaaacctt

SEQ ID NO: 31482 - DNA, 20 bp, synthetic construct
  misc_feature 1..20: note = Description of Artificial Sequence: Synthetic oligonucleotide
  misc_feature 1..20: note = Target: SCN10A; (+) strand; PAM type: NRG; PAM sequence: GGG
  source 1..20: mol_type = other DNA
gtgtgagactgtaaaccttc

SEQ ID NO: 31483 - DNA, 20 bp, synthetic construct
  misc_feature 1..20: note = Description of Artificial Sequence: Synthetic oligonucleotide
  misc_feature 1..20: note = Target: SCN10A; (+) strand; PAM type: NRG; PAM sequence: GGG
  source 1..20: mol_type = other DNA
tgtgagactgtaaaccttcg

SEQ ID NO: 31484 - DNA, 20 bp, synthetic construct
  misc_feature 1..20: note = Description of Artificial Sequence: Synthetic oligonucleotide
  misc_feature 1..20: note = Target: SCN10A; (+) strand; PAM type: NRG; PAM sequence: TGG
  source 1..20: mol_type = other DNA
taaaccttcggggcccctga

SEQ ID NO: 31485 - DNA, 20 bp, synthetic construct
  misc_feature 1..20: note = Description of Artificial Sequence: Synthetic oligonucleotide
  misc_feature 1..20: note = Target: SCN10A; (+) strand; PAM type: NRG; PAM sequence: GAG
  source 1..20: mol_type = other DNA
aaccttcggggcccctgatg

SEQ ID NO: 31486 - DNA, 20 bp, synthetic construct
  misc_feature 1..20: note = Description of Artificial Sequence: Synthetic oligonucleotide
  misc_feature 1..20: note = Target: SCN10A; (+) strand; PAM type: NRG; PAM sequence: TGG
  source 1..20: mol_type = other DNA
cggggcccctgatggagtgc

SEQ ID NO: 31487 - DNA, 20 bp, synthetic construct
  misc_feature 1..20: note = Description of Artificial Sequence: Synthetic oligonucleotide
  misc_feature 1..20: note = Target: SCN10A; (+) strand; PAM type: NRG; PAM sequence: TGG
  source 1..20: mol_type = other DNA
ccctgatggagtgctggcaa

SEQ ID NO: 31488 - DNA, 20 bp, synthetic construct
  misc_feature 1..20: note = Description of Artificial Sequence: Synthetic oligonucleotide
  misc_feature 1..20: note = Target: SCN10A; (+) strand; PAM type: NRG; PAM sequence: GAG
  source 1..20: mol_type = other DNA
tggagtgctggcaatggccc

SEQ ID NO: 31489 - DNA, 20 bp, synthetic construct
  misc_feature 1..20: note = Description of Artificial Sequence: Synthetic oligonucleotide
  misc_feature 1..20: note = Target: SCN10A; (+) strand; PAM type: NRG; PAM sequence: CAG
  source 1..20: mol_type = other DNA
attacacccataacgactct

SEQ ID NO: 31490 - DNA, 20 bp, synthetic construct
  misc_feature 1..20: note = Description of Artificial Sequence: Synthetic oligonucleotide
  misc_feature 1..20: note = Target: SCN10A; (+) strand; PAM type: NRG; PAM sequence: TGG
  source 1..20: mol_type = other DNA
taacgactctcagcattcac

SEQ ID NO: 31491 - DNA, 20 bp, synthetic construct
  misc_feature 1..20: note = Description of Artificial Sequence: Synthetic oligonucleotide
  misc_feature 1..20: note = Target: SCN10A; (+) strand; PAM type: NRG; PAM sequence: GGG
  source 1..20: mol_type = other DNA
aacgactctcagcattcact

SEQ ID NO: 31492 - DNA, 20 bp, synthetic construct
  misc_feature 1..20: note = Description of Artificial Sequence: Synthetic oligonucleotide
  misc_feature 1..20: note = Target: SCN10A; (+) strand; PAM type: NRG; PAM sequence: TGG
  source 1..20: mol_type = other DNA
tgggcttgaatatttaatca

SEQ ID NO: 31493 - DNA, 20 bp, synthetic construct
  misc_feature 1..20: note = Description of Artificial Sequence: Synthetic oligonucleotide
  misc_feature 1..20: note = Target: SCN10A; (+) strand; PAM type: NRG; PAM sequence: GAG
  source 1..20: mol_type = other DNA
ggcttgaatatttaatcatg

SEQ ID NO: 31494 - DNA, 20 bp, synthetic construct
  misc_feature 1..20: note = Description of Artificial Sequence: Synthetic oligonucleotide
  misc_feature 1..20: note = Target: SCN10A; (+) strand; PAM type: NRG; PAM sequence: CAG
  source 1..20: mol_type = other DNA
ttaatcatggagtaatgctg

SEQ ID NO: 31495 - DNA, 20 bp, synthetic construct
  misc_feature 1..20: note = Description of Artificial Sequence: Synthetic oligonucleotide
  misc_feature 1..20: note = Target: SCN10A; (+) strand; PAM type: NRG; PAM sequence: AGG
  source 1..20: mol_type = other DNA
taatcatggagtaatgctgc

SEQ ID NO: 31496 - DNA, 20 bp, synthetic construct
  misc_feature 1..20: note = Description of Artificial Sequence: Synthetic oligonucleotide
  misc_feature 1..20: note = Target: SCN10A; (+) strand; PAM type: NRG; PAM sequence: GGG
  source 1..20: mol_type = other DNA
aatcatggagtaatgctgca

SEQ ID NO: 31497 - DNA, 20 bp, synthetic construct
  misc_feature 1..20: note = Description of Artificial Sequence: Synthetic oligonucleotide
  misc_feature 1..20: note = Target: SCN10A; (+) strand; PAM type: NRG; PAM sequence: GGG
  source 1..20: mol_type = other DNA
atcatggagtaatgctgcag

SEQ ID NO: 31498 - DNA, 20 bp, synthetic construct
  misc_feature 1..20: note = Description of Artificial Sequence: Synthetic oligonucleotide
  misc_feature 1..20: note = Target: SCN10A; (+) strand; PAM type: NRG; PAM sequence: TGG
  source 1..20: mol_type = other DNA
gcaggggcctgctgccctcc

SEQ ID NO: 31499 - DNA, 20 bp, synthetic construct
  misc_feature 1..20: note = Description of Artificial Sequence: Synthetic oligonucleotide
  misc_feature 1..20: note = Target: SCN10A; (+) strand; PAM type: NRG; PAM sequence: CAG
  source 1..20: mol_type = other DNA
ggggcctgctgccctcctgg

SEQ ID NO: 31500 - DNA, 20 bp, synthetic construct
  misc_feature 1..20: note = Description of Artificial Sequence: Synthetic oligonucleotide
  misc_feature 1..20: note = Target: SCN10A; (+) strand; PAM type: NRG; PAM sequence: CAG
  source 1..20: mol_type = other DNA
tgctgccctcctggcagctc

SEQ ID NO: 31501 - DNA, 20 bp, synthetic construct
  misc_feature 1..20: note = Description of Artificial Sequence: Synthetic oligonucleotide
  misc_feature 1..20: note = Target: SCN10A; (+) strand; PAM type: NRG; PAM sequence: CAG
  source 1..20: mol_type = other DNA
ctccagccctataatgtctc

SEQ ID NO: 31502 - DNA, 20 bp, synthetic construct
  misc_feature 1..20: note = Description of Artificial Sequence: Synthetic oligonucleotide
  misc_feature 1..20: note = Target: SCN10A; (+) strand; PAM type: NRG; PAM sequence: TAG
  source 1..20: mol_type = other DNA
tgtctccagatgaattcaat

SEQ ID NO: 31503 - DNA, 20 bp, synthetic construct
  misc_feature 1..20: note = Description of Artificial Sequence: Synthetic oligonucleotide
  misc_feature 1..20: note = Target: SCN10A; (+) strand; PAM type: NRG; PAM sequence: AGG
  source 1..20: mol_type = other DNA
gtctccagatgaattcaatt

SEQ ID NO: 31504 - DNA, 20 bp, synthetic construct
  misc_feature 1..20: note = Description of Artificial Sequence: Synthetic oligonucleotide
  misc_feature 1..20: note = Target: SCN10A; (+) strand; PAM type: NRG; PAM sequence: GGG
  source 1..20: mol_type = other DNA
tctccagatgaattcaatta

SEQ ID NO: 31505 - DNA, 20 bp, synthetic construct
  misc_feature 1..20: note = Description of Artificial Sequence: Synthetic oligonucleotide
  misc_feature 1..20: note = Target: SCN10A; (+) strand; PAM type: NRG; PAM sequence: GGG
  source 1..20: mol_type = other DNA
ctccagatgaattcaattag

SEQ ID NO: 31506 - DNA, 20 bp, synthetic construct
  misc_feature 1..20: note = Description of Artificial Sequence: Synthetic oligonucleotide
  misc_feature 1..20: note = Target: SCN10A; (+) strand; PAM type: NRG; PAM sequence: AAG
  source 1..20: mol_type = other DNA
atgaattcaattaggggttg

SEQ ID NO: 31507 - DNA, 20 bp, synthetic construct
  misc_feature 1..20: note = Description of Artificial Sequence: Synthetic oligonucleotide
  misc_feature 1..20: note = Target: SCN10A; (+) strand; PAM type: NRG; PAM sequence: TAG
  source 1..20: mol_type = other DNA
ggttgaagttgctctcatat

SEQ ID NO: 31508 - DNA, 20 bp, synthetic construct
  misc_feature 1..20: note = Description of Artificial Sequence: Synthetic oligonucleotide
  misc_feature 1..20: note = Target: SCN10A; (+) strand; PAM type: NRG; PAM sequence: TAG
  source 1..20: mol_type = other DNA
tctcatattagtaaacctga

SEQ ID NO: 31509 - DNA, 20 bp, synthetic construct
  misc_feature 1..20: note = Description of Artificial Sequence: Synthetic oligonucleotide
  misc_feature 1..20: note = Target: SCN10A; (+) strand; PAM type: NRG; PAM sequence: TGG
  source 1..20: mol_type = other DNA
aaacctgatagctttgctaa

SEQ ID NO: 31510 - DNA, 20 bp, synthetic construct
  misc_feature 1..20: note = Description of Artificial Sequence: Synthetic oligonucleotide
  misc_feature 1..20: note = Target: SCN10A; (+) strand; PAM type: NRG; PAM sequence: TGG
  source 1..20: mol_type = other DNA
gctttgctaatggacccaaa

SEQ ID NO: 31511 - DNA, 20 bp, synthetic construct
  misc_feature 1..20: note = Description of Artificial Sequence: Synthetic oligonucleotide
  misc_feature 1..20: note = Target: SCN10A; (+) strand; PAM type: NRG; PAM sequence: TGG
  source 1..20: mol_type = other DNA
ttgctaatggacccaaatgg

SEQ ID NO: 31512 - DNA, 20 bp, synthetic construct
  misc_feature 1..20: note = Description of Artificial Sequence: Synthetic oligonucleotide
  misc_feature 1..20: note = Target: SCN10A; (+) strand; PAM type: NRG; PAM sequence: GGG
  source 1..20: mol_type = other DNA
tgctaatggacccaaatggt

SEQ ID NO: 31513 - DNA, 20 bp, synthetic construct
  misc_feature 1..20: note = Description of Artificial Sequence: Synthetic oligonucleotide
  misc_feature 1..20: note = Target: SCN10A; (+) strand; PAM type: NRG; PAM sequence: GGG
  source 1..20: mol_type = other DNA
gctaatggacccaaatggtg

SEQ ID NO: 31514 - DNA, 20 bp, synthetic construct
  misc_feature 1..20: note = Description of Artificial Sequence: Synthetic oligonucleotide
  misc_feature 1..20: note = Target: SCN10A; (+) strand; PAM type: NRG; PAM sequence: CGG
  source 1..20: mol_type = other DNA
aatggacccaaatggtgggg

SEQ ID NO: 31515 - DNA, 20 bp, synthetic construct
  misc_feature 1..20: note = Description of Artificial Sequence: Synthetic oligonucleotide
  misc_feature 1..20: note = Target: SCN10A; (+) strand; PAM type: NRG; PAM sequence: GGG
  source 1..20: mol_type = other DNA
atggacccaaatggtggggc

SEQ ID NO: 31516 - DNA, 20 bp, synthetic construct
  misc_feature 1..20: note = Description of Artificial Sequence: Synthetic oligonucleotide
  misc_feature 1..20: note = Target: SCN10A; (+) strand; PAM type: NRG; PAM sequence: CAG
  source 1..20: mol_type = other DNA
gggtccccatttgtcgctgt

SEQ ID NO: 31517 - DNA, 20 bp, synthetic construct
  misc_feature 1..20: note = Description of Artificial Sequence: Synthetic oligonucleotide
  misc_feature 1..20: note = Target: SCN10A; (+) strand; PAM type: NRG; PAM sequence: AGG
  source 1..20: mol_type = other DNA
ggtccccatttgtcgctgtc

SEQ ID NO: 31518 - DNA, 20 bp, synthetic construct
  misc_feature 1..20: note = Description of Artificial Sequence: Synthetic oligonucleotide
  misc_feature 1..20: note = Target: SCN10A; (+) strand; PAM type: NRG; PAM sequence: TAG
  source 1..20: mol_type = other DNA
gctgtcaggcccctcctgcc

SEQ ID NO: 31519 - DNA, 20 bp, synthetic construct
  misc_feature 1..20: note = Description of Artificial Sequence: Synthetic oligonucleotide
  misc_feature 1..20: note = Target: SCN10A; (+) strand; PAM type: NRG; PAM sequence: CGG
  source 1..20: mol_type = other DNA
tcaggcccctcctgcctagc

SEQ ID NO: 31520 - DNA, 20 bp, synthetic construct
  misc_feature 1..20: note = Description of Artificial Sequence: Synthetic oligonucleotide
  misc_feature 1..20: note = Target: SCN10A; (+) strand; PAM type: NRG; PAM sequence: GGG
  source 1..20: mol_type = other DNA
caggcccctcctgcctagcc

SEQ ID NO: 31521 - DNA, 20 bp, synthetic construct
  misc_feature 1..20: note = Description of Artificial Sequence: Synthetic oligonucleotide
  misc_feature 1..20: note = Target: SCN10A; (+) strand; PAM type: NRG; PAM sequence: GGG
  source 1..20: mol_type = other DNA
aggcccctcctgcctagccg

SEQ ID NO: 31522 - DNA, 20 bp, synthetic construct
  misc_feature 1..20: note = Description of Artificial Sequence: Synthetic oligonucleotide
  misc_feature 1..20: note = Target: SCN10A; (+) strand; PAM type: NRG; PAM sequence: TGG
  source 1..20: mol_type = other DNA
ctcctgcctagccggggtca

SEQ ID NO: 31523 - DNA, 20 bp, synthetic construct
  misc_feature 1..20: note = Description of Artificial Sequence: Synthetic oligonucleotide
  misc_feature 1..20: note = Target: SCN10A; (+) strand; PAM type: NRG; PAM sequence: AAG
  source 1..20: mol_type = other DNA
gcctagccggggtcatggac

SEQ ID NO: 31524 - DNA, 20 bp, synthetic construct
  misc_feature 1..20: note = Description of Artificial Sequence: Synthetic oligonucleotide
  misc_feature 1..20: note = Target: SCN10A; (+) strand; PAM type: NRG; PAM sequence: CAG
  source 1..20: mol_type = other DNA
aaaaacaaaaaaccaacacc

SEQ ID NO: 31525 - DNA, 20 bp, synthetic construct
  misc_feature 1..20: note = Description of Artificial Sequence: Synthetic oligonucleotide
  misc_feature 1..20: note = Target: SCN10A; (+) strand; PAM type: NRG; PAM sequence: AAG
  source 1..20: mol_type = other DNA
aacaaaaaaccaacacccag

SEQ ID NO: 31526 - DNA, 20 bp, synthetic construct
  misc_feature 1..20: note = Description of Artificial Sequence: Synthetic oligonucleotide
  misc_feature 1..20: note = Target: SCN10A; (+) strand; PAM type: NRG; PAM sequence: GAG
  source 1..20: mol_type = other DNA
agttgtgtactgaaaacatt

SEQ ID NO: 31527 - DNA, 20 bp, synthetic construct
  misc_feature 1..20: note = Description of Artificial Sequence: Synthetic oligonucleotide
  misc_feature 1..20: note = Target: SCN10A; (+) strand; PAM type: NRG; PAM sequence: TAG
  source 1..20: mol_type = other DNA
tgtgtactgaaaacattgag

SEQ ID NO: 31528 - DNA, 20 bp, synthetic construct
  misc_feature 1..20: note = Description of Artificial Sequence: Synthetic oligonucleotide
  misc_feature 1..20: note = Target: SCN10A; (+) strand; PAM type: NRG; PAM sequence: AGG
  source 1..20: mol_type = other DNA
gtgtactgaaaacattgagt

SEQ ID NO: 31529 - DNA, 20 bp, synthetic construct
  misc_feature 1..20: note = Description of Artificial Sequence: Synthetic oligonucleotide
  misc_feature 1..20: note = Target: SCN10A; (+) strand; PAM type: NRG; PAM sequence: GGG
  source 1..20: mol_type = other DNA
tgtactgaaaacattgagta

SEQ ID NO: 31530 - DNA, 20 bp, synthetic construct
  misc_feature 1..20: note = Description of Artificial Sequence: Synthetic oligonucleotide
  misc_feature 1..20: note = Target: SCN10A; (+) strand; PAM type: NRG; PAM sequence: TAG
  source 1..20: mol_type = other DNA
aaacattgagtagggacaac

SEQ ID NO: 31531 - DNA, 20 bp, synthetic construct
  misc_feature 1..20: note = Description of Artificial Sequence: Synthetic oligonucleotide
  misc_feature 1..20: note = Target: SCN10A; (+) strand; PAM type: NRG; PAM sequence: CAG
  source 1..20: mol_type = other DNA
attgagtagggacaactagc

SEQ ID NO: 31532 - DNA, 20 bp, synthetic construct
  misc_feature 1..20: note = Description of Artificial Sequence: Synthetic oligonucleotide
  misc_feature 1..20: note = Target: SCN10A; (+) strand; PAM type: NRG; PAM sequence: AGG
  source 1..20: mol_type = other DNA
ttgagtagggacaactagcc

SEQ ID NO: 31533 - DNA, 20 bp, synthetic construct
  misc_feature 1..20: note = Description of Artificial Sequence: Synthetic oligonucleotide
  misc_feature 1..20: note = Target: SCN10A; (+) strand; PAM type: NRG; PAM sequence: GGG
  source 1..20: mol_type = other DNA
tgagtagggacaactagcca

SEQ ID NO: 31534 - DNA, 20 bp, synthetic construct
  misc_feature 1..20: note = Description of Artificial Sequence: Synthetic oligonucleotide
  misc_feature 1..20: note = Target: SCN10A; (+) strand; PAM type: NRG; PAM sequence: GGG
  source 1..20: mol_type = other DNA
gagtagggacaactagccag

SEQ ID NO: 31535 - DNA, 20 bp, synthetic construct
  misc_feature 1..20: note = Description of Artificial Sequence: Synthetic oligonucleotide
  misc_feature 1..20: note = Target: SCN10A; (+) strand; PAM type: NRG; PAM sequence: GAG
  source 1..20: mol_type = other DNA
gtagggacaactagccaggg

SEQ ID NO: 31536 - DNA, 20 bp, synthetic construct
  misc_feature 1..20: note = Description of Artificial Sequence: Synthetic oligonucleotide
  misc_feature 1..20: note = Target: SCN10A; (+) strand; PAM type: NRG; PAM sequence: TGG
  source 1..20: mol_type = other DNA
caactagccaggggagtcct

SEQ ID NO: 31537 - DNA, 20 bp, synthetic construct
  misc_feature 1..20: note = Description of Artificial Sequence: Synthetic oligonucleotide
  misc_feature 1..20: note = Target: SCN10A; (+) strand; PAM type: NRG; PAM sequence: TGG
  source 1..20: mol_type = other DNA
aggggagtccttggaacatt

SEQ ID NO: 31538 - DNA, 20 bp, synthetic construct
  misc_feature 1..20: note = Description of Artificial Sequence: Synthetic oligonucleotide
  misc_feature 1..20: note = Target: SCN10A; (+) strand; PAM type: NRG; PAM sequence: GGG
  source 1..20: mol_type = other DNA
ggggagtccttggaacattt

SEQ ID NO: 31539 - DNA, 20 bp, synthetic construct
  misc_feature 1..20: note = Description of Artificial Sequence: Synthetic oligonucleotide
  misc_feature 1..20: note = Target: SCN10A; (+) strand; PAM type: NRG; PAM sequence: AAG
  source 1..20: mol_type = other DNA
gagtccttggaacatttggg

SEQ ID NO: 31540 - DNA, 20 bp, synthetic construct
  misc_feature 1..20: note = Description of Artificial Sequence: Synthetic oligonucleotide
  misc_feature 1..20: note = Target: SCN10A; (+) strand; PAM type: NRG; PAM sequence: AAG
  source 1..20: mol_type = other DNA
tccttggaacatttgggaag

SEQ ID NO: 31541 - DNA, 20 bp, synthetic construct
  misc_feature 1..20: note = Description of Artificial Sequence: Synthetic oligonucleotide
  misc_feature 1..20: note = Target: SCN10A; (+) strand; PAM type: NRG; PAM sequence: CAG
  source 1..20: mol_type = other DNA
agaagcatgacatccacgtg

SEQ ID NO: 31542 - DNA, 20 bp, synthetic construct
  misc_feature 1..20: note = Description of Artificial Sequence: Synthetic oligonucleotide
  misc_feature 1..20: note = Target: SCN10A; (+) strand; PAM type: NRG; PAM sequence: CAG
  source 1..20: mol_type = other DNA
catccacgtgcagaatgtga

SEQ ID NO: 31543 - DNA, 20 bp, synthetic construct
  misc_feature 1..20: note = Description of Artificial Sequence: Synthetic oligonucleotide
  misc_feature 1..20: note = Target: SCN10A; (+) strand; PAM type: NRG; PAM sequence: CAG
  source 1..20: mol_type = other DNA
agaatgtgacagccctcacc

SEQ ID NO: 31544 - DNA, 20 bp, synthetic construct
  misc_feature 1..20: note = Description of Artificial Sequence: Synthetic oligonucleotide
  misc_feature 1..20: note = Target: SCN10A; (+) strand; PAM type: NRG; PAM sequence: TGG
  source 1..20: mol_type = other DNA
atgtgacagccctcacccag

SEQ ID NO: 31545 - DNA, 20 bp, synthetic construct
  misc_feature 1..20: note = Description of Artificial Sequence: Synthetic oligonucleotide
  misc_feature 1..20: note = Target: SCN10A; (+) strand; PAM type: NRG; PAM sequence: GGG
  source 1..20: mol_type = other DNA
tgtgacagccctcacccagt

SEQ ID NO: 31546 - DNA, 20 bp, synthetic construct
  misc_feature 1..20: note = Description of Artificial Sequence: Synthetic oligonucleotide
  misc_feature 1..20: note = Target: SCN10A; (+) strand; PAM type: NRG; PAM sequence: AAG
  source 1..20: mol_type = other DNA
gccctcacccagtgggaacc

SEQ ID NO: 31547 - DNA, 20 bp, synthetic construct
  misc_feature 1..20: note = Description of Artificial Sequence: Synthetic oligonucleotide
  misc_feature 1..20: note = Target: SCN10A; (+) strand; PAM type: NRG; PAM sequence: CGG
  source 1..20: mol_type = other DNA
ctcacccagtgggaaccaag

SEQ ID NO: 31548 - DNA, 20 bp, synthetic construct
  misc_feature 1..20: note = Description of Artificial Sequence: Synthetic oligonucleotide
  misc_feature 1..20: note = Target: SCN10A; (+) strand; PAM type: NRG; PAM sequence: CAG
  source 1..20: mol_type = other DNA
aagcggcttctgttcaccca

SEQ ID NO: 31549 - DNA, 20 bp, synthetic construct
  misc_feature 1..20: note = Description of Artificial Sequence: Synthetic oligonucleotide
  misc_feature 1..20: note = Target: SCN10A; (+) strand; PAM type: NRG; PAM sequence: CAG
  source 1..20: mol_type = other DNA
acagcccccaaatcccgtcc

SEQ ID NO: 31550 - DNA, 20 bp, synthetic construct
  misc_feature 1..20: note = Description of Artificial Sequence: Synthetic oligonucleotide
  misc_feature 1..20: note = Target: SCN10A; (+) strand; PAM type: NRG; PAM sequence: TGG
  source 1..20: mol_type = other DNA
cctcttatcttaccctgctg

SEQ ID NO: 31551 - DNA, 20 bp, synthetic construct
  misc_feature 1..20: note = Description of Artificial Sequence: Synthetic oligonucleotide
  misc_feature 1..20: note = Target: SCN10A; (+) strand; PAM type: NRG; PAM sequence: CAG
  source 1..20: mol_type = other DNA
ttatcttaccctgctgtggt

SEQ ID NO: 31552 - DNA, 20 bp, synthetic construct
  misc_feature 1..20: note = Description of Artificial Sequence: Synthetic oligonucleotide
  misc_feature 1..20: note = Target: SCN10A; (+) strand; PAM type: NRG; PAM sequence: TAG
  source 1..20: mol_type = other DNA
ctgctgtggtcagccttgcc

SEQ ID NO: 31553 - DNA, 20 bp, synthetic construct
  misc_feature 1..20: note = Description of Artificial Sequence: Synthetic oligonucleotide
  misc_feature 1..20: note = Target: SCN10A; (+) strand; PAM type: NRG; PAM sequence: AGG
  source 1..20: mol_type = other DNA
tgctgtggtcagccttgcct

SEQ ID NO: 31554 - DNA, 20 bp, synthetic construct
  misc_feature 1..20: note = Description of Artificial Sequence: Synthetic oligonucleotide
  misc_feature 1..20: note = Target: SCN10A; (+) strand; PAM type: NRG; PAM sequence: GGG
  source 1..20: mol_type = other DNA
gctgtggtcagccttgccta

SEQ ID NO: 31555 - DNA, 20 bp, synthetic construct
  misc_feature 1..20: note = Description of Artificial Sequence: Synthetic oligonucleotide
  misc_feature 1..20: note = Target: SCN10A; (+) strand; PAM type: NRG; PAM sequence: CAG
  source 1..20: mol_type = other DNA
tcagccttgcctagggcaca

SEQ ID NO: 31556 - DNA, 20 bp, synthetic construct
  misc_feature 1..20: note = Description of Artificial Sequence: Synthetic oligonucleotide
  misc_feature 1..20: note = Target: SCN10A; (+) strand; PAM type: NRG; PAM sequence: CAG
  source 1..20: mol_type = other DNA
ccttgcctagggcacacagc

SEQ ID NO: 31557 - DNA, 20 bp, synthetic construct
  misc_feature 1..20: note = Description of Artificial Sequence: Synthetic oligonucleotide
  misc_feature 1..20: note = Target: SCN10A; (+) strand; PAM type: NRG; PAM sequence: TAG
  source 1..20: mol_type = other DNA
tgcctagggcacacagccag

SEQ ID NO: 31558 - DNA, 20 bp, synthetic construct
  misc_feature 1..20: note = Description of Artificial Sequence: Synthetic oligonucleotide
  misc_feature 1..20: note = Target: SCN10A; (+) strand; PAM type: NRG; PAM sequence: AAG
  source 1..20: mol_type = other DNA
gccagtagctgacattcttc

SEQ ID NO: 31559 - DNA, 20 bp, synthetic construct
  misc_feature 1..20: note = Description of Artificial Sequence: Synthetic oligonucleotide
  misc_feature 1..20: note = Target: SCN10A; (+) strand; PAM type: NRG; PAM sequence: AAG
  source 1..20: mol_type = other DNA
agctgacattcttcaagctg

SEQ ID NO: 31560 - DNA, 20 bp, synthetic construct
  misc_feature 1..20: note = Description of Artificial Sequence: Synthetic oligonucleotide
  misc_feature 1..20: note = Target: SCN10A; (+) strand; PAM type: NRG; PAM sequence: AGG
  source 1..20: mol_type = other DNA
gctgacattcttcaagctga

SEQ ID NO: 31561 - DNA, 20 bp, synthetic construct
  misc_feature 1..20: note = Description of Artificial Sequence: Synthetic oligonucleotide
  misc_feature 1..20: note = Target: SCN10A; (+) strand; PAM type: NRG; PAM sequence: GGG
  source 1..20: mol_type = other DNA
ctgacattcttcaagctgaa

SEQ ID NO: 31562 - DNA, 20 bp, synthetic construct
  misc_feature 1..20: note = Description of Artificial Sequence: Synthetic oligonucleotide
  misc_feature 1..20: note = Target: SCN10A; (+) strand; PAM type: NRG; PAM sequence: TGG
  source 1..20: mol_type = other DNA
gctgaagggcttgataactt

SEQ ID NO: 31563 - DNA, 20 bp, synthetic construct
  misc_feature 1..20: note = Description of Artificial Sequence: Synthetic oligonucleotide
  misc_feature 1..20: note = Target: SCN10A; (+) strand; PAM type: NRG; PAM sequence: GGG
  source 1..20: mol_type = other DNA
ctgaagggcttgataacttt

SEQ ID NO: 31564 - DNA, 20 bp, synthetic construct
  misc_feature 1..20: note = Description of Artificial Sequence: Synthetic oligonucleotide
  misc_feature 1..20: note = Target: SCN10A; (+) strand; PAM type: NRG; PAM sequence: GGG
  source 1..20: mol_type = other DNA
tgaagggcttgataactttg

SEQ ID NO: 31565 - DNA, 20 bp, synthetic construct
  misc_feature 1..20: note = Description of Artificial Sequence: Synthetic oligonucleotide
  misc_feature 1..20: note = Target: SCN10A; (+) strand; PAM type: NRG; PAM sequence: GAG
  source 1..20: mol_type = other DNA
atgacttccttatctctgtt

SEQ ID NO: 31566 - DNA, 20 bp, synthetic construct
  misc_feature 1..20: note = Description of Artificial Sequence: Synthetic oligonucleotide
  misc_feature 1..20: note = Target: SCN10A; (+) strand; PAM type: NRG; PAM sequence: CAG
  source 1..20: mol_type = other DNA
ttccttatctctgttgagcc

SEQ ID NO: 31567 - DNA, 20 bp, synthetic construct
  misc_feature 1..20: note = Description of Artificial Sequence: Synthetic oligonucleotide
  misc_feature 1..20: note = Target: SCN10A; (+) strand; PAM type: NRG; PAM sequence: AAG
  source 1..20: mol_type = other DNA
tgagcccagtgcctgtcaca

SEQ ID NO: 31568 - DNA, 20 bp, synthetic construct
  misc_feature 1..20: note = Description of Artificial Sequence: Synthetic oligonucleotide
  misc_feature 1..20: note = Target: SCN10A; (+) strand; PAM type: NRG; PAM sequence: CAG
  source 1..20: mol_type = other DNA
cccagtgcctgtcacaaagt

SEQ ID NO: 31569 - DNA, 20 bp, synthetic construct
  misc_feature 1..20: note = Description of Artificial Sequence: Synthetic oligonucleotide
  misc_feature 1..20: note = Target: SCN10A; (+) strand; PAM type: NRG; PAM sequence: CAG
  source 1..20: mol_type = other DNA
cctgtcacaaagtcagcact

SEQ ID NO: 31570 - DNA, 20 bp, synthetic construct
  misc_feature 1..20: note = Description of Artificial Sequence: Synthetic oligonucleotide
  misc_feature 1..20: note = Target: SCN10A; (+) strand; PAM type: NRG; PAM sequence: TGG
  source 1..20: mol_type = other DNA
gtcacaaagtcagcactcag

SEQ ID NO: 31571 - DNA, 20 bp, synthetic construct
  misc_feature 1..20: note = Description of Artificial Sequence: Synthetic oligonucleotide
  misc_feature 1..20: note = Target: SCN10A; (+) strand; PAM type: NRG; PAM sequence: TAG
  source 1..20: mol_type = other DNA
caaagtcagcactcagtggc

SEQ ID NO: 31572 - DNA, 20 bp, synthetic construct
  misc_feature 1..20: note = Description of Artificial Sequence: Synthetic oligonucleotide
  misc_feature 1..20: note = Target: SCN10A; (+) strand; PAM type: NRG; PAM sequence: AGG
  source 1..20: mol_type = other DNA
aaagtcagcactcagtggct

SEQ ID NO: 31573 - DNA, 20 bp, synthetic construct
  misc_feature 1..20: note = Description of Artificial Sequence: Synthetic oligonucleotide
  misc_feature 1..20: note = Target: SCN10A; (+) strand; PAM type: NRG; PAM sequence: AAG
  source 1..20: mol_type = other DNA
caaattaaattcttgaattg

SEQ ID NO: 31574 - DNA, 20 bp, synthetic construct
  misc_feature 1..20: note = Description of Artificial Sequence: Synthetic oligonucleotide
  misc_feature 1..20: note = Target: SCN10A; (+) strand; PAM type: NRG; PAM sequence: AGG
  source 1..20: mol_type = other DNA
aaattaaattcttgaattga

SEQ ID NO: 31575 - DNA, 20 bp, synthetic construct
  misc_feature 1..20: note = Description of Artificial Sequence: Synthetic oligonucleotide
  misc_feature 1..20: note = Target: SCN10A; (+) strand; PAM type: NRG; PAM sequence: CAG
  source 1..20: mol_type = other DNA
ttaaattcttgaattgaagg

SEQ ID NO: 31576 - DNA, 20 bp, synthetic construct
  misc_feature 1..20: note = Description of Artificial Sequence: Synthetic oligonucleotide
  misc_feature 1..20: note = Target: SCN10A; (+) strand; PAM type: NRG; PAM sequence: AAG
  source 1..20: mol_type = other DNA
aattgaaggcagtgttatta

SEQ ID NO: 31577 - DNA, 20 bp, synthetic construct
  misc_feature 1..20: note = Description of Artificial Sequence: Synthetic oligonucleotide
  misc_feature 1..20: note = Target: SCN10A; (+) strand; PAM type: NRG; PAM sequence: TAG
  source 1..20: mol_type = other DNA
ttaaagatgctaaactttta

SEQ ID NO: 31578 - DNA, 20 bp, synthetic construct
  misc_feature 1..20: note = Description of Artificial Sequence: Synthetic oligonucleotide
  misc_feature 1..20: note = Target: SCN10A; (+) strand; PAM type: NRG; PAM sequence: TAG
  source 1..20: mol_type = other DNA
tatagatgcctctttcccta

SEQ ID NO: 31579 - DNA, 20 bp, synthetic construct
  misc_feature 1..20: note = Description of Artificial Sequence: Synthetic oligonucleotide
  misc_feature 1..20: note = Target: SCN10A; (+) strand; PAM type: NRG; PAM sequence: AAG
  source 1..20: mol_type = other DNA
ccctatagcttgtttccttc

SEQ ID NO: 31580 - DNA, 20 bp, synthetic construct
  misc_feature 1..20: note = Description of Artificial Sequence: Synthetic oligonucleotide
  misc_feature 1..20: note = Target: SCN10A; (+) strand; PAM type: NRG; PAM sequence: AAG
  source 1..20: mol_type = other DNA
ttgtttccttcaagatttgt

SEQ ID NO: 31581 - DNA, 20 bp, synthetic construct
  misc_feature 1..20: note = Description of Artificial Sequence: Synthetic oligonucleotide
  misc_feature 1..20: note = Target: SCN10A; (+) strand; PAM type: NRG; PAM sequence: AAG
  source 1..20: mol_type = other DNA
catttatttttaccttgtat

SEQ ID NO: 31582 - DNA, 20 bp, synthetic construct
  misc_feature 1..20: note = Description of Artificial Sequence: Synthetic oligonucleotide
  misc_feature 1..20: note = Target: SCN10A; (+) strand; PAM type: NRG; PAM sequence: CAG
  source 1..20: mol_type = other DNA
atcctaaacctctaatcttc

SEQ ID NO: 31583 - DNA, 20 bp, synthetic construct
  misc_feature 1..20: note = Description of Artificial Sequence: Synthetic oligonucleotide
  misc_feature 1..20: note = Target: SCN10A; (+) strand; PAM type: NRG; PAM sequence: CAG
  source 1..20: mol_type = other DNA
aaacctctaatcttccagct

SEQ ID NO: 31584 - DNA, 20 bp, synthetic construct
  misc_feature 1..20: note = Description of Artificial Sequence: Synthetic oligonucleotide
  misc_feature 1..20: note = Target: SCN10A; (+) strand; PAM type: NRG; PAM sequence: GAG
  source 1..20: mol_type = other DNA
tcttccagctcagtctctgt

SEQ ID NO: 31585 - DNA, 20 bp, synthetic construct
  misc_feature 1..20: note = Description of Artificial Sequence: Synthetic oligonucleotide
  misc_feature 1..20: note = Target: SCN10A; (+) strand; PAM type: NRG; PAM sequence: AGG
  source 1..20: mol_type = other DNA
cttccagctcagtctctgtg

SEQ ID NO: 31586 - DNA, 20 bp, synthetic construct
  misc_feature 1..20: note = Description of Artificial Sequence: Synthetic oligonucleotide
  misc_feature 1..20: note = Target: SCN10A; (+) strand; PAM type: NRG; PAM sequence: TAG
  source 1..20: mol_type = other DNA
gtcacttcactactcaccta

SEQ ID NO: 31587 - DNA, 20 bp, synthetic construct
  misc_feature 1..20: note = Description of Artificial Sequence: Synthetic oligonucleotide
  misc_feature 1..20: note = Target: SCN10A; (+) strand; PAM type: NRG; PAM sequence: GAG
  source 1..20: mol_type = other DNA
cacttcactactcacctata

SEQ ID NO: 31588 - DNA, 20 bp, synthetic construct
  misc_feature 1..20: note = Description of Artificial Sequence: Synthetic oligonucleotide
  misc_feature 1..20: note = Target: SCN10A; (+) strand; PAM type: NRG; PAM sequence: GAG
  source 1..20: mol_type = other DNA
cttcactactcacctataga

SEQ ID NO: 31589 - DNA, 20 bp, synthetic construct
  misc_feature 1..20: note = Description of Artificial Sequence: Synthetic oligonucleotide
  misc_feature 1..20: note = Target: SCN10A; (+) strand; PAM type: NRG; PAM sequence: TAG
  source 1..20: mol_type = other DNA
acctatagagagcctctccc

SEQ ID NO: 31590 - DNA, 20 bp, synthetic construct
  misc_feature 1..20: note = Description of Artificial Sequence: Synthetic oligonucleotide
  misc_feature 1..20: note = Target: SCN10A; (+) strand; PAM type: NRG; PAM sequence: CAG
  source 1..20: mol_type = other DNA
agagagcctctccctagccc

SEQ ID NO: 31591 - DNA, 20 bp, synthetic construct
  misc_feature 1..20: note = Description of Artificial Sequence: Synthetic oligonucleotide
  misc_feature 1..20: note = Target: SCN10A; (+) strand; PAM type: NRG; PAM sequence: AGG
  source 1..20: mol_type = other DNA
gagagcctctccctagcccc

SEQ ID NO: 31592 - DNA, 20 bp, synthetic construct
  misc_feature 1..20: note = Description of Artificial Sequence: Synthetic oligonucleotide
  misc_feature 1..20: note = Target: SCN10A; (+) strand; PAM type: NRG; PAM sequence: TAG
  source 1..20: mol_type = other DNA
agccccaggctacttttgcc

SEQ ID NO: 31593 - DNA, 20 bp, synthetic construct
  misc_feature 1..20: note = Description of Artificial Sequence: Synthetic oligonucleotide
  misc_feature 1..20: note = Target: SCN10A; (+) strand; PAM type: NRG; PAM sequence: GAG
  source 1..20: mol_type = other DNA
ccccaggctacttttgccta

SEQ ID NO: 31594 - DNA, 20 bp, synthetic construct
  misc_feature 1..20: note = Description of Artificial Sequence: Synthetic oligonucleotide
  misc_feature 1..20: note = Target: SCN10A; (+) strand; PAM type: NRG; PAM sequence: TGG
  source 1..20: mol_type = other DNA
tttgcctagagaaaatgatg

SEQ ID NO: 31595 - DNA, 20 bp, synthetic construct
  misc_feature 1..20: note = Description of Artificial Sequence: Synthetic oligonucleotide
  misc_feature 1..20: note = Target: SCN10A; (+) strand; PAM type: NRG; PAM sequence: AAG
  source 1..20: mol_type = other DNA
agagaaaatgatgtggacaa

SEQ ID NO: 31596 - DNA, 20 bp, synthetic construct
  misc_feature 1..20: note = Description of Artificial Sequence: Synthetic oligonucleotide
  misc_feature 1..20: note = Target: SCN10A; (+) strand; PAM type: NRG; PAM sequence: AAG
  source 1..20: mol_type = other DNA
aaaatgatgtggacaaaaga

SEQ ID NO: 31597 - DNA, 20 bp, synthetic construct
  misc_feature 1..20: note = Description of Artificial Sequence: Synthetic oligonucleotide
  misc_feature 1..20: note = Target: SCN10A; (+) strand; PAM type: NRG; PAM sequence: TGG
  source 1..20: mol_type = other DNA
atgatgtggacaaaagaaag

SEQ ID NO: 31598 - DNA, 20 bp, synthetic construct
  misc_feature 1..20: note = Description of Artificial Sequence: Synthetic oligonucleotide
  misc_feature 1..20: note = Target: SCN10A; (+) strand; PAM type: NRG; PAM sequence: GGG
  source 1..20: mol_type = other DNA
tgatgtggacaaaagaaagt

SEQ ID NO: 31599 - DNA, 20 bp, synthetic construct
  misc_feature 1..20: note = Description of Artificial Sequence: Synthetic oligonucleotide
  misc_feature 1..20: note = Target: SCN10A; (+) strand; PAM type: NRG; PAM sequence: GGG
  source 1..20: mol_type = other DNA
gatgtggacaaaagaaagtg

SEQ ID NO: 31600 - DNA, 20 bp, synthetic construct
  misc_feature 1..20: note = Description of Artificial Sequence: Synthetic oligonucleotide
  misc_feature 1..20: note = Target: SCN10A; (+) strand; PAM type: NRG; PAM sequence: GGG
  source 1..20: mol_type = other DNA
atgtggacaaaagaaagtgg

SEQ ID NO: 31601 - DNA, 20 bp, synthetic construct
  misc_feature 1..20: note = Description of Artificial Sequence: Synthetic oligonucleotide
  misc_feature 1..20: note = Target: SCN10A; (+) strand; PAM type: NRG; PAM sequence: GAG
  source 1..20: mol_type = other DNA
gtggacaaaagaaagtgggg

SEQ ID NO: 31602 - DNA, 20 bp, synthetic construct
  misc_feature 1..20: note = Description of Artificial Sequence: Synthetic oligonucleotide
  misc_feature 1..20: note = Target: SCN10A; (+) strand; PAM type: NRG; PAM sequence: AAG
  source 1..20: mol_type = other DNA
agaaagtgggggagaatcac

SEQ ID NO: 31603 - DNA, 20 bp, synthetic construct
  misc_feature 1..20: note = Description of Artificial Sequence: Synthetic oligonucleotide
  misc_feature 1..20: note = Target: SCN10A; (+) strand; PAM type: NRG; PAM sequence: AGG
  source 1..20: mol_type = other DNA
gaaagtgggggagaatcaca

SEQ ID NO: 31604 - DNA, 20 bp, synthetic construct
  misc_feature 1..20: note = Description of Artificial Sequence: Synthetic oligonucleotide
  misc_feature 1..20: note = Target: SCN10A; (+) strand; PAM type: NRG; PAM sequence: GGG
  source 1..20: mol_type = other DNA
aaagtgggggagaatcacaa

SEQ ID NO: 31605 - DNA, 20 bp, synthetic construct
  misc_feature 1..20: note = Description of Artificial Sequence: Synthetic oligonucleotide
  misc_feature 1..20: note = Target: SCN10A; (+) strand; PAM type: NRG; PAM sequence: GAG
  source 1..20: mol_type = other DNA
gggaaaacttcttcatctgt

SEQ ID NO: 31606 - DNA, 20 bp, synthetic construct
  misc_feature 1..20: note = Description of Artificial Sequence: Synthetic oligonucleotide
  misc_feature 1..20: note = Target: SCN10A; (+) strand; PAM type: NRG; PAM sequence: TGG
  source 1..20: mol_type = other DNA
cacctccaactcttatttgc

SEQ ID NO: 31607 - DNA, 20 bp, synthetic construct
  misc_feature 1..20: note = Description of Artificial Sequence: Synthetic oligonucleotide
  misc_feature 1..20: note = Target: SCN10A; (+) strand; PAM type: NRG; PAM sequence: AAG
  source 1..20: mol_type = other DNA
ctcttatttgctggctctga

SEQ ID NO: 31608 - DNA, 20 bp, synthetic construct
  misc_feature 1..20: note = Description of Artificial Sequence: Synthetic oligonucleotide
  misc_feature 1..20: note = Target: SCN10A; (+) strand; PAM type: NRG; PAM sequence: TGG
  source 1..20: mol_type = other DNA
tctttcgtttccttttttct

SEQ ID NO: 31609 - DNA, 20 bp, synthetic construct
  misc_feature 1..20: note = Description of Artificial Sequence: Synthetic oligonucleotide
  misc_feature 1..20: note = Target: SCN10A; (+) strand; PAM type: NRG; PAM sequence: TGG
  source 1..20: mol_type = other DNA
ttttcttggctgtcatttcc

SEQ ID NO: 31610 - DNA, 20 bp, synthetic construct
  misc_feature 1..20: note = Description of Artificial Sequence: Synthetic oligonucleotide
  misc_feature 1..20: note = Target: SCN10A; (+) strand; PAM type: NRG; PAM sequence: GGG
  source 1..20: mol_type = other DNA
tttcttggctgtcatttcct

SEQ ID NO: 31611 - DNA, 20 bp, synthetic construct
  misc_feature 1..20: note = Description of Artificial Sequence: Synthetic oligonucleotide
  misc_feature 1..20: note = Target: SCN10A; (+) strand; PAM type: NRG; PAM sequence: CAG
  source 1..20: mol_type = other DNA
cctgggcacttactttgtct

SEQ ID NO: 31612 - DNA, 20 bp, synthetic construct
  misc_feature 1..20: note = Description of Artificial Sequence: Synthetic oligonucleotide
  misc_feature 1..20: note = Target: SCN10A; (+) strand; PAM type: NRG; PAM sequence: AGG
  source 1..20: mol_type = other DNA
ctgggcacttactttgtctc

SEQ ID NO: 31613 - DNA, 20 bp, synthetic construct
  misc_feature 1..20: note = Description of Artificial Sequence: Synthetic oligonucleotide
  misc_feature 1..20: note = Target: SCN10A; (+) strand; PAM type: NRG; PAM sequence: CAG
  source 1..20: mol_type = other DNA
ggcacttactttgtctcagg

SEQ ID NO: 31614 - DNA, 20 bp, synthetic construct
  misc_feature 1..20: note = Description of Artificial Sequence: Synthetic oligonucleotide
  misc_feature 1..20: note = Target: SCN10A; (+) strand; PAM type: NRG; PAM sequence: AGG
  source 1..20: mol_type = other DNA
gcacttactttgtctcaggc

SEQ ID NO: 31615 - DNA, 20 bp, synthetic construct
  misc_feature 1..20: note = Description of Artificial Sequence: Synthetic oligonucleotide
  misc_feature 1..20: note = Target: SCN10A; (+) strand; PAM type: NRG; PAM sequence: AAG
  source 1..20: mol_type = other DNA
gcaggacctaaacatttgac

SEQ ID NO: 31616 - DNA, 20 bp, synthetic construct
  misc_feature 1..20: note = Description of Artificial Sequence: Synthetic oligonucleotide
  misc_feature 1..20: note = Target: SCN10A; (+) strand; PAM type: NRG; PAM sequence: CAG
  source 1..20: mol_type = other DNA
ggacctaaacatttgacaag

SEQ ID NO: 31617 - DNA, 20 bp, synthetic construct
  misc_feature 1..20: note = Description of Artificial Sequence: Synthetic oligonucleotide
  misc_feature 1..20: note = Target: SCN10A; (+) strand; PAM type: NRG; PAM sequence: AAG
  source 1..20: mol_type = other DNA
tgacaagcagcatctcattt

SEQ ID NO: 31618 - DNA, 20 bp, synthetic construct
  misc_feature 1..20: note = Description of Artificial Sequence: Synthetic oligonucleotide
  misc_feature 1..20: note = Target: SCN10A; (+) strand; PAM type: NRG; PAM sequence: AAG
  source 1..20: mol_type = other DNA
agcttcaaaataatcctacc

SEQ ID NO: 31619 - DNA, 20 bp, synthetic construct
  misc_feature 1..20: note = Description of Artificial Sequence: Synthetic oligonucleotide
  misc_feature 1..20: note = Target: SCN10A; (+) strand; PAM type: NRG; PAM sequence: TAG
  source 1..20: mol_type = other DNA
ttcaaaataatcctaccaag

SEQ ID NO: 31620 - DNA, 20 bp, synthetic construct
  misc_feature 1..20: note = Description of Artificial Sequence: Synthetic oligonucleotide
  misc_feature 1..20: note = Target: SCN10A; (+) strand; PAM type: NRG; PAM sequence: AGG
  source 1..20: mol_type = other DNA
tcaaaataatcctaccaagt

SEQ ID NO: 31621 - DNA, 20 bp, synthetic construct
  misc_feature 1..20: note = Description of Artificial Sequence: Synthetic oligonucleotide
  misc_feature 1..20: note = Target: SCN10A; (+) strand; PAM type: NRG; PAM sequence: CAG
  source 1..20: mol_type = other DNA
accaagtaggcattaccatt

SEQ ID NO: 31622 - DNA, 20 bp, synthetic construct
  misc_feature 1..20: note = Description of Artificial Sequence: Synthetic oligonucleotide
  misc_feature 1..20: note = Target: SCN10A; (+) strand; PAM type: NRG; PAM sequence: TAG
  source 1..20: mol_type = other DNA
ggcattaccattcagtttca

SEQ ID NO: 31623 - DNA, 20 bp, synthetic construct
  misc_feature 1..20: note = Description of Artificial Sequence: Synthetic oligonucleotide
  misc_feature 1..20: note = Target: SCN10A; (+) strand; PAM type: NRG; PAM sequence: TGG
  source 1..20: mol_type = other DNA
cagtttcatagatgaataaa

SEQ ID NO: 31624 - DNA, 20 bp, synthetic construct
  misc_feature 1..20: note = Description of Artificial Sequence: Synthetic oligonucleotide
  misc_feature 1..20: note = Target: SCN10A; (+) strand; PAM type: NRG; PAM sequence: CGG
  source 1..20: mol_type = other DNA
tttcatagatgaataaatgg

SEQ ID NO: 31625 - DNA, 20 bp, synthetic construct
  misc_feature 1..20: note = Description of Artificial Sequence: Synthetic oligonucleotide
  misc_feature 1..20: note = Target: SCN10A; (+) strand; PAM type: NRG; PAM sequence: CAG
  source 1..20: mol_type = other DNA
tagatgaataaatggcggct

SEQ ID NO: 31626 - DNA, 20 bp, synthetic construct
  misc_feature 1..20: note = Description of Artificial Sequence: Synthetic oligonucleotide
  misc_feature 1..20: note = Target: SCN10A; (+) strand; PAM type: NRG; PAM sequence: GAG
  source 1..20: mol_type = other DNA
gatgaataaatggcggctca

SEQ ID NO: 31627 - DNA, 20 bp, synthetic construct
  misc_feature 1..20: note = Description of Artificial Sequence: Synthetic oligonucleotide
  misc_feature 1..20: note = Target: SCN10A; (+) strand; PAM type: NRG; PAM sequence: GAG
  source 1..20: mol_type = other DNA
tgaataaatggcggctcaga

SEQ ID NO: 31628 - DNA, 20 bp, synthetic construct
  misc_feature 1..20: note = Description of Artificial Sequence: Synthetic oligonucleotide
  misc_feature 1..20: note = Target: SCN10A; (+) strand; PAM type: NRG; PAM sequence: AGG
  source 1..20: mol_type = other DNA
gaataaatggcggctcagag

SEQ ID NO: 31629 - DNA, 20 bp, synthetic construct
  misc_feature 1..20: note = Description of Artificial Sequence: Synthetic oligonucleotide
  misc_feature 1..20: note = Target: SCN10A; (+) strand; PAM type: NRG; PAM sequence: TGG
  source 1..20: mol_type = other DNA
aatggcggctcagagaggtt

SEQ ID NO: 31630 - DNA, 20 bp, synthetic construct
  misc_feature 1..20: note = Description of Artificial Sequence: Synthetic oligonucleotide
  misc_feature 1..20: note = Target: SCN10A; (+) strand; PAM type: NRG; PAM sequence: GGG
  source 1..20: mol_type = other DNA
atggcggctcagagaggttt

SEQ ID NO: 31631 - DNA, 20 bp, synthetic construct
  misc_feature 1..20: note = Description of Artificial Sequence: Synthetic oligonucleotide
  misc_feature 1..20: note = Target: SCN10A; (+) strand; PAM type: NRG; PAM sequence: TAG
  source 1..20: mol_type = other DNA
agaggtttgggaactgatct

SEQ ID NO: 31632 - DNA, 20 bp, synthetic construct
  misc_feature 1..20: note = Description of Artificial Sequence: Synthetic oligonucleotide
  misc_feature 1..20: note = Target: SCN10A; (+) strand; PAM type: NRG; PAM sequence: AGG
  source 1..20: mol_type = other DNA
gaggtttgggaactgatctt

SEQ ID NO: 31633 - DNA, 20 bp, synthetic construct
  misc_feature 1..20: note = Description of Artificial Sequence: Synthetic oligonucleotide
  misc_feature 1..20: note = Target: SCN10A; (+) strand; PAM type: NRG; PAM sequence: CAG
  source 1..20: mol_type = other DNA
ggaactgatcttaggtccca

SEQ ID NO: 31634 - DNA, 20 bp, synthetic construct
  misc_feature 1..20: note = Description of Artificial Sequence: Synthetic oligonucleotide
  misc_feature 1..20: note = Target: SCN10A; (+) strand; PAM type: NRG; PAM sequence: TGG
  source 1..20: mol_type = other DNA
atcttaggtcccacagcttg

SEQ ID NO: 31635 - DNA, 20 bp, synthetic construct
  misc_feature 1..20: note = Description of Artificial Sequence: Synthetic oligonucleotide
  misc_feature 1..20: note = Target: SCN10A; (+) strand; PAM type: NRG; PAM sequence: GAG
  source 1..20: mol_type = other DNA
cttaggtcccacagcttgtg

SEQ ID NO: 31636 - DNA, 20 bp, synthetic construct
  misc_feature 1..20: note = Description of Artificial Sequence: Synthetic oligonucleotide
  misc_feature 1..20: note = Target: SCN10A; (+) strand; PAM type: NRG; PAM sequence: TAG
  source 1..20: mol_type = other DNA
tcactctttctttctatacc

SEQ ID NO: 31637 - DNA, 20 bp, synthetic construct
  misc_feature 1..20: note = Description of Artificial Sequence: Synthetic oligonucleotide
  misc_feature 1..20: note = Target: SCN10A; (+) strand; PAM type: NRG; PAM sequence: TGG
  source 1..20: mol_type = other DNA
ttctatacctagaaccaccc

SEQ ID NO: 31638 - DNA, 20 bp, synthetic construct
  misc_feature 1..20: note = Description of Artificial Sequence: Synthetic oligonucleotide
  misc_feature 1..20: note = Target: SCN10A; (+) strand; PAM type: NRG; PAM sequence: GAG
  source 1..20: mol_type = other DNA
ctatacctagaaccaccctg

SEQ ID NO: 31639 - DNA, 20 bp, synthetic construct
  misc_feature 1..20: note = Description of Artificial Sequence: Synthetic oligonucleotide
  misc_feature 1..20: note = Target: SCN10A; (+) strand; PAM type: NRG; PAM sequence: GAG
  source 1..20: mol_type = other DNA
acctagaaccaccctggagt

SEQ ID NO: 31640 - DNA, 20 bp, synthetic construct
  misc_feature 1..20: note = Description of Artificial Sequence: Synthetic oligonucleotide
  misc_feature 1..20: note = Target: SCN10A; (+) strand; PAM type: NRG; PAM sequence: TGG
  source 1..20: mol_type = other DNA
accaccctggagtgagattg

SEQ ID NO: 31641 - DNA, 20 bp, synthetic construct
  misc_feature 1..20: note = Description of Artificial Sequence: Synthetic oligonucleotide
  misc_feature 1..20: note = Target: SCN10A; (+) strand; PAM type: NRG; PAM sequence: TGG
  source 1..20: mol_type = other DNA
ctggagtgagattgtggcaa

SEQ ID NO: 31642 - DNA, 20 bp, synthetic construct
  misc_feature 1..20: note = Description of Artificial Sequence: Synthetic oligonucleotide
  misc_feature 1..20: note = Target: SCN10A; (+) strand; PAM type: NRG; PAM sequence: TGG
  source 1..20: mol_type = other DNA
gagattgtggcaatggtata

SEQ ID NO: 31643 - DNA, 20 bp, synthetic construct
  misc_feature 1..20: note = Description of Artificial Sequence: Synthetic oligonucleotide
  misc_feature 1..20: note = Target: SCN10A; (+) strand; PAM type: NRG; PAM sequence: AAG
  source 1..20: mol_type = other DNA
gtggcaatggtatatggtga

SEQ ID NO: 31644 - DNA, 20 bp, synthetic construct
  misc_feature 1..20: note = Description of Artificial Sequence: Synthetic oligonucleotide
  misc_feature 1..20: note = Target: SCN10A; (+) strand; PAM type: NRG; PAM sequence: CGG
  source 1..20: mol_type = other DNA
tggtgaaagttgaaattgtg

SEQ ID NO: 31645 - DNA, 20 bp, synthetic construct
  misc_feature 1..20: note = Description of Artificial Sequence: Synthetic oligonucleotide
  misc_feature 1..20: note = Target: SCN10A; (+) strand; PAM type: NRG; PAM sequence: TAG
  source 1..20: mol_type = other DNA
aaagttgaaattgtgcggat

SEQ ID NO: 31646 - DNA, 20 bp, synthetic construct
  misc_feature 1..20: note = Description of Artificial Sequence: Synthetic oligonucleotide
  misc_feature 1..20: note = Target: SCN10A; (+) strand; PAM type: NRG; PAM sequence: CGG
  source 1..20: mol_type = other DNA
ttgaaattgtgcggattagc

SEQ ID NO: 31647 - DNA, 20 bp, synthetic construct
  misc_feature 1..20: note = Description of Artificial Sequence: Synthetic oligonucleotide
  misc_feature 1..20: note = Target: SCN10A; (+) strand; PAM type: NRG; PAM sequence: GAG
  source 1..20: mol_type = other DNA
gaaattgtgcggattagccg

SEQ ID NO: 31648 - DNA, 20 bp, synthetic construct
  misc_feature 1..20: note = Description of Artificial Sequence: Synthetic oligonucleotide
  misc_feature 1..20: note = Target: SCN10A; (+) strand; PAM type: NRG; PAM sequence: AGG
  source 1..20: mol_type = other DNA
aaattgtgcggattagccgg

SEQ ID NO: 31649 - DNA, 20 bp, synthetic construct
  misc_feature 1..20: note = Description of Artificial Sequence: Synthetic oligonucleotide
  misc_feature 1..20: note = Target: SCN10A; (+) strand; PAM type: NRG; PAM sequence: TGG
  source 1..20: mol_type = other DNA
tgtgcggattagccggaggt

SEQ ID NO: 31650 - DNA, 20 bp, synthetic construct
  misc_feature 1..20: note = Description of Artificial Sequence: Synthetic oligonucleotide
  misc_feature 1..20: note = Target: SCN10A; (+) strand; PAM type: NRG; PAM sequence: GGG
  source 1..20: mol_type = other DNA
gtgcggattagccggaggtt

SEQ ID NO: 31651 - DNA, 20 bp, synthetic construct
  misc_feature 1..20: note = Description of Artificial Sequence: Synthetic oligonucleotide
  misc_feature 1..20: note = Target: SCN10A; (+) strand; PAM type: NRG; PAM sequence: GAG
  source 1..20: mol_type = other DNA
gcggattagccggaggttgg

SEQ ID NO: 31652 - DNA, 20 bp, synthetic construct
  misc_feature 1..20: note = Description of Artificial Sequence: Synthetic oligonucleotide
  misc_feature 1..20: note = Target: SCN10A; (+) strand; PAM type: NRG; PAM sequence: AGG
  source 1..20: mol_type = other DNA
cggattagccggaggttggg

SEQ ID NO: 31653 - DNA, 20 bp, synthetic construct
  misc_feature 1..20: note = Description of Artificial Sequence: Synthetic oligonucleotide
  misc_feature 1..20: note = Target: SCN10A; (+) strand; PAM type: NRG; PAM sequence: GGG
  source 1..20: mol_type = other DNA
ggattagccggaggttggga

SEQ ID NO: 31654 - DNA, 20 bp, synthetic construct
  misc_feature 1..20: note = Description of Artificial Sequence: Synthetic oligonucleotide
  misc_feature 1..20: note = Target: SCN10A; (+) strand; PAM type: NRG; PAM sequence: CAG
  source 1..20: mol_type = other DNA
ggagggactttaaaaattcc

SEQ ID NO: 31655 - DNA, 20 bp, synthetic construct
  misc_feature 1..20: note = Description of Artificial Sequence: Synthetic oligonucleotide
  misc_feature 1..20: note = Target: SCN10A; (+) strand; PAM type: NRG; PAM sequence: AGG
  source 1..20: mol_type = other DNA
gagggactttaaaaattccc

SEQ ID NO: 31656 - DNA, 20 bp, synthetic construct
  misc_feature 1..20: note = Description of Artificial Sequence: Synthetic oligonucleotide
  misc_feature 1..20: note = Target: SCN10A; (+) strand; PAM type: NRG; PAM sequence: AAG
  source 1..20: mol_type = other DNA
actttaaaaattcccaggat

SEQ ID NO: 31657 - DNA, 20 bp, synthetic construct
  misc_feature 1..20: note = Description of Artificial Sequence: Synthetic oligonucleotide
  misc_feature 1..20: note = Target: SCN10A; (+) strand; PAM type: NRG; PAM sequence: GAG
  source 1..20: mol_type = other DNA
aaattcccaggataagaaat

SEQ ID NO: 31658 - DNA, 20 bp, synthetic construct
  misc_feature 1..20: note = Description of Artificial Sequence: Synthetic oligonucleotide
  misc_feature 1..20: note = Target: SCN10A; (+) strand; PAM type: NRG; PAM sequence: AGG
  source 1..20: mol_type = other DNA
aattcccaggataagaaatg

SEQ ID NO: 31659 - DNA, 20 bp, synthetic construct
  misc_feature 1..20: note = Description of Artificial Sequence: Synthetic oligonucleotide
  misc_feature 1..20: note = Target: SCN10A; (+) strand; PAM type: NRG; PAM sequence: GAG
  source 1..20: mol_type = other DNA
agaaatgaggttatgtgatt

SEQ ID NO: 31660 - DNA, 20 bp, synthetic construct
  misc_feature 1..20: note = Description of Artificial Sequence: Synthetic oligonucleotide
  misc_feature 1..20: note = Target: SCN10A; (+) strand; PAM type: NRG; PAM sequence: CAG
  source 1..20: mol_type = other DNA
tgaggttatgtgattgagtg

SEQ ID NO: 31661 - DNA, 20 bp, synthetic construct
  misc_feature 1..20: note = Description of Artificial Sequence: Synthetic oligonucleotide
  misc_feature 1..20: note = Target: SCN10A; (+) strand; PAM type: NRG; PAM sequence: TGG
  source 1..20: mol_type = other DNA
ttatgtgattgagtgcagtc

SEQ ID NO: 31662 - DNA, 20 bp, synthetic construct
  misc_feature 1..20: note = Description of Artificial Sequence: Synthetic oligonucleotide
  misc_feature 1..20: note = Target: SCN10A; (+) strand; PAM type: NRG; PAM sequence: CAG
  source 1..20: mol_type = other DNA
ccaccttcaccgccaccctc

SEQ ID NO: 31663 - DNA, 20 bp, synthetic construct
  misc_feature 1..20: note = Description of Artificial Sequence: Synthetic oligonucleotide
  misc_feature 1..20: note = Target: SCN10A; (+) strand; PAM type: NRG; PAM sequence: CAG
  source 1..20: mol_type = other DNA
cgccaccctccagcctctac

SEQ ID NO: 31664 - DNA, 20 bp, synthetic construct
  misc_feature 1..20: note = Description of Artificial Sequence: Synthetic oligonucleotide
  misc_feature 1..20: note = Target: SCN10A; (+) strand; PAM type: NRG; PAM sequence: CAG
  source 1..20: mol_type = other DNA
gcctctaccagcccactgct

SEQ ID NO: 31665 - DNA, 20 bp, synthetic construct
  misc_feature 1..20: note = Description of Artificial Sequence: Synthetic oligonucleotide
  misc_feature 1..20: note = Target: SCN10A; (+) strand; PAM type: NRG; PAM sequence: TGG
  source 1..20: mol_type = other DNA
ccagcccactgctcagtgtc

SEQ ID NO: 31666 - DNA, 20 bp, synthetic construct
  misc_feature 1..20: note = Description of Artificial Sequence: Synthetic oligonucleotide
  misc_feature 1..20: note = Target: SCN10A; (+) strand; PAM type: NRG; PAM sequence: TGG
  source 1..20: mol_type = other DNA
cccactgctcagtgtctggc

SEQ ID NO: 31667 - DNA, 20 bp, synthetic construct
  misc_feature 1..20: note = Description of Artificial Sequence: Synthetic oligonucleotide
  misc_feature 1..20: note = Target: SCN10A; (+) strand; PAM type: NRG; PAM sequence: CAG
  source 1..20: mol_type = other DNA
ggctggctgtccaacctctc

SEQ ID NO: 31668 - DNA, 20 bp, synthetic construct
  misc_feature 1..20: note = Description of Artificial Sequence: Synthetic oligonucleotide
  misc_feature 1..20: note = Target: SCN10A; (+) strand; PAM type: NRG; PAM sequence: AGG
  source 1..20: mol_type = other DNA
gctggctgtccaacctctcc

SEQ ID NO: 31669 - DNA, 20 bp, synthetic construct
  misc_feature 1..20: note = Description of Artificial Sequence: Synthetic oligonucleotide
  misc_feature 1..20: note = Target: SCN10A; (+) strand; PAM type: NRG; PAM sequence: AAG
  source 1..20: mol_type = other DNA
ggctgtccaacctctccagg

SEQ ID NO: 31670 - DNA, 20 bp, synthetic construct
  misc_feature 1..20: note = Description of Artificial Sequence: Synthetic oligonucleotide
  misc_feature 1..20: note = Target: SCN10A; (+) strand; PAM type: NRG; PAM sequence: CAG
  source 1..20: mol_type = other DNA
ggaagctgacatacctacct

SEQ ID NO: 31671 - DNA, 20 bp, synthetic construct
  misc_feature 1..20: note = Description of Artificial Sequence: Synthetic oligonucleotide
  misc_feature 1..20: note = Target: SCN10A; (+) strand; PAM type: NRG; PAM sequence: CAG
  source 1..20: mol_type = other DNA
agctgacatacctacctcag

SEQ ID NO: 31672 - DNA, 20 bp, synthetic construct
  misc_feature 1..20: note = Description of Artificial Sequence: Synthetic oligonucleotide
  misc_feature 1..20: note = Target: SCN10A; (+) strand; PAM type: NRG; PAM sequence: AGG
  source 1..20: mol_type = other DNA
gctgacatacctacctcagc

SEQ ID NO: 31673 - DNA, 20 bp, synthetic construct
  misc_feature 1..20: note = Description of Artificial Sequence: Synthetic oligonucleotide
  misc_feature 1..20: note = Target: SCN10A; (+) strand; PAM type: NRG; PAM sequence: GGG
  source 1..20: mol_type = other DNA
ctgacatacctacctcagca

SEQ ID NO: 31674 - DNA, 20 bp, synthetic construct
  misc_feature 1..20: note = Description of Artificial Sequence: Synthetic oligonucleotide
  misc_feature 1..20: note = Target: SCN10A; (+) strand; PAM type: NRG; PAM sequence: GAG
  source 1..20: mol_type = other DNA
acctacctcagcagggacct

SEQ ID NO: 31675 - DNA, 20 bp, synthetic construct
  misc_feature 1..20: note = Description of Artificial Sequence: Synthetic oligonucleotide
  misc_feature 1..20: note = Target: SCN10A; (+) strand; PAM type: NRG; PAM sequence: AGG
  source 1..20: mol_type = other DNA
cctacctcagcagggacctg

SEQ ID NO: 31676 - DNA, 20 bp, synthetic construct
  misc_feature 1..20: note = Description of Artificial Sequence: Synthetic oligonucleotide
  misc_feature 1..20: note = Target: SCN10A; (+) strand; PAM type: NRG; PAM sequence: CAG
  source 1..20: mol_type = other DNA
ctcagcagggacctgaggaa

SEQ ID NO: 31677 - DNA, 20 bp, synthetic construct
  misc_feature 1..20: note = Description of Artificial Sequence: Synthetic oligonucleotide
  misc_feature 1..20: note = Target: SCN10A; (+) strand; PAM type: NRG; PAM sequence: CAG
  source 1..20: mol_type = other DNA
tcatctttccacgtctcacc

SEQ ID NO: 31678 - DNA, 20 bp, synthetic construct
  misc_feature 1..20: note = Description of Artificial Sequence: Synthetic oligonucleotide
  misc_feature 1..20: note = Target: SCN10A; (+) strand; PAM type: NRG; PAM sequence: AGG
  source 1..20: mol_type = other DNA
catctttccacgtctcaccc

SEQ ID NO: 31679 - DNA, 20 bp, synthetic construct
  misc_feature 1..20: note = Description of Artificial Sequence: Synthetic oligonucleotide
  misc_feature 1..20: note = Target: SCN10A; (+) strand; PAM type: NRG; PAM sequence: GGG
  source 1..20: mol_type = other DNA
atctttccacgtctcaccca

SEQ ID NO: 31680 - DNA, 20 bp, synthetic construct
  misc_feature 1..20: note = Description of Artificial Sequence: Synthetic oligonucleotide
  misc_feature 1..20: note = Target: SCN10A; (+) strand; PAM type: NRG; PAM sequence: TGG
  source 1..20: mol_type = other DNA
ttccacgtctcacccaggga

SEQ ID NO: 31681 - DNA, 20 bp, synthetic construct
  misc_feature 1..20: note = Description of Artificial Sequence: Synthetic oligonucleotide
  misc_feature 1..20: note = Target: SCN10A; (+) strand; PAM type: NRG; PAM sequence: GAG
  source 1..20: mol_type = other DNA
ccacgtctcacccagggatg

SEQ ID NO: 31682 - DNA, 20 bp, synthetic construct
  misc_feature 1..20: note = Description of Artificial Sequence: Synthetic oligonucleotide
  misc_feature 1..20: note = Target: SCN10A; (+) strand; PAM type: NRG; PAM sequence: CAG
  source 1..20: mol_type = other DNA
gtctcacccagggatggagc

SEQ ID NO: 31683 - DNA, 20 bp, synthetic construct
  misc_feature 1..20: note = Description of Artificial Sequence: Synthetic oligonucleotide
  misc_feature 1..20: note = Target: SCN10A; (+) strand; PAM type: NRG; PAM sequence: AGG
  source 1..20: mol_type = other DNA
tctcacccagggatggagcc

SEQ ID NO: 31684 - DNA, 20 bp, synthetic construct
  misc_feature 1..20: note = Description of Artificial Sequence: Synthetic oligonucleotide
  misc_feature 1..20: note = Target: SCN10A; (+) strand; PAM type: NRG; PAM sequence: CAG
  source 1..20: mol_type = other DNA
cagggatggagccaggtcct

SEQ ID NO: 31685 - DNA, 20 bp, synthetic construct
  misc_feature 1..20: note = Description of Artificial Sequence: Synthetic oligonucleotide
  misc_feature 1..20: note = Target: SCN10A; (+) strand; PAM type: NRG; PAM sequence: AAG
  source 1..20: mol_type = other DNA
ggatggagccaggtcctcag

SEQ ID NO: 31686 - DNA, 20 bp, synthetic construct
  misc_feature 1..20: note = Description of Artificial Sequence: Synthetic oligonucleotide
  misc_feature 1..20: note = Target: SCN10A; (+) strand; PAM type: NRG; PAM sequence: CAG
  source 1..20: mol_type = other DNA
caggtcctcagaagatgttc

SEQ ID NO: 31687 - DNA, 20 bp, synthetic construct
  misc_feature 1..20: note = Description of Artificial Sequence: Synthetic oligonucleotide
  misc_feature 1..20: note = Target: SCN10A; (+) strand; PAM type: NRG; PAM sequence: TGG
  source 1..20: mol_type = other DNA
tcagaagatgttccagtgcc

SEQ ID NO: 31688 - DNA, 20 bp, synthetic construct
  misc_feature 1..20: note = Description of Artificial Sequence: Synthetic oligonucleotide
  misc_feature 1..20: note = Target: SCN10A; (+) strand; PAM type: NRG; PAM sequence: GGG
  source 1..20: mol_type = other DNA
cagaagatgttccagtgcct

SEQ ID NO: 31689 - DNA, 20 bp, synthetic construct
  misc_feature 1..20: note = Description of Artificial Sequence: Synthetic oligonucleotide
  misc_feature 1..20: note = Target: SCN10A; (+) strand; PAM type: NRG; PAM sequence: TGG
  source 1..20: mol_type = other DNA
tgttccagtgcctgggctcc

SEQ ID NO: 31690 - DNA, 20 bp, synthetic construct
  misc_feature 1..20: note = Description of Artificial Sequence: Synthetic oligonucleotide
  misc_feature 1..20: note = Target: SCN10A; (+) strand; PAM type: NRG; PAM sequence: GGG
  source 1..20: mol_type = other DNA
gttccagtgcctgggctcct

SEQ ID NO: 31691 - DNA, 20 bp, synthetic construct
  misc_feature 1..20: note = Description of Artificial Sequence: Synthetic oligonucleotide
  misc_feature 1..20: note = Target: SCN10A; (+) strand; PAM type: NRG; PAM sequence: CAG
  source 1..20: mol_type = other DNA
gtgcctgggctcctgggtgt

SEQ ID NO: 31692 - DNA, 20 bp, synthetic construct
  misc_feature 1..20: note = Description of Artificial Sequence: Synthetic oligonucleotide
  misc_feature 1..20: note = Target: SCN10A; (+) strand; PAM type: NRG; PAM sequence: AGG
  source 1..20: mol_type = other DNA
tgcctgggctcctgggtgtc

SEQ ID NO: 31693 - DNA, 20 bp, synthetic construct
  misc_feature 1..20: note = Description of Artificial Sequence: Synthetic oligonucleotide
  misc_feature 1..20: note = Target: SCN10A; (+) strand; PAM type: NRG; PAM sequence: TGG
  source 1..20: mol_type = other DNA
ctgggctcctgggtgtcagg

SEQ ID NO: 31694 - DNA, 20 bp, synthetic construct
  misc_feature 1..20: note = Description of Artificial Sequence: Synthetic oligonucleotide
  misc_feature 1..20: note = Target: SCN10A; (+) strand; PAM type: NRG; PAM sequence: CAG
  source 1..20: mol_type = other DNA
ccacacctctcgacttgctg

SEQ ID NO: 31695 - DNA, 20 bp, synthetic construct
  misc_feature 1..20: note = Description of Artificial Sequence: Synthetic oligonucleotide
  misc_feature 1..20: note = Target: SCN10A; (+) strand; PAM type: NRG; PAM sequence: TAG
  source 1..20: mol_type = other DNA
cttgctgcagctgctcctgc

SEQ ID NO: 31696 - DNA, 20 bp, synthetic construct
  misc_feature 1..20: note = Description of Artificial Sequence: Synthetic oligonucleotide
  misc_feature 1..20: note = Target: SCN10A; (+) strand; PAM type: NRG; PAM sequence: GAG
  source 1..20: mol_type = other DNA
ctgcagctgctcctgctagt

SEQ ID NO: 31697 - DNA, 20 bp, synthetic construct
  misc_feature 1..20: note = Description of Artificial Sequence: Synthetic oligonucleotide
  misc_feature 1..20: note = Target: SCN10A; (+) strand; PAM type: NRG; PAM sequence: GAG
  source 1..20: mol_type = other DNA
gcagctgctcctgctagtga

SEQ ID NO: 31698 - DNA, 20 bp, synthetic construct
  misc_feature 1..20: note = Description of Artificial Sequence: Synthetic oligonucleotide
  misc_feature 1..20: note = Target: SCN10A; (+) strand; PAM type: NRG; PAM sequence: GAG
  source 1..20: mol_type = other DNA
agctgctcctgctagtgaga

SEQ ID NO: 31699 - DNA, 20 bp, synthetic construct
  misc_feature 1..20: note = Description of Artificial Sequence: Synthetic oligonucleotide
  misc_feature 1..20: note = Target: SCN10A; (+) strand; PAM type: NRG; PAM sequence: AGG
  source 1..20: mol_type = other DNA
gctgctcctgctagtgagag

SEQ ID NO: 31700 - DNA, 20 bp, synthetic construct
  misc_feature 1..20: note = Description of Artificial Sequence: Synthetic oligonucleotide
  misc_feature 1..20: note = Target: SCN10A; (+) strand; PAM type: NRG; PAM sequence: GGG
  source 1..20: mol_type = other DNA
ctgctcctgctagtgagaga

SEQ ID NO: 31701 - DNA, 20 bp, synthetic construct
  misc_feature 1..20: note = Description of Artificial Sequence: Synthetic oligonucleotide
  misc_feature 1..20: note = Target: SCN10A; (+) strand; PAM type: NRG; PAM sequence: TGG
  source 1..20: mol_type = other DNA
tagtgagagagggtcccaac

SEQ ID NO: 31702 - DNA, 20 bp, synthetic construct
  misc_feature 1..20: note = Description of Artificial Sequence: Synthetic oligonucleotide
  misc_feature 1..20: note = Target: SCN10A; (+) strand; PAM type: NRG; PAM sequence: GGG
  source 1..20: mol_type = other DNA
agtgagagagggtcccaact

SEQ ID NO: 31703 - DNA, 20 bp, synthetic construct
  misc_feature 1..20: note = Description of Artificial Sequence: Synthetic oligonucleotide
  misc_feature 1..20: note = Target: SCN10A; (+) strand; PAM type: NRG; PAM sequence: TGG
  source 1..20: mol_type = other DNA
gagggtcccaactgggtgcc

SEQ ID NO: 31704 - DNA, 20 bp, synthetic construct
  misc_feature 1..20: note = Description of Artificial Sequence: Synthetic oligonucleotide
  misc_feature 1..20: note = Target: SCN10A; (+) strand; PAM type: NRG; PAM sequence: TAG
  source 1..20: mol_type = other DNA
tgggtgcctggccccaccct

SEQ ID NO: 31705 - DNA, 20 bp, synthetic construct
  misc_feature 1..20: note = Description of Artificial Sequence: Synthetic oligonucleotide
  misc_feature 1..20: note = Target: SCN10A; (+) strand; PAM type: NRG; PAM sequence: CAG
  source 1..20: mol_type = other DNA
tggccccacccttagatgac

SEQ ID NO: 31706 - DNA, 20 bp, synthetic construct
  misc_feature 1..20: note = Description of Artificial Sequence: Synthetic oligonucleotide
  misc_feature 1..20: note = Target: SCN10A; (+) strand; PAM type: NRG; PAM sequence: AAG
  source 1..20: mol_type = other DNA
gatgaccagttctaaatttg

SEQ ID NO: 31707 - DNA, 20 bp, synthetic construct
  misc_feature 1..20: note = Description of Artificial Sequence: Synthetic oligonucleotide
  misc_feature 1..20: note = Target: SCN10A; (+) strand; PAM type: NRG; PAM sequence: AGG
  source 1..20: mol_type = other DNA
atgaccagttctaaatttga

SEQ ID NO: 31708 - DNA, 20 bp, synthetic construct
  misc_feature 1..20: note = Description of Artificial Sequence: Synthetic oligonucleotide
  misc_feature 1..20: note = Target: SCN10A; (+) strand; PAM type: NRG; PAM sequence: GGG
  source 1..20: mol_type = other DNA
tgaccagttctaaatttgaa

SEQ ID NO: 31709 - DNA, 20 bp, synthetic construct
  misc_feature 1..20: note = Description of Artificial Sequence: Synthetic oligonucleotide
  misc_feature 1..20: note = Target: SCN10A; (+) strand; PAM type: NRG; PAM sequence: CAG
  source 1..20: mol_type = other DNA
tgaagggatcttgcacatca

SEQ ID NO: 31710 - DNA, 20 bp, synthetic construct
  misc_feature 1..20: note = Description of Artificial Sequence: Synthetic oligonucleotide
  misc_feature 1..20: note = Target: SCN10A; (+) strand; PAM type: NRG; PAM sequence: AGG
  source 1..20: mol_type = other DNA
gaagggatcttgcacatcac

SEQ ID NO: 31711 - DNA, 20 bp, synthetic construct
  misc_feature 1..20: note = Description of Artificial Sequence: Synthetic oligonucleotide
  misc_feature 1..20: note = Target: SCN10A; (+) strand; PAM type: NRG; PAM sequence: CAG
  source 1..20: mol_type = other DNA
tcttgcacatcacaggctgc

SEQ ID NO: 31712 - DNA, 20 bp, synthetic construct
  misc_feature 1..20: note = Description of Artificial Sequence: Synthetic oligonucleotide
  misc_feature 1..20: note = Target: SCN10A; (+) strand; PAM type: NRG; PAM sequence: GAG
  source 1..20: mol_type = other DNA
ttgcacatcacaggctgcca

SEQ ID NO: 31713 - DNA, 20 bp, synthetic construct
  misc_feature 1..20: note = Description of Artificial Sequence: Synthetic oligonucleotide
  misc_feature 1..20: note = Target: SCN10A; (+) strand; PAM type: NRG; PAM sequence: AAG
  source 1..20: mol_type = other DNA
catcacaggctgccagagcc

SEQ ID NO: 31714 - DNA, 20 bp, synthetic construct
  misc_feature 1..20: note = Description of Artificial Sequence: Synthetic oligonucleotide
  misc_feature 1..20: note = Target: SCN10A; (+) strand; PAM type: NRG; PAM sequence: GAG
  source 1..20: mol_type = other DNA
tcacaggctgccagagccaa

SEQ ID NO: 31715 - DNA, 20 bp, synthetic construct
  misc_feature 1..20: note = Description of Artificial Sequence: Synthetic oligonucleotide
  misc_feature 1..20: note = Target: SCN10A; (+) strand; PAM type: NRG; PAM sequence: AAG
  source 1..20: mol_type = other DNA
tatatacatacacgtgtgtg

SEQ ID NO: 31716 - DNA, 20 bp, synthetic construct
  misc_feature 1..20: note = Description of Artificial Sequence: Synthetic oligonucleotide
  misc_feature 1..20: note = Target: SCN10A; (+) strand; PAM type: NRG; PAM sequence: GAG
  source 1..20: mol_type = other DNA
tacatacacgtgtgtgaagt

SEQ ID NO: 31717 - DNA, 20 bp, synthetic construct
  misc_feature 1..20: note = Description of Artificial Sequence: Synthetic oligonucleotide
  misc_feature 1..20: note = Target: SCN10A; (+) strand; PAM type: NRG; PAM sequence: AAG
  source 1..20: mol_type = other DNA
acgtgtgtgaagtgagcatg

SEQ ID NO: 31718 - DNA, 20 bp, synthetic construct
  misc_feature 1..20: note = Description of Artificial Sequence: Synthetic oligonucleotide
  misc_feature 1..20: note = Target: SCN10A; (+) strand; PAM type: NRG; PAM sequence: TAG
  source 1..20: mol_type = other DNA
tgaagtgagcatgaagacta

SEQ ID NO: 31719 - DNA, 20 bp, synthetic construct
  misc_feature 1..20: note = Description of Artificial Sequence: Synthetic oligonucleotide
  misc_feature 1..20: note = Target: SCN10A; (+) strand; PAM type: NRG; PAM sequence: TAG
  source 1..20: mol_type = other DNA
gtgagcatgaagactatagc

SEQ ID NO: 31720 - DNA, 20 bp, synthetic construct
  misc_feature 1..20: note = Description of Artificial Sequence: Synthetic oligonucleotide
  misc_feature 1..20: note = Target: SCN10A; (+) strand; PAM type: NRG; PAM sequence: TAG
  source 1..20: mol_type = other DNA
gcatgaagactatagctaga

SEQ ID NO: 31721 - DNA, 20 bp, synthetic construct
  misc_feature 1..20: note = Description of Artificial Sequence: Synthetic oligonucleotide
  misc_feature 1..20: note = Target: SCN10A; (+) strand; PAM type: NRG; PAM sequence: TGG
  source 1..20: mol_type = other DNA
atagacctatgttttatcct

SEQ ID NO: 31722 - DNA, 20 bp, synthetic construct
  misc_feature 1..20: note = Description of Artificial Sequence: Synthetic oligonucleotide
  misc_feature 1..20: note = Target: SCN10A; (+) strand; PAM type: NRG; PAM sequence: GGG
  source 1..20: mol_type = other DNA
tagacctatgttttatcctt

SEQ ID NO: 31723 - DNA, 20 bp, synthetic construct
  misc_feature 1..20: note = Description of Artificial Sequence: Synthetic oligonucleotide
  misc_feature 1..20: note = Target: SCN10A; (+) strand; PAM type: NRG; PAM sequence: AAG
  source 1..20: mol_type = other DNA
ccttgggctccattaattat

SEQ ID NO: 31724 - DNA, 20 bp, synthetic construct
  misc_feature 1..20: note = Description of Artificial Sequence: Synthetic oligonucleotide
  misc_feature 1..20: note = Target: SCN10A; (+) strand; PAM type: NRG; PAM sequence: TAG
  source 1..20: mol_type = other DNA
aattataagatgtgtgacct

SEQ ID NO: 31725 - DNA, 20 bp, synthetic construct
  misc_feature 1..20: note = Description of Artificial Sequence: Synthetic oligonucleotide
  misc_feature 1..20: note = Target: SCN10A; (+) strand; PAM type: NRG; PAM sequence: AGG
  source 1..20: mol_type = other DNA
attataagatgtgtgacctt

SEQ ID NO: 31726 - DNA, 20 bp, synthetic construct
  misc_feature 1..20: note = Description of Artificial Sequence: Synthetic oligonucleotide
  misc_feature 1..20: note = Target: SCN10A; (+) strand; PAM type: NRG; PAM sequence: AAG
  source 1..20: mol_type = other DNA
taagatgtgtgaccttaggc

SEQ ID NO: 31727 - DNA, 20 bp, synthetic construct
  misc_feature 1..20: note = Description of Artificial Sequence: Synthetic oligonucleotide
  misc_feature 1..20: note = Target: SCN10A; (+) strand; PAM type: NRG; PAM sequence: CAG
  source 1..20: mol_type = other DNA
tctctaatcttcatttttcc

SEQ ID NO: 31728 - DNA, 20 bp, synthetic construct
  misc_feature 1..20: note = Description of Artificial Sequence: Synthetic oligonucleotide
  misc_feature 1..20: note = Target: SCN10A; (+) strand; PAM type: NRG; PAM sequence: AAG
  source 1..20: mol_type = other DNA
ttcccagcttcaaaattgaa

SEQ ID NO: 31729 - DNA, 20 bp, synthetic construct
  misc_feature 1..20: note = Description of Artificial Sequence: Synthetic oligonucleotide
  misc_feature 1..20: note = Target: SCN10A; (+) strand; PAM type: NRG; PAM sequence: AGG
  source 1..20: mol_type = other DNA
tcccagcttcaaaattgaaa

SEQ ID NO: 31730 - DNA, 20 bp, synthetic construct
  misc_feature 1..20: note = Description of Artificial Sequence: Synthetic oligonucleotide
  misc_feature 1..20: note = Target: SCN10A; (+) strand; PAM type: NRG; PAM sequence: TAG
  source 1..20: mol_type = other DNA
agcttcaaaattgaaaaggc

SEQ ID NO: 31731 - DNA, 20 bp, synthetic construct
  misc_feature 1..20: note = Description of Artificial Sequence: Synthetic oligonucleotide
  misc_feature 1..20: note = Target: SCN10A; (+) strand; PAM type: NRG; PAM sequence: CAG
  source 1..20: mol_type = other DNA
aaggctagatctgcatcatt

SEQ ID NO: 31732 - DNA, 20 bp, synthetic construct
  misc_feature 1..20: note = Description of Artificial Sequence: Synthetic oligonucleotide
  misc_feature 1..20: note = Target: SCN10A; (+) strand; PAM type: NRG; PAM sequence: TAG
  source 1..20: mol_type = other DNA
gttttgatgactaaatatgt

SEQ ID NO: 31733 - DNA, 20 bp, synthetic construct
  misc_feature 1..20: note = Description of Artificial Sequence: Synthetic oligonucleotide
  misc_feature 1..20: note = Target: SCN10A; (+) strand; PAM type: NRG; PAM sequence: AAG
  source 1..20: mol_type = other DNA
cttgtaaaacactttgcacg

SEQ ID NO: 31734 - DNA, 20 bp, synthetic construct
  misc_feature 1..20: note = Description of Artificial Sequence: Synthetic oligonucleotide
  misc_feature 1..20: note = Target: SCN10A; (+) strand; PAM type: NRG; PAM sequence: TGG
  source 1..20: mol_type = other DNA
aacactttgcacgaagtgct

SEQ ID NO: 31735 - DNA, 20 bp, synthetic construct
  misc_feature 1..20: note = Description of Artificial Sequence: Synthetic oligonucleotide
  misc_feature 1..20: note = Target: SCN10A; (+) strand; PAM type: NRG; PAM sequence: TAG
  source 1..20: mol_type = other DNA
gcacgaagtgcttggctcaa

SEQ ID NO: 31736 - DNA, 20 bp, synthetic construct
  misc_feature 1..20: note = Description of Artificial Sequence: Synthetic oligonucleotide
  misc_feature 1..20: note = Target: SCN10A; (+) strand; PAM type: NRG; PAM sequence: TAG
  source 1..20: mol_type = other DNA
gtgcttggctcaatagattt

SEQ ID NO: 31737 - DNA, 20 bp, synthetic construct
  misc_feature 1..20: note = Description of Artificial Sequence: Synthetic oligonucleotide
  misc_feature 1..20: note = Target: SCN10A; (+) strand; PAM type: NRG; PAM sequence: CAG
  source 1..20: mol_type = other DNA
catgaccattgttatttgtc

SEQ ID NO: 31738 - DNA, 20 bp, synthetic construct
  misc_feature 1..20: note = Description of Artificial Sequence: Synthetic oligonucleotide
  misc_feature 1..20: note = Target: SCN10A; (+) strand; PAM type: NRG; PAM sequence: GAG
  source 1..20: mol_type = other DNA
tgaccattgttatttgtcca

SEQ ID NO: 31739 - DNA, 20 bp, synthetic construct
  misc_feature 1..20: note = Description of Artificial Sequence: Synthetic oligonucleotide
  misc_feature 1..20: note = Target: SCN10A; (+) strand; PAM type: NRG; PAM sequence: AGG
  source 1..20: mol_type = other DNA
gaccattgttatttgtccag

SEQ ID NO: 31740 - DNA, 20 bp, synthetic construct
  misc_feature 1..20: note = Description of Artificial Sequence: Synthetic oligonucleotide
  misc_feature 1..20: note = Target: SCN10A; (+) strand; PAM type: NRG; PAM sequence: TAG
  source 1..20: mol_type = other DNA
ttgtccagaggtcaaaattg

SEQ ID NO: 31741 - DNA, 20 bp, synthetic construct
  misc_feature 1..20: note = Description of Artificial Sequence: Synthetic oligonucleotide
  misc_feature 1..20: note = Target: SCN10A; (+) strand; PAM type: NRG; PAM sequence: AGG
  source 1..20: mol_type = other DNA
tgtccagaggtcaaaattgt

SEQ ID NO: 31742 - DNA, 20 bp, synthetic construct
  misc_feature 1..20: note = Description of Artificial Sequence: Synthetic oligonucleotide
  misc_feature 1..20: note = Target: SCN10A; (+) strand; PAM type: NRG; PAM sequence: GGG
  source 1..20: mol_type = other DNA
gtccagaggtcaaaattgta

SEQ ID NO: 31743 - DNA, 20 bp, synthetic construct
  misc_feature 1..20: note = Description of Artificial Sequence: Synthetic oligonucleotide
  misc_feature 1..20: note = Target: SCN10A; (+) strand; PAM type: NRG; PAM sequence: TGG
  source 1..20: mol_type = other DNA
ggtcaaaattgtagggaact

SEQ ID NO: 31744 - DNA, 20 bp, synthetic construct
  misc_feature 1..20: note = Description of Artificial Sequence: Synthetic oligonucleotide
  misc_feature 1..20: note = Target: SCN10A; (+) strand; PAM type: NRG; PAM sequence: TGG
  source 1..20: mol_type = other DNA
ttgtagggaacttggccacc

SEQ ID NO: 31745 - DNA, 20 bp, synthetic construct
  misc_feature 1..20: note = Description of Artificial Sequence: Synthetic oligonucleotide
  misc_feature 1..20: note = Target: SCN10A; (+) strand; PAM type: NRG; PAM sequence: GAG
  source 1..20: mol_type = other DNA
gtagggaacttggccacctg

SEQ ID NO: 31746 - DNA, 20 bp, synthetic construct
  misc_feature 1..20: note = Description of Artificial Sequence: Synthetic oligonucleotide
  misc_feature 1..20: note = Target: SCN10A; (+) strand; PAM type: NRG; PAM sequence: AAG
  source 1..20: mol_type = other DNA
ttggccacctggagctccct

SEQ ID NO: 31747 - DNA, 20 bp, synthetic construct
  misc_feature 1..20: note = Description of Artificial Sequence: Synthetic oligonucleotide
  misc_feature 1..20: note = Target: SCN10A; (+) strand; PAM type: NRG; PAM sequence: GAG
  source 1..20: mol_type = other DNA
ggccacctggagctccctaa

SEQ ID NO: 31748 - DNA, 20 bp, synthetic construct
  misc_feature 1..20: note = Description of Artificial Sequence: Synthetic oligonucleotide
  misc_feature 1..20: note = Target: SCN10A; (+) strand; PAM type: NRG; PAM sequence: AAG
  source 1..20: mol_type = other DNA
ggagctccctaagagcccca

SEQ ID NO: 31749 - DNA, 20 bp, synthetic construct
  misc_feature 1..20: note = Description of Artificial Sequence: Synthetic oligonucleotide
  misc_feature 1..20: note = Target: SCN10A; (+) strand; PAM type: NRG; PAM sequence: GAG
  source 1..20: mol_type = other DNA
aagtaactgaaaatgcttct

SEQ ID NO: 31750 - DNA, 20 bp, synthetic construct
  misc_feature 1..20: note = Description of Artificial Sequence: Synthetic oligonucleotide
  misc_feature 1..20: note = Target: SCN10A; (+) strand; PAM type: NRG; PAM sequence: TGG
  source 1..20: mol_type = other DNA
taactgaaaatgcttctgag

SEQ ID NO: 31751 - DNA, 20 bp, synthetic construct
  misc_feature 1..20: note = Description of Artificial Sequence: Synthetic oligonucleotide
  misc_feature 1..20: note = Target: SCN10A; (+) strand; PAM type: NRG; PAM sequence: CAG
  source 1..20: mol_type = other DNA
ctgaaaatgcttctgagtgg

SEQ ID NO: 31752 - DNA, 20 bp, synthetic construct
  misc_feature 1..20: note = Description of Artificial Sequence: Synthetic oligonucleotide
  misc_feature 1..20: note = Target: SCN10A; (+) strand; PAM type: NRG; PAM sequence: CAG
  source 1..20: mol_type = other DNA
aaatgcttctgagtggcaga

SEQ ID NO: 31753 - DNA, 20 bp, synthetic construct
  misc_feature 1..20: note = Description of Artificial Sequence: Synthetic oligonucleotide
  misc_feature 1..20: note = Target: SCN10A; (+) strand; PAM type: NRG; PAM sequence: CAG
  source 1..20: mol_type = other DNA
tgagtggcagacagctgtca

SEQ ID NO: 31754 - DNA, 20 bp, synthetic construct
  misc_feature 1..20: note = Description of Artificial Sequence: Synthetic oligonucleotide
  misc_feature 1..20: note = Target: SCN10A; (+) strand; PAM type: NRG; PAM sequence: GAG
  source 1..20: mol_type = other DNA
agtggcagacagctgtcaca

SEQ ID NO: 31755 - DNA, 20 bp, synthetic construct
  misc_feature 1..20: note = Description of Artificial Sequence: Synthetic oligonucleotide
  misc_feature 1..20: note = Target: SCN10A; (+) strand; PAM type: NRG; PAM sequence: TAG
  source 1..20: mol_type = other DNA
tcatgctctctgctgttacc

SEQ ID NO: 31756 - DNA, 20 bp, synthetic construct
  misc_feature 1..20: note = Description of Artificial Sequence: Synthetic oligonucleotide
  misc_feature 1..20: note = Target: SCN10A; (+) strand; PAM type: NRG; PAM sequence: AAG
  source 1..20: mol_type = other DNA
tctctgctgttacctagaca

SEQ ID NO: 31757 - DNA, 20 bp, synthetic construct
  misc_feature 1..20: note = Description of Artificial Sequence: Synthetic oligonucleotide
  misc_feature 1..20: note = Target: SCN10A; (+) strand; PAM type: NRG; PAM sequence: AGG
  source 1..20: mol_type = other DNA
ctctgctgttacctagacaa

SEQ ID NO: 31758 - DNA, 20 bp, synthetic construct
  misc_feature 1..20: note = Description of Artificial Sequence: Synthetic oligonucleotide
  misc_feature 1..20: note = Target: SCN10A; (+) strand; PAM type: NRG; PAM sequence: TGG
  source 1..20: mol_type = other DNA
agacaaaggcatgtaaaata

SEQ ID NO: 31759 - DNA, 20 bp, synthetic construct
  misc_feature 1..20: note = Description of Artificial Sequence: Synthetic oligonucleotide
  misc_feature 1..20: note = Target: SCN10A; (+) strand; PAM type: NRG; PAM sequence: CAG
  source 1..20: mol_type = other DNA
caaaggcatgtaaaatatgg

SEQ ID NO: 31760 - DNA, 20 bp, synthetic construct
  misc_feature 1..20: note = Description of Artificial Sequence: Synthetic oligonucleotide
  misc_feature 1..20: note = Target: SCN10A; (+) strand; PAM type: NRG; PAM sequence: CAG
  source 1..20: mol_type = other DNA
taaaatatggcagctgataa

SEQ ID NO: 31761 - DNA, 20 bp, synthetic construct
  misc_feature 1..20: note = Description of Artificial Sequence: Synthetic oligonucleotide
  misc_feature 1..20: note = Target: SCN10A; (+) strand; PAM type: NRG; PAM sequence: CAG
  source 1..20: mol_type = other DNA
aatatggcagctgataacag

SEQ ID NO: 31762 - DNA, 20 bp, synthetic construct
  misc_feature 1..20: note = Description of Artificial Sequence: Synthetic oligonucleotide
  misc_feature 1..20: note = Target: SCN10A; (+) strand; PAM type: NRG; PAM sequence: TGG
  source 1..20: mol_type = other DNA
cagctgataacagcagctgc

SEQ ID NO: 31763 - DNA, 20 bp, synthetic construct
  misc_feature 1..20: note = Description of Artificial Sequence: Synthetic oligonucleotide
  misc_feature 1..20: note = Target: SCN10A; (+) strand; PAM type: NRG; PAM sequence: AAG
  source 1..20: mol_type = other DNA
aacagcagctgctggaacac

SEQ ID NO: 31764 - DNA, 20 bp, synthetic construct
  misc_feature 1..20: note = Description of Artificial Sequence: Synthetic oligonucleotide
  misc_feature 1..20: note = Target: SCN10A; (+) strand; PAM type: NRG; PAM sequence: CAG
  source 1..20: mol_type = other DNA
tggaacacaagtgacgactg

SEQ ID NO: 31765 - DNA, 20 bp, synthetic construct
  misc_feature 1..20: note = Description of Artificial Sequence: Synthetic oligonucleotide
  misc_feature 1..20: note = Target: SCN10A; (+) strand; PAM type: NRG; PAM sequence: AGG
  source 1..20: mol_type = other DNA
ggaacacaagtgacgactgc

SEQ ID NO: 31766 - DNA, 20 bp, synthetic construct
  misc_feature 1..20: note = Description of Artificial Sequence: Synthetic oligonucleotide
  misc_feature 1..20: note = Target: SCN10A; (+) strand; PAM type: NRG; PAM sequence: GGG
  source 1..20: mol_type = other DNA
gaacacaagtgacgactgca

SEQ ID NO: 31767 - DNA, 20 bp, synthetic construct
  misc_feature 1..20: note = Description of Artificial Sequence: Synthetic oligonucleotide
  misc_feature 1..20: note = Target: SCN10A; (+) strand; PAM type: NRG; PAM sequence: AAG
  source 1..20: mol_type = other DNA
cacaagtgacgactgcaggg

SEQ ID NO: 31768 - DNA, 20 bp, synthetic construct
  misc_feature 1..20: note = Description of Artificial Sequence: Synthetic oligonucleotide
  misc_feature 1..20: note = Target: SCN10A; (+) strand; PAM type: NRG; PAM sequence: AAG
  source 1..20: mol_type = other DNA
aagtgacgactgcagggaag

SEQ ID NO: 31769 - DNA, 20 bp, synthetic construct
  misc_feature 1..20: note = Description of Artificial Sequence: Synthetic oligonucleotide
  misc_feature 1..20: note = Target: SCN10A; (+) strand; PAM type: NRG; PAM sequence: AGG
  source 1..20: mol_type = other DNA
agtgacgactgcagggaaga

SEQ ID NO: 31770 - DNA, 20 bp, synthetic construct
  misc_feature 1..20: note = Description of Artificial Sequence: Synthetic oligonucleotide
  misc_feature 1..20: note = Target: SCN10A; (+) strand; PAM type: NRG; PAM sequence: TGG
  source 1..20: mol_type = other DNA
gactgcagggaagaaggcta

SEQ ID NO: 31771 - DNA, 20 bp, synthetic construct
  misc_feature 1..20: note = Description of Artificial Sequence: Synthetic oligonucleotide
  misc_feature 1..20: note = Target: SCN10A; (+) strand; PAM type: NRG; PAM sequence: GGG
  source 1..20: mol_type = other DNA
actgcagggaagaaggctat

SEQ ID NO: 31772 - DNA, 20 bp, synthetic construct
  misc_feature 1..20: note = Description of Artificial Sequence: Synthetic oligonucleotide
  misc_feature 1..20: note = Target: SCN10A; (+) strand; PAM type: NRG; PAM sequence: GAG
  source 1..20: mol_type = other DNA
tgcagggaagaaggctatgg

SEQ ID NO: 31773 - DNA, 20 bp, synthetic construct
  misc_feature 1..20: note = Description of Artificial Sequence: Synthetic oligonucleotide
  misc_feature 1..20: note = Target: SCN10A; (+) strand; PAM type: NRG; PAM sequence: GAG
  source 1..20: mol_type = other DNA
cagggaagaaggctatggga

SEQ ID NO: 31774 - DNA, 20 bp, synthetic construct
  misc_feature 1..20: note = Description of Artificial Sequence: Synthetic oligonucleotide
  misc_feature 1..20: note = Target: SCN10A; (+) strand; PAM type: NRG; PAM sequence: CAG
  source 1..20: mol_type = other DNA
agaaggctatgggagagcta

SEQ ID NO: 31775 - DNA, 20 bp, synthetic construct
  misc_feature 1..20: note = Description of Artificial Sequence: Synthetic oligonucleotide
  misc_feature 1..20: note = Target: SCN10A; (+) strand; PAM type: NRG; PAM sequence: AAG
  source 1..20: mol_type = other DNA
atgggagagctacagactca

SEQ ID NO: 31776 - DNA, 20 bp, synthetic construct
  misc_feature 1..20: note = Description of Artificial Sequence: Synthetic oligonucleotide
  misc_feature 1..20: note = Target: SCN10A; (+) strand; PAM type: NRG; PAM sequence: CAG
  source 1..20: mol_type = other DNA
agagctacagactcaaagca

SEQ ID NO: 31777 - DNA, 20 bp, synthetic construct
  misc_feature 1..20: note = Description of Artificial Sequence: Synthetic oligonucleotide
  misc_feature 1..20: note = Target: SCN10A; (+) strand; PAM type: NRG; PAM sequence: TGG
  source 1..20: mol_type = other DNA
gactcaaagcacagcttttc

SEQ ID NO: 31778 - DNA, 20 bp, synthetic construct
  misc_feature 1..20: note = Description of Artificial Sequence: Synthetic oligonucleotide
  misc_feature 1..20: note = Target: SCN10A; (+) strand; PAM type: NRG; PAM sequence: TAG
  source 1..20: mol_type = other DNA
cacagcttttctggaccact

SEQ ID NO: 31779 - DNA, 20 bp, synthetic construct
  misc_feature 1..20: note = Description of Artificial Sequence: Synthetic oligonucleotide
  misc_feature 1..20: note = Target: SCN10A; (+) strand; PAM type: NRG; PAM sequence: TGG
  source 1..20: mol_type = other DNA
ttctggaccacttagtaacc

SEQ ID NO: 31780 - DNA, 20 bp, synthetic construct
  misc_feature 1..20: note = Description of Artificial Sequence: Synthetic oligonucleotide
  misc_feature 1..20: note = Target: SCN10A; (+) strand; PAM type: NRG; PAM sequence: CAG
  source 1..20: mol_type = other DNA
ggaccacttagtaacctggc

SEQ ID NO: 31781 - DNA, 20 bp, synthetic construct
  misc_feature 1..20: note = Description of Artificial Sequence: Synthetic oligonucleotide
  misc_feature 1..20: note = Target: SCN10A; (+) strand; PAM type: NRG; PAM sequence: CAG
  source 1..20: mol_type = other DNA
ccacttagtaacctggccag

SEQ ID NO: 31782 - DNA, 20 bp, synthetic construct
  misc_feature 1..20: note = Description of Artificial Sequence: Synthetic oligonucleotide
  misc_feature 1..20: note = Target: SCN10A; (+) strand; PAM type: NRG; PAM sequence: GAG
  source 1..20: mol_type = other DNA
cagcagccctgcatgttcct

SEQ ID NO: 31783 - DNA, 20 bp, synthetic construct
  misc_feature 1..20: note = Description of Artificial Sequence: Synthetic oligonucleotide
  misc_feature 1..20: note = Target: SCN10A; (+) strand; PAM type: NRG; PAM sequence: AGG
  source 1..20: mol_type = other DNA
agcagccctgcatgttcctg

SEQ ID NO: 31784 - DNA, 20 bp, synthetic construct
  misc_feature 1..20: note = Description of Artificial Sequence: Synthetic oligonucleotide
  misc_feature 1..20: note = Target: SCN10A; (+) strand; PAM type: NRG; PAM sequence: CAG
  source 1..20: mol_type = other DNA
tgcatgttcctgaggcctca

SEQ ID NO: 31785 - DNA, 20 bp, synthetic construct
  misc_feature 1..20: note = Description of Artificial Sequence: Synthetic oligonucleotide
  misc_feature 1..20: note = Target: SCN10A; (+) strand; PAM type: NRG; PAM sequence: AGG
  source 1..20: mol_type = other DNA
gcatgttcctgaggcctcac

SEQ ID NO: 31786 - DNA, 20 bp, synthetic construct
  misc_feature 1..20: note = Description of Artificial Sequence: Synthetic oligonucleotide
  misc_feature 1..20: note = Target: SCN10A; (+) strand; PAM type: NRG; PAM sequence: GGG
  source 1..20: mol_type = other DNA
catgttcctgaggcctcaca

SEQ ID NO: 31787 - DNA, 20 bp, synthetic construct
  misc_feature 1..20: note = Description of Artificial Sequence: Synthetic oligonucleotide
  misc_feature 1..20: note = Target: SCN10A; (+) strand; PAM type: NRG; PAM sequence: TGG
  source 1..20: mol_type = other DNA
ggttccctgccttcccacgt

SEQ ID NO: 31788 - DNA, 20 bp, synthetic construct
  misc_feature 1..20: note = Description of Artificial Sequence: Synthetic oligonucleotide
  misc_feature 1..20: note = Target: SCN10A; (+) strand; PAM type: NRG; PAM sequence: GGG
  source 1..20: mol_type = other DNA
gttccctgccttcccacgtt

SEQ ID NO: 31789 - DNA, 20 bp, synthetic construct
  misc_feature 1..20: note = Description of Artificial Sequence: Synthetic oligonucleotide
  misc_feature 1..20: note = Target: SCN10A; (+) strand; PAM type: NRG; PAM sequence: CAG
  source 1..20: mol_type = other DNA
ccctgccttcccacgttggg

SEQ ID NO: 31790 - DNA, 20 bp, synthetic construct
  misc_feature 1..20: note = Description of Artificial Sequence: Synthetic oligonucleotide
  misc_feature 1..20: note = Target: SCN10A; (+) strand; PAM type: NRG; PAM sequence: GAG
  source 1..20: mol_type = other DNA
ctgccttcccacgttgggca

SEQ ID NO: 31791 - DNA, 20 bp, synthetic construct
  misc_feature 1..20: note = Description of Artificial Sequence: Synthetic oligonucleotide
  misc_feature 1..20: note = Target: SCN10A; (+) strand; PAM type: NRG; PAM sequence: AGG
  source 1..20: mol_type = other DNA
tgccttcccacgttgggcag

SEQ ID NO: 31792 - DNA, 20 bp, synthetic construct
  misc_feature 1..20: note = Description of Artificial Sequence: Synthetic oligonucleotide
  misc_feature 1..20: note = Target: SCN10A; (+) strand; PAM type: NRG; PAM sequence: GAG
  source 1..20: mol_type = other DNA
tgggcagaggtgaatgccct

SEQ ID NO: 31793 - DNA, 20 bp, synthetic construct
  misc_feature 1..20: note = Description of Artificial Sequence: Synthetic oligonucleotide
  misc_feature 1..20: note = Target: SCN10A; (+) strand; PAM type: NRG; PAM sequence: GAG
  source 1..20: mol_type = other DNA
ggtgaatgccctgagttact

SEQ ID NO: 31794 - DNA, 20 bp, synthetic construct
  misc_feature 1..20: note = Description of Artificial Sequence: Synthetic oligonucleotide
  misc_feature 1..20: note = Target: SCN10A; (+) strand; PAM type: NRG; PAM sequence: AAG
  source 1..20: mol_type = other DNA
gaatgccctgagttactgag

SEQ ID NO: 31795 - DNA, 20 bp, synthetic construct
  misc_feature 1..20: note = Description of Artificial Sequence: Synthetic oligonucleotide
  misc_feature 1..20: note = Target: SCN10A; (+) strand; PAM type: NRG; PAM sequence: GAG
  source 1..20: mol_type = other DNA
atgccctgagttactgagaa

SEQ ID NO: 31796 - DNA, 20 bp, synthetic construct
  misc_feature 1..20: note = Description of Artificial Sequence: Synthetic oligonucleotide
  misc_feature 1..20: note = Target: SCN10A; (+) strand; PAM type: NRG; PAM sequence: AGG
  source 1..20: mol_type = other DNA
tgccctgagttactgagaag

SEQ ID NO: 31797 - DNA, 20 bp, synthetic construct
  misc_feature 1..20: note = Description of Artificial Sequence: Synthetic oligonucleotide
  misc_feature 1..20: note = Target: SCN10A; (+) strand; PAM type: NRG; PAM sequence: TAG
  source 1..20: mol_type = other DNA
ctgagttactgagaagaggt

SEQ ID NO: 31798 - DNA, 20 bp, synthetic construct
  misc_feature 1..20: note = Description of Artificial Sequence: Synthetic oligonucleotide
  misc_feature 1..20: note = Target: SCN10A; (+) strand; PAM type: NRG; PAM sequence: GAG
  source 1..20: mol_type = other DNA
gttactgagaagaggttagc

SEQ ID NO: 31799 - DNA, 20 bp, synthetic construct
  misc_feature 1..20: note = Description of Artificial Sequence: Synthetic oligonucleotide
  misc_feature 1..20: note = Target: SCN10A; (+) strand; PAM type: NRG; PAM sequence: AGG
  source 1..20: mol_type = other DNA
ttactgagaagaggttagcg

SEQ ID NO: 31800 - DNA, 20 bp, synthetic construct
  misc_feature 1..20: note = Description of Artificial Sequence: Synthetic oligonucleotide
  misc_feature 1..20: note = Target: SCN10A; (+) strand; PAM type: NRG; PAM sequence: GGG
  source 1..20: mol_type = other DNA
tactgagaagaggttagcga

SEQ ID NO: 31801 - DNA, 20 bp, synthetic construct
  misc_feature 1..20: note = Description of Artificial Sequence: Synthetic oligonucleotide
  misc_feature 1..20: note = Target: SCN10A; (+) strand; PAM type: NRG; PAM sequence: CAG
  source 1..20: mol_type = other DNA
gttagcgagggttgatatac

SEQ ID NO: 31802 - DNA, 20 bp, synthetic construct
  misc_feature 1..20: note = Description of Artificial Sequence: Synthetic oligonucleotide
  misc_feature 1..20: note = Target: SCN10A; (+) strand; PAM type: NRG; PAM sequence: AAG
  source 1..20: mol_type = other DNA
gagggttgatataccagctt

SEQ ID NO: 31803 - DNA, 20 bp, synthetic construct
  misc_feature 1..20: note = Description of Artificial Sequence: Synthetic oligonucleotide
  misc_feature 1..20: note = Target: SCN10A; (+) strand; PAM type: NRG; PAM sequence: AGG
  source 1..20: mol_type = other DNA
agggttgatataccagctta

SEQ ID NO: 31804 - DNA, 20 bp, synthetic construct
  misc_feature 1..20: note = Description of Artificial Sequence: Synthetic oligonucleotide
  misc_feature 1..20: note = Target: SCN10A; (+) strand; PAM type: NRG; PAM sequence: TAG
  source 1..20: mol_type = other DNA
gttgatataccagcttaagg

SEQ ID NO: 31805 - DNA, 20 bp, synthetic construct
  misc_feature 1..20: note = Description of Artificial Sequence: Synthetic oligonucleotide
  misc_feature 1..20: note = Target: SCN10A; (+) strand; PAM type: NRG; PAM sequence: AAG
  source 1..20: mol_type = other DNA
atataccagcttaaggtagt

SEQ ID NO: 31806 - DNA, 20 bp, synthetic construct
  misc_feature 1..20: note = Description of Artificial Sequence: Synthetic oligonucleotide
  misc_feature 1..20: note = Target: SCN10A; (+) strand; PAM type: NRG; PAM sequence: AGG
  source 1..20: mol_type = other DNA
tataccagcttaaggtagta

SEQ ID NO: 31807 - DNA, 20 bp, synthetic construct
  misc_feature 1..20: note = Description of Artificial Sequence: Synthetic oligonucleotide
  misc_feature 1..20: note = Target: SCN10A; (+) strand; PAM type: NRG; PAM sequence: TAG
  source 1..20: mol_type = other DNA
cagcttaaggtagtaaggaa

SEQ ID NO: 31808 - DNA, 20 bp, synthetic construct
  misc_feature 1..20: note = Description of Artificial Sequence: Synthetic oligonucleotide
  misc_feature 1..20: note = Target: SCN10A; (+) strand; PAM type: NRG; PAM sequence: AAG
  source 1..20: mol_type = other DNA
aggtagtaaggaatagtgcc

SEQ ID NO: 31809 - DNA, 20 bp, synthetic construct
  misc_feature 1..20: note = Description of Artificial Sequence: Synthetic oligonucleotide
  misc_feature 1..20: note = Target: SCN10A; (+) strand; PAM type: NRG; PAM sequence: TGG
  source 1..20: mol_type = other DNA
taaaaatatatattatcaaa

SEQ ID NO: 31810 - DNA, 20 bp, synthetic construct
  misc_feature 1..20: note = Description of Artificial Sequence: Synthetic oligonucleotide
  misc_feature 1..20: note = Target: SCN10A; (+) strand; PAM type: NRG; PAM sequence: TAG
  source 1..20: mol_type = other DNA
ggctcaaatgtgctttaaat

SEQ ID NO: 31811 - DNA, 20 bp, synthetic construct
  misc_feature 1..20: note = Description of Artificial Sequence: Synthetic oligonucleotide
  misc_feature 1..20: note = Target: SCN10A; (+) strand; PAM type: NRG; PAM sequence: TGG
  source 1..20: mol_type = other DNA
caaatgtgctttaaattagt

SEQ ID NO: 31812 - DNA, 20 bp, synthetic construct
  misc_feature 1..20: note = Description of Artificial Sequence: Synthetic oligonucleotide
  misc_feature 1..20: note = Target: SCN10A; (+) strand; PAM type: NRG; PAM sequence: AAG
  source 1..20: mol_type = other DNA
tttaaattagttggtgccaa

SEQ ID NO: 31813 - DNA, 20 bp, synthetic construct
  misc_feature 1..20: note = Description of Artificial Sequence: Synthetic oligonucleotide
  misc_feature 1..20: note = Target: SCN10A; (+) strand; PAM type: NRG; PAM sequence: AGG
  source 1..20: mol_type = other DNA
ttaaattagttggtgccaaa

SEQ ID NO: 31814 - DNA, 20 bp, synthetic construct
  misc_feature 1..20: note = Description of Artificial Sequence: Synthetic oligonucleotide
  misc_feature 1..20: note = Target: SCN10A; (+) strand; PAM type: NRG; PAM sequence: GAG
  source 1..20: mol_type = other DNA
aaattagttggtgccaaaag

SEQ ID NO: 31815 - DNA, 20 bp, synthetic construct
  misc_feature 1..20: note = Description of Artificial Sequence: Synthetic oligonucleotide
  misc_feature 1..20: note = Target: SCN10A; (+) strand; PAM type: NRG; PAM sequence: TGG
  source 1..20: mol_type = other DNA
tttccctgtgataccacttg

SEQ ID NO: 31816 - DNA, 20 bp, synthetic construct
  misc_feature 1..20: note = Description of Artificial Sequence: Synthetic oligonucleotide
  misc_feature 1..20: note = Target: SCN10A; (+) strand; PAM type: NRG; PAM sequence: GGG
  source 1..20: mol_type = other DNA
ttccctgtgataccacttgt

SEQ ID NO: 31817 - DNA, 20 bp, synthetic construct
  misc_feature 1..20: note = Description of Artificial Sequence: Synthetic oligonucleotide
  misc_feature 1..20: note = Target: SCN10A; (+) strand; PAM type: NRG; PAM sequence: GGG
  source 1..20: mol_type = other DNA
tccctgtgataccacttgtg

SEQ ID NO: 31818 - DNA, 20 bp, synthetic construct
  misc_feature 1..20: note = Description of Artificial Sequence: Synthetic oligonucleotide
  misc_feature 1..20: note = Target: SCN10A; (+) strand; PAM type: NRG; PAM sequence: AAG
  source 1..20: mol_type = other DNA
gtgataccacttgtggggaa

SEQ ID NO: 31819 - DNA, 20 bp, synthetic construct
  misc_feature 1..20: note = Description of Artificial Sequence: Synthetic oligonucleotide
  misc_feature 1..20: note = Target: SCN10A; (+) strand; PAM type: NRG; PAM sequence: TGG
  source 1..20: mol_type = other DNA
taccacttgtggggaaaagc

SEQ ID NO: 31820 - DNA, 20 bp, synthetic construct
  misc_feature 1..20: note = Description of Artificial Sequence: Synthetic oligonucleotide
  misc_feature 1..20: note = Target: SCN10A; (+) strand; PAM type: NRG; PAM sequence: GAG
  source 1..20: mol_type = other DNA
tggggaaaagctggctaaat

SEQ ID NO: 31821 - DNA, 20 bp, synthetic construct
  misc_feature 1..20: note = Description of Artificial Sequence: Synthetic oligonucleotide
  misc_feature 1..20: note = Target: SCN10A; (+) strand; PAM type: NRG; PAM sequence: AAG
  source 1..20: mol_type = other DNA
gctggctaaatgagtcacat

SEQ ID NO: 31822 - DNA, 20 bp, synthetic construct
  misc_feature 1..20: note = Description of Artificial Sequence: Synthetic oligonucleotide
  misc_feature 1..20: note = Target: SCN10A; (+) strand; PAM type: NRG; PAM sequence: CAG
  source 1..20: mol_type = other DNA
taaatgagtcacataagaat

SEQ ID NO: 31823 - DNA, 20 bp, synthetic construct
  misc_feature 1..20: note = Description of Artificial Sequence: Synthetic oligonucleotide
  misc_feature 1..20: note = Target: SCN10A; (+) strand; PAM type: NRG; PAM sequence: AGG
  source 1..20: mol_type = other DNA
aaatgagtcacataagaatc

SEQ ID NO: 31824 - DNA, 20 bp, synthetic construct
  misc_feature 1..20: note = Description of Artificial Sequence: Synthetic oligonucleotide
  misc_feature 1..20: note = Target: SCN10A; (+) strand; PAM type: NRG; PAM sequence: TAG
  source 1..20: mol_type = other DNA
acataagaatcaggacttct

SEQ ID NO: 31825 - DNA, 20 bp, synthetic construct
  misc_feature 1..20: note = Description of Artificial Sequence: Synthetic oligonucleotide
  misc_feature 1..20: note = Target: SCN10A; (+) strand; PAM type: NRG; PAM sequence: AGG
  source 1..20: mol_type = other DNA
cataagaatcaggacttctt

SEQ ID NO: 31826 - DNA, 20 bp, synthetic construct
  misc_feature 1..20: note = Description of Artificial Sequence: Synthetic oligonucleotide
  misc_feature 1..20: note = Target: SCN10A; (+) strand; PAM type: NRG; PAM sequence: TGG
  source 1..20: mol_type = other DNA
atcaggacttcttaggatgc

SEQ ID NO: 31827 - DNA, 20 bp, synthetic construct
  misc_feature 1..20: note = Description of Artificial Sequence: Synthetic oligonucleotide
  misc_feature 1..20: note = Target: SCN10A; (+) strand; PAM type: NRG; PAM sequence: AAG
  source 1..20: mol_type = other DNA
gacttcttaggatgctggta

SEQ ID NO: 31828 - DNA, 20 bp, synthetic construct
  misc_feature 1..20: note = Description of Artificial Sequence: Synthetic oligonucleotide
  misc_feature 1..20: note = Target: SCN10A; (+) strand; PAM type: NRG; PAM sequence: TAG
  source 1..20: mol_type = other DNA
cttaggatgctggtaaagat

SEQ ID NO: 31829 - DNA, 20 bp, synthetic construct
  misc_feature 1..20: note = Description of Artificial Sequence: Synthetic oligonucleotide
  misc_feature 1..20: note = Target: SCN10A; (+) strand; PAM type: NRG; PAM sequence: GAG
  source 1..20: mol_type = other DNA
gatgctggtaaagattagat

SEQ ID NO: 31830 - DNA, 20 bp, synthetic construct
  misc_feature 1..20: note = Description of Artificial Sequence: Synthetic oligonucleotide
  misc_feature 1..20: note = Target: SCN10A; (+) strand; PAM type: NRG; PAM sequence: TGG
  source 1..20: mol_type = other DNA
gattagatgagccttgctct

SEQ ID NO: 31831 - DNA, 20 bp, synthetic construct
  misc_feature 1..20: note = Description of Artificial Sequence: Synthetic oligonucleotide
  misc_feature 1..20: note = Target: SCN10A; (+) strand; PAM type: NRG; PAM sequence: TAG
  source 1..20: mol_type = other DNA
cttggacaacatcctgttct

SEQ ID NO: 31832 - DNA, 20 bp, synthetic construct
  misc_feature 1..20: note = Description of Artificial Sequence: Synthetic oligonucleotide
  misc_feature 1..20: note = Target: SCN10A; (+) strand; PAM type: NRG; PAM sequence: GAG
  source 1..20: mol_type = other DNA
tggacaacatcctgttctta

SEQ ID NO: 31833 - DNA, 20 bp, synthetic construct
  misc_feature 1..20: note = Description of Artificial Sequence: Synthetic oligonucleotide
  misc_feature 1..20: note = Target: SCN10A; (+) strand; PAM type: NRG; PAM sequence: TAG
  source 1..20: mol_type = other DNA
tgttcttagagaaatctcat

SEQ ID NO: 31834 - DNA, 20 bp, synthetic construct
  misc_feature 1..20: note = Description of Artificial Sequence: Synthetic oligonucleotide
  misc_feature 1..20: note = Target: SCN10A; (+) strand; PAM type: NRG; PAM sequence: CAG
  source 1..20: mol_type = other DNA
tctcattagcatctcatgca

SEQ ID NO: 31835 - DNA, 20 bp, synthetic construct
  misc_feature 1..20: note = Description of Artificial Sequence: Synthetic oligonucleotide
  misc_feature 1..20: note = Target: SCN10A; (+) strand; PAM type: NRG; PAM sequence: GAG
  source 1..20: mol_type = other DNA
tcattagcatctcatgcaca

SEQ ID NO: 31836 - DNA, 20 bp, synthetic construct
  misc_feature 1..20: note = Description of Artificial Sequence: Synthetic oligonucleotide
  misc_feature 1..20: note = Target: SCN10A; (+) strand; PAM type: NRG; PAM sequence: TGG
  source 1..20: mol_type = other DNA
agcatctcatgcacagagcc

SEQ ID NO: 31837 - DNA, 20 bp, synthetic construct
  misc_feature 1..20: note = Description of Artificial Sequence: Synthetic oligonucleotide
  misc_feature 1..20: note = Target: SCN10A; (+) strand; PAM type: NRG; PAM sequence: GGG
  source 1..20: mol_type = other DNA
gcatctcatgcacagagcct

SEQ ID NO: 31838 - DNA, 20 bp, synthetic construct
  misc_feature 1..20: note = Description of Artificial Sequence: Synthetic oligonucleotide
  misc_feature 1..20: note = Target: SCN10A; (+) strand; PAM type: NRG; PAM sequence: TGG
  source 1..20: mol_type = other DNA
ctcatgcacagagcctgggt

SEQ ID NO: 31839 - DNA, 20 bp, synthetic construct
  misc_feature 1..20: note = Description of Artificial Sequence: Synthetic oligonucleotide
  misc_feature 1..20: note = Target: SCN10A; (+) strand; PAM type: NRG; PAM sequence: GGG
  source 1..20: mol_type = other DNA
tcatgcacagagcctgggtt

SEQ ID NO: 31840 - DNA, 20 bp, synthetic construct
  misc_feature 1..20: note = Description of Artificial Sequence: Synthetic oligonucleotide
  misc_feature 1..20: note = Target: SCN10A; (+) strand; PAM type: NRG; PAM sequence: CAG
  source 1..20: mol_type = other DNA
tgcacagagcctgggttggg

SEQ ID NO: 31841 - DNA, 20 bp, synthetic construct
  misc_feature 1..20: note = Description of Artificial Sequence: Synthetic oligonucleotide
  misc_feature 1..20: note = Target: SCN10A; (+) strand; PAM type: NRG; PAM sequence: GAG
  source 1..20: mol_type = other DNA
cacagagcctgggttgggca

SEQ ID NO: 31842 - DNA, 20 bp, synthetic construct
  misc_feature 1..20: note = Description of Artificial Sequence: Synthetic oligonucleotide
  misc_feature 1..20: note = Target: SCN10A; (+) strand; PAM type: NRG; PAM sequence: TGG
  source 1..20: mol_type = other DNA
cctgggttgggcagagcgca

SEQ ID NO: 31843 - DNA, 20 bp, synthetic construct
  misc_feature 1..20: note = Description of Artificial Sequence: Synthetic oligonucleotide
  misc_feature 1..20: note = Target: SCN10A; (+) strand; PAM type: NRG; PAM sequence: GGG
  source 1..20: mol_type = other DNA
ctgggttgggcagagcgcat

SEQ ID NO: 31844 - DNA, 20 bp, synthetic construct
  misc_feature 1..20: note = Description of Artificial Sequence: Synthetic oligonucleotide
  misc_feature 1..20: note = Target: SCN10A; (+) strand; PAM type: NRG; PAM sequence: CAG
  source 1..20: mol_type = other DNA
gttgggcagagcgcatggga

SEQ ID NO: 31845 - DNA, 20 bp, synthetic construct
  misc_feature 1..20: note = Description of Artificial Sequence: Synthetic oligonucleotide
  misc_feature 1..20: note = Target: SCN10A; (+) strand; PAM type: NRG; PAM sequence: AAG
  source 1..20: mol_type = other DNA
cgcatgggacagctgtgtga

SEQ ID NO: 31846 - DNA, 20 bp, synthetic construct
  misc_feature 1..20: note = Description of Artificial Sequence: Synthetic oligonucleotide
  misc_feature 1..20: note = Target: SCN10A; (+) strand; PAM type: NRG; PAM sequence: AAG
  source 1..20: mol_type = other DNA
ctgtgtgaaagacaatcccc

SEQ ID NO: 31847 - DNA, 20 bp, synthetic construct
  misc_feature 1..20: note = Description of Artificial Sequence: Synthetic oligonucleotide
  misc_feature 1..20: note = Target: SCN10A; (+) strand; PAM type: NRG; PAM sequence: AAG
  source 1..20: mol_type = other DNA
agacaatccccaagcacctc

SEQ ID NO: 31848 - DNA, 20 bp, synthetic construct
  misc_feature 1..20: note = Description of Artificial Sequence: Synthetic oligonucleotide
  misc_feature 1..20: note = Target: SCN10A; (+) strand; PAM type: NRG; PAM sequence: AGG
  source 1..20: mol_type = other DNA
gacaatccccaagcacctca

SEQ ID NO: 31849 - DNA, 20 bp, synthetic construct
  misc_feature 1..20: note = Description of Artificial Sequence: Synthetic oligonucleotide
  misc_feature 1..20: note = Target: SCN10A; (+) strand; PAM type: NRG; PAM sequence: TGG
  source 1..20: mol_type = other DNA
aatccccaagcacctcaagg

SEQ ID NO: 31850 - DNA, 20 bp, synthetic construct
  misc_feature 1..20: note = Description of Artificial Sequence: Synthetic oligonucleotide
  misc_feature 1..20: note = Target: SCN10A; (+) strand; PAM type: NRG; PAM sequence: TGG
  source 1..20: mol_type = other DNA
ccactccctgtttgtctgcc

SEQ ID NO: 31851 - DNA, 20 bp, synthetic construct
  misc_feature 1..20: note = Description of Artificial Sequence: Synthetic oligonucleotide
  misc_feature 1..20: note = Target: SCN10A; (+) strand; PAM type: NRG; PAM sequence: GGG
  source 1..20: mol_type = other DNA
cactccctgtttgtctgcct

SEQ ID NO: 31852 - DNA, 20 bp, synthetic construct
  misc_feature 1..20: note = Description of Artificial Sequence: Synthetic oligonucleotide
  misc_feature 1..20: note = Target: SCN10A; (+) strand; PAM type: NRG; PAM sequence: GGG
  source 1..20: mol_type = other DNA
actccctgtttgtctgcctg

SEQ ID NO: 31853 - DNA, 20 bp, synthetic construct
  misc_feature 1..20: note = Description of Artificial Sequence: Synthetic oligonucleotide
  misc_feature 1..20: note = Target: SCN10A; (+) strand; PAM type: NRG; PAM sequence: CAG
  source 1..20: mol_type = other DNA
ggaattctgactttttcttc

SEQ ID NO: 31854 - DNA, 20 bp, synthetic construct
  misc_feature 1..20: note = Description of Artificial Sequence: Synthetic oligonucleotide
  misc_feature 1..20: note = Target: SCN10A; (+) strand; PAM type: NRG; PAM sequence: AGG
  source 1..20: mol_type = other DNA
gaattctgactttttcttcc

SEQ ID NO: 31855 - DNA, 20 bp, synthetic construct
  misc_feature 1..20: note = Description of Artificial Sequence: Synthetic oligonucleotide
  misc_feature 1..20: note = Target: SCN10A; (+) strand; PAM type: NRG; PAM sequence: TGG
  source 1..20: mol_type = other DNA
tgctcaaacgccaactcctc

SEQ ID NO: 31856 - DNA, 20 bp, synthetic construct
  misc_feature 1..20: note = Description of Artificial Sequence: Synthetic oligonucleotide
  misc_feature 1..20: note = Target: SCN10A; (+) strand; PAM type: NRG; PAM sequence: AAG
  source 1..20: mol_type = other DNA
caaacgccaactcctctgga

SEQ ID NO: 31857 - DNA, 20 bp, synthetic construct
  misc_feature 1..20: note = Description of Artificial Sequence: Synthetic oligonucleotide
  misc_feature 1..20: note = Target: SCN10A; (+) strand; PAM type: NRG; PAM sequence: TGG
  source 1..20: mol_type = other DNA
gccaactcctctggaaagct

SEQ ID NO: 31858 - DNA, 20 bp, synthetic construct
  misc_feature 1..20: note = Description of Artificial Sequence: Synthetic oligonucleotide
  misc_feature 1..20: note = Target: SCN10A; (+) strand; PAM type: NRG; PAM sequence: TGG
  source 1..20: mol_type = other DNA
ctcctctggaaagcttggca

SEQ ID NO: 31859 - DNA, 20 bp, synthetic construct
  misc_feature 1..20: note = Description of Artificial Sequence: Synthetic oligonucleotide
  misc_feature 1..20: note = Target: SCN10A; (+) strand; PAM type: NRG; PAM sequence: AAG
  source 1..20: mol_type = other DNA
ggtttaaacttctttatgtc

SEQ ID NO: 31860 - DNA, 20 bp, synthetic construct
  misc_feature 1..20: note = Description of Artificial Sequence: Synthetic oligonucleotide
  misc_feature 1..20: note = Target: SCN10A; (+) strand; PAM type: NRG; PAM sequence: AGG
  source 1..20: mol_type = other DNA
gtttaaacttctttatgtca

SEQ ID NO: 31861 - DNA, 20 bp, synthetic construct
  misc_feature 1..20: note = Description of Artificial Sequence: Synthetic oligonucleotide
  misc_feature 1..20: note = Target: SCN10A; (+) strand; PAM type: NRG; PAM sequence: AAG
  source 1..20: mol_type = other DNA
ccttttgccctttgtcactc

SEQ ID NO: 31862 - DNA, 20 bp, synthetic construct
  misc_feature 1..20: note = Description of Artificial Sequence: Synthetic oligonucleotide
  misc_feature 1..20: note = Target: SCN10A; (+) strand; PAM type: NRG; PAM sequence: AAG
  source 1..20: mol_type = other DNA
cctttgtcactcaagccctg

SEQ ID NO: 31863 - DNA, 20 bp, synthetic construct
  misc_feature 1..20: note = Description of Artificial Sequence: Synthetic oligonucleotide
  misc_feature 1..20: note = Target: SCN10A; (+) strand; PAM type: NRG; PAM sequence: TGG
  source 1..20: mol_type = other DNA
aagcccctccccactgcctg

SEQ ID NO: 31864 - DNA, 20 bp, synthetic construct
  misc_feature 1..20: note = Description of Artificial Sequence: Synthetic oligonucleotide
  misc_feature 1..20: note = Target: SCN10A; (+) strand; PAM type: NRG; PAM sequence: TGG
  source 1..20: mol_type = other DNA
cactgcctgtggctgtccct

SEQ ID NO: 31865 - DNA, 20 bp, synthetic construct
  misc_feature 1..20: note = Description of Artificial Sequence: Synthetic oligonucleotide
  misc_feature 1..20: note = Target: SCN10A; (+) strand; PAM type: NRG; PAM sequence: GGG
  source 1..20: mol_type = other DNA
actgcctgtggctgtccctt

SEQ ID NO: 31866 - DNA, 20 bp, synthetic construct
  misc_feature 1..20: note = Description of Artificial Sequence: Synthetic oligonucleotide
  misc_feature 1..20: note = Target: SCN10A; (+) strand; PAM type: NRG; PAM sequence: GGG
  source 1..20: mol_type = other DNA
ctgcctgtggctgtcccttg

SEQ ID NO: 31867 - DNA, 20 bp, synthetic construct
  misc_feature 1..20: note = Description of Artificial Sequence: Synthetic oligonucleotide
  misc_feature 1..20: note = Target: SCN10A; (+) strand; PAM type: NRG; PAM sequence: TGG
  source 1..20: mol_type = other DNA
gataactcttacctgtcctt

SEQ ID NO: 31868 - DNA, 20 bp, synthetic construct
  misc_feature 1..20: note = Description of Artificial Sequence: Synthetic oligonucleotide
  misc_feature 1..20: note = Target: SCN10A; (+) strand; PAM type: NRG; PAM sequence: GGG
  source 1..20: mol_type = other DNA
ataactcttacctgtccttt

SEQ ID NO: 31869 - DNA, 20 bp, synthetic construct
  misc_feature 1..20: note = Description of Artificial Sequence: Synthetic oligonucleotide
  misc_feature 1..20: note = Target: SCN10A; (+) strand; PAM type: NRG; PAM sequence: GGG
  source 1..20: mol_type = other DNA
taactcttacctgtcctttg

SEQ ID NO: 31870 - DNA, 20 bp, synthetic construct
  misc_feature 1..20: note = Description of Artificial Sequence: Synthetic oligonucleotide
  misc_feature 1..20: note = Target: SCN10A; (+) strand; PAM type: NRG; PAM sequence: TGG
  source 1..20: mol_type = other DNA
ctttggggatcacttcctgc

SEQ ID NO: 31871 - DNA, 20 bp, synthetic construct
  misc_feature 1..20: note = Description of Artificial Sequence: Synthetic oligonucleotide
  misc_feature 1..20: note = Target: SCN10A; (+) strand; PAM type: NRG; PAM sequence: AAG
  source 1..20: mol_type = other DNA
tggggatcacttcctgctgg

SEQ ID NO: 31872 - DNA, 20 bp, synthetic construct
  misc_feature 1..20: note = Description of Artificial Sequence: Synthetic oligonucleotide
  misc_feature 1..20: note = Target: SCN10A; (+) strand; PAM type: NRG; PAM sequence: GAG
  source 1..20: mol_type = other DNA
cacttcctgctggaagctct

SEQ ID NO: 31873 - DNA, 20 bp, synthetic construct
  misc_feature 1..20: note = Description of Artificial Sequence: Synthetic oligonucleotide
  misc_feature 1..20: note = Target: SCN10A; (+) strand; PAM type: NRG; PAM sequence: AAG
  source 1..20: mol_type = other DNA
cttccccaccatcatcctcc

SEQ ID NO: 31874 - DNA, 20 bp, synthetic construct
  misc_feature 1..20: note = Description of Artificial Sequence: Synthetic oligonucleotide
  misc_feature 1..20: note = Target: SCN10A; (+) strand; PAM type: NRG; PAM sequence: AAG
  source 1..20: mol_type = other DNA
ccatcatcctccaagtcatc

SEQ ID NO: 31875 - DNA, 20 bp, synthetic construct
  misc_feature 1..20: note = Description of Artificial Sequence: Synthetic oligonucleotide
  misc_feature 1..20: note = Target: SCN10A; (+) strand; PAM type: NRG; PAM sequence: CAG
  source 1..20: mol_type = other DNA
atcctccaagtcatcaagat

SEQ ID NO: 31876 - DNA, 20 bp, synthetic construct
  misc_feature 1..20: note = Description of Artificial Sequence: Synthetic oligonucleotide
  misc_feature 1..20: note = Target: SCN10A; (+) strand; PAM type: NRG; PAM sequence: CAG
  source 1..20: mol_type = other DNA
atcaagatcagattcaccct

SEQ ID NO: 31877 - DNA, 20 bp, synthetic construct
  misc_feature 1..20: note = Description of Artificial Sequence: Synthetic oligonucleotide
  misc_feature 1..20: note = Target: SCN10A; (+) strand; PAM type: NRG; PAM sequence: TGG
  source 1..20: mol_type = other DNA
atcagattcaccctcagcaa

SEQ ID NO: 31878 - DNA, 20 bp, synthetic construct
  misc_feature 1..20: note = Description of Artificial Sequence: Synthetic oligonucleotide
  misc_feature 1..20: note = Target: SCN10A; (+) strand; PAM type: NRG; PAM sequence: GGG
  source 1..20: mol_type = other DNA
tcagattcaccctcagcaat

SEQ ID NO: 31879 - DNA, 20 bp, synthetic construct
  misc_feature 1..20: note = Description of Artificial Sequence: Synthetic oligonucleotide
  misc_feature 1..20: note = Target: SCN10A; (+) strand; PAM type: NRG; PAM sequence: CAG
  source 1..20: mol_type = other DNA
ttcaccctcagcaatgggca

SEQ ID NO: 31880 - DNA, 20 bp, synthetic construct
  misc_feature 1..20: note = Description of Artificial Sequence: Synthetic oligonucleotide
  misc_feature 1..20: note = Target: SCN10A; (+) strand; PAM type: NRG; PAM sequence: GAG
  source 1..20: mol_type = other DNA
caccctcagcaatgggcaca

SEQ ID NO: 31881 - DNA, 20 bp, synthetic construct
  misc_feature 1..20: note = Description of Artificial Sequence: Synthetic oligonucleotide
  misc_feature 1..20: note = Target: SCN10A; (+) strand; PAM type: NRG; PAM sequence: CAG
  source 1..20: mol_type = other DNA
aatgggcacagagacccaca

SEQ ID NO: 31882 - DNA, 20 bp, synthetic construct
  misc_feature 1..20: note = Description of Artificial Sequence: Synthetic oligonucleotide
  misc_feature 1..20: note = Target: SCN10A; (+) strand; PAM type: NRG; PAM sequence: CGG
  source 1..20: mol_type = other DNA
ggcacagagacccacacagt

SEQ ID NO: 31883 - DNA, 20 bp, synthetic construct
  misc_feature 1..20: note = Description of Artificial Sequence: Synthetic oligonucleotide
  misc_feature 1..20: note = Target: SCN10A; (+) strand; PAM type: NRG; PAM sequence: TAG
  source 1..20: mol_type = other DNA
agagacccacacagtcggat

SEQ ID NO: 31884 - DNA, 20 bp, synthetic construct
  misc_feature 1..20: note = Description of Artificial Sequence: Synthetic oligonucleotide
  misc_feature 1..20: note = Target: SCN10A; (+) strand; PAM type: NRG; PAM sequence: AAG
  source 1..20: mol_type = other DNA
acacagtcggattagcgatg

SEQ ID NO: 31885 - DNA, 20 bp, synthetic construct
  misc_feature 1..20: note = Description of Artificial Sequence: Synthetic oligonucleotide
  misc_feature 1..20: note = Target: SCN10A; (+) strand; PAM type: NRG; PAM sequence: TGG
  source 1..20: mol_type = other DNA
gaagtcactgtgctcatccc

SEQ ID NO: 31886 - DNA, 20 bp, synthetic construct
  misc_feature 1..20: note = Description of Artificial Sequence: Synthetic oligonucleotide
  misc_feature 1..20: note = Target: SCN10A; (+) strand; PAM type: NRG; PAM sequence: GGG
  source 1..20: mol_type = other DNA
aagtcactgtgctcatccct

SEQ ID NO: 31887 - DNA, 20 bp, synthetic construct
  misc_feature 1..20: note = Description of Artificial Sequence: Synthetic oligonucleotide
  misc_feature 1..20: note = Target: SCN10A; (+) strand; PAM type: NRG; PAM sequence: GGG
  source 1..20: mol_type = other DNA
agtcactgtgctcatccctg

SEQ ID NO: 31888 - DNA, 20 bp, synthetic construct
  misc_feature 1..20: note = Description of Artificial Sequence: Synthetic oligonucleotide
  misc_feature 1..20: note = Target: SCN10A; (+) strand; PAM type: NRG; PAM sequence: TGG
  source 1..20: mol_type = other DNA
gtgctcatccctggggcctc

SEQ ID NO: 31889 - DNA, 20 bp, synthetic construct
  misc_feature 1..20: note = Description of Artificial Sequence: Synthetic oligonucleotide
  misc_feature 1..20: note = Target: SCN10A; (+) strand; PAM type: NRG; PAM sequence: GGG
  source 1..20: mol_type = other DNA
tgctcatccctggggcctct

SEQ ID NO: 31890 - DNA, 20 bp, synthetic construct
  misc_feature 1..20: note = Description of Artificial Sequence: Synthetic oligonucleotide
  misc_feature 1..20: note = Target: SCN10A; (+) strand; PAM type: NRG; PAM sequence: GAG
  source 1..20: mol_type = other DNA
ctcatccctggggcctctgg

SEQ ID NO: 31891 - DNA, 20 bp, synthetic construct
  misc_feature 1..20: note = Description of Artificial Sequence: Synthetic oligonucleotide
  misc_feature 1..20: note = Target: SCN10A; (+) strand; PAM type: NRG; PAM sequence: TGG
  source 1..20: mol_type = other DNA
ccctggggcctctgggagct

SEQ ID NO: 31892 - DNA, 20 bp, synthetic construct
  misc_feature 1..20: note = Description of Artificial Sequence: Synthetic oligonucleotide
  misc_feature 1..20: note = Target: SCN10A; (+) strand; PAM type: NRG; PAM sequence: GAG
  source 1..20: mol_type = other DNA
ctggggcctctgggagcttg

SEQ ID NO: 31893 - DNA, 20 bp, synthetic construct
  misc_feature 1..20: note = Description of Artificial Sequence: Synthetic oligonucleotide
  misc_feature 1..20: note = Target: SCN10A; (+) strand; PAM type: NRG; PAM sequence: CAG
  source 1..20: mol_type = other DNA
tctgggagcttggagccctc

SEQ ID NO: 31894 - DNA, 20 bp, synthetic construct
  misc_feature 1..20: note = Description of Artificial Sequence: Synthetic oligonucleotide
  misc_feature 1..20: note = Target: SCN10A; (+) strand; PAM type: NRG; PAM sequence: GAG
  source 1..20: mol_type = other DNA
tgggagcttggagccctcca

SEQ ID NO: 31895 - DNA, 20 bp, synthetic construct
  misc_feature 1..20: note = Description of Artificial Sequence: Synthetic oligonucleotide
  misc_feature 1..20: note = Target: SCN10A; (+) strand; PAM type: NRG; PAM sequence: TGG
  source 1..20: mol_type = other DNA
gagccctccagagctccccc

SEQ ID NO: 31896 - DNA, 20 bp, synthetic construct
  misc_feature 1..20: note = Description of Artificial Sequence: Synthetic oligonucleotide
  misc_feature 1..20: note = Target: SCN10A; (+) strand; PAM type: NRG; PAM sequence: CAG
  source 1..20: mol_type = other DNA
ccctccagagctccccctgg

SEQ ID NO: 31897 - DNA, 20 bp, synthetic construct
  misc_feature 1..20: note = Description of Artificial Sequence: Synthetic oligonucleotide
  misc_feature 1..20: note = Target: SCN10A; (+) strand; PAM type: NRG; PAM sequence: TGG
  source 1..20: mol_type = other DNA
agagctccccctggcagtgt

SEQ ID NO: 31898 - DNA, 20 bp, synthetic construct
  misc_feature 1..20: note = Description of Artificial Sequence: Synthetic oligonucleotide
  misc_feature 1..20: note = Target: SCN10A; (+) strand; PAM type: NRG; PAM sequence: CAG
  source 1..20: mol_type = other DNA
gctccccctggcagtgttgg

SEQ ID NO: 31899 - DNA, 20 bp, synthetic construct
  misc_feature 1..20: note = Description of Artificial Sequence: Synthetic oligonucleotide
  misc_feature 1..20: note = Target: SCN10A; (+) strand; PAM type: NRG; PAM sequence: TGG
  source 1..20: mol_type = other DNA
tggcagtgttggcagcaatg

SEQ ID NO: 31900 - DNA, 20 bp, synthetic construct
  misc_feature 1..20: note = Description of Artificial Sequence: Synthetic oligonucleotide
  misc_feature 1..20: note = Target: SCN10A; (+) strand; PAM type: NRG; PAM sequence: CAG
  source 1..20: mol_type = other DNA
gttggcagcaatgtggttct

SEQ ID NO: 31901 - DNA, 20 bp, synthetic construct
  misc_feature 1..20: note = Description of Artificial Sequence: Synthetic oligonucleotide
  misc_feature 1..20: note = Target: SCN10A; (+) strand; PAM type: NRG; PAM sequence: TGG
  source 1..20: mol_type = other DNA
agcaatgtggttctcagcct

SEQ ID NO: 31902 - DNA, 20 bp, synthetic construct
  misc_feature 1..20: note = Description of Artificial Sequence: Synthetic oligonucleotide
  misc_feature 1..20: note = Target: SCN10A; (+) strand; PAM type: NRG; PAM sequence: GAG
  source 1..20: mol_type = other DNA
caatgtggttctcagccttg

SEQ ID NO: 31903 - DNA, 20 bp, synthetic construct
  misc_feature 1..20: note = Description of Artificial Sequence: Synthetic oligonucleotide
  misc_feature 1..20: note = Target: SCN10A; (+) strand; PAM type: NRG; PAM sequence: TGG
  source 1..20: mol_type = other DNA
gtggttctcagccttggagc

SEQ ID NO: 31904 - DNA, 20 bp, synthetic construct
  misc_feature 1..20: note = Description of Artificial Sequence: Synthetic oligonucleotide
  misc_feature 1..20: note = Target: SCN10A; (+) strand; PAM type: NRG; PAM sequence: GAG
  source 1..20: mol_type = other DNA
ggttctcagccttggagctg

SEQ ID NO: 31905 - DNA, 20 bp, synthetic construct
  misc_feature 1..20: note = Description of Artificial Sequence: Synthetic oligonucleotide
  misc_feature 1..20: note = Target: SCN10A; (+) strand; PAM type: NRG; PAM sequence: GAG
  source 1..20: mol_type = other DNA
ttctcagccttggagctgga

SEQ ID NO: 31906 - DNA, 20 bp, synthetic construct
  misc_feature 1..20: note = Description of Artificial Sequence: Synthetic oligonucleotide
  misc_feature 1..20: note = Target: SCN10A; (+) strand; PAM type: NRG; PAM sequence: TGG
  source 1..20: mol_type = other DNA
tcagccttggagctggagag

SEQ ID NO: 31907 - DNA, 20 bp, synthetic construct
  misc_feature 1..20: note = Description of Artificial Sequence: Synthetic oligonucleotide
  misc_feature 1..20: note = Target: SCN10A; (+) strand; PAM type: NRG; PAM sequence: GGG
  source 1..20: mol_type = other DNA
cagccttggagctggagagt

SEQ ID NO: 31908 - DNA, 20 bp, synthetic construct
  misc_feature 1..20: note = Description of Artificial Sequence: Synthetic oligonucleotide
  misc_feature 1..20: note = Target: SCN10A; (+) strand; PAM type: NRG; PAM sequence: GAG
  source 1..20: mol_type = other DNA
gccttggagctggagagtgg

SEQ ID NO: 31909 - DNA, 20 bp, synthetic construct
  misc_feature 1..20: note = Description of Artificial Sequence: Synthetic oligonucleotide
  misc_feature 1..20: note = Target: SCN10A; (+) strand; PAM type: NRG; PAM sequence: CAG
  source 1..20: mol_type = other DNA
gagagtgggagtttcaccac

SEQ ID NO: 31910 - DNA, 20 bp, synthetic construct
  misc_feature 1..20: note = Description of Artificial Sequence: Synthetic oligonucleotide
  misc_feature 1..20: note = Target: SCN10A; (+) strand; PAM type: NRG; PAM sequence: CAG
  source 1..20: mol_type = other DNA
tgggagtttcaccaccagct

SEQ ID NO: 31911 - DNA, 20 bp, synthetic construct
  misc_feature 1..20: note = Description of Artificial Sequence: Synthetic oligonucleotide
  misc_feature 1..20: note = Target: SCN10A; (+) strand; PAM type: NRG; PAM sequence: AGG
  source 1..20: mol_type = other DNA
gggagtttcaccaccagctc

SEQ ID NO: 31912 - DNA, 20 bp, synthetic construct
  misc_feature 1..20: note = Description of Artificial Sequence: Synthetic oligonucleotide
  misc_feature 1..20: note = Target: SCN10A; (+) strand; PAM type: NRG; PAM sequence: TGG
  source 1..20: mol_type = other DNA
caccagctcaggctctgcct

SEQ ID NO: 31913 - DNA, 20 bp, synthetic construct
  misc_feature 1..20: note = Description of Artificial Sequence: Synthetic oligonucleotide
  misc_feature 1..20: note = Target: SCN10A; (+) strand; PAM type: NRG; PAM sequence: GGG
  source 1..20: mol_type = other DNA
accagctcaggctctgcctt

SEQ ID NO: 31914 - DNA, 20 bp, synthetic construct
  misc_feature 1..20: note = Description of Artificial Sequence: Synthetic oligonucleotide
  misc_feature 1..20: note = Target: SCN10A; (+) strand; PAM type: NRG; PAM sequence: TGG
  source 1..20: mol_type = other DNA
gctcaggctctgccttgggc

SEQ ID NO: 31915 - DNA, 20 bp, synthetic construct
  misc_feature 1..20: note = Description of Artificial Sequence: Synthetic oligonucleotide
  misc_feature 1..20: note = Target: SCN10A; (+) strand; PAM type: NRG; PAM sequence: GGG
  source 1..20: mol_type = other DNA
ctcaggctctgccttgggct

SEQ ID NO: 31916 - DNA, 20 bp, synthetic construct
  misc_feature 1..20: note = Description of Artificial Sequence: Synthetic oligonucleotide
  misc_feature 1..20: note = Target: SCN10A; (+) strand; PAM type: NRG; PAM sequence: GGG
  source 1..20: mol_type = other DNA
tcaggctctgccttgggctg

SEQ ID NO: 31917 - DNA, 20 bp, synthetic construct
  misc_feature 1..20: note = Description of Artificial Sequence: Synthetic oligonucleotide
  misc_feature 1..20: note = Target: SCN10A; (+) strand; PAM type: NRG; PAM sequence: GGG
  source 1..20: mol_type = other DNA
caggctctgccttgggctgg

SEQ ID NO: 31918 - DNA, 20 bp, synthetic construct
  misc_feature 1..20: note = Description of Artificial Sequence: Synthetic oligonucleotide
  misc_feature 1..20: note = Target: SCN10A; (+) strand; PAM type: NRG; PAM sequence: TGG
  source 1..20: mol_type = other DNA
tctgccttgggctgggggaa

SEQ ID NO: 31919 - DNA, 20 bp, synthetic construct
  misc_feature 1..20: note = Description of Artificial Sequence: Synthetic oligonucleotide
  misc_feature 1..20: note = Target: SCN10A; (+) strand; PAM type: NRG; PAM sequence: GGG
  source 1..20: mol_type = other DNA
ctgccttgggctgggggaat

SEQ ID NO: 31920 - DNA, 20 bp, synthetic construct
  misc_feature 1..20: note = Description of Artificial Sequence: Synthetic oligonucleotide
  misc_feature 1..20: note = Target: SCN10A; (+) strand; PAM type: NRG; PAM sequence: CAG
  source 1..20: mol_type = other DNA
ccttgggctgggggaatggg

SEQ ID NO: 31921 - DNA, 20 bp, synthetic construct
  misc_feature 1..20: note = Description of Artificial Sequence: Synthetic oligonucleotide
  misc_feature 1..20: note = Target: SCN10A; (+) strand; PAM type: NRG; PAM sequence: AGG
  source 1..20: mol_type = other DNA
cttgggctgggggaatgggc

SEQ ID NO: 31922 - DNA, 20 bp, synthetic construct
  misc_feature 1..20: note = Description of Artificial Sequence: Synthetic oligonucleotide
  misc_feature 1..20: note = Target: SCN10A; (+) strand; PAM type: NRG; PAM sequence: AAG
  source 1..20: mol_type = other DNA
ggaatgggcaggacctgctg

SEQ ID NO: 31923 - DNA, 20 bp, synthetic construct
  misc_feature 1..20: note = Description of Artificial Sequence: Synthetic oligonucleotide
  misc_feature 1..20: note = Target: SCN10A; (+) strand; PAM type: NRG; PAM sequence: AAG
  source 1..20: mol_type = other DNA
atgggcaggacctgctgaag

SEQ ID NO: 31924 - DNA, 20 bp, synthetic construct
  misc_feature 1..20: note = Description of Artificial Sequence: Synthetic oligonucleotide
  misc_feature 1..20: note = Target: SCN10A; (+) strand; PAM type: NRG; PAM sequence: AAG
  source 1..20: mol_type = other DNA
gacctgctgaagaagctgca

SEQ ID NO: 31925 - DNA, 20 bp, synthetic construct
  misc_feature 1..20: note = Description of Artificial Sequence: Synthetic oligonucleotide
  misc_feature 1..20: note = Target: SCN10A; (+) strand; PAM type: NRG; PAM sequence: GAG
  source 1..20: mol_type = other DNA
cctgctgaagaagctgcaaa

SEQ ID NO: 31926 - DNA, 20 bp, synthetic construct
  misc_feature 1..20: note = Description of Artificial Sequence: Synthetic oligonucleotide
  misc_feature 1..20: note = Target: SCN10A; (+) strand; PAM type: NRG; PAM sequence: TGG
  source 1..20: mol_type = other DNA
gaagctgcaaagagcctgtt

SEQ ID NO: 31927 - DNA, 20 bp, synthetic construct
  misc_feature 1..20: note = Description of Artificial Sequence: Synthetic oligonucleotide
  misc_feature 1..20: note = Target: SCN10A; (+) strand; PAM type: NRG; PAM sequence: TGG
  source 1..20: mol_type = other DNA
aaagagcctgtttggtacga

SEQ ID NO: 31928 - DNA, 20 bp, synthetic construct
  misc_feature 1..20: note = Description of Artificial Sequence: Synthetic oligonucleotide
  misc_feature 1..20: note = Target: SCN10A; (+) strand; PAM type: NRG; PAM sequence: AAG
  source 1..20: mol_type = other DNA
cctgtttggtacgatggcca

SEQ ID NO: 31929 - DNA, 20 bp, synthetic construct
  misc_feature 1..20: note = Description of Artificial Sequence: Synthetic oligonucleotide
  misc_feature 1..20: note = Target: SCN10A; (+) strand; PAM type: NRG; PAM sequence: TGG
  source 1..20: mol_type = other DNA
tggtacgatggccaaagacc

SEQ ID NO: 31930 - DNA, 20 bp, synthetic construct
  misc_feature 1..20: note = Description of Artificial Sequence: Synthetic oligonucleotide
  misc_feature 1..20: note = Target: SCN10A; (+) strand; PAM type: NRG; PAM sequence: CAG
  source 1..20: mol_type = other DNA
ccaaagacctggatccgtgc

SEQ ID NO: 31931 - DNA, 20 bp, synthetic construct
  misc_feature 1..20: note = Description of Artificial Sequence: Synthetic oligonucleotide
  misc_feature 1..20: note = Target: SCN10A; (+) strand; PAM type: NRG; PAM sequence: AGG
  source 1..20: mol_type = other DNA
caaagacctggatccgtgcc

SEQ ID NO: 31932 - DNA, 20 bp, synthetic construct
  misc_feature 1..20: note = Description of Artificial Sequence: Synthetic oligonucleotide
  misc_feature 1..20: note = Target: SCN10A; (+) strand; PAM type: NRG; PAM sequence: GGG
  source 1..20: mol_type = other DNA
aaagacctggatccgtgcca

SEQ ID NO: 31933 - DNA, 20 bp, synthetic construct
  misc_feature 1..20: note = Description of Artificial Sequence: Synthetic oligonucleotide
  misc_feature 1..20: note = Target: SCN10A; (+) strand; PAM type: NRG; PAM sequence: CAG
  source 1..20: mol_type = other DNA
atccgtgccagggccacctg

SEQ ID NO: 31934 - DNA, 20 bp, synthetic construct
  misc_feature 1..20: note = Description of Artificial Sequence: Synthetic oligonucleotide
  misc_feature 1..20: note = Target: SCN10A; (+) strand; PAM type: NRG; PAM sequence: AGG
  source 1..20: mol_type = other DNA
tccgtgccagggccacctgc

SEQ ID NO: 31935 - DNA, 20 bp, synthetic construct
  misc_feature 1..20: note = Description of Artificial Sequence: Synthetic oligonucleotide
  misc_feature 1..20: note = Target: SCN10A; (+) strand; PAM type: NRG; PAM sequence: CGG
  source 1..20: mol_type = other DNA
ttcacctccccatcgtcctc

SEQ ID NO: 31936 - DNA, 20 bp, synthetic construct
  misc_feature 1..20: note = Description of Artificial Sequence: Synthetic oligonucleotide
  misc_feature 1..20: note = Target: SCN10A; (+) strand; PAM type: NRG; PAM sequence: GGG
  source 1..20: mol_type = other DNA
tcacctccccatcgtcctcc

SEQ ID NO: 31937 - DNA, 20 bp, synthetic construct
  misc_feature 1..20: note = Description of Artificial Sequence: Synthetic oligonucleotide
  misc_feature 1..20: note = Target: SCN10A; (+) strand; PAM type: NRG; PAM sequence: GGG
  source 1..20: mol_type = other DNA
cacctccccatcgtcctccg

SEQ ID NO: 31938 - DNA, 20 bp, synthetic construct
  misc_feature 1..20: note = Description of Artificial Sequence: Synthetic oligonucleotide
  misc_feature 1..20: note = Target: SCN10A; (+) strand; PAM type: NRG; PAM sequence: GAG
  source 1..20: mol_type = other DNA
ccatcgtcctccggggctgt

SEQ ID NO: 31939 - DNA, 20 bp, synthetic construct
  misc_feature 1..20: note = Description of Artificial Sequence: Synthetic oligonucleotide
  misc_feature 1..20: note = Target: SCN10A; (+) strand; PAM type: NRG; PAM sequence: AGG
  source 1..20: mol_type = other DNA
catcgtcctccggggctgtg

SEQ ID NO: 31940 - DNA, 20 bp, synthetic construct
  misc_feature 1..20: note = Description of Artificial Sequence: Synthetic oligonucleotide
  misc_feature 1..20: note = Target: SCN10A; (+) strand; PAM type: NRG; PAM sequence: CAG
  source 1..20: mol_type = other DNA
ctccggggctgtgaggttgt

SEQ ID NO: 31941 - DNA, 20 bp, synthetic construct
  misc_feature 1..20: note = Description of Artificial Sequence: Synthetic oligonucleotide
  misc_feature 1..20: note = Target: SCN10A; (+) strand; PAM type: NRG; PAM sequence: AAG
  source 1..20: mol_type = other DNA
tgtgaggttgtcagcactga

SEQ ID NO: 31942 - DNA, 20 bp, synthetic construct
  misc_feature 1..20: note = Description of Artificial Sequence: Synthetic oligonucleotide
  misc_feature 1..20: note = Target: SCN10A; (+) strand; PAM type: NRG; PAM sequence: GAG
  source 1..20: mol_type = other DNA
tgaggttgtcagcactgaaa

SEQ ID NO: 31943 - DNA, 20 bp, synthetic construct
  misc_feature 1..20: note = Description of Artificial Sequence: Synthetic oligonucleotide
  misc_feature 1..20: note = Target: SCN10A; (+) strand; PAM type: NRG; PAM sequence: TAG
  source 1..20: mol_type = other DNA
tcagcactgaaagagttcaa

SEQ ID NO: 31944 - DNA, 20 bp, synthetic construct
  misc_feature 1..20: note = Description of Artificial Sequence: Synthetic oligonucleotide
  misc_feature 1..20: note = Target: SCN10A; (+) strand; PAM type: NRG; PAM sequence: CAG
  source 1..20: mol_type = other DNA
gcactgaaagagttcaatag

SEQ ID NO: 31945 - DNA, 20 bp, synthetic construct
  misc_feature 1..20: note = Description of Artificial Sequence: Synthetic oligonucleotide
  misc_feature 1..20: note = Target: SCN10A; (+) strand; PAM type: NRG; PAM sequence: AGG
  source 1..20: mol_type = other DNA
cactgaaagagttcaatagc

SEQ ID NO: 31946 - DNA, 20 bp, synthetic construct
  misc_feature 1..20: note = Description of Artificial Sequence: Synthetic oligonucleotide
  misc_feature 1..20: note = Target: SCN10A; (+) strand; PAM type: NRG; PAM sequence: GGG
  source 1..20: mol_type = other DNA
actgaaagagttcaatagca

SEQ ID NO: 31947 - DNA, 20 bp, synthetic construct
  misc_feature 1..20: note = Description of Artificial Sequence: Synthetic oligonucleotide
  misc_feature 1..20: note = Target: SCN10A; (+) strand; PAM type: NRG; PAM sequence: CAG
  source 1..20: mol_type = other DNA
ttcaatagcagggcgatgaa

SEQ ID NO: 31948 - DNA, 20 bp, synthetic construct
  misc_feature 1..20: note = Description of Artificial Sequence: Synthetic oligonucleotide
  misc_feature 1..20: note = Target: SCN10A; (+) strand; PAM type: NRG; PAM sequence: AGG
  source 1..20: mol_type = other DNA
tcaatagcagggcgatgaac

SEQ ID NO: 31949 - DNA, 20 bp, synthetic construct
  misc_feature 1..20: note = Description of Artificial Sequence: Synthetic oligonucleotide
  misc_feature 1..20: note = Target: SCN10A; (+) strand; PAM type: NRG; PAM sequence: AAG
  source 1..20: mol_type = other DNA
agcagggcgatgaacaggtt

SEQ ID NO: 31950 - DNA, 20 bp, synthetic construct
  misc_feature 1..20: note = Description of Artificial Sequence: Synthetic oligonucleotide
  misc_feature 1..20: note = Target: SCN10A; (+) strand; PAM type: NRG; PAM sequence: AAG
  source 1..20: mol_type = other DNA
atgaacaggttaagcacctg

SEQ ID NO: 31951 - DNA, 20 bp, synthetic construct
  misc_feature 1..20: note = Description of Artificial Sequence: Synthetic oligonucleotide
  misc_feature 1..20: note = Target: SCN10A; (+) strand; PAM type: NRG; PAM sequence: GAG
  source 1..20: mol_type = other DNA
gaacaggttaagcacctgaa

SEQ ID NO: 31952 - DNA, 20 bp, synthetic construct
  misc_feature 1..20: note = Description of Artificial Sequence: Synthetic oligonucleotide
  misc_feature 1..20: note = Target: SCN10A; (+) strand; PAM type: NRG; PAM sequence: AAG
  source 1..20: mol_type = other DNA
caggttaagcacctgaagag

SEQ ID NO: 31953 - DNA, 20 bp, synthetic construct
  misc_feature 1..20: note = Description of Artificial Sequence: Synthetic oligonucleotide
  misc_feature 1..20: note = Target: SCN10A; (+) strand; PAM type: NRG; PAM sequence: AGG
  source 1..20: mol_type = other DNA
aggttaagcacctgaagaga

SEQ ID NO: 31954 - DNA, 20 bp, synthetic construct
  misc_feature 1..20: note = Description of Artificial Sequence: Synthetic oligonucleotide
  misc_feature 1..20: note = Target: SCN10A; (+) strand; PAM type: NRG; PAM sequence: TGG
  source 1..20: mol_type = other DNA
aagcacctgaagagaaggaa

SEQ ID NO: 31955 - DNA, 20 bp, synthetic construct
  misc_feature 1..20: note = Description of Artificial Sequence: Synthetic oligonucleotide
  misc_feature 1..20: note = Target: SCN10A; (+) strand; PAM type: NRG; PAM sequence: AAG
  source 1..20: mol_type = other DNA
cacctgaagagaaggaatgg

SEQ ID NO: 31956 - DNA, 20 bp, synthetic construct
  misc_feature 1..20: note = Description of Artificial Sequence: Synthetic oligonucleotide
  misc_feature 1..20: note = Target: SCN10A; (+) strand; PAM type: NRG; PAM sequence: AGG
  source 1..20: mol_type = other DNA
acctgaagagaaggaatgga

SEQ ID NO: 31957 - DNA, 20 bp, synthetic construct
  misc_feature 1..20: note = Description of Artificial Sequence: Synthetic oligonucleotide
  misc_feature 1..20: note = Target: SCN10A; (+) strand; PAM type: NRG; PAM sequence: GGG
  source 1..20: mol_type = other DNA
cctgaagagaaggaatggaa

SEQ ID NO: 31958 - DNA, 20 bp, synthetic construct
  misc_feature 1..20: note = Description of Artificial Sequence: Synthetic oligonucleotide
  misc_feature 1..20: note = Target: SCN10A; (+) strand; PAM type: NRG; PAM sequence: AAG
  source 1..20: mol_type = other DNA
gaagagaaggaatggaaggg

SEQ ID NO: 31959 - DNA, 20 bp, synthetic construct
  misc_feature 1..20: note = Description of Artificial Sequence: Synthetic oligonucleotide
  misc_feature 1..20: note = Target: SCN10A; (+) strand; PAM type: NRG; PAM sequence: AAG
  source 1..20: mol_type = other DNA
gggaagattgatcaatctct

SEQ ID NO: 31960 - DNA, 20 bp, synthetic construct
  misc_feature 1..20: note = Description of Artificial Sequence: Synthetic oligonucleotide
  misc_feature 1..20: note = Target: SCN10A; (+) strand; PAM type: NRG; PAM sequence: GAG
  source 1..20: mol_type = other DNA
gattgatcaatctctaagct

SEQ ID NO: 31961 - DNA, 20 bp, synthetic construct
  misc_feature 1..20: note = Description of Artificial Sequence: Synthetic oligonucleotide
  misc_feature 1..20: note = Target: SCN10A; (+) strand; PAM type: NRG; PAM sequence: TGG
  source 1..20: mol_type = other DNA
ctctaagctgagccccacat

SEQ ID NO: 31962 - DNA, 20 bp, synthetic construct
  misc_feature 1..20: note = Description of Artificial Sequence: Synthetic oligonucleotide
  misc_feature 1..20: note = Target: SCN10A; (+) strand; PAM type: NRG; PAM sequence: CGG
  source 1..20: mol_type = other DNA
tgagccccacattggcctac

SEQ ID NO: 31963 - DNA, 20 bp, synthetic construct
  misc_feature 1..20: note = Description of Artificial Sequence: Synthetic oligonucleotide
  misc_feature 1..20: note = Target: SCN10A; (+) strand; PAM type: NRG; PAM sequence: GGG
  source 1..20: mol_type = other DNA
gagccccacattggcctacc

SEQ ID NO: 31964 - DNA, 20 bp, synthetic construct
  misc_feature 1..20: note = Description of Artificial Sequence: Synthetic oligonucleotide
  misc_feature 1..20: note = Target: SCN10A; (+) strand; PAM type: NRG; PAM sequence: TAG
  source 1..20: mol_type = other DNA
cccacattggcctaccgggt

SEQ ID NO: 31965 - DNA, 20 bp, synthetic construct
  misc_feature 1..20: note = Description of Artificial Sequence: Synthetic oligonucleotide
  misc_feature 1..20: note = Target: SCN10A; (+) strand; PAM type: NRG; PAM sequence: CAG
  source 1..20: mol_type = other DNA
acattggcctaccgggttag

SEQ ID NO: 31966 - DNA, 20 bp, synthetic construct
  misc_feature 1..20: note = Description of Artificial Sequence: Synthetic oligonucleotide
  misc_feature 1..20: note = Target: SCN10A; (+) strand; PAM type: NRG; PAM sequence: TGG
  source 1..20: mol_type = other DNA
tggcctaccgggttagcagc

SEQ ID NO: 31967 - DNA, 20 bp, synthetic construct
  misc_feature 1..20: note = Description of Artificial Sequence: Synthetic oligonucleotide
  misc_feature 1..20: note = Target: SCN10A; (+) strand; PAM type: NRG; PAM sequence: TGG
  source 1..20: mol_type = other DNA
ctaccgggttagcagctggc

SEQ ID NO: 31968 - DNA, 20 bp, synthetic construct
  misc_feature 1..20: note = Description of Artificial Sequence: Synthetic oligonucleotide
  misc_feature 1..20: note = Target: SCN10A; (+) strand; PAM type: NRG; PAM sequence: AAG
  source 1..20: mol_type = other DNA
cgggttagcagctggctggc

SEQ ID NO: 31969 - DNA, 20 bp, synthetic construct
  misc_feature 1..20: note = Description of Artificial Sequence: Synthetic oligonucleotide
  misc_feature 1..20: note = Target: SCN10A; (+) strand; PAM type: NRG; PAM sequence: CAG
  source 1..20: mol_type = other DNA
ttagcagctggctggcaaga

SEQ ID NO: 31970 - DNA, 20 bp, synthetic construct
  misc_feature 1..20: note = Description of Artificial Sequence: Synthetic oligonucleotide
  misc_feature 1..20: note = Target: SCN10A; (+) strand; PAM type: NRG; PAM sequence: CGG
  source 1..20: mol_type = other DNA
gctggctggcaagacagcca

SEQ ID NO: 31971 - DNA, 20 bp, synthetic construct
  misc_feature 1..20: note = Description of Artificial Sequence: Synthetic oligonucleotide
  misc_feature 1..20: note = Target: SCN10A; (+) strand; PAM type: NRG; PAM sequence: TGG
  source 1..20: mol_type = other DNA
ctggcaagacagccacggcc

SEQ ID NO: 31972 - DNA, 20 bp, synthetic construct
  misc_feature 1..20: note = Description of Artificial Sequence: Synthetic oligonucleotide
  misc_feature 1..20: note = Target: SCN10A; (+) strand; PAM type: NRG; PAM sequence: GGG
  source 1..20: mol_type = other DNA
tggcaagacagccacggcct

SEQ ID NO: 31973 - DNA, 20 bp, synthetic construct
  misc_feature 1..20: note = Description of Artificial Sequence: Synthetic oligonucleotide
  misc_feature 1..20: note = Target: SCN10A; (+) strand; PAM type: NRG; PAM sequence: CGG
  source 1..20: mol_type = other DNA
tgggcctcttcctgcccacc

SEQ ID NO: 31974 - DNA, 20 bp, synthetic construct
  misc_feature 1..20: note = Description of Artificial Sequence: Synthetic oligonucleotide
  misc_feature 1..20: note = Target: SCN10A; (+) strand; PAM type: NRG; PAM sequence: GGG
  source 1..20: mol_type = other DNA
gggcctcttcctgcccaccc

SEQ ID NO: 31975 - DNA, 20 bp, synthetic construct
  misc_feature 1..20: note = Description of Artificial Sequence: Synthetic oligonucleotide
  misc_feature 1..20: note = Target: SCN10A; (+) strand; PAM type: NRG; PAM sequence: TGG
  source 1..20: mol_type = other DNA
acccgggatgctgtcccttt

SEQ ID NO: 31976 - DNA, 20 bp, synthetic construct
  misc_feature 1..20: note = Description of Artificial Sequence: Synthetic oligonucleotide
  misc_feature 1..20: note = Target: SCN10A; (+) strand; PAM type: NRG; PAM sequence: GGG
  source 1..20: mol_type = other DNA
cccgggatgctgtccctttt

SEQ ID NO: 31977 - DNA, 20 bp, synthetic construct
  misc_feature 1..20: note = Description of Artificial Sequence: Synthetic oligonucleotide
  misc_feature 1..20: note = Target: SCN10A; (+) strand; PAM type: NRG; PAM sequence: GGG
  source 1..20: mol_type = other DNA
ccgggatgctgtcccttttg

SEQ ID NO: 31978 - DNA, 20 bp, synthetic construct
  misc_feature 1..20: note = Description of Artificial Sequence: Synthetic oligonucleotide
  misc_feature 1..20: note = Target: SCN10A; (+) strand; PAM type: NRG; PAM sequence: GGG
  source 1..20: mol_type = other DNA
cgggatgctgtcccttttgg

SEQ ID NO: 31979 - DNA, 20 bp, synthetic construct
  misc_feature 1..20: note = Description of Artificial Sequence: Synthetic oligonucleotide
  misc_feature 1..20: note = Target: SCN10A; (+) strand; PAM type: NRG; PAM sequence: TGG
  source 1..20: mol_type = other DNA
tgctgtcccttttgggggaa

SEQ ID NO: 31980 - DNA, 20 bp, synthetic construct
  misc_feature 1..20: note = Description of Artificial Sequence: Synthetic oligonucleotide
  misc_feature 1..20: note = Target: SCN10A; (+) strand; PAM type: NRG; PAM sequence: GAG
  source 1..20: mol_type = other DNA
tttgggggaatggactttct

SEQ ID NO: 31981 - DNA, 20 bp, synthetic construct
  misc_feature 1..20: note = Description of Artificial Sequence: Synthetic oligonucleotide
  misc_feature 1..20: note = Target: SCN10A; (+) strand; PAM type: NRG; PAM sequence: GAG
  source 1..20: mol_type = other DNA
tgggggaatggactttctga

SEQ ID NO: 31982 - DNA, 20 bp, synthetic construct
  misc_feature 1..20: note = Description of Artificial Sequence: Synthetic oligonucleotide
  misc_feature 1..20: note = Target: SCN10A; (+) strand; PAM type: NRG; PAM sequence: CAG
  source 1..20: mol_type = other DNA
gggaatggactttctgagag

SEQ ID NO: 31983 - DNA, 20 bp, synthetic construct
  misc_feature 1..20: note = Description of Artificial Sequence: Synthetic oligonucleotide
  misc_feature 1..20: note = Target: SCN10A; (+) strand; PAM type: NRG; PAM sequence: GAG
  source 1..20: mol_type = other DNA
tggactttctgagagcagtt

SEQ ID NO: 31984 - DNA, 20 bp, synthetic construct
  misc_feature 1..20: note = Description of Artificial Sequence: Synthetic oligonucleotide
  misc_feature 1..20: note = Target: SCN10A; (+) strand; PAM type: NRG; PAM sequence: AGG
  source 1..20: mol_type = other DNA
ggactttctgagagcagttg

SEQ ID NO: 31985 - DNA, 20 bp, synthetic construct
  misc_feature 1..20: note = Description of Artificial Sequence: Synthetic oligonucleotide
  misc_feature 1..20: note = Target: SCN10A; (+) strand; PAM type: NRG; PAM sequence: GGG
  source 1..20: mol_type = other DNA
gactttctgagagcagttga

SEQ ID NO: 31986 - DNA, 20 bp, synthetic construct
  misc_feature 1..20: note = Description of Artificial Sequence: Synthetic oligonucleotide
  misc_feature 1..20: note = Target: SCN10A; (+) strand; PAM type: NRG; PAM sequence: AAG
  source 1..20: mol_type = other DNA
ttctgagagcagttgaggga

SEQ ID NO: 31987 - DNA, 20 bp, synthetic construct
  misc_feature 1..20: note = Description of Artificial Sequence: Synthetic oligonucleotide
  misc_feature 1..20: note = Target: SCN10A; (+) strand; PAM type: NRG; PAM sequence: TGG
  source 1..20: mol_type = other DNA
agagcagttgagggaaagtt

SEQ ID NO: 31988 - DNA, 20 bp, synthetic construct
  misc_feature 1..20: note = Description of Artificial Sequence: Synthetic oligonucleotide
  misc_feature 1..20: note = Target: SCN10A; (+) strand; PAM type: NRG; PAM sequence: GGG
  source 1..20: mol_type = other DNA
gagcagttgagggaaagttt

SEQ ID NO: 31989 - DNA, 20 bp, synthetic construct
  misc_feature 1..20: note = Description of Artificial Sequence: Synthetic oligonucleotide
  misc_feature 1..20: note = Target: SCN10A; (+) strand; PAM type: NRG; PAM sequence: GGG
  source 1..20: mol_type = other DNA
agcagttgagggaaagtttg

SEQ ID NO: 31990 - DNA, 20 bp, synthetic construct
  misc_feature 1..20: note = Description of Artificial Sequence: Synthetic oligonucleotide
  misc_feature 1..20: note = Target: SCN10A; (+) strand; PAM type: NRG; PAM sequence: TGG
  source 1..20: mol_type = other DNA
gggaaagtttggggatgtcc

SEQ ID NO: 31991 - DNA, 20 bp, synthetic construct
  misc_feature 1..20: note = Description of Artificial Sequence: Synthetic oligonucleotide
  misc_feature 1..20: note = Target: SCN10A; (+) strand; PAM type: NRG; PAM sequence: GAG
  source 1..20: mol_type = other DNA
gaaagtttggggatgtcctg

SEQ ID NO: 31992 - DNA, 20 bp, synthetic construct
  misc_feature 1..20: note = Description of Artificial Sequence: Synthetic oligonucleotide
  misc_feature 1..20: note = Target: SCN10A; (+) strand; PAM type: NRG; PAM sequence: CAG
  source 1..20: mol_type = other DNA
tgtcctggagtgacccgcct

SEQ ID NO: 31993 - DNA, 20 bp, synthetic construct
  misc_feature 1..20: note = Description of Artificial Sequence: Synthetic oligonucleotide
  misc_feature 1..20: note = Target: SCN10A; (+) strand; PAM type: NRG; PAM sequence: TGG
  source 1..20: mol_type = other DNA
cctggagtgacccgcctcag

SEQ ID NO: 31994 - DNA, 20 bp, synthetic construct
  misc_feature 1..20: note = Description of Artificial Sequence: Synthetic oligonucleotide
  misc_feature 1..20: note = Target: SCN10A; (+) strand; PAM type: NRG; PAM sequence: GAG
  source 1..20: mol_type = other DNA
agtgacccgcctcagtggac

SEQ ID NO: 31995 - DNA, 20 bp, synthetic construct
  misc_feature 1..20: note = Description of Artificial Sequence: Synthetic oligonucleotide
  misc_feature 1..20: note = Target: SCN10A; (+) strand; PAM type: NRG; PAM sequence: AGG
  source 1..20: mol_type = other DNA
gtgacccgcctcagtggacg

SEQ ID NO: 31996 - DNA, 20 bp, synthetic construct
  misc_feature 1..20: note = Description of Artificial Sequence: Synthetic oligonucleotide
  misc_feature 1..20: note = Target: SCN10A; (+) strand; PAM type: NRG; PAM sequence: TGG
  source 1..20: mol_type = other DNA
ccgcctcagtggacgaggct

SEQ ID NO: 31997 - DNA, 20 bp, synthetic construct
  misc_feature 1..20: note = Description of Artificial Sequence: Synthetic oligonucleotide
  misc_feature 1..20: note = Target: SCN10A; (+) strand; PAM type: NRG; PAM sequence: AAG
  source 1..20: mol_type = other DNA
cctcagtggacgaggcttgg

SEQ ID NO: 31998 - DNA, 20 bp, synthetic construct
  misc_feature 1..20: note = Description of Artificial Sequence: Synthetic oligonucleotide
  misc_feature 1..20: note = Target: SCN10A; (+) strand; PAM type: NRG; PAM sequence: AAG
  source 1..20: mol_type = other DNA
gaagcatattttccaccata

SEQ ID NO: 31999 - DNA, 20 bp, synthetic construct
  misc_feature 1..20: note = Description of Artificial Sequence: Synthetic oligonucleotide
  misc_feature 1..20: note = Target: SCN10A; (+) strand; PAM type: NRG; PAM sequence: AGG
  source 1..20: mol_type = other DNA
aagcatattttccaccataa

SEQ ID NO: 32000 - DNA, 20 bp, synthetic construct
  misc_feature 1..20: note = Description of Artificial Sequence: Synthetic oligonucleotide
  misc_feature 1..20: note = Target: SCN10A; (+) strand; PAM type: NRG; PAM sequence: GAG
  source 1..20: mol_type = other DNA
gcatattttccaccataaag

SEQ ID NO: 32001 - DNA, 20 bp, synthetic construct
  misc_feature 1..20: note = Description of Artificial Sequence: Synthetic oligonucleotide
  misc_feature 1..20: note = Target: SCN10A; (+) strand; PAM type: NRG; PAM sequence: AGG
  source 1..20: mol_type = other DNA
catattttccaccataaagg

SEQ ID NO: 32002 - DNA, 20 bp, synthetic construct
  misc_feature 1..20: note = Description of Artificial Sequence: Synthetic oligonucleotide
  misc_feature 1..20: note = Target: SCN10A; (+) strand; PAM type: NRG; PAM sequence: GAG
  source 1..20: mol_type = other DNA
tattttccaccataaaggag

SEQ ID NO: 32003 - DNA, 20 bp, synthetic construct
  misc_feature 1..20: note = Description of Artificial Sequence: Synthetic oligonucleotide
  misc_feature 1..20: note = Target: SCN10A; (+) strand; PAM type: NRG; PAM sequence: GAG
  source 1..20: mol_type = other DNA
taaaggaggagccccccgct

SEQ ID NO: 32004 - DNA, 20 bp, synthetic construct
  misc_feature 1..20: note = Description of Artificial Sequence: Synthetic oligonucleotide
  misc_feature 1..20: note = Target: SCN10A; (+) strand; PAM type: NRG; PAM sequence: CAG
  source 1..20: mol_type = other DNA
aggaggagccccccgctgag

SEQ ID NO: 32005 - DNA, 20 bp, synthetic construct
  misc_feature 1..20: note = Description of Artificial Sequence: Synthetic oligonucleotide
  misc_feature 1..20: note = Target: SCN10A; (+) strand; PAM type: NRG; PAM sequence: GAG
  source 1..20: mol_type = other DNA
gaggagccccccgctgagca

SEQ ID NO: 32006 - DNA, 20 bp, synthetic construct
  misc_feature 1..20: note = Description of Artificial Sequence: Synthetic oligonucleotide
  misc_feature 1..20: note = Target: SCN10A; (+) strand; PAM type: NRG; PAM sequence: AGG
  source 1..20: mol_type = other DNA
aggagccccccgctgagcag

SEQ ID NO: 32007 - DNA, 20 bp, synthetic construct
  misc_feature 1..20: note = Description of Artificial Sequence: Synthetic oligonucleotide
  misc_feature 1..20: note = Target: SCN10A; (+) strand; PAM type: NRG; PAM sequence: GGG
  source 1..20: mol_type = other DNA
ggagccccccgctgagcaga

SEQ ID NO: 32008 - DNA, 20 bp, synthetic construct
  misc_feature 1..20: note = Description of Artificial Sequence: Synthetic oligonucleotide
  misc_feature 1..20: note = Target: SCN10A; (+) strand; PAM type: NRG; PAM sequence: TAG
  source 1..20: mol_type = other DNA
ccgctgagcagagggacatt

SEQ ID NO: 32009 - DNA, 20 bp, synthetic construct
  misc_feature 1..20: note = Description of Artificial Sequence: Synthetic oligonucleotide
  misc_feature 1..20: note = Target: SCN10A; (+) strand; PAM type: NRG; PAM sequence: AGG
  source 1..20: mol_type = other DNA
cgctgagcagagggacattt

SEQ ID NO: 32010 - DNA, 20 bp, synthetic construct
  misc_feature 1..20: note = Description of Artificial Sequence: Synthetic oligonucleotide
  misc_feature 1..20: note = Target: SCN10A; (+) strand; PAM type: NRG; PAM sequence: GGG
  source 1..20: mol_type = other DNA
gctgagcagagggacattta

SEQ ID NO: 32011 - DNA, 20 bp, synthetic construct
  misc_feature 1..20: note = Description of Artificial Sequence: Synthetic oligonucleotide
  misc_feature 1..20: note = Target: SCN10A; (+) strand; PAM type: NRG; PAM sequence: CAG
  source 1..20: mol_type = other DNA
agagggacatttagggacaa

SEQ ID NO: 32012 - DNA, 20 bp, synthetic construct
  misc_feature 1..20: note = Description of Artificial Sequence: Synthetic oligonucleotide
  misc_feature 1..20: note = Target: SCN10A; (+) strand; PAM type: NRG; PAM sequence: GAG
  source 1..20: mol_type = other DNA
agggacatttagggacaaca

SEQ ID NO: 32013 - DNA, 20 bp, synthetic construct
  misc_feature 1..20: note = Description of Artificial Sequence: Synthetic oligonucleotide
  misc_feature 1..20: note = Target: SCN10A; (+) strand; PAM type: NRG; PAM sequence: GAG
  source 1..20: mol_type = other DNA
ggacatttagggacaacaga

SEQ ID NO: 32014 - DNA, 20 bp, synthetic construct
  misc_feature 1..20: note = Description of Artificial Sequence: Synthetic oligonucleotide
  misc_feature 1..20: note = Target: SCN10A; (+) strand; PAM type: NRG; PAM sequence: AAG
  source 1..20: mol_type = other DNA
catttagggacaacagagag

SEQ ID NO: 32015 - DNA, 20 bp, synthetic construct
  misc_feature 1..20: note = Description of Artificial Sequence: Synthetic oligonucleotide
  misc_feature 1..20: note = Target: SCN10A; (+) strand; PAM type: NRG; PAM sequence: AGG
  source 1..20: mol_type = other DNA
atttagggacaacagagaga

SEQ ID NO: 32016 - DNA, 20 bp, synthetic construct
  misc_feature 1..20: note = Description of Artificial Sequence: Synthetic oligonucleotide
  misc_feature 1..20: note = Target: SCN10A; (+) strand; PAM type: NRG; PAM sequence: CAG
  source 1..20: mol_type = other DNA
ggacaacagagagaaggcac

SEQ ID NO: 32017 - DNA, 20 bp, synthetic construct
  misc_feature 1..20: note = Description of Artificial Sequence: Synthetic oligonucleotide
  misc_feature 1..20: note = Target: SCN10A; (+) strand; PAM type: NRG; PAM sequence: AAG
  source 1..20: mol_type = other DNA
gcaaccaccctcatgtgcca

SEQ ID NO: 32018 - DNA, 20 bp, synthetic construct
  misc_feature 1..20: note = Description of Artificial Sequence: Synthetic oligonucleotide
  misc_feature 1..20: note = Target: SCN10A; (+) strand; PAM type: NRG; PAM sequence: TGG
  source 1..20: mol_type = other DNA
accctcatgtgccaaagccc

SEQ ID NO: 32019 - DNA, 20 bp, synthetic construct
  misc_feature 1..20: note = Description of Artificial Sequence: Synthetic oligonucleotide
  misc_feature 1..20: note = Target: SCN10A; (+) strand; PAM type: NRG; PAM sequence: GGG
  source 1..20: mol_type = other DNA
ccctcatgtgccaaagccct

SEQ ID NO: 32020 - DNA, 20 bp, synthetic construct
  misc_feature 1..20: note = Description of Artificial Sequence: Synthetic oligonucleotide
  misc_feature 1..20: note = Target: SCN10A; (+) strand; PAM type: NRG; PAM sequence: TGG
  source 1..20: mol_type = other DNA
ctgggctctgttcctgactc

SEQ ID NO: 32021 - DNA, 20 bp, synthetic construct
  misc_feature 1..20: note = Description of Artificial Sequence: Synthetic oligonucleotide
  misc_feature 1..20: note = Target: SCN10A; (+) strand; PAM type: NRG; PAM sequence: TGG
  source 1..20: mol_type = other DNA
tgttcctgactctggaatcc

SEQ ID NO: 32022 - DNA, 20 bp, synthetic construct
  misc_feature 1..20: note = Description of Artificial Sequence: Synthetic oligonucleotide
  misc_feature 1..20: note = Target: SCN10A; (+) strand; PAM type: NRG; PAM sequence: GGG
  source 1..20: mol_type = other DNA
gttcctgactctggaatcct

SEQ ID NO: 32023 - DNA, 20 bp, synthetic construct
  misc_feature 1..20: note = Description of Artificial Sequence: Synthetic oligonucleotide
  misc_feature 1..20: note = Target: SCN10A; (+) strand; PAM type: NRG; PAM sequence: CAG
  source 1..20: mol_type = other DNA
tgggcacatcttgctgcttc

SEQ ID NO: 32024 - DNA, 20 bp, synthetic construct
  misc_feature 1..20: note = Description of Artificial Sequence: Synthetic oligonucleotide
  misc_feature 1..20: note = Target: SCN10A; (+) strand; PAM type: NRG; PAM sequence: GAG
  source 1..20: mol_type = other DNA
ctgcttccagttcttcactt

SEQ ID NO: 32025 - DNA, 20 bp, synthetic construct
  misc_feature 1..20: note = Description of Artificial Sequence: Synthetic oligonucleotide
  misc_feature 1..20: note = Target: SCN10A; (+) strand; PAM type: NRG; PAM sequence: GAG
  source 1..20: mol_type = other DNA
gcttccagttcttcacttga

SEQ ID NO: 32026 - DNA, 20 bp, synthetic construct
  misc_feature 1..20: note = Description of Artificial Sequence: Synthetic oligonucleotide
  misc_feature 1..20: note = Target: SCN10A; (+) strand; PAM type: NRG; PAM sequence: CAG
  source 1..20: mol_type = other DNA
tccagttcttcacttgagag

SEQ ID NO: 32027 - DNA, 20 bp, synthetic construct
  misc_feature 1..20: note = Description of Artificial Sequence: Synthetic oligonucleotide
  misc_feature 1..20: note = Target: SCN10A; (+) strand; PAM type: NRG; PAM sequence: AAG
  source 1..20: mol_type = other DNA
tcttcacttgagagcagatg

SEQ ID NO: 32028 - DNA, 20 bp, synthetic construct
  misc_feature 1..20: note = Description of Artificial Sequence: Synthetic oligonucleotide
  misc_feature 1..20: note = Target: SCN10A; (+) strand; PAM type: NRG; PAM sequence: GAG
  source 1..20: mol_type = other DNA
ttcacttgagagcagatgaa

SEQ ID NO: 32029 - DNA, 20 bp, synthetic construct
  misc_feature 1..20: note = Description of Artificial Sequence: Synthetic oligonucleotide
  misc_feature 1..20: note = Target: SCN10A; (+) strand; PAM type: NRG; PAM sequence: CGG
  source 1..20: mol_type = other DNA
acttgagagcagatgaagag

SEQ ID NO: 32030 - DNA, 20 bp, synthetic construct
  misc_feature 1..20: note = Description of Artificial Sequence: Synthetic oligonucleotide
  misc_feature 1..20: note = Target: SCN10A; (+) strand; PAM type: NRG; PAM sequence: AAG
  source 1..20: mol_type = other DNA
gcagatgaagagcggttgtg

SEQ ID NO: 32031 - DNA, 20 bp, synthetic construct
  misc_feature 1..20: note = Description of Artificial Sequence: Synthetic oligonucleotide
  misc_feature 1..20: note = Target: SCN10A; (+) strand; PAM type: NRG; PAM sequence: GAG
  source 1..20: mol_type = other DNA
ttgtgaagacaaaatgatat

SEQ ID NO: 32032 - DNA, 20 bp, synthetic construct
  misc_feature 1..20: note = Description of Artificial Sequence: Synthetic oligonucleotide
  misc_feature 1..20: note = Target: SCN10A; (+) strand; PAM type: NRG; PAM sequence: AAG
  source 1..20: mol_type = other DNA
aaatgatatgagaaatgtaa

SEQ ID NO: 32033 - DNA, 20 bp, synthetic construct
  misc_feature 1..20: note = Description of Artificial Sequence: Synthetic oligonucleotide
  misc_feature 1..20: note = Target: SCN10A; (+) strand; PAM type: NRG; PAM sequence: CAG
  source 1..20: mol_type = other DNA
atgagaaatgtaaaagtgct

SEQ ID NO: 32034 - DNA, 20 bp, synthetic construct
  misc_feature 1..20: note = Description of Artificial Sequence: Synthetic oligonucleotide
  misc_feature 1..20: note = Target: SCN10A; (+) strand; PAM type: NRG; PAM sequence: GAG
  source 1..20: mol_type = other DNA
gagaaatgtaaaagtgctca

SEQ ID NO: 32035 - DNA, 20 bp, synthetic construct
  misc_feature 1..20: note = Description of Artificial Sequence: Synthetic oligonucleotide
  misc_feature 1..20: note = Target: SCN10A; (+) strand; PAM type: NRG; PAM sequence: AGG
  source 1..20: mol_type = other DNA
agaaatgtaaaagtgctcag

SEQ ID NO: 32036 - DNA, 20 bp, synthetic construct
  misc_feature 1..20: note = Description of Artificial Sequence: Synthetic oligonucleotide
  misc_feature 1..20: note = Target: SCN10A; (+) strand; PAM type: NRG; PAM sequence: GGG
  source 1..20: mol_type = other DNA
gaaatgtaaaagtgctcaga

SEQ ID NO: 32037 - DNA, 20 bp, synthetic construct
  misc_feature 1..20: note = Description of Artificial Sequence: Synthetic oligonucleotide
  misc_feature 1..20: note = Target: SCN10A; (+) strand; PAM type: NRG; PAM sequence: GGG
  source 1..20: mol_type = other DNA
aaatgtaaaagtgctcagag

SEQ ID NO: 32038 - DNA, 20 bp, synthetic construct
  misc_feature 1..20: note = Description of Artificial Sequence: Synthetic oligonucleotide
  misc_feature 1..20: note = Target: SCN10A; (+) strand; PAM type: NRG; PAM sequence: GAG
  source 1..20: mol_type = other DNA
gaggggtaaacttcctgtct

SEQ ID NO: 32039 - DNA, 20 bp, synthetic construct
  misc_feature 1..20: note = Description of Artificial Sequence: Synthetic oligonucleotide
  misc_feature 1..20: note = Target: SCN10A; (+) strand; PAM type: NRG; PAM sequence: AGG
  source 1..20: mol_type = other DNA
aggggtaaacttcctgtctg

SEQ ID NO: 32040 - DNA, 20 bp, synthetic construct
  misc_feature 1..20: note = Description of Artificial Sequence: Synthetic oligonucleotide
  misc_feature 1..20: note = Target: SCN10A; (+) strand; PAM type: NRG; PAM sequence: GGG
  source 1..20: mol_type = other DNA
ggggtaaacttcctgtctga

SEQ ID NO: 32041 - DNA, 20 bp, synthetic construct
  misc_feature 1..20: note = Description of Artificial Sequence: Synthetic oligonucleotide
  misc_feature 1..20: note = Target: SCN10A; (+) strand; PAM type: NRG; PAM sequence: GAG
  source 1..20: mol_type = other DNA
taaacttcctgtctgagggt

SEQ ID NO: 32042 - DNA, 20 bp, synthetic construct
  misc_feature 1..20: note = Description of Artificial Sequence: Synthetic oligonucleotide
  misc_feature 1..20: note = Target: SCN10A; (+) strand; PAM type: NRG; PAM sequence: AGG
  source 1..20: mol_type = other DNA
aaacttcctgtctgagggtg

SEQ ID NO: 32043 - DNA, 20 bp, synthetic construct
  misc_feature 1..20: note = Description of Artificial Sequence: Synthetic oligonucleotide
  misc_feature 1..20: note = Target: SCN10A; (+) strand; PAM type: NRG; PAM sequence: GGG
  source 1..20: mol_type = other DNA
aacttcctgtctgagggtga

SEQ ID NO: 32044 - DNA, 20 bp, synthetic construct
  misc_feature 1..20: note = Description of Artificial Sequence: Synthetic oligonucleotide
  misc_feature 1..20: note = Target: SCN10A; (+) strand; PAM type: NRG; PAM sequence: GGG
  source 1..20: mol_type = other DNA
acttcctgtctgagggtgag

SEQ ID NO: 32045 - DNA, 20 bp, synthetic construct
  misc_feature 1..20: note = Description of Artificial Sequence: Synthetic oligonucleotide
  misc_feature 1..20: note = Target: SCN10A; (+) strand; PAM type: NRG; PAM sequence: TGG
  source 1..20: mol_type = other DNA
ctgagggtgaggggcatctg

SEQ ID NO: 32046 - DNA, 20 bp, synthetic construct
  misc_feature 1..20: note = Description of Artificial Sequence: Synthetic oligonucleotide
  misc_feature 1..20: note = Target: SCN10A; (+) strand; PAM type: NRG; PAM sequence: CAG
  source 1..20: mol_type = other DNA
gaggggcatctgtggctctg

SEQ ID NO: 32047 - DNA, 20 bp, synthetic construct
  misc_feature 1..20: note = Description of Artificial Sequence: Synthetic oligonucleotide
  misc_feature 1..20: note = Target: SCN10A; (+) strand; PAM type: NRG; PAM sequence: AGG
  source 1..20: mol_type = other DNA
aggggcatctgtggctctgc

SEQ ID NO: 32048 - DNA, 20 bp, synthetic construct
  misc_feature 1..20: note = Description of Artificial Sequence: Synthetic oligonucleotide
  misc_feature 1..20: note = Target: SCN10A; (+) strand; PAM type: NRG; PAM sequence: GGG
  source 1..20: mol_type = other DNA
ggggcatctgtggctctgca

SEQ ID NO: 32049 - DNA, 20 bp, synthetic construct
  misc_feature 1..20: note = Description of Artificial Sequence: Synthetic oligonucleotide
  misc_feature 1..20: note = Target: SCN10A; (+) strand; PAM type: NRG; PAM sequence: TGG
  source 1..20: mol_type = other DNA
catctgtggctctgcaggga

SEQ ID NO: 32050 - DNA, 20 bp, synthetic construct
  misc_feature 1..20: note = Description of Artificial Sequence: Synthetic oligonucleotide
  misc_feature 1..20: note = Target: SCN10A; (+) strand; PAM type: NRG; PAM sequence: TGG
  source 1..20: mol_type = other DNA
ctgtggctctgcagggatgg

SEQ ID NO: 32051 - DNA, 20 bp, synthetic construct
  misc_feature 1..20: note = Description of Artificial Sequence: Synthetic oligonucleotide
  misc_feature 1..20: note = Target: SCN10A; (+) strand; PAM type: NRG; PAM sequence: GGG
  source 1..20: mol_type = other DNA
tgtggctctgcagggatggt

SEQ ID NO: 32052 - DNA, 20 bp, synthetic construct
  misc_feature 1..20: note = Description of Artificial Sequence: Synthetic oligonucleotide
  misc_feature 1..20: note = Target: SCN10A; (+) strand; PAM type: NRG; PAM sequence: CAG
  source 1..20: mol_type = other DNA
ctctgcagggatggtgggct

SEQ ID NO: 32053 - DNA, 20 bp, synthetic construct
  misc_feature 1..20: note = Description of Artificial Sequence: Synthetic oligonucleotide
  misc_feature 1..20: note = Target: SCN10A; (+) strand; PAM type: NRG; PAM sequence: TGG
  source 1..20: mol_type = other DNA
cagggatggtgggctcagcc

SEQ ID NO: 32054 - DNA, 20 bp, synthetic construct
  misc_feature 1..20: note = Description of Artificial Sequence: Synthetic oligonucleotide
  misc_feature 1..20: note = Target: SCN10A; (+) strand; PAM type: NRG; PAM sequence: AAG
  source 1..20: mol_type = other DNA
ggatggtgggctcagcctgg

SEQ ID NO: 32055 - DNA, 20 bp, synthetic construct
  misc_feature 1..20: note = Description of Artificial Sequence: Synthetic oligonucleotide
  misc_feature 1..20: note = Target: SCN10A; (+) strand; PAM type: NRG; PAM sequence: CAG
  source 1..20: mol_type = other DNA
gtgggctcagcctggaagaa

SEQ ID NO: 32056 - DNA, 20 bp, synthetic construct
  misc_feature 1..20: note = Description of Artificial Sequence: Synthetic oligonucleotide
  misc_feature 1..20: note = Target: SCN10A; (+) strand; PAM type: NRG; PAM sequence: GAG
  source 1..20: mol_type = other DNA
gggctcagcctggaagaaca

SEQ ID NO: 32057 - DNA, 20 bp, synthetic construct
  misc_feature 1..20: note = Description of Artificial Sequence: Synthetic oligonucleotide
  misc_feature 1..20: note = Target: SCN10A; (+) strand; PAM type: NRG; PAM sequence: TGG
  source 1..20: mol_type = other DNA
gcctggaagaacagagtttc

SEQ ID NO: 32058 - DNA, 20 bp, synthetic construct
  misc_feature 1..20: note = Description of Artificial Sequence: Synthetic oligonucleotide
  misc_feature 1..20: note = Target: SCN10A; (+) strand; PAM type: NRG; PAM sequence: GGG
  source 1..20: mol_type = other DNA
cctggaagaacagagtttct

SEQ ID NO: 32059 - DNA, 20 bp, synthetic construct
  misc_feature 1..20: note = Description of Artificial Sequence: Synthetic oligonucleotide
  misc_feature 1..20: note = Target: SCN10A; (+) strand; PAM type: NRG; PAM sequence: CAG
  source 1..20: mol_type = other DNA
agaacagagtttctgggatg

SEQ ID NO: 32060 - DNA, 20 bp, synthetic construct
  misc_feature 1..20: note = Description of Artificial Sequence: Synthetic oligonucleotide
  misc_feature 1..20: note = Target: SCN10A; (+) strand; PAM type: NRG; PAM sequence: AGG
  source 1..20: mol_type = other DNA
gaacagagtttctgggatgc

SEQ ID NO: 32061 - DNA, 20 bp, synthetic construct
  misc_feature 1..20: note = Description of Artificial Sequence: Synthetic oligonucleotide
  misc_feature 1..20: note = Target: SCN10A; (+) strand; PAM type: NRG; PAM sequence: CAG
  source 1..20: mol_type = other DNA
cagagtttctgggatgcagg

SEQ ID NO: 32062 - DNA, 20 bp, synthetic construct
  misc_feature 1..20: note = Description of Artificial Sequence: Synthetic oligonucleotide
  misc_feature 1..20: note = Target: SCN10A; (+) strand; PAM type: NRG; PAM sequence: GAG
  source 1..20: mol_type = other DNA
gagtttctgggatgcaggca

SEQ ID NO: 32063 - DNA, 20 bp, synthetic construct
  misc_feature 1..20: note = Description of Artificial Sequence: Synthetic oligonucleotide
  misc_feature 1..20: note = Target: SCN10A; (+) strand; PAM type: NRG; PAM sequence: AGG
  source 1..20: mol_type = other DNA
agtttctgggatgcaggcag

SEQ ID NO: 32064 - DNA, 20 bp, synthetic construct
  misc_feature 1..20: note = Description of Artificial Sequence: Synthetic oligonucleotide
  misc_feature 1..20: note = Target: SCN10A; (+) strand; PAM type: NRG; PAM sequence: TGG
  source 1..20: mol_type = other DNA
gatgcaggcagaggcatccc

SEQ ID NO: 32065 - DNA, 20 bp, synthetic construct
  misc_feature 1..20: note = Description of Artificial Sequence: Synthetic oligonucleotide
  misc_feature 1..20: note = Target: SCN10A; (+) strand; PAM type: NRG; PAM sequence: CAG
  source 1..20: mol_type = other DNA
aggcagaggcatccctggct

SEQ ID NO: 32066 - DNA, 20 bp, synthetic construct
  misc_feature 1..20: note = Description of Artificial Sequence: Synthetic oligonucleotide
  misc_feature 1..20: note = Target: SCN10A; (+) strand; PAM type: NRG; PAM sequence: AGG
  source 1..20: mol_type = other DNA
ggcagaggcatccctggctc

SEQ ID NO: 32067 - DNA, 20 bp, synthetic construct
  misc_feature 1..20: note = Description of Artificial Sequence: Synthetic oligonucleotide
  misc_feature 1..20: note = Target: SCN10A; (+) strand; PAM type: NRG; PAM sequence: CAG
  source 1..20: mol_type = other DNA
ggcatccctggctcaggcac

SEQ ID NO: 32068 - DNA, 20 bp, synthetic construct
  misc_feature 1..20: note = Description of Artificial Sequence: Synthetic oligonucleotide
  misc_feature 1..20: note = Target: SCN10A; (+) strand; PAM type: NRG; PAM sequence: AGG
  source 1..20: mol_type = other DNA
gcatccctggctcaggcacc

SEQ ID NO: 32069 - DNA, 20 bp, synthetic construct
  misc_feature 1..20: note = Description of Artificial Sequence: Synthetic oligonucleotide
  misc_feature 1..20: note = Target: SCN10A; (+) strand; PAM type: NRG; PAM sequence: GGG
  source 1..20: mol_type = other DNA
catccctggctcaggcacca

SEQ ID NO: 32070 - DNA, 20 bp, synthetic construct
  misc_feature 1..20: note = Description of Artificial Sequence: Synthetic oligonucleotide
  misc_feature 1..20: note = Target: SCN10A; (+) strand; PAM type: NRG; PAM sequence: TGG
  source 1..20: mol_type = other DNA
ccctggctcaggcaccaggg

SEQ ID NO: 32071 - DNA, 20 bp, synthetic construct
  misc_feature 1..20: note = Description of Artificial Sequence: Synthetic oligonucleotide
  misc_feature 1..20: note = Target: SCN10A; (+) strand; PAM type: NRG; PAM sequence: AAG
  source 1..20: mol_type = other DNA
gctcaggcaccagggtggaa

SEQ ID NO: 32072 - DNA, 20 bp, synthetic construct
  misc_feature 1..20: note = Description of Artificial Sequence: Synthetic oligonucleotide
  misc_feature 1..20: note = Target: SCN10A; (+) strand; PAM type: NRG; PAM sequence: AAG
  source 1..20: mol_type = other DNA
caccagggtggaaaagacta

SEQ ID NO: 32073 - DNA, 20 bp, synthetic construct
  misc_feature 1..20: note = Description of Artificial Sequence: Synthetic oligonucleotide
  misc_feature 1..20: note = Target: SCN10A; (+) strand; PAM type: NRG; PAM sequence: GAG
  source 1..20: mol_type = other DNA
ccagggtggaaaagactaaa

SEQ ID NO: 32074 - DNA, 20 bp, synthetic construct
  misc_feature 1..20: note = Description of Artificial Sequence: Synthetic oligonucleotide
  misc_feature 1..20: note = Target: SCN10A; (+) strand; PAM type: NRG; PAM sequence: TGG
  source 1..20: mol_type = other DNA
gtggaaaagactaaagagtc

SEQ ID NO: 32075 - DNA, 20 bp, synthetic construct
  misc_feature 1..20: note = Description of Artificial Sequence: Synthetic oligonucleotide
  misc_feature 1..20: note = Target: SCN10A; (+) strand; PAM type: NRG; PAM sequence: TGG
  source 1..20: mol_type = other DNA
tgttgttgcttcccttttct

SEQ ID NO: 32076 - DNA, 20 bp, synthetic construct
  misc_feature 1..20: note = Description of Artificial Sequence: Synthetic oligonucleotide
  misc_feature 1..20: note = Target: SCN10A; (+) strand; PAM type: NRG; PAM sequence: TAG
  source 1..20: mol_type = other DNA
ttgcttcccttttcttggtt

SEQ ID NO: 32077 - DNA, 20 bp, synthetic construct
  misc_feature 1..20: note = Description of Artificial Sequence: Synthetic oligonucleotide
  misc_feature 1..20: note = Target: SCN10A; (+) strand; PAM type: NRG; PAM sequence: GAG
  source 1..20: mol_type = other DNA
cttctgtctataaaactcat

SEQ ID NO: 32078 - DNA, 20 bp, synthetic construct
  misc_feature 1..20: note = Description of Artificial Sequence: Synthetic oligonucleotide
  misc_feature 1..20: note = Target: SCN10A; (+) strand; PAM type: NRG; PAM sequence: AGG
  source 1..20: mol_type = other DNA
ttctgtctataaaactcatg

SEQ ID NO: 32079 - DNA, 20 bp, synthetic construct
  misc_feature 1..20: note = Description of Artificial Sequence: Synthetic oligonucleotide
  misc_feature 1..20: note = Target: SCN10A; (+) strand; PAM type: NRG; PAM sequence: AAG
  source 1..20: mol_type = other DNA
gtctataaaactcatgagga

SEQ ID NO: 32080 - DNA, 20 bp, synthetic construct
  misc_feature 1..20: note = Description of Artificial Sequence: Synthetic oligonucleotide
  misc_feature 1..20: note = Target: SCN10A; (+) strand; PAM type: NRG; PAM sequence: AAG
  source 1..20: mol_type = other DNA
aactcatgaggaaagaaccc

SEQ ID NO: 32081 - DNA, 20 bp, synthetic construct
  misc_feature 1..20: note = Description of Artificial Sequence: Synthetic oligonucleotide
  misc_feature 1..20: note = Target: SCN10A; (+) strand; PAM type: NRG; PAM sequence: TGG
  source 1..20: mol_type = other DNA
catgaggaaagaacccaagt

SEQ ID NO: 32082 - DNA, 20 bp, synthetic construct
  misc_feature 1..20: note = Description of Artificial Sequence: Synthetic oligonucleotide
  misc_feature 1..20: note = Target: SCN10A; (+) strand; PAM type: NRG; PAM sequence: CAG
  source 1..20: mol_type = other DNA
aacccaagttggttgatgtc

SEQ ID NO: 32083 - DNA, 20 bp, synthetic construct
  misc_feature 1..20: note = Description of Artificial Sequence: Synthetic oligonucleotide
  misc_feature 1..20: note = Target: SCN10A; (+) strand; PAM type: NRG; PAM sequence: AGG
  source 1..20: mol_type = other DNA
acccaagttggttgatgtcc

SEQ ID NO: 32084 - DNA, 20 bp, synthetic construct
  misc_feature 1..20: note = Description of Artificial Sequence: Synthetic oligonucleotide
  misc_feature 1..20: note = Target: SCN10A; (+) strand; PAM type: NRG; PAM sequence: GGG
  source 1..20: mol_type = other DNA
cccaagttggttgatgtcca

SEQ ID NO: 32085 - DNA, 20 bp, synthetic construct
  misc_feature 1..20: note = Description of Artificial Sequence: Synthetic oligonucleotide
  misc_feature 1..20: note = Target: SCN10A; (+) strand; PAM type: NRG; PAM sequence: AAG
  source 1..20: mol_type = other DNA
tggttgatgtccagggcaat

SEQ ID NO: 32086 - DNA, 20 bp, synthetic construct
  misc_feature 1..20: note = Description of Artificial Sequence: Synthetic oligonucleotide
  misc_feature 1..20: note = Target: SCN10A; (+) strand; PAM type: NRG; PAM sequence: AAG
  source 1..20: mol_type = other DNA
tgatgtccagggcaataaga

SEQ ID NO: 32087 - DNA, 20 bp, synthetic construct
  misc_feature 1..20: note = Description of Artificial Sequence: Synthetic oligonucleotide
  misc_feature 1..20: note = Target: SCN10A; (+) strand; PAM type: NRG; PAM sequence: AGG
  source 1..20: mol_type = other DNA
gatgtccagggcaataagaa

SEQ ID NO: 32088 - DNA, 20 bp, synthetic construct
  misc_feature 1..20: note = Description of Artificial Sequence: Synthetic oligonucleotide
  misc_feature 1..20: note = Target: SCN10A; (+) strand; PAM type: NRG; PAM sequence: GGG
  source 1..20: mol_type = other DNA
atgtccagggcaataagaaa

SEQ ID NO: 32089 - DNA, 20 bp, synthetic construct
  misc_feature 1..20: note = Description of Artificial Sequence: Synthetic oligonucleotide
  misc_feature 1..20: note = Target: SCN10A; (+) strand; PAM type: NRG; PAM sequence: GGG
  source 1..20: mol_type = other DNA
tgtccagggcaataagaaag

SEQ ID NO: 32090 - DNA, 20 bp, synthetic construct
  misc_feature 1..20: note = Description of Artificial Sequence: Synthetic oligonucleotide
  misc_feature 1..20: note = Target: SCN10A; (+) strand; PAM type: NRG; PAM sequence: TGG
  source 1..20: mol_type = other DNA
ggcaataagaaaggggcttc

SEQ ID NO: 32091 - DNA, 20 bp, synthetic construct
  misc_feature 1..20: note = Description of Artificial Sequence: Synthetic oligonucleotide
  misc_feature 1..20: note = Target: SCN10A; (+) strand; PAM type: NRG; PAM sequence: AAG
  source 1..20: mol_type = other DNA
aataagaaaggggcttctgg

SEQ ID NO: 32092 - DNA, 20 bp, synthetic construct
  misc_feature 1..20: note = Description of Artificial Sequence: Synthetic oligonucleotide
  misc_feature 1..20: note = Target: SCN10A; (+) strand; PAM type: NRG; PAM sequence: CAG
  source 1..20: mol_type = other DNA
actgcatcctcccacacaac

SEQ ID NO: 32093 - DNA, 20 bp, synthetic construct
  misc_feature 1..20: note = Description of Artificial Sequence: Synthetic oligonucleotide
  misc_feature 1..20: note = Target: SCN10A; (+) strand; PAM type: NRG; PAM sequence: CAG
  source 1..20: mol_type = other DNA
catcctcccacacaaccagt

SEQ ID NO: 32094 - DNA, 20 bp, synthetic construct
  misc_feature 1..20: note = Description of Artificial Sequence: Synthetic oligonucleotide
  misc_feature 1..20: note = Target: SCN10A; (+) strand; PAM type: NRG; PAM sequence: CAG
  source 1..20: mol_type = other DNA
cccacacaaccagtcagtcc

SEQ ID NO: 32095 - DNA, 20 bp, synthetic construct
  misc_feature 1..20: note = Description of Artificial Sequence: Synthetic oligonucleotide
  misc_feature 1..20: note = Target: SCN10A; (+) strand; PAM type: NRG; PAM sequence: AGG
  source 1..20: mol_type = other DNA
ccacacaaccagtcagtccc

SEQ ID NO: 32096 - DNA, 20 bp, synthetic construct
  misc_feature 1..20: note = Description of Artificial Sequence: Synthetic oligonucleotide
  misc_feature 1..20: note = Target: SCN10A; (+) strand; PAM type: NRG; PAM sequence: GAG
  source 1..20: mol_type = other DNA
acacaaccagtcagtcccag

SEQ ID NO: 32097 - DNA, 20 bp, synthetic construct
  misc_feature 1..20: note = Description of Artificial Sequence: Synthetic oligonucleotide
  misc_feature 1..20: note = Target: SCN10A; (+) strand; PAM type: NRG; PAM sequence: AGG
  source 1..20: mol_type = other DNA
cacaaccagtcagtcccagg

SEQ ID NO: 32098 - DNA, 20 bp, synthetic construct
  misc_feature 1..20: note = Description of Artificial Sequence: Synthetic oligonucleotide
  misc_feature 1..20: note = Target: SCN10A; (+) strand; PAM type: NRG; PAM sequence: GGG
  source 1..20: mol_type = other DNA
acaaccagtcagtcccagga

SEQ ID NO: 32099 - DNA, 20 bp, synthetic construct
  misc_feature 1..20: note = Description of Artificial Sequence: Synthetic oligonucleotide
  misc_feature 1..20: note = Target: SCN10A; (+) strand; PAM type: NRG; PAM sequence: AAG
  source 1..20: mol_type = other DNA
ccagtcagtcccaggagggc

SEQ ID NO: 32100 - DNA, 20 bp, synthetic construct
  misc_feature 1..20: note = Description of Artificial Sequence: Synthetic oligonucleotide
  misc_feature 1..20: note = Target: SCN10A; (+) strand; PAM type: NRG; PAM sequence: AGG
  source 1..20: mol_type = other DNA
cagtcagtcccaggagggca

SEQ ID NO: 32101 - DNA, 20 bp, synthetic construct
  misc_feature 1..20: note = Description of Artificial Sequence: Synthetic oligonucleotide
  misc_feature 1..20: note = Target: SCN10A; (+) strand; PAM type: NRG; PAM sequence: CAG
  source 1..20: mol_type = other DNA
ggcaaggaccccaccatgac

SEQ ID NO: 32102 - DNA, 20 bp, synthetic construct
  misc_feature 1..20: note = Description of Artificial Sequence: Synthetic oligonucleotide
  misc_feature 1..20: note = Target: SCN10A; (+) strand; PAM type: NRG; PAM sequence: GAG
  source 1..20: mol_type = other DNA
caaggaccccaccatgacca

SEQ ID NO: 32103 - DNA, 20 bp, synthetic construct
  misc_feature 1..20: note = Description of Artificial Sequence: Synthetic oligonucleotide
  misc_feature 1..20: note = Target: SCN10A; (+) strand; PAM type: NRG; PAM sequence: TGG
  source 1..20: mol_type = other DNA
ggaccccaccatgaccagag

SEQ ID NO: 32104 - DNA, 20 bp, synthetic construct
  misc_feature 1..20: note = Description of Artificial Sequence: Synthetic oligonucleotide
  misc_feature 1..20: note = Target: SCN10A; (+) strand; PAM type: NRG; PAM sequence: GGG
  source 1..20: mol_type = other DNA
gaccccaccatgaccagagt

SEQ ID NO: 32105 - DNA, 20 bp, synthetic construct
  misc_feature 1..20: note = Description of Artificial Sequence: Synthetic oligonucleotide
  misc_feature 1..20: note = Target: SCN10A; (+) strand; PAM type: NRG; PAM sequence: TGG
  source 1..20: mol_type = other DNA
cccaccatgaccagagtggg

SEQ ID NO: 32106 - DNA, 20 bp, synthetic construct
  misc_feature 1..20: note = Description of Artificial Sequence: Synthetic oligonucleotide
  misc_feature 1..20: note = Target: SCN10A; (+) strand; PAM type: NRG; PAM sequence: GAG
  source 1..20: mol_type = other DNA
caccatgaccagagtgggtg

SEQ ID NO: 32107 - DNA, 20 bp, synthetic construct
  misc_feature 1..20: note = Description of Artificial Sequence: Synthetic oligonucleotide
  misc_feature 1..20: note = Target: SCN10A; (+) strand; PAM type: NRG; PAM sequence: AAG
  source 1..20: mol_type = other DNA
tgaccagagtgggtggagac

SEQ ID NO: 32108 - DNA, 20 bp, synthetic construct
  misc_feature 1..20: note = Description of Artificial Sequence: Synthetic oligonucleotide
  misc_feature 1..20: note = Target: SCN10A; (+) strand; PAM type: NRG; PAM sequence: GAG
  source 1..20: mol_type = other DNA
agagtgggtggagacaagct

SEQ ID NO: 32109 - DNA, 20 bp, synthetic construct
  misc_feature 1..20: note = Description of Artificial Sequence: Synthetic oligonucleotide
  misc_feature 1..20: note = Target: SCN10A; (+) strand; PAM type: NRG; PAM sequence: AGG
  source 1..20: mol_type = other DNA
gagtgggtggagacaagctg

SEQ ID NO: 32110 - DNA, 20 bp, synthetic construct
  misc_feature 1..20: note = Description of Artificial Sequence: Synthetic oligonucleotide
  misc_feature 1..20: note = Target: SCN10A; (+) strand; PAM type: NRG; PAM sequence: GGG
  source 1..20: mol_type = other DNA
agtgggtggagacaagctga

SEQ ID NO: 32111 - DNA, 20 bp, synthetic construct
  misc_feature 1..20: note = Description of Artificial Sequence: Synthetic oligonucleotide
  misc_feature 1..20: note = Target: SCN10A; (+) strand; PAM type: NRG; PAM sequence: CAG
  source 1..20: mol_type = other DNA
gggtggagacaagctgaggg

SEQ ID NO: 32112 - DNA, 20 bp, synthetic construct
  misc_feature 1..20: note = Description of Artificial Sequence: Synthetic oligonucleotide
  misc_feature 1..20: note = Target: SCN10A; (+) strand; PAM type: NRG; PAM sequence: AGG
  source 1..20: mol_type = other DNA
ggtggagacaagctgagggc

SEQ ID NO: 32113 - DNA, 20 bp, synthetic construct
  misc_feature 1..20: note = Description of Artificial Sequence: Synthetic oligonucleotide
  misc_feature 1..20: note = Target: SCN10A; (+) strand; PAM type: NRG; PAM sequence: GGG
  source 1..20: mol_type = other DNA
gtggagacaagctgagggca

SEQ ID NO: 32114 - DNA, 20 bp, synthetic construct
  misc_feature 1..20: note = Description of Artificial Sequence: Synthetic oligonucleotide
  misc_feature 1..20: note = Target: SCN10A; (+) strand; PAM type: NRG; PAM sequence: GGG
  source 1..20: mol_type = other DNA
tggagacaagctgagggcag

SEQ ID NO: 32115 - DNA, 20 bp, synthetic construct
  misc_feature 1..20: note = Description of Artificial Sequence: Synthetic oligonucleotide
  misc_feature 1..20: note = Target: SCN10A; (+) strand; PAM type: NRG; PAM sequence: GGG
  source 1..20: mol_type = other DNA
ggagacaagctgagggcagg

SEQ ID NO: 32116 - DNA, 20 bp, synthetic construct
  misc_feature 1..20: note = Description of Artificial Sequence: Synthetic oligonucleotide
  misc_feature 1..20: note = Target: SCN10A; (+) strand; PAM type: NRG; PAM sequence: CAG
  source 1..20: mol_type = other DNA
acaagctgagggcagggggc

SEQ ID NO: 32117 - DNA, 20 bp, synthetic construct
  misc_feature 1..20: note = Description of Artificial Sequence: Synthetic oligonucleotide
  misc_feature 1..20: note = Target: SCN10A; (+) strand; PAM type: NRG; PAM sequence: AGG
  source 1..20: mol_type = other DNA
caagctgagggcagggggcc

SEQ ID NO: 32118 - DNA, 20 bp, synthetic construct
  misc_feature 1..20: note = Description of Artificial Sequence: Synthetic oligonucleotide
  misc_feature 1..20: note = Target: SCN10A; (+) strand; PAM type: NRG; PAM sequence: TGG
  source 1..20: mol_type = other DNA
ctgagggcagggggccaggc

SEQ ID NO: 32119 - DNA, 20 bp, synthetic construct
  misc_feature 1..20: note = Description of Artificial Sequence: Synthetic oligonucleotide
  misc_feature 1..20: note = Target: SCN10A; (+) strand; PAM type: NRG; PAM sequence: GGG
  source 1..20: mol_type = other DNA
tgagggcagggggccaggct

SEQ ID NO: 32120 - DNA, 20 bp, synthetic construct
  misc_feature 1..20: note = Description of Artificial Sequence: Synthetic oligonucleotide
  misc_feature 1..20: note = Target: SCN10A; (+) strand; PAM type: NRG; PAM sequence: GGG
  source 1..20: mol_type = other DNA
gagggcagggggccaggctg

SEQ ID NO: 32121 - DNA, 20 bp, synthetic construct
  misc_feature 1..20: note = Description of Artificial Sequence: Synthetic oligonucleotide
  misc_feature 1..20: note = Target: SCN10A; (+) strand; PAM type: NRG; PAM sequence: CGG
  source 1..20: mol_type = other DNA
ggcagggggccaggctgggg

SEQ ID NO: 32122 - DNA, 20 bp, synthetic construct
  misc_feature 1..20: note = Description of Artificial Sequence: Synthetic oligonucleotide
  misc_feature 1..20: note = Target: SCN10A; (+) strand; PAM type: NRG; PAM sequence: GAG
  source 1..20: mol_type = other DNA
cagggggccaggctggggcg

SEQ ID NO: 32123 - DNA, 20 bp, synthetic construct
  misc_feature 1..20: note = Description of Artificial Sequence: Synthetic oligonucleotide
  misc_feature 1..20: note = Target: SCN10A; (+) strand; PAM type: NRG; PAM sequence: AAG
  source 1..20: mol_type = other DNA
ggggccaggctggggcggag

SEQ ID NO: 32124 - DNA, 20 bp, synthetic construct
  misc_feature 1..20: note = Description of Artificial Sequence: Synthetic oligonucleotide
  misc_feature 1..20: note = Target: SCN10A; (+) strand; PAM type: NRG; PAM sequence: AGG
  source 1..20: mol_type = other DNA
gggccaggctggggcggaga

SEQ ID NO: 32125 - DNA, 20 bp, synthetic construct
  misc_feature 1..20: note = Description of Artificial Sequence: Synthetic oligonucleotide
  misc_feature 1..20: note = Target: SCN10A; (+) strand; PAM type: NRG; PAM sequence: GGG
  source 1..20: mol_type = other DNA
ggccaggctggggcggagaa

SEQ ID NO: 32126 - DNA, 20 bp, synthetic construct
  misc_feature 1..20: note = Description of Artificial Sequence: Synthetic oligonucleotide
  misc_feature 1..20: note = Target: SCN10A; (+) strand; PAM type: NRG; PAM sequence: GGG
  source 1..20: mol_type = other DNA
gccaggctggggcggagaag

SEQ ID NO: 32127 - DNA, 20 bp, synthetic construct
  misc_feature 1..20: note = Description of Artificial Sequence: Synthetic oligonucleotide
  misc_feature 1..20: note = Target: SCN10A; (+) strand; PAM type: NRG; PAM sequence: TGG
  source 1..20: mol_type = other DNA
ctggggcggagaaggggtat

SEQ ID NO: 32128 - DNA, 20 bp, synthetic construct
  misc_feature 1..20: note = Description of Artificial Sequence: Synthetic oligonucleotide
  misc_feature 1..20: note = Target: SCN10A; (+) strand; PAM type: NRG; PAM sequence: GGG
  source 1..20: mol_type = other DNA
tggggcggagaaggggtatt

SEQ ID NO: 32129 - DNA, 20 bp, synthetic construct
  misc_feature 1..20: note = Description of Artificial Sequence: Synthetic oligonucleotide
  misc_feature 1..20: note = Target: SCN10A; (+) strand; PAM type: NRG; PAM sequence: GGG
  source 1..20: mol_type = other DNA
ggggcggagaaggggtattg

SEQ ID NO: 32130 - DNA, 20 bp, synthetic construct
  misc_feature 1..20: note = Description of Artificial Sequence: Synthetic oligonucleotide
  misc_feature 1..20: note = Target: SCN10A; (+) strand; PAM type: NRG; PAM sequence: TGG
  source 1..20: mol_type = other DNA
gaaggggtattggggcttat

SEQ ID NO: 32131 - DNA, 20 bp, synthetic construct
  misc_feature 1..20: note = Description of Artificial Sequence: Synthetic oligonucleotide
  misc_feature 1..20: note = Target: SCN10A; (+) strand; PAM type: NRG; PAM sequence: AAG
  source 1..20: mol_type = other DNA
gggtattggggcttattggc

SEQ ID NO: 32132 - DNA, 20 bp, synthetic construct
  misc_feature 1..20: note = Description of Artificial Sequence: Synthetic oligonucleotide
  misc_feature 1..20: note = Target: SCN10A; (+) strand; PAM type: NRG; PAM sequence: GAG
  source 1..20: mol_type = other DNA
attggggcttattggcaagt

SEQ ID NO: 32133 - DNA, 20 bp, synthetic construct
  misc_feature 1..20: note = Description of Artificial Sequence: Synthetic oligonucleotide
  misc_feature 1..20: note = Target: SCN10A; (+) strand; PAM type: NRG; PAM sequence: CAG
  source 1..20: mol_type = other DNA
cttattggcaagtgagtctc

SEQ ID NO: 32134 - DNA, 20 bp, synthetic construct
  misc_feature 1..20: note = Description of Artificial Sequence: Synthetic oligonucleotide
  misc_feature 1..20: note = Target: SCN10A; (+) strand; PAM type: NRG; PAM sequence: GAG
  source 1..20: mol_type = other DNA
tattggcaagtgagtctcca

SEQ ID NO: 32135 - DNA, 20 bp, synthetic construct
  misc_feature 1..20: note = Description of Artificial Sequence: Synthetic oligonucleotide
  misc_feature 1..20: note = Target: SCN10A; (+) strand; PAM type: NRG; PAM sequence: AGG
  source 1..20: mol_type = other DNA
attggcaagtgagtctccag

SEQ ID NO: 32136 - DNA, 20 bp, synthetic construct
  misc_feature 1..20: note = Description of Artificial Sequence: Synthetic oligonucleotide
  misc_feature 1..20: note = Target: SCN10A; (+) strand; PAM type: NRG; PAM sequence: GGG
  source 1..20: mol_type = other DNA
ttggcaagtgagtctccaga

SEQ ID NO: 32137 - DNA, 20 bp, synthetic construct
  misc_feature 1..20: note = Description of Artificial Sequence: Synthetic oligonucleotide
  misc_feature 1..20: note = Target: SCN10A; (+) strand; PAM type: NRG; PAM sequence: GGG
  source 1..20: mol_type = other DNA
tggcaagtgagtctccagag

SEQ ID NO: 32138 - DNA, 20 bp, synthetic construct
  misc_feature 1..20: note = Description of Artificial Sequence: Synthetic oligonucleotide
  misc_feature 1..20: note = Target: SCN10A; (+) strand; PAM type: NRG; PAM sequence: TGG
  source 1..20: mol_type = other DNA
agaggggcttcctccaaaca

SEQ ID NO: 32139 - DNA, 20 bp, synthetic construct
  misc_feature 1..20: note = Description of Artificial Sequence: Synthetic oligonucleotide
  misc_feature 1..20: note = Target: SCN10A; (+) strand; PAM type: NRG; PAM sequence: GAG
  source 1..20: mol_type = other DNA
aggggcttcctccaaacatg

SEQ ID NO: 32140 - DNA, 20 bp, synthetic construct
  misc_feature 1..20: note = Description of Artificial Sequence: Synthetic oligonucleotide
  misc_feature 1..20: note = Target: SCN10A; (+) strand; PAM type: NRG; PAM sequence: TAG
  source 1..20: mol_type = other DNA
ggcttcctccaaacatggag

SEQ ID NO: 32141 - DNA, 20 bp, synthetic construct
  misc_feature 1..20: note = Description of Artificial Sequence: Synthetic oligonucleotide
  misc_feature 1..20: note = Target: SCN10A; (+) strand; PAM type: NRG; PAM sequence: TGG
  source 1..20: mol_type = other DNA
agattttgttattatttctg

SEQ ID NO: 32142 - DNA, 20 bp, synthetic construct
  misc_feature 1..20: note = Description of Artificial Sequence: Synthetic oligonucleotide
  misc_feature 1..20: note = Target: SCN10A; (+) strand; PAM type: NRG; PAM sequence: TGG
  source 1..20: mol_type = other DNA
tgttattatttctgtggcct

SEQ ID NO: 32143 - DNA, 20 bp, synthetic construct
  misc_feature 1..20: note = Description of Artificial Sequence: Synthetic oligonucleotide
  misc_feature 1..20: note = Target: SCN10A; (+) strand; PAM type: NRG; PAM sequence: CAG
  source 1..20: mol_type = other DNA
cccattgtgccccctccctg

SEQ ID NO: 32144 - DNA, 20 bp, synthetic construct
  misc_feature 1..20: note = Description of Artificial Sequence: Synthetic oligonucleotide
  misc_feature 1..20: note = Target: SCN10A; (+) strand; PAM type: NRG; PAM sequence: CAG
  source 1..20: mol_type = other DNA
gcagcctctccccctgctcc

SEQ ID NO: 32145 - DNA, 20 bp, synthetic construct
  misc_feature 1..20: note = Description of Artificial Sequence: Synthetic oligonucleotide
  misc_feature 1..20: note = Target: SCN10A; (+) strand; PAM type: NRG; PAM sequence: TAG
  source 1..20: mol_type = other DNA
cctctccccctgctcccagc

SEQ ID NO: 32146 - DNA, 20 bp, synthetic construct
  misc_feature 1..20: note = Description of Artificial Sequence: Synthetic oligonucleotide
  misc_feature 1..20: note = Target: SCN10A; (+) strand; PAM type: NRG; PAM sequence: AGG
  source 1..20: mol_type = other DNA
ctctccccctgctcccagct

SEQ ID NO: 32147 - DNA, 20 bp, synthetic construct
  misc_feature 1..20: note = Description of Artificial Sequence: Synthetic oligonucleotide
  misc_feature 1..20: note = Target: SCN10A; (+) strand; PAM type: NRG; PAM sequence: CAG
  source 1..20: mol_type = other DNA
gctcccagctaggacctgtg

SEQ ID NO: 32148 - DNA, 20 bp, synthetic construct
  misc_feature 1..20: note = Description of Artificial Sequence: Synthetic oligonucleotide
  misc_feature 1..20: note = Target: SCN10A; (+) strand; PAM type: NRG; PAM sequence: TGG
  source 1..20: mol_type = other DNA
cagctaggacctgtgcagct

SEQ ID NO: 32149 - DNA, 20 bp, synthetic construct
  misc_feature 1..20: note = Description of Artificial Sequence: Synthetic oligonucleotide
  misc_feature 1..20: note = Target: SCN10A; (+) strand; PAM type: NRG; PAM sequence: GAG
  source 1..20: mol_type = other DNA
gctaggacctgtgcagcttg

SEQ ID NO: 32150 - DNA, 20 bp, synthetic construct
  misc_feature 1..20: note = Description of Artificial Sequence: Synthetic oligonucleotide
  misc_feature 1..20: note = Target: SCN10A; (+) strand; PAM type: NRG; PAM sequence: CAG
  source 1..20: mol_type = other DNA
cctgtgcagcttggagaaat

SEQ ID NO: 32151 - DNA, 20 bp, synthetic construct
  misc_feature 1..20: note = Description of Artificial Sequence: Synthetic oligonucleotide
  misc_feature 1..20: note = Target: SCN10A; (+) strand; PAM type: NRG; PAM sequence: CAG
  source 1..20: mol_type = other DNA
tgcagcttggagaaatcagt

SEQ ID NO: 32152 - DNA, 20 bp, synthetic construct
  misc_feature 1..20: note = Description of Artificial Sequence: Synthetic oligonucleotide
  misc_feature 1..20: note = Target: SCN10A; (+) strand; PAM type: NRG; PAM sequence: GAG
  source 1..20: mol_type = other DNA
cctgaataaaaatgttttct

SEQ ID NO: 32153 - DNA, 20 bp, synthetic construct
  misc_feature 1..20: note = Description of Artificial Sequence: Synthetic oligonucleotide
  misc_feature 1..20: note = Target: SCN10A; (+) strand; PAM type: NRG; PAM sequence: CAG
  source 1..20: mol_type = other DNA
aaatgttttctgagccccct

SEQ ID NO: 32154 - DNA, 20 bp, synthetic construct
  misc_feature 1..20: note = Description of Artificial Sequence: Synthetic oligonucleotide
  misc_feature 1..20: note = Target: SCN10A; (+) strand; PAM type: NRG; PAM sequence: TGG
  source 1..20: mol_type = other DNA
ttttctgagccccctcagat

SEQ ID NO: 32155 - DNA, 20 bp, synthetic construct
  misc_feature 1..20: note = Description of Artificial Sequence: Synthetic oligonucleotide
  misc_feature 1..20: note = Target: SCN10A; (+) strand; PAM type: NRG; PAM sequence: GGG
  source 1..20: mol_type = other DNA
tttctgagccccctcagatt

SEQ ID NO: 32156 - DNA, 20 bp, synthetic construct
  misc_feature 1..20: note = Description of Artificial Sequence: Synthetic oligonucleotide
  misc_feature 1..20: note = Target: SCN10A; (+) strand; PAM type: NRG; PAM sequence: GGG
  source 1..20: mol_type = other DNA
ttctgagccccctcagattg

SEQ ID NO: 32157 - DNA, 20 bp, synthetic construct
  misc_feature 1..20: note = Description of Artificial Sequence: Synthetic oligonucleotide
  misc_feature 1..20: note = Target: SCN10A; (+) strand; PAM type: NRG; PAM sequence: AAG
  source 1..20: mol_type = other DNA
tgagccccctcagattgggg

SEQ ID NO: 32158 - DNA, 20 bp, synthetic construct
  misc_feature 1..20: note = Description of Artificial Sequence: Synthetic oligonucleotide
  misc_feature 1..20: note = Target: SCN10A; (+) strand; PAM type: NRG; PAM sequence: AGG
  source 1..20: mol_type = other DNA
gagccccctcagattgggga

SEQ ID NO: 32159 - DNA, 20 bp, synthetic construct
  misc_feature 1..20: note = Description of Artificial Sequence: Synthetic oligonucleotide
  misc_feature 1..20: note = Target: SCN10A; (+) strand; PAM type: NRG; PAM sequence: CAG
  source 1..20: mol_type = other DNA
gaaggacatttttcctttaa

SEQ ID NO: 32160 - DNA, 20 bp, synthetic construct
  misc_feature 1..20: note = Description of Artificial Sequence: Synthetic oligonucleotide
  misc_feature 1..20: note = Target: SCN10A; (+) strand; PAM type: NRG; PAM sequence: TAG
  source 1..20: mol_type = other DNA
atttttcctttaacagctaa

SEQ ID NO: 32161 - DNA, 20 bp, synthetic construct
  misc_feature 1..20: note = Description of Artificial Sequence: Synthetic oligonucleotide
  misc_feature 1..20: note = Target: SCN10A; (+) strand; PAM type: NRG; PAM sequence: GAG
  source 1..20: mol_type = other DNA
gctaatagacaccgtttatt

SEQ ID NO: 32162 - DNA, 20 bp, synthetic construct
  misc_feature 1..20: note = Description of Artificial Sequence: Synthetic oligonucleotide
  misc_feature 1..20: note = Target: SCN10A; (+) strand; PAM type: NRG; PAM sequence: CAG
  source 1..20: mol_type = other DNA
cgtttattgagttcctgcct

SEQ ID NO: 32163 - DNA, 20 bp, synthetic construct
  misc_feature 1..20: note = Description of Artificial Sequence: Synthetic oligonucleotide
  misc_feature 1..20: note = Target: SCN10A; (+) strand; PAM type: NRG; PAM sequence: CAG
  source 1..20: mol_type = other DNA
attgagttcctgcctcagcc

SEQ ID NO: 32164 - DNA, 20 bp, synthetic construct
  misc_feature 1..20: note = Description of Artificial Sequence: Synthetic oligonucleotide
  misc_feature 1..20: note = Target: SCN10A; (+) strand; PAM type: NRG; PAM sequence: TAG
  source 1..20: mol_type = other DNA
cctcagcccagacattgcat

SEQ ID NO: 32165 - DNA, 20 bp, synthetic construct
  misc_feature 1..20: note = Description of Artificial Sequence: Synthetic oligonucleotide
  misc_feature 1..20: note = Target: SCN10A; (+) strand; PAM type: NRG; PAM sequence: AGG
  source 1..20: mol_type = other DNA
ctcagcccagacattgcatt

SEQ ID NO: 32166 - DNA, 20 bp, synthetic construct
  misc_feature 1..20: note = Description of Artificial Sequence: Synthetic oligonucleotide
  misc_feature 1..20: note = Target: SCN10A; (+) strand; PAM type: NRG; PAM sequence: CAG
  source 1..20: mol_type = other DNA
ctcctgtcatttaattctcc

SEQ ID NO: 32167 - DNA, 20 bp, synthetic construct
  misc_feature 1..20: note = Description of Artificial Sequence: Synthetic oligonucleotide
  misc_feature 1..20: note = Target: SCN10A; (+) strand; PAM type: NRG; PAM sequence: GAG
  source 1..20: mol_type = other DNA
aattctcccagtaaacccat

SEQ ID NO: 32168 - DNA, 20 bp, synthetic construct
  misc_feature 1..20: note = Description of Artificial Sequence: Synthetic oligonucleotide
  misc_feature 1..20: note = Target: SCN10A; (+) strand; PAM type: NRG; PAM sequence: AAG
  source 1..20: mol_type = other DNA
ctcccagtaaacccatgagt

SEQ ID NO: 32169 - DNA, 20 bp, synthetic construct
  misc_feature 1..20: note = Description of Artificial Sequence: Synthetic oligonucleotide
  misc_feature 1..20: note = Target: SCN10A; (+) strand; PAM type: NRG; PAM sequence: AAG
  source 1..20: mol_type = other DNA
agcattattttcttgatttt

SEQ ID NO: 32170 - DNA, 20 bp, synthetic construct
  misc_feature 1..20: note = Description of Artificial Sequence: Synthetic oligonucleotide
  misc_feature 1..20: note = Target: SCN10A; (+) strand; PAM type: NRG; PAM sequence: AGG
  source 1..20: mol_type = other DNA
gcattattttcttgatttta

SEQ ID NO: 32171 - DNA, 20 bp, synthetic construct
  misc_feature 1..20: note = Description of Artificial Sequence: Synthetic oligonucleotide
  misc_feature 1..20: note = Target: SCN10A; (+) strand; PAM type: NRG; PAM sequence: TAG
  source 1..20: mol_type = other DNA
tttcttgattttaaggaaat

SEQ ID NO: 32172 - DNA, 20 bp, synthetic construct
  misc_feature 1..20: note = Description of Artificial Sequence: Synthetic oligonucleotide
  misc_feature 1..20: note = Target: SCN10A; (+) strand; PAM type: NRG; PAM sequence: GAG
  source 1..20: mol_type = other DNA
ttttaaggaaattagatctt

SEQ ID NO: 32173 - DNA, 20 bp, synthetic construct
  misc_feature 1..20: note = Description of Artificial Sequence: Synthetic oligonucleotide
  misc_feature 1..20: note = Target: SCN10A; (+) strand; PAM type: NRG; PAM sequence: AGG
  source 1..20: mol_type = other DNA
tttaaggaaattagatcttg

SEQ ID NO: 32174 - DNA, 20 bp, synthetic construct
  misc_feature 1..20: note = Description of Artificial Sequence: Synthetic oligonucleotide
  misc_feature 1..20: note = Target: SCN10A; (+) strand; PAM type: NRG; PAM sequence: GAG
  source 1..20: mol_type = other DNA
taaggaaattagatcttgag

SEQ ID NO: 32175 - DNA, 20 bp, synthetic construct
  misc_feature 1..20: note = Description of Artificial Sequence: Synthetic oligonucleotide
  misc_feature 1..20: note = Target: SCN10A; (+) strand; PAM type: NRG; PAM sequence: AAG
  source 1..20: mol_type = other DNA
aattagatcttgaggagatt

SEQ ID NO: 32176 - DNA, 20 bp, synthetic construct
  misc_feature 1..20: note = Description of Artificial Sequence: Synthetic oligonucleotide
  misc_feature 1..20: note = Target: SCN10A; (+) strand; PAM type: NRG; PAM sequence: TGG
  source 1..20: mol_type = other DNA
aggagattaagtctcttgcc

SEQ ID NO: 32177 - DNA, 20 bp, synthetic construct
  misc_feature 1..20: note = Description of Artificial Sequence: Synthetic oligonucleotide
  misc_feature 1..20: note = Target: SCN10A; (+) strand; PAM type: NRG; PAM sequence: GGG
  source 1..20: mol_type = other DNA
ggagattaagtctcttgcct

SEQ ID NO: 32178 - DNA, 20 bp, synthetic construct
  misc_feature 1..20: note = Description of Artificial Sequence: Synthetic oligonucleotide
  misc_feature 1..20: note = Target: SCN10A; (+) strand; PAM type: NRG; PAM sequence: GGG
  source 1..20: mol_type = other DNA
gagattaagtctcttgcctg

SEQ ID NO: 32179 - DNA, 20 bp, synthetic construct
  misc_feature 1..20: note = Description of Artificial Sequence: Synthetic oligonucleotide
  misc_feature 1..20: note = Target: SCN10A; (+) strand; PAM type: NRG; PAM sequence: TAG
  source 1..20: mol_type = other DNA
cttgcctggggtcacccacc

SEQ ID NO: 32180 - DNA, 20 bp, synthetic construct
  misc_feature 1..20: note = Description of Artificial Sequence: Synthetic oligonucleotide
  misc_feature 1..20: note = Target: SCN10A; (+) strand; PAM type: NRG; PAM sequence: TGG
  source 1..20: mol_type = other DNA
ggggtcacccacctagtaaa

SEQ ID NO: 32181 - DNA, 20 bp, synthetic construct
  misc_feature 1..20: note = Description of Artificial Sequence: Synthetic oligonucleotide
  misc_feature 1..20: note = Target: SCN10A; (+) strand; PAM type: NRG; PAM sequence: TGG
  source 1..20: mol_type = other DNA
gtcacccacctagtaaatgg

SEQ ID NO: 32182 - DNA, 20 bp, synthetic construct
  misc_feature 1..20: note = Description of Artificial Sequence: Synthetic oligonucleotide
  misc_feature 1..20: note = Target: SCN10A; (+) strand; PAM type: NRG; PAM sequence: GAG
  source 1..20: mol_type = other DNA
cacccacctagtaaatggtg

SEQ ID NO: 32183 - DNA, 20 bp, synthetic construct
  misc_feature 1..20: note = Description of Artificial Sequence: Synthetic oligonucleotide
  misc_feature 1..20: note = Target: SCN10A; (+) strand; PAM type: NRG; PAM sequence: CAG
  source 1..20: mol_type = other DNA
ccacctagtaaatggtggag

SEQ ID NO: 32184 - DNA, 20 bp, synthetic construct
  misc_feature 1..20: note = Description of Artificial Sequence: Synthetic oligonucleotide
  misc_feature 1..20: note = Target: SCN10A; (+) strand; PAM type: NRG; PAM sequence: GAG
  source 1..20: mol_type = other DNA
acctagtaaatggtggagca

SEQ ID NO: 32185 - DNA, 20 bp, synthetic construct
  misc_feature 1..20: note = Description of Artificial Sequence: Synthetic oligonucleotide
  misc_feature 1..20: note = Target: SCN10A; (+) strand; PAM type: NRG; PAM sequence: CAG
  source 1..20: mol_type = other DNA
gtggagcagagattctacac

SEQ ID NO: 32186 - DNA, 20 bp, synthetic construct
  misc_feature 1..20: note = Description of Artificial Sequence: Synthetic oligonucleotide
  misc_feature 1..20: note = Target: SCN10A; (+) strand; PAM type: NRG; PAM sequence: AGG
  source 1..20: mol_type = other DNA
tggagcagagattctacacc

SEQ ID NO: 32187 - DNA, 20 bp, synthetic construct
  misc_feature 1..20: note = Description of Artificial Sequence: Synthetic oligonucleotide
  misc_feature 1..20: note = Target: SCN10A; (+) strand; PAM type: NRG; PAM sequence: AAG
  source 1..20: mol_type = other DNA
tcatatgttctcattcctgc

SEQ ID NO: 32188 - DNA, 20 bp, synthetic construct
  misc_feature 1..20: note = Description of Artificial Sequence: Synthetic oligonucleotide
  misc_feature 1..20: note = Target: SCN10A; (+) strand; PAM type: NRG; PAM sequence: CAG
  source 1..20: mol_type = other DNA
atgttctcattcctgcaagt

SEQ ID NO: 32189 - DNA, 20 bp, synthetic construct
  misc_feature 1..20: note = Description of Artificial Sequence: Synthetic oligonucleotide
  misc_feature 1..20: note = Target: SCN10A; (+) strand; PAM type: NRG; PAM sequence: AAG
  source 1..20: mol_type = other DNA
tgcaagtcagactgcctccc

SEQ ID NO: 32190 - DNA, 20 bp, synthetic construct
  misc_feature 1..20: note = Description of Artificial Sequence: Synthetic oligonucleotide
  misc_feature 1..20: note = Target: SCN10A; (+) strand; PAM type: NRG; PAM sequence: AGG
  source 1..20: mol_type = other DNA
gcaagtcagactgcctccca

SEQ ID NO: 32191 - DNA, 20 bp, synthetic construct
  misc_feature 1..20: note = Description of Artificial Sequence: Synthetic oligonucleotide
  misc_feature 1..20: note = Target: SCN10A; (+) strand; PAM type: NRG; PAM sequence: AAG
  source 1..20: mol_type = other DNA
gaatcccacatgaatttgaa

SEQ ID NO: 32192 - DNA, 20 bp, synthetic construct
  misc_feature 1..20: note = Description of Artificial Sequence: Synthetic oligonucleotide
  misc_feature 1..20: note = Target: SCN10A; (+) strand; PAM type: NRG; PAM sequence: AAG
  source 1..20: mol_type = other DNA
acatgaatttgaaaagtttg

SEQ ID NO: 32193 - DNA, 20 bp, synthetic construct
  misc_feature 1..20: note = Description of Artificial Sequence: Synthetic oligonucleotide
  misc_feature 1..20: note = Target: SCN10A; (+) strand; PAM type: NRG; PAM sequence: CAG
  source 1..20: mol_type = other DNA
aagtttgaagacttttcaac

SEQ ID NO: 32194 - DNA, 20 bp, synthetic construct
  misc_feature 1..20: note = Description of Artificial Sequence: Synthetic oligonucleotide
  misc_feature 1..20: note = Target: SCN10A; (+) strand; PAM type: NRG; PAM sequence: GAG
  source 1..20: mol_type = other DNA
gtttgaagacttttcaacca

SEQ ID NO: 32195 - DNA, 20 bp, synthetic construct
  misc_feature 1..20: note = Description of Artificial Sequence: Synthetic oligonucleotide
  misc_feature 1..20: note = Target: SCN10A; (+) strand; PAM type: NRG; PAM sequence: AAG
  source 1..20: mol_type = other DNA
tgaagacttttcaaccagag

SEQ ID NO: 32196 - DNA, 20 bp, synthetic construct
  misc_feature 1..20: note = Description of Artificial Sequence: Synthetic oligonucleotide
  misc_feature 1..20: note = Target: SCN10A; (+) strand; PAM type: NRG; PAM sequence: TGG
  source 1..20: mol_type = other DNA
tcaaccagagaagtacaatc

SEQ ID NO: 32197 - DNA, 20 bp, synthetic construct
  misc_feature 1..20: note = Description of Artificial Sequence: Synthetic oligonucleotide
  misc_feature 1..20: note = Target: SCN10A; (+) strand; PAM type: NRG; PAM sequence: GGG
  source 1..20: mol_type = other DNA
caaccagagaagtacaatct

SEQ ID NO: 32198 - DNA, 20 bp, synthetic construct
  misc_feature 1..20: note = Description of Artificial Sequence: Synthetic oligonucleotide
  misc_feature 1..20: note = Target: SCN10A; (+) strand; PAM type: NRG; PAM sequence: CAG
  source 1..20: mol_type = other DNA
acaatctgggcataaaaatg

SEQ ID NO: 32199 - DNA, 20 bp, synthetic construct
  misc_feature 1..20: note = Description of Artificial Sequence: Synthetic oligonucleotide
  misc_feature 1..20: note = Target: SCN10A; (+) strand; PAM type: NRG; PAM sequence: AAG
  source 1..20: mol_type = other DNA
gggcataaaaatgcagatca

SEQ ID NO: 32200 - DNA, 20 bp, synthetic construct
  misc_feature 1..20: note = Description of Artificial Sequence: Synthetic oligonucleotide
  misc_feature 1..20: note = Target: SCN10A; (+) strand; PAM type: NRG; PAM sequence: CAG
  source 1..20: mol_type = other DNA
aatgcagatcaaagcttttt

SEQ ID NO: 32201 - DNA, 20 bp, synthetic construct
  misc_feature 1..20: note = Description of Artificial Sequence: Synthetic oligonucleotide
  misc_feature 1..20: note = Target: SCN10A; (+) strand; PAM type: NRG; PAM sequence: CAG
  source 1..20: mol_type = other DNA
caaagctttttcagataacc

SEQ ID NO: 32202 - DNA, 20 bp, synthetic construct
  misc_feature 1..20: note = Description of Artificial Sequence: Synthetic oligonucleotide
  misc_feature 1..20: note = Target: SCN10A; (+) strand; PAM type: NRG; PAM sequence: AAG
  source 1..20: mol_type = other DNA
agctttttcagataacccag

SEQ ID NO: 32203 - DNA, 20 bp, synthetic construct
  misc_feature 1..20: note = Description of Artificial Sequence: Synthetic oligonucleotide
  misc_feature 1..20: note = Target: SCN10A; (+) strand; PAM type: NRG; PAM sequence: CAG
  source 1..20: mol_type = other DNA
cagaagccttctcctttccc

SEQ ID NO: 32204 - DNA, 20 bp, synthetic construct
  misc_feature 1..20: note = Description of Artificial Sequence: Synthetic oligonucleotide
  misc_feature 1..20: note = Target: SCN10A; (+) strand; PAM type: NRG; PAM sequence: AGG
  source 1..20: mol_type = other DNA
agaagccttctcctttcccc

SEQ ID NO: 32205 - DNA, 20 bp, synthetic construct
  misc_feature 1..20: note = Description of Artificial Sequence: Synthetic oligonucleotide
  misc_feature 1..20: note = Target: SCN10A; (+) strand; PAM type: NRG; PAM sequence: GAG
  source 1..20: mol_type = other DNA
aagccttctcctttccccag

SEQ ID NO: 32206 - DNA, 20 bp, synthetic construct
  misc_feature 1..20: note = Description of Artificial Sequence: Synthetic oligonucleotide
  misc_feature 1..20: note = Target: SCN10A; (+) strand; PAM type: NRG; PAM sequence: CAG
  source 1..20: mol_type = other DNA
cttctcctttccccaggaga

SEQ ID NO: 32207 - DNA, 20 bp, synthetic construct
  misc_feature 1..20: note = Description of Artificial Sequence: Synthetic oligonucleotide
  misc_feature 1..20: note = Target: SCN10A; (+) strand; PAM type: NRG; PAM sequence: CAG
  source 1..20: mol_type = other DNA
tccccaggagacagtgcccc

SEQ ID NO: 32208 - DNA, 20 bp, synthetic construct
  misc_feature 1..20: note = Description of Artificial Sequence: Synthetic oligonucleotide
  misc_feature 1..20: note = Target: SCN10A; (+) strand; PAM type: NRG; PAM sequence: CAG
  source 1..20: mol_type = other DNA
ccaggagacagtgcccccag

SEQ ID NO: 32209 - DNA, 20 bp, synthetic construct
  misc_feature 1..20: note = Description of Artificial Sequence: Synthetic oligonucleotide
  misc_feature 1..20: note = Target: SCN10A; (+) strand; PAM type: NRG; PAM sequence: AGG
  source 1..20: mol_type = other DNA
caggagacagtgcccccagc

SEQ ID NO: 32210 - DNA, 20 bp, synthetic construct
  misc_feature 1..20: note = Description of Artificial Sequence: Synthetic oligonucleotide
  misc_feature 1..20: note = Target: SCN10A; (+) strand; PAM type: NRG; PAM sequence: GGG
  source 1..20: mol_type = other DNA
aggagacagtgcccccagca

SEQ ID NO: 32211 - DNA, 20 bp, synthetic construct
  misc_feature 1..20: note = Description of Artificial Sequence: Synthetic oligonucleotide
  misc_feature 1..20: note = Target: SCN10A; (+) strand; PAM type: NRG; PAM sequence: CAG
  source 1..20: mol_type = other DNA
cagggttcaccactcaccac

SEQ ID NO: 32212 - DNA, 20 bp, synthetic construct
  misc_feature 1..20: note = Description of Artificial Sequence: Synthetic oligonucleotide
  misc_feature 1..20: note = Target: SCN10A; (+) strand; PAM type: NRG; PAM sequence: AGG
  source 1..20: mol_type = other DNA
agggttcaccactcaccacc

SEQ ID NO: 32213 - DNA, 20 bp, synthetic construct
  misc_feature 1..20: note = Description of Artificial Sequence: Synthetic oligonucleotide
  misc_feature 1..20: note = Target: SCN10A; (+) strand; PAM type: NRG; PAM sequence: TAG
  source 1..20: mol_type = other DNA
ccactcaccaccaggttccc

SEQ ID NO: 32214 - DNA, 20 bp, synthetic construct
  misc_feature 1..20: note = Description of Artificial Sequence: Synthetic oligonucleotide
  misc_feature 1..20: note = Target: SCN10A; (+) strand; PAM type: NRG; PAM sequence: AAG
  source 1..20: mol_type = other DNA
tccctagcaccatcaccgtc

SEQ ID NO: 32215 - DNA, 20 bp, synthetic construct
  misc_feature 1..20: note = Description of Artificial Sequence: Synthetic oligonucleotide
  misc_feature 1..20: note = Target: SCN10A; (+) strand; PAM type: NRG; PAM sequence: AAG
  source 1..20: mol_type = other DNA
agcaccatcaccgtcaagaa

SEQ ID NO: 32216 - DNA, 20 bp, synthetic construct
  misc_feature 1..20: note = Description of Artificial Sequence: Synthetic oligonucleotide
  misc_feature 1..20: note = Target: SCN10A; (+) strand; PAM type: NRG; PAM sequence: AGG
  source 1..20: mol_type = other DNA
gcaccatcaccgtcaagaaa

SEQ ID NO: 32217 - DNA, 20 bp, synthetic construct
  misc_feature 1..20: note = Description of Artificial Sequence: Synthetic oligonucleotide
  misc_feature 1..20: note = Target: SCN10A; (+) strand; PAM type: NRG; PAM sequence: GAG
  source 1..20: mol_type = other DNA
atcaccgtcaagaaaaggat

SEQ ID NO: 32218 - DNA, 20 bp, synthetic construct
  misc_feature 1..20: note = Description of Artificial Sequence: Synthetic oligonucleotide
  misc_feature 1..20: note = Target: SCN10A; (+) strand; PAM type: NRG; PAM sequence: AGG
  source 1..20: mol_type = other DNA
tcaccgtcaagaaaaggatg

SEQ ID NO: 32219 - DNA, 20 bp, synthetic construct
  misc_feature 1..20: note = Description of Artificial Sequence: Synthetic oligonucleotide
  misc_feature 1..20: note = Target: SCN10A; (+) strand; PAM type: NRG; PAM sequence: TGG
  source 1..20: mol_type = other DNA
caagaaaaggatgaggcata

SEQ ID NO: 32220 - DNA, 20 bp, synthetic construct
  misc_feature 1..20: note = Description of Artificial Sequence: Synthetic oligonucleotide
  misc_feature 1..20: note = Target: SCN10A; (+) strand; PAM type: NRG; PAM sequence: TGG
  source 1..20: mol_type = other DNA
ggatgaggcatatggatttt

SEQ ID NO: 32221 - DNA, 20 bp, synthetic construct
  misc_feature 1..20: note = Description of Artificial Sequence: Synthetic oligonucleotide
  misc_feature 1..20: note = Target: SCN10A; (+) strand; PAM type: NRG; PAM sequence: CAG
  source 1..20: mol_type = other DNA
atttttggccaacttccatg

SEQ ID NO: 32222 - DNA, 20 bp, synthetic construct
  misc_feature 1..20: note = Description of Artificial Sequence: Synthetic oligonucleotide
  misc_feature 1..20: note = Target: SCN10A; (+) strand; PAM type: NRG; PAM sequence: AGG
  source 1..20: mol_type = other DNA
tttttggccaacttccatgc

SEQ ID NO: 32223 - DNA, 20 bp, synthetic construct
  misc_feature 1..20: note = Description of Artificial Sequence: Synthetic oligonucleotide
  misc_feature 1..20: note = Target: SCN10A; (+) strand; PAM type: NRG; PAM sequence: CAG
  source 1..20: mol_type = other DNA
tgttctcaatccactctcca

SEQ ID NO: 32224 - DNA, 20 bp, synthetic construct
  misc_feature 1..20: note = Description of Artificial Sequence: Synthetic oligonucleotide
  misc_feature 1..20: note = Target: SCN10A; (+) strand; PAM type: NRG; PAM sequence: GAG
  source 1..20: mol_type = other DNA
ttctcaatccactctccaca

SEQ ID NO: 32225 - DNA, 20 bp, synthetic construct
  misc_feature 1..20: note = Description of Artificial Sequence: Synthetic oligonucleotide
  misc_feature 1..20: note = Target: SCN10A; (+) strand; PAM type: NRG; PAM sequence: AGG
  source 1..20: mol_type = other DNA
tctcaatccactctccacag

SEQ ID NO: 32226 - DNA, 20 bp, synthetic construct
  misc_feature 1..20: note = Description of Artificial Sequence: Synthetic oligonucleotide
  misc_feature 1..20: note = Target: SCN10A; (+) strand; PAM type: NRG; PAM sequence: CGG
  source 1..20: mol_type = other DNA
tccactctccacagaggata

SEQ ID NO: 32227 - DNA, 20 bp, synthetic construct
  misc_feature 1..20: note = Description of Artificial Sequence: Synthetic oligonucleotide
  misc_feature 1..20: note = Target: SCN10A; (+) strand; PAM type: NRG; PAM sequence: AAG
  source 1..20: mol_type = other DNA
actctccacagaggatacgg

SEQ ID NO: 32228 - DNA, 20 bp, synthetic construct
  misc_feature 1..20: note = Description of Artificial Sequence: Synthetic oligonucleotide
  misc_feature 1..20: note = Target: SCN10A; (+) strand; PAM type: NRG; PAM sequence: GAG
  source 1..20: mol_type = other DNA
cagaggatacggaagacaat

SEQ ID NO: 32229 - DNA, 20 bp, synthetic construct
  misc_feature 1..20: note = Description of Artificial Sequence: Synthetic oligonucleotide
  misc_feature 1..20: note = Target: SCN10A; (+) strand; PAM type: NRG; PAM sequence: AGG
  source 1..20: mol_type = other DNA
agaggatacggaagacaatg

SEQ ID NO: 32230 - DNA, 20 bp, synthetic construct
  misc_feature 1..20: note = Description of Artificial Sequence: Synthetic oligonucleotide
  misc_feature 1..20: note = Target: SCN10A; (+) strand; PAM type: NRG; PAM sequence: AAG
  source 1..20: mol_type = other DNA
gatacggaagacaatgagga

SEQ ID NO: 32231 - DNA, 20 bp, synthetic construct
  misc_feature 1..20: note = Description of Artificial Sequence: Synthetic oligonucleotide
  misc_feature 1..20: note = Target: SCN10A; (+) strand; PAM type: NRG; PAM sequence: GAG
  source 1..20: mol_type = other DNA
tacggaagacaatgaggaaa

SEQ ID NO: 32232 - DNA, 20 bp, synthetic construct
  misc_feature 1..20: note = Description of Artificial Sequence: Synthetic oligonucleotide
  misc_feature 1..20: note = Target: SCN10A; (+) strand; PAM type: NRG; PAM sequence: TGG
  source 1..20: mol_type = other DNA
ggaagacaatgaggaaagag

SEQ ID NO: 32233 - DNA, 20 bp, synthetic construct
  misc_feature 1..20: note = Description of Artificial Sequence: Synthetic oligonucleotide
  misc_feature 1..20: note = Target: SCN10A; (+) strand; PAM type: NRG; PAM sequence: AAG
  source 1..20: mol_type = other DNA
agacaatgaggaaagagtgg

SEQ ID NO: 32234 - DNA, 20 bp, synthetic construct
  misc_feature 1..20: note = Description of Artificial Sequence: Synthetic oligonucleotide
  misc_feature 1..20: note = Target: SCN10A; (+) strand; PAM type: NRG; PAM sequence: AAG
  source 1..20: mol_type = other DNA
caatgaggaaagagtggaag

SEQ ID NO: 32235 - DNA, 20 bp, synthetic construct
  misc_feature 1..20: note = Description of Artificial Sequence: Synthetic oligonucleotide
  misc_feature 1..20: note = Target: SCN10A; (+) strand; PAM type: NRG; PAM sequence: CAG
  source 1..20: mol_type = other DNA
ggaagaagtcgtgcatgtgc

SEQ ID NO: 32236 - DNA, 20 bp, synthetic construct
  misc_feature 1..20: note = Description of Artificial Sequence: Synthetic oligonucleotide
  misc_feature 1..20: note = Target: SCN10A; (+) strand; PAM type: NRG; PAM sequence: CGG
  source 1..20: mol_type = other DNA
agaagtcgtgcatgtgccag

SEQ ID NO: 32237 - DNA, 20 bp, synthetic construct
  misc_feature 1..20: note = Description of Artificial Sequence: Synthetic oligonucleotide
  misc_feature 1..20: note = Target: SCN10A; (+) strand; PAM type: NRG; PAM sequence: GGG
  source 1..20: mol_type = other DNA
gaagtcgtgcatgtgccagc

SEQ ID NO: 32238 - DNA, 20 bp, synthetic construct
  misc_feature 1..20: note = Description of Artificial Sequence: Synthetic oligonucleotide
  misc_feature 1..20: note = Target: SCN10A; (+) strand; PAM type: NRG; PAM sequence: GGG
  source 1..20: mol_type = other DNA
aagtcgtgcatgtgccagcg

SEQ ID NO: 32239 - DNA, 20 bp, synthetic construct
  misc_feature 1..20: note = Description of Artificial Sequence: Synthetic oligonucleotide
  misc_feature 1..20: note = Target: SCN10A; (+) strand; PAM type: NRG; PAM sequence: CAG
  source 1..20: mol_type = other DNA
cgtgcatgtgccagcggggc

SEQ ID NO: 32240 - DNA, 20 bp, synthetic construct
  misc_feature 1..20: note = Description of Artificial Sequence: Synthetic oligonucleotide
  misc_feature 1..20: note = Target: SCN10A; (+) strand; PAM type: NRG; PAM sequence: TGG
  source 1..20: mol_type = other DNA
gccagcggggccagtcttca

SEQ ID NO: 32241 - DNA, 20 bp, synthetic construct
  misc_feature 1..20: note = Description of Artificial Sequence: Synthetic oligonucleotide
  misc_feature 1..20: note = Target: SCN10A; (+) strand; PAM type: NRG; PAM sequence: GGG
  source 1..20: mol_type = other DNA
ccagcggggccagtcttcat

SEQ ID NO: 32242 - DNA, 20 bp, synthetic construct
  misc_feature 1..20: note = Description of Artificial Sequence: Synthetic oligonucleotide
  misc_feature 1..20: note = Target: SCN10A; (+) strand; PAM type: NRG; PAM sequence: GGG
  source 1..20: mol_type = other DNA
cagcggggccagtcttcatg

SEQ ID NO: 32243 - DNA, 20 bp, synthetic construct
  misc_feature 1..20: note = Description of Artificial Sequence: Synthetic oligonucleotide
  misc_feature 1..20: note = Target: SCN10A; (+) strand; PAM type: NRG; PAM sequence: CGG
  source 1..20: mol_type = other DNA
gggccagtcttcatggggcg

SEQ ID NO: 32244 - DNA, 20 bp, synthetic construct
  misc_feature 1..20: note = Description of Artificial Sequence: Synthetic oligonucleotide
  misc_feature 1..20: note = Target: SCN10A; (+) strand; PAM type: NRG; PAM sequence: GAG
  source 1..20: mol_type = other DNA
gccagtcttcatggggcgcg

SEQ ID NO: 32245 - DNA, 20 bp, synthetic construct
  misc_feature 1..20: note = Description of Artificial Sequence: Synthetic oligonucleotide
  misc_feature 1..20: note = Target: SCN10A; (+) strand; PAM type: NRG; PAM sequence: CGG
  source 1..20: mol_type = other DNA
ggggcgcggagatatttttt

SEQ ID NO: 32246 - DNA, 20 bp, synthetic construct
  misc_feature 1..20: note = Description of Artificial Sequence: Synthetic oligonucleotide
  misc_feature 1..20: note = Target: SCN10A; (+) strand; PAM type: NRG; PAM sequence: CGG
  source 1..20: mol_type = other DNA
agatattttttcggttgtta

SEQ ID NO: 32247 - DNA, 20 bp, synthetic construct
  misc_feature 1..20: note = Description of Artificial Sequence: Synthetic oligonucleotide
  misc_feature 1..20: note = Target: SCN10A; (+) strand; PAM type: NRG; PAM sequence: TAG
  source 1..20: mol_type = other DNA
tattttttcggttgttacgg

SEQ ID NO: 32248 - DNA, 20 bp, synthetic construct
  misc_feature 1..20: note = Description of Artificial Sequence: Synthetic oligonucleotide
  misc_feature 1..20: note = Target: SCN10A; (+) strand; PAM type: NRG; PAM sequence: TAG
  source 1..20: mol_type = other DNA
ttgttacggtagttttcccc

SEQ ID NO: 32249 - DNA, 20 bp, synthetic construct
  misc_feature 1..20: note = Description of Artificial Sequence: Synthetic oligonucleotide
  misc_feature 1..20: note = Target: SCN10A; (+) strand; PAM type: NRG; PAM sequence: AGG
  source 1..20: mol_type = other DNA
tgttacggtagttttcccct

SEQ ID NO: 32250 - DNA, 20 bp, synthetic construct
  misc_feature 1..20: note = Description of Artificial Sequence: Synthetic oligonucleotide
  misc_feature 1..20: note = Target: SCN10A; (+) strand; PAM type: NRG; PAM sequence: GAG
  source 1..20: mol_type = other DNA
ttacggtagttttcccctag

SEQ ID NO: 32251 - DNA, 20 bp, synthetic construct
  misc_feature 1..20: note = Description of Artificial Sequence: Synthetic oligonucleotide
  misc_feature 1..20: note = Target: SCN10A; (+) strand; PAM type: NRG; PAM sequence: CAG
  source 1..20: mol_type = other DNA
cctaggagctgcttgccaac

SEQ ID NO: 32252 - DNA, 20 bp, synthetic construct
  misc_feature 1..20: note = Description of Artificial Sequence: Synthetic oligonucleotide
  misc_feature 1..20: note = Target: SCN10A; (+) strand; PAM type: NRG; PAM sequence: GAG
  source 1..20: mol_type = other DNA
taggagctgcttgccaacca

SEQ ID NO: 32253 - DNA, 20 bp, synthetic construct
  misc_feature 1..20: note = Description of Artificial Sequence: Synthetic oligonucleotide
  misc_feature 1..20: note = Target: SCN10A; (+) strand; PAM type: NRG; PAM sequence: AAG
  source 1..20: mol_type = other DNA
gctgcttgccaaccagagca

SEQ ID NO: 32254 - DNA, 20 bp, synthetic construct
  misc_feature 1..20: note = Description of Artificial Sequence: Synthetic oligonucleotide
  misc_feature 1..20: note = Target: SCN10A; (+) strand; PAM type: NRG; PAM sequence: AAG
  source 1..20: mol_type = other DNA
tgccaaccagagcaaagaca

SEQ ID NO: 32255 - DNA, 20 bp, synthetic construct
  misc_feature 1..20: note = Description of Artificial Sequence: Synthetic oligonucleotide
  misc_feature 1..20: note = Target: SCN10A; (+) strand; PAM type: NRG; PAM sequence: TGG
  source 1..20: mol_type = other DNA
agcaaagacaaagacaatga

SEQ ID NO: 32256 - DNA, 20 bp, synthetic construct
  misc_feature 1..20: note = Description of Artificial Sequence: Synthetic oligonucleotide
  misc_feature 1..20: note = Target: SCN10A; (+) strand; PAM type: NRG; PAM sequence: CAG
  source 1..20: mol_type = other DNA
aagacaaagacaatgatggc

SEQ ID NO: 32257 - DNA, 20 bp, synthetic construct
  misc_feature 1..20: note = Description of Artificial Sequence: Synthetic oligonucleotide
  misc_feature 1..20: note = Target: SCN10A; (+) strand; PAM type: NRG; PAM sequence: AGG
  source 1..20: mol_type = other DNA
agacaaagacaatgatggcc

SEQ ID NO: 32258 - DNA, 20 bp, synthetic construct
  misc_feature 1..20: note = Description of Artificial Sequence: Synthetic oligonucleotide
  misc_feature 1..20: note = Target: SCN10A; (+) strand; PAM type: NRG; PAM sequence: TGG
  source 1..20: mol_type = other DNA
gacaatgatggccaggatga

SEQ ID NO: 32259 - DNA, 20 bp, synthetic construct
  misc_feature 1..20: note = Description of Artificial Sequence: Synthetic oligonucleotide
  misc_feature 1..20: note = Target: SCN10A; (+) strand; PAM type: NRG; PAM sequence: GAG
  source 1..20: mol_type = other DNA
atgatggccaggatgatggt

SEQ ID NO: 32260 - DNA, 20 bp, synthetic construct
  misc_feature 1..20: note = Description of Artificial Sequence: Synthetic oligonucleotide
  misc_feature 1..20: note = Target: SCN10A; (+) strand; PAM type: NRG; PAM sequence: AGG
  source 1..20: mol_type = other DNA
tgatggccaggatgatggtg

SEQ ID NO: 32261 - DNA, 20 bp, synthetic construct
  misc_feature 1..20: note = Description of Artificial Sequence: Synthetic oligonucleotide
  misc_feature 1..20: note = Target: SCN10A; (+) strand; PAM type: NRG; PAM sequence: CAG
  source 1..20: mol_type = other DNA
aggatgatggtgaggttccc

SEQ ID NO: 32262 - DNA, 20 bp, synthetic construct
  misc_feature 1..20: note = Description of Artificial Sequence: Synthetic oligonucleotide
  misc_feature 1..20: note = Target: SCN10A; (+) strand; PAM type: NRG; PAM sequence: GAG
  source 1..20: mol_type = other DNA
ggttccccagtgcccccact

SEQ ID NO: 32263 - DNA, 20 bp, synthetic construct
  misc_feature 1..20: note = Description of Artificial Sequence: Synthetic oligonucleotide
  misc_feature 1..20: note = Target: SCN10A; (+) strand; PAM type: NRG; PAM sequence: GAG
  source 1..20: mol_type = other DNA
gagtttccgatgatcttgat

SEQ ID NO: 32264 - DNA, 20 bp, synthetic construct
  misc_feature 1..20: note = Description of Artificial Sequence: Synthetic oligonucleotide
  misc_feature 1..20: note = Target: SCN10A; (+) strand; PAM type: NRG; PAM sequence: AAG
  source 1..20: mol_type = other DNA
tgatcttgatgagtgtgttt

SEQ ID NO: 32265 - DNA, 20 bp, synthetic construct
  misc_feature 1..20: note = Description of Artificial Sequence: Synthetic oligonucleotide
  misc_feature 1..20: note = Target: SCN10A; (+) strand; PAM type: NRG; PAM sequence: AGG
  source 1..20: mol_type = other DNA
gatcttgatgagtgtgttta

SEQ ID NO: 32266 - DNA, 20 bp, synthetic construct
  misc_feature 1..20: note = Description of Artificial Sequence: Synthetic oligonucleotide
  misc_feature 1..20: note = Target: SCN10A; (+) strand; PAM type: NRG; PAM sequence: TGG
  source 1..20: mol_type = other DNA
cttgatgagtgtgtttaagg

SEQ ID NO: 32267 - DNA, 20 bp, synthetic construct
  misc_feature 1..20: note = Description of Artificial Sequence: Synthetic oligonucleotide
  misc_feature 1..20: note = Target: SCN10A; (+) strand; PAM type: NRG; PAM sequence: GGG
  source 1..20: mol_type = other DNA
ttgatgagtgtgtttaaggt

SEQ ID NO: 32268 - DNA, 20 bp, synthetic construct
  misc_feature 1..20: note = Description of Artificial Sequence: Synthetic oligonucleotide
  misc_feature 1..20: note = Target: SCN10A; (+) strand; PAM type: NRG; PAM sequence: CAG
  source 1..20: mol_type = other DNA
tgagtgtgtttaaggtgggc

SEQ ID NO: 32269 - DNA, 20 bp, synthetic construct
  misc_feature 1..20: note = Description of Artificial Sequence: Synthetic oligonucleotide
  misc_feature 1..20: note = Target: SCN10A; (+) strand; PAM type: NRG; PAM sequence: AGG
  source 1..20: mol_type = other DNA
gagtgtgtttaaggtgggcc

SEQ ID NO: 32270 - DNA, 20 bp, synthetic construct
  misc_feature 1..20: note = Description of Artificial Sequence: Synthetic oligonucleotide
  misc_feature 1..20: note = Target: SCN10A; (+) strand; PAM type: NRG; PAM sequence: TGG
  source 1..20: mol_type = other DNA
gtttaaggtgggccaggatt

SEQ ID NO: 32271 - DNA, 20 bp, synthetic construct
  misc_feature 1..20: note = Description of Artificial Sequence: Synthetic oligonucleotide
  misc_feature 1..20: note = Target: SCN10A; (+) strand; PAM type: NRG; PAM sequence: CAG
  source 1..20: mol_type = other DNA
aaggtgggccaggatttggc

SEQ ID NO: 32272 - DNA, 20 bp, synthetic construct
  misc_feature 1..20: note = Description of Artificial Sequence: Synthetic oligonucleotide
  misc_feature 1..20: note = Target: SCN10A; (+) strand; PAM type: NRG; PAM sequence: CAG
  source 1..20: mol_type = other DNA
ttggccagcttgaatacgcg

SEQ ID NO: 32273 - DNA, 20 bp, synthetic construct
  misc_feature 1..20: note = Description of Artificial Sequence: Synthetic oligonucleotide
  misc_feature 1..20: note = Target: SCN10A; (+) strand; PAM type: NRG; PAM sequence: CAG
  source 1..20: mol_type = other DNA
agcttgaatacgcgcagctg

SEQ ID NO: 32274 - DNA, 20 bp, synthetic construct
  misc_feature 1..20: note = Description of Artificial Sequence: Synthetic oligonucleotide
  misc_feature 1..20: note = Target: SCN10A; (+) strand; PAM type: NRG; PAM sequence: GAG
  source 1..20: mol_type = other DNA
cttgaatacgcgcagctgca

SEQ ID NO: 32275 - DNA, 20 bp, synthetic construct
  misc_feature 1..20: note = Description of Artificial Sequence: Synthetic oligonucleotide
  misc_feature 1..20: note = Target: SCN10A; (+) strand; PAM type: NRG; PAM sequence: CAG
  source 1..20: mol_type = other DNA
tacgcgcagctgcagagaaa

SEQ ID NO: 32276 - DNA, 20 bp, synthetic construct
  misc_feature 1..20: note = Description of Artificial Sequence: Synthetic oligonucleotide
  misc_feature 1..20: note = Target: SCN10A; (+) strand; PAM type: NRG; PAM sequence: GAG
  source 1..20: mol_type = other DNA
cgcgcagctgcagagaaaca

SEQ ID NO: 32277 - DNA, 20 bp, synthetic construct
  misc_feature 1..20: note = Description of Artificial Sequence: Synthetic oligonucleotide
  misc_feature 1..20: note = Target: SCN10A; (+) strand; PAM type: NRG; PAM sequence: CAG
  source 1..20: mol_type = other DNA
tgcagagaaacagagaccgt

SEQ ID NO: 32278 - DNA, 20 bp, synthetic construct
  misc_feature 1..20: note = Description of Artificial Sequence: Synthetic oligonucleotide
  misc_feature 1..20: note = Target: SCN10A; (+) strand; PAM type: NRG; PAM sequence: AGG
  source 1..20: mol_type = other DNA
gcagagaaacagagaccgtc

SEQ ID NO: 32279 - DNA, 20 bp, synthetic construct
  misc_feature 1..20: note = Description of Artificial Sequence: Synthetic oligonucleotide
  misc_feature 1..20: note = Target: SCN10A; (+) strand; PAM type: NRG; PAM sequence: TGG
  source 1..20: mol_type = other DNA
aaacagagaccgtcaggttt

SEQ ID NO: 32280 - DNA, 20 bp, synthetic construct
  misc_feature 1..20: note = Description of Artificial Sequence: Synthetic oligonucleotide
  misc_feature 1..20: note = Target: SCN10A; (+) strand; PAM type: NRG; PAM sequence: TAG
  source 1..20: mol_type = other DNA
cagagaccgtcaggttttgg

SEQ ID NO: 32281 - DNA, 20 bp, synthetic construct
  misc_feature 1..20: note = Description of Artificial Sequence: Synthetic oligonucleotide
  misc_feature 1..20: note = Target: SCN10A; (+) strand; PAM type: NRG; PAM sequence: AAG
  source 1..20: mol_type = other DNA
tgctcattacctttcatcta

SEQ ID NO: 32282 - DNA, 20 bp, synthetic construct
  misc_feature 1..20: note = Description of Artificial Sequence: Synthetic oligonucleotide
  misc_feature 1..20: note = Target: SCN10A; (+) strand; PAM type: NRG; PAM sequence: TGG
  source 1..20: mol_type = other DNA
ctttcatctaaagttttgcc

SEQ ID NO: 32283 - DNA, 20 bp, synthetic construct
  misc_feature 1..20: note = Description of Artificial Sequence: Synthetic oligonucleotide
  misc_feature 1..20: note = Target: SCN10A; (+) strand; PAM type: NRG; PAM sequence: AAG
  source 1..20: mol_type = other DNA
aaagttttgcctggaaacca

SEQ ID NO: 32284 - DNA, 20 bp, synthetic construct
  misc_feature 1..20: note = Description of Artificial Sequence: Synthetic oligonucleotide
  misc_feature 1..20: note = Target: SCN10A; (+) strand; PAM type: NRG; PAM sequence: TGG
  source 1..20: mol_type = other DNA
ttgcctggaaaccaaagatc

SEQ ID NO: 32285 - DNA, 20 bp, synthetic construct
  misc_feature 1..20: note = Description of Artificial Sequence: Synthetic oligonucleotide
  misc_feature 1..20: note = Target: SCN10A; (+) strand; PAM type: NRG; PAM sequence: GGG
  source 1..20: mol_type = other DNA
tgcctggaaaccaaagatct

SEQ ID NO: 32286 - DNA, 20 bp, synthetic construct
  misc_feature 1..20: note = Description of Artificial Sequence: Synthetic oligonucleotide
  misc_feature 1..20: note = Target: SCN10A; (+) strand; PAM type: NRG; PAM sequence: AAG
  source 1..20: mol_type = other DNA
caaagatctgggaaaaacac

SEQ ID NO: 32287 - DNA, 20 bp, synthetic construct
  misc_feature 1..20: note = Description of Artificial Sequence: Synthetic oligonucleotide
  misc_feature 1..20: note = Target: SCN10A; (+) strand; PAM type: NRG; PAM sequence: AGG
  source 1..20: mol_type = other DNA
aaagatctgggaaaaacaca

SEQ ID NO: 32288 - DNA, 20 bp, synthetic construct
  misc_feature 1..20: note = Description of Artificial Sequence: Synthetic oligonucleotide
  misc_feature 1..20: note = Target: SCN10A; (+) strand; PAM type: NRG; PAM sequence: CAG
  source 1..20: mol_type = other DNA
ggcctctcatcccattaaac

SEQ ID NO: 32289 - DNA, 20 bp, synthetic construct
  misc_feature 1..20: note = Description of Artificial Sequence: Synthetic oligonucleotide
  misc_feature 1..20: note = Target: SCN10A; (+) strand; PAM type: NRG; PAM sequence: AGG
  source 1..20: mol_type = other DNA
gcctctcatcccattaaacc

SEQ ID NO: 32290 - DNA, 20 bp, synthetic construct
  misc_feature 1..20: note = Description of Artificial Sequence: Synthetic oligonucleotide
  misc_feature 1..20: note = Target: SCN10A; (+) strand; PAM type: NRG; PAM sequence: GGG
  source 1..20: mol_type = other DNA
cctctcatcccattaaacca

SEQ ID NO: 32291 - DNA, 20 bp, synthetic construct
  misc_feature 1..20: note = Description of Artificial Sequence: Synthetic oligonucleotide
  misc_feature 1..20: note = Target: SCN10A; (+) strand; PAM type: NRG; PAM sequence: TGG
  source 1..20: mol_type = other DNA
cattaaaccagggcgttttc

SEQ ID NO: 32292 - DNA, 20 bp, synthetic construct
  misc_feature 1..20: note = Description of Artificial Sequence: Synthetic oligonucleotide
  misc_feature 1..20: note = Target: SCN10A; (+) strand; PAM type: NRG; PAM sequence: TGG
  source 1..20: mol_type = other DNA
cgttttctggacactgcttt

SEQ ID NO: 32293 - DNA, 20 bp, synthetic construct
  misc_feature 1..20: note = Description of Artificial Sequence: Synthetic oligonucleotide
  misc_feature 1..20: note = Target: SCN10A; (+) strand; PAM type: NRG; PAM sequence: GAG
  source 1..20: mol_type = other DNA
ttttctggacactgcttttg

SEQ ID NO: 32294 - DNA, 20 bp, synthetic construct
  misc_feature 1..20: note = Description of Artificial Sequence: Synthetic oligonucleotide
  misc_feature 1..20: note = Target: SCN10A; (+) strand; PAM type: NRG; PAM sequence: TGG
  source 1..20: mol_type = other DNA
aaaatatgatctgccttcta

SEQ ID NO: 32295 - DNA, 20 bp, synthetic construct
  misc_feature 1..20: note = Description of Artificial Sequence: Synthetic oligonucleotide
  misc_feature 1..20: note = Target: SCN10A; (+) strand; PAM type: NRG; PAM sequence: AAG
  source 1..20: mol_type = other DNA
atctgccttctatggttcat

SEQ ID NO: 32296 - DNA, 20 bp, synthetic construct
  misc_feature 1..20: note = Description of Artificial Sequence: Synthetic oligonucleotide
  misc_feature 1..20: note = Target: SCN10A; (+) strand; PAM type: NRG; PAM sequence: TGG
  source 1..20: mol_type = other DNA
tcaatgtgcttcattgactg

SEQ ID NO: 32297 - DNA, 20 bp, synthetic construct
  misc_feature 1..20: note = Description of Artificial Sequence: Synthetic oligonucleotide
  misc_feature 1..20: note = Target: SCN10A; (+) strand; PAM type: NRG; PAM sequence: GAG
  source 1..20: mol_type = other DNA
gtgcttcattgactgtggct

SEQ ID NO: 32298 - DNA, 20 bp, synthetic construct
  misc_feature 1..20: note = Description of Artificial Sequence: Synthetic oligonucleotide
  misc_feature 1..20: note = Target: SCN10A; (+) strand; PAM type: NRG; PAM sequence: CAG
  source 1..20: mol_type = other DNA
ttcattgactgtggctgagt

SEQ ID NO: 32299 - DNA, 20 bp, synthetic construct
  misc_feature 1..20: note = Description of Artificial Sequence: Synthetic oligonucleotide
  misc_feature 1..20: note = Target: SCN10A; (+) strand; PAM type: NRG; PAM sequence: AGG
  source 1..20: mol_type = other DNA
tcattgactgtggctgagtc

SEQ ID NO: 32300 - DNA, 20 bp, synthetic construct
  misc_feature 1..20: note = Description of Artificial Sequence: Synthetic oligonucleotide
  misc_feature 1..20: note = Target: SCN10A; (+) strand; PAM type: NRG; PAM sequence: GGG
  source 1..20: mol_type = other DNA
cattgactgtggctgagtca

SEQ ID NO: 32301 - DNA, 20 bp, synthetic construct
  misc_feature 1..20: note = Description of Artificial Sequence: Synthetic oligonucleotide
  misc_feature 1..20: note = Target: SCN10A; (+) strand; PAM type: NRG; PAM sequence: TGG
  source 1..20: mol_type = other DNA
gctgagtcagggtcttctac

SEQ ID NO: 32302 - DNA, 20 bp, synthetic construct
  misc_feature 1..20: note = Description of Artificial Sequence: Synthetic oligonucleotide
  misc_feature 1..20: note = Target: SCN10A; (+) strand; PAM type: NRG; PAM sequence: GGG
  source 1..20: mol_type = other DNA
ctgagtcagggtcttctact

SEQ ID NO: 32303 - DNA, 20 bp, synthetic construct
  misc_feature 1..20: note = Description of Artificial Sequence: Synthetic oligonucleotide
  misc_feature 1..20: note = Target: SCN10A; (+) strand; PAM type: NRG; PAM sequence: GGG
  source 1..20: mol_type = other DNA
tgagtcagggtcttctactg

SEQ ID NO: 32304 - DNA, 20 bp, synthetic construct
  misc_feature 1..20: note = Description of Artificial Sequence: Synthetic oligonucleotide
  misc_feature 1..20: note = Target: SCN10A; (+) strand; PAM type: NRG; PAM sequence: TGG
  source 1..20: mol_type = other DNA
gtcagggtcttctactgggg

SEQ ID NO: 32305 - DNA, 20 bp, synthetic construct
  misc_feature 1..20: note = Description of Artificial Sequence: Synthetic oligonucleotide
  misc_feature 1..20: note = Target: SCN10A; (+) strand; PAM type: NRG; PAM sequence: TGG
  source 1..20: mol_type = other DNA
agggtcttctactggggtgg

SEQ ID NO: 32306 - DNA, 20 bp, synthetic construct
  misc_feature 1..20: note = Description of Artificial Sequence: Synthetic oligonucleotide
  misc_feature 1..20: note = Target: SCN10A; (+) strand; PAM type: NRG; PAM sequence: TAG
  source 1..20: mol_type = other DNA
gcgatctgtactctgttcta

SEQ ID NO: 32307 - DNA, 20 bp, synthetic construct
  misc_feature 1..20: note = Description of Artificial Sequence: Synthetic oligonucleotide
  misc_feature 1..20: note = Target: SCN10A; (+) strand; PAM type: NRG; PAM sequence: CAG
  source 1..20: mol_type = other DNA
tgtactctgttctatagcca

SEQ ID NO: 32308 - DNA, 20 bp, synthetic construct
  misc_feature 1..20: note = Description of Artificial Sequence: Synthetic oligonucleotide
  misc_feature 1..20: note = Target: SCN10A; (+) strand; PAM type: NRG; PAM sequence: AGG
  source 1..20: mol_type = other DNA
gtactctgttctatagccac

SEQ ID NO: 32309 - DNA, 20 bp, synthetic construct
  misc_feature 1..20: note = Description of Artificial Sequence: Synthetic oligonucleotide
  misc_feature 1..20: note = Target: SCN10A; (+) strand; PAM type: NRG; PAM sequence: TGG
  source 1..20: mol_type = other DNA
ggcctgatccctcctgaata

SEQ ID NO: 32310 - DNA, 20 bp, synthetic construct
  misc_feature 1..20: note = Description of Artificial Sequence: Synthetic oligonucleotide
  misc_feature 1..20: note = Target: SCN10A; (+) strand; PAM type: NRG; PAM sequence: GGG
  source 1..20: mol_type = other DNA
gcctgatccctcctgaatat

SEQ ID NO: 32311 - DNA, 20 bp, synthetic construct
  misc_feature 1..20: note = Description of Artificial Sequence: Synthetic oligonucleotide
  misc_feature 1..20: note = Target: SCN10A; (+) strand; PAM type: NRG; PAM sequence: TGG
  source 1..20: mol_type = other DNA
ctgaatatgggcctcttctg

SEQ ID NO: 32312 - DNA, 20 bp, synthetic construct
  misc_feature 1..20: note = Description of Artificial Sequence: Synthetic oligonucleotide
  misc_feature 1..20: note = Target: SCN10A; (+) strand; PAM type: NRG; PAM sequence: GAG
  source 1..20: mol_type = other DNA
gaatatgggcctcttctgtg

SEQ ID NO: 32313 - DNA, 20 bp, synthetic construct
  misc_feature 1..20: note = Description of Artificial Sequence: Synthetic oligonucleotide
  misc_feature 1..20: note = Target: SCN10A; (+) strand; PAM type: NRG; PAM sequence: AGG
  source 1..20: mol_type = other DNA
aatatgggcctcttctgtgg

SEQ ID NO: 32314 - DNA, 20 bp, synthetic construct
  misc_feature 1..20: note = Description of Artificial Sequence: Synthetic oligonucleotide
  misc_feature 1..20: note = Target: SCN10A; (+) strand; PAM type: NRG; PAM sequence: TGG
  source 1..20: mol_type = other DNA
atgggcctcttctgtggagg

SEQ ID NO: 32315 - DNA, 20 bp, synthetic construct
  misc_feature 1..20: note = Description of Artificial Sequence: Synthetic oligonucleotide
  misc_feature 1..20: note = Target: SCN10A; (+) strand; PAM type: NRG; PAM sequence: GGG
  source 1..20: mol_type = other DNA
tgggcctcttctgtggaggt

SEQ ID NO: 32316 - DNA, 20 bp, synthetic construct
  misc_feature 1..20: note = Description of Artificial Sequence: Synthetic oligonucleotide
  misc_feature 1..20: note = Target: SCN10A; (+) strand; PAM type: NRG; PAM sequence: GGG
  source 1..20: mol_type = other DNA
gggcctcttctgtggaggtg

SEQ ID NO: 32317 - DNA, 20 bp, synthetic construct
  misc_feature 1..20: note = Description of Artificial Sequence: Synthetic oligonucleotide
  misc_feature 1..20: note = Target: SCN10A; (+) strand; PAM type: NRG; PAM sequence: TGG
  source 1..20: mol_type = other DNA
cctcttctgtggaggtgggg

SEQ ID NO: 32318 - DNA, 20 bp, synthetic construct
  misc_feature 1..20: note = Description of Artificial Sequence: Synthetic oligonucleotide
  misc_feature 1..20: note = Target: SCN10A; (+) strand; PAM type: NRG; PAM sequence: GGG
  source 1..20: mol_type = other DNA
ctcttctgtggaggtggggt

SEQ ID NO: 32319 - DNA, 20 bp, synthetic construct
  misc_feature 1..20: note = Description of Artificial Sequence: Synthetic oligonucleotide
  misc_feature 1..20: note = Target: SCN10A; (+) strand; PAM type: NRG; PAM sequence: TGG
  source 1..20: mol_type = other DNA
tggaggtggggtgggtgtga

SEQ ID NO: 32320 - DNA, 20 bp, synthetic construct
  misc_feature 1..20: note = Description of Artificial Sequence: Synthetic oligonucleotide
  misc_feature 1..20: note = Target: SCN10A; (+) strand; PAM type: NRG; PAM sequence: GGG
  source 1..20: mol_type = other DNA
ggaggtggggtgggtgtgat

SEQ ID NO: 32321 - DNA, 20 bp, synthetic construct
  misc_feature 1..20: note = Description of Artificial Sequence: Synthetic oligonucleotide
  misc_feature 1..20: note = Target: SCN10A; (+) strand; PAM type: NRG; PAM sequence: GGG
  source 1..20: mol_type = other DNA
gaggtggggtgggtgtgatg

SEQ ID NO: 32322 - DNA, 20 bp, synthetic construct
  misc_feature 1..20: note = Description of Artificial Sequence: Synthetic oligonucleotide
  misc_feature 1..20: note = Target: SCN10A; (+) strand; PAM type: NRG; PAM sequence: AAG
  source 1..20: mol_type = other DNA
gtgtgatggggctcacaaat

SEQ ID NO: 32323 - DNA, 20 bp, synthetic construct
  misc_feature 1..20: note = Description of Artificial Sequence: Synthetic oligonucleotide
  misc_feature 1..20: note = Target: SCN10A; (+) strand; PAM type: NRG; PAM sequence: GAG
  source 1..20: mol_type = other DNA
gatggggctcacaaataagt

SEQ ID NO: 32324 - DNA, 20 bp, synthetic construct
  misc_feature 1..20: note = Description of Artificial Sequence: Synthetic oligonucleotide
  misc_feature 1..20: note = Target: SCN10A; (+) strand; PAM type: NRG; PAM sequence: AAG
  source 1..20: mol_type = other DNA
gctcacaaataagtgagaac

SEQ ID NO: 32325 - DNA, 20 bp, synthetic construct
  misc_feature 1..20: note = Description of Artificial Sequence: Synthetic oligonucleotide
  misc_feature 1..20: note = Target: SCN10A; (+) strand; PAM type: NRG; PAM sequence: AAG
  source 1..20: mol_type = other DNA
aacaagcttatttatgactg

SEQ ID NO: 32326 - DNA, 20 bp, synthetic construct
  misc_feature 1..20: note = Description of Artificial Sequence: Synthetic oligonucleotide
  misc_feature 1..20: note = Target: SCN10A; (+) strand; PAM type: NRG; PAM sequence: GAG
  source 1..20: mol_type = other DNA
caagcttatttatgactgaa

SEQ ID NO: 32327 - DNA, 20 bp, synthetic construct
  misc_feature 1..20: note = Description of Artificial Sequence: Synthetic oligonucleotide
  misc_feature 1..20: note = Target: SCN10A; (+) strand; PAM type: NRG; PAM sequence: GAG
  source 1..20: mol_type = other DNA
agcttatttatgactgaaga

SEQ ID NO: 32328 - DNA, 20 bp, synthetic construct
  misc_feature 1..20: note = Description of Artificial Sequence: Synthetic oligonucleotide
  misc_feature 1..20: note = Target: SCN10A; (+) strand; PAM type: NRG; PAM sequence: CAG
  source 1..20: mol_type = other DNA
atttatgactgaagagagac

SEQ ID NO: 32329 - DNA, 20 bp, synthetic construct
  misc_feature 1..20: note = Description of Artificial Sequence: Synthetic oligonucleotide
  misc_feature 1..20: note = Target: SCN10A; (+) strand; PAM type: NRG; PAM sequence: CGG
  source 1..20: mol_type = other DNA
gaagagagaccagcctcctt

SEQ ID NO: 32330 - DNA, 20 bp, synthetic construct
  misc_feature 1..20: note = Description of Artificial Sequence: Synthetic oligonucleotide
  misc_feature 1..20: note = Target: SCN10A; (+) strand; PAM type: NRG; PAM sequence: GGG
  source 1..20: mol_type = other DNA
aagagagaccagcctccttc

SEQ ID NO: 32331 - DNA, 20 bp, synthetic construct
  misc_feature 1..20: note = Description of Artificial Sequence: Synthetic oligonucleotide
  misc_feature 1..20: note = Target: SCN10A; (+) strand; PAM type: NRG; PAM sequence: TAG
  source 1..20: mol_type = other DNA
agagaccagcctccttcggg

SEQ ID NO: 32332 - DNA, 20 bp, synthetic construct
  misc_feature 1..20: note = Description of Artificial Sequence: Synthetic oligonucleotide
  misc_feature 1..20: note = Target: SCN10A; (+) strand; PAM type: NRG; PAM sequence: AGG
  source 1..20: mol_type = other DNA
gagaccagcctccttcgggt

SEQ ID NO: 32333 - DNA, 20 bp, synthetic construct
  misc_feature 1..20: note = Description of Artificial Sequence: Synthetic oligonucleotide
  misc_feature 1..20: note = Target: SCN10A; (+) strand; PAM type: NRG; PAM sequence: GGG
  source 1..20: mol_type = other DNA
agaccagcctccttcgggta

SEQ ID NO: 32334 - DNA, 20 bp, synthetic construct
  misc_feature 1..20: note = Description of Artificial Sequence: Synthetic oligonucleotide
  misc_feature 1..20: note = Target: SCN10A; (+) strand; PAM type: NRG; PAM sequence: GGG
  source 1..20: mol_type = other DNA
gaccagcctccttcgggtag

SEQ ID NO: 32335 - DNA, 20 bp, synthetic construct
  misc_feature 1..20: note = Description of Artificial Sequence: Synthetic oligonucleotide
  misc_feature 1..20: note = Target: SCN10A; (+) strand; PAM type: NRG; PAM sequence: TAG
  source 1..20: mol_type = other DNA
ggatgacccactgcattcga

SEQ ID NO: 32336 - DNA, 20 bp, synthetic construct
  misc_feature 1..20: note = Description of Artificial Sequence: Synthetic oligonucleotide
  misc_feature 1..20: note = Target: SCN10A; (+) strand; PAM type: NRG; PAM sequence: AGG
  source 1..20: mol_type = other DNA
gatgacccactgcattcgat

SEQ ID NO: 32337 - DNA, 20 bp, synthetic construct
  misc_feature 1..20: note = Description of Artificial Sequence: Synthetic oligonucleotide
  misc_feature 1..20: note = Target: SCN10A; (+) strand; PAM type: NRG; PAM sequence: TGG
  source 1..20: mol_type = other DNA
ccactgcattcgataggtat

SEQ ID NO: 32338 - DNA, 20 bp, synthetic construct
  misc_feature 1..20: note = Description of Artificial Sequence: Synthetic oligonucleotide
  misc_feature 1..20: note = Target: SCN10A; (+) strand; PAM type: NRG; PAM sequence: TAG
  source 1..20: mol_type = other DNA
ggtattggcaaaacatctct

SEQ ID NO: 32339 - DNA, 20 bp, synthetic construct
  misc_feature 1..20: note = Description of Artificial Sequence: Synthetic oligonucleotide
  misc_feature 1..20: note = Target: SCN10A; (+) strand; PAM type: NRG; PAM sequence: AGG
  source 1..20: mol_type = other DNA
gtattggcaaaacatctctt

SEQ ID NO: 32340 - DNA, 20 bp, synthetic construct
  misc_feature 1..20: note = Description of Artificial Sequence: Synthetic oligonucleotide
  misc_feature 1..20: note = Target: SCN10A; (+) strand; PAM type: NRG; PAM sequence: GGG
  source 1..20: mol_type = other DNA
tattggcaaaacatctctta

SEQ ID NO: 32341 - DNA, 20 bp, synthetic construct
  misc_feature 1..20: note = Description of Artificial Sequence: Synthetic oligonucleotide
  misc_feature 1..20: note = Target: SCN10A; (+) strand; PAM type: NRG; PAM sequence: TGG
  source 1..20: mol_type = other DNA
tcttagggcatttctcatct

SEQ ID NO: 32342 - DNA, 20 bp, synthetic construct
  misc_feature 1..20: note = Description of Artificial Sequence: Synthetic oligonucleotide
  misc_feature 1..20: note = Target: SCN10A; (+) strand; PAM type: NRG; PAM sequence: GGG
  source 1..20: mol_type = other DNA
cttagggcatttctcatctt

SEQ ID NO: 32343 - DNA, 20 bp, synthetic construct
  misc_feature 1..20: note = Description of Artificial Sequence: Synthetic oligonucleotide
  misc_feature 1..20: note = Target: SCN10A; (+) strand; PAM type: NRG; PAM sequence: GGG
  source 1..20: mol_type = other DNA
ttagggcatttctcatcttg

SEQ ID NO: 32344 - DNA, 20 bp, synthetic construct
  misc_feature 1..20: note = Description of Artificial Sequence: Synthetic oligonucleotide
  misc_feature 1..20: note = Target: SCN10A; (+) strand; PAM type: NRG; PAM sequence: CAG
  source 1..20: mol_type = other DNA
gggcatttctcatcttgggg

SEQ ID NO: 32345 - DNA, 20 bp, synthetic construct
  misc_feature 1..20: note = Description of Artificial Sequence: Synthetic oligonucleotide
  misc_feature 1..20: note = Target: SCN10A; (+) strand; PAM type: NRG; PAM sequence: TGG
  source 1..20: mol_type = other DNA
catttctcatcttggggcag

SEQ ID NO: 32346 - DNA, 20 bp, synthetic construct
  misc_feature 1..20: note = Description of Artificial Sequence: Synthetic oligonucleotide
  misc_feature 1..20: note = Target: SCN10A; (+) strand; PAM type: NRG; PAM sequence: CAG
  source 1..20: mol_type = other DNA
acaacatctgttgctcccac

SEQ ID NO: 32347 - DNA, 20 bp, synthetic construct
  misc_feature 1..20: note = Description of Artificial Sequence: Synthetic oligonucleotide
  misc_feature 1..20: note = Target: SCN10A; (+) strand; PAM type: NRG; PAM sequence: TGG
  source 1..20: mol_type = other DNA
tgcaaatgtccatgatttca

SEQ ID NO: 32348 - DNA, 20 bp, synthetic construct
  misc_feature 1..20: note = Description of Artificial Sequence: Synthetic oligonucleotide
  misc_feature 1..20: note = Target: SCN10A; (+) strand; PAM type: NRG; PAM sequence: CAG
  source 1..20: mol_type = other DNA
tgtccatgatttcatggact

SEQ ID NO: 32349 - DNA, 20 bp, synthetic construct
  misc_feature 1..20: note = Description of Artificial Sequence: Synthetic oligonucleotide
  misc_feature 1..20: note = Target: SCN10A; (+) strand; PAM type: NRG; PAM sequence: AAG
  source 1..20: mol_type = other DNA
ttcatggactcagcattcat

SEQ ID NO: 32350 - DNA, 20 bp, synthetic construct
  misc_feature 1..20: note = Description of Artificial Sequence: Synthetic oligonucleotide
  misc_feature 1..20: note = Target: SCN10A; (+) strand; PAM type: NRG; PAM sequence: CAG
  source 1..20: mol_type = other DNA
tgaccaacgaacctaccccc

SEQ ID NO: 32351 - DNA, 20 bp, synthetic construct
  misc_feature 1..20: note = Description of Artificial Sequence: Synthetic oligonucleotide
  misc_feature 1..20: note = Target: SCN10A; (+) strand; PAM type: NRG; PAM sequence: CAG
  source 1..20: mol_type = other DNA
gaacctaccccccagaactc

SEQ ID NO: 32352 - DNA, 20 bp, synthetic construct
  misc_feature 1..20: note = Description of Artificial Sequence: Synthetic oligonucleotide
  misc_feature 1..20: note = Target: SCN10A; (+) strand; PAM type: NRG; PAM sequence: CAG
  source 1..20: mol_type = other DNA
cccccagaactccagccgtg

SEQ ID NO: 32353 - DNA, 20 bp, synthetic construct
  misc_feature 1..20: note = Description of Artificial Sequence: Synthetic oligonucleotide
  misc_feature 1..20: note = Target: SCN10A; (+) strand; PAM type: NRG; PAM sequence: AGG
  source 1..20: mol_type = other DNA
ccccagaactccagccgtgc

SEQ ID NO: 32354 - DNA, 20 bp, synthetic construct
  misc_feature 1..20: note = Description of Artificial Sequence: Synthetic oligonucleotide
  misc_feature 1..20: note = Target: SCN10A; (+) strand; PAM type: NRG; PAM sequence: TGG
  source 1..20: mol_type = other DNA
actccagccgtgcaggtgca

SEQ ID NO: 32355 - DNA, 20 bp, synthetic construct
  misc_feature 1..20: note = Description of Artificial Sequence: Synthetic oligonucleotide
  misc_feature 1..20: note = Target: SCN10A; (+) strand; PAM type: NRG; PAM sequence: CAG
  source 1..20: mol_type = other DNA
ccagccgtgcaggtgcatgg

SEQ ID NO: 32356 - DNA, 20 bp, synthetic construct
  misc_feature 1..20: note = Description of Artificial Sequence: Synthetic oligonucleotide
  misc_feature 1..20: note = Target: SCN10A; (+) strand; PAM type: NRG; PAM sequence: TAG
  source 1..20: mol_type = other DNA
gcaggtgcatggcagtgtgc

SEQ ID NO: 32357 - DNA, 20 bp, synthetic construct
  misc_feature 1..20: note = Description of Artificial Sequence: Synthetic oligonucleotide
  misc_feature 1..20: note = Target: SCN10A; (+) strand; PAM type: NRG; PAM sequence: GAG
  source 1..20: mol_type = other DNA
atggcagtgtgctagcctat

SEQ ID NO: 32358 - DNA, 20 bp, synthetic construct
  misc_feature 1..20: note = Description of Artificial Sequence: Synthetic oligonucleotide
  misc_feature 1..20: note = Target: SCN10A; (+) strand; PAM type: NRG; PAM sequence: AGG
  source 1..20: mol_type = other DNA
tggcagtgtgctagcctatg

SEQ ID NO: 32359 - DNA, 20 bp, synthetic construct
  misc_feature 1..20: note = Description of Artificial Sequence: Synthetic oligonucleotide
  misc_feature 1..20: note = Target: SCN10A; (+) strand; PAM type: NRG; PAM sequence: AAG
  source 1..20: mol_type = other DNA
gctagcctatgaggtgtatg

SEQ ID NO: 32360 - DNA, 20 bp, synthetic construct
  misc_feature 1..20: note = Description of Artificial Sequence: Synthetic oligonucleotide
  misc_feature 1..20: note = Target: SCN10A; (+) strand; PAM type: NRG; PAM sequence: GAG
  source 1..20: mol_type = other DNA
tagcctatgaggtgtatgaa

SEQ ID NO: 32361 - DNA, 20 bp, synthetic construct
  misc_feature 1..20: note = Description of Artificial Sequence: Synthetic oligonucleotide
  misc_feature 1..20: note = Target: SCN10A; (+) strand; PAM type: NRG; PAM sequence: GAG
  source 1..20: mol_type = other DNA
gcctatgaggtgtatgaaga

SEQ ID NO: 32362 - DNA, 20 bp, synthetic construct
  misc_feature 1..20: note = Description of Artificial Sequence: Synthetic oligonucleotide
  misc_feature 1..20: note = Target: SCN10A; (+) strand; PAM type: NRG; PAM sequence: AGG
  source 1..20: mol_type = other DNA
cctatgaggtgtatgaagag

SEQ ID NO: 32363 - DNA, 20 bp, synthetic construct
  misc_feature 1..20: note = Description of Artificial Sequence: Synthetic oligonucleotide
  misc_feature 1..20: note = Target: SCN10A; (+) strand; PAM type: NRG; PAM sequence: TGG
  source 1..20: mol_type = other DNA
ggtgtatgaagagaggtgtg

SEQ ID NO: 32364 - DNA, 20 bp, synthetic construct
  misc_feature 1..20: note = Description of Artificial Sequence: Synthetic oligonucleotide
  misc_feature 1..20: note = Target: SCN10A; (+) strand; PAM type: NRG; PAM sequence: GGG
  source 1..20: mol_type = other DNA
gtgtatgaagagaggtgtgt

SEQ ID NO: 32365 - DNA, 20 bp, synthetic construct
  misc_feature 1..20: note = Description of Artificial Sequence: Synthetic oligonucleotide
  misc_feature 1..20: note = Target: SCN10A; (+) strand; PAM type: NRG; PAM sequence: TGG
  source 1..20: mol_type = other DNA
tgtgtgggctcttgctctca

SEQ ID NO: 32366 - DNA, 20 bp, synthetic construct
  misc_feature 1..20: note = Description of Artificial Sequence: Synthetic oligonucleotide
  misc_feature 1..20: note = Target: SCN10A; (+) strand; PAM type: NRG; PAM sequence: TGG
  source 1..20: mol_type = other DNA
tcttgctctcatggaaccaa

SEQ ID NO: 32367 - DNA, 20 bp, synthetic construct
  misc_feature 1..20: note = Description of Artificial Sequence: Synthetic oligonucleotide
  misc_feature 1..20: note = Target: SCN10A; (+) strand; PAM type: NRG; PAM sequence: TAG
  source 1..20: mol_type = other DNA
ctctcatggaaccaatggtt

SEQ ID NO: 32368 - DNA, 20 bp, synthetic construct
  misc_feature 1..20: note = Description of Artificial Sequence: Synthetic oligonucleotide
  misc_feature 1..20: note = Target: SCN10A; (+) strand; PAM type: NRG; PAM sequence: GAG
  source 1..20: mol_type = other DNA
gaaccaatggtttagttact

SEQ ID NO: 32369 - DNA, 20 bp, synthetic construct
  misc_feature 1..20: note = Description of Artificial Sequence: Synthetic oligonucleotide
  misc_feature 1..20: note = Target: SCN10A; (+) strand; PAM type: NRG; PAM sequence: AAG
  source 1..20: mol_type = other DNA
aatggtttagttactgagaa

SEQ ID NO: 32370 - DNA, 20 bp, synthetic construct
  misc_feature 1..20: note = Description of Artificial Sequence: Synthetic oligonucleotide
  misc_feature 1..20: note = Target: SCN10A; (+) strand; PAM type: NRG; PAM sequence: AAG
  source 1..20: mol_type = other DNA
ttagttactgagaaaagatg

SEQ ID NO: 32371 - DNA, 20 bp, synthetic construct
  misc_feature 1..20: note = Description of Artificial Sequence: Synthetic oligonucleotide
  misc_feature 1..20: note = Target: SCN10A; (+) strand; PAM type: NRG; PAM sequence: AAG
  source 1..20: mol_type = other DNA
gagaaaagatgaagtctcaa

SEQ ID NO: 32372 - DNA, 20 bp, synthetic construct
  misc_feature 1..20: note = Description of Artificial Sequence: Synthetic oligonucleotide
  misc_feature 1..20: note = Target: SCN10A; (+) strand; PAM type: NRG; PAM sequence: AAG
  source 1..20: mol_type = other DNA
actgtaaactcaaatatgct

SEQ ID NO: 32373 - DNA, 20 bp, synthetic construct
  misc_feature 1..20: note = Description of Artificial Sequence: Synthetic oligonucleotide
  misc_feature 1..20: note = Target: SCN10A; (+) strand; PAM type: NRG; PAM sequence: AAG
  source 1..20: mol_type = other DNA
tcaaatatgctaagtcccac

SEQ ID NO: 32374 - DNA, 20 bp, synthetic construct
  misc_feature 1..20: note = Description of Artificial Sequence: Synthetic oligonucleotide
  misc_feature 1..20: note = Target: SCN10A; (+) strand; PAM type: NRG; PAM sequence: CAG
  source 1..20: mol_type = other DNA
atatgctaagtcccacaaga

SEQ ID NO: 32375 - DNA, 20 bp, synthetic construct
  misc_feature 1..20: note = Description of Artificial Sequence: Synthetic oligonucleotide
  misc_feature 1..20: note = Target: SCN10A; (+) strand; PAM type: NRG; PAM sequence: AAG
  source 1..20: mol_type = other DNA
cacaagacagcaaaatcatc

SEQ ID NO: 32376 - DNA, 20 bp, synthetic construct
  misc_feature 1..20: note = Description of Artificial Sequence: Synthetic oligonucleotide
  misc_feature 1..20: note = Target: SCN10A; (+) strand; PAM type: NRG; PAM sequence: TGG
  source 1..20: mol_type = other DNA
tgttttaaaatatatttgta

SEQ ID NO: 32377 - DNA, 20 bp, synthetic construct
  misc_feature 1..20: note = Description of Artificial Sequence: Synthetic oligonucleotide
  misc_feature 1..20: note = Target: SCN10A; (+) strand; PAM type: NRG; PAM sequence: CAG
  source 1..20: mol_type = other DNA
tgtatggttctctaatttgt

SEQ ID NO: 32378 - DNA, 20 bp, synthetic construct
  misc_feature 1..20: note = Description of Artificial Sequence: Synthetic oligonucleotide
  misc_feature 1..20: note = Target: SCN10A; (+) strand; PAM type: NRG; PAM sequence: AGG
  source 1..20: mol_type = other DNA
gtatggttctctaatttgtc

SEQ ID NO: 32379 - DNA, 20 bp, synthetic construct
  misc_feature 1..20: note = Description of Artificial Sequence: Synthetic oligonucleotide
  misc_feature 1..20: note = Target: SCN10A; (+) strand; PAM type: NRG; PAM sequence: GAG
  source 1..20: mol_type = other DNA
tttgtcaggaaaaaaaatct

SEQ ID NO: 32380 - DNA, 20 bp, synthetic construct
  misc_feature 1..20: note = Description of Artificial Sequence: Synthetic oligonucleotide
  misc_feature 1..20: note = Target: SCN10A; (+) strand; PAM type: NRG; PAM sequence: CAG
  source 1..20: mol_type = other DNA
aaaaatctgagctcaactgt

SEQ ID NO: 32381 - DNA, 20 bp, synthetic construct
  misc_feature 1..20: note = Description of Artificial Sequence: Synthetic oligonucleotide
  misc_feature 1..20: note = Target: SCN10A; (+) strand; PAM type: NRG; PAM sequence: CAG
  source 1..20: mol_type = other DNA
gagctcaactgtcagtctgt

SEQ ID NO: 32382 - DNA, 20 bp, synthetic construct
  misc_feature 1..20: note = Description of Artificial Sequence: Synthetic oligonucleotide
  misc_feature 1..20: note = Target: SCN10A; (+) strand; PAM type: NRG; PAM sequence: AAG
  source 1..20: mol_type = other DNA
caactgtcagtctgtcagtc

SEQ ID NO: 32383 - DNA, 20 bp, synthetic construct
  misc_feature 1..20: note = Description of Artificial Sequence: Synthetic oligonucleotide
  misc_feature 1..20: note = Target: SCN10A; (+) strand; PAM type: NRG; PAM sequence: AGG
  source 1..20: mol_type = other DNA
aactgtcagtctgtcagtca

SEQ ID NO: 32384 - DNA, 20 bp, synthetic construct
  misc_feature 1..20: note = Description of Artificial Sequence: Synthetic oligonucleotide
  misc_feature 1..20: note = Target: SCN10A; (+) strand; PAM type: NRG; PAM sequence: TGG
  source 1..20: mol_type = other DNA
tgtcagtcaaggtgtgttta

SEQ ID NO: 32385 - DNA, 20 bp, synthetic construct
  misc_feature 1..20: note = Description of Artificial Sequence: Synthetic oligonucleotide
  misc_feature 1..20: note = Target: SCN10A; (+) strand; PAM type: NRG; PAM sequence: GAG
  source 1..20: mol_type = other DNA
tcagtcaaggtgtgtttatg

SEQ ID NO: 32386 - DNA, 20 bp, synthetic construct
  misc_feature 1..20: note = Description of Artificial Sequence: Synthetic oligonucleotide
  misc_feature 1..20: note = Target: SCN10A; (+) strand; PAM type: NRG; PAM sequence: AAG
  source 1..20: mol_type = other DNA
gtgtttatggagcacctact

SEQ ID NO: 32387 - DNA, 20 bp, synthetic construct
  misc_feature 1..20: note = Description of Artificial Sequence: Synthetic oligonucleotide
  misc_feature 1..20: note = Target: SCN10A; (+) strand; PAM type: NRG; PAM sequence: GAG
  source 1..20: mol_type = other DNA
gtttatggagcacctactaa

SEQ ID NO: 32388 - DNA, 20 bp, synthetic construct
  misc_feature 1..20: note = Description of Artificial Sequence: Synthetic oligonucleotide
  misc_feature 1..20: note = Target: SCN10A; (+) strand; PAM type: NRG; PAM sequence: CAG
  source 1..20: mol_type = other DNA
atggagcacctactaagagc

SEQ ID NO: 32389 - DNA, 20 bp, synthetic construct
  misc_feature 1..20: note = Description of Artificial Sequence: Synthetic oligonucleotide
  misc_feature 1..20: note = Target: SCN10A; (+) strand; PAM type: NRG; PAM sequence: AGG
  source 1..20: mol_type = other DNA
tggagcacctactaagagcc

SEQ ID NO: 32390 - DNA, 20 bp, synthetic construct
  misc_feature 1..20: note = Description of Artificial Sequence: Synthetic oligonucleotide
  misc_feature 1..20: note = Target: SCN10A; (+) strand; PAM type: NRG; PAM sequence: TGG
  source 1..20: mol_type = other DNA
acctactaagagccaggctg

SEQ ID NO: 32391 - DNA, 20 bp, synthetic construct
  misc_feature 1..20: note = Description of Artificial Sequence: Synthetic oligonucleotide
  misc_feature 1..20: note = Target: SCN10A; (+) strand; PAM type: NRG; PAM sequence: TAG
  source 1..20: mol_type = other DNA
ctaagagccaggctgtggct

SEQ ID NO: 32392 - DNA, 20 bp, synthetic construct
  misc_feature 1..20: note = Description of Artificial Sequence: Synthetic oligonucleotide
  misc_feature 1..20: note = Target: SCN10A; (+) strand; PAM type: NRG; PAM sequence: AGG
  source 1..20: mol_type = other DNA
taagagccaggctgtggctt

SEQ ID NO: 32393 - DNA, 20 bp, synthetic construct
  misc_feature 1..20: note = Description of Artificial Sequence: Synthetic oligonucleotide
  misc_feature 1..20: note = Target: SCN10A; (+) strand; PAM type: NRG; PAM sequence: TAG
  source 1..20: mol_type = other DNA
ccaggctgtggcttaggtgc

SEQ ID NO: 32394 - DNA, 20 bp, synthetic construct
  misc_feature 1..20: note = Description of Artificial Sequence: Synthetic oligonucleotide
  misc_feature 1..20: note = Target: SCN10A; (+) strand; PAM type: NRG; PAM sequence: AGG
  source 1..20: mol_type = other DNA
caggctgtggcttaggtgct

SEQ ID NO: 32395 - DNA, 20 bp, synthetic construct
  misc_feature 1..20: note = Description of Artificial Sequence: Synthetic oligonucleotide
  misc_feature 1..20: note = Target: SCN10A; (+) strand; PAM type: NRG; PAM sequence: CAG
  source 1..20: mol_type = other DNA
ggatgcaatgctgaacacaa

SEQ ID NO: 32396 - DNA, 20 bp, synthetic construct
  misc_feature 1..20: note = Description of Artificial Sequence: Synthetic oligonucleotide
  misc_feature 1..20: note = Target: SCN10A; (+) strand; PAM type: NRG; PAM sequence: TAG
  source 1..20: mol_type = other DNA
caatgctgaacacaacagtg

SEQ ID NO: 32397 - DNA, 20 bp, synthetic construct
  misc_feature 1..20: note = Description of Artificial Sequence: Synthetic oligonucleotide
  misc_feature 1..20: note = Target: SCN10A; (+) strand; PAM type: NRG; PAM sequence: GAG
  source 1..20: mol_type = other DNA
attttatcacccatatccgt

SEQ ID NO: 32398 - DNA, 20 bp, synthetic construct
  misc_feature 1..20: note = Description of Artificial Sequence: Synthetic oligonucleotide
  misc_feature 1..20: note = Target: SCN10A; (+) strand; PAM type: NRG; PAM sequence: CGG
  source 1..20: mol_type = other DNA
atatccgtgagtaaatccca

SEQ ID NO: 32399 - DNA, 20 bp, synthetic construct
  misc_feature 1..20: note = Description of Artificial Sequence: Synthetic oligonucleotide
  misc_feature 1..20: note = Target: SCN10A; (+) strand; PAM type: NRG; PAM sequence: GGG
  source 1..20: mol_type = other DNA
tatccgtgagtaaatcccac

SEQ ID NO: 32400 - DNA, 20 bp, synthetic construct
  misc_feature 1..20: note = Description of Artificial Sequence: Synthetic oligonucleotide
  misc_feature 1..20: note = Target: SCN10A; (+) strand; PAM type: NRG; PAM sequence: GAG
  source 1..20: mol_type = other DNA
tccgtgagtaaatcccacgg

SEQ ID NO: 32401 - DNA, 20 bp, synthetic construct
  misc_feature 1..20: note = Description of Artificial Sequence: Synthetic oligonucleotide
  misc_feature 1..20: note = Target: SCN10A; (+) strand; PAM type: NRG; PAM sequence: AGG
  source 1..20: mol_type = other DNA
ccgtgagtaaatcccacggg

SEQ ID NO: 32402 - DNA, 20 bp, synthetic construct
  misc_feature 1..20: note = Description of Artificial Sequence: Synthetic oligonucleotide
  misc_feature 1..20: note = Target: SCN10A; (+) strand; PAM type: NRG; PAM sequence: GAG
  source 1..20: mol_type = other DNA
gtgagtaaatcccacgggag

SEQ ID NO: 32403 - DNA, 20 bp, synthetic construct
  misc_feature 1..20: note = Description of Artificial Sequence: Synthetic oligonucleotide
  misc_feature 1..20: note = Target: SCN10A; (+) strand; PAM type: NRG; PAM sequence: AGG
  source 1..20: mol_type = other DNA
tgagtaaatcccacgggagg

SEQ ID NO: 32404 - DNA, 20 bp, synthetic construct
  misc_feature 1..20: note = Description of Artificial Sequence: Synthetic oligonucleotide
  misc_feature 1..20: note = Target: SCN10A; (+) strand; PAM type: NRG; PAM sequence: CAG
  source 1..20: mol_type = other DNA
ggaggtttaatcctgttata

SEQ ID NO: 32405 - DNA, 20 bp, synthetic construct
  misc_feature 1..20: note = Description of Artificial Sequence: Synthetic oligonucleotide
  misc_feature 1..20: note = Target: SCN10A; (+) strand; PAM type: NRG; PAM sequence: AAG
  source 1..20: mol_type = other DNA
gtttaatcctgttatacagt

SEQ ID NO: 32406 - DNA, 20 bp, synthetic construct
  misc_feature 1..20: note = Description of Artificial Sequence: Synthetic oligonucleotide
  misc_feature 1..20: note = Target: SCN10A; (+) strand; PAM type: NRG; PAM sequence: TGG
  source 1..20: mol_type = other DNA
gtatgcacctctttatgtga

SEQ ID NO: 32407 - DNA, 20 bp, synthetic construct
  misc_feature 1..20: note = Description of Artificial Sequence: Synthetic oligonucleotide
  misc_feature 1..20: note = Target: SCN10A; (+) strand; PAM type: NRG; PAM sequence: GGG
  source 1..20: mol_type = other DNA
tatgcacctctttatgtgat

SEQ ID NO: 32408 - DNA, 20 bp, synthetic construct
  misc_feature 1..20: note = Description of Artificial Sequence: Synthetic oligonucleotide
  misc_feature 1..20: note = Target: SCN10A; (+) strand; PAM type: NRG; PAM sequence: GGG
  source 1..20: mol_type = other DNA
atgcacctctttatgtgatg

SEQ ID NO: 32409 - DNA, 20 bp, synthetic construct
  misc_feature 1..20: note = Description of Artificial Sequence: Synthetic oligonucleotide
  misc_feature 1..20: note = Target: SCN10A; (+) strand; PAM type: NRG; PAM sequence: GGG
  source 1..20: mol_type = other DNA
tgcacctctttatgtgatgg

SEQ ID NO: 32410 - DNA, 20 bp, synthetic construct
  misc_feature 1..20: note = Description of Artificial Sequence: Synthetic oligonucleotide
  misc_feature 1..20: note = Target: SCN10A; (+) strand; PAM type: NRG; PAM sequence: GAG
  source 1..20: mol_type = other DNA
cacctctttatgtgatgggg

SEQ ID NO: 32411 - DNA, 20 bp, synthetic construct
  misc_feature 1..20: note = Description of Artificial Sequence: Synthetic oligonucleotide
  misc_feature 1..20: note = Target: SCN10A; (+) strand; PAM type: NRG; PAM sequence: GAG
  source 1..20: mol_type = other DNA
cctctttatgtgatggggga

SEQ ID NO: 32412 - DNA, 20 bp, synthetic construct
  misc_feature 1..20: note = Description of Artificial Sequence: Synthetic oligonucleotide
  misc_feature 1..20: note = Target: SCN10A; (+) strand; PAM type: NRG; PAM sequence: CGG
  source 1..20: mol_type = other DNA
ctttatgtgatgggggagag

SEQ ID NO: 32413 - DNA, 20 bp, synthetic construct
  misc_feature 1..20: note = Description of Artificial Sequence: Synthetic oligonucleotide
  misc_feature 1..20: note = Target: SCN10A; (+) strand; PAM type: NRG; PAM sequence: GGG
  source 1..20: mol_type = other DNA
tttatgtgatgggggagagc

SEQ ID NO: 32414 - DNA, 20 bp, synthetic construct
  misc_feature 1..20: note = Description of Artificial Sequence: Synthetic oligonucleotide
  misc_feature 1..20: note = Target: SCN10A; (+) strand; PAM type: NRG; PAM sequence: TGG
  source 1..20: mol_type = other DNA
cgttcaccttacacccaatc

SEQ ID NO: 32415 - DNA, 20 bp, synthetic construct
  misc_feature 1..20: note = Description of Artificial Sequence: Synthetic oligonucleotide
  misc_feature 1..20: note = Target: SCN10A; (+) strand; PAM type: NRG; PAM sequence: AAG
  source 1..20: mol_type = other DNA
tcaccttacacccaatctgg

SEQ ID NO: 32416 - DNA, 20 bp, synthetic construct
  misc_feature 1..20: note = Description of Artificial Sequence: Synthetic oligonucleotide
  misc_feature 1..20: note = Target: SCN10A; (+) strand; PAM type: NRG; PAM sequence: TGG
  source 1..20: mol_type = other DNA
tggaagttactctcctcata

SEQ ID NO: 32417 - DNA, 20 bp, synthetic construct
  misc_feature 1..20: note = Description of Artificial Sequence: Synthetic oligonucleotide
  misc_feature 1..20: note = Target: SCN10A; (+) strand; PAM type: NRG; PAM sequence: GGG
  source 1..20: mol_type = other DNA
ggaagttactctcctcatat

SEQ ID NO: 32418 - DNA, 20 bp, synthetic construct
  misc_feature 1..20: note = Description of Artificial Sequence: Synthetic oligonucleotide
  misc_feature 1..20: note = Target: SCN10A; (+) strand; PAM type: NRG; PAM sequence: AAG
  source 1..20: mol_type = other DNA
agttactctcctcatatggg

SEQ ID NO: 32419 - DNA, 20 bp, synthetic construct
  misc_feature 1..20: note = Description of Artificial Sequence: Synthetic oligonucleotide
  misc_feature 1..20: note = Target: SCN10A; (+) strand; PAM type: NRG; PAM sequence: CAG
  source 1..20: mol_type = other DNA
tactctcctcatatgggaag

SEQ ID NO: 32420 - DNA, 20 bp, synthetic construct
  misc_feature 1..20: note = Description of Artificial Sequence: Synthetic oligonucleotide
  misc_feature 1..20: note = Target: SCN10A; (+) strand; PAM type: NRG; PAM sequence: GAG
  source 1..20: mol_type = other DNA
ctctcctcatatgggaagca

SEQ ID NO: 32421 - DNA, 20 bp, synthetic construct
  misc_feature 1..20: note = Description of Artificial Sequence: Synthetic oligonucleotide
  misc_feature 1..20: note = Target: SCN10A; (+) strand; PAM type: NRG; PAM sequence: TGG
  source 1..20: mol_type = other DNA
agcttaaaacaacaactctg

SEQ ID NO: 32422 - DNA, 20 bp, synthetic construct
  misc_feature 1..20: note = Description of Artificial Sequence: Synthetic oligonucleotide
  misc_feature 1..20: note = Target: SCN10A; (+) strand; PAM type: NRG; PAM sequence: TGG
  source 1..20: mol_type = other DNA
aaaacaacaactctgtggac

SEQ ID NO: 32423 - DNA, 20 bp, synthetic construct
  misc_feature 1..20: note = Description of Artificial Sequence: Synthetic oligonucleotide
  misc_feature 1..20: note = Target: SCN10A; (+) strand; PAM type: NRG; PAM sequence: CAG
  source 1..20: mol_type = other DNA
acaactctgtggactggtca

SEQ ID NO: 32424 - DNA, 20 bp, synthetic construct
  misc_feature 1..20: note = Description of Artificial Sequence: Synthetic oligonucleotide
  misc_feature 1..20: note = Target: SCN10A; (+) strand; PAM type: NRG; PAM sequence: GAG
  source 1..20: mol_type = other DNA
aactctgtggactggtcaca

SEQ ID NO: 32425 - DNA, 20 bp, synthetic construct
  misc_feature 1..20: note = Description of Artificial Sequence: Synthetic oligonucleotide
  misc_feature 1..20: note = Target: SCN10A; (+) strand; PAM type: NRG; PAM sequence: AGG
  source 1..20: mol_type = other DNA
actctgtggactggtcacag

SEQ ID NO: 32426 - DNA, 20 bp, synthetic construct
  misc_feature 1..20: note = Description of Artificial Sequence: Synthetic oligonucleotide
  misc_feature 1..20: note = Target: SCN10A; (+) strand; PAM type: NRG; PAM sequence: CAG
  source 1..20: mol_type = other DNA
ctgtggactggtcacagagg

SEQ ID NO: 32427 - DNA, 20 bp, synthetic construct
  misc_feature 1..20: note = Description of Artificial Sequence: Synthetic oligonucleotide
  misc_feature 1..20: note = Target: SCN10A; (+) strand; PAM type: NRG; PAM sequence: GAG
  source 1..20: mol_type = other DNA
gataaacacaaataaaaact

SEQ ID NO: 32428 - DNA, 20 bp, synthetic construct
  misc_feature 1..20: note = Description of Artificial Sequence: Synthetic oligonucleotide
  misc_feature 1..20: note = Target: SCN10A; (+) strand; PAM type: NRG; PAM sequence: TAG
  source 1..20: mol_type = other DNA
cacaaataaaaactgagcat

SEQ ID NO: 32429 - DNA, 20 bp, synthetic construct
  misc_feature 1..20: note = Description of Artificial Sequence: Synthetic oligonucleotide
  misc_feature 1..20: note = Target: SCN10A; (+) strand; PAM type: NRG; PAM sequence: TAG
  source 1..20: mol_type = other DNA
aaaaactgagcattagtaac

SEQ ID NO: 32430 - DNA, 20 bp, synthetic construct
  misc_feature 1..20: note = Description of Artificial Sequence: Synthetic oligonucleotide
  misc_feature 1..20: note = Target: SCN10A; (+) strand; PAM type: NRG; PAM sequence: TGG
  source 1..20: mol_type = other DNA
ctgagcattagtaactagta

SEQ ID NO: 32431 - DNA, 20 bp, synthetic construct
  misc_feature 1..20: note = Description of Artificial Sequence: Synthetic oligonucleotide
  misc_feature 1..20: note = Target: SCN10A; (+) strand; PAM type: NRG; PAM sequence: GGG
  source 1..20: mol_type = other DNA
tgagcattagtaactagtat

SEQ ID NO: 32432 - DNA, 20 bp, synthetic construct
  misc_feature 1..20: note = Description of Artificial Sequence: Synthetic oligonucleotide
  misc_feature 1..20: note = Target: SCN10A; (+) strand; PAM type: NRG; PAM sequence: GGG
  source 1..20: mol_type = other DNA
gagcattagtaactagtatg

SEQ ID NO: 32433 - DNA, 20 bp, synthetic construct
  misc_feature 1..20: note = Description of Artificial Sequence: Synthetic oligonucleotide
  misc_feature 1..20: note = Target: SCN10A; (+) strand; PAM type: NRG; PAM sequence: GAG
  source 1..20: mol_type = other DNA
gcattagtaactagtatggg

SEQ ID NO: 32434 - DNA, 20 bp, synthetic construct
  misc_feature 1..20: note = Description of Artificial Sequence: Synthetic oligonucleotide
  misc_feature 1..20: note = Target: SCN10A; (+) strand; PAM type: NRG; PAM sequence: CAG
  source 1..20: mol_type = other DNA
ttagtaactagtatggggag

SEQ ID NO: 32435 - DNA, 20 bp, synthetic construct
  misc_feature 1..20: note = Description of Artificial Sequence: Synthetic oligonucleotide
  misc_feature 1..20: note = Target: SCN10A; (+) strand; PAM type: NRG; PAM sequence: AGG
  source 1..20: mol_type = other DNA
tagtaactagtatggggagc

SEQ ID NO: 32436 - DNA, 20 bp, synthetic construct
  misc_feature 1..20: note = Description of Artificial Sequence: Synthetic oligonucleotide
  misc_feature 1..20: note = Target: SCN10A; (+) strand; PAM type: NRG; PAM sequence: TAG
  source 1..20: mol_type = other DNA
agtatggggagcaggaaacg

SEQ ID NO: 32437 - DNA, 20 bp, synthetic construct
  misc_feature 1..20: note = Description of Artificial Sequence: Synthetic oligonucleotide
  misc_feature 1..20: note = Target: SCN10A; (+) strand; PAM type: NRG; PAM sequence: TGG
  source 1..20: mol_type = other DNA
ggagcaggaaacgtagtcca

SEQ ID NO: 32438 - DNA, 20 bp, synthetic construct
  misc_feature 1..20: note = Description of Artificial Sequence: Synthetic oligonucleotide
  misc_feature 1..20: note = Target: SCN10A; (+) strand; PAM type: NRG; PAM sequence: AAG
  source 1..20: mol_type = other DNA
acgtagtccatggcctgccg

SEQ ID NO: 32439 - DNA, 20 bp, synthetic construct
  misc_feature 1..20: note = Description of Artificial Sequence: Synthetic oligonucleotide
  misc_feature 1..20: note = Target: SCN10A; (+) strand; PAM type: NRG; PAM sequence: AGG
  source 1..20: mol_type = other DNA
cgtagtccatggcctgccga

SEQ ID NO: 32440 - DNA, 20 bp, synthetic construct
  misc_feature 1..20: note = Description of Artificial Sequence: Synthetic oligonucleotide
  misc_feature 1..20: note = Target: SCN10A; (+) strand; PAM type: NRG; PAM sequence: AAG
  source 1..20: mol_type = other DNA
catggcctgccgaaggttgt

SEQ ID NO: 32441 - DNA, 20 bp, synthetic construct
  misc_feature 1..20: note = Description of Artificial Sequence: Synthetic oligonucleotide
  misc_feature 1..20: note = Target: SCN10A; (+) strand; PAM type: NRG; PAM sequence: TAG
  source 1..20: mol_type = other DNA
cctgccgaaggttgtaagcc

SEQ ID NO: 32442 - DNA, 20 bp, synthetic construct
  misc_feature 1..20: note = Description of Artificial Sequence: Synthetic oligonucleotide
  misc_feature 1..20: note = Target: SCN10A; (+) strand; PAM type: NRG; PAM sequence: CAG
  source 1..20: mol_type = other DNA
gccgaaggttgtaagcctag

SEQ ID NO: 32443 - DNA, 20 bp, synthetic construct
  misc_feature 1..20: note = Description of Artificial Sequence: Synthetic oligonucleotide
  misc_feature 1..20: note = Target: SCN10A; (+) strand; PAM type: NRG; PAM sequence: AGG
  source 1..20: mol_type = other DNA
ccgaaggttgtaagcctagc

SEQ ID NO: 32444 - DNA, 20 bp, synthetic construct
  misc_feature 1..20: note = Description of Artificial Sequence: Synthetic oligonucleotide
  misc_feature 1..20: note = Target: SCN10A; (+) strand; PAM type: NRG; PAM sequence: AAG
  source 1..20: mol_type = other DNA
caggaatttctccctgcttt

SEQ ID NO: 32445 - DNA, 20 bp, synthetic construct
  misc_feature 1..20: note = Description of Artificial Sequence: Synthetic oligonucleotide
  misc_feature 1..20: note = Target: SCN10A; (+) strand; PAM type: NRG; PAM sequence: TAG
  source 1..20: mol_type = other DNA
atttctccctgctttaagac

SEQ ID NO: 32446 - DNA, 20 bp, synthetic construct
  misc_feature 1..20: note = Description of Artificial Sequence: Synthetic oligonucleotide
  misc_feature 1..20: note = Target: SCN10A; (+) strand; PAM type: NRG; PAM sequence: AAG
  source 1..20: mol_type = other DNA
tgctttaagactagatccca

SEQ ID NO: 32447 - DNA, 20 bp, synthetic construct
  misc_feature 1..20: note = Description of Artificial Sequence: Synthetic oligonucleotide
  misc_feature 1..20: note = Target: SCN10A; (+) strand; PAM type: NRG; PAM sequence: GAG
  source 1..20: mol_type = other DNA
ctttaagactagatcccaaa

SEQ ID NO: 32448 - DNA, 20 bp, synthetic construct
  misc_feature 1..20: note = Description of Artificial Sequence: Synthetic oligonucleotide
  misc_feature 1..20: note = Target: SCN10A; (+) strand; PAM type: NRG; PAM sequence: AAG
  source 1..20: mol_type = other DNA
aagagctatacccttcatgt

SEQ ID NO: 32449 - DNA, 20 bp, synthetic construct
  misc_feature 1..20: note = Description of Artificial Sequence: Synthetic oligonucleotide
  misc_feature 1..20: note = Target: SCN10A; (+) strand; PAM type: NRG; PAM sequence: AGG
  source 1..20: mol_type = other DNA
agagctatacccttcatgta

SEQ ID NO: 32450 - DNA, 20 bp, synthetic construct
  misc_feature 1..20: note = Description of Artificial Sequence: Synthetic oligonucleotide
  misc_feature 1..20: note = Target: SCN10A; (+) strand; PAM type: NRG; PAM sequence: CAG
  source 1..20: mol_type = other DNA
ggatgaaccacaaacaatcc

SEQ ID NO: 32451 - DNA, 20 bp, synthetic construct
  misc_feature 1..20: note = Description of Artificial Sequence: Synthetic oligonucleotide
  misc_feature 1..20: note = Target: SCN10A; (+) strand; PAM type: NRG; PAM sequence: AGG
  source 1..20: mol_type = other DNA
gatgaaccacaaacaatccc

SEQ ID NO: 32452 - DNA, 20 bp, synthetic construct
  misc_feature 1..20: note = Description of Artificial Sequence: Synthetic oligonucleotide
  misc_feature 1..20: note = Target: SCN10A; (+) strand; PAM type: NRG; PAM sequence: GAG
  source 1..20: mol_type = other DNA
tgaaccacaaacaatcccag

SEQ ID NO: 32453 - DNA, 20 bp, synthetic construct
  misc_feature 1..20: note = Description of Artificial Sequence: Synthetic oligonucleotide
  misc_feature 1..20: note = Target: SCN10A; (+) strand; PAM type: NRG; PAM sequence: AAG
  source 1..20: mol_type = other DNA
aaacaatcccaggagaatgc

SEQ ID NO: 32454 - DNA, 20 bp, synthetic construct
  misc_feature 1..20: note = Description of Artificial Sequence: Synthetic oligonucleotide
  misc_feature 1..20: note = Target: SCN10A; (+) strand; PAM type: NRG; PAM sequence: AGG
  source 1..20: mol_type = other DNA
aacaatcccaggagaatgca

SEQ ID NO: 32455 - DNA, 20 bp, synthetic construct
  misc_feature 1..20: note = Description of Artificial Sequence: Synthetic oligonucleotide
  misc_feature 1..20: note = Target: SCN10A; (+) strand; PAM type: NRG; PAM sequence: TGG
  source 1..20: mol_type = other DNA
agaatgcaaggaaaattgaa

SEQ ID NO: 32456 - DNA, 20 bp, synthetic construct
  misc_feature 1..20: note = Description of Artificial Sequence: Synthetic oligonucleotide
  misc_feature 1..20: note = Target: SCN10A; (+) strand; PAM type: NRG; PAM sequence: TGG
  source 1..20: mol_type = other DNA
tgcaaggaaaattgaatggc

SEQ ID NO: 32457 - DNA, 20 bp, synthetic construct
  misc_feature 1..20: note = Description of Artificial Sequence: Synthetic oligonucleotide
  misc_feature 1..20: note = Target: SCN10A; (+) strand; PAM type: NRG; PAM sequence: TAG
  source 1..20: mol_type = other DNA
gaaaattgaatggctggtgt

SEQ ID NO: 32458 - DNA, 20 bp, synthetic construct
  misc_feature 1..20: note = Description of Artificial Sequence: Synthetic oligonucleotide
  misc_feature 1..20: note = Target: SCN10A; (+) strand; PAM type: NRG; PAM sequence: AGG
  source 1..20: mol_type = other DNA
aaaattgaatggctggtgtt

SEQ ID NO: 32459 - DNA, 20 bp, synthetic construct
  misc_feature 1..20: note = Description of Artificial Sequence: Synthetic oligonucleotide
  misc_feature 1..20: note = Target: SCN10A; (+) strand; PAM type: NRG; PAM sequence: CAG
  source 1..20: mol_type = other DNA
gaatggctggtgttaggtac

SEQ ID NO: 32460 - DNA, 20 bp, synthetic construct
  misc_feature 1..20: note = Description of Artificial Sequence: Synthetic oligonucleotide
  misc_feature 1..20: note = Target: SCN10A; (+) strand; PAM type: NRG; PAM sequence: CAG
  source 1..20: mol_type = other DNA
ctggtgttaggtaccagcta

SEQ ID NO: 32461 - DNA, 20 bp, synthetic construct
  misc_feature 1..20: note = Description of Artificial Sequence: Synthetic oligonucleotide
  misc_feature 1..20: note = Target: SCN10A; (+) strand; PAM type: NRG; PAM sequence: AGG
  source 1..20: mol_type = other DNA
tggtgttaggtaccagctac

SEQ ID NO: 32462 - DNA, 20 bp, synthetic construct
  misc_feature 1..20: note = Description of Artificial Sequence: Synthetic oligonucleotide
  misc_feature 1..20: note = Target: SCN10A; (+) strand; PAM type: NRG; PAM sequence: GAG
  source 1..20: mol_type = other DNA
gtgttaggtaccagctacag

SEQ ID NO: 32463 - DNA, 20 bp, synthetic construct
  misc_feature 1..20: note = Description of Artificial Sequence: Synthetic oligonucleotide
  misc_feature 1..20: note = Target: SCN10A; (+) strand; PAM type: NRG; PAM sequence: AGG
  source 1..20: mol_type = other DNA
tgttaggtaccagctacagg

SEQ ID NO: 32464 - DNA, 20 bp, synthetic construct
  misc_feature 1..20: note = Description of Artificial Sequence: Synthetic oligonucleotide
  misc_feature 1..20: note = Target: SCN10A; (+) strand; PAM type: NRG; PAM sequence: GAG
  source 1..20: mol_type = other DNA
acaggaggaaaattgacgct

SEQ ID NO: 32465 - DNA, 20 bp, synthetic construct
  misc_feature 1..20: note = Description of Artificial Sequence: Synthetic oligonucleotide
  misc_feature 1..20: note = Target: SCN10A; (+) strand; PAM type: NRG; PAM sequence: AAG
  source 1..20: mol_type = other DNA
gctgagcatttgaaacaaca

SEQ ID NO: 32466 - DNA, 20 bp, synthetic construct
  misc_feature 1..20: note = Description of Artificial Sequence: Synthetic oligonucleotide
  misc_feature 1..20: note = Target: SCN10A; (+) strand; PAM type: NRG; PAM sequence: TGG
  source 1..20: mol_type = other DNA
gagcatttgaaacaacaaag

SEQ ID NO: 32467 - DNA, 20 bp, synthetic construct
  misc_feature 1..20: note = Description of Artificial Sequence: Synthetic oligonucleotide
  misc_feature 1..20: note = Target: SCN10A; (+) strand; PAM type: NRG; PAM sequence: TAG
  source 1..20: mol_type = other DNA
acaacaaagtggtgctcata

SEQ ID NO: 32468 - DNA, 20 bp, synthetic construct
  misc_feature 1..20: note = Description of Artificial Sequence: Synthetic oligonucleotide
  misc_feature 1..20: note = Target: SCN10A; (+) strand; PAM type: NRG; PAM sequence: AGG
  source 1..20: mol_type = other DNA
caacaaagtggtgctcatat

SEQ ID NO: 32469 - DNA, 20 bp, synthetic construct
  misc_feature 1..20: note = Description of Artificial Sequence: Synthetic oligonucleotide
  misc_feature 1..20: note = Target: SCN10A; (+) strand; PAM type: NRG; PAM sequence: TGG
  source 1..20: mol_type = other DNA
tgctcatataggattttatc

SEQ ID NO: 32470 - DNA, 20 bp, synthetic construct
  misc_feature 1..20: note = Description of Artificial Sequence: Synthetic oligonucleotide
  misc_feature 1..20: note = Target: SCN10A; (+) strand; PAM type: NRG; PAM sequence: TAG
  source 1..20: mol_type = other DNA
tatctggaattcacactacc

SEQ ID NO: 32471 - DNA, 20 bp, synthetic construct
  misc_feature 1..20: note = Description of Artificial Sequence: Synthetic oligonucleotide
  misc_feature 1..20: note = Target: SCN10A; (+) strand; PAM type: NRG; PAM sequence: AGG
  source 1..20: mol_type = other DNA
atctggaattcacactacct

SEQ ID NO: 32472 - DNA, 20 bp, synthetic construct
  misc_feature 1..20: note = Description of Artificial Sequence: Synthetic oligonucleotide
  misc_feature 1..20: note = Target: SCN10A; (+) strand; PAM type: NRG; PAM sequence: AAG
  source 1..20: mol_type = other DNA
tcacactacctaggtatttt

SEQ ID NO: 32473 - DNA, 20 bp, synthetic construct
  misc_feature 1..20: note = Description of Artificial Sequence: Synthetic oligonucleotide
  misc_feature 1..20: note = Target: SCN10A; (+) strand; PAM type: NRG; PAM sequence: GAG
  source 1..20: mol_type = other DNA
ctacctaggtattttaagtt

SEQ ID NO: 32474 - DNA, 20 bp, synthetic construct
  misc_feature 1..20: note = Description of Artificial Sequence: Synthetic oligonucleotide
  misc_feature 1..20: note = Target: SCN10A; (+) strand; PAM type: NRG; PAM sequence: TAG
  source 1..20: mol_type = other DNA
tttaagttgagaatttaatt

SEQ ID NO: 32475 - DNA, 20 bp, synthetic construct
  misc_feature 1..20: note = Description of Artificial Sequence: Synthetic oligonucleotide
  misc_feature 1..20: note = Target: SCN10A; (+) strand; PAM type: NRG; PAM sequence: GAG
  source 1..20: mol_type = other DNA
taagttgagaatttaattta

SEQ ID NO: 32476 - DNA, 20 bp, synthetic construct
  misc_feature 1..20: note = Description of Artificial Sequence: Synthetic oligonucleotide
  misc_feature 1..20: note = Target: SCN10A; (+) strand; PAM type: NRG; PAM sequence: AAG
  source 1..20: mol_type = other DNA
taatttagagcaattctaca

SEQ ID NO: 32477 - DNA, 20 bp, synthetic construct
  misc_feature 1..20: note = Description of Artificial Sequence: Synthetic oligonucleotide
  misc_feature 1..20: note = Target: SCN10A; (+) strand; PAM type: NRG; PAM sequence: CAG
  source 1..20: mol_type = other DNA
caattctacaaagtgctctg

SEQ ID NO: 32478 - DNA, 20 bp, synthetic construct
  misc_feature 1..20: note = Description of Artificial Sequence: Synthetic oligonucleotide
  misc_feature 1..20: note = Target: SCN10A; (+) strand; PAM type: NRG; PAM sequence: TGG
  source 1..20: mol_type = other DNA
gaattaaatgcaaatacctc

SEQ ID NO: 32479 - DNA, 20 bp, synthetic construct
  misc_feature 1..20: note = Description of Artificial Sequence: Synthetic oligonucleotide
  misc_feature 1..20: note = Target: SCN10A; (+) strand; PAM type: NRG; PAM sequence: GAG
  source 1..20: mol_type = other DNA
attaaatgcaaatacctctg

SEQ ID NO: 32480 - DNA, 20 bp, synthetic construct
  misc_feature 1..20: note = Description of Artificial Sequence: Synthetic oligonucleotide
  misc_feature 1..20: note = Target: SCN10A; (+) strand; PAM type: NRG; PAM sequence: AGG
  source 1..20: mol_type = other DNA
ttaaatgcaaatacctctgg

SEQ ID NO: 32481 - DNA, 20 bp, synthetic construct
  misc_feature 1..20: note = Description of Artificial Sequence: Synthetic oligonucleotide
  misc_feature 1..20: note = Target: SCN10A; (+) strand; PAM type: NRG; PAM sequence: CAG
  source 1..20: mol_type = other DNA
ggaggaacctgcctttatct

SEQ ID NO: 32482 - DNA, 20 bp, synthetic construct
  misc_feature 1..20: note = Description of Artificial Sequence: Synthetic oligonucleotide
  misc_feature 1..20: note = Target: SCN10A; (+) strand; PAM type: NRG; PAM sequence: AGG
  source 1..20: mol_type = other DNA
gaggaacctgcctttatctc

SEQ ID NO: 32483 - DNA, 20 bp, synthetic construct
  misc_feature 1..20: note = Description of Artificial Sequence: Synthetic oligonucleotide
  misc_feature 1..20: note = Target: SCN10A; (+) strand; PAM type: NRG; PAM sequence: AAG
  source 1..20: mol_type = other DNA
tattccctcaaaaattgttt

SEQ ID NO: 32484 - DNA, 20 bp, synthetic construct
  misc_feature 1..20: note = Description of Artificial Sequence: Synthetic oligonucleotide
  misc_feature 1..20: note = Target: SCN10A; (+) strand; PAM type: NRG; PAM sequence: GAG
  source 1..20: mol_type = other DNA
ttccctcaaaaattgtttaa

SEQ ID NO: 32485 - DNA, 20 bp, synthetic construct
  misc_feature 1..20: note = Description of Artificial Sequence: Synthetic oligonucleotide
  misc_feature 1..20: note = Target: SCN10A; (+) strand; PAM type: NRG; PAM sequence: CAG
  source 1..20: mol_type = other DNA
caaaaattgtttaagagttg

SEQ ID NO: 32486 - DNA, 20 bp, synthetic construct
  misc_feature 1..20: note = Description of Artificial Sequence: Synthetic oligonucleotide
  misc_feature 1..20: note = Target: SCN10A; (+) strand; PAM type: NRG; PAM sequence: CAG
  source 1..20: mol_type = other DNA
agtaaaaaaacaaacaaaaa

SEQ ID NO: 32487 - DNA, 20 bp, synthetic construct
  misc_feature 1..20: note = Description of Artificial Sequence: Synthetic oligonucleotide
  misc_feature 1..20: note = Target: SCN10A; (+) strand; PAM type: NRG; PAM sequence: AAG
  source 1..20: mol_type = other DNA
aaaaaaacaaacaaaaacag

SEQ ID NO: 32488 - DNA, 20 bp, synthetic construct
  misc_feature 1..20: note = Description of Artificial Sequence: Synthetic oligonucleotide
  misc_feature 1..20: note = Target: SCN10A; (+) strand; PAM type: NRG; PAM sequence: AGG
  source 1..20: mol_type = other DNA
aaaaaacaaacaaaaacaga

SEQ ID NO: 32489 - DNA, 20 bp, synthetic construct
  misc_feature 1..20: note = Description of Artificial Sequence: Synthetic oligonucleotide
  misc_feature 1..20: note = Target: SCN10A; (+) strand; PAM type: NRG; PAM sequence: GAG
  source 1..20: mol_type = other DNA
caaacaaaaacagaaggaat

SEQ ID NO: 32490 - DNA, 20 bp, synthetic construct
  misc_feature 1..20: note = Description of Artificial Sequence: Synthetic oligonucleotide
  misc_feature 1..20: note = Target: SCN10A; (+) strand; PAM type: NRG; PAM sequence: AAG
  source 1..20: mol_type = other DNA
aacagaaggaatgagtcatc

SEQ ID NO: 32491 - DNA, 20 bp, synthetic construct
  misc_feature 1..20: note = Description of Artificial Sequence: Synthetic oligonucleotide
  misc_feature 1..20: note = Target: SCN10A; (+) strand; PAM type: NRG; PAM sequence: GAG
  source 1..20: mol_type = other DNA
cagaaggaatgagtcatcaa

SEQ ID NO: 32492 - DNA, 20 bp, synthetic construct
  misc_feature 1..20: note = Description of Artificial Sequence: Synthetic oligonucleotide
  misc_feature 1..20: note = Target: SCN10A; (+) strand; PAM type: NRG; PAM sequence: GAG
  source 1..20: mol_type = other DNA
atgagtcatcaagagtgaat

SEQ ID NO: 32493 - DNA, 20 bp, synthetic construct
  misc_feature 1..20: note = Description of Artificial Sequence: Synthetic oligonucleotide
  misc_feature 1..20: note = Target: SCN10A; (+) strand; PAM type: NRG; PAM sequence: AAG
  source 1..20: mol_type = other DNA
caagagtgaatgagatcttg

SEQ ID NO: 32494 - DNA, 20 bp, synthetic construct
  misc_feature 1..20: note = Description of Artificial Sequence: Synthetic oligonucleotide
  misc_feature 1..20: note = Target: SCN10A; (+) strand; PAM type: NRG; PAM sequence: CAG
  source 1..20: mol_type = other DNA
atgagatcttgaagaaacca

SEQ ID NO: 32495 - DNA, 20 bp, synthetic construct
  misc_feature 1..20: note = Description of Artificial Sequence: Synthetic oligonucleotide
  misc_feature 1..20: note = Target: SCN10A; (+) strand; PAM type: NRG; PAM sequence: TGG
  source 1..20: mol_type = other DNA
tcttgaagaaaccacagatg

SEQ ID NO: 32496 - DNA, 20 bp, synthetic construct
  misc_feature 1..20: note = Description of Artificial Sequence: Synthetic oligonucleotide
  misc_feature 1..20: note = Target: SCN10A; (+) strand; PAM type: NRG; PAM sequence: TAG
  source 1..20: mol_type = other DNA
agaaaccacagatgtggaaa

SEQ ID NO: 32497 - DNA, 20 bp, synthetic construct
  misc_feature 1..20: note = Description of Artificial Sequence: Synthetic oligonucleotide
  misc_feature 1..20: note = Target: SCN10A; (+) strand; PAM type: NRG; PAM sequence: CAG
  source 1..20: mol_type = other DNA
aaatagtcattccatttctt

SEQ ID NO: 32498 - DNA, 20 bp, synthetic construct
  misc_feature 1..20: note = Description of Artificial Sequence: Synthetic oligonucleotide
  misc_feature 1..20: note = Target: SCN10A; (+) strand; PAM type: NRG; PAM sequence: TAG
  source 1..20: mol_type = other DNA
cattccatttcttcagatga

SEQ ID NO: 32499 - DNA, 20 bp, synthetic construct
  misc_feature 1..20: note = Description of Artificial Sequence: Synthetic oligonucleotide
  misc_feature 1..20: note = Target: SCN10A; (+) strand; PAM type: NRG; PAM sequence: TAG
  source 1..20: mol_type = other DNA
tcttcagatgatagaattat

SEQ ID NO: 32500 - DNA, 20 bp, synthetic construct
  misc_feature 1..20: note = Description of Artificial Sequence: Synthetic oligonucleotide
  misc_feature 1..20: note = Target: SCN10A; (+) strand; PAM type: NRG; PAM sequence: CAG
  source 1..20: mol_type = other DNA
cagatgatagaattattagt

SEQ ID NO: 32501 - DNA, 20 bp, synthetic construct
  misc_feature 1..20: note = Description of Artificial Sequence: Synthetic oligonucleotide
  misc_feature 1..20: note = Target: SCN10A; (+) strand; PAM type: NRG; PAM sequence: GAG
  source 1..20: mol_type = other DNA
gatgatagaattattagtca

SEQ ID NO: 32502 - DNA, 20 bp, synthetic construct
  misc_feature 1..20: note = Description of Artificial Sequence: Synthetic oligonucleotide
  misc_feature 1..20: note = Target: SCN10A; (+) strand; PAM type: NRG; PAM sequence: CAG
  source 1..20: mol_type = other DNA
gaattattagtcagagataa

SEQ ID NO: 32503 - DNA, 20 bp, synthetic construct
  misc_feature 1..20: note = Description of Artificial Sequence: Synthetic oligonucleotide
  misc_feature 1..20: note = Target: SCN10A; (+) strand; PAM type: NRG; PAM sequence: TAG
  source 1..20: mol_type = other DNA
gtcagagataacagtataat

SEQ ID NO: 32504 - DNA, 20 bp, synthetic construct
  misc_feature 1..20: note = Description of Artificial Sequence: Synthetic oligonucleotide
  misc_feature 1..20: note = Target: SCN10A; (+) strand; PAM type: NRG; PAM sequence: AAG
  source 1..20: mol_type = other DNA
taattagatataatatgtta

SEQ ID NO: 32505 - DNA, 20 bp, synthetic construct
  misc_feature 1..20: note = Description of Artificial Sequence: Synthetic oligonucleotide
  misc_feature 1..20: note = Target: SCN10A; (+) strand; PAM type: NRG; PAM sequence: CAG
  source 1..20: mol_type = other DNA
taataacttgaaactatgtg

SEQ ID NO: 32506 - DNA, 20 bp, synthetic construct
  misc_feature 1..20: note = Description of Artificial Sequence: Synthetic oligonucleotide
  misc_feature 1..20: note = Target: SCN10A; (+) strand; PAM type: NRG; PAM sequence: GAG
  source 1..20: mol_type = other DNA
ataacttgaaactatgtgca

SEQ ID NO: 32507 - DNA, 20 bp, synthetic construct
  misc_feature 1..20: note = Description of Artificial Sequence: Synthetic oligonucleotide
  misc_feature 1..20: note = Target: SCN10A; (+) strand; PAM type: NRG; PAM sequence: TAG
  source 1..20: mol_type = other DNA
tgcagagaataaaaaaacta

SEQ ID NO: 32508 - DNA, 20 bp, synthetic construct
  misc_feature 1..20: note = Description of Artificial Sequence: Synthetic oligonucleotide
  misc_feature 1..20: note = Target: SCN10A; (+) strand; PAM type: NRG; PAM sequence: AAG
  source 1..20: mol_type = other DNA
aaactatagataacaataac

SEQ ID NO: 32509 - DNA, 20 bp, synthetic construct
  misc_feature 1..20: note = Description of Artificial Sequence: Synthetic oligonucleotide
  misc_feature 1..20: note = Target: SCN10A; (+) strand; PAM type: NRG; PAM sequence: TAG
  source 1..20: mol_type = other DNA
agttgtgaaaaatacactct

SEQ ID NO: 32510 - DNA, 20 bp, synthetic construct
  misc_feature 1..20: note = Description of Artificial Sequence: Synthetic oligonucleotide
  misc_feature 1..20: note = Target: SCN10A; (+) strand; PAM type: NRG; PAM sequence: AAG
  source 1..20: mol_type = other DNA
ttaaaattaaaaatattatg

SEQ ID NO: 32511 - DNA, 20 bp, synthetic construct
  misc_feature 1..20: note = Description of Artificial Sequence: Synthetic oligonucleotide
  misc_feature 1..20: note = Target: SCN10A; (+) strand; PAM type: NRG; PAM sequence: AAG
  source 1..20: mol_type = other DNA
aaattaaaaatattatgaag

SEQ ID NO: 32512 - DNA, 20 bp, synthetic construct
  misc_feature 1..20: note = Description of Artificial Sequence: Synthetic oligonucleotide
  misc_feature 1..20: note = Target: SCN10A; (+) strand; PAM type: NRG; PAM sequence: AGG
  source 1..20: mol_type = other DNA
aattaaaaatattatgaaga

SEQ ID NO: 32513 - DNA, 20 bp, synthetic construct
  misc_feature 1..20: note = Description of Artificial Sequence: Synthetic oligonucleotide
  misc_feature 1..20: note = Target: SCN10A; (+) strand; PAM type: NRG; PAM sequence: CAG
  source 1..20: mol_type = other DNA
attatgaagaaggtttgcat

SEQ ID NO: 32514 - DNA, 20 bp, synthetic construct
  misc_feature 1..20: note = Description of Artificial Sequence: Synthetic oligonucleotide
  misc_feature 1..20: note = Target: SCN10A; (+) strand; PAM type: NRG; PAM sequence: CAG
  source 1..20: mol_type = other DNA
ggtttgcatcagatttgaca

SEQ ID NO: 32515 - DNA, 20 bp, synthetic construct
  misc_feature 1..20: note = Description of Artificial Sequence: Synthetic oligonucleotide
  misc_feature 1..20: note = Target: SCN10A; (+) strand; PAM type: NRG; PAM sequence: TGG
  source 1..20: mol_type = other DNA
gcatcagatttgacacagtt

SEQ ID NO: 32516 - DNA, 20 bp, synthetic construct
  misc_feature 1..20: note = Description of Artificial Sequence: Synthetic oligonucleotide
  misc_feature 1..20: note = Target: SCN10A; (+) strand; PAM type: NRG; PAM sequence: GGG
  source 1..20: mol_type = other DNA
catcagatttgacacagttt

SEQ ID NO: 32517 - DNA, 20 bp, synthetic construct
  misc_feature 1..20: note = Description of Artificial Sequence: Synthetic oligonucleotide
  misc_feature 1..20: note = Target: SCN10A; (+) strand; PAM type: NRG; PAM sequence: GAG
  source 1..20: mol_type = other DNA
tcagatttgacacagtttgg

SEQ ID NO: 32518 - DNA, 20 bp, synthetic construct
  misc_feature 1..20: note = Description of Artificial Sequence: Synthetic oligonucleotide
  misc_feature 1..20: note = Target: SCN10A; (+) strand; PAM type: NRG; PAM sequence: GAG
  source 1..20: mol_type = other DNA
agatttgacacagtttggga

SEQ ID NO: 32519 - DNA, 20 bp, synthetic construct
  misc_feature 1..20: note = Description of Artificial Sequence: Synthetic oligonucleotide
  misc_feature 1..20: note = Target: SCN10A; (+) strand; PAM type: NRG; PAM sequence: TAG
  source 1..20: mol_type = other DNA
gacacagtttgggagagaat

SEQ ID NO: 32520 - DNA, 20 bp, synthetic construct
  misc_feature 1..20: note = Description of Artificial Sequence: Synthetic oligonucleotide
  misc_feature 1..20: note = Target: SCN10A; (+) strand; PAM type: NRG; PAM sequence: GAG
  source 1..20: mol_type = other DNA
tgggagagaattagtgaact

SEQ ID NO: 32521 - DNA, 20 bp, synthetic construct
  misc_feature 1..20: note = Description of Artificial Sequence: Synthetic oligonucleotide
  misc_feature 1..20: note = Target: SCN10A; (+) strand; PAM type: NRG; PAM sequence: AGG
  source 1..20: mol_type = other DNA
gggagagaattagtgaactg

SEQ ID NO: 32522 - DNA, 20 bp, synthetic construct
  misc_feature 1..20: note = Description of Artificial Sequence: Synthetic oligonucleotide
  misc_feature 1..20: note = Target: SCN10A; (+) strand; PAM type: NRG; PAM sequence: CAG
  source 1..20: mol_type = other DNA
ttagtgaactgaggatatat

SEQ ID NO: 32523 - DNA, 20 bp, synthetic construct
  misc_feature 1..20: note = Description of Artificial Sequence: Synthetic oligonucleotide
  misc_feature 1..20: note = Target: SCN10A; (+) strand; PAM type: NRG; PAM sequence: CAG
  source 1..20: mol_type = other DNA
atatatcagaataaattatt

SEQ ID NO: 32524 - DNA, 20 bp, synthetic construct
  misc_feature 1..20: note = Description of Artificial Sequence: Synthetic oligonucleotide
  misc_feature 1..20: note = Target: SCN10A; (+) strand; PAM type: NRG; PAM sequence: TAG
  source 1..20: mol_type = other DNA
aaattattcagaatgtaacc

SEQ ID NO: 32525 - DNA, 20 bp, synthetic construct
  misc_feature 1..20: note = Description of Artificial Sequence: Synthetic oligonucleotide
  misc_feature 1..20: note = Target: SCN10A; (+) strand; PAM type: NRG; PAM sequence: GAG
  source 1..20: mol_type = other DNA
attattcagaatgtaaccta

SEQ ID NO: 32526 - DNA, 20 bp, synthetic construct
  misc_feature 1..20: note = Description of Artificial Sequence: Synthetic oligonucleotide
  misc_feature 1..20: note = Target: SCN10A; (+) strand; PAM type: NRG; PAM sequence: GAG
  source 1..20: mol_type = other DNA
tattcagaatgtaacctaga

SEQ ID NO: 32527 - DNA, 20 bp, synthetic construct
  misc_feature 1..20: note = Description of Artificial Sequence: Synthetic oligonucleotide
  misc_feature 1..20: note = Target: SCN10A; (+) strand; PAM type: NRG; PAM sequence: AAG
  source 1..20: mol_type = other DNA
aatgtaacctagagagacat

SEQ ID NO: 32528 - DNA, 20 bp, synthetic construct
  misc_feature 1..20: note = Description of Artificial Sequence: Synthetic oligonucleotide
  misc_feature 1..20: note = Target: SCN10A; (+) strand; PAM type: NRG; PAM sequence: TAG
  source 1..20: mol_type = other DNA
taagatgaaaaataacaaaa

SEQ ID NO: 32529 - DNA, 20 bp, synthetic construct
  misc_feature 1..20: note = Description of Artificial Sequence: Synthetic oligonucleotide
  misc_feature 1..20: note = Target: SCN10A; (+) strand; PAM type: NRG; PAM sequence: AAG
  source 1..20: mol_type = other DNA
gaaaaataacaaaatagtgt

SEQ ID NO: 32530 - DNA, 20 bp, synthetic construct
  misc_feature 1..20: note = Description of Artificial Sequence: Synthetic oligonucleotide
  misc_feature 1..20: note = Target: SCN10A; (+) strand; PAM type: NRG; PAM sequence: GAG
  source 1..20: mol_type = other DNA
aaaataacaaaatagtgtaa

SEQ ID NO: 32531 - DNA, 20 bp, synthetic construct
  misc_feature 1..20: note = Description of Artificial Sequence: Synthetic oligonucleotide
  misc_feature 1..20: note = Target: SCN10A; (+) strand; PAM type: NRG; PAM sequence: TAG
  source 1..20: mol_type = other DNA
acaaaatagtgtaagagaca

SEQ ID NO: 32532 - DNA, 20 bp, synthetic construct
  misc_feature 1..20: note = Description of Artificial Sequence: Synthetic oligonucleotide
  misc_feature 1..20: note = Target: SCN10A; (+) strand; PAM type: NRG; PAM sequence: GAG
  source 1..20: mol_type = other DNA
aaaatagtgtaagagacata

SEQ ID NO: 32533 - DNA, 20 bp, synthetic construct
  misc_feature 1..20: note = Description of Artificial Sequence: Synthetic oligonucleotide
  misc_feature 1..20: note = Target: SCN10A; (+) strand; PAM type: NRG; PAM sequence: AGG
  source 1..20: mol_type = other DNA
aaatagtgtaagagacatag

SEQ ID NO: 32534 - DNA, 20 bp, synthetic construct
  misc_feature 1..20: note = Description of Artificial Sequence: Synthetic oligonucleotide
  misc_feature 1..20: note = Target: SCN10A; (+) strand; PAM type: NRG; PAM sequence: TAG
  source 1..20: mol_type = other DNA
agtgtaagagacatagagga

SEQ ID NO: 32535 - DNA, 20 bp, synthetic construct
  misc_feature 1..20: note = Description of Artificial Sequence: Synthetic oligonucleotide
  misc_feature 1..20: note = Target: SCN10A; (+) strand; PAM type: NRG; PAM sequence: GAG
  source 1..20: mol_type = other DNA
agagacatagaggatagaat

SEQ ID NO: 32536 - DNA, 20 bp, synthetic construct
  misc_feature 1..20: note = Description of Artificial Sequence: Synthetic oligonucleotide
  misc_feature 1..20: note = Target: SCN10A; (+) strand; PAM type: NRG; PAM sequence: GAG
  source 1..20: mol_type = other DNA
agacatagaggatagaatga

SEQ ID NO: 32537 - DNA, 20 bp, synthetic construct
  misc_feature 1..20: note = Description of Artificial Sequence: Synthetic oligonucleotide
  misc_feature 1..20: note = Target: SCN10A; (+) strand; PAM type: NRG; PAM sequence: GAG
  source 1..20: mol_type = other DNA
acatagaggatagaatgaga

SEQ ID NO: 32538 - DNA, 20 bp, synthetic construct
  misc_feature 1..20: note = Description of Artificial Sequence: Synthetic oligonucleotide
  misc_feature 1..20: note = Target: SCN10A; (+) strand; PAM type: NRG; PAM sequence: AAG
  source 1..20: mol_type = other DNA
gtttaacatctatctaacca

SEQ ID NO: 32539 - DNA, 20 bp, synthetic construct
  misc_feature 1..20: note = Description of Artificial Sequence: Synthetic oligonucleotide
  misc_feature 1..20: note = Target: SCN10A; (+) strand; PAM type: NRG; PAM sequence: CAG
  source 1..20: mol_type = other DNA
acatctatctaaccaaagtc

SEQ ID NO: 32540 - DNA, 20 bp, synthetic construct
  misc_feature 1..20: note = Description of Artificial Sequence: Synthetic oligonucleotide
  misc_feature 1..20: note = Target: SCN10A; (+) strand; PAM type: NRG; PAM sequence: AAG
  source 1..20: mol_type = other DNA
tctatctaaccaaagtccag

SEQ ID NO: 32541 - DNA, 20 bp, synthetic construct
  misc_feature 1..20: note = Description of Artificial Sequence: Synthetic oligonucleotide
  misc_feature 1..20: note = Target: SCN10A; (+) strand; PAM type: NRG; PAM sequence: AGG
  source 1..20: mol_type = other DNA
ctatctaaccaaagtccaga

SEQ ID NO: 32542 - DNA, 20 bp, synthetic construct
  misc_feature 1..20: note = Description of Artificial Sequence: Synthetic oligonucleotide
  misc_feature 1..20: note = Target: SCN10A; (+) strand; PAM type: NRG; PAM sequence: GAG
  source 1..20: mol_type = other DNA
atctaaccaaagtccagaag

SEQ ID NO: 32543 - DNA, 20 bp, synthetic construct
  misc_feature 1..20: note = Description of Artificial Sequence: Synthetic oligonucleotide
  misc_feature 1..20: note = Target: SCN10A; (+) strand; PAM type: NRG; PAM sequence: TAG
  source 1..20: mol_type = other DNA
aagtccagaaggagaaaaaa

SEQ ID NO: 32544 - DNA, 20 bp, synthetic construct
  misc_feature 1..20: note = Description of Artificial Sequence: Synthetic oligonucleotide
  misc_feature 1..20: note = Target: SCN10A; (+) strand; PAM type: NRG; PAM sequence: TGG
  source 1..20: mol_type = other DNA
cagaaggagaaaaaatagaa

SEQ ID NO: 32545 - DNA, 20 bp, synthetic construct
  misc_feature 1..20: note = Description of Artificial Sequence: Synthetic oligonucleotide
  misc_feature 1..20: note = Target: SCN10A; (+) strand; PAM type: NRG; PAM sequence: TGG
  source 1..20: mol_type = other DNA
ggagaaaaaatagaatggcg

SEQ ID NO: 32546 - DNA, 20 bp, synthetic construct
  misc_feature 1..20: note = Description of Artificial Sequence: Synthetic oligonucleotide
  misc_feature 1..20: note = Target: SCN10A; (+) strand; PAM type: NRG; PAM sequence: GAG
  source 1..20: mol_type = other DNA
agaaaaaatagaatggcgtg

SEQ ID NO: 32547 - DNA, 20 bp, synthetic construct
  misc_feature 1..20: note = Description of Artificial Sequence: Synthetic oligonucleotide
  misc_feature 1..20: note = Target: SCN10A; (+) strand; PAM type: NRG; PAM sequence: AGG
  source 1..20: mol_type = other DNA
gaaaaaatagaatggcgtgg

SEQ ID NO: 32548 - DNA, 20 bp, synthetic construct
  misc_feature 1..20: note = Description of Artificial Sequence: Synthetic oligonucleotide
  misc_feature 1..20: note = Target: SCN10A; (+) strand; PAM type: NRG; PAM sequence: TGG
  source 1..20: mol_type = other DNA
atgactgcccacatcatgtc

SEQ ID NO: 32549 - DNA, 20 bp, synthetic construct
  misc_feature 1..20: note = Description of Artificial Sequence: Synthetic oligonucleotide
  misc_feature 1..20: note = Target: SCN10A; (+) strand; PAM type: NRG; PAM sequence: GGG
  source 1..20: mol_type = other DNA
tgactgcccacatcatgtct

SEQ ID NO: 32550 - DNA, 20 bp, synthetic construct
  misc_feature 1..20: note = Description of Artificial Sequence: Synthetic oligonucleotide
  misc_feature 1..20: note = Target: SCN10A; (+) strand; PAM type: NRG; PAM sequence: CAG
  source 1..20: mol_type = other DNA
catcatgtctgggaactttc

SEQ ID NO: 32551 - DNA, 20 bp, synthetic construct
  misc_feature 1..20: note = Description of Artificial Sequence: Synthetic oligonucleotide
  misc_feature 1..20: note = Target: SCN10A; (+) strand; PAM type: NRG; PAM sequence: AAG
  source 1..20: mol_type = other DNA
ctgggaactttccagaattg

SEQ ID NO: 32552 - DNA, 20 bp, synthetic construct
  misc_feature 1..20: note = Description of Artificial Sequence: Synthetic oligonucleotide
  misc_feature 1..20: note = Target: SCN10A; (+) strand; PAM type: NRG; PAM sequence: AAG
  source 1..20: mol_type = other DNA
tgaagaaaattacaaaacta

SEQ ID NO: 32553 - DNA, 20 bp, synthetic construct
  misc_feature 1..20: note = Description of Artificial Sequence: Synthetic oligonucleotide
  misc_feature 1..20: note = Target: SCN10A; (+) strand; PAM type: NRG; PAM sequence: AAG
  source 1..20: mol_type = other DNA
aattacaaaactaaagattc

SEQ ID NO: 32554 - DNA, 20 bp, synthetic construct
  misc_feature 1..20: note = Description of Artificial Sequence: Synthetic oligonucleotide
  misc_feature 1..20: note = Target: SCN10A; (+) strand; PAM type: NRG; PAM sequence: AAG
  source 1..20: mol_type = other DNA
tacaaaactaaagattcaag

SEQ ID NO: 32555 - DNA, 20 bp, synthetic construct
  misc_feature 1..20: note = Description of Artificial Sequence: Synthetic oligonucleotide
  misc_feature 1..20: note = Target: SCN10A; (+) strand; PAM type: NRG; PAM sequence: CAG
  source 1..20: mol_type = other DNA
aaactaaagattcaagaagt

SEQ ID NO: 32556 - DNA, 20 bp, synthetic construct
  misc_feature 1..20: note = Description of Artificial Sequence: Synthetic oligonucleotide
  misc_feature 1..20: note = Target: SCN10A; (+) strand; PAM type: NRG; PAM sequence: AAG
  source 1..20: mol_type = other DNA
tcaagaagtcagtatatctt

SEQ ID NO: 32557 - DNA, 20 bp, synthetic construct
  misc_feature 1..20: note = Description of Artificial Sequence: Synthetic oligonucleotide
  misc_feature 1..20: note = Target: SCN10A; (+) strand; PAM type: NRG; PAM sequence: TGG
  source 1..20: mol_type = other DNA
tatatcttaagcattataaa

SEQ ID NO: 32558 - DNA, 20 bp, synthetic construct
  misc_feature 1..20: note = Description of Artificial Sequence: Synthetic oligonucleotide
  misc_feature 1..20: note = Target: SCN10A; (+) strand; PAM type: NRG; PAM sequence: AAG
  source 1..20: mol_type = other DNA
tcttaagcattataaatgga

SEQ ID NO: 32559 - DNA, 20 bp, synthetic construct
  misc_feature 1..20: note = Description of Artificial Sequence: Synthetic oligonucleotide
  misc_feature 1..20: note = Target: SCN10A; (+) strand; PAM type: NRG; PAM sequence: AAG
  source 1..20: mol_type = other DNA
taagcattataaatggaaag

SEQ ID NO: 32560 - DNA, 20 bp, synthetic construct
  misc_feature 1..20: note = Description of Artificial Sequence: Synthetic oligonucleotide
  misc_feature 1..20: note = Target: SCN10A; (+) strand; PAM type: NRG; PAM sequence: TAG
  source 1..20: mol_type = other DNA
aatggaaagaagtccacacc

SEQ ID NO: 32561 - DNA, 20 bp, synthetic construct
  misc_feature 1..20: note = Description of Artificial Sequence: Synthetic oligonucleotide
  misc_feature 1..20: note = Target: SCN10A; (+) strand; PAM type: NRG; PAM sequence: CAG
  source 1..20: mol_type = other DNA
gtccacacctagacatatta

SEQ ID NO: 32562 - DNA, 20 bp, synthetic construct
  misc_feature 1..20: note = Description of Artificial Sequence: Synthetic oligonucleotide
  misc_feature 1..20: note = Target: SCN10A; (+) strand; PAM type: NRG; PAM sequence: CAG
  source 1..20: mol_type = other DNA
gacatattacagtgaaactg

SEQ ID NO: 32563 - DNA, 20 bp, synthetic construct
  misc_feature 1..20: note = Description of Artificial Sequence: Synthetic oligonucleotide
  misc_feature 1..20: note = Target: SCN10A; (+) strand; PAM type: NRG; PAM sequence: AAG
  source 1..20: mol_type = other DNA
agtgaaactgcagaacacca

SEQ ID NO: 32564 - DNA, 20 bp, synthetic construct
  misc_feature 1..20: note = Description of Artificial Sequence: Synthetic oligonucleotide
  misc_feature 1..20: note = Target: SCN10A; (+) strand; PAM type: NRG; PAM sequence: TGG
  source 1..20: mol_type = other DNA
aaactgcagaacaccaaaga

SEQ ID NO: 32565 - DNA, 20 bp, synthetic construct
  misc_feature 1..20: note = Description of Artificial Sequence: Synthetic oligonucleotide
  misc_feature 1..20: note = Target: SCN10A; (+) strand; PAM type: NRG; PAM sequence: TAG
  source 1..20: mol_type = other DNA
tgcagaacaccaaagatgga

SEQ ID NO: 32566 - DNA, 20 bp, synthetic construct
  misc_feature 1..20: note = Description of Artificial Sequence: Synthetic oligonucleotide
  misc_feature 1..20: note = Target: SCN10A; (+) strand; PAM type: NRG; PAM sequence: AAG
  source 1..20: mol_type = other DNA
agaacaccaaagatggatag

SEQ ID NO: 32567 - DNA, 20 bp, synthetic construct
  misc_feature 1..20: note = Description of Artificial Sequence: Synthetic oligonucleotide
  misc_feature 1..20: note = Target: SCN10A; (+) strand; PAM type: NRG; PAM sequence: AAG
  source 1..20: mol_type = other DNA
agatggatagaagatttaaa

SEQ ID NO: 32568 - DNA, 20 bp, synthetic construct
  misc_feature 1..20: note = Description of Artificial Sequence: Synthetic oligonucleotide
  misc_feature 1..20: note = Target: SCN10A; (+) strand; PAM type: NRG; PAM sequence: CAG
  source 1..20: mol_type = other DNA
tagaagatttaaaaagcatc

SEQ ID NO: 32569 - DNA, 20 bp, synthetic construct
  misc_feature 1..20: note = Description of Artificial Sequence: Synthetic oligonucleotide
  misc_feature 1..20: note = Target: SCN10A; (+) strand; PAM type: NRG; PAM sequence: AAG
  source 1..20: mol_type = other DNA
agatttaaaaagcatccaga

SEQ ID NO: 32570 - DNA, 20 bp, synthetic construct
  misc_feature 1..20: note = Description of Artificial Sequence: Synthetic oligonucleotide
  misc_feature 1..20: note = Target: SCN10A; (+) strand; PAM type: NRG; PAM sequence: AGG
  source 1..20: mol_type = other DNA
gatttaaaaagcatccagaa

SEQ ID NO: 32571 - DNA, 20 bp, synthetic construct
  misc_feature 1..20: note = Description of Artificial Sequence: Synthetic oligonucleotide
  misc_feature 1..20: note = Target: SCN10A; (+) strand; PAM type: NRG; PAM sequence: AAG
  source 1..20: mol_type = other DNA
ttaaaaagcatccagaaagg

SEQ ID NO: 32572 - DNA, 20 bp, synthetic construct
  misc_feature 1..20: note = Description of Artificial Sequence: Synthetic oligonucleotide
  misc_feature 1..20: note = Target: SCN10A; (+) strand; PAM type: NRG; PAM sequence: AGG
  source 1..20: mol_type = other DNA
taaaaagcatccagaaagga

SEQ ID NO: 32573 - DNA, 20 bp, synthetic construct
  misc_feature 1..20: note = Description of Artificial Sequence: Synthetic oligonucleotide
  misc_feature 1..20: note = Target: SCN10A; (+) strand; PAM type: NRG; PAM sequence: CAG
  source 1..20: mol_type = other DNA
atccagaaaggaaggaataa

SEQ ID NO: 32574 - DNA, 20 bp, synthetic construct
  misc_feature 1..20: note = Description of Artificial Sequence: Synthetic oligonucleotide
  misc_feature 1..20: note = Target: SCN10A; (+) strand; PAM type: NRG; PAM sequence: AAG
  source 1..20: mol_type = other DNA
aggaataacagttaaattga

SEQ ID NO: 32575 - DNA, 20 bp, synthetic construct
  misc_feature 1..20: note = Description of Artificial Sequence: Synthetic oligonucleotide
  misc_feature 1..20: note = Target: SCN10A; (+) strand; PAM type: NRG; PAM sequence: TAG
  source 1..20: mol_type = other DNA
attgaaagctgactgctcat

SEQ ID NO: 32576 - DNA, 20 bp, synthetic construct
  misc_feature 1..20: note = Description of Artificial Sequence: Synthetic oligonucleotide
  misc_feature 1..20: note = Target: SCN10A; (+) strand; PAM type: NRG; PAM sequence: TGG
  source 1..20: mol_type = other DNA
tgactgctcattagcaacaa

SEQ ID NO: 32577 - DNA, 20 bp, synthetic construct
  misc_feature 1..20: note = Description of Artificial Sequence: Synthetic oligonucleotide
  misc_feature 1..20: note = Target: SCN10A; (+) strand; PAM type: NRG; PAM sequence: GAG
  source 1..20: mol_type = other DNA
actgctcattagcaacaatg

SEQ ID NO: 32578 - DNA, 20 bp, synthetic construct
  misc_feature 1..20: note = Description of Artificial Sequence: Synthetic oligonucleotide
  misc_feature 1..20: note = Target: SCN10A; (+) strand; PAM type: NRG; PAM sequence: AGG
  source 1..20: mol_type = other DNA
ctgctcattagcaacaatgg

SEQ ID NO: 32579 - DNA, 20 bp, synthetic construct
  misc_feature 1..20: note = Description of Artificial Sequence: Synthetic oligonucleotide
  misc_feature 1..20: note = Target: SCN10A; (+) strand; PAM type: NRG; PAM sequence: TGG
  source 1..20: mol_type = other DNA
caacaatggaggctaattgt

SEQ ID NO: 32580 - DNA, 20 bp, synthetic construct
  misc_feature 1..20: note = Description of Artificial Sequence: Synthetic oligonucleotide
  misc_feature 1..20: note = Target: SCN10A; (+) strand; PAM type: NRG; PAM sequence: AAG
  source 1..20: mol_type = other DNA
ttggaatactatcttcactg

SEQ ID NO: 32581 - DNA, 20 bp, synthetic construct
  misc_feature 1..20: note = Description of Artificial Sequence: Synthetic oligonucleotide
  misc_feature 1..20: note = Target: SCN10A; (+) strand; PAM type: NRG; PAM sequence: AGG
  source 1..20: mol_type = other DNA
tggaatactatcttcactga

SEQ ID NO: 32582 - DNA, 20 bp, synthetic construct
  misc_feature 1..20: note = Description of Artificial Sequence: Synthetic oligonucleotide
  misc_feature 1..20: note = Target: SCN10A; (+) strand; PAM type: NRG; PAM sequence: AAG
  source 1..20: mol_type = other DNA
aatactatcttcactgaagg

SEQ ID NO: 32583 - DNA, 20 bp, synthetic construct
  misc_feature 1..20: note = Description of Artificial Sequence: Synthetic oligonucleotide
  misc_feature 1..20: note = Target: SCN10A; (+) strand; PAM type: NRG; PAM sequence: AAG
  source 1..20: mol_type = other DNA
atcttcactgaaggaagata

SEQ ID NO: 32584 - DNA, 20 bp, synthetic construct
  misc_feature 1..20: note = Description of Artificial Sequence: Synthetic oligonucleotide
  misc_feature 1..20: note = Target: SCN10A; (+) strand; PAM type: NRG; PAM sequence: TAG
  source 1..20: mol_type = other DNA
aaggaagataaagtatcaac

SEQ ID NO: 32585 - DNA, 20 bp, synthetic construct
  misc_feature 1..20: note = Description of Artificial Sequence: Synthetic oligonucleotide
  misc_feature 1..20: note = Target: SCN10A; (+) strand; PAM type: NRG; PAM sequence: AAG
  source 1..20: mol_type = other DNA
aactagaattttacattcat

SEQ ID NO: 32586 - DNA, 20 bp, synthetic construct
  misc_feature 1..20: note = Description of Artificial Sequence: Synthetic oligonucleotide
  misc_feature 1..20: note = Target: SCN10A; (+) strand; PAM type: NRG; PAM sequence: AAG
  source 1..20: mol_type = other DNA
ttcataagaaatgtctctca

SEQ ID NO: 32587 - DNA, 20 bp, synthetic construct
  misc_feature 1..20: note = Description of Artificial Sequence: Synthetic oligonucleotide
  misc_feature 1..20: note = Target: SCN10A; (+) strand; PAM type: NRG; PAM sequence: CGG
  source 1..20: mol_type = other DNA
agaaatgtctctcaaagaca

SEQ ID NO: 32588 - DNA, 20 bp, synthetic construct
  misc_feature 1..20: note = Description of Artificial Sequence: Synthetic oligonucleotide
  misc_feature 1..20: note = Target: SCN10A; (+) strand; PAM type: NRG; PAM sequence: GGG
  source 1..20: mol_type = other DNA
gaaatgtctctcaaagacac

SEQ ID NO: 32589 - DNA, 20 bp, synthetic construct
  misc_feature 1..20: note = Description of Artificial Sequence: Synthetic oligonucleotide
  misc_feature 1..20: note = Target: SCN10A; (+) strand; PAM type: NRG; PAM sequence: AAG
  source 1..20: mol_type = other DNA
tcaaagacacgggcaaactg

SEQ ID NO: 32590 - DNA, 20 bp, synthetic construct
  misc_feature 1..20: note = Description of Artificial Sequence: Synthetic oligonucleotide
  misc_feature 1..20: note = Target: SCN10A; (+) strand; PAM type: NRG; PAM sequence: GAG
  source 1..20: mol_type = other DNA
aaagacacgggcaaactgaa

SEQ ID NO: 32591 - DNA, 20 bp, synthetic construct
  misc_feature 1..20: note = Description of Artificial Sequence: Synthetic oligonucleotide
  misc_feature 1..20: note = Target: SCN10A; (+) strand; PAM type: NRG; PAM sequence: CAG
  source 1..20: mol_type = other DNA
gcaaactgaagagcaaattt

SEQ ID NO: 32592 - DNA, 20 bp, synthetic construct
  misc_feature 1..20: note = Description of Artificial Sequence: Synthetic oligonucleotide
  misc_feature 1..20: note = Target: SCN10A; (+) strand; PAM type: NRG; PAM sequence: AAG
  source 1..20: mol_type = other DNA
gagcaaatttcagataaaca

SEQ ID NO: 32593 - DNA, 20 bp, synthetic construct
  misc_feature 1..20: note = Description of Artificial Sequence: Synthetic oligonucleotide
  misc_feature 1..20: note = Target: SCN10A; (+) strand; PAM type: NRG; PAM sequence: GAG
  source 1..20: mol_type = other DNA
gcaaatttcagataaacaaa

SEQ ID NO: 32594 - DNA, 20 bp, synthetic construct
  misc_feature 1..20: note = Description of Artificial Sequence: Synthetic oligonucleotide
  misc_feature 1..20: note = Target: SCN10A; (+) strand; PAM type: NRG; PAM sequence: AGG
  source 1..20: mol_type = other DNA
caaatttcagataaacaaag

SEQ ID NO: 32595 - DNA, 20 bp, synthetic construct
  misc_feature 1..20: note = Description of Artificial Sequence: Synthetic oligonucleotide
  misc_feature 1..20: note = Target: SCN10A; (+) strand; PAM type: NRG; PAM sequence: TGG
  source 1..20: mol_type = other DNA
tcagataaacaaagaggtta

SEQ ID NO: 32596 - DNA, 20 bp, synthetic construct
  misc_feature 1..20: note = Description of Artificial Sequence: Synthetic oligonucleotide
  misc_feature 1..20: note = Target: SCN10A; (+) strand; PAM type: NRG; PAM sequence: CAG
  source 1..20: mol_type = other DNA
ataaacaaagaggttatggc

SEQ ID NO: 32597 - DNA, 20 bp, synthetic construct
  misc_feature 1..20: note = Description of Artificial Sequence: Synthetic oligonucleotide
  misc_feature 1..20: note = Target: SCN10A; (+) strand; PAM type: NRG; PAM sequence: AAG
  source 1..20: mol_type = other DNA
aacaaagaggttatggccag

SEQ ID NO: 32598 - DNA, 20 bp, synthetic construct
  misc_feature 1..20: note = Description of Artificial Sequence: Synthetic oligonucleotide
  misc_feature 1..20: note = Target: SCN10A; (+) strand; PAM type: NRG; PAM sequence: AGG
  source 1..20: mol_type = other DNA
acaaagaggttatggccaga

SEQ ID NO: 32599 - DNA, 20 bp, synthetic construct
  misc_feature 1..20: note = Description of Artificial Sequence: Synthetic oligonucleotide
  misc_feature 1..20: note = Target: SCN10A; (+) strand; PAM type: NRG; PAM sequence: AAG
  source 1..20: mol_type = other DNA
ggccagaaggcacttactaa

SEQ ID NO: 32600 - DNA, 20 bp, synthetic construct
  misc_feature 1..20: note = Description of Artificial Sequence: Synthetic oligonucleotide
  misc_feature 1..20: note = Target: SCN10A; (+) strand; PAM type: NRG; PAM sequence: AAG
  source 1..20: mol_type = other DNA
acttactaaaagaaattcta

SEQ ID NO: 32601 - DNA, 20 bp, synthetic construct
  misc_feature 1..20: note = Description of Artificial Sequence: Synthetic oligonucleotide
  misc_feature 1..20: note = Target: SCN10A; (+) strand; PAM type: NRG; PAM sequence: AGG
  source 1..20: mol_type = other DNA
cttactaaaagaaattctaa

SEQ ID NO: 32602 - DNA, 20 bp, synthetic construct
  misc_feature 1..20: note = Description of Artificial Sequence: Synthetic oligonucleotide
  misc_feature 1..20: note = Target: SCN10A; (+) strand; PAM type: NRG; PAM sequence: GAG
  source 1..20: mol_type = other DNA
tactaaaagaaattctaaag

SEQ ID NO: 32603 - DNA, 20 bp, synthetic construct
  misc_feature 1..20: note = Description of Artificial Sequence: Synthetic oligonucleotide
  misc_feature 1..20: note = Target: SCN10A; (+) strand; PAM type: NRG; PAM sequence: AGG
  source 1..20: mol_type = other DNA
actaaaagaaattctaaagg

SEQ ID NO: 32604 - DNA, 20 bp, synthetic construct
  misc_feature 1..20: note = Description of Artificial Sequence: Synthetic oligonucleotide
  misc_feature 1..20: note = Target: SCN10A; (+) strand; PAM type: NRG; PAM sequence: CAG
  source 1..20: mol_type = other DNA
aaattctaaaggaggtactt

SEQ ID NO: 32605 - DNA, 20 bp, synthetic construct
  misc_feature 1..20: note = Description of Artificial Sequence: Synthetic oligonucleotide
  misc_feature 1..20: note = Target: SCN10A; (+) strand; PAM type: NRG; PAM sequence: AGG
  source 1..20: mol_type = other DNA
aattctaaaggaggtacttc

SEQ ID NO: 32606 - DNA, 20 bp, synthetic construct
  misc_feature 1..20: note = Description of Artificial Sequence: Synthetic oligonucleotide
  misc_feature 1..20: note = Target: SCN10A; (+) strand; PAM type: NRG; PAM sequence: TAG
  source 1..20: mol_type = other DNA
tctaaaggaggtacttcagg

SEQ ID NO: 32607 - DNA, 20 bp, synthetic construct
  misc_feature 1..20: note = Description of Artificial Sequence: Synthetic oligonucleotide
  misc_feature 1..20: note = Target: SCN10A; (+) strand; PAM type: NRG; PAM sequence: TAG
  source 1..20: mol_type = other DNA
aaggaggtacttcaggtaga

SEQ ID NO: 32608 - DNA, 20 bp, synthetic construct
  misc_feature 1..20: note = Description of Artificial Sequence: Synthetic oligonucleotide
  misc_feature 1..20: note = Target: SCN10A; (+) strand; PAM type: NRG; PAM sequence: AAG
  source 1..20: mol_type = other DNA
aggtacttcaggtagataga

SEQ ID NO: 32609 - DNA, 20 bp, synthetic construct
  misc_feature 1..20: note = Description of Artificial Sequence: Synthetic oligonucleotide
  misc_feature 1..20: note = Target: SCN10A; (+) strand; PAM type: NRG; PAM sequence: CAG
  source 1..20: mol_type = other DNA
aggtagatagaaagtgatcc

SEQ ID NO: 32610 - DNA, 20 bp, synthetic construct
  misc_feature 1..20: note = Description of Artificial Sequence: Synthetic oligonucleotide
  misc_feature 1..20: note = Target: SCN10A; (+) strand; PAM type: NRG; PAM sequence: AAG
  source 1..20: mol_type = other DNA
tagatagaaagtgatcccag

SEQ ID NO: 32611 - DNA, 20 bp, synthetic construct
  misc_feature 1..20: note = Description of Artificial Sequence: Synthetic oligonucleotide
  misc_feature 1..20: note = Target: SCN10A; (+) strand; PAM type: NRG; PAM sequence: AAG
  source 1..20: mol_type = other DNA
atatgtaatgtgtaatatac

SEQ ID NO: 32612 - DNA, 20 bp, synthetic construct
  misc_feature 1..20: note = Description of Artificial Sequence: Synthetic oligonucleotide
  misc_feature 1..20: note = Target: SCN10A; (+) strand; PAM type: NRG; PAM sequence: AAG
  source 1..20: mol_type = other DNA
gaatgtgaaactgtgctcca

SEQ ID NO: 32613 - DNA, 20 bp, synthetic construct
  misc_feature 1..20: note = Description of Artificial Sequence: Synthetic oligonucleotide
  misc_feature 1..20: note = Target: SCN10A; (+) strand; PAM type: NRG; PAM sequence: AGG
  source 1..20: mol_type = other DNA
aatgtgaaactgtgctccaa

SEQ ID NO: 32614 - DNA, 20 bp, synthetic construct
  misc_feature 1..20: note = Description of Artificial Sequence: Synthetic oligonucleotide
  misc_feature 1..20: note = Target: SCN10A; (+) strand; PAM type: NRG; PAM sequence: GGG
  source 1..20: mol_type = other DNA
atgtgaaactgtgctccaaa

SEQ ID NO: 32615 - DNA, 20 bp, synthetic construct
  misc_feature 1..20: note = Description of Artificial Sequence: Synthetic oligonucleotide
  misc_feature 1..20: note = Target: SCN10A; (+) strand; PAM type: NRG; PAM sequence: AAG
  source 1..20: mol_type = other DNA
aactgtgctccaaagggttg

SEQ ID NO: 32616 - DNA, 20 bp, synthetic construct
  misc_feature 1..20: note = Description of Artificial Sequence: Synthetic oligonucleotide
  misc_feature 1..20: note = Target: SCN10A; (+) strand; PAM type: NRG; PAM sequence: TAG
  source 1..20: mol_type = other DNA
gaaatcaataactaaatttt

SEQ ID NO: 32617 - DNA, 20 bp, synthetic construct
  misc_feature 1..20: note = Description of Artificial Sequence: Synthetic oligonucleotide
  misc_feature 1..20: note = Target: SCN10A; (+) strand; PAM type: NRG; PAM sequence: AGG
  source 1..20: mol_type = other DNA
aaatcaataactaaattttt

SEQ ID NO: 32618 - DNA, 20 bp, synthetic construct
  misc_feature 1..20: note = Description of Artificial Sequence: Synthetic oligonucleotide
  misc_feature 1..20: note = Target: SCN10A; (+) strand; PAM type: NRG; PAM sequence: CAG
  source 1..20: mol_type = other DNA
taactaaatttttaggctta

SEQ ID NO: 32619 - DNA, 20 bp, synthetic construct
  misc_feature 1..20: note = Description of Artificial Sequence: Synthetic oligonucleotide
  misc_feature 1..20: note = Target: SCN10A; (+) strand; PAM type: NRG; PAM sequence: AGG
  source 1..20: mol_type = other DNA
aactaaatttttaggcttac

SEQ ID NO: 32620 - DNA, 20 bp, synthetic construct
  misc_feature 1..20: note = Description of Artificial Sequence: Synthetic oligonucleotide
  misc_feature 1..20: note = Target: SCN10A; (+) strand; PAM type: NRG; PAM sequence: CAG
  source 1..20: mol_type = other DNA
tttttaggcttacaggatac

SEQ ID NO: 32621 - DNA, 20 bp, synthetic construct
  misc_feature 1..20: note = Description of Artificial Sequence: Synthetic oligonucleotide
  misc_feature 1..20: note = Target: SCN10A; (+) strand; PAM type: NRG; PAM sequence: AAG
  source 1..20: mol_type = other DNA
aggcttacaggataccagat

SEQ ID NO: 32622 - DNA, 20 bp, synthetic construct
  misc_feature 1..20: note = Description of Artificial Sequence: Synthetic oligonucleotide
  misc_feature 1..20: note = Target: SCN10A; (+) strand; PAM type: NRG; PAM sequence: AAG
  source 1..20: mol_type = other DNA
gaaactcaaactgtgttcca

SEQ ID NO: 32623 - DNA, 20 bp, synthetic construct
  misc_feature 1..20: note = Description of Artificial Sequence: Synthetic oligonucleotide
  misc_feature 1..20: note = Target: SCN10A; (+) strand; PAM type: NRG; PAM sequence: GAG
  source 1..20: mol_type = other DNA
aactcaaactgtgttccaaa

SEQ ID NO: 32624 - DNA, 20 bp, synthetic construct
  misc_feature 1..20: note = Description of Artificial Sequence: Synthetic oligonucleotide
  misc_feature 1..20: note = Target: SCN10A; (+) strand; PAM type: NRG; PAM sequence: AAG
  source 1..20: mol_type = other DNA
caaactgtgttccaaagagt

SEQ ID NO: 32625 - DNA, 20 bp, synthetic construct
  misc_feature 1..20: note = Description of Artificial Sequence: Synthetic oligonucleotide
  misc_feature 1..20: note = Target: SCN10A; (+) strand; PAM type: NRG; PAM sequence: CAG
  source 1..20: mol_type = other DNA
tgttccaaagagtaagaaat

SEQ ID NO: 32626 - DNA, 20 bp, synthetic construct
  misc_feature 1..20: note = Description of Artificial Sequence: Synthetic oligonucleotide
  misc_feature 1..20: note = Target: SCN10A; (+) strand; PAM type: NRG; PAM sequence: GAG
  source 1..20: mol_type = other DNA
agtaacttacaaaaattctt

SEQ ID NO: 32627 - DNA, 20 bp, synthetic construct
  misc_feature 1..20: note = Description of Artificial Sequence: Synthetic oligonucleotide
  misc_feature 1..20: note = Target: SCN10A; (+) strand; PAM type: NRG; PAM sequence: TAG
  source 1..20: mol_type = other DNA
tacaaaaattcttgagtttt

SEQ ID NO: 32628 - DNA, 20 bp, synthetic construct
  misc_feature 1..20: note = Description of Artificial Sequence: Synthetic oligonucleotide
  misc_feature 1..20: note = Target: SCN10A; (+) strand; PAM type: NRG; PAM sequence: AGG
  source 1..20: mol_type = other DNA
acaaaaattcttgagttttt

SEQ ID NO: 32629 - DNA, 20 bp, synthetic construct
  misc_feature 1..20: note = Description of Artificial Sequence: Synthetic oligonucleotide
  misc_feature 1..20: note = Target: SCN10A; (+) strand; PAM type: NRG; PAM sequence: TAG
  source 1..20: mol_type = other DNA
aaattcttgagtttttagga

SEQ ID NO: 32630 - DNA, 20 bp, synthetic construct
  misc_feature 1..20: note = Description of Artificial Sequence: Synthetic oligonucleotide
  misc_feature 1..20: note = Target: SCN10A; (+) strand; PAM type: NRG; PAM sequence: CAG
  source 1..20: mol_type = other DNA
ttcttgagtttttaggatag

SEQ ID NO: 32631 - DNA, 20 bp, synthetic construct
  misc_feature 1..20: note = Description of Artificial Sequence: Synthetic oligonucleotide
  misc_feature 1..20: note = Target: SCN10A; (+) strand; PAM type: NRG; PAM sequence: TAG
  source 1..20: mol_type = other DNA
tgagtttttaggatagcaga

SEQ ID NO: 32632 - DNA, 20 bp, synthetic construct
  misc_feature 1..20: note = Description of Artificial Sequence: Synthetic oligonucleotide
  misc_feature 1..20: note = Target: SCN10A; (+) strand; PAM type: NRG; PAM sequence: AGG
  source 1..20: mol_type = other DNA
gagtttttaggatagcagat

SEQ ID NO: 32633 - DNA, 20 bp, synthetic construct
  misc_feature 1..20: note = Description of Artificial Sequence: Synthetic oligonucleotide
  misc_feature 1..20: note = Target: SCN10A; (+) strand; PAM type: NRG; PAM sequence: AAG
  source 1..20: mol_type = other DNA
tttaggatagcagataggta

SEQ ID NO: 32634 - DNA, 20 bp, synthetic construct
  misc_feature 1..20: note = Description of Artificial Sequence: Synthetic oligonucleotide
  misc_feature 1..20: note = Target: SCN10A; (+) strand; PAM type: NRG; PAM sequence: GAG
  source 1..20: mol_type = other DNA
aggtaaagaaacaacttgct

SEQ ID NO: 32635 - DNA, 20 bp, synthetic construct
  misc_feature 1..20: note = Description of Artificial Sequence: Synthetic oligonucleotide
  misc_feature 1..20: note = Target: SCN10A; (+) strand; PAM type: NRG; PAM sequence: CAG
  source 1..20: mol_type = other DNA
cttgtgtgatgatgaaaaaa

SEQ ID NO: 32636 - DNA, 20 bp, synthetic construct
  misc_feature 1..20: note = Description of Artificial Sequence: Synthetic oligonucleotide
  misc_feature 1..20: note = Target: SCN10A; (+) strand; PAM type: NRG; PAM sequence: AGG
  source 1..20: mol_type = other DNA
ttgtgtgatgatgaaaaaac

SEQ ID NO: 32637 - DNA, 20 bp, synthetic construct
  misc_feature 1..20: note = Description of Artificial Sequence: Synthetic oligonucleotide
  misc_feature 1..20: note = Target: SCN10A; (+) strand; PAM type: NRG; PAM sequence: TGG
  source 1..20: mol_type = other DNA
aaaaacaggctgaaatcaat

SEQ ID NO: 32638 - DNA, 20 bp, synthetic construct
  misc_feature 1..20: note = Description of Artificial Sequence: Synthetic oligonucleotide
  misc_feature 1..20: note = Target: SCN10A; (+) strand; PAM type: NRG; PAM sequence: CAG
  source 1..20: mol_type = other DNA
aggctgaaatcaattggaac

SEQ ID NO: 32639 - DNA, 20 bp, synthetic construct
  misc_feature 1..20: note = Description of Artificial Sequence: Synthetic oligonucleotide
  misc_feature 1..20: note = Target: SCN10A; (+) strand; PAM type: NRG; PAM sequence: AGG
  source 1..20: mol_type = other DNA
ggctgaaatcaattggaacc

SEQ ID NO: 32640 - DNA, 20 bp, synthetic construct
  misc_feature 1..20: note = Description of Artificial Sequence: Synthetic oligonucleotide
  misc_feature 1..20: note = Target: SCN10A; (+) strand; PAM type: NRG; PAM sequence: TGG
  source 1..20: mol_type = other DNA
gaaatcaattggaaccagga

SEQ ID NO: 32641 - DNA, 20 bp, synthetic construct
  misc_feature 1..20: note = Description of Artificial Sequence: Synthetic oligonucleotide
  misc_feature 1..20: note = Target: SCN10A; (+) strand; PAM type: NRG; PAM sequence: TGG
  source 1..20: mol_type = other DNA
ttggaaccaggatggccgac

SEQ ID NO: 32642 - DNA, 20 bp, synthetic construct
  misc_feature 1..20: note = Description of Artificial Sequence: Synthetic oligonucleotide
  misc_feature 1..20: note = Target: SCN10A; (+) strand; PAM type: NRG; PAM sequence: GAG
  source 1..20: mol_type = other DNA
ggaaccaggatggccgactg

SEQ ID NO: 32643 - DNA, 20 bp, synthetic construct
  misc_feature 1..20: note = Description of Artificial Sequence: Synthetic oligonucleotide
  misc_feature 1..20: note = Target: SCN10A; (+) strand; PAM type: NRG; PAM sequence: CAG
  source 1..20: mol_type = other DNA
atggccgactggagtttgtg

SEQ ID NO: 32644 - DNA, 20 bp, synthetic construct
  misc_feature 1..20: note = Description of Artificial Sequence: Synthetic oligonucleotide
  misc_feature 1..20: note = Target: SCN10A; (+) strand; PAM type: NRG; PAM sequence: GAG
  source 1..20: mol_type = other DNA
gactggagtttgtgcagaat

SEQ ID NO: 32645 - DNA, 20 bp, synthetic construct
  misc_feature 1..20: note = Description of Artificial Sequence: Synthetic oligonucleotide
  misc_feature 1..20: note = Target: SCN10A; (+) strand; PAM type: NRG; PAM sequence: TGG
  source 1..20: mol_type = other DNA
gaatgagcttgctgacgtca

SEQ ID NO: 32646 - DNA, 20 bp, synthetic construct
  misc_feature 1..20: note = Description of Artificial Sequence: Synthetic oligonucleotide
  misc_feature 1..20: note = Target: SCN10A; (+) strand; PAM type: NRG; PAM sequence: CAG
  source 1..20: mol_type = other DNA
tattgcatactaactccccc

SEQ ID NO: 32647 - DNA, 20 bp, synthetic construct
  misc_feature 1..20: note = Description of Artificial Sequence: Synthetic oligonucleotide
  misc_feature 1..20: note = Target: SCN10A; (+) strand; PAM type: NRG; PAM sequence: GAG
  source 1..20: mol_type = other DNA
gatttgcatatgcaacccat

SEQ ID NO: 32648 - DNA, 20 bp, synthetic construct
  misc_feature 1..20: note = Description of Artificial Sequence: Synthetic oligonucleotide
  misc_feature 1..20: note = Target: SCN10A; (+) strand; PAM type: NRG; PAM sequence: AAG
  source 1..20: mol_type = other DNA
tgcatatgcaacccatgagt

SEQ ID NO: 32649 - DNA, 20 bp, synthetic construct
  misc_feature 1..20: note = Description of Artificial Sequence: Synthetic oligonucleotide
  misc_feature 1..20: note = Target: SCN10A; (+) strand; PAM type: NRG; PAM sequence: AAG
  source 1..20: mol_type = other DNA
gcaacccatgagtaagcatg

SEQ ID NO: 32650 - DNA, 20 bp, synthetic construct
  misc_feature 1..20: note = Description of Artificial Sequence: Synthetic oligonucleotide
  misc_feature 1..20: note = Target: SCN10A; (+) strand; PAM type: NRG; PAM sequence: GAG
  source 1..20: mol_type = other DNA
aacccatgagtaagcatgaa

SEQ ID NO: 32651 - DNA, 20 bp, synthetic construct
  misc_feature 1..20: note = Description of Artificial Sequence: Synthetic oligonucleotide
  misc_feature 1..20: note = Target: SCN10A; (+) strand; PAM type: NRG; PAM sequence: CAG
  source 1..20: mol_type = other DNA
agcatgaagagataactgtg

SEQ ID NO: 32652 - DNA, 20 bp, synthetic construct
  misc_feature 1..20: note = Description of Artificial Sequence: Synthetic oligonucleotide
  misc_feature 1..20: note = Target: SCN10A; (+) strand; PAM type: NRG; PAM sequence: AGG
  source 1..20: mol_type = other DNA
gcatgaagagataactgtgc

SEQ ID NO: 32653 - DNA, 20 bp, synthetic construct
  misc_feature 1..20: note = Description of Artificial Sequence: Synthetic oligonucleotide
  misc_feature 1..20: note = Target: SCN10A; (+) strand; PAM type: NRG; PAM sequence: TGG
  source 1..20: mol_type = other DNA
gagataactgtgcaggccca

SEQ ID NO: 32654 - DNA, 20 bp, synthetic construct
  misc_feature 1..20: note = Description of Artificial Sequence: Synthetic oligonucleotide
  misc_feature 1..20: note = Target: SCN10A; (+) strand; PAM type: NRG; PAM sequence: CGG
  source 1..20: mol_type = other DNA
caccaatcacctgcaaatcc

SEQ ID NO: 32655 - DNA, 20 bp, synthetic construct
  misc_feature 1..20: note = Description of Artificial Sequence: Synthetic oligonucleotide
  misc_feature 1..20: note = Target: SCN10A; (+) strand; PAM type: NRG; PAM sequence: AAG
  source 1..20: mol_type = other DNA
ctaataaaaatactgccttg

SEQ ID NO: 32656 - DNA, 20 bp, synthetic construct
  misc_feature 1..20: note = Description of Artificial Sequence: Synthetic oligonucleotide
  misc_feature 1..20: note = Target: SCN10A; (+) strand; PAM type: NRG; PAM sequence: CAG
  source 1..20: mol_type = other DNA
taaaaatactgccttgaaga

SEQ ID NO: 32657 - DNA, 20 bp, synthetic construct
  misc_feature 1..20: note = Description of Artificial Sequence: Synthetic oligonucleotide
  misc_feature 1..20: note = Target: SCN10A; (+) strand; PAM type: NRG; PAM sequence: CAG
  source 1..20: mol_type = other DNA
atactgccttgaagacagca

SEQ ID NO: 32658 - DNA, 20 bp, synthetic construct
  misc_feature 1..20: note = Description of Artificial Sequence: Synthetic oligonucleotide
  misc_feature 1..20: note = Target: SCN10A; (+) strand; PAM type: NRG; PAM sequence: AGG
  source 1..20: mol_type = other DNA
tactgccttgaagacagcac

SEQ ID NO: 32659 - DNA, 20 bp, synthetic construct
  misc_feature 1..20: note = Description of Artificial Sequence: Synthetic oligonucleotide
  misc_feature 1..20: note = Target: SCN10A; (+) strand; PAM type: NRG; PAM sequence: GGG
  source 1..20: mol_type = other DNA
actgccttgaagacagcaca

SEQ ID NO: 32660 - DNA, 20 bp, synthetic construct
  misc_feature 1..20: note = Description of Artificial Sequence: Synthetic oligonucleotide
  misc_feature 1..20: note = Target: SCN10A; (+) strand; PAM type: NRG; PAM sequence: GAG
  source 1..20: mol_type = other DNA
tgccttgaagacagcacagg

SEQ ID NO: 32661 - DNA, 20 bp, synthetic construct
  misc_feature 1..20: note = Description of Artificial Sequence: Synthetic oligonucleotide
  misc_feature 1..20: note = Target: SCN10A; (+) strand; PAM type: NRG; PAM sequence: CAG
  source 1..20: mol_type = other DNA
ttgaagacagcacagggaga

SEQ ID NO: 32662 - DNA, 20 bp, synthetic construct
  misc_feature 1..20: note = Description of Artificial Sequence: Synthetic oligonucleotide
  misc_feature 1..20: note = Target: SCN10A; (+) strand; PAM type: NRG; PAM sequence: GAG
  source 1..20: mol_type = other DNA
cagcacagggagacagatct

SEQ ID NO: 32663 - DNA, 20 bp, synthetic construct
  misc_feature 1..20: note = Description of Artificial Sequence: Synthetic oligonucleotide
  misc_feature 1..20: note = Target: SCN10A; (+) strand; PAM type: NRG; PAM sequence: CAG
  source 1..20: mol_type = other DNA
ttgacctcctgtcttcttgc

SEQ ID NO: 32664 - DNA, 20 bp, synthetic construct
  misc_feature 1..20: note = Description of Artificial Sequence: Synthetic oligonucleotide
  misc_feature 1..20: note = Target: SCN10A; (+) strand; PAM type: NRG; PAM sequence: CAG
  source 1..20: mol_type = other DNA
cctcctgtcttcttgccagc

SEQ ID NO: 32665 - DNA, 20 bp, synthetic construct
  misc_feature 1..20: note = Description of Artificial Sequence: Synthetic oligonucleotide
  misc_feature 1..20: note = Target: SCN10A; (+) strand; PAM type: NRG; PAM sequence: CAG
  source 1..20: mol_type = other DNA
tcttcttgccagccagcttg

SEQ ID NO: 32666 - DNA, 20 bp, synthetic construct
  misc_feature 1..20: note = Description of Artificial Sequence: Synthetic oligonucleotide
  misc_feature 1..20: note = Target: SCN10A; (+) strand; PAM type: NRG; PAM sequence: AAG
  source 1..20: mol_type = other DNA
gccagccagcttgcagtatt

SEQ ID NO: 32667 - DNA, 20 bp, synthetic construct
  misc_feature 1..20: note = Description of Artificial Sequence: Synthetic oligonucleotide
  misc_feature 1..20: note = Target: SCN10A; (+) strand; PAM type: NRG; PAM sequence: AAG
  source 1..20: mol_type = other DNA
ttaagcttttcttttctcaa

SEQ ID NO: 32668 - DNA, 20 bp, synthetic construct
  misc_feature 1..20: note = Description of Artificial Sequence: Synthetic oligonucleotide
  misc_feature 1..20: note = Target: SCN10A; (+) strand; PAM type: NRG; PAM sequence: TGG
  source 1..20: mol_type = other DNA
cttttcttttctcaaaagcc

SEQ ID NO: 32669 - DNA, 20 bp, synthetic construct
  misc_feature 1..20: note = Description of Artificial Sequence: Synthetic oligonucleotide
  misc_feature 1..20: note = Target: SCN10A; (+) strand; PAM type: NRG; PAM sequence: TGG
  source 1..20: mol_type = other DNA
aaagcctggtgtcctcgtct

SEQ ID NO: 32670 - DNA, 20 bp, synthetic construct
  misc_feature 1..20: note = Description of Artificial Sequence: Synthetic oligonucleotide
  misc_feature 1..20: note = Target: SCN10A; (+) strand; PAM type: NRG; PAM sequence: AAG
  source 1..20: mol_type = other DNA
tgtcctcgtcttggcttcca

SEQ ID NO: 32671 - DNA, 20 bp, synthetic construct
  misc_feature 1..20: note = Description of Artificial Sequence: Synthetic oligonucleotide
  misc_feature 1..20: note = Target: SCN10A; (+) strand; PAM type: NRG; PAM sequence: TAG
  source 1..20: mol_type = other DNA
cgtcttggcttccaaagtca

SEQ ID NO: 32672 - DNA, 20 bp, synthetic construct
  misc_feature 1..20: note = Description of Artificial Sequence: Synthetic oligonucleotide
  misc_feature 1..20: note = Target: SCN10A; (+) strand; PAM type: NRG; PAM sequence: TGG
  source 1..20: mol_type = other DNA
ggcttccaaagtcatagtat

SEQ ID NO: 32673 - DNA, 20 bp, synthetic construct
  misc_feature 1..20: note = Description of Artificial Sequence: Synthetic oligonucleotide
  misc_feature 1..20: note = Target: SCN10A; (+) strand; PAM type: NRG; PAM sequence: TAG
  source 1..20: mol_type = other DNA
aaagtcatagtattggcttc

SEQ ID NO: 32674 - DNA, 20 bp, synthetic construct
  misc_feature 1..20: note = Description of Artificial Sequence: Synthetic oligonucleotide
  misc_feature 1..20: note = Target: SCN10A; (+) strand; PAM type: NRG; PAM sequence: GAG
  source 1..20: mol_type = other DNA
agtcatagtattggcttcta

SEQ ID NO: 32675 - DNA, 20 bp, synthetic construct
  misc_feature 1..20: note = Description of Artificial Sequence: Synthetic oligonucleotide
  misc_feature 1..20: note = Target: SCN10A; (+) strand; PAM type: NRG; PAM sequence: TGG
  source 1..20: mol_type = other DNA
agtattggcttctagagcat

SEQ ID NO: 32676 - DNA, 20 bp, synthetic construct
  misc_feature 1..20: note = Description of Artificial Sequence: Synthetic oligonucleotide
  misc_feature 1..20: note = Target: SCN10A; (+) strand; PAM type: NRG; PAM sequence: GGG
  source 1..20: mol_type = other DNA
gtattggcttctagagcatt

SEQ ID NO: 32677 - DNA, 20 bp, synthetic construct
  misc_feature 1..20: note = Description of Artificial Sequence: Synthetic oligonucleotide
  misc_feature 1..20: note = Target: SCN10A; (+) strand; PAM type: NRG; PAM sequence: CAG
  source 1..20: mol_type = other DNA
ttggcttctagagcattggg

SEQ ID NO: 32678 - DNA, 20 bp, synthetic construct
  misc_feature 1..20: note = Description of Artificial Sequence: Synthetic oligonucleotide
  misc_feature 1..20: note = Target: SCN10A; (+) strand; PAM type: NRG; PAM sequence: GAG
  source 1..20: mol_type = other DNA
cttctagagcattgggcagt

SEQ ID NO: 32679 - DNA, 20 bp, synthetic construct
  misc_feature 1..20: note = Description of Artificial Sequence: Synthetic oligonucleotide
  misc_feature 1..20: note = Target: SCN10A; (+) strand; PAM type: NRG; PAM sequence: TGG
  source 1..20: mol_type = other DNA
attgggcagtgagcccccac

SEQ ID NO: 32680 - DNA, 20 bp, synthetic construct
  misc_feature 1..20: note = Description of Artificial Sequence: Synthetic oligonucleotide
  misc_feature 1..20: note = Target: SCN10A; (+) strand; PAM type: NRG; PAM sequence: AAG
  source 1..20: mol_type = other DNA
cccccactggctctataaca

SEQ ID NO: 32681 - DNA, 20 bp, synthetic construct
  misc_feature 1..20: note = Description of Artificial Sequence: Synthetic oligonucleotide
  misc_feature 1..20: note = Target: SCN10A; (+) strand; PAM type: NRG; PAM sequence: AGG
  source 1..20: mol_type = other DNA
ccccactggctctataacaa

SEQ ID NO: 32682 - DNA, 20 bp, synthetic construct
  misc_feature 1..20: note = Description of Artificial Sequence: Synthetic oligonucleotide
  misc_feature 1..20: note = Target: SCN10A; (+) strand; PAM type: NRG; PAM sequence: AAG
  source 1..20: mol_type = other DNA
ggctctataacaaaggtata

SEQ ID NO: 32683 - DNA, 20 bp, synthetic construct
  misc_feature 1..20: note = Description of Artificial Sequence: Synthetic oligonucleotide
  misc_feature 1..20: note = Target: SCN10A; (+) strand; PAM type: NRG; PAM sequence: GAG
  source 1..20: mol_type = other DNA
ctctataacaaaggtataaa

SEQ ID NO: 32684 - DNA, 20 bp, synthetic construct
  misc_feature 1..20: note = Description of Artificial Sequence: Synthetic oligonucleotide
  misc_feature 1..20: note = Target: SCN10A; (+) strand; PAM type: NRG; PAM sequence: AAG
  source 1..20: mol_type = other DNA
ataacaaaggtataaagagc

SEQ ID NO: 32685 - DNA, 20 bp, synthetic construct
  misc_feature 1..20: note = Description of Artificial Sequence: Synthetic oligonucleotide
  misc_feature 1..20: note = Target: SCN10A; (+) strand; PAM type: NRG; PAM sequence: AAG
  source 1..20: mol_type = other DNA
caaaggtataaagagcaaga

SEQ ID NO: 32686 - DNA, 20 bp, synthetic construct
  misc_feature 1..20: note = Description of Artificial Sequence: Synthetic oligonucleotide
  misc_feature 1..20: note = Target: SCN10A; (+) strand; PAM type: NRG; PAM sequence: AAG
  source 1..20: mol_type = other DNA
ataaagagcaagaaagtgct

SEQ ID NO: 32687 - DNA, 20 bp, synthetic construct
  misc_feature 1..20: note = Description of Artificial Sequence: Synthetic oligonucleotide
  misc_feature 1..20: note = Target: SCN10A; (+) strand; PAM type: NRG; PAM sequence: GAG
  source 1..20: mol_type = other DNA
agcaagaaagtgctaagcat

SEQ ID NO: 32688 - DNA, 20 bp, synthetic construct
  misc_feature 1..20: note = Description of Artificial Sequence: Synthetic oligonucleotide
  misc_feature 1..20: note = Target: SCN10A; (+) strand; PAM type: NRG; PAM sequence: GAG
  source 1..20: mol_type = other DNA
caagaaagtgctaagcatga

SEQ ID NO: 32689 - DNA, 20 bp, synthetic construct
  misc_feature 1..20: note = Description of Artificial Sequence: Synthetic oligonucleotide
  misc_feature 1..20: note = Target: SCN10A; (+) strand; PAM type: NRG; PAM sequence: GAG
  source 1..20: mol_type = other DNA
agtgaatctaaataaacatt

SEQ ID NO: 32690 - DNA, 20 bp, synthetic construct
  misc_feature 1..20: note = Description of Artificial Sequence: Synthetic oligonucleotide
  misc_feature 1..20: note = Target: SCN10A; (+) strand; PAM type: NRG; PAM sequence: TGG
  source 1..20: mol_type = other DNA
gaatctaaataaacattgag

SEQ ID NO: 32691 - DNA, 20 bp, synthetic construct
  misc_feature 1..20: note = Description of Artificial Sequence: Synthetic oligonucleotide
  misc_feature 1..20: note = Target: SCN10A; (+) strand; PAM type: NRG; PAM sequence: GAG
  source 1..20: mol_type = other DNA
acacaacaacaatgtcttgt

SEQ ID NO: 32692 - DNA, 20 bp, synthetic construct
  misc_feature 1..20: note = Description of Artificial Sequence: Synthetic oligonucleotide
  misc_feature 1..20: note = Target: SCN10A; (+) strand; PAM type: NRG; PAM sequence: TGG
  source 1..20: mol_type = other DNA
caacaatgtcttgtgagatg

SEQ ID NO: 32693 - DNA, 20 bp, synthetic construct
  misc_feature 1..20: note = Description of Artificial Sequence: Synthetic oligonucleotide
  misc_feature 1..20: note = Target: SCN10A; (+) strand; PAM type: NRG; PAM sequence: AAG
  source 1..20: mol_type = other DNA
caatgtcttgtgagatgtgg

SEQ ID NO: 32694 - DNA, 20 bp, synthetic construct
  misc_feature 1..20: note = Description of Artificial Sequence: Synthetic oligonucleotide
  misc_feature 1..20: note = Target: SCN10A; (+) strand; PAM type: NRG; PAM sequence: GAG
  source 1..20: mol_type = other DNA
atgtcttgtgagatgtggaa

SEQ ID NO: 32695 - DNA, 20 bp, synthetic construct
  misc_feature 1..20: note = Description of Artificial Sequence: Synthetic oligonucleotide
  misc_feature 1..20: note = Target: SCN10A; (+) strand; PAM type: NRG; PAM sequence: TGG
  source 1..20: mol_type = other DNA
ttgtgagatgtggaagagac

SEQ ID NO: 32696 - DNA, 20 bp, synthetic construct
  misc_feature 1..20: note = Description of Artificial Sequence: Synthetic oligonucleotide
  misc_feature 1..20: note = Target: SCN10A; (+) strand; PAM type: NRG; PAM sequence: TAG
  source 1..20: mol_type = other DNA
tgtggaagagactggtcata

SEQ ID NO: 32697 - DNA, 20 bp, synthetic construct
  misc_feature 1..20: note = Description of Artificial Sequence: Synthetic oligonucleotide
  misc_feature 1..20: note = Target: SCN10A; (+) strand; PAM type: NRG; PAM sequence: CAG
  source 1..20: mol_type = other DNA
tccattcacttttctcctcc

SEQ ID NO: 32698 - DNA, 20 bp, synthetic construct
  misc_feature 1..20: note = Description of Artificial Sequence: Synthetic oligonucleotide
  misc_feature 1..20: note = Target: SCN10A; (+) strand; PAM type: NRG; PAM sequence: CGG
  source 1..20: mol_type = other DNA
ttttctcctcccagacacaa

SEQ ID NO: 32699 - DNA, 20 bp, synthetic construct
  misc_feature 1..20: note = Description of Artificial Sequence: Synthetic oligonucleotide
  misc_feature 1..20: note = Target: SCN10A; (+) strand; PAM type: NRG; PAM sequence: AAG
  source 1..20: mol_type = other DNA
tctcctcccagacacaacgg

SEQ ID NO: 32700 - DNA, 20 bp, synthetic construct
  misc_feature 1..20: note = Description of Artificial Sequence: Synthetic oligonucleotide
  misc_feature 1..20: note = Target: SCN10A; (+) strand; PAM type: NRG; PAM sequence: CAG
  source 1..20: mol_type = other DNA
cacaacggaagactgttttc

SEQ ID NO: 32701 - DNA, 20 bp, synthetic construct
  misc_feature 1..20: note = Description of Artificial Sequence: Synthetic oligonucleotide
  misc_feature 1..20: note = Target: SCN10A; (+) strand; PAM type: NRG; PAM sequence: TAG
  source 1..20: mol_type = other DNA
tttccagttttgcttgcaaa

SEQ ID NO: 32702 - DNA, 20 bp, synthetic construct
  misc_feature 1..20: note = Description of Artificial Sequence: Synthetic oligonucleotide
  misc_feature 1..20: note = Target: SCN10A; (+) strand; PAM type: NRG; PAM sequence: TGG
  source 1..20: mol_type = other DNA
cagttttgcttgcaaatagt

SEQ ID NO: 32703 - DNA, 20 bp, synthetic construct
  misc_feature 1..20: note = Description of Artificial Sequence: Synthetic oligonucleotide
  misc_feature 1..20: note = Target: SCN10A; (+) strand; PAM type: NRG; PAM sequence: GGG
  source 1..20: mol_type = other DNA
agttttgcttgcaaatagtt

SEQ ID NO: 32704 - DNA, 20 bp, synthetic construct
  misc_feature 1..20: note = Description of Artificial Sequence: Synthetic oligonucleotide
  misc_feature 1..20: note = Target: SCN10A; (+) strand; PAM type: NRG; PAM sequence: GGG
  source 1..20: mol_type = other DNA
gttttgcttgcaaatagttg

SEQ ID NO: 32705 - DNA, 20 bp, synthetic construct
  misc_feature 1..20: note = Description of Artificial Sequence: Synthetic oligonucleotide
  misc_feature 1..20: note = Target: SCN10A; (+) strand; PAM type: NRG; PAM sequence: TAG
  source 1..20: mol_type = other DNA
gcaaatagttggggtcatgt

SEQ ID NO: 32706 - DNA, 20 bp, synthetic construct
  misc_feature 1..20: note = Description of Artificial Sequence: Synthetic oligonucleotide
  misc_feature 1..20: note = Target: SCN10A; (+) strand; PAM type: NRG; PAM sequence: TGG
  source 1..20: mol_type = other DNA
aatagttggggtcatgttag

SEQ ID NO: 32707 - DNA, 20 bp, synthetic construct
  misc_feature 1..20: note = Description of Artificial Sequence: Synthetic oligonucleotide
  misc_feature 1..20: note = Target: SCN10A; (+) strand; PAM type: NRG; PAM sequence: GGG
  source 1..20: mol_type = other DNA
atagttggggtcatgttagt

SEQ ID NO: 32708 - DNA, 20 bp, synthetic construct
  misc_feature 1..20: note = Description of Artificial Sequence: Synthetic oligonucleotide
  misc_feature 1..20: note = Target: SCN10A; (+) strand; PAM type: NRG; PAM sequence: TGG
  source 1..20: mol_type = other DNA
tcatgttagtgggttctgtc

SEQ ID NO: 32709 - DNA, 20 bp, synthetic construct
  misc_feature 1..20: note = Description of Artificial Sequence: Synthetic oligonucleotide
  misc_feature 1..20: note = Target: SCN10A; (+) strand; PAM type: NRG; PAM sequence: TGG
  source 1..20: mol_type = other DNA
tgttagtgggttctgtctgg

SEQ ID NO: 32710 - DNA, 20 bp, synthetic construct
  misc_feature 1..20: note = Description of Artificial Sequence: Synthetic oligonucleotide
  misc_feature 1..20: note = Target: SCN10A; (+) strand; PAM type: NRG; PAM sequence: TGG
  source 1..20: mol_type = other DNA
gtgggttctgtctggtggaa

SEQ ID NO: 32711 - DNA, 20 bp, synthetic construct
  misc_feature 1..20: note = Description of Artificial Sequence: Synthetic oligonucleotide
  misc_feature 1..20: note = Target: SCN10A; (+) strand; PAM type: NRG; PAM sequence: GAG
  source 1..20: mol_type = other DNA
gggttctgtctggtggaatg

SEQ ID NO: 32712 - DNA, 20 bp, synthetic construct
  misc_feature 1..20: note = Description of Artificial Sequence: Synthetic oligonucleotide
  misc_feature 1..20: note = Target: SCN10A; (+) strand; PAM type: NRG; PAM sequence: TGG
  source 1..20: mol_type = other DNA
tctgtctggtggaatggaga

SEQ ID NO: 32713 - DNA, 20 bp, synthetic construct
  misc_feature 1..20: note = Description of Artificial Sequence: Synthetic oligonucleotide
  misc_feature 1..20: note = Target: SCN10A; (+) strand; PAM type: NRG; PAM sequence: GAG
  source 1..20: mol_type = other DNA
tgtctggtggaatggagatg

SEQ ID NO: 32714 - DNA, 20 bp, synthetic construct
  misc_feature 1..20: note = Description of Artificial Sequence: Synthetic oligonucleotide
  misc_feature 1..20: note = Target: SCN10A; (+) strand; PAM type: NRG; PAM sequence: CAG
  source 1..20: mol_type = other DNA
tggtggaatggagatggaga

SEQ ID NO: 32715 - DNA, 20 bp, synthetic construct
  misc_feature 1..20: note = Description of Artificial Sequence: Synthetic oligonucleotide
  misc_feature 1..20: note = Target: SCN10A; (+) strand; PAM type: NRG; PAM sequence: AAG
  source 1..20: mol_type = other DNA
tggaatggagatggagacag

SEQ ID NO: 32716 - DNA, 20 bp, synthetic construct
  misc_feature 1..20: note = Description of Artificial Sequence: Synthetic oligonucleotide
  misc_feature 1..20: note = Target: SCN10A; (+) strand; PAM type: NRG; PAM sequence: TAG
  source 1..20: mol_type = other DNA
gaagtaatatacatgacttt

SEQ ID NO: 32717 - DNA, 20 bp, synthetic construct
  misc_feature 1..20: note = Description of Artificial Sequence: Synthetic oligonucleotide
  misc_feature 1..20: note = Target: SCN10A; (+) strand; PAM type: NRG; PAM sequence: AGG
  source 1..20: mol_type = other DNA
aagtaatatacatgactttt

SEQ ID NO: 32718 - DNA, 20 bp, synthetic construct
  misc_feature 1..20: note = Description of Artificial Sequence: Synthetic oligonucleotide
  misc_feature 1..20: note = Target: SCN10A; (+) strand; PAM type: NRG; PAM sequence: TAG
  source 1..20: mol_type = other DNA
atatacatgacttttaggca

SEQ ID NO: 32719 - DNA, 20 bp, synthetic construct
  misc_feature 1..20: note = Description of Artificial Sequence: Synthetic oligonucleotide
  misc_feature 1..20: note = Target: SCN10A; (+) strand; PAM type: NRG; PAM sequence: AAG
  source 1..20: mol_type = other DNA
tccctttcatgttcaccata

SEQ ID NO: 32720 - DNA, 20 bp, synthetic construct
  misc_feature 1..20: note = Description of Artificial Sequence: Synthetic oligonucleotide
  misc_feature 1..20: note = Target: SCN10A; (+) strand; PAM type: NRG; PAM sequence: AGG
  source 1..20: mol_type = other DNA
ccctttcatgttcaccataa

SEQ ID NO: 32721 - DNA, 20 bp, synthetic construct
  misc_feature 1..20: note = Description of Artificial Sequence: Synthetic oligonucleotide
  misc_feature 1..20: note = Target: SCN10A; (+) strand; PAM type: NRG; PAM sequence: AAG
  source 1..20: mol_type = other DNA
accataaaggtcactaactg

SEQ ID NO: 32722 - DNA, 20 bp, synthetic construct
  misc_feature 1..20: note = Description of Artificial Sequence: Synthetic oligonucleotide
  misc_feature 1..20: note = Target: SCN10A; (+) strand; PAM type: NRG; PAM sequence: TGG
  source 1..20: mol_type = other DNA
taaaggtcactaactgaaga

SEQ ID NO: 32723 - DNA, 20 bp, synthetic construct
  misc_feature 1..20: note = Description of Artificial Sequence: Synthetic oligonucleotide
  misc_feature 1..20: note = Target: SCN10A; (+) strand; PAM type: NRG; PAM sequence: TGG
  source 1..20: mol_type = other DNA
aagatggtgacatcacgata

SEQ ID NO: 32724 - DNA, 20 bp, synthetic construct
  misc_feature 1..20: note = Description of Artificial Sequence: Synthetic oligonucleotide
  misc_feature 1..20: note = Target: SCN10A; (+) strand; PAM type: NRG; PAM sequence: GGG
  source 1..20: mol_type = other DNA
agatggtgacatcacgatat

SEQ ID NO: 32725 - DNA, 20 bp, synthetic construct
  misc_feature 1..20: note = Description of Artificial Sequence: Synthetic oligonucleotide
  misc_feature 1..20: note = Target: SCN10A; (+) strand; PAM type: NRG; PAM sequence: TAG
  source 1..20: mol_type = other DNA
atcacgatatgggataatcc

SEQ ID NO: 32726 - DNA, 20 bp, synthetic construct
  misc_feature 1..20: note = Description of Artificial Sequence: Synthetic oligonucleotide
  misc_feature 1..20: note = Target: SCN10A; (+) strand; PAM type: NRG; PAM sequence: GAG
  source 1..20: mol_type = other DNA
tgggataatcctagatcctt

SEQ ID NO: 32727 - DNA, 20 bp, synthetic construct
  misc_feature 1..20: note = Description of Artificial Sequence: Synthetic oligonucleotide
  misc_feature 1..20: note = Target: SCN10A; (+) strand; PAM type: NRG; PAM sequence: AGG
  source 1..20: mol_type = other DNA
gggataatcctagatccttg

SEQ ID NO: 32728 - DNA, 20 bp, synthetic construct
  misc_feature 1..20: note = Description of Artificial Sequence: Synthetic oligonucleotide
  misc_feature 1..20: note = Target: SCN10A; (+) strand; PAM type: NRG; PAM sequence: AAG
  source 1..20: mol_type = other DNA
gatccttgaggcgctacttg

SEQ ID NO: 32729 - DNA, 20 bp, synthetic construct
  misc_feature 1..20: note = Description of Artificial Sequence: Synthetic oligonucleotide
  misc_feature 1..20: note = Target: SCN10A; (+) strand; PAM type: NRG; PAM sequence: TAG
  source 1..20: mol_type = other DNA
ccttgaggcgctacttgaag

SEQ ID NO: 32730 - DNA, 20 bp, synthetic construct
  misc_feature 1..20: note = Description of Artificial Sequence: Synthetic oligonucleotide
  misc_feature 1..20: note = Target: SCN10A; (+) strand; PAM type: NRG; PAM sequence: CAG
  source 1..20: mol_type = other DNA
ctacttgaagtagacactcc

SEQ ID NO: 32731 - DNA, 20 bp, synthetic construct
  misc_feature 1..20: note = Description of Artificial Sequence: Synthetic oligonucleotide
  misc_feature 1..20: note = Target: SCN10A; (+) strand; PAM type: NRG; PAM sequence: AGG
  source 1..20: mol_type = other DNA
tacttgaagtagacactccc

SEQ ID NO: 32732 - DNA, 20 bp, synthetic construct
  misc_feature 1..20: note = Description of Artificial Sequence: Synthetic oligonucleotide
  misc_feature 1..20: note = Target: SCN10A; (+) strand; PAM type: NRG; PAM sequence: GAG
  source 1..20: mol_type = other DNA
cttgaagtagacactcccag

SEQ ID NO: 32733 - DNA, 20 bp, synthetic construct
  misc_feature 1..20: note = Description of Artificial Sequence: Synthetic oligonucleotide
  misc_feature 1..20: note = Target: SCN10A; (+) strand; PAM type: NRG; PAM sequence: GAG
  source 1..20: mol_type = other DNA
tgaagtagacactcccagga

SEQ ID NO: 32734 - DNA, 20 bp, synthetic construct
  misc_feature 1..20: note = Description of Artificial Sequence: Synthetic oligonucleotide
  misc_feature 1..20: note = Target: SCN10A; (+) strand; PAM type: NRG; PAM sequence: AAG
  source 1..20: mol_type = other DNA
tcccaggagagcttcccaac

SEQ ID NO: 32735 - DNA, 20 bp, synthetic construct
  misc_feature 1..20: note = Description of Artificial Sequence: Synthetic oligonucleotide
  misc_feature 1..20: note = Target: SCN10A; (+) strand; PAM type: NRG; PAM sequence: GAG
  source 1..20: mol_type = other DNA
acaagcactgaatgtgctgt

SEQ ID NO: 32736 - DNA, 20 bp, synthetic construct
  misc_feature 1..20: note = Description of Artificial Sequence: Synthetic oligonucleotide
  misc_feature 1..20: note = Target: SCN10A; (+) strand; PAM type: NRG; PAM sequence: CAG
  source 1..20: mol_type = other DNA
atctctattatgttaactca

SEQ ID NO: 32737 - DNA, 20 bp, synthetic construct
  misc_feature 1..20: note = Description of Artificial Sequence: Synthetic oligonucleotide
  misc_feature 1..20: note = Target: SCN10A; (+) strand; PAM type: NRG; PAM sequence: TAG
  source 1..20: mol_type = other DNA
attatgttaactcacagatt

SEQ ID NO: 32738 - DNA, 20 bp, synthetic construct
  misc_feature 1..20: note = Description of Artificial Sequence: Synthetic oligonucleotide
  misc_feature 1..20: note = Target: SCN10A; (+) strand; PAM type: NRG; PAM sequence: GAG
  source 1..20: mol_type = other DNA
tatgttaactcacagattta

SEQ ID NO: 32739 - DNA, 20 bp, synthetic construct
  misc_feature 1..20: note = Description of Artificial Sequence: Synthetic oligonucleotide
  misc_feature 1..20: note = Target: SCN10A; (+) strand; PAM type: NRG; PAM sequence: AGG
  source 1..20: mol_type = other DNA
atgttaactcacagatttag

SEQ ID NO: 32740 - DNA, 20 bp, synthetic construct
  misc_feature 1..20: note = Description of Artificial Sequence: Synthetic oligonucleotide
  misc_feature 1..20: note = Target: SCN10A; (+) strand; PAM type: NRG; PAM sequence: GGG
  source 1..20: mol_type = other DNA
tgttaactcacagatttaga

SEQ ID NO: 32741 - DNA, 20 bp, synthetic construct
  misc_feature 1..20: note = Description of Artificial Sequence: Synthetic oligonucleotide
  misc_feature 1..20: note = Target: SCN10A; (+) strand; PAM type: NRG; PAM sequence: CAG
  source 1..20: mol_type = other DNA
agatttagagggtatcactg

SEQ ID NO: 32742 - DNA, 20 bp, synthetic construct
  misc_feature 1..20: note = Description of Artificial Sequence: Synthetic oligonucleotide
  misc_feature 1..20: note = Target: SCN10A; (+) strand; PAM type: NRG; PAM sequence: TAG
  source 1..20: mol_type = other DNA
ttagagggtatcactgcagc

SEQ ID NO: 32743 - DNA, 20 bp, synthetic construct
  misc_feature 1..20: note = Description of Artificial Sequence: Synthetic oligonucleotide
  misc_feature 1..20: note = Target: SCN10A; (+) strand; PAM type: NRG; PAM sequence: GAG
  source 1..20: mol_type = other DNA
cagctagttgtacttatctt

SEQ ID NO: 32744 - DNA, 20 bp, synthetic construct
  misc_feature 1..20: note = Description of Artificial Sequence: Synthetic oligonucleotide
  misc_feature 1..20: note = Target: SCN10A; (+) strand; PAM type: NRG; PAM sequence: TGG
  source 1..20: mol_type = other DNA
gttgtacttatcttgagtaa

SEQ ID NO: 32745 - DNA, 20 bp, synthetic construct
  misc_feature 1..20: note = Description of Artificial Sequence: Synthetic oligonucleotide
  misc_feature 1..20: note = Target: SCN10A; (+) strand; PAM type: NRG; PAM sequence: GAG
  source 1..20: mol_type = other DNA
tgtacttatcttgagtaatg

SEQ ID NO: 32746 - DNA, 20 bp, synthetic construct
  misc_feature 1..20: note = Description of Artificial Sequence: Synthetic oligonucleotide
  misc_feature 1..20: note = Target: SCN10A; (+) strand; PAM type: NRG; PAM sequence: AAG
  source 1..20: mol_type = other DNA
agaaattgcttcattgaaaa

SEQ ID NO: 32747 - DNA, 20 bp, synthetic construct
  misc_feature 1..20: note = Description of Artificial Sequence: Synthetic oligonucleotide
  misc_feature 1..20: note = Target: SCN10A; (+) strand; PAM type: NRG; PAM sequence: AGG
  source 1..20: mol_type = other DNA
gaaattgcttcattgaaaaa

SEQ ID NO: 32748 - DNA, 20 bp, synthetic construct
  misc_feature 1..20: note = Description of Artificial Sequence: Synthetic oligonucleotide
  misc_feature 1..20: note = Target: SCN10A; (+) strand; PAM type: NRG; PAM sequence: AAG
  source 1..20: mol_type = other DNA
aaaaggtattgccttttcaa

SEQ ID NO: 32749 - DNA, 20 bp, synthetic construct
  misc_feature 1..20: note = Description of Artificial Sequence: Synthetic oligonucleotide
  misc_feature 1..20: note = Target: SCN10A; (+) strand; PAM type: NRG; PAM sequence: TGG
  source 1..20: mol_type = other DNA
tttcaaaagcatcaactatg

SEQ ID NO: 32750 - DNA, 20 bp, synthetic construct
  misc_feature 1..20: note = Description of Artificial Sequence: Synthetic oligonucleotide
  misc_feature 1..20: note = Target: SCN10A; (+) strand; PAM type: NRG; PAM sequence: TGG
  source 1..20: mol_type = other DNA
aagcatcaactatgtggcac

SEQ ID NO: 32751 - DNA, 20 bp, synthetic construct
  misc_feature 1..20: note = Description of Artificial Sequence: Synthetic oligonucleotide
  misc_feature 1..20: note = Target: SCN10A; (+) strand; PAM type: NRG; PAM sequence: TGG
  source 1..20: mol_type = other DNA
gcactggcttaatgatcatg

SEQ ID NO: 32752 - DNA, 20 bp, synthetic construct
  misc_feature 1..20: note = Description of Artificial Sequence: Synthetic oligonucleotide
  misc_feature 1..20: note = Target: SCN10A; (+) strand; PAM type: NRG; PAM sequence: TGG
  source 1..20: mol_type = other DNA
ctggcttaatgatcatgtgg

SEQ ID NO: 32753 - DNA, 20 bp, synthetic construct
  misc_feature 1..20: note = Description of Artificial Sequence: Synthetic oligonucleotide
  misc_feature 1..20: note = Target: SCN10A; (+) strand; PAM type: NRG; PAM sequence: GGG
  source 1..20: mol_type = other DNA
tggcttaatgatcatgtggt

SEQ ID NO: 32754 - DNA, 20 bp, synthetic construct
  misc_feature 1..20: note = Description of Artificial Sequence: Synthetic oligonucleotide
  misc_feature 1..20: note = Target: SCN10A; (+) strand; PAM type: NRG; PAM sequence: AAG
  source 1..20: mol_type = other DNA
atgatcatgtggtgggcaac

SEQ ID NO: 32755 - DNA, 20 bp, synthetic construct
  misc_feature 1..20: note = Description of Artificial Sequence: Synthetic oligonucleotide
  misc_feature 1..20: note = Target: SCN10A; (+) strand; PAM type: NRG; PAM sequence: AGG
  source 1..20: mol_type = other DNA
tgatcatgtggtgggcaaca

SEQ ID NO: 32756 - DNA, 20 bp, synthetic construct
  misc_feature 1..20: note = Description of Artificial Sequence: Synthetic oligonucleotide
  misc_feature 1..20: note = Target: SCN10A; (+) strand; PAM type: NRG; PAM sequence: AAG
  source 1..20: mol_type = other DNA
tcatgtggtgggcaacaagg

SEQ ID NO: 32757 - DNA, 20 bp, synthetic construct
  misc_feature 1..20: note = Description of Artificial Sequence: Synthetic oligonucleotide
  misc_feature 1..20: note = Target: SCN10A; (+) strand; PAM type: NRG; PAM sequence: TAG
  source 1..20: mol_type = other DNA
gtgggcaacaaggaagctga

SEQ ID NO: 32758 - DNA, 20 bp, synthetic construct
  misc_feature 1..20: note = Description of Artificial Sequence: Synthetic oligonucleotide
  misc_feature 1..20: note = Target: SCN10A; (+) strand; PAM type: NRG; PAM sequence: AGG
  source 1..20: mol_type = other DNA
tgggcaacaaggaagctgat

SEQ ID NO: 32759 - DNA, 20 bp, synthetic construct
  misc_feature 1..20: note = Description of Artificial Sequence: Synthetic oligonucleotide
  misc_feature 1..20: note = Target: SCN10A; (+) strand; PAM type: NRG; PAM sequence: GAG
  source 1..20: mol_type = other DNA
ggcaacaaggaagctgatag

SEQ ID NO: 32760 - DNA, 20 bp, synthetic construct
  misc_feature 1..20: note = Description of Artificial Sequence: Synthetic oligonucleotide
  misc_feature 1..20: note = Target: SCN10A; (+) strand; PAM type: NRG; PAM sequence: AAG
  source 1..20: mol_type = other DNA
aacaaggaagctgataggag

SEQ ID NO: 32761 - DNA, 20 bp, synthetic construct
  misc_feature 1..20: note = Description of Artificial Sequence: Synthetic oligonucleotide
  misc_feature 1..20: note = Target: SCN10A; (+) strand; PAM type: NRG; PAM sequence: AGG
  source 1..20: mol_type = other DNA
acaaggaagctgataggaga

SEQ ID NO: 32762 - DNA, 20 bp, synthetic construct
  misc_feature 1..20: note = Description of Artificial Sequence: Synthetic oligonucleotide
  misc_feature 1..20: note = Target: SCN10A; (+) strand; PAM type: NRG; PAM sequence: TGG
  source 1..20: mol_type = other DNA
gaagctgataggagaaggct

SEQ ID NO: 32763 - DNA, 20 bp, synthetic construct
  misc_feature 1..20: note = Description of Artificial Sequence: Synthetic oligonucleotide
  misc_feature 1..20: note = Target: SCN10A; (+) strand; PAM type: NRG; PAM sequence: CAG
  source 1..20: mol_type = other DNA
gaatgtcaatctatgttatt

SEQ ID NO: 32764 - DNA, 20 bp, synthetic construct
  misc_feature 1..20: note = Description of Artificial Sequence: Synthetic oligonucleotide
  misc_feature 1..20: note = Target: SCN10A; (+) strand; PAM type: NRG; PAM sequence: TGG
  source 1..20: mol_type = other DNA
ttcagtgacaaaaatattgc

SEQ ID NO: 32765 - DNA, 20 bp, synthetic construct
  misc_feature 1..20: note = Description of Artificial Sequence: Synthetic oligonucleotide
  misc_feature 1..20: note = Target: SCN10A; (+) strand; PAM type: NRG; PAM sequence: GAG
  source 1..20: mol_type = other DNA
atattgctggcaaaaatttt

SEQ ID NO: 32766 - DNA, 20 bp, synthetic construct
  misc_feature 1..20: note = Description of Artificial Sequence: Synthetic oligonucleotide
  misc_feature 1..20: note = Target: SCN10A; (+) strand; PAM type: NRG; PAM sequence: AGG
  source 1..20: mol_type = other DNA
tattgctggcaaaaattttg

SEQ ID NO: 32767 - DNA, 20 bp, synthetic construct
  misc_feature 1..20: note = Description of Artificial Sequence: Synthetic oligonucleotide
  misc_feature 1..20: note = Target: SCN10A; (+) strand; PAM type: NRG; PAM sequence: CAG
  source 1..20: mol_type = other DNA
tgctggcaaaaattttgagg

SEQ ID NO: 32768 - DNA, 20 bp, synthetic construct
  misc_feature 1..20: note = Description of Artificial Sequence: Synthetic oligonucleotide
  misc_feature 1..20: note = Target: SCN10A; (+) strand; PAM type: NRG; PAM sequence: GAG
  source 1..20: mol_type = other DNA
ctggcaaaaattttgaggca

SEQ ID NO: 32769 - DNA, 20 bp, synthetic construct
  misc_feature 1..20: note = Description of Artificial Sequence: Synthetic oligonucleotide
  misc_feature 1..20: note = Target: SCN10A; (+) strand; PAM type: NRG; PAM sequence: GAG
  source 1..20: mol_type = other DNA
aaaattttgaggcagagcac

SEQ ID NO: 32770 - DNA, 20 bp, synthetic construct
  misc_feature 1..20: note = Description of Artificial Sequence: Synthetic oligonucleotide
  misc_feature 1..20: note = Target: SCN10A; (+) strand; PAM type: NRG; PAM sequence: CAG
  source 1..20: mol_type = other DNA
agagcacgagcctcatgaac

SEQ ID NO: 32771 - DNA, 20 bp, synthetic construct
  misc_feature 1..20: note = Description of Artificial Sequence: Synthetic oligonucleotide
  misc_feature 1..20: note = Target: SCN10A; (+) strand; PAM type: NRG; PAM sequence: TAG
  source 1..20: mol_type = other DNA
gcctcatgaaccagcaaccc

SEQ ID NO: 32772 - DNA, 20 bp, synthetic construct
  misc_feature 1..20: note = Description of Artificial Sequence: Synthetic oligonucleotide
  misc_feature 1..20: note = Target: SCN10A; (+) strand; PAM type: NRG; PAM sequence: AGG
  source 1..20: mol_type = other DNA
cctcatgaaccagcaaccct

SEQ ID NO: 32773 - DNA, 20 bp, synthetic construct
  misc_feature 1..20: note = Description of Artificial Sequence: Synthetic oligonucleotide
  misc_feature 1..20: note = Target: SCN10A; (+) strand; PAM type: NRG; PAM sequence: GGG
  source 1..20: mol_type = other DNA
ctcatgaaccagcaacccta

SEQ ID NO: 32774 - DNA, 20 bp, synthetic construct
  misc_feature 1..20: note = Description of Artificial Sequence: Synthetic oligonucleotide
  misc_feature 1..20: note = Target: SCN10A; (+) strand; PAM type: NRG; PAM sequence: GGG
  source 1..20: mol_type = other DNA
tcatgaaccagcaaccctag

SEQ ID NO: 32775 - DNA, 20 bp, synthetic construct
  misc_feature 1..20: note = Description of Artificial Sequence: Synthetic oligonucleotide
  misc_feature 1..20: note = Target: SCN10A; (+) strand; PAM type: NRG; PAM sequence: AAG
  source 1..20: mol_type = other DNA
tgaaccagcaaccctagggg

SEQ ID NO: 32776 - DNA, 20 bp, synthetic construct
  misc_feature 1..20: note = Description of Artificial Sequence: Synthetic oligonucleotide
  misc_feature 1..20: note = Target: SCN10A; (+) strand; PAM type: NRG; PAM sequence: AGG
  source 1..20: mol_type = other DNA
gaaccagcaaccctagggga

SEQ ID NO: 32777 - DNA, 20 bp, synthetic construct
  misc_feature 1..20: note = Description of Artificial Sequence: Synthetic oligonucleotide
  misc_feature 1..20: note = Target: SCN10A; (+) strand; PAM type: NRG; PAM sequence: GGG
  source 1..20: mol_type = other DNA
aaccagcaaccctaggggaa

SEQ ID NO: 32778 - DNA, 20 bp, synthetic construct
  misc_feature 1..20: note = Description of Artificial Sequence: Synthetic oligonucleotide
  misc_feature 1..20: note = Target: SCN10A; (+) strand; PAM type: NRG; PAM sequence: TAG
  source 1..20: mol_type = other DNA
gggaagggtttattaaacct

SEQ ID NO: 32779 - DNA, 20 bp, synthetic construct
  misc_feature 1..20: note = Description of Artificial Sequence: Synthetic oligonucleotide
  misc_feature 1..20: note = Target: SCN10A; (+) strand; PAM type: NRG; PAM sequence: TGG
  source 1..20: mol_type = other DNA
tttattaaaccttagtattg

SEQ ID NO: 32780 - DNA, 20 bp, synthetic construct
  misc_feature 1..20: note = Description of Artificial Sequence: Synthetic oligonucleotide
  misc_feature 1..20: note = Target: SCN10A; (+) strand; PAM type: NRG; PAM sequence: GGG
  source 1..20: mol_type = other DNA
ttattaaaccttagtattgt

SEQ ID NO: 32781 - DNA, 20 bp, synthetic construct
  misc_feature 1..20: note = Description of Artificial Sequence: Synthetic oligonucleotide
  misc_feature 1..20: note = Target: SCN10A; (+) strand; PAM type: NRG; PAM sequence: CAG
  source 1..20: mol_type = other DNA
taaaccttagtattgtgggt

SEQ ID NO: 32782 - DNA, 20 bp, synthetic construct
  misc_feature 1..20: note = Description of Artificial Sequence: Synthetic oligonucleotide
  misc_feature 1..20: note = Target: SCN10A; (+) strand; PAM type: NRG; PAM sequence: TGG
  source 1..20: mol_type = other DNA
tattgtgggtcagttgtaat

SEQ ID NO: 32783 - DNA, 20 bp, synthetic construct
  misc_feature 1..20: note = Description of Artificial Sequence: Synthetic oligonucleotide
  misc_feature 1..20: note = Target: SCN10A; (+) strand; PAM type: NRG; PAM sequence: TGG
  source 1..20: mol_type = other DNA
tcagttgtaattggctatgt

SEQ ID NO: 32784 - DNA, 20 bp, synthetic construct
  misc_feature 1..20: note = Description of Artificial Sequence: Synthetic oligonucleotide
  misc_feature 1..20: note = Target: SCN10A; (+) strand; PAM type: NRG; PAM sequence: AAG
  source 1..20: mol_type = other DNA
tgtaattggctatgttggtc

SEQ ID NO: 32785 - DNA, 20 bp, synthetic construct
  misc_feature 1..20: note = Description of Artificial Sequence: Synthetic oligonucleotide
  misc_feature 1..20: note = Target: SCN10A; (+) strand; PAM type: NRG; PAM sequence: CAG
  source 1..20: mol_type = other DNA
attggctatgttggtcaaga

SEQ ID NO: 32786 - DNA, 20 bp, synthetic construct
  misc_feature 1..20: note = Description of Artificial Sequence: Synthetic oligonucleotide
  misc_feature 1..20: note = Target: SCN10A; (+) strand; PAM type: NRG; PAM sequence: AAG
  source 1..20: mol_type = other DNA
tatgttggtcaagacagtac

SEQ ID NO: 32787 - DNA, 20 bp, synthetic construct
  misc_feature 1..20: note = Description of Artificial Sequence: Synthetic oligonucleotide
  misc_feature 1..20: note = Target: SCN10A; (+) strand; PAM type: NRG; PAM sequence: AAG
  source 1..20: mol_type = other DNA
ttggtcaagacagtacaaga

SEQ ID NO: 32788 - DNA, 20 bp, synthetic construct
  misc_feature 1..20: note = Description of Artificial Sequence: Synthetic oligonucleotide
  misc_feature 1..20: note = Target: SCN10A; (+) strand; PAM type: NRG; PAM sequence: GAG
  source 1..20: mol_type = other DNA
ggtcaagacagtacaagaaa

SEQ ID NO: 32789 - DNA, 20 bp, synthetic construct
  misc_feature 1..20: note = Description of Artificial Sequence: Synthetic oligonucleotide
  misc_feature 1..20: note = Target: SCN10A; (+) strand; PAM type: NRG; PAM sequence: TAG
  source 1..20: mol_type = other DNA
agacagtacaagaaagagat

SEQ ID NO: 32790 - DNA, 20 bp, synthetic construct
  misc_feature 1..20: note = Description of Artificial Sequence: Synthetic oligonucleotide
  misc_feature 1..20: note = Target: SCN10A; (+) strand; PAM type: NRG; PAM sequence: CAG
  source 1..20: mol_type = other DNA
gtacaagaaagagattagct

SEQ ID NO: 32791 - DNA, 20 bp, synthetic construct
  misc_feature 1..20: note = Description of Artificial Sequence: Synthetic oligonucleotide
  misc_feature 1..20: note = Target: SCN10A; (+) strand; PAM type: NRG; PAM sequence: AGG
  source 1..20: mol_type = other DNA
tacaagaaagagattagctc

SEQ ID NO: 32792 - DNA, 20 bp, synthetic construct
  misc_feature 1..20: note = Description of Artificial Sequence: Synthetic oligonucleotide
  misc_feature 1..20: note = Target: SCN10A; (+) strand; PAM type: NRG; PAM sequence: AAG
  source 1..20: mol_type = other DNA
agaaagagattagctcagga

SEQ ID NO: 32793 - DNA, 20 bp, synthetic construct
  misc_feature 1..20: note = Description of Artificial Sequence: Synthetic oligonucleotide
  misc_feature 1..20: note = Target: SCN10A; (+) strand; PAM type: NRG; PAM sequence: TAG
  source 1..20: mol_type = other DNA
agattagctcaggaaagatt

SEQ ID NO: 32794 - DNA, 20 bp, synthetic construct
  misc_feature 1..20: note = Description of Artificial Sequence: Synthetic oligonucleotide
  misc_feature 1..20: note = Target: SCN10A; (+) strand; PAM type: NRG; PAM sequence: TGG
  source 1..20: mol_type = other DNA
tagctcaggaaagatttagc

SEQ ID NO: 32795 - DNA, 20 bp, synthetic construct
  misc_feature 1..20: note = Description of Artificial Sequence: Synthetic oligonucleotide
  misc_feature 1..20: note = Target: SCN10A; (+) strand; PAM type: NRG; PAM sequence: AAG
  source 1..20: mol_type = other DNA
gaaagatttagctggtttat

SEQ ID NO: 32796 - DNA, 20 bp, synthetic construct
  misc_feature 1..20: note = Description of Artificial Sequence: Synthetic oligonucleotide
  misc_feature 1..20: note = Target: SCN10A; (+) strand; PAM type: NRG; PAM sequence: AAG
  source 1..20: mol_type = other DNA
tagctggtttataagaataa

SEQ ID NO: 32797 - DNA, 20 bp, synthetic construct
  misc_feature 1..20: note = Description of Artificial Sequence: Synthetic oligonucleotide
  misc_feature 1..20: note = Target: SCN10A; (+) strand; PAM type: NRG; PAM sequence: CAG
  source 1..20: mol_type = other DNA
gaataaaagaaaatataatc

SEQ ID NO: 32798 - DNA, 20 bp, synthetic construct
  misc_feature 1..20: note = Description of Artificial Sequence: Synthetic oligonucleotide
  misc_feature 1..20: note = Target: SCN10A; (+) strand; PAM type: NRG; PAM sequence: AAG
  source 1..20: mol_type = other DNA
taaaagaaaatataatccag

SEQ ID NO: 32799 - DNA, 20 bp, synthetic construct
  misc_feature 1..20: note = Description of Artificial Sequence: Synthetic oligonucleotide
  misc_feature 1..20: note = Target: SCN10A; (+) strand; PAM type: NRG; PAM sequence: TAG
  source 1..20: mol_type = other DNA
gaaaatataatccagaagtt

SEQ ID NO: 32800 - DNA, 20 bp, synthetic construct
  misc_feature 1..20: note = Description of Artificial Sequence: Synthetic oligonucleotide
  misc_feature 1..20: note = Target: SCN10A; (+) strand; PAM type: NRG; PAM sequence: GAG
  source 1..20: mol_type = other DNA
aaatataatccagaagttta

SEQ ID NO: 32801 - DNA, 20 bp, synthetic construct
  misc_feature 1..20: note = Description of Artificial Sequence: Synthetic oligonucleotide
  misc_feature 1..20: note = Target: SCN10A; (+) strand; PAM type: NRG; PAM sequence: TAG
  source 1..20: mol_type = other DNA
agtttagagccttgacgatt

SEQ ID NO: 32802 - DNA, 20 bp, synthetic construct
  misc_feature 1..20: note = Description of Artificial Sequence: Synthetic oligonucleotide
  misc_feature 1..20: note = Target: SCN10A; (+) strand; PAM type: NRG; PAM sequence: AGG
  source 1..20: mol_type = other DNA
gtttagagccttgacgattt

SEQ ID NO: 32803 - DNA, 20 bp, synthetic construct
  misc_feature 1..20: note = Description of Artificial Sequence: Synthetic oligonucleotide
  misc_feature 1..20: note = Target: SCN10A; (+) strand; PAM type: NRG; PAM sequence: GGG
  source 1..20: mol_type = other DNA
tttagagccttgacgattta

SEQ ID NO: 32804 - DNA, 20 bp, synthetic construct
  misc_feature 1..20: note = Description of Artificial Sequence: Synthetic oligonucleotide
  misc_feature 1..20: note = Target: SCN10A; (+) strand; PAM type: NRG; PAM sequence: TAG
  source 1..20: mol_type = other DNA
ttagggaactgtactgcttc

SEQ ID NO: 32805 - DNA, 20 bp, synthetic construct
  misc_feature 1..20: note = Description of Artificial Sequence: Synthetic oligonucleotide
  misc_feature 1..20: note = Target: SCN10A; (+) strand; PAM type: NRG; PAM sequence: CAG
  source 1..20: mol_type = other DNA
actgtactgcttctagattc

SEQ ID NO: 32806 - DNA, 20 bp, synthetic construct
  misc_feature 1..20: note = Description of Artificial Sequence: Synthetic oligonucleotide
  misc_feature 1..20: note = Target: SCN10A; (+) strand; PAM type: NRG; PAM sequence: AGG
  source 1..20: mol_type = other DNA
ctgtactgcttctagattcc

SEQ ID NO: 32807 - DNA, 20 bp, synthetic construct
  misc_feature 1..20: note = Description of Artificial Sequence: Synthetic oligonucleotide
  misc_feature 1..20: note = Target: SCN10A; (+) strand; PAM type: NRG; PAM sequence: CAG
  source 1..20: mol_type = other DNA
tactgcttctagattccagg

SEQ ID NO: 32808 - DNA, 20 bp, synthetic construct
  misc_feature 1..20: note = Description of Artificial Sequence: Synthetic oligonucleotide
  misc_feature 1..20: note = Target: SCN10A; (+) strand; PAM type: NRG; PAM sequence: GAG
  source 1..20: mol_type = other DNA
gcttctagattccaggcagt

SEQ ID NO: 32809 - DNA, 20 bp, synthetic construct
  misc_feature 1..20: note = Description of Artificial Sequence: Synthetic oligonucleotide
  misc_feature 1..20: note = Target: SCN10A; (+) strand; PAM type: NRG; PAM sequence: TGG
  source 1..20: mol_type = other DNA
agattccaggcagtgagcaa

SEQ ID NO: 32810 - DNA, 20 bp, synthetic construct
  misc_feature 1..20: note = Description of Artificial Sequence: Synthetic oligonucleotide
  misc_feature 1..20: note = Target: SCN10A; (+) strand; PAM type: NRG; PAM sequence: GGG
  source 1..20: mol_type = other DNA
gattccaggcagtgagcaat

SEQ ID NO: 32811 - DNA, 20 bp, synthetic construct
  misc_feature 1..20: note = Description of Artificial Sequence: Synthetic oligonucleotide
  misc_feature 1..20: note = Target: SCN10A; (+) strand; PAM type: NRG; PAM sequence: AAG
  source 1..20: mol_type = other DNA
aggcagtgagcaatgggatt

SEQ ID NO: 32812 - DNA, 20 bp, synthetic construct
  misc_feature 1..20: note = Description of Artificial Sequence: Synthetic oligonucleotide
  misc_feature 1..20: note = Target: SCN10A; (+) strand; PAM type: NRG; PAM sequence: AAG
  source 1..20: mol_type = other DNA
gattaagtcttcaaatgttg

SEQ ID NO: 32813 - DNA, 20 bp, synthetic construct
  misc_feature 1..20: note = Description of Artificial Sequence: Synthetic oligonucleotide
  misc_feature 1..20: note = Target: SCN10A; (+) strand; PAM type: NRG; PAM sequence: TAG
  source 1..20: mol_type = other DNA
agtcttcaaatgttgaagac

SEQ ID NO: 32814 - DNA, 20 bp, synthetic construct
  misc_feature 1..20: note = Description of Artificial Sequence: Synthetic oligonucleotide
  misc_feature 1..20: note = Target: SCN10A; (+) strand; PAM type: NRG; PAM sequence: TAG
  source 1..20: mol_type = other DNA
caattaaatgaaacaactct

SEQ ID NO: 32815 - DNA, 20 bp, synthetic construct
  misc_feature 1..20: note = Description of Artificial Sequence: Synthetic oligonucleotide
  misc_feature 1..20: note = Target: SCN10A; (+) strand; PAM type: NRG; PAM sequence: AAG
  source 1..20: mol_type = other DNA
aaatgaaacaactcttagca

SEQ ID NO: 32816 - DNA, 20 bp, synthetic construct
  misc_feature 1..20: note = Description of Artificial Sequence: Synthetic oligonucleotide
  misc_feature 1..20: note = Target: SCN10A; (+) strand; PAM type: NRG; PAM sequence: TAG
  source 1..20: mol_type = other DNA
acaactcttagcaaagcttg

SEQ ID NO: 32817 - DNA, 20 bp, synthetic construct
  misc_feature 1..20: note = Description of Artificial Sequence: Synthetic oligonucleotide
  misc_feature 1..20: note = Target: SCN10A; (+) strand; PAM type: NRG; PAM sequence: TGG
  source 1..20: mol_type = other DNA
cttagcaaagcttgtagtaa

SEQ ID NO: 32818 - DNA, 20 bp, synthetic construct
  misc_feature 1..20: note = Description of Artificial Sequence: Synthetic oligonucleotide
  misc_feature 1..20: note = Target: SCN10A; (+) strand; PAM type: NRG; PAM sequence: TAG
  source 1..20: mol_type = other DNA
caaagcttgtagtaatggtg

SEQ ID NO: 32819 - DNA, 20 bp, synthetic construct
  misc_feature 1..20: note = Description of Artificial Sequence: Synthetic oligonucleotide
  misc_feature 1..20: note = Target: SCN10A; (+) strand; PAM type: NRG; PAM sequence: AAG
  source 1..20: mol_type = other DNA
gtagccactgtttcttgtgc

SEQ ID NO: 32820 - DNA, 20 bp, synthetic construct
  misc_feature 1..20: note = Description of Artificial Sequence: Synthetic oligonucleotide
  misc_feature 1..20: note = Target: SCN10A; (+) strand; PAM type: NRG; PAM sequence: GAG
  source 1..20: mol_type = other DNA
agccactgtttcttgtgcaa

SEQ ID NO: 32821 - DNA, 20 bp, synthetic construct
  misc_feature 1..20: note = Description of Artificial Sequence: Synthetic oligonucleotide
  misc_feature 1..20: note = Target: SCN10A; (+) strand; PAM type: NRG; PAM sequence: AAG
  source 1..20: mol_type = other DNA
actgtttcttgtgcaagaga

SEQ ID NO: 32822 - DNA, 20 bp, synthetic construct
  misc_feature 1..20: note = Description of Artificial Sequence: Synthetic oligonucleotide
  misc_feature 1..20: note = Target: SCN10A; (+) strand; PAM type: NRG; PAM sequence: AGG
  source 1..20: mol_type = other DNA
ctgtttcttgtgcaagagaa

SEQ ID NO: 32823 - DNA, 20 bp, synthetic construct
  misc_feature 1..20: note = Description of Artificial Sequence: Synthetic oligonucleotide
  misc_feature 1..20: note = Target: SCN10A; (+) strand; PAM type: NRG; PAM sequence: TGG
  source 1..20: mol_type = other DNA
tcttgtgcaagagaaaggca

SEQ ID NO: 32824 - DNA, 20 bp, synthetic construct
  misc_feature 1..20: note = Description of Artificial Sequence: Synthetic oligonucleotide
  misc_feature 1..20: note = Target: SCN10A; (+) strand; PAM type: NRG; PAM sequence: GGG
  source 1..20: mol_type = other DNA
cttgtgcaagagaaaggcat

SEQ ID NO: 32825 - DNA, 20 bp, synthetic construct
  misc_feature 1..20: note = Description of Artificial Sequence: Synthetic oligonucleotide
  misc_feature 1..20: note = Target: SCN10A; (+) strand; PAM type: NRG; PAM sequence: GGG
  source 1..20: mol_type = other DNA
ttgtgcaagagaaaggcatg

SEQ ID NO: 32826 - DNA, 20 bp, synthetic construct
  misc_feature 1..20: note = Description of Artificial Sequence: Synthetic oligonucleotide
  misc_feature 1..20: note = Target: SCN10A; (+) strand; PAM type: NRG; PAM sequence: AAG
  source 1..20: mol_type = other DNA
gcaagagaaaggcatgggga

SEQ ID NO: 32827 - DNA, 20 bp, synthetic construct
  misc_feature 1..20: note = Description of Artificial Sequence: Synthetic oligonucleotide
  misc_feature 1..20: note = Target: SCN10A; (+) strand; PAM type: NRG; PAM sequence: AGG
  source 1..20: mol_type = other DNA
caagagaaaggcatggggaa

SEQ ID NO: 32828 - DNA, 20 bp, synthetic construct
  misc_feature 1..20: note = Description of Artificial Sequence: Synthetic oligonucleotide
  misc_feature 1..20: note = Target: SCN10A; (+) strand; PAM type: NRG; PAM sequence: AAG
  source 1..20: mol_type = other DNA
agaaaggcatggggaaagga

SEQ ID NO: 32829 - DNA, 20 bp, synthetic construct
  misc_feature 1..20: note = Description of Artificial Sequence: Synthetic oligonucleotide
  misc_feature 1..20: note = Target: SCN10A; (+) strand; PAM type: NRG; PAM sequence: AAG
  source 1..20: mol_type = other DNA
ggcatggggaaaggaaagca

SEQ ID NO: 32830 - DNA, 20 bp, synthetic construct
  misc_feature 1..20: note = Description of Artificial Sequence: Synthetic oligonucleotide
  misc_feature 1..20: note = Target: SCN10A; (+) strand; PAM type: NRG; PAM sequence: AAG
  source 1..20: mol_type = other DNA
gaaaggaaagcaaagaaata

SEQ ID NO: 32831 - DNA, 20 bp, synthetic construct
  misc_feature 1..20: note = Description of Artificial Sequence: Synthetic oligonucleotide
  misc_feature 1..20: note = Target: SCN10A; (+) strand; PAM type: NRG; PAM sequence: GAG
  source 1..20: mol_type = other DNA
caaagaaataaagaacaatt

SEQ ID NO: 32832 - DNA, 20 bp, synthetic construct
  misc_feature 1..20: note = Description of Artificial Sequence: Synthetic oligonucleotide
  misc_feature 1..20: note = Target: SCN10A; (+) strand; PAM type: NRG; PAM sequence: AAG
  source 1..20: mol_type = other DNA
aacaattgagaactttgtca

SEQ ID NO: 32833 - DNA, 20 bp, synthetic construct
  misc_feature 1..20: note = Description of Artificial Sequence: Synthetic oligonucleotide
  misc_feature 1..20: note = Target: SCN10A; (+) strand; PAM type: NRG; PAM sequence: AAG
  source 1..20: mol_type = other DNA
attgagaactttgtcaaaga

SEQ ID NO: 32834 - DNA, 20 bp, synthetic construct
  misc_feature 1..20: note = Description of Artificial Sequence: Synthetic oligonucleotide
  misc_feature 1..20: note = Target: SCN10A; (+) strand; PAM type: NRG; PAM sequence: TGG
  source 1..20: mol_type = other DNA
gtcaaagaaagcactttgtg

SEQ ID NO: 32835 - DNA, 20 bp, synthetic construct
  misc_feature 1..20: note = Description of Artificial Sequence: Synthetic oligonucleotide
  misc_feature 1..20: note = Target: SCN10A; (+) strand; PAM type: NRG; PAM sequence: GAG
  source 1..20: mol_type = other DNA
aaagcactttgtgtggcaat

SEQ ID NO: 32836 - DNA, 20 bp, synthetic construct
  misc_feature 1..20: note = Description of Artificial Sequence: Synthetic oligonucleotide
  misc_feature 1..20: note = Target: SCN10A; (+) strand; PAM type: NRG; PAM sequence: GAG
  source 1..20: mol_type = other DNA
agcactttgtgtggcaatga

SEQ ID NO: 32837 - DNA, 20 bp, synthetic construct
  misc_feature 1..20: note = Description of Artificial Sequence: Synthetic oligonucleotide
  misc_feature 1..20: note = Target: SCN10A; (+) strand; PAM type: NRG; PAM sequence: AGG
  source 1..20: mol_type = other DNA
gcactttgtgtggcaatgag

SEQ ID NO: 32838 - DNA, 20 bp, synthetic construct
  misc_feature 1..20: note = Description of Artificial Sequence: Synthetic oligonucleotide
  misc_feature 1..20: note = Target: SCN10A; (+) strand; PAM type: NRG; PAM sequence: AAG
  source 1..20: mol_type = other DNA
gtgtggcaatgagaggtctg

SEQ ID NO: 32839 - DNA, 20 bp, synthetic construct
  misc_feature 1..20: note = Description of Artificial Sequence: Synthetic oligonucleotide
  misc_feature 1..20: note = Target: SCN10A; (+) strand; PAM type: NRG; PAM sequence: AAG
  source 1..20: mol_type = other DNA
tgagaggtctgaagccatct

SEQ ID NO: 32840 - DNA, 20 bp, synthetic construct
  misc_feature 1..20: note = Description of Artificial Sequence: Synthetic oligonucleotide
  misc_feature 1..20: note = Target: SCN10A; (+) strand; PAM type: NRG; PAM sequence: AAG
  source 1..20: mol_type = other DNA
tgaagccatctaagtttttg

SEQ ID NO: 32841 - DNA, 20 bp, synthetic construct
  misc_feature 1..20: note = Description of Artificial Sequence: Synthetic oligonucleotide
  misc_feature 1..20: note = Target: SCN10A; (+) strand; PAM type: NRG; PAM sequence: AAG
  source 1..20: mol_type = other DNA
atcaaaatccctgactgaaa

SEQ ID NO: 32842 - DNA, 20 bp, synthetic construct
  misc_feature 1..20: note = Description of Artificial Sequence: Synthetic oligonucleotide
  misc_feature 1..20: note = Target: SCN10A; (+) strand; PAM type: NRG; PAM sequence: TGG
  source 1..20: mol_type = other DNA
ttaaaccttaaaacaaacct

SEQ ID NO: 32843 - DNA, 20 bp, synthetic construct
  misc_feature 1..20: note = Description of Artificial Sequence: Synthetic oligonucleotide
  misc_feature 1..20: note = Target: SCN10A; (+) strand; PAM type: NRG; PAM sequence: AAG
  source 1..20: mol_type = other DNA
ttggctttccattttcccac

SEQ ID NO: 32844 - DNA, 20 bp, synthetic construct
  misc_feature 1..20: note = Description of Artificial Sequence: Synthetic oligonucleotide
  misc_feature 1..20: note = Target: SCN10A; (+) strand; PAM type: NRG; PAM sequence: CAG
  source 1..20: mol_type = other DNA
gctttccattttcccacaag

SEQ ID NO: 32845 - DNA, 20 bp, synthetic construct
  misc_feature 1..20: note = Description of Artificial Sequence: Synthetic oligonucleotide
  misc_feature 1..20: note = Target: SCN10A; (+) strand; PAM type: NRG; PAM sequence: AGG
  source 1..20: mol_type = other DNA
ctttccattttcccacaagc

SEQ ID NO: 32846 - DNA, 20 bp, synthetic construct
  misc_feature 1..20: note = Description of Artificial Sequence: Synthetic oligonucleotide
  misc_feature 1..20: note = Target: SCN10A; (+) strand; PAM type: NRG; PAM sequence: GAG
  source 1..20: mol_type = other DNA
ttccattttcccacaagcag

SEQ ID NO: 32847 - DNA, 20 bp, synthetic construct
  misc_feature 1..20: note = Description of Artificial Sequence: Synthetic oligonucleotide
  misc_feature 1..20: note = Target: SCN10A; (+) strand; PAM type: NRG; PAM sequence: AGG
  source 1..20: mol_type = other DNA
tccattttcccacaagcagg

SEQ ID NO: 32848 - DNA, 20 bp, synthetic construct
  misc_feature 1..20: note = Description of Artificial Sequence: Synthetic oligonucleotide
  misc_feature 1..20: note = Target: SCN10A; (+) strand; PAM type: NRG; PAM sequence: AAG
  source 1..20: mol_type = other DNA
caagcaggaggcaaactttg

SEQ ID NO: 32849 - DNA, 20 bp, synthetic construct
  misc_feature 1..20: note = Description of Artificial Sequence: Synthetic oligonucleotide
  misc_feature 1..20: note = Target: SCN10A; (+) strand; PAM type: NRG; PAM sequence: TGG
  source 1..20: mol_type = other DNA
ggcaaactttgaagttatat

SEQ ID NO: 32850 - DNA, 20 bp, synthetic construct
  misc_feature 1..20: note = Description of Artificial Sequence: Synthetic oligonucleotide
  misc_feature 1..20: note = Target: SCN10A; (+) strand; PAM type: NRG; PAM sequence: CAG
  source 1..20: mol_type = other DNA
gaagttatattggcctcctt

SEQ ID NO: 32851 - DNA, 20 bp, synthetic construct
  misc_feature 1..20: note = Description of Artificial Sequence: Synthetic oligonucleotide
  misc_feature 1..20: note = Target: SCN10A; (+) strand; PAM type: NRG; PAM sequence: AGG
  source 1..20: mol_type = other DNA
aagttatattggcctccttc

SEQ ID NO: 32852 - DNA, 20 bp, synthetic construct
  misc_feature 1..20: note = Description of Artificial Sequence: Synthetic oligonucleotide
  misc_feature 1..20: note = Target: SCN10A; (+) strand; PAM type: NRG; PAM sequence: TGG
  source 1..20: mol_type = other DNA
atattggcctccttcaggca

SEQ ID NO: 32853 - DNA, 20 bp, synthetic construct
  misc_feature 1..20: note = Description of Artificial Sequence: Synthetic oligonucleotide
  misc_feature 1..20: note = Target: SCN10A; (+) strand; PAM type: NRG; PAM sequence: AAG
  source 1..20: mol_type = other DNA
ggcctccttcaggcatggca

SEQ ID NO: 32854 - DNA, 20 bp, synthetic construct
  misc_feature 1..20: note = Description of Artificial Sequence: Synthetic oligonucleotide
  misc_feature 1..20: note = Target: SCN10A; (+) strand; PAM type: NRG; PAM sequence: TGG
  source 1..20: mol_type = other DNA
ggcatggcaaagtcacttct

SEQ ID NO: 32855 - DNA, 20 bp, synthetic construct
  misc_feature 1..20: note = Description of Artificial Sequence: Synthetic oligonucleotide
  misc_feature 1..20: note = Target: SCN10A; (+) strand; PAM type: NRG; PAM sequence: GAG
  source 1..20: mol_type = other DNA
catggcaaagtcacttcttg

SEQ ID NO: 32856 - DNA, 20 bp, synthetic construct
  misc_feature 1..20: note = Description of Artificial Sequence: Synthetic oligonucleotide
  misc_feature 1..20: note = Target: SCN10A; (+) strand; PAM type: NRG; PAM sequence: TAG
  source 1..20: mol_type = other DNA
tcacttcttggagtcccacc

SEQ ID NO: 32857 - DNA, 20 bp, synthetic construct
  misc_feature 1..20: note = Description of Artificial Sequence: Synthetic oligonucleotide
  misc_feature 1..20: note = Target: SCN10A; (+) strand; PAM type: NRG; PAM sequence: GAG
  source 1..20: mol_type = other DNA
acttcttggagtcccaccta

SEQ ID NO: 32858 - DNA, 20 bp, synthetic construct
  misc_feature 1..20: note = Description of Artificial Sequence: Synthetic oligonucleotide
  misc_feature 1..20: note = Target: SCN10A; (+) strand; PAM type: NRG; PAM sequence: TGG
  source 1..20: mol_type = other DNA
gagtcccacctagagctgtc

SEQ ID NO: 32859 - DNA, 20 bp, synthetic construct
  misc_feature 1..20: note = Description of Artificial Sequence: Synthetic oligonucleotide
  misc_feature 1..20: note = Target: SCN10A; (+) strand; PAM type: NRG; PAM sequence: TAG
  source 1..20: mol_type = other DNA
tagagctgtctggcttgcat

SEQ ID NO: 32860 - DNA, 20 bp, synthetic construct
  misc_feature 1..20: note = Description of Artificial Sequence: Synthetic oligonucleotide
  misc_feature 1..20: note = Target: SCN10A; (+) strand; PAM type: NRG; PAM sequence: AGG
  source 1..20: mol_type = other DNA
agagctgtctggcttgcatt

SEQ ID NO: 32861 - DNA, 20 bp, synthetic construct
  misc_feature 1..20: note = Description of Artificial Sequence: Synthetic oligonucleotide
  misc_feature 1..20: note = Target: SCN10A; (+) strand; PAM type: NRG; PAM sequence: GAG
  source 1..20: mol_type = other DNA
cttgcattaggctatgatac

SEQ ID NO: 32862 - DNA, 20 bp, synthetic construct
  misc_feature 1..20: note = Description of Artificial Sequence: Synthetic oligonucleotide
  misc_feature 1..20: note = Target: SCN10A; (+) strand; PAM type: NRG; PAM sequence: GAG
  source 1..20: mol_type = other DNA
cattaggctatgatacgagt

SEQ ID NO: 32863 - DNA, 20 bp, synthetic construct
  misc_feature 1..20: note = Description of Artificial Sequence: Synthetic oligonucleotide
  misc_feature 1..20: note = Target: SCN10A; (+) strand; PAM type: NRG; PAM sequence: TGG
  source 1..20: mol_type = other DNA
agtgagaaataaacctttat

SEQ ID NO: 32864 - DNA, 20 bp, synthetic construct
  misc_feature 1..20: note = Description of Artificial Sequence: Synthetic oligonucleotide
  misc_feature 1..20: note = Target: SCN10A; (+) strand; PAM type: NRG; PAM sequence: GGG
  source 1..20: mol_type = other DNA
gtgagaaataaacctttatt

SEQ ID NO: 32865 - DNA, 20 bp, synthetic construct
  misc_feature 1..20: note = Description of Artificial Sequence: Synthetic oligonucleotide
  misc_feature 1..20: note = Target: SCN10A; (+) strand; PAM type: NRG; PAM sequence: GGG
  source 1..20: mol_type = other DNA
tgagaaataaacctttattg

SEQ ID NO: 32866 - DNA, 20 bp, synthetic construct
  misc_feature 1..20: note = Description of Artificial Sequence: Synthetic oligonucleotide
  misc_feature 1..20: note = Target: SCN10A; (+) strand; PAM type: NRG; PAM sequence: CAG
  source 1..20: mol_type = other DNA
aaataaacctttattggggt

SEQ ID NO: 32867 - DNA, 20 bp, synthetic construct
  misc_feature 1..20: note = Description of Artificial Sequence: Synthetic oligonucleotide
  misc_feature 1..20: note = Target: SCN10A; (+) strand; PAM type: NRG; PAM sequence: CAG
  source 1..20: mol_type = other DNA
ctttattggggtcagttact

SEQ ID NO: 32868 - DNA, 20 bp, synthetic construct
  misc_feature 1..20: note = Description of Artificial Sequence: Synthetic oligonucleotide
  misc_feature 1..20: note = Target: SCN10A; (+) strand; PAM type: NRG; PAM sequence: TAG
  source 1..20: mol_type = other DNA
tggggtcagttactcagttt

SEQ ID NO: 32869 - DNA, 20 bp, synthetic construct
  misc_feature 1..20: note = Description of Artificial Sequence: Synthetic oligonucleotide
  misc_feature 1..20: note = Target: SCN10A; (+) strand; PAM type: NRG; PAM sequence: GAG
  source 1..20: mol_type = other DNA
gggtcagttactcagtttta

SEQ ID NO: 32870 - DNA, 20 bp, synthetic construct
  misc_feature 1..20: note = Description of Artificial Sequence: Synthetic oligonucleotide
  misc_feature 1..20: note = Target: SCN10A; (+) strand; PAM type: NRG; PAM sequence: TAG
  source 1..20: mol_type = other DNA
tttagagattgtctgtataa

SEQ ID NO: 32871 - DNA, 20 bp, synthetic construct
  misc_feature 1..20: note = Description of Artificial Sequence: Synthetic oligonucleotide
  misc_feature 1..20: note = Target: SCN10A; (+) strand; PAM type: NRG; PAM sequence: AGG
  source 1..20: mol_type = other DNA
ttagagattgtctgtataat

SEQ ID NO: 32872 - DNA, 20 bp, synthetic construct
  misc_feature 1..20: note = Description of Artificial Sequence: Synthetic oligonucleotide
  misc_feature 1..20: note = Target: SCN10A; (+) strand; PAM type: NRG; PAM sequence: TAG
  source 1..20: mol_type = other DNA
gagattgtctgtataatagg

SEQ ID NO: 32873 - DNA, 20 bp, synthetic construct
  misc_feature 1..20: note = Description of Artificial Sequence: Synthetic oligonucleotide
  misc_feature 1..20: note = Target: SCN10A; (+) strand; PAM type: NRG; PAM sequence: AAG
  source 1..20: mol_type = other DNA
taataaaaatttttataaac

SEQ ID NO: 32874 - DNA, 20 bp, synthetic construct
  misc_feature 1..20: note = Description of Artificial Sequence: Synthetic oligonucleotide
  misc_feature 1..20: note = Target: SCN10A; (+) strand; PAM type: NRG; PAM sequence: TGG
  source 1..20: mol_type = other DNA
tacttatcattacaataaat

SEQ ID NO: 32875 - DNA, 20 bp, synthetic construct
  misc_feature 1..20: note = Description of Artificial Sequence: Synthetic oligonucleotide
  misc_feature 1..20: note = Target: SCN10A; (+) strand; PAM type: NRG; PAM sequence: GGG
  source 1..20: mol_type = other DNA
acttatcattacaataaatt

SEQ ID NO: 32876 - DNA, 20 bp, synthetic construct
  misc_feature 1..20: note = Description of Artificial Sequence: Synthetic oligonucleotide
  misc_feature 1..20: note = Target: SCN10A; (+) strand; PAM type: NRG; PAM sequence: AAG
  source 1..20: mol_type = other DNA
atcattacaataaattggga

SEQ ID NO: 32877 - DNA, 20 bp, synthetic construct
  misc_feature 1..20: note = Description of Artificial Sequence: Synthetic oligonucleotide
  misc_feature 1..20: note = Target: SCN10A; (+) strand; PAM type: NRG; PAM sequence: AGG
  source 1..20: mol_type = other DNA
tcattacaataaattgggaa

SEQ ID NO: 32878 - DNA, 20 bp, synthetic construct
  misc_feature 1..20: note = Description of Artificial Sequence: Synthetic oligonucleotide
  misc_feature 1..20: note = Target: SCN10A; (+) strand; PAM type: NRG; PAM sequence: TGG
  source 1..20: mol_type = other DNA
ataaattgggaaaggatatc

SEQ ID NO: 32879 - DNA, 20 bp, synthetic construct
  misc_feature 1..20: note = Description of Artificial Sequence: Synthetic oligonucleotide
  misc_feature 1..20: note = Target: SCN10A; (+) strand; PAM type: NRG; PAM sequence: AAG
  source 1..20: mol_type = other DNA
gaaaggatatctggaatgaa

SEQ ID NO: 32880 - DNA, 20 bp, synthetic construct
  misc_feature 1..20: note = Description of Artificial Sequence: Synthetic oligonucleotide
  misc_feature 1..20: note = Target: SCN10A; (+) strand; PAM type: NRG; PAM sequence: TGG
  source 1..20: mol_type = other DNA
tctggaatgaaaagttgtct

SEQ ID NO: 32881 - DNA, 20 bp, synthetic construct
  misc_feature 1..20: note = Description of Artificial Sequence: Synthetic oligonucleotide
  misc_feature 1..20: note = Target: SCN10A; (+) strand; PAM type: NRG; PAM sequence: GAG
  source 1..20: mol_type = other DNA
tggaatgaaaagttgtcttg

SEQ ID NO: 32882 - DNA, 20 bp, synthetic construct
  misc_feature 1..20: note = Description of Artificial Sequence: Synthetic oligonucleotide
  misc_feature 1..20: note = Target: SCN10A; (+) strand; PAM type: NRG; PAM sequence: AGG
  source 1..20: mol_type = other DNA
ggaatgaaaagttgtcttgg

SEQ ID NO: 32883 - DNA, 20 bp, synthetic construct
  misc_feature 1..20: note = Description of Artificial Sequence: Synthetic oligonucleotide
  misc_feature 1..20: note = Target: SCN10A; (+) strand; PAM type: NRG; PAM sequence: AAG
  source 1..20: mol_type = other DNA
atgaaaagttgtcttggagg

SEQ ID NO: 32884 - DNA, 20 bp, synthetic construct
  misc_feature 1..20: note = Description of Artificial Sequence: Synthetic oligonucleotide
  misc_feature 1..20: note = Target: SCN10A; (+) strand; PAM type: NRG; PAM sequence: AGG
  source 1..20: mol_type = other DNA
tgaaaagttgtcttggagga

SEQ ID NO: 32885 - DNA, 20 bp, synthetic construct
  misc_feature 1..20: note = Description of Artificial Sequence: Synthetic oligonucleotide
  misc_feature 1..20: note = Target: SCN10A; (+) strand; PAM type: NRG; PAM sequence: AAG
  source 1..20: mol_type = other DNA
gttgtcttggaggaaggtta

SEQ ID NO: 32886 - DNA, 20 bp, synthetic construct
  misc_feature 1..20: note = Description of Artificial Sequence: Synthetic oligonucleotide
  misc_feature 1..20: note = Target: SCN10A; (+) strand; PAM type: NRG; PAM sequence: TAG
  source 1..20: mol_type = other DNA
tggaggaaggttaaagattt

SEQ ID NO: 32887 - DNA, 20 bp, synthetic construct
  misc_feature 1..20: note = Description of Artificial Sequence: Synthetic oligonucleotide
  misc_feature 1..20: note = Target: SCN10A; (+) strand; PAM type: NRG; PAM sequence: TGG
  source 1..20: mol_type = other DNA
taaagattttagctaacttt

SEQ ID NO: 32888 - DNA, 20 bp, synthetic construct
  misc_feature 1..20: note = Description of Artificial Sequence: Synthetic oligonucleotide
  misc_feature 1..20: note = Target: SCN10A; (+) strand; PAM type: NRG; PAM sequence: AAG
  source 1..20: mol_type = other DNA
gctaacttttggctttgatt

SEQ ID NO: 32889 - DNA, 20 bp, synthetic construct
  misc_feature 1..20: note = Description of Artificial Sequence: Synthetic oligonucleotide
  misc_feature 1..20: note = Target: SCN10A; (+) strand; PAM type: NRG; PAM sequence: TGG
  source 1..20: mol_type = other DNA
gctttgattaagttaactaa

SEQ ID NO: 32890 - DNA, 20 bp, synthetic construct
  misc_feature 1..20: note = Description of Artificial Sequence: Synthetic oligonucleotide
  misc_feature 1..20: note = Target: SCN10A; (+) strand; PAM type: NRG; PAM sequence: GAG
  source 1..20: mol_type = other DNA
tttgattaagttaactaatg

SEQ ID NO: 32891 - DNA, 20 bp, synthetic construct
  misc_feature 1..20: note = Description of Artificial Sequence: Synthetic oligonucleotide
  misc_feature 1..20: note = Target: SCN10A; (+) strand; PAM type: NRG; PAM sequence: GAG
  source 1..20: mol_type = other DNA
tgattaagttaactaatgga

SEQ ID NO: 32892 - DNA, 20 bp, synthetic construct
  misc_feature 1..20: note = Description of Artificial Sequence: Synthetic oligonucleotide
  misc_feature 1..20: note = Target: SCN10A; (+) strand; PAM type: NRG; PAM sequence: CAG
  source 1..20: mol_type = other DNA
aatttatgctgtaatttctg

SEQ ID NO: 32893 - DNA, 20 bp, synthetic construct
  misc_feature 1..20: note = Description of Artificial Sequence: Synthetic oligonucleotide
  misc_feature 1..20: note = Target: SCN10A; (+) strand; PAM type: NRG; PAM sequence: TGG
  source 1..20: mol_type = other DNA
tttctgcagccacgacctcc

SEQ ID NO: 32894 - DNA, 20 bp, synthetic construct
  misc_feature 1..20: note = Description of Artificial Sequence: Synthetic oligonucleotide
  misc_feature 1..20: note = Target: SCN10A; (+) strand; PAM type: NRG; PAM sequence: GGG
  source 1..20: mol_type = other DNA
ttctgcagccacgacctcct

SEQ ID NO: 32895 - DNA, 20 bp, synthetic construct
  misc_feature 1..20: note = Description of Artificial Sequence: Synthetic oligonucleotide
  misc_feature 1..20: note = Target: SCN10A; (+) strand; PAM type: NRG; PAM sequence: AAG
  source 1..20: mol_type = other DNA
agccacgacctcctgggctc

SEQ ID NO: 32896 - DNA, 20 bp, synthetic construct
  misc_feature 1..20: note = Description of Artificial Sequence: Synthetic oligonucleotide
  misc_feature 1..20: note = Target: SCN10A; (+) strand; PAM type: NRG; PAM sequence: CAG
  source 1..20: mol_type = other DNA
ctcaagtcatcctcccacct

SEQ ID NO: 32897 - DNA, 20 bp, synthetic construct
  misc_feature 1..20: note = Description of Artificial Sequence: Synthetic oligonucleotide
  misc_feature 1..20: note = Target: SCN10A; (+) strand; PAM type: NRG; PAM sequence: TAG
  source 1..20: mol_type = other DNA
tcccacctcagcctcccaaa

SEQ ID NO: 32898 - DNA, 20 bp, synthetic construct
  misc_feature 1..20: note = Description of Artificial Sequence: Synthetic oligonucleotide
  misc_feature 1..20: note = Target: SCN10A; (+) strand; PAM type: NRG; PAM sequence: GAG
  source 1..20: mol_type = other DNA
cctcagcctcccaaatagct

SEQ ID NO: 32899 - DNA, 20 bp, synthetic construct
  misc_feature 1..20: note = Description of Artificial Sequence: Synthetic oligonucleotide
  misc_feature 1..20: note = Target: SCN10A; (+) strand; PAM type: NRG; PAM sequence: CAG
  source 1..20: mol_type = other DNA
ctcccaaatagctgagacta

SEQ ID NO: 32900 - DNA, 20 bp, synthetic construct
  misc_feature 1..20: note = Description of Artificial Sequence: Synthetic oligonucleotide
  misc_feature 1..20: note = Target: SCN10A; (+) strand; PAM type: NRG; PAM sequence: CAG
  source 1..20: mol_type = other DNA
cagacacgtgccatcatgcc

SEQ ID NO: 32901 - DNA, 20 bp, synthetic construct
  misc_feature 1..20: note = Description of Artificial Sequence: Synthetic oligonucleotide
  misc_feature 1..20: note = Target: SCN10A; (+) strand; PAM type: NRG; PAM sequence: GAG
  source 1..20: mol_type = other DNA
ttatttatttatttattttt

SEQ ID NO: 32902 - DNA, 20 bp, synthetic construct
  misc_feature 1..20: note = Description of Artificial Sequence: Synthetic oligonucleotide
  misc_feature 1..20: note = Target: SCN10A; (+) strand; PAM type: NRG; PAM sequence: TGG
  source 1..20: mol_type = other DNA
ttatttatttatttttgaga

SEQ ID NO: 32903 - DNA, 20 bp, synthetic construct
  misc_feature 1..20: note = Description of Artificial Sequence: Synthetic oligonucleotide
  misc_feature 1..20: note = Target: SCN10A; (+) strand; PAM type: NRG; PAM sequence: GAG
  source 1..20: mol_type = other DNA
atttatttatttttgagatg

SEQ ID NO: 32904 - DNA, 20 bp, synthetic construct
  misc_feature 1..20: note = Description of Artificial Sequence: Synthetic oligonucleotide
  misc_feature 1..20: note = Target: SCN10A; (+) strand; PAM type: NRG; PAM sequence: CAG
  source 1..20: mol_type = other DNA
ggagttttgcccttgttgcc

SEQ ID NO: 32905 - DNA, 20 bp, synthetic construct
  misc_feature 1..20: note = Description of Artificial Sequence: Synthetic oligonucleotide
  misc_feature 1..20: note = Target: SCN10A; (+) strand; PAM type: NRG; PAM sequence: AGG
  source 1..20: mol_type = other DNA
gagttttgcccttgttgccc

SEQ ID NO: 32906 - DNA, 20 bp, synthetic construct
  misc_feature 1..20: note = Description of Artificial Sequence: Synthetic oligonucleotide
  misc_feature 1..20: note = Target: SCN10A; (+) strand; PAM type: NRG; PAM sequence: TGG
  source 1..20: mol_type = other DNA
tttgcccttgttgcccaggc

SEQ ID NO: 32907 - DNA, 20 bp, synthetic construct
  misc_feature 1..20: note = Description of Artificial Sequence: Synthetic oligonucleotide
  misc_feature 1..20: note = Target: SCN10A; (+) strand; PAM type: NRG; PAM sequence: GAG
  source 1..20: mol_type = other DNA
tgcccttgttgcccaggctg

SEQ ID NO: 32908 - DNA, 20 bp, synthetic construct
  misc_feature 1..20: note = Description of Artificial Sequence: Synthetic oligonucleotide
  misc_feature 1..20: note = Target: SCN10A; (+) strand; PAM type: NRG; PAM sequence: TGG
  source 1..20: mol_type = other DNA
ttgcccaggctggagtgcaa

SEQ ID NO: 32909 - DNA, 20 bp, synthetic construct
  misc_feature 1..20: note = Description of Artificial Sequence: Synthetic oligonucleotide
  misc_feature 1..20: note = Target: SCN10A; (+) strand; PAM type: NRG; PAM sequence: CAG
  source 1..20: mol_type = other DNA
ggagtgcaatggtgcaatct

SEQ ID NO: 32910 - DNA, 20 bp, synthetic construct
  misc_feature 1..20: note = Description of Artificial Sequence: Synthetic oligonucleotide
  misc_feature 1..20: note = Target: SCN10A; (+) strand; PAM type: NRG; PAM sequence: CGG
  source 1..20: mol_type = other DNA
tcaccgcaacctccgcctcc

SEQ ID NO: 32911 - DNA, 20 bp, synthetic construct
  misc_feature 1..20: note = Description of Artificial Sequence: Synthetic oligonucleotide
  misc_feature 1..20: note = Target: SCN10A; (+) strand; PAM type: NRG; PAM sequence: GGG
  source 1..20: mol_type = other DNA
caccgcaacctccgcctccc

SEQ ID NO: 32912 - DNA, 20 bp, synthetic construct
  misc_feature 1..20: note = Description of Artificial Sequence: Synthetic oligonucleotide
  misc_feature 1..20: note = Target: SCN10A; (+) strand; PAM type: NRG; PAM sequence: AAG
  source 1..20: mol_type = other DNA
aacctccgcctcccgggttc

SEQ ID NO: 32913 - DNA, 20 bp, synthetic construct
  misc_feature 1..20: note = Description of Artificial Sequence: Synthetic oligonucleotide
  misc_feature 1..20: note = Target: SCN10A; (+) strand; PAM type: NRG; PAM sequence: CAG
  source 1..20: mol_type = other DNA
ttcaagcaattctcctccct

SEQ ID NO: 32914 - DNA, 20 bp, synthetic construct
  misc_feature 1..20: note = Description of Artificial Sequence: Synthetic oligonucleotide
  misc_feature 1..20: note = Target: SCN10A; (+) strand; PAM type: NRG; PAM sequence: AAG
  source 1..20: mol_type = other DNA
ttctcctccctcagcctccc

SEQ ID NO: 32915 - DNA, 20 bp, synthetic construct
  misc_feature 1..20: note = Description of Artificial Sequence: Synthetic oligonucleotide
  misc_feature 1..20: note = Target: SCN10A; (+) strand; PAM type: NRG; PAM sequence: TAG
  source 1..20: mol_type = other DNA
tcctccctcagcctcccaag

SEQ ID NO: 32916 - DNA, 20 bp, synthetic construct
  misc_feature 1..20: note = Description of Artificial Sequence: Synthetic oligonucleotide
  misc_feature 1..20: note = Target: SCN10A; (+) strand; PAM type: NRG; PAM sequence: TGG
  source 1..20: mol_type = other DNA
ccctcagcctcccaagtagc

SEQ ID NO: 32917 - DNA, 20 bp, synthetic construct
  misc_feature 1..20: note = Description of Artificial Sequence: Synthetic oligonucleotide
  misc_feature 1..20: note = Target: SCN10A; (+) strand; PAM type: NRG; PAM sequence: GGG
  source 1..20: mol_type = other DNA
cctcagcctcccaagtagct

SEQ ID NO: 32918 - DNA, 20 bp, synthetic construct
  misc_feature 1..20: note = Description of Artificial Sequence: Synthetic oligonucleotide
  misc_feature 1..20: note = Target: SCN10A; (+) strand; PAM type: NRG; PAM sequence: AAG
  source 1..20: mol_type = other DNA
tcccaagtagctgggattaa

SEQ ID NO: 32919 - DNA, 20 bp, synthetic construct
  misc_feature 1..20: note = Description of Artificial Sequence: Synthetic oligonucleotide
  misc_feature 1..20: note = Target: SCN10A; (+) strand; PAM type: NRG; PAM sequence: TGG
  source 1..20: mol_type = other DNA
aaagtatgcaccatcacacc

SEQ ID NO: 32920 - DNA, 20 bp, synthetic construct
  misc_feature 1..20: note = Description of Artificial Sequence: Synthetic oligonucleotide
  misc_feature 1..20: note = Target: SCN10A; (+) strand; PAM type: NRG; PAM sequence: TGG
  source 1..20: mol_type = other DNA
cctggctaattttgtatttt

SEQ ID NO: 32921 - DNA, 20 bp, synthetic construct
  misc_feature 1..20: note = Description of Artificial Sequence: Synthetic oligonucleotide
  misc_feature 1..20: note = Target: SCN10A; (+) strand; PAM type: NRG; PAM sequence: TAG
  source 1..20: mol_type = other DNA
ggctaattttgtatttttgg

SEQ ID NO: 32922 - DNA, 20 bp, synthetic construct
  misc_feature 1..20: note = Description of Artificial Sequence: Synthetic oligonucleotide
  misc_feature 1..20: note = Target: SCN10A; (+) strand; PAM type: NRG; PAM sequence: GAG
  source 1..20: mol_type = other DNA
ctaattttgtatttttggta

SEQ ID NO: 32923 - DNA, 20 bp, synthetic construct
  misc_feature 1..20: note = Description of Artificial Sequence: Synthetic oligonucleotide
  misc_feature 1..20: note = Target: SCN10A; (+) strand; PAM type: NRG; PAM sequence: TGG
  source 1..20: mol_type = other DNA
ttttgtatttttggtagaga

SEQ ID NO: 32924 - DNA, 20 bp, synthetic construct
  misc_feature 1..20: note = Description of Artificial Sequence: Synthetic oligonucleotide
  misc_feature 1..20: note = Target: SCN10A; (+) strand; PAM type: NRG; PAM sequence: GGG
  source 1..20: mol_type = other DNA
tttgtatttttggtagagat

SEQ ID NO: 32925 - DNA, 20 bp, synthetic construct
  misc_feature 1..20: note = Description of Artificial Sequence: Synthetic oligonucleotide
  misc_feature 1..20: note = Target: SCN10A; (+) strand; PAM type: NRG; PAM sequence: TGG
  source 1..20: mol_type = other DNA
gagatgggtcttctccatgt

SEQ ID NO: 32926 - DNA, 20 bp, synthetic construct
  misc_feature 1..20: note = Description of Artificial Sequence: Synthetic oligonucleotide
  misc_feature 1..20: note = Target: SCN10A; (+) strand; PAM type: NRG; PAM sequence: CAG
  source 1..20: mol_type = other DNA
tgggtcttctccatgttggt

SEQ ID NO: 32927 - DNA, 20 bp, synthetic construct
  misc_feature 1..20: note = Description of Artificial Sequence: Synthetic oligonucleotide
  misc_feature 1..20: note = Target: SCN10A; (+) strand; PAM type: NRG; PAM sequence: AGG
  source 1..20: mol_type = other DNA
gggtcttctccatgttggtc

SEQ ID NO: 32928 - DNA, 20 bp, synthetic construct
  misc_feature 1..20: note = Description of Artificial Sequence: Synthetic oligonucleotide
  misc_feature 1..20: note = Target: SCN10A; (+) strand; PAM type: NRG; PAM sequence: TGG
  source 1..20: mol_type = other DNA
cttctccatgttggtcaggc

SEQ ID NO: 32929 - DNA, 20 bp, synthetic construct
  misc_feature 1..20: note = Description of Artificial Sequence: Synthetic oligonucleotide
  misc_feature 1..20: note = Target: SCN10A; (+) strand; PAM type: NRG; PAM sequence: CAG
  source 1..20: mol_type = other DNA
tggtctcgaactcccgacct

SEQ ID NO: 32930 - DNA, 20 bp, synthetic construct
  misc_feature 1..20: note = Description of Artificial Sequence: Synthetic oligonucleotide
  misc_feature 1..20: note = Target: SCN10A; (+) strand; PAM type: NRG; PAM sequence: AGG
  source 1..20: mol_type = other DNA
ggtctcgaactcccgacctc

SEQ ID NO: 32931 - DNA, 20 bp, synthetic construct
  misc_feature 1..20: note = Description of Artificial Sequence: Synthetic oligonucleotide
  misc_feature 1..20: note = Target: SCN10A; (+) strand; PAM type: NRG; PAM sequence: CAG
  source 1..20: mol_type = other DNA
ccgcctgcctgcgcctccaa

SEQ ID NO: 32932 - DNA, 20 bp, synthetic construct
  misc_feature 1..20: note = Description of Artificial Sequence: Synthetic oligonucleotide
  misc_feature 1..20: note = Target: SCN10A; (+) strand; PAM type: NRG; PAM sequence: TGG
  source 1..20: mol_type = other DNA
gcctgcgcctccaacagtgc

SEQ ID NO: 32933 - DNA, 20 bp, synthetic construct
  misc_feature 1..20: note = Description of Artificial Sequence: Synthetic oligonucleotide
  misc_feature 1..20: note = Target: SCN10A; (+) strand; PAM type: NRG; PAM sequence: GGG
  source 1..20: mol_type = other DNA
cctgcgcctccaacagtgct

SEQ ID NO: 32934 - DNA, 20 bp, synthetic construct
  misc_feature 1..20: note = Description of Artificial Sequence: Synthetic oligonucleotide
  misc_feature 1..20: note = Target: SCN10A; (+) strand; PAM type: NRG; PAM sequence: CAG
  source 1..20: mol_type = other DNA
ctccaacagtgctgggatta

SEQ ID NO: 32935 - DNA, 20 bp, synthetic construct
  misc_feature 1..20: note = Description of Artificial Sequence: Synthetic oligonucleotide
  misc_feature 1..20: note = Target: SCN10A; (+) strand; PAM type: NRG; PAM sequence: AGG
  source 1..20: mol_type = other DNA
tccaacagtgctgggattac

SEQ ID NO: 32936 - DNA, 20 bp, synthetic construct
  misc_feature 1..20: note = Description of Artificial Sequence: Synthetic oligonucleotide
  misc_feature 1..20: note = Target: SCN10A; (+) strand; PAM type: NRG; PAM sequence: TGG
  source 1..20: mol_type = other DNA
caggcattaaccactgcccc

SEQ ID NO: 32937 - DNA, 20 bp, synthetic construct
  misc_feature 1..20: note = Description of Artificial Sequence: Synthetic oligonucleotide
  misc_feature 1..20: note = Target: SCN10A; (+) strand; PAM type: NRG; PAM sequence: GAG
  source 1..20: mol_type = other DNA
ttctttttattgttttcaat

SEQ ID NO: 32938 - DNA, 20 bp, synthetic construct
  misc_feature 1..20: note = Description of Artificial Sequence: Synthetic oligonucleotide
  misc_feature 1..20: note = Target: SCN10A; (+) strand; PAM type: NRG; PAM sequence: CGG
  source 1..20: mol_type = other DNA
ttttattgttttcaatgaga

SEQ ID NO: 32939 - DNA, 20 bp, synthetic construct
  misc_feature 1..20: note = Description of Artificial Sequence: Synthetic oligonucleotide
  misc_feature 1..20: note = Target: SCN10A; (+) strand; PAM type: NRG; PAM sequence: GAG
  source 1..20: mol_type = other DNA
ttattgttttcaatgagacg

SEQ ID NO: 32940 - DNA, 20 bp, synthetic construct
  misc_feature 1..20: note = Description of Artificial Sequence: Synthetic oligonucleotide
  misc_feature 1..20: note = Target: SCN10A; (+) strand; PAM type: NRG; PAM sequence: CAG
  source 1..20: mol_type = other DNA
cggagtctcgctctgttgcc

SEQ ID NO: 32941 - DNA, 20 bp, synthetic construct
  misc_feature 1..20: note = Description of Artificial Sequence: Synthetic oligonucleotide
  misc_feature 1..20: note = Target: SCN10A; (+) strand; PAM type: NRG; PAM sequence: AGG
  source 1..20: mol_type = other DNA
ggagtctcgctctgttgccc

SEQ ID NO: 32942 - DNA, 20 bp, synthetic construct
  misc_feature 1..20: note = Description of Artificial Sequence: Synthetic oligonucleotide
  misc_feature 1..20: note = Target: SCN10A; (+) strand; PAM type: NRG; PAM sequence: TGG
  source 1..20: mol_type = other DNA
tctcgctctgttgcccaggc

SEQ ID NO: 32943 - DNA, 20 bp, synthetic construct
  misc_feature 1..20: note = Description of Artificial Sequence: Synthetic oligonucleotide
  misc_feature 1..20: note = Target: SCN10A; (+) strand; PAM type: NRG; PAM sequence: GAG
  source 1..20: mol_type = other DNA
tcgctctgttgcccaggctg

SEQ ID NO: 32944 - DNA, 20 bp, synthetic construct
  misc_feature 1..20: note = Description of Artificial Sequence: Synthetic oligonucleotide
  misc_feature 1..20: note = Target: SCN10A; (+) strand; PAM type: NRG; PAM sequence: CAG
  source 1..20: mol_type = other DNA
ctgttgcccaggctggagtg

SEQ ID NO: 32945 - DNA, 20 bp, synthetic construct
  misc_feature 1..20: note = Description of Artificial Sequence: Synthetic oligonucleotide
  misc_feature 1..20: note = Target: SCN10A; (+) strand; PAM type: NRG; PAM sequence: TGG
  source 1..20: mol_type = other DNA
ttgcccaggctggagtgcag

SEQ ID NO: 32946 - DNA, 20 bp, synthetic construct
  misc_feature 1..20: note = Description of Artificial Sequence: Synthetic oligonucleotide
  misc_feature 1..20: note = Target: SCN10A; (+) strand; PAM type: NRG; PAM sequence: CAG
  source 1..20: mol_type = other DNA
ggagtgcagtggcatgatct

SEQ ID NO: 32947 - DNA, 20 bp, synthetic construct
  misc_feature 1..20: note = Description of Artificial Sequence: Synthetic oligonucleotide
  misc_feature 1..20: note = Target: SCN10A; (+) strand; PAM type: NRG; PAM sequence: TGG
  source 1..20: mol_type = other DNA
ctcactgcaacctctgtctc

SEQ ID NO: 32948 - DNA, 20 bp, synthetic construct
  misc_feature 1..20: note = Description of Artificial Sequence: Synthetic oligonucleotide
  misc_feature 1..20: note = Target: SCN10A; (+) strand; PAM type: NRG; PAM sequence: GGG
  source 1..20: mol_type = other DNA
tcactgcaacctctgtctct

SEQ ID NO: 32949 - DNA, 20 bp, synthetic construct
  misc_feature 1..20: note = Description of Artificial Sequence: Synthetic oligonucleotide
  misc_feature 1..20: note = Target: SCN10A; (+) strand; PAM type: NRG; PAM sequence: AAG
  source 1..20: mol_type = other DNA
aacctctgtctctgggattc

SEQ ID NO: 32950 - DNA, 20 bp, synthetic construct
  misc_feature 1..20: note = Description of Artificial Sequence: Synthetic oligonucleotide
  misc_feature 1..20: note = Target: SCN10A; (+) strand; PAM type: NRG; PAM sequence: GAG
  source 1..20: mol_type = other DNA
ttctcatgcctcaccctcct

SEQ ID NO: 32951 - DNA, 20 bp, synthetic construct
  misc_feature 1..20: note = Description of Artificial Sequence: Synthetic oligonucleotide
  misc_feature 1..20: note = Target: SCN10A; (+) strand; PAM type: NRG; PAM sequence: TAG
  source 1..20: mol_type = other DNA
tcatgcctcaccctcctgag

SEQ ID NO: 32952 - DNA, 20 bp, synthetic construct
  misc_feature 1..20: note = Description of Artificial Sequence: Synthetic oligonucleotide
  misc_feature 1..20: note = Target: SCN10A; (+) strand; PAM type: NRG; PAM sequence: TGG
  source 1..20: mol_type = other DNA
gcctcaccctcctgagtagc

SEQ ID NO: 32953 - DNA, 20 bp, synthetic construct
  misc_feature 1..20: note = Description of Artificial Sequence: Synthetic oligonucleotide
  misc_feature 1..20: note = Target: SCN10A; (+) strand; PAM type: NRG; PAM sequence: GGG
  source 1..20: mol_type = other DNA
cctcaccctcctgagtagct

SEQ ID NO: 32954 - DNA, 20 bp, synthetic construct
  misc_feature 1..20: note = Description of Artificial Sequence: Synthetic oligonucleotide
  misc_feature 1..20: note = Target: SCN10A; (+) strand; PAM type: NRG; PAM sequence: CAG
  source 1..20: mol_type = other DNA
ctcctgagtagctgggatta

SEQ ID NO: 32955 - DNA, 20 bp, synthetic construct
  misc_feature 1..20: note = Description of Artificial Sequence: Synthetic oligonucleotide
  misc_feature 1..20: note = Target: SCN10A; (+) strand; PAM type: NRG; PAM sequence: AGG
  source 1..20: mol_type = other DNA
tcctgagtagctgggattac

SEQ ID NO: 32956 - DNA, 20 bp, synthetic construct
  misc_feature 1..20: note = Description of Artificial Sequence: Synthetic oligonucleotide
  misc_feature 1..20: note = Target: SCN10A; (+) strand; PAM type: NRG; PAM sequence: CAG
  source 1..20: mol_type = other DNA
caggtgtgtgccaccacacc

SEQ ID NO: 32957 - DNA, 20 bp, synthetic construct
  misc_feature 1..20: note = Description of Artificial Sequence: Synthetic oligonucleotide
  misc_feature 1..20: note = Target: SCN10A; (+) strand; PAM type: NRG; PAM sequence: TAG
  source 1..20: mol_type = other DNA
ccagctaatttatatatttt

SEQ ID NO: 32958 - DNA, 20 bp, synthetic construct
  misc_feature 1..20: note = Description of Artificial Sequence: Synthetic oligonucleotide
  misc_feature 1..20: note = Target: SCN10A; (+) strand; PAM type: NRG; PAM sequence: TAG
  source 1..20: mol_type = other DNA
gctaatttatatatttttag

SEQ ID NO: 32959 - DNA, 20 bp, synthetic construct
  misc_feature 1..20: note = Description of Artificial Sequence: Synthetic oligonucleotide
  misc_feature 1..20: note = Target: SCN10A; (+) strand; PAM type: NRG; PAM sequence: GAG
  source 1..20: mol_type = other DNA
taatttatatatttttagta

SEQ ID NO: 32960 - DNA, 20 bp, synthetic construct
  misc_feature 1..20: note = Description of Artificial Sequence: Synthetic oligonucleotide
  misc_feature 1..20: note = Target: SCN10A; (+) strand; PAM type: NRG; PAM sequence: TGG
  source 1..20: mol_type = other DNA
ttatatatttttagtagaga

SEQ ID NO: 32961 - DNA, 20 bp, synthetic construct
  misc_feature 1..20: note = Description of Artificial Sequence: Synthetic oligonucleotide
  misc_feature 1..20: note = Target: SCN10A; (+) strand; PAM type: NRG; PAM sequence: GGG
  source 1..20: mol_type = other DNA
tatatatttttagtagagat

SEQ ID NO: 32962 - DNA, 20 bp, synthetic construct
  misc_feature 1..20: note = Description of Artificial Sequence: Synthetic oligonucleotide
  misc_feature 1..20: note = Target: SCN10A; (+) strand; PAM type: NRG; PAM sequence: GGG
  source 1..20: mol_type = other DNA
atatatttttagtagagatg

SEQ ID NO: 32963 - DNA, 20 bp, synthetic construct
  misc_feature 1..20: note = Description of Artificial Sequence: Synthetic oligonucleotide
  misc_feature 1..20: note = Target: SCN10A; (+) strand; PAM type: NRG; PAM sequence: TGG
  source 1..20: mol_type = other DNA
gagatggggttttctcctgt

SEQ ID NO: 32964 - DNA, 20 bp, synthetic construct
  misc_feature 1..20: note = Description of Artificial Sequence: Synthetic oligonucleotide
  misc_feature 1..20: note = Target: SCN10A; (+) strand; PAM type: NRG; PAM sequence: CAG
  source 1..20: mol_type = other DNA
tggggttttctcctgttggc

SEQ ID NO: 32965 - DNA, 20 bp, synthetic construct
  misc_feature 1..20: note = Description of Artificial Sequence: Synthetic oligonucleotide
  misc_feature 1..20: note = Target: SCN10A; (+) strand; PAM type: NRG; PAM sequence: AGG
  source 1..20: mol_type = other DNA
ggggttttctcctgttggcc

SEQ ID NO: 32966 - DNA, 20 bp, synthetic construct
  misc_feature 1..20: note = Description of Artificial Sequence: Synthetic oligonucleotide
  misc_feature 1..20: note = Target: SCN10A; (+) strand; PAM type: NRG; PAM sequence: TGG
  source 1..20: mol_type = other DNA
ttttctcctgttggccaggc

SEQ ID NO: 32967 - DNA, 20 bp, synthetic construct
  misc_feature 1..20: note = Description of Artificial Sequence: Synthetic oligonucleotide
  misc_feature 1..20: note = Target: SCN10A; (+) strand; PAM type: NRG; PAM sequence: AAG
  source 1..20: mol_type = other DNA
ggtctccaactcctgtcctc

SEQ ID NO: 32968 - DNA, 20 bp, synthetic construct
  misc_feature 1..20: note = Description of Artificial Sequence: Synthetic oligonucleotide
  misc_feature 1..20: note = Target: SCN10A; (+) strand; PAM type: NRG; PAM sequence: TGG
  source 1..20: mol_type = other DNA
ctcaagcaatcctcccacct

SEQ ID NO: 32969 - DNA, 20 bp, synthetic construct
  misc_feature 1..20: note = Description of Artificial Sequence: Synthetic oligonucleotide
  misc_feature 1..20: note = Target: SCN10A; (+) strand; PAM type: NRG; PAM sequence: TGG
  source 1..20: mol_type = other DNA
accttggcctcccaaaattc

SEQ ID NO: 32970 - DNA, 20 bp, synthetic construct
  misc_feature 1..20: note = Description of Artificial Sequence: Synthetic oligonucleotide
  misc_feature 1..20: note = Target: SCN10A; (+) strand; PAM type: NRG; PAM sequence: GGG
  source 1..20: mol_type = other DNA
ccttggcctcccaaaattct

SEQ ID NO: 32971 - DNA, 20 bp, synthetic construct
  misc_feature 1..20: note = Description of Artificial Sequence: Synthetic oligonucleotide
  misc_feature 1..20: note = Target: SCN10A; (+) strand; PAM type: NRG; PAM sequence: CAG
  source 1..20: mol_type = other DNA
ctcccaaaattctgggatta

SEQ ID NO: 32972 - DNA, 20 bp, synthetic construct
  misc_feature 1..20: note = Description of Artificial Sequence: Synthetic oligonucleotide
  misc_feature 1..20: note = Target: SCN10A; (+) strand; PAM type: NRG; PAM sequence: AGG
  source 1..20: mol_type = other DNA
tcccaaaattctgggattac

SEQ ID NO: 32973 - DNA, 20 bp, synthetic construct
  misc_feature 1..20: note = Description of Artificial Sequence: Synthetic oligonucleotide
  misc_feature 1..20: note = Target: SCN10A; (+) strand; PAM type: NRG; PAM sequence: GAG
  source 1..20: mol_type = other DNA
aattctgggattacaggcgt

SEQ ID NO: 32974 - DNA, 20 bp, synthetic construct
  misc_feature 1..20: note = Description of Artificial Sequence: Synthetic oligonucleotide
  misc_feature 1..20: note = Target: SCN10A; (+) strand; PAM type: NRG; PAM sequence: TGG
  source 1..20: mol_type = other DNA
caggcgtgagccaccccacc

SEQ ID NO: 32975 - DNA, 20 bp, synthetic construct
  misc_feature 1..20: note = Description of Artificial Sequence: Synthetic oligonucleotide
  misc_feature 1..20: note = Target: SCN10A; (+) strand; PAM type: NRG; PAM sequence: TGG
  source 1..20: mol_type = other DNA
gccaccccacctggccccct

SEQ ID NO: 32976 - DNA, 20 bp, synthetic construct
  misc_feature 1..20: note = Description of Artificial Sequence: Synthetic oligonucleotide
  misc_feature 1..20: note = Target: SCN10A; (+) strand; PAM type: NRG; PAM sequence: TGG
  source 1..20: mol_type = other DNA
ccttggctttaaaaaaaaaa

SEQ ID NO: 32977 - DNA, 20 bp, synthetic construct
  misc_feature 1..20: note = Description of Artificial Sequence: Synthetic oligonucleotide
  misc_feature 1..20: note = Target: SCN10A; (+) strand; PAM type: NRG; PAM sequence: TGG
  source 1..20: mol_type = other DNA
aaaaaaaaatggcataatct

SEQ ID NO: 32978 - DNA, 20 bp, synthetic construct
  misc_feature 1..20: note = Description of Artificial Sequence: Synthetic oligonucleotide
  misc_feature 1..20: note = Target: SCN10A; (+) strand; PAM type: NRG; PAM sequence: TGG
  source 1..20: mol_type = other DNA
ggaaccttgataccaaaacc

SEQ ID NO: 32979 - DNA, 20 bp, synthetic construct
  misc_feature 1..20: note = Description of Artificial Sequence: Synthetic oligonucleotide
  misc_feature 1..20: note = Target: SCN10A; (+) strand; PAM type: NRG; PAM sequence: AAG
  source 1..20: mol_type = other DNA
ccttgataccaaaacctggc

SEQ ID NO: 32980 - DNA, 20 bp, synthetic construct
  misc_feature 1..20: note = Description of Artificial Sequence: Synthetic oligonucleotide
  misc_feature 1..20: note = Target: SCN10A; (+) strand; PAM type: NRG; PAM sequence: AGG
  source 1..20: mol_type = other DNA
cttgataccaaaacctggca

SEQ ID NO: 32981 - DNA, 20 bp, synthetic construct
  misc_feature 1..20: note = Description of Artificial Sequence: Synthetic oligonucleotide
  misc_feature 1..20: note = Target: SCN10A; (+) strand; PAM type: NRG; PAM sequence: AAG
  source 1..20: mol_type = other DNA
aaacctggcaaggacaatga

SEQ ID NO: 32982 - DNA, 20 bp, synthetic construct
  misc_feature 1..20: note = Description of Artificial Sequence: Synthetic oligonucleotide
  misc_feature 1..20: note = Target: SCN10A; (+) strand; PAM type: NRG; PAM sequence: CAG
  source 1..20: mol_type = other DNA
ctggcaaggacaatgaaagt

SEQ ID NO: 32983 - DNA, 20 bp, synthetic construct
  misc_feature 1..20: note = Description of Artificial Sequence: Synthetic oligonucleotide
  misc_feature 1..20: note = Target: SCN10A; (+) strand; PAM type: NRG; PAM sequence: AGG
  source 1..20: mol_type = other DNA
tggcaaggacaatgaaagtc

SEQ ID NO: 32984 - DNA, 20 bp, synthetic construct
  misc_feature 1..20: note = Description of Artificial Sequence: Synthetic oligonucleotide
  misc_feature 1..20: note = Target: SCN10A; (+) strand; PAM type: NRG; PAM sequence: TAG
  source 1..20: mol_type = other DNA
aatgaaagtcaggaaaatta

SEQ ID NO: 32985 - DNA, 20 bp, synthetic construct
  misc_feature 1..20: note = Description of Artificial Sequence: Synthetic oligonucleotide
  misc_feature 1..20: note = Target: SCN10A; (+) strand; PAM type: NRG; PAM sequence: TGG
  source 1..20: mol_type = other DNA
tcaaatattactcattgata

SEQ ID NO: 32986 - DNA, 20 bp, synthetic construct
  misc_feature 1..20: note = Description of Artificial Sequence: Synthetic oligonucleotide
  misc_feature 1..20: note = Target: SCN10A; (+) strand; PAM type: NRG; PAM sequence: AAG
  source 1..20: mol_type = other DNA
gatatggataaaaaaatctt

SEQ ID NO: 32987 - DNA, 20 bp, synthetic construct
  misc_feature 1..20: note = Description of Artificial Sequence: Synthetic oligonucleotide
  misc_feature 1..20: note = Target: SCN10A; (+) strand; PAM type: NRG; PAM sequence: TAG
  source 1..20: mol_type = other DNA
aaaaatcttaagcaaatttt

SEQ ID NO: 32988 - DNA, 20 bp, synthetic construct
  misc_feature 1..20: note = Description of Artificial Sequence: Synthetic oligonucleotide
  misc_feature 1..20: note = Target: SCN10A; (+) strand; PAM type: NRG; PAM sequence: AAG
  source 1..20: mol_type = other DNA
ttaaaaaatgcatcacgatc

SEQ ID NO: 32989 - DNA, 20 bp, synthetic construct
  misc_feature 1..20: note = Description of Artificial Sequence: Synthetic oligonucleotide
  misc_feature 1..20: note = Target: SCN10A; (+) strand; PAM type: NRG; PAM sequence: TAG
  source 1..20: mol_type = other DNA
aaaatgcatcacgatcaagc

SEQ ID NO: 32990 - DNA, 20 bp, synthetic construct
  misc_feature 1..20: note = Description of Artificial Sequence: Synthetic oligonucleotide
  misc_feature 1..20: note = Target: SCN10A; (+) strand; PAM type: NRG; PAM sequence: AGG
  source 1..20: mol_type = other DNA
aaatgcatcacgatcaagct

SEQ ID NO: 32991 - DNA, 20 bp, synthetic construct
  misc_feature 1..20: note = Description of Artificial Sequence: Synthetic oligonucleotide
  misc_feature 1..20: note = Target: SCN10A; (+) strand; PAM type: NRG; PAM sequence: GAG
  source 1..20: mol_type = other DNA
atcacgatcaagctaggttt

SEQ ID NO: 32992 - DNA, 20 bp, synthetic construct
  misc_feature 1..20: note = Description of Artificial Sequence: Synthetic oligonucleotide
  misc_feature 1..20: note = Target: SCN10A; (+) strand; PAM type: NRG; PAM sequence: TGG
  source 1..20: mol_type = other DNA
cgatcaagctaggtttgagc

SEQ ID NO: 32993 - DNA, 20 bp, synthetic construct
  misc_feature 1..20: note = Description of Artificial Sequence: Synthetic oligonucleotide
  misc_feature 1..20: note = Target: SCN10A; (+) strand; PAM type: NRG; PAM sequence: GGG
  source 1..20: mol_type = other DNA
gatcaagctaggtttgagct

SEQ ID NO: 32994 - DNA, 20 bp, synthetic construct
  misc_feature 1..20: note = Description of Artificial Sequence: Synthetic oligonucleotide
  misc_feature 1..20: note = Target: SCN10A; (+) strand; PAM type: NRG; PAM sequence: AAG
  source 1..20: mol_type = other DNA
aggtttgagctgggaatgta

SEQ ID NO: 32995 - DNA, 20 bp, synthetic construct
  misc_feature 1..20: note = Description of Artificial Sequence: Synthetic oligonucleotide
  misc_feature 1..20: note = Target: SCN10A; (+) strand; PAM type: NRG; PAM sequence: TAG
  source 1..20: mol_type = other DNA
atgtaaagttgatttaacat

SEQ ID NO: 32996 - DNA, 20 bp, synthetic construct
  misc_feature 1..20: note = Description of Artificial Sequence: Synthetic oligonucleotide
  misc_feature 1..20: note = Target: SCN10A; (+) strand; PAM type: NRG; PAM sequence: CAG
  source 1..20: mol_type = other DNA
aatataattcaccactttaa

SEQ ID NO: 32997 - DNA, 20 bp, synthetic construct
  misc_feature 1..20: note = Description of Artificial Sequence: Synthetic oligonucleotide
  misc_feature 1..20: note = Target: SCN10A; (+) strand; PAM type: NRG; PAM sequence: AAG
  source 1..20: mol_type = other DNA
ttcaccactttaacagattg

SEQ ID NO: 32998 - DNA, 20 bp, synthetic construct
  misc_feature 1..20: note = Description of Artificial Sequence: Synthetic oligonucleotide
  misc_feature 1..20: note = Target: SCN10A; (+) strand; PAM type: NRG; PAM sequence: AGG
  source 1..20: mol_type = other DNA
tcaccactttaacagattga

SEQ ID NO: 32999 - DNA, 20 bp, synthetic construct
  misc_feature 1..20: note = Description of Artificial Sequence: Synthetic oligonucleotide
  misc_feature 1..20: note = Target: SCN10A; (+) strand; PAM type: NRG; PAM sequence: GAG
  source 1..20: mol_type = other DNA
accactttaacagattgaag

SEQ ID NO: 33000 - DNA, 20 bp, synthetic construct
  misc_feature 1..20: note = Description of Artificial Sequence: Synthetic oligonucleotide
  misc_feature 1..20: note = Target: SCN10A; (+) strand; PAM type: NRG; PAM sequence: TAG
  source 1..20: mol_type = other DNA
catgattatctcaatacatg

SEQ ID NO: 33001 - DNA, 20 bp, synthetic construct
  misc_feature 1..20: note = Description of Artificial Sequence: Synthetic oligonucleotide
  misc_feature 1..20: note = Target: SCN10A; (+) strand; PAM type: NRG; PAM sequence: AAG
  source 1..20: mol_type = other DNA
atgataaatattcttgataa

SEQ ID NO: 33002 - DNA, 20 bp, synthetic construct
  misc_feature 1..20: note = Description of Artificial Sequence: Synthetic oligonucleotide
  misc_feature 1..20: note = Target: SCN10A; (+) strand; PAM type: NRG; PAM sequence: GAG
  source 1..20: mol_type = other DNA
gataaatattcttgataaaa

SEQ ID NO: 33003 - DNA, 20 bp, synthetic construct
  misc_feature 1..20: note = Description of Artificial Sequence: Synthetic oligonucleotide
  misc_feature 1..20: note = Target: SCN10A; (+) strand; PAM type: NRG; PAM sequence: AAG
  source 1..20: mol_type = other DNA
gagaacttcctgaactgata

SEQ ID NO: 33004 - DNA, 20 bp, synthetic construct
  misc_feature 1..20: note = Description of Artificial Sequence: Synthetic oligonucleotide
  misc_feature 1..20: note = Target: SCN10A; (+) strand; PAM type: NRG; PAM sequence: AAG
  source 1..20: mol_type = other DNA
agatttcttatctttaaaaa

SEQ ID NO: 33005 - DNA, 20 bp, synthetic construct
  misc_feature 1..20: note = Description of Artificial Sequence: Synthetic oligonucleotide
  misc_feature 1..20: note = Target: SCN10A; (+) strand; PAM type: NRG; PAM sequence: TAG
  source 1..20: mol_type = other DNA
aaaaagcctgccacaattgt

SEQ ID NO: 33006 - DNA, 20 bp, synthetic construct
  misc_feature 1..20: note = Description of Artificial Sequence: Synthetic oligonucleotide
  misc_feature 1..20: note = Target: SCN10A; (+) strand; PAM type: NRG; PAM sequence: GAG
  source 1..20: mol_type = other DNA
aaagcctgccacaattgtta

SEQ ID NO: 33007 - DNA, 20 bp, synthetic construct
  misc_feature 1..20: note = Description of Artificial Sequence: Synthetic oligonucleotide
  misc_feature 1..20: note = Target: SCN10A; (+) strand; PAM type: NRG; PAM sequence: AGG
  source 1..20: mol_type = other DNA
aagcctgccacaattgttag

SEQ ID NO: 33008 - DNA, 20 bp, synthetic construct
  misc_feature 1..20: note = Description of Artificial Sequence: Synthetic oligonucleotide
  misc_feature 1..20: note = Target: SCN10A; (+) strand; PAM type: NRG; PAM sequence: TGG
  source 1..20: mol_type = other DNA
cctgccacaattgttagagg

SEQ ID NO: 33009 - DNA, 20 bp, synthetic construct
  misc_feature 1..20: note = Description of Artificial Sequence: Synthetic oligonucleotide
  misc_feature 1..20: note = Target: SCN10A; (+) strand; PAM type: NRG; PAM sequence: AAG
  source 1..20: mol_type = other DNA
tagaggtggtgaaatattga

SEQ ID NO: 33010 - DNA, 20 bp, synthetic construct
  misc_feature 1..20: note = Description of Artificial Sequence: Synthetic oligonucleotide
  misc_feature 1..20: note = Target: SCN10A; (+) strand; PAM type: NRG; PAM sequence: AGG
  source 1..20: mol_type = other DNA
agaggtggtgaaatattgaa

SEQ ID NO: 33011 - DNA, 20 bp, synthetic construct
  misc_feature 1..20: note = Description of Artificial Sequence: Synthetic oligonucleotide
  misc_feature 1..20: note = Target: SCN10A; (+) strand; PAM type: NRG; PAM sequence: TGG
  source 1..20: mol_type = other DNA
aatattgaaaggattctttt

SEQ ID NO: 33012 - DNA, 20 bp, synthetic construct
  misc_feature 1..20: note = Description of Artificial Sequence: Synthetic oligonucleotide
  misc_feature 1..20: note = Target: SCN10A; (+) strand; PAM type: NRG; PAM sequence: GGG
  source 1..20: mol_type = other DNA
atattgaaaggattcttttt

SEQ ID NO: 33013 - DNA, 20 bp, synthetic construct
  misc_feature 1..20: note = Description of Artificial Sequence: Synthetic oligonucleotide
  misc_feature 1..20: note = Target: SCN10A; (+) strand; PAM type: NRG; PAM sequence: CAG
  source 1..20: mol_type = other DNA
gaaaggattctttttgggat

SEQ ID NO: 33014 - DNA, 20 bp, synthetic construct
  misc_feature 1..20: note = Description of Artificial Sequence: Synthetic oligonucleotide
  misc_feature 1..20: note = Target: SCN10A; (+) strand; PAM type: NRG; PAM sequence: AAG
  source 1..20: mol_type = other DNA
ttgggatcagaaaattgata

SEQ ID NO: 33015 - DNA, 20 bp, synthetic construct
  misc_feature 1..20: note = Description of Artificial Sequence: Synthetic oligonucleotide
  misc_feature 1..20: note = Target: SCN10A; (+) strand; PAM type: NRG; PAM sequence: CAG
  source 1..20: mol_type = other DNA
ttattaacacttcttttcaa

SEQ ID NO: 33016 - DNA, 20 bp, synthetic construct
  misc_feature 1..20: note = Description of Artificial Sequence: Synthetic oligonucleotide
  misc_feature 1..20: note = Target: SCN10A; (+) strand; PAM type: NRG; PAM sequence: TGG
  source 1..20: mol_type = other DNA
acttcttttcaacagtgtac

SEQ ID NO: 33017 - DNA, 20 bp, synthetic construct
  misc_feature 1..20: note = Description of Artificial Sequence: Synthetic oligonucleotide
  misc_feature 1..20: note = Target: SCN10A; (+) strand; PAM type: NRG; PAM sequence: TAG
  source 1..20: mol_type = other DNA
agtgtactggatgtcctaac

SEQ ID NO: 33018 - DNA, 20 bp, synthetic construct
  misc_feature 1..20: note = Description of Artificial Sequence: Synthetic oligonucleotide
  misc_feature 1..20: note = Target: SCN10A; (+) strand; PAM type: NRG; PAM sequence: CAG
  source 1..20: mol_type = other DNA
actggatgtcctaactagca

SEQ ID NO: 33019 - DNA, 20 bp, synthetic construct
  misc_feature 1..20: note = Description of Artificial Sequence: Synthetic oligonucleotide
  misc_feature 1..20: note = Target: SCN10A; (+) strand; PAM type: NRG; PAM sequence: TAG
  source 1..20: mol_type = other DNA
tcctaactagcacagtgatc

SEQ ID NO: 33020 - DNA, 20 bp, synthetic construct
  misc_feature 1..20: note = Description of Artificial Sequence: Synthetic oligonucleotide
  misc_feature 1..20: note = Target: SCN10A; (+) strand; PAM type: NRG; PAM sequence: AAG
  source 1..20: mol_type = other DNA
tagcacagtgatctagtaaa

SEQ ID NO: 33021 - DNA, 20 bp, synthetic construct
  misc_feature 1..20: note = Description of Artificial Sequence: Synthetic oligonucleotide
  misc_feature 1..20: note = Target: SCN10A; (+) strand; PAM type: NRG; PAM sequence: TGG
  source 1..20: mol_type = other DNA
atctagtaaaaagaacctaa

SEQ ID NO: 33022 - DNA, 20 bp, synthetic construct
  misc_feature 1..20: note = Description of Artificial Sequence: Synthetic oligonucleotide
  misc_feature 1..20: note = Target: SCN10A; (+) strand; PAM type: NRG; PAM sequence: AAG
  source 1..20: mol_type = other DNA
taaaaagaacctaatggcat

SEQ ID NO: 33023 - DNA, 20 bp, synthetic construct
  misc_feature 1..20: note = Description of Artificial Sequence: Synthetic oligonucleotide
  misc_feature 1..20: note = Target: SCN10A; (+) strand; PAM type: NRG; PAM sequence: AGG
  source 1..20: mol_type = other DNA
aaaaagaacctaatggcata

SEQ ID NO: 33024 - DNA, 20 bp, synthetic construct
  misc_feature 1..20: note = Description of Artificial Sequence: Synthetic oligonucleotide
  misc_feature 1..20: note = Target: SCN10A; (+) strand; PAM type: NRG; PAM sequence: TAG
  source 1..20: mol_type = other DNA
gaacctaatggcataaggat

SEQ ID NO: 33025 - DNA, 20 bp, synthetic construct
  misc_feature 1..20: note = Description of Artificial Sequence: Synthetic oligonucleotide
  misc_feature 1..20: note = Target: SCN10A; (+) strand; PAM type: NRG; PAM sequence: AAG
  source 1..20: mol_type = other DNA
taatggcataaggattagaa

SEQ ID NO: 33026 - DNA, 20 bp, synthetic construct
  misc_feature 1..20: note = Description of Artificial Sequence: Synthetic oligonucleotide
  misc_feature 1..20: note = Target: SCN10A; (+) strand; PAM type: NRG; PAM sequence: AAG
  source 1..20: mol_type = other DNA
tggcataaggattagaaaag

SEQ ID NO: 33027 - DNA, 20 bp, synthetic construct
  misc_feature 1..20: note = Description of Artificial Sequence: Synthetic oligonucleotide
  misc_feature 1..20: note = Target: SCN10A; (+) strand; PAM type: NRG; PAM sequence: TAG
  source 1..20: mol_type = other DNA
aggattagaaaagaagaaat

SEQ ID NO: 33028 - DNA, 20 bp, synthetic construct
  misc_feature 1..20: note = Description of Artificial Sequence: Synthetic oligonucleotide
  misc_feature 1..20: note = Target: SCN10A; (+) strand; PAM type: NRG; PAM sequence: AGG
  source 1..20: mol_type = other DNA
ggattagaaaagaagaaatt

SEQ ID NO: 33029 - DNA, 20 bp, synthetic construct
  misc_feature 1..20: note = Description of Artificial Sequence: Synthetic oligonucleotide
  misc_feature 1..20: note = Target: SCN10A; (+) strand; PAM type: NRG; PAM sequence: TGG
  source 1..20: mol_type = other DNA
tagaaaagaagaaattaggc

SEQ ID NO: 33030 - DNA, 20 bp, synthetic construct
  misc_feature 1..20: note = Description of Artificial Sequence: Synthetic oligonucleotide
  misc_feature 1..20: note = Target: SCN10A; (+) strand; PAM type: NRG; PAM sequence: GGG
  source 1..20: mol_type = other DNA
agaaaagaagaaattaggct

SEQ ID NO: 33031 - DNA, 20 bp, synthetic construct
  misc_feature 1..20: note = Description of Artificial Sequence: Synthetic oligonucleotide
  misc_feature 1..20: note = Target: SCN10A; (+) strand; PAM type: NRG; PAM sequence: TGG
  source 1..20: mol_type = other DNA
agaagaaattaggctgggcg

SEQ ID NO: 33032 - DNA, 20 bp, synthetic construct
  misc_feature 1..20: note = Description of Artificial Sequence: Synthetic oligonucleotide
  misc_feature 1..20: note = Target: SCN10A; (+) strand; PAM type: NRG; PAM sequence: GGG
  source 1..20: mol_type = other DNA
gaagaaattaggctgggcgt

SEQ ID NO: 33033 - DNA, 20 bp, synthetic construct
  misc_feature 1..20: note = Description of Artificial Sequence: Synthetic oligonucleotide
  misc_feature 1..20: note = Target: SCN10A; (+) strand; PAM type: NRG; PAM sequence: TGG
  source 1..20: mol_type = other DNA
gaaattaggctgggcgtggg

SEQ ID NO: 33034 - DNA, 20 bp, synthetic construct
  misc_feature 1..20: note = Description of Artificial Sequence: Synthetic oligonucleotide
  misc_feature 1..20: note = Target: SCN10A; (+) strand; PAM type: NRG; PAM sequence: CAG
  source 1..20: mol_type = other DNA
gtggctcatgcctgtaatcc

SEQ ID NO: 33035 - DNA, 20 bp, synthetic construct
  misc_feature 1..20: note = Description of Artificial Sequence: Synthetic oligonucleotide
  misc_feature 1..20: note = Target: SCN10A; (+) strand; PAM type: NRG; PAM sequence: TAG
  source 1..20: mol_type = other DNA
tgcctgtaatcccagcactt

SEQ ID NO: 33036 - DNA, 20 bp, synthetic construct
  misc_feature 1..20: note = Description of Artificial Sequence: Synthetic oligonucleotide
  misc_feature 1..20: note = Target: SCN10A; (+) strand; PAM type: NRG; PAM sequence: AGG
  source 1..20: mol_type = other DNA
gcctgtaatcccagcacttt

SEQ ID NO: 33037 - DNA, 20 bp, synthetic construct
  misc_feature 1..20: note = Description of Artificial Sequence: Synthetic oligonucleotide
  misc_feature 1..20: note = Target: SCN10A; (+) strand; PAM type: NRG; PAM sequence: GAG
  source 1..20: mol_type = other DNA
ctgtaatcccagcactttag

SEQ ID NO: 33038 - DNA, 20 bp, synthetic construct
  misc_feature 1..20: note = Description of Artificial Sequence: Synthetic oligonucleotide
  misc_feature 1..20: note = Target: SCN10A; (+) strand; PAM type: NRG; PAM sequence: AGG
  source 1..20: mol_type = other DNA
tgtaatcccagcactttagg

SEQ ID NO: 33039 - DNA, 20 bp, synthetic construct
  misc_feature 1..20: note = Description of Artificial Sequence: Synthetic oligonucleotide
  misc_feature 1..20: note = Target: SCN10A; (+) strand; PAM type: NRG; PAM sequence: AAG
  source 1..20: mol_type = other DNA
tcccagcactttaggaggcc

SEQ ID NO: 33040 - DNA, 20 bp, synthetic construct
  misc_feature 1..20: note = Description of Artificial Sequence: Synthetic oligonucleotide
  misc_feature 1..20: note = Target: SCN10A; (+) strand; PAM type: NRG; PAM sequence: AGG
  source 1..20: mol_type = other DNA
cccagcactttaggaggcca

SEQ ID NO: 33041 - DNA, 20 bp, synthetic construct
  misc_feature 1..20: note = Description of Artificial Sequence: Synthetic oligonucleotide
  misc_feature 1..20: note = Target: SCN10A; (+) strand; PAM type: NRG; PAM sequence: CAG
  source 1..20: mol_type = other DNA
agcactttaggaggccaagg

SEQ ID NO: 33042 - DNA, 20 bp, synthetic construct
  misc_feature 1..20: note = Description of Artificial Sequence: Synthetic oligonucleotide
  misc_feature 1..20: note = Target: SCN10A; (+) strand; PAM type: NRG; PAM sequence: AGG
  source 1..20: mol_type = other DNA
gcactttaggaggccaaggc

SEQ ID NO: 33043 - DNA, 20 bp, synthetic construct
  misc_feature 1..20: note = Description of Artificial Sequence: Synthetic oligonucleotide
  misc_feature 1..20: note = Target: SCN10A; (+) strand; PAM type: NRG; PAM sequence: CAG
  source 1..20: mol_type = other DNA
ctttaggaggccaaggcagg

SEQ ID NO: 33044 - DNA, 20 bp, synthetic construct
  misc_feature 1..20: note = Description of Artificial Sequence: Synthetic oligonucleotide
  misc_feature 1..20: note = Target: SCN10A; (+) strand; PAM type: NRG; PAM sequence: GAG
  source 1..20: mol_type = other DNA
ggccaaggcaggcagatcat

SEQ ID NO: 33045 - DNA, 20 bp, synthetic construct
  misc_feature 1..20: note = Description of Artificial Sequence: Synthetic oligonucleotide
  misc_feature 1..20: note = Target: SCN10A; (+) strand; PAM type: NRG; PAM sequence: AGG
  source 1..20: mol_type = other DNA
gccaaggcaggcagatcatg

SEQ ID NO: 33046 - DNA, 20 bp, synthetic construct
  misc_feature 1..20: note = Description of Artificial Sequence: Synthetic oligonucleotide
  misc_feature 1..20: note = Target: SCN10A; (+) strand; PAM type: NRG; PAM sequence: CAG
  source 1..20: mol_type = other DNA
aggcaggcagatcatgaggt

SEQ ID NO: 33047 - DNA, 20 bp, synthetic construct
  misc_feature 1..20: note = Description of Artificial Sequence: Synthetic oligonucleotide
  misc_feature 1..20: note = Target: SCN10A; (+) strand; PAM type: NRG; PAM sequence: AGG
  source 1..20: mol_type = other DNA
ggcaggcagatcatgaggtc

SEQ ID NO: 33048 - DNA, 20 bp, synthetic construct
  misc_feature 1..20: note = Description of Artificial Sequence: Synthetic oligonucleotide
  misc_feature 1..20: note = Target: SCN10A; (+) strand; PAM type: NRG; PAM sequence: GAG
  source 1..20: mol_type = other DNA
caggcagatcatgaggtcag

SEQ ID NO: 33049 - DNA, 20 bp, synthetic construct
  misc_feature 1..20: note = Description of Artificial Sequence: Synthetic oligonucleotide
  misc_feature 1..20: note = Target: SCN10A; (+) strand; PAM type: NRG; PAM sequence: GAG
  source 1..20: mol_type = other DNA
gatcatgaggtcaggagatc

SEQ ID NO: 33050 - DNA, 20 bp, synthetic construct
  misc_feature 1..20: note = Description of Artificial Sequence: Synthetic oligonucleotide
  misc_feature 1..20: note = Target: SCN10A; (+) strand; PAM type: NRG; PAM sequence: TGG
  source 1..20: mol_type = other DNA
tcaggagatcgagaccatcc

SEQ ID NO: 33051 - DNA, 20 bp, synthetic construct
  misc_feature 1..20: note = Description of Artificial Sequence: Synthetic oligonucleotide
  misc_feature 1..20: note = Target: SCN10A; (+) strand; PAM type: NRG; PAM sequence: CGG
  source 1..20: mol_type = other DNA
cgagaccatcctggctaaca

SEQ ID NO: 33052 - DNA, 20 bp, synthetic construct
  misc_feature 1..20: note = Description of Artificial Sequence: Synthetic oligonucleotide
  misc_feature 1..20: note = Target: SCN10A; (+) strand; PAM type: NRG; PAM sequence: AAG
  source 1..20: mol_type = other DNA
ccgtctctactaaaaataca

SEQ ID NO: 33053 - DNA, 20 bp, synthetic construct
  misc_feature 1..20: note = Description of Artificial Sequence: Synthetic oligonucleotide
  misc_feature 1..20: note = Target: SCN10A; (+) strand; PAM type: NRG; PAM sequence: TAG
  source 1..20: mol_type = other DNA
ctactaaaaatacaaagaat

SEQ ID NO: 33054 - DNA, 20 bp, synthetic construct
  misc_feature 1..20: note = Description of Artificial Sequence: Synthetic oligonucleotide
  misc_feature 1..20: note = Target: SCN10A; (+) strand; PAM type: NRG; PAM sequence: CAG
  source 1..20: mol_type = other DNA
taaaaatacaaagaattagc

SEQ ID NO: 33055 - DNA, 20 bp, synthetic construct
  misc_feature 1..20: note = Description of Artificial Sequence: Synthetic oligonucleotide
  misc_feature 1..20: note = Target: SCN10A; (+) strand; PAM type: NRG; PAM sequence: AGG
  source 1..20: mol_type = other DNA
aaaaatacaaagaattagcc

SEQ ID NO: 33056 - DNA, 20 bp, synthetic construct
  misc_feature 1..20: note = Description of Artificial Sequence: Synthetic oligonucleotide
  misc_feature 1..20: note = Target: SCN10A; (+) strand; PAM type: NRG; PAM sequence: TGG
  source 1..20: mol_type = other DNA
tacaaagaattagccaggca

SEQ ID NO: 33057 - DNA, 20 bp, synthetic construct
  misc_feature 1..20: note = Description of Artificial Sequence: Synthetic oligonucleotide
  misc_feature 1..20: note = Target: SCN10A; (+) strand; PAM type: NRG; PAM sequence: TGG
  source 1..20: mol_type = other DNA
aaagaattagccaggcatgg

SEQ ID NO: 33058 - DNA, 20 bp, synthetic construct
  misc_feature 1..20: note = Description of Artificial Sequence: Synthetic oligonucleotide
  misc_feature 1..20: note = Target: SCN10A; (+) strand; PAM type: NRG; PAM sequence: TGG
  source 1..20: mol_type = other DNA
gaattagccaggcatggtgg

SEQ ID NO: 33059 - DNA, 20 bp, synthetic construct
  misc_feature 1..20: note = Description of Artificial Sequence: Synthetic oligonucleotide
  misc_feature 1..20: note = Target: SCN10A; (+) strand; PAM type: NRG; PAM sequence: GGG
  source 1..20: mol_type = other DNA
aattagccaggcatggtggt

SEQ ID NO: 33060 - DNA, 20 bp, synthetic construct
  misc_feature 1..20: note = Description of Artificial Sequence: Synthetic oligonucleotide
  misc_feature 1..20: note = Target: SCN10A; (+) strand; PAM type: NRG; PAM sequence: TAG
  source 1..20: mol_type = other DNA
ggcatggtggtgggtgcctg

SEQ ID NO: 33061 - DNA, 20 bp, synthetic construct
  misc_feature 1..20: note = Description of Artificial Sequence: Synthetic oligonucleotide
  misc_feature 1..20: note = Target: SCN10A; (+) strand; PAM type: NRG; PAM sequence: CAG
  source 1..20: mol_type = other DNA
gtggtgggtgcctgtagtcc

SEQ ID NO: 33062 - DNA, 20 bp, synthetic construct
  misc_feature 1..20: note = Description of Artificial Sequence: Synthetic oligonucleotide
  misc_feature 1..20: note = Target: SCN10A; (+) strand; PAM type: NRG; PAM sequence: CAG
  source 1..20: mol_type = other DNA
tgcctgtagtcccagctact

SEQ ID NO: 33063 - DNA, 20 bp, synthetic construct
  misc_feature 1..20: note = Description of Artificial Sequence: Synthetic oligonucleotide
  misc_feature 1..20: note = Target: SCN10A; (+) strand; PAM type: NRG; PAM sequence: AGG
  source 1..20: mol_type = other DNA
gcctgtagtcccagctactc

SEQ ID NO: 33064 - DNA, 20 bp, synthetic construct
  misc_feature 1..20: note = Description of Artificial Sequence: Synthetic oligonucleotide
  misc_feature 1..20: note = Target: SCN10A; (+) strand; PAM type: NRG; PAM sequence: GAG
  source 1..20: mol_type = other DNA
ctgtagtcccagctactcag

SEQ ID NO: 33065 - DNA, 20 bp, synthetic construct
  misc_feature 1..20: note = Description of Artificial Sequence: Synthetic oligonucleotide
  misc_feature 1..20: note = Target: SCN10A; (+) strand; PAM type: NRG; PAM sequence: AGG
  source 1..20: mol_type = other DNA
tgtagtcccagctactcagg

SEQ ID NO: 33066 - DNA, 20 bp, synthetic construct
  misc_feature 1..20: note = Description of Artificial Sequence: Synthetic oligonucleotide
  misc_feature 1..20: note = Target: SCN10A; (+) strand; PAM type: NRG; PAM sequence: GAG
  source 1..20: mol_type = other DNA
tcccagctactcaggaggct

SEQ ID NO: 33067 - DNA, 20 bp, synthetic construct
  misc_feature 1..20: note = Description of Artificial Sequence: Synthetic oligonucleotide
  misc_feature 1..20: note = Target: SCN10A; (+) strand; PAM type: NRG; PAM sequence: AGG
  source 1..20: mol_type = other DNA
cccagctactcaggaggctg

SEQ ID NO: 33068 - DNA, 20 bp, synthetic construct
  misc_feature 1..20: note = Description of Artificial Sequence: Synthetic oligonucleotide
  misc_feature 1..20: note = Target: SCN10A; (+) strand; PAM type: NRG; PAM sequence: CAG
  source 1..20: mol_type = other DNA
agctactcaggaggctgagg

SEQ ID NO: 33069 - DNA, 20 bp, synthetic construct
  misc_feature 1..20: note = Description of Artificial Sequence: Synthetic oligonucleotide
  misc_feature 1..20: note = Target: SCN10A; (+) strand; PAM type: NRG; PAM sequence: AGG
  source 1..20: mol_type = other DNA
gctactcaggaggctgaggc

SEQ ID NO: 33070 - DNA, 20 bp, synthetic construct
  misc_feature 1..20: note = Description of Artificial Sequence: Synthetic oligonucleotide
  misc_feature 1..20: note = Target: SCN10A; (+) strand; PAM type: NRG; PAM sequence: GAG
  source 1..20: mol_type = other DNA
tactcaggaggctgaggcag

SEQ ID NO: 33071 - DNA, 20 bp, synthetic construct
  misc_feature 1..20: note = Description of Artificial Sequence: Synthetic oligonucleotide
  misc_feature 1..20: note = Target: SCN10A; (+) strand; PAM type: NRG; PAM sequence: TGG
  source 1..20: mol_type = other DNA
aggaggctgaggcaggagaa

SEQ ID NO: 33072 - DNA, 20 bp, synthetic construct
  misc_feature 1..20: note = Description of Artificial Sequence: Synthetic oligonucleotide
  misc_feature 1..20: note = Target: SCN10A; (+) strand; PAM type: NRG; PAM sequence: CGG
  source 1..20: mol_type = other DNA
gcaggagaatggcgtgaacc

SEQ ID NO: 33073 - DNA, 20 bp, synthetic construct
  misc_feature 1..20: note = Description of Artificial Sequence: Synthetic oligonucleotide
  misc_feature 1..20: note = Target: SCN10A; (+) strand; PAM type: NRG; PAM sequence: GGG
  source 1..20: mol_type = other DNA
caggagaatggcgtgaaccc

SEQ ID NO: 33074 - DNA, 20 bp, synthetic construct
  misc_feature 1..20: note = Description of Artificial Sequence: Synthetic oligonucleotide
  misc_feature 1..20: note = Target: SCN10A; (+) strand; PAM type: NRG; PAM sequence: GAG
  source 1..20: mol_type = other DNA
ggagaatggcgtgaacccgg

SEQ ID NO: 33075 - DNA, 20 bp, synthetic construct
  misc_feature 1..20: note = Description of Artificial Sequence: Synthetic oligonucleotide
  misc_feature 1..20: note = Target: SCN10A; (+) strand; PAM type: NRG; PAM sequence: AGG
  source 1..20: mol_type = other DNA
gagaatggcgtgaacccggg

SEQ ID NO: 33076 - DNA, 20 bp, synthetic construct
  misc_feature 1..20: note = Description of Artificial Sequence: Synthetic oligonucleotide
  misc_feature 1..20: note = Target: SCN10A; (+) strand; PAM type: NRG; PAM sequence: TGG
  source 1..20: mol_type = other DNA
aatggcgtgaacccgggagg

SEQ ID NO: 33077 - DNA, 20 bp, synthetic construct
  misc_feature 1..20: note = Description of Artificial Sequence: Synthetic oligonucleotide
  misc_feature 1..20: note = Target: SCN10A; (+) strand; PAM type: NRG; PAM sequence: GAG
  source 1..20: mol_type = other DNA
tggcgtgaacccgggaggtg

SEQ ID NO: 33078 - DNA, 20 bp, synthetic construct
  misc_feature 1..20: note = Description of Artificial Sequence: Synthetic oligonucleotide
  misc_feature 1..20: note = Target: SCN10A; (+) strand; PAM type: NRG; PAM sequence: TGG
  source 1..20: mol_type = other DNA
gtgaacccgggaggtggagc

SEQ ID NO: 33079 - DNA, 20 bp, synthetic construct
  misc_feature 1..20: note = Description of Artificial Sequence: Synthetic oligonucleotide
  misc_feature 1..20: note = Target: SCN10A; (+) strand; PAM type: NRG; PAM sequence: GAG
  source 1..20: mol_type = other DNA
cgggaggtggagctggcaat

SEQ ID NO: 33080 - DNA, 20 bp, synthetic construct
  misc_feature 1..20: note = Description of Artificial Sequence: Synthetic oligonucleotide
  misc_feature 1..20: note = Target: SCN10A; (+) strand; PAM type: NRG; PAM sequence: GAG
  source 1..20: mol_type = other DNA
ggtggagctggcaatgagcc

SEQ ID NO: 33081 - DNA, 20 bp, synthetic construct
  misc_feature 1..20: note = Description of Artificial Sequence: Synthetic oligonucleotide
  misc_feature 1..20: note = Target: SCN10A; (+) strand; PAM type: NRG; PAM sequence: TAG
  source 1..20: mol_type = other DNA
gagatcacgccactgcactc

SEQ ID NO: 33082 - DNA, 20 bp, synthetic construct
  misc_feature 1..20: note = Description of Artificial Sequence: Synthetic oligonucleotide
  misc_feature 1..20: note = Target: SCN10A; (+) strand; PAM type: NRG; PAM sequence: TGG
  source 1..20: mol_type = other DNA
cacgccactgcactctagcc

SEQ ID NO: 33083 - DNA, 20 bp, synthetic construct
  misc_feature 1..20: note = Description of Artificial Sequence: Synthetic oligonucleotide
  misc_feature 1..20: note = Target: SCN10A; (+) strand; PAM type: NRG; PAM sequence: GGG
  source 1..20: mol_type = other DNA
acgccactgcactctagcct

SEQ ID NO: 33084 - DNA, 20 bp, synthetic construct
  misc_feature 1..20: note = Description of Artificial Sequence: Synthetic oligonucleotide
  misc_feature 1..20: note = Target: SCN10A; (+) strand; PAM type: NRG; PAM sequence: CAG
  source 1..20: mol_type = other DNA
ctgcactctagcctgggtga

SEQ ID NO: 33085 - DNA, 20 bp, synthetic construct
  misc_feature 1..20: note = Description of Artificial Sequence: Synthetic oligonucleotide
  misc_feature 1..20: note = Target: SCN10A; (+) strand; PAM type: NRG; PAM sequence: GAG
  source 1..20: mol_type = other DNA
gcactctagcctgggtgaca

SEQ ID NO: 33086 - DNA, 20 bp, synthetic construct
  misc_feature 1..20: note = Description of Artificial Sequence: Synthetic oligonucleotide
  misc_feature 1..20: note = Target: SCN10A; (+) strand; PAM type: NRG; PAM sequence: GAG
  source 1..20: mol_type = other DNA
tctagcctgggtgacagagc

SEQ ID NO: 33087 - DNA, 20 bp, synthetic construct
  misc_feature 1..20: note = Description of Artificial Sequence: Synthetic oligonucleotide
  misc_feature 1..20: note = Target: SCN10A; (+) strand; PAM type: NRG; PAM sequence: AAG
  source 1..20: mol_type = other DNA
tcaaaaaaaaaaaaaaaaaa

SEQ ID NO: 33088 - DNA, 20 bp, synthetic construct
  misc_feature 1..20: note = Description of Artificial Sequence: Synthetic oligonucleotide
  misc_feature 1..20: note = Target: SCN10A; (+) strand; PAM type: NRG; PAM sequence: AAG
  source 1..20: mol_type = other DNA
aaaaaaaaaaaaaaaaaaga

SEQ ID NO: 33089 - DNA, 20 bp, synthetic construct
  misc_feature 1..20: note = Description of Artificial Sequence: Synthetic oligonucleotide
  misc_feature 1..20: note = Target: SCN10A; (+) strand; PAM type: NRG; PAM sequence: AAG
  source 1..20: mol_type = other DNA
aaaaaaaaaaaaagaaagaa

SEQ ID NO: 33090 - DNA, 20 bp, synthetic construct
  misc_feature 1..20: note = Description of Artificial Sequence: Synthetic oligonucleotide
  misc_feature 1..20: note = Target: SCN10A; (+) strand; PAM type: NRG; PAM sequence: AAG
  source 1..20: mol_type = other DNA
aaaaaaaaaagaaagaaaag

SEQ ID NO: 33091 - DNA, 20 bp, synthetic construct
  misc_feature 1..20: note = Description of Artificial Sequence: Synthetic oligonucleotide
  misc_feature 1..20: note = Target: SCN10A; (+) strand; PAM type: NRG; PAM sequence: TAG
  source 1..20: mol_type = other DNA
ttcacatgatgtgattatgt

SEQ ID NO: 33092 - DNA, 20 bp, synthetic construct
  misc_feature 1..20: note = Description of Artificial Sequence: Synthetic oligonucleotide
  misc_feature 1..20: note = Target: SCN10A; (+) strand; PAM type: NRG; PAM sequence: TAG
  source 1..20: mol_type = other DNA
agaaaatttaaaacattgta

SEQ ID NO: 33093 - DNA, 20 bp, synthetic construct
  misc_feature 1..20: note = Description of Artificial Sequence: Synthetic oligonucleotide
  misc_feature 1..20: note = Target: SCN10A; (+) strand; PAM type: NRG; PAM sequence: TAG
  source 1..20: mol_type = other DNA
acattgtatagataaattat

SEQ ID NO: 33094 - DNA, 20 bp, synthetic construct
  misc_feature 1..20: note = Description of Artificial Sequence: Synthetic oligonucleotide
  misc_feature 1..20: note = Target: SCN10A; (+) strand; PAM type: NRG; PAM sequence: AAG
  source 1..20: mol_type = other DNA
gataaattattagaattaat

SEQ ID NO: 33095 - DNA, 20 bp, synthetic construct
  misc_feature 1..20: note = Description of Artificial Sequence: Synthetic oligonucleotide
  misc_feature 1..20: note = Target: SCN10A; (+) strand; PAM type: NRG; PAM sequence: GAG
  source 1..20: mol_type = other DNA
taaattattagaattaataa

SEQ ID NO: 33096 - DNA, 20 bp, synthetic construct
  misc_feature 1..20: note = Description of Artificial Sequence: Synthetic oligonucleotide
  misc_feature 1..20: note = Target: SCN10A; (+) strand; PAM type: NRG; PAM sequence: TAG
  source 1..20: mol_type = other DNA
gaattaataagagacatttc

SEQ ID NO: 33097 - DNA, 20 bp, synthetic construct
  misc_feature 1..20: note = Description of Artificial Sequence: Synthetic oligonucleotide
  misc_feature 1..20: note = Target: SCN10A; (+) strand; PAM type: NRG; PAM sequence: TAG
  source 1..20: mol_type = other DNA
aatgttaaatatcaaaatgc

SEQ ID NO: 33098 - DNA, 20 bp, synthetic construct
  misc_feature 1..20: note = Description of Artificial Sequence: Synthetic oligonucleotide
  misc_feature 1..20: note = Target: SCN10A; (+) strand; PAM type: NRG; PAM sequence: CAG
  source 1..20: mol_type = other DNA
aaaatgctagccaaaaatgc

SEQ ID NO: 33099 - DNA, 20 bp, synthetic construct
  misc_feature 1..20: note = Description of Artificial Sequence: Synthetic oligonucleotide
  misc_feature 1..20: note = Target: SCN10A; (+) strand; PAM type: NRG; PAM sequence: AAG
  source 1..20: mol_type = other DNA
gctagccaaaaatgccagaa

SEQ ID NO: 33100 - DNA, 20 bp, synthetic construct
  misc_feature 1..20: note = Description of Artificial Sequence: Synthetic oligonucleotide
  misc_feature 1..20: note = Target: SCN10A; (+) strand; PAM type: NRG; PAM sequence: AAG
  source 1..20: mol_type = other DNA
aatgccagaaaagaacattt

SEQ ID NO: 33101 - DNA, 20 bp, synthetic construct
  misc_feature 1..20: note = Description of Artificial Sequence: Synthetic oligonucleotide
  misc_feature 1..20: note = Target: SCN10A; (+) strand; PAM type: NRG; PAM sequence: AAG
  source 1..20: mol_type = other DNA
gccagaaaagaacatttaag

SEQ ID NO: 33102 - DNA, 20 bp, synthetic construct
  misc_feature 1..20: note = Description of Artificial Sequence: Synthetic oligonucleotide
  misc_feature 1..20: note = Target: SCN10A; (+) strand; PAM type: NRG; PAM sequence: AAG
  source 1..20: mol_type = other DNA
gaacatttaagaagatatgc

SEQ ID NO: 33103 - DNA, 20 bp, synthetic construct
  misc_feature 1..20: note = Description of Artificial Sequence: Synthetic oligonucleotide
  misc_feature 1..20: note = Target: SCN10A; (+) strand; PAM type: NRG; PAM sequence: TGG
  source 1..20: mol_type = other DNA
agaagatatgcaagatccta

SEQ ID NO: 33104 - DNA, 20 bp, synthetic construct
  misc_feature 1..20: note = Description of Artificial Sequence: Synthetic oligonucleotide
  misc_feature 1..20: note = Target: SCN10A; (+) strand; PAM type: NRG; PAM sequence: GAG
  source 1..20: mol_type = other DNA
aagatatgcaagatcctatg

SEQ ID NO: 33105 - DNA, 20 bp, synthetic construct
  misc_feature 1..20: note = Description of Artificial Sequence: Synthetic oligonucleotide
  misc_feature 1..20: note = Target: SCN10A; (+) strand; PAM type: NRG; PAM sequence: TGG
  source 1..20: mol_type = other DNA
agaaaattataaaaacctca

SEQ ID NO: 33106 - DNA, 20 bp, synthetic construct
  misc_feature 1..20: note = Description of Artificial Sequence: Synthetic oligonucleotide
  misc_feature 1..20: note = Target: SCN10A; (+) strand; PAM type: NRG; PAM sequence: AAG
  source 1..20: mol_type = other DNA
acatttttaaactttattga

SEQ ID NO: 33107 - DNA, 20 bp, synthetic construct
  misc_feature 1..20: note = Description of Artificial Sequence: Synthetic oligonucleotide
  misc_feature 1..20: note = Target: SCN10A; (+) strand; PAM type: NRG; PAM sequence: TGG
  source 1..20: mol_type = other DNA
tttaaactttattgaaagac

SEQ ID NO: 33108 - DNA, 20 bp, synthetic construct
  misc_feature 1..20: note = Description of Artificial Sequence: Synthetic oligonucleotide
  misc_feature 1..20: note = Target: SCN10A; (+) strand; PAM type: NRG; PAM sequence: CAG
  source 1..20: mol_type = other DNA
tttattgaaagactggtata

SEQ ID NO: 33109 - DNA, 20 bp, synthetic construct
  misc_feature 1..20: note = Description of Artificial Sequence: Synthetic oligonucleotide
  misc_feature 1..20: note = Target: SCN10A; (+) strand; PAM type: NRG; PAM sequence: TAG
  source 1..20: mol_type = other DNA
tacagcgtatactatcttca

SEQ ID NO: 33110 - DNA, 20 bp, synthetic construct
  misc_feature 1..20: note = Description of Artificial Sequence: Synthetic oligonucleotide
  misc_feature 1..20: note = Target: SCN10A; (+) strand; PAM type: NRG; PAM sequence: CAG
  source 1..20: mol_type = other DNA
cgtatactatcttcatagat

SEQ ID NO: 33111 - DNA, 20 bp, synthetic construct
  misc_feature 1..20: note = Description of Artificial Sequence: Synthetic oligonucleotide
  misc_feature 1..20: note = Target: SCN10A; (+) strand; PAM type: NRG; PAM sequence: AAG
  source 1..20: mol_type = other DNA
atactatcttcatagatcag

SEQ ID NO: 33112 - DNA, 20 bp, synthetic construct
  misc_feature 1..20: note = Description of Artificial Sequence: Synthetic oligonucleotide
  misc_feature 1..20: note = Target: SCN10A; (+) strand; PAM type: NRG; PAM sequence: AAG
  source 1..20: mol_type = other DNA
tcagaagactgaattatgta

SEQ ID NO: 33113 - DNA, 20 bp, synthetic construct
  misc_feature 1..20: note = Description of Artificial Sequence: Synthetic oligonucleotide
  misc_feature 1..20: note = Target: SCN10A; (+) strand; PAM type: NRG; PAM sequence: AAG
  source 1..20: mol_type = other DNA
ctgaattatgtaaagattat

SEQ ID NO: 33114 - DNA, 20 bp, synthetic construct
  misc_feature 1..20: note = Description of Artificial Sequence: Synthetic oligonucleotide
  misc_feature 1..20: note = Target: SCN10A; (+) strand; PAM type: NRG; PAM sequence: CAG
  source 1..20: mol_type = other DNA
ccaaattgacctatcaatta

SEQ ID NO: 33115 - DNA, 20 bp, synthetic construct
  misc_feature 1..20: note = Description of Artificial Sequence: Synthetic oligonucleotide
  misc_feature 1..20: note = Target: SCN10A; (+) strand; PAM type: NRG; PAM sequence: CAG
  source 1..20: mol_type = other DNA
aattgacctatcaattacag

SEQ ID NO: 33116 - DNA, 20 bp, synthetic construct
  misc_feature 1..20: note = Description of Artificial Sequence: Synthetic oligonucleotide
  misc_feature 1..20: note = Target: SCN10A; (+) strand; PAM type: NRG; PAM sequence: TGG
  source 1..20: mol_type = other DNA
tcaattacagcagtccctaa

SEQ ID NO: 33117 - DNA, 20 bp, synthetic construct
  misc_feature 1..20: note = Description of Artificial Sequence: Synthetic oligonucleotide
  misc_feature 1..20: note = Target: SCN10A; (+) strand; PAM type: NRG; PAM sequence: GGG
  source 1..20: mol_type = other DNA
caattacagcagtccctaat

SEQ ID NO: 33118 - DNA, 20 bp, synthetic construct
  misc_feature 1..20: note = Description of Artificial Sequence: Synthetic oligonucleotide
  misc_feature 1..20: note = Target: SCN10A; (+) strand; PAM type: NRG; PAM sequence: TAG
  source 1..20: mol_type = other DNA
gtccctaatgggaaaaacaa

SEQ ID NO: 33119 - DNA, 20 bp, synthetic construct
  misc_feature 1..20: note = Description of Artificial Sequence: Synthetic oligonucleotide
  misc_feature 1..20: note = Target: SCN10A; (+) strand; PAM type: NRG; PAM sequence: CAG
  source 1..20: mol_type = other DNA
cctaatgggaaaaacaatag

SEQ ID NO: 33120 - DNA, 20 bp, synthetic construct
  misc_feature 1..20: note = Description of Artificial Sequence: Synthetic oligonucleotide
  misc_feature 1..20: note = Target: SCN10A; (+) strand; PAM type: NRG; PAM sequence: TGG
  source 1..20: mol_type = other DNA
atagcagttttgtgtgtatg

SEQ ID NO: 33121 - DNA, 20 bp, synthetic construct
  misc_feature 1..20: note = Description of Artificial Sequence: Synthetic oligonucleotide
  misc_feature 1..20: note = Target: SCN10A; (+) strand; PAM type: NRG; PAM sequence: GGG
  source 1..20: mol_type = other DNA
tagcagttttgtgtgtatgt

SEQ ID NO: 33122 - DNA, 20 bp, synthetic construct
  misc_feature 1..20: note = Description of Artificial Sequence: Synthetic oligonucleotide
  misc_feature 1..20: note = Target: SCN10A; (+) strand; PAM type: NRG; PAM sequence: TGG
  source 1..20: mol_type = other DNA
gtgtatgtgggtatgtaact

SEQ ID NO: 33123 - DNA, 20 bp, synthetic construct
  misc_feature 1..20: note = Description of Artificial Sequence: Synthetic oligonucleotide
  misc_feature 1..20: note = Target: SCN10A; (+) strand; PAM type: NRG; PAM sequence: AAG
  source 1..20: mol_type = other DNA
atgtgggtatgtaacttggc

SEQ ID NO: 33124 - DNA, 20 bp, synthetic construct
  misc_feature 1..20: note = Description of Artificial Sequence: Synthetic oligonucleotide
  misc_feature 1..20: note = Target: SCN10A; (+) strand; PAM type: NRG; PAM sequence: AAG
  source 1..20: mol_type = other DNA
aacttggcaagataattcta

SEQ ID NO: 33125 - DNA, 20 bp, synthetic construct
  misc_feature 1..20: note = Description of Artificial Sequence: Synthetic oligonucleotide
  misc_feature 1..20: note = Target: SCN10A; (+) strand; PAM type: NRG; PAM sequence: AAG
  source 1..20: mol_type = other DNA
taattctaaagtgaatatga

SEQ ID NO: 33126 - DNA, 20 bp, synthetic construct
  misc_feature 1..20: note = Description of Artificial Sequence: Synthetic oligonucleotide
  misc_feature 1..20: note = Target: SCN10A; (+) strand; PAM type: NRG; PAM sequence: CAG
  source 1..20: mol_type = other DNA
aaagtgaatatgaaagtgtg

SEQ ID NO: 33127 - DNA, 20 bp, synthetic construct
  misc_feature 1..20: note = Description of Artificial Sequence: Synthetic oligonucleotide
  misc_feature 1..20: note = Target: SCN10A; (+) strand; PAM type: NRG; PAM sequence: AGG
  source 1..20: mol_type = other DNA
aagtgaatatgaaagtgtgc

SEQ ID NO: 33128 - DNA, 20 bp, synthetic construct
  misc_feature 1..20: note = Description of Artificial Sequence: Synthetic oligonucleotide
  misc_feature 1..20: note = Target: SCN10A; (+) strand; PAM type: NRG; PAM sequence: AAG
  source 1..20: mol_type = other DNA
aatatgaaagtgtgcaggcc

SEQ ID NO: 33129 - DNA, 20 bp, synthetic construct
  misc_feature 1..20: note = Description of Artificial Sequence: Synthetic oligonucleotide
  misc_feature 1..20: note = Target: SCN10A; (+) strand; PAM type: NRG; PAM sequence: AAG
  source 1..20: mol_type = other DNA
tgcaggccaagatattcttg

SEQ ID NO: 33130 - DNA, 20 bp, synthetic construct
  misc_feature 1..20: note = Description of Artificial Sequence: Synthetic oligonucleotide
  misc_feature 1..20: note = Target: SCN10A; (+) strand; PAM type: NRG; PAM sequence: TAG
  source 1..20: mol_type = other DNA
aagatattcttgaagtaaat

SEQ ID NO: 33131 - DNA, 20 bp, synthetic construct
  misc_feature 1..20: note = Description of Artificial Sequence: Synthetic oligonucleotide
  misc_feature 1..20: note = Target: SCN10A; (+) strand; PAM type: NRG; PAM sequence: AGG
  source 1..20: mol_type = other DNA
agatattcttgaagtaaatt

SEQ ID NO: 33132 - DNA, 20 bp, synthetic construct
  misc_feature 1..20: note = Description of Artificial Sequence: Synthetic oligonucleotide
  misc_feature 1..20: note = Target: SCN10A; (+) strand; PAM type: NRG; PAM sequence: TGG
  source 1..20: mol_type = other DNA
tattcttgaagtaaattagg

SEQ ID NO: 33133 - DNA, 20 bp, synthetic construct
  misc_feature 1..20: note = Description of Artificial Sequence: Synthetic oligonucleotide
  misc_feature 1..20: note = Target: SCN10A; (+) strand; PAM type: NRG; PAM sequence: CAG
  source 1..20: mol_type = other DNA
taggtggattacttgattta

SEQ ID NO: 33134 - DNA, 20 bp, synthetic construct
  misc_feature 1..20: note = Description of Artificial Sequence: Synthetic oligonucleotide
  misc_feature 1..20: note = Target: SCN10A; (+) strand; PAM type: NRG; PAM sequence: CAG
  source 1..20: mol_type = other DNA
gattacttgatttacagaca

SEQ ID NO: 33135 - DNA, 20 bp, synthetic construct
  misc_feature 1..20: note = Description of Artificial Sequence: Synthetic oligonucleotide
  misc_feature 1..20: note = Target: SCN10A; (+) strand; PAM type: NRG; PAM sequence: AAG
  source 1..20: mol_type = other DNA
tacagacacagatatattta

SEQ ID NO: 33136 - DNA, 20 bp, synthetic construct
  misc_feature 1..20: note = Description of Artificial Sequence: Synthetic oligonucleotide
  misc_feature 1..20: note = Target: SCN10A; (+) strand; PAM type: NRG; PAM sequence: AAG
  source 1..20: mol_type = other DNA
tatttaaagctgccataatt

SEQ ID NO: 33137 - DNA, 20 bp, synthetic construct
  misc_feature 1..20: note = Description of Artificial Sequence: Synthetic oligonucleotide
  misc_feature 1..20: note = Target: SCN10A; (+) strand; PAM type: NRG; PAM sequence: TGG
  source 1..20: mol_type = other DNA
gccataattaagactgatat

SEQ ID NO: 33138 - DNA, 20 bp, synthetic construct
  misc_feature 1..20: note = Description of Artificial Sequence: Synthetic oligonucleotide
  misc_feature 1..20: note = Target: SCN10A; (+) strand; PAM type: NRG; PAM sequence: CAG
  source 1..20: mol_type = other DNA
attaagactgatattggtgc

SEQ ID NO: 33139 - DNA, 20 bp, synthetic construct
  misc_feature 1..20: note = Description of Artificial Sequence: Synthetic oligonucleotide
  misc_feature 1..20: note = Target: SCN10A; (+) strand; PAM type: NRG; PAM sequence: AGG
  source 1..20: mol_type = other DNA
ttaagactgatattggtgcc

SEQ ID NO: 33140 - DNA, 20 bp, synthetic construct
  misc_feature 1..20: note = Description of Artificial Sequence: Synthetic oligonucleotide
  misc_feature 1..20: note = Target: SCN10A; (+) strand; PAM type: NRG; PAM sequence: TAG
  source 1..20: mol_type = other DNA
gactgatattggtgccagga

SEQ ID NO: 33141 - DNA, 20 bp, synthetic construct
  misc_feature 1..20: note = Description of Artificial Sequence: Synthetic oligonucleotide
  misc_feature 1..20: note = Target: SCN10A; (+) strand; PAM type: NRG; PAM sequence: TGG
  source 1..20: mol_type = other DNA
ttggtgccaggatagaccaa

SEQ ID NO: 33142 - DNA, 20 bp, synthetic construct
  misc_feature 1..20: note = Description of Artificial Sequence: Synthetic oligonucleotide
  misc_feature 1..20: note = Target: SCN10A; (+) strand; PAM type: NRG; PAM sequence: CAG
  source 1..20: mol_type = other DNA
aggatagaccaatggactaa

SEQ ID NO: 33143 - DNA, 20 bp, synthetic construct
  misc_feature 1..20: note = Description of Artificial Sequence: Synthetic oligonucleotide
  misc_feature 1..20: note = Target: SCN10A; (+) strand; PAM type: NRG; PAM sequence: GAG
  source 1..20: mol_type = other DNA
gatagaccaatggactaaca

SEQ ID NO: 33144 - DNA, 20 bp, synthetic construct
  misc_feature 1..20: note = Description of Artificial Sequence: Synthetic oligonucleotide
  misc_feature 1..20: note = Target: SCN10A; (+) strand; PAM type: NRG; PAM sequence: TGG
  source 1..20: mol_type = other DNA
caatggactaacagagcaaa

SEQ ID NO: 33145 - DNA, 20 bp, synthetic construct
  misc_feature 1..20: note = Description of Artificial Sequence: Synthetic oligonucleotide
  misc_feature 1..20: note = Target: SCN10A; (+) strand; PAM type: NRG; PAM sequence: GAG
  source 1..20: mol_type = other DNA
atggactaacagagcaaatg

SEQ ID NO: 33146 - DNA, 20 bp, synthetic construct
  misc_feature 1..20: note = Description of Artificial Sequence: Synthetic oligonucleotide
  misc_feature 1..20: note = Target: SCN10A; (+) strand; PAM type: NRG; PAM sequence: AAG
  source 1..20: mol_type = other DNA
actaacagagcaaatggagc

SEQ ID NO: 33147 - DNA, 20 bp, synthetic construct
  misc_feature 1..20: note = Description of Artificial Sequence: Synthetic oligonucleotide
  misc_feature 1..20: note = Target: SCN10A; (+) strand; PAM type: NRG; PAM sequence: AGG
  source 1..20: mol_type = other DNA
ctaacagagcaaatggagca

SEQ ID NO: 33148 - DNA, 20 bp, synthetic construct
  misc_feature 1..20: note = Description of Artificial Sequence: Synthetic oligonucleotide
  misc_feature 1..20: note = Target: SCN10A; (+) strand; PAM type: NRG; PAM sequence: AAG
  source 1..20: mol_type = other DNA
agcaaatggagcaaggcttt

SEQ ID NO: 33149 - DNA, 20 bp, synthetic construct
  misc_feature 1..20: note = Description of Artificial Sequence: Synthetic oligonucleotide
  misc_feature 1..20: note = Target: SCN10A; (+) strand; PAM type: NRG; PAM sequence: CGG
  source 1..20: mol_type = other DNA
tggagcaaggctttaagtga

SEQ ID NO: 33150 - DNA, 20 bp, synthetic construct
  misc_feature 1..20: note = Description of Artificial Sequence: Synthetic oligonucleotide
  misc_feature 1..20: note = Target: SCN10A; (+) strand; PAM type: NRG; PAM sequence: GGG
  source 1..20: mol_type = other DNA
ggagcaaggctttaagtgac

SEQ ID NO: 33151 - DNA, 20 bp, synthetic construct
  misc_feature 1..20: note = Description of Artificial Sequence: Synthetic oligonucleotide
  misc_feature 1..20: note = Target: SCN10A; (+) strand; PAM type: NRG; PAM sequence: GAG
  source 1..20: mol_type = other DNA
agcaaggctttaagtgacgg

SEQ ID NO: 33152 - DNA, 20 bp, synthetic construct
  misc_feature 1..20: note = Description of Artificial Sequence: Synthetic oligonucleotide
  misc_feature 1..20: note = Target: SCN10A; (+) strand; PAM type: NRG; PAM sequence: AGG
  source 1..20: mol_type = other DNA
gcaaggctttaagtgacggg

SEQ ID NO: 33153 - DNA, 20 bp, synthetic construct
  misc_feature 1..20: note = Description of Artificial Sequence: Synthetic oligonucleotide
  misc_feature 1..20: note = Target: SCN10A; (+) strand; PAM type: NRG; PAM sequence: GAG
  source 1..20: mol_type = other DNA
aaggctttaagtgacgggag

SEQ ID NO: 33154 - DNA, 20 bp, synthetic construct
  misc_feature 1..20: note = Description of Artificial Sequence: Synthetic oligonucleotide
  misc_feature 1..20: note = Target: SCN10A; (+) strand; PAM type: NRG; PAM sequence: AAG
  source 1..20: mol_type = other DNA
gctttaagtgacgggaggag

SEQ ID NO: 33155 - DNA, 20 bp, synthetic construct
  misc_feature 1..20: note = Description of Artificial Sequence: Synthetic oligonucleotide
  misc_feature 1..20: note = Target: SCN10A; (+) strand; PAM type: NRG; PAM sequence: TGG
  source 1..20: mol_type = other DNA
gaggagaagcaatgctattt

SEQ ID NO: 33156 - DNA, 20 bp, synthetic construct
  misc_feature 1..20: note = Description of Artificial Sequence: Synthetic oligonucleotide
  misc_feature 1..20: note = Target: SCN10A; (+) strand; PAM type: NRG; PAM sequence: GGG
  source 1..20: mol_type = other DNA
aggagaagcaatgctatttt

SEQ ID NO: 33157 - DNA, 20 bp, synthetic construct
  misc_feature 1..20: note = Description of Artificial Sequence: Synthetic oligonucleotide
  misc_feature 1..20: note = Target: SCN10A; (+) strand; PAM type: NRG; PAM sequence: GAG
  source 1..20: mol_type = other DNA
gagaagcaatgctattttgg

SEQ ID NO: 33158 - DNA, 20 bp, synthetic construct
  misc_feature 1..20: note = Description of Artificial Sequence: Synthetic oligonucleotide
  misc_feature 1..20: note = Target: SCN10A; (+) strand; PAM type: NRG; PAM sequence: GAG
  source 1..20: mol_type = other DNA
gaagcaatgctattttggga

SEQ ID NO: 33159 - DNA, 20 bp, synthetic construct
  misc_feature 1..20: note = Description of Artificial Sequence: Synthetic oligonucleotide
  misc_feature 1..20: note = Target: SCN10A; (+) strand; PAM type: NRG; PAM sequence: AAG
  source 1..20: mol_type = other DNA
gcaatgctattttgggagag

SEQ ID NO: 33160 - DNA, 20 bp, synthetic construct
  misc_feature 1..20: note = Description of Artificial Sequence: Synthetic oligonucleotide
  misc_feature 1..20: note = Target: SCN10A; (+) strand; PAM type: NRG; PAM sequence: AGG
  source 1..20: mol_type = other DNA
caatgctattttgggagaga

SEQ ID NO: 33161 - DNA, 20 bp, synthetic construct
  misc_feature 1..20: note = Description of Artificial Sequence: Synthetic oligonucleotide
  misc_feature 1..20: note = Target: SCN10A; (+) strand; PAM type: NRG; PAM sequence: AAG
  source 1..20: mol_type = other DNA
tgctattttgggagagaagg

SEQ ID NO: 33162 - DNA, 20 bp, synthetic construct
  misc_feature 1..20: note = Description of Artificial Sequence: Synthetic oligonucleotide
  misc_feature 1..20: note = Target: SCN10A; (+) strand; PAM type: NRG; PAM sequence: CAG
  source 1..20: mol_type = other DNA
attttgggagagaaggaaga

SEQ ID NO: 33163 - DNA, 20 bp, synthetic construct
  misc_feature 1..20: note = Description of Artificial Sequence: Synthetic oligonucleotide
  misc_feature 1..20: note = Target: SCN10A; (+) strand; PAM type: NRG; PAM sequence: CAG
  source 1..20: mol_type = other DNA
tccttccttcaatcaatcaa

SEQ ID NO: 33164 - DNA, 20 bp, synthetic construct
  misc_feature 1..20: note = Description of Artificial Sequence: Synthetic oligonucleotide
  misc_feature 1..20: note = Target: SCN10A; (+) strand; PAM type: NRG; PAM sequence: AGG
  source 1..20: mol_type = other DNA
ccttccttcaatcaatcaac

SEQ ID NO: 33165 - DNA, 20 bp, synthetic construct
  misc_feature 1..20: note = Description of Artificial Sequence: Synthetic oligonucleotide
  misc_feature 1..20: note = Target: SCN10A; (+) strand; PAM type: NRG; PAM sequence: GAG
  source 1..20: mol_type = other DNA
tcaatcaacaggtgtttatt

SEQ ID NO: 33166 - DNA, 20 bp, synthetic construct
  misc_feature 1..20: note = Description of Artificial Sequence: Synthetic oligonucleotide
  misc_feature 1..20: note = Target: SCN10A; (+) strand; PAM type: NRG; PAM sequence: TGG
  source 1..20: mol_type = other DNA
ttgagttcctatgtatgtgc

SEQ ID NO: 33167 - DNA, 20 bp, synthetic construct
  misc_feature 1..20: note = Description of Artificial Sequence: Synthetic oligonucleotide
  misc_feature 1..20: note = Target: SCN10A; (+) strand; PAM type: NRG; PAM sequence: GGG
  source 1..20: mol_type = other DNA
tgagttcctatgtatgtgct

SEQ ID NO: 33168 - DNA, 20 bp, synthetic construct
  misc_feature 1..20: note = Description of Artificial Sequence: Synthetic oligonucleotide
  misc_feature 1..20: note = Target: SCN10A; (+) strand; PAM type: NRG; PAM sequence: TAG
  source 1..20: mol_type = other DNA
gtatgtgctgggccttgtgc

SEQ ID NO: 33169 - DNA, 20 bp, synthetic construct
  misc_feature 1..20: note = Description of Artificial Sequence: Synthetic oligonucleotide
  misc_feature 1..20: note = Target: SCN10A; (+) strand; PAM type: NRG; PAM sequence: AGG
  source 1..20: mol_type = other DNA
tatgtgctgggccttgtgct

SEQ ID NO: 33170 - DNA, 20 bp, synthetic construct
  misc_feature 1..20: note = Description of Artificial Sequence: Synthetic oligonucleotide
  misc_feature 1..20: note = Target: SCN10A; (+) strand; PAM type: NRG; PAM sequence: TGG
  source 1..20: mol_type = other DNA
tgggccttgtgctaggccct

SEQ ID NO: 33171 - DNA, 20 bp, synthetic construct
  misc_feature 1..20: note = Description of Artificial Sequence: Synthetic oligonucleotide
  misc_feature 1..20: note = Target: SCN10A; (+) strand; PAM type: NRG; PAM sequence: GGG
  source 1..20: mol_type = other DNA
gggccttgtgctaggccctt

SEQ ID NO: 33172 - DNA, 20 bp, synthetic construct
  misc_feature 1..20: note = Description of Artificial Sequence: Synthetic oligonucleotide
  misc_feature 1..20: note = Target: SCN10A; (+) strand; PAM type: NRG; PAM sequence: CGG
  source 1..20: mol_type = other DNA
gctaggcccttgggataaaa

SEQ ID NO: 33173 - DNA, 20 bp, synthetic construct
  misc_feature 1..20: note = Description of Artificial Sequence: Synthetic oligonucleotide
  misc_feature 1..20: note = Target: SCN10A; (+) strand; PAM type: NRG; PAM sequence: TAG
  source 1..20: mol_type = other DNA
aggcccttgggataaaacgg

SEQ ID NO: 33174 - DNA, 20 bp, synthetic construct
  misc_feature 1..20: note = Description of Artificial Sequence: Synthetic oligonucleotide
  misc_feature 1..20: note = Target: SCN10A; (+) strand; PAM type: NRG; PAM sequence: AAG
  source 1..20: mol_type = other DNA
cttgggataaaacggtagac

SEQ ID NO: 33175 - DNA, 20 bp, synthetic construct
  misc_feature 1..20: note = Description of Artificial Sequence: Synthetic oligonucleotide
  misc_feature 1..20: note = Target: SCN10A; (+) strand; PAM type: NRG; PAM sequence: TGG
  source 1..20: mol_type = other DNA
aaacggtagacaagaaactc

SEQ ID NO: 33176 - DNA, 20 bp, synthetic construct
  misc_feature 1..20: note = Description of Artificial Sequence: Synthetic oligonucleotide
  misc_feature 1..20: note = Target: SCN10A; (+) strand; PAM type: NRG; PAM sequence: TGG
  source 1..20: mol_type = other DNA
aaactctggtttttgcctca

SEQ ID NO: 33177 - DNA, 20 bp, synthetic construct
  misc_feature 1..20: note = Description of Artificial Sequence: Synthetic oligonucleotide
  misc_feature 1..20: note = Target: SCN10A; (+) strand; PAM type: NRG; PAM sequence: GGG
  source 1..20: mol_type = other DNA
aactctggtttttgcctcat

SEQ ID NO: 33178 - DNA, 20 bp, synthetic construct
  misc_feature 1..20: note = Description of Artificial Sequence: Synthetic oligonucleotide
  misc_feature 1..20: note = Target: SCN10A; (+) strand; PAM type: NRG; PAM sequence: TAG
  source 1..20: mol_type = other DNA
ctggtttttgcctcatggga

SEQ ID NO: 33179 - DNA, 20 bp, synthetic construct
  misc_feature 1..20: note = Description of Artificial Sequence: Synthetic oligonucleotide
  misc_feature 1..20: note = Target: SCN10A; (+) strand; PAM type: NRG; PAM sequence: CAG
  source 1..20: mol_type = other DNA
gtttttgcctcatgggatag

SEQ ID NO: 33180 - DNA, 20 bp, synthetic construct
  misc_feature 1..20: note = Description of Artificial Sequence: Synthetic oligonucleotide
  misc_feature 1..20: note = Target: SCN10A; (+) strand; PAM type: NRG; PAM sequence: AGG
  source 1..20: mol_type = other DNA
tttttgcctcatgggatagc

SEQ ID NO: 33181 - DNA, 20 bp, synthetic construct
  misc_feature 1..20: note = Description of Artificial Sequence: Synthetic oligonucleotide
  misc_feature 1..20: note = Target: SCN10A; (+) strand; PAM type: NRG; PAM sequence: CAG
  source 1..20: mol_type = other DNA
agcaggacaattgtaaatgc

SEQ ID NO: 33182 - DNA, 20 bp, synthetic construct
  misc_feature 1..20: note = Description of Artificial Sequence: Synthetic oligonucleotide
  misc_feature 1..20: note = Target: SCN10A; (+) strand; PAM type: NRG; PAM sequence: AGG
  source 1..20: mol_type = other DNA
gcaggacaattgtaaatgcc

SEQ ID NO: 33183 - DNA, 20 bp, synthetic construct
  misc_feature 1..20: note = Description of Artificial Sequence: Synthetic oligonucleotide
  misc_feature 1..20: note = Target: SCN10A; (+) strand; PAM type: NRG; PAM sequence: AAG
  source 1..20: mol_type = other DNA
aatgccaggttaatttgatg

SEQ ID NO: 33184 - DNA, 20 bp, synthetic construct
  misc_feature 1..20: note = Description of Artificial Sequence: Synthetic oligonucleotide
  misc_feature 1..20: note = Target: SCN10A; (+) strand; PAM type: NRG; PAM sequence: AGG
  source 1..20: mol_type = other DNA
atgccaggttaatttgatga

SEQ ID NO: 33185 - DNA, 20 bp, synthetic construct
  misc_feature 1..20: note = Description of Artificial Sequence: Synthetic oligonucleotide
  misc_feature 1..20: note = Target: SCN10A; (+) strand; PAM type: NRG; PAM sequence: TAG
  source 1..20: mol_type = other DNA
ttgatgaaggaatccaactt

SEQ ID NO: 33186 - DNA, 20 bp, synthetic construct
  misc_feature 1..20: note = Description of Artificial Sequence: Synthetic oligonucleotide
  misc_feature 1..20: note = Target: SCN10A; (+) strand; PAM type: NRG; PAM sequence: TAG
  source 1..20: mol_type = other DNA
tgaaggaatccaactttaga

SEQ ID NO: 33187 - DNA, 20 bp, synthetic construct
  misc_feature 1..20: note = Description of Artificial Sequence: Synthetic oligonucleotide
  misc_feature 1..20: note = Target: SCN10A; (+) strand; PAM type: NRG; PAM sequence: TGG
  source 1..20: mol_type = other DNA
gaatccaactttagatagtg

SEQ ID NO: 33188 - DNA, 20 bp, synthetic construct
  misc_feature 1..20: note = Description of Artificial Sequence: Synthetic oligonucleotide
  misc_feature 1..20: note = Target: SCN10A; (+) strand; PAM type: NRG; PAM sequence: TGG
  source 1..20: mol_type = other DNA
ccaactttagatagtgtggt

SEQ ID NO: 33189 - DNA, 20 bp, synthetic construct
  misc_feature 1..20: note = Description of Artificial Sequence: Synthetic oligonucleotide
  misc_feature 1..20: note = Target: SCN10A; (+) strand; PAM type: NRG; PAM sequence: GGG
  source 1..20: mol_type = other DNA
caactttagatagtgtggtt

SEQ ID NO: 33190 - DNA, 20 bp, synthetic construct
  misc_feature 1..20: note = Description of Artificial Sequence: Synthetic oligonucleotide
  misc_feature 1..20: note = Target: SCN10A; (+) strand; PAM type: NRG; PAM sequence: GGG
  source 1..20: mol_type = other DNA
aactttagatagtgtggttg

SEQ ID NO: 33191 - DNA, 20 bp, synthetic construct
  misc_feature 1..20: note = Description of Artificial Sequence: Synthetic oligonucleotide
  misc_feature 1..20: note = Target: SCN10A; (+) strand; PAM type: NRG; PAM sequence: GAG
  source 1..20: mol_type = other DNA
ctttagatagtgtggttggg

SEQ ID NO: 33192 - DNA, 20 bp, synthetic construct
  misc_feature 1..20: note = Description of Artificial Sequence: Synthetic oligonucleotide
  misc_feature 1..20: note = Target: SCN10A; (+) strand; PAM type: NRG; PAM sequence: AGG
  source 1..20: mol_type = other DNA
tttagatagtgtggttgggg

SEQ ID NO: 33193 - DNA, 20 bp, synthetic construct
  misc_feature 1..20: note = Description of Artificial Sequence: Synthetic oligonucleotide
  misc_feature 1..20: note = Target: SCN10A; (+) strand; PAM type: NRG; PAM sequence: AAG
  source 1..20: mol_type = other DNA
tggttggggaggtcccctct

SEQ ID NO: 33194 - DNA, 20 bp, synthetic construct
  misc_feature 1..20: note = Description of Artificial Sequence: Synthetic oligonucleotide
  misc_feature 1..20: note = Target: SCN10A; (+) strand; PAM type: NRG; PAM sequence: AGG
  source 1..20: mol_type = other DNA
ggttggggaggtcccctcta

SEQ ID NO: 33195 - DNA, 20 bp, synthetic construct
  misc_feature 1..20: note = Description of Artificial Sequence: Synthetic oligonucleotide
  misc_feature 1..20: note = Target: SCN10A; (+) strand; PAM type: NRG; PAM sequence: GAG
  source 1..20: mol_type = other DNA
ttggggaggtcccctctaag

SEQ ID NO: 33196 - DNA, 20 bp, synthetic construct
  misc_feature 1..20: note = Description of Artificial Sequence: Synthetic oligonucleotide
  misc_feature 1..20: note = Target: SCN10A; (+) strand; PAM type: NRG; PAM sequence: AGG
  source 1..20: mol_type = other DNA
tggggaggtcccctctaagg

SEQ ID NO: 33197 - DNA, 20 bp, synthetic construct
  misc_feature 1..20: note = Description of Artificial Sequence: Synthetic oligonucleotide
  misc_feature 1..20: note = Target: SCN10A; (+) strand; PAM type: NRG; PAM sequence: AAG
  source 1..20: mol_type = other DNA
gtcccctctaaggaggtgac

SEQ ID NO: 33198 - DNA, 20 bp, synthetic construct
  misc_feature 1..20: note = Description of Artificial Sequence: Synthetic oligonucleotide
  misc_feature 1..20: note = Target: SCN10A; (+) strand; PAM type: NRG; PAM sequence: CAG
  source 1..20: mol_type = other DNA
ggtgacaagtgcattgaaca

SEQ ID NO: 33199 - DNA, 20 bp, synthetic construct
  misc_feature 1..20: note = Description of Artificial Sequence: Synthetic oligonucleotide
  misc_feature 1..20: note = Target: SCN10A; (+) strand; PAM type: NRG; PAM sequence: GAG
  source 1..20: mol_type = other DNA
tgacaagtgcattgaacaca

SEQ ID NO: 33200 - DNA, 20 bp, synthetic construct
  misc_feature 1..20: note = Description of Artificial Sequence: Synthetic oligonucleotide
  misc_feature 1..20: note = Target: SCN10A; (+) strand; PAM type: NRG; PAM sequence: GAG
  source 1..20: mol_type = other DNA
gtgcattgaacacagagttt

SEQ ID NO: 33201 - DNA, 20 bp, synthetic construct
  misc_feature 1..20: note = Description of Artificial Sequence: Synthetic oligonucleotide
  misc_feature 1..20: note = Target: SCN10A; (+) strand; PAM type: NRG; PAM sequence: AAG
  source 1..20: mol_type = other DNA
tgaacacagagtttgagaat

SEQ ID NO: 33202 - DNA, 20 bp, synthetic construct
  misc_feature 1..20: note = Description of Artificial Sequence: Synthetic oligonucleotide
  misc_feature 1..20: note = Target: SCN10A; (+) strand; PAM type: NRG; PAM sequence: GAG
  source 1..20: mol_type = other DNA
cacagagtttgagaataagt

SEQ ID NO: 33203 - DNA, 20 bp, synthetic construct
  misc_feature 1..20: note = Description of Artificial Sequence: Synthetic oligonucleotide
  misc_feature 1..20: note = Target: SCN10A; (+) strand; PAM type: NRG; PAM sequence: AAG
  source 1..20: mol_type = other DNA
agtttgagaataagtgagct

SEQ ID NO: 33204 - DNA, 20 bp, synthetic construct
  misc_feature 1..20: note = Description of Artificial Sequence: Synthetic oligonucleotide
  misc_feature 1..20: note = Target: SCN10A; (+) strand; PAM type: NRG; PAM sequence: AAG
  source 1..20: mol_type = other DNA
gagaataagtgagctaagtg

SEQ ID NO: 33205 - DNA, 20 bp, synthetic construct
  misc_feature 1..20: note = Description of Artificial Sequence: Synthetic oligonucleotide
  misc_feature 1..20: note = Target: SCN10A; (+) strand; PAM type: NRG; PAM sequence: AAG
  source 1..20: mol_type = other DNA
agtgagctaagtgaagacta

SEQ ID NO: 33206 - DNA, 20 bp, synthetic construct
  misc_feature 1..20: note = Description of Artificial Sequence: Synthetic oligonucleotide
  misc_feature 1..20: note = Target: SCN10A; (+) strand; PAM type: NRG; PAM sequence: AGG
  source 1..20: mol_type = other DNA
gtgagctaagtgaagactaa

SEQ ID NO: 33207 - DNA, 20 bp, synthetic construct
  misc_feature 1..20: note = Description of Artificial Sequence: Synthetic oligonucleotide
  misc_feature 1..20: note = Target: SCN10A; (+) strand; PAM type: NRG; PAM sequence: AAG
  source 1..20: mol_type = other DNA
ctaagtgaagactaaaggaa

SEQ ID NO: 33208 - DNA, 20 bp, synthetic construct
  misc_feature 1..20: note = Description of Artificial Sequence: Synthetic oligonucleotide
  misc_feature 1..20: note = Target: SCN10A; (+) strand; PAM type: NRG; PAM sequence: CAG
  source 1..20: mol_type = other DNA
agactaaaggaaaagtattc

SEQ ID NO: 33209 - DNA, 20 bp, synthetic construct
  misc_feature 1..20: note = Description of Artificial Sequence: Synthetic oligonucleotide
  misc_feature 1..20: note = Target: SCN10A; (+) strand; PAM type: NRG; PAM sequence: AGG
  source 1..20: mol_type = other DNA
gactaaaggaaaagtattcc

SEQ ID NO: 33210 - DNA, 20 bp, synthetic construct
  misc_feature 1..20: note = Description of Artificial Sequence: Synthetic oligonucleotide
  misc_feature 1..20: note = Target: SCN10A; (+) strand; PAM type: NRG; PAM sequence: CAG
  source 1..20: mol_type = other DNA
aaggaaaagtattccaggca

SEQ ID NO: 33211 - DNA, 20 bp, synthetic construct
  misc_feature 1..20: note = Description of Artificial Sequence: Synthetic oligonucleotide
  misc_feature 1..20: note = Target: SCN10A; (+) strand; PAM type: NRG; PAM sequence: AAG
  source 1..20: mol_type = other DNA
gcacagcgaaaaaaacttca

SEQ ID NO: 33212 - DNA, 20 bp, synthetic construct
  misc_feature 1..20: note = Description of Artificial Sequence: Synthetic oligonucleotide
  misc_feature 1..20: note = Target: SCN10A; (+) strand; PAM type: NRG; PAM sequence: AGG
  source 1..20: mol_type = other DNA
cacagcgaaaaaaacttcaa

SEQ ID NO: 33213 - DNA, 20 bp, synthetic construct
  misc_feature 1..20: note = Description of Artificial Sequence: Synthetic oligonucleotide
  misc_feature 1..20: note = Target: SCN10A; (+) strand; PAM type: NRG; PAM sequence: AAG
  source 1..20: mol_type = other DNA
aaaaaaacttcaaaggccca

SEQ ID NO: 33214 - DNA, 20 bp, synthetic construct
  misc_feature 1..20: note = Description of Artificial Sequence: Synthetic oligonucleotide
  misc_feature 1..20: note = Target: SCN10A; (+) strand; PAM type: NRG; PAM sequence: AAG
  source 1..20: mol_type = other DNA
aacttcaaaggcccaaagcc

SEQ ID NO: 33215 - DNA, 20 bp, synthetic construct
  misc_feature 1..20: note = Description of Artificial Sequence: Synthetic oligonucleotide
  misc_feature 1..20: note = Target: SCN10A; (+) strand; PAM type: NRG; PAM sequence: AAG
  source 1..20: mol_type = other DNA
ttcaaaggcccaaagccaag

SEQ ID NO: 33216 - DNA, 20 bp, synthetic construct
  misc_feature 1..20: note = Description of Artificial Sequence: Synthetic oligonucleotide
  misc_feature 1..20: note = Target: SCN10A; (+) strand; PAM type: NRG; PAM sequence: AAG
  source 1..20: mol_type = other DNA
gaagttctctgttatgtgtg

SEQ ID NO: 33217 - DNA, 20 bp, synthetic construct
  misc_feature 1..20: note = Description of Artificial Sequence: Synthetic oligonucleotide
  misc_feature 1..20: note = Target: SCN10A; (+) strand; PAM type: NRG; PAM sequence: AAG
  source 1..20: mol_type = other DNA
gttctctgttatgtgtgaag

SEQ ID NO: 33218 - DNA, 20 bp, synthetic construct
  misc_feature 1..20: note = Description of Artificial Sequence: Synthetic oligonucleotide
  misc_feature 1..20: note = Target: SCN10A; (+) strand; PAM type: NRG; PAM sequence: GAG
  source 1..20: mol_type = other DNA
tctctgttatgtgtgaagaa

SEQ ID NO: 33219 - DNA, 20 bp, synthetic construct
  misc_feature 1..20: note = Description of Artificial Sequence: Synthetic oligonucleotide
  misc_feature 1..20: note = Target: SCN10A; (+) strand; PAM type: NRG; PAM sequence: GAG
  source 1..20: mol_type = other DNA
tctgttatgtgtgaagaaga

SEQ ID NO: 33220 - DNA, 20 bp, synthetic construct
  misc_feature 1..20: note = Description of Artificial Sequence: Synthetic oligonucleotide
  misc_feature 1..20: note = Target: SCN10A; (+) strand; PAM type: NRG; PAM sequence: GAG
  source 1..20: mol_type = other DNA
tgttatgtgtgaagaagaga

SEQ ID NO: 33221 - DNA, 20 bp, synthetic construct
  misc_feature 1..20: note = Description of Artificial Sequence: Synthetic oligonucleotide
  misc_feature 1..20: note = Target: SCN10A; (+) strand; PAM type: NRG; PAM sequence: TAG
  source 1..20: mol_type = other DNA
tatgtgtgaagaagagagag

SEQ ID NO: 33222 - DNA, 20 bp, synthetic construct
  misc_feature 1..20: note = Description of Artificial Sequence: Synthetic oligonucleotide
  misc_feature 1..20: note = Target: SCN10A; (+) strand; PAM type: NRG; PAM sequence: AGG
  source 1..20: mol_type = other DNA
atgtgtgaagaagagagagt

SEQ ID NO: 33223 - DNA, 20 bp, synthetic construct
  misc_feature 1..20: note = Description of Artificial Sequence: Synthetic oligonucleotide
  misc_feature 1..20: note = Target: SCN10A; (+) strand; PAM type: NRG; PAM sequence: TGG
  source 1..20: mol_type = other DNA
gaagagagagtaggcctttt

SEQ ID NO: 33224 - DNA, 20 bp, synthetic construct
  misc_feature 1..20: note = Description of Artificial Sequence: Synthetic oligonucleotide
  misc_feature 1..20: note = Target: SCN10A; (+) strand; PAM type: NRG; PAM sequence: TGG
  source 1..20: mol_type = other DNA
agagagtaggcctttttggc

SEQ ID NO: 33225 - DNA, 20 bp, synthetic construct
  misc_feature 1..20: note = Description of Artificial Sequence: Synthetic oligonucleotide
  misc_feature 1..20: note = Target: SCN10A; (+) strand; PAM type: NRG; PAM sequence: GAG
  source 1..20: mol_type = other DNA
agagtaggcctttttggctg

SEQ ID NO: 33226 - DNA, 20 bp, synthetic construct
  misc_feature 1..20: note = Description of Artificial Sequence: Synthetic oligonucleotide
  misc_feature 1..20: note = Target: SCN10A; (+) strand; PAM type: NRG; PAM sequence: AAG
  source 1..20: mol_type = other DNA
aggcctttttggctggagca

SEQ ID NO: 33227 - DNA, 20 bp, synthetic construct
  misc_feature 1..20: note = Description of Artificial Sequence: Synthetic oligonucleotide
  misc_feature 1..20: note = Target: SCN10A; (+) strand; PAM type: NRG; PAM sequence: TGG
  source 1..20: mol_type = other DNA
cctttttggctggagcaaag

SEQ ID NO: 33228 - DNA, 20 bp, synthetic construct
  misc_feature 1..20: note = Description of Artificial Sequence: Synthetic oligonucleotide
  misc_feature 1..20: note = Target: SCN10A; (+) strand; PAM type: NRG; PAM sequence: GGG
  source 1..20: mol_type = other DNA
ctttttggctggagcaaagt

SEQ ID NO: 33229 - DNA, 20 bp, synthetic construct
  misc_feature 1..20: note = Description of Artificial Sequence: Synthetic oligonucleotide
  misc_feature 1..20: note = Target: SCN10A; (+) strand; PAM type: NRG; PAM sequence: AAG
  source 1..20: mol_type = other DNA
ttggctggagcaaagtgggc

SEQ ID NO: 33230 - DNA, 20 bp, synthetic construct
  misc_feature 1..20: note = Description of Artificial Sequence: Synthetic oligonucleotide
  misc_feature 1..20: note = Target: SCN10A; (+) strand; PAM type: NRG; PAM sequence: CGG
  source 1..20: mol_type = other DNA
ctggagcaaagtgggcaaga

SEQ ID NO: 33231 - DNA, 20 bp, synthetic construct
  misc_feature 1..20: note = Description of Artificial Sequence: Synthetic oligonucleotide
  misc_feature 1..20: note = Target: SCN10A; (+) strand; PAM type: NRG; PAM sequence: GAG
  source 1..20: mol_type = other DNA
ggagcaaagtgggcaagacg

SEQ ID NO: 33232 - DNA, 20 bp, synthetic construct
  misc_feature 1..20: note = Description of Artificial Sequence: Synthetic oligonucleotide
  misc_feature 1..20: note = Target: SCN10A; (+) strand; PAM type: NRG; PAM sequence: TGG
  source 1..20: mol_type = other DNA
aaagtgggcaagacggagac

SEQ ID NO: 33233 - DNA, 20 bp, synthetic construct
  misc_feature 1..20: note = Description of Artificial Sequence: Synthetic oligonucleotide
  misc_feature 1..20: note = Target: SCN10A; (+) strand; PAM type: NRG; PAM sequence: TGG
  source 1..20: mol_type = other DNA
caagacggagactggtgaac

SEQ ID NO: 33234 - DNA, 20 bp, synthetic construct
  misc_feature 1..20: note = Description of Artificial Sequence: Synthetic oligonucleotide
  misc_feature 1..20: note = Target: SCN10A; (+) strand; PAM type: NRG; PAM sequence: CAG
  source 1..20: mol_type = other DNA
gacggagactggtgaactgg

SEQ ID NO: 33235 - DNA, 20 bp, synthetic construct
  misc_feature 1..20: note = Description of Artificial Sequence: Synthetic oligonucleotide
  misc_feature 1..20: note = Target: SCN10A; (+) strand; PAM type: NRG; PAM sequence: AGG
  source 1..20: mol_type = other DNA
acggagactggtgaactggc

SEQ ID NO: 33236 - DNA, 20 bp, synthetic construct
  misc_feature 1..20: note = Description of Artificial Sequence: Synthetic oligonucleotide
  misc_feature 1..20: note = Target: SCN10A; (+) strand; PAM type: NRG; PAM sequence: CAG
  source 1..20: mol_type = other DNA
actggcaggtcctgattatg

SEQ ID NO: 33237 - DNA, 20 bp, synthetic construct
  misc_feature 1..20: note = Description of Artificial Sequence: Synthetic oligonucleotide
  misc_feature 1..20: note = Target: SCN10A; (+) strand; PAM type: NRG; PAM sequence: GAG
  source 1..20: mol_type = other DNA
agaactttgtacaccatcat

SEQ ID NO: 33238 - DNA, 20 bp, synthetic construct
  misc_feature 1..20: note = Description of Artificial Sequence: Synthetic oligonucleotide
  misc_feature 1..20: note = Target: SCN10A; (+) strand; PAM type: NRG; PAM sequence: AGG
  source 1..20: mol_type = other DNA
gaactttgtacaccatcatg

SEQ ID NO: 33239 - DNA, 20 bp, synthetic construct
  misc_feature 1..20: note = Description of Artificial Sequence: Synthetic oligonucleotide
  misc_feature 1..20: note = Target: SCN10A; (+) strand; PAM type: NRG; PAM sequence: GAG
  source 1..20: mol_type = other DNA
actttgtacaccatcatgag

SEQ ID NO: 33240 - DNA, 20 bp, synthetic construct
  misc_feature 1..20: note = Description of Artificial Sequence: Synthetic oligonucleotide
  misc_feature 1..20: note = Target: SCN10A; (+) strand; PAM type: NRG; PAM sequence: TGG
  source 1..20: mol_type = other DNA
gtacaccatcatgaggagtc

SEQ ID NO: 33241 - DNA, 20 bp, synthetic construct
  misc_feature 1..20: note = Description of Artificial Sequence: Synthetic oligonucleotide
  misc_feature 1..20: note = Target: SCN10A; (+) strand; PAM type: NRG; PAM sequence: CAG
  source 1..20: mol_type = other DNA
aggagtctggattttattct

SEQ ID NO: 33242 - DNA, 20 bp, synthetic construct
  misc_feature 1..20: note = Description of Artificial Sequence: Synthetic oligonucleotide
  misc_feature 1..20: note = Target: SCN10A; (+) strand; PAM type: NRG; PAM sequence: GAG
  source 1..20: mol_type = other DNA
gagtctggattttattctca

SEQ ID NO: 33243 - DNA, 20 bp, synthetic construct
  misc_feature 1..20: note = Description of Artificial Sequence: Synthetic oligonucleotide
  misc_feature 1..20: note = Target: SCN10A; (+) strand; PAM type: NRG; PAM sequence: TGG
  source 1..20: mol_type = other DNA
ggattttattctcagagcaa

SEQ ID NO: 33244 - DNA, 20 bp, synthetic construct
  misc_feature 1..20: note = Description of Artificial Sequence: Synthetic oligonucleotide
  misc_feature 1..20: note = Target: SCN10A; (+) strand; PAM type: NRG; PAM sequence: GGG
  source 1..20: mol_type = other DNA
gattttattctcagagcaat

SEQ ID NO: 33245 - DNA, 20 bp, synthetic construct
  misc_feature 1..20: note = Description of Artificial Sequence: Synthetic oligonucleotide
  misc_feature 1..20: note = Target: SCN10A; (+) strand; PAM type: NRG; PAM sequence: CAG
  source 1..20: mol_type = other DNA
ttctcagagcaatgggaaac

SEQ ID NO: 33246 - DNA, 20 bp, synthetic construct
  misc_feature 1..20: note = Description of Artificial Sequence: Synthetic oligonucleotide
  misc_feature 1..20: note = Target: SCN10A; (+) strand; PAM type: NRG; PAM sequence: AAG
  source 1..20: mol_type = other DNA
agagcaatgggaaaccagtg

SEQ ID NO: 33247 - DNA, 20 bp, synthetic construct
  misc_feature 1..20: note = Description of Artificial Sequence: Synthetic oligonucleotide
  misc_feature 1..20: note = Target: SCN10A; (+) strand; PAM type: NRG; PAM sequence: TAG
  source 1..20: mol_type = other DNA
gaagttatttgtaacaaatg

SEQ ID NO: 33248 - DNA, 20 bp, synthetic construct
  misc_feature 1..20: note = Description of Artificial Sequence: Synthetic oligonucleotide
  misc_feature 1..20: note = Target: SCN10A; (+) strand; PAM type: NRG; PAM sequence: AGG
  source 1..20: mol_type = other DNA
aagttatttgtaacaaatgt

SEQ ID NO: 33249 - DNA, 20 bp, synthetic construct
  misc_feature 1..20: note = Description of Artificial Sequence: Synthetic oligonucleotide
  misc_feature 1..20: note = Target: SCN10A; (+) strand; PAM type: NRG; PAM sequence: AAG
  source 1..20: mol_type = other DNA
acaaatgtaggtactaacat

SEQ ID NO: 33250 - DNA, 20 bp, synthetic construct
  misc_feature 1..20: note = Description of Artificial Sequence: Synthetic oligonucleotide
  misc_feature 1..20: note = Target: SCN10A; (+) strand; PAM type: NRG; PAM sequence: TGG
  source 1..20: mol_type = other DNA
taggtactaacataagatgt

SEQ ID NO: 33251 - DNA, 20 bp, synthetic construct
  misc_feature 1..20: note = Description of Artificial Sequence: Synthetic oligonucleotide
  misc_feature 1..20: note = Target: SCN10A; (+) strand; PAM type: NRG; PAM sequence: TAG
  source 1..20: mol_type = other DNA
ctaacataagatgttggtaa

SEQ ID NO: 33252 - DNA, 20 bp, synthetic construct
  misc_feature 1..20: note = Description of Artificial Sequence: Synthetic oligonucleotide
  misc_feature 1..20: note = Target: SCN10A; (+) strand; PAM type: NRG; PAM sequence: AGG
  source 1..20: mol_type = other DNA
taacataagatgttggtaat

SEQ ID NO: 33253 - DNA, 20 bp, synthetic construct
  misc_feature 1..20: note = Description of Artificial Sequence: Synthetic oligonucleotide
  misc_feature 1..20: note = Target: SCN10A; (+) strand; PAM type: NRG; PAM sequence: GGG
  source 1..20: mol_type = other DNA
aacataagatgttggtaata

SEQ ID NO: 33254 - DNA, 20 bp, synthetic construct
  misc_feature 1..20: note = Description of Artificial Sequence: Synthetic oligonucleotide
  misc_feature 1..20: note = Target: SCN10A; (+) strand; PAM type: NRG; PAM sequence: TGG
  source 1..20: mol_type = other DNA
gtgtgtgtgtgtgtgtgttg

SEQ ID NO: 33255 - DNA, 20 bp, synthetic construct
  misc_feature 1..20: note = Description of Artificial Sequence: Synthetic oligonucleotide
  misc_feature 1..20: note = Target: SCN10A; (+) strand; PAM type: NRG; PAM sequence: GGG
  source 1..20: mol_type = other DNA
tgtgtgtgtgtgtgtgttgt

SEQ ID NO: 33256 - DNA, 20 bp, synthetic construct
  misc_feature 1..20: note = Description of Artificial Sequence: Synthetic oligonucleotide
  misc_feature 1..20: note = Target: SCN10A; (+) strand; PAM type: NRG; PAM sequence: TGG
  source 1..20: mol_type = other DNA
tgtgtgtgttgtgggattga

SEQ ID NO: 33257 - DNA, 20 bp, synthetic construct
  misc_feature 1..20: note = Description of Artificial Sequence: Synthetic oligonucleotide
  misc_feature 1..20: note = Target: SCN10A; (+) strand; PAM type: NRG; PAM sequence: AAG
  source 1..20: mol_type = other DNA
gtgggattgatggtatatga

SEQ ID NO: 33258 - DNA, 20 bp, synthetic construct
  misc_feature 1..20: note = Description of Artificial Sequence: Synthetic oligonucleotide
  misc_feature 1..20: note = Target: SCN10A; (+) strand; PAM type: NRG; PAM sequence: CAG
  source 1..20: mol_type = other DNA
gctttctgttcaatctgctc

SEQ ID NO: 33259 - DNA, 20 bp, synthetic construct
  misc_feature 1..20: note = Description of Artificial Sequence: Synthetic oligonucleotide
  misc_feature 1..20: note = Target: SCN10A; (+) strand; PAM type: NRG; PAM sequence: AAG
  source 1..20: mol_type = other DNA
tgaaaactgtcctgaaaata

SEQ ID NO: 33260 - DNA, 20 bp, synthetic construct
  misc_feature 1..20: note = Description of Artificial Sequence: Synthetic oligonucleotide
  misc_feature 1..20: note = Target: SCN10A; (+) strand; PAM type: NRG; PAM sequence: CAG
  source 1..20: mol_type = other DNA
taaagtctattaattaaaac

SEQ ID NO: 33261 - DNA, 20 bp, synthetic construct
  misc_feature 1..20: note = Description of Artificial Sequence: Synthetic oligonucleotide
  misc_feature 1..20: note = Target: SCN10A; (+) strand; PAM type: NRG; PAM sequence: AGG
  source 1..20: mol_type = other DNA
aaagtctattaattaaaacc

SEQ ID NO: 33262 - DNA, 20 bp, synthetic construct
  misc_feature 1..20: note = Description of Artificial Sequence: Synthetic oligonucleotide
  misc_feature 1..20: note = Target: SCN10A; (+) strand; PAM type: NRG; PAM sequence: CAG
  source 1..20: mol_type = other DNA
attaaaaccaggaaactgac

SEQ ID NO: 33263 - DNA, 20 bp, synthetic construct
  misc_feature 1..20: note = Description of Artificial Sequence: Synthetic oligonucleotide
  misc_feature 1..20: note = Target: SCN10A; (+) strand; PAM type: NRG; PAM sequence: TGG
  source 1..20: mol_type = other DNA
aaaccaggaaactgaccagc

SEQ ID NO: 33264 - DNA, 20 bp, synthetic construct
  misc_feature 1..20: note = Description of Artificial Sequence: Synthetic oligonucleotide
  misc_feature 1..20: note = Target: SCN10A; (+) strand; PAM type: NRG; PAM sequence: CGG
  source 1..20: mol_type = other DNA
ccaggaaactgaccagctgg

SEQ ID NO: 33265 - DNA, 20 bp, synthetic construct
  misc_feature 1..20: note = Description of Artificial Sequence: Synthetic oligonucleotide
  misc_feature 1..20: note = Target: SCN10A; (+) strand; PAM type: NRG; PAM sequence: CAG
  source 1..20: mol_type = other DNA
agctggcggtgatttttctc

SEQ ID NO: 33266 - DNA, 20 bp, synthetic construct
  misc_feature 1..20: note = Description of Artificial Sequence: Synthetic oligonucleotide
  misc_feature 1..20: note = Target: SCN10A; (+) strand; PAM type: NRG; PAM sequence: CAG
  source 1..20: mol_type = other DNA
tttttctccagcatttctca

SEQ ID NO: 33267 - DNA, 20 bp, synthetic construct
  misc_feature 1..20: note = Description of Artificial Sequence: Synthetic oligonucleotide
  misc_feature 1..20: note = Target: SCN10A; (+) strand; PAM type: NRG; PAM sequence: CAG
  source 1..20: mol_type = other DNA
ctccagcatttctcacagct

SEQ ID NO: 33268 - DNA, 20 bp, synthetic construct
  misc_feature 1..20: note = Description of Artificial Sequence: Synthetic oligonucleotide
  misc_feature 1..20: note = Target: SCN10A; (+) strand; PAM type: NRG; PAM sequence: AGG
  source 1..20: mol_type = other DNA
tccagcatttctcacagctc

SEQ ID NO: 33269 - DNA, 20 bp, synthetic construct
  misc_feature 1..20: note = Description of Artificial Sequence: Synthetic oligonucleotide
  misc_feature 1..20: note = Target: SCN10A; (+) strand; PAM type: NRG; PAM sequence: CAG
  source 1..20: mol_type = other DNA
catttctcacagctcaggtg

SEQ ID NO: 33270 - DNA, 20 bp, synthetic construct
  misc_feature 1..20: note = Description of Artificial Sequence: Synthetic oligonucleotide
  misc_feature 1..20: note = Target: SCN10A; (+) strand; PAM type: NRG; PAM sequence: AAG
  source 1..20: mol_type = other DNA
ctcacagctcaggtgcagac

SEQ ID NO: 33271 - DNA, 20 bp, synthetic construct
  misc_feature 1..20: note = Description of Artificial Sequence: Synthetic oligonucleotide
  misc_feature 1..20: note = Target: SCN10A; (+) strand; PAM type: NRG; PAM sequence: AGG
  source 1..20: mol_type = other DNA
tcacagctcaggtgcagaca

SEQ ID NO: 33272 - DNA, 20 bp, synthetic construct
  misc_feature 1..20: note = Description of Artificial Sequence: Synthetic oligonucleotide
  misc_feature 1..20: note = Target: SCN10A; (+) strand; PAM type: NRG; PAM sequence: TGG
  source 1..20: mol_type = other DNA
cagctcaggtgcagacaagg

SEQ ID NO: 33273 - DNA, 20 bp, synthetic construct
  misc_feature 1..20: note = Description of Artificial Sequence: Synthetic oligonucleotide
  misc_feature 1..20: note = Target: SCN10A; (+) strand; PAM type: NRG; PAM sequence: GAG
  source 1..20: mol_type = other DNA
gctcaggtgcagacaaggtg

SEQ ID NO: 33274 - DNA, 20 bp, synthetic construct
  misc_feature 1..20: note = Description of Artificial Sequence: Synthetic oligonucleotide
  misc_feature 1..20: note = Target: SCN10A; (+) strand; PAM type: NRG; PAM sequence: GAG
  source 1..20: mol_type = other DNA
tcaggtgcagacaaggtgga

SEQ ID NO: 33275 - DNA, 20 bp, synthetic construct
  misc_feature 1..20: note = Description of Artificial Sequence: Synthetic oligonucleotide
  misc_feature 1..20: note = Target: SCN10A; (+) strand; PAM type: NRG; PAM sequence: TAG
  source 1..20: mol_type = other DNA
gtggagagaaatatttgact

SEQ ID NO: 33276 - DNA, 20 bp, synthetic construct
  misc_feature 1..20: note = Description of Artificial Sequence: Synthetic oligonucleotide
  misc_feature 1..20: note = Target: SCN10A; (+) strand; PAM type: NRG; PAM sequence: CGG
  source 1..20: mol_type = other DNA
aatatttgacttagactctc

SEQ ID NO: 33277 - DNA, 20 bp, synthetic construct
  misc_feature 1..20: note = Description of Artificial Sequence: Synthetic oligonucleotide
  misc_feature 1..20: note = Target: SCN10A; (+) strand; PAM type: NRG; PAM sequence: GAG
  source 1..20: mol_type = other DNA
tttgacttagactctccggt

SEQ ID NO: 33278 - DNA, 20 bp, synthetic construct
  misc_feature 1..20: note = Description of Artificial Sequence: Synthetic oligonucleotide
  misc_feature 1..20: note = Target: SCN10A; (+) strand; PAM type: NRG; PAM sequence: AGG
  source 1..20: mol_type = other DNA
ttgacttagactctccggtg

SEQ ID NO: 33279 - DNA, 20 bp, synthetic construct
  misc_feature 1..20: note = Description of Artificial Sequence: Synthetic oligonucleotide
  misc_feature 1..20: note = Target: SCN10A; (+) strand; PAM type: NRG; PAM sequence: TGG
  source 1..20: mol_type = other DNA
tagactctccggtgaggttt

SEQ ID NO: 33280 - DNA, 20 bp, synthetic construct
  misc_feature 1..20: note = Description of Artificial Sequence: Synthetic oligonucleotide
  misc_feature 1..20: note = Target: SCN10A; (+) strand; PAM type: NRG; PAM sequence: AAG
  source 1..20: mol_type = other DNA
ttggcaaacacaaaaacgca

SEQ ID NO: 33281 - DNA, 20 bp, synthetic construct
  misc_feature 1..20: note = Description of Artificial Sequence: Synthetic oligonucleotide
  misc_feature 1..20: note = Target: SCN10A; (+) strand; PAM type: NRG; PAM sequence: GAG
  source 1..20: mol_type = other DNA
ggcaaacacaaaaacgcaaa

SEQ ID NO: 33282 - DNA, 20 bp, synthetic construct
  misc_feature 1..20: note = Description of Artificial Sequence: Synthetic oligonucleotide
  misc_feature 1..20: note = Target: SCN10A; (+) strand; PAM type: NRG; PAM sequence: AGG
  source 1..20: mol_type = other DNA
gcaaacacaaaaacgcaaag

SEQ ID NO: 33283 - DNA, 20 bp, synthetic construct
  misc_feature 1..20: note = Description of Artificial Sequence: Synthetic oligonucleotide
  misc_feature 1..20: note = Target: SCN10A; (+) strand; PAM type: NRG; PAM sequence: CAG
  source 1..20: mol_type = other DNA
aacacaaaaacgcaaagagg

SEQ ID NO: 33284 - DNA, 20 bp, synthetic construct
  misc_feature 1..20: note = Description of Artificial Sequence: Synthetic oligonucleotide
  misc_feature 1..20: note = Target: SCN10A; (+) strand; PAM type: NRG; PAM sequence: GAG
  source 1..20: mol_type = other DNA
cacaaaaacgcaaagaggca

SEQ ID NO: 33285 - DNA, 20 bp, synthetic construct
  misc_feature 1..20: note = Description of Artificial Sequence: Synthetic oligonucleotide
  misc_feature 1..20: note = Target: SCN10A; (+) strand; PAM type: NRG; PAM sequence: AGG
  source 1..20: mol_type = other DNA
acaaaaacgcaaagaggcag

SEQ ID NO: 33286 - DNA, 20 bp, synthetic construct
  misc_feature 1..20: note = Description of Artificial Sequence: Synthetic oligonucleotide
  misc_feature 1..20: note = Target: SCN10A; (+) strand; PAM type: NRG; PAM sequence: GGG
  source 1..20: mol_type = other DNA
caaaaacgcaaagaggcaga

SEQ ID NO: 33287 - DNA, 20 bp, synthetic construct
  misc_feature 1..20: note = Description of Artificial Sequence: Synthetic oligonucleotide
  misc_feature 1..20: note = Target: SCN10A; (+) strand; PAM type: NRG; PAM sequence: AAG
  source 1..20: mol_type = other DNA
acgcaaagaggcagagggaa

SEQ ID NO: 33288 - DNA, 20 bp, synthetic construct
  misc_feature 1..20: note = Description of Artificial Sequence: Synthetic oligonucleotide
  misc_feature 1..20: note = Target: SCN10A; (+) strand; PAM type: NRG; PAM sequence: AGG
  source 1..20: mol_type = other DNA
cgcaaagaggcagagggaaa

SEQ ID NO: 33289 - DNA, 20 bp, synthetic construct
  misc_feature 1..20: note = Description of Artificial Sequence: Synthetic oligonucleotide
  misc_feature 1..20: note = Target: SCN10A; (+) strand; PAM type: NRG; PAM sequence: GAG
  source 1..20: mol_type = other DNA
ggcagagggaaaaggtgatt

SEQ ID NO: 33290 - DNA, 20 bp, synthetic construct
  misc_feature 1..20: note = Description of Artificial Sequence: Synthetic oligonucleotide
  misc_feature 1..20: note = Target: SCN10A; (+) strand; PAM type: NRG; PAM sequence: AAG
  source 1..20: mol_type = other DNA
aggtgattgagtttgttttc

SEQ ID NO: 33291 - DNA, 20 bp, synthetic construct
  misc_feature 1..20: note = Description of Artificial Sequence: Synthetic oligonucleotide
  misc_feature 1..20: note = Target: SCN10A; (+) strand; PAM type: NRG; PAM sequence: AGG
  source 1..20: mol_type = other DNA
ggtgattgagtttgttttca

SEQ ID NO: 33292 - DNA, 20 bp, synthetic construct
  misc_feature 1..20: note = Description of Artificial Sequence: Synthetic oligonucleotide
  misc_feature 1..20: note = Target: SCN10A; (+) strand; PAM type: NRG; PAM sequence: GGG
  source 1..20: mol_type = other DNA
gtgattgagtttgttttcaa

SEQ ID NO: 33293 - DNA, 20 bp, synthetic construct
  misc_feature 1..20: note = Description of Artificial Sequence: Synthetic oligonucleotide
  misc_feature 1..20: note = Target: SCN10A; (+) strand; PAM type: NRG; PAM sequence: TGG
  source 1..20: mol_type = other DNA
tttcaagggcataataatat

SEQ ID NO: 33294 - DNA, 20 bp, synthetic construct
  misc_feature 1..20: note = Description of Artificial Sequence: Synthetic oligonucleotide
  misc_feature 1..20: note = Target: SCN10A; (+) strand; PAM type: NRG; PAM sequence: TGG
  source 1..20: mol_type = other DNA
caagggcataataatattgg

SEQ ID NO: 33295 - DNA, 20 bp, synthetic construct
  misc_feature 1..20: note = Description of Artificial Sequence: Synthetic oligonucleotide
  misc_feature 1..20: note = Target: SCN10A; (+) strand; PAM type: NRG; PAM sequence: GGG
  source 1..20: mol_type = other DNA
aagggcataataatattggt

SEQ ID NO: 33296 - DNA, 20 bp, synthetic construct
  misc_feature 1..20: note = Description of Artificial Sequence: Synthetic oligonucleotide
  misc_feature 1..20: note = Target: SCN10A; (+) strand; PAM type: NRG; PAM sequence: AAG
  source 1..20: mol_type = other DNA
attggtgggctgtgaaatct

SEQ ID NO: 33297 - DNA, 20 bp, synthetic construct
  misc_feature 1..20: note = Description of Artificial Sequence: Synthetic oligonucleotide
  misc_feature 1..20: note = Target: SCN10A; (+) strand; PAM type: NRG; PAM sequence: TAG
  source 1..20: mol_type = other DNA
gtgggctgtgaaatctaagc

SEQ ID NO: 33298 - DNA, 20 bp, synthetic construct
  misc_feature 1..20: note = Description of Artificial Sequence: Synthetic oligonucleotide
  misc_feature 1..20: note = Target: SCN10A; (+) strand; PAM type: NRG; PAM sequence: AGG
  source 1..20: mol_type = other DNA
tgggctgtgaaatctaagct

SEQ ID NO: 33299 - DNA, 20 bp, synthetic construct
  misc_feature 1..20: note = Description of Artificial Sequence: Synthetic oligonucleotide
  misc_feature 1..20: note = Target: SCN10A; (+) strand; PAM type: NRG; PAM sequence: GAG
  source 1..20: mol_type = other DNA
tgaaatctaagctaggtcat

SEQ ID NO: 33300 - DNA, 20 bp, synthetic construct
  misc_feature 1..20: note = Description of Artificial Sequence: Synthetic oligonucleotide
  misc_feature 1..20: note = Target: SCN10A; (+) strand; PAM type: NRG; PAM sequence: AGG
  source 1..20: mol_type = other DNA
gaaatctaagctaggtcatg

SEQ ID NO: 33301 - DNA, 20 bp, synthetic construct
  misc_feature 1..20: note = Description of Artificial Sequence: Synthetic oligonucleotide
  misc_feature 1..20: note = Target: SCN10A; (+) strand; PAM type: NRG; PAM sequence: GGG
  source 1..20: mol_type = other DNA
aaatctaagctaggtcatga

SEQ ID NO: 33302 - DNA, 20 bp, synthetic construct
  misc_feature 1..20: note = Description of Artificial Sequence: Synthetic oligonucleotide
  misc_feature 1..20: note = Target: SCN10A; (+) strand; PAM type: NRG; PAM sequence: AAG
  source 1..20: mol_type = other DNA
tctaagctaggtcatgaggg

SEQ ID NO: 33303 - DNA, 20 bp, synthetic construct
  misc_feature 1..20: note = Description of Artificial Sequence: Synthetic oligonucleotide
  misc_feature 1..20: note = Target: SCN10A; (+) strand; PAM type: NRG; PAM sequence: TGG
  source 1..20: mol_type = other DNA
aagctaggtcatgagggaag

SEQ ID NO: 33304 - DNA, 20 bp, synthetic construct
  misc_feature 1..20: note = Description of Artificial Sequence: Synthetic oligonucleotide
  misc_feature 1..20: note = Target: SCN10A; (+) strand; PAM type: NRG; PAM sequence: TAG
  source 1..20: mol_type = other DNA
aggtcatgagggaagtggaa

SEQ ID NO: 33305 - DNA, 20 bp, synthetic construct
  misc_feature 1..20: note = Description of Artificial Sequence: Synthetic oligonucleotide
  misc_feature 1..20: note = Target: SCN10A; (+) strand; PAM type: NRG; PAM sequence: AAG
  source 1..20: mol_type = other DNA
agggaagtggaatagatccc

SEQ ID NO: 33306 - DNA, 20 bp, synthetic construct
  misc_feature 1..20: note = Description of Artificial Sequence: Synthetic oligonucleotide
  misc_feature 1..20: note = Target: SCN10A; (+) strand; PAM type: NRG; PAM sequence: AAG
  source 1..20: mol_type = other DNA
aagtggaatagatcccaaga

SEQ ID NO: 33307 - DNA, 20 bp, synthetic construct
  misc_feature 1..20: note = Description of Artificial Sequence: Synthetic oligonucleotide
  misc_feature 1..20: note = Target: SCN10A; (+) strand; PAM type: NRG; PAM sequence: TAG
  source 1..20: mol_type = other DNA
atagatcccaagaaagtgtg

SEQ ID NO: 33308 - DNA, 20 bp, synthetic construct
  misc_feature 1..20: note = Description of Artificial Sequence: Synthetic oligonucleotide
  misc_feature 1..20: note = Target: SCN10A; (+) strand; PAM type: NRG; PAM sequence: TGG
  source 1..20: mol_type = other DNA
atcccaagaaagtgtgtagt

SEQ ID NO: 33309 - DNA, 20 bp, synthetic construct
  misc_feature 1..20: note = Description of Artificial Sequence: Synthetic oligonucleotide
  misc_feature 1..20: note = Target: SCN10A; (+) strand; PAM type: NRG; PAM sequence: TGG
  source 1..20: mol_type = other DNA
ccaagaaagtgtgtagttgg

SEQ ID NO: 33310 - DNA, 20 bp, synthetic construct
  misc_feature 1..20: note = Description of Artificial Sequence: Synthetic oligonucleotide
  misc_feature 1..20: note = Target: SCN10A; (+) strand; PAM type: NRG; PAM sequence: GGG
  source 1..20: mol_type = other DNA
caagaaagtgtgtagttggt

SEQ ID NO: 33311 - DNA, 20 bp, synthetic construct
  misc_feature 1..20: note = Description of Artificial Sequence: Synthetic oligonucleotide
  misc_feature 1..20: note = Target: SCN10A; (+) strand; PAM type: NRG; PAM sequence: TGG
  source 1..20: mol_type = other DNA
aagtgtgtagttggtgggtg

SEQ ID NO: 33312 - DNA, 20 bp, synthetic construct
  misc_feature 1..20: note = Description of Artificial Sequence: Synthetic oligonucleotide
  misc_feature 1..20: note = Target: SCN10A; (+) strand; PAM type: NRG; PAM sequence: TAG
  source 1..20: mol_type = other DNA
gtgtagttggtgggtgtggt

SEQ ID NO: 33313 - DNA, 20 bp, synthetic construct
  misc_feature 1..20: note = Description of Artificial Sequence: Synthetic oligonucleotide
  misc_feature 1..20: note = Target: SCN10A; (+) strand; PAM type: NRG; PAM sequence: AGG
  source 1..20: mol_type = other DNA
tgtagttggtgggtgtggtt

SEQ ID NO: 33314 - DNA, 20 bp, synthetic construct
  misc_feature 1..20: note = Description of Artificial Sequence: Synthetic oligonucleotide
  misc_feature 1..20: note = Target: SCN10A; (+) strand; PAM type: NRG; PAM sequence: GGG
  source 1..20: mol_type = other DNA
gtagttggtgggtgtggtta

SEQ ID NO: 33315 - DNA, 20 bp, synthetic construct
  misc_feature 1..20: note = Description of Artificial Sequence: Synthetic oligonucleotide
  misc_feature 1..20: note = Target: SCN10A; (+) strand; PAM type: NRG; PAM sequence: GAG
  source 1..20: mol_type = other DNA
gtgggtgtggttagggaatt

SEQ ID NO: 33316 - DNA, 20 bp, synthetic construct
  misc_feature 1..20: note = Description of Artificial Sequence: Synthetic oligonucleotide
  misc_feature 1..20: note = Target: SCN10A; (+) strand; PAM type: NRG; PAM sequence: CAG
  source 1..20: mol_type = other DNA
ttagggaattgagcactgat

SEQ ID NO: 33317 - DNA, 20 bp, synthetic construct
  misc_feature 1..20: note = Description of Artificial Sequence: Synthetic oligonucleotide
  misc_feature 1..20: note = Target: SCN10A; (+) strand; PAM type: NRG; PAM sequence: CAG
  source 1..20: mol_type = other DNA
cactgatcagcatgttaaat

SEQ ID NO: 33318 - DNA, 20 bp, synthetic construct
  misc_feature 1..20: note = Description of Artificial Sequence: Synthetic oligonucleotide
  misc_feature 1..20: note = Target: SCN10A; (+) strand; PAM type: NRG; PAM sequence: GAG
  source 1..20: mol_type = other DNA
gatcagcatgttaaatcagc

SEQ ID NO: 33319 - DNA, 20 bp, synthetic construct
  misc_feature 1..20: note = Description of Artificial Sequence: Synthetic oligonucleotide
  misc_feature 1..20: note = Target: SCN10A; (+) strand; PAM type: NRG; PAM sequence: AGG
  source 1..20: mol_type = other DNA
atcagcatgttaaatcagcg

SEQ ID NO: 33320 - DNA, 20 bp, synthetic construct
  misc_feature 1..20: note = Description of Artificial Sequence: Synthetic oligonucleotide
  misc_feature 1..20: note = Target: SCN10A; (+) strand; PAM type: NRG; PAM sequence: TGG
  source 1..20: mol_type = other DNA
agcatgttaaatcagcgagg

SEQ ID NO: 33321 - DNA, 20 bp, synthetic construct
  misc_feature 1..20: note = Description of Artificial Sequence: Synthetic oligonucleotide
  misc_feature 1..20: note = Target: SCN10A; (+) strand; PAM type: NRG; PAM sequence: GGG
  source 1..20: mol_type = other DNA
gcatgttaaatcagcgaggt

SEQ ID NO: 33322 - DNA, 20 bp, synthetic construct
  misc_feature 1..20: note = Description of Artificial Sequence: Synthetic oligonucleotide
  misc_feature 1..20: note = Target: SCN10A; (+) strand; PAM type: NRG; PAM sequence: GGG
  source 1..20: mol_type = other DNA
catgttaaatcagcgaggtg

SEQ ID NO: 33323 - DNA, 20 bp, synthetic construct
  misc_feature 1..20: note = Description of Artificial Sequence: Synthetic oligonucleotide
  misc_feature 1..20: note = Target: SCN10A; (+) strand; PAM type: NRG; PAM sequence: CAG
  source 1..20: mol_type = other DNA
ttaaatcagcgaggtgggga

SEQ ID NO: 33324 - DNA, 20 bp, synthetic construct
  misc_feature 1..20: note = Description of Artificial Sequence: Synthetic oligonucleotide
  misc_feature 1..20: note = Target: SCN10A; (+) strand; PAM type: NRG; PAM sequence: AGG
  source 1..20: mol_type = other DNA
taaatcagcgaggtggggac

SEQ ID NO: 33325 - DNA, 20 bp, synthetic construct
  misc_feature 1..20: note = Description of Artificial Sequence: Synthetic oligonucleotide
  misc_feature 1..20: note = Target: SCN10A; (+) strand; PAM type: NRG; PAM sequence: GGG
  source 1..20: mol_type = other DNA
aaatcagcgaggtggggaca

SEQ ID NO: 33326 - DNA, 20 bp, synthetic construct
  misc_feature 1..20: note = Description of Artificial Sequence: Synthetic oligonucleotide
  misc_feature 1..20: note = Target: SCN10A; (+) strand; PAM type: NRG; PAM sequence: TAG
  source 1..20: mol_type = other DNA
tcagcgaggtggggacaggg

SEQ ID NO: 33327 - DNA, 20 bp, synthetic construct
  misc_feature 1..20: note = Description of Artificial Sequence: Synthetic oligonucleotide
  misc_feature 1..20: note = Target: SCN10A; (+) strand; PAM type: NRG; PAM sequence: CAG
  source 1..20: mol_type = other DNA
gacagggtagcattcccctg

SEQ ID NO: 33328 - DNA, 20 bp, synthetic construct
  misc_feature 1..20: note = Description of Artificial Sequence: Synthetic oligonucleotide
  misc_feature 1..20: note = Target: SCN10A; (+) strand; PAM type: NRG; PAM sequence: TAG
  source 1..20: mol_type = other DNA
cattcccctgcagaatcctg

SEQ ID NO: 33329 - DNA, 20 bp, synthetic construct
  misc_feature 1..20: note = Description of Artificial Sequence: Synthetic oligonucleotide
  misc_feature 1..20: note = Target: SCN10A; (+) strand; PAM type: NRG; PAM sequence: AGG
  source 1..20: mol_type = other DNA
attcccctgcagaatcctgt

SEQ ID NO: 33330 - DNA, 20 bp, synthetic construct
  misc_feature 1..20: note = Description of Artificial Sequence: Synthetic oligonucleotide
  misc_feature 1..20: note = Target: SCN10A; (+) strand; PAM type: NRG; PAM sequence: GGG
  source 1..20: mol_type = other DNA
ttcccctgcagaatcctgta

SEQ ID NO: 33331 - DNA, 20 bp, synthetic construct
  misc_feature 1..20: note = Description of Artificial Sequence: Synthetic oligonucleotide
  misc_feature 1..20: note = Target: SCN10A; (+) strand; PAM type: NRG; PAM sequence: GGG
  source 1..20: mol_type = other DNA
tcccctgcagaatcctgtag

SEQ ID NO: 33332 - DNA, 20 bp, synthetic construct
  misc_feature 1..20: note = Description of Artificial Sequence: Synthetic oligonucleotide
  misc_feature 1..20: note = Target: SCN10A; (+) strand; PAM type: NRG; PAM sequence: CAG
  source 1..20: mol_type = other DNA
cctgcagaatcctgtagggg

SEQ ID NO: 33333 - DNA, 20 bp, synthetic construct
  misc_feature 1..20: note = Description of Artificial Sequence: Synthetic oligonucleotide
  misc_feature 1..20: note = Target: SCN10A; (+) strand; PAM type: NRG; PAM sequence: AAG
  source 1..20: mol_type = other DNA
tcctgtaggggcagactgtg

SEQ ID NO: 33334 - DNA, 20 bp, synthetic construct
  misc_feature 1..20: note = Description of Artificial Sequence: Synthetic oligonucleotide
  misc_feature 1..20: note = Target: SCN10A; (+) strand; PAM type: NRG; PAM sequence: TGG
  source 1..20: mol_type = other DNA
gaagtaaacttgcctatttt

SEQ ID NO: 33335 - DNA, 20 bp, synthetic construct
  misc_feature 1..20: note = Description of Artificial Sequence: Synthetic oligonucleotide
  misc_feature 1..20: note = Target: SCN10A; (+) strand; PAM type: NRG; PAM sequence: TGG
  source 1..20: mol_type = other DNA
cttgcctatttttggttgtt

SEQ ID NO: 33336 - DNA, 20 bp, synthetic construct
  misc_feature 1..20: note = Description of Artificial Sequence: Synthetic oligonucleotide
  misc_feature 1..20: note = Target: SCN10A; (+) strand; PAM type: NRG; PAM sequence: GGG
  source 1..20: mol_type = other DNA
ttgcctatttttggttgttt

SEQ ID NO: 33337 - DNA, 20 bp, synthetic construct
  misc_feature 1..20: note = Description of Artificial Sequence: Synthetic oligonucleotide
  misc_feature 1..20: note = Target: SCN10A; (+) strand; PAM type: NRG; PAM sequence: TAG
  source 1..20: mol_type = other DNA
tttttggttgtttgggactt

SEQ ID NO: 33338 - DNA, 20 bp, synthetic construct
  misc_feature 1..20: note = Description of Artificial Sequence: Synthetic oligonucleotide
  misc_feature 1..20: note = Target: SCN10A; (+) strand; PAM type: NRG; PAM sequence: TGG
  source 1..20: mol_type = other DNA
ttgtttgggactttagactg

SEQ ID NO: 33339 - DNA, 20 bp, synthetic construct
  misc_feature 1..20: note = Description of Artificial Sequence: Synthetic oligonucleotide
  misc_feature 1..20: note = Target: SCN10A; (+) strand; PAM type: NRG; PAM sequence: GGG
  source 1..20: mol_type = other DNA
tgtttgggactttagactgt

SEQ ID NO: 33340 - DNA, 20 bp, synthetic construct
  misc_feature 1..20: note = Description of Artificial Sequence: Synthetic oligonucleotide
  misc_feature 1..20: note = Target: SCN10A; (+) strand; PAM type: NRG; PAM sequence: CAG
  source 1..20: mol_type = other DNA
gggactttagactgtgggat

SEQ ID NO: 33341 - DNA, 20 bp, synthetic construct
  misc_feature 1..20: note = Description of Artificial Sequence: Synthetic oligonucleotide
  misc_feature 1..20: note = Target: SCN10A; (+) strand; PAM type: NRG; PAM sequence: AAG
  source 1..20: mol_type = other DNA
agactgtgggatcagaacaa

SEQ ID NO: 33342 - DNA, 20 bp, synthetic construct
  misc_feature 1..20: note = Description of Artificial Sequence: Synthetic oligonucleotide
  misc_feature 1..20: note = Target: SCN10A; (+) strand; PAM type: NRG; PAM sequence: TAG
  source 1..20: mol_type = other DNA
ctgtgggatcagaacaaaag

SEQ ID NO: 33343 - DNA, 20 bp, synthetic construct
  misc_feature 1..20: note = Description of Artificial Sequence: Synthetic oligonucleotide
  misc_feature 1..20: note = Target: SCN10A; (+) strand; PAM type: NRG; PAM sequence: TAG
  source 1..20: mol_type = other DNA
atcagaacaaaagtagcaca

SEQ ID NO: 33344 - DNA, 20 bp, synthetic construct
  misc_feature 1..20: note = Description of Artificial Sequence: Synthetic oligonucleotide
  misc_feature 1..20: note = Target: SCN10A; (+) strand; PAM type: NRG; PAM sequence: AAG
  source 1..20: mol_type = other DNA
cacatagaccttaaaacact

SEQ ID NO: 33345 - DNA, 20 bp, synthetic construct
  misc_feature 1..20: note = Description of Artificial Sequence: Synthetic oligonucleotide
  misc_feature 1..20: note = Target: SCN10A; (+) strand; PAM type: NRG; PAM sequence: AAG
  source 1..20: mol_type = other DNA
cactaagcttctgcttcccc

SEQ ID NO: 33346 - DNA, 20 bp, synthetic construct
  misc_feature 1..20: note = Description of Artificial Sequence: Synthetic oligonucleotide
  misc_feature 1..20: note = Target: SCN10A; (+) strand; PAM type: NRG; PAM sequence: TAG
  source 1..20: mol_type = other DNA
agcttctgcttccccaagtg

SEQ ID NO: 33347 - DNA, 20 bp, synthetic construct
  misc_feature 1..20: note = Description of Artificial Sequence: Synthetic oligonucleotide
  misc_feature 1..20: note = Target: SCN10A; (+) strand; PAM type: NRG; PAM sequence: CAG
  source 1..20: mol_type = other DNA
ttctgcttccccaagtgtag

SEQ ID NO: 33348 - DNA, 20 bp, synthetic construct
  misc_feature 1..20: note = Description of Artificial Sequence: Synthetic oligonucleotide
  misc_feature 1..20: note = Target: SCN10A; (+) strand; PAM type: NRG; PAM sequence: GAG
  source 1..20: mol_type = other DNA
tttttttttttttttttttt

SEQ ID NO: 33349 - DNA, 20 bp, synthetic construct
  misc_feature 1..20: note = Description of Artificial Sequence: Synthetic oligonucleotide
  misc_feature 1..20: note = Target: SCN10A; (+) strand; PAM type: NRG; PAM sequence: CGG
  source 1..20: mol_type = other DNA
ttttttttttttttttgaga

SEQ ID NO: 33350 - DNA, 20 bp, synthetic construct
  misc_feature 1..20: note = Description of Artificial Sequence: Synthetic oligonucleotide
  misc_feature 1..20: note = Target: SCN10A; (+) strand; PAM type: NRG; PAM sequence: GAG
  source 1..20: mol_type = other DNA
ttttttttttttttgagacg

SEQ ID NO: 33351 - DNA, 20 bp, synthetic construct
  misc_feature 1..20: note = Description of Artificial Sequence: Synthetic oligonucleotide
  misc_feature 1..20: note = Target: SCN10A; (+) strand; PAM type: NRG; PAM sequence: TAG
  source 1..20: mol_type = other DNA
tgagacggagtcccgctgtt

SEQ ID NO: 33352 - DNA, 20 bp, synthetic construct
  misc_feature 1..20: note = Description of Artificial Sequence: Synthetic oligonucleotide
  misc_feature 1..20: note = Target: SCN10A; (+) strand; PAM type: NRG; PAM sequence: CAG
  source 1..20: mol_type = other DNA
cggagtcccgctgtttagcc

SEQ ID NO: 33353 - DNA, 20 bp, synthetic construct
  misc_feature 1..20: note = Description of Artificial Sequence: Synthetic oligonucleotide
  misc_feature 1..20: note = Target: SCN10A; (+) strand; PAM type: NRG; PAM sequence: AGG
  source 1..20: mol_type = other DNA
ggagtcccgctgtttagccc

SEQ ID NO: 33354 - DNA, 20 bp, synthetic construct
  misc_feature 1..20: note = Description of Artificial Sequence: Synthetic oligonucleotide
  misc_feature 1..20: note = Target: SCN10A; (+) strand; PAM type: NRG; PAM sequence: CGG
  source 1..20: mol_type = other DNA
tcccgctgtttagcccaggc

SEQ ID NO: 33355 - DNA, 20 bp, synthetic construct
  misc_feature 1..20: note = Description of Artificial Sequence: Synthetic oligonucleotide
  misc_feature 1..20: note = Target: SCN10A; (+) strand; PAM type: NRG; PAM sequence: CAG
  source 1..20: mol_type = other DNA
gtttagcccaggccggattg

SEQ ID NO: 33356 - DNA, 20 bp, synthetic construct
  misc_feature 1..20: note = Description of Artificial Sequence: Synthetic oligonucleotide
  misc_feature 1..20: note = Target: SCN10A; (+) strand; PAM type: NRG; PAM sequence: TGG
  source 1..20: mol_type = other DNA
tagcccaggccggattgcag

SEQ ID NO: 33357 - DNA, 20 bp, synthetic construct
  misc_feature 1..20: note = Description of Artificial Sequence: Synthetic oligonucleotide
  misc_feature 1..20: note = Target: SCN10A; (+) strand; PAM type: NRG; PAM sequence: CGG
  source 1..20: mol_type = other DNA
ggattgcagtggcgcaatct

SEQ ID NO: 33358 - DNA, 20 bp, synthetic construct
  misc_feature 1..20: note = Description of Artificial Sequence: Synthetic oligonucleotide
  misc_feature 1..20: note = Target: SCN10A; (+) strand; PAM type: NRG; PAM sequence: AAG
  source 1..20: mol_type = other DNA
gcgcaatctcggctcactgt

SEQ ID NO: 33359 - DNA, 20 bp, synthetic construct
  misc_feature 1..20: note = Description of Artificial Sequence: Synthetic oligonucleotide
  misc_feature 1..20: note = Target: SCN10A; (+) strand; PAM type: NRG; PAM sequence: CAG
  source 1..20: mol_type = other DNA
tcactgtaagctccgcctcc

SEQ ID NO: 33360 - DNA, 20 bp, synthetic construct
  misc_feature 1..20: note = Description of Artificial Sequence: Synthetic oligonucleotide
  misc_feature 1..20: note = Target: SCN10A; (+) strand; PAM type: NRG; PAM sequence: AGG
  source 1..20: mol_type = other DNA
cactgtaagctccgcctccc

SEQ ID NO: 33361 - DNA, 20 bp, synthetic construct
  misc_feature 1..20: note = Description of Artificial Sequence: Synthetic oligonucleotide
  misc_feature 1..20: note = Target: SCN10A; (+) strand; PAM type: NRG; PAM sequence: CAG
  source 1..20: mol_type = other DNA
ttcacgccattctcctgcct

SEQ ID NO: 33362 - DNA, 20 bp, synthetic construct
  misc_feature 1..20: note = Description of Artificial Sequence: Synthetic oligonucleotide
  misc_feature 1..20: note = Target: SCN10A; (+) strand; PAM type: NRG; PAM sequence: GAG
  source 1..20: mol_type = other DNA
ttctcctgcctcagcctccc

SEQ ID NO: 33363 - DNA, 20 bp, synthetic construct
  misc_feature 1..20: note = Description of Artificial Sequence: Synthetic oligonucleotide
  misc_feature 1..20: note = Target: SCN10A; (+) strand; PAM type: NRG; PAM sequence: TAG
  source 1..20: mol_type = other DNA
tcctgcctcagcctcccgag

SEQ ID NO: 33364 - DNA, 20 bp, synthetic construct
  misc_feature 1..20: note = Description of Artificial Sequence: Synthetic oligonucleotide
  misc_feature 1..20: note = Target: SCN10A; (+) strand; PAM type: NRG; PAM sequence: TGG
  source 1..20: mol_type = other DNA
gcctcagcctcccgagtagc

SEQ ID NO: 33365 - DNA, 20 bp, synthetic construct
  misc_feature 1..20: note = Description of Artificial Sequence: Synthetic oligonucleotide
  misc_feature 1..20: note = Target: SCN10A; (+) strand; PAM type: NRG; PAM sequence: GGG
  source 1..20: mol_type = other DNA
cctcagcctcccgagtagct

SEQ ID NO: 33366 - DNA, 20 bp, synthetic construct
  misc_feature 1..20: note = Description of Artificial Sequence: Synthetic oligonucleotide
  misc_feature 1..20: note = Target: SCN10A; (+) strand; PAM type: NRG; PAM sequence: CAG
  source 1..20: mol_type = other DNA
ctcccgagtagctgggacta

SEQ ID NO: 33367 - DNA, 20 bp, synthetic construct
  misc_feature 1..20: note = Description of Artificial Sequence: Synthetic oligonucleotide
  misc_feature 1..20: note = Target: SCN10A; (+) strand; PAM type: NRG; PAM sequence: AGG
  source 1..20: mol_type = other DNA
tcccgagtagctgggactac

SEQ ID NO: 33368 - DNA, 20 bp, synthetic construct
  misc_feature 1..20: note = Description of Artificial Sequence: Synthetic oligonucleotide
  misc_feature 1..20: note = Target: SCN10A; (+) strand; PAM type: NRG; PAM sequence: CGG
  source 1..20: mol_type = other DNA
caggcgcccgccaccgtgcc

SEQ ID NO: 33369 - DNA, 20 bp, synthetic construct
  misc_feature 1..20: note = Description of Artificial Sequence: Synthetic oligonucleotide
  misc_feature 1..20: note = Target: SCN10A; (+) strand; PAM type: NRG; PAM sequence: TAG
  source 1..20: mol_type = other DNA
cggctaattttttgtatttt

SEQ ID NO: 33370 - DNA, 20 bp, synthetic construct
  misc_feature 1..20: note = Description of Artificial Sequence: Synthetic oligonucleotide
  misc_feature 1..20: note = Target: SCN10A; (+) strand; PAM type: NRG; PAM sequence: TAG
  source 1..20: mol_type = other DNA
ctaattttttgtatttttag

SEQ ID NO: 33371 - DNA, 20 bp, synthetic construct
  misc_feature 1..20: note = Description of Artificial Sequence: Synthetic oligonucleotide
  misc_feature 1..20: note = Target: SCN10A; (+) strand; PAM type: NRG; PAM sequence: GAG
  source 1..20: mol_type = other DNA
aattttttgtatttttagta

SEQ ID NO: 33372 - DNA, 20 bp, synthetic construct
  misc_feature 1..20: note = Description of Artificial Sequence: Synthetic oligonucleotide
  misc_feature 1..20: note = Target: SCN10A; (+) strand; PAM type: NRG; PAM sequence: CGG
  source 1..20: mol_type = other DNA
ttttgtatttttagtagaga

SEQ ID NO: 33373 - DNA, 20 bp, synthetic construct
  misc_feature 1..20: note = Description of Artificial Sequence: Synthetic oligonucleotide
  misc_feature 1..20: note = Target: SCN10A; (+) strand; PAM type: NRG; PAM sequence: GGG
  source 1..20: mol_type = other DNA
tttgtatttttagtagagac

SEQ ID NO: 33374 - DNA, 20 bp, synthetic construct
  misc_feature 1..20: note = Description of Artificial Sequence: Synthetic oligonucleotide
  misc_feature 1..20: note = Target: SCN10A; (+) strand; PAM type: NRG; PAM sequence: GGG
  source 1..20: mol_type = other DNA
ttgtatttttagtagagacg

SEQ ID NO: 33375 - DNA, 20 bp, synthetic construct
  misc_feature 1..20: note = Description of Artificial Sequence: Synthetic oligonucleotide
  misc_feature 1..20: note = Target: SCN10A; (+) strand; PAM type: NRG; PAM sequence: TAG
  source 1..20: mol_type = other DNA
gagacggggtttcaccgtgt

SEQ ID NO: 33376 - DNA, 20 bp, synthetic construct
  misc_feature 1..20: note = Description of Artificial Sequence: Synthetic oligonucleotide
  misc_feature 1..20: note = Target: SCN10A; (+) strand; PAM type: NRG; PAM sequence: AAG
  source 1..20: mol_type = other DNA
ggggtttcaccgtgttagcc

SEQ ID NO: 33377 - DNA, 20 bp, synthetic construct
  misc_feature 1..20: note = Description of Artificial Sequence: Synthetic oligonucleotide
  misc_feature 1..20: note = Target: SCN10A; (+) strand; PAM type: NRG; PAM sequence: TGG
  source 1..20: mol_type = other DNA
tttcaccgtgttagccaaga

SEQ ID NO: 33378 - DNA, 20 bp, synthetic construct
  misc_feature 1..20: note = Description of Artificial Sequence: Synthetic oligonucleotide
  misc_feature 1..20: note = Target: SCN10A; (+) strand; PAM type: NRG; PAM sequence: CGG
  source 1..20: mol_type = other DNA
accttgtgatccgcctgcct

SEQ ID NO: 33379 - DNA, 20 bp, synthetic construct
  misc_feature 1..20: note = Description of Artificial Sequence: Synthetic oligonucleotide
  misc_feature 1..20: note = Target: SCN10A; (+) strand; PAM type: NRG; PAM sequence: AAG
  source 1..20: mol_type = other DNA
ccgcctgcctcggcctccca

SEQ ID NO: 33380 - DNA, 20 bp, synthetic construct
  misc_feature 1..20: note = Description of Artificial Sequence: Synthetic oligonucleotide
  misc_feature 1..20: note = Target: SCN10A; (+) strand; PAM type: NRG; PAM sequence: TGG
  source 1..20: mol_type = other DNA
gcctcggcctcccaaagtgc

SEQ ID NO: 33381 - DNA, 20 bp, synthetic construct
  misc_feature 1..20: note = Description of Artificial Sequence: Synthetic oligonucleotide
  misc_feature 1..20: note = Target: SCN10A; (+) strand; PAM type: NRG; PAM sequence: GGG
  source 1..20: mol_type = other DNA
cctcggcctcccaaagtgct

SEQ ID NO: 33382 - DNA, 20 bp, synthetic construct
  misc_feature 1..20: note = Description of Artificial Sequence: Synthetic oligonucleotide
  misc_feature 1..20: note = Target: SCN10A; (+) strand; PAM type: NRG; PAM sequence: CAG
  source 1..20: mol_type = other DNA
ctcccaaagtgctgggatta

SEQ ID NO: 33383 - DNA, 20 bp, synthetic construct
  misc_feature 1..20: note = Description of Artificial Sequence: Synthetic oligonucleotide
  misc_feature 1..20: note = Target: SCN10A; (+) strand; PAM type: NRG; PAM sequence: AGG
  source 1..20: mol_type = other DNA
tcccaaagtgctgggattac

SEQ ID NO: 33384 - DNA, 20 bp, synthetic construct
  misc_feature 1..20: note = Description of Artificial Sequence: Synthetic oligonucleotide
  misc_feature 1..20: note = Target: SCN10A; (+) strand; PAM type: NRG; PAM sequence: GAG
  source 1..20: mol_type = other DNA
agtgctgggattacaggcgt

SEQ ID NO: 33385 - DNA, 20 bp, synthetic construct
  misc_feature 1..20: note = Description of Artificial Sequence: Synthetic oligonucleotide
  misc_feature 1..20: note = Target: SCN10A; (+) strand; PAM type: NRG; PAM sequence: CAG
  source 1..20: mol_type = other DNA
caggcgtgagccaccgcgcc

SEQ ID NO: 33386 - DNA, 20 bp, synthetic construct
  misc_feature 1..20: note = Description of Artificial Sequence: Synthetic oligonucleotide
  misc_feature 1..20: note = Target: SCN10A; (+) strand; PAM type: NRG; PAM sequence: TAG
  source 1..20: mol_type = other DNA
cgcccagcctcgtattttat

SEQ ID NO: 33387 - DNA, 20 bp, synthetic construct
  misc_feature 1..20: note = Description of Artificial Sequence: Synthetic oligonucleotide
  misc_feature 1..20: note = Target: SCN10A; (+) strand; PAM type: NRG; PAM sequence: TGG
  source 1..20: mol_type = other DNA
ttttattagaaaactaactg

SEQ ID NO: 33388 - DNA, 20 bp, synthetic construct
  misc_feature 1..20: note = Description of Artificial Sequence: Synthetic oligonucleotide
  misc_feature 1..20: note = Target: SCN10A; (+) strand; PAM type: NRG; PAM sequence: GGG
  source 1..20: mol_type = other DNA
tttattagaaaactaactgt

SEQ ID NO: 33389 - DNA, 20 bp, synthetic construct
  misc_feature 1..20: note = Description of Artificial Sequence: Synthetic oligonucleotide
  misc_feature 1..20: note = Target: SCN10A; (+) strand; PAM type: NRG; PAM sequence: CAG
  source 1..20: mol_type = other DNA
aaaactaactgtgggcctgc

SEQ ID NO: 33390 - DNA, 20 bp, synthetic construct
  misc_feature 1..20: note = Description of Artificial Sequence: Synthetic oligonucleotide
  misc_feature 1..20: note = Target: SCN10A; (+) strand; PAM type: NRG; PAM sequence: AGG
  source 1..20: mol_type = other DNA
aaactaactgtgggcctgcc

SEQ ID NO: 33391 - DNA, 20 bp, synthetic construct
  misc_feature 1..20: note = Description of Artificial Sequence: Synthetic oligonucleotide
  misc_feature 1..20: note = Target: SCN10A; (+) strand; PAM type: NRG; PAM sequence: GGG
  source 1..20: mol_type = other DNA
aactaactgtgggcctgcca

SEQ ID NO: 33392 - DNA, 20 bp, synthetic construct
  misc_feature 1..20: note = Description of Artificial Sequence: Synthetic oligonucleotide
  misc_feature 1..20: note = Target: SCN10A; (+) strand; PAM type: NRG; PAM sequence: TGG
  source 1..20: mol_type = other DNA
actgtgggcctgccagggta

SEQ ID NO: 33393 - DNA, 20 bp, synthetic construct
  misc_feature 1..20: note = Description of Artificial Sequence: Synthetic oligonucleotide
  misc_feature 1..20: note = Target: SCN10A; (+) strand; PAM type: NRG; PAM sequence: GGG
  source 1..20: mol_type = other DNA
ctgtgggcctgccagggtat

SEQ ID NO: 33394 - DNA, 20 bp, synthetic construct
  misc_feature 1..20: note = Description of Artificial Sequence: Synthetic oligonucleotide
  misc_feature 1..20: note = Target: SCN10A; (+) strand; PAM type: NRG; PAM sequence: GGG
  source 1..20: mol_type = other DNA
tgtgggcctgccagggtatg

SEQ ID NO: 33395 - DNA, 20 bp, synthetic construct
  misc_feature 1..20: note = Description of Artificial Sequence: Synthetic oligonucleotide
  misc_feature 1..20: note = Target: SCN10A; (+) strand; PAM type: NRG; PAM sequence: GGG
  source 1..20: mol_type = other DNA
gtgggcctgccagggtatgg

SEQ ID NO: 33396 - DNA, 20 bp, synthetic construct
  misc_feature 1..20: note = Description of Artificial Sequence: Synthetic oligonucleotide
  misc_feature 1..20: note = Target: SCN10A; (+) strand; PAM type: NRG; PAM sequence: TAG
  source 1..20: mol_type = other DNA
gctctcttgacgattgtgca

SEQ ID NO: 33397 - DNA, 20 bp, synthetic construct
  misc_feature 1..20: note = Description of Artificial Sequence: Synthetic oligonucleotide
  misc_feature 1..20: note = Target: SCN10A; (+) strand; PAM type: NRG; PAM sequence: AGG
  source 1..20: mol_type = other DNA
ctctcttgacgattgtgcat

SEQ ID NO: 33398 - DNA, 20 bp, synthetic construct
  misc_feature 1..20: note = Description of Artificial Sequence: Synthetic oligonucleotide
  misc_feature 1..20: note = Target: SCN10A; (+) strand; PAM type: NRG; PAM sequence: TAG
  source 1..20: mol_type = other DNA
aggtaccttatattgaccat

SEQ ID NO: 33399 - DNA, 20 bp, synthetic construct
  misc_feature 1..20: note = Description of Artificial Sequence: Synthetic oligonucleotide
  misc_feature 1..20: note = Target: SCN10A; (+) strand; PAM type: NRG; PAM sequence: TAG
  source 1..20: mol_type = other DNA
ccttatattgaccattagct

SEQ ID NO: 33400 - DNA, 20 bp, synthetic construct
  misc_feature 1..20: note = Description of Artificial Sequence: Synthetic oligonucleotide
  misc_feature 1..20: note = Target: SCN10A; (+) strand; PAM type: NRG; PAM sequence: AGG
  source 1..20: mol_type = other DNA
cttatattgaccattagctt

SEQ ID NO: 33401 - DNA, 20 bp, synthetic construct
  misc_feature 1..20: note = Description of Artificial Sequence: Synthetic oligonucleotide
  misc_feature 1..20: note = Target: SCN10A; (+) strand; PAM type: NRG; PAM sequence: GGG
  source 1..20: mol_type = other DNA
ttatattgaccattagctta

SEQ ID NO: 33402 - DNA, 20 bp, synthetic construct
  misc_feature 1..20: note = Description of Artificial Sequence: Synthetic oligonucleotide
  misc_feature 1..20: note = Target: SCN10A; (+) strand; PAM type: NRG; PAM sequence: GGG
  source 1..20: mol_type = other DNA
tatattgaccattagcttag

SEQ ID NO: 33403 - DNA, 20 bp, synthetic construct
  misc_feature 1..20: note = Description of Artificial Sequence: Synthetic oligonucleotide
  misc_feature 1..20: note = Target: SCN10A; (+) strand; PAM type: NRG; PAM sequence: TAG
  source 1..20: mol_type = other DNA
tacatcttgacatcaatttc

SEQ ID NO: 33404 - DNA, 20 bp, synthetic construct
  misc_feature 1..20: note = Description of Artificial Sequence: Synthetic oligonucleotide
  misc_feature 1..20: note = Target: SCN10A; (+) strand; PAM type: NRG; PAM sequence: TAG
  source 1..20: mol_type = other DNA
gacatcaatttctagatacc

SEQ ID NO: 33405 - DNA, 20 bp, synthetic construct
  misc_feature 1..20: note = Description of Artificial Sequence: Synthetic oligonucleotide
  misc_feature 1..20: note = Target: SCN10A; (+) strand; PAM type: NRG; PAM sequence: GAG
  source 1..20: mol_type = other DNA
catcaatttctagataccta

SEQ ID NO: 33406 - DNA, 20 bp, synthetic construct
  misc_feature 1..20: note = Description of Artificial Sequence: Synthetic oligonucleotide
  misc_feature 1..20: note = Target: SCN10A; (+) strand; PAM type: NRG; PAM sequence: AAG
  source 1..20: mol_type = other DNA
tgatttaattctgaccttgt

SEQ ID NO: 33407 - DNA, 20 bp, synthetic construct
  misc_feature 1..20: note = Description of Artificial Sequence: Synthetic oligonucleotide
  misc_feature 1..20: note = Target: SCN10A; (+) strand; PAM type: NRG; PAM sequence: AAG
  source 1..20: mol_type = other DNA
tctgaccttgtaagattttc

SEQ ID NO: 33408 - DNA, 20 bp, synthetic construct
  misc_feature 1..20: note = Description of Artificial Sequence: Synthetic oligonucleotide
  misc_feature 1..20: note = Target: SCN10A; (+) strand; PAM type: NRG; PAM sequence: TGG
  source 1..20: mol_type = other DNA
cttgtaagattttcaagtta

SEQ ID NO: 33409 - DNA, 20 bp, synthetic construct
  misc_feature 1..20: note = Description of Artificial Sequence: Synthetic oligonucleotide
  misc_feature 1..20: note = Target: SCN10A; (+) strand; PAM type: NRG; PAM sequence: AAG
  source 1..20: mol_type = other DNA
agattttcaagttatggata

SEQ ID NO: 33410 - DNA, 20 bp, synthetic construct
  misc_feature 1..20: note = Description of Artificial Sequence: Synthetic oligonucleotide
  misc_feature 1..20: note = Target: SCN10A; (+) strand; PAM type: NRG; PAM sequence: GAG
  source 1..20: mol_type = other DNA
attttcaagttatggataaa

SEQ ID NO: 33411 - DNA, 20 bp, synthetic construct
  misc_feature 1..20: note = Description of Artificial Sequence: Synthetic oligonucleotide
  misc_feature 1..20: note = Target: SCN10A; (+) strand; PAM type: NRG; PAM sequence: CAG
  source 1..20: mol_type = other DNA
ttatggataaagagtcctac

SEQ ID NO: 33412 - DNA, 20 bp, synthetic construct
  misc_feature 1..20: note = Description of Artificial Sequence: Synthetic oligonucleotide
  misc_feature 1..20: note = Target: SCN10A; (+) strand; PAM type: NRG; PAM sequence: AGG
  source 1..20: mol_type = other DNA
tatggataaagagtcctacc

SEQ ID NO: 33413 - DNA, 20 bp, synthetic construct
  misc_feature 1..20: note = Description of Artificial Sequence: Synthetic oligonucleotide
  misc_feature 1..20: note = Target: SCN10A; (+) strand; PAM type: NRG; PAM sequence: TGG
  source 1..20: mol_type = other DNA
tactctacccttctcctccc

SEQ ID NO: 33414 - DNA, 20 bp, synthetic construct
  misc_feature 1..20: note = Description of Artificial Sequence: Synthetic oligonucleotide
  misc_feature 1..20: note = Target: SCN10A; (+) strand; PAM type: NRG; PAM sequence: GGG
  source 1..20: mol_type = other DNA
actctacccttctcctccct

SEQ ID NO: 33415 - DNA, 20 bp, synthetic construct
  misc_feature 1..20: note = Description of Artificial Sequence: Synthetic oligonucleotide
  misc_feature 1..20: note = Target: SCN10A; (+) strand; PAM type: NRG; PAM sequence: TGG
  source 1..20: mol_type = other DNA
tacccttctcctccctggga

SEQ ID NO: 33416 - DNA, 20 bp, synthetic construct
  misc_feature 1..20: note = Description of Artificial Sequence: Synthetic oligonucleotide
  misc_feature 1..20: note = Target: SCN10A; (+) strand; PAM type: NRG; PAM sequence: CAG
  source 1..20: mol_type = other DNA
tctcctccctgggatggtga

SEQ ID NO: 33417 - DNA, 20 bp, synthetic construct
  misc_feature 1..20: note = Description of Artificial Sequence: Synthetic oligonucleotide
  misc_feature 1..20: note = Target: SCN10A; (+) strand; PAM type: NRG; PAM sequence: CAG
  source 1..20: mol_type = other DNA
tgggatggtgacagtaccat

SEQ ID NO: 33418 - DNA, 20 bp, synthetic construct
  misc_feature 1..20: note = Description of Artificial Sequence: Synthetic oligonucleotide
  misc_feature 1..20: note = Target: SCN10A; (+) strand; PAM type: NRG; PAM sequence: TAG
  source 1..20: mol_type = other DNA
tggtgacagtaccatcagct

SEQ ID NO: 33419 - DNA, 20 bp, synthetic construct
  misc_feature 1..20: note = Description of Artificial Sequence: Synthetic oligonucleotide
  misc_feature 1..20: note = Target: SCN10A; (+) strand; PAM type: NRG; PAM sequence: AGG
  source 1..20: mol_type = other DNA
ggtgacagtaccatcagctt

SEQ ID NO: 33420 - DNA, 20 bp, synthetic construct
  misc_feature 1..20: note = Description of Artificial Sequence: Synthetic oligonucleotide
  misc_feature 1..20: note = Target: SCN10A; (+) strand; PAM type: NRG; PAM sequence: CAG
  source 1..20: mol_type = other DNA
gacagtaccatcagcttagg

SEQ ID NO: 33421 - DNA, 20 bp, synthetic construct
  misc_feature 1..20: note = Description of Artificial Sequence: Synthetic oligonucleotide
  misc_feature 1..20: note = Target: SCN10A; (+) strand; PAM type: NRG; PAM sequence: CAG
  source 1..20: mol_type = other DNA
cttaggcagatgccatcaac

SEQ ID NO: 33422 - DNA, 20 bp, synthetic construct
  misc_feature 1..20: note = Description of Artificial Sequence: Synthetic oligonucleotide
  misc_feature 1..20: note = Target: SCN10A; (+) strand; PAM type: NRG; PAM sequence: TGG
  source 1..20: mol_type = other DNA
tgccatcaaccagcgtttca

SEQ ID NO: 33423 - DNA, 20 bp, synthetic construct
  misc_feature 1..20: note = Description of Artificial Sequence: Synthetic oligonucleotide
  misc_feature 1..20: note = Target: SCN10A; (+) strand; PAM type: NRG; PAM sequence: CAG
  source 1..20: mol_type = other DNA
tcaaccagcgtttcatggca

SEQ ID NO: 33424 - DNA, 20 bp, synthetic construct
  misc_feature 1..20: note = Description of Artificial Sequence: Synthetic oligonucleotide
  misc_feature 1..20: note = Target: SCN10A; (+) strand; PAM type: NRG; PAM sequence: CAG
  source 1..20: mol_type = other DNA
ttcatggcacagctgtgtct

SEQ ID NO: 33425 - DNA, 20 bp, synthetic construct
  misc_feature 1..20: note = Description of Artificial Sequence: Synthetic oligonucleotide
  misc_feature 1..20: note = Target: SCN10A; (+) strand; PAM type: NRG; PAM sequence: AGG
  source 1..20: mol_type = other DNA
tcatggcacagctgtgtctc

SEQ ID NO: 33426 - DNA, 20 bp, synthetic construct
  misc_feature 1..20: note = Description of Artificial Sequence: Synthetic oligonucleotide
  misc_feature 1..20: note = Target: SCN10A; (+) strand; PAM type: NRG; PAM sequence: TGG
  source 1..20: mol_type = other DNA
gtctcaggacatgctttatt

SEQ ID NO: 33427 - DNA, 20 bp, synthetic construct
  misc_feature 1..20: note = Description of Artificial Sequence: Synthetic oligonucleotide
  misc_feature 1..20: note = Target: SCN10A; (+) strand; PAM type: NRG; PAM sequence: TAG
  source 1..20: mol_type = other DNA
gacatgctttatttggtctt

SEQ ID NO: 33428 - DNA, 20 bp, synthetic construct
  misc_feature 1..20: note = Description of Artificial Sequence: Synthetic oligonucleotide
  misc_feature 1..20: note = Target: SCN10A; (+) strand; PAM type: NRG; PAM sequence: GAG
  source 1..20: mol_type = other DNA
catgctttatttggtcttta

SEQ ID NO: 33429 - DNA, 20 bp, synthetic construct
  misc_feature 1..20: note = Description of Artificial Sequence: Synthetic oligonucleotide
  misc_feature 1..20: note = Target: SCN10A; (+) strand; PAM type: NRG; PAM sequence: TGG
  source 1..20: mol_type = other DNA
tttagagtgtttttaaaaac

SEQ ID NO: 33430 - DNA, 20 bp, synthetic construct
  misc_feature 1..20: note = Description of Artificial Sequence: Synthetic oligonucleotide
  misc_feature 1..20: note = Target: SCN10A; (+) strand; PAM type: NRG; PAM sequence: TAG
  source 1..20: mol_type = other DNA
agtgtttttaaaaactggat

SEQ ID NO: 33431 - DNA, 20 bp, synthetic construct
  misc_feature 1..20: note = Description of Artificial Sequence: Synthetic oligonucleotide
  misc_feature 1..20: note = Target: SCN10A; (+) strand; PAM type: NRG; PAM sequence: TAG
  source 1..20: mol_type = other DNA
gtttttaaaaactggattag

SEQ ID NO: 33432 - DNA, 20 bp, synthetic construct
  misc_feature 1..20: note = Description of Artificial Sequence: Synthetic oligonucleotide
  misc_feature 1..20: note = Target: SCN10A; (+) strand; PAM type: NRG; PAM sequence: AAG
  source 1..20: mol_type = other DNA
tggattagtagccaatatta

SEQ ID NO: 33433 - DNA, 20 bp, synthetic construct
  misc_feature 1..20: note = Description of Artificial Sequence: Synthetic oligonucleotide
  misc_feature 1..20: note = Target: SCN10A; (+) strand; PAM type: NRG; PAM sequence: TGG
  source 1..20: mol_type = other DNA
aagacatttgcacaaaaatc

SEQ ID NO: 33434 - DNA, 20 bp, synthetic construct
  misc_feature 1..20: note = Description of Artificial Sequence: Synthetic oligonucleotide
  misc_feature 1..20: note = Target: SCN10A; (+) strand; PAM type: NRG; PAM sequence: TGG
  source 1..20: mol_type = other DNA
atctggatttctgacttttt

SEQ ID NO: 33435 - DNA, 20 bp, synthetic construct
  misc_feature 1..20: note = Description of Artificial Sequence: Synthetic oligonucleotide
  misc_feature 1..20: note = Target: SCN10A; (+) strand; PAM type: NRG; PAM sequence: TAG
  source 1..20: mol_type = other DNA
ttctgacttttttggaaaat

SEQ ID NO: 33436 - DNA, 20 bp, synthetic construct
  misc_feature 1..20: note = Description of Artificial Sequence: Synthetic oligonucleotide
  misc_feature 1..20: note = Target: SCN10A; (+) strand; PAM type: NRG; PAM sequence: TGG
  source 1..20: mol_type = other DNA
attagtaactctgacaataa

SEQ ID NO: 33437 - DNA, 20 bp, synthetic construct
  misc_feature 1..20: note = Description of Artificial Sequence: Synthetic oligonucleotide
  misc_feature 1..20: note = Target: SCN10A; (+) strand; PAM type: NRG; PAM sequence: CAG
  source 1..20: mol_type = other DNA
gtaactctgacaataatgga

SEQ ID NO: 33438 - DNA, 20 bp, synthetic construct
  misc_feature 1..20: note = Description of Artificial Sequence: Synthetic oligonucleotide
  misc_feature 1..20: note = Target: SCN10A; (+) strand; PAM type: NRG; PAM sequence: AGG
  source 1..20: mol_type = other DNA
taactctgacaataatggac

SEQ ID NO: 33439 - DNA, 20 bp, synthetic construct
  misc_feature 1..20: note = Description of Artificial Sequence: Synthetic oligonucleotide
  misc_feature 1..20: note = Target: SCN10A; (+) strand; PAM type: NRG; PAM sequence: TAG
  source 1..20: mol_type = other DNA
tgacaataatggacaggcca

SEQ ID NO: 33440 - DNA, 20 bp, synthetic construct
  misc_feature 1..20: note = Description of Artificial Sequence: Synthetic oligonucleotide
  misc_feature 1..20: note = Target: SCN10A; (+) strand; PAM type: NRG; PAM sequence: GAG
  source 1..20: mol_type = other DNA
ctgtgtctcctttctttttt

SEQ ID NO: 33441 - DNA, 20 bp, synthetic construct
  misc_feature 1..20: note = Description of Artificial Sequence: Synthetic oligonucleotide
  misc_feature 1..20: note = Target: SCN10A; (+) strand; PAM type: NRG; PAM sequence: CAG
  source 1..20: mol_type = other DNA
gtctcctttcttttttgaga

SEQ ID NO: 33442 - DNA, 20 bp, synthetic construct
  misc_feature 1..20: note = Description of Artificial Sequence: Synthetic oligonucleotide
  misc_feature 1..20: note = Target: SCN10A; (+) strand; PAM type: NRG; PAM sequence: AGG
  source 1..20: mol_type = other DNA
tctcctttcttttttgagac

SEQ ID NO: 33443 - DNA, 20 bp, synthetic construct
  misc_feature 1..20: note = Description of Artificial Sequence: Synthetic oligonucleotide
  misc_feature 1..20: note = Target: SCN10A; (+) strand; PAM type: NRG; PAM sequence: CAG
  source 1..20: mol_type = other DNA
caggttcttactctgtctcc

SEQ ID NO: 33444 - DNA, 20 bp, synthetic construct
  misc_feature 1..20: note = Description of Artificial Sequence: Synthetic oligonucleotide
  misc_feature 1..20: note = Target: SCN10A; (+) strand; PAM type: NRG; PAM sequence: AGG
  source 1..20: mol_type = other DNA
aggttcttactctgtctccc

SEQ ID NO: 33445 - DNA, 20 bp, synthetic construct
  misc_feature 1..20: note = Description of Artificial Sequence: Synthetic oligonucleotide
  misc_feature 1..20: note = Target: SCN10A; (+) strand; PAM type: NRG; PAM sequence: TGG
  source 1..20: mol_type = other DNA
tcttactctgtctcccaggc

SEQ ID NO: 33446 - DNA, 20 bp, synthetic construct
  misc_feature 1..20: note = Description of Artificial Sequence: Synthetic oligonucleotide
  misc_feature 1..20: note = Target: SCN10A; (+) strand; PAM type: NRG; PAM sequence: GAG
  source 1..20: mol_type = other DNA
ttactctgtctcccaggctg

SEQ ID NO: 33447 - DNA, 20 bp, synthetic construct
  misc_feature 1..20: note = Description of Artificial Sequence: Synthetic oligonucleotide
  misc_feature 1..20: note = Target: SCN10A; (+) strand; PAM type: NRG; PAM sequence: CAG
  source 1..20: mol_type = other DNA
ctgtctcccaggctggagtg

SEQ ID NO: 33448 - DNA, 20 bp, synthetic construct
  misc_feature 1..20: note = Description of Artificial Sequence: Synthetic oligonucleotide
  misc_feature 1..20: note = Target: SCN10A; (+) strand; PAM type: NRG; PAM sequence: TGG
  source 1..20: mol_type = other DNA
tctcccaggctggagtgcag

SEQ ID NO: 33449 - DNA, 20 bp, synthetic construct
  misc_feature 1..20: note = Description of Artificial Sequence: Synthetic oligonucleotide
  misc_feature 1..20: note = Target: SCN10A; (+) strand; PAM type: NRG; PAM sequence: TGG
  source 1..20: mol_type = other DNA
ggagtgcagtggcacgatca

SEQ ID NO: 33450 - DNA, 20 bp, synthetic construct
  misc_feature 1..20: note = Description of Artificial Sequence: Synthetic oligonucleotide
  misc_feature 1..20: note = Target: SCN10A; (+) strand; PAM type: NRG; PAM sequence: CAG
  source 1..20: mol_type = other DNA
ggcacgatcatggtgcactg

SEQ ID NO: 33451 - DNA, 20 bp, synthetic construct
  misc_feature 1..20: note = Description of Artificial Sequence: Synthetic oligonucleotide
  misc_feature 1..20: note = Target: SCN10A; (+) strand; PAM type: NRG; PAM sequence: TGG
  source 1..20: mol_type = other DNA
cactgcagcctccacctccc

SEQ ID NO: 33452 - DNA, 20 bp, synthetic construct
  misc_feature 1..20: note = Description of Artificial Sequence: Synthetic oligonucleotide
  misc_feature 1..20: note = Target: SCN10A; (+) strand; PAM type: NRG; PAM sequence: CAG
  source 1..20: mol_type = other DNA
agcctccacctccctggtct

SEQ ID NO: 33453 - DNA, 20 bp, synthetic construct
  misc_feature 1..20: note = Description of Artificial Sequence: Synthetic oligonucleotide
  misc_feature 1..20: note = Target: SCN10A; (+) strand; PAM type: NRG; PAM sequence: AGG
  source 1..20: mol_type = other DNA
gcctccacctccctggtctc

SEQ ID NO: 33454 - DNA, 20 bp, synthetic construct
  misc_feature 1..20: note = Description of Artificial Sequence: Synthetic oligonucleotide
  misc_feature 1..20: note = Target: SCN10A; (+) strand; PAM type: NRG; PAM sequence: CAG
  source 1..20: mol_type = other DNA
ctcaggtgatcctcccacct

SEQ ID NO: 33455 - DNA, 20 bp, synthetic construct
  misc_feature 1..20: note = Description of Artificial Sequence: Synthetic oligonucleotide
  misc_feature 1..20: note = Target: SCN10A; (+) strand; PAM type: NRG; PAM sequence: GAG
  source 1..20: mol_type = other DNA
tcctcccacctcagtcttct

SEQ ID NO: 33456 - DNA, 20 bp, synthetic construct
  misc_feature 1..20: note = Description of Artificial Sequence: Synthetic oligonucleotide
  misc_feature 1..20: note = Target: SCN10A; (+) strand; PAM type: NRG; PAM sequence: TAG
  source 1..20: mol_type = other DNA
tcccacctcagtcttctgag

SEQ ID NO: 33457 - DNA, 20 bp, synthetic construct
  misc_feature 1..20: note = Description of Artificial Sequence: Synthetic oligonucleotide
  misc_feature 1..20: note = Target: SCN10A; (+) strand; PAM type: NRG; PAM sequence: TAG
  source 1..20: mol_type = other DNA
acctcagtcttctgagtagc

SEQ ID NO: 33458 - DNA, 20 bp, synthetic construct
  misc_feature 1..20: note = Description of Artificial Sequence: Synthetic oligonucleotide
  misc_feature 1..20: note = Target: SCN10A; (+) strand; PAM type: NRG; PAM sequence: AGG
  source 1..20: mol_type = other DNA
cctcagtcttctgagtagct

SEQ ID NO: 33459 - DNA, 20 bp, synthetic construct
  misc_feature 1..20: note = Description of Artificial Sequence: Synthetic oligonucleotide
  misc_feature 1..20: note = Target: SCN10A; (+) strand; PAM type: NRG; PAM sequence: CAG
  source 1..20: mol_type = other DNA
cttctgagtagctaggataa

SEQ ID NO: 33460 - DNA, 20 bp, synthetic construct
  misc_feature 1..20: note = Description of Artificial Sequence: Synthetic oligonucleotide
  misc_feature 1..20: note = Target: SCN10A; (+) strand; PAM type: NRG; PAM sequence: TGG
  source 1..20: mol_type = other DNA
cagatgtgcaccaccatgcc

SEQ ID NO: 33461 - DNA, 20 bp, synthetic construct
  misc_feature 1..20: note = Description of Artificial Sequence: Synthetic oligonucleotide
  misc_feature 1..20: note = Target: SCN10A; (+) strand; PAM type: NRG; PAM sequence: TAG
  source 1..20: mol_type = other DNA
gctaattttttcattttttg

SEQ ID NO: 33462 - DNA, 20 bp, synthetic construct
  misc_feature 1..20: note = Description of Artificial Sequence: Synthetic oligonucleotide
  misc_feature 1..20: note = Target: SCN10A; (+) strand; PAM type: NRG; PAM sequence: GAG
  source 1..20: mol_type = other DNA
taattttttcattttttgta

SEQ ID NO: 33463 - DNA, 20 bp, synthetic construct
  misc_feature 1..20: note = Description of Artificial Sequence: Synthetic oligonucleotide
  misc_feature 1..20: note = Target: SCN10A; (+) strand; PAM type: NRG; PAM sequence: CGG
  source 1..20: mol_type = other DNA
tttttcattttttgtagaga

SEQ ID NO: 33464 - DNA, 20 bp, synthetic construct
  misc_feature 1..20: note = Description of Artificial Sequence: Synthetic oligonucleotide
  misc_feature 1..20: note = Target: SCN10A; (+) strand; PAM type: NRG; PAM sequence: GGG
  source 1..20: mol_type = other DNA
ttttcattttttgtagagac

SEQ ID NO: 33465 - DNA, 20 bp, synthetic construct
  misc_feature 1..20: note = Description of Artificial Sequence: Synthetic oligonucleotide
  misc_feature 1..20: note = Target: SCN10A; (+) strand; PAM type: NRG; PAM sequence: GGG
  source 1..20: mol_type = other DNA
tttcattttttgtagagacg

SEQ ID NO: 33466 - DNA, 20 bp, synthetic construct
  misc_feature 1..20: note = Description of Artificial Sequence: Synthetic oligonucleotide
  misc_feature 1..20: note = Target: SCN10A; (+) strand; PAM type: NRG; PAM sequence: TGG
  source 1..20: mol_type = other DNA
ccatgttgcccttgaactcc

SEQ ID NO: 33467 - DNA, 20 bp, synthetic construct
  misc_feature 1..20: note = Description of Artificial Sequence: Synthetic oligonucleotide
  misc_feature 1..20: note = Target: SCN10A; (+) strand; PAM type: NRG; PAM sequence: GGG
  source 1..20: mol_type = other DNA
catgttgcccttgaactcct

SEQ ID NO: 33468 - DNA, 20 bp, synthetic construct
  misc_feature 1..20: note = Description of Artificial Sequence: Synthetic oligonucleotide
  misc_feature 1..20: note = Target: SCN10A; (+) strand; PAM type: NRG; PAM sequence: AAG
  source 1..20: mol_type = other DNA
gcccttgaactcctgggctc

SEQ ID NO: 33469 - DNA, 20 bp, synthetic construct
  misc_feature 1..20: note = Description of Artificial Sequence: Synthetic oligonucleotide
  misc_feature 1..20: note = Target: SCN10A; (+) strand; PAM type: NRG; PAM sequence: CGG
  source 1..20: mol_type = other DNA
ctcaagcgatctgcctgcct

SEQ ID NO: 33470 - DNA, 20 bp, synthetic construct
  misc_feature 1..20: note = Description of Artificial Sequence: Synthetic oligonucleotide
  misc_feature 1..20: note = Target: SCN10A; (+) strand; PAM type: NRG; PAM sequence: AAG
  source 1..20: mol_type = other DNA
ctgcctgcctcggcctccca

SEQ ID NO: 33471 - DNA, 20 bp, synthetic construct
  misc_feature 1..20: note = Description of Artificial Sequence: Synthetic oligonucleotide
  misc_feature 1..20: note = Target: SCN10A; (+) strand; PAM type: NRG; PAM sequence: TAG
  source 1..20: mol_type = other DNA
gcctcggcctcccaaagtac

SEQ ID NO: 33472 - DNA, 20 bp, synthetic construct
  misc_feature 1..20: note = Description of Artificial Sequence: Synthetic oligonucleotide
  misc_feature 1..20: note = Target: SCN10A; (+) strand; PAM type: NRG; PAM sequence: AGG
  source 1..20: mol_type = other DNA
cctcggcctcccaaagtact

SEQ ID NO: 33473 - DNA, 20 bp, synthetic construct
  misc_feature 1..20: note = Description of Artificial Sequence: Synthetic oligonucleotide
  misc_feature 1..20: note = Target: SCN10A; (+) strand; PAM type: NRG; PAM sequence: CAG
  source 1..20: mol_type = other DNA
ctcccaaagtactaggatta

SEQ ID NO: 33474 - DNA, 20 bp, synthetic construct
  misc_feature 1..20: note = Description of Artificial Sequence: Synthetic oligonucleotide
  misc_feature 1..20: note = Target: SCN10A; (+) strand; PAM type: NRG; PAM sequence: AGG
  source 1..20: mol_type = other DNA
tcccaaagtactaggattac

SEQ ID NO: 33475 - DNA, 20 bp, synthetic construct
  misc_feature 1..20: note = Description of Artificial Sequence: Synthetic oligonucleotide
  misc_feature 1..20: note = Target: SCN10A; (+) strand; PAM type: NRG; PAM sequence: GAG
  source 1..20: mol_type = other DNA
agtactaggattacaggtgt

SEQ ID NO: 33476 - DNA, 20 bp, synthetic construct
  misc_feature 1..20: note = Description of Artificial Sequence: Synthetic oligonucleotide
  misc_feature 1..20: note = Target: SCN10A; (+) strand; PAM type: NRG; PAM sequence: TGG
  source 1..20: mol_type = other DNA
caggtgtgagccactgcacc

SEQ ID NO: 33477 - DNA, 20 bp, synthetic construct
  misc_feature 1..20: note = Description of Artificial Sequence: Synthetic oligonucleotide
  misc_feature 1..20: note = Target: SCN10A; (+) strand; PAM type: NRG; PAM sequence: GAG
  source 1..20: mol_type = other DNA
tgagccactgcacctggcct

SEQ ID NO: 33478 - DNA, 20 bp, synthetic construct
  misc_feature 1..20: note = Description of Artificial Sequence: Synthetic oligonucleotide
  misc_feature 1..20: note = Target: SCN10A; (+) strand; PAM type: NRG; PAM sequence: TGG
  source 1..20: mol_type = other DNA
ccactgcacctggcctgaga

SEQ ID NO: 33479 - DNA, 20 bp, synthetic construct
  misc_feature 1..20: note = Description of Artificial Sequence: Synthetic oligonucleotide
  misc_feature 1..20: note = Target: SCN10A; (+) strand; PAM type: NRG; PAM sequence: CAG
  source 1..20: mol_type = other DNA
ttctatgtaaacatccctcc

SEQ ID NO: 33480 - DNA, 20 bp, synthetic construct
  misc_feature 1..20: note = Description of Artificial Sequence: Synthetic oligonucleotide
  misc_feature 1..20: note = Target: SCN10A; (+) strand; PAM type: NRG; PAM sequence: AGG
  source 1..20: mol_type = other DNA
tctatgtaaacatccctccc

SEQ ID NO: 33481 - DNA, 20 bp, synthetic construct
  misc_feature 1..20: note = Description of Artificial Sequence: Synthetic oligonucleotide
  misc_feature 1..20: note = Target: SCN10A; (+) strand; PAM type: NRG; PAM sequence: GAG
  source 1..20: mol_type = other DNA
tatgtaaacatccctcccag

SEQ ID NO: 33482 - DNA, 20 bp, synthetic construct
  misc_feature 1..20: note = Description of Artificial Sequence: Synthetic oligonucleotide
  misc_feature 1..20: note = Target: SCN10A; (+) strand; PAM type: NRG; PAM sequence: TGG
  source 1..20: mol_type = other DNA
ccaggagttgtgcactgctt

SEQ ID NO: 33483 - DNA, 20 bp, synthetic construct
  misc_feature 1..20: note = Description of Artificial Sequence: Synthetic oligonucleotide
  misc_feature 1..20: note = Target: SCN10A; (+) strand; PAM type: NRG; PAM sequence: GGG
  source 1..20: mol_type = other DNA
caggagttgtgcactgcttt

SEQ ID NO: 33484 - DNA, 20 bp, synthetic construct
  misc_feature 1..20: note = Description of Artificial Sequence: Synthetic oligonucleotide
  misc_feature 1..20: note = Target: SCN10A; (+) strand; PAM type: NRG; PAM sequence: TAG
  source 1..20: mol_type = other DNA
tgcactgctttgggtctgcc

SEQ ID NO: 33485 - DNA, 20 bp, synthetic construct
  misc_feature 1..20: note = Description of Artificial Sequence: Synthetic oligonucleotide
  misc_feature 1..20: note = Target: SCN10A; (+) strand; PAM type: NRG; PAM sequence: AGG
  source 1..20: mol_type = other DNA
gcactgctttgggtctgcct

SEQ ID NO: 33486 - DNA, 20 bp, synthetic construct
  misc_feature 1..20: note = Description of Artificial Sequence: Synthetic oligonucleotide
  misc_feature 1..20: note = Target: SCN10A; (+) strand; PAM type: NRG; PAM sequence: TGG
  source 1..20: mol_type = other DNA
ttgggtctgcctaggtgaaa

SEQ ID NO: 33487 - DNA, 20 bp, synthetic construct
  misc_feature 1..20: note = Description of Artificial Sequence: Synthetic oligonucleotide
  misc_feature 1..20: note = Target: SCN10A; (+) strand; PAM type: NRG; PAM sequence: GAG
  source 1..20: mol_type = other DNA
gggtctgcctaggtgaaatg

SEQ ID NO: 33488 - DNA, 20 bp, synthetic construct
  misc_feature 1..20: note = Description of Artificial Sequence: Synthetic oligonucleotide
  misc_feature 1..20: note = Target: SCN10A; (+) strand; PAM type: NRG; PAM sequence: GAG
  source 1..20: mol_type = other DNA
tcatctttgcctgtctacct

SEQ ID NO: 33489 - DNA, 20 bp, synthetic construct
  misc_feature 1..20: note = Description of Artificial Sequence: Synthetic oligonucleotide
  misc_feature 1..20: note = Target: SCN10A; (+) strand; PAM type: NRG; PAM sequence: AGG
  source 1..20: mol_type = other DNA
catctttgcctgtctacctg

SEQ ID NO: 33490 - DNA, 20 bp, synthetic construct
  misc_feature 1..20: note = Description of Artificial Sequence: Synthetic oligonucleotide
  misc_feature 1..20: note = Target: SCN10A; (+) strand; PAM type: NRG; PAM sequence: CAG
  source 1..20: mol_type = other DNA
gtctacctgaggcaaatatc

SEQ ID NO: 33491 - DNA, 20 bp, synthetic construct
  misc_feature 1..20: note = Description of Artificial Sequence: Synthetic oligonucleotide
  misc_feature 1..20: note = Target: SCN10A; (+) strand; PAM type: NRG; PAM sequence: TGG
  source 1..20: mol_type = other DNA
cagtgcccacatctcttcca

SEQ ID NO: 33492 - DNA, 20 bp, synthetic construct
  misc_feature 1..20: note = Description of Artificial Sequence: Synthetic oligonucleotide
  misc_feature 1..20: note = Target: SCN10A; (+) strand; PAM type: NRG; PAM sequence: TGG
  source 1..20: mol_type = other DNA
gcccacatctcttccatggc

SEQ ID NO: 33493 - DNA, 20 bp, synthetic construct
  misc_feature 1..20: note = Description of Artificial Sequence: Synthetic oligonucleotide
  misc_feature 1..20: note = Target: SCN10A; (+) strand; PAM type: NRG; PAM sequence: TGG
  source 1..20: mol_type = other DNA
tggctctatgtcactgcaca

SEQ ID NO: 33494 - DNA, 20 bp, synthetic construct
  misc_feature 1..20: note = Description of Artificial Sequence: Synthetic oligonucleotide
  misc_feature 1..20: note = Target: SCN10A; (+) strand; PAM type: NRG; PAM sequence: GGG
  source 1..20: mol_type = other DNA
ggctctatgtcactgcacat

SEQ ID NO: 33495 - DNA, 20 bp, synthetic construct
  misc_feature 1..20: note = Description of Artificial Sequence: Synthetic oligonucleotide
  misc_feature 1..20: note = Target: SCN10A; (+) strand; PAM type: NRG; PAM sequence: GAG
  source 1..20: mol_type = other DNA
gtcactgcacatgggcattt

SEQ ID NO: 33496 - DNA, 20 bp, synthetic construct
  misc_feature 1..20: note = Description of Artificial Sequence: Synthetic oligonucleotide
  misc_feature 1..20: note = Target: SCN10A; (+) strand; PAM type: NRG; PAM sequence: CAG
  source 1..20: mol_type = other DNA
tgagtttgccacccctaatc

SEQ ID NO: 33497 - DNA, 20 bp, synthetic construct
  misc_feature 1..20: note = Description of Artificial Sequence: Synthetic oligonucleotide
  misc_feature 1..20: note = Target: SCN10A; (+) strand; PAM type: NRG; PAM sequence: AGG
  source 1..20: mol_type = other DNA
gagtttgccacccctaatcc

SEQ ID NO: 33498 - DNA, 20 bp, synthetic construct
  misc_feature 1..20: note = Description of Artificial Sequence: Synthetic oligonucleotide
  misc_feature 1..20: note = Target: SCN10A; (+) strand; PAM type: NRG; PAM sequence: AAG
  source 1..20: mol_type = other DNA
acccctaatccaggtacgcc

SEQ ID NO: 33499 - DNA, 20 bp, synthetic construct
  misc_feature 1..20: note = Description of Artificial Sequence: Synthetic oligonucleotide
  misc_feature 1..20: note = Target: SCN10A; (+) strand; PAM type: NRG; PAM sequence: CAG
  source 1..20: mol_type = other DNA
taatccaggtacgccaagtt

SEQ ID NO: 33500 - DNA, 20 bp, synthetic construct
  misc_feature 1..20: note = Description of Artificial Sequence: Synthetic oligonucleotide
  misc_feature 1..20: note = Target: SCN10A; (+) strand; PAM type: NRG; PAM sequence: AGG
  source 1..20: mol_type = other DNA
aatccaggtacgccaagttc

SEQ ID NO: 33501 - DNA, 20 bp, synthetic construct
  misc_feature 1..20: note = Description of Artificial Sequence: Synthetic oligonucleotide
  misc_feature 1..20: note = Target: SCN10A; (+) strand; PAM type: NRG; PAM sequence: GGG
  source 1..20: mol_type = other DNA
atccaggtacgccaagttca

SEQ ID NO: 33502 - DNA, 20 bp, synthetic construct
  misc_feature 1..20: note = Description of Artificial Sequence: Synthetic oligonucleotide
  misc_feature 1..20: note = Target: SCN10A; (+) strand; PAM type: NRG; PAM sequence: GGG
  source 1..20: mol_type = other DNA
tccaggtacgccaagttcag

SEQ ID NO: 33503 - DNA, 20 bp, synthetic construct
  misc_feature 1..20: note = Description of Artificial Sequence: Synthetic oligonucleotide
  misc_feature 1..20: note = Target: SCN10A; (+) strand; PAM type: NRG; PAM sequence: CAG
  source 1..20: mol_type = other DNA
gtacgccaagttcaggggct

SEQ ID NO: 33504 - DNA, 20 bp, synthetic construct
  misc_feature 1..20: note = Description of Artificial Sequence: Synthetic oligonucleotide
  misc_feature 1..20: note = Target: SCN10A; (+) strand; PAM type: NRG; PAM sequence: TGG
  source 1..20: mol_type = other DNA
ggggctcagcactgtctcac

SEQ ID NO: 33505 - DNA, 20 bp, synthetic construct
  misc_feature 1..20: note = Description of Artificial Sequence: Synthetic oligonucleotide
  misc_feature 1..20: note = Target: SCN10A; (+) strand; PAM type: NRG; PAM sequence: TAG
  source 1..20: mol_type = other DNA
tgtctcactggcccctgtga

SEQ ID NO: 33506 - DNA, 20 bp, synthetic construct
  misc_feature 1..20: note = Description of Artificial Sequence: Synthetic oligonucleotide
  misc_feature 1..20: note = Target: SCN10A; (+) strand; PAM type: NRG; PAM sequence: AGG
  source 1..20: mol_type = other DNA
gtctcactggcccctgtgat

SEQ ID NO: 33507 - DNA, 20 bp, synthetic construct
  misc_feature 1..20: note = Description of Artificial Sequence: Synthetic oligonucleotide
  misc_feature 1..20: note = Target: SCN10A; (+) strand; PAM type: NRG; PAM sequence: GGG
  source 1..20: mol_type = other DNA
tctcactggcccctgtgata

SEQ ID NO: 33508 - DNA, 20 bp, synthetic construct
  misc_feature 1..20: note = Description of Artificial Sequence: Synthetic oligonucleotide
  misc_feature 1..20: note = Target: SCN10A; (+) strand; PAM type: NRG; PAM sequence: AAG
  source 1..20: mol_type = other DNA
ggcccctgtgatagggtccc

SEQ ID NO: 33509 - DNA, 20 bp, synthetic construct
  misc_feature 1..20: note = Description of Artificial Sequence: Synthetic oligonucleotide
  misc_feature 1..20: note = Target: SCN10A; (+) strand; PAM type: NRG; PAM sequence: CAG
  source 1..20: mol_type = other DNA
ccctgtgatagggtcccaag

SEQ ID NO: 33510 - DNA, 20 bp, synthetic construct
  misc_feature 1..20: note = Description of Artificial Sequence: Synthetic oligonucleotide
  misc_feature 1..20: note = Target: SCN10A; (+) strand; PAM type: NRG; PAM sequence: TAG
  source 1..20: mol_type = other DNA
ggtcccaagcagatctgtcc

SEQ ID NO: 33511 - DNA, 20 bp, synthetic construct
  misc_feature 1..20: note = Description of Artificial Sequence: Synthetic oligonucleotide
  misc_feature 1..20: note = Target: SCN10A; (+) strand; PAM type: NRG; PAM sequence: GAG
  source 1..20: mol_type = other DNA
tcccaagcagatctgtccta

SEQ ID NO: 33512 - DNA, 20 bp, synthetic construct
  misc_feature 1..20: note = Description of Artificial Sequence: Synthetic oligonucleotide
  misc_feature 1..20: note = Target: SCN10A; (+) strand; PAM type: NRG; PAM sequence: TGG
  source 1..20: mol_type = other DNA
catgcacccccttcaacctc

SEQ ID NO: 33513 - DNA, 20 bp, synthetic construct
  misc_feature 1..20: note = Description of Artificial Sequence: Synthetic oligonucleotide
  misc_feature 1..20: note = Target: SCN10A; (+) strand; PAM type: NRG; PAM sequence: CAG
  source 1..20: mol_type = other DNA
ctctggatgccaacacttgt

SEQ ID NO: 33514 - DNA, 20 bp, synthetic construct
  misc_feature 1..20: note = Description of Artificial Sequence: Synthetic oligonucleotide
  misc_feature 1..20: note = Target: SCN10A; (+) strand; PAM type: NRG; PAM sequence: AGG
  source 1..20: mol_type = other DNA
tctggatgccaacacttgtc

SEQ ID NO: 33515 - DNA, 20 bp, synthetic construct
  misc_feature 1..20: note = Description of Artificial Sequence: Synthetic oligonucleotide
  misc_feature 1..20: note = Target: SCN10A; (+) strand; PAM type: NRG; PAM sequence: TGG
  source 1..20: mol_type = other DNA
gccaacacttgtcaggacct

SEQ ID NO: 33516 - DNA, 20 bp, synthetic construct
  misc_feature 1..20: note = Description of Artificial Sequence: Synthetic oligonucleotide
  misc_feature 1..20: note = Target: SCN10A; (+) strand; PAM type: NRG; PAM sequence: GGG
  source 1..20: mol_type = other DNA
ccaacacttgtcaggacctt

SEQ ID NO: 33517 - DNA, 20 bp, synthetic construct
  misc_feature 1..20: note = Description of Artificial Sequence: Synthetic oligonucleotide
  misc_feature 1..20: note = Target: SCN10A; (+) strand; PAM type: NRG; PAM sequence: AAG
  source 1..20: mol_type = other DNA
acacttgtcaggaccttggg

SEQ ID NO: 33518 - DNA, 20 bp, synthetic construct
  misc_feature 1..20: note = Description of Artificial Sequence: Synthetic oligonucleotide
  misc_feature 1..20: note = Target: SCN10A; (+) strand; PAM type: NRG; PAM sequence: TGG
  source 1..20: mol_type = other DNA
caggaccttgggaagattgt

SEQ ID NO: 33519 - DNA, 20 bp, synthetic construct
  misc_feature 1..20: note = Description of Artificial Sequence: Synthetic oligonucleotide
  misc_feature 1..20: note = Target: SCN10A; (+) strand; PAM type: NRG; PAM sequence: AAG
  source 1..20: mol_type = other DNA
ttgttttgtcacctctcttc

SEQ ID NO: 33520 - DNA, 20 bp, synthetic construct
  misc_feature 1..20: note = Description of Artificial Sequence: Synthetic oligonucleotide
  misc_feature 1..20: note = Target: SCN10A; (+) strand; PAM type: NRG; PAM sequence: TAG
  source 1..20: mol_type = other DNA
ttgtcacctctcttcaagtc

SEQ ID NO: 33521 - DNA, 20 bp, synthetic construct
  misc_feature 1..20: note = Description of Artificial Sequence: Synthetic oligonucleotide
  misc_feature 1..20: note = Target: SCN10A; (+) strand; PAM type: NRG; PAM sequence: CAG
  source 1..20: mol_type = other DNA
cctctcttcaagtctagatg

SEQ ID NO: 33522 - DNA, 20 bp, synthetic construct
  misc_feature 1..20: note = Description of Artificial Sequence: Synthetic oligonucleotide
  misc_feature 1..20: note = Target: SCN10A; (+) strand; PAM type: NRG; PAM sequence: AGG
  source 1..20: mol_type = other DNA
ctctcttcaagtctagatgc

SEQ ID NO: 33523 - DNA, 20 bp, synthetic construct
  misc_feature 1..20: note = Description of Artificial Sequence: Synthetic oligonucleotide
  misc_feature 1..20: note = Target: SCN10A; (+) strand; PAM type: NRG; PAM sequence: GGG
  source 1..20: mol_type = other DNA
tctcttcaagtctagatgca

SEQ ID NO: 33524 - DNA, 20 bp, synthetic construct
  misc_feature 1..20: note = Description of Artificial Sequence: Synthetic oligonucleotide
  misc_feature 1..20: note = Target: SCN10A; (+) strand; PAM type: NRG; PAM sequence: CAG
  source 1..20: mol_type = other DNA
aagtctagatgcagggctcc

SEQ ID NO: 33525 - DNA, 20 bp, synthetic construct
  misc_feature 1..20: note = Description of Artificial Sequence: Synthetic oligonucleotide
  misc_feature 1..20: note = Target: SCN10A; (+) strand; PAM type: NRG; PAM sequence: GAG
  source 1..20: mol_type = other DNA
cagggctcccagttaatact

SEQ ID NO: 33526 - DNA, 20 bp, synthetic construct
  misc_feature 1..20: note = Description of Artificial Sequence: Synthetic oligonucleotide
  misc_feature 1..20: note = Target: SCN10A; (+) strand; PAM type: NRG; PAM sequence: GAG
  source 1..20: mol_type = other DNA
gggctcccagttaatactga

SEQ ID NO: 33527 - DNA, 20 bp, synthetic construct
  misc_feature 1..20: note = Description of Artificial Sequence: Synthetic oligonucleotide
  misc_feature 1..20: note = Target: SCN10A; (+) strand; PAM type: NRG; PAM sequence: GAG
  source 1..20: mol_type = other DNA
gttaatactgagagattcct

SEQ ID NO: 33528 - DNA, 20 bp, synthetic construct
  misc_feature 1..20: note = Description of Artificial Sequence: Synthetic oligonucleotide
  misc_feature 1..20: note = Target: SCN10A; (+) strand; PAM type: NRG; PAM sequence: GAG
  source 1..20: mol_type = other DNA
taatactgagagattcctga

SEQ ID NO: 33529 - DNA, 20 bp, synthetic construct
  misc_feature 1..20: note = Description of Artificial Sequence: Synthetic oligonucleotide
  misc_feature 1..20: note = Target: SCN10A; (+) strand; PAM type: NRG; PAM sequence: CAG
  source 1..20: mol_type = other DNA
tactgagagattcctgagag

SEQ ID NO: 33530 - DNA, 20 bp, synthetic construct
  misc_feature 1..20: note = Description of Artificial Sequence: Synthetic oligonucleotide
  misc_feature 1..20: note = Target: SCN10A; (+) strand; PAM type: NRG; PAM sequence: AGG
  source 1..20: mol_type = other DNA
actgagagattcctgagagc

SEQ ID NO: 33531 - DNA, 20 bp, synthetic construct
  misc_feature 1..20: note = Description of Artificial Sequence: Synthetic oligonucleotide
  misc_feature 1..20: note = Target: SCN10A; (+) strand; PAM type: NRG; PAM sequence: CGG
  source 1..20: mol_type = other DNA
gagagattcctgagagcagg

SEQ ID NO: 33532 - DNA, 20 bp, synthetic construct
  misc_feature 1..20: note = Description of Artificial Sequence: Synthetic oligonucleotide
  misc_feature 1..20: note = Target: SCN10A; (+) strand; PAM type: NRG; PAM sequence: AAG
  source 1..20: mol_type = other DNA
agcaggcggcctgcgctaac

SEQ ID NO: 33533 - DNA, 20 bp, synthetic construct
  misc_feature 1..20: note = Description of Artificial Sequence: Synthetic oligonucleotide
  misc_feature 1..20: note = Target: SCN10A; (+) strand; PAM type: NRG; PAM sequence: CAG
  source 1..20: mol_type = other DNA
aacaagccgtgacatttctt

SEQ ID NO: 33534 - DNA, 20 bp, synthetic construct
  misc_feature 1..20: note = Description of Artificial Sequence: Synthetic oligonucleotide
  misc_feature 1..20: note = Target: SCN10A; (+) strand; PAM type: NRG; PAM sequence: AGG
  source 1..20: mol_type = other DNA
acaagccgtgacatttcttc

SEQ ID NO: 33535 - DNA, 20 bp, synthetic construct
  misc_feature 1..20: note = Description of Artificial Sequence: Synthetic oligonucleotide
  misc_feature 1..20: note = Target: SCN10A; (+) strand; PAM type: NRG; PAM sequence: AAG
  source 1..20: mol_type = other DNA
caggcctctttcctattccc

SEQ ID NO: 33536 - DNA, 20 bp, synthetic construct
  misc_feature 1..20: note = Description of Artificial Sequence: Synthetic oligonucleotide
  misc_feature 1..20: note = Target: SCN10A; (+) strand; PAM type: NRG; PAM sequence: GAG
  source 1..20: mol_type = other DNA
ggcctctttcctattcccaa

SEQ ID NO: 33537 - DNA, 20 bp, synthetic construct
  misc_feature 1..20: note = Description of Artificial Sequence: Synthetic oligonucleotide
  misc_feature 1..20: note = Target: SCN10A; (+) strand; PAM type: NRG; PAM sequence: CAG
  source 1..20: mol_type = other DNA
tctttcctattcccaagagt

SEQ ID NO: 33538 - DNA, 20 bp, synthetic construct
  misc_feature 1..20: note = Description of Artificial Sequence: Synthetic oligonucleotide
  misc_feature 1..20: note = Target: SCN10A; (+) strand; PAM type: NRG; PAM sequence: GAG
  source 1..20: mol_type = other DNA
tcctattcccaagagtcagt

SEQ ID NO: 33539 - DNA, 20 bp, synthetic construct
  misc_feature 1..20: note = Description of Artificial Sequence: Synthetic oligonucleotide
  misc_feature 1..20: note = Target: SCN10A; (+) strand; PAM type: NRG; PAM sequence: AAG
  source 1..20: mol_type = other DNA
ccaagagtcagtgagatgcc

SEQ ID NO: 33540 - DNA, 20 bp, synthetic construct
  misc_feature 1..20: note = Description of Artificial Sequence: Synthetic oligonucleotide
  misc_feature 1..20: note = Target: SCN10A; (+) strand; PAM type: NRG; PAM sequence: CAG
  source 1..20: mol_type = other DNA
gtgagatgccaagcttcctc

SEQ ID NO: 33541 - DNA, 20 bp, synthetic construct
  misc_feature 1..20: note = Description of Artificial Sequence: Synthetic oligonucleotide
  misc_feature 1..20: note = Target: SCN10A; (+) strand; PAM type: NRG; PAM sequence: TGG
  source 1..20: mol_type = other DNA
gatgccaagcttcctccaga

SEQ ID NO: 33542 - DNA, 20 bp, synthetic construct
  misc_feature 1..20: note = Description of Artificial Sequence: Synthetic oligonucleotide
  misc_feature 1..20: note = Target: SCN10A; (+) strand; PAM type: NRG; PAM sequence: TGG
  source 1..20: mol_type = other DNA
caagcttcctccagatggcc

SEQ ID NO: 33543 - DNA, 20 bp, synthetic construct
  misc_feature 1..20: note = Description of Artificial Sequence: Synthetic oligonucleotide
  misc_feature 1..20: note = Target: SCN10A; (+) strand; PAM type: NRG; PAM sequence: GAG
  source 1..20: mol_type = other DNA
agcttcctccagatggcctg

SEQ ID NO: 33544 - DNA, 20 bp, synthetic construct
  misc_feature 1..20: note = Description of Artificial Sequence: Synthetic oligonucleotide
  misc_feature 1..20: note = Target: SCN10A; (+) strand; PAM type: NRG; PAM sequence: TAG
  source 1..20: mol_type = other DNA
ctccagatggcctggagacc

SEQ ID NO: 33545 - DNA, 20 bp, synthetic construct
  misc_feature 1..20: note = Description of Artificial Sequence: Synthetic oligonucleotide
  misc_feature 1..20: note = Target: SCN10A; (+) strand; PAM type: NRG; PAM sequence: TGG
  source 1..20: mol_type = other DNA
acctagtgacccgacactcc

SEQ ID NO: 33546 - DNA, 20 bp, synthetic construct
  misc_feature 1..20: note = Description of Artificial Sequence: Synthetic oligonucleotide
  misc_feature 1..20: note = Target: SCN10A; (+) strand; PAM type: NRG; PAM sequence: GGG
  source 1..20: mol_type = other DNA
cctagtgacccgacactcct

SEQ ID NO: 33547 - DNA, 20 bp, synthetic construct
  misc_feature 1..20: note = Description of Artificial Sequence: Synthetic oligonucleotide
  misc_feature 1..20: note = Target: SCN10A; (+) strand; PAM type: NRG; PAM sequence: CAG
  source 1..20: mol_type = other DNA
cgacactcctgggaatctga

SEQ ID NO: 33548 - DNA, 20 bp, synthetic construct
  misc_feature 1..20: note = Description of Artificial Sequence: Synthetic oligonucleotide
  misc_feature 1..20: note = Target: SCN10A; (+) strand; PAM type: NRG; PAM sequence: AGG
  source 1..20: mol_type = other DNA
gacactcctgggaatctgac

SEQ ID NO: 33549 - DNA, 20 bp, synthetic construct
  misc_feature 1..20: note = Description of Artificial Sequence: Synthetic oligonucleotide
  misc_feature 1..20: note = Target: SCN10A; (+) strand; PAM type: NRG; PAM sequence: TGG
  source 1..20: mol_type = other DNA
tcctgggaatctgacaggtt

SEQ ID NO: 33550 - DNA, 20 bp, synthetic construct
  misc_feature 1..20: note = Description of Artificial Sequence: Synthetic oligonucleotide
  misc_feature 1..20: note = Target: SCN10A; (+) strand; PAM type: NRG; PAM sequence: TGG
  source 1..20: mol_type = other DNA
aggtttggctgacaaacctg

SEQ ID NO: 33551 - DNA, 20 bp, synthetic construct
  misc_feature 1..20: note = Description of Artificial Sequence: Synthetic oligonucleotide
  misc_feature 1..20: note = Target: SCN10A; (+) strand; PAM type: NRG; PAM sequence: AAG
  source 1..20: mol_type = other DNA
caaacctgtggctctgataa

SEQ ID NO: 33552 - DNA, 20 bp, synthetic construct
  misc_feature 1..20: note = Description of Artificial Sequence: Synthetic oligonucleotide
  misc_feature 1..20: note = Target: SCN10A; (+) strand; PAM type: NRG; PAM sequence: TGG
  source 1..20: mol_type = other DNA
acctgtggctctgataaaag

SEQ ID NO: 33553 - DNA, 20 bp, synthetic construct
  misc_feature 1..20: note = Description of Artificial Sequence: Synthetic oligonucleotide
  misc_feature 1..20: note = Target: SCN10A; (+) strand; PAM type: NRG; PAM sequence: GGG
  source 1..20: mol_type = other DNA
cctgtggctctgataaaagt

SEQ ID NO: 33554 - DNA, 20 bp, synthetic construct
  misc_feature 1..20: note = Description of Artificial Sequence: Synthetic oligonucleotide
  misc_feature 1..20: note = Target: SCN10A; (+) strand; PAM type: NRG; PAM sequence: TGG
  source 1..20: mol_type = other DNA
gtggctctgataaaagtggg

SEQ ID NO: 33555 - DNA, 20 bp, synthetic construct
  misc_feature 1..20: note = Description of Artificial Sequence: Synthetic oligonucleotide
  misc_feature 1..20: note = Target: SCN10A; (+) strand; PAM type: NRG; PAM sequence: TGG
  source 1..20: mol_type = other DNA
tgataaaagtgggtggcctg

SEQ ID NO: 33556 - DNA, 20 bp, synthetic construct
  misc_feature 1..20: note = Description of Artificial Sequence: Synthetic oligonucleotide
  misc_feature 1..20: note = Target: SCN10A; (+) strand; PAM type: NRG; PAM sequence: TAG
  source 1..20: mol_type = other DNA
ggcctgtggcacttctcctg

SEQ ID NO: 33557 - DNA, 20 bp, synthetic construct
  misc_feature 1..20: note = Description of Artificial Sequence: Synthetic oligonucleotide
  misc_feature 1..20: note = Target: SCN10A; (+) strand; PAM type: NRG; PAM sequence: GAG
  source 1..20: mol_type = other DNA
cctgtggcacttctcctgta

SEQ ID NO: 33558 - DNA, 20 bp, synthetic construct
  misc_feature 1..20: note = Description of Artificial Sequence: Synthetic oligonucleotide
  misc_feature 1..20: note = Target: SCN10A; (+) strand; PAM type: NRG; PAM sequence: AGG
  source 1..20: mol_type = other DNA
ctgtggcacttctcctgtag

SEQ ID NO: 33559 - DNA, 20 bp, synthetic construct
  misc_feature 1..20: note = Description of Artificial Sequence: Synthetic oligonucleotide
  misc_feature 1..20: note = Target: SCN10A; (+) strand; PAM type: NRG; PAM sequence: GGG
  source 1..20: mol_type = other DNA
tgtggcacttctcctgtaga

SEQ ID NO: 33560 - DNA, 20 bp, synthetic construct
  misc_feature 1..20: note = Description of Artificial Sequence: Synthetic oligonucleotide
  misc_feature 1..20: note = Target: SCN10A; (+) strand; PAM type: NRG; PAM sequence: TGG
  source 1..20: mol_type = other DNA
ttctcctgtagagggcgtcc

SEQ ID NO: 33561 - DNA, 20 bp, synthetic construct
  misc_feature 1..20: note = Description of Artificial Sequence: Synthetic oligonucleotide
  misc_feature 1..20: note = Target: SCN10A; (+) strand; PAM type: NRG; PAM sequence: GAG
  source 1..20: mol_type = other DNA
ctcctgtagagggcgtcctg

SEQ ID NO: 33562 - DNA, 20 bp, synthetic construct
  misc_feature 1..20: note = Description of Artificial Sequence: Synthetic oligonucleotide
  misc_feature 1..20: note = Target: SCN10A; (+) strand; PAM type: NRG; PAM sequence: GAG
  source 1..20: mol_type = other DNA
gtagagggcgtcctggagct

SEQ ID NO: 33563 - DNA, 20 bp, synthetic construct
  misc_feature 1..20: note = Description of Artificial Sequence: Synthetic oligonucleotide
  misc_feature 1..20: note = Target: SCN10A; (+) strand; PAM type: NRG; PAM sequence: TAG
  source 1..20: mol_type = other DNA
gggcgtcctggagctgagtt

SEQ ID NO: 33564 - DNA, 20 bp, synthetic construct
  misc_feature 1..20: note = Description of Artificial Sequence: Synthetic oligonucleotide
  misc_feature 1..20: note = Target: SCN10A; (+) strand; PAM type: NRG; PAM sequence: GAG
  source 1..20: mol_type = other DNA
gcgtcctggagctgagttta

SEQ ID NO: 33565 - DNA, 20 bp, synthetic construct
  misc_feature 1..20: note = Description of Artificial Sequence: Synthetic oligonucleotide
  misc_feature 1..20: note = Target: SCN10A; (+) strand; PAM type: NRG; PAM sequence: AAG
  source 1..20: mol_type = other DNA
tcctggagctgagtttagag

SEQ ID NO: 33566 - DNA, 20 bp, synthetic construct
  misc_feature 1..20: note = Description of Artificial Sequence: Synthetic oligonucleotide
  misc_feature 1..20: note = Target: SCN10A; (+) strand; PAM type: NRG; PAM sequence: GAG
  source 1..20: mol_type = other DNA
ctggagctgagtttagagaa

SEQ ID NO: 33567 - DNA, 20 bp, synthetic construct
  misc_feature 1..20: note = Description of Artificial Sequence: Synthetic oligonucleotide
  misc_feature 1..20: note = Target: SCN10A; (+) strand; PAM type: NRG; PAM sequence: GAG
  source 1..20: mol_type = other DNA
gaagagccatcattgcatgt

SEQ ID NO: 33568 - DNA, 20 bp, synthetic construct
  misc_feature 1..20: note = Description of Artificial Sequence: Synthetic oligonucleotide
  misc_feature 1..20: note = Target: SCN10A; (+) strand; PAM type: NRG; PAM sequence: GAG
  source 1..20: mol_type = other DNA
agccatcattgcatgtgagt

SEQ ID NO: 33569 - DNA, 20 bp, synthetic construct
  misc_feature 1..20: note = Description of Artificial Sequence: Synthetic oligonucleotide
  misc_feature 1..20: note = Target: SCN10A; (+) strand; PAM type: NRG; PAM sequence: TAG
  source 1..20: mol_type = other DNA
ttgcatgtgagtgagactaa

SEQ ID NO: 33570 - DNA, 20 bp, synthetic construct
  misc_feature 1..20: note = Description of Artificial Sequence: Synthetic oligonucleotide
  misc_feature 1..20: note = Target: SCN10A; (+) strand; PAM type: NRG; PAM sequence: AGG
  source 1..20: mol_type = other DNA
tgcatgtgagtgagactaat

SEQ ID NO: 33571 - DNA, 20 bp, synthetic construct
  misc_feature 1..20: note = Description of Artificial Sequence: Synthetic oligonucleotide
  misc_feature 1..20: note = Target: SCN10A; (+) strand; PAM type: NRG; PAM sequence: CAG
  source 1..20: mol_type = other DNA
atgtgagtgagactaatagg

SEQ ID NO: 33572 - DNA, 20 bp, synthetic construct
  misc_feature 1..20: note = Description of Artificial Sequence: Synthetic oligonucleotide
  misc_feature 1..20: note = Target: SCN10A; (+) strand; PAM type: NRG; PAM sequence: AGG
  source 1..20: mol_type = other DNA
tgtgagtgagactaataggc

SEQ ID NO: 33573 - DNA, 20 bp, synthetic construct
  misc_feature 1..20: note = Description of Artificial Sequence: Synthetic oligonucleotide
  misc_feature 1..20: note = Target: SCN10A; (+) strand; PAM type: NRG; PAM sequence: AAG
  source 1..20: mol_type = other DNA
tgagactaataggcaggttg

SEQ ID NO: 33574 - DNA, 20 bp, synthetic construct
  misc_feature 1..20: note = Description of Artificial Sequence: Synthetic oligonucleotide
  misc_feature 1..20: note = Target: SCN10A; (+) strand; PAM type: NRG; PAM sequence: AGG
  source 1..20: mol_type = other DNA
gagactaataggcaggttga

SEQ ID NO: 33575 - DNA, 20 bp, synthetic construct
  misc_feature 1..20: note = Description of Artificial Sequence: Synthetic oligonucleotide
  misc_feature 1..20: note = Target: SCN10A; (+) strand; PAM type: NRG; PAM sequence: GAG
  source 1..20: mol_type = other DNA
taggcaggttgaaggtgctt

SEQ ID NO: 33576 - DNA, 20 bp, synthetic construct
  misc_feature 1..20: note = Description of Artificial Sequence: Synthetic oligonucleotide
  misc_feature 1..20: note = Target: SCN10A; (+) strand; PAM type: NRG; PAM sequence: TGG
  source 1..20: mol_type = other DNA
gttgaaggtgcttgagacat

SEQ ID NO: 33577 - DNA, 20 bp, synthetic construct
  misc_feature 1..20: note = Description of Artificial Sequence: Synthetic oligonucleotide
  misc_feature 1..20: note = Target: SCN10A; (+) strand; PAM type: NRG; PAM sequence: GGG
  source 1..20: mol_type = other DNA
ttgaaggtgcttgagacatt

SEQ ID NO: 33578 - DNA, 20 bp, synthetic construct
  misc_feature 1..20: note = Description of Artificial Sequence: Synthetic oligonucleotide
  misc_feature 1..20: note = Target: SCN10A; (+) strand; PAM type: NRG; PAM sequence: GGG
  source 1..20: mol_type = other DNA
tgaaggtgcttgagacattg

SEQ ID NO: 33579 - DNA, 20 bp, synthetic construct
  misc_feature 1..20: note = Description of Artificial Sequence: Synthetic oligonucleotide
  misc_feature 1..20: note = Target: SCN10A; (+) strand; PAM type: NRG; PAM sequence: CGG
  source 1..20: mol_type = other DNA
agacattggggctgtgattt

SEQ ID NO: 33580 - DNA, 20 bp, synthetic construct
  misc_feature 1..20: note = Description of Artificial Sequence: Synthetic oligonucleotide
  misc_feature 1..20: note = Target: SCN10A; (+) strand; PAM type: NRG; PAM sequence: GGG
  source 1..20: mol_type = other DNA
gacattggggctgtgatttc

SEQ ID NO: 33581 - DNA, 20 bp, synthetic construct
  misc_feature 1..20: note = Description of Artificial Sequence: Synthetic oligonucleotide
  misc_feature 1..20: note = Target: SCN10A; (+) strand; PAM type: NRG; PAM sequence: AAG
  source 1..20: mol_type = other DNA
ggggctgtgatttcgggcac

SEQ ID NO: 33582 - DNA, 20 bp, synthetic construct
  misc_feature 1..20: note = Description of Artificial Sequence: Synthetic oligonucleotide
  misc_feature 1..20: note = Target: SCN10A; (+) strand; PAM type: NRG; PAM sequence: AGG
  source 1..20: mol_type = other DNA
gggctgtgatttcgggcaca

SEQ ID NO: 33583 - DNA, 20 bp, synthetic construct
  misc_feature 1..20: note = Description of Artificial Sequence: Synthetic oligonucleotide
  misc_feature 1..20: note = Target: SCN10A; (+) strand; PAM type: NRG; PAM sequence: GGG
  source 1..20: mol_type = other DNA
ggctgtgatttcgggcacaa

SEQ ID NO: 33584 - DNA, 20 bp, synthetic construct
  misc_feature 1..20: note = Description of Artificial Sequence: Synthetic oligonucleotide
  misc_feature 1..20: note = Target: SCN10A; (+) strand; PAM type: NRG; PAM sequence: CAG
  source 1..20: mol_type = other DNA
gatttcgggcacaagggaat

SEQ ID NO: 33585 - DNA, 20 bp, synthetic construct
  misc_feature 1..20: note = Description of Artificial Sequence: Synthetic oligonucleotide
  misc_feature 1..20: note = Target: SCN10A; (+) strand; PAM type: NRG; PAM sequence: GAG
  source 1..20: mol_type = other DNA
tttcgggcacaagggaatca

SEQ ID NO: 33586 - DNA, 20 bp, synthetic construct
  misc_feature 1..20: note = Description of Artificial Sequence: Synthetic oligonucleotide
  misc_feature 1..20: note = Target: SCN10A; (+) strand; PAM type: NRG; PAM sequence: GAG
  source 1..20: mol_type = other DNA
aatcagagaatgacttcctt

SEQ ID NO: 33587 - DNA, 20 bp, synthetic construct
  misc_feature 1..20: note = Description of Artificial Sequence: Synthetic oligonucleotide
  misc_feature 1..20: note = Target: SCN10A; (+) strand; PAM type: NRG; PAM sequence: AGG
  source 1..20: mol_type = other DNA
atcagagaatgacttccttg

SEQ ID NO: 33588 - DNA, 20 bp, synthetic construct
  misc_feature 1..20: note = Description of Artificial Sequence: Synthetic oligonucleotide
  misc_feature 1..20: note = Target: SCN10A; (+) strand; PAM type: NRG; PAM sequence: TGG
  source 1..20: mol_type = other DNA
gagaatgacttccttgaggc

SEQ ID NO: 33589 - DNA, 20 bp, synthetic construct
  misc_feature 1..20: note = Description of Artificial Sequence: Synthetic oligonucleotide
  misc_feature 1..20: note = Target: SCN10A; (+) strand; PAM type: NRG; PAM sequence: AAG
  source 1..20: mol_type = other DNA
aatgacttccttgaggctgg

SEQ ID NO: 33590 - DNA, 20 bp, synthetic construct
  misc_feature 1..20: note = Description of Artificial Sequence: Synthetic oligonucleotide
  misc_feature 1..20: note = Target: SCN10A; (+) strand; PAM type: NRG; PAM sequence: AGG
  source 1..20: mol_type = other DNA
atgacttccttgaggctgga

SEQ ID NO: 33591 - DNA, 20 bp, synthetic construct
  misc_feature 1..20: note = Description of Artificial Sequence: Synthetic oligonucleotide
  misc_feature 1..20: note = Target: SCN10A; (+) strand; PAM type: NRG; PAM sequence: GAG
  source 1..20: mol_type = other DNA
gacttccttgaggctggaag

SEQ ID NO: 33592 - DNA, 20 bp, synthetic construct
  misc_feature 1..20: note = Description of Artificial Sequence: Synthetic oligonucleotide
  misc_feature 1..20: note = Target: SCN10A; (+) strand; PAM type: NRG; PAM sequence: TGG
  source 1..20: mol_type = other DNA
tccttgaggctggaaggagc

SEQ ID NO: 33593 - DNA, 20 bp, synthetic construct
  misc_feature 1..20: note = Description of Artificial Sequence: Synthetic oligonucleotide
  misc_feature 1..20: note = Target: SCN10A; (+) strand; PAM type: NRG; PAM sequence: GGG
  source 1..20: mol_type = other DNA
ccttgaggctggaaggagct

SEQ ID NO: 33594 - DNA, 20 bp, synthetic construct
  misc_feature 1..20: note = Description of Artificial Sequence: Synthetic oligonucleotide
  misc_feature 1..20: note = Target: SCN10A; (+) strand; PAM type: NRG; PAM sequence: GGG
  source 1..20: mol_type = other DNA
cttgaggctggaaggagctg

SEQ ID NO: 33595 - DNA, 20 bp, synthetic construct
  misc_feature 1..20: note = Description of Artificial Sequence: Synthetic oligonucleotide
  misc_feature 1..20: note = Target: SCN10A; (+) strand; PAM type: NRG; PAM sequence: TGG
  source 1..20: mol_type = other DNA
gctggaaggagctggggctc

SEQ ID NO: 33596 - DNA, 20 bp, synthetic construct
  misc_feature 1..20: note = Description of Artificial Sequence: Synthetic oligonucleotide
  misc_feature 1..20: note = Target: SCN10A; (+) strand; PAM type: NRG; PAM sequence: GAG
  source 1..20: mol_type = other DNA
tggaaggagctggggctctg

SEQ ID NO: 33597 - DNA, 20 bp, synthetic construct
  misc_feature 1..20: note = Description of Artificial Sequence: Synthetic oligonucleotide
  misc_feature 1..20: note = Target: SCN10A; (+) strand; PAM type: NRG; PAM sequence: CAG
  source 1..20: mol_type = other DNA
aggagctggggctctggagt

SEQ ID NO: 33598 - DNA, 20 bp, synthetic construct
  misc_feature 1..20: note = Description of Artificial Sequence: Synthetic oligonucleotide
  misc_feature 1..20: note = Target: SCN10A; (+) strand; PAM type: NRG; PAM sequence: TGG
  source 1..20: mol_type = other DNA
ggctctggagtcagacaacc

SEQ ID NO: 33599 - DNA, 20 bp, synthetic construct
  misc_feature 1..20: note = Description of Artificial Sequence: Synthetic oligonucleotide
  misc_feature 1..20: note = Target: SCN10A; (+) strand; PAM type: NRG; PAM sequence: GAG
  source 1..20: mol_type = other DNA
gagtcagacaacctggattt

SEQ ID NO: 33600 - DNA, 20 bp, synthetic construct
  misc_feature 1..20: note = Description of Artificial Sequence: Synthetic oligonucleotide
  misc_feature 1..20: note = Target: SCN10A; (+) strand; PAM type: NRG; PAM sequence: CAG
  source 1..20: mol_type = other DNA
gacaacctggatttgagatc

SEQ ID NO: 33601 - DNA, 20 bp, synthetic construct
  misc_feature 1..20: note = Description of Artificial Sequence: Synthetic oligonucleotide
  misc_feature 1..20: note = Target: SCN10A; (+) strand; PAM type: NRG; PAM sequence: AGG
  source 1..20: mol_type = other DNA
acaacctggatttgagatcc

SEQ ID NO: 33602 - DNA, 20 bp, synthetic construct
  misc_feature 1..20: note = Description of Artificial Sequence: Synthetic oligonucleotide
  misc_feature 1..20: note = Target: SCN10A; (+) strand; PAM type: NRG; PAM sequence: TGG
  source 1..20: mol_type = other DNA
ggatttgagatccaggtctg

SEQ ID NO: 33603 - DNA, 20 bp, synthetic construct
  misc_feature 1..20: note = Description of Artificial Sequence: Synthetic oligonucleotide
  misc_feature 1..20: note = Target: SCN10A; (+) strand; PAM type: NRG; PAM sequence: TGG
  source 1..20: mol_type = other DNA
ctgtggcttattcgcttgct

SEQ ID NO: 33604 - DNA, 20 bp, synthetic construct
  misc_feature 1..20: note = Description of Artificial Sequence: Synthetic oligonucleotide
  misc_feature 1..20: note = Target: SCN10A; (+) strand; PAM type: NRG; PAM sequence: CAG
  source 1..20: mol_type = other DNA
tggcttattcgcttgcttgg

SEQ ID NO: 33605 - DNA, 20 bp, synthetic construct
  misc_feature 1..20: note = Description of Artificial Sequence: Synthetic oligonucleotide
  misc_feature 1..20: note = Target: SCN10A; (+) strand; PAM type: NRG; PAM sequence: TGG
  source 1..20: mol_type = other DNA
ttattcgcttgcttggcaga

SEQ ID NO: 33606 - DNA, 20 bp, synthetic construct
  misc_feature 1..20: note = Description of Artificial Sequence: Synthetic oligonucleotide
  misc_feature 1..20: note = Target: SCN10A; (+) strand; PAM type: NRG; PAM sequence: GGG
  source 1..20: mol_type = other DNA
tattcgcttgcttggcagat

SEQ ID NO: 33607 - DNA, 20 bp, synthetic construct
  misc_feature 1..20: note = Description of Artificial Sequence: Synthetic oligonucleotide
  misc_feature 1..20: note = Target: SCN10A; (+) strand; PAM type: NRG; PAM sequence: GAG
  source 1..20: mol_type = other DNA
ttcgcttgcttggcagatgg

SEQ ID NO: 33608 - DNA, 20 bp, synthetic construct
  misc_feature 1..20: note = Description of Artificial Sequence: Synthetic oligonucleotide
  misc_feature 1..20: note = Target: SCN10A; (+) strand; PAM type: NRG; PAM sequence: CGG
  source 1..20: mol_type = other DNA
cttggcagatgggagacttt

SEQ ID NO: 33609 - DNA, 20 bp, synthetic construct
  misc_feature 1..20: note = Description of Artificial Sequence: Synthetic oligonucleotide
  misc_feature 1..20: note = Target: SCN10A; (+) strand; PAM type: NRG; PAM sequence: GGG
  source 1..20: mol_type = other DNA
ttggcagatgggagactttc

SEQ ID NO: 33610 - DNA, 20 bp, synthetic construct
  misc_feature 1..20: note = Description of Artificial Sequence: Synthetic oligonucleotide
  misc_feature 1..20: note = Target: SCN10A; (+) strand; PAM type: NRG; PAM sequence: TGG
  source 1..20: mol_type = other DNA
gggagactttcgggtcatca

SEQ ID NO: 33611 - DNA, 20 bp, synthetic construct
  misc_feature 1..20: note = Description of Artificial Sequence: Synthetic oligonucleotide
  misc_feature 1..20: note = Target: SCN10A; (+) strand; PAM type: NRG; PAM sequence: GAG
  source 1..20: mol_type = other DNA
ctttttcctcacccacccct

SEQ ID NO: 33612 - DNA, 20 bp, synthetic construct
  misc_feature 1..20: note = Description of Artificial Sequence: Synthetic oligonucleotide
  misc_feature 1..20: note = Target: SCN10A; (+) strand; PAM type: NRG; PAM sequence: AGG
  source 1..20: mol_type = other DNA
tttttcctcacccacccctg

SEQ ID NO: 33613 - DNA, 20 bp, synthetic construct
  misc_feature 1..20: note = Description of Artificial Sequence: Synthetic oligonucleotide
  misc_feature 1..20: note = Target: SCN10A; (+) strand; PAM type: NRG; PAM sequence: CAG
  source 1..20: mol_type = other DNA
tcttaaaaacgactatctct

SEQ ID NO: 33614 - DNA, 20 bp, synthetic construct
  misc_feature 1..20: note = Description of Artificial Sequence: Synthetic oligonucleotide
  misc_feature 1..20: note = Target: SCN10A; (+) strand; PAM type: NRG; PAM sequence: AGG
  source 1..20: mol_type = other DNA
cttaaaaacgactatctctc

SEQ ID NO: 33615 - DNA, 20 bp, synthetic construct
  misc_feature 1..20: note = Description of Artificial Sequence: Synthetic oligonucleotide
  misc_feature 1..20: note = Target: SCN10A; (+) strand; PAM type: NRG; PAM sequence: GGG
  source 1..20: mol_type = other DNA
ttaaaaacgactatctctca

SEQ ID NO: 33616 - DNA, 20 bp, synthetic construct
  misc_feature 1..20: note = Description of Artificial Sequence: Synthetic oligonucleotide
  misc_feature 1..20: note = Target: SCN10A; (+) strand; PAM type: NRG; PAM sequence: GAG
  source 1..20: mol_type = other DNA
ctatctctcagggttgttgt

SEQ ID NO: 33617 - DNA, 20 bp, synthetic construct
  misc_feature 1..20: note = Description of Artificial Sequence: Synthetic oligonucleotide
  misc_feature 1..20: note = Target: SCN10A; (+) strand; PAM type: NRG; PAM sequence: GAG
  source 1..20: mol_type = other DNA
ggttgttgtgagcataaaat

SEQ ID NO: 33618 - DNA, 20 bp, synthetic construct
  misc_feature 1..20: note = Description of Artificial Sequence: Synthetic oligonucleotide
  misc_feature 1..20: note = Target: SCN10A; (+) strand; PAM type: NRG; PAM sequence: AGG
  source 1..20: mol_type = other DNA
gttgttgtgagcataaaatg

SEQ ID NO: 33619 - DNA, 20 bp, synthetic construct
  misc_feature 1..20: note = Description of Artificial Sequence: Synthetic oligonucleotide
  misc_feature 1..20: note = Target: SCN10A; (+) strand; PAM type: NRG; PAM sequence: AAG
  source 1..20: mol_type = other DNA
aaaatgaggtgcgttttttc

SEQ ID NO: 33620 - DNA, 20 bp, synthetic construct
  misc_feature 1..20: note = Description of Artificial Sequence: Synthetic oligonucleotide
  misc_feature 1..20: note = Target: SCN10A; (+) strand; PAM type: NRG; PAM sequence: CAG
  source 1..20: mol_type = other DNA
ggtgcgttttttcaagtgtc

SEQ ID NO: 33621 - DNA, 20 bp, synthetic construct
  misc_feature 1..20: note = Description of Artificial Sequence: Synthetic oligonucleotide
  misc_feature 1..20: note = Target: SCN10A; (+) strand; PAM type: NRG; PAM sequence: AAG
  source 1..20: mol_type = other DNA
tgctatgcctgacacattgt

SEQ ID NO: 33622 - DNA, 20 bp, synthetic construct
  misc_feature 1..20: note = Description of Artificial Sequence: Synthetic oligonucleotide
  misc_feature 1..20: note = Target: SCN10A; (+) strand; PAM type: NRG; PAM sequence: CAG
  source 1..20: mol_type = other DNA
cctgacacattgtaagtgct

SEQ ID NO: 33623 - DNA, 20 bp, synthetic construct
  misc_feature 1..20: note = Description of Artificial Sequence: Synthetic oligonucleotide
  misc_feature 1..20: note = Target: SCN10A; (+) strand; PAM type: NRG; PAM sequence: AAG
  source 1..20: mol_type = other DNA
acacattgtaagtgctcagt

SEQ ID NO: 33624 - DNA, 20 bp, synthetic construct
  misc_feature 1..20: note = Description of Artificial Sequence: Synthetic oligonucleotide
  misc_feature 1..20: note = Target: SCN10A; (+) strand; PAM type: NRG; PAM sequence: TAG
  source 1..20: mol_type = other DNA
tgtaagtgctcagtaagtat

SEQ ID NO: 33625 - DNA, 20 bp, synthetic construct
  misc_feature 1..20: note = Description of Artificial Sequence: Synthetic oligonucleotide
  misc_feature 1..20: note = Target: SCN10A; (+) strand; PAM type: NRG; PAM sequence: AAG
  source 1..20: mol_type = other DNA
tgctgttattgttatttgat

SEQ ID NO: 33626 - DNA, 20 bp, synthetic construct
  misc_feature 1..20: note = Description of Artificial Sequence: Synthetic oligonucleotide
  misc_feature 1..20: note = Target: SCN10A; (+) strand; PAM type: NRG; PAM sequence: GAG
  source 1..20: mol_type = other DNA
ctgttattgttatttgataa

SEQ ID NO: 33627 - DNA, 20 bp, synthetic construct
  misc_feature 1..20: note = Description of Artificial Sequence: Synthetic oligonucleotide
  misc_feature 1..20: note = Target: SCN10A; (+) strand; PAM type: NRG; PAM sequence: GAG
  source 1..20: mol_type = other DNA
attgttatttgataagagac

SEQ ID NO: 33628 - DNA, 20 bp, synthetic construct
  misc_feature 1..20: note = Description of Artificial Sequence: Synthetic oligonucleotide
  misc_feature 1..20: note = Target: SCN10A; (+) strand; PAM type: NRG; PAM sequence: AGG
  source 1..20: mol_type = other DNA
ttgttatttgataagagacg

SEQ ID NO: 33629 - DNA, 20 bp, synthetic construct
  misc_feature 1..20: note = Description of Artificial Sequence: Synthetic oligonucleotide
  misc_feature 1..20: note = Target: SCN10A; (+) strand; PAM type: NRG; PAM sequence: CAG
  source 1..20: mol_type = other DNA
tatttgataagagacgagga

SEQ ID NO: 33630 - DNA, 20 bp, synthetic construct
  misc_feature 1..20: note = Description of Artificial Sequence: Synthetic oligonucleotide
  misc_feature 1..20: note = Target: SCN10A; (+) strand; PAM type: NRG; PAM sequence: TGG
  source 1..20: mol_type = other DNA
taagagacgaggacagtgct

SEQ ID NO: 33631 - DNA, 20 bp, synthetic construct
  misc_feature 1..20: note = Description of Artificial Sequence: Synthetic oligonucleotide
  misc_feature 1..20: note = Target: SCN10A; (+) strand; PAM type: NRG; PAM sequence: AAG
  source 1..20: mol_type = other DNA
gagacgaggacagtgcttgg

SEQ ID NO: 33632 - DNA, 20 bp, synthetic construct
  misc_feature 1..20: note = Description of Artificial Sequence: Synthetic oligonucleotide
  misc_feature 1..20: note = Target: SCN10A; (+) strand; PAM type: NRG; PAM sequence: TGG
  source 1..20: mol_type = other DNA
agtgcttggaagtcccctct

SEQ ID NO: 33633 - DNA, 20 bp, synthetic construct
  misc_feature 1..20: note = Description of Artificial Sequence: Synthetic oligonucleotide
  misc_feature 1..20: note = Target: SCN10A; (+) strand; PAM type: NRG; PAM sequence: CAG
  source 1..20: mol_type = other DNA
ttggaagtcccctcttggtg

SEQ ID NO: 33634 - DNA, 20 bp, synthetic construct
  misc_feature 1..20: note = Description of Artificial Sequence: Synthetic oligonucleotide
  misc_feature 1..20: note = Target: SCN10A; (+) strand; PAM type: NRG; PAM sequence: AAG
  source 1..20: mol_type = other DNA
agtcccctcttggtgcagat

SEQ ID NO: 33635 - DNA, 20 bp, synthetic construct
  misc_feature 1..20: note = Description of Artificial Sequence: Synthetic oligonucleotide
  misc_feature 1..20: note = Target: SCN10A; (+) strand; PAM type: NRG; PAM sequence: AGG
  source 1..20: mol_type = other DNA
gtcccctcttggtgcagata

SEQ ID NO: 33636 - DNA, 20 bp, synthetic construct
  misc_feature 1..20: note = Description of Artificial Sequence: Synthetic oligonucleotide
  misc_feature 1..20: note = Target: SCN10A; (+) strand; PAM type: NRG; PAM sequence: GGG
  source 1..20: mol_type = other DNA
tcccctcttggtgcagataa

SEQ ID NO: 33637 - DNA, 20 bp, synthetic construct
  misc_feature 1..20: note = Description of Artificial Sequence: Synthetic oligonucleotide
  misc_feature 1..20: note = Target: SCN10A; (+) strand; PAM type: NRG; PAM sequence: GAG
  source 1..20: mol_type = other DNA
ccctcttggtgcagataagg

SEQ ID NO: 33638 - DNA, 20 bp, synthetic construct
  misc_feature 1..20: note = Description of Artificial Sequence: Synthetic oligonucleotide
  misc_feature 1..20: note = Target: SCN10A; (+) strand; PAM type: NRG; PAM sequence: AAG
  source 1..20: mol_type = other DNA
ttggtgcagataagggagcc

SEQ ID NO: 33639 - DNA, 20 bp, synthetic construct
  misc_feature 1..20: note = Description of Artificial Sequence: Synthetic oligonucleotide
  misc_feature 1..20: note = Target: SCN10A; (+) strand; PAM type: NRG; PAM sequence: AGG
  source 1..20: mol_type = other DNA
tggtgcagataagggagcca

SEQ ID NO: 33640 - DNA, 20 bp, synthetic construct
  misc_feature 1..20: note = Description of Artificial Sequence: Synthetic oligonucleotide
  misc_feature 1..20: note = Target: SCN10A; (+) strand; PAM type: NRG; PAM sequence: CAG
  source 1..20: mol_type = other DNA
cagataagggagccaaggcc

SEQ ID NO: 33641 - DNA, 20 bp, synthetic construct
  misc_feature 1..20: note = Description of Artificial Sequence: Synthetic oligonucleotide
  misc_feature 1..20: note = Target: SCN10A; (+) strand; PAM type: NRG; PAM sequence: AAG
  source 1..20: mol_type = other DNA
taagggagccaaggcccaga

SEQ ID NO: 33642 - DNA, 20 bp, synthetic construct
  misc_feature 1..20: note = Description of Artificial Sequence: Synthetic oligonucleotide
  misc_feature 1..20: note = Target: SCN10A; (+) strand; PAM type: NRG; PAM sequence: AGG
  source 1..20: mol_type = other DNA
aagggagccaaggcccagaa

SEQ ID NO: 33643 - DNA, 20 bp, synthetic construct
  misc_feature 1..20: note = Description of Artificial Sequence: Synthetic oligonucleotide
  misc_feature 1..20: note = Target: SCN10A; (+) strand; PAM type: NRG; PAM sequence: GAG
  source 1..20: mol_type = other DNA
gggagccaaggcccagaaag

SEQ ID NO: 33644 - DNA, 20 bp, synthetic construct
  misc_feature 1..20: note = Description of Artificial Sequence: Synthetic oligonucleotide
  misc_feature 1..20: note = Target: SCN10A; (+) strand; PAM type: NRG; PAM sequence: AAG
  source 1..20: mol_type = other DNA
agccaaggcccagaaaggag

SEQ ID NO: 33645 - DNA, 20 bp, synthetic construct
  misc_feature 1..20: note = Description of Artificial Sequence: Synthetic oligonucleotide
  misc_feature 1..20: note = Target: SCN10A; (+) strand; PAM type: NRG; PAM sequence: AGG
  source 1..20: mol_type = other DNA
gccaaggcccagaaaggaga

SEQ ID NO: 33646 - DNA, 20 bp, synthetic construct
  misc_feature 1..20: note = Description of Artificial Sequence: Synthetic oligonucleotide
  misc_feature 1..20: note = Target: SCN10A; (+) strand; PAM type: NRG; PAM sequence: GAG
  source 1..20: mol_type = other DNA
agaaggcatgtccccactct

SEQ ID NO: 33647 - DNA, 20 bp, synthetic construct
  misc_feature 1..20: note = Description of Artificial Sequence: Synthetic oligonucleotide
  misc_feature 1..20: note = Target: SCN10A; (+) strand; PAM type: NRG; PAM sequence: CAG
  source 1..20: mol_type = other DNA
ggcatgtccccactctgagt

SEQ ID NO: 33648 - DNA, 20 bp, synthetic construct
  misc_feature 1..20: note = Description of Artificial Sequence: Synthetic oligonucleotide
  misc_feature 1..20: note = Target: SCN10A; (+) strand; PAM type: NRG; PAM sequence: AAG
  source 1..20: mol_type = other DNA
ccccactctgagtcagcgaa

SEQ ID NO: 33649 - DNA, 20 bp, synthetic construct
  misc_feature 1..20: note = Description of Artificial Sequence: Synthetic oligonucleotide
  misc_feature 1..20: note = Target: SCN10A; (+) strand; PAM type: NRG; PAM sequence: TGG
  source 1..20: mol_type = other DNA
actctgagtcagcgaaaagc

SEQ ID NO: 33650 - DNA, 20 bp, synthetic construct
  misc_feature 1..20: note = Description of Artificial Sequence: Synthetic oligonucleotide
  misc_feature 1..20: note = Target: SCN10A; (+) strand; PAM type: NRG; PAM sequence: GGG
  source 1..20: mol_type = other DNA
ctctgagtcagcgaaaagct

SEQ ID NO: 33651 - DNA, 20 bp, synthetic construct
  misc_feature 1..20: note = Description of Artificial Sequence: Synthetic oligonucleotide
  misc_feature 1..20: note = Target: SCN10A; (+) strand; PAM type: NRG; PAM sequence: GGG
  source 1..20: mol_type = other DNA
tctgagtcagcgaaaagctg

SEQ ID NO: 33652 - DNA, 20 bp, synthetic construct
  misc_feature 1..20: note = Description of Artificial Sequence: Synthetic oligonucleotide
  misc_feature 1..20: note = Target: SCN10A; (+) strand; PAM type: NRG; PAM sequence: CAG
  source 1..20: mol_type = other DNA
tcagcgaaaagctggggcca

SEQ ID NO: 33653 - DNA, 20 bp, synthetic construct
  misc_feature 1..20: note = Description of Artificial Sequence: Synthetic oligonucleotide
  misc_feature 1..20: note = Target: SCN10A; (+) strand; PAM type: NRG; PAM sequence: AAG
  source 1..20: mol_type = other DNA
aaagctggggccacagaccc

SEQ ID NO: 33654 - DNA, 20 bp, synthetic construct
  misc_feature 1..20: note = Description of Artificial Sequence: Synthetic oligonucleotide
  misc_feature 1..20: note = Target: SCN10A; (+) strand; PAM type: NRG; PAM sequence: CAG
  source 1..20: mol_type = other DNA
gggccacagacccaagtctc

SEQ ID NO: 33655 - DNA, 20 bp, synthetic construct
  misc_feature 1..20: note = Description of Artificial Sequence: Synthetic oligonucleotide
  misc_feature 1..20: note = Target: SCN10A; (+) strand; PAM type: NRG; PAM sequence: CAG
  source 1..20: mol_type = other DNA
gacccaagtctccagtcgcc

SEQ ID NO: 33656 - DNA, 20 bp, synthetic construct
  misc_feature 1..20: note = Description of Artificial Sequence: Synthetic oligonucleotide
  misc_feature 1..20: note = Target: SCN10A; (+) strand; PAM type: NRG; PAM sequence: AGG
  source 1..20: mol_type = other DNA
acccaagtctccagtcgccc

SEQ ID NO: 33657 - DNA, 20 bp, synthetic construct
  misc_feature 1..20: note = Description of Artificial Sequence: Synthetic oligonucleotide
  misc_feature 1..20: note = Target: SCN10A; (+) strand; PAM type: NRG; PAM sequence: GAG
  source 1..20: mol_type = other DNA
ccaagtctccagtcgcccag

SEQ ID NO: 33658 - DNA, 20 bp, synthetic construct
  misc_feature 1..20: note = Description of Artificial Sequence: Synthetic oligonucleotide
  misc_feature 1..20: note = Target: SCN10A; (+) strand; PAM type: NRG; PAM sequence: CAG
  source 1..20: mol_type = other DNA
gtctccagtcgcccaggagt

SEQ ID NO: 33659 - DNA, 20 bp, synthetic construct
  misc_feature 1..20: note = Description of Artificial Sequence: Synthetic oligonucleotide
  misc_feature 1..20: note = Target: SCN10A; (+) strand; PAM type: NRG; PAM sequence: AAG
  source 1..20: mol_type = other DNA
cagaccctgctccctcccac

SEQ ID NO: 33660 - DNA, 20 bp, synthetic construct
  misc_feature 1..20: note = Description of Artificial Sequence: Synthetic oligonucleotide
  misc_feature 1..20: note = Target: SCN10A; (+) strand; PAM type: NRG; PAM sequence: AGG
  source 1..20: mol_type = other DNA
agaccctgctccctcccaca

SEQ ID NO: 33661 - DNA, 20 bp, synthetic construct
  misc_feature 1..20: note = Description of Artificial Sequence: Synthetic oligonucleotide
  misc_feature 1..20: note = Target: SCN10A; (+) strand; PAM type: NRG; PAM sequence: CAG
  source 1..20: mol_type = other DNA
cctgctccctcccacaagga

SEQ ID NO: 33662 - DNA, 20 bp, synthetic construct
  misc_feature 1..20: note = Description of Artificial Sequence: Synthetic oligonucleotide
  misc_feature 1..20: note = Target: SCN10A; (+) strand; PAM type: NRG; PAM sequence: AGG
  source 1..20: mol_type = other DNA
ctgctccctcccacaaggac

SEQ ID NO: 33663 - DNA, 20 bp, synthetic construct
  misc_feature 1..20: note = Description of Artificial Sequence: Synthetic oligonucleotide
  misc_feature 1..20: note = Target: SCN10A; (+) strand; PAM type: NRG; PAM sequence: GAG
  source 1..20: mol_type = other DNA
gctccctcccacaaggacag

SEQ ID NO: 33664 - DNA, 20 bp, synthetic construct
  misc_feature 1..20: note = Description of Artificial Sequence: Synthetic oligonucleotide
  misc_feature 1..20: note = Target: SCN10A; (+) strand; PAM type: NRG; PAM sequence: GAG
  source 1..20: mol_type = other DNA
tccctcccacaaggacagga

SEQ ID NO: 33665 - DNA, 20 bp, synthetic construct
  misc_feature 1..20: note = Description of Artificial Sequence: Synthetic oligonucleotide
  misc_feature 1..20: note = Target: SCN10A; (+) strand; PAM type: NRG; PAM sequence: AGG
  source 1..20: mol_type = other DNA
ccctcccacaaggacaggag

SEQ ID NO: 33666 - DNA, 20 bp, synthetic construct
  misc_feature 1..20: note = Description of Artificial Sequence: Synthetic oligonucleotide
  misc_feature 1..20: note = Target: SCN10A; (+) strand; PAM type: NRG; PAM sequence: AAG
  source 1..20: mol_type = other DNA
tcccacaaggacaggagagg

SEQ ID NO: 33667 - DNA, 20 bp, synthetic construct
  misc_feature 1..20: note = Description of Artificial Sequence: Synthetic oligonucleotide
  misc_feature 1..20: note = Target: SCN10A; (+) strand; PAM type: NRG; PAM sequence: AGG
  source 1..20: mol_type = other DNA
cccacaaggacaggagagga

SEQ ID NO: 33668 - DNA, 20 bp, synthetic construct
  misc_feature 1..20: note = Description of Artificial Sequence: Synthetic oligonucleotide
  misc_feature 1..20: note = Target: SCN10A; (+) strand; PAM type: NRG; PAM sequence: GGG
  source 1..20: mol_type = other DNA
ccacaaggacaggagaggaa

SEQ ID NO: 33669 - DNA, 20 bp, synthetic construct
  misc_feature 1..20: note = Description of Artificial Sequence: Synthetic oligonucleotide
  misc_feature 1..20: note = Target: SCN10A; (+) strand; PAM type: NRG; PAM sequence: GGG
  source 1..20: mol_type = other DNA
cacaaggacaggagaggaag

SEQ ID NO: 33670 - DNA, 20 bp, synthetic construct
  misc_feature 1..20: note = Description of Artificial Sequence: Synthetic oligonucleotide
  misc_feature 1..20: note = Target: SCN10A; (+) strand; PAM type: NRG; PAM sequence: GGG
  source 1..20: mol_type = other DNA
acaaggacaggagaggaagg

SEQ ID NO: 33671 - DNA, 20 bp, synthetic construct
  misc_feature 1..20: note = Description of Artificial Sequence: Synthetic oligonucleotide
  misc_feature 1..20: note = Target: SCN10A; (+) strand; PAM type: NRG; PAM sequence: GAG
  source 1..20: mol_type = other DNA
aaggacaggagaggaagggg

SEQ ID NO: 33672 - DNA, 20 bp, synthetic construct
  misc_feature 1..20: note = Description of Artificial Sequence: Synthetic oligonucleotide
  misc_feature 1..20: note = Target: SCN10A; (+) strand; PAM type: NRG; PAM sequence: TGG
  source 1..20: mol_type = other DNA
acaggagaggaagggggagc

SEQ ID NO: 33673 - DNA, 20 bp, synthetic construct
  misc_feature 1..20: note = Description of Artificial Sequence: Synthetic oligonucleotide
  misc_feature 1..20: note = Target: SCN10A; (+) strand; PAM type: NRG; PAM sequence: TGG
  source 1..20: mol_type = other DNA
gagaggaagggggagctggc

SEQ ID NO: 33674 - DNA, 20 bp, synthetic construct
  misc_feature 1..20: note = Description of Artificial Sequence: Synthetic oligonucleotide
  misc_feature 1..20: note = Target: SCN10A; (+) strand; PAM type: NRG; PAM sequence: CAG
  source 1..20: mol_type = other DNA
gaagggggagctggctggtg

SEQ ID NO: 33675 - DNA, 20 bp, synthetic construct
  misc_feature 1..20: note = Description of Artificial Sequence: Synthetic oligonucleotide
  misc_feature 1..20: note = Target: SCN10A; (+) strand; PAM type: NRG; PAM sequence: CAG
  source 1..20: mol_type = other DNA
gagctggctggtgcagtccc

SEQ ID NO: 33676 - DNA, 20 bp, synthetic construct
  misc_feature 1..20: note = Description of Artificial Sequence: Synthetic oligonucleotide
  misc_feature 1..20: note = Target: SCN10A; (+) strand; PAM type: NRG; PAM sequence: GAG
  source 1..20: mol_type = other DNA
gctggctggtgcagtcccca

SEQ ID NO: 33677 - DNA, 20 bp, synthetic construct
  misc_feature 1..20: note = Description of Artificial Sequence: Synthetic oligonucleotide
  misc_feature 1..20: note = Target: SCN10A; (+) strand; PAM type: NRG; PAM sequence: CAG
  source 1..20: mol_type = other DNA
ctggtgcagtccccagagca

SEQ ID NO: 33678 - DNA, 20 bp, synthetic construct
  misc_feature 1..20: note = Description of Artificial Sequence: Synthetic oligonucleotide
  misc_feature 1..20: note = Target: SCN10A; (+) strand; PAM type: NRG; PAM sequence: TGG
  source 1..20: mol_type = other DNA
cacagtgtcttccctgaatc

SEQ ID NO: 33679 - DNA, 20 bp, synthetic construct
  misc_feature 1..20: note = Description of Artificial Sequence: Synthetic oligonucleotide
  misc_feature 1..20: note = Target: SCN10A; (+) strand; PAM type: NRG; PAM sequence: GGG
  source 1..20: mol_type = other DNA
acagtgtcttccctgaatct

SEQ ID NO: 33680 - DNA, 20 bp, synthetic construct
  misc_feature 1..20: note = Description of Artificial Sequence: Synthetic oligonucleotide
  misc_feature 1..20: note = Target: SCN10A; (+) strand; PAM type: NRG; PAM sequence: TGG
  source 1..20: mol_type = other DNA
gtgtcttccctgaatctggg

SEQ ID NO: 33681 - DNA, 20 bp, synthetic construct
  misc_feature 1..20: note = Description of Artificial Sequence: Synthetic oligonucleotide
  misc_feature 1..20: note = Target: SCN10A; (+) strand; PAM type: NRG; PAM sequence: GGG
  source 1..20: mol_type = other DNA
tgtcttccctgaatctgggt

SEQ ID NO: 33682 - DNA, 20 bp, synthetic construct
  misc_feature 1..20: note = Description of Artificial Sequence: Synthetic oligonucleotide
  misc_feature 1..20: note = Target: SCN10A; (+) strand; PAM type: NRG; PAM sequence: GAG
  source 1..20: mol_type = other DNA
tcttccctgaatctgggtgg

SEQ ID NO: 33683 - DNA, 20 bp, synthetic construct
  misc_feature 1..20: note = Description of Artificial Sequence: Synthetic oligonucleotide
  misc_feature 1..20: note = Target: SCN10A; (+) strand; PAM type: NRG; PAM sequence: AAG
  source 1..20: mol_type = other DNA
atctgggtgggagtttcccc

SEQ ID NO: 33684 - DNA, 20 bp, synthetic construct
  misc_feature 1..20: note = Description of Artificial Sequence: Synthetic oligonucleotide
  misc_feature 1..20: note = Target: SCN10A; (+) strand; PAM type: NRG; PAM sequence: AAG
  source 1..20: mol_type = other DNA
gggagtttccccaagccatc

SEQ ID NO: 33685 - DNA, 20 bp, synthetic construct
  misc_feature 1..20: note = Description of Artificial Sequence: Synthetic oligonucleotide
  misc_feature 1..20: note = Target: SCN10A; (+) strand; PAM type: NRG; PAM sequence: GAG
  source 1..20: mol_type = other DNA
gagtttccccaagccatcaa

SEQ ID NO: 33686 - DNA, 20 bp, synthetic construct
  misc_feature 1..20: note = Description of Artificial Sequence: Synthetic oligonucleotide
  misc_feature 1..20: note = Target: SCN10A; (+) strand; PAM type: NRG; PAM sequence: AAG
  source 1..20: mol_type = other DNA
atcaagagaaaaacattacc

SEQ ID NO: 33687 - DNA, 20 bp, synthetic construct
  misc_feature 1..20: note = Description of Artificial Sequence: Synthetic oligonucleotide
  misc_feature 1..20: note = Target: SCN10A; (+) strand; PAM type: NRG; PAM sequence: CGG
  source 1..20: mol_type = other DNA
aagagaaaaacattaccaag

SEQ ID NO: 33688 - DNA, 20 bp, synthetic construct
  misc_feature 1..20: note = Description of Artificial Sequence: Synthetic oligonucleotide
  misc_feature 1..20: note = Target: SCN10A; (+) strand; PAM type: NRG; PAM sequence: AAG
  source 1..20: mol_type = other DNA
agaaaaacattaccaagcgg

SEQ ID NO: 33689 - DNA, 20 bp, synthetic construct
  misc_feature 1..20: note = Description of Artificial Sequence: Synthetic oligonucleotide
  misc_feature 1..20: note = Target: SCN10A; (+) strand; PAM type: NRG; PAM sequence: CAG
  source 1..20: mol_type = other DNA
attaccaagcggaagctccg

SEQ ID NO: 33690 - DNA, 20 bp, synthetic construct
  misc_feature 1..20: note = Description of Artificial Sequence: Synthetic oligonucleotide
  misc_feature 1..20: note = Target: SCN10A; (+) strand; PAM type: NRG; PAM sequence: CAG
  source 1..20: mol_type = other DNA
caagcggaagctccgcagca

SEQ ID NO: 33691 - DNA, 20 bp, synthetic construct
  misc_feature 1..20: note = Description of Artificial Sequence: Synthetic oligonucleotide
  misc_feature 1..20: note = Target: SCN10A; (+) strand; PAM type: NRG; PAM sequence: CAG
  source 1..20: mol_type = other DNA
cggaagctccgcagcacaga

SEQ ID NO: 33692 - DNA, 20 bp, synthetic construct
  misc_feature 1..20: note = Description of Artificial Sequence: Synthetic oligonucleotide
  misc_feature 1..20: note = Target: SCN10A; (+) strand; PAM type: NRG; PAM sequence: AGG
  source 1..20: mol_type = other DNA
ggaagctccgcagcacagac

SEQ ID NO: 33693 - DNA, 20 bp, synthetic construct
  misc_feature 1..20: note = Description of Artificial Sequence: Synthetic oligonucleotide
  misc_feature 1..20: note = Target: SCN10A; (+) strand; PAM type: NRG; PAM sequence: TGG
  source 1..20: mol_type = other DNA
cacagacaggcttcccttct

SEQ ID NO: 33694 - DNA, 20 bp, synthetic construct
  misc_feature 1..20: note = Description of Artificial Sequence: Synthetic oligonucleotide
  misc_feature 1..20: note = Target: SCN10A; (+) strand; PAM type: NRG; PAM sequence: CAG
  source 1..20: mol_type = other DNA
cttcccttcttggccacgcc

SEQ ID NO: 33695 - DNA, 20 bp, synthetic construct
  misc_feature 1..20: note = Description of Artificial Sequence: Synthetic oligonucleotide
  misc_feature 1..20: note = Target: SCN10A; (+) strand; PAM type: NRG; PAM sequence: TAG
  source 1..20: mol_type = other DNA
ttcttggccacgcccagctc

SEQ ID NO: 33696 - DNA, 20 bp, synthetic construct
  misc_feature 1..20: note = Description of Artificial Sequence: Synthetic oligonucleotide
  misc_feature 1..20: note = Target: SCN10A; (+) strand; PAM type: NRG; PAM sequence: CAG
  source 1..20: mol_type = other DNA
ttggccacgcccagctctag

SEQ ID NO: 33697 - DNA, 20 bp, synthetic construct
  misc_feature 1..20: note = Description of Artificial Sequence: Synthetic oligonucleotide
  misc_feature 1..20: note = Target: SCN10A; (+) strand; PAM type: NRG; PAM sequence: CAG
  source 1..20: mol_type = other DNA
gcccagctctagcagactca

SEQ ID NO: 33698 - DNA, 20 bp, synthetic construct
  misc_feature 1..20: note = Description of Artificial Sequence: Synthetic oligonucleotide
  misc_feature 1..20: note = Target: SCN10A; (+) strand; PAM type: NRG; PAM sequence: CAG
  source 1..20: mol_type = other DNA
gactcacagtgacgatgatg

SEQ ID NO: 33699 - DNA, 20 bp, synthetic construct
  misc_feature 1..20: note = Description of Artificial Sequence: Synthetic oligonucleotide
  misc_feature 1..20: note = Target: SCN10A; (+) strand; PAM type: NRG; PAM sequence: AAG
  source 1..20: mol_type = other DNA
cagtgacgatgatgcagtca

SEQ ID NO: 33700 - DNA, 20 bp, synthetic construct
  misc_feature 1..20: note = Description of Artificial Sequence: Synthetic oligonucleotide
  misc_feature 1..20: note = Target: SCN10A; (+) strand; PAM type: NRG; PAM sequence: TGG
  source 1..20: mol_type = other DNA
caaagatattccacttcttc

SEQ ID NO: 33701 - DNA, 20 bp, synthetic construct
  misc_feature 1..20: note = Description of Artificial Sequence: Synthetic oligonucleotide
  misc_feature 1..20: note = Target: SCN10A; (+) strand; PAM type: NRG; PAM sequence: TAG
  source 1..20: mol_type = other DNA
tccacttcttctggaaataa

SEQ ID NO: 33702 - DNA, 20 bp, synthetic construct
  misc_feature 1..20: note = Description of Artificial Sequence: Synthetic oligonucleotide
  misc_feature 1..20: note = Target: SCN10A; (+) strand; PAM type: NRG; PAM sequence: TGG
  source 1..20: mol_type = other DNA
ttcttctggaaataatagta

SEQ ID NO: 33703 - DNA, 20 bp, synthetic construct
  misc_feature 1..20: note = Description of Artificial Sequence: Synthetic oligonucleotide
  misc_feature 1..20: note = Target: SCN10A; (+) strand; PAM type: NRG; PAM sequence: GGG
  source 1..20: mol_type = other DNA
tcttctggaaataatagtat

SEQ ID NO: 33704 - DNA, 20 bp, synthetic construct
  misc_feature 1..20: note = Description of Artificial Sequence: Synthetic oligonucleotide
  misc_feature 1..20: note = Target: SCN10A; (+) strand; PAM type: NRG; PAM sequence: AAG
  source 1..20: mol_type = other DNA
ggaaataatagtatgggtcg

SEQ ID NO: 33705 - DNA, 20 bp, synthetic construct
  misc_feature 1..20: note = Description of Artificial Sequence: Synthetic oligonucleotide
  misc_feature 1..20: note = Target: SCN10A; (+) strand; PAM type: NRG; PAM sequence: AGG
  source 1..20: mol_type = other DNA
gaaataatagtatgggtcga

SEQ ID NO: 33706 - DNA, 20 bp, synthetic construct
  misc_feature 1..20: note = Description of Artificial Sequence: Synthetic oligonucleotide
  misc_feature 1..20: note = Target: SCN10A; (+) strand; PAM type: NRG; PAM sequence: AAG
  source 1..20: mol_type = other DNA
ggtcgaaggcaatgattttg

SEQ ID NO: 33707 - DNA, 20 bp, synthetic construct
  misc_feature 1..20: note = Description of Artificial Sequence: Synthetic oligonucleotide
  misc_feature 1..20: note = Target: SCN10A; (+) strand; PAM type: NRG; PAM sequence: CAG
  source 1..20: mol_type = other DNA
aatgattttgaagaccattt

SEQ ID NO: 33708 - DNA, 20 bp, synthetic construct
  misc_feature 1..20: note = Description of Artificial Sequence: Synthetic oligonucleotide
  misc_feature 1..20: note = Target: SCN10A; (+) strand; PAM type: NRG; PAM sequence: CAG
  source 1..20: mol_type = other DNA
gattttgaagaccatttcag

SEQ ID NO: 33709 - DNA, 20 bp, synthetic construct
  misc_feature 1..20: note = Description of Artificial Sequence: Synthetic oligonucleotide
  misc_feature 1..20: note = Target: SCN10A; (+) strand; PAM type: NRG; PAM sequence: TGG
  source 1..20: mol_type = other DNA
catttcagcagtaaaaaata

SEQ ID NO: 33710 - DNA, 20 bp, synthetic construct
  misc_feature 1..20: note = Description of Artificial Sequence: Synthetic oligonucleotide
  misc_feature 1..20: note = Target: SCN10A; (+) strand; PAM type: NRG; PAM sequence: AAG
  source 1..20: mol_type = other DNA
cagcagtaaaaaatatggta

SEQ ID NO: 33711 - DNA, 20 bp, synthetic construct
  misc_feature 1..20: note = Description of Artificial Sequence: Synthetic oligonucleotide
  misc_feature 1..20: note = Target: SCN10A; (+) strand; PAM type: NRG; PAM sequence: TAG
  source 1..20: mol_type = other DNA
taaaaaatatggtaaagacc

SEQ ID NO: 33712 - DNA, 20 bp, synthetic construct
  misc_feature 1..20: note = Description of Artificial Sequence: Synthetic oligonucleotide
  misc_feature 1..20: note = Target: SCN10A; (+) strand; PAM type: NRG; PAM sequence: AGG
  source 1..20: mol_type = other DNA
aaaaaatatggtaaagacct

SEQ ID NO: 33713 - DNA, 20 bp, synthetic construct
  misc_feature 1..20: note = Description of Artificial Sequence: Synthetic oligonucleotide
  misc_feature 1..20: note = Target: SCN10A; (+) strand; PAM type: NRG; PAM sequence: GAG
  source 1..20: mol_type = other DNA
aaaatatggtaaagacctag

SEQ ID NO: 33714 - DNA, 20 bp, synthetic construct
  misc_feature 1..20: note = Description of Artificial Sequence: Synthetic oligonucleotide
  misc_feature 1..20: note = Target: SCN10A; (+) strand; PAM type: NRG; PAM sequence: TGG
  source 1..20: mol_type = other DNA
atatggtaaagacctaggag

SEQ ID NO: 33715 - DNA, 20 bp, synthetic construct
  misc_feature 1..20: note = Description of Artificial Sequence: Synthetic oligonucleotide
  misc_feature 1..20: note = Target: SCN10A; (+) strand; PAM type: NRG; PAM sequence: AAG
  source 1..20: mol_type = other DNA
aaagacctaggagtggaaac

SEQ ID NO: 33716 - DNA, 20 bp, synthetic construct
  misc_feature 1..20: note = Description of Artificial Sequence: Synthetic oligonucleotide
  misc_feature 1..20: note = Target: SCN10A; (+) strand; PAM type: NRG; PAM sequence: CAG
  source 1..20: mol_type = other DNA
gtggaaacaagctttcatca

SEQ ID NO: 33717 - DNA, 20 bp, synthetic construct
  misc_feature 1..20: note = Description of Artificial Sequence: Synthetic oligonucleotide
  misc_feature 1..20: note = Target: SCN10A; (+) strand; PAM type: NRG; PAM sequence: TGG
  source 1..20: mol_type = other DNA
gaaacaagctttcatcacag

SEQ ID NO: 33718 - DNA, 20 bp, synthetic construct
  misc_feature 1..20: note = Description of Artificial Sequence: Synthetic oligonucleotide
  misc_feature 1..20: note = Target: SCN10A; (+) strand; PAM type: NRG; PAM sequence: GGG
  source 1..20: mol_type = other DNA
aaacaagctttcatcacagt

SEQ ID NO: 33719 - DNA, 20 bp, synthetic construct
  misc_feature 1..20: note = Description of Artificial Sequence: Synthetic oligonucleotide
  misc_feature 1..20: note = Target: SCN10A; (+) strand; PAM type: NRG; PAM sequence: TGG
  source 1..20: mol_type = other DNA
tttcatcacagtgggatctg

SEQ ID NO: 33720 - DNA, 20 bp, synthetic construct
  misc_feature 1..20: note = Description of Artificial Sequence: Synthetic oligonucleotide
  misc_feature 1..20: note = Target: SCN10A; (+) strand; PAM type: NRG; PAM sequence: GGG
  source 1..20: mol_type = other DNA
ttcatcacagtgggatctgt

SEQ ID NO: 33721 - DNA, 20 bp, synthetic construct
  misc_feature 1..20: note = Description of Artificial Sequence: Synthetic oligonucleotide
  misc_feature 1..20: note = Target: SCN10A; (+) strand; PAM type: NRG; PAM sequence: GGG
  source 1..20: mol_type = other DNA
tcatcacagtgggatctgtg

SEQ ID NO: 33722 - DNA, 20 bp, synthetic construct
  misc_feature 1..20: note = Description of Artificial Sequence: Synthetic oligonucleotide
  misc_feature 1..20: note = Target: SCN10A; (+) strand; PAM type: NRG; PAM sequence: CGG
  source 1..20: mol_type = other DNA
cacagtgggatctgtggggt

SEQ ID NO: 33723 - DNA, 20 bp, synthetic construct
  misc_feature 1..20: note = Description of Artificial Sequence: Synthetic oligonucleotide
  misc_feature 1..20: note = Target: SCN10A; (+) strand; PAM type: NRG; PAM sequence: GAG
  source 1..20: mol_type = other DNA
cagtgggatctgtggggtcg

SEQ ID NO: 33724 - DNA, 20 bp, synthetic construct
  misc_feature 1..20: note = Description of Artificial Sequence: Synthetic oligonucleotide
  misc_feature 1..20: note = Target: SCN10A; (+) strand; PAM type: NRG; PAM sequence: AGG
  source 1..20: mol_type = other DNA
agtgggatctgtggggtcgg

SEQ ID NO: 33725 - DNA, 20 bp, synthetic construct
  misc_feature 1..20: note = Description of Artificial Sequence: Synthetic oligonucleotide
  misc_feature 1..20: note = Target: SCN10A; (+) strand; PAM type: NRG; PAM sequence: TGG
  source 1..20: mol_type = other DNA
gtcggaggcaatgataaaaa

SEQ ID NO: 33726 - DNA, 20 bp, synthetic construct
  misc_feature 1..20: note = Description of Artificial Sequence: Synthetic oligonucleotide
  misc_feature 1..20: note = Target: SCN10A; (+) strand; PAM type: NRG; PAM sequence: CAG
  source 1..20: mol_type = other DNA
ggaggcaatgataaaaatgg

SEQ ID NO: 33727 - DNA, 20 bp, synthetic construct
  misc_feature 1..20: note = Description of Artificial Sequence: Synthetic oligonucleotide
  misc_feature 1..20: note = Target: SCN10A; (+) strand; PAM type: NRG; PAM sequence: AAG
  source 1..20: mol_type = other DNA
gcaatgataaaaatggcagc

SEQ ID NO: 33728 - DNA, 20 bp, synthetic construct
  misc_feature 1..20: note = Description of Artificial Sequence: Synthetic oligonucleotide
  misc_feature 1..20: note = Target: SCN10A; (+) strand; PAM type: NRG; PAM sequence: TAG
  source 1..20: mol_type = other DNA
aaaatgtcttatttacaaaa

SEQ ID NO: 33729 - DNA, 20 bp, synthetic construct
  misc_feature 1..20: note = Description of Artificial Sequence: Synthetic oligonucleotide
  misc_feature 1..20: note = Target: SCN10A; (+) strand; PAM type: NRG; PAM sequence: CAG
  source 1..20: mol_type = other DNA
gaaaatccttttgttttgtt

SEQ ID NO: 33730 - DNA, 20 bp, synthetic construct
  misc_feature 1..20: note = Description of Artificial Sequence: Synthetic oligonucleotide
  misc_feature 1..20: note = Target: SCN10A; (+) strand; PAM type: NRG; PAM sequence: TGG
  source 1..20: mol_type = other DNA
ttcagttgctatgttatctg

SEQ ID NO: 33731 - DNA, 20 bp, synthetic construct
  misc_feature 1..20: note = Description of Artificial Sequence: Synthetic oligonucleotide
  misc_feature 1..20: note = Target: SCN10A; (+) strand; PAM type: NRG; PAM sequence: GGG
  source 1..20: mol_type = other DNA
tcagttgctatgttatctgt

SEQ ID NO: 33732 - DNA, 20 bp, synthetic construct
  misc_feature 1..20: note = Description of Artificial Sequence: Synthetic oligonucleotide
  misc_feature 1..20: note = Target: SCN10A; (+) strand; PAM type: NRG; PAM sequence: GAG
  source 1..20: mol_type = other DNA
tatgttatctgtgggctcct

SEQ ID NO: 33733 - DNA, 20 bp, synthetic construct
  misc_feature 1..20: note = Description of Artificial Sequence: Synthetic oligonucleotide
  misc_feature 1..20: note = Target: SCN10A; (+) strand; PAM type: NRG; PAM sequence: AGG
  source 1..20: mol_type = other DNA
atgttatctgtgggctcctg

SEQ ID NO: 33734 - DNA, 20 bp, synthetic construct
  misc_feature 1..20: note = Description of Artificial Sequence: Synthetic oligonucleotide
  misc_feature 1..20: note = Target: SCN10A; (+) strand; PAM type: NRG; PAM sequence: TGG
  source 1..20: mol_type = other DNA
atctgtgggctcctgaggat

SEQ ID NO: 33735 - DNA, 20 bp, synthetic construct
  misc_feature 1..20: note = Description of Artificial Sequence: Synthetic oligonucleotide
  misc_feature 1..20: note = Target: SCN10A; (+) strand; PAM type: NRG; PAM sequence: CAG
  source 1..20: mol_type = other DNA
gtgggctcctgaggattggc

SEQ ID NO: 33736 - DNA, 20 bp, synthetic construct
  misc_feature 1..20: note = Description of Artificial Sequence: Synthetic oligonucleotide
  misc_feature 1..20: note = Target: SCN10A; (+) strand; PAM type: NRG; PAM sequence: AGG
  source 1..20: mol_type = other DNA
tgggctcctgaggattggcc

SEQ ID NO: 33737 - DNA, 20 bp, synthetic construct
  misc_feature 1..20: note = Description of Artificial Sequence: Synthetic oligonucleotide
  misc_feature 1..20: note = Target: SCN10A; (+) strand; PAM type: NRG; PAM sequence: GGG
  source 1..20: mol_type = other DNA
gggctcctgaggattggcca

SEQ ID NO: 33738 - DNA, 20 bp, synthetic construct
  misc_feature 1..20: note = Description of Artificial Sequence: Synthetic oligonucleotide
  misc_feature 1..20: note = Target: SCN10A; (+) strand; PAM type: NRG; PAM sequence: CAG
  source 1..20: mol_type = other DNA
ctgaggattggccagggtaa

SEQ ID NO: 33739 - DNA, 20 bp, synthetic construct
  misc_feature 1..20: note = Description of Artificial Sequence: Synthetic oligonucleotide
  misc_feature 1..20: note = Target: SCN10A; (+) strand; PAM type: NRG; PAM sequence: CAG
  source 1..20: mol_type = other DNA
cagggtaacagtcaacgtga

SEQ ID NO: 33740 - DNA, 20 bp, synthetic construct
  misc_feature 1..20: note = Description of Artificial Sequence: Synthetic oligonucleotide
  misc_feature 1..20: note = Target: SCN10A; (+) strand; PAM type: NRG; PAM sequence: TGG
  source 1..20: mol_type = other DNA
taacagtcaacgtgacagaa

SEQ ID NO: 33741 - DNA, 20 bp, synthetic construct
  misc_feature 1..20: note = Description of Artificial Sequence: Synthetic oligonucleotide
  misc_feature 1..20: note = Target: SCN10A; (+) strand; PAM type: NRG; PAM sequence: GAG
  source 1..20: mol_type = other DNA
acagtcaacgtgacagaatg

SEQ ID NO: 33742 - DNA, 20 bp, synthetic construct
  misc_feature 1..20: note = Description of Artificial Sequence: Synthetic oligonucleotide
  misc_feature 1..20: note = Target: SCN10A; (+) strand; PAM type: NRG; PAM sequence: CAG
  source 1..20: mol_type = other DNA
agacatttctgcaccattct

SEQ ID NO: 33743 - DNA, 20 bp, synthetic construct
  misc_feature 1..20: note = Description of Artificial Sequence: Synthetic oligonucleotide
  misc_feature 1..20: note = Target: SCN10A; (+) strand; PAM type: NRG; PAM sequence: AGG
  source 1..20: mol_type = other DNA
gacatttctgcaccattctc

SEQ ID NO: 33744 - DNA, 20 bp, synthetic construct
  misc_feature 1..20: note = Description of Artificial Sequence: Synthetic oligonucleotide
  misc_feature 1..20: note = Target: SCN10A; (+) strand; PAM type: NRG; PAM sequence: GGG
  source 1..20: mol_type = other DNA
acatttctgcaccattctca

SEQ ID NO: 33745 - DNA, 20 bp, synthetic construct
  misc_feature 1..20: note = Description of Artificial Sequence: Synthetic oligonucleotide
  misc_feature 1..20: note = Target: SCN10A; (+) strand; PAM type: NRG; PAM sequence: GGG
  source 1..20: mol_type = other DNA
catttctgcaccattctcag

SEQ ID NO: 33746 - DNA, 20 bp, synthetic construct
  misc_feature 1..20: note = Description of Artificial Sequence: Synthetic oligonucleotide
  misc_feature 1..20: note = Target: SCN10A; (+) strand; PAM type: NRG; PAM sequence: CAG
  source 1..20: mol_type = other DNA
ctcaggggctgtgcatgctg

SEQ ID NO: 33747 - DNA, 20 bp, synthetic construct
  misc_feature 1..20: note = Description of Artificial Sequence: Synthetic oligonucleotide
  misc_feature 1..20: note = Target: SCN10A; (+) strand; PAM type: NRG; PAM sequence: TGG
  source 1..20: mol_type = other DNA
ctgcagtttttccacgtgaa

SEQ ID NO: 33748 - DNA, 20 bp, synthetic construct
  misc_feature 1..20: note = Description of Artificial Sequence: Synthetic oligonucleotide
  misc_feature 1..20: note = Target: SCN10A; (+) strand; PAM type: NRG; PAM sequence: TGG
  source 1..20: mol_type = other DNA
cagtttttccacgtgaatgg

SEQ ID NO: 33749 - DNA, 20 bp, synthetic construct
  misc_feature 1..20: note = Description of Artificial Sequence: Synthetic oligonucleotide
  misc_feature 1..20: note = Target: SCN10A; (+) strand; PAM type: NRG; PAM sequence: TGG
  source 1..20: mol_type = other DNA
tttttccacgtgaatggtgg

SEQ ID NO: 33750 - DNA, 20 bp, synthetic construct
  misc_feature 1..20: note = Description of Artificial Sequence: Synthetic oligonucleotide
  misc_feature 1..20: note = Target: SCN10A; (+) strand; PAM type: NRG; PAM sequence: GGG
  source 1..20: mol_type = other DNA
ttttccacgtgaatggtggt

SEQ ID NO: 33751 - DNA, 20 bp, synthetic construct
  misc_feature 1..20: note = Description of Artificial Sequence: Synthetic oligonucleotide
  misc_feature 1..20: note = Target: SCN10A; (+) strand; PAM type: NRG; PAM sequence: GAG
  source 1..20: mol_type = other DNA
ttccacgtgaatggtggtgg

SEQ ID NO: 33752 - DNA, 20 bp, synthetic construct
  misc_feature 1..20: note = Description of Artificial Sequence: Synthetic oligonucleotide
  misc_feature 1..20: note = Target: SCN10A; (+) strand; PAM type: NRG; PAM sequence: TGG
  source 1..20: mol_type = other DNA
cacgtgaatggtggtgggag

SEQ ID NO: 33753 - DNA, 20 bp, synthetic construct
  misc_feature 1..20: note = Description of Artificial Sequence: Synthetic oligonucleotide
  misc_feature 1..20: note = Target: SCN10A; (+) strand; PAM type: NRG; PAM sequence: AAG
  source 1..20: mol_type = other DNA
aatggtggtgggagtggaat

SEQ ID NO: 33754 - DNA, 20 bp, synthetic construct
  misc_feature 1..20: note = Description of Artificial Sequence: Synthetic oligonucleotide
  misc_feature 1..20: note = Target: SCN10A; (+) strand; PAM type: NRG; PAM sequence: CGG
  source 1..20: mol_type = other DNA
ggtggtgggagtggaataag

SEQ ID NO: 33755 - DNA, 20 bp, synthetic construct
  misc_feature 1..20: note = Description of Artificial Sequence: Synthetic oligonucleotide
  misc_feature 1..20: note = Target: SCN10A; (+) strand; PAM type: NRG; PAM sequence: TAG
  source 1..20: mol_type = other DNA
gtgggagtggaataagcgga

SEQ ID NO: 33756 - DNA, 20 bp, synthetic construct
  misc_feature 1..20: note = Description of Artificial Sequence: Synthetic oligonucleotide
  misc_feature 1..20: note = Target: SCN10A; (+) strand; PAM type: NRG; PAM sequence: AAG
  source 1..20: mol_type = other DNA
ggaataagcggatagtcttt

SEQ ID NO: 33757 - DNA, 20 bp, synthetic construct
  misc_feature 1..20: note = Description of Artificial Sequence: Synthetic oligonucleotide
  misc_feature 1..20: note = Target: SCN10A; (+) strand; PAM type: NRG; PAM sequence: CAG
  source 1..20: mol_type = other DNA
ttattataatatcattttgt

SEQ ID NO: 33758 - DNA, 20 bp, synthetic construct
  misc_feature 1..20: note = Description of Artificial Sequence: Synthetic oligonucleotide
  misc_feature 1..20: note = Target: SCN10A; (+) strand; PAM type: NRG; PAM sequence: AAG
  source 1..20: mol_type = other DNA
ataatatcattttgtcagtg

SEQ ID NO: 33759 - DNA, 20 bp, synthetic construct
  misc_feature 1..20: note = Description of Artificial Sequence: Synthetic oligonucleotide
  misc_feature 1..20: note = Target: SCN10A; (+) strand; PAM type: NRG; PAM sequence: GAG
  source 1..20: mol_type = other DNA
aatatcattttgtcagtgaa

SEQ ID NO: 33760 - DNA, 20 bp, synthetic construct
  misc_feature 1..20: note = Description of Artificial Sequence: Synthetic oligonucleotide
  misc_feature 1..20: note = Target: SCN10A; (+) strand; PAM type: NRG; PAM sequence: CAG
  source 1..20: mol_type = other DNA
tcattttgtcagtgaagagt

SEQ ID NO: 33761 - DNA, 20 bp, synthetic construct
  misc_feature 1..20: note = Description of Artificial Sequence: Synthetic oligonucleotide
  misc_feature 1..20: note = Target: SCN10A; (+) strand; PAM type: NRG; PAM sequence: TGG
  source 1..20: mol_type = other DNA
ttgtcagtgaagagtcagtc

SEQ ID NO: 33762 - DNA, 20 bp, synthetic construct
  misc_feature 1..20: note = Description of Artificial Sequence: Synthetic oligonucleotide
  misc_feature 1..20: note = Target: SCN10A; (+) strand; PAM type: NRG; PAM sequence: CAG
  source 1..20: mol_type = other DNA
agtgaagagtcagtctggtt

SEQ ID NO: 33763 - DNA, 20 bp, synthetic construct
  misc_feature 1..20: note = Description of Artificial Sequence: Synthetic oligonucleotide
  misc_feature 1..20: note = Target: SCN10A; (+) strand; PAM type: NRG; PAM sequence: TAG
  source 1..20: mol_type = other DNA
gaagagtcagtctggttcag

SEQ ID NO: 33764 - DNA, 20 bp, synthetic construct
  misc_feature 1..20: note = Description of Artificial Sequence: Synthetic oligonucleotide
  misc_feature 1..20: note = Target: SCN10A; (+) strand; PAM type: NRG; PAM sequence: TGG
  source 1..20: mol_type = other DNA
ggttcagtagttaaaacgtg

SEQ ID NO: 33765 - DNA, 20 bp, synthetic construct
  misc_feature 1..20: note = Description of Artificial Sequence: Synthetic oligonucleotide
  misc_feature 1..20: note = Target: SCN10A; (+) strand; PAM type: NRG; PAM sequence: GGG
  source 1..20: mol_type = other DNA
gttcagtagttaaaacgtgt

SEQ ID NO: 33766 - DNA, 20 bp, synthetic construct
  misc_feature 1..20: note = Description of Artificial Sequence: Synthetic oligonucleotide
  misc_feature 1..20: note = Target: SCN10A; (+) strand; PAM type: NRG; PAM sequence: TGG
  source 1..20: mol_type = other DNA
tagttaaaacgtgtgggttg

SEQ ID NO: 33767 - DNA, 20 bp, synthetic construct
  misc_feature 1..20: note = Description of Artificial Sequence: Synthetic oligonucleotide
  misc_feature 1..20: note = Target: SCN10A; (+) strand; PAM type: NRG; PAM sequence: GGG
  source 1..20: mol_type = other DNA
agttaaaacgtgtgggttgt

SEQ ID NO: 33768 - DNA, 20 bp, synthetic construct
  misc_feature 1..20: note = Description of Artificial Sequence: Synthetic oligonucleotide
  misc_feature 1..20: note = Target: SCN10A; (+) strand; PAM type: NRG; PAM sequence: CAG
  source 1..20: mol_type = other DNA
gtgtgggttgtgggacatca

SEQ ID NO: 33769 - DNA, 20 bp, synthetic construct
  misc_feature 1..20: note = Description of Artificial Sequence: Synthetic oligonucleotide
  misc_feature 1..20: note = Target: SCN10A; (+) strand; PAM type: NRG; PAM sequence: TGG
  source 1..20: mol_type = other DNA
gttgtgggacatcacagacc

SEQ ID NO: 33770 - DNA, 20 bp, synthetic construct
  misc_feature 1..20: note = Description of Artificial Sequence: Synthetic oligonucleotide
  misc_feature 1..20: note = Target: SCN10A; (+) strand; PAM type: NRG; PAM sequence: CAG
  source 1..20: mol_type = other DNA
acagacctggattaaaatcc

SEQ ID NO: 33771 - DNA, 20 bp, synthetic construct
  misc_feature 1..20: note = Description of Artificial Sequence: Synthetic oligonucleotide
  misc_feature 1..20: note = Target: SCN10A; (+) strand; PAM type: NRG; PAM sequence: CAG
  source 1..20: mol_type = other DNA
cctggattaaaatcccagcc

SEQ ID NO: 33772 - DNA, 20 bp, synthetic construct
  misc_feature 1..20: note = Description of Artificial Sequence: Synthetic oligonucleotide
  misc_feature 1..20: note = Target: SCN10A; (+) strand; PAM type: NRG; PAM sequence: TAG
  source 1..20: mol_type = other DNA
atcccagcccagacatttcc

SEQ ID NO: 33773 - DNA, 20 bp, synthetic construct
  misc_feature 1..20: note = Description of Artificial Sequence: Synthetic oligonucleotide
  misc_feature 1..20: note = Target: SCN10A; (+) strand; PAM type: NRG; PAM sequence: AAG
  source 1..20: mol_type = other DNA
agacatttcctagcttatgt

SEQ ID NO: 33774 - DNA, 20 bp, synthetic construct
  misc_feature 1..20: note = Description of Artificial Sequence: Synthetic oligonucleotide
  misc_feature 1..20: note = Target: SCN10A; (+) strand; PAM type: NRG; PAM sequence: TGG
  source 1..20: mol_type = other DNA
tttcctagcttatgtaagct

SEQ ID NO: 33775 - DNA, 20 bp, synthetic construct
  misc_feature 1..20: note = Description of Artificial Sequence: Synthetic oligonucleotide
  misc_feature 1..20: note = Target: SCN10A; (+) strand; PAM type: NRG; PAM sequence: TGG
  source 1..20: mol_type = other DNA
caatttcctcatctgtataa

SEQ ID NO: 33776 - DNA, 20 bp, synthetic construct
  misc_feature 1..20: note = Description of Artificial Sequence: Synthetic oligonucleotide
  misc_feature 1..20: note = Target: SCN10A; (+) strand; PAM type: NRG; PAM sequence: GGG
  source 1..20: mol_type = other DNA
aatttcctcatctgtataat

SEQ ID NO: 33777 - DNA, 20 bp, synthetic construct
  misc_feature 1..20: note = Description of Artificial Sequence: Synthetic oligonucleotide
  misc_feature 1..20: note = Target: SCN10A; (+) strand; PAM type: NRG; PAM sequence: GAG
  source 1..20: mol_type = other DNA
ctgtataatgggcataaaat

SEQ ID NO: 33778 - DNA, 20 bp, synthetic construct
  misc_feature 1..20: note = Description of Artificial Sequence: Synthetic oligonucleotide
  misc_feature 1..20: note = Target: SCN10A; (+) strand; PAM type: NRG; PAM sequence: CAG
  source 1..20: mol_type = other DNA
aaaatgagccaatgcatgtg

SEQ ID NO: 33779 - DNA, 20 bp, synthetic construct
  misc_feature 1..20: note = Description of Artificial Sequence: Synthetic oligonucleotide
  misc_feature 1..20: note = Target: SCN10A; (+) strand; PAM type: NRG; PAM sequence: AAG
  source 1..20: mol_type = other DNA
tgcatgtgcagttcttaaca

SEQ ID NO: 33780 - DNA, 20 bp, synthetic construct
  misc_feature 1..20: note = Description of Artificial Sequence: Synthetic oligonucleotide
  misc_feature 1..20: note = Target: SCN10A; (+) strand; PAM type: NRG; PAM sequence: AGG
  source 1..20: mol_type = other DNA
gcatgtgcagttcttaacaa

SEQ ID NO: 33781 - DNA, 20 bp, synthetic construct
  misc_feature 1..20: note = Description of Artificial Sequence: Synthetic oligonucleotide
  misc_feature 1..20: note = Target: SCN10A; (+) strand; PAM type: NRG; PAM sequence: GGG
  source 1..20: mol_type = other DNA
catgtgcagttcttaacaaa

SEQ ID NO: 33782 - DNA, 20 bp, synthetic construct
  misc_feature 1..20: note = Description of Artificial Sequence: Synthetic oligonucleotide
  misc_feature 1..20: note = Target: SCN10A; (+) strand; PAM type: NRG; PAM sequence: TGG
  source 1..20: mol_type = other DNA
gcagttcttaacaaagggcc

SEQ ID NO: 33783 - DNA, 20 bp, synthetic construct
  misc_feature 1..20: note = Description of Artificial Sequence: Synthetic oligonucleotide
  misc_feature 1..20: note = Target: SCN10A; (+) strand; PAM type: NRG; PAM sequence: CAG
  source 1..20: mol_type = other DNA
gttcttaacaaagggcctgg

SEQ ID NO: 33784 - DNA, 20 bp, synthetic construct
  misc_feature 1..20: note = Description of Artificial Sequence: Synthetic oligonucleotide
  misc_feature 1..20: note = Target: SCN10A; (+) strand; PAM type: NRG; PAM sequence: CAG
  source 1..20: mol_type = other DNA
ttaacaaagggcctggcaga

SEQ ID NO: 33785 - DNA, 20 bp, synthetic construct
  misc_feature 1..20: note = Description of Artificial Sequence: Synthetic oligonucleotide
  misc_feature 1..20: note = Target: SCN10A; (+) strand; PAM type: NRG; PAM sequence: AAG
  source 1..20: mol_type = other DNA
gcagacagtaattcattcat

SEQ ID NO: 33786 - DNA, 20 bp, synthetic construct
  misc_feature 1..20: note = Description of Artificial Sequence: Synthetic oligonucleotide
  misc_feature 1..20: note = Target: SCN10A; (+) strand; PAM type: NRG; PAM sequence: CAG
  source 1..20: mol_type = other DNA
agtaattcattcataagtaa

SEQ ID NO: 33787 - DNA, 20 bp, synthetic construct
  misc_feature 1..20: note = Description of Artificial Sequence: Synthetic oligonucleotide
  misc_feature 1..20: note = Target: SCN10A; (+) strand; PAM type: NRG; PAM sequence: TAG
  source 1..20: mol_type = other DNA
cattcataagtaacagtgac

SEQ ID NO: 33788 - DNA, 20 bp, synthetic construct
  misc_feature 1..20: note = Description of Artificial Sequence: Synthetic oligonucleotide
  misc_feature 1..20: note = Target: SCN10A; (+) strand; PAM type: NRG; PAM sequence: AAG
  source 1..20: mol_type = other DNA
cataagtaacagtgactagt

SEQ ID NO: 33789 - DNA, 20 bp, synthetic construct
  misc_feature 1..20: note = Description of Artificial Sequence: Synthetic oligonucleotide
  misc_feature 1..20: note = Target: SCN10A; (+) strand; PAM type: NRG; PAM sequence: AAG
  source 1..20: mol_type = other DNA
aacaatgattcattgcctct

SEQ ID NO: 33790 - DNA, 20 bp, synthetic construct
  misc_feature 1..20: note = Description of Artificial Sequence: Synthetic oligonucleotide
  misc_feature 1..20: note = Target: SCN10A; (+) strand; PAM type: NRG; PAM sequence: TAG
  source 1..20: mol_type = other DNA
cattgcctctaagattcttt

SEQ ID NO: 33791 - DNA, 20 bp, synthetic construct
  misc_feature 1..20: note = Description of Artificial Sequence: Synthetic oligonucleotide
  misc_feature 1..20: note = Target: SCN10A; (+) strand; PAM type: NRG; PAM sequence: AGG
  source 1..20: mol_type = other DNA
attgcctctaagattctttt

SEQ ID NO: 33792 - DNA, 20 bp, synthetic construct
  misc_feature 1..20: note = Description of Artificial Sequence: Synthetic oligonucleotide
  misc_feature 1..20: note = Target: SCN10A; (+) strand; PAM type: NRG; PAM sequence: TAG
  source 1..20: mol_type = other DNA
gtgtctctaattgtcttaaa

SEQ ID NO: 33793 - DNA, 20 bp, synthetic construct
  misc_feature 1..20: note = Description of Artificial Sequence: Synthetic oligonucleotide
  misc_feature 1..20: note = Target: SCN10A; (+) strand; PAM type: NRG; PAM sequence: AGG
  source 1..20: mol_type = other DNA
tgtctctaattgtcttaaat

SEQ ID NO: 33794 - DNA, 20 bp, synthetic construct
  misc_feature 1..20: note = Description of Artificial Sequence: Synthetic oligonucleotide
  misc_feature 1..20: note = Target: SCN10A; (+) strand; PAM type: NRG; PAM sequence: CAG
  source 1..20: mol_type = other DNA
tctaattgtcttaaatagga

SEQ ID NO: 33795 - DNA, 20 bp, synthetic construct
  misc_feature 1..20: note = Description of Artificial Sequence: Synthetic oligonucleotide
  misc_feature 1..20: note = Target: SCN10A; (+) strand; PAM type: NRG; PAM sequence: GAG
  source 1..20: mol_type = other DNA
taggacagaattctgacact

SEQ ID NO: 33796 - DNA, 20 bp, synthetic construct
  misc_feature 1..20: note = Description of Artificial Sequence: Synthetic oligonucleotide
  misc_feature 1..20: note = Target: SCN10A; (+) strand; PAM type: NRG; PAM sequence: GAG
  source 1..20: mol_type = other DNA
ggacagaattctgacactga

SEQ ID NO: 33797 - DNA, 20 bp, synthetic construct
  misc_feature 1..20: note = Description of Artificial Sequence: Synthetic oligonucleotide
  misc_feature 1..20: note = Target: SCN10A; (+) strand; PAM type: NRG; PAM sequence: GAG
  source 1..20: mol_type = other DNA
acagaattctgacactgaga

SEQ ID NO: 33798 - DNA, 20 bp, synthetic construct
  misc_feature 1..20: note = Description of Artificial Sequence: Synthetic oligonucleotide
  misc_feature 1..20: note = Target: SCN10A; (+) strand; PAM type: NRG; PAM sequence: AGG
  source 1..20: mol_type = other DNA
cagaattctgacactgagag

SEQ ID NO: 33799 - DNA, 20 bp, synthetic construct
  misc_feature 1..20: note = Description of Artificial Sequence: Synthetic oligonucleotide
  misc_feature 1..20: note = Target: SCN10A; (+) strand; PAM type: NRG; PAM sequence: CAG
  source 1..20: mol_type = other DNA
attctgacactgagagaggt

SEQ ID NO: 33800 - DNA, 20 bp, synthetic construct
  misc_feature 1..20: note = Description of Artificial Sequence: Synthetic oligonucleotide
  misc_feature 1..20: note = Target: SCN10A; (+) strand; PAM type: NRG; PAM sequence: CAG
  source 1..20: mol_type = other DNA
acactgagagaggtcagaac

SEQ ID NO: 33801 - DNA, 20 bp, synthetic construct
  misc_feature 1..20: note = Description of Artificial Sequence: Synthetic oligonucleotide
  misc_feature 1..20: note = Target: SCN10A; (+) strand; PAM type: NRG; PAM sequence: AGG
  source 1..20: mol_type = other DNA
cactgagagaggtcagaacc

SEQ ID NO: 33802 - DNA, 20 bp, synthetic construct
  misc_feature 1..20: note = Description of Artificial Sequence: Synthetic oligonucleotide
  misc_feature 1..20: note = Target: SCN10A; (+) strand; PAM type: NRG; PAM sequence: CGG
  source 1..20: mol_type = other DNA
agagaggtcagaaccaggct

SEQ ID NO: 33803 - DNA, 20 bp, synthetic construct
  misc_feature 1..20: note = Description of Artificial Sequence: Synthetic oligonucleotide
  misc_feature 1..20: note = Target: SCN10A; (+) strand; PAM type: NRG; PAM sequence: GGG
  source 1..20: mol_type = other DNA
gagaggtcagaaccaggctc

SEQ ID NO: 33804 - DNA, 20 bp, synthetic construct
  misc_feature 1..20: note = Description of Artificial Sequence: Synthetic oligonucleotide
  misc_feature 1..20: note = Target: SCN10A; (+) strand; PAM type: NRG; PAM sequence: CAG
  source 1..20: mol_type = other DNA
ggctcgggtaacacaacaac

SEQ ID NO: 33805 - DNA, 20 bp, synthetic construct
  misc_feature 1..20: note = Description of Artificial Sequence: Synthetic oligonucleotide
  misc_feature 1..20: note = Target: SCN10A; (+) strand; PAM type: NRG; PAM sequence: CAG
  source 1..20: mol_type = other DNA
tcgggtaacacaacaaccag

SEQ ID NO: 33806 - DNA, 20 bp, synthetic construct
  misc_feature 1..20: note = Description of Artificial Sequence: Synthetic oligonucleotide
  misc_feature 1..20: note = Target: SCN10A; (+) strand; PAM type: NRG; PAM sequence: AGG
  source 1..20: mol_type = other DNA
cgggtaacacaacaaccagc

SEQ ID NO: 33807 - DNA, 20 bp, synthetic construct
  misc_feature 1..20: note = Description of Artificial Sequence: Synthetic oligonucleotide
  misc_feature 1..20: note = Target: SCN10A; (+) strand; PAM type: NRG; PAM sequence: GGG
  source 1..20: mol_type = other DNA
gggtaacacaacaaccagca

SEQ ID NO: 33808 - DNA, 20 bp, synthetic construct
  misc_feature 1..20: note = Description of Artificial Sequence: Synthetic oligonucleotide
  misc_feature 1..20: note = Target: SCN10A; (+) strand; PAM type: NRG; PAM sequence: AAG
  source 1..20: mol_type = other DNA
taacacaacaaccagcaggg

SEQ ID NO: 33809 - DNA, 20 bp, synthetic construct
  misc_feature 1..20: note = Description of Artificial Sequence: Synthetic oligonucleotide
  misc_feature 1..20: note = Target: SCN10A; (+) strand; PAM type: NRG; PAM sequence: AGG
  source 1..20: mol_type = other DNA
aacacaacaaccagcaggga

SEQ ID NO: 33810 - DNA, 20 bp, synthetic construct
  misc_feature 1..20: note = Description of Artificial Sequence: Synthetic oligonucleotide
  misc_feature 1..20: note = Target: SCN10A; (+) strand; PAM type: NRG; PAM sequence: GGG
  source 1..20: mol_type = other DNA
acacaacaaccagcagggaa

SEQ ID NO: 33811 - DNA, 20 bp, synthetic construct
  misc_feature 1..20: note = Description of Artificial Sequence: Synthetic oligonucleotide
  misc_feature 1..20: note = Target: SCN10A; (+) strand; PAM type: NRG; PAM sequence: GAG
  source 1..20: mol_type = other DNA
acaacaaccagcagggaagg

SEQ ID NO: 33812 - DNA, 20 bp, synthetic construct
  misc_feature 1..20: note = Description of Artificial Sequence: Synthetic oligonucleotide
  misc_feature 1..20: note = Target: SCN10A; (+) strand; PAM type: NRG; PAM sequence: CAG
  source 1..20: mol_type = other DNA
caaccagcagggaagggaga

SEQ ID NO: 33813 - DNA, 20 bp, synthetic construct
  misc_feature 1..20: note = Description of Artificial Sequence: Synthetic oligonucleotide
  misc_feature 1..20: note = Target: SCN10A; (+) strand; PAM type: NRG; PAM sequence: GAG
  source 1..20: mol_type = other DNA
accagcagggaagggagaca

SEQ ID NO: 33814 - DNA, 20 bp, synthetic construct
  misc_feature 1..20: note = Description of Artificial Sequence: Synthetic oligonucleotide
  misc_feature 1..20: note = Target: SCN10A; (+) strand; PAM type: NRG; PAM sequence: AAG
  source 1..20: mol_type = other DNA
agcagggaagggagacagag

SEQ ID NO: 33815 - DNA, 20 bp, synthetic construct
  misc_feature 1..20: note = Description of Artificial Sequence: Synthetic oligonucleotide
  misc_feature 1..20: note = Target: SCN10A; (+) strand; PAM type: NRG; PAM sequence: AGG
  source 1..20: mol_type = other DNA
gcagggaagggagacagaga

SEQ ID NO: 33816 - DNA, 20 bp, synthetic construct
  misc_feature 1..20: note = Description of Artificial Sequence: Synthetic oligonucleotide
  misc_feature 1..20: note = Target: SCN10A; (+) strand; PAM type: NRG; PAM sequence: GAG
  source 1..20: mol_type = other DNA
agggaagggagacagagaag

SEQ ID NO: 33817 - DNA, 20 bp, synthetic construct
  misc_feature 1..20: note = Description of Artificial Sequence: Synthetic oligonucleotide
  misc_feature 1..20: note = Target: SCN10A; (+) strand; PAM type: NRG; PAM sequence: AGG
  source 1..20: mol_type = other DNA
gggaagggagacagagaagg

SEQ ID NO: 33818 - DNA, 20 bp, synthetic construct
  misc_feature 1..20: note = Description of Artificial Sequence: Synthetic oligonucleotide
  misc_feature 1..20: note = Target: SCN10A; (+) strand; PAM type: NRG; PAM sequence: AAG
  source 1..20: mol_type = other DNA
agggagacagagaaggagga

SEQ ID NO: 33819 - DNA, 20 bp, synthetic construct
  misc_feature 1..20: note = Description of Artificial Sequence: Synthetic oligonucleotide
  misc_feature 1..20: note = Target: SCN10A; (+) strand; PAM type: NRG; PAM sequence: CAG
  source 1..20: mol_type = other DNA
agaaggaggaaagcaacgac

SEQ ID NO: 33820 - DNA, 20 bp, synthetic construct
  misc_feature 1..20: note = Description of Artificial Sequence: Synthetic oligonucleotide
  misc_feature 1..20: note = Target: SCN10A; (+) strand; PAM type: NRG; PAM sequence: AGG
  source 1..20: mol_type = other DNA
gaaggaggaaagcaacgacc

SEQ ID NO: 33821 - DNA, 20 bp, synthetic construct
  misc_feature 1..20: note = Description of Artificial Sequence: Synthetic oligonucleotide
  misc_feature 1..20: note = Target: SCN10A; (+) strand; PAM type: NRG; PAM sequence: GGG
  source 1..20: mol_type = other DNA
aaggaggaaagcaacgacca

SEQ ID NO: 33822 - DNA, 20 bp, synthetic construct
  misc_feature 1..20: note = Description of Artificial Sequence: Synthetic oligonucleotide
  misc_feature 1..20: note = Target: SCN10A; (+) strand; PAM type: NRG; PAM sequence: CAG
  source 1..20: mol_type = other DNA
aggaaagcaacgaccagggt

SEQ ID NO: 33823 - DNA, 20 bp, synthetic construct
  misc_feature 1..20: note = Description of Artificial Sequence: Synthetic oligonucleotide
  misc_feature 1..20: note = Target: SCN10A; (+) strand; PAM type: NRG; PAM sequence: AGG
  source 1..20: mol_type = other DNA
ggaaagcaacgaccagggtc

SEQ ID NO: 33824 - DNA, 20 bp, synthetic construct
  misc_feature 1..20: note = Description of Artificial Sequence: Synthetic oligonucleotide
  misc_feature 1..20: note = Target: SCN10A; (+) strand; PAM type: NRG; PAM sequence: GAG
  source 1..20: mol_type = other DNA
tccttcatatctttttatct

SEQ ID NO: 33825 - DNA, 20 bp, synthetic construct
  misc_feature 1..20: note = Description of Artificial Sequence: Synthetic oligonucleotide
  misc_feature 1..20: note = Target: SCN10A; (+) strand; PAM type: NRG; PAM sequence: CAG
  source 1..20: mol_type = other DNA
tttttatctgagcccctcac

SEQ ID NO: 33826 - DNA, 20 bp, synthetic construct
  misc_feature 1..20: note = Description of Artificial Sequence: Synthetic oligonucleotide
  misc_feature 1..20: note = Target: SCN10A; (+) strand; PAM type: NRG; PAM sequence: GAG
  source 1..20: mol_type = other DNA
tctgagcccctcaccagcct

SEQ ID NO: 33827 - DNA, 20 bp, synthetic construct
  misc_feature 1..20: note = Description of Artificial Sequence: Synthetic oligonucleotide
  misc_feature 1..20: note = Target: SCN10A; (+) strand; PAM type: NRG; PAM sequence: CAG
  source 1..20: mol_type = other DNA
cccctcaccagcctgagaaa

SEQ ID NO: 33828 - DNA, 20 bp, synthetic construct
  misc_feature 1..20: note = Description of Artificial Sequence: Synthetic oligonucleotide
  misc_feature 1..20: note = Target: SCN10A; (+) strand; PAM type: NRG; PAM sequence: TGG
  source 1..20: mol_type = other DNA
cagacaatgcatccttctta

SEQ ID NO: 33829 - DNA, 20 bp, synthetic construct
  misc_feature 1..20: note = Description of Artificial Sequence: Synthetic oligonucleotide
  misc_feature 1..20: note = Target: SCN10A; (+) strand; PAM type: NRG; PAM sequence: GAG
  source 1..20: mol_type = other DNA
gacaatgcatccttcttatg

SEQ ID NO: 33830 - DNA, 20 bp, synthetic construct
  misc_feature 1..20: note = Description of Artificial Sequence: Synthetic oligonucleotide
  misc_feature 1..20: note = Target: SCN10A; (+) strand; PAM type: NRG; PAM sequence: AAG
  source 1..20: mol_type = other DNA
aatgcatccttcttatggag

SEQ ID NO: 33831 - DNA, 20 bp, synthetic construct
  misc_feature 1..20: note = Description of Artificial Sequence: Synthetic oligonucleotide
  misc_feature 1..20: note = Target: SCN10A; (+) strand; PAM type: NRG; PAM sequence: CAG
  source 1..20: mol_type = other DNA
ccttcttatggagaagaaaa

SEQ ID NO: 33832 - DNA, 20 bp, synthetic construct
  misc_feature 1..20: note = Description of Artificial Sequence: Synthetic oligonucleotide
  misc_feature 1..20: note = Target: SCN10A; (+) strand; PAM type: NRG; PAM sequence: AGG
  source 1..20: mol_type = other DNA
cttcttatggagaagaaaac

SEQ ID NO: 33833 - DNA, 20 bp, synthetic construct
  misc_feature 1..20: note = Description of Artificial Sequence: Synthetic oligonucleotide
  misc_feature 1..20: note = Target: SCN10A; (+) strand; PAM type: NRG; PAM sequence: GAG
  source 1..20: mol_type = other DNA
tatggagaagaaaacaggct

SEQ ID NO: 33834 - DNA, 20 bp, synthetic construct
  misc_feature 1..20: note = Description of Artificial Sequence: Synthetic oligonucleotide
  misc_feature 1..20: note = Target: SCN10A; (+) strand; PAM type: NRG; PAM sequence: GAG
  source 1..20: mol_type = other DNA
tggagaagaaaacaggctga

SEQ ID NO: 33835 - DNA, 20 bp, synthetic construct
  misc_feature 1..20: note = Description of Artificial Sequence: Synthetic oligonucleotide
  misc_feature 1..20: note = Target: SCN10A; (+) strand; PAM type: NRG; PAM sequence: AAG
  source 1..20: mol_type = other DNA
agaaaacaggctgagagttt

SEQ ID NO: 33836 - DNA, 20 bp, synthetic construct
  misc_feature 1..20: note = Description of Artificial Sequence: Synthetic oligonucleotide
  misc_feature 1..20: note = Target: SCN10A; (+) strand; PAM type: NRG; PAM sequence: AAG
  source 1..20: mol_type = other DNA
aagtgactttctcatgccac

SEQ ID NO: 33837 - DNA, 20 bp, synthetic construct
  misc_feature 1..20: note = Description of Artificial Sequence: Synthetic oligonucleotide
  misc_feature 1..20: note = Target: SCN10A; (+) strand; PAM type: NRG; PAM sequence: AAG
  source 1..20: mol_type = other DNA
catgccacaagactgattca

SEQ ID NO: 33838 - DNA, 20 bp, synthetic construct
  misc_feature 1..20: note = Description of Artificial Sequence: Synthetic oligonucleotide
  misc_feature 1..20: note = Target: SCN10A; (+) strand; PAM type: NRG; PAM sequence: GAG
  source 1..20: mol_type = other DNA
tgccacaagactgattcaaa

SEQ ID NO: 33839 - DNA, 20 bp, synthetic construct
  misc_feature 1..20: note = Description of Artificial Sequence: Synthetic oligonucleotide
  misc_feature 1..20: note = Target: SCN10A; (+) strand; PAM type: NRG; PAM sequence: TGG
  source 1..20: mol_type = other DNA
actgattcaaagagtatcta

SEQ ID NO: 33840 - DNA, 20 bp, synthetic construct
  misc_feature 1..20: note = Description of Artificial Sequence: Synthetic oligonucleotide
  misc_feature 1..20: note = Target: SCN10A; (+) strand; PAM type: NRG; PAM sequence: GAG
  source 1..20: mol_type = other DNA
tgattcaaagagtatctatg

SEQ ID NO: 33841 - DNA, 20 bp, synthetic construct
  misc_feature 1..20: note = Description of Artificial Sequence: Synthetic oligonucleotide
  misc_feature 1..20: note = Target: SCN10A; (+) strand; PAM type: NRG; PAM sequence: TAG
  source 1..20: mol_type = other DNA
tatctatggagtgtcccttg

SEQ ID NO: 33842 - DNA, 20 bp, synthetic construct
  misc_feature 1..20: note = Description of Artificial Sequence: Synthetic oligonucleotide
  misc_feature 1..20: note = Target: SCN10A; (+) strand; PAM type: NRG; PAM sequence: AGG
  source 1..20: mol_type = other DNA
atctatggagtgtcccttgt

SEQ ID NO: 33843 - DNA, 20 bp, synthetic construct
  misc_feature 1..20: note = Description of Artificial Sequence: Synthetic oligonucleotide
  misc_feature 1..20: note = Target: SCN10A; (+) strand; PAM type: NRG; PAM sequence: AAG
  source 1..20: mol_type = other DNA
atggagtgtcccttgtaggc

SEQ ID NO: 33844 - DNA, 20 bp, synthetic construct
  misc_feature 1..20: note = Description of Artificial Sequence: Synthetic oligonucleotide
  misc_feature 1..20: note = Target: SCN10A; (+) strand; PAM type: NRG; PAM sequence: CAG
  source 1..20: mol_type = other DNA
agtgtcccttgtaggcaagt

SEQ ID NO: 33845 - DNA, 20 bp, synthetic construct
  misc_feature 1..20: note = Description of Artificial Sequence: Synthetic oligonucleotide
  misc_feature 1..20: note = Target: SCN10A; (+) strand; PAM type: NRG; PAM sequence: TGG
  source 1..20: mol_type = other DNA
cccttgtaggcaagtcagtg

SEQ ID NO: 33846 - DNA, 20 bp, synthetic construct
  misc_feature 1..20: note = Description of Artificial Sequence: Synthetic oligonucleotide
  misc_feature 1..20: note = Target: SCN10A; (+) strand; PAM type: NRG; PAM sequence: TGG
  source 1..20: mol_type = other DNA
gtaggcaagtcagtgtggtg

SEQ ID NO: 33847 - DNA, 20 bp, synthetic construct
  misc_feature 1..20: note = Description of Artificial Sequence: Synthetic oligonucleotide
  misc_feature 1..20: note = Target: SCN10A; (+) strand; PAM type: NRG; PAM sequence: TGG
  source 1..20: mol_type = other DNA
ggcaagtcagtgtggtgtgg

SEQ ID NO: 33848 - DNA, 20 bp, synthetic construct
  misc_feature 1..20: note = Description of Artificial Sequence: Synthetic oligonucleotide
  misc_feature 1..20: note = Target: SCN10A; (+) strand; PAM type: NRG; PAM sequence: GGG
  source 1..20: mol_type = other DNA
gcaagtcagtgtggtgtggt

SEQ ID NO: 33849 - DNA, 20 bp, synthetic construct
  misc_feature 1..20: note = Description of Artificial Sequence: Synthetic oligonucleotide
  misc_feature 1..20: note = Target: SCN10A; (+) strand; PAM type: NRG; PAM sequence: GGG
  source 1..20: mol_type = other DNA
caagtcagtgtggtgtggtg

SEQ ID NO: 33850 - DNA, 20 bp, synthetic construct
  misc_feature 1..20: note = Description of Artificial Sequence: Synthetic oligonucleotide
  misc_feature 1..20: note = Target: SCN10A; (+) strand; PAM type: NRG; PAM sequence: GGG
  source 1..20: mol_type = other DNA
aagtcagtgtggtgtggtgg

SEQ ID NO: 33851 - DNA, 20 bp, synthetic construct
  misc_feature 1..20: note = Description of Artificial Sequence: Synthetic oligonucleotide
  misc_feature 1..20: note = Target: SCN10A; (+) strand; PAM type: NRG; PAM sequence: GGG
  source 1..20: mol_type = other DNA
agtcagtgtggtgtggtggg

SEQ ID NO: 33852 - DNA, 20 bp, synthetic construct
  misc_feature 1..20: note = Description of Artificial Sequence: Synthetic oligonucleotide
  misc_feature 1..20: note = Target: SCN10A; (+) strand; PAM type: NRG; PAM sequence: TAG
  source 1..20: mol_type = other DNA
cagtgtggtgtggtgggggg

SEQ ID NO: 33853 - DNA, 20 bp, synthetic construct
  misc_feature 1..20: note = Description of Artificial Sequence: Synthetic oligonucleotide
  misc_feature 1..20: note = Target: SCN10A; (+) strand; PAM type: NRG; PAM sequence: AGG
  source 1..20: mol_type = other DNA
agtgtggtgtggtggggggt

SEQ ID NO: 33854 - DNA, 20 bp, synthetic construct
  misc_feature 1..20: note = Description of Artificial Sequence: Synthetic oligonucleotide
  misc_feature 1..20: note = Target: SCN10A; (+) strand; PAM type: NRG; PAM sequence: GGG
  source 1..20: mol_type = other DNA
gtgtggtgtggtggggggta

SEQ ID NO: 33855 - DNA, 20 bp, synthetic construct
  misc_feature 1..20: note = Description of Artificial Sequence: Synthetic oligonucleotide
  misc_feature 1..20: note = Target: SCN10A; (+) strand; PAM type: NRG; PAM sequence: GAG
  source 1..20: mol_type = other DNA
gtgtggtggggggtagggtt

SEQ ID NO: 33856 - DNA, 20 bp, synthetic construct
  misc_feature 1..20: note = Description of Artificial Sequence: Synthetic oligonucleotide
  misc_feature 1..20: note = Target: SCN10A; (+) strand; PAM type: NRG; PAM sequence: AGG
  source 1..20: mol_type = other DNA
tgtggtggggggtagggttg

SEQ ID NO: 33857 - DNA, 20 bp, synthetic construct
  misc_feature 1..20: note = Description of Artificial Sequence: Synthetic oligonucleotide
  misc_feature 1..20: note = Target: SCN10A; (+) strand; PAM type: NRG; PAM sequence: CAG
  source 1..20: mol_type = other DNA
ggttgaggtcttgtgtcttc

SEQ ID NO: 33858 - DNA, 20 bp, synthetic construct
  misc_feature 1..20: note = Description of Artificial Sequence: Synthetic oligonucleotide
  misc_feature 1..20: note = Target: SCN10A; (+) strand; PAM type: NRG; PAM sequence: GAG
  source 1..20: mol_type = other DNA
ttgaggtcttgtgtcttcca

SEQ ID NO: 33859 - DNA, 20 bp, synthetic construct
  misc_feature 1..20: note = Description of Artificial Sequence: Synthetic oligonucleotide
  misc_feature 1..20: note = Target: SCN10A; (+) strand; PAM type: NRG; PAM sequence: TGG
  source 1..20: mol_type = other DNA
tcttgtgtcttccagagacc

SEQ ID NO: 33860 - DNA, 20 bp, synthetic construct
  misc_feature 1..20: note = Description of Artificial Sequence: Synthetic oligonucleotide
  misc_feature 1..20: note = Target: SCN10A; (+) strand; PAM type: NRG; PAM sequence: GGG
  source 1..20: mol_type = other DNA
cttgtgtcttccagagacct

SEQ ID NO: 33861 - DNA, 20 bp, synthetic construct
  misc_feature 1..20: note = Description of Artificial Sequence: Synthetic oligonucleotide
  misc_feature 1..20: note = Target: SCN10A; (+) strand; PAM type: NRG; PAM sequence: TGG
  source 1..20: mol_type = other DNA
ccagagacctgggtccaccc

SEQ ID NO: 33862 - DNA, 20 bp, synthetic construct
  misc_feature 1..20: note = Description of Artificial Sequence: Synthetic oligonucleotide
  misc_feature 1..20: note = Target: SCN10A; (+) strand; PAM type: NRG; PAM sequence: CAG
  source 1..20: mol_type = other DNA
caccctggatccaccctcac

SEQ ID NO: 33863 - DNA, 20 bp, synthetic construct
  misc_feature 1..20: note = Description of Artificial Sequence: Synthetic oligonucleotide
  misc_feature 1..20: note = Target: SCN10A; (+) strand; PAM type: NRG; PAM sequence: TGG
  source 1..20: mol_type = other DNA
cctcaccagctatacaattt

SEQ ID NO: 33864 - DNA, 20 bp, synthetic construct
  misc_feature 1..20: note = Description of Artificial Sequence: Synthetic oligonucleotide
  misc_feature 1..20: note = Target: SCN10A; (+) strand; PAM type: NRG; PAM sequence: GGG
  source 1..20: mol_type = other DNA
ctcaccagctatacaatttt

SEQ ID NO: 33865 - DNA, 20 bp, synthetic construct
  misc_feature 1..20: note = Description of Artificial Sequence: Synthetic oligonucleotide
  misc_feature 1..20: note = Target: SCN10A; (+) strand; PAM type: NRG; PAM sequence: CAG
  source 1..20: mol_type = other DNA
accagctatacaattttggg

SEQ ID NO: 33866 - DNA, 20 bp, synthetic construct
  misc_feature 1..20: note = Description of Artificial Sequence: Synthetic oligonucleotide
  misc_feature 1..20: note = Target: SCN10A; (+) strand; PAM type: NRG; PAM sequence: AGG
  source 1..20: mol_type = other DNA
ccagctatacaattttgggc

SEQ ID NO: 33867 - DNA, 20 bp, synthetic construct
  misc_feature 1..20: note = Description of Artificial Sequence: Synthetic oligonucleotide
  misc_feature 1..20: note = Target: SCN10A; (+) strand; PAM type: NRG; PAM sequence: GAG
  source 1..20: mol_type = other DNA
gcaggatatttaacctctct

SEQ ID NO: 33868 - DNA, 20 bp, synthetic construct
  misc_feature 1..20: note = Description of Artificial Sequence: Synthetic oligonucleotide
  misc_feature 1..20: note = Target: SCN10A; (+) strand; PAM type: NRG; PAM sequence: TAG
  source 1..20: mol_type = other DNA
tatttaacctctctgagtct

SEQ ID NO: 33869 - DNA, 20 bp, synthetic construct
  misc_feature 1..20: note = Description of Artificial Sequence: Synthetic oligonucleotide
  misc_feature 1..20: note = Target: SCN10A; (+) strand; PAM type: NRG; PAM sequence: GAG
  source 1..20: mol_type = other DNA
agtgctctcttttgtcatgt

SEQ ID NO: 33870 - DNA, 20 bp, synthetic construct
  misc_feature 1..20: note = Description of Artificial Sequence: Synthetic oligonucleotide
  misc_feature 1..20: note = Target: SCN10A; (+) strand; PAM type: NRG; PAM sequence: AGG
  source 1..20: mol_type = other DNA
gtgctctcttttgtcatgtg

SEQ ID NO: 33871 - DNA, 20 bp, synthetic construct
  misc_feature 1..20: note = Description of Artificial Sequence: Synthetic oligonucleotide
  misc_feature 1..20: note = Target: SCN10A; (+) strand; PAM type: NRG; PAM sequence: GGG
  source 1..20: mol_type = other DNA
tgctctcttttgtcatgtga

SEQ ID NO: 33872 - DNA, 20 bp, synthetic construct
  misc_feature 1..20: note = Description of Artificial Sequence: Synthetic oligonucleotide
  misc_feature 1..20: note = Target: SCN10A; (+) strand; PAM type: NRG; PAM sequence: AAG
  source 1..20: mol_type = other DNA
acactgaaataacattcata

SEQ ID NO: 33873 - DNA, 20 bp, synthetic construct
  misc_feature 1..20: note = Description of Artificial Sequence: Synthetic oligonucleotide
  misc_feature 1..20: note = Target: SCN10A; (+) strand; PAM type: NRG; PAM sequence: CAG
  source 1..20: mol_type = other DNA
ataaagcacctgactcattg

SEQ ID NO: 33874 - DNA, 20 bp, synthetic construct
  misc_feature 1..20: note = Description of Artificial Sequence: Synthetic oligonucleotide
  misc_feature 1..20: note = Target: SCN10A; (+) strand; PAM type: NRG; PAM sequence: AGG
  source 1..20: mol_type = other DNA
taaagcacctgactcattgc

SEQ ID NO: 33875 - DNA, 20 bp, synthetic construct
  misc_feature 1..20: note = Description of Artificial Sequence: Synthetic oligonucleotide
  misc_feature 1..20: note = Target: SCN10A; (+) strand; PAM type: NRG; PAM sequence: AAG
  source 1..20: mol_type = other DNA
cctgactcattgcaggcacc

SEQ ID NO: 33876 - DNA, 20 bp, synthetic construct
  misc_feature 1..20: note = Description of Artificial Sequence: Synthetic oligonucleotide
  misc_feature 1..20: note = Target: SCN10A; (+) strand; PAM type: NRG; PAM sequence: AAG
  source 1..20: mol_type = other DNA
atgactttcttgctttaaaa

SEQ ID NO: 33877 - DNA, 20 bp, synthetic construct
  misc_feature 1..20: note = Description of Artificial Sequence: Synthetic oligonucleotide
  misc_feature 1..20: note = Target: SCN10A; (+) strand; PAM type: NRG; PAM sequence: TGG
  source 1..20: mol_type = other DNA
actttcttgctttaaaaaag

SEQ ID NO: 33878 - DNA, 20 bp, synthetic construct
  misc_feature 1..20: note = Description of Artificial Sequence: Synthetic oligonucleotide
  misc_feature 1..20: note = Target: SCN10A; (+) strand; PAM type: NRG; PAM sequence: TGG
  source 1..20: mol_type = other DNA
ggcactttcctctgacactg

SEQ ID NO: 33879 - DNA, 20 bp, synthetic construct
  misc_feature 1..20: note = Description of Artificial Sequence: Synthetic oligonucleotide
  misc_feature 1..20: note = Target: SCN10A; (+) strand; PAM type: NRG; PAM sequence: GGG
  source 1..20: mol_type = other DNA
gcactttcctctgacactgt

SEQ ID NO: 33880 - DNA, 20 bp, synthetic construct
  misc_feature 1..20: note = Description of Artificial Sequence: Synthetic oligonucleotide
  misc_feature 1..20: note = Target: SCN10A; (+) strand; PAM type: NRG; PAM sequence: AAG
  source 1..20: mol_type = other DNA
tttcctctgacactgtggga

SEQ ID NO: 33881 - DNA, 20 bp, synthetic construct
  misc_feature 1..20: note = Description of Artificial Sequence: Synthetic oligonucleotide
  misc_feature 1..20: note = Target: SCN10A; (+) strand; PAM type: NRG; PAM sequence: AGG
  source 1..20: mol_type = other DNA
ttcctctgacactgtgggaa

SEQ ID NO: 33882 - DNA, 20 bp, synthetic construct
  misc_feature 1..20: note = Description of Artificial Sequence: Synthetic oligonucleotide
  misc_feature 1..20: note = Target: SCN10A; (+) strand; PAM type: NRG; PAM sequence: TAG
  source 1..20: mol_type = other DNA
tgcttccacttttctaactg

SEQ ID NO: 33883 - DNA, 20 bp, synthetic construct
  misc_feature 1..20: note = Description of Artificial Sequence: Synthetic oligonucleotide
  misc_feature 1..20: note = Target: SCN10A; (+) strand; PAM type: NRG; PAM sequence: GAG
  source 1..20: mol_type = other DNA
cacttttctaactgtagaat

SEQ ID NO: 33884 - DNA, 20 bp, synthetic construct
  misc_feature 1..20: note = Description of Artificial Sequence: Synthetic oligonucleotide
  misc_feature 1..20: note = Target: SCN10A; (+) strand; PAM type: NRG; PAM sequence: AGG
  source 1..20: mol_type = other DNA
acttttctaactgtagaatg

SEQ ID NO: 33885 - DNA, 20 bp, synthetic construct
  misc_feature 1..20: note = Description of Artificial Sequence: Synthetic oligonucleotide
  misc_feature 1..20: note = Target: SCN10A; (+) strand; PAM type: NRG; PAM sequence: GGG
  source 1..20: mol_type = other DNA
cttttctaactgtagaatga

SEQ ID NO: 33886 - DNA, 20 bp, synthetic construct
  misc_feature 1..20: note = Description of Artificial Sequence: Synthetic oligonucleotide
  misc_feature 1..20: note = Target: SCN10A; (+) strand; PAM type: NRG; PAM sequence: TGG
  source 1..20: mol_type = other DNA
ctaactgtagaatgagggtg

SEQ ID NO: 33887 - DNA, 20 bp, synthetic construct
  misc_feature 1..20: note = Description of Artificial Sequence: Synthetic oligonucleotide
  misc_feature 1..20: note = Target: SCN10A; (+) strand; PAM type: NRG; PAM sequence: GGG
  source 1..20: mol_type = other DNA
taactgtagaatgagggtgt

SEQ ID NO: 33888 - DNA, 20 bp, synthetic construct
  misc_feature 1..20: note = Description of Artificial Sequence: Synthetic oligonucleotide
  misc_feature 1..20: note = Target: SCN10A; (+) strand; PAM type: NRG; PAM sequence: AAG
  source 1..20: mol_type = other DNA
ggctcaaatgtctattccat

SEQ ID NO: 33889 - DNA, 20 bp, synthetic construct
  misc_feature 1..20: note = Description of Artificial Sequence: Synthetic oligonucleotide
  misc_feature 1..20: note = Target: SCN10A; (+) strand; PAM type: NRG; PAM sequence: AGG
  source 1..20: mol_type = other DNA
gctcaaatgtctattccata

SEQ ID NO: 33890 - DNA, 20 bp, synthetic construct
  misc_feature 1..20: note = Description of Artificial Sequence: Synthetic oligonucleotide
  misc_feature 1..20: note = Target: SCN10A; (+) strand; PAM type: NRG; PAM sequence: TGG
  source 1..20: mol_type = other DNA
ctattccataaggccctctg

SEQ ID NO: 33891 - DNA, 20 bp, synthetic construct
  misc_feature 1..20: note = Description of Artificial Sequence: Synthetic oligonucleotide
  misc_feature 1..20: note = Target: SCN10A; (+) strand; PAM type: NRG; PAM sequence: TAG
  source 1..20: mol_type = other DNA
cataaggccctctgtggtct

SEQ ID NO: 33892 - DNA, 20 bp, synthetic construct
  misc_feature 1..20: note = Description of Artificial Sequence: Synthetic oligonucleotide
  misc_feature 1..20: note = Target: SCN10A; (+) strand; PAM type: NRG; PAM sequence: AGG
  source 1..20: mol_type = other DNA
ataaggccctctgtggtctt

SEQ ID NO: 33893 - DNA, 20 bp, synthetic construct
  misc_feature 1..20: note = Description of Artificial Sequence: Synthetic oligonucleotide
  misc_feature 1..20: note = Target: SCN10A; (+) strand; PAM type: NRG; PAM sequence: TGG
  source 1..20: mol_type = other DNA
gtggtcttaggctgacttct

SEQ ID NO: 33894 - DNA, 20 bp, synthetic construct
  misc_feature 1..20: note = Description of Artificial Sequence: Synthetic oligonucleotide
  misc_feature 1..20: note = Target: SCN10A; (+) strand; PAM type: NRG; PAM sequence: GGG
  source 1..20: mol_type = other DNA
tggtcttaggctgacttctt

SEQ ID NO: 33895 - DNA, 20 bp, synthetic construct
  misc_feature 1..20: note = Description of Artificial Sequence: Synthetic oligonucleotide
  misc_feature 1..20: note = Target: SCN10A; (+) strand; PAM type: NRG; PAM sequence: AAG
  source 1..20: mol_type = other DNA
taggctgacttcttgggaat

SEQ ID NO: 33896 - DNA, 20 bp, synthetic construct
  misc_feature 1..20: note = Description of Artificial Sequence: Synthetic oligonucleotide
  misc_feature 1..20: note = Target: SCN10A; (+) strand; PAM type: NRG; PAM sequence: TAG
  source 1..20: mol_type = other DNA
tttccttttcatatcaactt

SEQ ID NO: 33897 - DNA, 20 bp, synthetic construct
  misc_feature 1..20: note = Description of Artificial Sequence: Synthetic oligonucleotide
  misc_feature 1..20: note = Target: SCN10A; (+) strand; PAM type: NRG; PAM sequence: AGG
  source 1..20: mol_type = other DNA
ttccttttcatatcaacttt

SEQ ID NO: 33898 - DNA, 20 bp, synthetic construct
  misc_feature 1..20: note = Description of Artificial Sequence: Synthetic oligonucleotide
  misc_feature 1..20: note = Target: SCN10A; (+) strand; PAM type: NRG; PAM sequence: CAG
  source 1..20: mol_type = other DNA
tcaactttaggatgtgacct

SEQ ID NO: 33899 - DNA, 20 bp, synthetic construct
  misc_feature 1..20: note = Description of Artificial Sequence: Synthetic oligonucleotide
  misc_feature 1..20: note = Target: SCN10A; (+) strand; PAM type: NRG; PAM sequence: TAG
  source 1..20: mol_type = other DNA
tttaggatgtgacctcagcc

SEQ ID NO: 33900 - DNA, 20 bp, synthetic construct
  misc_feature 1..20: note = Description of Artificial Sequence: Synthetic oligonucleotide
  misc_feature 1..20: note = Target: SCN10A; (+) strand; PAM type: NRG; PAM sequence: AGG
  source 1..20: mol_type = other DNA
ttaggatgtgacctcagcct

SEQ ID NO: 33901 - DNA, 20 bp, synthetic construct
  misc_feature 1..20: note = Description of Artificial Sequence: Synthetic oligonucleotide
  misc_feature 1..20: note = Target: SCN10A; (+) strand; PAM type: NRG; PAM sequence: GAG
  source 1..20: mol_type = other DNA
cctaggtgctgccaaaacat

SEQ ID NO: 33902 - DNA, 20 bp, synthetic construct
  misc_feature 1..20: note = Description of Artificial Sequence: Synthetic oligonucleotide
  misc_feature 1..20: note = Target: SCN10A; (+) strand; PAM type: NRG; PAM sequence: AGG
  source 1..20: mol_type = other DNA
ctaggtgctgccaaaacatg

SEQ ID NO: 33903 - DNA, 20 bp, synthetic construct
  misc_feature 1..20: note = Description of Artificial Sequence: Synthetic oligonucleotide
  misc_feature 1..20: note = Target: SCN10A; (+) strand; PAM type: NRG; PAM sequence: CAG
  source 1..20: mol_type = other DNA
atgctgattccaccatgttc

SEQ ID NO: 33904 - DNA, 20 bp, synthetic construct
  misc_feature 1..20: note = Description of Artificial Sequence: Synthetic oligonucleotide
  misc_feature 1..20: note = Target: SCN10A; (+) strand; PAM type: NRG; PAM sequence: CAG
  source 1..20: mol_type = other DNA
acctactgctgcccctttca

SEQ ID NO: 33905 - DNA, 20 bp, synthetic construct
  misc_feature 1..20: note = Description of Artificial Sequence: Synthetic oligonucleotide
  misc_feature 1..20: note = Target: SCN10A; (+) strand; PAM type: NRG; PAM sequence: TGG
  source 1..20: mol_type = other DNA
tgctgcccctttcacagccc

SEQ ID NO: 33906 - DNA, 20 bp, synthetic construct
  misc_feature 1..20: note = Description of Artificial Sequence: Synthetic oligonucleotide
  misc_feature 1..20: note = Target: SCN10A; (+) strand; PAM type: NRG; PAM sequence: TGG
  source 1..20: mol_type = other DNA
cctttcacagccctggatta

SEQ ID NO: 33907 - DNA, 20 bp, synthetic construct
  misc_feature 1..20: note = Description of Artificial Sequence: Synthetic oligonucleotide
  misc_feature 1..20: note = Target: SCN10A; (+) strand; PAM type: NRG; PAM sequence: CGG
  source 1..20: mol_type = other DNA
ttcacagccctggattatgg

SEQ ID NO: 33908 - DNA, 20 bp, synthetic construct
  misc_feature 1..20: note = Description of Artificial Sequence: Synthetic oligonucleotide
  misc_feature 1..20: note = Target: SCN10A; (+) strand; PAM type: NRG; PAM sequence: GAG
  source 1..20: mol_type = other DNA
cacagccctggattatggcg

SEQ ID NO: 33909 - DNA, 20 bp, synthetic construct
  misc_feature 1..20: note = Description of Artificial Sequence: Synthetic oligonucleotide
  misc_feature 1..20: note = Target: SCN10A; (+) strand; PAM type: NRG; PAM sequence: AGG
  source 1..20: mol_type = other DNA
acagccctggattatggcgg

SEQ ID NO: 33910 - DNA, 20 bp, synthetic construct
  misc_feature 1..20: note = Description of Artificial Sequence: Synthetic oligonucleotide
  misc_feature 1..20: note = Target: SCN10A; (+) strand; PAM type: NRG; PAM sequence: GGG
  source 1..20: mol_type = other DNA
cagccctggattatggcgga

SEQ ID NO: 33911 - DNA, 20 bp, synthetic construct
  misc_feature 1..20: note = Description of Artificial Sequence: Synthetic oligonucleotide
  misc_feature 1..20: note = Target: SCN10A; (+) strand; PAM type: NRG; PAM sequence: GAG
  source 1..20: mol_type = other DNA
gccctggattatggcggagg

SEQ ID NO: 33912 - DNA, 20 bp, synthetic construct
  misc_feature 1..20: note = Description of Artificial Sequence: Synthetic oligonucleotide
  misc_feature 1..20: note = Target: SCN10A; (+) strand; PAM type: NRG; PAM sequence: TGG
  source 1..20: mol_type = other DNA
ctggattatggcggagggag

SEQ ID NO: 33913 - DNA, 20 bp, synthetic construct
  misc_feature 1..20: note = Description of Artificial Sequence: Synthetic oligonucleotide
  misc_feature 1..20: note = Target: SCN10A; (+) strand; PAM type: NRG; PAM sequence: TAG
  source 1..20: mol_type = other DNA
atggcggagggagtggtttc

SEQ ID NO: 33914 - DNA, 20 bp, synthetic construct
  misc_feature 1..20: note = Description of Artificial Sequence: Synthetic oligonucleotide
  misc_feature 1..20: note = Target: SCN10A; (+) strand; PAM type: NRG; PAM sequence: AGG
  source 1..20: mol_type = other DNA
tggcggagggagtggtttct

SEQ ID NO: 33915 - DNA, 20 bp, synthetic construct
  misc_feature 1..20: note = Description of Artificial Sequence: Synthetic oligonucleotide
  misc_feature 1..20: note = Target: SCN10A; (+) strand; PAM type: NRG; PAM sequence: GGG
  source 1..20: mol_type = other DNA
ggcggagggagtggtttcta

SEQ ID NO: 33916 - DNA, 20 bp, synthetic construct
  misc_feature 1..20: note = Description of Artificial Sequence: Synthetic oligonucleotide
  misc_feature 1..20: note = Target: SCN10A; (+) strand; PAM type: NRG; PAM sequence: AAG
  source 1..20: mol_type = other DNA
agggagtggtttctagggac

SEQ ID NO: 33917 - DNA, 20 bp, synthetic construct
  misc_feature 1..20: note = Description of Artificial Sequence: Synthetic oligonucleotide
  misc_feature 1..20: note = Target: SCN10A; (+) strand; PAM type: NRG; PAM sequence: TAG
  source 1..20: mol_type = other DNA
gagtggtttctagggacaag

SEQ ID NO: 33918 - DNA, 20 bp, synthetic construct
  misc_feature 1..20: note = Description of Artificial Sequence: Synthetic oligonucleotide
  misc_feature 1..20: note = Target: SCN10A; (+) strand; PAM type: NRG; PAM sequence: TGG
  source 1..20: mol_type = other DNA
acaagtagtcacatttcctc

SEQ ID NO: 33919 - DNA, 20 bp, synthetic construct
  misc_feature 1..20: note = Description of Artificial Sequence: Synthetic oligonucleotide
  misc_feature 1..20: note = Target: SCN10A; (+) strand; PAM type: NRG; PAM sequence: GGG
  source 1..20: mol_type = other DNA
caagtagtcacatttcctct

SEQ ID NO: 33920 - DNA, 20 bp, synthetic construct
  misc_feature 1..20: note = Description of Artificial Sequence: Synthetic oligonucleotide
  misc_feature 1..20: note = Target: SCN10A; (+) strand; PAM type: NRG; PAM sequence: AAG
  source 1..20: mol_type = other DNA
tgggccttccccctccacct

SEQ ID NO: 33921 - DNA, 20 bp, synthetic construct
  misc_feature 1..20: note = Description of Artificial Sequence: Synthetic oligonucleotide
  misc_feature 1..20: note = Target: SCN10A; (+) strand; PAM type: NRG; PAM sequence: CAG
  source 1..20: mol_type = other DNA
tccccctccacctaagtctg

SEQ ID NO: 33922 - DNA, 20 bp, synthetic construct
  misc_feature 1..20: note = Description of Artificial Sequence: Synthetic oligonucleotide
  misc_feature 1..20: note = Target: SCN10A; (+) strand; PAM type: NRG; PAM sequence: AAG
  source 1..20: mol_type = other DNA
cacctaagtctgcagcctat

SEQ ID NO: 33923 - DNA, 20 bp, synthetic construct
  misc_feature 1..20: note = Description of Artificial Sequence: Synthetic oligonucleotide
  misc_feature 1..20: note = Target: SCN10A; (+) strand; PAM type: NRG; PAM sequence: AAG
  source 1..20: mol_type = other DNA
ctaagtctgcagcctataag

SEQ ID NO: 33924 - DNA, 20 bp, synthetic construct
  misc_feature 1..20: note = Description of Artificial Sequence: Synthetic oligonucleotide
  misc_feature 1..20: note = Target: SCN10A; (+) strand; PAM type: NRG; PAM sequence: TGG
  source 1..20: mol_type = other DNA
gtctgcagcctataagaagc

SEQ ID NO: 33925 - DNA, 20 bp, synthetic construct
  misc_feature 1..20: note = Description of Artificial Sequence: Synthetic oligonucleotide
  misc_feature 1..20: note = Target: SCN10A; (+) strand; PAM type: NRG; PAM sequence: AAG
  source 1..20: mol_type = other DNA
ctataagaagctggacccca

SEQ ID NO: 33926 - DNA, 20 bp, synthetic construct
  misc_feature 1..20: note = Description of Artificial Sequence: Synthetic oligonucleotide
  misc_feature 1..20: note = Target: SCN10A; (+) strand; PAM type: NRG; PAM sequence: CAG
  source 1..20: mol_type = other DNA
aagaagctggaccccaaagc

SEQ ID NO: 33927 - DNA, 20 bp, synthetic construct
  misc_feature 1..20: note = Description of Artificial Sequence: Synthetic oligonucleotide
  misc_feature 1..20: note = Target: SCN10A; (+) strand; PAM type: NRG; PAM sequence: CAG
  source 1..20: mol_type = other DNA
agctggaccccaaagccaga

SEQ ID NO: 33928 - DNA, 20 bp, synthetic construct
  misc_feature 1..20: note = Description of Artificial Sequence: Synthetic oligonucleotide
  misc_feature 1..20: note = Target: SCN10A; (+) strand; PAM type: NRG; PAM sequence: TGG
  source 1..20: mol_type = other DNA
accccaaagccagacagttc

SEQ ID NO: 33929 - DNA, 20 bp, synthetic construct
  misc_feature 1..20: note = Description of Artificial Sequence: Synthetic oligonucleotide
  misc_feature 1..20: note = Target: SCN10A; (+) strand; PAM type: NRG; PAM sequence: CAG
  source 1..20: mol_type = other DNA
ccagacagttctggtgaatc

SEQ ID NO: 33930 - DNA, 20 bp, synthetic construct
  misc_feature 1..20: note = Description of Artificial Sequence: Synthetic oligonucleotide
  misc_feature 1..20: note = Target: SCN10A; (+) strand; PAM type: NRG; PAM sequence: TAG
  source 1..20: mol_type = other DNA
gacagttctggtgaatccag

SEQ ID NO: 33931 - DNA, 20 bp, synthetic construct
  misc_feature 1..20: note = Description of Artificial Sequence: Synthetic oligonucleotide
  misc_feature 1..20: note = Target: SCN10A; (+) strand; PAM type: NRG; PAM sequence: AGG
  source 1..20: mol_type = other DNA
acagttctggtgaatccagt

SEQ ID NO: 33932 - DNA, 20 bp, synthetic construct
  misc_feature 1..20: note = Description of Artificial Sequence: Synthetic oligonucleotide
  misc_feature 1..20: note = Target: SCN10A; (+) strand; PAM type: NRG; PAM sequence: CAG
  source 1..20: mol_type = other DNA
tgaatccagtaggtcacctc

SEQ ID NO: 33933 - DNA, 20 bp, synthetic construct
  misc_feature 1..20: note = Description of Artificial Sequence: Synthetic oligonucleotide
  misc_feature 1..20: note = Target: SCN10A; (+) strand; PAM type: NRG; PAM sequence: TGG
  source 1..20: mol_type = other DNA
ccagtaggtcacctccagct

SEQ ID NO: 33934 - DNA, 20 bp, synthetic construct
  misc_feature 1..20: note = Description of Artificial Sequence: Synthetic oligonucleotide
  misc_feature 1..20: note = Target: SCN10A; (+) strand; PAM type: NRG; PAM sequence: TGG
  source 1..20: mol_type = other DNA
gtaggtcacctccagcttgg

SEQ ID NO: 33935 - DNA, 20 bp, synthetic construct
  misc_feature 1..20: note = Description of Artificial Sequence: Synthetic oligonucleotide
  misc_feature 1..20: note = Target: SCN10A; (+) strand; PAM type: NRG; PAM sequence: CGG
  source 1..20: mol_type = other DNA
cagcttggtggaccctgctg

SEQ ID NO: 33936 - DNA, 20 bp, synthetic construct
  misc_feature 1..20: note = Description of Artificial Sequence: Synthetic oligonucleotide
  misc_feature 1..20: note = Target: SCN10A; (+) strand; PAM type: NRG; PAM sequence: AAG
  source 1..20: mol_type = other DNA
tggaccctgctgcggacatg

SEQ ID NO: 33937 - DNA, 20 bp, synthetic construct
  misc_feature 1..20: note = Description of Artificial Sequence: Synthetic oligonucleotide
  misc_feature 1..20: note = Target: SCN10A; (+) strand; PAM type: NRG; PAM sequence: AGG
  source 1..20: mol_type = other DNA
ggaccctgctgcggacatga

SEQ ID NO: 33938 - DNA, 20 bp, synthetic construct
  misc_feature 1..20: note = Description of Artificial Sequence: Synthetic oligonucleotide
  misc_feature 1..20: note = Target: SCN10A; (+) strand; PAM type: NRG; PAM sequence: CAG
  source 1..20: mol_type = other DNA
ccctgctgcggacatgaagg

SEQ ID NO: 33939 - DNA, 20 bp, synthetic construct
  misc_feature 1..20: note = Description of Artificial Sequence: Synthetic oligonucleotide
  misc_feature 1..20: note = Target: SCN10A; (+) strand; PAM type: NRG; PAM sequence: AGG
  source 1..20: mol_type = other DNA
cctgctgcggacatgaaggc

SEQ ID NO: 33940 - DNA, 20 bp, synthetic construct
  misc_feature 1..20: note = Description of Artificial Sequence: Synthetic oligonucleotide
  misc_feature 1..20: note = Target: SCN10A; (+) strand; PAM type: NRG; PAM sequence: TAG
  source 1..20: mol_type = other DNA
ggcaggatgctgaccctttc

SEQ ID NO: 33941 - DNA, 20 bp, synthetic construct
  misc_feature 1..20: note = Description of Artificial Sequence: Synthetic oligonucleotide
  misc_feature 1..20: note = Target: SCN10A; (+) strand; PAM type: NRG; PAM sequence: AAG
  source 1..20: mol_type = other DNA
acacacacacacacacacgc

SEQ ID NO: 33942 - DNA, 20 bp, synthetic construct
  misc_feature 1..20: note = Description of Artificial Sequence: Synthetic oligonucleotide
  misc_feature 1..20: note = Target: SCN10A; (+) strand; PAM type: NRG; PAM sequence: GAG
  source 1..20: mol_type = other DNA
cacacacacgcaagtcttgt

SEQ ID NO: 33943 - DNA, 20 bp, synthetic construct
  misc_feature 1..20: note = Description of Artificial Sequence: Synthetic oligonucleotide
  misc_feature 1..20: note = Target: SCN10A; (+) strand; PAM type: NRG; PAM sequence: AGG
  source 1..20: mol_type = other DNA
acacacacgcaagtcttgtg

SEQ ID NO: 33944 - DNA, 20 bp, synthetic construct
  misc_feature 1..20: note = Description of Artificial Sequence: Synthetic oligonucleotide
  misc_feature 1..20: note = Target: SCN10A; (+) strand; PAM type: NRG; PAM sequence: TGG
  source 1..20: mol_type = other DNA
cacacgcaagtcttgtgagg

SEQ ID NO: 33945 - DNA, 20 bp, synthetic construct
  misc_feature 1..20: note = Description of Artificial Sequence: Synthetic oligonucleotide
  misc_feature 1..20: note = Target: SCN10A; (+) strand; PAM type: NRG; PAM sequence: CAG
  source 1..20: mol_type = other DNA
tcttgtgaggtggcttaatt

SEQ ID NO: 33946 - DNA, 20 bp, synthetic construct
  misc_feature 1..20: note = Description of Artificial Sequence: Synthetic oligonucleotide
  misc_feature 1..20: note = Target: SCN10A; (+) strand; PAM type: NRG; PAM sequence: AGG
  source 1..20: mol_type = other DNA
cttgtgaggtggcttaattc

SEQ ID NO: 33947 - DNA, 20 bp, synthetic construct
  misc_feature 1..20: note = Description of Artificial Sequence: Synthetic oligonucleotide
  misc_feature 1..20: note = Target: SCN10A; (+) strand; PAM type: NRG; PAM sequence: GGG
  source 1..20: mol_type = other DNA
ttgtgaggtggcttaattca

SEQ ID NO: 33948 - DNA, 20 bp, synthetic construct
  misc_feature 1..20: note = Description of Artificial Sequence: Synthetic oligonucleotide
  misc_feature 1..20: note = Target: SCN10A; (+) strand; PAM type: NRG; PAM sequence: GGG
  source 1..20: mol_type = other DNA
tgtgaggtggcttaattcag

SEQ ID NO: 33949 - DNA, 20 bp, synthetic construct
  misc_feature 1..20: note = Description of Artificial Sequence: Synthetic oligonucleotide
  misc_feature 1..20: note = Target: SCN10A; (+) strand; PAM type: NRG; PAM sequence: AAG
  source 1..20: mol_type = other DNA
ggtggcttaattcaggggtt

SEQ ID NO: 33950 - DNA, 20 bp, synthetic construct
  misc_feature 1..20: note = Description of Artificial Sequence: Synthetic oligonucleotide
  misc_feature 1..20: note = Target: SCN10A; (+) strand; PAM type: NRG; PAM sequence: AAG
  source 1..20: mol_type = other DNA
cttaattcaggggttaagaa

SEQ ID NO: 33951 - DNA, 20 bp, synthetic construct
  misc_feature 1..20: note = Description of Artificial Sequence: Synthetic oligonucleotide
  misc_feature 1..20: note = Target: SCN10A; (+) strand; PAM type: NRG; PAM sequence: CGG
  source 1..20: mol_type = other DNA
aattcaggggttaagaaaag

SEQ ID NO: 33952 - DNA, 20 bp, synthetic construct
  misc_feature 1..20: note = Description of Artificial Sequence: Synthetic oligonucleotide
  misc_feature 1..20: note = Target: SCN10A; (+) strand; PAM type: NRG; PAM sequence: GGG
  source 1..20: mol_type = other DNA
attcaggggttaagaaaagc

SEQ ID NO: 33953 - DNA, 20 bp, synthetic construct
  misc_feature 1..20: note = Description of Artificial Sequence: Synthetic oligonucleotide
  misc_feature 1..20: note = Target: SCN10A; (+) strand; PAM type: NRG; PAM sequence: TGG
  source 1..20: mol_type = other DNA
ggggttaagaaaagcgggct

SEQ ID NO: 33954 - DNA, 20 bp, synthetic construct
  misc_feature 1..20: note = Description of Artificial Sequence: Synthetic oligonucleotide
  misc_feature 1..20: note = Target: SCN10A; (+) strand; PAM type: NRG; PAM sequence: CAG
  source 1..20: mol_type = other DNA
gttaagaaaagcgggcttgg

SEQ ID NO: 33955 - DNA, 20 bp, synthetic construct
  misc_feature 1..20: note = Description of Artificial Sequence: Synthetic oligonucleotide
  misc_feature 1..20: note = Target: SCN10A; (+) strand; PAM type: NRG; PAM sequence: CGG
  source 1..20: mol_type = other DNA
agaaaagcgggcttggcagc

SEQ ID NO: 33956 - DNA, 20 bp, synthetic construct
  misc_feature 1..20: note = Description of Artificial Sequence: Synthetic oligonucleotide
  misc_feature 1..20: note = Target: SCN10A; (+) strand; PAM type: NRG; PAM sequence: TGG
  source 1..20: mol_type = other DNA
ggcttggcagccggtctgtc

SEQ ID NO: 33957 - DNA, 20 bp, synthetic construct
  misc_feature 1..20: note = Description of Artificial Sequence: Synthetic oligonucleotide
  misc_feature 1..20: note = Target: SCN10A; (+) strand; PAM type: NRG; PAM sequence: GGG
  source 1..20: mol_type = other DNA
gcttggcagccggtctgtct

SEQ ID NO: 33958 - DNA, 20 bp, synthetic construct
  misc_feature 1..20: note = Description of Artificial Sequence: Synthetic oligonucleotide
  misc_feature 1..20: note = Target: SCN10A; (+) strand; PAM type: NRG; PAM sequence: TGG
  source 1..20: mol_type = other DNA
tctgggttcaaattctgatg

SEQ ID NO: 33959 - DNA, 20 bp, synthetic construct
  misc_feature 1..20: note = Description of Artificial Sequence: Synthetic oligonucleotide
  misc_feature 1..20: note = Target: SCN10A; (+) strand; PAM type: NRG; PAM sequence: TGG
  source 1..20: mol_type = other DNA
taaactcaactctatgatct

SEQ ID NO: 33960 - DNA, 20 bp, synthetic construct
  misc_feature 1..20: note = Description of Artificial Sequence: Synthetic oligonucleotide
  misc_feature 1..20: note = Target: SCN10A; (+) strand; PAM type: NRG; PAM sequence: GGG
  source 1..20: mol_type = other DNA
aaactcaactctatgatctt

SEQ ID NO: 33961 - DNA, 20 bp, synthetic construct
  misc_feature 1..20: note = Description of Artificial Sequence: Synthetic oligonucleotide
  misc_feature 1..20: note = Target: SCN10A; (+) strand; PAM type: NRG; PAM sequence: AAG
  source 1..20: mol_type = other DNA
ctcaactctatgatcttggg

SEQ ID NO: 33962 - DNA, 20 bp, synthetic construct
  misc_feature 1..20: note = Description of Artificial Sequence: Synthetic oligonucleotide
  misc_feature 1..20: note = Target: SCN10A; (+) strand; PAM type: NRG; PAM sequence: TGG
  source 1..20: mol_type = other DNA
tgcatctccatttttccatc

SEQ ID NO: 33963 - DNA, 20 bp, synthetic construct
  misc_feature 1..20: note = Description of Artificial Sequence: Synthetic oligonucleotide
  misc_feature 1..20: note = Target: SCN10A; (+) strand; PAM type: NRG; PAM sequence: GGG
  source 1..20: mol_type = other DNA
gcatctccatttttccatct

SEQ ID NO: 33964 - DNA, 20 bp, synthetic construct
  misc_feature 1..20: note = Description of Artificial Sequence: Synthetic oligonucleotide
  misc_feature 1..20: note = Target: SCN10A; (+) strand; PAM type: NRG; PAM sequence: AAG
  source 1..20: mol_type = other DNA
ctccatttttccatctggga

SEQ ID NO: 33965 - DNA, 20 bp, synthetic construct
  misc_feature 1..20: note = Description of Artificial Sequence: Synthetic oligonucleotide
  misc_feature 1..20: note = Target: SCN10A; (+) strand; PAM type: NRG; PAM sequence: AGG
  source 1..20: mol_type = other DNA
tccatttttccatctgggaa

SEQ ID NO: 33966 - DNA, 20 bp, synthetic construct
  misc_feature 1..20: note = Description of Artificial Sequence: Synthetic oligonucleotide
  misc_feature 1..20: note = Target: SCN10A; (+) strand; PAM type: NRG; PAM sequence: GGG
  source 1..20: mol_type = other DNA
ccatttttccatctgggaaa

SEQ ID NO: 33967 - DNA, 20 bp, synthetic construct
  misc_feature 1..20: note = Description of Artificial Sequence: Synthetic oligonucleotide
  misc_feature 1..20: note = Target: SCN10A; (+) strand; PAM type: NRG; PAM sequence: AAG
  source 1..20: mol_type = other DNA
catctgggaaagggaataac

SEQ ID NO: 33968 - DNA, 20 bp, synthetic construct
  misc_feature 1..20: note = Description of Artificial Sequence: Synthetic oligonucleotide
  misc_feature 1..20: note = Target: SCN10A; (+) strand; PAM type: NRG; PAM sequence: GAG
  source 1..20: mol_type = other DNA
tctgggaaagggaataacaa

SEQ ID NO: 33969 - DNA, 20 bp, synthetic construct
  misc_feature 1..20: note = Description of Artificial Sequence: Synthetic oligonucleotide
  misc_feature 1..20: note = Target: SCN10A; (+) strand; PAM type: NRG; PAM sequence: TAG
  source 1..20: mol_type = other DNA
taacaagagtgcctaccatg

SEQ ID NO: 33970 - DNA, 20 bp, synthetic construct
  misc_feature 1..20: note = Description of Artificial Sequence: Synthetic oligonucleotide
  misc_feature 1..20: note = Target: SCN10A; (+) strand; PAM type: NRG; PAM sequence: AGG
  source 1..20: mol_type = other DNA
aacaagagtgcctaccatgt

SEQ ID NO: 33971 - DNA, 20 bp, synthetic construct
  misc_feature 1..20: note = Description of Artificial Sequence: Synthetic oligonucleotide
  misc_feature 1..20: note = Target: SCN10A; (+) strand; PAM type: NRG; PAM sequence: GGG
  source 1..20: mol_type = other DNA
acaagagtgcctaccatgta

SEQ ID NO: 33972 - DNA, 20 bp, synthetic construct
  misc_feature 1..20: note = Description of Artificial Sequence: Synthetic oligonucleotide
  misc_feature 1..20: note = Target: SCN10A; (+) strand; PAM type: NRG; PAM sequence: GAG
  source 1..20: mol_type = other DNA
ggttgttgtgaaaataaaat

SEQ ID NO: 33973 - DNA, 20 bp, synthetic construct
  misc_feature 1..20: note = Description of Artificial Sequence: Synthetic oligonucleotide
  misc_feature 1..20: note = Target: SCN10A; (+) strand; PAM type: NRG; PAM sequence: GAG
  source 1..20: mol_type = other DNA
aataaaatgagataatccat

SEQ ID NO: 33974 - DNA, 20 bp, synthetic construct
  misc_feature 1..20: note = Description of Artificial Sequence: Synthetic oligonucleotide
  misc_feature 1..20: note = Target: SCN10A; (+) strand; PAM type: NRG; PAM sequence: AAG
  source 1..20: mol_type = other DNA
aaaatgagataatccatgag

SEQ ID NO: 33975 - DNA, 20 bp, synthetic construct
  misc_feature 1..20: note = Description of Artificial Sequence: Synthetic oligonucleotide
  misc_feature 1..20: note = Target: SCN10A; (+) strand; PAM type: NRG; PAM sequence: GAG
  source 1..20: mol_type = other DNA
ataatccatgagaagcatct

SEQ ID NO: 33976 - DNA, 20 bp, synthetic construct
  misc_feature 1..20: note = Description of Artificial Sequence: Synthetic oligonucleotide
  misc_feature 1..20: note = Target: SCN10A; (+) strand; PAM type: NRG; PAM sequence: TGG
  source 1..20: mol_type = other DNA
gagtattattactattcctg

SEQ ID NO: 33977 - DNA, 20 bp, synthetic construct
  misc_feature 1..20: note = Description of Artificial Sequence: Synthetic oligonucleotide
  misc_feature 1..20: note = Target: SCN10A; (+) strand; PAM type: NRG; PAM sequence: GGG
  source 1..20: mol_type = other DNA
agtattattactattcctgt

SEQ ID NO: 33978 - DNA, 20 bp, synthetic construct
  misc_feature 1..20: note = Description of Artificial Sequence: Synthetic oligonucleotide
  misc_feature 1..20: note = Target: SCN10A; (+) strand; PAM type: NRG; PAM sequence: TGG
  source 1..20: mol_type = other DNA
attattactattcctgtggg

SEQ ID NO: 33979 - DNA, 20 bp, synthetic construct
  misc_feature 1..20: note = Description of Artificial Sequence: Synthetic oligonucleotide
  misc_feature 1..20: note = Target: SCN10A; (+) strand; PAM type: NRG; PAM sequence: GGG
  source 1..20: mol_type = other DNA
ttattactattcctgtgggt

SEQ ID NO: 33980 - DNA, 20 bp, synthetic construct
  misc_feature 1..20: note = Description of Artificial Sequence: Synthetic oligonucleotide
  misc_feature 1..20: note = Target: SCN10A; (+) strand; PAM type: NRG; PAM sequence: GGG
  source 1..20: mol_type = other DNA
tattactattcctgtgggtg

SEQ ID NO: 33981 - DNA, 20 bp, synthetic construct
  misc_feature 1..20: note = Description of Artificial Sequence: Synthetic oligonucleotide
  misc_feature 1..20: note = Target: SCN10A; (+) strand; PAM type: NRG; PAM sequence: AAG
  source 1..20: mol_type = other DNA
actattcctgtgggtggggc

SEQ ID NO: 33982 - DNA, 20 bp, synthetic construct
  misc_feature 1..20: note = Description of Artificial Sequence: Synthetic oligonucleotide
  misc_feature 1..20: note = Target: SCN10A; (+) strand; PAM type: NRG; PAM sequence: AGG
  source 1..20: mol_type = other DNA
ctattcctgtgggtggggca

SEQ ID NO: 33983 - DNA, 20 bp, synthetic construct
  misc_feature 1..20: note = Description of Artificial Sequence: Synthetic oligonucleotide
  misc_feature 1..20: note = Target: SCN10A; (+) strand; PAM type: NRG; PAM sequence: TGG
  source 1..20: mol_type = other DNA
tcctgtgggtggggcaaggt

SEQ ID NO: 33984 - DNA, 20 bp, synthetic construct
  misc_feature 1..20: note = Description of Artificial Sequence: Synthetic oligonucleotide
  misc_feature 1..20: note = Target: SCN10A; (+) strand; PAM type: NRG; PAM sequence: GAG
  source 1..20: mol_type = other DNA
ctgtgggtggggcaaggttg

SEQ ID NO: 33985 - DNA, 20 bp, synthetic construct
  misc_feature 1..20: note = Description of Artificial Sequence: Synthetic oligonucleotide
  misc_feature 1..20: note = Target: SCN10A; (+) strand; PAM type: NRG; PAM sequence: CAG
  source 1..20: mol_type = other DNA
tgggtggggcaaggttggag

SEQ ID NO: 33986 - DNA, 20 bp, synthetic construct
  misc_feature 1..20: note = Description of Artificial Sequence: Synthetic oligonucleotide
  misc_feature 1..20: note = Target: SCN10A; (+) strand; PAM type: NRG; PAM sequence: GAG
  source 1..20: mol_type = other DNA
ggagcagttgttgtccctct

SEQ ID NO: 33987 - DNA, 20 bp, synthetic construct
  misc_feature 1..20: note = Description of Artificial Sequence: Synthetic oligonucleotide
  misc_feature 1..20: note = Target: SCN10A; (+) strand; PAM type: NRG; PAM sequence: CAG
  source 1..20: mol_type = other DNA
cagttgttgtccctctgagt

SEQ ID NO: 33988 - DNA, 20 bp, synthetic construct
  misc_feature 1..20: note = Description of Artificial Sequence: Synthetic oligonucleotide
  misc_feature 1..20: note = Target: SCN10A; (+) strand; PAM type: NRG; PAM sequence: CAG
  source 1..20: mol_type = other DNA
tctgagtcagatactttatc

SEQ ID NO: 33989 - DNA, 20 bp, synthetic construct
  misc_feature 1..20: note = Description of Artificial Sequence: Synthetic oligonucleotide
  misc_feature 1..20: note = Target: SCN10A; (+) strand; PAM type: NRG; PAM sequence: TAG
  source 1..20: mol_type = other DNA
cagatactttatccagtata

SEQ ID NO: 33990 - DNA, 20 bp, synthetic construct
  misc_feature 1..20: note = Description of Artificial Sequence: Synthetic oligonucleotide
  misc_feature 1..20: note = Target: SCN10A; (+) strand; PAM type: NRG; PAM sequence: CAG
  source 1..20: mol_type = other DNA
atccagtatatagtgaaatc

SEQ ID NO: 33991 - DNA, 20 bp, synthetic construct
  misc_feature 1..20: note = Description of Artificial Sequence: Synthetic oligonucleotide
  misc_feature 1..20: note = Target: SCN10A; (+) strand; PAM type: NRG; PAM sequence: TGG
  source 1..20: mol_type = other DNA
gtatatagtgaaatccagta

SEQ ID NO: 33992 - DNA, 20 bp, synthetic construct
  misc_feature 1..20: note = Description of Artificial Sequence: Synthetic oligonucleotide
  misc_feature 1..20: note = Target: SCN10A; (+) strand; PAM type: NRG; PAM sequence: AAG
  source 1..20: mol_type = other DNA
agtatggattgtatcttgtt

SEQ ID NO: 33993 - DNA, 20 bp, synthetic construct
  misc_feature 1..20: note = Description of Artificial Sequence: Synthetic oligonucleotide
  misc_feature 1..20: note = Target: SCN10A; (+) strand; PAM type: NRG; PAM sequence: GAG
  source 1..20: mol_type = other DNA
tatggattgtatcttgttaa

SEQ ID NO: 33994 - DNA, 20 bp, synthetic construct
  misc_feature 1..20: note = Description of Artificial Sequence: Synthetic oligonucleotide
  misc_feature 1..20: note = Target: SCN10A; (+) strand; PAM type: NRG; PAM sequence: AAG
  source 1..20: mol_type = other DNA
taagagtaaataatactaac

SEQ ID NO: 33995 - DNA, 20 bp, synthetic construct
  misc_feature 1..20: note = Description of Artificial Sequence: Synthetic oligonucleotide
  misc_feature 1..20: note = Target: SCN10A; (+) strand; PAM type: NRG; PAM sequence: TGG
  source 1..20: mol_type = other DNA
taaataatactaacaagtga

SEQ ID NO: 33996 - DNA, 20 bp, synthetic construct
  misc_feature 1..20: note = Description of Artificial Sequence: Synthetic oligonucleotide
  misc_feature 1..20: note = Target: SCN10A; (+) strand; PAM type: NRG; PAM sequence: GAG
  source 1..20: mol_type = other DNA
aataatactaacaagtgatg

SEQ ID NO: 33997 - DNA, 20 bp, synthetic construct
  misc_feature 1..20: note = Description of Artificial Sequence: Synthetic oligonucleotide
  misc_feature 1..20: note = Target: SCN10A; (+) strand; PAM type: NRG; PAM sequence: AGG
  source 1..20: mol_type = other DNA
ataatactaacaagtgatgg

SEQ ID NO: 33998 - DNA, 20 bp, synthetic construct
  misc_feature 1..20: note = Description of Artificial Sequence: Synthetic oligonucleotide
  misc_feature 1..20: note = Target: SCN10A; (+) strand; PAM type: NRG; PAM sequence: AAG
  source 1..20: mol_type = other DNA
aagtgatggaggaaaattta

SEQ ID NO: 33999 - DNA, 20 bp, synthetic construct
  misc_feature 1..20: note = Description of Artificial Sequence: Synthetic oligonucleotide
  misc_feature 1..20: note = Target: SCN10A; (+) strand; PAM type: NRG; PAM sequence: CAG
  source 1..20: mol_type = other DNA
tgatggaggaaaatttaaag

SEQ ID NO: 34000 - DNA, 20 bp, synthetic construct
  misc_feature 1..20: note = Description of Artificial Sequence: Synthetic oligonucleotide
  misc_feature 1..20: note = Target: SCN10A; (+) strand; PAM type: NRG; PAM sequence: TAG
  source 1..20: mol_type = other DNA
aagcagcatgatgtctaaac

SEQ ID NO: 34001 - DNA, 20 bp, synthetic construct
  misc_feature 1..20: note = Description of Artificial Sequence: Synthetic oligonucleotide
  misc_feature 1..20: note = Target: SCN10A; (+) strand; PAM type: NRG; PAM sequence: AAG
  source 1..20: mol_type = other DNA
gatgtctaaactagatgcca

SEQ ID NO: 34002 - DNA, 20 bp, synthetic construct
  misc_feature 1..20: note = Description of Artificial Sequence: Synthetic oligonucleotide
  misc_feature 1..20: note = Target: SCN10A; (+) strand; PAM type: NRG; PAM sequence: AAG
  source 1..20: mol_type = other DNA
ctaaactagatgccaaagaa

SEQ ID NO: 34003 - DNA, 20 bp, synthetic construct
  misc_feature 1..20: note = Description of Artificial Sequence: Synthetic oligonucleotide
  misc_feature 1..20: note = Target: SCN10A; (+) strand; PAM type: NRG; PAM sequence: CAG
  source 1..20: mol_type = other DNA
tcctgatgcttttgttacaa

SEQ ID NO: 34004 - DNA, 20 bp, synthetic construct
  misc_feature 1..20: note = Description of Artificial Sequence: Synthetic oligonucleotide
  misc_feature 1..20: note = Target: SCN10A; (+) strand; PAM type: NRG; PAM sequence: AAG
  source 1..20: mol_type = other DNA
ccccaactctttttctcctt

SEQ ID NO: 34005 - DNA, 20 bp, synthetic construct
  misc_feature 1..20: note = Description of Artificial Sequence: Synthetic oligonucleotide
  misc_feature 1..20: note = Target: SCN10A; (+) strand; PAM type: NRG; PAM sequence: TGG
  source 1..20: mol_type = other DNA
agtgacaacattgaaaatcg

SEQ ID NO: 34006 - DNA, 20 bp, synthetic construct
  misc_feature 1..20: note = Description of Artificial Sequence: Synthetic oligonucleotide
  misc_feature 1..20: note = Target: SCN10A; (+) strand; PAM type: NRG; PAM sequence: TGG
  source 1..20: mol_type = other DNA
atcgtggctactgttaattg

SEQ ID NO: 34007 - DNA, 20 bp, synthetic construct
  misc_feature 1..20: note = Description of Artificial Sequence: Synthetic oligonucleotide
  misc_feature 1..20: note = Target: SCN10A; (+) strand; PAM type: NRG; PAM sequence: AAG
  source 1..20: mol_type = other DNA
actgttaattgtggtcataa

SEQ ID NO: 34008 - DNA, 20 bp, synthetic construct
  misc_feature 1..20: note = Description of Artificial Sequence: Synthetic oligonucleotide
  misc_feature 1..20: note = Target: SCN10A; (+) strand; PAM type: NRG; PAM sequence: TGG
  source 1..20: mol_type = other DNA
ggtcataaaagtaattacat

SEQ ID NO: 34009 - DNA, 20 bp, synthetic construct
  misc_feature 1..20: note = Description of Artificial Sequence: Synthetic oligonucleotide
  misc_feature 1..20: note = Target: SCN10A; (+) strand; PAM type: NRG; PAM sequence: AAG
  source 1..20: mol_type = other DNA
cataaaagtaattacattgg

SEQ ID NO: 34010 - DNA, 20 bp, synthetic construct
  misc_feature 1..20: note = Description of Artificial Sequence: Synthetic oligonucleotide
  misc_feature 1..20: note = Target: SCN10A; (+) strand; PAM type: NRG; PAM sequence: AGG
  source 1..20: mol_type = other DNA
ataaaagtaattacattgga

SEQ ID NO: 34011 - DNA, 20 bp, synthetic construct
  misc_feature 1..20: note = Description of Artificial Sequence: Synthetic oligonucleotide
  misc_feature 1..20: note = Target: SCN10A; (+) strand; PAM type: NRG; PAM sequence: CAG
  source 1..20: mol_type = other DNA
gtaattacattggaaggaaa

SEQ ID NO: 34012 - DNA, 20 bp, synthetic construct
  misc_feature 1..20: note = Description of Artificial Sequence: Synthetic oligonucleotide
  misc_feature 1..20: note = Target: SCN10A; (+) strand; PAM type: NRG; PAM sequence: AAG
  source 1..20: mol_type = other DNA
tacattggaaggaaacagac

SEQ ID NO: 34013 - DNA, 20 bp, synthetic construct
  misc_feature 1..20: note = Description of Artificial Sequence: Synthetic oligonucleotide
  misc_feature 1..20: note = Target: SCN10A; (+) strand; PAM type: NRG; PAM sequence: AAG
  source 1..20: mol_type = other DNA
gaaggaaacagacaagtcca

SEQ ID NO: 34014 - DNA, 20 bp, synthetic construct
  misc_feature 1..20: note = Description of Artificial Sequence: Synthetic oligonucleotide
  misc_feature 1..20: note = Target: SCN10A; (+) strand; PAM type: NRG; PAM sequence: TAG
  source 1..20: mol_type = other DNA
acaagtccaaagattgtctt

SEQ ID NO: 34015 - DNA, 20 bp, synthetic construct
  misc_feature 1..20: note = Description of Artificial Sequence: Synthetic oligonucleotide
  misc_feature 1..20: note = Target: SCN10A; (+) strand; PAM type: NRG; PAM sequence: AAG
  source 1..20: mol_type = other DNA
aagattgtctttagataaaa

SEQ ID NO: 34016 - DNA, 20 bp, synthetic construct
  misc_feature 1..20: note = Description of Artificial Sequence: Synthetic oligonucleotide
  misc_feature 1..20: note = Target: SCN10A; (+) strand; PAM type: NRG; PAM sequence: AAG
  source 1..20: mol_type = other DNA
gtgacatttatcctcatttc

SEQ ID NO: 34017 - DNA, 20 bp, synthetic construct
  misc_feature 1..20: note = Description of Artificial Sequence: Synthetic oligonucleotide
  misc_feature 1..20: note = Target: SCN10A; (+) strand; PAM type: NRG; PAM sequence: AGG
  source 1..20: mol_type = other DNA
tgacatttatcctcatttca

SEQ ID NO: 34018 - DNA, 20 bp, synthetic construct
  misc_feature 1..20: note = Description of Artificial Sequence: Synthetic oligonucleotide
  misc_feature 1..20: note = Target: SCN10A; (+) strand; PAM type: NRG; PAM sequence: TAG
  source 1..20: mol_type = other DNA
catttatcctcatttcaagg

SEQ ID NO: 34019 - DNA, 20 bp, synthetic construct
  misc_feature 1..20: note = Description of Artificial Sequence: Synthetic oligonucleotide
  misc_feature 1..20: note = Target: SCN10A; (+) strand; PAM type: NRG; PAM sequence: GAG
  source 1..20: mol_type = other DNA
tttatcctcatttcaaggta

SEQ ID NO: 34020 - DNA, 20 bp, synthetic construct
  misc_feature 1..20: note = Description of Artificial Sequence: Synthetic oligonucleotide
  misc_feature 1..20: note = Target: SCN10A; (+) strand; PAM type: NRG; PAM sequence: AGG
  source 1..20: mol_type = other DNA
ttatcctcatttcaaggtag

SEQ ID NO: 34021 - DNA, 20 bp, synthetic construct
  misc_feature 1..20: note = Description of Artificial Sequence: Synthetic oligonucleotide
  misc_feature 1..20: note = Target: SCN10A; (+) strand; PAM type: NRG; PAM sequence: GAG
  source 1..20: mol_type = other DNA
atttcaaggtagaggcaact

SEQ ID NO: 34022 - DNA, 20 bp, synthetic construct
  misc_feature 1..20: note = Description of Artificial Sequence: Synthetic oligonucleotide
  misc_feature 1..20: note = Target: SCN10A; (+) strand; PAM type: NRG; PAM sequence: CAG
  source 1..20: mol_type = other DNA
aggtagaggcaactgagatc

SEQ ID NO: 34023 - DNA, 20 bp, synthetic construct
  misc_feature 1..20: note = Description of Artificial Sequence: Synthetic oligonucleotide
  misc_feature 1..20: note = Target: SCN10A; (+) strand; PAM type: NRG; PAM sequence: AAG
  source 1..20: mol_type = other DNA
aactgagatccagaaaattc

SEQ ID NO: 34024 - DNA, 20 bp, synthetic construct
  misc_feature 1..20: note = Description of Artificial Sequence: Synthetic oligonucleotide
  misc_feature 1..20: note = Target: SCN10A; (+) strand; PAM type: NRG; PAM sequence: TGG
  source 1..20: mol_type = other DNA
tgagatccagaaaattcaag

SEQ ID NO: 34025 - DNA, 20 bp, synthetic construct
  misc_feature 1..20: note = Description of Artificial Sequence: Synthetic oligonucleotide
  misc_feature 1..20: note = Target: SCN10A; (+) strand; PAM type: NRG; PAM sequence: AAG
  source 1..20: mol_type = other DNA
tggttgtcctatgttttgta

SEQ ID NO: 34026 - DNA, 20 bp, synthetic construct
  misc_feature 1..20: note = Description of Artificial Sequence: Synthetic oligonucleotide
  misc_feature 1..20: note = Target: SCN10A; (+) strand; PAM type: NRG; PAM sequence: AGG
  source 1..20: mol_type = other DNA
ggttgtcctatgttttgtaa

SEQ ID NO: 34027 - DNA, 20 bp, synthetic construct
  misc_feature 1..20: note = Description of Artificial Sequence: Synthetic oligonucleotide
  misc_feature 1..20: note = Target: SCN10A; (+) strand; PAM type: NRG; PAM sequence: GGG
  source 1..20: mol_type = other DNA
gttgtcctatgttttgtaaa

SEQ ID NO: 34028 - DNA, 20 bp, synthetic construct
  misc_feature 1..20: note = Description of Artificial Sequence: Synthetic oligonucleotide
  misc_feature 1..20: note = Target: SCN10A; (+) strand; PAM type: NRG; PAM sequence: TAG
  source 1..20: mol_type = other DNA
tatgttttgtaaagggcaac

SEQ ID NO: 34029 - DNA, 20 bp, synthetic construct
  misc_feature 1..20: note = Description of Artificial Sequence: Synthetic oligonucleotide
  misc_feature 1..20: note = Target: SCN10A; (+) strand; PAM type: NRG; PAM sequence: TGG
  source 1..20: mol_type = other DNA
aaagggcaactagctgcctc

SEQ ID NO: 34030 - DNA, 20 bp, synthetic construct
  misc_feature 1..20: note = Description of Artificial Sequence: Synthetic oligonucleotide
  misc_feature 1..20: note = Target: SCN10A; (+) strand; PAM type: NRG; PAM sequence: CAG
  source 1..20: mol_type = other DNA
caactagctgcctctggctc

SEQ ID NO: 34031 - DNA, 20 bp, synthetic construct
  misc_feature 1..20: note = Description of Artificial Sequence: Synthetic oligonucleotide
  misc_feature 1..20: note = Target: SCN10A; (+) strand; PAM type: NRG; PAM sequence: AGG
  source 1..20: mol_type = other DNA
aactagctgcctctggctcc

SEQ ID NO: 34032 - DNA, 20 bp, synthetic construct
  misc_feature 1..20: note = Description of Artificial Sequence: Synthetic oligonucleotide
  misc_feature 1..20: note = Target: SCN10A; (+) strand; PAM type: NRG; PAM sequence: TGG
  source 1..20: mol_type = other DNA
cctctggctccaggctctcc

SEQ ID NO: 34033 - DNA, 20 bp, synthetic construct
  misc_feature 1..20: note = Description of Artificial Sequence: Synthetic oligonucleotide
  misc_feature 1..20: note = Target: SCN10A; (+) strand; PAM type: NRG; PAM sequence: AAG
  source 1..20: mol_type = other DNA
tcctgtgcttgttcatccca

SEQ ID NO: 34034 - DNA, 20 bp, synthetic construct
  misc_feature 1..20: note = Description of Artificial Sequence: Synthetic oligonucleotide
  misc_feature 1..20: note = Target: SCN10A; (+) strand; PAM type: NRG; PAM sequence: CAG
  source 1..20: mol_type = other DNA
catcccaaagccattcccac

SEQ ID NO: 34035 - DNA, 20 bp, synthetic construct
  misc_feature 1..20: note = Description of Artificial Sequence: Synthetic oligonucleotide
  misc_feature 1..20: note = Target: SCN10A; (+) strand; PAM type: NRG; PAM sequence: CAG
  source 1..20: mol_type = other DNA
caaagccattcccaccagct

SEQ ID NO: 34036 - DNA, 20 bp, synthetic construct
  misc_feature 1..20: note = Description of Artificial Sequence: Synthetic oligonucleotide
  misc_feature 1..20: note = Target: SCN10A; (+) strand; PAM type: NRG; PAM sequence: TGG
  source 1..20: mol_type = other DNA
ccattcccaccagctcagcc

SEQ ID NO: 34037 - DNA, 20 bp, synthetic construct
  misc_feature 1..20: note = Description of Artificial Sequence: Synthetic oligonucleotide
  misc_feature 1..20: note = Target: SCN10A; (+) strand; PAM type: NRG; PAM sequence: GGG
  source 1..20: mol_type = other DNA
cattcccaccagctcagcct

SEQ ID NO: 34038 - DNA, 20 bp, synthetic construct
  misc_feature 1..20: note = Description of Artificial Sequence: Synthetic oligonucleotide
  misc_feature 1..20: note = Target: SCN10A; (+) strand; PAM type: NRG; PAM sequence: CAG
  source 1..20: mol_type = other DNA
cacacttgacctcctgaacc

SEQ ID NO: 34039 - DNA, 20 bp, synthetic construct
  misc_feature 1..20: note = Description of Artificial Sequence: Synthetic oligonucleotide
  misc_feature 1..20: note = Target: SCN10A; (+) strand; PAM type: NRG; PAM sequence: CAG
  source 1..20: mol_type = other DNA
ctgcactgctgctctgctct

SEQ ID NO: 34040 - DNA, 20 bp, synthetic construct
  misc_feature 1..20: note = Description of Artificial Sequence: Synthetic oligonucleotide
  misc_feature 1..20: note = Target: SCN10A; (+) strand; PAM type: NRG; PAM sequence: TGG
  source 1..20: mol_type = other DNA
ctgctctgctctcagctaac

SEQ ID NO: 34041 - DNA, 20 bp, synthetic construct
  misc_feature 1..20: note = Description of Artificial Sequence: Synthetic oligonucleotide
  misc_feature 1..20: note = Target: SCN10A; (+) strand; PAM type: NRG; PAM sequence: AAG
  source 1..20: mol_type = other DNA
ggctcaacacactaaccaat

SEQ ID NO: 34042 - DNA, 20 bp, synthetic construct
  misc_feature 1..20: note = Description of Artificial Sequence: Synthetic oligonucleotide
  misc_feature 1..20: note = Target: SCN10A; (+) strand; PAM type: NRG; PAM sequence: AGG
  source 1..20: mol_type = other DNA
gctcaacacactaaccaata

SEQ ID NO: 34043 - DNA, 20 bp, synthetic construct
  misc_feature 1..20: note = Description of Artificial Sequence: Synthetic oligonucleotide
  misc_feature 1..20: note = Target: SCN10A; (+) strand; PAM type: NRG; PAM sequence: GGG
  source 1..20: mol_type = other DNA
ctcaacacactaaccaataa

SEQ ID NO: 34044 - DNA, 20 bp, synthetic construct
  misc_feature 1..20: note = Description of Artificial Sequence: Synthetic oligonucleotide
  misc_feature 1..20: note = Target: SCN10A; (+) strand; PAM type: NRG; PAM sequence: CAG
  source 1..20: mol_type = other DNA
ccaccccgccccgaccacgc

SEQ ID NO: 34045 - DNA, 20 bp, synthetic construct
  misc_feature 1..20: note = Description of Artificial Sequence: Synthetic oligonucleotide
  misc_feature 1..20: note = Target: SCN10A; (+) strand; PAM type: NRG; PAM sequence: GAG
  source 1..20: mol_type = other DNA
cccgccccgaccacgccagt

SEQ ID NO: 34046 - DNA, 20 bp, synthetic construct
  misc_feature 1..20: note = Description of Artificial Sequence: Synthetic oligonucleotide
  misc_feature 1..20: note = Target: SCN10A; (+) strand; PAM type: NRG; PAM sequence: AGG
  source 1..20: mol_type = other DNA
ccgccccgaccacgccagtg

SEQ ID NO: 34047 - DNA, 20 bp, synthetic construct
  misc_feature 1..20: note = Description of Artificial Sequence: Synthetic oligonucleotide
  misc_feature 1..20: note = Target: SCN10A; (+) strand; PAM type: NRG; PAM sequence: GGG
  source 1..20: mol_type = other DNA
cgccccgaccacgccagtga

SEQ ID NO: 34048 - DNA, 20 bp, synthetic construct
  misc_feature 1..20: note = Description of Artificial Sequence: Synthetic oligonucleotide
  misc_feature 1..20: note = Target: SCN10A; (+) strand; PAM type: NRG; PAM sequence: CAG
  source 1..20: mol_type = other DNA
cccgaccacgccagtgaggg

SEQ ID NO: 34049 - DNA, 20 bp, synthetic construct
  misc_feature 1..20: note = Description of Artificial Sequence: Synthetic oligonucleotide
  misc_feature 1..20: note = Target: SCN10A; (+) strand; PAM type: NRG; PAM sequence: CAG
  source 1..20: mol_type = other DNA
cacgccagtgagggcagtac

SEQ ID NO: 34050 - DNA, 20 bp, synthetic construct
  misc_feature 1..20: note = Description of Artificial Sequence: Synthetic oligonucleotide
  misc_feature 1..20: note = Target: SCN10A; (+) strand; PAM type: NRG; PAM sequence: CAG
  source 1..20: mol_type = other DNA
ccagtgagggcagtaccagc

SEQ ID NO: 34051 - DNA, 20 bp, synthetic construct
  misc_feature 1..20: note = Description of Artificial Sequence: Synthetic oligonucleotide
  misc_feature 1..20: note = Target: SCN10A; (+) strand; PAM type: NRG; PAM sequence: GAG
  source 1..20: mol_type = other DNA
agtgagggcagtaccagcca

SEQ ID NO: 34052 - DNA, 20 bp, synthetic construct
  misc_feature 1..20: note = Description of Artificial Sequence: Synthetic oligonucleotide
  misc_feature 1..20: note = Target: SCN10A; (+) strand; PAM type: NRG; PAM sequence: TGG
  source 1..20: mol_type = other DNA
cactcacgatgttgcctatc

SEQ ID NO: 34053 - DNA, 20 bp, synthetic construct
  misc_feature 1..20: note = Description of Artificial Sequence: Synthetic oligonucleotide
  misc_feature 1..20: note = Target: SCN10A; (+) strand; PAM type: NRG; PAM sequence: GAG
  source 1..20: mol_type = other DNA
ctcacgatgttgcctatctg

SEQ ID NO: 34054 - DNA, 20 bp, synthetic construct
  misc_feature 1..20: note = Description of Artificial Sequence: Synthetic oligonucleotide
  misc_feature 1..20: note = Target: SCN10A; (+) strand; PAM type: NRG; PAM sequence: TGG
  source 1..20: mol_type = other DNA
gatgttgcctatctggagca

SEQ ID NO: 34055 - DNA, 20 bp, synthetic construct
  misc_feature 1..20: note = Description of Artificial Sequence: Synthetic oligonucleotide
  misc_feature 1..20: note = Target: SCN10A; (+) strand; PAM type: NRG; PAM sequence: AAG
  source 1..20: mol_type = other DNA
ctatctggagcatggcttcg

SEQ ID NO: 34056 - DNA, 20 bp, synthetic construct
  misc_feature 1..20: note = Description of Artificial Sequence: Synthetic oligonucleotide
  misc_feature 1..20: note = Target: SCN10A; (+) strand; PAM type: NRG; PAM sequence: AGG
  source 1..20: mol_type = other DNA
tatctggagcatggcttcga

SEQ ID NO: 34057 - DNA, 20 bp, synthetic construct
  misc_feature 1..20: note = Description of Artificial Sequence: Synthetic oligonucleotide
  misc_feature 1..20: note = Target: SCN10A; (+) strand; PAM type: NRG; PAM sequence: TAG
  source 1..20: mol_type = other DNA
ctggagcatggcttcgaagg

SEQ ID NO: 34058 - DNA, 20 bp, synthetic construct
  misc_feature 1..20: note = Description of Artificial Sequence: Synthetic oligonucleotide
  misc_feature 1..20: note = Target: SCN10A; (+) strand; PAM type: NRG; PAM sequence: AGG
  source 1..20: mol_type = other DNA
tggagcatggcttcgaaggt

SEQ ID NO: 34059 - DNA, 20 bp, synthetic construct
  misc_feature 1..20: note = Description of Artificial Sequence: Synthetic oligonucleotide
  misc_feature 1..20: note = Target: SCN10A; (+) strand; PAM type: NRG; PAM sequence: GGG
  source 1..20: mol_type = other DNA
ggagcatggcttcgaaggta

SEQ ID NO: 34060 - DNA, 20 bp, synthetic construct
  misc_feature 1..20: note = Description of Artificial Sequence: Synthetic oligonucleotide
  misc_feature 1..20: note = Target: SCN10A; (+) strand; PAM type: NRG; PAM sequence: TGG
  source 1..20: mol_type = other DNA
cgaaggtagggctcatgcca

SEQ ID NO: 34061 - DNA, 20 bp, synthetic construct
  misc_feature 1..20: note = Description of Artificial Sequence: Synthetic oligonucleotide
  misc_feature 1..20: note = Target: SCN10A; (+) strand; PAM type: NRG; PAM sequence: TGG
  source 1..20: mol_type = other DNA
gctcatgccatggtgctcca

SEQ ID NO: 34062 - DNA, 20 bp, synthetic construct
  misc_feature 1..20: note = Description of Artificial Sequence: Synthetic oligonucleotide
  misc_feature 1..20: note = Target: SCN10A; (+) strand; PAM type: NRG; PAM sequence: AAG
  source 1..20: mol_type = other DNA
catggtgctccatggccatg

SEQ ID NO: 34063 - DNA, 20 bp, synthetic construct
  misc_feature 1..20: note = Description of Artificial Sequence: Synthetic oligonucleotide
  misc_feature 1..20: note = Target: SCN10A; (+) strand; PAM type: NRG; PAM sequence: TGG
  source 1..20: mol_type = other DNA
gtgctccatggccatgaaga

SEQ ID NO: 34064 - DNA, 20 bp, synthetic construct
  misc_feature 1..20: note = Description of Artificial Sequence: Synthetic oligonucleotide
  misc_feature 1..20: note = Target: SCN10A; (+) strand; PAM type: NRG; PAM sequence: AAG
  source 1..20: mol_type = other DNA
tggtgttcaccacgatgcac

SEQ ID NO: 34065 - DNA, 20 bp, synthetic construct
  misc_feature 1..20: note = Description of Artificial Sequence: Synthetic oligonucleotide
  misc_feature 1..20: note = Target: SCN10A; (+) strand; PAM type: NRG; PAM sequence: AGG
  source 1..20: mol_type = other DNA
ggtgttcaccacgatgcaca

SEQ ID NO: 34066 - DNA, 20 bp, synthetic construct
  misc_feature 1..20: note = Description of Artificial Sequence: Synthetic oligonucleotide
  misc_feature 1..20: note = Target: SCN10A; (+) strand; PAM type: NRG; PAM sequence: TGG
  source 1..20: mol_type = other DNA
caccacgatgcacaaggtga

SEQ ID NO: 34067 - DNA, 20 bp, synthetic construct
  misc_feature 1..20: note = Description of Artificial Sequence: Synthetic oligonucleotide
  misc_feature 1..20: note = Target: SCN10A; (+) strand; PAM type: NRG; PAM sequence: GAG
  source 1..20: mol_type = other DNA
acgatgcacaaggtgatggt

SEQ ID NO: 34068 - DNA, 20 bp, synthetic construct
  misc_feature 1..20: note = Description of Artificial Sequence: Synthetic oligonucleotide
  misc_feature 1..20: note = Target: SCN10A; (+) strand; PAM type: NRG; PAM sequence: AAG
  source 1..20: mol_type = other DNA
aggtgatggtgagctctgca

SEQ ID NO: 34069 - DNA, 20 bp, synthetic construct
  misc_feature 1..20: note = Description of Artificial Sequence: Synthetic oligonucleotide
  misc_feature 1..20: note = Target: SCN10A; (+) strand; PAM type: NRG; PAM sequence: AGG
  source 1..20: mol_type = other DNA
ggtgatggtgagctctgcaa

SEQ ID NO: 34070 - DNA, 20 bp, synthetic construct
  misc_feature 1..20: note = Description of Artificial Sequence: Synthetic oligonucleotide
  misc_feature 1..20: note = Target: SCN10A; (+) strand; PAM type: NRG; PAM sequence: GGG
  source 1..20: mol_type = other DNA
gtgatggtgagctctgcaaa

SEQ ID NO: 34071 - DNA, 20 bp, synthetic construct
  misc_feature 1..20: note = Description of Artificial Sequence: Synthetic oligonucleotide
  misc_feature 1..20: note = Target: SCN10A; (+) strand; PAM type: NRG; PAM sequence: AAG
  source 1..20: mol_type = other DNA
tctgcaaagggatccgtcac

SEQ ID NO: 34072 - DNA, 20 bp, synthetic construct
  misc_feature 1..20: note = Description of Artificial Sequence: Synthetic oligonucleotide
  misc_feature 1..20: note = Target: SCN10A; (+) strand; PAM type: NRG; PAM sequence: AAG
  source 1..20: mol_type = other DNA
agggatccgtcacaagccca

SEQ ID NO: 34073 - DNA, 20 bp, synthetic construct
  misc_feature 1..20: note = Description of Artificial Sequence: Synthetic oligonucleotide
  misc_feature 1..20: note = Target: SCN10A; (+) strand; PAM type: NRG; PAM sequence: GAG
  source 1..20: mol_type = other DNA
ggatccgtcacaagcccaaa

SEQ ID NO: 34074 - DNA, 20 bp, synthetic construct
  misc_feature 1..20: note = Description of Artificial Sequence: Synthetic oligonucleotide
  misc_feature 1..20: note = Target: SCN10A; (+) strand; PAM type: NRG; PAM sequence: GAG
  source 1..20: mol_type = other DNA
agcccaaagagaattgtctt

SEQ ID NO: 34075 - DNA, 20 bp, synthetic construct
  misc_feature 1..20: note = Description of Artificial Sequence: Synthetic oligonucleotide
  misc_feature 1..20: note = Target: SCN10A; (+) strand; PAM type: NRG; PAM sequence: TGG
  source 1..20: mol_type = other DNA
tgtcttgagcttcacccaca

SEQ ID NO: 34076 - DNA, 20 bp, synthetic construct
  misc_feature 1..20: note = Description of Artificial Sequence: Synthetic oligonucleotide
  misc_feature 1..20: note = Target: SCN10A; (+) strand; PAM type: NRG; PAM sequence: GGG
  source 1..20: mol_type = other DNA
gtcttgagcttcacccacat

SEQ ID NO: 34077 - DNA, 20 bp, synthetic construct
  misc_feature 1..20: note = Description of Artificial Sequence: Synthetic oligonucleotide
  misc_feature 1..20: note = Target: SCN10A; (+) strand; PAM type: NRG; PAM sequence: GGG
  source 1..20: mol_type = other DNA
tcttgagcttcacccacatg

SEQ ID NO: 34078 - DNA, 20 bp, synthetic construct
  misc_feature 1..20: note = Description of Artificial Sequence: Synthetic oligonucleotide
  misc_feature 1..20: note = Target: SCN10A; (+) strand; PAM type: NRG; PAM sequence: CAG
  source 1..20: mol_type = other DNA
tgagcttcacccacatgggg

SEQ ID NO: 34079 - DNA, 20 bp, synthetic construct
  misc_feature 1..20: note = Description of Artificial Sequence: Synthetic oligonucleotide
  misc_feature 1..20: note = Target: SCN10A; (+) strand; PAM type: NRG; PAM sequence: CAG
  source 1..20: mol_type = other DNA
cccacatggggcagcaatcc

SEQ ID NO: 34080 - DNA, 20 bp, synthetic construct
  misc_feature 1..20: note = Description of Artificial Sequence: Synthetic oligonucleotide
  misc_feature 1..20: note = Target: SCN10A; (+) strand; PAM type: NRG; PAM sequence: CAG
  source 1..20: mol_type = other DNA
atggggcagcaatcccagat

SEQ ID NO: 34081 - DNA, 20 bp, synthetic construct
  misc_feature 1..20: note = Description of Artificial Sequence: Synthetic oligonucleotide
  misc_feature 1..20: note = Target: SCN10A; (+) strand; PAM type: NRG; PAM sequence: GAG
  source 1..20: mol_type = other DNA
atcccagatcagatacttct

SEQ ID NO: 34082 - DNA, 20 bp, synthetic construct
  misc_feature 1..20: note = Description of Artificial Sequence: Synthetic oligonucleotide
  misc_feature 1..20: note = Target: SCN10A; (+) strand; PAM type: NRG; PAM sequence: AAG
  source 1..20: mol_type = other DNA
agatcagatacttctgagac

SEQ ID NO: 34083 - DNA, 20 bp, synthetic construct
  misc_feature 1..20: note = Description of Artificial Sequence: Synthetic oligonucleotide
  misc_feature 1..20: note = Target: SCN10A; (+) strand; PAM type: NRG; PAM sequence: TGG
  source 1..20: mol_type = other DNA
cagatacttctgagacaagc

SEQ ID NO: 34084 - DNA, 20 bp, synthetic construct
  misc_feature 1..20: note = Description of Artificial Sequence: Synthetic oligonucleotide
  misc_feature 1..20: note = Target: SCN10A; (+) strand; PAM type: NRG; PAM sequence: AAG
  source 1..20: mol_type = other DNA
acttctgagacaagctggtc

SEQ ID NO: 34085 - DNA, 20 bp, synthetic construct
  misc_feature 1..20: note = Description of Artificial Sequence: Synthetic oligonucleotide
  misc_feature 1..20: note = Target: SCN10A; (+) strand; PAM type: NRG; PAM sequence: CAG
  source 1..20: mol_type = other DNA
tctgagacaagctggtcaag

SEQ ID NO: 34086 - DNA, 20 bp, synthetic construct
  misc_feature 1..20: note = Description of Artificial Sequence: Synthetic oligonucleotide
  misc_feature 1..20: note = Target: SCN10A; (+) strand; PAM type: NRG; PAM sequence: AGG
  source 1..20: mol_type = other DNA
ctgagacaagctggtcaagc

SEQ ID NO: 34087 - DNA, 20 bp, synthetic construct
  misc_feature 1..20: note = Description of Artificial Sequence: Synthetic oligonucleotide
  misc_feature 1..20: note = Target: SCN10A; (+) strand; PAM type: NRG; PAM sequence: GGG
  source 1..20: mol_type = other DNA
tgagacaagctggtcaagca

SEQ ID NO: 34088 - DNA, 20 bp, synthetic construct
  misc_feature 1..20: note = Description of Artificial Sequence: Synthetic oligonucleotide
  misc_feature 1..20: note = Target: SCN10A; (+) strand; PAM type: NRG; PAM sequence: TGG
  source 1..20: mol_type = other DNA
gacaagctggtcaagcaggg

SEQ ID NO: 34089 - DNA, 20 bp, synthetic construct
  misc_feature 1..20: note = Description of Artificial Sequence: Synthetic oligonucleotide
  misc_feature 1..20: note = Target: SCN10A; (+) strand; PAM type: NRG; PAM sequence: GGG
  source 1..20: mol_type = other DNA
acaagctggtcaagcagggt

SEQ ID NO: 34090 - DNA, 20 bp, synthetic construct
  misc_feature 1..20: note = Description of Artificial Sequence: Synthetic oligonucleotide
  misc_feature 1..20: note = Target: SCN10A; (+) strand; PAM type: NRG; PAM sequence: CAG
  source 1..20: mol_type = other DNA
gcagggtgggcacttctgtt

SEQ ID NO: 34091 - DNA, 20 bp, synthetic construct
  misc_feature 1..20: note = Description of Artificial Sequence: Synthetic oligonucleotide
  misc_feature 1..20: note = Target: SCN10A; (+) strand; PAM type: NRG; PAM sequence: GAG
  source 1..20: mol_type = other DNA
cacttctgttcagactcctc

SEQ ID NO: 34092 - DNA, 20 bp, synthetic construct
  misc_feature 1..20: note = Description of Artificial Sequence: Synthetic oligonucleotide
  misc_feature 1..20: note = Target: SCN10A; (+) strand; PAM type: NRG; PAM sequence: TAG
  source 1..20: mol_type = other DNA
actcctcgagttctgcatta

SEQ ID NO: 34093 - DNA, 20 bp, synthetic construct
  misc_feature 1..20: note = Description of Artificial Sequence: Synthetic oligonucleotide
  misc_feature 1..20: note = Target: SCN10A; (+) strand; PAM type: NRG; PAM sequence: TGG
  source 1..20: mol_type = other DNA
tcgagttctgcattatagtg

SEQ ID NO: 34094 - DNA, 20 bp, synthetic construct
  misc_feature 1..20: note = Description of Artificial Sequence: Synthetic oligonucleotide
  misc_feature 1..20: note = Target: SCN10A; (+) strand; PAM type: NRG; PAM sequence: CAG
  source 1..20: mol_type = other DNA
cattatagtgtggtcaatga

SEQ ID NO: 34095 - DNA, 20 bp, synthetic construct
  misc_feature 1..20: note = Description of Artificial Sequence: Synthetic oligonucleotide
  misc_feature 1..20: note = Target: SCN10A; (+) strand; PAM type: NRG; PAM sequence: CAG
  source 1..20: mol_type = other DNA
gtgtggtcaatgacagctgt

SEQ ID NO: 34096 - DNA, 20 bp, synthetic construct
  misc_feature 1..20: note = Description of Artificial Sequence: Synthetic oligonucleotide
  misc_feature 1..20: note = Target: SCN10A; (+) strand; PAM type: NRG; PAM sequence: TGG
  source 1..20: mol_type = other DNA
ctgtcagccatgtgtcacct

SEQ ID NO: 34097 - DNA, 20 bp, synthetic construct
  misc_feature 1..20: note = Description of Artificial Sequence: Synthetic oligonucleotide
  misc_feature 1..20: note = Target: SCN10A; (+) strand; PAM type: NRG; PAM sequence: CGG
  source 1..20: mol_type = other DNA
caccttggaccccaattctg

SEQ ID NO: 34098 - DNA, 20 bp, synthetic construct
  misc_feature 1..20: note = Description of Artificial Sequence: Synthetic oligonucleotide
  misc_feature 1..20: note = Target: SCN10A; (+) strand; PAM type: NRG; PAM sequence: TAG
  source 1..20: mol_type = other DNA
ccaattctgcggtcatcctc

SEQ ID NO: 34099 - DNA, 20 bp, synthetic construct
  misc_feature 1..20: note = Description of Artificial Sequence: Synthetic oligonucleotide
  misc_feature 1..20: note = Target: SCN10A; (+) strand; PAM type: NRG; PAM sequence: AAG
  source 1..20: mol_type = other DNA
tagaccttgttgttaataat

SEQ ID NO: 34100 - DNA, 20 bp, synthetic construct
  misc_feature 1..20: note = Description of Artificial Sequence: Synthetic oligonucleotide
  misc_feature 1..20: note = Target: SCN10A; (+) strand; PAM type: NRG; PAM sequence: CAG
  source 1..20: mol_type = other DNA
cacctccaacattttgactt

SEQ ID NO: 34101 - DNA, 20 bp, synthetic construct
  misc_feature 1..20: note = Description of Artificial Sequence: Synthetic oligonucleotide
  misc_feature 1..20: note = Target: SCN10A; (+) strand; PAM type: NRG; PAM sequence: TGG
  source 1..20: mol_type = other DNA
ttcagccctctctctgtctc

SEQ ID NO: 34102 - DNA, 20 bp, synthetic construct
  misc_feature 1..20: note = Description of Artificial Sequence: Synthetic oligonucleotide
  misc_feature 1..20: note = Target: SCN10A; (+) strand; PAM type: NRG; PAM sequence: TAG
  source 1..20: mol_type = other DNA
tcctatattttgaactcctt

SEQ ID NO: 34103 - DNA, 20 bp, synthetic construct
  misc_feature 1..20: note = Description of Artificial Sequence: Synthetic oligonucleotide
  misc_feature 1..20: note = Target: SCN10A; (+) strand; PAM type: NRG; PAM sequence: CAG
  source 1..20: mol_type = other DNA
caattaatatctgccccatc

SEQ ID NO: 34104 - DNA, 20 bp, synthetic construct
  misc_feature 1..20: note = Description of Artificial Sequence: Synthetic oligonucleotide
  misc_feature 1..20: note = Target: SCN10A; (+) strand; PAM type: NRG; PAM sequence: CAG
  source 1..20: mol_type = other DNA
tccttacttctcaatttgcc

SEQ ID NO: 34105 - DNA, 20 bp, synthetic construct
  misc_feature 1..20: note = Description of Artificial Sequence: Synthetic oligonucleotide
  misc_feature 1..20: note = Target: SCN10A; (+) strand; PAM type: NRG; PAM sequence: TAG
  source 1..20: mol_type = other DNA
acttctcaatttgcccagct

SEQ ID NO: 34106 - DNA, 20 bp, synthetic construct
  misc_feature 1..20: note = Description of Artificial Sequence: Synthetic oligonucleotide
  misc_feature 1..20: note = Target: SCN10A; (+) strand; PAM type: NRG; PAM sequence: TAG
  source 1..20: mol_type = other DNA
tctctctaactactcccttg

SEQ ID NO: 34107 - DNA, 20 bp, synthetic construct
  misc_feature 1..20: note = Description of Artificial Sequence: Synthetic oligonucleotide
  misc_feature 1..20: note = Target: SCN10A; (+) strand; PAM type: NRG; PAM sequence: AGG
  source 1..20: mol_type = other DNA
ctctctaactactcccttgt

SEQ ID NO: 34108 - DNA, 20 bp, synthetic construct
  misc_feature 1..20: note = Description of Artificial Sequence: Synthetic oligonucleotide
  misc_feature 1..20: note = Target: SCN10A; (+) strand; PAM type: NRG; PAM sequence: TGG
  source 1..20: mol_type = other DNA
cctccttcattgtacttgcc

SEQ ID NO: 34109 - DNA, 20 bp, synthetic construct
  misc_feature 1..20: note = Description of Artificial Sequence: Synthetic oligonucleotide
  misc_feature 1..20: note = Target: SCN10A; (+) strand; PAM type: NRG; PAM sequence: TAG
  source 1..20: mol_type = other DNA
ggcaaaacctgaactgtgaa

SEQ ID NO: 34110 - DNA, 20 bp, synthetic construct
  misc_feature 1..20: note = Description of Artificial Sequence: Synthetic oligonucleotide
  misc_feature 1..20: note = Target: SCN10A; (+) strand; PAM type: NRG; PAM sequence: TAG
  source 1..20: mol_type = other DNA
ctgtgaatagacccaatttg

SEQ ID NO: 34111 - DNA, 20 bp, synthetic construct
  misc_feature 1..20: note = Description of Artificial Sequence: Synthetic oligonucleotide
  misc_feature 1..20: note = Target: SCN10A; (+) strand; PAM type: NRG; PAM sequence: CAG
  source 1..20: mol_type = other DNA
actctgtacttgcacccaac

SEQ ID NO: 34112 - DNA, 20 bp, synthetic construct
  misc_feature 1..20: note = Description of Artificial Sequence: Synthetic oligonucleotide
  misc_feature 1..20: note = Target: SCN10A; (+) strand; PAM type: NRG; PAM sequence: TGG
  source 1..20: mol_type = other DNA
tgtacttgcacccaaccagc

SEQ ID NO: 34113 - DNA, 20 bp, synthetic construct
  misc_feature 1..20: note = Description of Artificial Sequence: Synthetic oligonucleotide
  misc_feature 1..20: note = Target: SCN10A; (+) strand; PAM type: NRG; PAM sequence: TGG
  source 1..20: mol_type = other DNA
tgcacccaaccagctggacc

SEQ ID NO: 34114 - DNA, 20 bp, synthetic construct
  misc_feature 1..20: note = Description of Artificial Sequence: Synthetic oligonucleotide
  misc_feature 1..20: note = Target: SCN10A; (+) strand; PAM type: NRG; PAM sequence: TGG
  source 1..20: mol_type = other DNA
cccaaccagctggacctggc

SEQ ID NO: 34115 - DNA, 20 bp, synthetic construct
  misc_feature 1..20: note = Description of Artificial Sequence: Synthetic oligonucleotide
  misc_feature 1..20: note = Target: SCN10A; (+) strand; PAM type: NRG; PAM sequence: TAG
  source 1..20: mol_type = other DNA
actatgcttaccaaccctcc

SEQ ID NO: 34116 - DNA, 20 bp, synthetic construct
  misc_feature 1..20: note = Description of Artificial Sequence: Synthetic oligonucleotide
  misc_feature 1..20: note = Target: SCN10A; (+) strand; PAM type: NRG; PAM sequence: GAG
  source 1..20: mol_type = other DNA
tatgcttaccaaccctccta

SEQ ID NO: 34117 - DNA, 20 bp, synthetic construct
  misc_feature 1..20: note = Description of Artificial Sequence: Synthetic oligonucleotide
  misc_feature 1..20: note = Target: SCN10A; (+) strand; PAM type: NRG; PAM sequence: GAG
  source 1..20: mol_type = other DNA
caaccctcctagagatctgt

SEQ ID NO: 34118 - DNA, 20 bp, synthetic construct
  misc_feature 1..20: note = Description of Artificial Sequence: Synthetic oligonucleotide
  misc_feature 1..20: note = Target: SCN10A; (+) strand; PAM type: NRG; PAM sequence: CAG
  source 1..20: mol_type = other DNA
tcctagagatctgtgagccc

SEQ ID NO: 34119 - DNA, 20 bp, synthetic construct
  misc_feature 1..20: note = Description of Artificial Sequence: Synthetic oligonucleotide
  misc_feature 1..20: note = Target: SCN10A; (+) strand; PAM type: NRG; PAM sequence: CAG
  source 1..20: mol_type = other DNA
agccccagccttgccctgcc

SEQ ID NO: 34120 - DNA, 20 bp, synthetic construct
  misc_feature 1..20: note = Description of Artificial Sequence: Synthetic oligonucleotide
  misc_feature 1..20: note = Target: SCN10A; (+) strand; PAM type: NRG; PAM sequence: TGG
  source 1..20: mol_type = other DNA
ccttgccctgcccagaaatc

SEQ ID NO: 34121 - DNA, 20 bp, synthetic construct
  misc_feature 1..20: note = Description of Artificial Sequence: Synthetic oligonucleotide
  misc_feature 1..20: note = Target: SCN10A; (+) strand; PAM type: NRG; PAM sequence: CAG
  source 1..20: mol_type = other DNA
attccattccttcattcttc

SEQ ID NO: 34122 - DNA, 20 bp, synthetic construct
  misc_feature 1..20: note = Description of Artificial Sequence: Synthetic oligonucleotide
  misc_feature 1..20: note = Target: SCN10A; (+) strand; PAM type: NRG; PAM sequence: CGG
  source 1..20: mol_type = other DNA
ctcttcccccgtctaacctc

SEQ ID NO: 34123 - DNA, 20 bp, synthetic construct
  misc_feature 1..20: note = Description of Artificial Sequence: Synthetic oligonucleotide
  misc_feature 1..20: note = Target: SCN10A; (+) strand; PAM type: NRG; PAM sequence: GAG
  source 1..20: mol_type = other DNA
tctacttactctctgttgat

SEQ ID NO: 34124 - DNA, 20 bp, synthetic construct
  misc_feature 1..20: note = Description of Artificial Sequence: Synthetic oligonucleotide
  misc_feature 1..20: note = Target: SCN10A; (+) strand; PAM type: NRG; PAM sequence: CAG
  source 1..20: mol_type = other DNA
gagctcccttttatttcact

SEQ ID NO: 34125 - DNA, 20 bp, synthetic construct
  misc_feature 1..20: note = Description of Artificial Sequence: Synthetic oligonucleotide
  misc_feature 1..20: note = Target: SCN10A; (+) strand; PAM type: NRG; PAM sequence: TAG
  source 1..20: mol_type = other DNA
cttttatttcactcagaata

SEQ ID NO: 34126 - DNA, 20 bp, synthetic construct
  misc_feature 1..20: note = Description of Artificial Sequence: Synthetic oligonucleotide
  misc_feature 1..20: note = Target: SCN10A; (+) strand; PAM type: NRG; PAM sequence: TAG
  source 1..20: mol_type = other DNA
atttcactcagaatatagac

SEQ ID NO: 34127 - DNA, 20 bp, synthetic construct
  misc_feature 1..20: note = Description of Artificial Sequence: Synthetic oligonucleotide
  misc_feature 1..20: note = Target: SCN10A; (+) strand; PAM type: NRG; PAM sequence: AAG
  source 1..20: mol_type = other DNA
gaatatagactagttcacaa

SEQ ID NO: 34128 - DNA, 20 bp, synthetic construct
  misc_feature 1..20: note = Description of Artificial Sequence: Synthetic oligonucleotide
  misc_feature 1..20: note = Target: SCN10A; (+) strand; PAM type: NRG; PAM sequence: TGG
  source 1..20: mol_type = other DNA
tcttcctaccactaaatctc

SEQ ID NO: 34129 - DNA, 20 bp, synthetic construct
  misc_feature 1..20: note = Description of Artificial Sequence: Synthetic oligonucleotide
  misc_feature 1..20: note = Target: SCN10A; (+) strand; PAM type: NRG; PAM sequence: AAG
  source 1..20: mol_type = other DNA
taaatctctggcatatctgc

SEQ ID NO: 34130 - DNA, 20 bp, synthetic construct
  misc_feature 1..20: note = Description of Artificial Sequence: Synthetic oligonucleotide
  misc_feature 1..20: note = Target: SCN10A; (+) strand; PAM type: NRG; PAM sequence: TGG
  source 1..20: mol_type = other DNA
ggcatatctgcaagtccacc

SEQ ID NO: 34131 - DNA, 20 bp, synthetic construct
  misc_feature 1..20: note = Description of Artificial Sequence: Synthetic oligonucleotide
  misc_feature 1..20: note = Target: SCN10A; (+) strand; PAM type: NRG; PAM sequence: CAG
  source 1..20: mol_type = other DNA
ttctgtcttcgtgccccaca

SEQ ID NO: 34132 - DNA, 20 bp, synthetic construct
  misc_feature 1..20: note = Description of Artificial Sequence: Synthetic oligonucleotide
  misc_feature 1..20: note = Target: SCN10A; (+) strand; PAM type: NRG; PAM sequence: TGG
  source 1..20: mol_type = other DNA
ttcgtgccccacacagtgcg

SEQ ID NO: 34133 - DNA, 20 bp, synthetic construct
  misc_feature 1..20: note = Description of Artificial Sequence: Synthetic oligonucleotide
  misc_feature 1..20: note = Target: SCN10A; (+) strand; PAM type: NRG; PAM sequence: GGG
  source 1..20: mol_type = other DNA
tcgtgccccacacagtgcgt

SEQ ID NO: 34134 - DNA, 20 bp, synthetic construct
  misc_feature 1..20: note = Description of Artificial Sequence: Synthetic oligonucleotide
  misc_feature 1..20: note = Target: SCN10A; (+) strand; PAM type: NRG; PAM sequence: TGG
  source 1..20: mol_type = other DNA
tgccccacacagtgcgtggg

SEQ ID NO: 34135 - DNA, 20 bp, synthetic construct
  misc_feature 1..20: note = Description of Artificial Sequence: Synthetic oligonucleotide
  misc_feature 1..20: note = Target: SCN10A; (+) strand; PAM type: NRG; PAM sequence: CGG
  source 1..20: mol_type = other DNA
tctacccctcccacttgtgc

SEQ ID NO: 34136 - DNA, 20 bp, synthetic construct
  misc_feature 1..20: note = Description of Artificial Sequence: Synthetic oligonucleotide
  misc_feature 1..20: note = Target: SCN10A; (+) strand; PAM type: NRG; PAM sequence: GGG
  source 1..20: mol_type = other DNA
ctacccctcccacttgtgcc

SEQ ID NO: 34137 - DNA, 20 bp, synthetic construct
  misc_feature 1..20: note = Description of Artificial Sequence: Synthetic oligonucleotide
  misc_feature 1..20: note = Target: SCN10A; (+) strand; PAM type: NRG; PAM sequence: AAG
  source 1..20: mol_type = other DNA
ctttcctctcccacctattc

SEQ ID NO: 34138 - DNA, 20 bp, synthetic construct
  misc_feature 1..20: note = Description of Artificial Sequence: Synthetic oligonucleotide
  misc_feature 1..20: note = Target: SCN10A; (+) strand; PAM type: NRG; PAM sequence: AGG
  source 1..20: mol_type = other DNA
tttcctctcccacctattca

SEQ ID NO: 34139 - DNA, 20 bp, synthetic construct
  misc_feature 1..20: note = Description of Artificial Sequence: Synthetic oligonucleotide
  misc_feature 1..20: note = Target: SCN10A; (+) strand; PAM type: NRG; PAM sequence: CAG
  source 1..20: mol_type = other DNA
tattcaaggcctgcatcatc

SEQ ID NO: 34140 - DNA, 20 bp, synthetic construct
  misc_feature 1..20: note = Description of Artificial Sequence: Synthetic oligonucleotide
  misc_feature 1..20: note = Target: SCN10A; (+) strand; PAM type: NRG; PAM sequence: CAG
  source 1..20: mol_type = other DNA
atccagacctgtctcccttc

SEQ ID NO: 34141 - DNA, 20 bp, synthetic construct
  misc_feature 1..20: note = Description of Artificial Sequence: Synthetic oligonucleotide
  misc_feature 1..20: note = Target: SCN10A; (+) strand; PAM type: NRG; PAM sequence: GAG
  source 1..20: mol_type = other DNA
cccttccagaccattgccat

SEQ ID NO: 34142 - DNA, 20 bp, synthetic construct
  misc_feature 1..20: note = Description of Artificial Sequence: Synthetic oligonucleotide
  misc_feature 1..20: note = Target: SCN10A; (+) strand; PAM type: NRG; PAM sequence: CAG
  source 1..20: mol_type = other DNA
ttccagaccattgccatgag

SEQ ID NO: 34143 - DNA, 20 bp, synthetic construct
  misc_feature 1..20: note = Description of Artificial Sequence: Synthetic oligonucleotide
  misc_feature 1..20: note = Target: SCN10A; (+) strand; PAM type: NRG; PAM sequence: AGG
  source 1..20: mol_type = other DNA
tccagaccattgccatgagc

SEQ ID NO: 34144 - DNA, 20 bp, synthetic construct
  misc_feature 1..20: note = Description of Artificial Sequence: Synthetic oligonucleotide
  misc_feature 1..20: note = Target: SCN10A; (+) strand; PAM type: NRG; PAM sequence: CGG
  source 1..20: mol_type = other DNA
aacatgctttaattatctcg

SEQ ID NO: 34145 - DNA, 20 bp, synthetic construct
  misc_feature 1..20: note = Description of Artificial Sequence: Synthetic oligonucleotide
  misc_feature 1..20: note = Target: SCN10A; (+) strand; PAM type: NRG; PAM sequence: AAG
  source 1..20: mol_type = other DNA
attatctcgcggctttgaaa

SEQ ID NO: 34146 - DNA, 20 bp, synthetic construct
  misc_feature 1..20: note = Description of Artificial Sequence: Synthetic oligonucleotide
  misc_feature 1..20: note = Target: SCN10A; (+) strand; PAM type: NRG; PAM sequence: TGG
  source 1..20: mol_type = other DNA
cggctttgaaaaagtctctc

SEQ ID NO: 34147 - DNA, 20 bp, synthetic construct
  misc_feature 1..20: note = Description of Artificial Sequence: Synthetic oligonucleotide
  misc_feature 1..20: note = Target: SCN10A; (+) strand; PAM type: NRG; PAM sequence: CAG
  source 1..20: mol_type = other DNA
tttcattactgcttctttga

SEQ ID NO: 34148 - DNA, 20 bp, synthetic construct
  misc_feature 1..20: note = Description of Artificial Sequence: Synthetic oligonucleotide
  misc_feature 1..20: note = Target: SCN10A; (+) strand; PAM type: NRG; PAM sequence: AAG
  source 1..20: mol_type = other DNA
ttgacagtaaaattccttgc

SEQ ID NO: 34149 - DNA, 20 bp, synthetic construct
  misc_feature 1..20: note = Description of Artificial Sequence: Synthetic oligonucleotide
  misc_feature 1..20: note = Target: SCN10A; (+) strand; PAM type: NRG; PAM sequence: GAG
  source 1..20: mol_type = other DNA
gacagtaaaattccttgcaa

SEQ ID NO: 34150 - DNA, 20 bp, synthetic construct
  misc_feature 1..20: note = Description of Artificial Sequence: Synthetic oligonucleotide
  misc_feature 1..20: note = Target: SCN10A; (+) strand; PAM type: NRG; PAM sequence: CAG
  source 1..20: mol_type = other DNA
tttctacacttaaccttcta

SEQ ID NO: 34151 - DNA, 20 bp, synthetic construct
  misc_feature 1..20: note = Description of Artificial Sequence: Synthetic oligonucleotide
  misc_feature 1..20: note = Target: SCN10A; (+) strand; PAM type: NRG; PAM sequence: CAG
  source 1..20: mol_type = other DNA
cttacctctttttttctctg

SEQ ID NO: 34152 - DNA, 20 bp, synthetic construct
  misc_feature 1..20: note = Description of Artificial Sequence: Synthetic oligonucleotide
  misc_feature 1..20: note = Target: SCN10A; (+) strand; PAM type: NRG; PAM sequence: TGG
  source 1..20: mol_type = other DNA
ctttttttctctgcagcccc

SEQ ID NO: 34153 - DNA, 20 bp, synthetic construct
  misc_feature 1..20: note = Description of Artificial Sequence: Synthetic oligonucleotide
  misc_feature 1..20: note = Target: SCN10A; (+) strand; PAM type: NRG; PAM sequence: CAG
  source 1..20: mol_type = other DNA
aaattcaaataattgatttc

SEQ ID NO: 34154 - DNA, 20 bp, synthetic construct
  misc_feature 1..20: note = Description of Artificial Sequence: Synthetic oligonucleotide
  misc_feature 1..20: note = Target: SCN10A; (+) strand; PAM type: NRG; PAM sequence: CAG
  source 1..20: mol_type = other DNA
cttacccttataacatttga

SEQ ID NO: 34155 - DNA, 20 bp, synthetic construct
  misc_feature 1..20: note = Description of Artificial Sequence: Synthetic oligonucleotide
  misc_feature 1..20: note = Target: SCN10A; (+) strand; PAM type: NRG; PAM sequence: CAG
  source 1..20: mol_type = other DNA
tatattgttctctttgaaac

SEQ ID NO: 34156 - DNA, 20 bp, synthetic construct
  misc_feature 1..20: note = Description of Artificial Sequence: Synthetic oligonucleotide
  misc_feature 1..20: note = Target: SCN10A; (+) strand; PAM type: NRG; PAM sequence: TGG
  source 1..20: mol_type = other DNA
ctttgaaaccagtgttcatt

SEQ ID NO: 34157 - DNA, 20 bp, synthetic construct
  misc_feature 1..20: note = Description of Artificial Sequence: Synthetic oligonucleotide
  misc_feature 1..20: note = Target: SCN10A; (+) strand; PAM type: NRG; PAM sequence: TGG
  source 1..20: mol_type = other DNA
aaccagtgttcatttggctc

SEQ ID NO: 34158 - DNA, 20 bp, synthetic construct
  misc_feature 1..20: note = Description of Artificial Sequence: Synthetic oligonucleotide
  misc_feature 1..20: note = Target: SCN10A; (+) strand; PAM type: NRG; PAM sequence: GGG
  source 1..20: mol_type = other DNA
accagtgttcatttggctct

SEQ ID NO: 34159 - DNA, 20 bp, synthetic construct
  misc_feature 1..20: note = Description of Artificial Sequence: Synthetic oligonucleotide
  misc_feature 1..20: note = Target: SCN10A; (+) strand; PAM type: NRG; PAM sequence: GGG
  source 1..20: mol_type = other DNA
ccagtgttcatttggctctg

SEQ ID NO: 34160 - DNA, 20 bp, synthetic construct
  misc_feature 1..20: note = Description of Artificial Sequence: Synthetic oligonucleotide
  misc_feature 1..20: note = Target: SCN10A; (+) strand; PAM type: NRG; PAM sequence: AAG
  source 1..20: mol_type = other DNA
ttgtaaatgttgaataactc

SEQ ID NO: 34161 - DNA, 20 bp, synthetic construct
  misc_feature 1..20: note = Description of Artificial Sequence: Synthetic oligonucleotide
  misc_feature 1..20: note = Target: SCN10A; (+) strand; PAM type: NRG; PAM sequence: TAG
  source 1..20: mol_type = other DNA
taactcaagcattctcacct

SEQ ID NO: 34162 - DNA, 20 bp, synthetic construct
  misc_feature 1..20: note = Description of Artificial Sequence: Synthetic oligonucleotide
  misc_feature 1..20: note = Target: SCN10A; (+) strand; PAM type: NRG; PAM sequence: TAG
  source 1..20: mol_type = other DNA
ctctgtgtttttgaatctca

SEQ ID NO: 34163 - DNA, 20 bp, synthetic construct
  misc_feature 1..20: note = Description of Artificial Sequence: Synthetic oligonucleotide
  misc_feature 1..20: note = Target: SCN10A; (+) strand; PAM type: NRG; PAM sequence: TAG
  source 1..20: mol_type = other DNA
tctgatcccttcctgaacac

SEQ ID NO: 34164 - DNA, 20 bp, synthetic construct
  misc_feature 1..20: note = Description of Artificial Sequence: Synthetic oligonucleotide
  misc_feature 1..20: note = Target: SCN10A; (+) strand; PAM type: NRG; PAM sequence: AGG
  source 1..20: mol_type = other DNA
ctgatcccttcctgaacact

SEQ ID NO: 34165 - DNA, 20 bp, synthetic construct
  misc_feature 1..20: note = Description of Artificial Sequence: Synthetic oligonucleotide
  misc_feature 1..20: note = Target: SCN10A; (+) strand; PAM type: NRG; PAM sequence: TGG
  source 1..20: mol_type = other DNA
gcctccgttaaatctccatg

SEQ ID NO: 34166 - DNA, 20 bp, synthetic construct
  misc_feature 1..20: note = Description of Artificial Sequence: Synthetic oligonucleotide
  misc_feature 1..20: note = Target: SCN10A; (+) strand; PAM type: NRG; PAM sequence: TGG
  source 1..20: mol_type = other DNA
tgtaactgtgttcacctcga

SEQ ID NO: 34167 - DNA, 20 bp, synthetic construct
  misc_feature 1..20: note = Description of Artificial Sequence: Synthetic oligonucleotide
  misc_feature 1..20: note = Target: SCN10A; (+) strand; PAM type: NRG; PAM sequence: GAG
  source 1..20: mol_type = other DNA
taactgtgttcacctcgatg

SEQ ID NO: 34168 - DNA, 20 bp, synthetic construct
  misc_feature 1..20: note = Description of Artificial Sequence: Synthetic oligonucleotide
  misc_feature 1..20: note = Target: SCN10A; (+) strand; PAM type: NRG; PAM sequence: AGG
  source 1..20: mol_type = other DNA
aactgtgttcacctcgatgg

SEQ ID NO: 34169 - DNA, 20 bp, synthetic construct
  misc_feature 1..20: note = Description of Artificial Sequence: Synthetic oligonucleotide
  misc_feature 1..20: note = Target: SCN10A; (+) strand; PAM type: NRG; PAM sequence: GGG
  source 1..20: mol_type = other DNA
actgtgttcacctcgatgga

SEQ ID NO: 34170 - DNA, 20 bp, synthetic construct
  misc_feature 1..20: note = Description of Artificial Sequence: Synthetic oligonucleotide
  misc_feature 1..20: note = Target: SCN10A; (+) strand; PAM type: NRG; PAM sequence: TAG
  source 1..20: mol_type = other DNA
ctcgatggagggcaatttct

SEQ ID NO: 34171 - DNA, 20 bp, synthetic construct
  misc_feature 1..20: note = Description of Artificial Sequence: Synthetic oligonucleotide
  misc_feature 1..20: note = Target: SCN10A; (+) strand; PAM type: NRG; PAM sequence: TAG
  source 1..20: mol_type = other DNA
ggagggcaatttcttagctt

SEQ ID NO: 34172 - DNA, 20 bp, synthetic construct
  misc_feature 1..20: note = Description of Artificial Sequence: Synthetic oligonucleotide
  misc_feature 1..20: note = Target: SCN10A; (+) strand; PAM type: NRG; PAM sequence: AGG
  source 1..20: mol_type = other DNA
gagggcaatttcttagcttt

SEQ ID NO: 34173 - DNA, 20 bp, synthetic construct
  misc_feature 1..20: note = Description of Artificial Sequence: Synthetic oligonucleotide
  misc_feature 1..20: note = Target: SCN10A; (+) strand; PAM type: NRG; PAM sequence: CGG
  source 1..20: mol_type = other DNA
aggtttatctataaattcct

SEQ ID NO: 34174 - DNA, 20 bp, synthetic construct
  misc_feature 1..20: note = Description of Artificial Sequence: Synthetic oligonucleotide
  misc_feature 1..20: note = Target: SCN10A; (+) strand; PAM type: NRG; PAM sequence: AAG
  source 1..20: mol_type = other DNA
ttatctataaattcctcggc

SEQ ID NO: 34175 - DNA, 20 bp, synthetic construct
  misc_feature 1..20: note = Description of Artificial Sequence: Synthetic oligonucleotide
  misc_feature 1..20: note = Target: SCN10A; (+) strand; PAM type: NRG; PAM sequence: CAG
  source 1..20: mol_type = other DNA
ggcaagacatgcatcttgaa

SEQ ID NO: 34176 - DNA, 20 bp, synthetic construct
  misc_feature 1..20: note = Description of Artificial Sequence: Synthetic oligonucleotide
  misc_feature 1..20: note = Target: SCN10A; (+) strand; PAM type: NRG; PAM sequence: CAG
  source 1..20: mol_type = other DNA
catgcatcttgaacagatat

SEQ ID NO: 34177 - DNA, 20 bp, synthetic construct
  misc_feature 1..20: note = Description of Artificial Sequence: Synthetic oligonucleotide
  misc_feature 1..20: note = Target: SCN10A; (+) strand; PAM type: NRG; PAM sequence: TGG
  source 1..20: mol_type = other DNA
tgaacagatatcagcctatg

SEQ ID NO: 34178 - DNA, 20 bp, synthetic construct
  misc_feature 1..20: note = Description of Artificial Sequence: Synthetic oligonucleotide
  misc_feature 1..20: note = Target: SCN10A; (+) strand; PAM type: NRG; PAM sequence: GGG
  source 1..20: mol_type = other DNA
gaacagatatcagcctatgt

SEQ ID NO: 34179 - DNA, 20 bp, synthetic construct
  misc_feature 1..20: note = Description of Artificial Sequence: Synthetic oligonucleotide
  misc_feature 1..20: note = Target: SCN10A; (+) strand; PAM type: NRG; PAM sequence: AAG
  source 1..20: mol_type = other DNA
gatatcagcctatgtgggca

SEQ ID NO: 34180 - DNA, 20 bp, synthetic construct
  misc_feature 1..20: note = Description of Artificial Sequence: Synthetic oligonucleotide
  misc_feature 1..20: note = Target: SCN10A; (+) strand; PAM type: NRG; PAM sequence: AAG
  source 1..20: mol_type = other DNA
tcagcctatgtgggcaaaga

SEQ ID NO: 34181 - DNA, 20 bp, synthetic construct
  misc_feature 1..20: note = Description of Artificial Sequence: Synthetic oligonucleotide
  misc_feature 1..20: note = Target: SCN10A; (+) strand; PAM type: NRG; PAM sequence: TGG
  source 1..20: mol_type = other DNA
tccattgtttataataataa

SEQ ID NO: 34182 - DNA, 20 bp, synthetic construct
  misc_feature 1..20: note = Description of Artificial Sequence: Synthetic oligonucleotide
  misc_feature 1..20: note = Target: SCN10A; (+) strand; PAM type: NRG; PAM sequence: AAG
  source 1..20: mol_type = other DNA
atggaaaacaacaactgata

SEQ ID NO: 34183 - DNA, 20 bp, synthetic construct
  misc_feature 1..20: note = Description of Artificial Sequence: Synthetic oligonucleotide
  misc_feature 1..20: note = Target: SCN10A; (+) strand; PAM type: NRG; PAM sequence: AAG
  source 1..20: mol_type = other DNA
aagcataatacattgtgaaa

SEQ ID NO: 34184 - DNA, 20 bp, synthetic construct
  misc_feature 1..20: note = Description of Artificial Sequence: Synthetic oligonucleotide
  misc_feature 1..20: note = Target: SCN10A; (+) strand; PAM type: NRG; PAM sequence: GAG
  source 1..20: mol_type = other DNA
aatacattgtgaaaaagaat

SEQ ID NO: 34185 - DNA, 20 bp, synthetic construct
  misc_feature 1..20: note = Description of Artificial Sequence: Synthetic oligonucleotide
  misc_feature 1..20: note = Target: SCN10A; (+) strand; PAM type: NRG; PAM sequence: AGG
  source 1..20: mol_type = other DNA
atacattgtgaaaaagaatg

SEQ ID NO: 34186 - DNA, 20 bp, synthetic construct
  misc_feature 1..20: note = Description of Artificial Sequence: Synthetic oligonucleotide
  misc_feature 1..20: note = Target: SCN10A; (+) strand; PAM type: NRG; PAM sequence: CAG
  source 1..20: mol_type = other DNA
cattgtgaaaaagaatgagg

SEQ ID NO: 34187 - DNA, 20 bp, synthetic construct
  misc_feature 1..20: note = Description of Artificial Sequence: Synthetic oligonucleotide
  misc_feature 1..20: note = Target: SCN10A; (+) strand; PAM type: NRG; PAM sequence: TGG
  source 1..20: mol_type = other DNA
gaatgaggcagatttatttg

SEQ ID NO: 34188 - DNA, 20 bp, synthetic construct
  misc_feature 1..20: note = Description of Artificial Sequence: Synthetic oligonucleotide
  misc_feature 1..20: note = Target: SCN10A; (+) strand; PAM type: NRG; PAM sequence: TAG
  source 1..20: mol_type = other DNA
cagatttatttgtggtgatg

SEQ ID NO: 34189 - DNA, 20 bp, synthetic construct
  misc_feature 1..20: note = Description of Artificial Sequence: Synthetic oligonucleotide
  misc_feature 1..20: note = Target: SCN10A; (+) strand; PAM type: NRG; PAM sequence: TAG
  source 1..20: mol_type = other DNA
tgtagaaaaatatgtatgtg

SEQ ID NO: 34190 - DNA, 20 bp, synthetic construct
  misc_feature 1..20: note = Description of Artificial Sequence: Synthetic oligonucleotide
  misc_feature 1..20: note = Target: SCN10A; (+) strand; PAM type: NRG; PAM sequence: TAG
  source 1..20: mol_type = other DNA
tgcatgtgcttatatatgca

SEQ ID NO: 34191 - DNA, 20 bp, synthetic construct
  misc_feature 1..20: note = Description of Artificial Sequence: Synthetic oligonucleotide
  misc_feature 1..20: note = Target: SCN10A; (+) strand; PAM type: NRG; PAM sequence: AAG
  source 1..20: mol_type = other DNA
tatgcatagaacattgcttg

SEQ ID NO: 34192 - DNA, 20 bp, synthetic construct
  misc_feature 1..20: note = Description of Artificial Sequence: Synthetic oligonucleotide
  misc_feature 1..20: note = Target: SCN10A; (+) strand; PAM type: NRG; PAM sequence: AAG
  source 1..20: mol_type = other DNA
gaacattgcttgaagaatat

SEQ ID NO: 34193 - DNA, 20 bp, synthetic construct
  misc_feature 1..20: note = Description of Artificial Sequence: Synthetic oligonucleotide
  misc_feature 1..20: note = Target: SCN10A; (+) strand; PAM type: NRG; PAM sequence: TGG
  source 1..20: mol_type = other DNA
ttgaagaatataagataaac

SEQ ID NO: 34194 - DNA, 20 bp, synthetic construct
  misc_feature 1..20: note = Description of Artificial Sequence: Synthetic oligonucleotide
  misc_feature 1..20: note = Target: SCN10A; (+) strand; PAM type: NRG; PAM sequence: GAG
  source 1..20: mol_type = other DNA
gaagaatataagataaactg

SEQ ID NO: 34195 - DNA, 20 bp, synthetic construct
  misc_feature 1..20: note = Description of Artificial Sequence: Synthetic oligonucleotide
  misc_feature 1..20: note = Target: SCN10A; (+) strand; PAM type: NRG; PAM sequence: TGG
  source 1..20: mol_type = other DNA
gaatataagataaactggag

SEQ ID NO: 34196 - DNA, 20 bp, synthetic construct
  misc_feature 1..20: note = Description of Artificial Sequence: Synthetic oligonucleotide
  misc_feature 1..20: note = Target: SCN10A; (+) strand; PAM type: NRG; PAM sequence: GGG
  source 1..20: mol_type = other DNA
aatataagataaactggagt

SEQ ID NO: 34197 - DNA, 20 bp, synthetic construct
  misc_feature 1..20: note = Description of Artificial Sequence: Synthetic oligonucleotide
  misc_feature 1..20: note = Target: SCN10A; (+) strand; PAM type: NRG; PAM sequence: GAG
  source 1..20: mol_type = other DNA
tataagataaactggagtgg

SEQ ID NO: 34198 - DNA, 20 bp, synthetic construct
  misc_feature 1..20: note = Description of Artificial Sequence: Synthetic oligonucleotide
  misc_feature 1..20: note = Target: SCN10A; (+) strand; PAM type: NRG; PAM sequence: AGG
  source 1..20: mol_type = other DNA
ataagataaactggagtggg

SEQ ID NO: 34199 - DNA, 20 bp, synthetic construct
  misc_feature 1..20: note = Description of Artificial Sequence: Synthetic oligonucleotide
  misc_feature 1..20: note = Target: SCN10A; (+) strand; PAM type: NRG; PAM sequence: GGG
  source 1..20: mol_type = other DNA
taagataaactggagtggga

SEQ ID NO: 34200 - DNA, 20 bp, synthetic construct
  misc_feature 1..20: note = Description of Artificial Sequence: Synthetic oligonucleotide
  misc_feature 1..20: note = Target: SCN10A; (+) strand; PAM type: NRG; PAM sequence: GGG
  source 1..20: mol_type = other DNA
aagataaactggagtgggag

SEQ ID NO: 34201 - DNA, 20 bp, synthetic construct
  misc_feature 1..20: note = Description of Artificial Sequence: Synthetic oligonucleotide
  misc_feature 1..20: note = Target: SCN10A; (+) strand; PAM type: NRG; PAM sequence: GGG
  source 1..20: mol_type = other DNA
agataaactggagtgggagg

SEQ ID NO: 34202 - DNA, 20 bp, synthetic construct
  misc_feature 1..20: note = Description of Artificial Sequence: Synthetic oligonucleotide
  misc_feature 1..20: note = Target: SCN10A; (+) strand; PAM type: NRG; PAM sequence: GGG
  source 1..20: mol_type = other DNA
gataaactggagtgggaggg

SEQ ID NO: 34203 - DNA, 20 bp, synthetic construct
  misc_feature 1..20: note = Description of Artificial Sequence: Synthetic oligonucleotide
  misc_feature 1..20: note = Target: SCN10A; (+) strand; PAM type: NRG; PAM sequence: CAG
  source 1..20: mol_type = other DNA
ggagtgggaggggggtgcac

SEQ ID NO: 34204 - DNA, 20 bp, synthetic construct
  misc_feature 1..20: note = Description of Artificial Sequence: Synthetic oligonucleotide
  misc_feature 1..20: note = Target: SCN10A; (+) strand; PAM type: NRG; PAM sequence: AGG
  source 1..20: mol_type = other DNA
gagtgggaggggggtgcacc

SEQ ID NO: 34205 - DNA, 20 bp, synthetic construct
  misc_feature 1..20: note = Description of Artificial Sequence: Synthetic oligonucleotide
  misc_feature 1..20: note = Target: SCN10A; (+) strand; PAM type: NRG; PAM sequence: GAG
  source 1..20: mol_type = other DNA
gtgggaggggggtgcaccag

SEQ ID NO: 34206 - DNA, 20 bp, synthetic construct
  misc_feature 1..20: note = Description of Artificial Sequence: Synthetic oligonucleotide
  misc_feature 1..20: note = Target: SCN10A; (+) strand; PAM type: NRG; PAM sequence: TGG
  source 1..20: mol_type = other DNA
aggggggtgcaccaggagtc

SEQ ID NO: 34207 - DNA, 20 bp, synthetic construct
  misc_feature 1..20: note = Description of Artificial Sequence: Synthetic oligonucleotide
  misc_feature 1..20: note = Target: SCN10A; (+) strand; PAM type: NRG; PAM sequence: GGG
  source 1..20: mol_type = other DNA
ggggggtgcaccaggagtct

SEQ ID NO: 34208 - DNA, 20 bp, synthetic construct
  misc_feature 1..20: note = Description of Artificial Sequence: Synthetic oligonucleotide
  misc_feature 1..20: note = Target: SCN10A; (+) strand; PAM type: NRG; PAM sequence: GGG
  source 1..20: mol_type = other DNA
gggggtgcaccaggagtctg

SEQ ID NO: 34209 - DNA, 20 bp, synthetic construct
  misc_feature 1..20: note = Description of Artificial Sequence: Synthetic oligonucleotide
  misc_feature 1..20: note = Target: SCN10A; (+) strand; PAM type: NRG; PAM sequence: GAG
  source 1..20: mol_type = other DNA
gggtgcaccaggagtctggg

SEQ ID NO: 34210 - DNA, 20 bp, synthetic construct
  misc_feature 1..20: note = Description of Artificial Sequence: Synthetic oligonucleotide
  misc_feature 1..20: note = Target: SCN10A; (+) strand; PAM type: NRG; PAM sequence: CAG
  source 1..20: mol_type = other DNA
tgcaccaggagtctggggag

SEQ ID NO: 34211 - DNA, 20 bp, synthetic construct
  misc_feature 1..20: note = Description of Artificial Sequence: Synthetic oligonucleotide
  misc_feature 1..20: note = Target: SCN10A; (+) strand; PAM type: NRG; PAM sequence: AGG
  source 1..20: mol_type = other DNA
gcaccaggagtctggggagc

SEQ ID NO: 34212 - DNA, 20 bp, synthetic construct
  misc_feature 1..20: note = Description of Artificial Sequence: Synthetic oligonucleotide
  misc_feature 1..20: note = Target: SCN10A; (+) strand; PAM type: NRG; PAM sequence: AAG
  source 1..20: mol_type = other DNA
ccaggagtctggggagcagg

SEQ ID NO: 34213 - DNA, 20 bp, synthetic construct
  misc_feature 1..20: note = Description of Artificial Sequence: Synthetic oligonucleotide
  misc_feature 1..20: note = Target: SCN10A; (+) strand; PAM type: NRG; PAM sequence: AGG
  source 1..20: mol_type = other DNA
caggagtctggggagcagga

SEQ ID NO: 34214 - DNA, 20 bp, synthetic construct
  misc_feature 1..20: note = Description of Artificial Sequence: Synthetic oligonucleotide
  misc_feature 1..20: note = Target: SCN10A; (+) strand; PAM type: NRG; PAM sequence: GGG
  source 1..20: mol_type = other DNA
aggagtctggggagcaggaa

SEQ ID NO: 34215 - DNA, 20 bp, synthetic construct
  misc_feature 1..20: note = Description of Artificial Sequence: Synthetic oligonucleotide
  misc_feature 1..20: note = Target: SCN10A; (+) strand; PAM type: NRG; PAM sequence: TAG
  source 1..20: mol_type = other DNA
tggggagcaggaagggtcta

SEQ ID NO: 34216 - DNA, 20 bp, synthetic construct
  misc_feature 1..20: note = Description of Artificial Sequence: Synthetic oligonucleotide
  misc_feature 1..20: note = Target: SCN10A; (+) strand; PAM type: NRG; PAM sequence: TGG
  source 1..20: mol_type = other DNA
ggagcaggaagggtctatag

SEQ ID NO: 34217 - DNA, 20 bp, synthetic construct
  misc_feature 1..20: note = Description of Artificial Sequence: Synthetic oligonucleotide
  misc_feature 1..20: note = Target: SCN10A; (+) strand; PAM type: NRG; PAM sequence: GGG
  source 1..20: mol_type = other DNA
gagcaggaagggtctatagt

SEQ ID NO: 34218 - DNA, 20 bp, synthetic construct
  misc_feature 1..20: note = Description of Artificial Sequence: Synthetic oligonucleotide
  misc_feature 1..20: note = Target: SCN10A; (+) strand; PAM type: NRG; PAM sequence: AAG
  source 1..20: mol_type = other DNA
caggaagggtctatagtggg

SEQ ID NO: 34219 - DNA, 20 bp, synthetic construct
  misc_feature 1..20: note = Description of Artificial Sequence: Synthetic oligonucleotide
  misc_feature 1..20: note = Target: SCN10A; (+) strand; PAM type: NRG; PAM sequence: AGG
  source 1..20: mol_type = other DNA
aggaagggtctatagtggga

SEQ ID NO: 34220 - DNA, 20 bp, synthetic construct
  misc_feature 1..20: note = Description of Artificial Sequence: Synthetic oligonucleotide
  misc_feature 1..20: note = Target: SCN10A; (+) strand; PAM type: NRG; PAM sequence: GAG
  source 1..20: mol_type = other DNA
gaagggtctatagtgggaag

SEQ ID NO: 34221 - DNA, 20 bp, synthetic construct
  misc_feature 1..20: note = Description of Artificial Sequence: Synthetic oligonucleotide
  misc_feature 1..20: note = Target: SCN10A; (+) strand; PAM type: NRG; PAM sequence: TAG
  source 1..20: mol_type = other DNA
tctatagtgggaaggagaca

SEQ ID NO: 34222 - DNA, 20 bp, synthetic construct
  misc_feature 1..20: note = Description of Artificial Sequence: Synthetic oligonucleotide
  misc_feature 1..20: note = Target: SCN10A; (+) strand; PAM type: NRG; PAM sequence: CAG
  source 1..20: mol_type = other DNA
tgtcattgcatacacacttg

SEQ ID NO: 34223 - DNA, 20 bp, synthetic construct
  misc_feature 1..20: note = Description of Artificial Sequence: Synthetic oligonucleotide
  misc_feature 1..20: note = Target: SCN10A; (+) strand; PAM type: NRG; PAM sequence: TAG
  source 1..20: mol_type = other DNA
gcatacacacttgcagtgtt

SEQ ID NO: 34224 - DNA, 20 bp, synthetic construct
  misc_feature 1..20: note = Description of Artificial Sequence: Synthetic oligonucleotide
  misc_feature 1..20: note = Target: SCN10A; (+) strand; PAM type: NRG; PAM sequence: AGG
  source 1..20: mol_type = other DNA
catacacacttgcagtgttt

SEQ ID NO: 34225 - DNA, 20 bp, synthetic construct
  misc_feature 1..20: note = Description of Artificial Sequence: Synthetic oligonucleotide
  misc_feature 1..20: note = Target: SCN10A; (+) strand; PAM type: NRG; PAM sequence: GGG
  source 1..20: mol_type = other DNA
atacacacttgcagtgttta

SEQ ID NO: 34226 - DNA, 20 bp, synthetic construct
  misc_feature 1..20: note = Description of Artificial Sequence: Synthetic oligonucleotide
  misc_feature 1..20: note = Target: SCN10A; (+) strand; PAM type: NRG; PAM sequence: CAG
  source 1..20: mol_type = other DNA
actatatgcacttgaaaaat

SEQ ID NO: 34227 - DNA, 20 bp, synthetic construct
  misc_feature 1..20: note = Description of Artificial Sequence: Synthetic oligonucleotide
  misc_feature 1..20: note = Target: SCN10A; (+) strand; PAM type: NRG; PAM sequence: TAG
  source 1..20: mol_type = other DNA
atgcacttgaaaaatcagtt

SEQ ID NO: 34228 - DNA, 20 bp, synthetic construct
  misc_feature 1..20: note = Description of Artificial Sequence: Synthetic oligonucleotide
  misc_feature 1..20: note = Target: SCN10A; (+) strand; PAM type: NRG; PAM sequence: GAG
  source 1..20: mol_type = other DNA
gcacttgaaaaatcagttta

SEQ ID NO: 34229 - DNA, 20 bp, synthetic construct
  misc_feature 1..20: note = Description of Artificial Sequence: Synthetic oligonucleotide
  misc_feature 1..20: note = Target: SCN10A; (+) strand; PAM type: NRG; PAM sequence: CAG
  source 1..20: mol_type = other DNA
gtgcccccaaattttgctaa

SEQ ID NO: 34230 - DNA, 20 bp, synthetic construct
  misc_feature 1..20: note = Description of Artificial Sequence: Synthetic oligonucleotide
  misc_feature 1..20: note = Target: SCN10A; (+) strand; PAM type: NRG; PAM sequence: TAG
  source 1..20: mol_type = other DNA
ataatttaaaaatgtgtatg

SEQ ID NO: 34231 - DNA, 20 bp, synthetic construct
  misc_feature 1..20: note = Description of Artificial Sequence: Synthetic oligonucleotide
  misc_feature 1..20: note = Target: SCN10A; (+) strand; PAM type: NRG; PAM sequence: AAG
  source 1..20: mol_type = other DNA
ttaaaaatgtgtatgtagtc

SEQ ID NO: 34232 - DNA, 20 bp, synthetic construct
  misc_feature 1..20: note = Description of Artificial Sequence: Synthetic oligonucleotide
  misc_feature 1..20: note = Target: SCN10A; (+) strand; PAM type: NRG; PAM sequence: CAG
  source 1..20: mol_type = other DNA
tgtatgtagtcaagatttat

SEQ ID NO: 34233 - DNA, 20 bp, synthetic construct
  misc_feature 1..20: note = Description of Artificial Sequence: Synthetic oligonucleotide
  misc_feature 1..20: note = Target: SCN10A; (+) strand; PAM type: NRG; PAM sequence: TAG
  source 1..20: mol_type = other DNA
atgtagtcaagatttatcag

SEQ ID NO: 34234 - DNA, 20 bp, synthetic construct
  misc_feature 1..20: note = Description of Artificial Sequence: Synthetic oligonucleotide
  misc_feature 1..20: note = Target: SCN10A; (+) strand; PAM type: NRG; PAM sequence: AAG
  source 1..20: mol_type = other DNA
ctttttttaaattatacttt

SEQ ID NO: 34235 - DNA, 20 bp, synthetic construct
  misc_feature 1..20: note = Description of Artificial Sequence: Synthetic oligonucleotide
  misc_feature 1..20: note = Target: SCN10A; (+) strand; PAM type: NRG; PAM sequence: TAG
  source 1..20: mol_type = other DNA
ttaaattatactttaagttt

SEQ ID NO: 34236 - DNA, 20 bp, synthetic construct
  misc_feature 1..20: note = Description of Artificial Sequence: Synthetic oligonucleotide
  misc_feature 1..20: note = Target: SCN10A; (+) strand; PAM type: NRG; PAM sequence: AGG
  source 1..20: mol_type = other DNA
taaattatactttaagtttt

SEQ ID NO: 34237 - DNA, 20 bp, synthetic construct
  misc_feature 1..20: note = Description of Artificial Sequence: Synthetic oligonucleotide
  misc_feature 1..20: note = Target: SCN10A; (+) strand; PAM type: NRG; PAM sequence: GGG
  source 1..20: mol_type = other DNA
aaattatactttaagtttta

SEQ ID NO: 34238 - DNA, 20 bp, synthetic construct
  misc_feature 1..20: note = Description of Artificial Sequence: Synthetic oligonucleotide
  misc_feature 1..20: note = Target: SCN10A; (+) strand; PAM type: NRG; PAM sequence: CAG
  source 1..20: mol_type = other DNA
gggtaaatgtgcacattatg

SEQ ID NO: 34239 - DNA, 20 bp, synthetic construct
  misc_feature 1..20: note = Description of Artificial Sequence: Synthetic oligonucleotide
  misc_feature 1..20: note = Target: SCN10A; (+) strand; PAM type: NRG; PAM sequence: AGG
  source 1..20: mol_type = other DNA
ggtaaatgtgcacattatgc

SEQ ID NO: 34240 - DNA, 20 bp, synthetic construct
  misc_feature 1..20: note = Description of Artificial Sequence: Synthetic oligonucleotide
  misc_feature 1..20: note = Target: SCN10A; (+) strand; PAM type: NRG; PAM sequence: TAG
  source 1..20: mol_type = other DNA
aatgtgcacattatgcaggt

SEQ ID NO: 34241 - DNA, 20 bp, synthetic construct
  misc_feature 1..20: note = Description of Artificial Sequence: Synthetic oligonucleotide
  misc_feature 1..20: note = Target: SCN10A; (+) strand; PAM type: NRG; PAM sequence: AAG
  source 1..20: mol_type = other DNA
gcatacatgccttacatatg

SEQ ID NO: 34242 - DNA, 20 bp, synthetic construct
  misc_feature 1..20: note = Description of Artificial Sequence: Synthetic oligonucleotide
  misc_feature 1..20: note = Target: SCN10A; (+) strand; PAM type: NRG; PAM sequence: AAG
  source 1..20: mol_type = other DNA
tatgaagcttttctcactac

SEQ ID NO: 34243 - DNA, 20 bp, synthetic construct
  misc_feature 1..20: note = Description of Artificial Sequence: Synthetic oligonucleotide
  misc_feature 1..20: note = Target: SCN10A; (+) strand; PAM type: NRG; PAM sequence: AGG
  source 1..20: mol_type = other DNA
atgaagcttttctcactaca

SEQ ID NO: 34244 - DNA, 20 bp, synthetic construct
  misc_feature 1..20: note = Description of Artificial Sequence: Synthetic oligonucleotide
  misc_feature 1..20: note = Target: SCN10A; (+) strand; PAM type: NRG; PAM sequence: TGG
  source 1..20: mol_type = other DNA
gcttttctcactacaaggct

SEQ ID NO: 34245 - DNA, 20 bp, synthetic construct
  misc_feature 1..20: note = Description of Artificial Sequence: Synthetic oligonucleotide
  misc_feature 1..20: note = Target: SCN10A; (+) strand; PAM type: NRG; PAM sequence: TAG
  source 1..20: mol_type = other DNA
atgtttttttctttcttttg

SEQ ID NO: 34246 - DNA, 20 bp, synthetic construct
  misc_feature 1..20: note = Description of Artificial Sequence: Synthetic oligonucleotide
  misc_feature 1..20: note = Target: SCN10A; (+) strand; PAM type: NRG; PAM sequence: TGG
  source 1..20: mol_type = other DNA
acttttttcacttaaaactt

SEQ ID NO: 34247 - DNA, 20 bp, synthetic construct
  misc_feature 1..20: note = Description of Artificial Sequence: Synthetic oligonucleotide
  misc_feature 1..20: note = Target: SCN10A; (+) strand; PAM type: NRG; PAM sequence: TGG
  source 1..20: mol_type = other DNA
ggtgcatttgaaatttattt

SEQ ID NO: 34248 - DNA, 20 bp, synthetic construct
  misc_feature 1..20: note = Description of Artificial Sequence: Synthetic oligonucleotide
  misc_feature 1..20: note = Target: SCN10A; (+) strand; PAM type: NRG; PAM sequence: GGG
  source 1..20: mol_type = other DNA
gtgcatttgaaatttatttt

SEQ ID NO: 34249 - DNA, 20 bp, synthetic construct
  misc_feature 1..20: note = Description of Artificial Sequence: Synthetic oligonucleotide
  misc_feature 1..20: note = Target: SCN10A; (+) strand; PAM type: NRG; PAM sequence: AAG
  source 1..20: mol_type = other DNA
tttgaaatttattttgggta

SEQ ID NO: 34250 - DNA, 20 bp, synthetic construct
  misc_feature 1..20: note = Description of Artificial Sequence: Synthetic oligonucleotide
  misc_feature 1..20: note = Target: SCN10A; (+) strand; PAM type: NRG; PAM sequence: GAG
  source 1..20: mol_type = other DNA
tgaaatttattttgggtaaa

SEQ ID NO: 34251 - DNA, 20 bp, synthetic construct
  misc_feature 1..20: note = Description of Artificial Sequence: Synthetic oligonucleotide
  misc_feature 1..20: note = Target: SCN10A; (+) strand; PAM type: NRG; PAM sequence: AAG
  source 1..20: mol_type = other DNA
atttattttgggtaaagagt

SEQ ID NO: 34252 - DNA, 20 bp, synthetic construct
  misc_feature 1..20: note = Description of Artificial Sequence: Synthetic oligonucleotide
  misc_feature 1..20: note = Target: SCN10A; (+) strand; PAM type: NRG; PAM sequence: TGG
  source 1..20: mol_type = other DNA
taaagagtaagatattgatg

SEQ ID NO: 34253 - DNA, 20 bp, synthetic construct
  misc_feature 1..20: note = Description of Artificial Sequence: Synthetic oligonucleotide
  misc_feature 1..20: note = Target: SCN10A; (+) strand; PAM type: NRG; PAM sequence: AAG
  source 1..20: mol_type = other DNA
gaataatttttcattttccc

SEQ ID NO: 34254 - DNA, 20 bp, synthetic construct
  misc_feature 1..20: note = Description of Artificial Sequence: Synthetic oligonucleotide
  misc_feature 1..20: note = Target: SCN10A; (+) strand; PAM type: NRG; PAM sequence: CAG
  source 1..20: mol_type = other DNA
acatgtccatttctcttcca

SEQ ID NO: 34255 - DNA, 20 bp, synthetic construct
  misc_feature 1..20: note = Description of Artificial Sequence: Synthetic oligonucleotide
  misc_feature 1..20: note = Target: SCN10A; (+) strand; PAM type: NRG; PAM sequence: CAG
  source 1..20: mol_type = other DNA
tccatttctcttccacagat

SEQ ID NO: 34256 - DNA, 20 bp, synthetic construct
  misc_feature 1..20: note = Description of Artificial Sequence: Synthetic oligonucleotide
  misc_feature 1..20: note = Target: SCN10A; (+) strand; PAM type: NRG; PAM sequence: TGG
  source 1..20: mol_type = other DNA
atgctgttttaatcactgac

SEQ ID NO: 34257 - DNA, 20 bp, synthetic construct
  misc_feature 1..20: note = Description of Artificial Sequence: Synthetic oligonucleotide
  misc_feature 1..20: note = Target: SCN10A; (+) strand; PAM type: NRG; PAM sequence: TAG
  source 1..20: mol_type = other DNA
tttaatcactgactggattt

SEQ ID NO: 34258 - DNA, 20 bp, synthetic construct
  misc_feature 1..20: note = Description of Artificial Sequence: Synthetic oligonucleotide
  misc_feature 1..20: note = Target: SCN10A; (+) strand; PAM type: NRG; PAM sequence: CAG
  source 1..20: mol_type = other DNA
tgactggattttagaaacta

SEQ ID NO: 34259 - DNA, 20 bp, synthetic construct
  misc_feature 1..20: note = Description of Artificial Sequence: Synthetic oligonucleotide
  misc_feature 1..20: note = Target: SCN10A; (+) strand; PAM type: NRG; PAM sequence: TGG
  source 1..20: mol_type = other DNA
gaaactacagatgtccaaac

SEQ ID NO: 34260 - DNA, 20 bp, synthetic construct
  misc_feature 1..20: note = Description of Artificial Sequence: Synthetic oligonucleotide
  misc_feature 1..20: note = Target: SCN10A; (+) strand; PAM type: NRG; PAM sequence: AAG
  source 1..20: mol_type = other DNA
tacagatgtccaaactggca

SEQ ID NO: 34261 - DNA, 20 bp, synthetic construct
  misc_feature 1..20: note = Description of Artificial Sequence: Synthetic oligonucleotide
  misc_feature 1..20: note = Target: SCN10A; (+) strand; PAM type: NRG; PAM sequence: TAG
  source 1..20: mol_type = other DNA
atgtccaaactggcaaagca

SEQ ID NO: 34262 - DNA, 20 bp, synthetic construct
  misc_feature 1..20: note = Description of Artificial Sequence: Synthetic oligonucleotide
  misc_feature 1..20: note = Target: SCN10A; (+) strand; PAM type: NRG; PAM sequence: AAG
  source 1..20: mol_type = other DNA
tggcaaagcatagttctcta

SEQ ID NO: 34263 - DNA, 20 bp, synthetic construct
  misc_feature 1..20: note = Description of Artificial Sequence: Synthetic oligonucleotide
  misc_feature 1..20: note = Target: SCN10A; (+) strand; PAM type: NRG; PAM sequence: AAG
  source 1..20: mol_type = other DNA
caaagcatagttctctaaag

SEQ ID NO: 34264 - DNA, 20 bp, synthetic construct
  misc_feature 1..20: note = Description of Artificial Sequence: Synthetic oligonucleotide
  misc_feature 1..20: note = Target: SCN10A; (+) strand; PAM type: NRG; PAM sequence: TGG
  source 1..20: mol_type = other DNA
gcatagttctctaaagaagt

SEQ ID NO: 34265 - DNA, 20 bp, synthetic construct
  misc_feature 1..20: note = Description of Artificial Sequence: Synthetic oligonucleotide
  misc_feature 1..20: note = Target: SCN10A; (+) strand; PAM type: NRG; PAM sequence: TGG
  source 1..20: mol_type = other DNA
ctaaagaagttggcacatcc

SEQ ID NO: 34266 - DNA, 20 bp, synthetic construct
  misc_feature 1..20: note = Description of Artificial Sequence: Synthetic oligonucleotide
  misc_feature 1..20: note = Target: SCN10A; (+) strand; PAM type: NRG; PAM sequence: GGG
  source 1..20: mol_type = other DNA
taaagaagttggcacatcct

SEQ ID NO: 34267 - DNA, 20 bp, synthetic construct
  misc_feature 1..20: note = Description of Artificial Sequence: Synthetic oligonucleotide
  misc_feature 1..20: note = Target: SCN10A; (+) strand; PAM type: NRG; PAM sequence: TGG
  source 1..20: mol_type = other DNA
caaaatcaacaatccctgtt

SEQ ID NO: 34268 - DNA, 20 bp, synthetic construct
  misc_feature 1..20: note = Description of Artificial Sequence: Synthetic oligonucleotide
  misc_feature 1..20: note = Target: SCN10A; (+) strand; PAM type: NRG; PAM sequence: AAG
  source 1..20: mol_type = other DNA
acaatccctgtttggaacaa

SEQ ID NO: 34269 - DNA, 20 bp, synthetic construct
  misc_feature 1..20: note = Description of Artificial Sequence: Synthetic oligonucleotide
  misc_feature 1..20: note = Target: SCN10A; (+) strand; PAM type: NRG; PAM sequence: AAG
  source 1..20: mol_type = other DNA
tccctgtttggaacaaaagc

SEQ ID NO: 34270 - DNA, 20 bp, synthetic construct
  misc_feature 1..20: note = Description of Artificial Sequence: Synthetic oligonucleotide
  misc_feature 1..20: note = Target: SCN10A; (+) strand; PAM type: NRG; PAM sequence: TGG
  source 1..20: mol_type = other DNA
aacaaaagcaagaacttccc

SEQ ID NO: 34271 - DNA, 20 bp, synthetic construct
  misc_feature 1..20: note = Description of Artificial Sequence: Synthetic oligonucleotide
  misc_feature 1..20: note = Target: SCN10A; (+) strand; PAM type: NRG; PAM sequence: TGG
  source 1..20: mol_type = other DNA
gaacttccctggacctattt

SEQ ID NO: 34272 - DNA, 20 bp, synthetic construct
  misc_feature 1..20: note = Description of Artificial Sequence: Synthetic oligonucleotide
  misc_feature 1..20: note = Target: SCN10A; (+) strand; PAM type: NRG; PAM sequence: AAG
  source 1..20: mol_type = other DNA
ggacctattttggcactaaa

SEQ ID NO: 34273 - DNA, 20 bp, synthetic construct
  misc_feature 1..20: note = Description of Artificial Sequence: Synthetic oligonucleotide
  misc_feature 1..20: note = Target: SCN10A; (+) strand; PAM type: NRG; PAM sequence: AAG
  source 1..20: mol_type = other DNA
cctattttggcactaaaaag

SEQ ID NO: 34274 - DNA, 20 bp, synthetic construct
  misc_feature 1..20: note = Description of Artificial Sequence: Synthetic oligonucleotide
  misc_feature 1..20: note = Target: SCN10A; (+) strand; PAM type: NRG; PAM sequence: CAG
  source 1..20: mol_type = other DNA
tttggcactaaaaagaagca

SEQ ID NO: 34275 - DNA, 20 bp, synthetic construct
  misc_feature 1..20: note = Description of Artificial Sequence: Synthetic oligonucleotide
  misc_feature 1..20: note = Target: SCN10A; (+) strand; PAM type: NRG; PAM sequence: AGG
  source 1..20: mol_type = other DNA
ttggcactaaaaagaagcac

SEQ ID NO: 34276 - DNA, 20 bp, synthetic construct
  misc_feature 1..20: note = Description of Artificial Sequence: Synthetic oligonucleotide
  misc_feature 1..20: note = Target: SCN10A; (+) strand; PAM type: NRG; PAM sequence: AAG
  source 1..20: mol_type = other DNA
gcactaaaaagaagcacagg

SEQ ID NO: 34277 - DNA, 20 bp, synthetic construct
  misc_feature 1..20: note = Description of Artificial Sequence: Synthetic oligonucleotide
  misc_feature 1..20: note = Target: SCN10A; (+) strand; PAM type: NRG; PAM sequence: TAG
  source 1..20: mol_type = other DNA
ctaaaaagaagcacaggaag

SEQ ID NO: 34278 - DNA, 20 bp, synthetic construct
  misc_feature 1..20: note = Description of Artificial Sequence: Synthetic oligonucleotide
  misc_feature 1..20: note = Target: SCN10A; (+) strand; PAM type: NRG; PAM sequence: GAG
  source 1..20: mol_type = other DNA
cacaggaagtagtcatgaat

SEQ ID NO: 34279 - DNA, 20 bp, synthetic construct
  misc_feature 1..20: note = Description of Artificial Sequence: Synthetic oligonucleotide
  misc_feature 1..20: note = Target: SCN10A; (+) strand; PAM type: NRG; PAM sequence: AGG
  source 1..20: mol_type = other DNA
acaggaagtagtcatgaatg

SEQ ID NO: 34280 - DNA, 20 bp, synthetic construct
  misc_feature 1..20: note = Description of Artificial Sequence: Synthetic oligonucleotide
  misc_feature 1..20: note = Target: SCN10A; (+) strand; PAM type: NRG; PAM sequence: TAG
  source 1..20: mol_type = other DNA
agtcatgaatgaggacactt

SEQ ID NO: 34281 - DNA, 20 bp, synthetic construct
  misc_feature 1..20: note = Description of Artificial Sequence: Synthetic oligonucleotide
  misc_feature 1..20: note = Target: SCN10A; (+) strand; PAM type: NRG; PAM sequence: TGG
  source 1..20: mol_type = other DNA
acactttagatgtgccattt

SEQ ID NO: 34282 - DNA, 20 bp, synthetic construct
  misc_feature 1..20: note = Description of Artificial Sequence: Synthetic oligonucleotide
  misc_feature 1..20: note = Target: SCN10A; (+) strand; PAM type: NRG; PAM sequence: CAG
  source 1..20: mol_type = other DNA
ctttagatgtgccattttgg

SEQ ID NO: 34283 - DNA, 20 bp, synthetic construct
  misc_feature 1..20: note = Description of Artificial Sequence: Synthetic oligonucleotide
  misc_feature 1..20: note = Target: SCN10A; (+) strand; PAM type: NRG; PAM sequence: AGG
  source 1..20: mol_type = other DNA
tttagatgtgccattttggc

SEQ ID NO: 34284 - DNA, 20 bp, synthetic construct
  misc_feature 1..20: note = Description of Artificial Sequence: Synthetic oligonucleotide
  misc_feature 1..20: note = Target: SCN10A; (+) strand; PAM type: NRG; PAM sequence: AAG
  source 1..20: mol_type = other DNA
agatgtgccattttggcagg

SEQ ID NO: 34285 - DNA, 20 bp, synthetic construct
  misc_feature 1..20: note = Description of Artificial Sequence: Synthetic oligonucleotide
  misc_feature 1..20: note = Target: SCN10A; (+) strand; PAM type: NRG; PAM sequence: CAG
  source 1..20: mol_type = other DNA
tgtgccattttggcaggaag

SEQ ID NO: 34286 - DNA, 20 bp, synthetic construct
  misc_feature 1..20: note = Description of Artificial Sequence: Synthetic oligonucleotide
  misc_feature 1..20: note = Target: SCN10A; (+) strand; PAM type: NRG; PAM sequence: GAG
  source 1..20: mol_type = other DNA
ggcaggaagcagccacctgt

SEQ ID NO: 34287 - DNA, 20 bp, synthetic construct
  misc_feature 1..20: note = Description of Artificial Sequence: Synthetic oligonucleotide
  misc_feature 1..20: note = Target: SCN10A; (+) strand; PAM type: NRG; PAM sequence: AGG
  source 1..20: mol_type = other DNA
gcaggaagcagccacctgtg

SEQ ID NO: 34288 - DNA, 20 bp, synthetic construct
  misc_feature 1..20: note = Description of Artificial Sequence: Synthetic oligonucleotide
  misc_feature 1..20: note = Target: SCN10A; (+) strand; PAM type: NRG; PAM sequence: TGG
  source 1..20: mol_type = other DNA
cagccacctgtgaggcatga

SEQ ID NO: 34289 - DNA, 20 bp, synthetic construct
  misc_feature 1..20: note = Description of Artificial Sequence: Synthetic oligonucleotide
  misc_feature 1..20: note = Target: SCN10A; (+) strand; PAM type: NRG; PAM sequence: GGG
  source 1..20: mol_type = other DNA
agccacctgtgaggcatgat

SEQ ID NO: 34290 - DNA, 20 bp, synthetic construct
  misc_feature 1..20: note = Description of Artificial Sequence: Synthetic oligonucleotide
  misc_feature 1..20: note = Target: SCN10A; (+) strand; PAM type: NRG; PAM sequence: AAG
  source 1..20: mol_type = other DNA
cctgtgaggcatgatgggaa

SEQ ID NO: 34291 - DNA, 20 bp, synthetic construct
  misc_feature 1..20: note = Description of Artificial Sequence: Synthetic oligonucleotide
  misc_feature 1..20: note = Target: SCN10A; (+) strand; PAM type: NRG; PAM sequence: GAG
  source 1..20: mol_type = other DNA
tgtgaggcatgatgggaaaa

SEQ ID NO: 34292 - DNA, 20 bp, synthetic construct
  misc_feature 1..20: note = Description of Artificial Sequence: Synthetic oligonucleotide
  misc_feature 1..20: note = Target: SCN10A; (+) strand; PAM type: NRG; PAM sequence: GAG
  source 1..20: mol_type = other DNA
tgaggcatgatgggaaaaga

SEQ ID NO: 34293 - DNA, 20 bp, synthetic construct
  misc_feature 1..20: note = Description of Artificial Sequence: Synthetic oligonucleotide
  misc_feature 1..20: note = Target: SCN10A; (+) strand; PAM type: NRG; PAM sequence: AGG
  source 1..20: mol_type = other DNA
gaggcatgatgggaaaagag

SEQ ID NO: 34294 - DNA, 20 bp, synthetic construct
  misc_feature 1..20: note = Description of Artificial Sequence: Synthetic oligonucleotide
  misc_feature 1..20: note = Target: SCN10A; (+) strand; PAM type: NRG; PAM sequence: CAG
  source 1..20: mol_type = other DNA
aagagaggcatctttgtaaa

SEQ ID NO: 34295 - DNA, 20 bp, synthetic construct
  misc_feature 1..20: note = Description of Artificial Sequence: Synthetic oligonucleotide
  misc_feature 1..20: note = Target: SCN10A; (+) strand; PAM type: NRG; PAM sequence: CAG
  source 1..20: mol_type = other DNA
ttgttgaacttgattgattg

SEQ ID NO: 34296 - DNA, 20 bp, synthetic construct
  misc_feature 1..20: note = Description of Artificial Sequence: Synthetic oligonucleotide
  misc_feature 1..20: note = Target: SCN10A; (+) strand; PAM type: NRG; PAM sequence: GAG
  source 1..20: mol_type = other DNA
gttgaacttgattgattgca

SEQ ID NO: 34297 - DNA, 20 bp, synthetic construct
  misc_feature 1..20: note = Description of Artificial Sequence: Synthetic oligonucleotide
  misc_feature 1..20: note = Target: SCN10A; (+) strand; PAM type: NRG; PAM sequence: CAG
  source 1..20: mol_type = other DNA
cttgattgattgcagagaca

SEQ ID NO: 34298 - DNA, 20 bp, synthetic construct
  misc_feature 1..20: note = Description of Artificial Sequence: Synthetic oligonucleotide
  misc_feature 1..20: note = Target: SCN10A; (+) strand; PAM type: NRG; PAM sequence: GAG
  source 1..20: mol_type = other DNA
tgattgattgcagagacaca

SEQ ID NO: 34299 - DNA, 20 bp, synthetic construct
  misc_feature 1..20: note = Description of Artificial Sequence: Synthetic oligonucleotide
  misc_feature 1..20: note = Target: SCN10A; (+) strand; PAM type: NRG; PAM sequence: AAG
  source 1..20: mol_type = other DNA
tgcagagacacagagactaa

SEQ ID NO: 34300 - DNA, 20 bp, synthetic construct
  misc_feature 1..20: note = Description of Artificial Sequence: Synthetic oligonucleotide
  misc_feature 1..20: note = Target: SCN10A; (+) strand; PAM type: NRG; PAM sequence: CAG
  source 1..20: mol_type = other DNA
gactaaaagtatctacttgc

SEQ ID NO: 34301 - DNA, 20 bp, synthetic construct
  misc_feature 1..20: note = Description of Artificial Sequence: Synthetic oligonucleotide
  misc_feature 1..20: note = Target: SCN10A; (+) strand; PAM type: NRG; PAM sequence: TGG
  source 1..20: mol_type = other DNA
gccagcttaaaacatgacca

SEQ ID NO: 34302 - DNA, 20 bp, synthetic construct
  misc_feature 1..20: note = Description of Artificial Sequence: Synthetic oligonucleotide
  misc_feature 1..20: note = Target: SCN10A; (+) strand; PAM type: NRG; PAM sequence: AAG
  source 1..20: mol_type = other DNA
tgaccatggccccacctcaa

SEQ ID NO: 34303 - DNA, 20 bp, synthetic construct
  misc_feature 1..20: note = Description of Artificial Sequence: Synthetic oligonucleotide
  misc_feature 1..20: note = Target: SCN10A; (+) strand; PAM type: NRG; PAM sequence: AGG
  source 1..20: mol_type = other DNA
gaccatggccccacctcaaa

SEQ ID NO: 34304 - DNA, 20 bp, synthetic construct
  misc_feature 1..20: note = Description of Artificial Sequence: Synthetic oligonucleotide
  misc_feature 1..20: note = Target: SCN10A; (+) strand; PAM type: NRG; PAM sequence: CAG
  source 1..20: mol_type = other DNA
ctcctatataaaattgataa

SEQ ID NO: 34305 - DNA, 20 bp, synthetic construct
  misc_feature 1..20: note = Description of Artificial Sequence: Synthetic oligonucleotide
  misc_feature 1..20: note = Target: SCN10A; (+) strand; PAM type: NRG; PAM sequence: GAG
  source 1..20: mol_type = other DNA
cctatataaaattgataaca

SEQ ID NO: 34306 - DNA, 20 bp, synthetic construct
  misc_feature 1..20: note = Description of Artificial Sequence: Synthetic oligonucleotide
  misc_feature 1..20: note = Target: SCN10A; (+) strand; PAM type: NRG; PAM sequence: GAG
  source 1..20: mol_type = other DNA
tatataaaattgataacaga

SEQ ID NO: 34307 - DNA, 20 bp, synthetic construct
  misc_feature 1..20: note = Description of Artificial Sequence: Synthetic oligonucleotide
  misc_feature 1..20: note = Target: SCN10A; (+) strand; PAM type: NRG; PAM sequence: AAG
  source 1..20: mol_type = other DNA
ccttcatcctgttacgctta

SEQ ID NO: 34308 - DNA, 20 bp, synthetic construct
  misc_feature 1..20: note = Description of Artificial Sequence: Synthetic oligonucleotide
  misc_feature 1..20: note = Target: SCN10A; (+) strand; PAM type: NRG; PAM sequence: GAG
  source 1..20: mol_type = other DNA
ttcatcctgttacgcttaaa

SEQ ID NO: 34309 - DNA, 20 bp, synthetic construct
  misc_feature 1..20: note = Description of Artificial Sequence: Synthetic oligonucleotide
  misc_feature 1..20: note = Target: SCN10A; (+) strand; PAM type: NRG; PAM sequence: AGG
  source 1..20: mol_type = other DNA
tcatcctgttacgcttaaag

SEQ ID NO: 34310 - DNA, 20 bp, synthetic construct
  misc_feature 1..20: note = Description of Artificial Sequence: Synthetic oligonucleotide
  misc_feature 1..20: note = Target: SCN10A; (+) strand; PAM type: NRG; PAM sequence: CAG
  source 1..20: mol_type = other DNA
ccccctgctcctgttaacac

SEQ ID NO: 34311 - DNA, 20 bp, synthetic construct
  misc_feature 1..20: note = Description of Artificial Sequence: Synthetic oligonucleotide
  misc_feature 1..20: note = Target: SCN10A; (+) strand; PAM type: NRG; PAM sequence: CAG
  source 1..20: mol_type = other DNA
tgcattctctcctgccactg

SEQ ID NO: 34312 - DNA, 20 bp, synthetic construct
  misc_feature 1..20: note = Description of Artificial Sequence: Synthetic oligonucleotide
  misc_feature 1..20: note = Target: SCN10A; (+) strand; PAM type: NRG; PAM sequence: AGG
  source 1..20: mol_type = other DNA
gcattctctcctgccactgc

SEQ ID NO: 34313 - DNA, 20 bp, synthetic construct
  misc_feature 1..20: note = Description of Artificial Sequence: Synthetic oligonucleotide
  misc_feature 1..20: note = Target: SCN10A; (+) strand; PAM type: NRG; PAM sequence: GAG
  source 1..20: mol_type = other DNA
attctctcctgccactgcag

SEQ ID NO: 34314 - DNA, 20 bp, synthetic construct
  misc_feature 1..20: note = Description of Artificial Sequence: Synthetic oligonucleotide
  misc_feature 1..20: note = Target: SCN10A; (+) strand; PAM type: NRG; PAM sequence: CAG
  source 1..20: mol_type = other DNA
ccctttcttcccttaatctt

SEQ ID NO: 34315 - DNA, 20 bp, synthetic construct
  misc_feature 1..20: note = Description of Artificial Sequence: Synthetic oligonucleotide
  misc_feature 1..20: note = Target: SCN10A; (+) strand; PAM type: NRG; PAM sequence: CAG
  source 1..20: mol_type = other DNA
ttcagtctctcttattctcc

SEQ ID NO: 34316 - DNA, 20 bp, synthetic construct
  misc_feature 1..20: note = Description of Artificial Sequence: Synthetic oligonucleotide
  misc_feature 1..20: note = Target: SCN10A; (+) strand; PAM type: NRG; PAM sequence: TAG
  source 1..20: mol_type = other DNA
ttctcccagatccttcccat

SEQ ID NO: 34317 - DNA, 20 bp, synthetic construct
  misc_feature 1..20: note = Description of Artificial Sequence: Synthetic oligonucleotide
  misc_feature 1..20: note = Target: SCN10A; (+) strand; PAM type: NRG; PAM sequence: AAG
  source 1..20: mol_type = other DNA
ccccaaacacaaaaaccaaa

SEQ ID NO: 34318 - DNA, 20 bp, synthetic construct
  misc_feature 1..20: note = Description of Artificial Sequence: Synthetic oligonucleotide
  misc_feature 1..20: note = Target: SCN10A; (+) strand; PAM type: NRG; PAM sequence: TAG
  source 1..20: mol_type = other DNA
tttcaattctccctactccc

SEQ ID NO: 34319 - DNA, 20 bp, synthetic construct
  misc_feature 1..20: note = Description of Artificial Sequence: Synthetic oligonucleotide
  misc_feature 1..20: note = Target: SCN10A; (+) strand; PAM type: NRG; PAM sequence: CAG
  source 1..20: mol_type = other DNA
ttactatctccttttcctca

SEQ ID NO: 34320 - DNA, 20 bp, synthetic construct
  misc_feature 1..20: note = Description of Artificial Sequence: Synthetic oligonucleotide
  misc_feature 1..20: note = Target: SCN10A; (+) strand; PAM type: NRG; PAM sequence: AGG
  source 1..20: mol_type = other DNA
tactatctccttttcctcac

SEQ ID NO: 34321 - DNA, 20 bp, synthetic construct
  misc_feature 1..20: note = Description of Artificial Sequence: Synthetic oligonucleotide
  misc_feature 1..20: note = Target: SCN10A; (+) strand; PAM type: NRG; PAM sequence: AAG
  source 1..20: mol_type = other DNA
tcacctctcacccgctcttt

SEQ ID NO: 34322 - DNA, 20 bp, synthetic construct
  misc_feature 1..20: note = Description of Artificial Sequence: Synthetic oligonucleotide
  misc_feature 1..20: note = Target: SCN10A; (+) strand; PAM type: NRG; PAM sequence: TAG
  source 1..20: mol_type = other DNA
tccattaatcctcttttgct

SEQ ID NO: 34323 - DNA, 20 bp, synthetic construct
  misc_feature 1..20: note = Description of Artificial Sequence: Synthetic oligonucleotide
  misc_feature 1..20: note = Target: SCN10A; (+) strand; PAM type: NRG; PAM sequence: AAG
  source 1..20: mol_type = other DNA
ctcttttgcttagatcacca

SEQ ID NO: 34324 - DNA, 20 bp, synthetic construct
  misc_feature 1..20: note = Description of Artificial Sequence: Synthetic oligonucleotide
  misc_feature 1..20: note = Target: SCN10A; (+) strand; PAM type: NRG; PAM sequence: AAG
  source 1..20: mol_type = other DNA
caaagacatccatgtgacta

SEQ ID NO: 34325 - DNA, 20 bp, synthetic construct
  misc_feature 1..20: note = Description of Artificial Sequence: Synthetic oligonucleotide
  misc_feature 1..20: note = Target: SCN10A; (+) strand; PAM type: NRG; PAM sequence: TGG
  source 1..20: mol_type = other DNA
atccatgtgactaaagcccc

SEQ ID NO: 34326 - DNA, 20 bp, synthetic construct
  misc_feature 1..20: note = Description of Artificial Sequence: Synthetic oligonucleotide
  misc_feature 1..20: note = Target: SCN10A; (+) strand; PAM type: NRG; PAM sequence: CAG
  source 1..20: mol_type = other DNA
cattttacctgacctttcca

SEQ ID NO: 34327 - DNA, 20 bp, synthetic construct
  misc_feature 1..20: note = Description of Artificial Sequence: Synthetic oligonucleotide
  misc_feature 1..20: note = Target: SCN10A; (+) strand; PAM type: NRG; PAM sequence: TGG
  source 1..20: mol_type = other DNA
ttccacagcattgcctctgt

SEQ ID NO: 34328 - DNA, 20 bp, synthetic construct
  misc_feature 1..20: note = Description of Artificial Sequence: Synthetic oligonucleotide
  misc_feature 1..20: note = Target: SCN10A; (+) strand; PAM type: NRG; PAM sequence: AAG
  source 1..20: mol_type = other DNA
tggcctttctattctttctg

SEQ ID NO: 34329 - DNA, 20 bp, synthetic construct
  misc_feature 1..20: note = Description of Artificial Sequence: Synthetic oligonucleotide
  misc_feature 1..20: note = Target: SCN10A; (+) strand; PAM type: NRG; PAM sequence: TGG
  source 1..20: mol_type = other DNA
tctgaagaaatttttactct

SEQ ID NO: 34330 - DNA, 20 bp, synthetic construct
  misc_feature 1..20: note = Description of Artificial Sequence: Synthetic oligonucleotide
  misc_feature 1..20: note = Target: SCN10A; (+) strand; PAM type: NRG; PAM sequence: TAG
  source 1..20: mol_type = other DNA
ggctctgcattgtattcttc

SEQ ID NO: 34331 - DNA, 20 bp, synthetic construct
  misc_feature 1..20: note = Description of Artificial Sequence: Synthetic oligonucleotide
  misc_feature 1..20: note = Target: SCN10A; (+) strand; PAM type: NRG; PAM sequence: CAG
  source 1..20: mol_type = other DNA
tatttctgtaccttcctttt

SEQ ID NO: 34332 - DNA, 20 bp, synthetic construct
  misc_feature 1..20: note = Description of Artificial Sequence: Synthetic oligonucleotide
  misc_feature 1..20: note = Target: SCN10A; (+) strand; PAM type: NRG; PAM sequence: TGG
  source 1..20: mol_type = other DNA
tccttttcagtctcctctgc

SEQ ID NO: 34333 - DNA, 20 bp, synthetic construct
  misc_feature 1..20: note = Description of Artificial Sequence: Synthetic oligonucleotide
  misc_feature 1..20: note = Target: SCN10A; (+) strand; PAM type: NRG; PAM sequence: GGG
  source 1..20: mol_type = other DNA
ccttttcagtctcctctgct

SEQ ID NO: 34334 - DNA, 20 bp, synthetic construct
  misc_feature 1..20: note = Description of Artificial Sequence: Synthetic oligonucleotide
  misc_feature 1..20: note = Target: SCN10A; (+) strand; PAM type: NRG; PAM sequence: TAG
  source 1..20: mol_type = other DNA
ctgcttaactattaaacatt

SEQ ID NO: 34335 - DNA, 20 bp, synthetic construct
  misc_feature 1..20: note = Description of Artificial Sequence: Synthetic oligonucleotide
  misc_feature 1..20: note = Target: SCN10A; (+) strand; PAM type: NRG; PAM sequence: TAG
  source 1..20: mol_type = other DNA
ctattaaacatttagtttgt

SEQ ID NO: 34336 - DNA, 20 bp, synthetic construct
  misc_feature 1..20: note = Description of Artificial Sequence: Synthetic oligonucleotide
  misc_feature 1..20: note = Target: SCN10A; (+) strand; PAM type: NRG; PAM sequence: GAG
  source 1..20: mol_type = other DNA
agtttgttagaactgtgtct

SEQ ID NO: 34337 - DNA, 20 bp, synthetic construct
  misc_feature 1..20: note = Description of Artificial Sequence: Synthetic oligonucleotide
  misc_feature 1..20: note = Target: SCN10A; (+) strand; PAM type: NRG; PAM sequence: AGG
  source 1..20: mol_type = other DNA
gtttgttagaactgtgtctg

SEQ ID NO: 34338 - DNA, 20 bp, synthetic construct
  misc_feature 1..20: note = Description of Artificial Sequence: Synthetic oligonucleotide
  misc_feature 1..20: note = Target: SCN10A; (+) strand; PAM type: NRG; PAM sequence: CAG
  source 1..20: mol_type = other DNA
cccttctgtgttaactcatc

SEQ ID NO: 34339 - DNA, 20 bp, synthetic construct
  misc_feature 1..20: note = Description of Artificial Sequence: Synthetic oligonucleotide
  misc_feature 1..20: note = Target: SCN10A; (+) strand; PAM type: NRG; PAM sequence: AAG
  source 1..20: mol_type = other DNA
atatgccatctttgtcatct

SEQ ID NO: 34340 - DNA, 20 bp, synthetic construct
  misc_feature 1..20: note = Description of Artificial Sequence: Synthetic oligonucleotide
  misc_feature 1..20: note = Target: SCN10A; (+) strand; PAM type: NRG; PAM sequence: TAG
  source 1..20: mol_type = other DNA
catctttgtcatctaagttc

SEQ ID NO: 34341 - DNA, 20 bp, synthetic construct
  misc_feature 1..20: note = Description of Artificial Sequence: Synthetic oligonucleotide
  misc_feature 1..20: note = Target: SCN10A; (+) strand; PAM type: NRG; PAM sequence: AAG
  source 1..20: mol_type = other DNA
ttctagacccctatatccta

SEQ ID NO: 34342 - DNA, 20 bp, synthetic construct
  misc_feature 1..20: note = Description of Artificial Sequence: Synthetic oligonucleotide
  misc_feature 1..20: note = Target: SCN10A; (+) strand; PAM type: NRG; PAM sequence: TGG
  source 1..20: mol_type = other DNA
tcctaaagtcaacttcctac

SEQ ID NO: 34343 - DNA, 20 bp, synthetic construct
  misc_feature 1..20: note = Description of Artificial Sequence: Synthetic oligonucleotide
  misc_feature 1..20: note = Target: SCN10A; (+) strand; PAM type: NRG; PAM sequence: TAG
  source 1..20: mol_type = other DNA
tcctactggacacccctacc

SEQ ID NO: 34344 - DNA, 20 bp, synthetic construct
  misc_feature 1..20: note = Description of Artificial Sequence: Synthetic oligonucleotide
  misc_feature 1..20: note = Target: SCN10A; (+) strand; PAM type: NRG; PAM sequence: AAG
  source 1..20: mol_type = other DNA
cacccctacctagatgctcc

SEQ ID NO: 34345 - DNA, 20 bp, synthetic construct
  misc_feature 1..20: note = Description of Artificial Sequence: Synthetic oligonucleotide
  misc_feature 1..20: note = Target: SCN10A; (+) strand; PAM type: NRG; PAM sequence: AGG
  source 1..20: mol_type = other DNA
acccctacctagatgctcca

SEQ ID NO: 34346 - DNA, 20 bp, synthetic construct
  misc_feature 1..20: note = Description of Artificial Sequence: Synthetic oligonucleotide
  misc_feature 1..20: note = Target: SCN10A; (+) strand; PAM type: NRG; PAM sequence: GGG
  source 1..20: mol_type = other DNA
cccctacctagatgctccaa

SEQ ID NO: 34347 - DNA, 20 bp, synthetic construct
  misc_feature 1..20: note = Description of Artificial Sequence: Synthetic oligonucleotide
  misc_feature 1..20: note = Target: SCN10A; (+) strand; PAM type: NRG; PAM sequence: CAG
  source 1..20: mol_type = other DNA
acctgaaacccaatatatcc

SEQ ID NO: 34348 - DNA, 20 bp, synthetic construct
  misc_feature 1..20: note = Description of Artificial Sequence: Synthetic oligonucleotide
  misc_feature 1..20: note = Target: SCN10A; (+) strand; PAM type: NRG; PAM sequence: AAG
  source 1..20: mol_type = other DNA
tctttcatctttccccatta

SEQ ID NO: 34349 - DNA, 20 bp, synthetic construct
  misc_feature 1..20: note = Description of Artificial Sequence: Synthetic oligonucleotide
  misc_feature 1..20: note = Target: SCN10A; (+) strand; PAM type: NRG; PAM sequence: GAG
  source 1..20: mol_type = other DNA
ccctaaaatgctccctttat

SEQ ID NO: 34350 - DNA, 20 bp, synthetic construct
  misc_feature 1..20: note = Description of Artificial Sequence: Synthetic oligonucleotide
  misc_feature 1..20: note = Target: SCN10A; (+) strand; PAM type: NRG; PAM sequence: CAG
  source 1..20: mol_type = other DNA
ccctttatgagttattgtat

SEQ ID NO: 34351 - DNA, 20 bp, synthetic construct
  misc_feature 1..20: note = Description of Artificial Sequence: Synthetic oligonucleotide
  misc_feature 1..20: note = Target: SCN10A; (+) strand; PAM type: NRG; PAM sequence: AAG
  source 1..20: mol_type = other DNA
ttattgtatcagcatatctt

SEQ ID NO: 34352 - DNA, 20 bp, synthetic construct
  misc_feature 1..20: note = Description of Artificial Sequence: Synthetic oligonucleotide
  misc_feature 1..20: note = Target: SCN10A; (+) strand; PAM type: NRG; PAM sequence: AGG
  source 1..20: mol_type = other DNA
tattgtatcagcatatctta

SEQ ID NO: 34353 - DNA, 20 bp, synthetic construct
  misc_feature 1..20: note = Description of Artificial Sequence: Synthetic oligonucleotide
  misc_feature 1..20: note = Target: SCN10A; (+) strand; PAM type: NRG; PAM sequence: CAG
  source 1..20: mol_type = other DNA
atatcttaaggcacttatac

SEQ ID NO: 34354 - DNA, 20 bp, synthetic construct
  misc_feature 1..20: note = Description of Artificial Sequence: Synthetic oligonucleotide
  misc_feature 1..20: note = Target: SCN10A; (+) strand; PAM type: NRG; PAM sequence: AAG
  source 1..20: mol_type = other DNA
ccagaaccatatgcatcatc

SEQ ID NO: 34355 - DNA, 20 bp, synthetic construct
  misc_feature 1..20: note = Description of Artificial Sequence: Synthetic oligonucleotide
  misc_feature 1..20: note = Target: SCN10A; (+) strand; PAM type: NRG; PAM sequence: TAG
  source 1..20: mol_type = other DNA
gtcctgaatcttatgcccct

SEQ ID NO: 34356 - DNA, 20 bp, synthetic construct
  misc_feature 1..20: note = Description of Artificial Sequence: Synthetic oligonucleotide
  misc_feature 1..20: note = Target: SCN10A; (+) strand; PAM type: NRG; PAM sequence: TAG
  source 1..20: mol_type = other DNA
tgaatcttatgccccttaga

SEQ ID NO: 34357 - DNA, 20 bp, synthetic construct
  misc_feature 1..20: note = Description of Artificial Sequence: Synthetic oligonucleotide
  misc_feature 1..20: note = Target: SCN10A; (+) strand; PAM type: NRG; PAM sequence: CAG
  source 1..20: mol_type = other DNA
catatccttccatttcccat

SEQ ID NO: 34358 - DNA, 20 bp, synthetic construct
  misc_feature 1..20: note = Description of Artificial Sequence: Synthetic oligonucleotide
  misc_feature 1..20: note = Target: SCN10A; (+) strand; PAM type: NRG; PAM sequence: CAG
  source 1..20: mol_type = other DNA
cagccccactgtcactaccc

SEQ ID NO: 34359 - DNA, 20 bp, synthetic construct
  misc_feature 1..20: note = Description of Artificial Sequence: Synthetic oligonucleotide
  misc_feature 1..20: note = Target: SCN10A; (+) strand; PAM type: NRG; PAM sequence: GAG
  source 1..20: mol_type = other DNA
gccccactgtcactacccca

SEQ ID NO: 34360 - DNA, 20 bp, synthetic construct
  misc_feature 1..20: note = Description of Artificial Sequence: Synthetic oligonucleotide
  misc_feature 1..20: note = Target: SCN10A; (+) strand; PAM type: NRG; PAM sequence: AAG
  source 1..20: mol_type = other DNA
ctgtcactaccccagagttc

SEQ ID NO: 34361 - DNA, 20 bp, synthetic construct
  misc_feature 1..20: note = Description of Artificial Sequence: Synthetic oligonucleotide
  misc_feature 1..20: note = Target: SCN10A; (+) strand; PAM type: NRG; PAM sequence: TGG
  source 1..20: mol_type = other DNA
aagcactgccatcttgtact

SEQ ID NO: 34362 - DNA, 20 bp, synthetic construct
  misc_feature 1..20: note = Description of Artificial Sequence: Synthetic oligonucleotide
  misc_feature 1..20: note = Target: SCN10A; (+) strand; PAM type: NRG; PAM sequence: TGG
  source 1..20: mol_type = other DNA
gtacttggcttcctcctaac

SEQ ID NO: 34363 - DNA, 20 bp, synthetic construct
  misc_feature 1..20: note = Description of Artificial Sequence: Synthetic oligonucleotide
  misc_feature 1..20: note = Target: SCN10A; (+) strand; PAM type: NRG; PAM sequence: AAG
  source 1..20: mol_type = other DNA
acttcccctcttatatctac

SEQ ID NO: 34364 - DNA, 20 bp, synthetic construct
  misc_feature 1..20: note = Description of Artificial Sequence: Synthetic oligonucleotide
  misc_feature 1..20: note = Target: SCN10A; (+) strand; PAM type: NRG; PAM sequence: CAG
  source 1..20: mol_type = other DNA
ctcttatatctacaagtatc

SEQ ID NO: 34365 - DNA, 20 bp, synthetic construct
  misc_feature 1..20: note = Description of Artificial Sequence: Synthetic oligonucleotide
  misc_feature 1..20: note = Target: SCN10A; (+) strand; PAM type: NRG; PAM sequence: GAG
  source 1..20: mol_type = other DNA
cttatatctacaagtatcca

SEQ ID NO: 34366 - DNA, 20 bp, synthetic construct
  misc_feature 1..20: note = Description of Artificial Sequence: Synthetic oligonucleotide
  misc_feature 1..20: note = Target: SCN10A; (+) strand; PAM type: NRG; PAM sequence: TGG
  source 1..20: mol_type = other DNA
ccctgcctccaatcctttaa

SEQ ID NO: 34367 - DNA, 20 bp, synthetic construct
  misc_feature 1..20: note = Description of Artificial Sequence: Synthetic oligonucleotide
  misc_feature 1..20: note = Target: SCN10A; (+) strand; PAM type: NRG; PAM sequence: TAG
  source 1..20: mol_type = other DNA
taatggcacctcactcctct

SEQ ID NO: 34368 - DNA, 20 bp, synthetic construct
  misc_feature 1..20: note = Description of Artificial Sequence: Synthetic oligonucleotide
  misc_feature 1..20: note = Target: SCN10A; (+) strand; PAM type: NRG; PAM sequence: AAG
  source 1..20: mol_type = other DNA
acctcactcctcttagcatg

SEQ ID NO: 34369 - DNA, 20 bp, synthetic construct
  misc_feature 1..20: note = Description of Artificial Sequence: Synthetic oligonucleotide
  misc_feature 1..20: note = Target: SCN10A; (+) strand; PAM type: NRG; PAM sequence: CAG
  source 1..20: mol_type = other DNA
gaagtcccatatccttaatg

SEQ ID NO: 34370 - DNA, 20 bp, synthetic construct
  misc_feature 1..20: note = Description of Artificial Sequence: Synthetic oligonucleotide
  misc_feature 1..20: note = Target: SCN10A; (+) strand; PAM type: NRG; PAM sequence: TAG
  source 1..20: mol_type = other DNA
cccatatccttaatgcagtc

SEQ ID NO: 34371 - DNA, 20 bp, synthetic construct
  misc_feature 1..20: note = Description of Artificial Sequence: Synthetic oligonucleotide
  misc_feature 1..20: note = Target: SCN10A; (+) strand; PAM type: NRG; PAM sequence: AGG
  source 1..20: mol_type = other DNA
ccatatccttaatgcagtct

SEQ ID NO: 34372 - DNA, 20 bp, synthetic construct
  misc_feature 1..20: note = Description of Artificial Sequence: Synthetic oligonucleotide
  misc_feature 1..20: note = Target: SCN10A; (+) strand; PAM type: NRG; PAM sequence: GAG
  source 1..20: mol_type = other DNA
atatccttaatgcagtctag

SEQ ID NO: 34373 - DNA, 20 bp, synthetic construct
  misc_feature 1..20: note = Description of Artificial Sequence: Synthetic oligonucleotide
  misc_feature 1..20: note = Target: SCN10A; (+) strand; PAM type: NRG; PAM sequence: TGG
  source 1..20: mol_type = other DNA
aatgcagtctaggagtttct

SEQ ID NO: 34374 - DNA, 20 bp, synthetic construct
  misc_feature 1..20: note = Description of Artificial Sequence: Synthetic oligonucleotide
  misc_feature 1..20: note = Target: SCN10A; (+) strand; PAM type: NRG; PAM sequence: GGG
  source 1..20: mol_type = other DNA
atgcagtctaggagtttctt

SEQ ID NO: 34375 - DNA, 20 bp, synthetic construct
  misc_feature 1..20: note = Description of Artificial Sequence: Synthetic oligonucleotide
  misc_feature 1..20: note = Target: SCN10A; (+) strand; PAM type: NRG; PAM sequence: TGG
  source 1..20: mol_type = other DNA
tctaggagtttcttgggatc

SEQ ID NO: 34376 - DNA, 20 bp, synthetic construct
  misc_feature 1..20: note = Description of Artificial Sequence: Synthetic oligonucleotide
  misc_feature 1..20: note = Target: SCN10A; (+) strand; PAM type: NRG; PAM sequence: TAG
  source 1..20: mol_type = other DNA
ctggccccaactcatccctc

SEQ ID NO: 34377 - DNA, 20 bp, synthetic construct
  misc_feature 1..20: note = Description of Artificial Sequence: Synthetic oligonucleotide
  misc_feature 1..20: note = Target: SCN10A; (+) strand; PAM type: NRG; PAM sequence: CAG
  source 1..20: mol_type = other DNA
catccctctagccttatttt

SEQ ID NO: 34378 - DNA, 20 bp, synthetic construct
  misc_feature 1..20: note = Description of Artificial Sequence: Synthetic oligonucleotide
  misc_feature 1..20: note = Target: SCN10A; (+) strand; PAM type: NRG; PAM sequence: TGG
  source 1..20: mol_type = other DNA
agccttattttcagttctcc

SEQ ID NO: 34379 - DNA, 20 bp, synthetic construct
  misc_feature 1..20: note = Description of Artificial Sequence: Synthetic oligonucleotide
  misc_feature 1..20: note = Target: SCN10A; (+) strand; PAM type: NRG; PAM sequence: TAG
  source 1..20: mol_type = other DNA
tttcagttctcctggttctc

SEQ ID NO: 34380 - DNA, 20 bp, synthetic construct
  misc_feature 1..20: note = Description of Artificial Sequence: Synthetic oligonucleotide
  misc_feature 1..20: note = Target: SCN10A; (+) strand; PAM type: NRG; PAM sequence: AGG
  source 1..20: mol_type = other DNA
ttcagttctcctggttctct

SEQ ID NO: 34381 - DNA, 20 bp, synthetic construct
  misc_feature 1..20: note = Description of Artificial Sequence: Synthetic oligonucleotide
  misc_feature 1..20: note = Target: SCN10A; (+) strand; PAM type: NRG; PAM sequence: CAG
  source 1..20: mol_type = other DNA
tctcctggttctctaggtta

SEQ ID NO: 34382 - DNA, 20 bp, synthetic construct
  misc_feature 1..20: note = Description of Artificial Sequence: Synthetic oligonucleotide
  misc_feature 1..20: note = Target: SCN10A; (+) strand; PAM type: NRG; PAM sequence: TAG
  source 1..20: mol_type = other DNA
tctctaggttacagctacat

SEQ ID NO: 34383 - DNA, 20 bp, synthetic construct
  misc_feature 1..20: note = Description of Artificial Sequence: Synthetic oligonucleotide
  misc_feature 1..20: note = Target: SCN10A; (+) strand; PAM type: NRG; PAM sequence: AGG
  source 1..20: mol_type = other DNA
ctctaggttacagctacatt

SEQ ID NO: 34384 - DNA, 20 bp, synthetic construct
  misc_feature 1..20: note = Description of Artificial Sequence: Synthetic oligonucleotide
  misc_feature 1..20: note = Target: SCN10A; (+) strand; PAM type: NRG; PAM sequence: CAG
  source 1..20: mol_type = other DNA
ttattctctcttctgctttg

SEQ ID NO: 34385 - DNA, 20 bp, synthetic construct
  misc_feature 1..20: note = Description of Artificial Sequence: Synthetic oligonucleotide
  misc_feature 1..20: note = Target: SCN10A; (+) strand; PAM type: NRG; PAM sequence: CAG
  source 1..20: mol_type = other DNA
cttctgctttgcagtccttt

SEQ ID NO: 34386 - DNA, 20 bp, synthetic construct
  misc_feature 1..20: note = Description of Artificial Sequence: Synthetic oligonucleotide
  misc_feature 1..20: note = Target: SCN10A; (+) strand; PAM type: NRG; PAM sequence: TGG
  source 1..20: mol_type = other DNA
gctttgcagtcctttcagcc

SEQ ID NO: 34387 - DNA, 20 bp, synthetic construct
  misc_feature 1..20: note = Description of Artificial Sequence: Synthetic oligonucleotide
  misc_feature 1..20: note = Target: SCN10A; (+) strand; PAM type: NRG; PAM sequence: GGG
  source 1..20: mol_type = other DNA
ctttgcagtcctttcagcct

SEQ ID NO: 34388 - DNA, 20 bp, synthetic construct
  misc_feature 1..20: note = Description of Artificial Sequence: Synthetic oligonucleotide
  misc_feature 1..20: note = Target: SCN10A; (+) strand; PAM type: NRG; PAM sequence: TGG
  source 1..20: mol_type = other DNA
ttcagcctgggataattccc

SEQ ID NO: 34389 - DNA, 20 bp, synthetic construct
  misc_feature 1..20: note = Description of Artificial Sequence: Synthetic oligonucleotide
  misc_feature 1..20: note = Target: SCN10A; (+) strand; PAM type: NRG; PAM sequence: CAG
  source 1..20: mol_type = other DNA
ctgggataattccctggctc

SEQ ID NO: 34390 - DNA, 20 bp, synthetic construct
  misc_feature 1..20: note = Description of Artificial Sequence: Synthetic oligonucleotide
  misc_feature 1..20: note = Target: SCN10A; (+) strand; PAM type: NRG; PAM sequence: AGG
  source 1..20: mol_type = other DNA
tgggataattccctggctcc

SEQ ID NO: 34391 - DNA, 20 bp, synthetic construct
  misc_feature 1..20: note = Description of Artificial Sequence: Synthetic oligonucleotide
  misc_feature 1..20: note = Target: SCN10A; (+) strand; PAM type: NRG; PAM sequence: TAG
  source 1..20: mol_type = other DNA
aaatcttaccatatttcact

SEQ ID NO: 34392 - DNA, 20 bp, synthetic construct
  misc_feature 1..20: note = Description of Artificial Sequence: Synthetic oligonucleotide
  misc_feature 1..20: note = Target: SCN10A; (+) strand; PAM type: NRG; PAM sequence: AAG
  source 1..20: mol_type = other DNA
gtatcctgcacttcctcttt

SEQ ID NO: 34393 - DNA, 20 bp, synthetic construct
  misc_feature 1..20: note = Description of Artificial Sequence: Synthetic oligonucleotide
  misc_feature 1..20: note = Target: SCN10A; (+) strand; PAM type: NRG; PAM sequence: AGG
  source 1..20: mol_type = other DNA
tatcctgcacttcctcttta

SEQ ID NO: 34394 - DNA, 20 bp, synthetic construct
  misc_feature 1..20: note = Description of Artificial Sequence: Synthetic oligonucleotide
  misc_feature 1..20: note = Target: SCN10A; (+) strand; PAM type: NRG; PAM sequence: CAG
  source 1..20: mol_type = other DNA
ctttaaggcactcaccactc

SEQ ID NO: 34395 - DNA, 20 bp, synthetic construct
  misc_feature 1..20: note = Description of Artificial Sequence: Synthetic oligonucleotide
  misc_feature 1..20: note = Target: SCN10A; (+) strand; PAM type: NRG; PAM sequence: AAG
  source 1..20: mol_type = other DNA
aaggcactcaccactccagt

SEQ ID NO: 34396 - DNA, 20 bp, synthetic construct
  misc_feature 1..20: note = Description of Artificial Sequence: Synthetic oligonucleotide
  misc_feature 1..20: note = Target: SCN10A; (+) strand; PAM type: NRG; PAM sequence: CAG
  source 1..20: mol_type = other DNA
gtaagctcactgctgtgacc

SEQ ID NO: 34397 - DNA, 20 bp, synthetic construct
  misc_feature 1..20: note = Description of Artificial Sequence: Synthetic oligonucleotide
  misc_feature 1..20: note = Target: SCN10A; (+) strand; PAM type: NRG; PAM sequence: TGG
  source 1..20: mol_type = other DNA
cactgctgtgacccagcttc

SEQ ID NO: 34398 - DNA, 20 bp, synthetic construct
  misc_feature 1..20: note = Description of Artificial Sequence: Synthetic oligonucleotide
  misc_feature 1..20: note = Target: SCN10A; (+) strand; PAM type: NRG; PAM sequence: TGG
  source 1..20: mol_type = other DNA
tgacccagcttctggaattc

SEQ ID NO: 34399 - DNA, 20 bp, synthetic construct
  misc_feature 1..20: note = Description of Artificial Sequence: Synthetic oligonucleotide
  misc_feature 1..20: note = Target: SCN10A; (+) strand; PAM type: NRG; PAM sequence: TGG
  source 1..20: mol_type = other DNA
cagcttctggaattctggct

SEQ ID NO: 34400 - DNA, 20 bp, synthetic construct
  misc_feature 1..20: note = Description of Artificial Sequence: Synthetic oligonucleotide
  misc_feature 1..20: note = Target: SCN10A; (+) strand; PAM type: NRG; PAM sequence: CAG
  source 1..20: mol_type = other DNA
tggaattctggcttggacaa

SEQ ID NO: 34401 - DNA, 20 bp, synthetic construct
  misc_feature 1..20: note = Description of Artificial Sequence: Synthetic oligonucleotide
  misc_feature 1..20: note = Target: SCN10A; (+) strand; PAM type: NRG; PAM sequence: CAG
  source 1..20: mol_type = other DNA
cttggacaacagtgaaatct

SEQ ID NO: 34402 - DNA, 20 bp, synthetic construct
  misc_feature 1..20: note = Description of Artificial Sequence: Synthetic oligonucleotide
  misc_feature 1..20: note = Target: SCN10A; (+) strand; PAM type: NRG; PAM sequence: AAG
  source 1..20: mol_type = other DNA
gaaatctcagcttgcatgcc

SEQ ID NO: 34403 - DNA, 20 bp, synthetic construct
  misc_feature 1..20: note = Description of Artificial Sequence: Synthetic oligonucleotide
  misc_feature 1..20: note = Target: SCN10A; (+) strand; PAM type: NRG; PAM sequence: TAG
  source 1..20: mol_type = other DNA
ctcagcttgcatgccaagca

SEQ ID NO: 34404 - DNA, 20 bp, synthetic construct
  misc_feature 1..20: note = Description of Artificial Sequence: Synthetic oligonucleotide
  misc_feature 1..20: note = Target: SCN10A; (+) strand; PAM type: NRG; PAM sequence: AAG
  source 1..20: mol_type = other DNA
agcttgcatgccaagcatag

SEQ ID NO: 34405 - DNA, 20 bp, synthetic construct
  misc_feature 1..20: note = Description of Artificial Sequence: Synthetic oligonucleotide
  misc_feature 1..20: note = Target: SCN10A; (+) strand; PAM type: NRG; PAM sequence: AGG
  source 1..20: mol_type = other DNA
gcttgcatgccaagcataga

SEQ ID NO: 34406 - DNA, 20 bp, synthetic construct
  misc_feature 1..20: note = Description of Artificial Sequence: Synthetic oligonucleotide
  misc_feature 1..20: note = Target: SCN10A; (+) strand; PAM type: NRG; PAM sequence: GAG
  source 1..20: mol_type = other DNA
atagaaggttcacatgcttt

SEQ ID NO: 34407 - DNA, 20 bp, synthetic construct
  misc_feature 1..20: note = Description of Artificial Sequence: Synthetic oligonucleotide
  misc_feature 1..20: note = Target: SCN10A; (+) strand; PAM type: NRG; PAM sequence: CAG
  source 1..20: mol_type = other DNA
aggttcacatgctttgagtt

SEQ ID NO: 34408 - DNA, 20 bp, synthetic construct
  misc_feature 1..20: note = Description of Artificial Sequence: Synthetic oligonucleotide
  misc_feature 1..20: note = Target: SCN10A; (+) strand; PAM type: NRG; PAM sequence: TGG
  source 1..20: mol_type = other DNA
gtgaattgtcaaactcctgt

SEQ ID NO: 34409 - DNA, 20 bp, synthetic construct
  misc_feature 1..20: note = Description of Artificial Sequence: Synthetic oligonucleotide
  misc_feature 1..20: note = Target: SCN10A; (+) strand; PAM type: NRG; PAM sequence: TGG
  source 1..20: mol_type = other DNA
ttgtcaaactcctgttggtt

SEQ ID NO: 34410 - DNA, 20 bp, synthetic construct
  misc_feature 1..20: note = Description of Artificial Sequence: Synthetic oligonucleotide
  misc_feature 1..20: note = Target: SCN10A; (+) strand; PAM type: NRG; PAM sequence: GGG
  source 1..20: mol_type = other DNA
tgtcaaactcctgttggttt

SEQ ID NO: 34411 - DNA, 20 bp, synthetic construct
  misc_feature 1..20: note = Description of Artificial Sequence: Synthetic oligonucleotide
  misc_feature 1..20: note = Target: SCN10A; (+) strand; PAM type: NRG; PAM sequence: AAG
  source 1..20: mol_type = other DNA
ggtttgggccaaactttctt

SEQ ID NO: 34412 - DNA, 20 bp, synthetic construct
  misc_feature 1..20: note = Description of Artificial Sequence: Synthetic oligonucleotide
  misc_feature 1..20: note = Target: SCN10A; (+) strand; PAM type: NRG; PAM sequence: AAG
  source 1..20: mol_type = other DNA
cttaagcataatccctctta

SEQ ID NO: 34413 - DNA, 20 bp, synthetic construct
  misc_feature 1..20: note = Description of Artificial Sequence: Synthetic oligonucleotide
  misc_feature 1..20: note = Target: SCN10A; (+) strand; PAM type: NRG; PAM sequence: GAG
  source 1..20: mol_type = other DNA
taagcataatccctcttaaa

SEQ ID NO: 34414 - DNA, 20 bp, synthetic construct
  misc_feature 1..20: note = Description of Artificial Sequence: Synthetic oligonucleotide
  misc_feature 1..20: note = Target: SCN10A; (+) strand; PAM type: NRG; PAM sequence: AGG
  source 1..20: mol_type = other DNA
aagcataatccctcttaaag

SEQ ID NO: 34415 - DNA, 20 bp, synthetic construct
  misc_feature 1..20: note = Description of Artificial Sequence: Synthetic oligonucleotide
  misc_feature 1..20: note = Target: SCN10A; (+) strand; PAM type: NRG; PAM sequence: TGG
  source 1..20: mol_type = other DNA
cataatccctcttaaagagg

SEQ ID NO: 34416 - DNA, 20 bp, synthetic construct
  misc_feature 1..20: note = Description of Artificial Sequence: Synthetic oligonucleotide
  misc_feature 1..20: note = Target: SCN10A; (+) strand; PAM type: NRG; PAM sequence: TGG
  source 1..20: mol_type = other DNA
tataaatcctattacgactc

SEQ ID NO: 34417 - DNA, 20 bp, synthetic construct
  misc_feature 1..20: note = Description of Artificial Sequence: Synthetic oligonucleotide
  misc_feature 1..20: note = Target: SCN10A; (+) strand; PAM type: NRG; PAM sequence: CAG
  source 1..20: mol_type = other DNA
aaatcctattacgactctgg

SEQ ID NO: 34418 - DNA, 20 bp, synthetic construct
  misc_feature 1..20: note = Description of Artificial Sequence: Synthetic oligonucleotide
  misc_feature 1..20: note = Target: SCN10A; (+) strand; PAM type: NRG; PAM sequence: AAG
  source 1..20: mol_type = other DNA
attacgactctggcagcatg

SEQ ID NO: 34419 - DNA, 20 bp, synthetic construct
  misc_feature 1..20: note = Description of Artificial Sequence: Synthetic oligonucleotide
  misc_feature 1..20: note = Target: SCN10A; (+) strand; PAM type: NRG; PAM sequence: CAG
  source 1..20: mol_type = other DNA
tggcagcatgaagcatcctt

SEQ ID NO: 34420 - DNA, 20 bp, synthetic construct
  misc_feature 1..20: note = Description of Artificial Sequence: Synthetic oligonucleotide
  misc_feature 1..20: note = Target: SCN10A; (+) strand; PAM type: NRG; PAM sequence: AGG
  source 1..20: mol_type = other DNA
ggcagcatgaagcatccttc

SEQ ID NO: 34421 - DNA, 20 bp, synthetic construct
  misc_feature 1..20: note = Description of Artificial Sequence: Synthetic oligonucleotide
  misc_feature 1..20: note = Target: SCN10A; (+) strand; PAM type: NRG; PAM sequence: CAG
  source 1..20: mol_type = other DNA
taatgaatataacatccaac

SEQ ID NO: 34422 - DNA, 20 bp, synthetic construct
  misc_feature 1..20: note = Description of Artificial Sequence: Synthetic oligonucleotide
  misc_feature 1..20: note = Target: SCN10A; (+) strand; PAM type: NRG; PAM sequence: GAG
  source 1..20: mol_type = other DNA
atgaatataacatccaacca

SEQ ID NO: 34423 - DNA, 20 bp, synthetic construct
  misc_feature 1..20: note = Description of Artificial Sequence: Synthetic oligonucleotide
  misc_feature 1..20: note = Target: SCN10A; (+) strand; PAM type: NRG; PAM sequence: AAG
  source 1..20: mol_type = other DNA
aatataacatccaaccagag

SEQ ID NO: 34424 - DNA, 20 bp, synthetic construct
  misc_feature 1..20: note = Description of Artificial Sequence: Synthetic oligonucleotide
  misc_feature 1..20: note = Target: SCN10A; (+) strand; PAM type: NRG; PAM sequence: CAG
  source 1..20: mol_type = other DNA
aagatgatgtgccctatgct

SEQ ID NO: 34425 - DNA, 20 bp, synthetic construct
  misc_feature 1..20: note = Description of Artificial Sequence: Synthetic oligonucleotide
  misc_feature 1..20: note = Target: SCN10A; (+) strand; PAM type: NRG; PAM sequence: AAG
  source 1..20: mol_type = other DNA
tgacctcttttatttaacct

SEQ ID NO: 34426 - DNA, 20 bp, synthetic construct
  misc_feature 1..20: note = Description of Artificial Sequence: Synthetic oligonucleotide
  misc_feature 1..20: note = Target: SCN10A; (+) strand; PAM type: NRG; PAM sequence: AGG
  source 1..20: mol_type = other DNA
gacctcttttatttaaccta

SEQ ID NO: 34427 - DNA, 20 bp, synthetic construct
  misc_feature 1..20: note = Description of Artificial Sequence: Synthetic oligonucleotide
  misc_feature 1..20: note = Target: SCN10A; (+) strand; PAM type: NRG; PAM sequence: CAG
  source 1..20: mol_type = other DNA
aacctaaggtttcctctcct

SEQ ID NO: 34428 - DNA, 20 bp, synthetic construct
  misc_feature 1..20: note = Description of Artificial Sequence: Synthetic oligonucleotide
  misc_feature 1..20: note = Target: SCN10A; (+) strand; PAM type: NRG; PAM sequence: TGG
  source 1..20: mol_type = other DNA
ttaaaacatcattgtttctc

SEQ ID NO: 34429 - DNA, 20 bp, synthetic construct
  misc_feature 1..20: note = Description of Artificial Sequence: Synthetic oligonucleotide
  misc_feature 1..20: note = Target: SCN10A; (+) strand; PAM type: NRG; PAM sequence: CAG
  source 1..20: mol_type = other DNA
cctttcttactctactgtca

SEQ ID NO: 34430 - DNA, 20 bp, synthetic construct
  misc_feature 1..20: note = Description of Artificial Sequence: Synthetic oligonucleotide
  misc_feature 1..20: note = Target: SCN10A; (+) strand; PAM type: NRG; PAM sequence: GAG
  source 1..20: mol_type = other DNA
actgtcacagcatcttcctt

SEQ ID NO: 34431 - DNA, 20 bp, synthetic construct
  misc_feature 1..20: note = Description of Artificial Sequence: Synthetic oligonucleotide
  misc_feature 1..20: note = Target: SCN10A; (+) strand; PAM type: NRG; PAM sequence: AGG
  source 1..20: mol_type = other DNA
ctgtcacagcatcttccttg

SEQ ID NO: 34432 - DNA, 20 bp, synthetic construct
  misc_feature 1..20: note = Description of Artificial Sequence: Synthetic oligonucleotide
  misc_feature 1..20: note = Target: SCN10A; (+) strand; PAM type: NRG; PAM sequence: GGG
  source 1..20: mol_type = other DNA
tgtcacagcatcttccttga

SEQ ID NO: 34433 - DNA, 20 bp, synthetic construct
  misc_feature 1..20: note = Description of Artificial Sequence: Synthetic oligonucleotide
  misc_feature 1..20: note = Target: SCN10A; (+) strand; PAM type: NRG; PAM sequence: GGG
  source 1..20: mol_type = other DNA
gtcacagcatcttccttgag

SEQ ID NO: 34434 - DNA, 20 bp, synthetic construct
  misc_feature 1..20: note = Description of Artificial Sequence: Synthetic oligonucleotide
  misc_feature 1..20: note = Target: SCN10A; (+) strand; PAM type: NRG; PAM sequence: AAG
  source 1..20: mol_type = other DNA
acagcatcttccttgagggg

SEQ ID NO: 34435 - DNA, 20 bp, synthetic construct
  misc_feature 1..20: note = Description of Artificial Sequence: Synthetic oligonucleotide
  misc_feature 1..20: note = Target: SCN10A; (+) strand; PAM type: NRG; PAM sequence: CAG
  source 1..20: mol_type = other DNA
cttattttcttcctttttat

SEQ ID NO: 34436 - DNA, 20 bp, synthetic construct
  misc_feature 1..20: note = Description of Artificial Sequence: Synthetic oligonucleotide
  misc_feature 1..20: note = Target: SCN10A; (+) strand; PAM type: NRG; PAM sequence: TAG
  source 1..20: mol_type = other DNA
cagttcacactgttataaat

SEQ ID NO: 34437 - DNA, 20 bp, synthetic construct
  misc_feature 1..20: note = Description of Artificial Sequence: Synthetic oligonucleotide
  misc_feature 1..20: note = Target: SCN10A; (+) strand; PAM type: NRG; PAM sequence: TGG
  source 1..20: mol_type = other DNA
ttgtgcatgcacttgtcttc

SEQ ID NO: 34438 - DNA, 20 bp, synthetic construct
  misc_feature 1..20: note = Description of Artificial Sequence: Synthetic oligonucleotide
  misc_feature 1..20: note = Target: SCN10A; (+) strand; PAM type: NRG; PAM sequence: GGG
  source 1..20: mol_type = other DNA
tgtgcatgcacttgtcttct

SEQ ID NO: 34439 - DNA, 20 bp, synthetic construct
  misc_feature 1..20: note = Description of Artificial Sequence: Synthetic oligonucleotide
  misc_feature 1..20: note = Target: SCN10A; (+) strand; PAM type: NRG; PAM sequence: TGG
  source 1..20: mol_type = other DNA
tgcacttgtcttctgggtaa

SEQ ID NO: 34440 - DNA, 20 bp, synthetic construct
  misc_feature 1..20: note = Description of Artificial Sequence: Synthetic oligonucleotide
  misc_feature 1..20: note = Target: SCN10A; (+) strand; PAM type: NRG; PAM sequence: GAG
  source 1..20: mol_type = other DNA
cacttgtcttctgggtaatg

SEQ ID NO: 34441 - DNA, 20 bp, synthetic construct
  misc_feature 1..20: note = Description of Artificial Sequence: Synthetic oligonucleotide
  misc_feature 1..20: note = Target: SCN10A; (+) strand; PAM type: NRG; PAM sequence: AGG
  source 1..20: mol_type = other DNA
acttgtcttctgggtaatgg

SEQ ID NO: 34442 - DNA, 20 bp, synthetic construct
  misc_feature 1..20: note = Description of Artificial Sequence: Synthetic oligonucleotide
  misc_feature 1..20: note = Target: SCN10A; (+) strand; PAM type: NRG; PAM sequence: CAG
  source 1..20: mol_type = other DNA
gtcttctgggtaatggaggt

SEQ ID NO: 34443 - DNA, 20 bp, synthetic construct
  misc_feature 1..20: note = Description of Artificial Sequence: Synthetic oligonucleotide
  misc_feature 1..20: note = Target: SCN10A; (+) strand; PAM type: NRG; PAM sequence: AGG
  source 1..20: mol_type = other DNA
tcttctgggtaatggaggtc

SEQ ID NO: 34444 - DNA, 20 bp, synthetic construct
  misc_feature 1..20: note = Description of Artificial Sequence: Synthetic oligonucleotide
  misc_feature 1..20: note = Target: SCN10A; (+) strand; PAM type: NRG; PAM sequence: GAG
  source 1..20: mol_type = other DNA
ggtaatggaggtcaggctgt

SEQ ID NO: 34445 - DNA, 20 bp, synthetic construct
  misc_feature 1..20: note = Description of Artificial Sequence: Synthetic oligonucleotide
  misc_feature 1..20: note = Target: SCN10A; (+) strand; PAM type: NRG; PAM sequence: CAG
  source 1..20: mol_type = other DNA
aggtcaggctgtgagcaaaa

SEQ ID NO: 34446 - DNA, 20 bp, synthetic construct
  misc_feature 1..20: note = Description of Artificial Sequence: Synthetic oligonucleotide
  misc_feature 1..20: note = Target: SCN10A; (+) strand; PAM type: NRG; PAM sequence: TAG
  source 1..20: mol_type = other DNA
cagacacatctccgccctca

SEQ ID NO: 34447 - DNA, 20 bp, synthetic construct
  misc_feature 1..20: note = Description of Artificial Sequence: Synthetic oligonucleotide
  misc_feature 1..20: note = Target: SCN10A; (+) strand; PAM type: NRG; PAM sequence: TAG
  source 1..20: mol_type = other DNA
ccctcatagattttacaacc

SEQ ID NO: 34448 - DNA, 20 bp, synthetic construct
  misc_feature 1..20: note = Description of Artificial Sequence: Synthetic oligonucleotide
  misc_feature 1..20: note = Target: SCN10A; (+) strand; PAM type: NRG; PAM sequence: TAG
  source 1..20: mol_type = other DNA
tacaacctagtaaatcataa

SEQ ID NO: 34449 - DNA, 20 bp, synthetic construct
  misc_feature 1..20: note = Description of Artificial Sequence: Synthetic oligonucleotide
  misc_feature 1..20: note = Target: SCN10A; (+) strand; PAM type: NRG; PAM sequence: GAG
  source 1..20: mol_type = other DNA
tcataatagccaaatgtgat

SEQ ID NO: 34450 - DNA, 20 bp, synthetic construct
  misc_feature 1..20: note = Description of Artificial Sequence: Synthetic oligonucleotide
  misc_feature 1..20: note = Target: SCN10A; (+) strand; PAM type: NRG; PAM sequence: CAG
  source 1..20: mol_type = other DNA
gatgagtatttactacatgc

SEQ ID NO: 34451 - DNA, 20 bp, synthetic construct
  misc_feature 1..20: note = Description of Artificial Sequence: Synthetic oligonucleotide
  misc_feature 1..20: note = Target: SCN10A; (+) strand; PAM type: NRG; PAM sequence: TGG
  source 1..20: mol_type = other DNA
tatttactacatgccagtcg

SEQ ID NO: 34452 - DNA, 20 bp, synthetic construct
  misc_feature 1..20: note = Description of Artificial Sequence: Synthetic oligonucleotide
  misc_feature 1..20: note = Target: SCN10A; (+) strand; PAM type: NRG; PAM sequence: AAG
  source 1..20: mol_type = other DNA
tacatgccagtcgtggttct

SEQ ID NO: 34453 - DNA, 20 bp, synthetic construct
  misc_feature 1..20: note = Description of Artificial Sequence: Synthetic oligonucleotide
  misc_feature 1..20: note = Target: SCN10A; (+) strand; PAM type: NRG; PAM sequence: AAG
  source 1..20: mol_type = other DNA
taatcctcacaaaactctac

SEQ ID NO: 34454 - DNA, 20 bp, synthetic construct
  misc_feature 1..20: note = Description of Artificial Sequence: Synthetic oligonucleotide
  misc_feature 1..20: note = Target: SCN10A; (+) strand; PAM type: NRG; PAM sequence: AAG
  source 1..20: mol_type = other DNA
ctcacaaaactctacaagat

SEQ ID NO: 34455 - DNA, 20 bp, synthetic construct
  misc_feature 1..20: note = Description of Artificial Sequence: Synthetic oligonucleotide
  misc_feature 1..20: note = Target: SCN10A; (+) strand; PAM type: NRG; PAM sequence: CAG
  source 1..20: mol_type = other DNA
agtatattctcactacttta

SEQ ID NO: 34456 - DNA, 20 bp, synthetic construct
  misc_feature 1..20: note = Description of Artificial Sequence: Synthetic oligonucleotide
  misc_feature 1..20: note = Target: SCN10A; (+) strand; PAM type: NRG; PAM sequence: AGG
  source 1..20: mol_type = other DNA
gtatattctcactactttac

SEQ ID NO: 34457 - DNA, 20 bp, synthetic construct
  misc_feature 1..20: note = Description of Artificial Sequence: Synthetic oligonucleotide
  misc_feature 1..20: note = Target: SCN10A; (+) strand; PAM type: NRG; PAM sequence: GAG
  source 1..20: mol_type = other DNA
actttacaggctaaaaatct

SEQ ID NO: 34458 - DNA, 20 bp, synthetic construct
  misc_feature 1..20: note = Description of Artificial Sequence: Synthetic oligonucleotide
  misc_feature 1..20: note = Target: SCN10A; (+) strand; PAM type: NRG; PAM sequence: AGG
  source 1..20: mol_type = other DNA
ctttacaggctaaaaatctg

SEQ ID NO: 34459 - DNA, 20 bp, synthetic construct
  misc_feature 1..20: note = Description of Artificial Sequence: Synthetic oligonucleotide
  misc_feature 1..20: note = Target: SCN10A; (+) strand; PAM type: NRG; PAM sequence: CAG
  source 1..20: mol_type = other DNA
caggctaaaaatctgaggca

SEQ ID NO: 34460 - DNA, 20 bp, synthetic construct
  misc_feature 1..20: note = Description of Artificial Sequence: Synthetic oligonucleotide
  misc_feature 1..20: note = Target: SCN10A; (+) strand; PAM type: NRG; PAM sequence: AAG
  source 1..20: mol_type = other DNA
taaaaatctgaggcacagaa

SEQ ID NO: 34461 - DNA, 20 bp, synthetic construct
  misc_feature 1..20: note = Description of Artificial Sequence: Synthetic oligonucleotide
  misc_feature 1..20: note = Target: SCN10A; (+) strand; PAM type: NRG; PAM sequence: AAG
  source 1..20: mol_type = other DNA
gaggcacagaaaagttactg

SEQ ID NO: 34462 - DNA, 20 bp, synthetic construct
  misc_feature 1..20: note = Description of Artificial Sequence: Synthetic oligonucleotide
  misc_feature 1..20: note = Target: SCN10A; (+) strand; PAM type: NRG; PAM sequence: AAG
  source 1..20: mol_type = other DNA
agaaaagttactgaagctcc

SEQ ID NO: 34463 - DNA, 20 bp, synthetic construct
  misc_feature 1..20: note = Description of Artificial Sequence: Synthetic oligonucleotide
  misc_feature 1..20: note = Target: SCN10A; (+) strand; PAM type: NRG; PAM sequence: AGG
  source 1..20: mol_type = other DNA
gaaaagttactgaagctcca

SEQ ID NO: 34464 - DNA, 20 bp, synthetic construct
  misc_feature 1..20: note = Description of Artificial Sequence: Synthetic oligonucleotide
  misc_feature 1..20: note = Target: SCN10A; (+) strand; PAM type: NRG; PAM sequence: AAG
  source 1..20: mol_type = other DNA
aaggtcacactgtgtaccat

SEQ ID NO: 34465 - DNA, 20 bp, synthetic construct
  misc_feature 1..20: note = Description of Artificial Sequence: Synthetic oligonucleotide
  misc_feature 1..20: note = Target: SCN10A; (+) strand; PAM type: NRG; PAM sequence: TGG
  source 1..20: mol_type = other DNA
gtcacactgtgtaccataag

SEQ ID NO: 34466 - DNA, 20 bp, synthetic construct
  misc_feature 1..20: note = Description of Artificial Sequence: Synthetic oligonucleotide
  misc_feature 1..20: note = Target: SCN10A; (+) strand; PAM type: NRG; PAM sequence: AAG
  source 1..20: mol_type = other DNA
acactgtgtaccataagtgg

SEQ ID NO: 34467 - DNA, 20 bp, synthetic construct
  misc_feature 1..20: note = Description of Artificial Sequence: Synthetic oligonucleotide
  misc_feature 1..20: note = Target: SCN10A; (+) strand; PAM type: NRG; PAM sequence: GAG
  source 1..20: mol_type = other DNA
actgtgtaccataagtggaa

SEQ ID NO: 34468 - DNA, 20 bp, synthetic construct
  misc_feature 1..20: note = Description of Artificial Sequence: Synthetic oligonucleotide
  misc_feature 1..20: note = Target: SCN10A; (+) strand; PAM type: NRG; PAM sequence: TAG
  source 1..20: mol_type = other DNA
tgtaccataagtggaagagc

SEQ ID NO: 34469 - DNA, 20 bp, synthetic construct
  misc_feature 1..20: note = Description of Artificial Sequence: Synthetic oligonucleotide
  misc_feature 1..20: note = Target: SCN10A; (+) strand; PAM type: NRG; PAM sequence: AGG
  source 1..20: mol_type = other DNA
gtaccataagtggaagagct

SEQ ID NO: 34470 - DNA, 20 bp, synthetic construct
  misc_feature 1..20: note = Description of Artificial Sequence: Synthetic oligonucleotide
  misc_feature 1..20: note = Target: SCN10A; (+) strand; PAM type: NRG; PAM sequence: CAG
  source 1..20: mol_type = other DNA
gaagagctaggatgcaaacc

SEQ ID NO: 34471 - DNA, 20 bp, synthetic construct
  misc_feature 1..20: note = Description of Artificial Sequence: Synthetic oligonucleotide
  misc_feature 1..20: note = Target: SCN10A; (+) strand; PAM type: NRG; PAM sequence: AGG
  source 1..20: mol_type = other DNA
aagagctaggatgcaaaccc

SEQ ID NO: 34472 - DNA, 20 bp, synthetic construct
  misc_feature 1..20: note = Description of Artificial Sequence: Synthetic oligonucleotide
  misc_feature 1..20: note = Target: SCN10A; (+) strand; PAM type: NRG; PAM sequence: CAG
  source 1..20: mol_type = other DNA
agctaggatgcaaacccagg

SEQ ID NO: 34473 - DNA, 20 bp, synthetic construct
  misc_feature 1..20: note = Description of Artificial Sequence: Synthetic oligonucleotide
  misc_feature 1..20: note = Target: SCN10A; (+) strand; PAM type: NRG; PAM sequence: CGG
  source 1..20: mol_type = other DNA
aggatgcaaacccaggcagc

SEQ ID NO: 34474 - DNA, 20 bp, synthetic construct
  misc_feature 1..20: note = Description of Artificial Sequence: Synthetic oligonucleotide
  misc_feature 1..20: note = Target: SCN10A; (+) strand; PAM type: NRG; PAM sequence: GGG
  source 1..20: mol_type = other DNA
ggatgcaaacccaggcagcc

SEQ ID NO: 34475 - DNA, 20 bp, synthetic construct
  misc_feature 1..20: note = Description of Artificial Sequence: Synthetic oligonucleotide
  misc_feature 1..20: note = Target: SCN10A; (+) strand; PAM type: NRG; PAM sequence: CAG
  source 1..20: mol_type = other DNA
aaacccaggcagccgggttc

SEQ ID NO: 34476 - DNA, 20 bp, synthetic construct
  misc_feature 1..20: note = Description of Artificial Sequence: Synthetic oligonucleotide
  misc_feature 1..20: note = Target: SCN10A; (+) strand; PAM type: NRG; PAM sequence: GAG
  source 1..20: mol_type = other DNA
acccaggcagccgggttcca

SEQ ID NO: 34477 - DNA, 20 bp, synthetic construct
  misc_feature 1..20: note = Description of Artificial Sequence: Synthetic oligonucleotide
  misc_feature 1..20: note = Target: SCN10A; (+) strand; PAM type: NRG; PAM sequence: CAG
  source 1..20: mol_type = other DNA
caggcagccgggttccagag

SEQ ID NO: 34478 - DNA, 20 bp, synthetic construct
  misc_feature 1..20: note = Description of Artificial Sequence: Synthetic oligonucleotide
  misc_feature 1..20: note = Target: SCN10A; (+) strand; PAM type: NRG; PAM sequence: TGG
  source 1..20: mol_type = other DNA
ttcttttgtcttacctacac

SEQ ID NO: 34479 - DNA, 20 bp, synthetic construct
  misc_feature 1..20: note = Description of Artificial Sequence: Synthetic oligonucleotide
  misc_feature 1..20: note = Target: SCN10A; (+) strand; PAM type: NRG; PAM sequence: GGG
  source 1..20: mol_type = other DNA
tcttttgtcttacctacact

SEQ ID NO: 34480 - DNA, 20 bp, synthetic construct
  misc_feature 1..20: note = Description of Artificial Sequence: Synthetic oligonucleotide
  misc_feature 1..20: note = Target: SCN10A; (+) strand; PAM type: NRG; PAM sequence: TGG
  source 1..20: mol_type = other DNA
tacctacactgggatgtgtt

SEQ ID NO: 34481 - DNA, 20 bp, synthetic construct
  misc_feature 1..20: note = Description of Artificial Sequence: Synthetic oligonucleotide
  misc_feature 1..20: note = Target: SCN10A; (+) strand; PAM type: NRG; PAM sequence: GGG
  source 1..20: mol_type = other DNA
acctacactgggatgtgttt

SEQ ID NO: 34482 - DNA, 20 bp, synthetic construct
  misc_feature 1..20: note = Description of Artificial Sequence: Synthetic oligonucleotide
  misc_feature 1..20: note = Target: SCN10A; (+) strand; PAM type: NRG; PAM sequence: CAG
  source 1..20: mol_type = other DNA
ttgttgctatctcattcttg

SEQ ID NO: 34483 - DNA, 20 bp, synthetic construct
  misc_feature 1..20: note = Description of Artificial Sequence: Synthetic oligonucleotide
  misc_feature 1..20: note = Target: SCN10A; (+) strand; PAM type: NRG; PAM sequence: CAG
  source 1..20: mol_type = other DNA
gtgtctgcgaactttctcct

SEQ ID NO: 34484 - DNA, 20 bp, synthetic construct
  misc_feature 1..20: note = Description of Artificial Sequence: Synthetic oligonucleotide
  misc_feature 1..20: note = Target: SCN10A; (+) strand; PAM type: NRG; PAM sequence: TAG
  source 1..20: mol_type = other DNA
tttctcctcagcttcttaca

SEQ ID NO: 34485 - DNA, 20 bp, synthetic construct
  misc_feature 1..20: note = Description of Artificial Sequence: Synthetic oligonucleotide
  misc_feature 1..20: note = Target: SCN10A; (+) strand; PAM type: NRG; PAM sequence: TGG
  source 1..20: mol_type = other DNA
attcaaatttctgttcttct

SEQ ID NO: 34486 - DNA, 20 bp, synthetic construct
  misc_feature 1..20: note = Description of Artificial Sequence: Synthetic oligonucleotide
  misc_feature 1..20: note = Target: SCN10A; (+) strand; PAM type: NRG; PAM sequence: GAG
  source 1..20: mol_type = other DNA
tcaaatttctgttcttcttg

SEQ ID NO: 34487 - DNA, 20 bp, synthetic construct
  misc_feature 1..20: note = Description of Artificial Sequence: Synthetic oligonucleotide
  misc_feature 1..20: note = Target: SCN10A; (+) strand; PAM type: NRG; PAM sequence: GAG
  source 1..20: mol_type = other DNA
aaatttctgttcttcttgga

SEQ ID NO: 34488 - DNA, 20 bp, synthetic construct
  misc_feature 1..20: note = Description of Artificial Sequence: Synthetic oligonucleotide
  misc_feature 1..20: note = Target: SCN10A; (+) strand; PAM type: NRG; PAM sequence: TAG
  source 1..20: mol_type = other DNA
tttcatgtccccttccctgc

SEQ ID NO: 34489 - DNA, 20 bp, synthetic construct
  misc_feature 1..20: note = Description of Artificial Sequence: Synthetic oligonucleotide
  misc_feature 1..20: note = Target: SCN10A; (+) strand; PAM type: NRG; PAM sequence: AGG
  source 1..20: mol_type = other DNA
ttcatgtccccttccctgct

SEQ ID NO: 34490 - DNA, 20 bp, synthetic construct
  misc_feature 1..20: note = Description of Artificial Sequence: Synthetic oligonucleotide
  misc_feature 1..20: note = Target: SCN10A; (+) strand; PAM type: NRG; PAM sequence: TAG
  source 1..20: mol_type = other DNA
tccccttccctgctaggatg

SEQ ID NO: 34491 - DNA, 20 bp, synthetic construct
  misc_feature 1..20: note = Description of Artificial Sequence: Synthetic oligonucleotide
  misc_feature 1..20: note = Target: SCN10A; (+) strand; PAM type: NRG; PAM sequence: GAG
  source 1..20: mol_type = other DNA
tgctaggatgtagattccat

SEQ ID NO: 34492 - DNA, 20 bp, synthetic construct
  misc_feature 1..20: note = Description of Artificial Sequence: Synthetic oligonucleotide
  misc_feature 1..20: note = Target: SCN10A; (+) strand; PAM type: NRG; PAM sequence: AAG
  source 1..20: mol_type = other DNA
gatgtagattccatgagcgc

SEQ ID NO: 34493 - DNA, 20 bp, synthetic construct
  misc_feature 1..20: note = Description of Artificial Sequence: Synthetic oligonucleotide
  misc_feature 1..20: note = Target: SCN10A; (+) strand; PAM type: NRG; PAM sequence: CAG
  source 1..20: mol_type = other DNA
ccatgagcgcaagcttatat

SEQ ID NO: 34494 - DNA, 20 bp, synthetic construct
  misc_feature 1..20: note = Description of Artificial Sequence: Synthetic oligonucleotide
  misc_feature 1..20: note = Target: SCN10A; (+) strand; PAM type: NRG; PAM sequence: CAG
  source 1..20: mol_type = other DNA
atcagttcaccactgaatcc

SEQ ID NO: 34495 - DNA, 20 bp, synthetic construct
  misc_feature 1..20: note = Description of Artificial Sequence: Synthetic oligonucleotide
  misc_feature 1..20: note = Target: SCN10A; (+) strand; PAM type: NRG; PAM sequence: AAG
  source 1..20: mol_type = other DNA
ccactgaatcccagcacctg

SEQ ID NO: 34496 - DNA, 20 bp, synthetic construct
  misc_feature 1..20: note = Description of Artificial Sequence: Synthetic oligonucleotide
  misc_feature 1..20: note = Target: SCN10A; (+) strand; PAM type: NRG; PAM sequence: CAG
  source 1..20: mol_type = other DNA
aagcaatgccacacacacaa

SEQ ID NO: 34497 - DNA, 20 bp, synthetic construct
  misc_feature 1..20: note = Description of Artificial Sequence: Synthetic oligonucleotide
  misc_feature 1..20: note = Target: SCN10A; (+) strand; PAM type: NRG; PAM sequence: AGG
  source 1..20: mol_type = other DNA
agcaatgccacacacacaac

SEQ ID NO: 34498 - DNA, 20 bp, synthetic construct
  misc_feature 1..20: note = Description of Artificial Sequence: Synthetic oligonucleotide
  misc_feature 1..20: note = Target: SCN10A; (+) strand; PAM type: NRG; PAM sequence: GGG
  source 1..20: mol_type = other DNA
gcaatgccacacacacaaca

SEQ ID NO: 34499 - DNA, 20 bp, synthetic construct
  misc_feature 1..20: note = Description of Artificial Sequence: Synthetic oligonucleotide
  misc_feature 1..20: note = Target: SCN10A; (+) strand; PAM type: NRG; PAM sequence: GGG
  source 1..20: mol_type = other DNA
caatgccacacacacaacag

SEQ ID NO: 34500 - DNA, 20 bp, synthetic construct
  misc_feature 1..20: note = Description of Artificial Sequence: Synthetic oligonucleotide
  misc_feature 1..20: note = Target: SCN10A; (+) strand; PAM type: NRG; PAM sequence: AAG
  source 1..20: mol_type = other DNA
ctcaacaaatgcttgttgat

SEQ ID NO: 34501 - DNA, 20 bp, synthetic construct
  misc_feature 1..20: note = Description of Artificial Sequence: Synthetic oligonucleotide
  misc_feature 1..20: note = Target: SCN10A; (+) strand; PAM type: NRG; PAM sequence: GAG
  source 1..20: mol_type = other DNA
caacaaatgcttgttgataa

SEQ ID NO: 34502 - DNA, 20 bp, synthetic construct
  misc_feature 1..20: note = Description of Artificial Sequence: Synthetic oligonucleotide
  misc_feature 1..20: note = Target: SCN10A; (+) strand; PAM type: NRG; PAM sequence: AAG
  source 1..20: mol_type = other DNA
gttgataagagaataaatga

SEQ ID NO: 34503 - DNA, 20 bp, synthetic construct
  misc_feature 1..20: note = Description of Artificial Sequence: Synthetic oligonucleotide
  misc_feature 1..20: note = Target: SCN10A; (+) strand; PAM type: NRG; PAM sequence: AAG
  source 1..20: mol_type = other DNA
gataagagaataaatgaaag

SEQ ID NO: 34504 - DNA, 20 bp, synthetic construct
  misc_feature 1..20: note = Description of Artificial Sequence: Synthetic oligonucleotide
  misc_feature 1..20: note = Target: SCN10A; (+) strand; PAM type: NRG; PAM sequence: GAG
  source 1..20: mol_type = other DNA
taagagaataaatgaaagaa

SEQ ID NO: 34505 - DNA, 20 bp, synthetic construct
  misc_feature 1..20: note = Description of Artificial Sequence: Synthetic oligonucleotide
  misc_feature 1..20: note = Target: SCN10A; (+) strand; PAM type: NRG; PAM sequence: GAG
  source 1..20: mol_type = other DNA
agagaataaatgaaagaaga

SEQ ID NO: 34506 - DNA, 20 bp, synthetic construct
  misc_feature 1..20: note = Description of Artificial Sequence: Synthetic oligonucleotide
  misc_feature 1..20: note = Target: SCN10A; (+) strand; PAM type: NRG; PAM sequence: AAG
  source 1..20: mol_type = other DNA
gaataaatgaaagaagagag

SEQ ID NO: 34507 - DNA, 20 bp, synthetic construct
  misc_feature 1..20: note = Description of Artificial Sequence: Synthetic oligonucleotide
  misc_feature 1..20: note = Target: SCN10A; (+) strand; PAM type: NRG; PAM sequence: AGG
  source 1..20: mol_type = other DNA
aataaatgaaagaagagaga

SEQ ID NO: 34508 - DNA, 20 bp, synthetic construct
  misc_feature 1..20: note = Description of Artificial Sequence: Synthetic oligonucleotide
  misc_feature 1..20: note = Target: SCN10A; (+) strand; PAM type: NRG; PAM sequence: GAG
  source 1..20: mol_type = other DNA
taaatgaaagaagagagaag

SEQ ID NO: 34509 - DNA, 20 bp, synthetic construct
  misc_feature 1..20: note = Description of Artificial Sequence: Synthetic oligonucleotide
  misc_feature 1..20: note = Target: SCN10A; (+) strand; PAM type: NRG; PAM sequence: AGG
  source 1..20: mol_type = other DNA
aaatgaaagaagagagaagg

SEQ ID NO: 34510 - DNA, 20 bp, synthetic construct
  misc_feature 1..20: note = Description of Artificial Sequence: Synthetic oligonucleotide
  misc_feature 1..20: note = Target: SCN10A; (+) strand; PAM type: NRG; PAM sequence: AAG
  source 1..20: mol_type = other DNA
tgaaagaagagagaaggagg

SEQ ID NO: 34511 - DNA, 20 bp, synthetic construct
  misc_feature 1..20: note = Description of Artificial Sequence: Synthetic oligonucleotide
  misc_feature 1..20: note = Target: SCN10A; (+) strand; PAM type: NRG; PAM sequence: CAG
  source 1..20: mol_type = other DNA
gagagaaggaggaagcttaa

SEQ ID NO: 34512 - DNA, 20 bp, synthetic construct
  misc_feature 1..20: note = Description of Artificial Sequence: Synthetic oligonucleotide
  misc_feature 1..20: note = Target: SCN10A; (+) strand; PAM type: NRG; PAM sequence: GAG
  source 1..20: mol_type = other DNA
gaggaagcttaacagttttc

SEQ ID NO: 34513 - DNA, 20 bp, synthetic construct
  misc_feature 1..20: note = Description of Artificial Sequence: Synthetic oligonucleotide
  misc_feature 1..20: note = Target: SCN10A; (+) strand; PAM type: NRG; PAM sequence: TAG
  source 1..20: mol_type = other DNA
gtttgctgtttgatgactaa

SEQ ID NO: 34514 - DNA, 20 bp, synthetic construct
  misc_feature 1..20: note = Description of Artificial Sequence: Synthetic oligonucleotide
  misc_feature 1..20: note = Target: SCN10A; (+) strand; PAM type: NRG; PAM sequence: AAG
  source 1..20: mol_type = other DNA
aaaacaaacaaacaaaaacc

SEQ ID NO: 34515 - DNA, 20 bp, synthetic construct
  misc_feature 1..20: note = Description of Artificial Sequence: Synthetic oligonucleotide
  misc_feature 1..20: note = Target: SCN10A; (+) strand; PAM type: NRG; PAM sequence: TGG
  source 1..20: mol_type = other DNA
caaaaaccaagaaacctatc

SEQ ID NO: 34516 - DNA, 20 bp, synthetic construct
  misc_feature 1..20: note = Description of Artificial Sequence: Synthetic oligonucleotide
  misc_feature 1..20: note = Target: SCN10A; (+) strand; PAM type: NRG; PAM sequence: AAG
  source 1..20: mol_type = other DNA
accaagaaacctatctggcc

SEQ ID NO: 34517 - DNA, 20 bp, synthetic construct
  misc_feature 1..20: note = Description of Artificial Sequence: Synthetic oligonucleotide
  misc_feature 1..20: note = Target: SCN10A; (+) strand; PAM type: NRG; PAM sequence: AAG
  source 1..20: mol_type = other DNA
agaaacctatctggccaaga

SEQ ID NO: 34518 - DNA, 20 bp, synthetic construct
  misc_feature 1..20: note = Description of Artificial Sequence: Synthetic oligonucleotide
  misc_feature 1..20: note = Target: SCN10A; (+) strand; PAM type: NRG; PAM sequence: TGG
  source 1..20: mol_type = other DNA
tctggccaagaaagaaattg

SEQ ID NO: 34519 - DNA, 20 bp, synthetic construct
  misc_feature 1..20: note = Description of Artificial Sequence: Synthetic oligonucleotide
  misc_feature 1..20: note = Target: SCN10A; (+) strand; PAM type: NRG; PAM sequence: GGG
  source 1..20: mol_type = other DNA
ctggccaagaaagaaattgt

SEQ ID NO: 34520 - DNA, 20 bp, synthetic construct
  misc_feature 1..20: note = Description of Artificial Sequence: Synthetic oligonucleotide
  misc_feature 1..20: note = Target: SCN10A; (+) strand; PAM type: NRG; PAM sequence: TAG
  source 1..20: mol_type = other DNA
caagaaagaaattgtgggaa

SEQ ID NO: 34521 - DNA, 20 bp, synthetic construct
  misc_feature 1..20: note = Description of Artificial Sequence: Synthetic oligonucleotide
  misc_feature 1..20: note = Target: SCN10A; (+) strand; PAM type: NRG; PAM sequence: CAG
  source 1..20: mol_type = other DNA
gaaagaaattgtgggaatag

SEQ ID NO: 34522 - DNA, 20 bp, synthetic construct
  misc_feature 1..20: note = Description of Artificial Sequence: Synthetic oligonucleotide
  misc_feature 1..20: note = Target: SCN10A; (+) strand; PAM type: NRG; PAM sequence: TGG
  source 1..20: mol_type = other DNA
aaattgtgggaatagcagct

SEQ ID NO: 34523 - DNA, 20 bp, synthetic construct
  misc_feature 1..20: note = Description of Artificial Sequence: Synthetic oligonucleotide
  misc_feature 1..20: note = Target: SCN10A; (+) strand; PAM type: NRG; PAM sequence: TAG
  source 1..20: mol_type = other DNA
ttctatgccatgaaaaatgt

SEQ ID NO: 34524 - DNA, 20 bp, synthetic construct
  misc_feature 1..20: note = Description of Artificial Sequence: Synthetic oligonucleotide
  misc_feature 1..20: note = Target: SCN10A; (+) strand; PAM type: NRG; PAM sequence: AAG
  source 1..20: mol_type = other DNA
tatgccatgaaaaatgttag

SEQ ID NO: 34525 - DNA, 20 bp, synthetic construct
  misc_feature 1..20: note = Description of Artificial Sequence: Synthetic oligonucleotide
  misc_feature 1..20: note = Target: SCN10A; (+) strand; PAM type: NRG; PAM sequence: CAG
  source 1..20: mol_type = other DNA
catgaaaaatgttagaagta

SEQ ID NO: 34526 - DNA, 20 bp, synthetic construct
  misc_feature 1..20: note = Description of Artificial Sequence: Synthetic oligonucleotide
  misc_feature 1..20: note = Target: SCN10A; (+) strand; PAM type: NRG; PAM sequence: CAG
  source 1..20: mol_type = other DNA
acagactctattacaatgaa

SEQ ID NO: 34527 - DNA, 20 bp, synthetic construct
  misc_feature 1..20: note = Description of Artificial Sequence: Synthetic oligonucleotide
  misc_feature 1..20: note = Target: SCN10A; (+) strand; PAM type: NRG; PAM sequence: GAG
  source 1..20: mol_type = other DNA
gatattaaataattatcaat

SEQ ID NO: 34528 - DNA, 20 bp, synthetic construct
  misc_feature 1..20: note = Description of Artificial Sequence: Synthetic oligonucleotide
  misc_feature 1..20: note = Target: SCN10A; (+) strand; PAM type: NRG; PAM sequence: TAG
  source 1..20: mol_type = other DNA
ttatcaatgagaaaaaataa

SEQ ID NO: 34529 - DNA, 20 bp, synthetic construct
  misc_feature 1..20: note = Description of Artificial Sequence: Synthetic oligonucleotide
  misc_feature 1..20: note = Target: SCN10A; (+) strand; PAM type: NRG; PAM sequence: AAG
  source 1..20: mol_type = other DNA
tcaatgagaaaaaataatag

SEQ ID NO: 34530 - DNA, 20 bp, synthetic construct
  misc_feature 1..20: note = Description of Artificial Sequence: Synthetic oligonucleotide
  misc_feature 1..20: note = Target: SCN10A; (+) strand; PAM type: NRG; PAM sequence: GAG
  source 1..20: mol_type = other DNA
aatgagaaaaaataatagaa

SEQ ID NO: 34531 - DNA, 20 bp, synthetic construct
  misc_feature 1..20: note = Description of Artificial Sequence: Synthetic oligonucleotide
  misc_feature 1..20: note = Target: SCN10A; (+) strand; PAM type: NRG; PAM sequence: GAG
  source 1..20: mol_type = other DNA
tgagaaaaaataatagaaga

SEQ ID NO: 34532 - DNA, 20 bp, synthetic construct
  misc_feature 1..20: note = Description of Artificial Sequence: Synthetic oligonucleotide
  misc_feature 1..20: note = Target: SCN10A; (+) strand; PAM type: NRG; PAM sequence: GAG
  source 1..20: mol_type = other DNA
agtctgtacacgttgttgtt

SEQ ID NO: 34533 - DNA, 20 bp, synthetic construct
  misc_feature 1..20: note = Description of Artificial Sequence: Synthetic oligonucleotide
  misc_feature 1..20: note = Target: SCN10A; (+) strand; PAM type: NRG; PAM sequence: GAG
  source 1..20: mol_type = other DNA
acacgttgttgttgagaaat

SEQ ID NO: 34534 - DNA, 20 bp, synthetic construct
  misc_feature 1..20: note = Description of Artificial Sequence: Synthetic oligonucleotide
  misc_feature 1..20: note = Target: SCN10A; (+) strand; PAM type: NRG; PAM sequence: AAG
  source 1..20: mol_type = other DNA
aaatgagtacacatttctca

SEQ ID NO: 34535 - DNA, 20 bp, synthetic construct
  misc_feature 1..20: note = Description of Artificial Sequence: Synthetic oligonucleotide
  misc_feature 1..20: note = Target: SCN10A; (+) strand; PAM type: NRG; PAM sequence: CAG
  source 1..20: mol_type = other DNA
catttctcaaagcacaaact

SEQ ID NO: 34536 - DNA, 20 bp, synthetic construct
  misc_feature 1..20: note = Description of Artificial Sequence: Synthetic oligonucleotide
  misc_feature 1..20: note = Target: SCN10A; (+) strand; PAM type: NRG; PAM sequence: AGG
  source 1..20: mol_type = other DNA
atttctcaaagcacaaactc

SEQ ID NO: 34537 - DNA, 20 bp, synthetic construct
  misc_feature 1..20: note = Description of Artificial Sequence: Synthetic oligonucleotide
  misc_feature 1..20: note = Target: SCN10A; (+) strand; PAM type: NRG; PAM sequence: AAG
  source 1..20: mol_type = other DNA
aagcacaaactcaggtatgc

SEQ ID NO: 34538 - DNA, 20 bp, synthetic construct
  misc_feature 1..20: note = Description of Artificial Sequence: Synthetic oligonucleotide
  misc_feature 1..20: note = Target: SCN10A; (+) strand; PAM type: NRG; PAM sequence: TAG
  source 1..20: mol_type = other DNA
ggtatgcaagaaatgtaact

SEQ ID NO: 34539 - DNA, 20 bp, synthetic construct
  misc_feature 1..20: note = Description of Artificial Sequence: Synthetic oligonucleotide
  misc_feature 1..20: note = Target: SCN10A; (+) strand; PAM type: NRG; PAM sequence: AAG
  source 1..20: mol_type = other DNA
ttgaattcaatttatgcttc

SEQ ID NO: 34540 - DNA, 20 bp, synthetic construct
  misc_feature 1..20: note = Description of Artificial Sequence: Synthetic oligonucleotide
  misc_feature 1..20: note = Target: SCN10A; (+) strand; PAM type: NRG; PAM sequence: TGG
  source 1..20: mol_type = other DNA
tatgcttcaagtcctcacca

SEQ ID NO: 34541 - DNA, 20 bp, synthetic construct
  misc_feature 1..20: note = Description of Artificial Sequence: Synthetic oligonucleotide
  misc_feature 1..20: note = Target: SCN10A; (+) strand; PAM type: NRG; PAM sequence: GGG
  source 1..20: mol_type = other DNA
atgcttcaagtcctcaccat

SEQ ID NO: 34542 - DNA, 20 bp, synthetic construct
  misc_feature 1..20: note = Description of Artificial Sequence: Synthetic oligonucleotide
  misc_feature 1..20: note = Target: SCN10A; (+) strand; PAM type: NRG; PAM sequence: AAG
  source 1..20: mol_type = other DNA
catgggaactgtctcttgtt

SEQ ID NO: 34543 - DNA, 20 bp, synthetic construct
  misc_feature 1..20: note = Description of Artificial Sequence: Synthetic oligonucleotide
  misc_feature 1..20: note = Target: SCN10A; (+) strand; PAM type: NRG; PAM sequence: TGG
  source 1..20: mol_type = other DNA
gtctcttgttaagtcaatgt

SEQ ID NO: 34544 - DNA, 20 bp, synthetic construct
  misc_feature 1..20: note = Description of Artificial Sequence: Synthetic oligonucleotide
  misc_feature 1..20: note = Target: SCN10A; (+) strand; PAM type: NRG; PAM sequence: GGG
  source 1..20: mol_type = other DNA
tctcttgttaagtcaatgtt

SEQ ID NO: 34545 - DNA, 20 bp, synthetic construct
  misc_feature 1..20: note = Description of Artificial Sequence: Synthetic oligonucleotide
  misc_feature 1..20: note = Target: SCN10A; (+) strand; PAM type: NRG; PAM sequence: GAG
  source 1..20: mol_type = other DNA
tgggtactatttcaatatct

SEQ ID NO: 34546 - DNA, 20 bp, synthetic construct
  misc_feature 1..20: note = Description of Artificial Sequence: Synthetic oligonucleotide
  misc_feature 1..20: note = Target: SCN10A; (+) strand; PAM type: NRG; PAM sequence: GAG
  source 1..20: mol_type = other DNA
caatatctgagtctgtgtct

SEQ ID NO: 34547 - DNA, 20 bp, synthetic construct
  misc_feature 1..20: note = Description of Artificial Sequence: Synthetic oligonucleotide
  misc_feature 1..20: note = Target: SCN10A; (+) strand; PAM type: NRG; PAM sequence: TAG
  source 1..20: mol_type = other DNA
gagtctgtgtctgagttttg

SEQ ID NO: 34548 - DNA, 20 bp, synthetic construct
  misc_feature 1..20: note = Description of Artificial Sequence: Synthetic oligonucleotide
  misc_feature 1..20: note = Target: SCN10A; (+) strand; PAM type: NRG; PAM sequence: AGG
  source 1..20: mol_type = other DNA
agtctgtgtctgagttttgt

SEQ ID NO: 34549 - DNA, 20 bp, synthetic construct
  misc_feature 1..20: note = Description of Artificial Sequence: Synthetic oligonucleotide
  misc_feature 1..20: note = Target: SCN10A; (+) strand; PAM type: NRG; PAM sequence: GGG
  source 1..20: mol_type = other DNA
gtctgtgtctgagttttgta

SEQ ID NO: 34550 - DNA, 20 bp, synthetic construct
  misc_feature 1..20: note = Description of Artificial Sequence: Synthetic oligonucleotide
  misc_feature 1..20: note = Target: SCN10A; (+) strand; PAM type: NRG; PAM sequence: TGG
  source 1..20: mol_type = other DNA
agttttgtagggctcaaacc

SEQ ID NO: 34551 - DNA, 20 bp, synthetic construct
  misc_feature 1..20: note = Description of Artificial Sequence: Synthetic oligonucleotide
  misc_feature 1..20: note = Target: SCN10A; (+) strand; PAM type: NRG; PAM sequence: GAG
  source 1..20: mol_type = other DNA
ttttgtagggctcaaacctg

SEQ ID NO: 34552 - DNA, 20 bp, synthetic construct
  misc_feature 1..20: note = Description of Artificial Sequence: Synthetic oligonucleotide
  misc_feature 1..20: note = Target: SCN10A; (+) strand; PAM type: NRG; PAM sequence: AGG
  source 1..20: mol_type = other DNA
tttgtagggctcaaacctgg

SEQ ID NO: 34553 - DNA, 20 bp, synthetic construct
  misc_feature 1..20: note = Description of Artificial Sequence: Synthetic oligonucleotide
  misc_feature 1..20: note = Target: SCN10A; (+) strand; PAM type: NRG; PAM sequence: GAG
  source 1..20: mol_type = other DNA
tgtagggctcaaacctggag

SEQ ID NO: 34554 - DNA, 20 bp, synthetic construct
  misc_feature 1..20: note = Description of Artificial Sequence: Synthetic oligonucleotide
  misc_feature 1..20: note = Target: SCN10A; (+) strand; PAM type: NRG; PAM sequence: GAG
  source 1..20: mol_type = other DNA
tagggctcaaacctggagga

SEQ ID NO: 34555 - DNA, 20 bp, synthetic construct
  misc_feature 1..20: note = Description of Artificial Sequence: Synthetic oligonucleotide
  misc_feature 1..20: note = Target: SCN10A; (+) strand; PAM type: NRG; PAM sequence: GAG
  source 1..20: mol_type = other DNA
ctcaaacctggaggagagtt

SEQ ID NO: 34556 - DNA, 20 bp, synthetic construct
  misc_feature 1..20: note = Description of Artificial Sequence: Synthetic oligonucleotide
  misc_feature 1..20: note = Target: SCN10A; (+) strand; PAM type: NRG; PAM sequence: TGG
  source 1..20: mol_type = other DNA
aacctggaggagagttgagc

SEQ ID NO: 34557 - DNA, 20 bp, synthetic construct
  misc_feature 1..20: note = Description of Artificial Sequence: Synthetic oligonucleotide
  misc_feature 1..20: note = Target: SCN10A; (+) strand; PAM type: NRG; PAM sequence: AAG
  source 1..20: mol_type = other DNA
gctggtcctttgtcattgct

SEQ ID NO: 34558 - DNA, 20 bp, synthetic construct
  misc_feature 1..20: note = Description of Artificial Sequence: Synthetic oligonucleotide
  misc_feature 1..20: note = Target: SCN10A; (+) strand; PAM type: NRG; PAM sequence: GAG
  source 1..20: mol_type = other DNA
ttgctaagcgtattttgcct

SEQ ID NO: 34559 - DNA, 20 bp, synthetic construct
  misc_feature 1..20: note = Description of Artificial Sequence: Synthetic oligonucleotide
  misc_feature 1..20: note = Target: SCN10A; (+) strand; PAM type: NRG; PAM sequence: TAG
  source 1..20: mol_type = other DNA
agcgtattttgcctgagttg

SEQ ID NO: 34560 - DNA, 20 bp, synthetic construct
  misc_feature 1..20: note = Description of Artificial Sequence: Synthetic oligonucleotide
  misc_feature 1..20: note = Target: SCN10A; (+) strand; PAM type: NRG; PAM sequence: TGG
  source 1..20: mol_type = other DNA
cctgagttgtagctcccatc

SEQ ID NO: 34561 - DNA, 20 bp, synthetic construct
  misc_feature 1..20: note = Description of Artificial Sequence: Synthetic oligonucleotide
  misc_feature 1..20: note = Target: SCN10A; (+) strand; PAM type: NRG; PAM sequence: TGG
  source 1..20: mol_type = other DNA
tgtagctcccatctggtccc

SEQ ID NO: 34562 - DNA, 20 bp, synthetic construct
  misc_feature 1..20: note = Description of Artificial Sequence: Synthetic oligonucleotide
  misc_feature 1..20: note = Target: SCN10A; (+) strand; PAM type: NRG; PAM sequence: TGG
  source 1..20: mol_type = other DNA
agctcccatctggtccctgg

SEQ ID NO: 34563 - DNA, 20 bp, synthetic construct
  misc_feature 1..20: note = Description of Artificial Sequence: Synthetic oligonucleotide
  misc_feature 1..20: note = Target: SCN10A; (+) strand; PAM type: NRG; PAM sequence: GGG
  source 1..20: mol_type = other DNA
gctcccatctggtccctggt

SEQ ID NO: 34564 - DNA, 20 bp, synthetic construct
  misc_feature 1..20: note = Description of Artificial Sequence: Synthetic oligonucleotide
  misc_feature 1..20: note = Target: SCN10A; (+) strand; PAM type: NRG; PAM sequence: GAG
  source 1..20: mol_type = other DNA
tcccatctggtccctggtgg

SEQ ID NO: 34565 - DNA, 20 bp, synthetic construct
  misc_feature 1..20: note = Description of Artificial Sequence: Synthetic oligonucleotide
  misc_feature 1..20: note = Target: SCN10A; (+) strand; PAM type: NRG; PAM sequence: GAG
  source 1..20: mol_type = other DNA
ccatctggtccctggtggga

SEQ ID NO: 34566 - DNA, 20 bp, synthetic construct
  misc_feature 1..20: note = Description of Artificial Sequence: Synthetic oligonucleotide
  misc_feature 1..20: note = Target: SCN10A; (+) strand; PAM type: NRG; PAM sequence: AAG
  source 1..20: mol_type = other DNA
ccctggtgggagagtccatg

SEQ ID NO: 34567 - DNA, 20 bp, synthetic construct
  misc_feature 1..20: note = Description of Artificial Sequence: Synthetic oligonucleotide
  misc_feature 1..20: note = Target: SCN10A; (+) strand; PAM type: NRG; PAM sequence: TGG
  source 1..20: mol_type = other DNA
ggtgggagagtccatgaaga

SEQ ID NO: 34568 - DNA, 20 bp, synthetic construct
  misc_feature 1..20: note = Description of Artificial Sequence: Synthetic oligonucleotide
  misc_feature 1..20: note = Target: SCN10A; (+) strand; PAM type: NRG; PAM sequence: TAG
  source 1..20: mol_type = other DNA
gaagatggctcttctctctc

SEQ ID NO: 34569 - DNA, 20 bp, synthetic construct
  misc_feature 1..20: note = Description of Artificial Sequence: Synthetic oligonucleotide
  misc_feature 1..20: note = Target: SCN10A; (+) strand; PAM type: NRG; PAM sequence: TGG
  source 1..20: mol_type = other DNA
ctctctctagtttccctcta

SEQ ID NO: 34570 - DNA, 20 bp, synthetic construct
  misc_feature 1..20: note = Description of Artificial Sequence: Synthetic oligonucleotide
  misc_feature 1..20: note = Target: SCN10A; (+) strand; PAM type: NRG; PAM sequence: GGG
  source 1..20: mol_type = other DNA
tctctctagtttccctctat

SEQ ID NO: 34571 - DNA, 20 bp, synthetic construct
  misc_feature 1..20: note = Description of Artificial Sequence: Synthetic oligonucleotide
  misc_feature 1..20: note = Target: SCN10A; (+) strand; PAM type: NRG; PAM sequence: TAG
  source 1..20: mol_type = other DNA
gtctcactcatctttttcca

SEQ ID NO: 34572 - DNA, 20 bp, synthetic construct
  misc_feature 1..20: note = Description of Artificial Sequence: Synthetic oligonucleotide
  misc_feature 1..20: note = Target: SCN10A; (+) strand; PAM type: NRG; PAM sequence: TGG
  source 1..20: mol_type = other DNA
tctttttccatagccttcac

SEQ ID NO: 34573 - DNA, 20 bp, synthetic construct
  misc_feature 1..20: note = Description of Artificial Sequence: Synthetic oligonucleotide
  misc_feature 1..20: note = Target: SCN10A; (+) strand; PAM type: NRG; PAM sequence: GGG
  source 1..20: mol_type = other DNA
ctttttccatagccttcact

SEQ ID NO: 34574 - DNA, 20 bp, synthetic construct
  misc_feature 1..20: note = Description of Artificial Sequence: Synthetic oligonucleotide
  misc_feature 1..20: note = Target: SCN10A; (+) strand; PAM type: NRG; PAM sequence: GGG
  source 1..20: mol_type = other DNA
tttttccatagccttcactg

SEQ ID NO: 34575 - DNA, 20 bp, synthetic construct
  misc_feature 1..20: note = Description of Artificial Sequence: Synthetic oligonucleotide
  misc_feature 1..20: note = Target: SCN10A; (+) strand; PAM type: NRG; PAM sequence: GGG
  source 1..20: mol_type = other DNA
ttttccatagccttcactgg

SEQ ID NO: 34576 - DNA, 20 bp, synthetic construct
  misc_feature 1..20: note = Description of Artificial Sequence: Synthetic oligonucleotide
  misc_feature 1..20: note = Target: SCN10A; (+) strand; PAM type: NRG; PAM sequence: AAG
  source 1..20: mol_type = other DNA
catagccttcactgggggct

SEQ ID NO: 34577 - DNA, 20 bp, synthetic construct
  misc_feature 1..20: note = Description of Artificial Sequence: Synthetic oligonucleotide
  misc_feature 1..20: note = Target: SCN10A; (+) strand; PAM type: NRG; PAM sequence: CAG
  source 1..20: mol_type = other DNA
ctgggggctaagtcatcacc

SEQ ID NO: 34578 - DNA, 20 bp, synthetic construct
  misc_feature 1..20: note = Description of Artificial Sequence: Synthetic oligonucleotide
  misc_feature 1..20: note = Target: SCN10A; (+) strand; PAM type: NRG; PAM sequence: TGG
  source 1..20: mol_type = other DNA
ccagctcctctctgccattc

SEQ ID NO: 34579 - DNA, 20 bp, synthetic construct
  misc_feature 1..20: note = Description of Artificial Sequence: Synthetic oligonucleotide
  misc_feature 1..20: note = Target: SCN10A; (+) strand; PAM type: NRG; PAM sequence: GAG
  source 1..20: mol_type = other DNA
agctcctctctgccattctg

SEQ ID NO: 34580 - DNA, 20 bp, synthetic construct
  misc_feature 1..20: note = Description of Artificial Sequence: Synthetic oligonucleotide
  misc_feature 1..20: note = Target: SCN10A; (+) strand; PAM type: NRG; PAM sequence: CAG
  source 1..20: mol_type = other DNA
tctctgccattctggagcca

SEQ ID NO: 34581 - DNA, 20 bp, synthetic construct
  misc_feature 1..20: note = Description of Artificial Sequence: Synthetic oligonucleotide
  misc_feature 1..20: note = Target: SCN10A; (+) strand; PAM type: NRG; PAM sequence: AGG
  source 1..20: mol_type = other DNA
ctctgccattctggagccac

SEQ ID NO: 34582 - DNA, 20 bp, synthetic construct
  misc_feature 1..20: note = Description of Artificial Sequence: Synthetic oligonucleotide
  misc_feature 1..20: note = Target: SCN10A; (+) strand; PAM type: NRG; PAM sequence: GGG
  source 1..20: mol_type = other DNA
tctgccattctggagccaca

SEQ ID NO: 34583 - DNA, 20 bp, synthetic construct
  misc_feature 1..20: note = Description of Artificial Sequence: Synthetic oligonucleotide
  misc_feature 1..20: note = Target: SCN10A; (+) strand; PAM type: NRG; PAM sequence: GAG
  source 1..20: mol_type = other DNA
ggagccacagggctctctct

SEQ ID NO: 34584 - DNA, 20 bp, synthetic construct
  misc_feature 1..20: note = Description of Artificial Sequence: Synthetic oligonucleotide
  misc_feature 1..20: note = Target: SCN10A; (+) strand; PAM type: NRG; PAM sequence: AGG
  source 1..20: mol_type = other DNA
gagccacagggctctctctg

SEQ ID NO: 34585 - DNA, 20 bp, synthetic construct
  misc_feature 1..20: note = Description of Artificial Sequence: Synthetic oligonucleotide
  misc_feature 1..20: note = Target: SCN10A; (+) strand; PAM type: NRG; PAM sequence: CAG
  source 1..20: mol_type = other DNA
ggctctctctgaggctgctt

SEQ ID NO: 34586 - DNA, 20 bp, synthetic construct
  misc_feature 1..20: note = Description of Artificial Sequence: Synthetic oligonucleotide
  misc_feature 1..20: note = Target: SCN10A; (+) strand; PAM type: NRG; PAM sequence: AGG
  source 1..20: mol_type = other DNA
gctctctctgaggctgcttc

SEQ ID NO: 34587 - DNA, 20 bp, synthetic construct
  misc_feature 1..20: note = Description of Artificial Sequence: Synthetic oligonucleotide
  misc_feature 1..20: note = Target: SCN10A; (+) strand; PAM type: NRG; PAM sequence: AAG
  source 1..20: mol_type = other DNA
cttcaggccttctctaacct

SEQ ID NO: 34588 - DNA, 20 bp, synthetic construct
  misc_feature 1..20: note = Description of Artificial Sequence: Synthetic oligonucleotide
  misc_feature 1..20: note = Target: SCN10A; (+) strand; PAM type: NRG; PAM sequence: AGG
  source 1..20: mol_type = other DNA
ttcaggccttctctaaccta

SEQ ID NO: 34589 - DNA, 20 bp, synthetic construct
  misc_feature 1..20: note = Description of Artificial Sequence: Synthetic oligonucleotide
  misc_feature 1..20: note = Target: SCN10A; (+) strand; PAM type: NRG; PAM sequence: AAG
  source 1..20: mol_type = other DNA
ctctaacctaaggttgacct

SEQ ID NO: 34590 - DNA, 20 bp, synthetic construct
  misc_feature 1..20: note = Description of Artificial Sequence: Synthetic oligonucleotide
  misc_feature 1..20: note = Target: SCN10A; (+) strand; PAM type: NRG; PAM sequence: AAG
  source 1..20: mol_type = other DNA
acctaaggttgacctaagct

SEQ ID NO: 34591 - DNA, 20 bp, synthetic construct
  misc_feature 1..20: note = Description of Artificial Sequence: Synthetic oligonucleotide
  misc_feature 1..20: note = Target: SCN10A; (+) strand; PAM type: NRG; PAM sequence: AGG
  source 1..20: mol_type = other DNA
cctaaggttgacctaagcta

SEQ ID NO: 34592 - DNA, 20 bp, synthetic construct
  misc_feature 1..20: note = Description of Artificial Sequence: Synthetic oligonucleotide
  misc_feature 1..20: note = Target: SCN10A; (+) strand; PAM type: NRG; PAM sequence: CAG
  source 1..20: mol_type = other DNA
aagctaaggttgcctttccc

SEQ ID NO: 34593 - DNA, 20 bp, synthetic construct
  misc_feature 1..20: note = Description of Artificial Sequence: Synthetic oligonucleotide
  misc_feature 1..20: note = Target: SCN10A; (+) strand; PAM type: NRG; PAM sequence: CAG
  source 1..20: mol_type = other DNA
cctttcttactctactctca

SEQ ID NO: 34594 - DNA, 20 bp, synthetic construct
  misc_feature 1..20: note = Description of Artificial Sequence: Synthetic oligonucleotide
  misc_feature 1..20: note = Target: SCN10A; (+) strand; PAM type: NRG; PAM sequence: GAG
  source 1..20: mol_type = other DNA
actctcacagtatcttcctt

SEQ ID NO: 34595 - DNA, 20 bp, synthetic construct
  misc_feature 1..20: note = Description of Artificial Sequence: Synthetic oligonucleotide
  misc_feature 1..20: note = Target: SCN10A; (+) strand; PAM type: NRG; PAM sequence: CGG
  source 1..20: mol_type = other DNA
ctcacagtatcttccttgag

SEQ ID NO: 34596 - DNA, 20 bp, synthetic construct
  misc_feature 1..20: note = Description of Artificial Sequence: Synthetic oligonucleotide
  misc_feature 1..20: note = Target: SCN10A; (+) strand; PAM type: NRG; PAM sequence: AAG
  source 1..20: mol_type = other DNA
acagtatcttccttgagcgg

SEQ ID NO: 34597 - DNA, 20 bp, synthetic construct
  misc_feature 1..20: note = Description of Artificial Sequence: Synthetic oligonucleotide
  misc_feature 1..20: note = Target: SCN10A; (+) strand; PAM type: NRG; PAM sequence: AAG
  source 1..20: mol_type = other DNA
gcggaagtctatcctacccc

SEQ ID NO: 34598 - DNA, 20 bp, synthetic construct
  misc_feature 1..20: note = Description of Artificial Sequence: Synthetic oligonucleotide
  misc_feature 1..20: note = Target: SCN10A; (+) strand; PAM type: NRG; PAM sequence: CAG
  source 1..20: mol_type = other DNA
cttattttcttcctttttat

SEQ ID NO: 34599 - DNA, 20 bp, synthetic construct
  misc_feature 1..20: note = Description of Artificial Sequence: Synthetic oligonucleotide
  misc_feature 1..20: note = Target: SCN10A; (+) strand; PAM type: NRG; PAM sequence: AAG
  source 1..20: mol_type = other DNA
tatcagtttacaccactata

SEQ ID NO: 34600 - DNA, 20 bp, synthetic construct
  misc_feature 1..20: note = Description of Artificial Sequence: Synthetic oligonucleotide
  misc_feature 1..20: note = Target: SCN10A; (+) strand; PAM type: NRG; PAM sequence: TAG
  source 1..20: mol_type = other DNA
cagtttacaccactataaag

SEQ ID NO: 34601 - DNA, 20 bp, synthetic construct
  misc_feature 1..20: note = Description of Artificial Sequence: Synthetic oligonucleotide
  misc_feature 1..20: note = Target: SCN10A; (+) strand; PAM type: NRG; PAM sequence: CAG
  source 1..20: mol_type = other DNA
tataaagtagcatcaccccc

SEQ ID NO: 34602 - DNA, 20 bp, synthetic construct
  misc_feature 1..20: note = Description of Artificial Sequence: Synthetic oligonucleotide
  misc_feature 1..20: note = Target: SCN10A; (+) strand; PAM type: NRG; PAM sequence: TAG
  source 1..20: mol_type = other DNA
ttgttaatgcactgctcttc

SEQ ID NO: 34603 - DNA, 20 bp, synthetic construct
  misc_feature 1..20: note = Description of Artificial Sequence: Synthetic oligonucleotide
  misc_feature 1..20: note = Target: SCN10A; (+) strand; PAM type: NRG; PAM sequence: AGG
  source 1..20: mol_type = other DNA
tgttaatgcactgctcttct

SEQ ID NO: 34604 - DNA, 20 bp, synthetic construct
  misc_feature 1..20: note = Description of Artificial Sequence: Synthetic oligonucleotide
  misc_feature 1..20: note = Target: SCN10A; (+) strand; PAM type: NRG; PAM sequence: TGG
  source 1..20: mol_type = other DNA
tgcactgctcttctaggtaa

SEQ ID NO: 34605 - DNA, 20 bp, synthetic construct
  misc_feature 1..20: note = Description of Artificial Sequence: Synthetic oligonucleotide
  misc_feature 1..20: note = Target: SCN10A; (+) strand; PAM type: NRG; PAM sequence: GAG
  source 1..20: mol_type = other DNA
cactgctcttctaggtaatg

SEQ ID NO: 34606 - DNA, 20 bp, synthetic construct
  misc_feature 1..20: note = Description of Artificial Sequence: Synthetic oligonucleotide
  misc_feature 1..20: note = Target: SCN10A; (+) strand; PAM type: NRG; PAM sequence: CAG
  source 1..20: mol_type = other DNA
tcttctaggtaatggagatc

SEQ ID NO: 34607 - DNA, 20 bp, synthetic construct
  misc_feature 1..20: note = Description of Artificial Sequence: Synthetic oligonucleotide
  misc_feature 1..20: note = Target: SCN10A; (+) strand; PAM type: NRG; PAM sequence: GAG
  source 1..20: mol_type = other DNA
ggtaatggagatccagctgt

SEQ ID NO: 34608 - DNA, 20 bp, synthetic construct
  misc_feature 1..20: note = Description of Artificial Sequence: Synthetic oligonucleotide
  misc_feature 1..20: note = Target: SCN10A; (+) strand; PAM type: NRG; PAM sequence: CAG
  source 1..20: mol_type = other DNA
agatccagctgtgagcaaaa

SEQ ID NO: 34609 - DNA, 20 bp, synthetic construct
  misc_feature 1..20: note = Description of Artificial Sequence: Synthetic oligonucleotide
  misc_feature 1..20: note = Target: SCN10A; (+) strand; PAM type: NRG; PAM sequence: TGG
  source 1..20: mol_type = other DNA
cagatacatctctgcatatc

SEQ ID NO: 34610 - DNA, 20 bp, synthetic construct
  misc_feature 1..20: note = Description of Artificial Sequence: Synthetic oligonucleotide
  misc_feature 1..20: note = Target: SCN10A; (+) strand; PAM type: NRG; PAM sequence: TGG
  source 1..20: mol_type = other DNA
ctgcatatctggtaaattac

SEQ ID NO: 34611 - DNA, 20 bp, synthetic construct
  misc_feature 1..20: note = Description of Artificial Sequence: Synthetic oligonucleotide
  misc_feature 1..20: note = Target: SCN10A; (+) strand; PAM type: NRG; PAM sequence: TAG
  source 1..20: mol_type = other DNA
atatctggtaaattactggc

SEQ ID NO: 34612 - DNA, 20 bp, synthetic construct
  misc_feature 1..20: note = Description of Artificial Sequence: Synthetic oligonucleotide
  misc_feature 1..20: note = Target: SCN10A; (+) strand; PAM type: NRG; PAM sequence: CAG
  source 1..20: mol_type = other DNA
tactggctagttctactcta

SEQ ID NO: 34613 - DNA, 20 bp, synthetic construct
  misc_feature 1..20: note = Description of Artificial Sequence: Synthetic oligonucleotide
  misc_feature 1..20: note = Target: SCN10A; (+) strand; PAM type: NRG; PAM sequence: AAG
  source 1..20: mol_type = other DNA
gtgcatgtgaatctctctct

SEQ ID NO: 34614 - DNA, 20 bp, synthetic construct
  misc_feature 1..20: note = Description of Artificial Sequence: Synthetic oligonucleotide
  misc_feature 1..20: note = Target: SCN10A; (+) strand; PAM type: NRG; PAM sequence: AGG
  source 1..20: mol_type = other DNA
tgcatgtgaatctctctcta

SEQ ID NO: 34615 - DNA, 20 bp, synthetic construct
  misc_feature 1..20: note = Description of Artificial Sequence: Synthetic oligonucleotide
  misc_feature 1..20: note = Target: SCN10A; (+) strand; PAM type: NRG; PAM sequence: TGG
  source 1..20: mol_type = other DNA
tctctaaggcttgccacctc

SEQ ID NO: 34616 - DNA, 20 bp, synthetic construct
  misc_feature 1..20: note = Description of Artificial Sequence: Synthetic oligonucleotide
  misc_feature 1..20: note = Target: SCN10A; (+) strand; PAM type: NRG; PAM sequence: TAG
  source 1..20: mol_type = other DNA
ttgccacctctggctttacc

SEQ ID NO: 34617 - DNA, 20 bp, synthetic construct
  misc_feature 1..20: note = Description of Artificial Sequence: Synthetic oligonucleotide
  misc_feature 1..20: note = Target: SCN10A; (+) strand; PAM type: NRG; PAM sequence: AAG
  source 1..20: mol_type = other DNA
cacctctggctttacctaga

SEQ ID NO: 34618 - DNA, 20 bp, synthetic construct
  misc_feature 1..20: note = Description of Artificial Sequence: Synthetic oligonucleotide
  misc_feature 1..20: note = Target: SCN10A; (+) strand; PAM type: NRG; PAM sequence: TAG
  source 1..20: mol_type = other DNA
ctctggctttacctagaaag

SEQ ID NO: 34619 - DNA, 20 bp, synthetic construct
  misc_feature 1..20: note = Description of Artificial Sequence: Synthetic oligonucleotide
  misc_feature 1..20: note = Target: SCN10A; (+) strand; PAM type: NRG; PAM sequence: AGG
  source 1..20: mol_type = other DNA
tctggctttacctagaaagt

SEQ ID NO: 34620 - DNA, 20 bp, synthetic construct
  misc_feature 1..20: note = Description of Artificial Sequence: Synthetic oligonucleotide
  misc_feature 1..20: note = Target: SCN10A; (+) strand; PAM type: NRG; PAM sequence: GGG
  source 1..20: mol_type = other DNA
ctggctttacctagaaagta

SEQ ID NO: 34621 - DNA, 20 bp, synthetic construct
  misc_feature 1..20: note = Description of Artificial Sequence: Synthetic oligonucleotide
  misc_feature 1..20: note = Target: SCN10A; (+) strand; PAM type: NRG; PAM sequence: TGG
  source 1..20: mol_type = other DNA
ctagaaagtagggcacacat

SEQ ID NO: 34622 - DNA, 20 bp, synthetic construct
  misc_feature 1..20: note = Description of Artificial Sequence: Synthetic oligonucleotide
  misc_feature 1..20: note = Target: SCN10A; (+) strand; PAM type: NRG; PAM sequence: TGG
  source 1..20: mol_type = other DNA
aaatccctcaaacatttttt

SEQ ID NO: 34623 - DNA, 20 bp, synthetic construct
  misc_feature 1..20: note = Description of Artificial Sequence: Synthetic oligonucleotide
  misc_feature 1..20: note = Target: SCN10A; (+) strand; PAM type: NRG; PAM sequence: TAG
  source 1..20: mol_type = other DNA
accacttcttcccctcaaat

SEQ ID NO: 34624 - DNA, 20 bp, synthetic construct
  misc_feature 1..20: note = Description of Artificial Sequence: Synthetic oligonucleotide
  misc_feature 1..20: note = Target: SCN10A; (+) strand; PAM type: NRG; PAM sequence: AGG
  source 1..20: mol_type = other DNA
ccacttcttcccctcaaatt

SEQ ID NO: 34625 - DNA, 20 bp, synthetic construct
  misc_feature 1..20: note = Description of Artificial Sequence: Synthetic oligonucleotide
  misc_feature 1..20: note = Target: SCN10A; (+) strand; PAM type: NRG; PAM sequence: CAG
  source 1..20: mol_type = other DNA
cttcccctcaaattaggatt

SEQ ID NO: 34626 - DNA, 20 bp, synthetic construct
  misc_feature 1..20: note = Description of Artificial Sequence: Synthetic oligonucleotide
  misc_feature 1..20: note = Target: SCN10A; (+) strand; PAM type: NRG; PAM sequence: TAG
  source 1..20: mol_type = other DNA
cctcaaattaggattcagcc

SEQ ID NO: 34627 - DNA, 20 bp, synthetic construct
  misc_feature 1..20: note = Description of Artificial Sequence: Synthetic oligonucleotide
  misc_feature 1..20: note = Target: SCN10A; (+) strand; PAM type: NRG; PAM sequence: AGG
  source 1..20: mol_type = other DNA
ctcaaattaggattcagcct

SEQ ID NO: 34628 - DNA, 20 bp, synthetic construct
  misc_feature 1..20: note = Description of Artificial Sequence: Synthetic oligonucleotide
  misc_feature 1..20: note = Target: SCN10A; (+) strand; PAM type: NRG; PAM sequence: GGG
  source 1..20: mol_type = other DNA
tcaaattaggattcagccta

SEQ ID NO: 34629 - DNA, 20 bp, synthetic construct
  misc_feature 1..20: note = Description of Artificial Sequence: Synthetic oligonucleotide
  misc_feature 1..20: note = Target: SCN10A; (+) strand; PAM type: NRG; PAM sequence: TGG
  source 1..20: mol_type = other DNA
attaggattcagcctagggc

SEQ ID NO: 34630 - DNA, 20 bp, synthetic construct
  misc_feature 1..20: note = Description of Artificial Sequence: Synthetic oligonucleotide
  misc_feature 1..20: note = Target: SCN10A; (+) strand; PAM type: NRG; PAM sequence: GGG
  source 1..20: mol_type = other DNA
ttaggattcagcctagggct

SEQ ID NO: 34631 - DNA, 20 bp, synthetic construct
  misc_feature 1..20: note = Description of Artificial Sequence: Synthetic oligonucleotide
  misc_feature 1..20: note = Target: SCN10A; (+) strand; PAM type: NRG; PAM sequence: GAG
  source 1..20: mol_type = other DNA
aggattcagcctagggctgg

SEQ ID NO: 34632 - DNA, 20 bp, synthetic construct
  misc_feature 1..20: note = Description of Artificial Sequence: Synthetic oligonucleotide
  misc_feature 1..20: note = Target: SCN10A; (+) strand; PAM type: NRG; PAM sequence: AGG
  source 1..20: mol_type = other DNA
ggattcagcctagggctggg

SEQ ID NO: 34633 - DNA, 20 bp, synthetic construct
  misc_feature 1..20: note = Description of Artificial Sequence: Synthetic oligonucleotide
  misc_feature 1..20: note = Target: SCN10A; (+) strand; PAM type: NRG; PAM sequence: CAG
  source 1..20: mol_type = other DNA
agggctgggaggaaaacaca

SEQ ID NO: 34634 - DNA, 20 bp, synthetic construct
  misc_feature 1..20: note = Description of Artificial Sequence: Synthetic oligonucleotide
  misc_feature 1..20: note = Target: SCN10A; (+) strand; PAM type: NRG; PAM sequence: AGG
  source 1..20: mol_type = other DNA
gggctgggaggaaaacacac

SEQ ID NO: 34635 - DNA, 20 bp, synthetic construct
  misc_feature 1..20: note = Description of Artificial Sequence: Synthetic oligonucleotide
  misc_feature 1..20: note = Target: SCN10A; (+) strand; PAM type: NRG; PAM sequence: CAG
  source 1..20: mol_type = other DNA
aaacacacaggactccttct

SEQ ID NO: 34636 - DNA, 20 bp, synthetic construct
  misc_feature 1..20: note = Description of Artificial Sequence: Synthetic oligonucleotide
  misc_feature 1..20: note = Target: SCN10A; (+) strand; PAM type: NRG; PAM sequence: AGG
  source 1..20: mol_type = other DNA
aacacacaggactccttctc

SEQ ID NO: 34637 - DNA, 20 bp, synthetic construct
  misc_feature 1..20: note = Description of Artificial Sequence: Synthetic oligonucleotide
  misc_feature 1..20: note = Target: SCN10A; (+) strand; PAM type: NRG; PAM sequence: GGG
  source 1..20: mol_type = other DNA
acacacaggactccttctca

SEQ ID NO: 34638 - DNA, 20 bp, synthetic construct
  misc_feature 1..20: note = Description of Artificial Sequence: Synthetic oligonucleotide
  misc_feature 1..20: note = Target: SCN10A; (+) strand; PAM type: NRG; PAM sequence: GGG
  source 1..20: mol_type = other DNA
cacacaggactccttctcag

SEQ ID NO: 34639 - DNA, 20 bp, synthetic construct
  misc_feature 1..20: note = Description of Artificial Sequence: Synthetic oligonucleotide
  misc_feature 1..20: note = Target: SCN10A; (+) strand; PAM type: NRG; PAM sequence: CAG
  source 1..20: mol_type = other DNA
actccttctcaggggcacac

SEQ ID NO: 34640 - DNA, 20 bp, synthetic construct
  misc_feature 1..20: note = Description of Artificial Sequence: Synthetic oligonucleotide
  misc_feature 1..20: note = Target: SCN10A; (+) strand; PAM type: NRG; PAM sequence: AAG
  source 1..20: mol_type = other DNA
tcaggggcacaccagcactc

SEQ ID NO: 34641 - DNA, 20 bp, synthetic construct
  misc_feature 1..20: note = Description of Artificial Sequence: Synthetic oligonucleotide
  misc_feature 1..20: note = Target: SCN10A; (+) strand; PAM type: NRG; PAM sequence: CAG
  source 1..20: mol_type = other DNA
aagctcccttacaactcctc

SEQ ID NO: 34642 - DNA, 20 bp, synthetic construct
  misc_feature 1..20: note = Description of Artificial Sequence: Synthetic oligonucleotide
  misc_feature 1..20: note = Target: SCN10A; (+) strand; PAM type: NRG; PAM sequence: TAG
  source 1..20: mol_type = other DNA
cccttacaactcctccagcc

SEQ ID NO: 34643 - DNA, 20 bp, synthetic construct
  misc_feature 1..20: note = Description of Artificial Sequence: Synthetic oligonucleotide
  misc_feature 1..20: note = Target: SCN10A; (+) strand; PAM type: NRG; PAM sequence: AGG
  source 1..20: mol_type = other DNA
ccttacaactcctccagcct

SEQ ID NO: 34644 - DNA, 20 bp, synthetic construct
  misc_feature 1..20: note = Description of Artificial Sequence: Synthetic oligonucleotide
  misc_feature 1..20: note = Target: SCN10A; (+) strand; PAM type: NRG; PAM sequence: CAG
  source 1..20: mol_type = other DNA
acaactcctccagcctaggt

SEQ ID NO: 34645 - DNA, 20 bp, synthetic construct
  misc_feature 1..20: note = Description of Artificial Sequence: Synthetic oligonucleotide
  misc_feature 1..20: note = Target: SCN10A; (+) strand; PAM type: NRG; PAM sequence: TAG
  source 1..20: mol_type = other DNA
ctaggtcagtttaatttgtc

SEQ ID NO: 34646 - DNA, 20 bp, synthetic construct
  misc_feature 1..20: note = Description of Artificial Sequence: Synthetic oligonucleotide
  misc_feature 1..20: note = Target: SCN10A; (+) strand; PAM type: NRG; PAM sequence: AGG
  source 1..20: mol_type = other DNA
taggtcagtttaatttgtct

SEQ ID NO: 34647 - DNA, 20 bp, synthetic construct
  misc_feature 1..20: note = Description of Artificial Sequence: Synthetic oligonucleotide
  misc_feature 1..20: note = Target: SCN10A; (+) strand; PAM type: NRG; PAM sequence: GGG
  source 1..20: mol_type = other DNA
aggtcagtttaatttgtcta

SEQ ID NO: 34648 - DNA, 20 bp, synthetic construct
  misc_feature 1..20: note = Description of Artificial Sequence: Synthetic oligonucleotide
  misc_feature 1..20: note = Target: SCN10A; (+) strand; PAM type: NRG; PAM sequence: GGG
  source 1..20: mol_type = other DNA
ggtcagtttaatttgtctag

SEQ ID NO: 34649 - DNA, 20 bp, synthetic construct
  misc_feature 1..20: note = Description of Artificial Sequence: Synthetic oligonucleotide
  misc_feature 1..20: note = Target: SCN10A; (+) strand; PAM type: NRG; PAM sequence: GAG
  source 1..20: mol_type = other DNA
tcagtttaatttgtctaggg

SEQ ID NO: 34650 - DNA, 20 bp, synthetic construct
  misc_feature 1..20: note = Description of Artificial Sequence: Synthetic oligonucleotide
  misc_feature 1..20: note = Target: SCN10A; (+) strand; PAM type: NRG; PAM sequence: AAG
  source 1..20: mol_type = other DNA
tttaatttgtctaggggagt

SEQ ID NO: 34651 - DNA, 20 bp, synthetic construct
  misc_feature 1..20: note = Description of Artificial Sequence: Synthetic oligonucleotide
  misc_feature 1..20: note = Target: SCN10A; (+) strand; PAM type: NRG; PAM sequence: TGG
  source 1..20: mol_type = other DNA
gtctaggggagtaagataac

SEQ ID NO: 34652 - DNA, 20 bp, synthetic construct
  misc_feature 1..20: note = Description of Artificial Sequence: Synthetic oligonucleotide
  misc_feature 1..20: note = Target: SCN10A; (+) strand; PAM type: NRG; PAM sequence: AAG
  source 1..20: mol_type = other DNA
taagataactggaaatgatg

SEQ ID NO: 34653 - DNA, 20 bp, synthetic construct
  misc_feature 1..20: note = Description of Artificial Sequence: Synthetic oligonucleotide
  misc_feature 1..20: note = Target: SCN10A; (+) strand; PAM type: NRG; PAM sequence: AGG
  source 1..20: mol_type = other DNA
aagataactggaaatgatga

SEQ ID NO: 34654 - DNA, 20 bp, synthetic construct
  misc_feature 1..20: note = Description of Artificial Sequence: Synthetic oligonucleotide
  misc_feature 1..20: note = Target: SCN10A; (+) strand; PAM type: NRG; PAM sequence: AAG
  source 1..20: mol_type = other DNA
ggttgcattctccataccct

SEQ ID NO: 34655 - DNA, 20 bp, synthetic construct
  misc_feature 1..20: note = Description of Artificial Sequence: Synthetic oligonucleotide
  misc_feature 1..20: note = Target: SCN10A; (+) strand; PAM type: NRG; PAM sequence: AGG
  source 1..20: mol_type = other DNA
gttgcattctccatacccta

SEQ ID NO: 34656 - DNA, 20 bp, synthetic construct
  misc_feature 1..20: note = Description of Artificial Sequence: Synthetic oligonucleotide
  misc_feature 1..20: note = Target: SCN10A; (+) strand; PAM type: NRG; PAM sequence: AAG
  source 1..20: mol_type = other DNA
tccataccctaaggcaaaaa

SEQ ID NO: 34657 - DNA, 20 bp, synthetic construct
  misc_feature 1..20: note = Description of Artificial Sequence: Synthetic oligonucleotide
  misc_feature 1..20: note = Target: SCN10A; (+) strand; PAM type: NRG; PAM sequence: AGG
  source 1..20: mol_type = other DNA
ccataccctaaggcaaaaaa

SEQ ID NO: 34658 - DNA, 20 bp, synthetic construct
  misc_feature 1..20: note = Description of Artificial Sequence: Synthetic oligonucleotide
  misc_feature 1..20: note = Target: SCN10A; (+) strand; PAM type: NRG; PAM sequence: TGG
  source 1..20: mol_type = other DNA
accctaaggcaaaaaaaggc

SEQ ID NO: 34659 - DNA, 20 bp, synthetic construct
  misc_feature 1..20: note = Description of Artificial Sequence: Synthetic oligonucleotide
  misc_feature 1..20: note = Target: SCN10A; (+) strand; PAM type: NRG; PAM sequence: TAG
  source 1..20: mol_type = other DNA
aaggcaaaaaaaggctggat

SEQ ID NO: 34660 - DNA, 20 bp, synthetic construct
  misc_feature 1..20: note = Description of Artificial Sequence: Synthetic oligonucleotide
  misc_feature 1..20: note = Target: SCN10A; (+) strand; PAM type: NRG; PAM sequence: CAG
  source 1..20: mol_type = other DNA
aaaaaaaggctggattagaa

SEQ ID NO: 34661 - DNA, 20 bp, synthetic construct
  misc_feature 1..20: note = Description of Artificial Sequence: Synthetic oligonucleotide
  misc_feature 1..20: note = Target: SCN10A; (+) strand; PAM type: NRG; PAM sequence: AAG
  source 1..20: mol_type = other DNA
ttagaacagacctcctgctc

SEQ ID NO: 34662 - DNA, 20 bp, synthetic construct
  misc_feature 1..20: note = Description of Artificial Sequence: Synthetic oligonucleotide
  misc_feature 1..20: note = Target: SCN10A; (+) strand; PAM type: NRG; PAM sequence: AGG
  source 1..20: mol_type = other DNA
tagaacagacctcctgctca

SEQ ID NO: 34663 - DNA, 20 bp, synthetic construct
  misc_feature 1..20: note = Description of Artificial Sequence: Synthetic oligonucleotide
  misc_feature 1..20: note = Target: SCN10A; (+) strand; PAM type: NRG; PAM sequence: TAG
  source 1..20: mol_type = other DNA
acagacctcctgctcaaggt

SEQ ID NO: 34664 - DNA, 20 bp, synthetic construct
  misc_feature 1..20: note = Description of Artificial Sequence: Synthetic oligonucleotide
  misc_feature 1..20: note = Target: SCN10A; (+) strand; PAM type: NRG; PAM sequence: GAG
  source 1..20: mol_type = other DNA
agacctcctgctcaaggtta

SEQ ID NO: 34665 - DNA, 20 bp, synthetic construct
  misc_feature 1..20: note = Description of Artificial Sequence: Synthetic oligonucleotide
  misc_feature 1..20: note = Target: SCN10A; (+) strand; PAM type: NRG; PAM sequence: AGG
  source 1..20: mol_type = other DNA
gacctcctgctcaaggttag

SEQ ID NO: 34666 - DNA, 20 bp, synthetic construct
  misc_feature 1..20: note = Description of Artificial Sequence: Synthetic oligonucleotide
  misc_feature 1..20: note = Target: SCN10A; (+) strand; PAM type: NRG; PAM sequence: GGG
  source 1..20: mol_type = other DNA
acctcctgctcaaggttaga

SEQ ID NO: 34667 - DNA, 20 bp, synthetic construct
  misc_feature 1..20: note = Description of Artificial Sequence: Synthetic oligonucleotide
  misc_feature 1..20: note = Target: SCN10A; (+) strand; PAM type: NRG; PAM sequence: TGG
  source 1..20: mol_type = other DNA
agggatgcaatcacgctcta

SEQ ID NO: 34668 - DNA, 20 bp, synthetic construct
  misc_feature 1..20: note = Description of Artificial Sequence: Synthetic oligonucleotide
  misc_feature 1..20: note = Target: SCN10A; (+) strand; PAM type: NRG; PAM sequence: AAG
  source 1..20: mol_type = other DNA
tgcaatcacgctctatggca

SEQ ID NO: 34669 - DNA, 20 bp, synthetic construct
  misc_feature 1..20: note = Description of Artificial Sequence: Synthetic oligonucleotide
  misc_feature 1..20: note = Target: SCN10A; (+) strand; PAM type: NRG; PAM sequence: TGG
  source 1..20: mol_type = other DNA
acgctctatggcaaagtgtg

SEQ ID NO: 34670 - DNA, 20 bp, synthetic construct
  misc_feature 1..20: note = Description of Artificial Sequence: Synthetic oligonucleotide
  misc_feature 1..20: note = Target: SCN10A; (+) strand; PAM type: NRG; PAM sequence: TAG
  source 1..20: mol_type = other DNA
tctatggcaaagtgtgtgga

SEQ ID NO: 34671 - DNA, 20 bp, synthetic construct
  misc_feature 1..20: note = Description of Artificial Sequence: Synthetic oligonucleotide
  misc_feature 1..20: note = Target: SCN10A; (+) strand; PAM type: NRG; PAM sequence: AGG
  source 1..20: mol_type = other DNA
ctatggcaaagtgtgtggat

SEQ ID NO: 34672 - DNA, 20 bp, synthetic construct
  misc_feature 1..20: note = Description of Artificial Sequence: Synthetic oligonucleotide
  misc_feature 1..20: note = Target: SCN10A; (+) strand; PAM type: NRG; PAM sequence: TGG
  source 1..20: mol_type = other DNA
tggcaaagtgtgtggatagg

SEQ ID NO: 34673 - DNA, 20 bp, synthetic construct
  misc_feature 1..20: note = Description of Artificial Sequence: Synthetic oligonucleotide
  misc_feature 1..20: note = Target: SCN10A; (+) strand; PAM type: NRG; PAM sequence: TGG
  source 1..20: mol_type = other DNA
cactctcttcctctaccctt

SEQ ID NO: 34674 - DNA, 20 bp, synthetic construct
  misc_feature 1..20: note = Description of Artificial Sequence: Synthetic oligonucleotide
  misc_feature 1..20: note = Target: SCN10A; (+) strand; PAM type: NRG; PAM sequence: TGG
  source 1..20: mol_type = other DNA
tcttcctctaccctttggct

SEQ ID NO: 34675 - DNA, 20 bp, synthetic construct
  misc_feature 1..20: note = Description of Artificial Sequence: Synthetic oligonucleotide
  misc_feature 1..20: note = Target: SCN10A; (+) strand; PAM type: NRG; PAM sequence: TAG
  source 1..20: mol_type = other DNA
ctaccctttggcttggaact

SEQ ID NO: 34676 - DNA, 20 bp, synthetic construct
  misc_feature 1..20: note = Description of Artificial Sequence: Synthetic oligonucleotide
  misc_feature 1..20: note = Target: SCN10A; (+) strand; PAM type: NRG; PAM sequence: TGG
  source 1..20: mol_type = other DNA
ttggaacttagatacattgc

SEQ ID NO: 34677 - DNA, 20 bp, synthetic construct
  misc_feature 1..20: note = Description of Artificial Sequence: Synthetic oligonucleotide
  misc_feature 1..20: note = Target: SCN10A; (+) strand; PAM type: NRG; PAM sequence: GGG
  source 1..20: mol_type = other DNA
tggaacttagatacattgct

SEQ ID NO: 34678 - DNA, 20 bp, synthetic construct
  misc_feature 1..20: note = Description of Artificial Sequence: Synthetic oligonucleotide
  misc_feature 1..20: note = Target: SCN10A; (+) strand; PAM type: NRG; PAM sequence: GGG
  source 1..20: mol_type = other DNA
ggaacttagatacattgctg

SEQ ID NO: 34679 - DNA, 20 bp, synthetic construct
  misc_feature 1..20: note = Description of Artificial Sequence: Synthetic oligonucleotide
  misc_feature 1..20: note = Target: SCN10A; (+) strand; PAM type: NRG; PAM sequence: GAG
  source 1..20: mol_type = other DNA
aacttagatacattgctggg

SEQ ID NO: 34680 - DNA, 20 bp, synthetic construct
  misc_feature 1..20: note = Description of Artificial Sequence: Synthetic oligonucleotide
  misc_feature 1..20: note = Target: SCN10A; (+) strand; PAM type: NRG; PAM sequence: GAG
  source 1..20: mol_type = other DNA
gatacattgctggggagact

SEQ ID NO: 34681 - DNA, 20 bp, synthetic construct
  misc_feature 1..20: note = Description of Artificial Sequence: Synthetic oligonucleotide
  misc_feature 1..20: note = Target: SCN10A; (+) strand; PAM type: NRG; PAM sequence: TGG
  source 1..20: mol_type = other DNA
acattgctggggagactgag

SEQ ID NO: 34682 - DNA, 20 bp, synthetic construct
  misc_feature 1..20: note = Description of Artificial Sequence: Synthetic oligonucleotide
  misc_feature 1..20: note = Target: SCN10A; (+) strand; PAM type: NRG; PAM sequence: TGG
  source 1..20: mol_type = other DNA
tgagtggattcccacttgat

SEQ ID NO: 34683 - DNA, 20 bp, synthetic construct
  misc_feature 1..20: note = Description of Artificial Sequence: Synthetic oligonucleotide
  misc_feature 1..20: note = Target: SCN10A; (+) strand; PAM type: NRG; PAM sequence: TAG
  source 1..20: mol_type = other DNA
gtggattcccacttgattgg

SEQ ID NO: 34684 - DNA, 20 bp, synthetic construct
  misc_feature 1..20: note = Description of Artificial Sequence: Synthetic oligonucleotide
  misc_feature 1..20: note = Target: SCN10A; (+) strand; PAM type: NRG; PAM sequence: AAG
  source 1..20: mol_type = other DNA
tggtagaattctaaattaac

SEQ ID NO: 34685 - DNA, 20 bp, synthetic construct
  misc_feature 1..20: note = Description of Artificial Sequence: Synthetic oligonucleotide
  misc_feature 1..20: note = Target: SCN10A; (+) strand; PAM type: NRG; PAM sequence: AGG
  source 1..20: mol_type = other DNA
ggtagaattctaaattaaca

SEQ ID NO: 34686 - DNA, 20 bp, synthetic construct
  misc_feature 1..20: note = Description of Artificial Sequence: Synthetic oligonucleotide
  misc_feature 1..20: note = Target: SCN10A; (+) strand; PAM type: NRG; PAM sequence: TAG
  source 1..20: mol_type = other DNA
attctaaattaacaaggact

SEQ ID NO: 34687 - DNA, 20 bp, synthetic construct
  misc_feature 1..20: note = Description of Artificial Sequence: Synthetic oligonucleotide
  misc_feature 1..20: note = Target: SCN10A; (+) strand; PAM type: NRG; PAM sequence: TGG
  source 1..20: mol_type = other DNA
tagttaaattgactgattaa

SEQ ID NO: 34688 - DNA, 20 bp, synthetic construct
  misc_feature 1..20: note = Description of Artificial Sequence: Synthetic oligonucleotide
  misc_feature 1..20: note = Target: SCN10A; (+) strand; PAM type: NRG; PAM sequence: CAG
  source 1..20: mol_type = other DNA
ttaaattgtctaccaatatt

SEQ ID NO: 34689 - DNA, 20 bp, synthetic construct
  misc_feature 1..20: note = Description of Artificial Sequence: Synthetic oligonucleotide
  misc_feature 1..20: note = Target: SCN10A; (+) strand; PAM type: NRG; PAM sequence: TGG
  source 1..20: mol_type = other DNA
taccaatattcagcataatg

SEQ ID NO: 34690 - DNA, 20 bp, synthetic construct
  misc_feature 1..20: note = Description of Artificial Sequence: Synthetic oligonucleotide
  misc_feature 1..20: note = Target: SCN10A; (+) strand; PAM type: NRG; PAM sequence: GGG
  source 1..20: mol_type = other DNA
accaatattcagcataatgt

SEQ ID NO: 34691 - DNA, 20 bp, synthetic construct
  misc_feature 1..20: note = Description of Artificial Sequence: Synthetic oligonucleotide
  misc_feature 1..20: note = Target: SCN10A; (+) strand; PAM type: NRG; PAM sequence: AAG
  source 1..20: mol_type = other DNA
agcataatgtgggcttgaac

SEQ ID NO: 34692 - DNA, 20 bp, synthetic construct
  misc_feature 1..20: note = Description of Artificial Sequence: Synthetic oligonucleotide
  misc_feature 1..20: note = Target: SCN10A; (+) strand; PAM type: NRG; PAM sequence: AAG
  source 1..20: mol_type = other DNA
aaattaaattacaactgtgt

SEQ ID NO: 34693 - DNA, 20 bp, synthetic construct
  misc_feature 1..20: note = Description of Artificial Sequence: Synthetic oligonucleotide
  misc_feature 1..20: note = Target: SCN10A; (+) strand; PAM type: NRG; PAM sequence: AAG
  source 1..20: mol_type = other DNA
tataattatgaaaccatgaa

SEQ ID NO: 34694 - DNA, 20 bp, synthetic construct
  misc_feature 1..20: note = Description of Artificial Sequence: Synthetic oligonucleotide
  misc_feature 1..20: note = Target: SCN10A; (+) strand; PAM type: NRG; PAM sequence: AGG
  source 1..20: mol_type = other DNA
ataattatgaaaccatgaaa

SEQ ID NO: 34695 - DNA, 20 bp, synthetic construct
  misc_feature 1..20: note = Description of Artificial Sequence: Synthetic oligonucleotide
  misc_feature 1..20: note = Target: SCN10A; (+) strand; PAM type: NRG; PAM sequence: TGG
  source 1..20: mol_type = other DNA
aaaggataattttgccatgt

SEQ ID NO: 34696 - DNA, 20 bp, synthetic construct
  misc_feature 1..20: note = Description of Artificial Sequence: Synthetic oligonucleotide
  misc_feature 1..20: note = Target: SCN10A; (+) strand; PAM type: NRG; PAM sequence: AAG
  source 1..20: mol_type = other DNA
ttttgccatgttggaaaatt

SEQ ID NO: 34697 - DNA, 20 bp, synthetic construct
  misc_feature 1..20: note = Description of Artificial Sequence: Synthetic oligonucleotide
  misc_feature 1..20: note = Target: SCN10A; (+) strand; PAM type: NRG; PAM sequence: AGG
  source 1..20: mol_type = other DNA
tttgccatgttggaaaatta

SEQ ID NO: 34698 - DNA, 20 bp, synthetic construct
  misc_feature 1..20: note = Description of Artificial Sequence: Synthetic oligonucleotide
  misc_feature 1..20: note = Target: SCN10A; (+) strand; PAM type: NRG; PAM sequence: TGG
  source 1..20: mol_type = other DNA
ccatgttggaaaattaagga

SEQ ID NO: 34699 - DNA, 20 bp, synthetic construct
  misc_feature 1..20: note = Description of Artificial Sequence: Synthetic oligonucleotide
  misc_feature 1..20: note = Target: SCN10A; (+) strand; PAM type: NRG; PAM sequence: CGG
  source 1..20: mol_type = other DNA
tggttaaatttcttgtacac

SEQ ID NO: 34700 - DNA, 20 bp, synthetic construct
  misc_feature 1..20: note = Description of Artificial Sequence: Synthetic oligonucleotide
  misc_feature 1..20: note = Target: SCN10A; (+) strand; PAM type: NRG; PAM sequence: GAG
  source 1..20: mol_type = other DNA
gttaaatttcttgtacaccg

SEQ ID NO: 34701 - DNA, 20 bp, synthetic construct
  misc_feature 1..20: note = Description of Artificial Sequence: Synthetic oligonucleotide
  misc_feature 1..20: note = Target: SCN10A; (+) strand; PAM type: NRG; PAM sequence: GAG
  source 1..20: mol_type = other DNA
taaatttcttgtacaccgga

SEQ ID NO: 34702 - DNA, 20 bp, synthetic construct
  misc_feature 1..20: note = Description of Artificial Sequence: Synthetic oligonucleotide
  misc_feature 1..20: note = Target: SCN10A; (+) strand; PAM type: NRG; PAM sequence: TGG
  source 1..20: mol_type = other DNA
tttcttgtacaccggagagc

SEQ ID NO: 34703 - DNA, 20 bp, synthetic construct
  misc_feature 1..20: note = Description of Artificial Sequence: Synthetic oligonucleotide
  misc_feature 1..20: note = Target: SCN10A; (+) strand; PAM type: NRG; PAM sequence: CAG
  source 1..20: mol_type = other DNA
tgaaattctctgatgcctgc

SEQ ID NO: 34704 - DNA, 20 bp, synthetic construct
  misc_feature 1..20: note = Description of Artificial Sequence: Synthetic oligonucleotide
  misc_feature 1..20: note = Target: SCN10A; (+) strand; PAM type: NRG; PAM sequence: TAG
  source 1..20: mol_type = other DNA
ccagatcacttttaaaaatc

SEQ ID NO: 34705 - DNA, 20 bp, synthetic construct
  misc_feature 1..20: note = Description of Artificial Sequence: Synthetic oligonucleotide
  misc_feature 1..20: note = Target: SCN10A; (+) strand; PAM type: NRG; PAM sequence: AAG
  source 1..20: mol_type = other DNA
ctagttttgtgatgcatgca

SEQ ID NO: 34706 - DNA, 20 bp, synthetic construct
  misc_feature 1..20: note = Description of Artificial Sequence: Synthetic oligonucleotide
  misc_feature 1..20: note = Target: SCN10A; (+) strand; PAM type: NRG; PAM sequence: CAG
  source 1..20: mol_type = other DNA
gttttgtgatgcatgcaaag

SEQ ID NO: 34707 - DNA, 20 bp, synthetic construct
  misc_feature 1..20: note = Description of Artificial Sequence: Synthetic oligonucleotide
  misc_feature 1..20: note = Target: SCN10A; (+) strand; PAM type: NRG; PAM sequence: AAG
  source 1..20: mol_type = other DNA
aagcagatgctaatttgaac

SEQ ID NO: 34708 - DNA, 20 bp, synthetic construct
  misc_feature 1..20: note = Description of Artificial Sequence: Synthetic oligonucleotide
  misc_feature 1..20: note = Target: SCN10A; (+) strand; PAM type: NRG; PAM sequence: GAG
  source 1..20: mol_type = other DNA
gcagatgctaatttgaacaa

SEQ ID NO: 34709 - DNA, 20 bp, synthetic construct
  misc_feature 1..20: note = Description of Artificial Sequence: Synthetic oligonucleotide
  misc_feature 1..20: note = Target: SCN10A; (+) strand; PAM type: NRG; PAM sequence: GAG
  source 1..20: mol_type = other DNA
tgctaatttgaacaagagat

SEQ ID NO: 34710 - DNA, 20 bp, synthetic construct
  misc_feature 1..20: note = Description of Artificial Sequence: Synthetic oligonucleotide
  misc_feature 1..20: note = Target: SCN10A; (+) strand; PAM type: NRG; PAM sequence: TAG
  source 1..20: mol_type = other DNA
aatttgaacaagagatgagc

SEQ ID NO: 34711 - DNA, 20 bp, synthetic construct
  misc_feature 1..20: note = Description of Artificial Sequence: Synthetic oligonucleotide
  misc_feature 1..20: note = Target: SCN10A; (+) strand; PAM type: NRG; PAM sequence: AGG
  source 1..20: mol_type = other DNA
atttgaacaagagatgagct

SEQ ID NO: 34712 - DNA, 20 bp, synthetic construct
  misc_feature 1..20: note = Description of Artificial Sequence: Synthetic oligonucleotide
  misc_feature 1..20: note = Target: SCN10A; (+) strand; PAM type: NRG; PAM sequence: AAG
  source 1..20: mol_type = other DNA
ctaaaaaaccacattgataa

SEQ ID NO: 34713 - DNA, 20 bp, synthetic construct
  misc_feature 1..20: note = Description of Artificial Sequence: Synthetic oligonucleotide
  misc_feature 1..20: note = Target: SCN10A; (+) strand; PAM type: NRG; PAM sequence: TGG
  source 1..20: mol_type = other DNA
aaaaccacattgataaaaga

SEQ ID NO: 34714 - DNA, 20 bp, synthetic construct
  misc_feature 1..20: note = Description of Artificial Sequence: Synthetic oligonucleotide
  misc_feature 1..20: note = Target: SCN10A; (+) strand; PAM type: NRG; PAM sequence: TGG
  source 1..20: mol_type = other DNA
accacattgataaaagatgg

SEQ ID NO: 34715 - DNA, 20 bp, synthetic construct
  misc_feature 1..20: note = Description of Artificial Sequence: Synthetic oligonucleotide
  misc_feature 1..20: note = Target: SCN10A; (+) strand; PAM type: NRG; PAM sequence: GGG
  source 1..20: mol_type = other DNA
ccacattgataaaagatggt

SEQ ID NO: 34716 - DNA, 20 bp, synthetic construct
  misc_feature 1..20: note = Description of Artificial Sequence: Synthetic oligonucleotide
  misc_feature 1..20: note = Target: SCN10A; (+) strand; PAM type: NRG; PAM sequence: GGG
  source 1..20: mol_type = other DNA
cacattgataaaagatggtg

SEQ ID NO: 34717 - DNA, 20 bp, synthetic construct
  misc_feature 1..20: note = Description of Artificial Sequence: Synthetic oligonucleotide
  misc_feature 1..20: note = Target: SCN10A; (+) strand; PAM type: NRG; PAM sequence: AAG
  source 1..20: mol_type = other DNA
gataaaagatggtggggcct

SEQ ID NO: 34718 - DNA, 20 bp, synthetic construct
  misc_feature 1..20: note = Description of Artificial Sequence: Synthetic oligonucleotide
  misc_feature 1..20: note = Target: SCN10A; (+) strand; PAM type: NRG; PAM sequence: AAG
  source 1..20: mol_type = other DNA
gatggtggggcctaagacat

SEQ ID NO: 34719 - DNA, 20 bp, synthetic construct
  misc_feature 1..20: note = Description of Artificial Sequence: Synthetic oligonucleotide
  misc_feature 1..20: note = Target: SCN10A; (+) strand; PAM type: NRG; PAM sequence: GAG
  source 1..20: mol_type = other DNA
ggggcctaagacataagaat

SEQ ID NO: 34720 - DNA, 20 bp, synthetic construct
  misc_feature 1..20: note = Description of Artificial Sequence: Synthetic oligonucleotide
  misc_feature 1..20: note = Target: SCN10A; (+) strand; PAM type: NRG; PAM sequence: AGG
  source 1..20: mol_type = other DNA
gggcctaagacataagaatg

SEQ ID NO: 34721 - DNA, 20 bp, synthetic construct
  misc_feature 1..20: note = Description of Artificial Sequence: Synthetic oligonucleotide
  misc_feature 1..20: note = Target: SCN10A; (+) strand; PAM type: NRG; PAM sequence: GAG
  source 1..20: mol_type = other DNA
gcctaagacataagaatgag

SEQ ID NO: 34722 - DNA, 20 bp, synthetic construct
  misc_feature 1..20: note = Description of Artificial Sequence: Synthetic oligonucleotide
  misc_feature 1..20: note = Target: SCN10A; (+) strand; PAM type: NRG; PAM sequence: TAG
  source 1..20: mol_type = other DNA
gacataagaatgaggagtat

SEQ ID NO: 34723 - DNA, 20 bp, synthetic construct
  misc_feature 1..20: note = Description of Artificial Sequence: Synthetic oligonucleotide
  misc_feature 1..20: note = Target: SCN10A; (+) strand; PAM type: NRG; PAM sequence: AGG
  source 1..20: mol_type = other DNA
acataagaatgaggagtatt

SEQ ID NO: 34724 - DNA, 20 bp, synthetic construct
  misc_feature 1..20: note = Description of Artificial Sequence: Synthetic oligonucleotide
  misc_feature 1..20: note = Target: SCN10A; (+) strand; PAM type: NRG; PAM sequence: CAG
  source 1..20: mol_type = other DNA
atgaggagtattaggaattc

SEQ ID NO: 34725 - DNA, 20 bp, synthetic construct
  misc_feature 1..20: note = Description of Artificial Sequence: Synthetic oligonucleotide
  misc_feature 1..20: note = Target: SCN10A; (+) strand; PAM type: NRG; PAM sequence: CAG
  source 1..20: mol_type = other DNA
gtattaggaattccagtaca

SEQ ID NO: 34726 - DNA, 20 bp, synthetic construct
  misc_feature 1..20: note = Description of Artificial Sequence: Synthetic oligonucleotide
  misc_feature 1..20: note = Target: SCN10A; (+) strand; PAM type: NRG; PAM sequence: GAG
  source 1..20: mol_type = other DNA
attaggaattccagtacaca

SEQ ID NO: 34727 - DNA, 20 bp, synthetic construct
  misc_feature 1..20: note = Description of Artificial Sequence: Synthetic oligonucleotide
  misc_feature 1..20: note = Target: SCN10A; (+) strand; PAM type: NRG; PAM sequence: TGG
  source 1..20: mol_type = other DNA
ggaattccagtacacagaga

SEQ ID NO: 34728 - DNA, 20 bp, synthetic construct
  misc_feature 1..20: note = Description of Artificial Sequence: Synthetic oligonucleotide
  misc_feature 1..20: note = Target: SCN10A; (+) strand; PAM type: NRG; PAM sequence: GAG
  source 1..20: mol_type = other DNA
agagatggacgctttgacac

SEQ ID NO: 34729 - DNA, 20 bp, synthetic construct
  misc_feature 1..20: note = Description of Artificial Sequence: Synthetic oligonucleotide
  misc_feature 1..20: note = Target: SCN10A; (+) strand; PAM type: NRG; PAM sequence: TAG
  source 1..20: mol_type = other DNA
atggacgctttgacacgagt

SEQ ID NO: 34730 - DNA, 20 bp, synthetic construct
  misc_feature 1..20: note = Description of Artificial Sequence: Synthetic oligonucleotide
  misc_feature 1..20: note = Target: SCN10A; (+) strand; PAM type: NRG; PAM sequence: GAG
  source 1..20: mol_type = other DNA
ggacgctttgacacgagtta

SEQ ID NO: 34731 - DNA, 20 bp, synthetic construct
  misc_feature 1..20: note = Description of Artificial Sequence: Synthetic oligonucleotide
  misc_feature 1..20: note = Target: SCN10A; (+) strand; PAM type: NRG; PAM sequence: TGG
  source 1..20: mol_type = other DNA
cattgcttctgctgctcaca

SEQ ID NO: 34732 - DNA, 20 bp, synthetic construct
  misc_feature 1..20: note = Description of Artificial Sequence: Synthetic oligonucleotide
  misc_feature 1..20: note = Target: SCN10A; (+) strand; PAM type: NRG; PAM sequence: GGG
  source 1..20: mol_type = other DNA
attgcttctgctgctcacat

SEQ ID NO: 34733 - DNA, 20 bp, synthetic construct
  misc_feature 1..20: note = Description of Artificial Sequence: Synthetic oligonucleotide
  misc_feature 1..20: note = Target: SCN10A; (+) strand; PAM type: NRG; PAM sequence: CAG
  source 1..20: mol_type = other DNA
catgggaattcatcatgaca

SEQ ID NO: 34734 - DNA, 20 bp, synthetic construct
  misc_feature 1..20: note = Description of Artificial Sequence: Synthetic oligonucleotide
  misc_feature 1..20: note = Target: SCN10A; (+) strand; PAM type: NRG; PAM sequence: TGG
  source 1..20: mol_type = other DNA
gggaattcatcatgacacag

SEQ ID NO: 34735 - DNA, 20 bp, synthetic construct
  misc_feature 1..20: note = Description of Artificial Sequence: Synthetic oligonucleotide
  misc_feature 1..20: note = Target: SCN10A; (+) strand; PAM type: NRG; PAM sequence: CAG
  source 1..20: mol_type = other DNA
gacacagtggatgaacaatg

SEQ ID NO: 34736 - DNA, 20 bp, synthetic construct
  misc_feature 1..20: note = Description of Artificial Sequence: Synthetic oligonucleotide
  misc_feature 1..20: note = Target: SCN10A; (+) strand; PAM type: NRG; PAM sequence: GAG
  source 1..20: mol_type = other DNA
cagtggatgaacaatgcagt

SEQ ID NO: 34737 - DNA, 20 bp, synthetic construct
  misc_feature 1..20: note = Description of Artificial Sequence: Synthetic oligonucleotide
  misc_feature 1..20: note = Target: SCN10A; (+) strand; PAM type: NRG; PAM sequence: CAG
  source 1..20: mol_type = other DNA
tggatgaacaatgcagtgag

SEQ ID NO: 34738 - DNA, 20 bp, synthetic construct
  misc_feature 1..20: note = Description of Artificial Sequence: Synthetic oligonucleotide
  misc_feature 1..20: note = Target: SCN10A; (+) strand; PAM type: NRG; PAM sequence: AAG
  source 1..20: mol_type = other DNA
agtgagcagcacttaccctc

SEQ ID NO: 34739 - DNA, 20 bp, synthetic construct
  misc_feature 1..20: note = Description of Artificial Sequence: Synthetic oligonucleotide
  misc_feature 1..20: note = Target: SCN10A; (+) strand; PAM type: NRG; PAM sequence: AGG
  source 1..20: mol_type = other DNA
gtgagcagcacttaccctca

SEQ ID NO: 34740 - DNA, 20 bp, synthetic construct
  misc_feature 1..20: note = Description of Artificial Sequence: Synthetic oligonucleotide
  misc_feature 1..20: note = Target: SCN10A; (+) strand; PAM type: NRG; PAM sequence: CGG
  source 1..20: mol_type = other DNA
gcagcacttaccctcaagga

SEQ ID NO: 34741 - DNA, 20 bp, synthetic construct
  misc_feature 1..20: note = Description of Artificial Sequence: Synthetic oligonucleotide
  misc_feature 1..20: note = Target: SCN10A; (+) strand; PAM type: NRG; PAM sequence: GAG
  source 1..20: mol_type = other DNA
agcacttaccctcaaggacg

SEQ ID NO: 34742 - DNA, 20 bp, synthetic construct
  misc_feature 1..20: note = Description of Artificial Sequence: Synthetic oligonucleotide
  misc_feature 1..20: note = Target: SCN10A; (+) strand; PAM type: NRG; PAM sequence: AGG
  source 1..20: mol_type = other DNA
gcacttaccctcaaggacgg

SEQ ID NO: 34743 - DNA, 20 bp, synthetic construct
  misc_feature 1..20: note = Description of Artificial Sequence: Synthetic oligonucleotide
  misc_feature 1..20: note = Target: SCN10A; (+) strand; PAM type: NRG; PAM sequence: TGG
  source 1..20: mol_type = other DNA
tgacaacactcattgccctt

SEQ ID NO: 34744 - DNA, 20 bp, synthetic construct
  misc_feature 1..20: note = Description of Artificial Sequence: Synthetic oligonucleotide
  misc_feature 1..20: note = Target: SCN10A; (+) strand; PAM type: NRG; PAM sequence: GGG
  source 1..20: mol_type = other DNA
gacaacactcattgcccttt

SEQ ID NO: 34745 - DNA, 20 bp, synthetic construct
  misc_feature 1..20: note = Description of Artificial Sequence: Synthetic oligonucleotide
  misc_feature 1..20: note = Target: SCN10A; (+) strand; PAM type: NRG; PAM sequence: CGG
  source 1..20: mol_type = other DNA
cactcattgccctttgggcc

SEQ ID NO: 34746 - DNA, 20 bp, synthetic construct
  misc_feature 1..20: note = Description of Artificial Sequence: Synthetic oligonucleotide
  misc_feature 1..20: note = Target: SCN10A; (+) strand; PAM type: NRG; PAM sequence: AAG
  source 1..20: mol_type = other DNA
cattgccctttgggcccgga

SEQ ID NO: 34747 - DNA, 20 bp, synthetic construct
  misc_feature 1..20: note = Description of Artificial Sequence: Synthetic oligonucleotide
  misc_feature 1..20: note = Target: SCN10A; (+) strand; PAM type: NRG; PAM sequence: AGG
  source 1..20: mol_type = other DNA
attgccctttgggcccggaa

SEQ ID NO: 34748 - DNA, 20 bp, synthetic construct
  misc_feature 1..20: note = Description of Artificial Sequence: Synthetic oligonucleotide
  misc_feature 1..20: note = Target: SCN10A; (+) strand; PAM type: NRG; PAM sequence: AAG
  source 1..20: mol_type = other DNA
gggcccggaaaggttcatct

SEQ ID NO: 34749 - DNA, 20 bp, synthetic construct
  misc_feature 1..20: note = Description of Artificial Sequence: Synthetic oligonucleotide
  misc_feature 1..20: note = Target: SCN10A; (+) strand; PAM type: NRG; PAM sequence: AAG
  source 1..20: mol_type = other DNA
catctaagtattctgctgac

SEQ ID NO: 34750 - DNA, 20 bp, synthetic construct
  misc_feature 1..20: note = Description of Artificial Sequence: Synthetic oligonucleotide
  misc_feature 1..20: note = Target: SCN10A; (+) strand; PAM type: NRG; PAM sequence: AAG
  source 1..20: mol_type = other DNA
taagtattctgctgacaaga

SEQ ID NO: 34751 - DNA, 20 bp, synthetic construct
  misc_feature 1..20: note = Description of Artificial Sequence: Synthetic oligonucleotide
  misc_feature 1..20: note = Target: SCN10A; (+) strand; PAM type: NRG; PAM sequence: GAG
  source 1..20: mol_type = other DNA
tcctgcatcgaatgcctgtt

SEQ ID NO: 34752 - DNA, 20 bp, synthetic construct
  misc_feature 1..20: note = Description of Artificial Sequence: Synthetic oligonucleotide
  misc_feature 1..20: note = Target: SCN10A; (+) strand; PAM type: NRG; PAM sequence: CAG
  source 1..20: mol_type = other DNA
aatgcctgttgagacacaaa

SEQ ID NO: 34753 - DNA, 20 bp, synthetic construct
  misc_feature 1..20: note = Description of Artificial Sequence: Synthetic oligonucleotide
  misc_feature 1..20: note = Target: SCN10A; (+) strand; PAM type: NRG; PAM sequence: GAG
  source 1..20: mol_type = other DNA
tgcctgttgagacacaaaca

SEQ ID NO: 34754 - DNA, 20 bp, synthetic construct
  misc_feature 1..20: note = Description of Artificial Sequence: Synthetic oligonucleotide
  misc_feature 1..20: note = Target: SCN10A; (+) strand; PAM type: NRG; PAM sequence: CAG
  source 1..20: mol_type = other DNA
tgttgagacacaaacagagt

SEQ ID NO: 34755 - DNA, 20 bp, synthetic construct
  misc_feature 1..20: note = Description of Artificial Sequence: Synthetic oligonucleotide
  misc_feature 1..20: note = Target: SCN10A; (+) strand; PAM type: NRG; PAM sequence: AGG
  source 1..20: mol_type = other DNA
gttgagacacaaacagagtc

SEQ ID NO: 34756 - DNA, 20 bp, synthetic construct
  misc_feature 1..20: note = Description of Artificial Sequence: Synthetic oligonucleotide
  misc_feature 1..20: note = Target: SCN10A; (+) strand; PAM type: NRG; PAM sequence: TGG
  source 1..20: mol_type = other DNA
cctttaacctgacatcttca

SEQ ID NO: 34757 - DNA, 20 bp, synthetic construct
  misc_feature 1..20: note = Description of Artificial Sequence: Synthetic oligonucleotide
  misc_feature 1..20: note = Target: SCN10A; (+) strand; PAM type: NRG; PAM sequence: AAG
  source 1..20: mol_type = other DNA
aacctgacatcttcatggca

SEQ ID NO: 34758 - DNA, 20 bp, synthetic construct
  misc_feature 1..20: note = Description of Artificial Sequence: Synthetic oligonucleotide
  misc_feature 1..20: note = Target: SCN10A; (+) strand; PAM type: NRG; PAM sequence: TGG
  source 1..20: mol_type = other DNA
tgacatcttcatggcaaagt

SEQ ID NO: 34759 - DNA, 20 bp, synthetic construct
  misc_feature 1..20: note = Description of Artificial Sequence: Synthetic oligonucleotide
  misc_feature 1..20: note = Target: SCN10A; (+) strand; PAM type: NRG; PAM sequence: CAG
  source 1..20: mol_type = other DNA
catggcaaagttggatcatt

SEQ ID NO: 34760 - DNA, 20 bp, synthetic construct
  misc_feature 1..20: note = Description of Artificial Sequence: Synthetic oligonucleotide
  misc_feature 1..20: note = Target: SCN10A; (+) strand; PAM type: NRG; PAM sequence: TGG
  source 1..20: mol_type = other DNA
tggatcattcagcctcttat

SEQ ID NO: 34761 - DNA, 20 bp, synthetic construct
  misc_feature 1..20: note = Description of Artificial Sequence: Synthetic oligonucleotide
  misc_feature 1..20: note = Target: SCN10A; (+) strand; PAM type: NRG; PAM sequence: TAG
  source 1..20: mol_type = other DNA
ttattggccaatctcatata

SEQ ID NO: 34762 - DNA, 20 bp, synthetic construct
  misc_feature 1..20: note = Description of Artificial Sequence: Synthetic oligonucleotide
  misc_feature 1..20: note = Target: SCN10A; (+) strand; PAM type: NRG; PAM sequence: CAG
  source 1..20: mol_type = other DNA
atatagtcatatgtcactta

SEQ ID NO: 34763 - DNA, 20 bp, synthetic construct
  misc_feature 1..20: note = Description of Artificial Sequence: Synthetic oligonucleotide
  misc_feature 1..20: note = Target: SCN10A; (+) strand; PAM type: NRG; PAM sequence: TAG
  source 1..20: mol_type = other DNA
agtcatatgtcacttacaga

SEQ ID NO: 34764 - DNA, 20 bp, synthetic construct
  misc_feature 1..20: note = Description of Artificial Sequence: Synthetic oligonucleotide
  misc_feature 1..20: note = Target: SCN10A; (+) strand; PAM type: NRG; PAM sequence: GAG
  source 1..20: mol_type = other DNA
tcatatgtcacttacagata

SEQ ID NO: 34765 - DNA, 20 bp, synthetic construct
  misc_feature 1..20: note = Description of Artificial Sequence: Synthetic oligonucleotide
  misc_feature 1..20: note = Target: SCN10A; (+) strand; PAM type: NRG; PAM sequence: TAG
  source 1..20: mol_type = other DNA
tgttctgacaaatacatcat

SEQ ID NO: 34766 - DNA, 20 bp, synthetic construct
  misc_feature 1..20: note = Description of Artificial Sequence: Synthetic oligonucleotide
  misc_feature 1..20: note = Target: SCN10A; (+) strand; PAM type: NRG; PAM sequence: AGG
  source 1..20: mol_type = other DNA
gttctgacaaatacatcatt

SEQ ID NO: 34767 - DNA, 20 bp, synthetic construct
  misc_feature 1..20: note = Description of Artificial Sequence: Synthetic oligonucleotide
  misc_feature 1..20: note = Target: SCN10A; (+) strand; PAM type: NRG; PAM sequence: TAG
  source 1..20: mol_type = other DNA
atttacacaaacaaatgcta

SEQ ID NO: 34768 - DNA, 20 bp, synthetic construct
  misc_feature 1..20: note = Description of Artificial Sequence: Synthetic oligonucleotide
  misc_feature 1..20: note = Target: SCN10A; (+) strand; PAM type: NRG; PAM sequence: TAG
  source 1..20: mol_type = other DNA
gctatagccttctatacatc

SEQ ID NO: 34769 - DNA, 20 bp, synthetic construct
  misc_feature 1..20: note = Description of Artificial Sequence: Synthetic oligonucleotide
  misc_feature 1..20: note = Target: SCN10A; (+) strand; PAM type: NRG; PAM sequence: AGG
  source 1..20: mol_type = other DNA
ctatagccttctatacatct

SEQ ID NO: 34770 - DNA, 20 bp, synthetic construct
  misc_feature 1..20: note = Description of Artificial Sequence: Synthetic oligonucleotide
  misc_feature 1..20: note = Target: SCN10A; (+) strand; PAM type: NRG; PAM sequence: TAG
  source 1..20: mol_type = other DNA
ttctatacatctaggctaaa

SEQ ID NO: 34771 - DNA, 20 bp, synthetic construct
  misc_feature 1..20: note = Description of Artificial Sequence: Synthetic oligonucleotide
  misc_feature 1..20: note = Target: SCN10A; (+) strand; PAM type: NRG; PAM sequence: TGG
  source 1..20: mol_type = other DNA
tacatctaggctaaatagtg

SEQ ID NO: 34772 - DNA, 20 bp, synthetic construct
  misc_feature 1..20: note = Description of Artificial Sequence: Synthetic oligonucleotide
  misc_feature 1..20: note = Target: SCN10A; (+) strand; PAM type: NRG; PAM sequence: TAG
  source 1..20: mol_type = other DNA
atagtgtggcctattgctcc

SEQ ID NO: 34773 - DNA, 20 bp, synthetic construct
  misc_feature 1..20: note = Description of Artificial Sequence: Synthetic oligonucleotide
  misc_feature 1..20: note = Target: SCN10A; (+) strand; PAM type: NRG; PAM sequence: AGG
  source 1..20: mol_type = other DNA
tagtgtggcctattgctcct

SEQ ID NO: 34774 - DNA, 20 bp, synthetic construct
  misc_feature 1..20: note = Description of Artificial Sequence: Synthetic oligonucleotide
  misc_feature 1..20: note = Target: SCN10A; (+) strand; PAM type: NRG; PAM sequence: CAG
  source 1..20: mol_type = other DNA
tcctaggctacaaatctgta

SEQ ID NO: 34775 - DNA, 20 bp, synthetic construct
  misc_feature 1..20: note = Description of Artificial Sequence: Synthetic oligonucleotide
  misc_feature 1..20: note = Target: SCN10A; (+) strand; PAM type: NRG; PAM sequence: AAG
  source 1..20: mol_type = other DNA
atgttattgctgaatactgt

SEQ ID NO: 34776 - DNA, 20 bp, synthetic construct
  misc_feature 1..20: note = Description of Artificial Sequence: Synthetic oligonucleotide
  misc_feature 1..20: note = Target: SCN10A; (+) strand; PAM type: NRG; PAM sequence: CAG
  source 1..20: mol_type = other DNA
ctgaatactgtaagtataaa

SEQ ID NO: 34777 - DNA, 20 bp, synthetic construct
  misc_feature 1..20: note = Description of Artificial Sequence: Synthetic oligonucleotide
  misc_feature 1..20: note = Target: SCN10A; (+) strand; PAM type: NRG; PAM sequence: AAG
  source 1..20: mol_type = other DNA
ataaacagttaataaacata

SEQ ID NO: 34778 - DNA, 20 bp, synthetic construct
  misc_feature 1..20: note = Description of Artificial Sequence: Synthetic oligonucleotide
  misc_feature 1..20: note = Target: SCN10A; (+) strand; PAM type: NRG; PAM sequence: AAG
  source 1..20: mol_type = other DNA
acagttaataaacataaaga

SEQ ID NO: 34779 - DNA, 20 bp, synthetic construct
  misc_feature 1..20: note = Description of Artificial Sequence: Synthetic oligonucleotide
  misc_feature 1..20: note = Target: SCN10A; (+) strand; PAM type: NRG; PAM sequence: AAG
  source 1..20: mol_type = other DNA
aaacataaagaaagtttata

SEQ ID NO: 34780 - DNA, 20 bp, synthetic construct
  misc_feature 1..20: note = Description of Artificial Sequence: Synthetic oligonucleotide
  misc_feature 1..20: note = Target: SCN10A; (+) strand; PAM type: NRG; PAM sequence: GAG
  source 1..20: mol_type = other DNA
tttataaagcttccaaccat

SEQ ID NO: 34781 - DNA, 20 bp, synthetic construct
  misc_feature 1..20: note = Description of Artificial Sequence: Synthetic oligonucleotide
  misc_feature 1..20: note = Target: SCN10A; (+) strand; PAM type: NRG; PAM sequence: AGG
  source 1..20: mol_type = other DNA
ttataaagcttccaaccatg

SEQ ID NO: 34782 - DNA, 20 bp, synthetic construct
  misc_feature 1..20: note = Description of Artificial Sequence: Synthetic oligonucleotide
  misc_feature 1..20: note = Target: SCN10A; (+) strand; PAM type: NRG; PAM sequence: AAG
  source 1..20: mol_type = other DNA
agcttccaaccatgaggact

SEQ ID NO: 34783 - DNA, 20 bp, synthetic construct
  misc_feature 1..20: note = Description of Artificial Sequence: Synthetic oligonucleotide
  misc_feature 1..20: note = Target: SCN10A; (+) strand; PAM type: NRG; PAM sequence: TAG
  source 1..20: mol_type = other DNA
gaggactaagcaaatgatac

SEQ ID NO: 34784 - DNA, 20 bp, synthetic construct
  misc_feature 1..20: note = Description of Artificial Sequence: Synthetic oligonucleotide
  misc_feature 1..20: note = Target: SCN10A; (+) strand; PAM type: NRG; PAM sequence: TAG
  source 1..20: mol_type = other DNA
gactaagcaaatgatactag

SEQ ID NO: 34785 - DNA, 20 bp, synthetic construct
  misc_feature 1..20: note = Description of Artificial Sequence: Synthetic oligonucleotide
  misc_feature 1..20: note = Target: SCN10A; (+) strand; PAM type: NRG; PAM sequence: CAG
  source 1..20: mol_type = other DNA
cactatttattgttatctgt

SEQ ID NO: 34786 - DNA, 20 bp, synthetic construct
  misc_feature 1..20: note = Description of Artificial Sequence: Synthetic oligonucleotide
  misc_feature 1..20: note = Target: SCN10A; (+) strand; PAM type: NRG; PAM sequence: TAG
  source 1..20: mol_type = other DNA
gtcagacatgtataaaaatg

SEQ ID NO: 34787 - DNA, 20 bp, synthetic construct
  misc_feature 1..20: note = Description of Artificial Sequence: Synthetic oligonucleotide
  misc_feature 1..20: note = Target: SCN10A; (+) strand; PAM type: NRG; PAM sequence: AGG
  source 1..20: mol_type = other DNA
tcagacatgtataaaaatgt

SEQ ID NO: 34788 - DNA, 20 bp, synthetic construct
  misc_feature 1..20: note = Description of Artificial Sequence: Synthetic oligonucleotide
  misc_feature 1..20: note = Target: SCN10A; (+) strand; PAM type: NRG; PAM sequence: CAG
  source 1..20: mol_type = other DNA
tgttatttcatttaaccctc

SEQ ID NO: 34789 - DNA, 20 bp, synthetic construct
  misc_feature 1..20: note = Description of Artificial Sequence: Synthetic oligonucleotide
  misc_feature 1..20: note = Target: SCN10A; (+) strand; PAM type: NRG; PAM sequence: TAG
  source 1..20: mol_type = other DNA
catttaaccctccagctatt

SEQ ID NO: 34790 - DNA, 20 bp, synthetic construct
  misc_feature 1..20: note = Description of Artificial Sequence: Synthetic oligonucleotide
  misc_feature 1..20: note = Target: SCN10A; (+) strand; PAM type: NRG; PAM sequence: AAG
  source 1..20: mol_type = other DNA
ctatttagaaacctttttac

SEQ ID NO: 34791 - DNA, 20 bp, synthetic construct
  misc_feature 1..20: note = Description of Artificial Sequence: Synthetic oligonucleotide
  misc_feature 1..20: note = Target: SCN10A; (+) strand; PAM type: NRG; PAM sequence: AGG
  source 1..20: mol_type = other DNA
tatttagaaacctttttaca

SEQ ID NO: 34792 - DNA, 20 bp, synthetic construct
  misc_feature 1..20: note = Description of Artificial Sequence: Synthetic oligonucleotide
  misc_feature 1..20: note = Target: SCN10A; (+) strand; PAM type: NRG; PAM sequence: GGG
  source 1..20: mol_type = other DNA
atttagaaacctttttacaa

SEQ ID NO: 34793 - DNA, 20 bp, synthetic construct
  misc_feature 1..20: note = Description of Artificial Sequence: Synthetic oligonucleotide
  misc_feature 1..20: note = Target: SCN10A; (+) strand; PAM type: NRG; PAM sequence: GGG
  source 1..20: mol_type = other DNA
tttagaaacctttttacaag

SEQ ID NO: 34794 - DNA, 20 bp, synthetic construct
  misc_feature 1..20: note = Description of Artificial Sequence: Synthetic oligonucleotide
  misc_feature 1..20: note = Target: SCN10A; (+) strand; PAM type: NRG; PAM sequence: GAG
  source 1..20: mol_type = other DNA
tagaaacctttttacaaggg

SEQ ID NO: 34795 - DNA, 20 bp, synthetic construct
  misc_feature 1..20: note = Description of Artificial Sequence: Synthetic oligonucleotide
  misc_feature 1..20: note = Target: SCN10A; (+) strand; PAM type: NRG; PAM sequence: AAG
  source 1..20: mol_type = other DNA
acctttttacaaggggagat

SEQ ID NO: 34796 - DNA, 20 bp, synthetic construct
  misc_feature 1..20: note = Description of Artificial Sequence: Synthetic oligonucleotide
  misc_feature 1..20: note = Target: SCN10A; (+) strand; PAM type: NRG; PAM sequence: AGG
  source 1..20: mol_type = other DNA
cctttttacaaggggagata

SEQ ID NO: 34797 - DNA, 20 bp, synthetic construct
  misc_feature 1..20: note = Description of Artificial Sequence: Synthetic oligonucleotide
  misc_feature 1..20: note = Target: SCN10A; (+) strand; PAM type: NRG; PAM sequence: GAG
  source 1..20: mol_type = other DNA
tttttacaaggggagataag

SEQ ID NO: 34798 - DNA, 20 bp, synthetic construct
  misc_feature 1..20: note = Description of Artificial Sequence: Synthetic oligonucleotide
  misc_feature 1..20: note = Target: SCN10A; (+) strand; PAM type: NRG; PAM sequence: AGG
  source 1..20: mol_type = other DNA
ttttacaaggggagataagg

SEQ ID NO: 34799 - DNA, 20 bp, synthetic construct
  misc_feature 1..20: note = Description of Artificial Sequence: Synthetic oligonucleotide
  misc_feature 1..20: note = Target: SCN10A; (+) strand; PAM type: NRG; PAM sequence: TGG
  source 1..20: mol_type = other DNA
caaggggagataaggaggct

SEQ ID NO: 34800 - DNA, 20 bp, synthetic construct
  misc_feature 1..20: note = Description of Artificial Sequence: Synthetic oligonucleotide
  misc_feature 1..20: note = Target: SCN10A; (+) strand; PAM type: NRG; PAM sequence: AAG
  source 1..20: mol_type = other DNA
aaggaggcttggataattta

SEQ ID NO: 34801 - DNA, 20 bp, synthetic construct
  misc_feature 1..20: note = Description of Artificial Sequence: Synthetic oligonucleotide
  misc_feature 1..20: note = Target: SCN10A; (+) strand; PAM type: NRG; PAM sequence: AGG
  source 1..20: mol_type = other DNA
aggaggcttggataatttaa

SEQ ID NO: 34802 - DNA, 20 bp, synthetic construct
  misc_feature 1..20: note = Description of Artificial Sequence: Synthetic oligonucleotide
  misc_feature 1..20: note = Target: SCN10A; (+) strand; PAM type: NRG; PAM sequence: CAG
  source 1..20: mol_type = other DNA
aggacttgctaaatgtgact

SEQ ID NO: 34803 - DNA, 20 bp, synthetic construct
  misc_feature 1..20: note = Description of Artificial Sequence: Synthetic oligonucleotide
  misc_feature 1..20: note = Target: SCN10A; (+) strand; PAM type: NRG; PAM sequence: AGG
  source 1..20: mol_type = other DNA
ggacttgctaaatgtgactc

SEQ ID NO: 34804 - DNA, 20 bp, synthetic construct
  misc_feature 1..20: note = Description of Artificial Sequence: Synthetic oligonucleotide
  misc_feature 1..20: note = Target: SCN10A; (+) strand; PAM type: NRG; PAM sequence: TGG
  source 1..20: mol_type = other DNA
cttgctaaatgtgactcagg

SEQ ID NO: 34805 - DNA, 20 bp, synthetic construct
  misc_feature 1..20: note = Description of Artificial Sequence: Synthetic oligonucleotide
  misc_feature 1..20: note = Target: SCN10A; (+) strand; PAM type: NRG; PAM sequence: TGG
  source 1..20: mol_type = other DNA
aatgtgactcaggtggtaac

SEQ ID NO: 34806 - DNA, 20 bp, synthetic construct
  misc_feature 1..20: note = Description of Artificial Sequence: Synthetic oligonucleotide
  misc_feature 1..20: note = Target: SCN10A; (+) strand; PAM type: NRG; PAM sequence: CAG
  source 1..20: mol_type = other DNA
gactcaggtggtaactggca

SEQ ID NO: 34807 - DNA, 20 bp, synthetic construct
  misc_feature 1..20: note = Description of Artificial Sequence: Synthetic oligonucleotide
  misc_feature 1..20: note = Target: SCN10A; (+) strand; PAM type: NRG; PAM sequence: TGG
  source 1..20: mol_type = other DNA
caggtggtaactggcacagt

SEQ ID NO: 34808 - DNA, 20 bp, synthetic construct
  misc_feature 1..20: note = Description of Artificial Sequence: Synthetic oligonucleotide
  misc_feature 1..20: note = Target: SCN10A; (+) strand; PAM type: NRG; PAM sequence: GGG
  source 1..20: mol_type = other DNA
aggtggtaactggcacagtt

SEQ ID NO: 34809 - DNA, 20 bp, synthetic construct
  misc_feature 1..20: note = Description of Artificial Sequence: Synthetic oligonucleotide
  misc_feature 1..20: note = Target: SCN10A; (+) strand; PAM type: NRG; PAM sequence: TAG
  source 1..20: mol_type = other DNA
gcacagttgggactaaaata

SEQ ID NO: 34810 - DNA, 20 bp, synthetic construct
  misc_feature 1..20: note = Description of Artificial Sequence: Synthetic oligonucleotide
  misc_feature 1..20: note = Target: SCN10A; (+) strand; PAM type: NRG; PAM sequence: AGG
  source 1..20: mol_type = other DNA
cacagttgggactaaaatat

SEQ ID NO: 34811 - DNA, 20 bp, synthetic construct
  misc_feature 1..20: note = Description of Artificial Sequence: Synthetic oligonucleotide
  misc_feature 1..20: note = Target: SCN10A; (+) strand; PAM type: NRG; PAM sequence: CAG
  source 1..20: mol_type = other DNA
aaatataggtccatactaaa

SEQ ID NO: 34812 - DNA, 20 bp, synthetic construct
  misc_feature 1..20: note = Description of Artificial Sequence: Synthetic oligonucleotide
  misc_feature 1..20: note = Target: SCN10A; (+) strand; PAM type: NRG; PAM sequence: AAG
  source 1..20: mol_type = other DNA
tataggtccatactaaacag

SEQ ID NO: 34813 - DNA, 20 bp, synthetic construct
  misc_feature 1..20: note = Description of Artificial Sequence: Synthetic oligonucleotide
  misc_feature 1..20: note = Target: SCN10A; (+) strand; PAM type: NRG; PAM sequence: AGG
  source 1..20: mol_type = other DNA
ataggtccatactaaacaga

SEQ ID NO: 34814 - DNA, 20 bp, synthetic construct
  misc_feature 1..20: note = Description of Artificial Sequence: Synthetic oligonucleotide
  misc_feature 1..20: note = Target: SCN10A; (+) strand; PAM type: NRG; PAM sequence: GGG
  source 1..20: mol_type = other DNA
taggtccatactaaacagaa

SEQ ID NO: 34815 - DNA, 20 bp, synthetic construct
  misc_feature 1..20: note = Description of Artificial Sequence: Synthetic oligonucleotide
  misc_feature 1..20: note = Target: SCN10A; (+) strand; PAM type: NRG; PAM sequence: AAG
  source 1..20: mol_type = other DNA
atactaaacagaagggccta

SEQ ID NO: 34816 - DNA, 20 bp, synthetic construct
  misc_feature 1..20: note = Description of Artificial Sequence: Synthetic oligonucleotide
  misc_feature 1..20: note = Target: SCN10A; (+) strand; PAM type: NRG; PAM sequence: GAG
  source 1..20: mol_type = other DNA
actaaacagaagggcctaaa

SEQ ID NO: 34817 - DNA, 20 bp, synthetic construct
  misc_feature 1..20: note = Description of Artificial Sequence: Synthetic oligonucleotide
  misc_feature 1..20: note = Target: SCN10A; (+) strand; PAM type: NRG; PAM sequence: TAG
  source 1..20: mol_type = other DNA
ctaaagagtcaatctttcac

SEQ ID NO: 34818 - DNA, 20 bp, synthetic construct
  misc_feature 1..20: note = Description of Artificial Sequence: Synthetic oligonucleotide
  misc_feature 1..20: note = Target: SCN10A; (+) strand; PAM type: NRG; PAM sequence: TGG
  source 1..20: mol_type = other DNA
gagtcaatctttcactagcc

SEQ ID NO: 34819 - DNA, 20 bp, synthetic construct
  misc_feature 1..20: note = Description of Artificial Sequence: Synthetic oligonucleotide
  misc_feature 1..20: note = Target: SCN10A; (+) strand; PAM type: NRG; PAM sequence: TAG
  source 1..20: mol_type = other DNA
cactagcctggtaatttaac

SEQ ID NO: 34820 - DNA, 20 bp, synthetic construct
  misc_feature 1..20: note = Description of Artificial Sequence: Synthetic oligonucleotide
  misc_feature 1..20: note = Target: SCN10A; (+) strand; PAM type: NRG; PAM sequence: AAG
  source 1..20: mol_type = other DNA
taatttaactagaatgaatc

SEQ ID NO: 34821 - DNA, 20 bp, synthetic construct
  misc_feature 1..20: note = Description of Artificial Sequence: Synthetic oligonucleotide
  misc_feature 1..20: note = Target: SCN10A; (+) strand; PAM type: NRG; PAM sequence: AGG
  source 1..20: mol_type = other DNA
aatttaactagaatgaatca

SEQ ID NO: 34822 - DNA, 20 bp, synthetic construct
  misc_feature 1..20: note = Description of Artificial Sequence: Synthetic oligonucleotide
  misc_feature 1..20: note = Target: SCN10A; (+) strand; PAM type: NRG; PAM sequence: CAG
  source 1..20: mol_type = other DNA
taactagaatgaatcaaggt

SEQ ID NO: 34823 - DNA, 20 bp, synthetic construct
  misc_feature 1..20: note = Description of Artificial Sequence: Synthetic oligonucleotide
  misc_feature 1..20: note = Target: SCN10A; (+) strand; PAM type: NRG; PAM sequence: TAG
  source 1..20: mol_type = other DNA
tgaatcaaggtcagaatatc

SEQ ID NO: 34824 - DNA, 20 bp, synthetic construct
  misc_feature 1..20: note = Description of Artificial Sequence: Synthetic oligonucleotide
  misc_feature 1..20: note = Target: SCN10A; (+) strand; PAM type: NRG; PAM sequence: CAG
  source 1..20: mol_type = other DNA
atctagacacatgataatct

SEQ ID NO: 34825 - DNA, 20 bp, synthetic construct
  misc_feature 1..20: note = Description of Artificial Sequence: Synthetic oligonucleotide
  misc_feature 1..20: note = Target: SCN10A; (+) strand; PAM type: NRG; PAM sequence: AGG
  source 1..20: mol_type = other DNA
tctagacacatgataatctc

SEQ ID NO: 34826 - DNA, 20 bp, synthetic construct
  misc_feature 1..20: note = Description of Artificial Sequence: Synthetic oligonucleotide
  misc_feature 1..20: note = Target: SCN10A; (+) strand; PAM type: NRG; PAM sequence: CAG
  source 1..20: mol_type = other DNA
acacatgataatctcaggaa

SEQ ID NO: 34827 - DNA, 20 bp, synthetic construct
  misc_feature 1..20: note = Description of Artificial Sequence: Synthetic oligonucleotide
  misc_feature 1..20: note = Target: SCN10A; (+) strand; PAM type: NRG; PAM sequence: GAG
  source 1..20: mol_type = other DNA
acatgataatctcaggaaca

SEQ ID NO: 34828 - DNA, 20 bp, synthetic construct
  misc_feature 1..20: note = Description of Artificial Sequence: Synthetic oligonucleotide
  misc_feature 1..20: note = Target: SCN10A; (+) strand; PAM type: NRG; PAM sequence: AAG
  source 1..20: mol_type = other DNA
gataatctcaggaacagaga

SEQ ID NO: 34829 - DNA, 20 bp, synthetic construct
  misc_feature 1..20: note = Description of Artificial Sequence: Synthetic oligonucleotide
  misc_feature 1..20: note = Target: SCN10A; (+) strand; PAM type: NRG; PAM sequence: AGG
  source 1..20: mol_type = other DNA
ataatctcaggaacagagaa

SEQ ID NO: 34830 - DNA, 20 bp, synthetic construct
  misc_feature 1..20: note = Description of Artificial Sequence: Synthetic oligonucleotide
  misc_feature 1..20: note = Target: SCN10A; (+) strand; PAM type: NRG; PAM sequence: GAG
  source 1..20: mol_type = other DNA
aatctcaggaacagagaaag

SEQ ID NO: 34831 - DNA, 20 bp, synthetic construct
  misc_feature 1..20: note = Description of Artificial Sequence: Synthetic oligonucleotide
  misc_feature 1..20: note = Target: SCN10A; (+) strand; PAM type: NRG; PAM sequence: AGG
  source 1..20: mol_type = other DNA
atctcaggaacagagaaagg

SEQ ID NO: 34832 - DNA, 20 bp, synthetic construct
  misc_feature 1..20: note = Description of Artificial Sequence: Synthetic oligonucleotide
  misc_feature 1..20: note = Target: SCN10A; (+) strand; PAM type: NRG; PAM sequence: GGG
  source 1..20: mol_type = other DNA
tctcaggaacagagaaagga

SEQ ID NO: 34833 - DNA, 20 bp, synthetic construct
  misc_feature 1..20: note = Description of Artificial Sequence: Synthetic oligonucleotide
  misc_feature 1..20: note = Target: SCN10A; (+) strand; PAM type: NRG; PAM sequence: TGG
  source 1..20: mol_type = other DNA
caggaacagagaaaggaggg

SEQ ID NO: 34834 - DNA, 20 bp, synthetic construct
  misc_feature 1..20: note = Description of Artificial Sequence: Synthetic oligonucleotide
  misc_feature 1..20: note = Target: SCN10A; (+) strand; PAM type: NRG; PAM sequence: GGG
  source 1..20: mol_type = other DNA
aggaacagagaaaggagggt

SEQ ID NO: 34835 - DNA, 20 bp, synthetic construct
  misc_feature 1..20: note = Description of Artificial Sequence: Synthetic oligonucleotide
  misc_feature 1..20: note = Target: SCN10A; (+) strand; PAM type: NRG; PAM sequence: GGG
  source 1..20: mol_type = other DNA
ggaacagagaaaggagggtg

SEQ ID NO: 34836 - DNA, 20 bp, synthetic construct
  misc_feature 1..20: note = Description of Artificial Sequence: Synthetic oligonucleotide
  misc_feature 1..20: note = Target: SCN10A; (+) strand; PAM type: NRG; PAM sequence: GGG
  source 1..20: mol_type = other DNA
gaacagagaaaggagggtgg

SEQ ID NO: 34837 - DNA, 20 bp, synthetic construct
  misc_feature 1..20: note = Description of Artificial Sequence: Synthetic oligonucleotide
  misc_feature 1..20: note = Target: SCN10A; (+) strand; PAM type: NRG; PAM sequence: AAG
  source 1..20: mol_type = other DNA
ggagggtgggggcccatcac

SEQ ID NO: 34838 - DNA, 20 bp, synthetic construct
  misc_feature 1..20: note = Description of Artificial Sequence: Synthetic oligonucleotide
  misc_feature 1..20: note = Target: SCN10A; (+) strand; PAM type: NRG; PAM sequence: GAG
  source 1..20: mol_type = other DNA
agggtgggggcccatcacaa

SEQ ID NO: 34839 - DNA, 20 bp, synthetic construct
  misc_feature 1..20: note = Description of Artificial Sequence: Synthetic oligonucleotide
  misc_feature 1..20: note = Target: SCN10A; (+) strand; PAM type: NRG; PAM sequence: GAG
  source 1..20: mol_type = other DNA
ggtgggggcccatcacaaga

SEQ ID NO: 34840 - DNA, 20 bp, synthetic construct
  misc_feature 1..20: note = Description of Artificial Sequence: Synthetic oligonucleotide
  misc_feature 1..20: note = Target: SCN10A; (+) strand; PAM type: NRG; PAM sequence: AGG
  source 1..20: mol_type = other DNA
gtgggggcccatcacaagag

SEQ ID NO: 34841 - DNA, 20 bp, synthetic construct
  misc_feature 1..20: note = Description of Artificial Sequence: Synthetic oligonucleotide
  misc_feature 1..20: note = Target: SCN10A; (+) strand; PAM type: NRG; PAM sequence: CAG
  source 1..20: mol_type = other DNA
aagagaggcataaatgcctt

SEQ ID NO: 34842 - DNA, 20 bp, synthetic construct
  misc_feature 1..20: note = Description of Artificial Sequence: Synthetic oligonucleotide
  misc_feature 1..20: note = Target: SCN10A; (+) strand; PAM type: NRG; PAM sequence: GAG
  source 1..20: mol_type = other DNA
gaggcataaatgccttcagt

SEQ ID NO: 34843 - DNA, 20 bp, synthetic construct
  misc_feature 1..20: note = Description of Artificial Sequence: Synthetic oligonucleotide
  misc_feature 1..20: note = Target: SCN10A; (+) strand; PAM type: NRG; PAM sequence: AGG
  source 1..20: mol_type = other DNA
aggcataaatgccttcagtg

SEQ ID NO: 34844 - DNA, 20 bp, synthetic construct
  misc_feature 1..20: note = Description of Artificial Sequence: Synthetic oligonucleotide
  misc_feature 1..20: note = Target: SCN10A; (+) strand; PAM type: NRG; PAM sequence: TAG
  source 1..20: mol_type = other DNA
gccttcagtgaggcattttc

SEQ ID NO: 34845 - DNA, 20 bp, synthetic construct
  misc_feature 1..20: note = Description of Artificial Sequence: Synthetic oligonucleotide
  misc_feature 1..20: note = Target: SCN10A; (+) strand; PAM type: NRG; PAM sequence: GAG
  source 1..20: mol_type = other DNA
cttcagtgaggcattttcta

SEQ ID NO: 34846 - DNA, 20 bp, synthetic construct
  misc_feature 1..20: note = Description of Artificial Sequence: Synthetic oligonucleotide
  misc_feature 1..20: note = Target: SCN10A; (+) strand; PAM type: NRG; PAM sequence: CAG
  source 1..20: mol_type = other DNA
ctagagtgctaatgcactcc

SEQ ID NO: 34847 - DNA, 20 bp, synthetic construct
  misc_feature 1..20: note = Description of Artificial Sequence: Synthetic oligonucleotide
  misc_feature 1..20: note = Target: SCN10A; (+) strand; PAM type: NRG; PAM sequence: GAG
  source 1..20: mol_type = other DNA
agtgctaatgcactcccagc

SEQ ID NO: 34848 - DNA, 20 bp, synthetic construct
  misc_feature 1..20: note = Description of Artificial Sequence: Synthetic oligonucleotide
  misc_feature 1..20: note = Target: SCN10A; (+) strand; PAM type: NRG; PAM sequence: CAG
  source 1..20: mol_type = other DNA
tgcactcccagcgagccctg

SEQ ID NO: 34849 - DNA, 20 bp, synthetic construct
  misc_feature 1..20: note = Description of Artificial Sequence: Synthetic oligonucleotide
  misc_feature 1..20: note = Target: SCN10A; (+) strand; PAM type: NRG; PAM sequence: AGG
  source 1..20: mol_type = other DNA
gcactcccagcgagccctgc

SEQ ID NO: 34850 - DNA, 20 bp, synthetic construct
  misc_feature 1..20: note = Description of Artificial Sequence: Synthetic oligonucleotide
  misc_feature 1..20: note = Target: SCN10A; (+) strand; PAM type: NRG; PAM sequence: AAG
  source 1..20: mol_type = other DNA
tgcaggatgcctttgacttt

SEQ ID NO: 34851 - DNA, 20 bp, synthetic construct
  misc_feature 1..20: note = Description of Artificial Sequence: Synthetic oligonucleotide
  misc_feature 1..20: note = Target: SCN10A; (+) strand; PAM type: NRG; PAM sequence: AGG
  source 1..20: mol_type = other DNA
gcaggatgcctttgacttta

SEQ ID NO: 34852 - DNA, 20 bp, synthetic construct
  misc_feature 1..20: note = Description of Artificial Sequence: Synthetic oligonucleotide
  misc_feature 1..20: note = Target: SCN10A; (+) strand; PAM type: NRG; PAM sequence: TGG
  source 1..20: mol_type = other DNA
ttgactttaaggctctgttt

SEQ ID NO: 34853 - DNA, 20 bp, synthetic construct
  misc_feature 1..20: note = Description of Artificial Sequence: Synthetic oligonucleotide
  misc_feature 1..20: note = Target: SCN10A; (+) strand; PAM type: NRG; PAM sequence: TGG
  source 1..20: mol_type = other DNA
tttggtgattccatttgccc

SEQ ID NO: 34854 - DNA, 20 bp, synthetic construct
  misc_feature 1..20: note = Description of Artificial Sequence: Synthetic oligonucleotide
  misc_feature 1..20: note = Target: SCN10A; (+) strand; PAM type: NRG; PAM sequence: GAG
  source 1..20: mol_type = other DNA
tggtgattccatttgccctg

SEQ ID NO: 34855 - DNA, 20 bp, synthetic construct
  misc_feature 1..20: note = Description of Artificial Sequence: Synthetic oligonucleotide
  misc_feature 1..20: note = Target: SCN10A; (+) strand; PAM type: NRG; PAM sequence: TGG
  source 1..20: mol_type = other DNA
ttctccactgtctctgttcc

SEQ ID NO: 34856 - DNA, 20 bp, synthetic construct
  misc_feature 1..20: note = Description of Artificial Sequence: Synthetic oligonucleotide
  misc_feature 1..20: note = Target: SCN10A; (+) strand; PAM type: NRG; PAM sequence: GGG
  source 1..20: mol_type = other DNA
tctccactgtctctgttcct

SEQ ID NO: 34857 - DNA, 20 bp, synthetic construct
  misc_feature 1..20: note = Description of Artificial Sequence: Synthetic oligonucleotide
  misc_feature 1..20: note = Target: SCN10A; (+) strand; PAM type: NRG; PAM sequence: GGG
  source 1..20: mol_type = other DNA
ctccactgtctctgttcctg

SEQ ID NO: 34858 - DNA, 20 bp, synthetic construct
  misc_feature 1..20: note = Description of Artificial Sequence: Synthetic oligonucleotide
  misc_feature 1..20: note = Target: SCN10A; (+) strand; PAM type: NRG; PAM sequence: GAG
  source 1..20: mol_type = other DNA
ccactgtctctgttcctggg

SEQ ID NO: 34859 - DNA, 20 bp, synthetic construct
  misc_feature 1..20: note = Description of Artificial Sequence: Synthetic oligonucleotide
  misc_feature 1..20: note = Target: SCN10A; (+) strand; PAM type: NRG; PAM sequence: AGG
  source 1..20: mol_type = other DNA
cactgtctctgttcctgggg

SEQ ID NO: 34860 - DNA, 20 bp, synthetic construct
  misc_feature 1..20: note = Description of Artificial Sequence: Synthetic oligonucleotide
  misc_feature 1..20: note = Target: SCN10A; (+) strand; PAM type: NRG; PAM sequence: GGG
  source 1..20: mol_type = other DNA
actgtctctgttcctgggga

SEQ ID NO: 34861 - DNA, 20 bp, synthetic construct
  misc_feature 1..20: note = Description of Artificial Sequence: Synthetic oligonucleotide
  misc_feature 1..20: note = Target: SCN10A; (+) strand; PAM type: NRG; PAM sequence: GAG
  source 1..20: mol_type = other DNA
tgtctctgttcctggggagg

SEQ ID NO: 34862 - DNA, 20 bp, synthetic construct
  misc_feature 1..20: note = Description of Artificial Sequence: Synthetic oligonucleotide
  misc_feature 1..20: note = Target: SCN10A; (+) strand; PAM type: NRG; PAM sequence: TGG
  source 1..20: mol_type = other DNA
aatgtgttatccttaccctc

SEQ ID NO: 34863 - DNA, 20 bp, synthetic construct
  misc_feature 1..20: note = Description of Artificial Sequence: Synthetic oligonucleotide
  misc_feature 1..20: note = Target: SCN10A; (+) strand; PAM type: NRG; PAM sequence: TGG
  source 1..20: mol_type = other DNA
ttatccttaccctctggttc

SEQ ID NO: 34864 - DNA, 20 bp, synthetic construct
  misc_feature 1..20: note = Description of Artificial Sequence: Synthetic oligonucleotide
  misc_feature 1..20: note = Target: SCN10A; (+) strand; PAM type: NRG; PAM sequence: CAG
  source 1..20: mol_type = other DNA
ccttaccctctggttctggc

SEQ ID NO: 34865 - DNA, 20 bp, synthetic construct
  misc_feature 1..20: note = Description of Artificial Sequence: Synthetic oligonucleotide
  misc_feature 1..20: note = Target: SCN10A; (+) strand; PAM type: NRG; PAM sequence: AGG
  source 1..20: mol_type = other DNA
cttaccctctggttctggcc

SEQ ID NO: 34866 - DNA, 20 bp, synthetic construct
  misc_feature 1..20: note = Description of Artificial Sequence: Synthetic oligonucleotide
  misc_feature 1..20: note = Target: SCN10A; (+) strand; PAM type: NRG; PAM sequence: TGG
  source 1..20: mol_type = other DNA
cctctggttctggccaggtt

SEQ ID NO: 34867 - DNA, 20 bp, synthetic construct
  misc_feature 1..20: note = Description of Artificial Sequence: Synthetic oligonucleotide
  misc_feature 1..20: note = Target: SCN10A; (+) strand; PAM type: NRG; PAM sequence: TGG
  source 1..20: mol_type = other DNA
ttctggccaggtttggttaa

SEQ ID NO: 34868 - DNA, 20 bp, synthetic construct
  misc_feature 1..20: note = Description of Artificial Sequence: Synthetic oligonucleotide
  misc_feature 1..20: note = Target: SCN10A; (+) strand; PAM type: NRG; PAM sequence: GGG
  source 1..20: mol_type = other DNA
tctggccaggtttggttaat

SEQ ID NO: 34869 - DNA, 20 bp, synthetic construct
  misc_feature 1..20: note = Description of Artificial Sequence: Synthetic oligonucleotide
  misc_feature 1..20: note = Target: SCN10A; (+) strand; PAM type: NRG; PAM sequence: GAG
  source 1..20: mol_type = other DNA
tggccaggtttggttaatgg

SEQ ID NO: 34870 - DNA, 20 bp, synthetic construct
  misc_feature 1..20: note = Description of Artificial Sequence: Synthetic oligonucleotide
  misc_feature 1..20: note = Target: SCN10A; (+) strand; PAM type: NRG; PAM sequence: TAG
  source 1..20: mol_type = other DNA
ggtttggttaatgggagaca

SEQ ID NO: 34871 - DNA, 20 bp, synthetic construct
  misc_feature 1..20: note = Description of Artificial Sequence: Synthetic oligonucleotide
  misc_feature 1..20: note = Target: SCN10A; (+) strand; PAM type: NRG; PAM sequence: AGG
  source 1..20: mol_type = other DNA
gtttggttaatgggagacat

SEQ ID NO: 34872 - DNA, 20 bp, synthetic construct
  misc_feature 1..20: note = Description of Artificial Sequence: Synthetic oligonucleotide
  misc_feature 1..20: note = Target: SCN10A; (+) strand; PAM type: NRG; PAM sequence: CAG
  source 1..20: mol_type = other DNA
tggttaatgggagacatagg

SEQ ID NO: 34873 - DNA, 20 bp, synthetic construct
  misc_feature 1..20: note = Description of Artificial Sequence: Synthetic oligonucleotide
  misc_feature 1..20: note = Target: SCN10A; (+) strand; PAM type: NRG; PAM sequence: AGG
  source 1..20: mol_type = other DNA
ggttaatgggagacataggc

SEQ ID NO: 34874 - DNA, 20 bp, synthetic construct
  misc_feature 1..20: note = Description of Artificial Sequence: Synthetic oligonucleotide
  misc_feature 1..20: note = Target: SCN10A; (+) strand; PAM type: NRG; PAM sequence: AAG
  source 1..20: mol_type = other DNA
gagacataggcaggacattc

SEQ ID NO: 34875 - DNA, 20 bp, synthetic construct
  misc_feature 1..20: note = Description of Artificial Sequence: Synthetic oligonucleotide
  misc_feature 1..20: note = Target: SCN10A; (+) strand; PAM type: NRG; PAM sequence: AGG
  source 1..20: mol_type = other DNA
agacataggcaggacattca

SEQ ID NO: 34876 - DNA, 20 bp, synthetic construct
  misc_feature 1..20: note = Description of Artificial Sequence: Synthetic oligonucleotide
  misc_feature 1..20: note = Target: SCN10A; (+) strand; PAM type: NRG; PAM sequence: TAG
  source 1..20: mol_type = other DNA
ataggcaggacattcaagga

SEQ ID NO: 34877 - DNA, 20 bp, synthetic construct
  misc_feature 1..20: note = Description of Artificial Sequence: Synthetic oligonucleotide
  misc_feature 1..20: note = Target: SCN10A; (+) strand; PAM type: NRG; PAM sequence: AAG
  source 1..20: mol_type = other DNA
ggcaggacattcaaggatag

SEQ ID NO: 34878 - DNA, 20 bp, synthetic construct
  misc_feature 1..20: note = Description of Artificial Sequence: Synthetic oligonucleotide
  misc_feature 1..20: note = Target: SCN10A; (+) strand; PAM type: NRG; PAM sequence: AGG
  source 1..20: mol_type = other DNA
gcaggacattcaaggataga

SEQ ID NO: 34879 - DNA, 20 bp, synthetic construct
  misc_feature 1..20: note = Description of Artificial Sequence: Synthetic oligonucleotide
  misc_feature 1..20: note = Target: SCN10A; (+) strand; PAM type: NRG; PAM sequence: GAG
  source 1..20: mol_type = other DNA
aggacattcaaggatagaag

SEQ ID NO: 34880 - DNA, 20 bp, synthetic construct
  misc_feature 1..20: note = Description of Artificial Sequence: Synthetic oligonucleotide
  misc_feature 1..20: note = Target: SCN10A; (+) strand; PAM type: NRG; PAM sequence: GAG
  source 1..20: mol_type = other DNA
gacattcaaggatagaagga

SEQ ID NO: 34881 - DNA, 20 bp, synthetic construct
  misc_feature 1..20: note = Description of Artificial Sequence: Synthetic oligonucleotide
  misc_feature 1..20: note = Target: SCN10A; (+) strand; PAM type: NRG; PAM sequence: AAG
  source 1..20: mol_type = other DNA
tcaaggatagaaggagagac

SEQ ID NO: 34882 - DNA, 20 bp, synthetic construct
  misc_feature 1..20: note = Description of Artificial Sequence: Synthetic oligonucleotide
  misc_feature 1..20: note = Target: SCN10A; (+) strand; PAM type: NRG; PAM sequence: CAG
  source 1..20: mol_type = other DNA
ggatagaaggagagacaagt

SEQ ID NO: 34883 - DNA, 20 bp, synthetic construct
  misc_feature 1..20: note = Description of Artificial Sequence: Synthetic oligonucleotide
  misc_feature 1..20: note = Target: SCN10A; (+) strand; PAM type: NRG; PAM sequence: AGG
  source 1..20: mol_type = other DNA
gatagaaggagagacaagtc

SEQ ID NO: 34884 - DNA, 20 bp, synthetic construct
  misc_feature 1..20: note = Description of Artificial Sequence: Synthetic oligonucleotide
  misc_feature 1..20: note = Target: SCN10A; (+) strand; PAM type: NRG; PAM sequence: TGG
  source 1..20: mol_type = other DNA
acaagtcaggtattttcccc

SEQ ID NO: 34885 - DNA, 20 bp, synthetic construct
  misc_feature 1..20: note = Description of Artificial Sequence: Synthetic oligonucleotide
  misc_feature 1..20: note = Target: SCN10A; (+) strand; PAM type: NRG; PAM sequence: TGG
  source 1..20: mol_type = other DNA
gcttcttctctcctgtgcta

SEQ ID NO: 34886 - DNA, 20 bp, synthetic construct
  misc_feature 1..20: note = Description of Artificial Sequence: Synthetic oligonucleotide
  misc_feature 1..20: note = Target: SCN10A; (+) strand; PAM type: NRG; PAM sequence: GAG
  source 1..20: mol_type = other DNA
ttctctcctgtgctatggct

SEQ ID NO: 34887 - DNA, 20 bp, synthetic construct
  misc_feature 1..20: note = Description of Artificial Sequence: Synthetic oligonucleotide
  misc_feature 1..20: note = Target: SCN10A; (+) strand; PAM type: NRG; PAM sequence: TAG
  source 1..20: mol_type = other DNA
tctcctgtgctatggctgag

SEQ ID NO: 34888 - DNA, 20 bp, synthetic construct
  misc_feature 1..20: note = Description of Artificial Sequence: Synthetic oligonucleotide
  misc_feature 1..20: note = Target: SCN10A; (+) strand; PAM type: NRG; PAM sequence: CAG
  source 1..20: mol_type = other DNA
cctgtgctatggctgagtag

SEQ ID NO: 34889 - DNA, 20 bp, synthetic construct
  misc_feature 1..20: note = Description of Artificial Sequence: Synthetic oligonucleotide
  misc_feature 1..20: note = Target: SCN10A; (+) strand; PAM type: NRG; PAM sequence: GAG
  source 1..20: mol_type = other DNA
tgtgctatggctgagtagca

SEQ ID NO: 34890 - DNA, 20 bp, synthetic construct
  misc_feature 1..20: note = Description of Artificial Sequence: Synthetic oligonucleotide
  misc_feature 1..20: note = Target: SCN10A; (+) strand; PAM type: NRG; PAM sequence: AAG
  source 1..20: mol_type = other DNA
cagagctgtgatcctctact

SEQ ID NO: 34891 - DNA, 20 bp, synthetic construct
  misc_feature 1..20: note = Description of Artificial Sequence: Synthetic oligonucleotide
  misc_feature 1..20: note = Target: SCN10A; (+) strand; PAM type: NRG; PAM sequence: AAG
  source 1..20: mol_type = other DNA
tgatcctctactaagatcac

SEQ ID NO: 34892 - DNA, 20 bp, synthetic construct
  misc_feature 1..20: note = Description of Artificial Sequence: Synthetic oligonucleotide
  misc_feature 1..20: note = Target: SCN10A; (+) strand; PAM type: NRG; PAM sequence: CAG
  source 1..20: mol_type = other DNA
actaagatcacaagttctgc

SEQ ID NO: 34893 - DNA, 20 bp, synthetic construct
  misc_feature 1..20: note = Description of Artificial Sequence: Synthetic oligonucleotide
  misc_feature 1..20: note = Target: SCN10A; (+) strand; PAM type: NRG; PAM sequence: AGG
  source 1..20: mol_type = other DNA
ctaagatcacaagttctgcc

SEQ ID NO: 34894 - DNA, 20 bp, synthetic construct
  misc_feature 1..20: note = Description of Artificial Sequence: Synthetic oligonucleotide
  misc_feature 1..20: note = Target: SCN10A; (+) strand; PAM type: NRG; PAM sequence: CAG
  source 1..20: mol_type = other DNA
agatcacaagttctgccagg

SEQ ID NO: 34895 - DNA, 20 bp, synthetic construct
  misc_feature 1..20: note = Description of Artificial Sequence: Synthetic oligonucleotide
  misc_feature 1..20: note = Target: SCN10A; (+) strand; PAM type: NRG; PAM sequence: GAG
  source 1..20: mol_type = other DNA
aggcagcctctctgacacat

SEQ ID NO: 34896 - DNA, 20 bp, synthetic construct
  misc_feature 1..20: note = Description of Artificial Sequence: Synthetic oligonucleotide
  misc_feature 1..20: note = Target: SCN10A; (+) strand; PAM type: NRG; PAM sequence: AGG
  source 1..20: mol_type = other DNA
ggcagcctctctgacacatg

SEQ ID NO: 34897 - DNA, 20 bp, synthetic construct
  misc_feature 1..20: note = Description of Artificial Sequence: Synthetic oligonucleotide
  misc_feature 1..20: note = Target: SCN10A; (+) strand; PAM type: NRG; PAM sequence: GGG
  source 1..20: mol_type = other DNA
gcagcctctctgacacatga

SEQ ID NO: 34898 - DNA, 20 bp, synthetic construct
  misc_feature 1..20: note = Description of Artificial Sequence: Synthetic oligonucleotide
  misc_feature 1..20: note = Target: SCN10A; (+) strand; PAM type: NRG; PAM sequence: CAG
  source 1..20: mol_type = other DNA
gcctctctgacacatgaggg

SEQ ID NO: 34899 - DNA, 20 bp, synthetic construct
  misc_feature 1..20: note = Description of Artificial Sequence: Synthetic oligonucleotide
  misc_feature 1..20: note = Target: SCN10A; (+) strand; PAM type: NRG; PAM sequence: TAG
  source 1..20: mol_type = other DNA
catgagggcagctgctgctg

SEQ ID NO: 34900 - DNA, 20 bp, synthetic construct
  misc_feature 1..20: note = Description of Artificial Sequence: Synthetic oligonucleotide
  misc_feature 1..20: note = Target: SCN10A; (+) strand; PAM type: NRG; PAM sequence: TGG
  source 1..20: mol_type = other DNA
ctgctgctgtagtctaattc

SEQ ID NO: 34901 - DNA, 20 bp, synthetic construct
  misc_feature 1..20: note = Description of Artificial Sequence: Synthetic oligonucleotide
  misc_feature 1..20: note = Target: SCN10A; (+) strand; PAM type: NRG; PAM sequence: CAG
  source 1..20: mol_type = other DNA
ggtcctttccttcatccctt

SEQ ID NO: 34902 - DNA, 20 bp, synthetic construct
  misc_feature 1..20: note = Description of Artificial Sequence: Synthetic oligonucleotide
  misc_feature 1..20: note = Target: SCN10A; (+) strand; PAM type: NRG; PAM sequence: TAG
  source 1..20: mol_type = other DNA
tttccttcatcccttcagcc

SEQ ID NO: 34903 - DNA, 20 bp, synthetic construct
  misc_feature 1..20: note = Description of Artificial Sequence: Synthetic oligonucleotide
  misc_feature 1..20: note = Target: SCN10A; (+) strand; PAM type: NRG; PAM sequence: AGG
  source 1..20: mol_type = other DNA
ttccttcatcccttcagcct

SEQ ID NO: 34904 - DNA, 20 bp, synthetic construct
  misc_feature 1..20: note = Description of Artificial Sequence: Synthetic oligonucleotide
  misc_feature 1..20: note = Target: SCN10A; (+) strand; PAM type: NRG; PAM sequence: CAG
  source 1..20: mol_type = other DNA
ccttcagcctaggcatgtaa

SEQ ID NO: 34905 - DNA, 20 bp, synthetic construct
  misc_feature 1..20: note = Description of Artificial Sequence: Synthetic oligonucleotide
  misc_feature 1..20: note = Target: SCN10A; (+) strand; PAM type: NRG; PAM sequence: TAG
  source 1..20: mol_type = other DNA
taacagcttccccctgttac

SEQ ID NO: 34906 - DNA, 20 bp, synthetic construct
  misc_feature 1..20: note = Description of Artificial Sequence: Synthetic oligonucleotide
  misc_feature 1..20: note = Target: SCN10A; (+) strand; PAM type: NRG; PAM sequence: TAG
  source 1..20: mol_type = other DNA
ttccccctgttactagtttc

SEQ ID NO: 34907 - DNA, 20 bp, synthetic construct
  misc_feature 1..20: note = Description of Artificial Sequence: Synthetic oligonucleotide
  misc_feature 1..20: note = Target: SCN10A; (+) strand; PAM type: NRG; PAM sequence: AGG
  source 1..20: mol_type = other DNA
tccccctgttactagtttct

SEQ ID NO: 34908 - DNA, 20 bp, synthetic construct
  misc_feature 1..20: note = Description of Artificial Sequence: Synthetic oligonucleotide
  misc_feature 1..20: note = Target: SCN10A; (+) strand; PAM type: NRG; PAM sequence: AAG
  source 1..20: mol_type = other DNA
ctgtcccttattcattccct

SEQ ID NO: 34909 - DNA, 20 bp, synthetic construct
  misc_feature 1..20: note = Description of Artificial Sequence: Synthetic oligonucleotide
  misc_feature 1..20: note = Target: SCN10A; (+) strand; PAM type: NRG; PAM sequence: CAG
  source 1..20: mol_type = other DNA
ccttattcattccctaagcc

SEQ ID NO: 34910 - DNA, 20 bp, synthetic construct
  misc_feature 1..20: note = Description of Artificial Sequence: Synthetic oligonucleotide
  misc_feature 1..20: note = Target: SCN10A; (+) strand; PAM type: NRG; PAM sequence: TAG
  source 1..20: mol_type = other DNA
ctttactaaactctctctat

SEQ ID NO: 34911 - DNA, 20 bp, synthetic construct
  misc_feature 1..20: note = Description of Artificial Sequence: Synthetic oligonucleotide
  misc_feature 1..20: note = Target: SCN10A; (+) strand; PAM type: NRG; PAM sequence: CGG
  source 1..20: mol_type = other DNA
aactctctctattagcccat

SEQ ID NO: 34912 - DNA, 20 bp, synthetic construct
  misc_feature 1..20: note = Description of Artificial Sequence: Synthetic oligonucleotide
  misc_feature 1..20: note = Target: SCN10A; (+) strand; PAM type: NRG; PAM sequence: GAG
  source 1..20: mol_type = other DNA
ctctctctattagcccatcg

SEQ ID NO: 34913 - DNA, 20 bp, synthetic construct
  misc_feature 1..20: note = Description of Artificial Sequence: Synthetic oligonucleotide
  misc_feature 1..20: note = Target: SCN10A; (+) strand; PAM type: NRG; PAM sequence: TGG
  source 1..20: mol_type = other DNA
tctctattagcccatcggag

SEQ ID NO: 34914 - DNA, 20 bp, synthetic construct
  misc_feature 1..20: note = Description of Artificial Sequence: Synthetic oligonucleotide
  misc_feature 1..20: note = Target: SCN10A; (+) strand; PAM type: NRG; PAM sequence: TGG
  source 1..20: mol_type = other DNA
gtggtccatctgtttcttgc

SEQ ID NO: 34915 - DNA, 20 bp, synthetic construct
  misc_feature 1..20: note = Description of Artificial Sequence: Synthetic oligonucleotide
  misc_feature 1..20: note = Target: SCN10A; (+) strand; PAM type: NRG; PAM sequence: GGG
  source 1..20: mol_type = other DNA
tggtccatctgtttcttgct

SEQ ID NO: 34916 - DNA, 20 bp, synthetic construct
  misc_feature 1..20: note = Description of Artificial Sequence: Synthetic oligonucleotide
  misc_feature 1..20: note = Target: SCN10A; (+) strand; PAM type: NRG; PAM sequence: GAG
  source 1..20: mol_type = other DNA
accctgaatcacatgacatt

SEQ ID NO: 34917 - DNA, 20 bp, synthetic construct
  misc_feature 1..20: note = Description of Artificial Sequence: Synthetic oligonucleotide
  misc_feature 1..20: note = Target: SCN10A; (+) strand; PAM type: NRG; PAM sequence: CAG
  source 1..20: mol_type = other DNA
tgaatcacatgacattgagt

SEQ ID NO: 34918 - DNA, 20 bp, synthetic construct
  misc_feature 1..20: note = Description of Artificial Sequence: Synthetic oligonucleotide
  misc_feature 1..20: note = Target: SCN10A; (+) strand; PAM type: NRG; PAM sequence: GAG
  source 1..20: mol_type = other DNA
aatcacatgacattgagtca

SEQ ID NO: 34919 - DNA, 20 bp, synthetic construct
  misc_feature 1..20: note = Description of Artificial Sequence: Synthetic oligonucleotide
  misc_feature 1..20: note = Target: SCN10A; (+) strand; PAM type: NRG; PAM sequence: GAG
  source 1..20: mol_type = other DNA
atgacattgagtcagagact

SEQ ID NO: 34920 - DNA, 20 bp, synthetic construct
  misc_feature 1..20: note = Description of Artificial Sequence: Synthetic oligonucleotide
  misc_feature 1..20: note = Target: SCN10A; (+) strand; PAM type: NRG; PAM sequence: AAG
  source 1..20: mol_type = other DNA
attgagtcagagactgagct

SEQ ID NO: 34921 - DNA, 20 bp, synthetic construct
  misc_feature 1..20: note = Description of Artificial Sequence: Synthetic oligonucleotide
  misc_feature 1..20: note = Target: SCN10A; (+) strand; PAM type: NRG; PAM sequence: AGG
  source 1..20: mol_type = other DNA
ttgagtcagagactgagcta

SEQ ID NO: 34922 - DNA, 20 bp, synthetic construct
  misc_feature 1..20: note = Description of Artificial Sequence: Synthetic oligonucleotide
  misc_feature 1..20: note = Target: SCN10A; (+) strand; PAM type: NRG; PAM sequence: AAG
  source 1..20: mol_type = other DNA
gactgagctaaggcaactct

SEQ ID NO: 34923 - DNA, 20 bp, synthetic construct
  misc_feature 1..20: note = Description of Artificial Sequence: Synthetic oligonucleotide
  misc_feature 1..20: note = Target: SCN10A; (+) strand; PAM type: NRG; PAM sequence: CAG
  source 1..20: mol_type = other DNA
actctaagacttatctgtat

SEQ ID NO: 34924 - DNA, 20 bp, synthetic construct
  misc_feature 1..20: note = Description of Artificial Sequence: Synthetic oligonucleotide
  misc_feature 1..20: note = Target: SCN10A; (+) strand; PAM type: NRG; PAM sequence: TGG
  source 1..20: mol_type = other DNA
ctaagacttatctgtatcag

SEQ ID NO: 34925 - DNA, 20 bp, synthetic construct
  misc_feature 1..20: note = Description of Artificial Sequence: Synthetic oligonucleotide
  misc_feature 1..20: note = Target: SCN10A; (+) strand; PAM type: NRG; PAM sequence: TGG
  source 1..20: mol_type = other DNA
gtatcagtggaaccatttat

SEQ ID NO: 34926 - DNA, 20 bp, synthetic construct
  misc_feature 1..20: note = Description of Artificial Sequence: Synthetic oligonucleotide
  misc_feature 1..20: note = Target: SCN10A; (+) strand; PAM type: NRG; PAM sequence: TGG
  source 1..20: mol_type = other DNA
ctgcaattgcgctgtatccc

SEQ ID NO: 34927 - DNA, 20 bp, synthetic construct
  misc_feature 1..20: note = Description of Artificial Sequence: Synthetic oligonucleotide
  misc_feature 1..20: note = Target: SCN10A; (+) strand; PAM type: NRG; PAM sequence: TAG
  source 1..20: mol_type = other DNA
aattgcgctgtatccctggc

SEQ ID NO: 34928 - DNA, 20 bp, synthetic construct
  misc_feature 1..20: note = Description of Artificial Sequence: Synthetic oligonucleotide
  misc_feature 1..20: note = Target: SCN10A; (+) strand; PAM type: NRG; PAM sequence: CAG
  source 1..20: mol_type = other DNA
gcgctgtatccctggctagc

SEQ ID NO: 34929 - DNA, 20 bp, synthetic construct
  misc_feature 1..20: note = Description of Artificial Sequence: Synthetic oligonucleotide
  misc_feature 1..20: note = Target: SCN10A; (+) strand; PAM type: NRG; PAM sequence: GAG
  source 1..20: mol_type = other DNA
gctgtatccctggctagcca

SEQ ID NO: 34930 - DNA, 20 bp, synthetic construct
  misc_feature 1..20: note = Description of Artificial Sequence: Synthetic oligonucleotide
  misc_feature 1..20: note = Target: SCN10A; (+) strand; PAM type: NRG; PAM sequence: GAG
  source 1..20: mol_type = other DNA
tgtatccctggctagccaga

SEQ ID NO: 34931 - DNA, 20 bp, synthetic construct
  misc_feature 1..20: note = Description of Artificial Sequence: Synthetic oligonucleotide
  misc_feature 1..20: note = Target: SCN10A; (+) strand; PAM type: NRG; PAM sequence: AGG
  source 1..20: mol_type = other DNA
gtatccctggctagccagag

SEQ ID NO: 34932 - DNA, 20 bp, synthetic construct
  misc_feature 1..20: note = Description of Artificial Sequence: Synthetic oligonucleotide
  misc_feature 1..20: note = Target: SCN10A; (+) strand; PAM type: NRG; PAM sequence: GGG
  source 1..20: mol_type = other DNA
tatccctggctagccagaga

SEQ ID NO: 34933 - DNA, 20 bp, synthetic construct
  misc_feature 1..20: note = Description of Artificial Sequence: Synthetic oligonucleotide
  misc_feature 1..20: note = Target: SCN10A; (+) strand; PAM type: NRG; PAM sequence: TAG
  source 1..20: mol_type = other DNA
agagggcaaatgaaaaacac

SEQ ID NO: 34934 - DNA, 20 bp, synthetic construct
  misc_feature 1..20: note = Description of Artificial Sequence: Synthetic oligonucleotide
  misc_feature 1..20: note = Target: SCN10A; (+) strand; PAM type: NRG; PAM sequence: TGG
  source 1..20: mol_type = other DNA
agaaacatcattgctgaaac

SEQ ID NO: 34935 - DNA, 20 bp, synthetic construct
  misc_feature 1..20: note = Description of Artificial Sequence: Synthetic oligonucleotide
  misc_feature 1..20: note = Target: SCN10A; (+) strand; PAM type: NRG; PAM sequence: GAG
  source 1..20: mol_type = other DNA
aaacatcattgctgaaactg

SEQ ID NO: 34936 - DNA, 20 bp, synthetic construct
  misc_feature 1..20: note = Description of Artificial Sequence: Synthetic oligonucleotide
  misc_feature 1..20: note = Target: SCN10A; (+) strand; PAM type: NRG; PAM sequence: AGG
  source 1..20: mol_type = other DNA
aacatcattgctgaaactgg

SEQ ID NO: 34937 - DNA, 20 bp, synthetic construct
  misc_feature 1..20: note = Description of Artificial Sequence: Synthetic oligonucleotide
  misc_feature 1..20: note = Target: SCN10A; (+) strand; PAM type: NRG; PAM sequence: GGG
  source 1..20: mol_type = other DNA
acatcattgctgaaactgga

SEQ ID NO: 34938 - DNA, 20 bp, synthetic construct
  misc_feature 1..20: note = Description of Artificial Sequence: Synthetic oligonucleotide
  misc_feature 1..20: note = Target: SCN10A; (+) strand; PAM type: NRG; PAM sequence: GGG
  source 1..20: mol_type = other DNA
catcattgctgaaactggag

SEQ ID NO: 34939 - DNA, 20 bp, synthetic construct
  misc_feature 1..20: note = Description of Artificial Sequence: Synthetic oligonucleotide
  misc_feature 1..20: note = Target: SCN10A; (+) strand; PAM type: NRG; PAM sequence: GAG
  source 1..20: mol_type = other DNA
tcattgctgaaactggaggg

SEQ ID NO: 34940 - DNA, 20 bp, synthetic construct
  misc_feature 1..20: note = Description of Artificial Sequence: Synthetic oligonucleotide
  misc_feature 1..20: note = Target: SCN10A; (+) strand; PAM type: NRG; PAM sequence: GAG
  source 1..20: mol_type = other DNA
attgctgaaactggagggga

SEQ ID NO: 34941 - DNA, 20 bp, synthetic construct
  misc_feature 1..20: note = Description of Artificial Sequence: Synthetic oligonucleotide
  misc_feature 1..20: note = Target: SCN10A; (+) strand; PAM type: NRG; PAM sequence: CAG
  source 1..20: mol_type = other DNA
ggagagctcacattaactca

SEQ ID NO: 34942 - DNA, 20 bp, synthetic construct
  misc_feature 1..20: note = Description of Artificial Sequence: Synthetic oligonucleotide
  misc_feature 1..20: note = Target: SCN10A; (+) strand; PAM type: NRG; PAM sequence: GAG
  source 1..20: mol_type = other DNA
ctcacagctcccaatccaat

SEQ ID NO: 34943 - DNA, 20 bp, synthetic construct
  misc_feature 1..20: note = Description of Artificial Sequence: Synthetic oligonucleotide
  misc_feature 1..20: note = Target: SCN10A; (+) strand; PAM type: NRG; PAM sequence: AGG
  source 1..20: mol_type = other DNA
tcacagctcccaatccaatg

SEQ ID NO: 34944 - DNA, 20 bp, synthetic construct
  misc_feature 1..20: note = Description of Artificial Sequence: Synthetic oligonucleotide
  misc_feature 1..20: note = Target: SCN10A; (+) strand; PAM type: NRG; PAM sequence: AAG
  source 1..20: mol_type = other DNA
actctgcgattattctatta

SEQ ID NO: 34945 - DNA, 20 bp, synthetic construct
  misc_feature 1..20: note = Description of Artificial Sequence: Synthetic oligonucleotide
  misc_feature 1..20: note = Target: SCN10A; (+) strand; PAM type: NRG; PAM sequence: GAG
  source 1..20: mol_type = other DNA
tctgcgattattctattaaa

SEQ ID NO: 34946 - DNA, 20 bp, synthetic construct
  misc_feature 1..20: note = Description of Artificial Sequence: Synthetic oligonucleotide
  misc_feature 1..20: note = Target: SCN10A; (+) strand; PAM type: NRG; PAM sequence: TGG
  source 1..20: mol_type = other DNA
attattctattaaagagtgc

SEQ ID NO: 34947 - DNA, 20 bp, synthetic construct
  misc_feature 1..20: note = Description of Artificial Sequence: Synthetic oligonucleotide
  misc_feature 1..20: note = Target: SCN10A; (+) strand; PAM type: NRG; PAM sequence: CAG
  source 1..20: mol_type = other DNA
ttctattaaagagtgctggc

SEQ ID NO: 34948 - DNA, 20 bp, synthetic construct
  misc_feature 1..20: note = Description of Artificial Sequence: Synthetic oligonucleotide
  misc_feature 1..20: note = Target: SCN10A; (+) strand; PAM type: NRG; PAM sequence: TAG
  source 1..20: mol_type = other DNA
attaaagagtgctggccagt

SEQ ID NO: 34949 - DNA, 20 bp, synthetic construct
  misc_feature 1..20: note = Description of Artificial Sequence: Synthetic oligonucleotide
  misc_feature 1..20: note = Target: SCN10A; (+) strand; PAM type: NRG; PAM sequence: TGG
  source 1..20: mol_type = other DNA
gttgcctaatttgctcattt

SEQ ID NO: 34950 - DNA, 20 bp, synthetic construct
  misc_feature 1..20: note = Description of Artificial Sequence: Synthetic oligonucleotide
  misc_feature 1..20: note = Target: SCN10A; (+) strand; PAM type: NRG; PAM sequence: GAG
  source 1..20: mol_type = other DNA
tggcaaattatttcttctgt

SEQ ID NO: 34951 - DNA, 20 bp, synthetic construct
  misc_feature 1..20: note = Description of Artificial Sequence: Synthetic oligonucleotide
  misc_feature 1..20: note = Target: SCN10A; (+) strand; PAM type: NRG; PAM sequence: AAG
  source 1..20: mol_type = other DNA
aattatttcttctgtgagta

SEQ ID NO: 34952 - DNA, 20 bp, synthetic construct
  misc_feature 1..20: note = Description of Artificial Sequence: Synthetic oligonucleotide
  misc_feature 1..20: note = Target: SCN10A; (+) strand; PAM type: NRG; PAM sequence: AAG
  source 1..20: mol_type = other DNA
atttcttctgtgagtaaagc

SEQ ID NO: 34953 - DNA, 20 bp, synthetic construct
  misc_feature 1..20: note = Description of Artificial Sequence: Synthetic oligonucleotide
  misc_feature 1..20: note = Target: SCN10A; (+) strand; PAM type: NRG; PAM sequence: AGG
  source 1..20: mol_type = other DNA
tttcttctgtgagtaaagca

SEQ ID NO: 34954 - DNA, 20 bp, synthetic construct
  misc_feature 1..20: note = Description of Artificial Sequence: Synthetic oligonucleotide
  misc_feature 1..20: note = Target: SCN10A; (+) strand; PAM type: NRG; PAM sequence: CAG
  source 1..20: mol_type = other DNA
aggaatactgtgcttctatt

SEQ ID NO: 34955 - DNA, 20 bp, synthetic construct
  misc_feature 1..20: note = Description of Artificial Sequence: Synthetic oligonucleotide
  misc_feature 1..20: note = Target: SCN10A; (+) strand; PAM type: NRG; PAM sequence: AAG
  source 1..20: mol_type = other DNA
cttctattcagatctgtcct

SEQ ID NO: 34956 - DNA, 20 bp, synthetic construct
  misc_feature 1..20: note = Description of Artificial Sequence: Synthetic oligonucleotide
  misc_feature 1..20: note = Target: SCN10A; (+) strand; PAM type: NRG; PAM sequence: TGG
  source 1..20: mol_type = other DNA
agaaacttcctgaatttctc

SEQ ID NO: 34957 - DNA, 20 bp, synthetic construct
  misc_feature 1..20: note = Description of Artificial Sequence: Synthetic oligonucleotide
  misc_feature 1..20: note = Target: SCN10A; (+) strand; PAM type: NRG; PAM sequence: GGG
  source 1..20: mol_type = other DNA
gaaacttcctgaatttctct

SEQ ID NO: 34958 - DNA, 20 bp, synthetic construct
  misc_feature 1..20: note = Description of Artificial Sequence: Synthetic oligonucleotide
  misc_feature 1..20: note = Target: SCN10A; (+) strand; PAM type: NRG; PAM sequence: CAG
  source 1..20: mol_type = other DNA
ttctctgggtgccatttgcc

SEQ ID NO: 34959 - DNA, 20 bp, synthetic construct
  misc_feature 1..20: note = Description of Artificial Sequence: Synthetic oligonucleotide
  misc_feature 1..20: note = Target: SCN10A; (+) strand; PAM type: NRG; PAM sequence: TAG
  source 1..20: mol_type = other DNA
tgggtgccatttgcccagcc

SEQ ID NO: 34960 - DNA, 20 bp, synthetic construct
  misc_feature 1..20: note = Description of Artificial Sequence: Synthetic oligonucleotide
  misc_feature 1..20: note = Target: SCN10A; (+) strand; PAM type: NRG; PAM sequence: AAG
  source 1..20: mol_type = other DNA
gtgccatttgcccagcctag

SEQ ID NO: 34961 - DNA, 20 bp, synthetic construct
  misc_feature 1..20: note = Description of Artificial Sequence: Synthetic oligonucleotide
  misc_feature 1..20: note = Target: SCN10A; (+) strand; PAM type: NRG; PAM sequence: GAG
  source 1..20: mol_type = other DNA
gccatttgcccagcctagaa

SEQ ID NO: 34962 - DNA, 20 bp, synthetic construct
  misc_feature 1..20: note = Description of Artificial Sequence: Synthetic oligonucleotide
  misc_feature 1..20: note = Target: SCN10A; (+) strand; PAM type: NRG; PAM sequence: TAG
  source 1..20: mol_type = other DNA
ccagcctagaagagtttgca

SEQ ID NO: 34963 - DNA, 20 bp, synthetic construct
  misc_feature 1..20: note = Description of Artificial Sequence: Synthetic oligonucleotide
  misc_feature 1..20: note = Target: SCN10A; (+) strand; PAM type: NRG; PAM sequence: GAG
  source 1..20: mol_type = other DNA
agcctagaagagtttgcata

SEQ ID NO: 34964 - DNA, 20 bp, synthetic construct
  misc_feature 1..20: note = Description of Artificial Sequence: Synthetic oligonucleotide
  misc_feature 1..20: note = Target: SCN10A; (+) strand; PAM type: NRG; PAM sequence: AAG
  source 1..20: mol_type = other DNA
aagagtttgcatagagccat

SEQ ID NO: 34965 - DNA, 20 bp, synthetic construct
  misc_feature 1..20: note = Description of Artificial Sequence: Synthetic oligonucleotide
  misc_feature 1..20: note = Target: SCN10A; (+) strand; PAM type: NRG; PAM sequence: CAG
  source 1..20: mol_type = other DNA
agtttgcatagagccataag

SEQ ID NO: 34966 - DNA, 20 bp, synthetic construct
  misc_feature 1..20: note = Description of Artificial Sequence: Synthetic oligonucleotide
  misc_feature 1..20: note = Target: SCN10A; (+) strand; PAM type: NRG; PAM sequence: AGG
  source 1..20: mol_type = other DNA
gtttgcatagagccataagc

SEQ ID NO: 34967 - DNA, 20 bp, synthetic construct
  misc_feature 1..20: note = Description of Artificial Sequence: Synthetic oligonucleotide
  misc_feature 1..20: note = Target: SCN10A; (+) strand; PAM type: NRG; PAM sequence: AAG
  source 1..20: mol_type = other DNA
tgcatagagccataagcagg

SEQ ID NO: 34968 - DNA, 20 bp, synthetic construct
  misc_feature 1..20: note = Description of Artificial Sequence: Synthetic oligonucleotide
  misc_feature 1..20: note = Target: SCN10A; (+) strand; PAM type: NRG; PAM sequence: GAG
  source 1..20: mol_type = other DNA
catagagccataagcaggaa

SEQ ID NO: 34969 - DNA, 20 bp, synthetic construct
  misc_feature 1..20: note = Description of Artificial Sequence: Synthetic oligonucleotide
  misc_feature 1..20: note = Target: SCN10A; (+) strand; PAM type: NRG; PAM sequence: AAG
  source 1..20: mol_type = other DNA
agagccataagcaggaagag

SEQ ID NO: 34970 - DNA, 20 bp, synthetic construct
  misc_feature 1..20: note = Description of Artificial Sequence: Synthetic oligonucleotide
  misc_feature 1..20: note = Target: SCN10A; (+) strand; PAM type: NRG; PAM sequence: AGG
  source 1..20: mol_type = other DNA
gagccataagcaggaagaga

SEQ ID NO: 34971 - DNA, 20 bp, synthetic construct
  misc_feature 1..20: note = Description of Artificial Sequence: Synthetic oligonucleotide
  misc_feature 1..20: note = Target: SCN10A; (+) strand; PAM type: NRG; PAM sequence: GGG
  source 1..20: mol_type = other DNA
agccataagcaggaagagaa

SEQ ID NO: 34972 - DNA, 20 bp, synthetic construct
  misc_feature 1..20: note = Description of Artificial Sequence: Synthetic oligonucleotide
  misc_feature 1..20: note = Target: SCN10A; (+) strand; PAM type: NRG; PAM sequence: CAG
  source 1..20: mol_type = other DNA
gcaggaagagaagggtcctt

SEQ ID NO: 34973 - DNA, 20 bp, synthetic construct
  misc_feature 1..20: note = Description of Artificial Sequence: Synthetic oligonucleotide
  misc_feature 1..20: note = Target: SCN10A; (+) strand; PAM type: NRG; PAM sequence: AAG
  source 1..20: mol_type = other DNA
ttttctcatacctgtccaac

SEQ ID NO: 34974 - DNA, 20 bp, synthetic construct
  misc_feature 1..20: note = Description of Artificial Sequence: Synthetic oligonucleotide
  misc_feature 1..20: note = Target: SCN10A; (+) strand; PAM type: NRG; PAM sequence: AAG
  source 1..20: mol_type = other DNA
ctcatacctgtccaacaaga

SEQ ID NO: 34975 - DNA, 20 bp, synthetic construct
  misc_feature 1..20: note = Description of Artificial Sequence: Synthetic oligonucleotide
  misc_feature 1..20: note = Target: SCN10A; (+) strand; PAM type: NRG; PAM sequence: CAG
  source 1..20: mol_type = other DNA
atacctgtccaacaagaaag

SEQ ID NO: 34976 - DNA, 20 bp, synthetic construct
  misc_feature 1..20: note = Description of Artificial Sequence: Synthetic oligonucleotide
  misc_feature 1..20: note = Target: SCN10A; (+) strand; PAM type: NRG; PAM sequence: AGG
  source 1..20: mol_type = other DNA
tacctgtccaacaagaaagc

SEQ ID NO: 34977 - DNA, 20 bp, synthetic construct
  misc_feature 1..20: note = Description of Artificial Sequence: Synthetic oligonucleotide
  misc_feature 1..20: note = Target: SCN10A; (+) strand; PAM type: NRG; PAM sequence: GAG
  source 1..20: mol_type = other DNA
aagaaagcaggcctatcact

SEQ ID NO: 34978 - DNA, 20 bp, synthetic construct
  misc_feature 1..20: note = Description of Artificial Sequence: Synthetic oligonucleotide
  misc_feature 1..20: note = Target: SCN10A; (+) strand; PAM type: NRG; PAM sequence: AGG
  source 1..20: mol_type = other DNA
agaaagcaggcctatcactg

SEQ ID NO: 34979 - DNA, 20 bp, synthetic construct
  misc_feature 1..20: note = Description of Artificial Sequence: Synthetic oligonucleotide
  misc_feature 1..20: note = Target: SCN10A; (+) strand; PAM type: NRG; PAM sequence: CAG
  source 1..20: mol_type = other DNA
aagcaggcctatcactgagg

SEQ ID NO: 34980 - DNA, 20 bp, synthetic construct
  misc_feature 1..20: note = Description of Artificial Sequence: Synthetic oligonucleotide
  misc_feature 1..20: note = Target: SCN10A; (+) strand; PAM type: NRG; PAM sequence: GAG
  source 1..20: mol_type = other DNA
atcactgaggcagtgatgtt

SEQ ID NO: 34981 - DNA, 20 bp, synthetic construct
  misc_feature 1..20: note = Description of Artificial Sequence: Synthetic oligonucleotide
  misc_feature 1..20: note = Target: SCN10A; (+) strand; PAM type: NRG; PAM sequence: TGG
  source 1..20: mol_type = other DNA
actgaggcagtgatgttgag

SEQ ID NO: 34982 - DNA, 20 bp, synthetic construct
  misc_feature 1..20: note = Description of Artificial Sequence: Synthetic oligonucleotide
  misc_feature 1..20: note = Target: SCN10A; (+) strand; PAM type: NRG; PAM sequence: GGG
  source 1..20: mol_type = other DNA
ctgaggcagtgatgttgagt

SEQ ID NO: 34983 - DNA, 20 bp, synthetic construct
  misc_feature 1..20: note = Description of Artificial Sequence: Synthetic oligonucleotide
  misc_feature 1..20: note = Target: SCN10A; (+) strand; PAM type: NRG; PAM sequence: GGG
  source 1..20: mol_type = other DNA
tgaggcagtgatgttgagtg

SEQ ID NO: 34984 - DNA, 20 bp, synthetic construct
  misc_feature 1..20: note = Description of Artificial Sequence: Synthetic oligonucleotide
  misc_feature 1..20: note = Target: SCN10A; (+) strand; PAM type: NRG; PAM sequence: CAG
  source 1..20: mol_type = other DNA
gcagtgatgttgagtgggga

SEQ ID NO: 34985 - DNA, 20 bp, synthetic construct
  misc_feature 1..20: note = Description of Artificial Sequence: Synthetic oligonucleotide
  misc_feature 1..20: note = Target: SCN10A; (+) strand; PAM type: NRG; PAM sequence: GAG
  source 1..20: mol_type = other DNA
agtgatgttgagtggggaca

SEQ ID NO: 34986 - DNA, 20 bp, synthetic construct
  misc_feature 1..20: note = Description of Artificial Sequence: Synthetic oligonucleotide
  misc_feature 1..20: note = Target: SCN10A; (+) strand; PAM type: NRG; PAM sequence: AAG
  source 1..20: mol_type = other DNA
gatgttgagtggggacagag

SEQ ID NO: 34987 - DNA, 20 bp, synthetic construct
  misc_feature 1..20: note = Description of Artificial Sequence: Synthetic oligonucleotide
  misc_feature 1..20: note = Target: SCN10A; (+) strand; PAM type: NRG; PAM sequence: AAG
  source 1..20: mol_type = other DNA
ggggacagagaagcactgat

SEQ ID NO: 34988 - DNA, 20 bp, synthetic construct
  misc_feature 1..20: note = Description of Artificial Sequence: Synthetic oligonucleotide
  misc_feature 1..20: note = Target: SCN10A; (+) strand; PAM type: NRG; PAM sequence: TGG
  source 1..20: mol_type = other DNA
agaagcactgataagaaata

SEQ ID NO: 34989 - DNA, 20 bp, synthetic construct
  misc_feature 1..20: note = Description of Artificial Sequence: Synthetic oligonucleotide
  misc_feature 1..20: note = Target: SCN10A; (+) strand; PAM type: NRG; PAM sequence: GGG
  source 1..20: mol_type = other DNA
gaagcactgataagaaatat

SEQ ID NO: 34990 - DNA, 20 bp, synthetic construct
  misc_feature 1..20: note = Description of Artificial Sequence: Synthetic oligonucleotide
  misc_feature 1..20: note = Target: SCN10A; (+) strand; PAM type: NRG; PAM sequence: GGG
  source 1..20: mol_type = other DNA
aagcactgataagaaatatg

SEQ ID NO: 34991 - DNA, 20 bp, synthetic construct
  misc_feature 1..20: note = Description of Artificial Sequence: Synthetic oligonucleotide
  misc_feature 1..20: note = Target: SCN10A; (+) strand; PAM type: NRG; PAM sequence: TGG
  source 1..20: mol_type = other DNA
ataagaaatatggggtcaaa

SEQ ID NO: 34992 - DNA, 20 bp, synthetic construct
  misc_feature 1..20: note = Description of Artificial Sequence: Synthetic oligonucleotide
  misc_feature 1..20: note = Target: SCN10A; (+) strand; PAM type: NRG; PAM sequence: CAG
  source 1..20: mol_type = other DNA
tataatttgcatcactactg

SEQ ID NO: 34993 - DNA, 20 bp, synthetic construct
  misc_feature 1..20: note = Description of Artificial Sequence: Synthetic oligonucleotide
  misc_feature 1..20: note = Target: SCN10A; (+) strand; PAM type: NRG; PAM sequence: CAG
  source 1..20: mol_type = other DNA
atcactactgcagaataaac

SEQ ID NO: 34994 - DNA, 20 bp, synthetic construct
  misc_feature 1..20: note = Description of Artificial Sequence: Synthetic oligonucleotide
  misc_feature 1..20: note = Target: SCN10A; (+) strand; PAM type: NRG; PAM sequence: AGG
  source 1..20: mol_type = other DNA
tcactactgcagaataaacc

SEQ ID NO: 34995 - DNA, 20 bp, synthetic construct
  misc_feature 1..20: note = Description of Artificial Sequence: Synthetic oligonucleotide
  misc_feature 1..20: note = Target: SCN10A; (+) strand; PAM type: NRG; PAM sequence: CAG
  source 1..20: mol_type = other DNA
ccaggaaacctgtttgacct

SEQ ID NO: 34996 - DNA, 20 bp, synthetic construct
  misc_feature 1..20: note = Description of Artificial Sequence: Synthetic oligonucleotide
  misc_feature 1..20: note = Target: SCN10A; (+) strand; PAM type: NRG; PAM sequence: AGG
  source 1..20: mol_type = other DNA
caggaaacctgtttgacctc

SEQ ID NO: 34997 - DNA, 20 bp, synthetic construct
  misc_feature 1..20: note = Description of Artificial Sequence: Synthetic oligonucleotide
  misc_feature 1..20: note = Target: SCN10A; (+) strand; PAM type: NRG; PAM sequence: TGG
  source 1..20: mol_type = other DNA
actcaatctctctctctctc

SEQ ID NO: 34998 - DNA, 20 bp, synthetic construct
  misc_feature 1..20: note = Description of Artificial Sequence: Synthetic oligonucleotide
  misc_feature 1..20: note = Target: SCN10A; (+) strand; PAM type: NRG; PAM sequence: GGG
  source 1..20: mol_type = other DNA
ctcaatctctctctctctct

SEQ ID NO: 34999 - DNA, 20 bp, synthetic construct
  misc_feature 1..20: note = Description of Artificial Sequence: Synthetic oligonucleotide
  misc_feature 1..20: note = Target: SCN10A; (+) strand; PAM type: NRG; PAM sequence: AAG
  source 1..20: mol_type = other DNA
catcttctatgtctgtaaaa

SEQ ID NO: 35000 - DNA, 20 bp, synthetic construct
  misc_feature 1..20: note = Description of Artificial Sequence: Synthetic oligonucleotide
  misc_feature 1..20: note = Target: SCN10A; (+) strand; PAM type: NRG; PAM sequence: AGG
  source 1..20: mol_type = other DNA
atcttctatgtctgtaaaaa

SEQ ID NO: 35001 - DNA, 20 bp, synthetic construct
  misc_feature 1..20: note = Description of Artificial Sequence: Synthetic oligonucleotide
  misc_feature 1..20: note = Target: SCN10A; (+) strand; PAM type: NRG; PAM sequence: GAG
  source 1..20: mol_type = other DNA
cttctatgtctgtaaaaaag

SEQ ID NO: 35002 - DNA, 20 bp, synthetic construct
  misc_feature 1..20: note = Description of Artificial Sequence: Synthetic oligonucleotide
  misc_feature 1..20: note = Target: SCN10A; (+) strand; PAM type: NRG; PAM sequence: TAG
  source 1..20: mol_type = other DNA
ctatgtctgtaaaaaaggag

SEQ ID NO: 35003 - DNA, 20 bp, synthetic construct
  misc_feature 1..20: note = Description of Artificial Sequence: Synthetic oligonucleotide
  misc_feature 1..20: note = Target: SCN10A; (+) strand; PAM type: NRG; PAM sequence: TGG
  source 1..20: mol_type = other DNA
tctgtaaaaaaggagtagaa

SEQ ID NO: 35004 - DNA, 20 bp, synthetic construct
  misc_feature 1..20: note = Description of Artificial Sequence: Synthetic oligonucleotide
  misc_feature 1..20: note = Target: SCN10A; (+) strand; PAM type: NRG; PAM sequence: GGG
  source 1..20: mol_type = other DNA
ctgtaaaaaaggagtagaat

SEQ ID NO: 35005 - DNA, 20 bp, synthetic construct
  misc_feature 1..20: note = Description of Artificial Sequence: Synthetic oligonucleotide
  misc_feature 1..20: note = Target: SCN10A; (+) strand; PAM type: NRG; PAM sequence: GGG
  source 1..20: mol_type = other DNA
tgtaaaaaaggagtagaatg

SEQ ID NO: 35006 - DNA, 20 bp, synthetic construct
  misc_feature 1..20: note = Description of Artificial Sequence: Synthetic oligonucleotide
  misc_feature 1..20: note = Target: SCN10A; (+) strand; PAM type: NRG; PAM sequence: GAG
  source 1..20: mol_type = other DNA
taaaaaaggagtagaatggg

SEQ ID NO: 35007 - DNA, 20 bp, synthetic construct
  misc_feature 1..20: note = Description of Artificial Sequence: Synthetic oligonucleotide
  misc_feature 1..20: note = Target: SCN10A; (+) strand; PAM type: NRG; PAM sequence: AGG
  source 1..20: mol_type = other DNA
aaaaaaggagtagaatgggg

SEQ ID NO: 35008 - DNA, 20 bp, synthetic construct
  misc_feature 1..20: note = Description of Artificial Sequence: Synthetic oligonucleotide
  misc_feature 1..20: note = Target: SCN10A; (+) strand; PAM type: NRG; PAM sequence: TGG
  source 1..20: mol_type = other DNA
ggagtagaatggggaggcat

SEQ ID NO: 35009 - DNA, 20 bp, synthetic construct
  misc_feature 1..20: note = Description of Artificial Sequence: Synthetic oligonucleotide
  misc_feature 1..20: note = Target: SCN10A; (+) strand; PAM type: NRG; PAM sequence: CAG
  source 1..20: mol_type = other DNA
tagaatggggaggcattgga

SEQ ID NO: 35010 - DNA, 20 bp, synthetic construct
  misc_feature 1..20: note = Description of Artificial Sequence: Synthetic oligonucleotide
  misc_feature 1..20: note = Target: SCN10A; (+) strand; PAM type: NRG; PAM sequence: AGG
  source 1..20: mol_type = other DNA
agaatggggaggcattggac

SEQ ID NO: 35011 - DNA, 20 bp, synthetic construct
  misc_feature 1..20: note = Description of Artificial Sequence: Synthetic oligonucleotide
  misc_feature 1..20: note = Target: SCN10A; (+) strand; PAM type: NRG; PAM sequence: TGG
  source 1..20: mol_type = other DNA
ggaggcattggacaggatga

SEQ ID NO: 35012 - DNA, 20 bp, synthetic construct
  misc_feature 1..20: note = Description of Artificial Sequence: Synthetic oligonucleotide
  misc_feature 1..20: note = Target: SCN10A; (+) strand; PAM type: NRG; PAM sequence: AAG
  source 1..20: mol_type = other DNA
attggacaggatgatggcta

SEQ ID NO: 35013 - DNA, 20 bp, synthetic construct
  misc_feature 1..20: note = Description of Artificial Sequence: Synthetic oligonucleotide
  misc_feature 1..20: note = Target: SCN10A; (+) strand; PAM type: NRG; PAM sequence: TGG
  source 1..20: mol_type = other DNA
tggctaaagatcccttccat

SEQ ID NO: 35014 - DNA, 20 bp, synthetic construct
  misc_feature 1..20: note = Description of Artificial Sequence: Synthetic oligonucleotide
  misc_feature 1..20: note = Target: SCN10A; (+) strand; PAM type: NRG; PAM sequence: CAG
  source 1..20: mol_type = other DNA
tcccttccattggtgatact

SEQ ID NO: 35015 - DNA, 20 bp, synthetic construct
  misc_feature 1..20: note = Description of Artificial Sequence: Synthetic oligonucleotide
  misc_feature 1..20: note = Target: SCN10A; (+) strand; PAM type: NRG; PAM sequence: AGG
  source 1..20: mol_type = other DNA
cccttccattggtgatactc

SEQ ID NO: 35016 - DNA, 20 bp, synthetic construct
  misc_feature 1..20: note = Description of Artificial Sequence: Synthetic oligonucleotide
  misc_feature 1..20: note = Target: SCN10A; (+) strand; PAM type: NRG; PAM sequence: TGG
  source 1..20: mol_type = other DNA
ttggtgatactcaggcttct

SEQ ID NO: 35017 - DNA, 20 bp, synthetic construct
  misc_feature 1..20: note = Description of Artificial Sequence: Synthetic oligonucleotide
  misc_feature 1..20: note = Target: SCN10A; (+) strand; PAM type: NRG; PAM sequence: AAG
  source 1..20: mol_type = other DNA
atactcaggcttcttggctc

SEQ ID NO: 35018 - DNA, 20 bp, synthetic construct
  misc_feature 1..20: note = Description of Artificial Sequence: Synthetic oligonucleotide
  misc_feature 1..20: note = Target: SCN10A; (+) strand; PAM type: NRG; PAM sequence: AGG
  source 1..20: mol_type = other DNA
tactcaggcttcttggctca

SEQ ID NO: 35019 - DNA, 20 bp, synthetic construct
  misc_feature 1..20: note = Description of Artificial Sequence: Synthetic oligonucleotide
  misc_feature 1..20: note = Target: SCN10A; (+) strand; PAM type: NRG; PAM sequence: TAG
  source 1..20: mol_type = other DNA
gcttcttggctcaaggcttc

SEQ ID NO: 35020 - DNA, 20 bp, synthetic construct
  misc_feature 1..20: note = Description of Artificial Sequence: Synthetic oligonucleotide
  misc_feature 1..20: note = Target: SCN10A; (+) strand; PAM type: NRG; PAM sequence: AGG
  source 1..20: mol_type = other DNA
cttcttggctcaaggcttct

SEQ ID NO: 35021 - DNA, 20 bp, synthetic construct
  misc_feature 1..20: note = Description of Artificial Sequence: Synthetic oligonucleotide
  misc_feature 1..20: note = Target: SCN10A; (+) strand; PAM type: NRG; PAM sequence: TGG
  source 1..20: mol_type = other DNA
cttggctcaaggcttctagg

SEQ ID NO: 35022 - DNA, 20 bp, synthetic construct
  misc_feature 1..20: note = Description of Artificial Sequence: Synthetic oligonucleotide
  misc_feature 1..20: note = Target: SCN10A; (+) strand; PAM type: NRG; PAM sequence: AAG
  source 1..20: mol_type = other DNA
ggctcaaggcttctaggtgg

SEQ ID NO: 35023 - DNA, 20 bp, synthetic construct
  misc_feature 1..20: note = Description of Artificial Sequence: Synthetic oligonucleotide
  misc_feature 1..20: note = Target: SCN10A; (+) strand; PAM type: NRG; PAM sequence: CAG
  source 1..20: mol_type = other DNA
caaggcttctaggtggaaga

SEQ ID NO: 35024 - DNA, 20 bp, synthetic construct
  misc_feature 1..20: note = Description of Artificial Sequence: Synthetic oligonucleotide
  misc_feature 1..20: note = Target: SCN10A; (+) strand; PAM type: NRG; PAM sequence: GAG
  source 1..20: mol_type = other DNA
ttctaggtggaagacagcct

SEQ ID NO: 35025 - DNA, 20 bp, synthetic construct
  misc_feature 1..20: note = Description of Artificial Sequence: Synthetic oligonucleotide
  misc_feature 1..20: note = Target: SCN10A; (+) strand; PAM type: NRG; PAM sequence: AGG
  source 1..20: mol_type = other DNA
tctaggtggaagacagcctg

SEQ ID NO: 35026 - DNA, 20 bp, synthetic construct
  misc_feature 1..20: note = Description of Artificial Sequence: Synthetic oligonucleotide
  misc_feature 1..20: note = Target: SCN10A; (+) strand; PAM type: NRG; PAM sequence: GGG
  source 1..20: mol_type = other DNA
ctaggtggaagacagcctga

SEQ ID NO: 35027 - DNA, 20 bp, synthetic construct
  misc_feature 1..20: note = Description of Artificial Sequence: Synthetic oligonucleotide
  misc_feature 1..20: note = Target: SCN10A; (+) strand; PAM type: NRG; PAM sequence: GAG
  source 1..20: mol_type = other DNA
aggtggaagacagcctgagg

SEQ ID NO: 35028 - DNA, 20 bp, synthetic construct
  misc_feature 1..20: note = Description of Artificial Sequence: Synthetic oligonucleotide
  misc_feature 1..20: note = Target: SCN10A; (+) strand; PAM type: NRG; PAM sequence: AAG
  source 1..20: mol_type = other DNA
agacagcctgagggagtctg

SEQ ID NO: 35029 - DNA, 20 bp, synthetic construct
  misc_feature 1..20: note = Description of Artificial Sequence: Synthetic oligonucleotide
  misc_feature 1..20: note = Target: SCN10A; (+) strand; PAM type: NRG; PAM sequence: GAG
  source 1..20: mol_type = other DNA
gaagcattcacaaactcacc

SEQ ID NO: 35030 - DNA, 20 bp, synthetic construct
  misc_feature 1..20: note = Description of Artificial Sequence: Synthetic oligonucleotide
  misc_feature 1..20: note = Target: SCN10A; (+) strand; PAM type: NRG; PAM sequence: CAG
  source 1..20: mol_type = other DNA
caaactcaccgagacatcga

SEQ ID NO: 35031 - DNA, 20 bp, synthetic construct
  misc_feature 1..20: note = Description of Artificial Sequence: Synthetic oligonucleotide
  misc_feature 1..20: note = Target: SCN10A; (+) strand; PAM type: NRG; PAM sequence: CAG
  source 1..20: mol_type = other DNA
caccgagacatcgacagctc

SEQ ID NO: 35032 - DNA, 20 bp, synthetic construct
  misc_feature 1..20: note = Description of Artificial Sequence: Synthetic oligonucleotide
  misc_feature 1..20: note = Target: SCN10A; (+) strand; PAM type: NRG; PAM sequence: AGG
  source 1..20: mol_type = other DNA
accgagacatcgacagctcc

SEQ ID NO: 35033 - DNA, 20 bp, synthetic construct
  misc_feature 1..20: note = Description of Artificial Sequence: Synthetic oligonucleotide
  misc_feature 1..20: note = Target: SCN10A; (+) strand; PAM type: NRG; PAM sequence: GGG
  source 1..20: mol_type = other DNA
ccgagacatcgacagctcca

SEQ ID NO: 35034 - DNA, 20 bp, synthetic construct
  misc_feature 1..20: note = Description of Artificial Sequence: Synthetic oligonucleotide
  misc_feature 1..20: note = Target: SCN10A; (+) strand; PAM type: NRG; PAM sequence: GGG
  source 1..20: mol_type = other DNA
cgagacatcgacagctccag

SEQ ID NO: 35035 - DNA, 20 bp, synthetic construct
  misc_feature 1..20: note = Description of Artificial Sequence: Synthetic oligonucleotide
  misc_feature 1..20: note = Target: SCN10A; (+) strand; PAM type: NRG; PAM sequence: AAG
  source 1..20: mol_type = other DNA
acatcgacagctccaggggc

SEQ ID NO: 35036 - DNA, 20 bp, synthetic construct
  misc_feature 1..20: note = Description of Artificial Sequence: Synthetic oligonucleotide
  misc_feature 1..20: note = Target: SCN10A; (+) strand; PAM type: NRG; PAM sequence: TAG
  source 1..20: mol_type = other DNA
agctccaggggcaagctcac

SEQ ID NO: 35037 - DNA, 20 bp, synthetic construct
  misc_feature 1..20: note = Description of Artificial Sequence: Synthetic oligonucleotide
  misc_feature 1..20: note = Target: SCN10A; (+) strand; PAM type: NRG; PAM sequence: TGG
  source 1..20: mol_type = other DNA
tccaggggcaagctcactag

SEQ ID NO: 35038 - DNA, 20 bp, synthetic construct
  misc_feature 1..20: note = Description of Artificial Sequence: Synthetic oligonucleotide
  misc_feature 1..20: note = Target: SCN10A; (+) strand; PAM type: NRG; PAM sequence: GGG
  source 1..20: mol_type = other DNA
ccaggggcaagctcactagt

SEQ ID NO: 35039 - DNA, 20 bp, synthetic construct
  misc_feature 1..20: note = Description of Artificial Sequence: Synthetic oligonucleotide
  misc_feature 1..20: note = Target: SCN10A; (+) strand; PAM type: NRG; PAM sequence: CGG
  source 1..20: mol_type = other DNA
ggggcaagctcactagtggg

SEQ ID NO: 35040 - DNA, 20 bp, synthetic construct
  misc_feature 1..20: note = Description of Artificial Sequence: Synthetic oligonucleotide
  misc_feature 1..20: note = Target: SCN10A; (+) strand; PAM type: NRG; PAM sequence: CGG
  source 1..20: mol_type = other DNA
gcaagctcactagtgggcgg

SEQ ID NO: 35041 - DNA, 20 bp, synthetic construct
  misc_feature 1..20: note = Description of Artificial Sequence: Synthetic oligonucleotide
  misc_feature 1..20: note = Target: SCN10A; (+) strand; PAM type: NRG; PAM sequence: TGG
  source 1..20: mol_type = other DNA
gctcactagtgggcggcggt

SEQ ID NO: 35042 - DNA, 20 bp, synthetic construct
  misc_feature 1..20: note = Description of Artificial Sequence: Synthetic oligonucleotide
  misc_feature 1..20: note = Target: SCN10A; (+) strand; PAM type: NRG; PAM sequence: TGG
  source 1..20: mol_type = other DNA
gtgttcatcttctccatgcc

SEQ ID NO: 35043 - DNA, 20 bp, synthetic construct
  misc_feature 1..20: note = Description of Artificial Sequence: Synthetic oligonucleotide
  misc_feature 1..20: note = Target: SCN10A; (+) strand; PAM type: NRG; PAM sequence: GAG
  source 1..20: mol_type = other DNA
gttcatcttctccatgcctg

SEQ ID NO: 35044 - DNA, 20 bp, synthetic construct
  misc_feature 1..20: note = Description of Artificial Sequence: Synthetic oligonucleotide
  misc_feature 1..20: note = Target: SCN10A; (+) strand; PAM type: NRG; PAM sequence: CAG
  source 1..20: mol_type = other DNA
atcttctccatgcctggagt

SEQ ID NO: 35045 - DNA, 20 bp, synthetic construct
  misc_feature 1..20: note = Description of Artificial Sequence: Synthetic oligonucleotide
  misc_feature 1..20: note = Target: SCN10A; (+) strand; PAM type: NRG; PAM sequence: AGG
  source 1..20: mol_type = other DNA
tcttctccatgcctggagtc

SEQ ID NO: 35046 - DNA, 20 bp, synthetic construct
  misc_feature 1..20: note = Description of Artificial Sequence: Synthetic oligonucleotide
  misc_feature 1..20: note = Target: SCN10A; (+) strand; PAM type: NRG; PAM sequence: GGG
  source 1..20: mol_type = other DNA
cttctccatgcctggagtca

SEQ ID NO: 35047 - DNA, 20 bp, synthetic construct
  misc_feature 1..20: note = Description of Artificial Sequence: Synthetic oligonucleotide
  misc_feature 1..20: note = Target: SCN10A; (+) strand; PAM type: NRG; PAM sequence: TGG
  source 1..20: mol_type = other DNA
atgcctggagtcagggttgc

SEQ ID NO: 35048 - DNA, 20 bp, synthetic construct
  misc_feature 1..20: note = Description of Artificial Sequence: Synthetic oligonucleotide
  misc_feature 1..20: note = Target: SCN10A; (+) strand; PAM type: NRG; PAM sequence: GGG
  source 1..20: mol_type = other DNA
tgcctggagtcagggttgct

SEQ ID NO: 35049 - DNA, 20 bp, synthetic construct
  misc_feature 1..20: note = Description of Artificial Sequence: Synthetic oligonucleotide
  misc_feature 1..20: note = Target: SCN10A; (+) strand; PAM type: NRG; PAM sequence: GAG
  source 1..20: mol_type = other DNA
ggagtcagggttgctgggtt

SEQ ID NO: 35050 - DNA, 20 bp, synthetic construct
  misc_feature 1..20: note = Description of Artificial Sequence: Synthetic oligonucleotide
  misc_feature 1..20: note = Target: SCN10A; (+) strand; PAM type: NRG; PAM sequence: AGG
  source 1..20: mol_type = other DNA
gagtcagggttgctgggttg

SEQ ID NO: 35051 - DNA, 20 bp, synthetic construct
  misc_feature 1..20: note = Description of Artificial Sequence: Synthetic oligonucleotide
  misc_feature 1..20: note = Target: SCN10A; (+) strand; PAM type: NRG; PAM sequence: AAG
  source 1..20: mol_type = other DNA
tcagggttgctgggttgagg

SEQ ID NO: 35052 - DNA, 20 bp, synthetic construct
  misc_feature 1..20: note = Description of Artificial Sequence: Synthetic oligonucleotide
  misc_feature 1..20: note = Target: SCN10A; (+) strand; PAM type: NRG; PAM sequence: GAG
  source 1..20: mol_type = other DNA
agggttgctgggttgaggaa

SEQ ID NO: 35053 - DNA, 20 bp, synthetic construct
  misc_feature 1..20: note = Description of Artificial Sequence: Synthetic oligonucleotide
  misc_feature 1..20: note = Target: SCN10A; (+) strand; PAM type: NRG; PAM sequence: AGG
  source 1..20: mol_type = other DNA
gggttgctgggttgaggaag

SEQ ID NO: 35054 - DNA, 20 bp, synthetic construct
  misc_feature 1..20: note = Description of Artificial Sequence: Synthetic oligonucleotide
  misc_feature 1..20: note = Target: SCN10A; (+) strand; PAM type: NRG; PAM sequence: GGG
  source 1..20: mol_type = other DNA
ggttgctgggttgaggaaga

SEQ ID NO: 35055 - DNA, 20 bp, synthetic construct
  misc_feature 1..20: note = Description of Artificial Sequence: Synthetic oligonucleotide
  misc_feature 1..20: note = Target: SCN10A; (+) strand; PAM type: NRG; PAM sequence: TAG
  source 1..20: mol_type = other DNA
gggttgaggaagagggcttc

SEQ ID NO: 35056 - DNA, 20 bp, synthetic construct
  misc_feature 1..20: note = Description of Artificial Sequence: Synthetic oligonucleotide
  misc_feature 1..20: note = Target: SCN10A; (+) strand; PAM type: NRG; PAM sequence: AGG
  source 1..20: mol_type = other DNA
ggttgaggaagagggcttct

SEQ ID NO: 35057 - DNA, 20 bp, synthetic construct
  misc_feature 1..20: note = Description of Artificial Sequence: Synthetic oligonucleotide
  misc_feature 1..20: note = Target: SCN10A; (+) strand; PAM type: NRG; PAM sequence: GGG
  source 1..20: mol_type = other DNA
gttgaggaagagggcttcta

SEQ ID NO: 35058 - DNA, 20 bp, synthetic construct
  misc_feature 1..20: note = Description of Artificial Sequence: Synthetic oligonucleotide
  misc_feature 1..20: note = Target: SCN10A; (+) strand; PAM type: NRG; PAM sequence: GAG
  source 1..20: mol_type = other DNA
tgaggaagagggcttctagg

SEQ ID NO: 35059 - DNA, 20 bp, synthetic construct
  misc_feature 1..20: note = Description of Artificial Sequence: Synthetic oligonucleotide
  misc_feature 1..20: note = Target: SCN10A; (+) strand; PAM type: NRG; PAM sequence: AGG
  source 1..20: mol_type = other DNA
gaggaagagggcttctaggg

SEQ ID NO: 35060 - DNA, 20 bp, synthetic construct
  misc_feature 1..20: note = Description of Artificial Sequence: Synthetic oligonucleotide
  misc_feature 1..20: note = Target: SCN10A; (+) strand; PAM type: NRG; PAM sequence: GGG
  source 1..20: mol_type = other DNA
aggaagagggcttctaggga

SEQ ID NO: 35061 - DNA, 20 bp, synthetic construct
  misc_feature 1..20: note = Description of Artificial Sequence: Synthetic oligonucleotide
  misc_feature 1..20: note = Target: SCN10A; (+) strand; PAM type: NRG; PAM sequence: GGG
  source 1..20: mol_type = other DNA
ggaagagggcttctagggag

SEQ ID NO: 35062 - DNA, 20 bp, synthetic construct
  misc_feature 1..20: note = Description of Artificial Sequence: Synthetic oligonucleotide
  misc_feature 1..20: note = Target: SCN10A; (+) strand; PAM type: NRG; PAM sequence: GGG
  source 1..20: mol_type = other DNA
gaagagggcttctagggagg

SEQ ID NO: 35063 - DNA, 20 bp, synthetic construct
  misc_feature 1..20: note = Description of Artificial Sequence: Synthetic oligonucleotide
  misc_feature 1..20: note = Target: SCN10A; (+) strand; PAM type: NRG; PAM sequence: TGG
  source 1..20: mol_type = other DNA
ttctagggagggggccttgc

SEQ ID NO: 35064 - DNA, 20 bp, synthetic construct
  misc_feature 1..20: note = Description of Artificial Sequence: Synthetic oligonucleotide
  misc_feature 1..20: note = Target: SCN10A; (+) strand; PAM type: NRG; PAM sequence: CAG
  source 1..20: mol_type = other DNA
agggagggggccttgctggc

SEQ ID NO: 35065 - DNA, 20 bp, synthetic construct
  misc_feature 1..20: note = Description of Artificial Sequence: Synthetic oligonucleotide
  misc_feature 1..20: note = Target: SCN10A; (+) strand; PAM type: NRG; PAM sequence: CAG
  source 1..20: mol_type = other DNA
tgctggccagcacccccacc

SEQ ID NO: 35066 - DNA, 20 bp, synthetic construct
  misc_feature 1..20: note = Description of Artificial Sequence: Synthetic oligonucleotide
  misc_feature 1..20: note = Target: SCN10A; (+) strand; PAM type: NRG; PAM sequence: CAG
  source 1..20: mol_type = other DNA
tggccagcacccccacccag

SEQ ID NO: 35067 - DNA, 20 bp, synthetic construct
  misc_feature 1..20: note = Description of Artificial Sequence: Synthetic oligonucleotide
  misc_feature 1..20: note = Target: SCN10A; (+) strand; PAM type: NRG; PAM sequence: CAG
  source 1..20: mol_type = other DNA
ccagcacccccacccagcag

SEQ ID NO: 35068 - DNA, 20 bp, synthetic construct
  misc_feature 1..20: note = Description of Artificial Sequence: Synthetic oligonucleotide
  misc_feature 1..20: note = Target: SCN10A; (+) strand; PAM type: NRG; PAM sequence: GAG
  source 1..20: mol_type = other DNA
agcacccccacccagcagca

SEQ ID NO: 35069 - DNA, 20 bp, synthetic construct
  misc_feature 1..20: note = Description of Artificial Sequence: Synthetic oligonucleotide
  misc_feature 1..20: note = Target: SCN10A; (+) strand; PAM type: NRG; PAM sequence: GAG
  source 1..20: mol_type = other DNA
cacccccacccagcagcaga

SEQ ID NO: 35070 - DNA, 20 bp, synthetic construct
  misc_feature 1..20: note = Description of Artificial Sequence: Synthetic oligonucleotide
  misc_feature 1..20: note = Target: SCN10A; (+) strand; PAM type: NRG; PAM sequence: TGG
  source 1..20: mol_type = other DNA
ccagcagcagagagccccga

SEQ ID NO: 35071 - DNA, 20 bp, synthetic construct
  misc_feature 1..20: note = Description of Artificial Sequence: Synthetic oligonucleotide
  misc_feature 1..20: note = Target: SCN10A; (+) strand; PAM type: NRG; PAM sequence: TGG
  source 1..20: mol_type = other DNA
gagagccccgatggctttcg

SEQ ID NO: 35072 - DNA, 20 bp, synthetic construct
  misc_feature 1..20: note = Description of Artificial Sequence: Synthetic oligonucleotide
  misc_feature 1..20: note = Target: SCN10A; (+) strand; PAM type: NRG; PAM sequence: CAG
  source 1..20: mol_type = other DNA
ccgatggctttcgtggtctc

SEQ ID NO: 35073 - DNA, 20 bp, synthetic construct
  misc_feature 1..20: note = Description of Artificial Sequence: Synthetic oligonucleotide
  misc_feature 1..20: note = Target: SCN10A; (+) strand; PAM type: NRG; PAM sequence: AGG
  source 1..20: mol_type = other DNA
cgatggctttcgtggtctcc

SEQ ID NO: 35074 - DNA, 20 bp, synthetic construct
  misc_feature 1..20: note = Description of Artificial Sequence: Synthetic oligonucleotide
  misc_feature 1..20: note = Target: SCN10A; (+) strand; PAM type: NRG; PAM sequence: AAG
  source 1..20: mol_type = other DNA
ggctttcgtggtctccagga

SEQ ID NO: 35075 - DNA, 20 bp, synthetic construct
  misc_feature 1..20: note = Description of Artificial Sequence: Synthetic oligonucleotide
  misc_feature 1..20: note = Target: SCN10A; (+) strand; PAM type: NRG; PAM sequence: CAG
  source 1..20: mol_type = other DNA
tccatcatctgtgactccct

SEQ ID NO: 35076 - DNA, 20 bp, synthetic construct
  misc_feature 1..20: note = Description of Artificial Sequence: Synthetic oligonucleotide
  misc_feature 1..20: note = Target: SCN10A; (+) strand; PAM type: NRG; PAM sequence: AGG
  source 1..20: mol_type = other DNA
ccatcatctgtgactccctc

SEQ ID NO: 35077 - DNA, 20 bp, synthetic construct
  misc_feature 1..20: note = Description of Artificial Sequence: Synthetic oligonucleotide
  misc_feature 1..20: note = Target: SCN10A; (+) strand; PAM type: NRG; PAM sequence: GGG
  source 1..20: mol_type = other DNA
catcatctgtgactccctca

SEQ ID NO: 35078 - DNA, 20 bp, synthetic construct
  misc_feature 1..20: note = Description of Artificial Sequence: Synthetic oligonucleotide
  misc_feature 1..20: note = Target: SCN10A; (+) strand; PAM type: NRG; PAM sequence: GAG
  source 1..20: mol_type = other DNA
tcatctgtgactccctcagg

SEQ ID NO: 35079 - DNA, 20 bp, synthetic construct
  misc_feature 1..20: note = Description of Artificial Sequence: Synthetic oligonucleotide
  misc_feature 1..20: note = Target: SCN10A; (+) strand; PAM type: NRG; PAM sequence: GAG
  source 1..20: mol_type = other DNA
ctgtgactccctcagggagt

SEQ ID NO: 35080 - DNA, 20 bp, synthetic construct
  misc_feature 1..20: note = Description of Artificial Sequence: Synthetic oligonucleotide
  misc_feature 1..20: note = Target: SCN10A; (+) strand; PAM type: NRG; PAM sequence: CGG
  source 1..20: mol_type = other DNA
cctcagggagtgagatatct

SEQ ID NO: 35081 - DNA, 20 bp, synthetic construct
  misc_feature 1..20: note = Description of Artificial Sequence: Synthetic oligonucleotide
  misc_feature 1..20: note = Target: SCN10A; (+) strand; PAM type: NRG; PAM sequence: CAG
  source 1..20: mol_type = other DNA
agggagtgagatatctcggc

SEQ ID NO: 35082 - DNA, 20 bp, synthetic construct
  misc_feature 1..20: note = Description of Artificial Sequence: Synthetic oligonucleotide
  misc_feature 1..20: note = Target: SCN10A; (+) strand; PAM type: NRG; PAM sequence: AGG
  source 1..20: mol_type = other DNA
gggagtgagatatctcggcc

SEQ ID NO: 35083 - DNA, 20 bp, synthetic construct
  misc_feature 1..20: note = Description of Artificial Sequence: Synthetic oligonucleotide
  misc_feature 1..20: note = Target: SCN10A; (+) strand; PAM type: NRG; PAM sequence: GGG
  source 1..20: mol_type = other DNA
ggagtgagatatctcggcca

SEQ ID NO: 35084 - DNA, 20 bp, synthetic construct
  misc_feature 1..20: note = Description of Artificial Sequence: Synthetic oligonucleotide
  misc_feature 1..20: note = Target: SCN10A; (+) strand; PAM type: NRG; PAM sequence: GGG
  source 1..20: mol_type = other DNA
gagtgagatatctcggccag

SEQ ID NO: 35085 - DNA, 20 bp, synthetic construct
  misc_feature 1..20: note = Description of Artificial Sequence: Synthetic oligonucleotide
  misc_feature 1..20: note = Target: SCN10A; (+) strand; PAM type: NRG; PAM sequence: CGG
  source 1..20: mol_type = other DNA
agatatctcggccaggggac

SEQ ID NO: 35086 - DNA, 20 bp, synthetic construct
  misc_feature 1..20: note = Description of Artificial Sequence: Synthetic oligonucleotide
  misc_feature 1..20: note = Target: SCN10A; (+) strand; PAM type: NRG; PAM sequence: TGG
  source 1..20: mol_type = other DNA
ctcggccaggggaccggaaa

SEQ ID NO: 35087 - DNA, 20 bp, synthetic construct
  misc_feature 1..20: note = Description of Artificial Sequence: Synthetic oligonucleotide
  misc_feature 1..20: note = Target: SCN10A; (+) strand; PAM type: NRG; PAM sequence: TAG
  source 1..20: mol_type = other DNA
atggaacacactgccatgac

SEQ ID NO: 35088 - DNA, 20 bp, synthetic construct
  misc_feature 1..20: note = Description of Artificial Sequence: Synthetic oligonucleotide
  misc_feature 1..20: note = Target: SCN10A; (+) strand; PAM type: NRG; PAM sequence: CGG
  source 1..20: mol_type = other DNA
acacactgccatgactagcc

SEQ ID NO: 35089 - DNA, 20 bp, synthetic construct
  misc_feature 1..20: note = Description of Artificial Sequence: Synthetic oligonucleotide
  misc_feature 1..20: note = Target: SCN10A; (+) strand; PAM type: NRG; PAM sequence: CAG
  source 1..20: mol_type = other DNA
atgactagcccggcgttttc

SEQ ID NO: 35090 - DNA, 20 bp, synthetic construct
  misc_feature 1..20: note = Description of Artificial Sequence: Synthetic oligonucleotide
  misc_feature 1..20: note = Target: SCN10A; (+) strand; PAM type: NRG; PAM sequence: GAG
  source 1..20: mol_type = other DNA
gactagcccggcgttttcca

SEQ ID NO: 35091 - DNA, 20 bp, synthetic construct
  misc_feature 1..20: note = Description of Artificial Sequence: Synthetic oligonucleotide
  misc_feature 1..20: note = Target: SCN10A; (+) strand; PAM type: NRG; PAM sequence: AGG
  source 1..20: mol_type = other DNA
actagcccggcgttttccag

SEQ ID NO: 35092 - DNA, 20 bp, synthetic construct
  misc_feature 1..20: note = Description of Artificial Sequence: Synthetic oligonucleotide
  misc_feature 1..20: note = Target: SCN10A; (+) strand; PAM type: NRG; PAM sequence: GAG
  source 1..20: mol_type = other DNA
gcccggcgttttccagaggc

SEQ ID NO: 35093 - DNA, 20 bp, synthetic construct
  misc_feature 1..20: note = Description of Artificial Sequence: Synthetic oligonucleotide
  misc_feature 1..20: note = Target: SCN10A; (+) strand; PAM type: NRG; PAM sequence: AGG
  source 1..20: mol_type = other DNA
cccggcgttttccagaggcg

SEQ ID NO: 35094 - DNA, 20 bp, synthetic construct
  misc_feature 1..20: note = Description of Artificial Sequence: Synthetic oligonucleotide
  misc_feature 1..20: note = Target: SCN10A; (+) strand; PAM type: NRG; PAM sequence: TAG
  source 1..20: mol_type = other DNA
cgttttccagaggcgaggcc

SEQ ID NO: 35095 - DNA, 20 bp, synthetic construct
  misc_feature 1..20: note = Description of Artificial Sequence: Synthetic oligonucleotide
  misc_feature 1..20: note = Target: SCN10A; (+) strand; PAM type: NRG; PAM sequence: AAG
  source 1..20: mol_type = other DNA
tccagaggcgaggcctagaa

SEQ ID NO: 35096 - DNA, 20 bp, synthetic construct
  misc_feature 1..20: note = Description of Artificial Sequence: Synthetic oligonucleotide
  misc_feature 1..20: note = Target: SCN10A; (+) strand; PAM type: NRG; PAM sequence: TGG
  source 1..20: mol_type = other DNA
aggcgaggcctagaaaagac

SEQ ID NO: 35097 - DNA, 20 bp, synthetic construct
  misc_feature 1..20: note = Description of Artificial Sequence: Synthetic oligonucleotide
  misc_feature 1..20: note = Target: SCN10A; (+) strand; PAM type: NRG; PAM sequence: GGG
  source 1..20: mol_type = other DNA
ggcgaggcctagaaaagact

SEQ ID NO: 35098 - DNA, 20 bp, synthetic construct
  misc_feature 1..20: note = Description of Artificial Sequence: Synthetic oligonucleotide
  misc_feature 1..20: note = Target: SCN10A; (+) strand; PAM type: NRG; PAM sequence: AAG
  source 1..20: mol_type = other DNA
aaagactgggcattgcccca

SEQ ID NO: 35099 - DNA, 20 bp, synthetic construct
  misc_feature 1..20: note = Description of Artificial Sequence: Synthetic oligonucleotide
  misc_feature 1..20: note = Target: SCN10A; (+) strand; PAM type: NRG; PAM sequence: AGG
  source 1..20: mol_type = other DNA
aagactgggcattgccccaa

SEQ ID NO: 35100 - DNA, 20 bp, synthetic construct
  misc_feature 1..20: note = Description of Artificial Sequence: Synthetic oligonucleotide
  misc_feature 1..20: note = Target: SCN10A; (+) strand; PAM type: NRG; PAM sequence: GAG
  source 1..20: mol_type = other DNA
gactgggcattgccccaaag

SEQ ID NO: 35101 - DNA, 20 bp, synthetic construct
  misc_feature 1..20: note = Description of Artificial Sequence: Synthetic oligonucleotide
  misc_feature 1..20: note = Target: SCN10A; (+) strand; PAM type: NRG; PAM sequence: AAG
  source 1..20: mol_type = other DNA
gggcattgccccaaaggagc

SEQ ID NO: 35102 - DNA, 20 bp, synthetic construct
  misc_feature 1..20: note = Description of Artificial Sequence: Synthetic oligonucleotide
  misc_feature 1..20: note = Target: SCN10A; (+) strand; PAM type: NRG; PAM sequence: AAG
  source 1..20: mol_type = other DNA
cattgccccaaaggagcaag

SEQ ID NO: 35103 - DNA, 20 bp, synthetic construct
  misc_feature 1..20: note = Description of Artificial Sequence: Synthetic oligonucleotide
  misc_feature 1..20: note = Target: SCN10A; (+) strand; PAM type: NRG; PAM sequence: AGG
  source 1..20: mol_type = other DNA
attgccccaaaggagcaaga

SEQ ID NO: 35104 - DNA, 20 bp, synthetic construct
  misc_feature 1..20: note = Description of Artificial Sequence: Synthetic oligonucleotide
  misc_feature 1..20: note = Target: SCN10A; (+) strand; PAM type: NRG; PAM sequence: TGG
  source 1..20: mol_type = other DNA
ccccaaaggagcaagaaggc

SEQ ID NO: 35105 - DNA, 20 bp, synthetic construct
  misc_feature 1..20: note = Description of Artificial Sequence: Synthetic oligonucleotide
  misc_feature 1..20: note = Target: SCN10A; (+) strand; PAM type: NRG; PAM sequence: TGG
  source 1..20: mol_type = other DNA
ggagcaagaaggctggaaac

SEQ ID NO: 35106 - DNA, 20 bp, synthetic construct
  misc_feature 1..20: note = Description of Artificial Sequence: Synthetic oligonucleotide
  misc_feature 1..20: note = Target: SCN10A; (+) strand; PAM type: NRG; PAM sequence: TGG
  source 1..20: mol_type = other DNA
aaggctggaaactggtcctc

SEQ ID NO: 35107 - DNA, 20 bp, synthetic construct
  misc_feature 1..20: note = Description of Artificial Sequence: Synthetic oligonucleotide
  misc_feature 1..20: note = Target: SCN10A; (+) strand; PAM type: NRG; PAM sequence: GGG
  source 1..20: mol_type = other DNA
aggctggaaactggtcctct

SEQ ID NO: 35108 - DNA, 20 bp, synthetic construct
  misc_feature 1..20: note = Description of Artificial Sequence: Synthetic oligonucleotide
  misc_feature 1..20: note = Target: SCN10A; (+) strand; PAM type: NRG; PAM sequence: TAG
  source 1..20: mol_type = other DNA
aactggtcctctgggaaatc

SEQ ID NO: 35109 - DNA, 20 bp, synthetic construct
  misc_feature 1..20: note = Description of Artificial Sequence: Synthetic oligonucleotide
  misc_feature 1..20: note = Target: SCN10A; (+) strand; PAM type: NRG; PAM sequence: GAG
  source 1..20: mol_type = other DNA
ctggtcctctgggaaatcta

SEQ ID NO: 35110 - DNA, 20 bp, synthetic construct
  misc_feature 1..20: note = Description of Artificial Sequence: Synthetic oligonucleotide
  misc_feature 1..20: note = Target: SCN10A; (+) strand; PAM type: NRG; PAM sequence: CAG
  source 1..20: mol_type = other DNA
cccctgtctttatgaccttt

SEQ ID NO: 35111 - DNA, 20 bp, synthetic construct
  misc_feature 1..20: note = Description of Artificial Sequence: Synthetic oligonucleotide
  misc_feature 1..20: note = Target: SCN10A; (+) strand; PAM type: NRG; PAM sequence: AAG
  source 1..20: mol_type = other DNA
tttatgacctttcagtcact

SEQ ID NO: 35112 - DNA, 20 bp, synthetic construct
  misc_feature 1..20: note = Description of Artificial Sequence: Synthetic oligonucleotide
  misc_feature 1..20: note = Target: SCN10A; (+) strand; PAM type: NRG; PAM sequence: AAG
  source 1..20: mol_type = other DNA
gacctttcagtcactaagta

SEQ ID NO: 35113 - DNA, 20 bp, synthetic construct
  misc_feature 1..20: note = Description of Artificial Sequence: Synthetic oligonucleotide
  misc_feature 1..20: note = Target: SCN10A; (+) strand; PAM type: NRG; PAM sequence: AGG
  source 1..20: mol_type = other DNA
acctttcagtcactaagtaa

SEQ ID NO: 35114 - DNA, 20 bp, synthetic construct
  misc_feature 1..20: note = Description of Artificial Sequence: Synthetic oligonucleotide
  misc_feature 1..20: note = Target: SCN10A; (+) strand; PAM type: NRG; PAM sequence: AAG
  source 1..20: mol_type = other DNA
ctaagtaaaggcacaaatct

SEQ ID NO: 35115 - DNA, 20 bp, synthetic construct
  misc_feature 1..20: note = Description of Artificial Sequence: Synthetic oligonucleotide
  misc_feature 1..20: note = Target: SCN10A; (+) strand; PAM type: NRG; PAM sequence: AGG
  source 1..20: mol_type = other DNA
taagtaaaggcacaaatcta

SEQ ID NO: 35116 - DNA, 20 bp, synthetic construct
  misc_feature 1..20: note = Description of Artificial Sequence: Synthetic oligonucleotide
  misc_feature 1..20: note = Target: SCN10A; (+) strand; PAM type: NRG; PAM sequence: GGG
  source 1..20: mol_type = other DNA
aagtaaaggcacaaatctaa

SEQ ID NO: 35117 - DNA, 20 bp, synthetic construct
  misc_feature 1..20: note = Description of Artificial Sequence: Synthetic oligonucleotide
  misc_feature 1..20: note = Target: SCN10A; (+) strand; PAM type: NRG; PAM sequence: GGG
  source 1..20: mol_type = other DNA
agtaaaggcacaaatctaag

SEQ ID NO: 35118 - DNA, 20 bp, synthetic construct
  misc_feature 1..20: note = Description of Artificial Sequence: Synthetic oligonucleotide
  misc_feature 1..20: note = Target: SCN10A; (+) strand; PAM type: NRG; PAM sequence: TAG
  source 1..20: mol_type = other DNA
cacaaatctaaggggtattc

SEQ ID NO: 35119 - DNA, 20 bp, synthetic construct
  misc_feature 1..20: note = Description of Artificial Sequence: Synthetic oligonucleotide
  misc_feature 1..20: note = Target: SCN10A; (+) strand; PAM type: NRG; PAM sequence: AGG
  source 1..20: mol_type = other DNA
acaaatctaaggggtattct

SEQ ID NO: 35120 - DNA, 20 bp, synthetic construct
  misc_feature 1..20: note = Description of Artificial Sequence: Synthetic oligonucleotide
  misc_feature 1..20: note = Target: SCN10A; (+) strand; PAM type: NRG; PAM sequence: TGG
  source 1..20: mol_type = other DNA
aggggtattctaggtatgca

SEQ ID NO: 35121 - DNA, 20 bp, synthetic construct
  misc_feature 1..20: note = Description of Artificial Sequence: Synthetic oligonucleotide
  misc_feature 1..20: note = Target: SCN10A; (+) strand; PAM type: NRG; PAM sequence: TGG
  source 1..20: mol_type = other DNA
ggtattctaggtatgcatgg

SEQ ID NO: 35122 - DNA, 20 bp, synthetic construct
  misc_feature 1..20: note = Description of Artificial Sequence: Synthetic oligonucleotide
  misc_feature 1..20: note = Target: SCN10A; (+) strand; PAM type: NRG; PAM sequence: GGG
  source 1..20: mol_type = other DNA
gtattctaggtatgcatggt

SEQ ID NO: 35123 - DNA, 20 bp, synthetic construct
  misc_feature 1..20: note = Description of Artificial Sequence: Synthetic oligonucleotide
  misc_feature 1..20: note = Target: SCN10A; (+) strand; PAM type: NRG; PAM sequence: GGG
  source 1..20: mol_type = other DNA
tattctaggtatgcatggtg

SEQ ID NO: 35124 - DNA, 20 bp, synthetic construct
  misc_feature 1..20: note = Description of Artificial Sequence: Synthetic oligonucleotide
  misc_feature 1..20: note = Target: SCN10A; (+) strand; PAM type: NRG; PAM sequence: AAG
  source 1..20: mol_type = other DNA
aggtatgcatggtggggaaa

SEQ ID NO: 35125 - DNA, 20 bp, synthetic construct
  misc_feature 1..20: note = Description of Artificial Sequence: Synthetic oligonucleotide
  misc_feature 1..20: note = Target: SCN10A; (+) strand; PAM type: NRG; PAM sequence: AAG
  source 1..20: mol_type = other DNA
catggtggggaaaaagaaaa

SEQ ID NO: 35126 - DNA, 20 bp, synthetic construct
  misc_feature 1..20: note = Description of Artificial Sequence: Synthetic oligonucleotide
  misc_feature 1..20: note = Target: SCN10A; (+) strand; PAM type: NRG; PAM sequence: AGG
  source 1..20: mol_type = other DNA
atggtggggaaaaagaaaaa

SEQ ID NO: 35127 - DNA, 20 bp, synthetic construct
  misc_feature 1..20: note = Description of Artificial Sequence: Synthetic oligonucleotide
  misc_feature 1..20: note = Target: SCN10A; (+) strand; PAM type: NRG; PAM sequence: GAG
  source 1..20: mol_type = other DNA
ggtggggaaaaagaaaaaag

SEQ ID NO: 35128 - DNA, 20 bp, synthetic construct
  misc_feature 1..20: note = Description of Artificial Sequence: Synthetic oligonucleotide
  misc_feature 1..20: note = Target: SCN10A; (+) strand; PAM type: NRG; PAM sequence: TAG
  source 1..20: mol_type = other DNA
aaaaagaaaaaaggagactc

SEQ ID NO: 35129 - DNA, 20 bp, synthetic construct
  misc_feature 1..20: note = Description of Artificial Sequence: Synthetic oligonucleotide
  misc_feature 1..20: note = Target: SCN10A; (+) strand; PAM type: NRG; PAM sequence: TAG
  source 1..20: mol_type = other DNA
agaaaaaaggagactctaga

SEQ ID NO: 35130 - DNA, 20 bp, synthetic construct
  misc_feature 1..20: note = Description of Artificial Sequence: Synthetic oligonucleotide
  misc_feature 1..20: note = Target: SCN10A; (+) strand; PAM type: NRG; PAM sequence: CGG
  source 1..20: mol_type = other DNA
aggagactctagatagactc

SEQ ID NO: 35131 - DNA, 20 bp, synthetic construct
  misc_feature 1..20: note = Description of Artificial Sequence: Synthetic oligonucleotide
  misc_feature 1..20: note = Target: SCN10A; (+) strand; PAM type: NRG; PAM sequence: GGG
  source 1..20: mol_type = other DNA
ggagactctagatagactcc

SEQ ID NO: 35132 - DNA, 20 bp, synthetic construct
  misc_feature 1..20: note = Description of Artificial Sequence: Synthetic oligonucleotide
  misc_feature 1..20: note = Target: SCN10A; (+) strand; PAM type: NRG; PAM sequence: AAG
  source 1..20: mol_type = other DNA
actctagatagactccggga

SEQ ID NO: 35133 - DNA, 20 bp, synthetic construct
  misc_feature 1..20: note = Description of Artificial Sequence: Synthetic oligonucleotide
  misc_feature 1..20: note = Target: SCN10A; (+) strand; PAM type: NRG; PAM sequence: CAG
  source 1..20: mol_type = other DNA
agatagactccgggaaagac

SEQ ID NO: 35134 - DNA, 20 bp, synthetic construct
  misc_feature 1..20: note = Description of Artificial Sequence: Synthetic oligonucleotide
  misc_feature 1..20: note = Target: SCN10A; (+) strand; PAM type: NRG; PAM sequence: AGG
  source 1..20: mol_type = other DNA
gatagactccgggaaagacc

SEQ ID NO: 35135 - DNA, 20 bp, synthetic construct
  misc_feature 1..20: note = Description of Artificial Sequence: Synthetic oligonucleotide
  misc_feature 1..20: note = Target: SCN10A; (+) strand; PAM type: NRG; PAM sequence: GAG
  source 1..20: mol_type = other DNA
tagactccgggaaagaccag

SEQ ID NO: 35136 - DNA, 20 bp, synthetic construct
  misc_feature 1..20: note = Description of Artificial Sequence: Synthetic oligonucleotide
  misc_feature 1..20: note = Target: SCN10A; (+) strand; PAM type: NRG; PAM sequence: GAG
  source 1..20: mol_type = other DNA
gactccgggaaagaccagga

SEQ ID NO: 35137 - DNA, 20 bp, synthetic construct
  misc_feature 1..20: note = Description of Artificial Sequence: Synthetic oligonucleotide
  misc_feature 1..20: note = Target: SCN10A; (+) strand; PAM type: NRG; PAM sequence: GAG
  source 1..20: mol_type = other DNA
ctccgggaaagaccaggaga

SEQ ID NO: 35138 - DNA, 20 bp, synthetic construct
  misc_feature 1..20: note = Description of Artificial Sequence: Synthetic oligonucleotide
  misc_feature 1..20: note = Target: SCN10A; (+) strand; PAM type: NRG; PAM sequence: AGG
  source 1..20: mol_type = other DNA
tccgggaaagaccaggagag

SEQ ID NO: 35139 - DNA, 20 bp, synthetic construct
  misc_feature 1..20: note = Description of Artificial Sequence: Synthetic oligonucleotide
  misc_feature 1..20: note = Target: SCN10A; (+) strand; PAM type: NRG; PAM sequence: GAG
  source 1..20: mol_type = other DNA
cgggaaagaccaggagagag

SEQ ID NO: 35140 - DNA, 20 bp, synthetic construct
  misc_feature 1..20: note = Description of Artificial Sequence: Synthetic oligonucleotide
  misc_feature 1..20: note = Target: SCN10A; (+) strand; PAM type: NRG; PAM sequence: GAG
  source 1..20: mol_type = other DNA
ggaaagaccaggagagagga

SEQ ID NO: 35141 - DNA, 20 bp, synthetic construct
  misc_feature 1..20: note = Description of Artificial Sequence: Synthetic oligonucleotide
  misc_feature 1..20: note = Target: SCN10A; (+) strand; PAM type: NRG; PAM sequence: CAG
  source 1..20: mol_type = other DNA
ccaggagagaggagagatta

SEQ ID NO: 35142 - DNA, 20 bp, synthetic construct
  misc_feature 1..20: note = Description of Artificial Sequence: Synthetic oligonucleotide
  misc_feature 1..20: note = Target: SCN10A; (+) strand; PAM type: NRG; PAM sequence: CAG
  source 1..20: mol_type = other DNA
gattacagcgtgctgatgct

SEQ ID NO: 35143 - DNA, 20 bp, synthetic construct
  misc_feature 1..20: note = Description of Artificial Sequence: Synthetic oligonucleotide
  misc_feature 1..20: note = Target: SCN10A; (+) strand; PAM type: NRG; PAM sequence: TAG
  source 1..20: mol_type = other DNA
gcgtgctgatgctcagcaaa

SEQ ID NO: 35144 - DNA, 20 bp, synthetic construct
  misc_feature 1..20: note = Description of Artificial Sequence: Synthetic oligonucleotide
  misc_feature 1..20: note = Target: SCN10A; (+) strand; PAM type: NRG; PAM sequence: AGG
  source 1..20: mol_type = other DNA
cgtgctgatgctcagcaaat

SEQ ID NO: 35145 - DNA, 20 bp, synthetic construct
  misc_feature 1..20: note = Description of Artificial Sequence: Synthetic oligonucleotide
  misc_feature 1..20: note = Target: SCN10A; (+) strand; PAM type: NRG; PAM sequence: TGG
  source 1..20: mol_type = other DNA
gctcagcaaataggttatca

SEQ ID NO: 35146 - DNA, 20 bp, synthetic construct
  misc_feature 1..20: note = Description of Artificial Sequence: Synthetic oligonucleotide
  misc_feature 1..20: note = Target: SCN10A; (+) strand; PAM type: NRG; PAM sequence: CAG
  source 1..20: mol_type = other DNA
agcaaataggttatcatggt

SEQ ID NO: 35147 - DNA, 20 bp, synthetic construct
  misc_feature 1..20: note = Description of Artificial Sequence: Synthetic oligonucleotide
  misc_feature 1..20: note = Target: SCN10A; (+) strand; PAM type: NRG; PAM sequence: AGG
  source 1..20: mol_type = other DNA
gcaaataggttatcatggtc

SEQ ID NO: 35148 - DNA, 20 bp, synthetic construct
  misc_feature 1..20: note = Description of Artificial Sequence: Synthetic oligonucleotide
  misc_feature 1..20: note = Target: SCN10A; (+) strand; PAM type: NRG; PAM sequence: CAG
  source 1..20: mol_type = other DNA
tatcatggtcaggaacatgt

SEQ ID NO: 35149 - DNA, 20 bp, synthetic construct
  misc_feature 1..20: note = Description of Artificial Sequence: Synthetic oligonucleotide
  misc_feature 1..20: note = Target: SCN10A; (+) strand; PAM type: NRG; PAM sequence: GAG
  source 1..20: mol_type = other DNA
tcatggtcaggaacatgtca

SEQ ID NO: 35150 - DNA, 20 bp, synthetic construct
  misc_feature 1..20: note = Description of Artificial Sequence: Synthetic oligonucleotide
  misc_feature 1..20: note = Target: SCN10A; (+) strand; PAM type: NRG; PAM sequence: AGG
  source 1..20: mol_type = other DNA
catggtcaggaacatgtcag

SEQ ID NO: 35151 - DNA, 20 bp, synthetic construct
  misc_feature 1..20: note = Description of Artificial Sequence: Synthetic oligonucleotide
  misc_feature 1..20: note = Target: SCN10A; (+) strand; PAM type: NRG; PAM sequence: TGG
  source 1..20: mol_type = other DNA
tcagaggaaaccttgtcacc

SEQ ID NO: 35152 - DNA, 20 bp, synthetic construct
  misc_feature 1..20: note = Description of Artificial Sequence: Synthetic oligonucleotide
  misc_feature 1..20: note = Target: SCN10A; (+) strand; PAM type: NRG; PAM sequence: TAG
  source 1..20: mol_type = other DNA
aggaaaccttgtcacctgga

SEQ ID NO: 35153 - DNA, 20 bp, synthetic construct
  misc_feature 1..20: note = Description of Artificial Sequence: Synthetic oligonucleotide
  misc_feature 1..20: note = Target: SCN10A; (+) strand; PAM type: NRG; PAM sequence: CAG
  source 1..20: mol_type = other DNA
accttgtcacctggatagtt

SEQ ID NO: 35154 - DNA, 20 bp, synthetic construct
  misc_feature 1..20: note = Description of Artificial Sequence: Synthetic oligonucleotide
  misc_feature 1..20: note = Target: SCN10A; (+) strand; PAM type: NRG; PAM sequence: TGG
  source 1..20: mol_type = other DNA
ttcagttgattgccaacctt

SEQ ID NO: 35155 - DNA, 20 bp, synthetic construct
  misc_feature 1..20: note = Description of Artificial Sequence: Synthetic oligonucleotide
  misc_feature 1..20: note = Target: SCN10A; (+) strand; PAM type: NRG; PAM sequence: CAG
  source 1..20: mol_type = other DNA
tgattgccaacctttggcca

SEQ ID NO: 35156 - DNA, 20 bp, synthetic construct
  misc_feature 1..20: note = Description of Artificial Sequence: Synthetic oligonucleotide
  misc_feature 1..20: note = Target: SCN10A; (+) strand; PAM type: NRG; PAM sequence: AGG
  source 1..20: mol_type = other DNA
gattgccaacctttggccac

SEQ ID NO: 35157 - DNA, 20 bp, synthetic construct
  misc_feature 1..20: note = Description of Artificial Sequence: Synthetic oligonucleotide
  misc_feature 1..20: note = Target: SCN10A; (+) strand; PAM type: NRG; PAM sequence: GGG
  source 1..20: mol_type = other DNA
attgccaacctttggccaca

SEQ ID NO: 35158 - DNA, 20 bp, synthetic construct
  misc_feature 1..20: note = Description of Artificial Sequence: Synthetic oligonucleotide
  misc_feature 1..20: note = Target: SCN10A; (+) strand; PAM type: NRG; PAM sequence: TAG
  source 1..20: mol_type = other DNA
ccaacctttggccacagggc

SEQ ID NO: 35159 - DNA, 20 bp, synthetic construct
  misc_feature 1..20: note = Description of Artificial Sequence: Synthetic oligonucleotide
  misc_feature 1..20: note = Target: SCN10A; (+) strand; PAM type: NRG; PAM sequence: AAG
  source 1..20: mol_type = other DNA
tttggccacagggctagaca

SEQ ID NO: 35160 - DNA, 20 bp, synthetic construct
  misc_feature 1..20: note = Description of Artificial Sequence: Synthetic oligonucleotide
  misc_feature 1..20: note = Target: SCN10A; (+) strand; PAM type: NRG; PAM sequence: AAG
  source 1..20: mol_type = other DNA
gggctagacaaagctgtcct

SEQ ID NO: 35161 - DNA, 20 bp, synthetic construct
  misc_feature 1..20: note = Description of Artificial Sequence: Synthetic oligonucleotide
  misc_feature 1..20: note = Target: SCN10A; (+) strand; PAM type: NRG; PAM sequence: AAG
  source 1..20: mol_type = other DNA
agttcacttttccacatgca

SEQ ID NO: 35162 - DNA, 20 bp, synthetic construct
  misc_feature 1..20: note = Description of Artificial Sequence: Synthetic oligonucleotide
  misc_feature 1..20: note = Target: SCN10A; (+) strand; PAM type: NRG; PAM sequence: AAG
  source 1..20: mol_type = other DNA
cacatgcaaagttgtgacct

SEQ ID NO: 35163 - DNA, 20 bp, synthetic construct
  misc_feature 1..20: note = Description of Artificial Sequence: Synthetic oligonucleotide
  misc_feature 1..20: note = Target: SCN10A; (+) strand; PAM type: NRG; PAM sequence: AGG
  source 1..20: mol_type = other DNA
acatgcaaagttgtgaccta

SEQ ID NO: 35164 - DNA, 20 bp, synthetic construct
  misc_feature 1..20: note = Description of Artificial Sequence: Synthetic oligonucleotide
  misc_feature 1..20: note = Target: SCN10A; (+) strand; PAM type: NRG; PAM sequence: GAG
  source 1..20: mol_type = other DNA
atgcaaagttgtgacctaag

SEQ ID NO: 35165 - DNA, 20 bp, synthetic construct
  misc_feature 1..20: note = Description of Artificial Sequence: Synthetic oligonucleotide
  misc_feature 1..20: note = Target: SCN10A; (+) strand; PAM type: NRG; PAM sequence: AGG
  source 1..20: mol_type = other DNA
tgcaaagttgtgacctaagg

SEQ ID NO: 35166 - DNA, 20 bp, synthetic construct
  misc_feature 1..20: note = Description of Artificial Sequence: Synthetic oligonucleotide
  misc_feature 1..20: note = Target: SCN10A; (+) strand; PAM type: NRG; PAM sequence: CAG
  source 1..20: mol_type = other DNA
aaggaggctactatgcacac

SEQ ID NO: 35167 - DNA, 20 bp, synthetic construct
  misc_feature 1..20: note = Description of Artificial Sequence: Synthetic oligonucleotide
  misc_feature 1..20: note = Target: SCN10A; (+) strand; PAM type: NRG; PAM sequence: TGG
  source 1..20: mol_type = other DNA
gctactatgcacaccagtac

SEQ ID NO: 35168 - DNA, 20 bp, synthetic construct
  misc_feature 1..20: note = Description of Artificial Sequence: Synthetic oligonucleotide
  misc_feature 1..20: note = Target: SCN10A; (+) strand; PAM type: NRG; PAM sequence: TGG
  source 1..20: mol_type = other DNA
caccagtactggaacatact

SEQ ID NO: 35169 - DNA, 20 bp, synthetic construct
  misc_feature 1..20: note = Description of Artificial Sequence: Synthetic oligonucleotide
  misc_feature 1..20: note = Target: SCN10A; (+) strand; PAM type: NRG; PAM sequence: AAG
  source 1..20: mol_type = other DNA
agtactggaacatacttggt

SEQ ID NO: 35170 - DNA, 20 bp, synthetic construct
  misc_feature 1..20: note = Description of Artificial Sequence: Synthetic oligonucleotide
  misc_feature 1..20: note = Target: SCN10A; (+) strand; PAM type: NRG; PAM sequence: TGG
  source 1..20: mol_type = other DNA
actggaacatacttggtaag

SEQ ID NO: 35171 - DNA, 20 bp, synthetic construct
  misc_feature 1..20: note = Description of Artificial Sequence: Synthetic oligonucleotide
  misc_feature 1..20: note = Target: SCN10A; (+) strand; PAM type: NRG; PAM sequence: AAG
  source 1..20: mol_type = other DNA
taagtggttgttgaatgaat

SEQ ID NO: 35172 - DNA, 20 bp, synthetic construct
  misc_feature 1..20: note = Description of Artificial Sequence: Synthetic oligonucleotide
  misc_feature 1..20: note = Target: SCN10A; (+) strand; PAM type: NRG; PAM sequence: TAG
  source 1..20: mol_type = other DNA
gcacttcattgtctgaaaat

SEQ ID NO: 35173 - DNA, 20 bp, synthetic construct
  misc_feature 1..20: note = Description of Artificial Sequence: Synthetic oligonucleotide
  misc_feature 1..20: note = Target: SCN10A; (+) strand; PAM type: NRG; PAM sequence: AGG
  source 1..20: mol_type = other DNA
cacttcattgtctgaaaatt

SEQ ID NO: 35174 - DNA, 20 bp, synthetic construct
  misc_feature 1..20: note = Description of Artificial Sequence: Synthetic oligonucleotide
  misc_feature 1..20: note = Target: SCN10A; (+) strand; PAM type: NRG; PAM sequence: TAG
  source 1..20: mol_type = other DNA
ttcattgtctgaaaattagg

SEQ ID NO: 35175 - DNA, 20 bp, synthetic construct
  misc_feature 1..20: note = Description of Artificial Sequence: Synthetic oligonucleotide
  misc_feature 1..20: note = Target: SCN10A; (+) strand; PAM type: NRG; PAM sequence: TAG
  source 1..20: mol_type = other DNA
aattaggtagtacaattcat

SEQ ID NO: 35176 - DNA, 20 bp, synthetic construct
  misc_feature 1..20: note = Description of Artificial Sequence: Synthetic oligonucleotide
  misc_feature 1..20: note = Target: SCN10A; (+) strand; PAM type: NRG; PAM sequence: GAG
  source 1..20: mol_type = other DNA
gatcccatctgtatgaatgt

SEQ ID NO: 35177 - DNA, 20 bp, synthetic construct
  misc_feature 1..20: note = Description of Artificial Sequence: Synthetic oligonucleotide
  misc_feature 1..20: note = Target: SCN10A; (+) strand; PAM type: NRG; PAM sequence: GAG
  source 1..20: mol_type = other DNA
tcccatctgtatgaatgtga

SEQ ID NO: 35178 - DNA, 20 bp, synthetic construct
  misc_feature 1..20: note = Description of Artificial Sequence: Synthetic oligonucleotide
  misc_feature 1..20: note = Target: SCN10A; (+) strand; PAM type: NRG; PAM sequence: AAG
  source 1..20: mol_type = other DNA
atgtgagagtttgtgttgca

SEQ ID NO: 35179 - DNA, 20 bp, synthetic construct
  misc_feature 1..20: note = Description of Artificial Sequence: Synthetic oligonucleotide
  misc_feature 1..20: note = Target: SCN10A; (+) strand; PAM type: NRG; PAM sequence: AGG
  source 1..20: mol_type = other DNA
tgtgagagtttgtgttgcaa

SEQ ID NO: 35180 - DNA, 20 bp, synthetic construct
  misc_feature 1..20: note = Description of Artificial Sequence: Synthetic oligonucleotide
  misc_feature 1..20: note = Target: SCN10A; (+) strand; PAM type: NRG; PAM sequence: GAG
  source 1..20: mol_type = other DNA
tgagagtttgtgttgcaaag

SEQ ID NO: 35181 - DNA, 20 bp, synthetic construct
  misc_feature 1..20: note = Description of Artificial Sequence: Synthetic oligonucleotide
  misc_feature 1..20: note = Target: SCN10A; (+) strand; PAM type: NRG; PAM sequence: AGG
  source 1..20: mol_type = other DNA
gagagtttgtgttgcaaagg

SEQ ID NO: 35182 - DNA, 20 bp, synthetic construct
  misc_feature 1..20: note = Description of Artificial Sequence: Synthetic oligonucleotide
  misc_feature 1..20: note = Target: SCN10A; (+) strand; PAM type: NRG; PAM sequence: GAG
  source 1..20: mol_type = other DNA
gagtttgtgttgcaaaggag

SEQ ID NO: 35183 - DNA, 20 bp, synthetic construct
  misc_feature 1..20: note = Description of Artificial Sequence: Synthetic oligonucleotide
  misc_feature 1..20: note = Target: SCN10A; (+) strand; PAM type: NRG; PAM sequence: AAG
  source 1..20: mol_type = other DNA
tgtgttgcaaaggaggagac

SEQ ID NO: 35184 - DNA, 20 bp, synthetic construct
  misc_feature 1..20: note = Description of Artificial Sequence: Synthetic oligonucleotide
  misc_feature 1..20: note = Target: SCN10A; (+) strand; PAM type: NRG; PAM sequence: GAG
  source 1..20: mol_type = other DNA
tgttgcaaaggaggagacaa

SEQ ID NO: 35185 - DNA, 20 bp, synthetic construct
  misc_feature 1..20: note = Description of Artificial Sequence: Synthetic oligonucleotide
  misc_feature 1..20: note = Target: SCN10A; (+) strand; PAM type: NRG; PAM sequence: CAG
  source 1..20: mol_type = other DNA
aggaggagacaagagctgta

SEQ ID NO: 35186 - DNA, 20 bp, synthetic construct
  misc_feature 1..20: note = Description of Artificial Sequence: Synthetic oligonucleotide
  misc_feature 1..20: note = Target: SCN10A; (+) strand; PAM type: NRG; PAM sequence: GAG
  source 1..20: mol_type = other DNA
caagagctgtacagtgcaat

SEQ ID NO: 35187 - DNA, 20 bp, synthetic construct
  misc_feature 1..20: note = Description of Artificial Sequence: Synthetic oligonucleotide
  misc_feature 1..20: note = Target: SCN10A; (+) strand; PAM type: NRG; PAM sequence: TAG
  source 1..20: mol_type = other DNA
tgtacagtgcaatgagtttc

SEQ ID NO: 35188 - DNA, 20 bp, synthetic construct
  misc_feature 1..20: note = Description of Artificial Sequence: Synthetic oligonucleotide
  misc_feature 1..20: note = Target: SCN10A; (+) strand; PAM type: NRG; PAM sequence: AGG
  source 1..20: mol_type = other DNA
gtacagtgcaatgagtttct

SEQ ID NO: 35189 - DNA, 20 bp, synthetic construct
  misc_feature 1..20: note = Description of Artificial Sequence: Synthetic oligonucleotide
  misc_feature 1..20: note = Target: SCN10A; (+) strand; PAM type: NRG; PAM sequence: GAG
  source 1..20: mol_type = other DNA
atgagtttctaggatccctc

SEQ ID NO: 35190 - DNA, 20 bp, synthetic construct
  misc_feature 1..20: note = Description of Artificial Sequence: Synthetic oligonucleotide
  misc_feature 1..20: note = Target: SCN10A; (+) strand; PAM type: NRG; PAM sequence: AGG
  source 1..20: mol_type = other DNA
tgagtttctaggatccctcg

SEQ ID NO: 35191 - DNA, 20 bp, synthetic construct
  misc_feature 1..20: note = Description of Artificial Sequence: Synthetic oligonucleotide
  misc_feature 1..20: note = Target: SCN10A; (+) strand; PAM type: NRG; PAM sequence: CAG
  source 1..20: mol_type = other DNA
aggatccctcgaggcttgaa

SEQ ID NO: 35192 - DNA, 20 bp, synthetic construct
  misc_feature 1..20: note = Description of Artificial Sequence: Synthetic oligonucleotide
  misc_feature 1..20: note = Target: SCN10A; (+) strand; PAM type: NRG; PAM sequence: TGG
  source 1..20: mol_type = other DNA
gaggcttgaacagtcaacaa

SEQ ID NO: 35193 - DNA, 20 bp, synthetic construct
  misc_feature 1..20: note = Description of Artificial Sequence: Synthetic oligonucleotide
  misc_feature 1..20: note = Target: SCN10A; (+) strand; PAM type: NRG; PAM sequence: GAG
  source 1..20: mol_type = other DNA
ggcttgaacagtcaacaatg

SEQ ID NO: 35194 - DNA, 20 bp, synthetic construct
  misc_feature 1..20: note = Description of Artificial Sequence: Synthetic oligonucleotide
  misc_feature 1..20: note = Target: SCN10A; (+) strand; PAM type: NRG; PAM sequence: GAG
  source 1..20: mol_type = other DNA
cttgaacagtcaacaatgga

SEQ ID NO: 35195 - DNA, 20 bp, synthetic construct
  misc_feature 1..20: note = Description of Artificial Sequence: Synthetic oligonucleotide
  misc_feature 1..20: note = Target: SCN10A; (+) strand; PAM type: NRG; PAM sequence: AAG
  source 1..20: mol_type = other DNA
agtcaacaatggagagactg

SEQ ID NO: 35196 - DNA, 20 bp, synthetic construct
  misc_feature 1..20: note = Description of Artificial Sequence: Synthetic oligonucleotide
  misc_feature 1..20: note = Target: SCN10A; (+) strand; PAM type: NRG; PAM sequence: AGG
  source 1..20: mol_type = other DNA
gtcaacaatggagagactga

SEQ ID NO: 35197 - DNA, 20 bp, synthetic construct
  misc_feature 1..20: note = Description of Artificial Sequence: Synthetic oligonucleotide
  misc_feature 1..20: note = Target: SCN10A; (+) strand; PAM type: NRG; PAM sequence: AAG
  source 1..20: mol_type = other DNA
aacaatggagagactgaagg

SEQ ID NO: 35198 - DNA, 20 bp, synthetic construct
  misc_feature 1..20: note = Description of Artificial Sequence: Synthetic oligonucleotide
  misc_feature 1..20: note = Target: SCN10A; (+) strand; PAM type: NRG; PAM sequence: AGG
  source 1..20: mol_type = other DNA
acaatggagagactgaagga

SEQ ID NO: 35199 - DNA, 20 bp, synthetic construct
  misc_feature 1..20: note = Description of Artificial Sequence: Synthetic oligonucleotide
  misc_feature 1..20: note = Target: SCN10A; (+) strand; PAM type: NRG; PAM sequence: GGG
  source 1..20: mol_type = other DNA
caatggagagactgaaggaa

SEQ ID NO: 35200 - DNA, 20 bp, synthetic construct
  misc_feature 1..20: note = Description of Artificial Sequence: Synthetic oligonucleotide
  misc_feature 1..20: note = Target: SCN10A; (+) strand; PAM type: NRG; PAM sequence: CAG
  source 1..20: mol_type = other DNA
agagactgaaggaagggttg

SEQ ID NO: 35201 - DNA, 20 bp, synthetic construct
  misc_feature 1..20: note = Description of Artificial Sequence: Synthetic oligonucleotide
  misc_feature 1..20: note = Target: SCN10A; (+) strand; PAM type: NRG; PAM sequence: TGG
  source 1..20: mol_type = other DNA
agggttgcagcctaatttcc

SEQ ID NO: 35202 - DNA, 20 bp, synthetic construct
  misc_feature 1..20: note = Description of Artificial Sequence: Synthetic oligonucleotide
  misc_feature 1..20: note = Target: SCN10A; (+) strand; PAM type: NRG; PAM sequence: AAG
  source 1..20: mol_type = other DNA
gttgcagcctaatttcctgg

SEQ ID NO: 35203 - DNA, 20 bp, synthetic construct
  misc_feature 1..20: note = Description of Artificial Sequence: Synthetic oligonucleotide
  misc_feature 1..20: note = Target: SCN10A; (+) strand; PAM type: NRG; PAM sequence: GAG
  source 1..20: mol_type = other DNA
tcccatcaaaatcttccatt

SEQ ID NO: 35204 - DNA, 20 bp, synthetic construct
  misc_feature 1..20: note = Description of Artificial Sequence: Synthetic oligonucleotide
  misc_feature 1..20: note = Target: SCN10A; (+) strand; PAM type: NRG; PAM sequence: AGG
  source 1..20: mol_type = other DNA
cccatcaaaatcttccattg

SEQ ID NO: 35205 - DNA, 20 bp, synthetic construct
  misc_feature 1..20: note = Description of Artificial Sequence: Synthetic oligonucleotide
  misc_feature 1..20: note = Target: SCN10A; (+) strand; PAM type: NRG; PAM sequence: GGG
  source 1..20: mol_type = other DNA
ccatcaaaatcttccattga

SEQ ID NO: 35206 - DNA, 20 bp, synthetic construct
  misc_feature 1..20: note = Description of Artificial Sequence: Synthetic oligonucleotide
  misc_feature 1..20: note = Target: SCN10A; (+) strand; PAM type: NRG; PAM sequence: TGG
  source 1..20: mol_type = other DNA
cttccattgagggaactgtg

SEQ ID NO: 35207 - DNA, 20 bp, synthetic construct
  misc_feature 1..20: note = Description of Artificial Sequence: Synthetic oligonucleotide
  misc_feature 1..20: note = Target: SCN10A; (+) strand; PAM type: NRG; PAM sequence: AAG
  source 1..20: mol_type = other DNA
tgagggaactgtgtggctta

SEQ ID NO: 35208 - DNA, 20 bp, synthetic construct
  misc_feature 1..20: note = Description of Artificial Sequence: Synthetic oligonucleotide
  misc_feature 1..20: note = Target: SCN10A; (+) strand; PAM type: NRG; PAM sequence: CAG
  source 1..20: mol_type = other DNA
actgtgtggcttaaagttgc

SEQ ID NO: 35209 - DNA, 20 bp, synthetic construct
  misc_feature 1..20: note = Description of Artificial Sequence: Synthetic oligonucleotide
  misc_feature 1..20: note = Target: SCN10A; (+) strand; PAM type: NRG; PAM sequence: GAG
  source 1..20: mol_type = other DNA
tgtgtggcttaaagttgcca

SEQ ID NO: 35210 - DNA, 20 bp, synthetic construct
  misc_feature 1..20: note = Description of Artificial Sequence: Synthetic oligonucleotide
  misc_feature 1..20: note = Target: SCN10A; (+) strand; PAM type: NRG; PAM sequence: AAG
  source 1..20: mol_type = other DNA
ggcttaaagttgccagagaa

SEQ ID NO: 35211 - DNA, 20 bp, synthetic construct
  misc_feature 1..20: note = Description of Artificial Sequence: Synthetic oligonucleotide
  misc_feature 1..20: note = Target: SCN10A; (+) strand; PAM type: NRG; PAM sequence: GAG
  source 1..20: mol_type = other DNA
cttaaagttgccagagaaaa

SEQ ID NO: 35212 - DNA, 20 bp, synthetic construct
  misc_feature 1..20: note = Description of Artificial Sequence: Synthetic oligonucleotide
  misc_feature 1..20: note = Target: SCN10A; (+) strand; PAM type: NRG; PAM sequence: CAG
  source 1..20: mol_type = other DNA
aaagagctaattcataaacc

SEQ ID NO: 35213 - DNA, 20 bp, synthetic construct
  misc_feature 1..20: note = Description of Artificial Sequence: Synthetic oligonucleotide
  misc_feature 1..20: note = Target: SCN10A; (+) strand; PAM type: NRG; PAM sequence: GAG
  source 1..20: mol_type = other DNA
agagctaattcataaaccca

SEQ ID NO: 35214 - DNA, 20 bp, synthetic construct
  misc_feature 1..20: note = Description of Artificial Sequence: Synthetic oligonucleotide
  misc_feature 1..20: note = Target: SCN10A; (+) strand; PAM type: NRG; PAM sequence: CAG
  source 1..20: mol_type = other DNA
attcataaacccagagccct

SEQ ID NO: 35215 - DNA, 20 bp, synthetic construct
  misc_feature 1..20: note = Description of Artificial Sequence: Synthetic oligonucleotide
  misc_feature 1..20: note = Target: SCN10A; (+) strand; PAM type: NRG; PAM sequence: GAG
  source 1..20: mol_type = other DNA
tcataaacccagagccctca

SEQ ID NO: 35216 - DNA, 20 bp, synthetic construct
  misc_feature 1..20: note = Description of Artificial Sequence: Synthetic oligonucleotide
  misc_feature 1..20: note = Target: SCN10A; (+) strand; PAM type: NRG; PAM sequence: TAG
  source 1..20: mol_type = other DNA
acccagagccctcagagaat

SEQ ID NO: 35217 - DNA, 20 bp, synthetic construct
  misc_feature 1..20: note = Description of Artificial Sequence: Synthetic oligonucleotide
  misc_feature 1..20: note = Target: SCN10A; (+) strand; PAM type: NRG; PAM sequence: TGG
  source 1..20: mol_type = other DNA
ccctcagagaattagtgtgc

SEQ ID NO: 35218 - DNA, 20 bp, synthetic construct
  misc_feature 1..20: note = Description of Artificial Sequence: Synthetic oligonucleotide
  misc_feature 1..20: note = Target: SCN10A; (+) strand; PAM type: NRG; PAM sequence: GGG
  source 1..20: mol_type = other DNA
cctcagagaattagtgtgct

SEQ ID NO: 35219 - DNA, 20 bp, synthetic construct
  misc_feature 1..20: note = Description of Artificial Sequence: Synthetic oligonucleotide
  misc_feature 1..20: note = Target: SCN10A; (+) strand; PAM type: NRG; PAM sequence: TAG
  source 1..20: mol_type = other DNA
agagaattagtgtgctgggt

SEQ ID NO: 35220 - DNA, 20 bp, synthetic construct
  misc_feature 1..20: note = Description of Artificial Sequence: Synthetic oligonucleotide
  misc_feature 1..20: note = Target: SCN10A; (+) strand; PAM type: NRG; PAM sequence: AGG
  source 1..20: mol_type = other DNA
gagaattagtgtgctgggtt

SEQ ID NO: 35221 - DNA, 20 bp, synthetic construct
  misc_feature 1..20: note = Description of Artificial Sequence: Synthetic oligonucleotide
  misc_feature 1..20: note = Target: SCN10A; (+) strand; PAM type: NRG; PAM sequence: TAG
  source 1..20: mol_type = other DNA
aattagtgtgctgggttagg

SEQ ID NO: 35222 - DNA, 20 bp, synthetic construct
  misc_feature 1..20: note = Description of Artificial Sequence: Synthetic oligonucleotide
  misc_feature 1..20: note = Target: SCN10A; (+) strand; PAM type: NRG; PAM sequence: TAG
  source 1..20: mol_type = other DNA
ttaggtagttcccatgacca

SEQ ID NO: 35223 - DNA, 20 bp, synthetic construct
  misc_feature 1..20: note = Description of Artificial Sequence: Synthetic oligonucleotide
  misc_feature 1..20: note = Target: SCN10A; (+) strand; PAM type: NRG; PAM sequence: CAG
  source 1..20: mol_type = other DNA
taaaccatcatttgtgtcct

SEQ ID NO: 35224 - DNA, 20 bp, synthetic construct
  misc_feature 1..20: note = Description of Artificial Sequence: Synthetic oligonucleotide
  misc_feature 1..20: note = Target: SCN10A; (+) strand; PAM type: NRG; PAM sequence: AGG
  source 1..20: mol_type = other DNA
aaaccatcatttgtgtcctc

SEQ ID NO: 35225 - DNA, 20 bp, synthetic construct
  misc_feature 1..20: note = Description of Artificial Sequence: Synthetic oligonucleotide
  misc_feature 1..20: note = Target: SCN10A; (+) strand; PAM type: NRG; PAM sequence: TGG
  source 1..20: mol_type = other DNA
ccatcatttgtgtcctcagg

SEQ ID NO: 35226 - DNA, 20 bp, synthetic construct
  misc_feature 1..20: note = Description of Artificial Sequence: Synthetic oligonucleotide
  misc_feature 1..20: note = Target: SCN10A; (+) strand; PAM type: NRG; PAM sequence: TAG
  source 1..20: mol_type = other DNA
ttgtgtcctcaggtggtcta

SEQ ID NO: 35227 - DNA, 20 bp, synthetic construct
  misc_feature 1..20: note = Description of Artificial Sequence: Synthetic oligonucleotide
  misc_feature 1..20: note = Target: SCN10A; (+) strand; PAM type: NRG; PAM sequence: AAG
  source 1..20: mol_type = other DNA
cttaactcctttttattact

SEQ ID NO: 35228 - DNA, 20 bp, synthetic construct
  misc_feature 1..20: note = Description of Artificial Sequence: Synthetic oligonucleotide
  misc_feature 1..20: note = Target: SCN10A; (+) strand; PAM type: NRG; PAM sequence: AAG
  source 1..20: mol_type = other DNA
tttttattactaagctacta

SEQ ID NO: 35229 - DNA, 20 bp, synthetic construct
  misc_feature 1..20: note = Description of Artificial Sequence: Synthetic oligonucleotide
  misc_feature 1..20: note = Target: SCN10A; (+) strand; PAM type: NRG; PAM sequence: TGG
  source 1..20: mol_type = other DNA
ttattactaagctactaaag

SEQ ID NO: 35230 - DNA, 20 bp, synthetic construct
  misc_feature 1..20: note = Description of Artificial Sequence: Synthetic oligonucleotide
  misc_feature 1..20: note = Target: SCN10A; (+) strand; PAM type: NRG; PAM sequence: GAG
  source 1..20: mol_type = other DNA
attactaagctactaaagtg

SEQ ID NO: 35231 - DNA, 20 bp, synthetic construct
  misc_feature 1..20: note = Description of Artificial Sequence: Synthetic oligonucleotide
  misc_feature 1..20: note = Target: SCN10A; (+) strand; PAM type: NRG; PAM sequence: TGG
  source 1..20: mol_type = other DNA
aagtggagaatcttgccaat

SEQ ID NO: 35232 - DNA, 20 bp, synthetic construct
  misc_feature 1..20: note = Description of Artificial Sequence: Synthetic oligonucleotide
  misc_feature 1..20: note = Target: SCN10A; (+) strand; PAM type: NRG; PAM sequence: GGG
  source 1..20: mol_type = other DNA
agtggagaatcttgccaatt

SEQ ID NO: 35233 - DNA, 20 bp, synthetic construct
  misc_feature 1..20: note = Description of Artificial Sequence: Synthetic oligonucleotide
  misc_feature 1..20: note = Target: SCN10A; (+) strand; PAM type: NRG; PAM sequence: GGG
  source 1..20: mol_type = other DNA
gtggagaatcttgccaattg

SEQ ID NO: 35234 - DNA, 20 bp, synthetic construct
  misc_feature 1..20: note = Description of Artificial Sequence: Synthetic oligonucleotide
  misc_feature 1..20: note = Target: SCN10A; (+) strand; PAM type: NRG; PAM sequence: CAG
  source 1..20: mol_type = other DNA
ttactaatccccttatctca

SEQ ID NO: 35235 - DNA, 20 bp, synthetic construct
  misc_feature 1..20: note = Description of Artificial Sequence: Synthetic oligonucleotide
  misc_feature 1..20: note = Target: SCN10A; (+) strand; PAM type: NRG; PAM sequence: AAG
  source 1..20: mol_type = other DNA
ccccttatctcacagaactg

SEQ ID NO: 35236 - DNA, 20 bp, synthetic construct
  misc_feature 1..20: note = Description of Artificial Sequence: Synthetic oligonucleotide
  misc_feature 1..20: note = Target: SCN10A; (+) strand; PAM type: NRG; PAM sequence: AAG
  source 1..20: mol_type = other DNA
tttcctctcttgataatttg

SEQ ID NO: 35237 - DNA, 20 bp, synthetic construct
  misc_feature 1..20: note = Description of Artificial Sequence: Synthetic oligonucleotide
  misc_feature 1..20: note = Target: SCN10A; (+) strand; PAM type: NRG; PAM sequence: TAG
  source 1..20: mol_type = other DNA
atttgaagcctgatcctgtt

SEQ ID NO: 35238 - DNA, 20 bp, synthetic construct
  misc_feature 1..20: note = Description of Artificial Sequence: Synthetic oligonucleotide
  misc_feature 1..20: note = Target: SCN10A; (+) strand; PAM type: NRG; PAM sequence: AAG
  source 1..20: mol_type = other DNA
tgtttagcaaccattattaa

SEQ ID NO: 35239 - DNA, 20 bp, synthetic construct
  misc_feature 1..20: note = Description of Artificial Sequence: Synthetic oligonucleotide
  misc_feature 1..20: note = Target: SCN10A; (+) strand; PAM type: NRG; PAM sequence: CAG
  source 1..20: mol_type = other DNA
agcaaccattattaaaagct

SEQ ID NO: 35240 - DNA, 20 bp, synthetic construct
  misc_feature 1..20: note = Description of Artificial Sequence: Synthetic oligonucleotide
  misc_feature 1..20: note = Target: SCN10A; (+) strand; PAM type: NRG; PAM sequence: TAG
  source 1..20: mol_type = other DNA
taaaagctcagtattataaa

SEQ ID NO: 35241 - DNA, 20 bp, synthetic construct
  misc_feature 1..20: note = Description of Artificial Sequence: Synthetic oligonucleotide
  misc_feature 1..20: note = Target: SCN10A; (+) strand; PAM type: NRG; PAM sequence: GAG
  source 1..20: mol_type = other DNA
aaagctcagtattataaata

SEQ ID NO: 35242 - DNA, 20 bp, synthetic construct
  misc_feature 1..20: note = Description of Artificial Sequence: Synthetic oligonucleotide
  misc_feature 1..20: note = Target: SCN10A; (+) strand; PAM type: NRG; PAM sequence: AAG
  source 1..20: mol_type = other DNA
tctgcctgtaatacatgccc

SEQ ID NO: 35243 - DNA, 20 bp, synthetic construct
  misc_feature 1..20: note = Description of Artificial Sequence: Synthetic oligonucleotide
  misc_feature 1..20: note = Target: SCN10A; (+) strand; PAM type: NRG; PAM sequence: AGG
  source 1..20: mol_type = other DNA
ctgcctgtaatacatgccca

SEQ ID NO: 35244 - DNA, 20 bp, synthetic construct
  misc_feature 1..20: note = Description of Artificial Sequence: Synthetic oligonucleotide
  misc_feature 1..20: note = Target: SCN10A; (+) strand; PAM type: NRG; PAM sequence: TAG
  source 1..20: mol_type = other DNA
taatacatgcccaaggacta

SEQ ID NO: 35245 - DNA, 20 bp, synthetic construct
  misc_feature 1..20: note = Description of Artificial Sequence: Synthetic oligonucleotide
  misc_feature 1..20: note = Target: SCN10A; (+) strand; PAM type: NRG; PAM sequence: AAG
  source 1..20: mol_type = other DNA
aaaaatccttccaatttttg

SEQ ID NO: 35246 - DNA, 20 bp, synthetic construct
  misc_feature 1..20: note = Description of Artificial Sequence: Synthetic oligonucleotide
  misc_feature 1..20: note = Target: SCN10A; (+) strand; PAM type: NRG; PAM sequence: GAG
  source 1..20: mol_type = other DNA
ttccaatttttgaagcaaat

SEQ ID NO: 35247 - DNA, 20 bp, synthetic construct
  misc_feature 1..20: note = Description of Artificial Sequence: Synthetic oligonucleotide
  misc_feature 1..20: note = Target: SCN10A; (+) strand; PAM type: NRG; PAM sequence: AAG
  source 1..20: mol_type = other DNA
aaaattgacacatccatatt

SEQ ID NO: 35248 - DNA, 20 bp, synthetic construct
  misc_feature 1..20: note = Description of Artificial Sequence: Synthetic oligonucleotide
  misc_feature 1..20: note = Target: SCN10A; (+) strand; PAM type: NRG; PAM sequence: AGG
  source 1..20: mol_type = other DNA
aaattgacacatccatatta

SEQ ID NO: 35249 - DNA, 20 bp, synthetic construct
  misc_feature 1..20: note = Description of Artificial Sequence: Synthetic oligonucleotide
  misc_feature 1..20: note = Target: SCN10A; (+) strand; PAM type: NRG; PAM sequence: AAG
  source 1..20: mol_type = other DNA
ttgacacatccatattaagg

SEQ ID NO: 35250 - DNA, 20 bp, synthetic construct
  misc_feature 1..20: note = Description of Artificial Sequence: Synthetic oligonucleotide
  misc_feature 1..20: note = Target: SCN10A; (+) strand; PAM type: NRG; PAM sequence: AGG
  source 1..20: mol_type = other DNA
tgacacatccatattaagga

SEQ ID NO: 35251 - DNA, 20 bp, synthetic construct
  misc_feature 1..20: note = Description of Artificial Sequence: Synthetic oligonucleotide
  misc_feature 1..20: note = Target: SCN10A; (+) strand; PAM type: NRG; PAM sequence: GGG
  source 1..20: mol_type = other DNA
gacacatccatattaaggaa

SEQ ID NO: 35252 - DNA, 20 bp, synthetic construct
  misc_feature 1..20: note = Description of Artificial Sequence: Synthetic oligonucleotide
  misc_feature 1..20: note = Target: SCN10A; (+) strand; PAM type: NRG; PAM sequence: GAG
  source 1..20: mol_type = other DNA
atactacattatttgcactt

SEQ ID NO: 35253 - DNA, 20 bp, synthetic construct
  misc_feature 1..20: note = Description of Artificial Sequence: Synthetic oligonucleotide
  misc_feature 1..20: note = Target: SCN10A; (+) strand; PAM type: NRG; PAM sequence: AAG
  source 1..20: mol_type = other DNA
attatttgcacttgagcacc

SEQ ID NO: 35254 - DNA, 20 bp, synthetic construct
  misc_feature 1..20: note = Description of Artificial Sequence: Synthetic oligonucleotide
  misc_feature 1..20: note = Target: SCN10A; (+) strand; PAM type: NRG; PAM sequence: AAG
  source 1..20: mol_type = other DNA
gagcaccaagcaaaccaatg

SEQ ID NO: 35255 - DNA, 20 bp, synthetic construct
  misc_feature 1..20: note = Description of Artificial Sequence: Synthetic oligonucleotide
  misc_feature 1..20: note = Target: SCN10A; (+) strand; PAM type: NRG; PAM sequence: GAG
  source 1..20: mol_type = other DNA
agcaaaccaatgaagaaact

SEQ ID NO: 35256 - DNA, 20 bp, synthetic construct
  misc_feature 1..20: note = Description of Artificial Sequence: Synthetic oligonucleotide
  misc_feature 1..20: note = Target: SCN10A; (+) strand; PAM type: NRG; PAM sequence: AAG
  source 1..20: mol_type = other DNA
aaaccaatgaagaaactgag

SEQ ID NO: 35257 - DNA, 20 bp, synthetic construct
  misc_feature 1..20: note = Description of Artificial Sequence: Synthetic oligonucleotide
  misc_feature 1..20: note = Target: SCN10A; (+) strand; PAM type: NRG; PAM sequence: TGG
  source 1..20: mol_type = other DNA
agaaactgagaagaaaattt

SEQ ID NO: 35258 - DNA, 20 bp, synthetic construct
  misc_feature 1..20: note = Description of Artificial Sequence: Synthetic oligonucleotide
  misc_feature 1..20: note = Target: SCN10A; (+) strand; PAM type: NRG; PAM sequence: CAG
  source 1..20: mol_type = other DNA
aattttggttgcatatttga

SEQ ID NO: 35259 - DNA, 20 bp, synthetic construct
  misc_feature 1..20: note = Description of Artificial Sequence: Synthetic oligonucleotide
  misc_feature 1..20: note = Target: SCN10A; (+) strand; PAM type: NRG; PAM sequence: CAG
  source 1..20: mol_type = other DNA
tttggttgcatatttgacag

SEQ ID NO: 35260 - DNA, 20 bp, synthetic construct
  misc_feature 1..20: note = Description of Artificial Sequence: Synthetic oligonucleotide
  misc_feature 1..20: note = Target: SCN10A; (+) strand; PAM type: NRG; PAM sequence: TGG
  source 1..20: mol_type = other DNA
atttgacagcagtgtctcct

SEQ ID NO: 35261 - DNA, 20 bp, synthetic construct
  misc_feature 1..20: note = Description of Artificial Sequence: Synthetic oligonucleotide
  misc_feature 1..20: note = Target: SCN10A; (+) strand; PAM type: NRG; PAM sequence: GAG
  source 1..20: mol_type = other DNA
agcagtgtctccttggccac

SEQ ID NO: 35262 - DNA, 20 bp, synthetic construct
  misc_feature 1..20: note = Description of Artificial Sequence: Synthetic oligonucleotide
  misc_feature 1..20: note = Target: SCN10A; (+) strand; PAM type: NRG; PAM sequence: TAG
  source 1..20: mol_type = other DNA
tccttggccacgagttattt

SEQ ID NO: 35263 - DNA, 20 bp, synthetic construct
  misc_feature 1..20: note = Description of Artificial Sequence: Synthetic oligonucleotide
  misc_feature 1..20: note = Target: SCN10A; (+) strand; PAM type: NRG; PAM sequence: AAG
  source 1..20: mol_type = other DNA
ccacgagttattttagaatt

SEQ ID NO: 35264 - DNA, 20 bp, synthetic construct
  misc_feature 1..20: note = Description of Artificial Sequence: Synthetic oligonucleotide
  misc_feature 1..20: note = Target: SCN10A; (+) strand; PAM type: NRG; PAM sequence: AGG
  source 1..20: mol_type = other DNA
cacgagttattttagaatta

SEQ ID NO: 35265 - DNA, 20 bp, synthetic construct
  misc_feature 1..20: note = Description of Artificial Sequence: Synthetic oligonucleotide
  misc_feature 1..20: note = Target: SCN10A; (+) strand; PAM type: NRG; PAM sequence: TGG
  source 1..20: mol_type = other DNA
agaattaaggttttgacaaa

SEQ ID NO: 35266 - DNA, 20 bp, synthetic construct
  misc_feature 1..20: note = Description of Artificial Sequence: Synthetic oligonucleotide
  misc_feature 1..20: note = Target: SCN10A; (+) strand; PAM type: NRG; PAM sequence: TGG
  source 1..20: mol_type = other DNA
attaaggttttgacaaatgg

SEQ ID NO: 35267 - DNA, 20 bp, synthetic construct
  misc_feature 1..20: note = Description of Artificial Sequence: Synthetic oligonucleotide
  misc_feature 1..20: note = Target: SCN10A; (+) strand; PAM type: NRG; PAM sequence: GGG
  source 1..20: mol_type = other DNA
ttaaggttttgacaaatggt

SEQ ID NO: 35268 - DNA, 20 bp, synthetic construct
  misc_feature 1..20: note = Description of Artificial Sequence: Synthetic oligonucleotide
  misc_feature 1..20: note = Target: SCN10A; (+) strand; PAM type: NRG; PAM sequence: GAG
  source 1..20: mol_type = other DNA
aatggtgggcaatgtcttct

SEQ ID NO: 35269 - DNA, 20 bp, synthetic construct
  misc_feature 1..20: note = Description of Artificial Sequence: Synthetic oligonucleotide
  misc_feature 1..20: note = Target: SCN10A; (+) strand; PAM type: NRG; PAM sequence: AAG
  source 1..20: mol_type = other DNA
gggcaatgtcttctgagtat

SEQ ID NO: 35270 - DNA, 20 bp, synthetic construct
  misc_feature 1..20: note = Description of Artificial Sequence: Synthetic oligonucleotide
  misc_feature 1..20: note = Target: SCN10A; (+) strand; PAM type: NRG; PAM sequence: TAG
  source 1..20: mol_type = other DNA
tgtcttctgagtataagcat

SEQ ID NO: 35271 - DNA, 20 bp, synthetic construct
  misc_feature 1..20: note = Description of Artificial Sequence: Synthetic oligonucleotide
  misc_feature 1..20: note = Target: SCN10A; (+) strand; PAM type: NRG; PAM sequence: GAG
  source 1..20: mol_type = other DNA
tttaaaattcatcctctaac

SEQ ID NO: 35272 - DNA, 20 bp, synthetic construct
  misc_feature 1..20: note = Description of Artificial Sequence: Synthetic oligonucleotide
  misc_feature 1..20: note = Target: SCN10A; (+) strand; PAM type: NRG; PAM sequence: TGG
  source 1..20: mol_type = other DNA
catcctctaacgagaccaac

SEQ ID NO: 35273 - DNA, 20 bp, synthetic construct
  misc_feature 1..20: note = Description of Artificial Sequence: Synthetic oligonucleotide
  misc_feature 1..20: note = Target: SCN10A; (+) strand; PAM type: NRG; PAM sequence: TGG
  source 1..20: mol_type = other DNA
attttccacaaaaaccctcc

SEQ ID NO: 35274 - DNA, 20 bp, synthetic construct
  misc_feature 1..20: note = Description of Artificial Sequence: Synthetic oligonucleotide
  misc_feature 1..20: note = Target: SCN10A; (+) strand; PAM type: NRG; PAM sequence: GGG
  source 1..20: mol_type = other DNA
ttttccacaaaaaccctcct

SEQ ID NO: 35275 - DNA, 20 bp, synthetic construct
  misc_feature 1..20: note = Description of Artificial Sequence: Synthetic oligonucleotide
  misc_feature 1..20: note = Target: SCN10A; (+) strand; PAM type: NRG; PAM sequence: TGG
  source 1..20: mol_type = other DNA
ttcctctatttaatttctat

SEQ ID NO: 35276 - DNA, 20 bp, synthetic construct
  misc_feature 1..20: note = Description of Artificial Sequence: Synthetic oligonucleotide
  misc_feature 1..20: note = Target: SCN10A; (+) strand; PAM type: NRG; PAM sequence: TGG
  source 1..20: mol_type = other DNA
aatttctattggttataaaa

SEQ ID NO: 35277 - DNA, 20 bp, synthetic construct
  misc_feature 1..20: note = Description of Artificial Sequence: Synthetic oligonucleotide
  misc_feature 1..20: note = Target: SCN10A; (+) strand; PAM type: NRG; PAM sequence: TAG
  source 1..20: mol_type = other DNA
tattggttataaaatggctt

SEQ ID NO: 35278 - DNA, 20 bp, synthetic construct
  misc_feature 1..20: note = Description of Artificial Sequence: Synthetic oligonucleotide
  misc_feature 1..20: note = Target: SCN10A; (+) strand; PAM type: NRG; PAM sequence: TAG
  source 1..20: mol_type = other DNA
gctttagataaaaactgcat

SEQ ID NO: 35279 - DNA, 20 bp, synthetic construct
  misc_feature 1..20: note = Description of Artificial Sequence: Synthetic oligonucleotide
  misc_feature 1..20: note = Target: SCN10A; (+) strand; PAM type: NRG; PAM sequence: AGG
  source 1..20: mol_type = other DNA
ctttagataaaaactgcatt

SEQ ID NO: 35280 - DNA, 20 bp, synthetic construct
  misc_feature 1..20: note = Description of Artificial Sequence: Synthetic oligonucleotide
  misc_feature 1..20: note = Target: SCN10A; (+) strand; PAM type: NRG; PAM sequence: TGG
  source 1..20: mol_type = other DNA
atttaccacatgaatgtacc

SEQ ID NO: 35281 - DNA, 20 bp, synthetic construct
  misc_feature 1..20: note = Description of Artificial Sequence: Synthetic oligonucleotide
  misc_feature 1..20: note = Target: SCN10A; (+) strand; PAM type: NRG; PAM sequence: GGG
  source 1..20: mol_type = other DNA
tttaccacatgaatgtacct

SEQ ID NO: 35282 - DNA, 20 bp, synthetic construct
  misc_feature 1..20: note = Description of Artificial Sequence: Synthetic oligonucleotide
  misc_feature 1..20: note = Target: SCN10A; (+) strand; PAM type: NRG; PAM sequence: AAG
  source 1..20: mol_type = other DNA
cacatgaatgtacctgggaa

SEQ ID NO: 35283 - DNA, 20 bp, synthetic construct
  misc_feature 1..20: note = Description of Artificial Sequence: Synthetic oligonucleotide
  misc_feature 1..20: note = Target: SCN10A; (+) strand; PAM type: NRG; PAM sequence: GAG
  source 1..20: mol_type = other DNA
catgaatgtacctgggaaaa

SEQ ID NO: 35284 - DNA, 20 bp, synthetic construct
  misc_feature 1..20: note = Description of Artificial Sequence: Synthetic oligonucleotide
  misc_feature 1..20: note = Target: SCN10A; (+) strand; PAM type: NRG; PAM sequence: AGG
  source 1..20: mol_type = other DNA
atgaatgtacctgggaaaag

SEQ ID NO: 35285 - DNA, 20 bp, synthetic construct
  misc_feature 1..20: note = Description of Artificial Sequence: Synthetic oligonucleotide
  misc_feature 1..20: note = Target: SCN10A; (+) strand; PAM type: NRG; PAM sequence: GGG
  source 1..20: mol_type = other DNA
tgaatgtacctgggaaaaga

SEQ ID NO: 35286 - DNA, 20 bp, synthetic construct
  misc_feature 1..20: note = Description of Artificial Sequence: Synthetic oligonucleotide
  misc_feature 1..20: note = Target: SCN10A; (+) strand; PAM type: NRG; PAM sequence: GAG
  source 1..20: mol_type = other DNA
aatgtacctgggaaaagagg

SEQ ID NO: 35287 - DNA, 20 bp, synthetic construct
  misc_feature 1..20: note = Description of Artificial Sequence: Synthetic oligonucleotide
  misc_feature 1..20: note = Target: SCN10A; (+) strand; PAM type: NRG; PAM sequence: GAG
  source 1..20: mol_type = other DNA
tgtacctgggaaaagaggga

SEQ ID NO: 35288 - DNA, 20 bp, synthetic construct
  misc_feature 1..20: note = Description of Artificial Sequence: Synthetic oligonucleotide
  misc_feature 1..20: note = Target: SCN10A; (+) strand; PAM type: NRG; PAM sequence: AGG
  source 1..20: mol_type = other DNA
gtacctgggaaaagagggag

SEQ ID NO: 35289 - DNA, 20 bp, synthetic construct
  misc_feature 1..20: note = Description of Artificial Sequence: Synthetic oligonucleotide
  misc_feature 1..20: note = Target: SCN10A; (+) strand; PAM type: NRG; PAM sequence: GAG
  source 1..20: mol_type = other DNA
gagggagaggatgccttcct

SEQ ID NO: 35290 - DNA, 20 bp, synthetic construct
  misc_feature 1..20: note = Description of Artificial Sequence: Synthetic oligonucleotide
  misc_feature 1..20: note = Target: SCN10A; (+) strand; PAM type: NRG; PAM sequence: TGG
  source 1..20: mol_type = other DNA
ggagaggatgccttcctgag

SEQ ID NO: 35291 - DNA, 20 bp, synthetic construct
  misc_feature 1..20: note = Description of Artificial Sequence: Synthetic oligonucleotide
  misc_feature 1..20: note = Target: SCN10A; (+) strand; PAM type: NRG; PAM sequence: GGG
  source 1..20: mol_type = other DNA
gagaggatgccttcctgagt

SEQ ID NO: 35292 - DNA, 20 bp, synthetic construct
  misc_feature 1..20: note = Description of Artificial Sequence: Synthetic oligonucleotide
  misc_feature 1..20: note = Target: SCN10A; (+) strand; PAM type: NRG; PAM sequence: TAG
  source 1..20: mol_type = other DNA
gtgggctccaataaatcaat

SEQ ID NO: 35293 - DNA, 20 bp, synthetic construct
  misc_feature 1..20: note = Description of Artificial Sequence: Synthetic oligonucleotide
  misc_feature 1..20: note = Target: SCN10A; (+) strand; PAM type: NRG; PAM sequence: AAG
  source 1..20: mol_type = other DNA
caataaatcaattagcatta

SEQ ID NO: 35294 - DNA, 20 bp, synthetic construct
  misc_feature 1..20: note = Description of Artificial Sequence: Synthetic oligonucleotide
  misc_feature 1..20: note = Target: SCN10A; (+) strand; PAM type: NRG; PAM sequence: AAG
  source 1..20: mol_type = other DNA
taaatcaattagcattaaag

SEQ ID NO: 35295 - DNA, 20 bp, synthetic construct
  misc_feature 1..20: note = Description of Artificial Sequence: Synthetic oligonucleotide
  misc_feature 1..20: note = Target: SCN10A; (+) strand; PAM type: NRG; PAM sequence: TGG
  source 1..20: mol_type = other DNA
gcattaaagaagtacttaaa

SEQ ID NO: 35296 - DNA, 20 bp, synthetic construct
  misc_feature 1..20: note = Description of Artificial Sequence: Synthetic oligonucleotide
  misc_feature 1..20: note = Target: SCN10A; (+) strand; PAM type: NRG; PAM sequence: CAG
  source 1..20: mol_type = other DNA
atacatgttgttctttctgc

SEQ ID NO: 35297 - DNA, 20 bp, synthetic construct
  misc_feature 1..20: note = Description of Artificial Sequence: Synthetic oligonucleotide
  misc_feature 1..20: note = Target: SCN10A; (+) strand; PAM type: NRG; PAM sequence: AGG
  source 1..20: mol_type = other DNA
tacatgttgttctttctgcc

SEQ ID NO: 35298 - DNA, 20 bp, synthetic construct
  misc_feature 1..20: note = Description of Artificial Sequence: Synthetic oligonucleotide
  misc_feature 1..20: note = Target: SCN10A; (+) strand; PAM type: NRG; PAM sequence: AAG
  source 1..20: mol_type = other DNA
actcctccccaaactctctc

SEQ ID NO: 35299 - DNA, 20 bp, synthetic construct
  misc_feature 1..20: note = Description of Artificial Sequence: Synthetic oligonucleotide
  misc_feature 1..20: note = Target: SCN10A; (+) strand; PAM type: NRG; PAM sequence: TAG
  source 1..20: mol_type = other DNA
tctctcaagtcttcaattac

SEQ ID NO: 35300 - DNA, 20 bp, synthetic construct
  misc_feature 1..20: note = Description of Artificial Sequence: Synthetic oligonucleotide
  misc_feature 1..20: note = Target: SCN10A; (+) strand; PAM type: NRG; PAM sequence: AAG
  source 1..20: mol_type = other DNA
ctcaagtcttcaattactag

SEQ ID NO: 35301 - DNA, 20 bp, synthetic construct
  misc_feature 1..20: note = Description of Artificial Sequence: Synthetic oligonucleotide
  misc_feature 1..20: note = Target: SCN10A; (+) strand; PAM type: NRG; PAM sequence: CAG
  source 1..20: mol_type = other DNA
atcccaattatgccttcctc

SEQ ID NO: 35302 - DNA, 20 bp, synthetic construct
  misc_feature 1..20: note = Description of Artificial Sequence: Synthetic oligonucleotide
  misc_feature 1..20: note = Target: SCN10A; (+) strand; PAM type: NRG; PAM sequence: AGG
  source 1..20: mol_type = other DNA
tcccaattatgccttcctcc

SEQ ID NO: 35303 - DNA, 20 bp, synthetic construct
  misc_feature 1..20: note = Description of Artificial Sequence: Synthetic oligonucleotide
  misc_feature 1..20: note = Target: SCN10A; (+) strand; PAM type: NRG; PAM sequence: AAG
  source 1..20: mol_type = other DNA
caattatgccttcctccagg

SEQ ID NO: 35304 - DNA, 20 bp, synthetic construct
  misc_feature 1..20: note = Description of Artificial Sequence: Synthetic oligonucleotide
  misc_feature 1..20: note = Target: SCN10A; (+) strand; PAM type: NRG; PAM sequence: CAG
  source 1..20: mol_type = other DNA
agccttttctgatacctatc

SEQ ID NO: 35305 - DNA, 20 bp, synthetic construct
  misc_feature 1..20: note = Description of Artificial Sequence: Synthetic oligonucleotide
  misc_feature 1..20: note = Target: SCN10A; (+) strand; PAM type: NRG; PAM sequence: AAG
  source 1..20: mol_type = other DNA
tgatacctatccagccccat

SEQ ID NO: 35306 - DNA, 20 bp, synthetic construct
  misc_feature 1..20: note = Description of Artificial Sequence: Synthetic oligonucleotide
  misc_feature 1..20: note = Target: SCN10A; (+) strand; PAM type: NRG; PAM sequence: GAG
  source 1..20: mol_type = other DNA
atacctatccagccccataa

SEQ ID NO: 35307 - DNA, 20 bp, synthetic construct
  misc_feature 1..20: note = Description of Artificial Sequence: Synthetic oligonucleotide
  misc_feature 1..20: note = Target: SCN10A; (+) strand; PAM type: NRG; PAM sequence: TGG
  source 1..20: mol_type = other DNA
cctatccagccccataagag

SEQ ID NO: 35308 - DNA, 20 bp, synthetic construct
  misc_feature 1..20: note = Description of Artificial Sequence: Synthetic oligonucleotide
  misc_feature 1..20: note = Target: SCN10A; (+) strand; PAM type: NRG; PAM sequence: TAG
  source 1..20: mol_type = other DNA
ctaatacactatttaacaca

SEQ ID NO: 35309 - DNA, 20 bp, synthetic construct
  misc_feature 1..20: note = Description of Artificial Sequence: Synthetic oligonucleotide
  misc_feature 1..20: note = Target: SCN10A; (+) strand; PAM type: NRG; PAM sequence: TGG
  source 1..20: mol_type = other DNA
atctgcctcctccacccaaa

SEQ ID NO: 35310 - DNA, 20 bp, synthetic construct
  misc_feature 1..20: note = Description of Artificial Sequence: Synthetic oligonucleotide
  misc_feature 1..20: note = Target: SCN10A; (+) strand; PAM type: NRG; PAM sequence: TAG
  source 1..20: mol_type = other DNA
tccacccaaatggaaatcct

SEQ ID NO: 35311 - DNA, 20 bp, synthetic construct
  misc_feature 1..20: note = Description of Artificial Sequence: Synthetic oligonucleotide
  misc_feature 1..20: note = Target: SCN10A; (+) strand; PAM type: NRG; PAM sequence: AGG
  source 1..20: mol_type = other DNA
ccacccaaatggaaatcctt

SEQ ID NO: 35312 - DNA, 20 bp, synthetic construct
  misc_feature 1..20: note = Description of Artificial Sequence: Synthetic oligonucleotide
  misc_feature 1..20: note = Target: SCN10A; (+) strand; PAM type: NRG; PAM sequence: GGG
  source 1..20: mol_type = other DNA
cacccaaatggaaatcctta

SEQ ID NO: 35313 - DNA, 20 bp, synthetic construct
  misc_feature 1..20: note = Description of Artificial Sequence: Synthetic oligonucleotide
  misc_feature 1..20: note = Target: SCN10A; (+) strand; PAM type: NRG; PAM sequence: AAG
  source 1..20: mol_type = other DNA
aaatggaaatccttagggaa

SEQ ID NO: 35314 - DNA, 20 bp, synthetic construct
  misc_feature 1..20: note = Description of Artificial Sequence: Synthetic oligonucleotide
  misc_feature 1..20: note = Target: SCN10A; (+) strand; PAM type: NRG; PAM sequence: TAG
  source 1..20: mol_type = other DNA
ttagggaaaagaacatgttc

SEQ ID NO: 35315 - DNA, 20 bp, synthetic construct
  misc_feature 1..20: note = Description of Artificial Sequence: Synthetic oligonucleotide
  misc_feature 1..20: note = Target: SCN10A; (+) strand; PAM type: NRG; PAM sequence: AAG
  source 1..20: mol_type = other DNA
tctagtcatctctttatacc

SEQ ID NO: 35316 - DNA, 20 bp, synthetic construct
  misc_feature 1..20: note = Description of Artificial Sequence: Synthetic oligonucleotide
  misc_feature 1..20: note = Target: SCN10A; (+) strand; PAM type: NRG; PAM sequence: TAG
  source 1..20: mol_type = other DNA
atctctttataccaagcacc

SEQ ID NO: 35317 - DNA, 20 bp, synthetic construct
  misc_feature 1..20: note = Description of Artificial Sequence: Synthetic oligonucleotide
  misc_feature 1..20: note = Target: SCN10A; (+) strand; PAM type: NRG; PAM sequence: AAG
  source 1..20: mol_type = other DNA
cctagtattgttgaatgaac

SEQ ID NO: 35318 - DNA, 20 bp, synthetic construct
  misc_feature 1..20: note = Description of Artificial Sequence: Synthetic oligonucleotide
  misc_feature 1..20: note = Target: SCN10A; (+) strand; PAM type: NRG; PAM sequence: CAG
  source 1..20: mol_type = other DNA
attgttgaatgaacaagtta

SEQ ID NO: 35319 - DNA, 20 bp, synthetic construct
  misc_feature 1..20: note = Description of Artificial Sequence: Synthetic oligonucleotide
  misc_feature 1..20: note = Target: SCN10A; (+) strand; PAM type: NRG; PAM sequence: AAG
  source 1..20: mol_type = other DNA
ctcctcttttttccctttga

SEQ ID NO: 35320 - DNA, 20 bp, synthetic construct
  misc_feature 1..20: note = Description of Artificial Sequence: Synthetic oligonucleotide
  misc_feature 1..20: note = Target: SCN10A; (+) strand; PAM type: NRG; PAM sequence: AAG
  source 1..20: mol_type = other DNA
tcttttttccctttgaaagt

SEQ ID NO: 35321 - DNA, 20 bp, synthetic construct
  misc_feature 1..20: note = Description of Artificial Sequence: Synthetic oligonucleotide
  misc_feature 1..20: note = Target: SCN10A; (+) strand; PAM type: NRG; PAM sequence: TGG
  source 1..20: mol_type = other DNA
cctttgaaagtaagcatcac

SEQ ID NO: 35322 - DNA, 20 bp, synthetic construct
  misc_feature 1..20: note = Description of Artificial Sequence: Synthetic oligonucleotide
  misc_feature 1..20: note = Target: SCN10A; (+) strand; PAM type: NRG; PAM sequence: GAG
  source 1..20: mol_type = other DNA
tttgaaagtaagcatcactg

SEQ ID NO: 35323 - DNA, 20 bp, synthetic construct
  misc_feature 1..20: note = Description of Artificial Sequence: Synthetic oligonucleotide
  misc_feature 1..20: note = Target: SCN10A; (+) strand; PAM type: NRG; PAM sequence: GAG
  source 1..20: mol_type = other DNA
tgaaagtaagcatcactgga

SEQ ID NO: 35324 - DNA, 20 bp, synthetic construct
  misc_feature 1..20: note = Description of Artificial Sequence: Synthetic oligonucleotide
  misc_feature 1..20: note = Target: SCN10A; (+) strand; PAM type: NRG; PAM sequence: AAG
  source 1..20: mol_type = other DNA
gtaagcatcactggagagac

SEQ ID NO: 35325 - DNA, 20 bp, synthetic construct
  misc_feature 1..20: note = Description of Artificial Sequence: Synthetic oligonucleotide
  misc_feature 1..20: note = Target: SCN10A; (+) strand; PAM type: NRG; PAM sequence: TGG
  source 1..20: mol_type = other DNA
caagcacacataccaattat

SEQ ID NO: 35326 - DNA, 20 bp, synthetic construct
  misc_feature 1..20: note = Description of Artificial Sequence: Synthetic oligonucleotide
  misc_feature 1..20: note = Target: SCN10A; (+) strand; PAM type: NRG; PAM sequence: AAG
  source 1..20: mol_type = other DNA
ataccaattattggacatcc

SEQ ID NO: 35327 - DNA, 20 bp, synthetic construct
  misc_feature 1..20: note = Description of Artificial Sequence: Synthetic oligonucleotide
  misc_feature 1..20: note = Target: SCN10A; (+) strand; PAM type: NRG; PAM sequence: TGG
  source 1..20: mol_type = other DNA
catccaagtgctaatctgtg

SEQ ID NO: 35328 - DNA, 20 bp, synthetic construct
  misc_feature 1..20: note = Description of Artificial Sequence: Synthetic oligonucleotide
  misc_feature 1..20: note = Target: SCN10A; (+) strand; PAM type: NRG; PAM sequence: GGG
  source 1..20: mol_type = other DNA
atccaagtgctaatctgtgt

SEQ ID NO: 35329 - DNA, 20 bp, synthetic construct
  misc_feature 1..20: note = Description of Artificial Sequence: Synthetic oligonucleotide
  misc_feature 1..20: note = Target: SCN10A; (+) strand; PAM type: NRG; PAM sequence: GGG
  source 1..20: mol_type = other DNA
tccaagtgctaatctgtgtg

SEQ ID NO: 35330 - DNA, 20 bp, synthetic construct
  misc_feature 1..20: note = Description of Artificial Sequence: Synthetic oligonucleotide
  misc_feature 1..20: note = Target: SCN10A; (+) strand; PAM type: NRG; PAM sequence: CAG
  source 1..20: mol_type = other DNA
gctaatctgtgtggggctga

SEQ ID NO: 35331 - DNA, 20 bp, synthetic construct
  misc_feature 1..20: note = Description of Artificial Sequence: Synthetic oligonucleotide
  misc_feature 1..20: note = Target: SCN10A; (+) strand; PAM type: NRG; PAM sequence: TGG
  source 1..20: mol_type = other DNA
tctgtgtggggctgacagaa

SEQ ID NO: 35332 - DNA, 20 bp, synthetic construct
  misc_feature 1..20: note = Description of Artificial Sequence: Synthetic oligonucleotide
  misc_feature 1..20: note = Target: SCN10A; (+) strand; PAM type: NRG; PAM sequence: GGG
  source 1..20: mol_type = other DNA
ctgtgtggggctgacagaat

SEQ ID NO: 35333 - DNA, 20 bp, synthetic construct
  misc_feature 1..20: note = Description of Artificial Sequence: Synthetic oligonucleotide
  misc_feature 1..20: note = Target: SCN10A; (+) strand; PAM type: NRG; PAM sequence: GGG
  source 1..20: mol_type = other DNA
tgtgtggggctgacagaatg

SEQ ID NO: 35334 - DNA, 20 bp, synthetic construct
  misc_feature 1..20: note = Description of Artificial Sequence: Synthetic oligonucleotide
  misc_feature 1..20: note = Target: SCN10A; (+) strand; PAM type: NRG; PAM sequence: GGG
  source 1..20: mol_type = other DNA
gtgtggggctgacagaatgg

SEQ ID NO: 35335 - DNA, 20 bp, synthetic construct
  misc_feature 1..20: note = Description of Artificial Sequence: Synthetic oligonucleotide
  misc_feature 1..20: note = Target: SCN10A; (+) strand; PAM type: NRG; PAM sequence: AAG
  source 1..20: mol_type = other DNA
tgacagaatgggggaaatta

SEQ ID NO: 35336 - DNA, 20 bp, synthetic construct
  misc_feature 1..20: note = Description of Artificial Sequence: Synthetic oligonucleotide
  misc_feature 1..20: note = Target: SCN10A; (+) strand; PAM type: NRG; PAM sequence: CAG
  source 1..20: mol_type = other DNA
ggggaaattaaagcccaatt

SEQ ID NO: 35337 - DNA, 20 bp, synthetic construct
  misc_feature 1..20: note = Description of Artificial Sequence: Synthetic oligonucleotide
  misc_feature 1..20: note = Target: SCN10A; (+) strand; PAM type: NRG; PAM sequence: TGG
  source 1..20: mol_type = other DNA
cagtgtcattgacatttcca

SEQ ID NO: 35338 - DNA, 20 bp, synthetic construct
  misc_feature 1..20: note = Description of Artificial Sequence: Synthetic oligonucleotide
  misc_feature 1..20: note = Target: SCN10A; (+) strand; PAM type: NRG; PAM sequence: AAG
  source 1..20: mol_type = other DNA
tgtcattgacatttccatgg

SEQ ID NO: 35339 - DNA, 20 bp, synthetic construct
  misc_feature 1..20: note = Description of Artificial Sequence: Synthetic oligonucleotide
  misc_feature 1..20: note = Target: SCN10A; (+) strand; PAM type: NRG; PAM sequence: CAG
  source 1..20: mol_type = other DNA
gaactgtgccccatgtatgc

SEQ ID NO: 35340 - DNA, 20 bp, synthetic construct
  misc_feature 1..20: note = Description of Artificial Sequence: Synthetic oligonucleotide
  misc_feature 1..20: note = Target: SCN10A; (+) strand; PAM type: NRG; PAM sequence: AGG
  source 1..20: mol_type = other DNA
aactgtgccccatgtatgcc

SEQ ID NO: 35341 - DNA, 20 bp, synthetic construct
  misc_feature 1..20: note = Description of Artificial Sequence: Synthetic oligonucleotide
  misc_feature 1..20: note = Target: SCN10A; (+) strand; PAM type: NRG; PAM sequence: AAG
  source 1..20: mol_type = other DNA
gtatgccaggtgctgctcaa

SEQ ID NO: 35342 - DNA, 20 bp, synthetic construct
  misc_feature 1..20: note = Description of Artificial Sequence: Synthetic oligonucleotide
  misc_feature 1..20: note = Target: SCN10A; (+) strand; PAM type: NRG; PAM sequence: AGG
  source 1..20: mol_type = other DNA
tatgccaggtgctgctcaaa

SEQ ID NO: 35343 - DNA, 20 bp, synthetic construct
  misc_feature 1..20: note = Description of Artificial Sequence: Synthetic oligonucleotide
  misc_feature 1..20: note = Target: SCN10A; (+) strand; PAM type: NRG; PAM sequence: GGG
  source 1..20: mol_type = other DNA
atgccaggtgctgctcaaaa

SEQ ID NO: 35344 - DNA, 20 bp, synthetic construct
  misc_feature 1..20: note = Description of Artificial Sequence: Synthetic oligonucleotide
  misc_feature 1..20: note = Target: SCN10A; (+) strand; PAM type: NRG; PAM sequence: GGG
  source 1..20: mol_type = other DNA
tgccaggtgctgctcaaaag

SEQ ID NO: 35345 - DNA, 20 bp, synthetic construct
  misc_feature 1..20: note = Description of Artificial Sequence: Synthetic oligonucleotide
  misc_feature 1..20: note = Target: SCN10A; (+) strand; PAM type: NRG; PAM sequence: AAG
  source 1..20: mol_type = other DNA
ggtgctgctcaaaaggggca

SEQ ID NO: 35346 - DNA, 20 bp, synthetic construct
  misc_feature 1..20: note = Description of Artificial Sequence: Synthetic oligonucleotide
  misc_feature 1..20: note = Target: SCN10A; (+) strand; PAM type: NRG; PAM sequence: AAG
  source 1..20: mol_type = other DNA
ctgctcaaaaggggcaaagc

SEQ ID NO: 35347 - DNA, 20 bp, synthetic construct
  misc_feature 1..20: note = Description of Artificial Sequence: Synthetic oligonucleotide
  misc_feature 1..20: note = Target: SCN10A; (+) strand; PAM type: NRG; PAM sequence: AAG
  source 1..20: mol_type = other DNA
tcaaaaggggcaaagcaaga

SEQ ID NO: 35348 - DNA, 20 bp, synthetic construct
  misc_feature 1..20: note = Description of Artificial Sequence: Synthetic oligonucleotide
  misc_feature 1..20: note = Target: SCN10A; (+) strand; PAM type: NRG; PAM sequence: GAG
  source 1..20: mol_type = other DNA
aaaaggggcaaagcaagaaa

SEQ ID NO: 35349 - DNA, 20 bp, synthetic construct
  misc_feature 1..20: note = Description of Artificial Sequence: Synthetic oligonucleotide
  misc_feature 1..20: note = Target: SCN10A; (+) strand; PAM type: NRG; PAM sequence: AGG
  source 1..20: mol_type = other DNA
aaaggggcaaagcaagaaag

SEQ ID NO: 35350 - DNA, 20 bp, synthetic construct
  misc_feature 1..20: note = Description of Artificial Sequence: Synthetic oligonucleotide
  misc_feature 1..20: note = Target: SCN10A; (+) strand; PAM type: NRG; PAM sequence: GAG
  source 1..20: mol_type = other DNA
aggggcaaagcaagaaagag

SEQ ID NO: 35351 - DNA, 20 bp, synthetic construct
  misc_feature 1..20: note = Description of Artificial Sequence: Synthetic oligonucleotide
  misc_feature 1..20: note = Target: SCN10A; (+) strand; PAM type: NRG; PAM sequence: AGG
  source 1..20: mol_type = other DNA
ggggcaaagcaagaaagagg

SEQ ID NO: 35352 - DNA, 20 bp, synthetic construct
  misc_feature 1..20: note = Description of Artificial Sequence: Synthetic oligonucleotide
  misc_feature 1..20: note = Target: SCN10A; (+) strand; PAM type: NRG; PAM sequence: GGG
  source 1..20: mol_type = other DNA
gggcaaagcaagaaagagga

SEQ ID NO: 35353 - DNA, 20 bp, synthetic construct
  misc_feature 1..20: note = Description of Artificial Sequence: Synthetic oligonucleotide
  misc_feature 1..20: note = Target: SCN10A; (+) strand; PAM type: NRG; PAM sequence: CAG
  source 1..20: mol_type = other DNA
aagcaagaaagaggagggca

SEQ ID NO: 35354 - DNA, 20 bp, synthetic construct
  misc_feature 1..20: note = Description of Artificial Sequence: Synthetic oligonucleotide
  misc_feature 1..20: note = Target: SCN10A; (+) strand; PAM type: NRG; PAM sequence: CAG
  source 1..20: mol_type = other DNA
gaaagaggagggcacagatg

SEQ ID NO: 35355 - DNA, 20 bp, synthetic construct
  misc_feature 1..20: note = Description of Artificial Sequence: Synthetic oligonucleotide
  misc_feature 1..20: note = Target: SCN10A; (+) strand; PAM type: NRG; PAM sequence: AAG
  source 1..20: mol_type = other DNA
acagatgcagataaatgctg

SEQ ID NO: 35356 - DNA, 20 bp, synthetic construct
  misc_feature 1..20: note = Description of Artificial Sequence: Synthetic oligonucleotide
  misc_feature 1..20: note = Target: SCN10A; (+) strand; PAM type: NRG; PAM sequence: TGG
  source 1..20: mol_type = other DNA
tgcagataaatgctgaagtg

SEQ ID NO: 35357 - DNA, 20 bp, synthetic construct
  misc_feature 1..20: note = Description of Artificial Sequence: Synthetic oligonucleotide
  misc_feature 1..20: note = Target: SCN10A; (+) strand; PAM type: NRG; PAM sequence: GAG
  source 1..20: mol_type = other DNA
ctgaagtgtggatgtgtcat

SEQ ID NO: 35358 - DNA, 20 bp, synthetic construct
  misc_feature 1..20: note = Description of Artificial Sequence: Synthetic oligonucleotide
  misc_feature 1..20: note = Target: SCN10A; (+) strand; PAM type: NRG; PAM sequence: AGG
  source 1..20: mol_type = other DNA
tgaagtgtggatgtgtcatg

SEQ ID NO: 35359 - DNA, 20 bp, synthetic construct
  misc_feature 1..20: note = Description of Artificial Sequence: Synthetic oligonucleotide
  misc_feature 1..20: note = Target: SCN10A; (+) strand; PAM type: NRG; PAM sequence: CAG
  source 1..20: mol_type = other DNA
gtgtggatgtgtcatgaggt

SEQ ID NO: 35360 - DNA, 20 bp, synthetic construct
  misc_feature 1..20: note = Description of Artificial Sequence: Synthetic oligonucleotide
  misc_feature 1..20: note = Target: SCN10A; (+) strand; PAM type: NRG; PAM sequence: AAG
  source 1..20: mol_type = other DNA
catgaggtcagtgtgcatgc

SEQ ID NO: 35361 - DNA, 20 bp, synthetic construct
  misc_feature 1..20: note = Description of Artificial Sequence: Synthetic oligonucleotide
  misc_feature 1..20: note = Target: SCN10A; (+) strand; PAM type: NRG; PAM sequence: GAG
  source 1..20: mol_type = other DNA
gtatatgcacacataaatct

SEQ ID NO: 35362 - DNA, 20 bp, synthetic construct
  misc_feature 1..20: note = Description of Artificial Sequence: Synthetic oligonucleotide
  misc_feature 1..20: note = Target: SCN10A; (+) strand; PAM type: NRG; PAM sequence: AGG
  source 1..20: mol_type = other DNA
tatatgcacacataaatctg

SEQ ID NO: 35363 - DNA, 20 bp, synthetic construct
  misc_feature 1..20: note = Description of Artificial Sequence: Synthetic oligonucleotide
  misc_feature 1..20: note = Target: SCN10A; (+) strand; PAM type: NRG; PAM sequence: GGG
  source 1..20: mol_type = other DNA
atatgcacacataaatctga

SEQ ID NO: 35364 - DNA, 20 bp, synthetic construct
  misc_feature 1..20: note = Description of Artificial Sequence: Synthetic oligonucleotide
  misc_feature 1..20: note = Target: SCN10A; (+) strand; PAM type: NRG; PAM sequence: TGG
  source 1..20: mol_type = other DNA
gcacacataaatctgagggt

SEQ ID NO: 35365 - DNA, 20 bp, synthetic construct
  misc_feature 1..20: note = Description of Artificial Sequence: Synthetic oligonucleotide
  misc_feature 1..20: note = Target: SCN10A; (+) strand; PAM type: NRG; PAM sequence: GAG
  source 1..20: mol_type = other DNA
acacataaatctgagggttg

SEQ ID NO: 35366 - DNA, 20 bp, synthetic construct
  misc_feature 1..20: note = Description of Artificial Sequence: Synthetic oligonucleotide
  misc_feature 1..20: note = Target: SCN10A; (+) strand; PAM type: NRG; PAM sequence: GAG
  source 1..20: mol_type = other DNA
acataaatctgagggttgga

SEQ ID NO: 35367 - DNA, 20 bp, synthetic construct
  misc_feature 1..20: note = Description of Artificial Sequence: Synthetic oligonucleotide
  misc_feature 1..20: note = Target: SCN10A; (+) strand; PAM type: NRG; PAM sequence: TGG
  source 1..20: mol_type = other DNA
aaatctgagggttggagaga

SEQ ID NO: 35368 - DNA, 20 bp, synthetic construct
  misc_feature 1..20: note = Description of Artificial Sequence: Synthetic oligonucleotide
  misc_feature 1..20: note = Target: SCN10A; (+) strand; PAM type: NRG; PAM sequence: AAG
  source 1..20: mol_type = other DNA
ggagagatggtattgcaaaa

SEQ ID NO: 35369 - DNA, 20 bp, synthetic construct
  misc_feature 1..20: note = Description of Artificial Sequence: Synthetic oligonucleotide
  misc_feature 1..20: note = Target: SCN10A; (+) strand; PAM type: NRG; PAM sequence: CGG
  source 1..20: mol_type = other DNA
caaaaaagtaaaatatcctt

SEQ ID NO: 35370 - DNA, 20 bp, synthetic construct
  misc_feature 1..20: note = Description of Artificial Sequence: Synthetic oligonucleotide
  misc_feature 1..20: note = Target: SCN10A; (+) strand; PAM type: NRG; PAM sequence: TAG
  source 1..20: mol_type = other DNA
aagtaaaatatccttcggct

SEQ ID NO: 35371 - DNA, 20 bp, synthetic construct
  misc_feature 1..20: note = Description of Artificial Sequence: Synthetic oligonucleotide
  misc_feature 1..20: note = Target: SCN10A; (+) strand; PAM type: NRG; PAM sequence: CAG
  source 1..20: mol_type = other DNA
aaatatccttcggcttagca

SEQ ID NO: 35372 - DNA, 20 bp, synthetic construct
  misc_feature 1..20: note = Description of Artificial Sequence: Synthetic oligonucleotide
  misc_feature 1..20: note = Target: SCN10A; (+) strand; PAM type: NRG; PAM sequence: AGG
  source 1..20: mol_type = other DNA
aatatccttcggcttagcac

SEQ ID NO: 35373 - DNA, 20 bp, synthetic construct
  misc_feature 1..20: note = Description of Artificial Sequence: Synthetic oligonucleotide
  misc_feature 1..20: note = Target: SCN10A; (+) strand; PAM type: NRG; PAM sequence: AAG
  source 1..20: mol_type = other DNA
ccttcggcttagcacaggaa

SEQ ID NO: 35374 - DNA, 20 bp, synthetic construct
  misc_feature 1..20: note = Description of Artificial Sequence: Synthetic oligonucleotide
  misc_feature 1..20: note = Target: SCN10A; (+) strand; PAM type: NRG; PAM sequence: GAG
  source 1..20: mol_type = other DNA
ttcggcttagcacaggaaaa

SEQ ID NO: 35375 - DNA, 20 bp, synthetic construct
  misc_feature 1..20: note = Description of Artificial Sequence: Synthetic oligonucleotide
  misc_feature 1..20: note = Target: SCN10A; (+) strand; PAM type: NRG; PAM sequence: GAG
  source 1..20: mol_type = other DNA
ttagcacaggaaaagagatt

SEQ ID NO: 35376 - DNA, 20 bp, synthetic construct
  misc_feature 1..20: note = Description of Artificial Sequence: Synthetic oligonucleotide
  misc_feature 1..20: note = Target: SCN10A; (+) strand; PAM type: NRG; PAM sequence: GAG
  source 1..20: mol_type = other DNA
agcacaggaaaagagattga

SEQ ID NO: 35377 - DNA, 20 bp, synthetic construct
  misc_feature 1..20: note = Description of Artificial Sequence: Synthetic oligonucleotide
  misc_feature 1..20: note = Target: SCN10A; (+) strand; PAM type: NRG; PAM sequence: AGG
  source 1..20: mol_type = other DNA
gcacaggaaaagagattgag

SEQ ID NO: 35378 - DNA, 20 bp, synthetic construct
  misc_feature 1..20: note = Description of Artificial Sequence: Synthetic oligonucleotide
  misc_feature 1..20: note = Target: SCN10A; (+) strand; PAM type: NRG; PAM sequence: GGG
  source 1..20: mol_type = other DNA
cacaggaaaagagattgaga

SEQ ID NO: 35379 - DNA, 20 bp, synthetic construct
  misc_feature 1..20: note = Description of Artificial Sequence: Synthetic oligonucleotide
  misc_feature 1..20: note = Target: SCN10A; (+) strand; PAM type: NRG; PAM sequence: AAG
  source 1..20: mol_type = other DNA
aggaaaagagattgagaggg

SEQ ID NO: 35380 - DNA, 20 bp, synthetic construct
  misc_feature 1..20: note = Description of Artificial Sequence: Synthetic oligonucleotide
  misc_feature 1..20: note = Target: SCN10A; (+) strand; PAM type: NRG; PAM sequence: GAG
  source 1..20: mol_type = other DNA
aaagagattgagagggaagt

SEQ ID NO: 35381 - DNA, 20 bp, synthetic construct
  misc_feature 1..20: note = Description of Artificial Sequence: Synthetic oligonucleotide
  misc_feature 1..20: note = Target: SCN10A; (+) strand; PAM type: NRG; PAM sequence: GAG
  source 1..20: mol_type = other DNA
agagattgagagggaagtga

SEQ ID NO: 35382 - DNA, 20 bp, synthetic construct
  misc_feature 1..20: note = Description of Artificial Sequence: Synthetic oligonucleotide
  misc_feature 1..20: note = Target: SCN10A; (+) strand; PAM type: NRG; PAM sequence: AGG
  source 1..20: mol_type = other DNA
gagattgagagggaagtgag

SEQ ID NO: 35383 - DNA, 20 bp, synthetic construct
  misc_feature 1..20: note = Description of Artificial Sequence: Synthetic oligonucleotide
  misc_feature 1..20: note = Target: SCN10A; (+) strand; PAM type: NRG; PAM sequence: AAG
  source 1..20: mol_type = other DNA
agagggaagtgagaggtata

SEQ ID NO: 35384 - DNA, 20 bp, synthetic construct
  misc_feature 1..20: note = Description of Artificial Sequence: Synthetic oligonucleotide
  misc_feature 1..20: note = Target: SCN10A; (+) strand; PAM type: NRG; PAM sequence: TAG
  source 1..20: mol_type = other DNA
aggtataaagcataaaaaaa

SEQ ID NO: 35385 - DNA, 20 bp, synthetic construct
  misc_feature 1..20: note = Description of Artificial Sequence: Synthetic oligonucleotide
  misc_feature 1..20: note = Target: SCN10A; (+) strand; PAM type: NRG; PAM sequence: TAG
  source 1..20: mol_type = other DNA
gatccccttttccacactgt

SEQ ID NO: 35386 - DNA, 20 bp, synthetic construct
  misc_feature 1..20: note = Description of Artificial Sequence: Synthetic oligonucleotide
  misc_feature 1..20: note = Target: SCN10A; (+) strand; PAM type: NRG; PAM sequence: TGG
  source 1..20: mol_type = other DNA
ccttttccacactgttagtg

SEQ ID NO: 35387 - DNA, 20 bp, synthetic construct
  misc_feature 1..20: note = Description of Artificial Sequence: Synthetic oligonucleotide
  misc_feature 1..20: note = Target: SCN10A; (+) strand; PAM type: NRG; PAM sequence: GAG
  source 1..20: mol_type = other DNA
ttttccacactgttagtgtg

SEQ ID NO: 35388 - DNA, 20 bp, synthetic construct
  misc_feature 1..20: note = Description of Artificial Sequence: Synthetic oligonucleotide
  misc_feature 1..20: note = Target: SCN10A; (+) strand; PAM type: NRG; PAM sequence: CAG
  source 1..20: mol_type = other DNA
tgtggagccaccctcccaca

SEQ ID NO: 35389 - DNA, 20 bp, synthetic construct
  misc_feature 1..20: note = Description of Artificial Sequence: Synthetic oligonucleotide
  misc_feature 1..20: note = Target: SCN10A; (+) strand; PAM type: NRG; PAM sequence: CAG
  source 1..20: mol_type = other DNA
ggagccaccctcccacacag

SEQ ID NO: 35390 - DNA, 20 bp, synthetic construct
  misc_feature 1..20: note = Description of Artificial Sequence: Synthetic oligonucleotide
  misc_feature 1..20: note = Target: SCN10A; (+) strand; PAM type: NRG; PAM sequence: CAG
  source 1..20: mol_type = other DNA
acacagcagatattatctgt

SEQ ID NO: 35391 - DNA, 20 bp, synthetic construct
  misc_feature 1..20: note = Description of Artificial Sequence: Synthetic oligonucleotide
  misc_feature 1..20: note = Target: SCN10A; (+) strand; PAM type: NRG; PAM sequence: TAG
  source 1..20: mol_type = other DNA
gatattatctgtcagaccta

SEQ ID NO: 35392 - DNA, 20 bp, synthetic construct
  misc_feature 1..20: note = Description of Artificial Sequence: Synthetic oligonucleotide
  misc_feature 1..20: note = Target: SCN10A; (+) strand; PAM type: NRG; PAM sequence: AAG
  source 1..20: mol_type = other DNA
ttatctgtcagacctataga

SEQ ID NO: 35393 - DNA, 20 bp, synthetic construct
  misc_feature 1..20: note = Description of Artificial Sequence: Synthetic oligonucleotide
  misc_feature 1..20: note = Target: SCN10A; (+) strand; PAM type: NRG; PAM sequence: AGG
  source 1..20: mol_type = other DNA
tatctgtcagacctatagaa

SEQ ID NO: 35394 - DNA, 20 bp, synthetic construct
  misc_feature 1..20: note = Description of Artificial Sequence: Synthetic oligonucleotide
  misc_feature 1..20: note = Target: SCN10A; (+) strand; PAM type: NRG; PAM sequence: GGG
  source 1..20: mol_type = other DNA
atctgtcagacctatagaaa

SEQ ID NO: 35395 - DNA, 20 bp, synthetic construct
  misc_feature 1..20: note = Description of Artificial Sequence: Synthetic oligonucleotide
  misc_feature 1..20: note = Target: SCN10A; (+) strand; PAM type: NRG; PAM sequence: TGG
  source 1..20: mol_type = other DNA
acctatagaaagggcatatt

SEQ ID NO: 35396 - DNA, 20 bp, synthetic construct
  misc_feature 1..20: note = Description of Artificial Sequence: Synthetic oligonucleotide
  misc_feature 1..20: note = Target: SCN10A; (+) strand; PAM type: NRG; PAM sequence: GGG
  source 1..20: mol_type = other DNA
cctatagaaagggcatattt

SEQ ID NO: 35397 - DNA, 20 bp, synthetic construct
  misc_feature 1..20: note = Description of Artificial Sequence: Synthetic oligonucleotide
  misc_feature 1..20: note = Target: SCN10A; (+) strand; PAM type: NRG; PAM sequence: GGG
  source 1..20: mol_type = other DNA
ctatagaaagggcatatttg

SEQ ID NO: 35398 - DNA, 20 bp, synthetic construct
  misc_feature 1..20: note = Description of Artificial Sequence: Synthetic oligonucleotide
  misc_feature 1..20: note = Target: SCN10A; (+) strand; PAM type: NRG; PAM sequence: AAG
  source 1..20: mol_type = other DNA
aaagggcatatttggggtaa

SEQ ID NO: 35399 - DNA, 20 bp, synthetic construct
  misc_feature 1..20: note = Description of Artificial Sequence: Synthetic oligonucleotide
  misc_feature 1..20: note = Target: SCN10A; (+) strand; PAM type: NRG; PAM sequence: AGG
  source 1..20: mol_type = other DNA
aagggcatatttggggtaaa

SEQ ID NO: 35400 - DNA, 20 bp, synthetic construct
  misc_feature 1..20: note = Description of Artificial Sequence: Synthetic oligonucleotide
  misc_feature 1..20: note = Target: SCN10A; (+) strand; PAM type: NRG; PAM sequence: AAG
  source 1..20: mol_type = other DNA
tttggggtaaaaggactttc

SEQ ID NO: 35401 - DNA, 20 bp, synthetic construct
  misc_feature 1..20: note = Description of Artificial Sequence: Synthetic oligonucleotide
  misc_feature 1..20: note = Target: SCN10A; (+) strand; PAM type: NRG; PAM sequence: AGG
  source 1..20: mol_type = other DNA
ttggggtaaaaggactttca

SEQ ID NO: 35402 - DNA, 20 bp, synthetic construct
  misc_feature 1..20: note = Description of Artificial Sequence: Synthetic oligonucleotide
  misc_feature 1..20: note = Target: SCN10A; (+) strand; PAM type: NRG; PAM sequence: GGG
  source 1..20: mol_type = other DNA
tggggtaaaaggactttcaa

SEQ ID NO: 35403 - DNA, 20 bp, synthetic construct
  misc_feature 1..20: note = Description of Artificial Sequence: Synthetic oligonucleotide
  misc_feature 1..20: note = Target: SCN10A; (+) strand; PAM type: NRG; PAM sequence: GGG
  source 1..20: mol_type = other DNA
ggggtaaaaggactttcaag

SEQ ID NO: 35404 - DNA, 20 bp, synthetic construct
  misc_feature 1..20: note = Description of Artificial Sequence: Synthetic oligonucleotide
  misc_feature 1..20: note = Target: SCN10A; (+) strand; PAM type: NRG; PAM sequence: CAG
  source 1..20: mol_type = other DNA
gtaaaaggactttcaagggg

SEQ ID NO: 35405 - DNA, 20 bp, synthetic construct
  misc_feature 1..20: note = Description of Artificial Sequence: Synthetic oligonucleotide
  misc_feature 1..20: note = Target: SCN10A; (+) strand; PAM type: NRG; PAM sequence: AGG
  source 1..20: mol_type = other DNA
taaaaggactttcaaggggc

SEQ ID NO: 35406 - DNA, 20 bp, synthetic construct
  misc_feature 1..20: note = Description of Artificial Sequence: Synthetic oligonucleotide
  misc_feature 1..20: note = Target: SCN10A; (+) strand; PAM type: NRG; PAM sequence: AAG
  source 1..20: mol_type = other DNA
aaggactttcaaggggcagg

SEQ ID NO: 35407 - DNA, 20 bp, synthetic construct
  misc_feature 1..20: note = Description of Artificial Sequence: Synthetic oligonucleotide
  misc_feature 1..20: note = Target: SCN10A; (+) strand; PAM type: NRG; PAM sequence: AGG
  source 1..20: mol_type = other DNA
aggactttcaaggggcagga

SEQ ID NO: 35408 - DNA, 20 bp, synthetic construct
  misc_feature 1..20: note = Description of Artificial Sequence: Synthetic oligonucleotide
  misc_feature 1..20: note = Target: SCN10A; (+) strand; PAM type: NRG; PAM sequence: TGG
  source 1..20: mol_type = other DNA
actttcaaggggcaggaagg

SEQ ID NO: 35409 - DNA, 20 bp, synthetic construct
  misc_feature 1..20: note = Description of Artificial Sequence: Synthetic oligonucleotide
  misc_feature 1..20: note = Target: SCN10A; (+) strand; PAM type: NRG; PAM sequence: TGG
  source 1..20: mol_type = other DNA
ttcaaggggcaggaaggtgg

SEQ ID NO: 35410 - DNA, 20 bp, synthetic construct
  misc_feature 1..20: note = Description of Artificial Sequence: Synthetic oligonucleotide
  misc_feature 1..20: note = Target: SCN10A; (+) strand; PAM type: NRG; PAM sequence: GGG
  source 1..20: mol_type = other DNA
tcaaggggcaggaaggtggt

SEQ ID NO: 35411 - DNA, 20 bp, synthetic construct
  misc_feature 1..20: note = Description of Artificial Sequence: Synthetic oligonucleotide
  misc_feature 1..20: note = Target: SCN10A; (+) strand; PAM type: NRG; PAM sequence: GAG
  source 1..20: mol_type = other DNA
aaggggcaggaaggtggtgg

SEQ ID NO: 35412 - DNA, 20 bp, synthetic construct
  misc_feature 1..20: note = Description of Artificial Sequence: Synthetic oligonucleotide
  misc_feature 1..20: note = Target: SCN10A; (+) strand; PAM type: NRG; PAM sequence: AGG
  source 1..20: mol_type = other DNA
aggggcaggaaggtggtggg

SEQ ID NO: 35413 - DNA, 20 bp, synthetic construct
  misc_feature 1..20: note = Description of Artificial Sequence: Synthetic oligonucleotide
  misc_feature 1..20: note = Target: SCN10A; (+) strand; PAM type: NRG; PAM sequence: AAG
  source 1..20: mol_type = other DNA
ggcaggaaggtggtgggagg

SEQ ID NO: 35414 - DNA, 20 bp, synthetic construct
  misc_feature 1..20: note = Description of Artificial Sequence: Synthetic oligonucleotide
  misc_feature 1..20: note = Target: SCN10A; (+) strand; PAM type: NRG; PAM sequence: TGG
  source 1..20: mol_type = other DNA
gaaggtggtgggaggaagcg

SEQ ID NO: 35415 - DNA, 20 bp, synthetic construct
  misc_feature 1..20: note = Description of Artificial Sequence: Synthetic oligonucleotide
  misc_feature 1..20: note = Target: SCN10A; (+) strand; PAM type: NRG; PAM sequence: GAG
  source 1..20: mol_type = other DNA
gtggtgggaggaagcgtggc

SEQ ID NO: 35416 - DNA, 20 bp, synthetic construct
  misc_feature 1..20: note = Description of Artificial Sequence: Synthetic oligonucleotide
  misc_feature 1..20: note = Target: SCN10A; (+) strand; PAM type: NRG; PAM sequence: AGG
  source 1..20: mol_type = other DNA
tggtgggaggaagcgtggcg

SEQ ID NO: 35417 - DNA, 20 bp, synthetic construct
  misc_feature 1..20: note = Description of Artificial Sequence: Synthetic oligonucleotide
  misc_feature 1..20: note = Target: SCN10A; (+) strand; PAM type: NRG; PAM sequence: AAG
  source 1..20: mol_type = other DNA
gggaggaagcgtggcgagga

SEQ ID NO: 35418 - DNA, 20 bp, synthetic construct
  misc_feature 1..20: note = Description of Artificial Sequence: Synthetic oligonucleotide
  misc_feature 1..20: note = Target: SCN10A; (+) strand; PAM type: NRG; PAM sequence: CAG
  source 1..20: mol_type = other DNA
aagcgtggcgaggaaagttg

SEQ ID NO: 35419 - DNA, 20 bp, synthetic construct
  misc_feature 1..20: note = Description of Artificial Sequence: Synthetic oligonucleotide
  misc_feature 1..20: note = Target: SCN10A; (+) strand; PAM type: NRG; PAM sequence: TAG
  source 1..20: mol_type = other DNA
gaaagttgcagtgcaaattt

SEQ ID NO: 35420 - DNA, 20 bp, synthetic construct
  misc_feature 1..20: note = Description of Artificial Sequence: Synthetic oligonucleotide
  misc_feature 1..20: note = Target: SCN10A; (+) strand; PAM type: NRG; PAM sequence: GAG
  source 1..20: mol_type = other DNA
aagttgcagtgcaaatttta

SEQ ID NO: 35421 - DNA, 20 bp, synthetic construct
  misc_feature 1..20: note = Description of Artificial Sequence: Synthetic oligonucleotide
  misc_feature 1..20: note = Target: SCN10A; (+) strand; PAM type: NRG; PAM sequence: TGG
  source 1..20: mol_type = other DNA
ttgcagtgcaaattttagag

SEQ ID NO: 35422 - DNA, 20 bp, synthetic construct
  misc_feature 1..20: note = Description of Artificial Sequence: Synthetic oligonucleotide
  misc_feature 1..20: note = Target: SCN10A; (+) strand; PAM type: NRG; PAM sequence: GGG
  source 1..20: mol_type = other DNA
tgcagtgcaaattttagagt

SEQ ID NO: 35423 - DNA, 20 bp, synthetic construct
  misc_feature 1..20: note = Description of Artificial Sequence: Synthetic oligonucleotide
  misc_feature 1..20: note = Target: SCN10A; (+) strand; PAM type: NRG; PAM sequence: GAG
  source 1..20: mol_type = other DNA
cagtgcaaattttagagtgg

SEQ ID NO: 35424 - DNA, 20 bp, synthetic construct
  misc_feature 1..20: note = Description of Artificial Sequence: Synthetic oligonucleotide
  misc_feature 1..20: note = Target: SCN10A; (+) strand; PAM type: NRG; PAM sequence: AGG
  source 1..20: mol_type = other DNA
agtgcaaattttagagtggg

SEQ ID NO: 35425 - DNA, 20 bp, synthetic construct
  misc_feature 1..20: note = Description of Artificial Sequence: Synthetic oligonucleotide
  misc_feature 1..20: note = Target: SCN10A; (+) strand; PAM type: NRG; PAM sequence: CAG
  source 1..20: mol_type = other DNA
gcaaattttagagtgggagg

SEQ ID NO: 35426 - DNA, 20 bp, synthetic construct
  misc_feature 1..20: note = Description of Artificial Sequence: Synthetic oligonucleotide
  misc_feature 1..20: note = Target: SCN10A; (+) strand; PAM type: NRG; PAM sequence: AAG
  source 1..20: mol_type = other DNA
attttagagtgggaggcaga

SEQ ID NO: 35427 - DNA, 20 bp, synthetic construct
  misc_feature 1..20: note = Description of Artificial Sequence: Synthetic oligonucleotide
  misc_feature 1..20: note = Target: SCN10A; (+) strand; PAM type: NRG; PAM sequence: TGG
  source 1..20: mol_type = other DNA
tgggaggcagaaagttatta

SEQ ID NO: 35428 - DNA, 20 bp, synthetic construct
  misc_feature 1..20: note = Description of Artificial Sequence: Synthetic oligonucleotide
  misc_feature 1..20: note = Target: SCN10A; (+) strand; PAM type: NRG; PAM sequence: GGG
  source 1..20: mol_type = other DNA
gggaggcagaaagttattat

SEQ ID NO: 35429 - DNA, 20 bp, synthetic construct
  misc_feature 1..20: note = Description of Artificial Sequence: Synthetic oligonucleotide
  misc_feature 1..20: note = Target: SCN10A; (+) strand; PAM type: NRG; PAM sequence: GGG
  source 1..20: mol_type = other DNA
ggaggcagaaagttattatg

SEQ ID NO: 35430 - DNA, 20 bp, synthetic construct
  misc_feature 1..20: note = Description of Artificial Sequence: Synthetic oligonucleotide
  misc_feature 1..20: note = Target: SCN10A; (+) strand; PAM type: NRG; PAM sequence: GGG
  source 1..20: mol_type = other DNA
gaggcagaaagttattatgg

SEQ ID NO: 35431 - DNA, 20 bp, synthetic construct
  misc_feature 1..20: note = Description of Artificial Sequence: Synthetic oligonucleotide
  misc_feature 1..20: note = Target: SCN10A; (+) strand; PAM type: NRG; PAM sequence: GGG
  source 1..20: mol_type = other DNA
aggcagaaagttattatggg

SEQ ID NO: 35432 - DNA, 20 bp, synthetic construct
  misc_feature 1..20: note = Description of Artificial Sequence: Synthetic oligonucleotide
  misc_feature 1..20: note = Target: SCN10A; (+) strand; PAM type: NRG; PAM sequence: AAG
  source 1..20: mol_type = other DNA
gaaagttattatggggggaa

SEQ ID NO: 35433 - DNA, 20 bp, synthetic construct
  misc_feature 1..20: note = Description of Artificial Sequence: Synthetic oligonucleotide
  misc_feature 1..20: note = Target: SCN10A; (+) strand; PAM type: NRG; PAM sequence: CAG
  source 1..20: mol_type = other DNA
tggggggaaaagaattgcta

SEQ ID NO: 35434 - DNA, 20 bp, synthetic construct
  misc_feature 1..20: note = Description of Artificial Sequence: Synthetic oligonucleotide
  misc_feature 1..20: note = Target: SCN10A; (+) strand; PAM type: NRG; PAM sequence: AGG
  source 1..20: mol_type = other DNA
ggggggaaaagaattgctac

SEQ ID NO: 35435 - DNA, 20 bp, synthetic construct
  misc_feature 1..20: note = Description of Artificial Sequence: Synthetic oligonucleotide
  misc_feature 1..20: note = Target: SCN10A; (+) strand; PAM type: NRG; PAM sequence: GGG
  source 1..20: mol_type = other DNA
gggggaaaagaattgctaca

SEQ ID NO: 35436 - DNA, 20 bp, synthetic construct
  misc_feature 1..20: note = Description of Artificial Sequence: Synthetic oligonucleotide
  misc_feature 1..20: note = Target: SCN10A; (+) strand; PAM type: NRG; PAM sequence: GAG
  source 1..20: mol_type = other DNA
aaagaattgctacagggtct

SEQ ID NO: 35437 - DNA, 20 bp, synthetic construct
  misc_feature 1..20: note = Description of Artificial Sequence: Synthetic oligonucleotide
  misc_feature 1..20: note = Target: SCN10A; (+) strand; PAM type: NRG; PAM sequence: AGG
  source 1..20: mol_type = other DNA
aagaattgctacagggtctg

SEQ ID NO: 35438 - DNA, 20 bp, synthetic construct
  misc_feature 1..20: note = Description of Artificial Sequence: Synthetic oligonucleotide
  misc_feature 1..20: note = Target: SCN10A; (+) strand; PAM type: NRG; PAM sequence: GAG
  source 1..20: mol_type = other DNA
attgctacagggtctgaggt

SEQ ID NO: 35439 - DNA, 20 bp, synthetic construct
  misc_feature 1..20: note = Description of Artificial Sequence: Synthetic oligonucleotide
  misc_feature 1..20: note = Target: SCN10A; (+) strand; PAM type: NRG; PAM sequence: AGG
  source 1..20: mol_type = other DNA
ttgctacagggtctgaggtg

SEQ ID NO: 35440 - DNA, 20 bp, synthetic construct
  misc_feature 1..20: note = Description of Artificial Sequence: Synthetic oligonucleotide
  misc_feature 1..20: note = Target: SCN10A; (+) strand; PAM type: NRG; PAM sequence: AAG
  source 1..20: mol_type = other DNA
gggtctgaggtgaggtgctg

SEQ ID NO: 35441 - DNA, 20 bp, synthetic construct
  misc_feature 1..20: note = Description of Artificial Sequence: Synthetic oligonucleotide
  misc_feature 1..20: note = Target: SCN10A; (+) strand; PAM type: NRG; PAM sequence: CAG
  source 1..20: mol_type = other DNA
tgaggtgctgaagccattcc

SEQ ID NO: 35442 - DNA, 20 bp, synthetic construct
  misc_feature 1..20: note = Description of Artificial Sequence: Synthetic oligonucleotide
  misc_feature 1..20: note = Target: SCN10A; (+) strand; PAM type: NRG; PAM sequence: AGG
  source 1..20: mol_type = other DNA
gaggtgctgaagccattccc

SEQ ID NO: 35443 - DNA, 20 bp, synthetic construct
  misc_feature 1..20: note = Description of Artificial Sequence: Synthetic oligonucleotide
  misc_feature 1..20: note = Target: SCN10A; (+) strand; PAM type: NRG; PAM sequence: TGG
  source 1..20: mol_type = other DNA
tgctgaagccattcccaggc

SEQ ID NO: 35444 - DNA, 20 bp, synthetic construct
  misc_feature 1..20: note = Description of Artificial Sequence: Synthetic oligonucleotide
  misc_feature 1..20: note = Target: SCN10A; (+) strand; PAM type: NRG; PAM sequence: CAG
  source 1..20: mol_type = other DNA
tcccaggctggattgtgtca

SEQ ID NO: 35445 - DNA, 20 bp, synthetic construct
  misc_feature 1..20: note = Description of Artificial Sequence: Synthetic oligonucleotide
  misc_feature 1..20: note = Target: SCN10A; (+) strand; PAM type: NRG; PAM sequence: GAG
  source 1..20: mol_type = other DNA
ccaggctggattgtgtcaca

SEQ ID NO: 35446 - DNA, 20 bp, synthetic construct
  misc_feature 1..20: note = Description of Artificial Sequence: Synthetic oligonucleotide
  misc_feature 1..20: note = Target: SCN10A; (+) strand; PAM type: NRG; PAM sequence: TGG
  source 1..20: mol_type = other DNA
gctggattgtgtcacagaga

SEQ ID NO: 35447 - DNA, 20 bp, synthetic construct
  misc_feature 1..20: note = Description of Artificial Sequence: Synthetic oligonucleotide
  misc_feature 1..20: note = Target: SCN10A; (+) strand; PAM type: NRG; PAM sequence: GGG
  source 1..20: mol_type = other DNA
ctggattgtgtcacagagat

SEQ ID NO: 35448 - DNA, 20 bp, synthetic construct
  misc_feature 1..20: note = Description of Artificial Sequence: Synthetic oligonucleotide
  misc_feature 1..20: note = Target: SCN10A; (+) strand; PAM type: NRG; PAM sequence: TGG
  source 1..20: mol_type = other DNA
tgtgtcacagagatgggtgc

SEQ ID NO: 35449 - DNA, 20 bp, synthetic construct
  misc_feature 1..20: note = Description of Artificial Sequence: Synthetic oligonucleotide
  misc_feature 1..20: note = Target: SCN10A; (+) strand; PAM type: NRG; PAM sequence: CAG
  source 1..20: mol_type = other DNA
ggaaacttttctgataacaa

SEQ ID NO: 35450 - DNA, 20 bp, synthetic construct
  misc_feature 1..20: note = Description of Artificial Sequence: Synthetic oligonucleotide
  misc_feature 1..20: note = Target: SCN10A; (+) strand; PAM type: NRG; PAM sequence: AGG
  source 1..20: mol_type = other DNA
gaaacttttctgataacaac

SEQ ID NO: 35451 - DNA, 20 bp, synthetic construct
  misc_feature 1..20: note = Description of Artificial Sequence: Synthetic oligonucleotide
  misc_feature 1..20: note = Target: SCN10A; (+) strand; PAM type: NRG; PAM sequence: CAG
  source 1..20: mol_type = other DNA
tttctgataacaacaggtga

SEQ ID NO: 35452 - DNA, 20 bp, synthetic construct
  misc_feature 1..20: note = Description of Artificial Sequence: Synthetic oligonucleotide
  misc_feature 1..20: note = Target: SCN10A; (+) strand; PAM type: NRG; PAM sequence: CAG
  source 1..20: mol_type = other DNA
acaggtgacagcttgaattg

SEQ ID NO: 35453 - DNA, 20 bp, synthetic construct
  misc_feature 1..20: note = Description of Artificial Sequence: Synthetic oligonucleotide
  misc_feature 1..20: note = Target: SCN10A; (+) strand; PAM type: NRG; PAM sequence: AGG
  source 1..20: mol_type = other DNA
caggtgacagcttgaattgc

SEQ ID NO: 35454 - DNA, 20 bp, synthetic construct
  misc_feature 1..20: note = Description of Artificial Sequence: Synthetic oligonucleotide
  misc_feature 1..20: note = Target: SCN10A; (+) strand; PAM type: NRG; PAM sequence: TAG
  source 1..20: mol_type = other DNA
cagcttgaattgcaggacct

SEQ ID NO: 35455 - DNA, 20 bp, synthetic construct
  misc_feature 1..20: note = Description of Artificial Sequence: Synthetic oligonucleotide
  misc_feature 1..20: note = Target: SCN10A; (+) strand; PAM type: NRG; PAM sequence: AGG
  source 1..20: mol_type = other DNA
agcttgaattgcaggacctt

SEQ ID NO: 35456 - DNA, 20 bp, synthetic construct
  misc_feature 1..20: note = Description of Artificial Sequence: Synthetic oligonucleotide
  misc_feature 1..20: note = Target: SCN10A; (+) strand; PAM type: NRG; PAM sequence: AAG
  source 1..20: mol_type = other DNA
ttgaattgcaggaccttagg

SEQ ID NO: 35457 - DNA, 20 bp, synthetic construct
  misc_feature 1..20: note = Description of Artificial Sequence: Synthetic oligonucleotide
  misc_feature 1..20: note = Target: SCN10A; (+) strand; PAM type: NRG; PAM sequence: AGG
  source 1..20: mol_type = other DNA
tgaattgcaggaccttagga

SEQ ID NO: 35458 - DNA, 20 bp, synthetic construct
  misc_feature 1..20: note = Description of Artificial Sequence: Synthetic oligonucleotide
  misc_feature 1..20: note = Target: SCN10A; (+) strand; PAM type: NRG; PAM sequence: GAG
  source 1..20: mol_type = other DNA
aattgcaggaccttaggaag

SEQ ID NO: 35459 - DNA, 20 bp, synthetic construct
  misc_feature 1..20: note = Description of Artificial Sequence: Synthetic oligonucleotide
  misc_feature 1..20: note = Target: SCN10A; (+) strand; PAM type: NRG; PAM sequence: AGG
  source 1..20: mol_type = other DNA
attgcaggaccttaggaagg

SEQ ID NO: 35460 - DNA, 20 bp, synthetic construct
  misc_feature 1..20: note = Description of Artificial Sequence: Synthetic oligonucleotide
  misc_feature 1..20: note = Target: SCN10A; (+) strand; PAM type: NRG; PAM sequence: CAG
  source 1..20: mol_type = other DNA
caggaccttaggaaggaggt

SEQ ID NO: 35461 - DNA, 20 bp, synthetic construct
  misc_feature 1..20: note = Description of Artificial Sequence: Synthetic oligonucleotide
  misc_feature 1..20: note = Target: SCN10A; (+) strand; PAM type: NRG; PAM sequence: AAG
  source 1..20: mol_type = other DNA
aataattatataaaattgtg

SEQ ID NO: 35462 - DNA, 20 bp, synthetic construct
  misc_feature 1..20: note = Description of Artificial Sequence: Synthetic oligonucleotide
  misc_feature 1..20: note = Target: SCN10A; (+) strand; PAM type: NRG; PAM sequence: AAG
  source 1..20: mol_type = other DNA
agtgtcaattaaaaaaaact

SEQ ID NO: 35463 - DNA, 20 bp, synthetic construct
  misc_feature 1..20: note = Description of Artificial Sequence: Synthetic oligonucleotide
  misc_feature 1..20: note = Target: SCN10A; (+) strand; PAM type: NRG; PAM sequence: CAG
  source 1..20: mol_type = other DNA
taaaaaccacctcgacgcat

SEQ ID NO: 35464 - DNA, 20 bp, synthetic construct
  misc_feature 1..20: note = Description of Artificial Sequence: Synthetic oligonucleotide
  misc_feature 1..20: note = Target: SCN10A; (+) strand; PAM type: NRG; PAM sequence: AAG
  source 1..20: mol_type = other DNA
tcgacgcatcagaaaaaaaa

SEQ ID NO: 35465 - DNA, 20 bp, synthetic construct
  misc_feature 1..20: note = Description of Artificial Sequence: Synthetic oligonucleotide
  misc_feature 1..20: note = Target: SCN10A; (+) strand; PAM type: NRG; PAM sequence: AGG
  source 1..20: mol_type = other DNA
cgacgcatcagaaaaaaaaa

SEQ ID NO: 35466 - DNA, 20 bp, synthetic construct
  misc_feature 1..20: note = Description of Artificial Sequence: Synthetic oligonucleotide
  misc_feature 1..20: note = Target: SCN10A; (+) strand; PAM type: NRG; PAM sequence: AAG
  source 1..20: mol_type = other DNA
agaaaaaaaaaaggtgcatg

SEQ ID NO: 35467 - DNA, 20 bp, synthetic construct
  misc_feature 1..20: note = Description of Artificial Sequence: Synthetic oligonucleotide
  misc_feature 1..20: note = Target: SCN10A; (+) strand; PAM type: NRG; PAM sequence: AGG
  source 1..20: mol_type = other DNA
gaaaaaaaaaaggtgcatga

SEQ ID NO: 35468 - DNA, 20 bp, synthetic construct
  misc_feature 1..20: note = Description of Artificial Sequence: Synthetic oligonucleotide
  misc_feature 1..20: note = Target: SCN10A; (+) strand; PAM type: NRG; PAM sequence: CAG
  source 1..20: mol_type = other DNA
aaaaggtgcatgaaggatct

SEQ ID NO: 35469 - DNA, 20 bp, synthetic construct
  misc_feature 1..20: note = Description of Artificial Sequence: Synthetic oligonucleotide
  misc_feature 1..20: note = Target: SCN10A; (+) strand; PAM type: NRG; PAM sequence: CGG
  source 1..20: mol_type = other DNA
catgaaggatctcagcacca

SEQ ID NO: 35470 - DNA, 20 bp, synthetic construct
  misc_feature 1..20: note = Description of Artificial Sequence: Synthetic oligonucleotide
  misc_feature 1..20: note = Target: SCN10A; (+) strand; PAM type: NRG; PAM sequence: CAG
  source 1..20: mol_type = other DNA
aaggatctcagcaccacgga

SEQ ID NO: 35471 - DNA, 20 bp, synthetic construct
  misc_feature 1..20: note = Description of Artificial Sequence: Synthetic oligonucleotide
  misc_feature 1..20: note = Target: SCN10A; (+) strand; PAM type: NRG; PAM sequence: AGG
  source 1..20: mol_type = other DNA
aggatctcagcaccacggac

SEQ ID NO: 35472 - DNA, 20 bp, synthetic construct
  misc_feature 1..20: note = Description of Artificial Sequence: Synthetic oligonucleotide
  misc_feature 1..20: note = Target: SCN10A; (+) strand; PAM type: NRG; PAM sequence: GGG
  source 1..20: mol_type = other DNA
ggatctcagcaccacggaca

SEQ ID NO: 35473 - DNA, 20 bp, synthetic construct
  misc_feature 1..20: note = Description of Artificial Sequence: Synthetic oligonucleotide
  misc_feature 1..20: note = Target: SCN10A; (+) strand; PAM type: NRG; PAM sequence: TAG
  source 1..20: mol_type = other DNA
ggacagggaaccttgcactc

SEQ ID NO: 35474 - DNA, 20 bp, synthetic construct
  misc_feature 1..20: note = Description of Artificial Sequence: Synthetic oligonucleotide
  misc_feature 1..20: note = Target: SCN10A; (+) strand; PAM type: NRG; PAM sequence: CAG
  source 1..20: mol_type = other DNA
aaccttgcactctagaactg

SEQ ID NO: 35475 - DNA, 20 bp, synthetic construct
  misc_feature 1..20: note = Description of Artificial Sequence: Synthetic oligonucleotide
  misc_feature 1..20: note = Target: SCN10A; (+) strand; PAM type: NRG; PAM sequence: CAG
  source 1..20: mol_type = other DNA
tgcactctagaactgcagac

SEQ ID NO: 35476 - DNA, 20 bp, synthetic construct
  misc_feature 1..20: note = Description of Artificial Sequence: Synthetic oligonucleotide
  misc_feature 1..20: note = Target: SCN10A; (+) strand; PAM type: NRG; PAM sequence: GAG
  source 1..20: mol_type = other DNA
cactctagaactgcagacca

SEQ ID NO: 35477 - DNA, 20 bp, synthetic construct
  misc_feature 1..20: note = Description of Artificial Sequence: Synthetic oligonucleotide
  misc_feature 1..20: note = Target: SCN10A; (+) strand; PAM type: NRG; PAM sequence: CAG
  source 1..20: mol_type = other DNA
agaactgcagaccagagcct

SEQ ID NO: 35478 - DNA, 20 bp, synthetic construct
  misc_feature 1..20: note = Description of Artificial Sequence: Synthetic oligonucleotide
  misc_feature 1..20: note = Target: SCN10A; (+) strand; PAM type: NRG; PAM sequence: AAG
  source 1..20: mol_type = other DNA
actgcagaccagagcctcag

SEQ ID NO: 35479 - DNA, 20 bp, synthetic construct
  misc_feature 1..20: note = Description of Artificial Sequence: Synthetic oligonucleotide
  misc_feature 1..20: note = Target: SCN10A; (+) strand; PAM type: NRG; PAM sequence: AGG
  source 1..20: mol_type = other DNA
ctgcagaccagagcctcaga

SEQ ID NO: 35480 - DNA, 20 bp, synthetic construct
  misc_feature 1..20: note = Description of Artificial Sequence: Synthetic oligonucleotide
  misc_feature 1..20: note = Target: SCN10A; (+) strand; PAM type: NRG; PAM sequence: AAG
  source 1..20: mol_type = other DNA
cagaccagagcctcagaagg

SEQ ID NO: 35481 - DNA, 20 bp, synthetic construct
  misc_feature 1..20: note = Description of Artificial Sequence: Synthetic oligonucleotide
  misc_feature 1..20: note = Target: SCN10A; (+) strand; PAM type: NRG; PAM sequence: CAG
  source 1..20: mol_type = other DNA
aagctgacctttgatgtccg

SEQ ID NO: 35482 - DNA, 20 bp, synthetic construct
  misc_feature 1..20: note = Description of Artificial Sequence: Synthetic oligonucleotide
  misc_feature 1..20: note = Target: SCN10A; (+) strand; PAM type: NRG; PAM sequence: AAG
  source 1..20: mol_type = other DNA
ttgatgtccgcagacacctt

SEQ ID NO: 35483 - DNA, 20 bp, synthetic construct
  misc_feature 1..20: note = Description of Artificial Sequence: Synthetic oligonucleotide
  misc_feature 1..20: note = Target: SCN10A; (+) strand; PAM type: NRG; PAM sequence: TGG
  source 1..20: mol_type = other DNA
gtccgcagacaccttaagat

SEQ ID NO: 35484 - DNA, 20 bp, synthetic construct
  misc_feature 1..20: note = Description of Artificial Sequence: Synthetic oligonucleotide
  misc_feature 1..20: note = Target: SCN10A; (+) strand; PAM type: NRG; PAM sequence: CAG
  source 1..20: mol_type = other DNA
caccttaagattggcatgtt

SEQ ID NO: 35485 - DNA, 20 bp, synthetic construct
  misc_feature 1..20: note = Description of Artificial Sequence: Synthetic oligonucleotide
  misc_feature 1..20: note = Target: SCN10A; (+) strand; PAM type: NRG; PAM sequence: TGG
  source 1..20: mol_type = other DNA
taagattggcatgttcagta

SEQ ID NO: 35486 - DNA, 20 bp, synthetic construct
  misc_feature 1..20: note = Description of Artificial Sequence: Synthetic oligonucleotide
  misc_feature 1..20: note = Target: SCN10A; (+) strand; PAM type: NRG; PAM sequence: GGG
  source 1..20: mol_type = other DNA
aagattggcatgttcagtat

SEQ ID NO: 35487 - DNA, 20 bp, synthetic construct
  misc_feature 1..20: note = Description of Artificial Sequence: Synthetic oligonucleotide
  misc_feature 1..20: note = Target: SCN10A; (+) strand; PAM type: NRG; PAM sequence: CGG
  source 1..20: mol_type = other DNA
ttcccacctttcctacaaac

SEQ ID NO: 35488 - DNA, 20 bp, synthetic construct
  misc_feature 1..20: note = Description of Artificial Sequence: Synthetic oligonucleotide
  misc_feature 1..20: note = Target: SCN10A; (+) strand; PAM type: NRG; PAM sequence: GGG
  source 1..20: mol_type = other DNA
tcccacctttcctacaaacc

SEQ ID NO: 35489 - DNA, 20 bp, synthetic construct
  misc_feature 1..20: note = Description of Artificial Sequence: Synthetic oligonucleotide
  misc_feature 1..20: note = Target: SCN10A; (+) strand; PAM type: NRG; PAM sequence: GGG
  source 1..20: mol_type = other DNA
cccacctttcctacaaaccg

SEQ ID NO: 35490 - DNA, 20 bp, synthetic construct
  misc_feature 1..20: note = Description of Artificial Sequence: Synthetic oligonucleotide
  misc_feature 1..20: note = Target: SCN10A; (+) strand; PAM type: NRG; PAM sequence: CAG
  source 1..20: mol_type = other DNA
acaaaccggggttcttcctc

SEQ ID NO: 35491 - DNA, 20 bp, synthetic construct
  misc_feature 1..20: note = Description of Artificial Sequence: Synthetic oligonucleotide
  misc_feature 1..20: note = Target: SCN10A; (+) strand; PAM type: NRG; PAM sequence: TGG
  source 1..20: mol_type = other DNA
ttcctccagtgtcctcatct

SEQ ID NO: 35492 - DNA, 20 bp, synthetic construct
  misc_feature 1..20: note = Description of Artificial Sequence: Synthetic oligonucleotide
  misc_feature 1..20: note = Target: SCN10A; (+) strand; PAM type: NRG; PAM sequence: TGG
  source 1..20: mol_type = other DNA
gattgcccaatcctgaaacc

SEQ ID NO: 35493 - DNA, 20 bp, synthetic construct
  misc_feature 1..20: note = Description of Artificial Sequence: Synthetic oligonucleotide
  misc_feature 1..20: note = Target: SCN10A; (+) strand; PAM type: NRG; PAM sequence: GGG
  source 1..20: mol_type = other DNA
attgcccaatcctgaaacct

SEQ ID NO: 35494 - DNA, 20 bp, synthetic construct
  misc_feature 1..20: note = Description of Artificial Sequence: Synthetic oligonucleotide
  misc_feature 1..20: note = Target: SCN10A; (+) strand; PAM type: NRG; PAM sequence: GAG
  source 1..20: mol_type = other DNA
tgcccaatcctgaaacctgg

SEQ ID NO: 35495 - DNA, 20 bp, synthetic construct
  misc_feature 1..20: note = Description of Artificial Sequence: Synthetic oligonucleotide
  misc_feature 1..20: note = Target: SCN10A; (+) strand; PAM type: NRG; PAM sequence: TGG
  source 1..20: mol_type = other DNA
ctgaaacctgggagtcaaat

SEQ ID NO: 35496 - DNA, 20 bp, synthetic construct
  misc_feature 1..20: note = Description of Artificial Sequence: Synthetic oligonucleotide
  misc_feature 1..20: note = Target: SCN10A; (+) strand; PAM type: NRG; PAM sequence: CAG
  source 1..20: mol_type = other DNA
actcccctttcctttttcca

SEQ ID NO: 35497 - DNA, 20 bp, synthetic construct
  misc_feature 1..20: note = Description of Artificial Sequence: Synthetic oligonucleotide
  misc_feature 1..20: note = Target: SCN10A; (+) strand; PAM type: NRG; PAM sequence: AAG
  source 1..20: mol_type = other DNA
tcttgttgatccacttccct

SEQ ID NO: 35498 - DNA, 20 bp, synthetic construct
  misc_feature 1..20: note = Description of Artificial Sequence: Synthetic oligonucleotide
  misc_feature 1..20: note = Target: SCN10A; (+) strand; PAM type: NRG; PAM sequence: AGG
  source 1..20: mol_type = other DNA
cttgttgatccacttcccta

SEQ ID NO: 35499 - DNA, 20 bp, synthetic construct
  misc_feature 1..20: note = Description of Artificial Sequence: Synthetic oligonucleotide
  misc_feature 1..20: note = Target: SCN10A; (+) strand; PAM type: NRG; PAM sequence: TAG
  source 1..20: mol_type = other DNA
catctataattacactttcc

SEQ ID NO: 35500 - DNA, 20 bp, synthetic construct
  misc_feature 1..20: note = Description of Artificial Sequence: Synthetic oligonucleotide
  misc_feature 1..20: note = Target: SCN10A; (+) strand; PAM type: NRG; PAM sequence: AAG
  source 1..20: mol_type = other DNA
taattacactttcctagttt

SEQ ID NO: 35501 - DNA, 20 bp, synthetic construct
  misc_feature 1..20: note = Description of Artificial Sequence: Synthetic oligonucleotide
  misc_feature 1..20: note = Target: SCN10A; (+) strand; PAM type: NRG; PAM sequence: TGG
  source 1..20: mol_type = other DNA
cctagtttaagacaccattt

SEQ ID NO: 35502 - DNA, 20 bp, synthetic construct
  misc_feature 1..20: note = Description of Artificial Sequence: Synthetic oligonucleotide
  misc_feature 1..20: note = Target: SCN10A; (+) strand; PAM type: NRG; PAM sequence: GAG
  source 1..20: mol_type = other DNA
tagtttaagacaccattttg

SEQ ID NO: 35503 - DNA, 20 bp, synthetic construct
  misc_feature 1..20: note = Description of Artificial Sequence: Synthetic oligonucleotide
  misc_feature 1..20: note = Target: SCN10A; (+) strand; PAM type: NRG; PAM sequence: AGG
  source 1..20: mol_type = other DNA
agtttaagacaccattttgg

SEQ ID NO: 35504 - DNA, 20 bp, synthetic construct
  misc_feature 1..20: note = Description of Artificial Sequence: Synthetic oligonucleotide
  misc_feature 1..20: note = Target: SCN10A; (+) strand; PAM type: NRG; PAM sequence: GGG
  source 1..20: mol_type = other DNA
gtttaagacaccattttgga

SEQ ID NO: 35505 - DNA, 20 bp, synthetic construct
  misc_feature 1..20: note = Description of Artificial Sequence: Synthetic oligonucleotide
  misc_feature 1..20: note = Target: SCN10A; (+) strand; PAM type: NRG; PAM sequence: GGG
  source 1..20: mol_type = other DNA
tttaagacaccattttggag

SEQ ID NO: 35506 - DNA, 20 bp, synthetic construct
  misc_feature 1..20: note = Description of Artificial Sequence: Synthetic oligonucleotide
  misc_feature 1..20: note = Target: SCN10A; (+) strand; PAM type: NRG; PAM sequence: TGG
  source 1..20: mol_type = other DNA
caccattttggaggggtgtc

SEQ ID NO: 35507 - DNA, 20 bp, synthetic construct
  misc_feature 1..20: note = Description of Artificial Sequence: Synthetic oligonucleotide
  misc_feature 1..20: note = Target: SCN10A; (+) strand; PAM type: NRG; PAM sequence: TAG
  source 1..20: mol_type = other DNA
gaggggtgtctggatccttt

SEQ ID NO: 35508 - DNA, 20 bp, synthetic construct
  misc_feature 1..20: note = Description of Artificial Sequence: Synthetic oligonucleotide
  misc_feature 1..20: note = Target: SCN10A; (+) strand; PAM type: NRG; PAM sequence: AGG
  source 1..20: mol_type = other DNA
aggggtgtctggatcctttt

SEQ ID NO: 35509 - DNA, 20 bp, synthetic construct
  misc_feature 1..20: note = Description of Artificial Sequence: Synthetic oligonucleotide
  misc_feature 1..20: note = Target: SCN10A; (+) strand; PAM type: NRG; PAM sequence: CAG
  source 1..20: mol_type = other DNA
ccttttaggctctatgcctc

SEQ ID NO: 35510 - DNA, 20 bp, synthetic construct
  misc_feature 1..20: note = Description of Artificial Sequence: Synthetic oligonucleotide
  misc_feature 1..20: note = Target: SCN10A; (+) strand; PAM type: NRG; PAM sequence: CGG
  source 1..20: mol_type = other DNA
ccactccaactcattgtcta

SEQ ID NO: 35511 - DNA, 20 bp, synthetic construct
  misc_feature 1..20: note = Description of Artificial Sequence: Synthetic oligonucleotide
  misc_feature 1..20: note = Target: SCN10A; (+) strand; PAM type: NRG; PAM sequence: CAG
  source 1..20: mol_type = other DNA
ctccaactcattgtctacgg

SEQ ID NO: 35512 - DNA, 20 bp, synthetic construct
  misc_feature 1..20: note = Description of Artificial Sequence: Synthetic oligonucleotide
  misc_feature 1..20: note = Target: SCN10A; (+) strand; PAM type: NRG; PAM sequence: TGG
  source 1..20: mol_type = other DNA
attgtctacggcagctgcaa

SEQ ID NO: 35513 - DNA, 20 bp, synthetic construct
  misc_feature 1..20: note = Description of Artificial Sequence: Synthetic oligonucleotide
  misc_feature 1..20: note = Target: SCN10A; (+) strand; PAM type: NRG; PAM sequence: TGG
  source 1..20: mol_type = other DNA
gtctacggcagctgcaatgg

SEQ ID NO: 35514 - DNA, 20 bp, synthetic construct
  misc_feature 1..20: note = Description of Artificial Sequence: Synthetic oligonucleotide
  misc_feature 1..20: note = Target: SCN10A; (+) strand; PAM type: NRG; PAM sequence: GGG
  source 1..20: mol_type = other DNA
tctacggcagctgcaatggt

SEQ ID NO: 35515 - DNA, 20 bp, synthetic construct
  misc_feature 1..20: note = Description of Artificial Sequence: Synthetic oligonucleotide
  misc_feature 1..20: note = Target: SCN10A; (+) strand; PAM type: NRG; PAM sequence: TAG
  source 1..20: mol_type = other DNA
ctgcaatggtgggtaatctt

SEQ ID NO: 35516 - DNA, 20 bp, synthetic construct
  misc_feature 1..20: note = Description of Artificial Sequence: Synthetic oligonucleotide
  misc_feature 1..20: note = Target: SCN10A; (+) strand; PAM type: NRG; PAM sequence: GAG
  source 1..20: mol_type = other DNA
gcaatggtgggtaatcttta

SEQ ID NO: 35517 - DNA, 20 bp, synthetic construct
  misc_feature 1..20: note = Description of Artificial Sequence: Synthetic oligonucleotide
  misc_feature 1..20: note = Target: SCN10A; (+) strand; PAM type: NRG; PAM sequence: GAG
  source 1..20: mol_type = other DNA
aatctttagagcacaaacct

SEQ ID NO: 35518 - DNA, 20 bp, synthetic construct
  misc_feature 1..20: note = Description of Artificial Sequence: Synthetic oligonucleotide
  misc_feature 1..20: note = Target: SCN10A; (+) strand; PAM type: NRG; PAM sequence: TGG
  source 1..20: mol_type = other DNA
agcctcttaccatcctgcgc

SEQ ID NO: 35519 - DNA, 20 bp, synthetic construct
  misc_feature 1..20: note = Description of Artificial Sequence: Synthetic oligonucleotide
  misc_feature 1..20: note = Target: SCN10A; (+) strand; PAM type: NRG; PAM sequence: AAG
  source 1..20: mol_type = other DNA
taccatcctgcgctggttgt

SEQ ID NO: 35520 - DNA, 20 bp, synthetic construct
  misc_feature 1..20: note = Description of Artificial Sequence: Synthetic oligonucleotide
  misc_feature 1..20: note = Target: SCN10A; (+) strand; PAM type: NRG; PAM sequence: AGG
  source 1..20: mol_type = other DNA
accatcctgcgctggttgta

SEQ ID NO: 35521 - DNA, 20 bp, synthetic construct
  misc_feature 1..20: note = Description of Artificial Sequence: Synthetic oligonucleotide
  misc_feature 1..20: note = Target: SCN10A; (+) strand; PAM type: NRG; PAM sequence: CAG
  source 1..20: mol_type = other DNA
cctgcgctggttgtaaggat

SEQ ID NO: 35522 - DNA, 20 bp, synthetic construct
  misc_feature 1..20: note = Description of Artificial Sequence: Synthetic oligonucleotide
  misc_feature 1..20: note = Target: SCN10A; (+) strand; PAM type: NRG; PAM sequence: GAG
  source 1..20: mol_type = other DNA
tgcgctggttgtaaggatca

SEQ ID NO: 35523 - DNA, 20 bp, synthetic construct
  misc_feature 1..20: note = Description of Artificial Sequence: Synthetic oligonucleotide
  misc_feature 1..20: note = Target: SCN10A; (+) strand; PAM type: NRG; PAM sequence: CGG
  source 1..20: mol_type = other DNA
gctggttgtaaggatcagag

SEQ ID NO: 35524 - DNA, 20 bp, synthetic construct
  misc_feature 1..20: note = Description of Artificial Sequence: Synthetic oligonucleotide
  misc_feature 1..20: note = Target: SCN10A; (+) strand; PAM type: NRG; PAM sequence: GGG
  source 1..20: mol_type = other DNA
ctggttgtaaggatcagagc

SEQ ID NO: 35525 - DNA, 20 bp, synthetic construct
  misc_feature 1..20: note = Description of Artificial Sequence: Synthetic oligonucleotide
  misc_feature 1..20: note = Target: SCN10A; (+) strand; PAM type: NRG; PAM sequence: GGG
  source 1..20: mol_type = other DNA
tggttgtaaggatcagagcg

SEQ ID NO: 35526 - DNA, 20 bp, synthetic construct
  misc_feature 1..20: note = Description of Artificial Sequence: Synthetic oligonucleotide
  misc_feature 1..20: note = Target: SCN10A; (+) strand; PAM type: NRG; PAM sequence: TGG
  source 1..20: mol_type = other DNA
gggtgatttgttgtcttctg

SEQ ID NO: 35527 - DNA, 20 bp, synthetic construct
  misc_feature 1..20: note = Description of Artificial Sequence: Synthetic oligonucleotide
  misc_feature 1..20: note = Target: SCN10A; (+) strand; PAM type: NRG; PAM sequence: GAG
  source 1..20: mol_type = other DNA
gtgatttgttgtcttctgtg

SEQ ID NO: 35528 - DNA, 20 bp, synthetic construct
  misc_feature 1..20: note = Description of Artificial Sequence: Synthetic oligonucleotide
  misc_feature 1..20: note = Target: SCN10A; (+) strand; PAM type: NRG; PAM sequence: TGG
  source 1..20: mol_type = other DNA
gtggagccctctgacactct

SEQ ID NO: 35529 - DNA, 20 bp, synthetic construct
  misc_feature 1..20: note = Description of Artificial Sequence: Synthetic oligonucleotide
  misc_feature 1..20: note = Target: SCN10A; (+) strand; PAM type: NRG; PAM sequence: TGG
  source 1..20: mol_type = other DNA
tattctatgccttctctcac

SEQ ID NO: 35530 - DNA, 20 bp, synthetic construct
  misc_feature 1..20: note = Description of Artificial Sequence: Synthetic oligonucleotide
  misc_feature 1..20: note = Target: SCN10A; (+) strand; PAM type: NRG; PAM sequence: TGG
  source 1..20: mol_type = other DNA
ccttctctcactggcatttt

SEQ ID NO: 35531 - DNA, 20 bp, synthetic construct
  misc_feature 1..20: note = Description of Artificial Sequence: Synthetic oligonucleotide
  misc_feature 1..20: note = Target: SCN10A; (+) strand; PAM type: NRG; PAM sequence: GAG
  source 1..20: mol_type = other DNA
ttctctcactggcatttttg

SEQ ID NO: 35532 - DNA, 20 bp, synthetic construct
  misc_feature 1..20: note = Description of Artificial Sequence: Synthetic oligonucleotide
  misc_feature 1..20: note = Target: SCN10A; (+) strand; PAM type: NRG; PAM sequence: AGG
  source 1..20: mol_type = other DNA
tctctcactggcatttttgg

SEQ ID NO: 35533 - DNA, 20 bp, synthetic construct
  misc_feature 1..20: note = Description of Artificial Sequence: Synthetic oligonucleotide
  misc_feature 1..20: note = Target: SCN10A; (+) strand; PAM type: NRG; PAM sequence: AAG
  source 1..20: mol_type = other DNA
actggcatttttggaggtta

SEQ ID NO: 35534 - DNA, 20 bp, synthetic construct
  misc_feature 1..20: note = Description of Artificial Sequence: Synthetic oligonucleotide
  misc_feature 1..20: note = Target: SCN10A; (+) strand; PAM type: NRG; PAM sequence: AGG
  source 1..20: mol_type = other DNA
ctggcatttttggaggttaa

SEQ ID NO: 35535 - DNA, 20 bp, synthetic construct
  misc_feature 1..20: note = Description of Artificial Sequence: Synthetic oligonucleotide
  misc_feature 1..20: note = Target: SCN10A; (+) strand; PAM type: NRG; PAM sequence: TGG
  source 1..20: mol_type = other DNA
aggttaaaggtgatccattg

SEQ ID NO: 35536 - DNA, 20 bp, synthetic construct
  misc_feature 1..20: note = Description of Artificial Sequence: Synthetic oligonucleotide
  misc_feature 1..20: note = Target: SCN10A; (+) strand; PAM type: NRG; PAM sequence: GGG
  source 1..20: mol_type = other DNA
ggttaaaggtgatccattgt

SEQ ID NO: 35537 - DNA, 20 bp, synthetic construct
  misc_feature 1..20: note = Description of Artificial Sequence: Synthetic oligonucleotide
  misc_feature 1..20: note = Target: SCN10A; (+) strand; PAM type: NRG; PAM sequence: GAG
  source 1..20: mol_type = other DNA
ttaaaggtgatccattgtgg

SEQ ID NO: 35538 - DNA, 20 bp, synthetic construct
  misc_feature 1..20: note = Description of Artificial Sequence: Synthetic oligonucleotide
  misc_feature 1..20: note = Target: SCN10A; (+) strand; PAM type: NRG; PAM sequence: TGG
  source 1..20: mol_type = other DNA
aaggtgatccattgtgggag

SEQ ID NO: 35539 - DNA, 20 bp, synthetic construct
  misc_feature 1..20: note = Description of Artificial Sequence: Synthetic oligonucleotide
  misc_feature 1..20: note = Target: SCN10A; (+) strand; PAM type: NRG; PAM sequence: GAG
  source 1..20: mol_type = other DNA
ggtgatccattgtgggagtg

SEQ ID NO: 35540 - DNA, 20 bp, synthetic construct
  misc_feature 1..20: note = Description of Artificial Sequence: Synthetic oligonucleotide
  misc_feature 1..20: note = Target: SCN10A; (+) strand; PAM type: NRG; PAM sequence: GAG
  source 1..20: mol_type = other DNA
tgatccattgtgggagtgga

SEQ ID NO: 35541 - DNA, 20 bp, synthetic construct
  misc_feature 1..20: note = Description of Artificial Sequence: Synthetic oligonucleotide
  misc_feature 1..20: note = Target: SCN10A; (+) strand; PAM type: NRG; PAM sequence: GAG
  source 1..20: mol_type = other DNA
atccattgtgggagtggaga

SEQ ID NO: 35542 - DNA, 20 bp, synthetic construct
  misc_feature 1..20: note = Description of Artificial Sequence: Synthetic oligonucleotide
  misc_feature 1..20: note = Target: SCN10A; (+) strand; PAM type: NRG; PAM sequence: AGG
  source 1..20: mol_type = other DNA
tccattgtgggagtggagag

SEQ ID NO: 35543 - DNA, 20 bp, synthetic construct
  misc_feature 1..20: note = Description of Artificial Sequence: Synthetic oligonucleotide
  misc_feature 1..20: note = Target: SCN10A; (+) strand; PAM type: NRG; PAM sequence: TAG
  source 1..20: mol_type = other DNA
agagaggttgtgtcaatccc

SEQ ID NO: 35544 - DNA, 20 bp, synthetic construct
  misc_feature 1..20: note = Description of Artificial Sequence: Synthetic oligonucleotide
  misc_feature 1..20: note = Target: SCN10A; (+) strand; PAM type: NRG; PAM sequence: TAG
  source 1..20: mol_type = other DNA
gtgtcaatccctagtgctgc

SEQ ID NO: 35545 - DNA, 20 bp, synthetic construct
  misc_feature 1..20: note = Description of Artificial Sequence: Synthetic oligonucleotide
  misc_feature 1..20: note = Target: SCN10A; (+) strand; PAM type: NRG; PAM sequence: AAG
  source 1..20: mol_type = other DNA
tagtgctgctagcacctgcg

SEQ ID NO: 35546 - DNA, 20 bp, synthetic construct
  misc_feature 1..20: note = Description of Artificial Sequence: Synthetic oligonucleotide
  misc_feature 1..20: note = Target: SCN10A; (+) strand; PAM type: NRG; PAM sequence: GAG
  source 1..20: mol_type = other DNA
gtgctgctagcacctgcgaa

SEQ ID NO: 35547 - DNA, 20 bp, synthetic construct
  misc_feature 1..20: note = Description of Artificial Sequence: Synthetic oligonucleotide
  misc_feature 1..20: note = Target: SCN10A; (+) strand; PAM type: NRG; PAM sequence: GAG
  source 1..20: mol_type = other DNA
gctgctagcacctgcgaaga

SEQ ID NO: 35548 - DNA, 20 bp, synthetic construct
  misc_feature 1..20: note = Description of Artificial Sequence: Synthetic oligonucleotide
  misc_feature 1..20: note = Target: SCN10A; (+) strand; PAM type: NRG; PAM sequence: CAG
  source 1..20: mol_type = other DNA
tagcacctgcgaagagagaa

SEQ ID NO: 35549 - DNA, 20 bp, synthetic construct
  misc_feature 1..20: note = Description of Artificial Sequence: Synthetic oligonucleotide
  misc_feature 1..20: note = Target: SCN10A; (+) strand; PAM type: NRG; PAM sequence: CAG
  source 1..20: mol_type = other DNA
cacctgcgaagagagaacag

SEQ ID NO: 35550 - DNA, 20 bp, synthetic construct
  misc_feature 1..20: note = Description of Artificial Sequence: Synthetic oligonucleotide
  misc_feature 1..20: note = Target: SCN10A; (+) strand; PAM type: NRG; PAM sequence: AGG
  source 1..20: mol_type = other DNA
acctgcgaagagagaacagc

SEQ ID NO: 35551 - DNA, 20 bp, synthetic construct
  misc_feature 1..20: note = Description of Artificial Sequence: Synthetic oligonucleotide
  misc_feature 1..20: note = Target: SCN10A; (+) strand; PAM type: NRG; PAM sequence: TAG
  source 1..20: mol_type = other DNA
cgaagagagaacagcaggtg

SEQ ID NO: 35552 - DNA, 20 bp, synthetic construct
  misc_feature 1..20: note = Description of Artificial Sequence: Synthetic oligonucleotide
  misc_feature 1..20: note = Target: SCN10A; (+) strand; PAM type: NRG; PAM sequence: TAG
  source 1..20: mol_type = other DNA
agaacagcaggtgtagccaa

SEQ ID NO: 35553 - DNA, 20 bp, synthetic construct
  misc_feature 1..20: note = Description of Artificial Sequence: Synthetic oligonucleotide
  misc_feature 1..20: note = Target: SCN10A; (+) strand; PAM type: NRG; PAM sequence: TGG
  source 1..20: mol_type = other DNA
tgtagccaatagtatttgct

SEQ ID NO: 35554 - DNA, 20 bp, synthetic construct
  misc_feature 1..20: note = Description of Artificial Sequence: Synthetic oligonucleotide
  misc_feature 1..20: note = Target: SCN10A; (+) strand; PAM type: NRG; PAM sequence: TAG
  source 1..20: mol_type = other DNA
caatagtatttgcttggact

SEQ ID NO: 35555 - DNA, 20 bp, synthetic construct
  misc_feature 1..20: note = Description of Artificial Sequence: Synthetic oligonucleotide
  misc_feature 1..20: note = Target: SCN10A; (+) strand; PAM type: NRG; PAM sequence: CAG
  source 1..20: mol_type = other DNA
cttagcatgaatgtgtcccc

SEQ ID NO: 35556 - DNA, 20 bp, synthetic construct
  misc_feature 1..20: note = Description of Artificial Sequence: Synthetic oligonucleotide
  misc_feature 1..20: note = Target: SCN10A; (+) strand; PAM type: NRG; PAM sequence: TGG
  source 1..20: mol_type = other DNA
atgaatgtgtcccccagaca

SEQ ID NO: 35557 - DNA, 20 bp, synthetic construct
  misc_feature 1..20: note = Description of Artificial Sequence: Synthetic oligonucleotide
  misc_feature 1..20: note = Target: SCN10A; (+) strand; PAM type: NRG; PAM sequence: GGG
  source 1..20: mol_type = other DNA
tgaatgtgtcccccagacat

SEQ ID NO: 35558 - DNA, 20 bp, synthetic construct
  misc_feature 1..20: note = Description of Artificial Sequence: Synthetic oligonucleotide
  misc_feature 1..20: note = Target: SCN10A; (+) strand; PAM type: NRG; PAM sequence: GGG
  source 1..20: mol_type = other DNA
gaatgtgtcccccagacatg

SEQ ID NO: 35559 - DNA, 20 bp, synthetic construct
  misc_feature 1..20: note = Description of Artificial Sequence: Synthetic oligonucleotide
  misc_feature 1..20: note = Target: SCN10A; (+) strand; PAM type: NRG; PAM sequence: CAG
  source 1..20: mol_type = other DNA
gtcccccagacatggggtgc

SEQ ID NO: 35560 - DNA, 20 bp, synthetic construct
  misc_feature 1..20: note = Description of Artificial Sequence: Synthetic oligonucleotide
  misc_feature 1..20: note = Target: SCN10A; (+) strand; PAM type: NRG; PAM sequence: AGG
  source 1..20: mol_type = other DNA
tcccccagacatggggtgcc

SEQ ID NO: 35561 - DNA, 20 bp, synthetic construct
  misc_feature 1..20: note = Description of Artificial Sequence: Synthetic oligonucleotide
  misc_feature 1..20: note = Target: SCN10A; (+) strand; PAM type: NRG; PAM sequence: GGG
  source 1..20: mol_type = other DNA
cccccagacatggggtgcca

SEQ ID NO: 35562 - DNA, 20 bp, synthetic construct
  misc_feature 1..20: note = Description of Artificial Sequence: Synthetic oligonucleotide
  misc_feature 1..20: note = Target: SCN10A; (+) strand; PAM type: NRG; PAM sequence: GGG
  source 1..20: mol_type = other DNA
ccccagacatggggtgccag

SEQ ID NO: 35563 - DNA, 20 bp, synthetic construct
  misc_feature 1..20: note = Description of Artificial Sequence: Synthetic oligonucleotide
  misc_feature 1..20: note = Target: SCN10A; (+) strand; PAM type: NRG; PAM sequence: GAG
  source 1..20: mol_type = other DNA
agacatggggtgccaggggt

SEQ ID NO: 35564 - DNA, 20 bp, synthetic construct
  misc_feature 1..20: note = Description of Artificial Sequence: Synthetic oligonucleotide
  misc_feature 1..20: note = Target: SCN10A; (+) strand; PAM type: NRG; PAM sequence: GAG
  source 1..20: mol_type = other DNA
acatggggtgccaggggtga

SEQ ID NO: 35565 - DNA, 20 bp, synthetic construct
  misc_feature 1..20: note = Description of Artificial Sequence: Synthetic oligonucleotide
  misc_feature 1..20: note = Target: SCN10A; (+) strand; PAM type: NRG; PAM sequence: CAG
  source 1..20: mol_type = other DNA
caggggtgagagatctgaaa

SEQ ID NO: 35566 - DNA, 20 bp, synthetic construct
  misc_feature 1..20: note = Description of Artificial Sequence: Synthetic oligonucleotide
  misc_feature 1..20: note = Target: SCN10A; (+) strand; PAM type: NRG; PAM sequence: GAG
  source 1..20: mol_type = other DNA
ggggtgagagatctgaaaca

SEQ ID NO: 35567 - DNA, 20 bp, synthetic construct
  misc_feature 1..20: note = Description of Artificial Sequence: Synthetic oligonucleotide
  misc_feature 1..20: note = Target: SCN10A; (+) strand; PAM type: NRG; PAM sequence: AAG
  source 1..20: mol_type = other DNA
gtgagagatctgaaacagag

SEQ ID NO: 35568 - DNA, 20 bp, synthetic construct
  misc_feature 1..20: note = Description of Artificial Sequence: Synthetic oligonucleotide
  misc_feature 1..20: note = Target: SCN10A; (+) strand; PAM type: NRG; PAM sequence: AAG
  source 1..20: mol_type = other DNA
gatctgaaacagagaagctg

SEQ ID NO: 35569 - DNA, 20 bp, synthetic construct
  misc_feature 1..20: note = Description of Artificial Sequence: Synthetic oligonucleotide
  misc_feature 1..20: note = Target: SCN10A; (+) strand; PAM type: NRG; PAM sequence: AGG
  source 1..20: mol_type = other DNA
atctgaaacagagaagctga

SEQ ID NO: 35570 - DNA, 20 bp, synthetic construct
  misc_feature 1..20: note = Description of Artificial Sequence: Synthetic oligonucleotide
  misc_feature 1..20: note = Target: SCN10A; (+) strand; PAM type: NRG; PAM sequence: GGG
  source 1..20: mol_type = other DNA
tctgaaacagagaagctgaa

SEQ ID NO: 35571 - DNA, 20 bp, synthetic construct
  misc_feature 1..20: note = Description of Artificial Sequence: Synthetic oligonucleotide
  misc_feature 1..20: note = Target: SCN10A; (+) strand; PAM type: NRG; PAM sequence: TAG
  source 1..20: mol_type = other DNA
aaacagagaagctgaagggt

SEQ ID NO: 35572 - DNA, 20 bp, synthetic construct
  misc_feature 1..20: note = Description of Artificial Sequence: Synthetic oligonucleotide
  misc_feature 1..20: note = Target: SCN10A; (+) strand; PAM type: NRG; PAM sequence: AGG
  source 1..20: mol_type = other DNA
aacagagaagctgaagggtt

SEQ ID NO: 35573 - DNA, 20 bp, synthetic construct
  misc_feature 1..20: note = Description of Artificial Sequence: Synthetic oligonucleotide
  misc_feature 1..20: note = Target: SCN10A; (+) strand; PAM type: NRG; PAM sequence: CAG
  source 1..20: mol_type = other DNA
agaagctgaagggttaggac

SEQ ID NO: 35574 - DNA, 20 bp, synthetic construct
  misc_feature 1..20: note = Description of Artificial Sequence: Synthetic oligonucleotide
  misc_feature 1..20: note = Target: SCN10A; (+) strand; PAM type: NRG; PAM sequence: AGG
  source 1..20: mol_type = other DNA
gaagctgaagggttaggacc

SEQ ID NO: 35575 - DNA, 20 bp, synthetic construct
  misc_feature 1..20: note = Description of Artificial Sequence: Synthetic oligonucleotide
  misc_feature 1..20: note = Target: SCN10A; (+) strand; PAM type: NRG; PAM sequence: GGG
  source 1..20: mol_type = other DNA
aagctgaagggttaggacca

SEQ ID NO: 35576 - DNA, 20 bp, synthetic construct
  misc_feature 1..20: note = Description of Artificial Sequence: Synthetic oligonucleotide
  misc_feature 1..20: note = Target: SCN10A; (+) strand; PAM type: NRG; PAM sequence: TGG
  source 1..20: mol_type = other DNA
ctgaagggttaggaccaggg

SEQ ID NO: 35577 - DNA, 20 bp, synthetic construct
  misc_feature 1..20: note = Description of Artificial Sequence: Synthetic oligonucleotide
  misc_feature 1..20: note = Target: SCN10A; (+) strand; PAM type: NRG; PAM sequence: TGG
  source 1..20: mol_type = other DNA
aagggttaggaccagggtgg

SEQ ID NO: 35578 - DNA, 20 bp, synthetic construct
  misc_feature 1..20: note = Description of Artificial Sequence: Synthetic oligonucleotide
  misc_feature 1..20: note = Target: SCN10A; (+) strand; PAM type: NRG; PAM sequence: TGG
  source 1..20: mol_type = other DNA
ggttaggaccagggtggtgg

SEQ ID NO: 35579 - DNA, 20 bp, synthetic construct
  misc_feature 1..20: note = Description of Artificial Sequence: Synthetic oligonucleotide
  misc_feature 1..20: note = Target: SCN10A; (+) strand; PAM type: NRG; PAM sequence: GGG
  source 1..20: mol_type = other DNA
gttaggaccagggtggtggt

SEQ ID NO: 35580 - DNA, 20 bp, synthetic construct
  misc_feature 1..20: note = Description of Artificial Sequence: Synthetic oligonucleotide
  misc_feature 1..20: note = Target: SCN10A; (+) strand; PAM type: NRG; PAM sequence: TAG
  source 1..20: mol_type = other DNA
gaccagggtggtggtgggat

SEQ ID NO: 35581 - DNA, 20 bp, synthetic construct
  misc_feature 1..20: note = Description of Artificial Sequence: Synthetic oligonucleotide
  misc_feature 1..20: note = Target: SCN10A; (+) strand; PAM type: NRG; PAM sequence: AGG
  source 1..20: mol_type = other DNA
accagggtggtggtgggatt

SEQ ID NO: 35582 - DNA, 20 bp, synthetic construct
  misc_feature 1..20: note = Description of Artificial Sequence: Synthetic oligonucleotide
  misc_feature 1..20: note = Target: SCN10A; (+) strand; PAM type: NRG; PAM sequence: TGG
  source 1..20: mol_type = other DNA
gtggtggtgggattaggcca

SEQ ID NO: 35583 - DNA, 20 bp, synthetic construct
  misc_feature 1..20: note = Description of Artificial Sequence: Synthetic oligonucleotide
  misc_feature 1..20: note = Target: SCN10A; (+) strand; PAM type: NRG; PAM sequence: CAG
  source 1..20: mol_type = other DNA
gtggtgggattaggccatgg

SEQ ID NO: 35584 - DNA, 20 bp, synthetic construct
  misc_feature 1..20: note = Description of Artificial Sequence: Synthetic oligonucleotide
  misc_feature 1..20: note = Target: SCN10A; (+) strand; PAM type: NRG; PAM sequence: AGG
  source 1..20: mol_type = other DNA
tggtgggattaggccatggc

SEQ ID NO: 35585 - DNA, 20 bp, synthetic construct
  misc_feature 1..20: note = Description of Artificial Sequence: Synthetic oligonucleotide
  misc_feature 1..20: note = Target: SCN10A; (+) strand; PAM type: NRG; PAM sequence: CAG
  source 1..20: mol_type = other DNA
ggattaggccatggcaggaa

SEQ ID NO: 35586 - DNA, 20 bp, synthetic construct
  misc_feature 1..20: note = Description of Artificial Sequence: Synthetic oligonucleotide
  misc_feature 1..20: note = Target: SCN10A; (+) strand; PAM type: NRG; PAM sequence: CGG
  source 1..20: mol_type = other DNA
catggcaggaacagacacct

SEQ ID NO: 35587 - DNA, 20 bp, synthetic construct
  misc_feature 1..20: note = Description of Artificial Sequence: Synthetic oligonucleotide
  misc_feature 1..20: note = Target: SCN10A; (+) strand; PAM type: NRG; PAM sequence: GGG
  source 1..20: mol_type = other DNA
atggcaggaacagacacctc

SEQ ID NO: 35588 - DNA, 20 bp, synthetic construct
  misc_feature 1..20: note = Description of Artificial Sequence: Synthetic oligonucleotide
  misc_feature 1..20: note = Target: SCN10A; (+) strand; PAM type: NRG; PAM sequence: TGG
  source 1..20: mol_type = other DNA
gggtcacccccactcattca

SEQ ID NO: 35589 - DNA, 20 bp, synthetic construct
  misc_feature 1..20: note = Description of Artificial Sequence: Synthetic oligonucleotide
  misc_feature 1..20: note = Target: SCN10A; (+) strand; PAM type: NRG; PAM sequence: GGG
  source 1..20: mol_type = other DNA
ggtcacccccactcattcat

SEQ ID NO: 35590 - DNA, 20 bp, synthetic construct
  misc_feature 1..20: note = Description of Artificial Sequence: Synthetic oligonucleotide
  misc_feature 1..20: note = Target: SCN10A; (+) strand; PAM type: NRG; PAM sequence: GGG
  source 1..20: mol_type = other DNA
gtcacccccactcattcatg

SEQ ID NO: 35591 - DNA, 20 bp, synthetic construct
  misc_feature 1..20: note = Description of Artificial Sequence: Synthetic oligonucleotide
  misc_feature 1..20: note = Target: SCN10A; (+) strand; PAM type: NRG; PAM sequence: TGG
  source 1..20: mol_type = other DNA
tcattcatggggtactctgt

SEQ ID NO: 35592 - DNA, 20 bp, synthetic construct
  misc_feature 1..20: note = Description of Artificial Sequence: Synthetic oligonucleotide
  misc_feature 1..20: note = Target: SCN10A; (+) strand; PAM type: NRG; PAM sequence: CAG
  source 1..20: mol_type = other DNA
tactctgttggtgccccacc

SEQ ID NO: 35593 - DNA, 20 bp, synthetic construct
  misc_feature 1..20: note = Description of Artificial Sequence: Synthetic oligonucleotide
  misc_feature 1..20: note = Target: SCN10A; (+) strand; PAM type: NRG; PAM sequence: CAG
  source 1..20: mol_type = other DNA
cccacccagatccctttcac

SEQ ID NO: 35594 - DNA, 20 bp, synthetic construct
  misc_feature 1..20: note = Description of Artificial Sequence: Synthetic oligonucleotide
  misc_feature 1..20: note = Target: SCN10A; (+) strand; PAM type: NRG; PAM sequence: AGG
  source 1..20: mol_type = other DNA
ccacccagatccctttcacc

SEQ ID NO: 35595 - DNA, 20 bp, synthetic construct
  misc_feature 1..20: note = Description of Artificial Sequence: Synthetic oligonucleotide
  misc_feature 1..20: note = Target: SCN10A; (+) strand; PAM type: NRG; PAM sequence: CAG
  source 1..20: mol_type = other DNA
ccagatccctttcaccaggt

SEQ ID NO: 35596 - DNA, 20 bp, synthetic construct
  misc_feature 1..20: note = Description of Artificial Sequence: Synthetic oligonucleotide
  misc_feature 1..20: note = Target: SCN10A; (+) strand; PAM type: NRG; PAM sequence: CAG
  source 1..20: mol_type = other DNA
tccctttcaccaggtcagca

SEQ ID NO: 35597 - DNA, 20 bp, synthetic construct
  misc_feature 1..20: note = Description of Artificial Sequence: Synthetic oligonucleotide
  misc_feature 1..20: note = Target: SCN10A; (+) strand; PAM type: NRG; PAM sequence: GAG
  source 1..20: mol_type = other DNA
caggtcagcacagctatccc

SEQ ID NO: 35598 - DNA, 20 bp, synthetic construct
  misc_feature 1..20: note = Description of Artificial Sequence: Synthetic oligonucleotide
  misc_feature 1..20: note = Target: SCN10A; (+) strand; PAM type: NRG; PAM sequence: TGG
  source 1..20: mol_type = other DNA
gctatcccgagctgcttgca

SEQ ID NO: 35599 - DNA, 20 bp, synthetic construct
  misc_feature 1..20: note = Description of Artificial Sequence: Synthetic oligonucleotide
  misc_feature 1..20: note = Target: SCN10A; (+) strand; PAM type: NRG; PAM sequence: CAG
  source 1..20: mol_type = other DNA
atcccgagctgcttgcatgg

SEQ ID NO: 35600 - DNA, 20 bp, synthetic construct
  misc_feature 1..20: note = Description of Artificial Sequence: Synthetic oligonucleotide
  misc_feature 1..20: note = Target: SCN10A; (+) strand; PAM type: NRG; PAM sequence: CAG
  source 1..20: mol_type = other DNA
ccgagctgcttgcatggcag

SEQ ID NO: 35601 - DNA, 20 bp, synthetic construct
  misc_feature 1..20: note = Description of Artificial Sequence: Synthetic oligonucleotide
  misc_feature 1..20: note = Target: SCN10A; (+) strand; PAM type: NRG; PAM sequence: TGG
  source 1..20: mol_type = other DNA
gcttgcatggcagcagctga

SEQ ID NO: 35602 - DNA, 20 bp, synthetic construct
  misc_feature 1..20: note = Description of Artificial Sequence: Synthetic oligonucleotide
  misc_feature 1..20: note = Target: SCN10A; (+) strand; PAM type: NRG; PAM sequence: CAG
  source 1..20: mol_type = other DNA
cagctgatggctcatacttg

SEQ ID NO: 35603 - DNA, 20 bp, synthetic construct
  misc_feature 1..20: note = Description of Artificial Sequence: Synthetic oligonucleotide
  misc_feature 1..20: note = Target: SCN10A; (+) strand; PAM type: NRG; PAM sequence: AAG
  source 1..20: mol_type = other DNA
cttgcagcattctacaaaaa

SEQ ID NO: 35604 - DNA, 20 bp, synthetic construct
  misc_feature 1..20: note = Description of Artificial Sequence: Synthetic oligonucleotide
  misc_feature 1..20: note = Target: SCN10A; (+) strand; PAM type: NRG; PAM sequence: TGG
  source 1..20: mol_type = other DNA
tctacaaaaaaagtctcttt

SEQ ID NO: 35605 - DNA, 20 bp, synthetic construct
  misc_feature 1..20: note = Description of Artificial Sequence: Synthetic oligonucleotide
  misc_feature 1..20: note = Target: SCN10A; (+) strand; PAM type: NRG; PAM sequence: TGG
  source 1..20: mol_type = other DNA
ctcttttggctgcctgcttc

SEQ ID NO: 35606 - DNA, 20 bp, synthetic construct
  misc_feature 1..20: note = Description of Artificial Sequence: Synthetic oligonucleotide
  misc_feature 1..20: note = Target: SCN10A; (+) strand; PAM type: NRG; PAM sequence: GGG
  source 1..20: mol_type = other DNA
tcttttggctgcctgcttct

SEQ ID NO: 35607 - DNA, 20 bp, synthetic construct
  misc_feature 1..20: note = Description of Artificial Sequence: Synthetic oligonucleotide
  misc_feature 1..20: note = Target: SCN10A; (+) strand; PAM type: NRG; PAM sequence: TAG
  source 1..20: mol_type = other DNA
ttggctgcctgcttctggga

SEQ ID NO: 35608 - DNA, 20 bp, synthetic construct
  misc_feature 1..20: note = Description of Artificial Sequence: Synthetic oligonucleotide
  misc_feature 1..20: note = Target: SCN10A; (+) strand; PAM type: NRG; PAM sequence: AGG
  source 1..20: mol_type = other DNA
tggctgcctgcttctgggat

SEQ ID NO: 35609 - DNA, 20 bp, synthetic construct
  misc_feature 1..20: note = Description of Artificial Sequence: Synthetic oligonucleotide
  misc_feature 1..20: note = Target: SCN10A; (+) strand; PAM type: NRG; PAM sequence: TGG
  source 1..20: mol_type = other DNA
gcctgcttctgggataggta

SEQ ID NO: 35610 - DNA, 20 bp, synthetic construct
  misc_feature 1..20: note = Description of Artificial Sequence: Synthetic oligonucleotide
  misc_feature 1..20: note = Target: SCN10A; (+) strand; PAM type: NRG; PAM sequence: GGG
  source 1..20: mol_type = other DNA
cctgcttctgggataggtat

SEQ ID NO: 35611 - DNA, 20 bp, synthetic construct
  misc_feature 1..20: note = Description of Artificial Sequence: Synthetic oligonucleotide
  misc_feature 1..20: note = Target: SCN10A; (+) strand; PAM type: NRG; PAM sequence: GGG
  source 1..20: mol_type = other DNA
ctgcttctgggataggtatg

SEQ ID NO: 35612 - DNA, 20 bp, synthetic construct
  misc_feature 1..20: note = Description of Artificial Sequence: Synthetic oligonucleotide
  misc_feature 1..20: note = Target: SCN10A; (+) strand; PAM type: NRG; PAM sequence: GAG
  source 1..20: mol_type = other DNA
gcttctgggataggtatggg

SEQ ID NO: 35613 - DNA, 20 bp, synthetic construct
  misc_feature 1..20: note = Description of Artificial Sequence: Synthetic oligonucleotide
  misc_feature 1..20: note = Target: SCN10A; (+) strand; PAM type: NRG; PAM sequence: AGG
  source 1..20: mol_type = other DNA
cttctgggataggtatgggg

SEQ ID NO: 35614 - DNA, 20 bp, synthetic construct
  misc_feature 1..20: note = Description of Artificial Sequence: Synthetic oligonucleotide
  misc_feature 1..20: note = Target: SCN10A; (+) strand; PAM type: NRG; PAM sequence: GGG
  source 1..20: mol_type = other DNA
ttctgggataggtatgggga

SEQ ID NO: 35615 - DNA, 20 bp, synthetic construct
  misc_feature 1..20: note = Description of Artificial Sequence: Synthetic oligonucleotide
  misc_feature 1..20: note = Target: SCN10A; (+) strand; PAM type: NRG; PAM sequence: AAG
  source 1..20: mol_type = other DNA
atggggagggtaaaaaaaaa

SEQ ID NO: 35616 - DNA, 20 bp, synthetic construct
  misc_feature 1..20: note = Description of Artificial Sequence: Synthetic oligonucleotide
  misc_feature 1..20: note = Target: SCN10A; (+) strand; PAM type: NRG; PAM sequence: TGG
  source 1..20: mol_type = other DNA
ggagggtaaaaaaaaaaagc

SEQ ID NO: 35617 - DNA, 20 bp, synthetic construct
  misc_feature 1..20: note = Description of Artificial Sequence: Synthetic oligonucleotide
  misc_feature 1..20: note = Target: SCN10A; (+) strand; PAM type: NRG; PAM sequence: AAG
  source 1..20: mol_type = other DNA
aaagctggcccccttgcctc

SEQ ID NO: 35618 - DNA, 20 bp, synthetic construct
  misc_feature 1..20: note = Description of Artificial Sequence: Synthetic oligonucleotide
  misc_feature 1..20: note = Target: SCN10A; (+) strand; PAM type: NRG; PAM sequence: AGG
  source 1..20: mol_type = other DNA
aagctggcccccttgcctca

SEQ ID NO: 35619 - DNA, 20 bp, synthetic construct
  misc_feature 1..20: note = Description of Artificial Sequence: Synthetic oligonucleotide
  misc_feature 1..20: note = Target: SCN10A; (+) strand; PAM type: NRG; PAM sequence: TAG
  source 1..20: mol_type = other DNA
ctggcccccttgcctcaagg

SEQ ID NO: 35620 - DNA, 20 bp, synthetic construct
  misc_feature 1..20: note = Description of Artificial Sequence: Synthetic oligonucleotide
  misc_feature 1..20: note = Target: SCN10A; (+) strand; PAM type: NRG; PAM sequence: AGG
  source 1..20: mol_type = other DNA
tggcccccttgcctcaaggt

SEQ ID NO: 35621 - DNA, 20 bp, synthetic construct
  misc_feature 1..20: note = Description of Artificial Sequence: Synthetic oligonucleotide
  misc_feature 1..20: note = Target: SCN10A; (+) strand; PAM type: NRG; PAM sequence: TGG
  source 1..20: mol_type = other DNA
cctcaaggtaggactaactg

SEQ ID NO: 35622 - DNA, 20 bp, synthetic construct
  misc_feature 1..20: note = Description of Artificial Sequence: Synthetic oligonucleotide
  misc_feature 1..20: note = Target: SCN10A; (+) strand; PAM type: NRG; PAM sequence: CAG
  source 1..20: mol_type = other DNA
aggtaggactaactgtggta

SEQ ID NO: 35623 - DNA, 20 bp, synthetic construct
  misc_feature 1..20: note = Description of Artificial Sequence: Synthetic oligonucleotide
  misc_feature 1..20: note = Target: SCN10A; (+) strand; PAM type: NRG; PAM sequence: AGG
  source 1..20: mol_type = other DNA
ggtaggactaactgtggtac

SEQ ID NO: 35624 - DNA, 20 bp, synthetic construct
  misc_feature 1..20: note = Description of Artificial Sequence: Synthetic oligonucleotide
  misc_feature 1..20: note = Target: SCN10A; (+) strand; PAM type: NRG; PAM sequence: CAG
  source 1..20: mol_type = other DNA
ctgtggtacaggtcatgccc

SEQ ID NO: 35625 - DNA, 20 bp, synthetic construct
  misc_feature 1..20: note = Description of Artificial Sequence: Synthetic oligonucleotide
  misc_feature 1..20: note = Target: SCN10A; (+) strand; PAM type: NRG; PAM sequence: GAG
  source 1..20: mol_type = other DNA
gtggtacaggtcatgcccca

SEQ ID NO: 35626 - DNA, 20 bp, synthetic construct
  misc_feature 1..20: note = Description of Artificial Sequence: Synthetic oligonucleotide
  misc_feature 1..20: note = Target: SCN10A; (+) strand; PAM type: NRG; PAM sequence: TGG
  source 1..20: mol_type = other DNA
tcatgccccagagttcccca

SEQ ID NO: 35627 - DNA, 20 bp, synthetic construct
  misc_feature 1..20: note = Description of Artificial Sequence: Synthetic oligonucleotide
  misc_feature 1..20: note = Target: SCN10A; (+) strand; PAM type: NRG; PAM sequence: GGG
  source 1..20: mol_type = other DNA
catgccccagagttccccat

SEQ ID NO: 35628 - DNA, 20 bp, synthetic construct
  misc_feature 1..20: note = Description of Artificial Sequence: Synthetic oligonucleotide
  misc_feature 1..20: note = Target: SCN10A; (+) strand; PAM type: NRG; PAM sequence: AAG
  source 1..20: mol_type = other DNA
ccagagttccccatgggatc

SEQ ID NO: 35629 - DNA, 20 bp, synthetic construct
  misc_feature 1..20: note = Description of Artificial Sequence: Synthetic oligonucleotide
  misc_feature 1..20: note = Target: SCN10A; (+) strand; PAM type: NRG; PAM sequence: AAG
  source 1..20: mol_type = other DNA
ttccccatgggatcaagctg

SEQ ID NO: 35630 - DNA, 20 bp, synthetic construct
  misc_feature 1..20: note = Description of Artificial Sequence: Synthetic oligonucleotide
  misc_feature 1..20: note = Target: SCN10A; (+) strand; PAM type: NRG; PAM sequence: TGG
  source 1..20: mol_type = other DNA
ccatgggatcaagctgaagc

SEQ ID NO: 35631 - DNA, 20 bp, synthetic construct
  misc_feature 1..20: note = Description of Artificial Sequence: Synthetic oligonucleotide
  misc_feature 1..20: note = Target: SCN10A; (+) strand; PAM type: NRG; PAM sequence: TAG
  source 1..20: mol_type = other DNA
atcaagctgaagctggtctc

SEQ ID NO: 35632 - DNA, 20 bp, synthetic construct
  misc_feature 1..20: note = Description of Artificial Sequence: Synthetic oligonucleotide
  misc_feature 1..20: note = Target: SCN10A; (+) strand; PAM type: NRG; PAM sequence: GAG
  source 1..20: mol_type = other DNA
gctgaagctggtctctagct

SEQ ID NO: 35633 - DNA, 20 bp, synthetic construct
  misc_feature 1..20: note = Description of Artificial Sequence: Synthetic oligonucleotide
  misc_feature 1..20: note = Target: SCN10A; (+) strand; PAM type: NRG; PAM sequence: TAG
  source 1..20: mol_type = other DNA
agctgagaacactccttgtt

SEQ ID NO: 35634 - DNA, 20 bp, synthetic construct
  misc_feature 1..20: note = Description of Artificial Sequence: Synthetic oligonucleotide
  misc_feature 1..20: note = Target: SCN10A; (+) strand; PAM type: NRG; PAM sequence: GAG
  source 1..20: mol_type = other DNA
tgcttcattcgctttctcct

SEQ ID NO: 35635 - DNA, 20 bp, synthetic construct
  misc_feature 1..20: note = Description of Artificial Sequence: Synthetic oligonucleotide
  misc_feature 1..20: note = Target: SCN10A; (+) strand; PAM type: NRG; PAM sequence: GAG
  source 1..20: mol_type = other DNA
cttcattcgctttctcctga

SEQ ID NO: 35636 - DNA, 20 bp, synthetic construct
  misc_feature 1..20: note = Description of Artificial Sequence: Synthetic oligonucleotide
  misc_feature 1..20: note = Target: SCN10A; (+) strand; PAM type: NRG; PAM sequence: TAG
  source 1..20: mol_type = other DNA
tcctgagagcactccctcaa

SEQ ID NO: 35637 - DNA, 20 bp, synthetic construct
  misc_feature 1..20: note = Description of Artificial Sequence: Synthetic oligonucleotide
  misc_feature 1..20: note = Target: SCN10A; (+) strand; PAM type: NRG; PAM sequence: AGG
  source 1..20: mol_type = other DNA
cctgagagcactccctcaat

SEQ ID NO: 35638 - DNA, 20 bp, synthetic construct
  misc_feature 1..20: note = Description of Artificial Sequence: Synthetic oligonucleotide
  misc_feature 1..20: note = Target: SCN10A; (+) strand; PAM type: NRG; PAM sequence: AAG
  source 1..20: mol_type = other DNA
cctcaataggtcacttgcac

SEQ ID NO: 35639 - DNA, 20 bp, synthetic construct
  misc_feature 1..20: note = Description of Artificial Sequence: Synthetic oligonucleotide
  misc_feature 1..20: note = Target: SCN10A; (+) strand; PAM type: NRG; PAM sequence: TAG
  source 1..20: mol_type = other DNA
cttgcacaagaatcctcact

SEQ ID NO: 35640 - DNA, 20 bp, synthetic construct
  misc_feature 1..20: note = Description of Artificial Sequence: Synthetic oligonucleotide
  misc_feature 1..20: note = Target: SCN10A; (+) strand; PAM type: NRG; PAM sequence: GAG
  source 1..20: mol_type = other DNA
cctcacttagcttcttcttt

SEQ ID NO: 35641 - DNA, 20 bp, synthetic construct
  misc_feature 1..20: note = Description of Artificial Sequence: Synthetic oligonucleotide
  misc_feature 1..20: note = Target: SCN10A; (+) strand; PAM type: NRG; PAM sequence: TGG
  source 1..20: mol_type = other DNA
tgagaaaacctgatctaata

SEQ ID NO: 35642 - DNA, 20 bp, synthetic construct
  misc_feature 1..20: note = Description of Artificial Sequence: Synthetic oligonucleotide
  misc_feature 1..20: note = Target: SCN10A; (+) strand; PAM type: NRG; PAM sequence: GAG
  source 1..20: mol_type = other DNA
cctgatctaatatggtccct

SEQ ID NO: 35643 - DNA, 20 bp, synthetic construct
  misc_feature 1..20: note = Description of Artificial Sequence: Synthetic oligonucleotide
  misc_feature 1..20: note = Target: SCN10A; (+) strand; PAM type: NRG; PAM sequence: AGG
  source 1..20: mol_type = other DNA
ctgatctaatatggtccctg

SEQ ID NO: 35644 - DNA, 20 bp, synthetic construct
  misc_feature 1..20: note = Description of Artificial Sequence: Synthetic oligonucleotide
  misc_feature 1..20: note = Target: SCN10A; (+) strand; PAM type: NRG; PAM sequence: AAG
  source 1..20: mol_type = other DNA
tctaatatggtccctgaggc

SEQ ID NO: 35645 - DNA, 20 bp, synthetic construct
  misc_feature 1..20: note = Description of Artificial Sequence: Synthetic oligonucleotide
  misc_feature 1..20: note = Target: SCN10A; (+) strand; PAM type: NRG; PAM sequence: TAG
  source 1..20: mol_type = other DNA
aggcaagatgattcctccta

SEQ ID NO: 35646 - DNA, 20 bp, synthetic construct
  misc_feature 1..20: note = Description of Artificial Sequence: Synthetic oligonucleotide
  misc_feature 1..20: note = Target: SCN10A; (+) strand; PAM type: NRG; PAM sequence: CGG
  source 1..20: mol_type = other DNA
tcctcctatagctccctaaa

SEQ ID NO: 35647 - DNA, 20 bp, synthetic construct
  misc_feature 1..20: note = Description of Artificial Sequence: Synthetic oligonucleotide
  misc_feature 1..20: note = Target: SCN10A; (+) strand; PAM type: NRG; PAM sequence: AAG
  source 1..20: mol_type = other DNA
cctaaacggtgccctaattg

SEQ ID NO: 35648 - DNA, 20 bp, synthetic construct
  misc_feature 1..20: note = Description of Artificial Sequence: Synthetic oligonucleotide
  misc_feature 1..20: note = Target: SCN10A; (+) strand; PAM type: NRG; PAM sequence: TGG
  source 1..20: mol_type = other DNA
aaacggtgccctaattgaag

SEQ ID NO: 35649 - DNA, 20 bp, synthetic construct
  misc_feature 1..20: note = Description of Artificial Sequence: Synthetic oligonucleotide
  misc_feature 1..20: note = Target: SCN10A; (+) strand; PAM type: NRG; PAM sequence: TAG
  source 1..20: mol_type = other DNA
ggtgccctaattgaagtggc

SEQ ID NO: 35650 - DNA, 20 bp, synthetic construct
  misc_feature 1..20: note = Description of Artificial Sequence: Synthetic oligonucleotide
  misc_feature 1..20: note = Target: SCN10A; (+) strand; PAM type: NRG; PAM sequence: CAG
  source 1..20: mol_type = other DNA
cctaattgaagtggctagtc

SEQ ID NO: 35651 - DNA, 20 bp, synthetic construct
  misc_feature 1..20: note = Description of Artificial Sequence: Synthetic oligonucleotide
  misc_feature 1..20: note = Target: SCN10A; (+) strand; PAM type: NRG; PAM sequence: CAG
  source 1..20: mol_type = other DNA
ttgaagtggctagtccagaa

SEQ ID NO: 35652 - DNA, 20 bp, synthetic construct
  misc_feature 1..20: note = Description of Artificial Sequence: Synthetic oligonucleotide
  misc_feature 1..20: note = Target: SCN10A; (+) strand; PAM type: NRG; PAM sequence: AAG
  source 1..20: mol_type = other DNA
gctagtccagaacagtatcc

SEQ ID NO: 35653 - DNA, 20 bp, synthetic construct
  misc_feature 1..20: note = Description of Artificial Sequence: Synthetic oligonucleotide
  misc_feature 1..20: note = Target: SCN10A; (+) strand; PAM type: NRG; PAM sequence: TGG
  source 1..20: mol_type = other DNA
tccagaacagtatccaagaa

SEQ ID NO: 35654 - DNA, 20 bp, synthetic construct
  misc_feature 1..20: note = Description of Artificial Sequence: Synthetic oligonucleotide
  misc_feature 1..20: note = Target: SCN10A; (+) strand; PAM type: NRG; PAM sequence: CAG
  source 1..20: mol_type = other DNA
gaacagtatccaagaatgga

SEQ ID NO: 35655 - DNA, 20 bp, synthetic construct
  misc_feature 1..20: note = Description of Artificial Sequence: Synthetic oligonucleotide
  misc_feature 1..20: note = Target: SCN10A; (+) strand; PAM type: NRG; PAM sequence: AAG
  source 1..20: mol_type = other DNA
agtctgcaaccttcttcaca

SEQ ID NO: 35656 - DNA, 20 bp, synthetic construct
  misc_feature 1..20: note = Description of Artificial Sequence: Synthetic oligonucleotide
  misc_feature 1..20: note = Target: SCN10A; (+) strand; PAM type: NRG; PAM sequence: CGG
  source 1..20: mol_type = other DNA
cacaaacctcctgctccttc

SEQ ID NO: 35657 - DNA, 20 bp, synthetic construct
  misc_feature 1..20: note = Description of Artificial Sequence: Synthetic oligonucleotide
  misc_feature 1..20: note = Target: SCN10A; (+) strand; PAM type: NRG; PAM sequence: GAG
  source 1..20: mol_type = other DNA
caaacctcctgctccttccg

SEQ ID NO: 35658 - DNA, 20 bp, synthetic construct
  misc_feature 1..20: note = Description of Artificial Sequence: Synthetic oligonucleotide
  misc_feature 1..20: note = Target: SCN10A; (+) strand; PAM type: NRG; PAM sequence: GAG
  source 1..20: mol_type = other DNA
tgctccttccggagcatctc

SEQ ID NO: 35659 - DNA, 20 bp, synthetic construct
  misc_feature 1..20: note = Description of Artificial Sequence: Synthetic oligonucleotide
  misc_feature 1..20: note = Target: SCN10A; (+) strand; PAM type: NRG; PAM sequence: AGG
  source 1..20: mol_type = other DNA
gctccttccggagcatctcg

SEQ ID NO: 35660 - DNA, 20 bp, synthetic construct
  misc_feature 1..20: note = Description of Artificial Sequence: Synthetic oligonucleotide
  misc_feature 1..20: note = Target: SCN10A; (+) strand; PAM type: NRG; PAM sequence: GGG
  source 1..20: mol_type = other DNA
ctccttccggagcatctcga

SEQ ID NO: 35661 - DNA, 20 bp, synthetic construct
  misc_feature 1..20: note = Description of Artificial Sequence: Synthetic oligonucleotide
  misc_feature 1..20: note = Target: SCN10A; (+) strand; PAM type: NRG; PAM sequence: TGG
  source 1..20: mol_type = other DNA
ggagcatctcgagggcctcc

SEQ ID NO: 35662 - DNA, 20 bp, synthetic construct
  misc_feature 1..20: note = Description of Artificial Sequence: Synthetic oligonucleotide
  misc_feature 1..20: note = Target: SCN10A; (+) strand; PAM type: NRG; PAM sequence: CAG
  source 1..20: mol_type = other DNA
ctcctttgcttcaatttcat

SEQ ID NO: 35663 - DNA, 20 bp, synthetic construct
  misc_feature 1..20: note = Description of Artificial Sequence: Synthetic oligonucleotide
  misc_feature 1..20: note = Target: SCN10A; (+) strand; PAM type: NRG; PAM sequence: TGG
  source 1..20: mol_type = other DNA
ctttgcttcaatttcatcag

SEQ ID NO: 35664 - DNA, 20 bp, synthetic construct
  misc_feature 1..20: note = Description of Artificial Sequence: Synthetic oligonucleotide
  misc_feature 1..20: note = Target: SCN10A; (+) strand; PAM type: NRG; PAM sequence: TGG
  source 1..20: mol_type = other DNA
caatttcatcagtggttgcc

SEQ ID NO: 35665 - DNA, 20 bp, synthetic construct
  misc_feature 1..20: note = Description of Artificial Sequence: Synthetic oligonucleotide
  misc_feature 1..20: note = Target: SCN10A; (+) strand; PAM type: NRG; PAM sequence: TGG
  source 1..20: mol_type = other DNA
gttctgctcctcatacgcca

SEQ ID NO: 35666 - DNA, 20 bp, synthetic construct
  misc_feature 1..20: note = Description of Artificial Sequence: Synthetic oligonucleotide
  misc_feature 1..20: note = Target: SCN10A; (+) strand; PAM type: NRG; PAM sequence: CAG
  source 1..20: mol_type = other DNA
ctcatacgccatggtgacta

SEQ ID NO: 35667 - DNA, 20 bp, synthetic construct
  misc_feature 1..20: note = Description of Artificial Sequence: Synthetic oligonucleotide
  misc_feature 1..20: note = Target: SCN10A; (+) strand; PAM type: NRG; PAM sequence: AAG
  source 1..20: mol_type = other DNA
acgccatggtgactacagcc

SEQ ID NO: 35668 - DNA, 20 bp, synthetic construct
  misc_feature 1..20: note = Description of Artificial Sequence: Synthetic oligonucleotide
  misc_feature 1..20: note = Target: SCN10A; (+) strand; PAM type: NRG; PAM sequence: AAG
  source 1..20: mol_type = other DNA
tggtgactacagccaagatc

SEQ ID NO: 35669 - DNA, 20 bp, synthetic construct
  misc_feature 1..20: note = Description of Artificial Sequence: Synthetic oligonucleotide
  misc_feature 1..20: note = Target: SCN10A; (+) strand; PAM type: NRG; PAM sequence: CAG
  source 1..20: mol_type = other DNA
acagccaagatcaagttgac

SEQ ID NO: 35670 - DNA, 20 bp, synthetic construct
  misc_feature 1..20: note = Description of Artificial Sequence: Synthetic oligonucleotide
  misc_feature 1..20: note = Target: SCN10A; (+) strand; PAM type: NRG; PAM sequence: AGG
  source 1..20: mol_type = other DNA
cagccaagatcaagttgacc

SEQ ID NO: 35671 - DNA, 20 bp, synthetic construct
  misc_feature 1..20: note = Description of Artificial Sequence: Synthetic oligonucleotide
  misc_feature 1..20: note = Target: SCN10A; (+) strand; PAM type: NRG; PAM sequence: TAG
  source 1..20: mol_type = other DNA
ccaagatcaagttgaccagg

SEQ ID NO: 35672 - DNA, 20 bp, synthetic construct
  misc_feature 1..20: note = Description of Artificial Sequence: Synthetic oligonucleotide
  misc_feature 1..20: note = Target: SCN10A; (+) strand; PAM type: NRG; PAM sequence: AAG
  source 1..20: mol_type = other DNA
gatcaagttgaccaggtaga

SEQ ID NO: 35673 - DNA, 20 bp, synthetic construct
  misc_feature 1..20: note = Description of Artificial Sequence: Synthetic oligonucleotide
  misc_feature 1..20: note = Target: SCN10A; (+) strand; PAM type: NRG; PAM sequence: CAG
  source 1..20: mol_type = other DNA
ttgaccaggtagaaagatcc

SEQ ID NO: 35674 - DNA, 20 bp, synthetic construct
  misc_feature 1..20: note = Description of Artificial Sequence: Synthetic oligonucleotide
  misc_feature 1..20: note = Target: SCN10A; (+) strand; PAM type: NRG; PAM sequence: AGG
  source 1..20: mol_type = other DNA
tgaccaggtagaaagatccc

SEQ ID NO: 35675 - DNA, 20 bp, synthetic construct
  misc_feature 1..20: note = Description of Artificial Sequence: Synthetic oligonucleotide
  misc_feature 1..20: note = Target: SCN10A; (+) strand; PAM type: NRG; PAM sequence: AAG
  source 1..20: mol_type = other DNA
ccaggtagaaagatcccagg

SEQ ID NO: 35676 - DNA, 20 bp, synthetic construct
  misc_feature 1..20: note = Description of Artificial Sequence: Synthetic oligonucleotide
  misc_feature 1..20: note = Target: SCN10A; (+) strand; PAM type: NRG; PAM sequence: GAG
  source 1..20: mol_type = other DNA
aaagatcccaggaagattac

SEQ ID NO: 35677 - DNA, 20 bp, synthetic construct
  misc_feature 1..20: note = Description of Artificial Sequence: Synthetic oligonucleotide
  misc_feature 1..20: note = Target: SCN10A; (+) strand; PAM type: NRG; PAM sequence: AAG
  source 1..20: mol_type = other DNA
ggaagattacgagcacaaaa

SEQ ID NO: 35678 - DNA, 20 bp, synthetic construct
  misc_feature 1..20: note = Description of Artificial Sequence: Synthetic oligonucleotide
  misc_feature 1..20: note = Target: SCN10A; (+) strand; PAM type: NRG; PAM sequence: TAG
  source 1..20: mol_type = other DNA
cgagcacaaaaaagatcata

SEQ ID NO: 35679 - DNA, 20 bp, synthetic construct
  misc_feature 1..20: note = Description of Artificial Sequence: Synthetic oligonucleotide
  misc_feature 1..20: note = Target: SCN10A; (+) strand; PAM type: NRG; PAM sequence: CAG
  source 1..20: mol_type = other DNA
aaagatcatatagattttcc

SEQ ID NO: 35680 - DNA, 20 bp, synthetic construct
  misc_feature 1..20: note = Description of Artificial Sequence: Synthetic oligonucleotide
  misc_feature 1..20: note = Target: SCN10A; (+) strand; PAM type: NRG; PAM sequence: AAG
  source 1..20: mol_type = other DNA
gatcatatagattttcccag

SEQ ID NO: 35681 - DNA, 20 bp, synthetic construct
  misc_feature 1..20: note = Description of Artificial Sequence: Synthetic oligonucleotide
  misc_feature 1..20: note = Target: SCN10A; (+) strand; PAM type: NRG; PAM sequence: CAG
  source 1..20: mol_type = other DNA
tagattttcccagaagtcct

SEQ ID NO: 35682 - DNA, 20 bp, synthetic construct
  misc_feature 1..20: note = Description of Artificial Sequence: Synthetic oligonucleotide
  misc_feature 1..20: note = Target: SCN10A; (+) strand; PAM type: NRG; PAM sequence: AGG
  source 1..20: mol_type = other DNA
agattttcccagaagtcctc

SEQ ID NO: 35683 - DNA, 20 bp, synthetic construct
  misc_feature 1..20: note = Description of Artificial Sequence: Synthetic oligonucleotide
  misc_feature 1..20: note = Target: SCN10A; (+) strand; PAM type: NRG; PAM sequence: GGG
  source 1..20: mol_type = other DNA
gattttcccagaagtcctca

SEQ ID NO: 35684 - DNA, 20 bp, synthetic construct
  misc_feature 1..20: note = Description of Artificial Sequence: Synthetic oligonucleotide
  misc_feature 1..20: note = Target: SCN10A; (+) strand; PAM type: NRG; PAM sequence: CAG
  source 1..20: mol_type = other DNA
ccagaagtcctcagggtctg

SEQ ID NO: 35685 - DNA, 20 bp, synthetic construct
  misc_feature 1..20: note = Description of Artificial Sequence: Synthetic oligonucleotide
  misc_feature 1..20: note = Target: SCN10A; (+) strand; PAM type: NRG; PAM sequence: AGG
  source 1..20: mol_type = other DNA
cagaagtcctcagggtctgc

SEQ ID NO: 35686 - DNA, 20 bp, synthetic construct
  misc_feature 1..20: note = Description of Artificial Sequence: Synthetic oligonucleotide
  misc_feature 1..20: note = Target: SCN10A; (+) strand; PAM type: NRG; PAM sequence: AAG
  source 1..20: mol_type = other DNA
tcctcagggtctgcaggttc

SEQ ID NO: 35687 - DNA, 20 bp, synthetic construct
  misc_feature 1..20: note = Description of Artificial Sequence: Synthetic oligonucleotide
  misc_feature 1..20: note = Target: SCN10A; (+) strand; PAM type: NRG; PAM sequence: AGG
  source 1..20: mol_type = other DNA
cctcagggtctgcaggttca

SEQ ID NO: 35688 - DNA, 20 bp, synthetic construct
  misc_feature 1..20: note = Description of Artificial Sequence: Synthetic oligonucleotide
  misc_feature 1..20: note = Target: SCN10A; (+) strand; PAM type: NRG; PAM sequence: GGG
  source 1..20: mol_type = other DNA
ctcagggtctgcaggttcaa

SEQ ID NO: 35689 - DNA, 20 bp, synthetic construct
  misc_feature 1..20: note = Description of Artificial Sequence: Synthetic oligonucleotide
  misc_feature 1..20: note = Target: SCN10A; (+) strand; PAM type: NRG; PAM sequence: AAG
  source 1..20: mol_type = other DNA
gggtctgcaggttcaaggga

SEQ ID NO: 35690 - DNA, 20 bp, synthetic construct
  misc_feature 1..20: note = Description of Artificial Sequence: Synthetic oligonucleotide
  misc_feature 1..20: note = Target: SCN10A; (+) strand; PAM type: NRG; PAM sequence: AAG
  source 1..20: mol_type = other DNA
tctgcaggttcaagggaaag

SEQ ID NO: 35691 - DNA, 20 bp, synthetic construct
  misc_feature 1..20: note = Description of Artificial Sequence: Synthetic oligonucleotide
  misc_feature 1..20: note = Target: SCN10A; (+) strand; PAM type: NRG; PAM sequence: GAG
  source 1..20: mol_type = other DNA
tgcaggttcaagggaaagaa

SEQ ID NO: 35692 - DNA, 20 bp, synthetic construct
  misc_feature 1..20: note = Description of Artificial Sequence: Synthetic oligonucleotide
  misc_feature 1..20: note = Target: SCN10A; (+) strand; PAM type: NRG; PAM sequence: TAG
  source 1..20: mol_type = other DNA
agaagagaaacctgtaccca

SEQ ID NO: 35693 - DNA, 20 bp, synthetic construct
  misc_feature 1..20: note = Description of Artificial Sequence: Synthetic oligonucleotide
  misc_feature 1..20: note = Target: SCN10A; (+) strand; PAM type: NRG; PAM sequence: TGG
  source 1..20: mol_type = other DNA
aaacctgtacccatagcaca

SEQ ID NO: 35694 - DNA, 20 bp, synthetic construct
  misc_feature 1..20: note = Description of Artificial Sequence: Synthetic oligonucleotide
  misc_feature 1..20: note = Target: SCN10A; (+) strand; PAM type: NRG; PAM sequence: AAG
  source 1..20: mol_type = other DNA
gcacatggacccctgaattt

SEQ ID NO: 35695 - DNA, 20 bp, synthetic construct
  misc_feature 1..20: note = Description of Artificial Sequence: Synthetic oligonucleotide
  misc_feature 1..20: note = Target: SCN10A; (+) strand; PAM type: NRG; PAM sequence: CAG
  source 1..20: mol_type = other DNA
atggacccctgaatttaagt

SEQ ID NO: 35696 - DNA, 20 bp, synthetic construct
  misc_feature 1..20: note = Description of Artificial Sequence: Synthetic oligonucleotide
  misc_feature 1..20: note = Target: SCN10A; (+) strand; PAM type: NRG; PAM sequence: CAG
  source 1..20: mol_type = other DNA
gaatttaagtcagcctcctc

SEQ ID NO: 35697 - DNA, 20 bp, synthetic construct
  misc_feature 1..20: note = Description of Artificial Sequence: Synthetic oligonucleotide
  misc_feature 1..20: note = Target: SCN10A; (+) strand; PAM type: NRG; PAM sequence: AGG
  source 1..20: mol_type = other DNA
aatttaagtcagcctcctcc

SEQ ID NO: 35698 - DNA, 20 bp, synthetic construct
  misc_feature 1..20: note = Description of Artificial Sequence: Synthetic oligonucleotide
  misc_feature 1..20: note = Target: SCN10A; (+) strand; PAM type: NRG; PAM sequence: AAG
  source 1..20: mol_type = other DNA
aagtcagcctcctccaggaa

SEQ ID NO: 35699 - DNA, 20 bp, synthetic construct
  misc_feature 1..20: note = Description of Artificial Sequence: Synthetic oligonucleotide
  misc_feature 1..20: note = Target: SCN10A; (+) strand; PAM type: NRG; PAM sequence: CAG
  source 1..20: mol_type = other DNA
agcctcctccaggaaaagca

SEQ ID NO: 35700 - DNA, 20 bp, synthetic construct
  misc_feature 1..20: note = Description of Artificial Sequence: Synthetic oligonucleotide
  misc_feature 1..20: note = Target: SCN10A; (+) strand; PAM type: NRG; PAM sequence: CAG
  source 1..20: mol_type = other DNA
ccaggaaaagcacagccatg

SEQ ID NO: 35701 - DNA, 20 bp, synthetic construct
  misc_feature 1..20: note = Description of Artificial Sequence: Synthetic oligonucleotide
  misc_feature 1..20: note = Target: SCN10A; (+) strand; PAM type: NRG; PAM sequence: CAG
  source 1..20: mol_type = other DNA
cagccatgcagctgacccac

SEQ ID NO: 35702 - DNA, 20 bp, synthetic construct
  misc_feature 1..20: note = Description of Artificial Sequence: Synthetic oligonucleotide
  misc_feature 1..20: note = Target: SCN10A; (+) strand; PAM type: NRG; PAM sequence: AAG
  source 1..20: mol_type = other DNA
tgacccaccagcctccaacc

SEQ ID NO: 35703 - DNA, 20 bp, synthetic construct
  misc_feature 1..20: note = Description of Artificial Sequence: Synthetic oligonucleotide
  misc_feature 1..20: note = Target: SCN10A; (+) strand; PAM type: NRG; PAM sequence: TGG
  source 1..20: mol_type = other DNA
agcctccaaccaagtctgcg

SEQ ID NO: 35704 - DNA, 20 bp, synthetic construct
  misc_feature 1..20: note = Description of Artificial Sequence: Synthetic oligonucleotide
  misc_feature 1..20: note = Target: SCN10A; (+) strand; PAM type: NRG; PAM sequence: GGG
  source 1..20: mol_type = other DNA
gcctccaaccaagtctgcgt

SEQ ID NO: 35705 - DNA, 20 bp, synthetic construct
  misc_feature 1..20: note = Description of Artificial Sequence: Synthetic oligonucleotide
  misc_feature 1..20: note = Target: SCN10A; (+) strand; PAM type: NRG; PAM sequence: GGG
  source 1..20: mol_type = other DNA
cctccaaccaagtctgcgtg

SEQ ID NO: 35706 - DNA, 20 bp, synthetic construct
  misc_feature 1..20: note = Description of Artificial Sequence: Synthetic oligonucleotide
  misc_feature 1..20: note = Target: SCN10A; (+) strand; PAM type: NRG; PAM sequence: GGG
  source 1..20: mol_type = other DNA
ctccaaccaagtctgcgtgg

SEQ ID NO: 35707 - DNA, 20 bp, synthetic construct
  misc_feature 1..20: note = Description of Artificial Sequence: Synthetic oligonucleotide
  misc_feature 1..20: note = Target: SCN10A; (+) strand; PAM type: NRG; PAM sequence: CAG
  source 1..20: mol_type = other DNA
caagtctgcgtgggggaatg

SEQ ID NO: 35708 - DNA, 20 bp, synthetic construct
  misc_feature 1..20: note = Description of Artificial Sequence: Synthetic oligonucleotide
  misc_feature 1..20: note = Target: SCN10A; (+) strand; PAM type: NRG; PAM sequence: CAG
  source 1..20: mol_type = other DNA
ctgcgtgggggaatgcagct

SEQ ID NO: 35709 - DNA, 20 bp, synthetic construct
  misc_feature 1..20: note = Description of Artificial Sequence: Synthetic oligonucleotide
  misc_feature 1..20: note = Target: SCN10A; (+) strand; PAM type: NRG; PAM sequence: TGG
  source 1..20: mol_type = other DNA
gaatgcagctcagtacctgc

SEQ ID NO: 35710 - DNA, 20 bp, synthetic construct
  misc_feature 1..20: note = Description of Artificial Sequence: Synthetic oligonucleotide
  misc_feature 1..20: note = Target: SCN10A; (+) strand; PAM type: NRG; PAM sequence: TAG
  source 1..20: mol_type = other DNA
tgcagctcagtacctgctgg

SEQ ID NO: 35711 - DNA, 20 bp, synthetic construct
  misc_feature 1..20: note = Description of Artificial Sequence: Synthetic oligonucleotide
  misc_feature 1..20: note = Target: SCN10A; (+) strand; PAM type: NRG; PAM sequence: GAG
  source 1..20: mol_type = other DNA
cagctcagtacctgctggta

SEQ ID NO: 35712 - DNA, 20 bp, synthetic construct
  misc_feature 1..20: note = Description of Artificial Sequence: Synthetic oligonucleotide
  misc_feature 1..20: note = Target: SCN10A; (+) strand; PAM type: NRG; PAM sequence: AGG
  source 1..20: mol_type = other DNA
agctcagtacctgctggtag

SEQ ID NO: 35713 - DNA, 20 bp, synthetic construct
  misc_feature 1..20: note = Description of Artificial Sequence: Synthetic oligonucleotide
  misc_feature 1..20: note = Target: SCN10A; (+) strand; PAM type: NRG; PAM sequence: CAG
  source 1..20: mol_type = other DNA
cctgctggtagaggcgttcc

SEQ ID NO: 35714 - DNA, 20 bp, synthetic construct
  misc_feature 1..20: note = Description of Artificial Sequence: Synthetic oligonucleotide
  misc_feature 1..20: note = Target: SCN10A; (+) strand; PAM type: NRG; PAM sequence: AGG
  source 1..20: mol_type = other DNA
ctgctggtagaggcgttccc

SEQ ID NO: 35715 - DNA, 20 bp, synthetic construct
  misc_feature 1..20: note = Description of Artificial Sequence: Synthetic oligonucleotide
  misc_feature 1..20: note = Target: SCN10A; (+) strand; PAM type: NRG; PAM sequence: GAG
  source 1..20: mol_type = other DNA
tcccaggaatcctgtgtcat

SEQ ID NO: 35716 - DNA, 20 bp, synthetic construct
  misc_feature 1..20: note = Description of Artificial Sequence: Synthetic oligonucleotide
  misc_feature 1..20: note = Target: SCN10A; (+) strand; PAM type: NRG; PAM sequence: AGG
  source 1..20: mol_type = other DNA
cccaggaatcctgtgtcatg

SEQ ID NO: 35717 - DNA, 20 bp, synthetic construct
  misc_feature 1..20: note = Description of Artificial Sequence: Synthetic oligonucleotide
  misc_feature 1..20: note = Target: SCN10A; (+) strand; PAM type: NRG; PAM sequence: CGG
  source 1..20: mol_type = other DNA
aggaatcctgtgtcatgagg

SEQ ID NO: 35718 - DNA, 20 bp, synthetic construct
  misc_feature 1..20: note = Description of Artificial Sequence: Synthetic oligonucleotide
  misc_feature 1..20: note = Target: SCN10A; (+) strand; PAM type: NRG; PAM sequence: CAG
  source 1..20: mol_type = other DNA
tcctgtgtcatgaggcggaa

SEQ ID NO: 35719 - DNA, 20 bp, synthetic construct
  misc_feature 1..20: note = Description of Artificial Sequence: Synthetic oligonucleotide
  misc_feature 1..20: note = Target: SCN10A; (+) strand; PAM type: NRG; PAM sequence: GAG
  source 1..20: mol_type = other DNA
gtgtcatgaggcggaacagt

SEQ ID NO: 35720 - DNA, 20 bp, synthetic construct
  misc_feature 1..20: note = Description of Artificial Sequence: Synthetic oligonucleotide
  misc_feature 1..20: note = Target: SCN10A; (+) strand; PAM type: NRG; PAM sequence: GAG
  source 1..20: mol_type = other DNA
gtcatgaggcggaacagtga

SEQ ID NO: 35721 - DNA, 20 bp, synthetic construct
  misc_feature 1..20: note = Description of Artificial Sequence: Synthetic oligonucleotide
  misc_feature 1..20: note = Target: SCN10A; (+) strand; PAM type: NRG; PAM sequence: AGG
  source 1..20: mol_type = other DNA
tcatgaggcggaacagtgag

SEQ ID NO: 35722 - DNA, 20 bp, synthetic construct
  misc_feature 1..20: note = Description of Artificial Sequence: Synthetic oligonucleotide
  misc_feature 1..20: note = Target: SCN10A; (+) strand; PAM type: NRG; PAM sequence: AAG
  source 1..20: mol_type = other DNA
gaggcggaacagtgagagga

SEQ ID NO: 35723 - DNA, 20 bp, synthetic construct
  misc_feature 1..20: note = Description of Artificial Sequence: Synthetic oligonucleotide
  misc_feature 1..20: note = Target: SCN10A; (+) strand; PAM type: NRG; PAM sequence: AAG
  source 1..20: mol_type = other DNA
gaacagtgagaggaaagccc

SEQ ID NO: 35724 - DNA, 20 bp, synthetic construct
  misc_feature 1..20: note = Description of Artificial Sequence: Synthetic oligonucleotide
  misc_feature 1..20: note = Target: SCN10A; (+) strand; PAM type: NRG; PAM sequence: AAG
  source 1..20: mol_type = other DNA
gtgagaggaaagcccaagca

SEQ ID NO: 35725 - DNA, 20 bp, synthetic construct
  misc_feature 1..20: note = Description of Artificial Sequence: Synthetic oligonucleotide
  misc_feature 1..20: note = Target: SCN10A; (+) strand; PAM type: NRG; PAM sequence: AGG
  source 1..20: mol_type = other DNA
tgagaggaaagcccaagcaa

SEQ ID NO: 35726 - DNA, 20 bp, synthetic construct
  misc_feature 1..20: note = Description of Artificial Sequence: Synthetic oligonucleotide
  misc_feature 1..20: note = Target: SCN10A; (+) strand; PAM type: NRG; PAM sequence: AAG
  source 1..20: mol_type = other DNA
aagcccaagcaaaggaatca

SEQ ID NO: 35727 - DNA, 20 bp, synthetic construct
  misc_feature 1..20: note = Description of Artificial Sequence: Synthetic oligonucleotide
  misc_feature 1..20: note = Target: SCN10A; (+) strand; PAM type: NRG; PAM sequence: TGG
  source 1..20: mol_type = other DNA
ccaagcaaaggaatcaaagc

SEQ ID NO: 35728 - DNA, 20 bp, synthetic construct
  misc_feature 1..20: note = Description of Artificial Sequence: Synthetic oligonucleotide
  misc_feature 1..20: note = Target: SCN10A; (+) strand; PAM type: NRG; PAM sequence: TAG
  source 1..20: mol_type = other DNA
caaaggaatcaaagctggtg

SEQ ID NO: 35729 - DNA, 20 bp, synthetic construct
  misc_feature 1..20: note = Description of Artificial Sequence: Synthetic oligonucleotide
  misc_feature 1..20: note = Target: SCN10A; (+) strand; PAM type: NRG; PAM sequence: CGG
  source 1..20: mol_type = other DNA
aagctggtgtagttaaaatc

SEQ ID NO: 35730 - DNA, 20 bp, synthetic construct
  misc_feature 1..20: note = Description of Artificial Sequence: Synthetic oligonucleotide
  misc_feature 1..20: note = Target: SCN10A; (+) strand; PAM type: NRG; PAM sequence: GGG
  source 1..20: mol_type = other DNA
agctggtgtagttaaaatcc

SEQ ID NO: 35731 - DNA, 20 bp, synthetic construct
  misc_feature 1..20: note = Description of Artificial Sequence: Synthetic oligonucleotide
  misc_feature 1..20: note = Target: SCN10A; (+) strand; PAM type: NRG; PAM sequence: CAG
  source 1..20: mol_type = other DNA
gtagttaaaatccgggttgt

SEQ ID NO: 35732 - DNA, 20 bp, synthetic construct
  misc_feature 1..20: note = Description of Artificial Sequence: Synthetic oligonucleotide
  misc_feature 1..20: note = Target: SCN10A; (+) strand; PAM type: NRG; PAM sequence: AAG
  source 1..20: mol_type = other DNA
gttaaaatccgggttgtcag

SEQ ID NO: 35733 - DNA, 20 bp, synthetic construct
  misc_feature 1..20: note = Description of Artificial Sequence: Synthetic oligonucleotide
  misc_feature 1..20: note = Target: SCN10A; (+) strand; PAM type: NRG; PAM sequence: AAG
  source 1..20: mol_type = other DNA
tccgggttgtcagaagtttt

SEQ ID NO: 35734 - DNA, 20 bp, synthetic construct
  misc_feature 1..20: note = Description of Artificial Sequence: Synthetic oligonucleotide
  misc_feature 1..20: note = Target: SCN10A; (+) strand; PAM type: NRG; PAM sequence: AGG
  source 1..20: mol_type = other DNA
ccgggttgtcagaagtttta

SEQ ID NO: 35735 - DNA, 20 bp, synthetic construct
  misc_feature 1..20: note = Description of Artificial Sequence: Synthetic oligonucleotide
  misc_feature 1..20: note = Target: SCN10A; (+) strand; PAM type: NRG; PAM sequence: CAG
  source 1..20: mol_type = other DNA
ggttgtcagaagttttaagg

SEQ ID NO: 35736 - DNA, 20 bp, synthetic construct
  misc_feature 1..20: note = Description of Artificial Sequence: Synthetic oligonucleotide
  misc_feature 1..20: note = Target: SCN10A; (+) strand; PAM type: NRG; PAM sequence: CAG
  source 1..20: mol_type = other DNA
tttaaggcagatataaccat

SEQ ID NO: 35737 - DNA, 20 bp, synthetic construct
  misc_feature 1..20: note = Description of Artificial Sequence: Synthetic oligonucleotide
  misc_feature 1..20: note = Target: SCN10A; (+) strand; PAM type: NRG; PAM sequence: AGG
  source 1..20: mol_type = other DNA
ttaaggcagatataaccatc

SEQ ID NO: 35738 - DNA, 20 bp, synthetic construct
  misc_feature 1..20: note = Description of Artificial Sequence: Synthetic oligonucleotide
  misc_feature 1..20: note = Target: SCN10A; (+) strand; PAM type: NRG; PAM sequence: GGG
  source 1..20: mol_type = other DNA
taaggcagatataaccatca

SEQ ID NO: 35739 - DNA, 20 bp, synthetic construct
  misc_feature 1..20: note = Description of Artificial Sequence: Synthetic oligonucleotide
  misc_feature 1..20: note = Target: SCN10A; (+) strand; PAM type: NRG; PAM sequence: CAG
  source 1..20: mol_type = other DNA
ggcagatataaccatcaggg

SEQ ID NO: 35740 - DNA, 20 bp, synthetic construct
  misc_feature 1..20: note = Description of Artificial Sequence: Synthetic oligonucleotide
  misc_feature 1..20: note = Target: SCN10A; (+) strand; PAM type: NRG; PAM sequence: TGG
  source 1..20: mol_type = other DNA
agatataaccatcagggcag

SEQ ID NO: 35741 - DNA, 20 bp, synthetic construct
  misc_feature 1..20: note = Description of Artificial Sequence: Synthetic oligonucleotide
  misc_feature 1..20: note = Target: SCN10A; (+) strand; PAM type: NRG; PAM sequence: CAG
  source 1..20: mol_type = other DNA
aaccatcagggcagtggctg

SEQ ID NO: 35742 - DNA, 20 bp, synthetic construct
  misc_feature 1..20: note = Description of Artificial Sequence: Synthetic oligonucleotide
  misc_feature 1..20: note = Target: SCN10A; (+) strand; PAM type: NRG; PAM sequence: AAG
  source 1..20: mol_type = other DNA
atcagggcagtggctgcagc

SEQ ID NO: 35743 - DNA, 20 bp, synthetic construct
  misc_feature 1..20: note = Description of Artificial Sequence: Synthetic oligonucleotide
  misc_feature 1..20: note = Target: SCN10A; (+) strand; PAM type: NRG; PAM sequence: CAG
  source 1..20: mol_type = other DNA
ggcagtggctgcagcaagaa

SEQ ID NO: 35744 - DNA, 20 bp, synthetic construct
  misc_feature 1..20: note = Description of Artificial Sequence: Synthetic oligonucleotide
  misc_feature 1..20: note = Target: SCN10A; (+) strand; PAM type: NRG; PAM sequence: GAG
  source 1..20: mol_type = other DNA
cagtggctgcagcaagaaca

SEQ ID NO: 35745 - DNA, 20 bp, synthetic construct
  misc_feature 1..20: note = Description of Artificial Sequence: Synthetic oligonucleotide
  misc_feature 1..20: note = Target: SCN10A; (+) strand; PAM type: NRG; PAM sequence: AAG
  source 1..20: mol_type = other DNA
tggctgcagcaagaacagag

SEQ ID NO: 35746 - DNA, 20 bp, synthetic construct
  misc_feature 1..20: note = Description of Artificial Sequence: Synthetic oligonucleotide
  misc_feature 1..20: note = Target: SCN10A; (+) strand; PAM type: NRG; PAM sequence: AGG
  source 1..20: mol_type = other DNA
ggctgcagcaagaacagaga

SEQ ID NO: 35747 - DNA, 20 bp, synthetic construct
  misc_feature 1..20: note = Description of Artificial Sequence: Synthetic oligonucleotide
  misc_feature 1..20: note = Target: SCN10A; (+) strand; PAM type: NRG; PAM sequence: CAG
  source 1..20: mol_type = other DNA
aggtcatcccctgcttattg

SEQ ID NO: 35748 - DNA, 20 bp, synthetic construct
  misc_feature 1..20: note = Description of Artificial Sequence: Synthetic oligonucleotide
  misc_feature 1..20: note = Target: SCN10A; (+) strand; PAM type: NRG; PAM sequence: AAG
  source 1..20: mol_type = other DNA
atcccctgcttattgcagac

SEQ ID NO: 35749 - DNA, 20 bp, synthetic construct
  misc_feature 1..20: note = Description of Artificial Sequence: Synthetic oligonucleotide
  misc_feature 1..20: note = Target: SCN10A; (+) strand; PAM type: NRG; PAM sequence: AGG
  source 1..20: mol_type = other DNA
tcccctgcttattgcagaca

SEQ ID NO: 35750 - DNA, 20 bp, synthetic construct
  misc_feature 1..20: note = Description of Artificial Sequence: Synthetic oligonucleotide
  misc_feature 1..20: note = Target: SCN10A; (+) strand; PAM type: NRG; PAM sequence: TAG
  source 1..20: mol_type = other DNA
cctgcttattgcagacaagg

SEQ ID NO: 35751 - DNA, 20 bp, synthetic construct
  misc_feature 1..20: note = Description of Artificial Sequence: Synthetic oligonucleotide
  misc_feature 1..20: note = Target: SCN10A; (+) strand; PAM type: NRG; PAM sequence: CAG
  source 1..20: mol_type = other DNA
ttattgcagacaaggtagcc

SEQ ID NO: 35752 - DNA, 20 bp, synthetic construct
  misc_feature 1..20: note = Description of Artificial Sequence: Synthetic oligonucleotide
  misc_feature 1..20: note = Target: SCN10A; (+) strand; PAM type: NRG; PAM sequence: AGG
  source 1..20: mol_type = other DNA
tattgcagacaaggtagccc

SEQ ID NO: 35753 - DNA, 20 bp, synthetic construct
  misc_feature 1..20: note = Description of Artificial Sequence: Synthetic oligonucleotide
  misc_feature 1..20: note = Target: SCN10A; (+) strand; PAM type: NRG; PAM sequence: GGG
  source 1..20: mol_type = other DNA
attgcagacaaggtagccca

SEQ ID NO: 35754 - DNA, 20 bp, synthetic construct
  misc_feature 1..20: note = Description of Artificial Sequence: Synthetic oligonucleotide
  misc_feature 1..20: note = Target: SCN10A; (+) strand; PAM type: NRG; PAM sequence: GAG
  source 1..20: mol_type = other DNA
acaaggtagcccagggctgc

SEQ ID NO: 35755 - DNA, 20 bp, synthetic construct
  misc_feature 1..20: note = Description of Artificial Sequence: Synthetic oligonucleotide
  misc_feature 1..20: note = Target: SCN10A; (+) strand; PAM type: NRG; PAM sequence: CAG
  source 1..20: mol_type = other DNA
ccagggctgcgagacaacca

SEQ ID NO: 35756 - DNA, 20 bp, synthetic construct
  misc_feature 1..20: note = Description of Artificial Sequence: Synthetic oligonucleotide
  misc_feature 1..20: note = Target: SCN10A; (+) strand; PAM type: NRG; PAM sequence: GAG
  source 1..20: mol_type = other DNA
agggctgcgagacaaccaca

SEQ ID NO: 35757 - DNA, 20 bp, synthetic construct
  misc_feature 1..20: note = Description of Artificial Sequence: Synthetic oligonucleotide
  misc_feature 1..20: note = Target: SCN10A; (+) strand; PAM type: NRG; PAM sequence: CAG
  source 1..20: mol_type = other DNA
acaaccacagagttttatgt

SEQ ID NO: 35758 - DNA, 20 bp, synthetic construct
  misc_feature 1..20: note = Description of Artificial Sequence: Synthetic oligonucleotide
  misc_feature 1..20: note = Target: SCN10A; (+) strand; PAM type: NRG; PAM sequence: GAG
  source 1..20: mol_type = other DNA
aaccacagagttttatgtca

SEQ ID NO: 35759 - DNA, 20 bp, synthetic construct
  misc_feature 1..20: note = Description of Artificial Sequence: Synthetic oligonucleotide
  misc_feature 1..20: note = Target: SCN10A; (+) strand; PAM type: NRG; PAM sequence: CAG
  source 1..20: mol_type = other DNA
cagagttttatgtcagagat

SEQ ID NO: 35760 - DNA, 20 bp, synthetic construct
  misc_feature 1..20: note = Description of Artificial Sequence: Synthetic oligonucleotide
  misc_feature 1..20: note = Target: SCN10A; (+) strand; PAM type: NRG; PAM sequence: GAG
  source 1..20: mol_type = other DNA
gagttttatgtcagagatca

SEQ ID NO: 35761 - DNA, 20 bp, synthetic construct
  misc_feature 1..20: note = Description of Artificial Sequence: Synthetic oligonucleotide
  misc_feature 1..20: note = Target: SCN10A; (+) strand; PAM type: NRG; PAM sequence: AAG
  source 1..20: mol_type = other DNA
tatgtcagagatcagagttc

SEQ ID NO: 35762 - DNA, 20 bp, synthetic construct
  misc_feature 1..20: note = Description of Artificial Sequence: Synthetic oligonucleotide
  misc_feature 1..20: note = Target: SCN10A; (+) strand; PAM type: NRG; PAM sequence: TAG
  source 1..20: mol_type = other DNA
agagatcagagttcaagacc

SEQ ID NO: 35763 - DNA, 20 bp, synthetic construct
  misc_feature 1..20: note = Description of Artificial Sequence: Synthetic oligonucleotide
  misc_feature 1..20: note = Target: SCN10A; (+) strand; PAM type: NRG; PAM sequence: TAG
  source 1..20: mol_type = other DNA
agacctagtcttcctcttat

SEQ ID NO: 35764 - DNA, 20 bp, synthetic construct
  misc_feature 1..20: note = Description of Artificial Sequence: Synthetic oligonucleotide
  misc_feature 1..20: note = Target: SCN10A; (+) strand; PAM type: NRG; PAM sequence: CAG
  source 1..20: mol_type = other DNA
cctagtcttcctcttattag

SEQ ID NO: 35765 - DNA, 20 bp, synthetic construct
  misc_feature 1..20: note = Description of Artificial Sequence: Synthetic oligonucleotide
  misc_feature 1..20: note = Target: SCN10A; (+) strand; PAM type: NRG; PAM sequence: AGG
  source 1..20: mol_type = other DNA
ctagtcttcctcttattagc

SEQ ID NO: 35766 - DNA, 20 bp, synthetic construct
  misc_feature 1..20: note = Description of Artificial Sequence: Synthetic oligonucleotide
  misc_feature 1..20: note = Target: SCN10A; (+) strand; PAM type: NRG; PAM sequence: TGG
  source 1..20: mol_type = other DNA
tcttattagcaggatgatct

SEQ ID NO: 35767 - DNA, 20 bp, synthetic construct
  misc_feature 1..20: note = Description of Artificial Sequence: Synthetic oligonucleotide
  misc_feature 1..20: note = Target: SCN10A; (+) strand; PAM type: NRG; PAM sequence: TGG
  source 1..20: mol_type = other DNA
gcaggatgatcttggacact

SEQ ID NO: 35768 - DNA, 20 bp, synthetic construct
  misc_feature 1..20: note = Description of Artificial Sequence: Synthetic oligonucleotide
  misc_feature 1..20: note = Target: SCN10A; (+) strand; PAM type: NRG; PAM sequence: TAG
  source 1..20: mol_type = other DNA
tcttggacacttggtctgtt

SEQ ID NO: 35769 - DNA, 20 bp, synthetic construct
  misc_feature 1..20: note = Description of Artificial Sequence: Synthetic oligonucleotide
  misc_feature 1..20: note = Target: SCN10A; (+) strand; PAM type: NRG; PAM sequence: AGG
  source 1..20: mol_type = other DNA
cttggacacttggtctgttt

SEQ ID NO: 35770 - DNA, 20 bp, synthetic construct
  misc_feature 1..20: note = Description of Artificial Sequence: Synthetic oligonucleotide
  misc_feature 1..20: note = Target: SCN10A; (+) strand; PAM type: NRG; PAM sequence: TGG
  source 1..20: mol_type = other DNA
cacttggtctgtttaggtat

SEQ ID NO: 35771 - DNA, 20 bp, synthetic construct
  misc_feature 1..20: note = Description of Artificial Sequence: Synthetic oligonucleotide
  misc_feature 1..20: note = Target: SCN10A; (+) strand; PAM type: NRG; PAM sequence: CGG
  source 1..20: mol_type = other DNA
ggtttctgttatccataaaa

SEQ ID NO: 35772 - DNA, 20 bp, synthetic construct
  misc_feature 1..20: note = Description of Artificial Sequence: Synthetic oligonucleotide
  misc_feature 1..20: note = Target: SCN10A; (+) strand; PAM type: NRG; PAM sequence: GGG
  source 1..20: mol_type = other DNA
gtttctgttatccataaaac

SEQ ID NO: 35773 - DNA, 20 bp, synthetic construct
  misc_feature 1..20: note = Description of Artificial Sequence: Synthetic oligonucleotide
  misc_feature 1..20: note = Target: SCN10A; (+) strand; PAM type: NRG; PAM sequence: GGG
  source 1..20: mol_type = other DNA
tttctgttatccataaaacg

SEQ ID NO: 35774 - DNA, 20 bp, synthetic construct
  misc_feature 1..20: note = Description of Artificial Sequence: Synthetic oligonucleotide
  misc_feature 1..20: note = Target: SCN10A; (+) strand; PAM type: NRG; PAM sequence: CAG
  source 1..20: mol_type = other DNA
ggacgctaatactttcacgt

SEQ ID NO: 35775 - DNA, 20 bp, synthetic construct
  misc_feature 1..20: note = Description of Artificial Sequence: Synthetic oligonucleotide
  misc_feature 1..20: note = Target: SCN10A; (+) strand; PAM type: NRG; PAM sequence: CAG
  source 1..20: mol_type = other DNA
tcacgtcagaatttcataca

SEQ ID NO: 35776 - DNA, 20 bp, synthetic construct
  misc_feature 1..20: note = Description of Artificial Sequence: Synthetic oligonucleotide
  misc_feature 1..20: note = Target: SCN10A; (+) strand; PAM type: NRG; PAM sequence: AGG
  source 1..20: mol_type = other DNA
cacgtcagaatttcatacac

SEQ ID NO: 35777 - DNA, 20 bp, synthetic construct
  misc_feature 1..20: note = Description of Artificial Sequence: Synthetic oligonucleotide
  misc_feature 1..20: note = Target: SCN10A; (+) strand; PAM type: NRG; PAM sequence: GGG
  source 1..20: mol_type = other DNA
acgtcagaatttcatacaca

SEQ ID NO: 35778 - DNA, 20 bp, synthetic construct
  misc_feature 1..20: note = Description of Artificial Sequence: Synthetic oligonucleotide
  misc_feature 1..20: note = Target: SCN10A; (+) strand; PAM type: NRG; PAM sequence: GGG
  source 1..20: mol_type = other DNA
cgtcagaatttcatacacag

SEQ ID NO: 35779 - DNA, 20 bp, synthetic construct
  misc_feature 1..20: note = Description of Artificial Sequence: Synthetic oligonucleotide
  misc_feature 1..20: note = Target: SCN10A; (+) strand; PAM type: NRG; PAM sequence: GAG
  source 1..20: mol_type = other DNA
tcagaatttcatacacaggg

SEQ ID NO: 35780 - DNA, 20 bp, synthetic construct
  misc_feature 1..20: note = Description of Artificial Sequence: Synthetic oligonucleotide
  misc_feature 1..20: note = Target: SCN10A; (+) strand; PAM type: NRG; PAM sequence: TGG
  source 1..20: mol_type = other DNA
gaatttcatacacaggggag

SEQ ID NO: 35781 - DNA, 20 bp, synthetic construct
  misc_feature 1..20: note = Description of Artificial Sequence: Synthetic oligonucleotide
  misc_feature 1..20: note = Target: SCN10A; (+) strand; PAM type: NRG; PAM sequence: TGG
  source 1..20: mol_type = other DNA
tcatacacaggggagtggcc

SEQ ID NO: 35782 - DNA, 20 bp, synthetic construct
  misc_feature 1..20: note = Description of Artificial Sequence: Synthetic oligonucleotide
  misc_feature 1..20: note = Target: SCN10A; (+) strand; PAM type: NRG; PAM sequence: GGG
  source 1..20: mol_type = other DNA
catacacaggggagtggcct

SEQ ID NO: 35783 - DNA, 20 bp, synthetic construct
  misc_feature 1..20: note = Description of Artificial Sequence: Synthetic oligonucleotide
  misc_feature 1..20: note = Target: SCN10A; (+) strand; PAM type: NRG; PAM sequence: GGG
  source 1..20: mol_type = other DNA
atacacaggggagtggcctg

SEQ ID NO: 35784 - DNA, 20 bp, synthetic construct
  misc_feature 1..20: note = Description of Artificial Sequence: Synthetic oligonucleotide
  misc_feature 1..20: note = Target: SCN10A; (+) strand; PAM type: NRG; PAM sequence: AAG
  source 1..20: mol_type = other DNA
cacaggggagtggcctgggg

SEQ ID NO: 35785 - DNA, 20 bp, synthetic construct
  misc_feature 1..20: note = Description of Artificial Sequence: Synthetic oligonucleotide
  misc_feature 1..20: note = Target: SCN10A; (+) strand; PAM type: NRG; PAM sequence: AGG
  source 1..20: mol_type = other DNA
acaggggagtggcctgggga

SEQ ID NO: 35786 - DNA, 20 bp, synthetic construct
  misc_feature 1..20: note = Description of Artificial Sequence: Synthetic oligonucleotide
  misc_feature 1..20: note = Target: SCN10A; (+) strand; PAM type: NRG; PAM sequence: CAG
  source 1..20: mol_type = other DNA
ggggagtggcctggggaagg

SEQ ID NO: 35787 - DNA, 20 bp, synthetic construct
  misc_feature 1..20: note = Description of Artificial Sequence: Synthetic oligonucleotide
  misc_feature 1..20: note = Target: SCN10A; (+) strand; PAM type: NRG; PAM sequence: CAG
  source 1..20: mol_type = other DNA
ggggaaggcagctgactgcc

SEQ ID NO: 35788 - DNA, 20 bp, synthetic construct
  misc_feature 1..20: note = Description of Artificial Sequence: Synthetic oligonucleotide
  misc_feature 1..20: note = Target: SCN10A; (+) strand; PAM type: NRG; PAM sequence: AAG
  source 1..20: mol_type = other DNA
ctgcccagacacgatactat

SEQ ID NO: 35789 - DNA, 20 bp, synthetic construct
  misc_feature 1..20: note = Description of Artificial Sequence: Synthetic oligonucleotide
  misc_feature 1..20: note = Target: SCN10A; (+) strand; PAM type: NRG; PAM sequence: CAG
  source 1..20: mol_type = other DNA
cgatactataagctctttgc

SEQ ID NO: 35790 - DNA, 20 bp, synthetic construct
  misc_feature 1..20: note = Description of Artificial Sequence: Synthetic oligonucleotide
  misc_feature 1..20: note = Target: SCN10A; (+) strand; PAM type: NRG; PAM sequence: CAG
  source 1..20: mol_type = other DNA
agctctttgccagttcatac

SEQ ID NO: 35791 - DNA, 20 bp, synthetic construct
  misc_feature 1..20: note = Description of Artificial Sequence: Synthetic oligonucleotide
  misc_feature 1..20: note = Target: SCN10A; (+) strand; PAM type: NRG; PAM sequence: AGG
  source 1..20: mol_type = other DNA
gctctttgccagttcatacc

SEQ ID NO: 35792 - DNA, 20 bp, synthetic construct
  misc_feature 1..20: note = Description of Artificial Sequence: Synthetic oligonucleotide
  misc_feature 1..20: note = Target: SCN10A; (+) strand; PAM type: NRG; PAM sequence: GGG
  source 1..20: mol_type = other DNA
ctctttgccagttcatacca

SEQ ID NO: 35793 - DNA, 20 bp, synthetic construct
  misc_feature 1..20: note = Description of Artificial Sequence: Synthetic oligonucleotide
  misc_feature 1..20: note = Target: SCN10A; (+) strand; PAM type: NRG; PAM sequence: GAG
  source 1..20: mol_type = other DNA
ccagttcataccagggaaat

SEQ ID NO: 35794 - DNA, 20 bp, synthetic construct
  misc_feature 1..20: note = Description of Artificial Sequence: Synthetic oligonucleotide
  misc_feature 1..20: note = Target: SCN10A; (+) strand; PAM type: NRG; PAM sequence: GAG
  source 1..20: mol_type = other DNA
agttcataccagggaaatga

SEQ ID NO: 35795 - DNA, 20 bp, synthetic construct
  misc_feature 1..20: note = Description of Artificial Sequence: Synthetic oligonucleotide
  misc_feature 1..20: note = Target: SCN10A; (+) strand; PAM type: NRG; PAM sequence: CAG
  source 1..20: mol_type = other DNA
cataccagggaaatgagagt

SEQ ID NO: 35796 - DNA, 20 bp, synthetic construct
  misc_feature 1..20: note = Description of Artificial Sequence: Synthetic oligonucleotide
  misc_feature 1..20: note = Target: SCN10A; (+) strand; PAM type: NRG; PAM sequence: TAG
  source 1..20: mol_type = other DNA
accagggaaatgagagtcag

SEQ ID NO: 35797 - DNA, 20 bp, synthetic construct
  misc_feature 1..20: note = Description of Artificial Sequence: Synthetic oligonucleotide
  misc_feature 1..20: note = Target: SCN10A; (+) strand; PAM type: NRG; PAM sequence: CAG
  source 1..20: mol_type = other DNA
gagagtcagtagcaataacg

SEQ ID NO: 35798 - DNA, 20 bp, synthetic construct
  misc_feature 1..20: note = Description of Artificial Sequence: Synthetic oligonucleotide
  misc_feature 1..20: note = Target: SCN10A; (+) strand; PAM type: NRG; PAM sequence: GAG
  source 1..20: mol_type = other DNA
ataacgcagacttaaaacct

SEQ ID NO: 35799 - DNA, 20 bp, synthetic construct
  misc_feature 1..20: note = Description of Artificial Sequence: Synthetic oligonucleotide
  misc_feature 1..20: note = Target: SCN10A; (+) strand; PAM type: NRG; PAM sequence: TGG
  source 1..20: mol_type = other DNA
gacttaaaacctgagcctgt

SEQ ID NO: 35800 - DNA, 20 bp, synthetic construct
  misc_feature 1..20: note = Description of Artificial Sequence: Synthetic oligonucleotide
  misc_feature 1..20: note = Target: SCN10A; (+) strand; PAM type: NRG; PAM sequence: CAG
  source 1..20: mol_type = other DNA
gagcctgttggcatcatctg

SEQ ID NO: 35801 - DNA, 20 bp, synthetic construct
  misc_feature 1..20: note = Description of Artificial Sequence: Synthetic oligonucleotide
  misc_feature 1..20: note = Target: SCN10A; (+) strand; PAM type: NRG; PAM sequence: GAG
  source 1..20: mol_type = other DNA
gcctgttggcatcatctgca

SEQ ID NO: 35802 - DNA, 20 bp, synthetic construct
  misc_feature 1..20: note = Description of Artificial Sequence: Synthetic oligonucleotide
  misc_feature 1..20: note = Target: SCN10A; (+) strand; PAM type: NRG; PAM sequence: AAG
  source 1..20: mol_type = other DNA
catctgcagagttgtctatc

SEQ ID NO: 35803 - DNA, 20 bp, synthetic construct
  misc_feature 1..20: note = Description of Artificial Sequence: Synthetic oligonucleotide
  misc_feature 1..20: note = Target: SCN10A; (+) strand; PAM type: NRG; PAM sequence: AGG
  source 1..20: mol_type = other DNA
atctgcagagttgtctatca

SEQ ID NO: 35804 - DNA, 20 bp, synthetic construct
  misc_feature 1..20: note = Description of Artificial Sequence: Synthetic oligonucleotide
  misc_feature 1..20: note = Target: SCN10A; (+) strand; PAM type: NRG; PAM sequence: GGG
  source 1..20: mol_type = other DNA
tctgcagagttgtctatcaa

SEQ ID NO: 35805 - DNA, 20 bp, synthetic construct
  misc_feature 1..20: note = Description of Artificial Sequence: Synthetic oligonucleotide
  misc_feature 1..20: note = Target: SCN10A; (+) strand; PAM type: NRG; PAM sequence: GAG
  source 1..20: mol_type = other DNA
tgcagagttgtctatcaagg

SEQ ID NO: 35806 - DNA, 20 bp, synthetic construct
  misc_feature 1..20: note = Description of Artificial Sequence: Synthetic oligonucleotide
  misc_feature 1..20: note = Target: SCN10A; (+) strand; PAM type: NRG; PAM sequence: AGG
  source 1..20: mol_type = other DNA
gcagagttgtctatcaaggg

SEQ ID NO: 35807 - DNA, 20 bp, synthetic construct
  misc_feature 1..20: note = Description of Artificial Sequence: Synthetic oligonucleotide
  misc_feature 1..20: note = Target: SCN10A; (+) strand; PAM type: NRG; PAM sequence: TAG
  source 1..20: mol_type = other DNA
tatcaagggaggtctcacat

SEQ ID NO: 35808 - DNA, 20 bp, synthetic construct
  misc_feature 1..20: note = Description of Artificial Sequence: Synthetic oligonucleotide
  misc_feature 1..20: note = Target: SCN10A; (+) strand; PAM type: NRG; PAM sequence: AAG
  source 1..20: mol_type = other DNA
agggaggtctcacattagcc

SEQ ID NO: 35809 - DNA, 20 bp, synthetic construct
  misc_feature 1..20: note = Description of Artificial Sequence: Synthetic oligonucleotide
  misc_feature 1..20: note = Target: SCN10A; (+) strand; PAM type: NRG; PAM sequence: CAG
  source 1..20: mol_type = other DNA
cactgattaattatatgtaa

SEQ ID NO: 35810 - DNA, 20 bp, synthetic construct
  misc_feature 1..20: note = Description of Artificial Sequence: Synthetic oligonucleotide
  misc_feature 1..20: note = Target: SCN10A; (+) strand; PAM type: NRG; PAM sequence: TGG
  source 1..20: mol_type = other DNA
tgattaattatatgtaacag

SEQ ID NO: 35811 - DNA, 20 bp, synthetic construct
  misc_feature 1..20: note = Description of Artificial Sequence: Synthetic oligonucleotide
  misc_feature 1..20: note = Target: SCN10A; (+) strand; PAM type: NRG; PAM sequence: GAG
  source 1..20: mol_type = other DNA
aataacactttccacttact

SEQ ID NO: 35812 - DNA, 20 bp, synthetic construct
  misc_feature 1..20: note = Description of Artificial Sequence: Synthetic oligonucleotide
  misc_feature 1..20: note = Target: SCN10A; (+) strand; PAM type: NRG; PAM sequence: AAG
  source 1..20: mol_type = other DNA
gtgttcttctctctcccttt

SEQ ID NO: 35813 - DNA, 20 bp, synthetic construct
  misc_feature 1..20: note = Description of Artificial Sequence: Synthetic oligonucleotide
  misc_feature 1..20: note = Target: SCN10A; (+) strand; PAM type: NRG; PAM sequence: CAG
  source 1..20: mol_type = other DNA
cactcaatgttctttcttta

SEQ ID NO: 35814 - DNA, 20 bp, synthetic construct
  misc_feature 1..20: note = Description of Artificial Sequence: Synthetic oligonucleotide
  misc_feature 1..20: note = Target: SCN10A; (+) strand; PAM type: NRG; PAM sequence: AAG
  source 1..20: mol_type = other DNA
aatgttctttctttacagat

SEQ ID NO: 35815 - DNA, 20 bp, synthetic construct
  misc_feature 1..20: note = Description of Artificial Sequence: Synthetic oligonucleotide
  misc_feature 1..20: note = Target: SCN10A; (+) strand; PAM type: NRG; PAM sequence: AGG
  source 1..20: mol_type = other DNA
atgttctttctttacagata

SEQ ID NO: 35816 - DNA, 20 bp, synthetic construct
  misc_feature 1..20: note = Description of Artificial Sequence: Synthetic oligonucleotide
  misc_feature 1..20: note = Target: SCN10A; (+) strand; PAM type: NRG; PAM sequence: TGG
  source 1..20: mol_type = other DNA
ttctttacagataaggaatc

SEQ ID NO: 35817 - DNA, 20 bp, synthetic construct
  misc_feature 1..20: note = Description of Artificial Sequence: Synthetic oligonucleotide
  misc_feature 1..20: note = Target: SCN10A; (+) strand; PAM type: NRG; PAM sequence: GGG
  source 1..20: mol_type = other DNA
tctttacagataaggaatct

SEQ ID NO: 35818 - DNA, 20 bp, synthetic construct
  misc_feature 1..20: note = Description of Artificial Sequence: Synthetic oligonucleotide
  misc_feature 1..20: note = Target: SCN10A; (+) strand; PAM type: NRG; PAM sequence: GGG
  source 1..20: mol_type = other DNA
ctttacagataaggaatctg

SEQ ID NO: 35819 - DNA, 20 bp, synthetic construct
  misc_feature 1..20: note = Description of Artificial Sequence: Synthetic oligonucleotide
  misc_feature 1..20: note = Target: SCN10A; (+) strand; PAM type: NRG; PAM sequence: GGG
  source 1..20: mol_type = other DNA
tttacagataaggaatctgg

SEQ ID NO: 35820 - DNA, 20 bp, synthetic construct
  misc_feature 1..20: note = Description of Artificial Sequence: Synthetic oligonucleotide
  misc_feature 1..20: note = Target: SCN10A; (+) strand; PAM type: NRG; PAM sequence: CAG
  source 1..20: mol_type = other DNA
cagataaggaatctgggggt

SEQ ID NO: 35821 - DNA, 20 bp, synthetic construct
  misc_feature 1..20: note = Description of Artificial Sequence: Synthetic oligonucleotide
  misc_feature 1..20: note = Target: SCN10A; (+) strand; PAM type: NRG; PAM sequence: AAG
  source 1..20: mol_type = other DNA
taaggaatctgggggtcaga

SEQ ID NO: 35822 - DNA, 20 bp, synthetic construct
  misc_feature 1..20: note = Description of Artificial Sequence: Synthetic oligonucleotide
  misc_feature 1..20: note = Target: SCN10A; (+) strand; PAM type: NRG; PAM sequence: AAG
  source 1..20: mol_type = other DNA
ggaatctgggggtcagaaag

SEQ ID NO: 35823 - DNA, 20 bp, synthetic construct
  misc_feature 1..20: note = Description of Artificial Sequence: Synthetic oligonucleotide
  misc_feature 1..20: note = Target: SCN10A; (+) strand; PAM type: NRG; PAM sequence: CAG
  source 1..20: mol_type = other DNA
tctgggggtcagaaagaagt

SEQ ID NO: 35824 - DNA, 20 bp, synthetic construct
  misc_feature 1..20: note = Description of Artificial Sequence: Synthetic oligonucleotide
  misc_feature 1..20: note = Target: SCN10A; (+) strand; PAM type: NRG; PAM sequence: CAG
  source 1..20: mol_type = other DNA
gtcagttgcctaaaactacg

SEQ ID NO: 35825 - DNA, 20 bp, synthetic construct
  misc_feature 1..20: note = Description of Artificial Sequence: Synthetic oligonucleotide
  misc_feature 1..20: note = Target: SCN10A; (+) strand; PAM type: NRG; PAM sequence: AGG
  source 1..20: mol_type = other DNA
tcagttgcctaaaactacgc

SEQ ID NO: 35826 - DNA, 20 bp, synthetic construct
  misc_feature 1..20: note = Description of Artificial Sequence: Synthetic oligonucleotide
  misc_feature 1..20: note = Target: SCN10A; (+) strand; PAM type: NRG; PAM sequence: AAG
  source 1..20: mol_type = other DNA
ggtgtcaatatatttattaa

SEQ ID NO: 35827 - DNA, 20 bp, synthetic construct
  misc_feature 1..20: note = Description of Artificial Sequence: Synthetic oligonucleotide
  misc_feature 1..20: note = Target: SCN10A; (+) strand; PAM type: NRG; PAM sequence: AGG
  source 1..20: mol_type = other DNA
gtgtcaatatatttattaaa

SEQ ID NO: 35828 - DNA, 20 bp, synthetic construct
  misc_feature 1..20: note = Description of Artificial Sequence: Synthetic oligonucleotide
  misc_feature 1..20: note = Target: SCN10A; (+) strand; PAM type: NRG; PAM sequence: GAG
  source 1..20: mol_type = other DNA
gtcaatatatttattaaaag

SEQ ID NO: 35829 - DNA, 20 bp, synthetic construct
  misc_feature 1..20: note = Description of Artificial Sequence: Synthetic oligonucleotide
  misc_feature 1..20: note = Target: SCN10A; (+) strand; PAM type: NRG; PAM sequence: AAG
  source 1..20: mol_type = other DNA
aaaggagaaatataactgtc

SEQ ID NO: 35830 - DNA, 20 bp, synthetic construct
  misc_feature 1..20: note = Description of Artificial Sequence: Synthetic oligonucleotide
  misc_feature 1..20: note = Target: SCN10A; (+) strand; PAM type: NRG; PAM sequence: TAG
  source 1..20: mol_type = other DNA
ggagaaatataactgtcaag

SEQ ID NO: 35831 - DNA, 20 bp, synthetic construct
  misc_feature 1..20: note = Description of Artificial Sequence: Synthetic oligonucleotide
  misc_feature 1..20: note = Target: SCN10A; (+) strand; PAM type: NRG; PAM sequence: GAG
  source 1..20: mol_type = other DNA
tgtcaagtagcccaatactt

SEQ ID NO: 35832 - DNA, 20 bp, synthetic construct
  misc_feature 1..20: note = Description of Artificial Sequence: Synthetic oligonucleotide
  misc_feature 1..20: note = Target: SCN10A; (+) strand; PAM type: NRG; PAM sequence: CAG
  source 1..20: mol_type = other DNA
aagtagcccaatacttgagt

SEQ ID NO: 35833 - DNA, 20 bp, synthetic construct
  misc_feature 1..20: note = Description of Artificial Sequence: Synthetic oligonucleotide
  misc_feature 1..20: note = Target: SCN10A; (+) strand; PAM type: NRG; PAM sequence: TAG
  source 1..20: mol_type = other DNA
gcccaatacttgagtcagcc

SEQ ID NO: 35834 - DNA, 20 bp, synthetic construct
  misc_feature 1..20: note = Description of Artificial Sequence: Synthetic oligonucleotide
  misc_feature 1..20: note = Target: SCN10A; (+) strand; PAM type: NRG; PAM sequence: AAG
  source 1..20: mol_type = other DNA
gtcagcctagcctcctcctg

SEQ ID NO: 35835 - DNA, 20 bp, synthetic construct
  misc_feature 1..20: note = Description of Artificial Sequence: Synthetic oligonucleotide
  misc_feature 1..20: note = Target: SCN10A; (+) strand; PAM type: NRG; PAM sequence: TGG
  source 1..20: mol_type = other DNA
gcctagcctcctcctgaaga

SEQ ID NO: 35836 - DNA, 20 bp, synthetic construct
  misc_feature 1..20: note = Description of Artificial Sequence: Synthetic oligonucleotide
  misc_feature 1..20: note = Target: SCN10A; (+) strand; PAM type: NRG; PAM sequence: AAG
  source 1..20: mol_type = other DNA
cctcctgaagatggcctatg

SEQ ID NO: 35837 - DNA, 20 bp, synthetic construct
  misc_feature 1..20: note = Description of Artificial Sequence: Synthetic oligonucleotide
  misc_feature 1..20: note = Target: SCN10A; (+) strand; PAM type: NRG; PAM sequence: AGG
  source 1..20: mol_type = other DNA
ctcctgaagatggcctatga

SEQ ID NO: 35838 - DNA, 20 bp, synthetic construct
  misc_feature 1..20: note = Description of Artificial Sequence: Synthetic oligonucleotide
  misc_feature 1..20: note = Target: SCN10A; (+) strand; PAM type: NRG; PAM sequence: AAG
  source 1..20: mol_type = other DNA
ctgaagatggcctatgaagg

SEQ ID NO: 35839 - DNA, 20 bp, synthetic construct
  misc_feature 1..20: note = Description of Artificial Sequence: Synthetic oligonucleotide
  misc_feature 1..20: note = Target: SCN10A; (+) strand; PAM type: NRG; PAM sequence: AGG
  source 1..20: mol_type = other DNA
tgaagatggcctatgaagga

SEQ ID NO: 35840 - DNA, 20 bp, synthetic construct
  misc_feature 1..20: note = Description of Artificial Sequence: Synthetic oligonucleotide
  misc_feature 1..20: note = Target: SCN10A; (+) strand; PAM type: NRG; PAM sequence: CAG
  source 1..20: mol_type = other DNA
gatggcctatgaaggaaggc

SEQ ID NO: 35841 - DNA, 20 bp, synthetic construct
  misc_feature 1..20: note = Description of Artificial Sequence: Synthetic oligonucleotide
  misc_feature 1..20: note = Target: SCN10A; (+) strand; PAM type: NRG; PAM sequence: TGG
  source 1..20: mol_type = other DNA
ccagattaaaaatgactgcc

SEQ ID NO: 35842 - DNA, 20 bp, synthetic construct
  misc_feature 1..20: note = Description of Artificial Sequence: Synthetic oligonucleotide
  misc_feature 1..20: note = Target: SCN10A; (+) strand; PAM type: NRG; PAM sequence: GAG
  source 1..20: mol_type = other DNA
attaaaaatgactgcctggt

SEQ ID NO: 35843 - DNA, 20 bp, synthetic construct
  misc_feature 1..20: note = Description of Artificial Sequence: Synthetic oligonucleotide
  misc_feature 1..20: note = Target: SCN10A; (+) strand; PAM type: NRG; PAM sequence: GAG
  source 1..20: mol_type = other DNA
atgactgcctggtgagtatt

SEQ ID NO: 35844 - DNA, 20 bp, synthetic construct
  misc_feature 1..20: note = Description of Artificial Sequence: Synthetic oligonucleotide
  misc_feature 1..20: note = Target: SCN10A; (+) strand; PAM type: NRG; PAM sequence: AGG
  source 1..20: mol_type = other DNA
tgactgcctggtgagtattg

SEQ ID NO: 35845 - DNA, 20 bp, synthetic construct
  misc_feature 1..20: note = Description of Artificial Sequence: Synthetic oligonucleotide
  misc_feature 1..20: note = Target: SCN10A; (+) strand; PAM type: NRG; PAM sequence: TGG
  source 1..20: mol_type = other DNA
ctgcctggtgagtattgagg

SEQ ID NO: 35846 - DNA, 20 bp, synthetic construct
  misc_feature 1..20: note = Description of Artificial Sequence: Synthetic oligonucleotide
  misc_feature 1..20: note = Target: SCN10A; (+) strand; PAM type: NRG; PAM sequence: GGG
  source 1..20: mol_type = other DNA
tgcctggtgagtattgaggt

SEQ ID NO: 35847 - DNA, 20 bp, synthetic construct
  misc_feature 1..20: note = Description of Artificial Sequence: Synthetic oligonucleotide
  misc_feature 1..20: note = Target: SCN10A; (+) strand; PAM type: NRG; PAM sequence: TAG
  source 1..20: mol_type = other DNA
ctccttcctctctctcataa

SEQ ID NO: 35848 - DNA, 20 bp, synthetic construct
  misc_feature 1..20: note = Description of Artificial Sequence: Synthetic oligonucleotide
  misc_feature 1..20: note = Target: SCN10A; (+) strand; PAM type: NRG; PAM sequence: AGG
  source 1..20: mol_type = other DNA
tccttcctctctctcataat

SEQ ID NO: 35849 - DNA, 20 bp, synthetic construct
  misc_feature 1..20: note = Description of Artificial Sequence: Synthetic oligonucleotide
  misc_feature 1..20: note = Target: SCN10A; (+) strand; PAM type: NRG; PAM sequence: GAG
  source 1..20: mol_type = other DNA
cttcctctctctcataatag

SEQ ID NO: 35850 - DNA, 20 bp, synthetic construct
  misc_feature 1..20: note = Description of Artificial Sequence: Synthetic oligonucleotide
  misc_feature 1..20: note = Target: SCN10A; (+) strand; PAM type: NRG; PAM sequence: AGG
  source 1..20: mol_type = other DNA
ttcctctctctcataatagg

SEQ ID NO: 35851 - DNA, 20 bp, synthetic construct
  misc_feature 1..20: note = Description of Artificial Sequence: Synthetic oligonucleotide
  misc_feature 1..20: note = Target: SCN10A; (+) strand; PAM type: NRG; PAM sequence: GAG
  source 1..20: mol_type = other DNA
ctctctcataataggaggat

SEQ ID NO: 35852 - DNA, 20 bp, synthetic construct
  misc_feature 1..20: note = Description of Artificial Sequence: Synthetic oligonucleotide
  misc_feature 1..20: note = Target: SCN10A; (+) strand; PAM type: NRG; PAM sequence: AAG
  source 1..20: mol_type = other DNA
taggaggatgagtcgatgtc

SEQ ID NO: 35853 - DNA, 20 bp, synthetic construct
  misc_feature 1..20: note = Description of Artificial Sequence: Synthetic oligonucleotide
  misc_feature 1..20: note = Target: SCN10A; (+) strand; PAM type: NRG; PAM sequence: AAG
  source 1..20: mol_type = other DNA
gaggatgagtcgatgtcaag

SEQ ID NO: 35854 - DNA, 20 bp, synthetic construct
  misc_feature 1..20: note = Description of Artificial Sequence: Synthetic oligonucleotide
  misc_feature 1..20: note = Target: SCN10A; (+) strand; PAM type: NRG; PAM sequence: CAG
  source 1..20: mol_type = other DNA
cgatgtcaagaagcatctgt

SEQ ID NO: 35855 - DNA, 20 bp, synthetic construct
  misc_feature 1..20: note = Description of Artificial Sequence: Synthetic oligonucleotide
  misc_feature 1..20: note = Target: SCN10A; (+) strand; PAM type: NRG; PAM sequence: CAG
  source 1..20: mol_type = other DNA
tcaagaagcatctgtcagct

SEQ ID NO: 35856 - DNA, 20 bp, synthetic construct
  misc_feature 1..20: note = Description of Artificial Sequence: Synthetic oligonucleotide
  misc_feature 1..20: note = Target: SCN10A; (+) strand; PAM type: NRG; PAM sequence: AGG
  source 1..20: mol_type = other DNA
caagaagcatctgtcagctc

SEQ ID NO: 35857 - DNA, 20 bp, synthetic construct
  misc_feature 1..20: note = Description of Artificial Sequence: Synthetic oligonucleotide
  misc_feature 1..20: note = Target: SCN10A; (+) strand; PAM type: NRG; PAM sequence: GGG
  source 1..20: mol_type = other DNA
aagaagcatctgtcagctca

SEQ ID NO: 35858 - DNA, 20 bp, synthetic construct
  misc_feature 1..20: note = Description of Artificial Sequence: Synthetic oligonucleotide
  misc_feature 1..20: note = Target: SCN10A; (+) strand; PAM type: NRG; PAM sequence: GAG
  source 1..20: mol_type = other DNA
gaagcatctgtcagctcagg

SEQ ID NO: 35859 - DNA, 20 bp, synthetic construct
  misc_feature 1..20: note = Description of Artificial Sequence: Synthetic oligonucleotide
  misc_feature 1..20: note = Target: SCN10A; (+) strand; PAM type: NRG; PAM sequence: AAG
  source 1..20: mol_type = other DNA
ctgtcagctcagggagcgta

SEQ ID NO: 35860 - DNA, 20 bp, synthetic construct
  misc_feature 1..20: note = Description of Artificial Sequence: Synthetic oligonucleotide
  misc_feature 1..20: note = Target: SCN10A; (+) strand; PAM type: NRG; PAM sequence: TAG
  source 1..20: mol_type = other DNA
taaagtgctctcatccaccc

SEQ ID NO: 35861 - DNA, 20 bp, synthetic construct
  misc_feature 1..20: note = Description of Artificial Sequence: Synthetic oligonucleotide
  misc_feature 1..20: note = Target: SCN10A; (+) strand; PAM type: NRG; PAM sequence: CAG
  source 1..20: mol_type = other DNA
agtgctctcatccaccctag

SEQ ID NO: 35862 - DNA, 20 bp, synthetic construct
  misc_feature 1..20: note = Description of Artificial Sequence: Synthetic oligonucleotide
  misc_feature 1..20: note = Target: SCN10A; (+) strand; PAM type: NRG; PAM sequence: GAG
  source 1..20: mol_type = other DNA
tgctctcatccaccctagca

SEQ ID NO: 35863 - DNA, 20 bp, synthetic construct
  misc_feature 1..20: note = Description of Artificial Sequence: Synthetic oligonucleotide
  misc_feature 1..20: note = Target: SCN10A; (+) strand; PAM type: NRG; PAM sequence: TGG
  source 1..20: mol_type = other DNA
ctcatccaccctagcagaga

SEQ ID NO: 35864 - DNA, 20 bp, synthetic construct
  misc_feature 1..20: note = Description of Artificial Sequence: Synthetic oligonucleotide
  misc_feature 1..20: note = Target: SCN10A; (+) strand; PAM type: NRG; PAM sequence: CAG
  source 1..20: mol_type = other DNA
agatggcctgatcaatgaaa

SEQ ID NO: 35865 - DNA, 20 bp, synthetic construct
  misc_feature 1..20: note = Description of Artificial Sequence: Synthetic oligonucleotide
  misc_feature 1..20: note = Target: SCN10A; (+) strand; PAM type: NRG; PAM sequence: AAG
  source 1..20: mol_type = other DNA
aaacagcaatgcctcgtttg

SEQ ID NO: 35866 - DNA, 20 bp, synthetic construct
  misc_feature 1..20: note = Description of Artificial Sequence: Synthetic oligonucleotide
  misc_feature 1..20: note = Target: SCN10A; (+) strand; PAM type: NRG; PAM sequence: CAG
  source 1..20: mol_type = other DNA
gcaatgcctcgtttgaagtc

SEQ ID NO: 35867 - DNA, 20 bp, synthetic construct
  misc_feature 1..20: note = Description of Artificial Sequence: Synthetic oligonucleotide
  misc_feature 1..20: note = Target: SCN10A; (+) strand; PAM type: NRG; PAM sequence: TGG
  source 1..20: mol_type = other DNA
ctgcattccttgtgaataca

SEQ ID NO: 35868 - DNA, 20 bp, synthetic construct
  misc_feature 1..20: note = Description of Artificial Sequence: Synthetic oligonucleotide
  misc_feature 1..20: note = Target: SCN10A; (+) strand; PAM type: NRG; PAM sequence: CAG
  source 1..20: mol_type = other DNA
acatggaattcttttactcc

SEQ ID NO: 35869 - DNA, 20 bp, synthetic construct
  misc_feature 1..20: note = Description of Artificial Sequence: Synthetic oligonucleotide
  misc_feature 1..20: note = Target: SCN10A; (+) strand; PAM type: NRG; PAM sequence: AGG
  source 1..20: mol_type = other DNA
catggaattcttttactccc

SEQ ID NO: 35870 - DNA, 20 bp, synthetic construct
  misc_feature 1..20: note = Description of Artificial Sequence: Synthetic oligonucleotide
  misc_feature 1..20: note = Target: SCN10A; (+) strand; PAM type: NRG; PAM sequence: TGG
  source 1..20: mol_type = other DNA
tctccatgaactccaacctc

SEQ ID NO: 35871 - DNA, 20 bp, synthetic construct
  misc_feature 1..20: note = Description of Artificial Sequence: Synthetic oligonucleotide
  misc_feature 1..20: note = Target: SCN10A; (+) strand; PAM type: NRG; PAM sequence: GGG
  source 1..20: mol_type = other DNA
ctccatgaactccaacctct

SEQ ID NO: 35872 - DNA, 20 bp, synthetic construct
  misc_feature 1..20: note = Description of Artificial Sequence: Synthetic oligonucleotide
  misc_feature 1..20: note = Target: SCN10A; (+) strand; PAM type: NRG; PAM sequence: GGG
  source 1..20: mol_type = other DNA
tccatgaactccaacctctg

SEQ ID NO: 35873 - DNA, 20 bp, synthetic construct
  misc_feature 1..20: note = Description of Artificial Sequence: Synthetic oligonucleotide
  misc_feature 1..20: note = Target: SCN10A; (+) strand; PAM type: NRG; PAM sequence: CAG
  source 1..20: mol_type = other DNA
ctctggggctctccttatcc

SEQ ID NO: 35874 - DNA, 20 bp, synthetic construct
  misc_feature 1..20: note = Description of Artificial Sequence: Synthetic oligonucleotide
  misc_feature 1..20: note = Target: SCN10A; (+) strand; PAM type: NRG; PAM sequence: TGG
  source 1..20: mol_type = other DNA
catgtgaacaacccatacca

SEQ ID NO: 35875 - DNA, 20 bp, synthetic construct
  misc_feature 1..20: note = Description of Artificial Sequence: Synthetic oligonucleotide
  misc_feature 1..20: note = Target: SCN10A; (+) strand; PAM type: NRG; PAM sequence: TAG
  source 1..20: mol_type = other DNA
gaacaacccataccatggat

SEQ ID NO: 35876 - DNA, 20 bp, synthetic construct
  misc_feature 1..20: note = Description of Artificial Sequence: Synthetic oligonucleotide
  misc_feature 1..20: note = Target: SCN10A; (+) strand; PAM type: NRG; PAM sequence: GAG
  source 1..20: mol_type = other DNA
acaacccataccatggatta

SEQ ID NO: 35877 - DNA, 20 bp, synthetic construct
  misc_feature 1..20: note = Description of Artificial Sequence: Synthetic oligonucleotide
  misc_feature 1..20: note = Target: SCN10A; (+) strand; PAM type: NRG; PAM sequence: CAG
  source 1..20: mol_type = other DNA
tctgacaacttaattctaat

SEQ ID NO: 35878 - DNA, 20 bp, synthetic construct
  misc_feature 1..20: note = Description of Artificial Sequence: Synthetic oligonucleotide
  misc_feature 1..20: note = Target: SCN10A; (+) strand; PAM type: NRG; PAM sequence: AAG
  source 1..20: mol_type = other DNA
acttaattctaatcagttcc

SEQ ID NO: 35879 - DNA, 20 bp, synthetic construct
  misc_feature 1..20: note = Description of Artificial Sequence: Synthetic oligonucleotide
  misc_feature 1..20: note = Target: SCN10A; (+) strand; PAM type: NRG; PAM sequence: AAG
  source 1..20: mol_type = other DNA
gtctatctccacttcgattg

SEQ ID NO: 35880 - DNA, 20 bp, synthetic construct
  misc_feature 1..20: note = Description of Artificial Sequence: Synthetic oligonucleotide
  misc_feature 1..20: note = Target: SCN10A; (+) strand; PAM type: NRG; PAM sequence: AAG
  source 1..20: mol_type = other DNA
ccacttcgattgaagattgc

SEQ ID NO: 35881 - DNA, 20 bp, synthetic construct
  misc_feature 1..20: note = Description of Artificial Sequence: Synthetic oligonucleotide
  misc_feature 1..20: note = Target: SCN10A; (+) strand; PAM type: NRG; PAM sequence: TGG
  source 1..20: mol_type = other DNA
attgaagattgcaagttccc

SEQ ID NO: 35882 - DNA, 20 bp, synthetic construct
  misc_feature 1..20: note = Description of Artificial Sequence: Synthetic oligonucleotide
  misc_feature 1..20: note = Target: SCN10A; (+) strand; PAM type: NRG; PAM sequence: TAG
  source 1..20: mol_type = other DNA
ttgcaagttccctggctttg

SEQ ID NO: 35883 - DNA, 20 bp, synthetic construct
  misc_feature 1..20: note = Description of Artificial Sequence: Synthetic oligonucleotide
  misc_feature 1..20: note = Target: SCN10A; (+) strand; PAM type: NRG; PAM sequence: AAG
  source 1..20: mol_type = other DNA
gctttgtagacccacattta

SEQ ID NO: 35884 - DNA, 20 bp, synthetic construct
  misc_feature 1..20: note = Description of Artificial Sequence: Synthetic oligonucleotide
  misc_feature 1..20: note = Target: SCN10A; (+) strand; PAM type: NRG; PAM sequence: TAG
  source 1..20: mol_type = other DNA
tgtagacccacatttaaaga

SEQ ID NO: 35885 - DNA, 20 bp, synthetic construct
  misc_feature 1..20: note = Description of Artificial Sequence: Synthetic oligonucleotide
  misc_feature 1..20: note = Target: SCN10A; (+) strand; PAM type: NRG; PAM sequence: AGG
  source 1..20: mol_type = other DNA
gtagacccacatttaaagat

SEQ ID NO: 35886 - DNA, 20 bp, synthetic construct
  misc_feature 1..20: note = Description of Artificial Sequence: Synthetic oligonucleotide
  misc_feature 1..20: note = Target: SCN10A; (+) strand; PAM type: NRG; PAM sequence: TGG
  source 1..20: mol_type = other DNA
cacatttaaagataggctct

SEQ ID NO: 35887 - DNA, 20 bp, synthetic construct
  misc_feature 1..20: note = Description of Artificial Sequence: Synthetic oligonucleotide
  misc_feature 1..20: note = Target: SCN10A; (+) strand; PAM type: NRG; PAM sequence: AAG
  source 1..20: mol_type = other DNA
ggctcttggtttgctcttcc

SEQ ID NO: 35888 - DNA, 20 bp, synthetic construct
  misc_feature 1..20: note = Description of Artificial Sequence: Synthetic oligonucleotide
  misc_feature 1..20: note = Target: SCN10A; (+) strand; PAM type: NRG; PAM sequence: AGG
  source 1..20: mol_type = other DNA
gctcttggtttgctcttcca

SEQ ID NO: 35889 - DNA, 20 bp, synthetic construct
  misc_feature 1..20: note = Description of Artificial Sequence: Synthetic oligonucleotide
  misc_feature 1..20: note = Target: SCN10A; (+) strand; PAM type: NRG; PAM sequence: GGG
  source 1..20: mol_type = other DNA
ctcttggtttgctcttccaa

SEQ ID NO: 35890 - DNA, 20 bp, synthetic construct
  misc_feature 1..20: note = Description of Artificial Sequence: Synthetic oligonucleotide
  misc_feature 1..20: note = Target: SCN10A; (+) strand; PAM type: NRG; PAM sequence: GGG
  source 1..20: mol_type = other DNA
tcttggtttgctcttccaag

SEQ ID NO: 35891 - DNA, 20 bp, synthetic construct
  misc_feature 1..20: note = Description of Artificial Sequence: Synthetic oligonucleotide
  misc_feature 1..20: note = Target: SCN10A; (+) strand; PAM type: NRG; PAM sequence: TAG
  source 1..20: mol_type = other DNA
ggtttgctcttccaaggggc

SEQ ID NO: 35892 - DNA, 20 bp, synthetic construct
  misc_feature 1..20: note = Description of Artificial Sequence: Synthetic oligonucleotide
  misc_feature 1..20: note = Target: SCN10A; (+) strand; PAM type: NRG; PAM sequence: AGG
  source 1..20: mol_type = other DNA
gtttgctcttccaaggggct

SEQ ID NO: 35893 - DNA, 20 bp, synthetic construct
  misc_feature 1..20: note = Description of Artificial Sequence: Synthetic oligonucleotide
  misc_feature 1..20: note = Target: SCN10A; (+) strand; PAM type: NRG; PAM sequence: TAG
  source 1..20: mol_type = other DNA
gctaggcaacccatttcctg

SEQ ID NO: 35894 - DNA, 20 bp, synthetic construct
  misc_feature 1..20: note = Description of Artificial Sequence: Synthetic oligonucleotide
  misc_feature 1..20: note = Target: SCN10A; (+) strand; PAM type: NRG; PAM sequence: AGG
  source 1..20: mol_type = other DNA
ctaggcaacccatttcctgt

SEQ ID NO: 35895 - DNA, 20 bp, synthetic construct
  misc_feature 1..20: note = Description of Artificial Sequence: Synthetic oligonucleotide
  misc_feature 1..20: note = Target: SCN10A; (+) strand; PAM type: NRG; PAM sequence: GAG
  source 1..20: mol_type = other DNA
taggtttcttaattaactct

SEQ ID NO: 35896 - DNA, 20 bp, synthetic construct
  misc_feature 1..20: note = Description of Artificial Sequence: Synthetic oligonucleotide
  misc_feature 1..20: note = Target: SCN10A; (+) strand; PAM type: NRG; PAM sequence: AGG
  source 1..20: mol_type = other DNA
aggtttcttaattaactctg

SEQ ID NO: 35897 - DNA, 20 bp, synthetic construct
  misc_feature 1..20: note = Description of Artificial Sequence: Synthetic oligonucleotide
  misc_feature 1..20: note = Target: SCN10A; (+) strand; PAM type: NRG; PAM sequence: GGG
  source 1..20: mol_type = other DNA
ggtttcttaattaactctga

SEQ ID NO: 35898 - DNA, 20 bp, synthetic construct
  misc_feature 1..20: note = Description of Artificial Sequence: Synthetic oligonucleotide
  misc_feature 1..20: note = Target: SCN10A; (+) strand; PAM type: NRG; PAM sequence: CAG
  source 1..20: mol_type = other DNA
ttcttaattaactctgaggg

SEQ ID NO: 35899 - DNA, 20 bp, synthetic construct
  misc_feature 1..20: note = Description of Artificial Sequence: Synthetic oligonucleotide
  misc_feature 1..20: note = Target: SCN10A; (+) strand; PAM type: NRG; PAM sequence: TAG
  source 1..20: mol_type = other DNA
ccttgtttctatgtcttctg

SEQ ID NO: 35900 - DNA, 20 bp, synthetic construct
  misc_feature 1..20: note = Description of Artificial Sequence: Synthetic oligonucleotide
  misc_feature 1..20: note = Target: SCN10A; (+) strand; PAM type: NRG; PAM sequence: TAG
  source 1..20: mol_type = other DNA
tcttctgtagaaatccacca

SEQ ID NO: 35901 - DNA, 20 bp, synthetic construct
  misc_feature 1..20: note = Description of Artificial Sequence: Synthetic oligonucleotide
  misc_feature 1..20: note = Target: SCN10A; (+) strand; PAM type: NRG; PAM sequence: CAG
  source 1..20: mol_type = other DNA
ccatagccactgcatataaa

SEQ ID NO: 35902 - DNA, 20 bp, synthetic construct
  misc_feature 1..20: note = Description of Artificial Sequence: Synthetic oligonucleotide
  misc_feature 1..20: note = Target: SCN10A; (+) strand; PAM type: NRG; PAM sequence: GAG
  source 1..20: mol_type = other DNA
tataaacagttcactgctct

SEQ ID NO: 35903 - DNA, 20 bp, synthetic construct
  misc_feature 1..20: note = Description of Artificial Sequence: Synthetic oligonucleotide
  misc_feature 1..20: note = Target: SCN10A; (+) strand; PAM type: NRG; PAM sequence: AGG
  source 1..20: mol_type = other DNA
ataaacagttcactgctctg

SEQ ID NO: 35904 - DNA, 20 bp, synthetic construct
  misc_feature 1..20: note = Description of Artificial Sequence: Synthetic oligonucleotide
  misc_feature 1..20: note = Target: SCN10A; (+) strand; PAM type: NRG; PAM sequence: GAG
  source 1..20: mol_type = other DNA
cactgctctgaggattaaat

SEQ ID NO: 35905 - DNA, 20 bp, synthetic construct
  misc_feature 1..20: note = Description of Artificial Sequence: Synthetic oligonucleotide
  misc_feature 1..20: note = Target: SCN10A; (+) strand; PAM type: NRG; PAM sequence: TAG
  source 1..20: mol_type = other DNA
gattaaatgagatcactgta

SEQ ID NO: 35906 - DNA, 20 bp, synthetic construct
  misc_feature 1..20: note = Description of Artificial Sequence: Synthetic oligonucleotide
  misc_feature 1..20: note = Target: SCN10A; (+) strand; PAM type: NRG; PAM sequence: TAG
  source 1..20: mol_type = other DNA
tagtgtcttgcacttctgca

SEQ ID NO: 35907 - DNA, 20 bp, synthetic construct
  misc_feature 1..20: note = Description of Artificial Sequence: Synthetic oligonucleotide
  misc_feature 1..20: note = Target: SCN10A; (+) strand; PAM type: NRG; PAM sequence: AAG
  source 1..20: mol_type = other DNA
aatattgtatataaactgca

SEQ ID NO: 35908 - DNA, 20 bp, synthetic construct
  misc_feature 1..20: note = Description of Artificial Sequence: Synthetic oligonucleotide
  misc_feature 1..20: note = Target: SCN10A; (+) strand; PAM type: NRG; PAM sequence: AGG
  source 1..20: mol_type = other DNA
atattgtatataaactgcaa

SEQ ID NO: 35909 - DNA, 20 bp, synthetic construct
  misc_feature 1..20: note = Description of Artificial Sequence: Synthetic oligonucleotide
  misc_feature 1..20: note = Target: SCN10A; (+) strand; PAM type: NRG; PAM sequence: TGG
  source 1..20: mol_type = other DNA
attcctattgtttttaacct

SEQ ID NO: 35910 - DNA, 20 bp, synthetic construct
  misc_feature 1..20: note = Description of Artificial Sequence: Synthetic oligonucleotide
  misc_feature 1..20: note = Target: SCN10A; (+) strand; PAM type: NRG; PAM sequence: AAG
  source 1..20: mol_type = other DNA
cctattgtttttaaccttgg

SEQ ID NO: 35911 - DNA, 20 bp, synthetic construct
  misc_feature 1..20: note = Description of Artificial Sequence: Synthetic oligonucleotide
  misc_feature 1..20: note = Target: SCN10A; (+) strand; PAM type: NRG; PAM sequence: AAG
  source 1..20: mol_type = other DNA
ttaaccttggaagctgctga

SEQ ID NO: 35912 - DNA, 20 bp, synthetic construct
  misc_feature 1..20: note = Description of Artificial Sequence: Synthetic oligonucleotide
  misc_feature 1..20: note = Target: SCN10A; (+) strand; PAM type: NRG; PAM sequence: AGG
  source 1..20: mol_type = other DNA
taaccttggaagctgctgaa

SEQ ID NO: 35913 - DNA, 20 bp, synthetic construct
  misc_feature 1..20: note = Description of Artificial Sequence: Synthetic oligonucleotide
  misc_feature 1..20: note = Target: SCN10A; (+) strand; PAM type: NRG; PAM sequence: TGG
  source 1..20: mol_type = other DNA
aagctgctgaaaggataaac

SEQ ID NO: 35914 - DNA, 20 bp, synthetic construct
  misc_feature 1..20: note = Description of Artificial Sequence: Synthetic oligonucleotide
  misc_feature 1..20: note = Target: SCN10A; (+) strand; PAM type: NRG; PAM sequence: TGG
  source 1..20: mol_type = other DNA
ataaactggaataatatatg

SEQ ID NO: 35915 - DNA, 20 bp, synthetic construct
  misc_feature 1..20: note = Description of Artificial Sequence: Synthetic oligonucleotide
  misc_feature 1..20: note = Target: SCN10A; (+) strand; PAM type: NRG; PAM sequence: AAG
  source 1..20: mol_type = other DNA
aactggaataatatatgtgg

SEQ ID NO: 35916 - DNA, 20 bp, synthetic construct
  misc_feature 1..20: note = Description of Artificial Sequence: Synthetic oligonucleotide
  misc_feature 1..20: note = Target: SCN10A; (+) strand; PAM type: NRG; PAM sequence: TGG
  source 1..20: mol_type = other DNA
gaaaattatcaactattttc

SEQ ID NO: 35917 - DNA, 20 bp, synthetic construct
  misc_feature 1..20: note = Description of Artificial Sequence: Synthetic oligonucleotide
  misc_feature 1..20: note = Target: SCN10A; (+) strand; PAM type: NRG; PAM sequence: GAG
  source 1..20: mol_type = other DNA
tggtatccattttctgcctt

SEQ ID NO: 35918 - DNA, 20 bp, synthetic construct
  misc_feature 1..20: note = Description of Artificial Sequence: Synthetic oligonucleotide
  misc_feature 1..20: note = Target: SCN10A; (+) strand; PAM type: NRG; PAM sequence: CAG
  source 1..20: mol_type = other DNA
gacccctgaccttcctccca

SEQ ID NO: 35919 - DNA, 20 bp, synthetic construct
  misc_feature 1..20: note = Description of Artificial Sequence: Synthetic oligonucleotide
  misc_feature 1..20: note = Target: SCN10A; (+) strand; PAM type: NRG; PAM sequence: TGG
  source 1..20: mol_type = other DNA
ccttcctcccacagtgccat

SEQ ID NO: 35920 - DNA, 20 bp, synthetic construct
  misc_feature 1..20: note = Description of Artificial Sequence: Synthetic oligonucleotide
  misc_feature 1..20: note = Target: SCN10A; (+) strand; PAM type: NRG; PAM sequence: TGG
  source 1..20: mol_type = other DNA
cacagtgccattggccaatg

SEQ ID NO: 35921 - DNA, 20 bp, synthetic construct
  misc_feature 1..20: note = Description of Artificial Sequence: Synthetic oligonucleotide
  misc_feature 1..20: note = Target: SCN10A; (+) strand; PAM type: NRG; PAM sequence: GGG
  source 1..20: mol_type = other DNA
acagtgccattggccaatgt

SEQ ID NO: 35922 - DNA, 20 bp, synthetic construct
  misc_feature 1..20: note = Description of Artificial Sequence: Synthetic oligonucleotide
  misc_feature 1..20: note = Target: SCN10A; (+) strand; PAM type: NRG; PAM sequence: CAG
  source 1..20: mol_type = other DNA
ggccaatgtgggcctttcct

SEQ ID NO: 35923 - DNA, 20 bp, synthetic construct
  misc_feature 1..20: note = Description of Artificial Sequence: Synthetic oligonucleotide
  misc_feature 1..20: note = Target: SCN10A; (+) strand; PAM type: NRG; PAM sequence: AGG
  source 1..20: mol_type = other DNA
gccaatgtgggcctttcctc

SEQ ID NO: 35924 - DNA, 20 bp, synthetic construct
  misc_feature 1..20: note = Description of Artificial Sequence: Synthetic oligonucleotide
  misc_feature 1..20: note = Target: SCN10A; (+) strand; PAM type: NRG; PAM sequence: TGG
  source 1..20: mol_type = other DNA
tgggcctttcctcaggactc

SEQ ID NO: 35925 - DNA, 20 bp, synthetic construct
  misc_feature 1..20: note = Description of Artificial Sequence: Synthetic oligonucleotide
  misc_feature 1..20: note = Target: SCN10A; (+) strand; PAM type: NRG; PAM sequence: CAG
  source 1..20: mol_type = other DNA
tcaggactctggcttctctg

SEQ ID NO: 35926 - DNA, 20 bp, synthetic construct
  misc_feature 1..20: note = Description of Artificial Sequence: Synthetic oligonucleotide
  misc_feature 1..20: note = Target: SCN10A; (+) strand; PAM type: NRG; PAM sequence: CAG
  source 1..20: mol_type = other DNA
ctggcttctctgcagcccca

SEQ ID NO: 35927 - DNA, 20 bp, synthetic construct
  misc_feature 1..20: note = Description of Artificial Sequence: Synthetic oligonucleotide
  misc_feature 1..20: note = Target: SCN10A; (+) strand; PAM type: NRG; PAM sequence: GAG
  source 1..20: mol_type = other DNA
ggcttctctgcagccccaca

SEQ ID NO: 35928 - DNA, 20 bp, synthetic construct
  misc_feature 1..20: note = Description of Artificial Sequence: Synthetic oligonucleotide
  misc_feature 1..20: note = Target: SCN10A; (+) strand; PAM type: NRG; PAM sequence: AGG
  source 1..20: mol_type = other DNA
gcttctctgcagccccacag

SEQ ID NO: 35929 - DNA, 20 bp, synthetic construct
  misc_feature 1..20: note = Description of Artificial Sequence: Synthetic oligonucleotide
  misc_feature 1..20: note = Target: SCN10A; (+) strand; PAM type: NRG; PAM sequence: CAG
  source 1..20: mol_type = other DNA
ctgcagccccacagaggacc

SEQ ID NO: 35930 - DNA, 20 bp, synthetic construct
  misc_feature 1..20: note = Description of Artificial Sequence: Synthetic oligonucleotide
  misc_feature 1..20: note = Target: SCN10A; (+) strand; PAM type: NRG; PAM sequence: AGG
  source 1..20: mol_type = other DNA
tgcagccccacagaggaccc

SEQ ID NO: 35931 - DNA, 20 bp, synthetic construct
  misc_feature 1..20: note = Description of Artificial Sequence: Synthetic oligonucleotide
  misc_feature 1..20: note = Target: SCN10A; (+) strand; PAM type: NRG; PAM sequence: TAG
  source 1..20: mol_type = other DNA
ccccacagaggacccaggtt

SEQ ID NO: 35932 - DNA, 20 bp, synthetic construct
  misc_feature 1..20: note = Description of Artificial Sequence: Synthetic oligonucleotide
  misc_feature 1..20: note = Target: SCN10A; (+) strand; PAM type: NRG; PAM sequence: CGG
  source 1..20: mol_type = other DNA
ggacccaggtttagctttca

SEQ ID NO: 35933 - DNA, 20 bp, synthetic construct
  misc_feature 1..20: note = Description of Artificial Sequence: Synthetic oligonucleotide
  misc_feature 1..20: note = Target: SCN10A; (+) strand; PAM type: NRG; PAM sequence: CGG
  source 1..20: mol_type = other DNA
ttagctttcacggcatgccc

SEQ ID NO: 35934 - DNA, 20 bp, synthetic construct
  misc_feature 1..20: note = Description of Artificial Sequence: Synthetic oligonucleotide
  misc_feature 1..20: note = Target: SCN10A; (+) strand; PAM type: NRG; PAM sequence: CAG
  source 1..20: mol_type = other DNA
gctttcacggcatgccccgg

SEQ ID NO: 35935 - DNA, 20 bp, synthetic construct
  misc_feature 1..20: note = Description of Artificial Sequence: Synthetic oligonucleotide
  misc_feature 1..20: note = Target: SCN10A; (+) strand; PAM type: NRG; PAM sequence: AGG
  source 1..20: mol_type = other DNA
ctttcacggcatgccccggc

SEQ ID NO: 35936 - DNA, 20 bp, synthetic construct
  misc_feature 1..20: note = Description of Artificial Sequence: Synthetic oligonucleotide
  misc_feature 1..20: note = Target: SCN10A; (+) strand; PAM type: NRG; PAM sequence: GGG
  source 1..20: mol_type = other DNA
tttcacggcatgccccggca

SEQ ID NO: 35937 - DNA, 20 bp, synthetic construct
  misc_feature 1..20: note = Description of Artificial Sequence: Synthetic oligonucleotide
  misc_feature 1..20: note = Target: SCN10A; (+) strand; PAM type: NRG; PAM sequence: GAG
  source 1..20: mol_type = other DNA
ttcactctgtccgttatcct

SEQ ID NO: 35938 - DNA, 20 bp, synthetic construct
  misc_feature 1..20: note = Description of Artificial Sequence: Synthetic oligonucleotide
  misc_feature 1..20: note = Target: SCN10A; (+) strand; PAM type: NRG; PAM sequence: TGG
  source 1..20: mol_type = other DNA
ctctgtccgttatcctgagc

SEQ ID NO: 35939 - DNA, 20 bp, synthetic construct
  misc_feature 1..20: note = Description of Artificial Sequence: Synthetic oligonucleotide
  misc_feature 1..20: note = Target: SCN10A; (+) strand; PAM type: NRG; PAM sequence: CAG
  source 1..20: mol_type = other DNA
ctggcctctctctgccatcc

SEQ ID NO: 35940 - DNA, 20 bp, synthetic construct
  misc_feature 1..20: note = Description of Artificial Sequence: Synthetic oligonucleotide
  misc_feature 1..20: note = Target: SCN10A; (+) strand; PAM type: NRG; PAM sequence: TGG
  source 1..20: mol_type = other DNA
ctctctctgccatcccagcc

SEQ ID NO: 35941 - DNA, 20 bp, synthetic construct
  misc_feature 1..20: note = Description of Artificial Sequence: Synthetic oligonucleotide
  misc_feature 1..20: note = Target: SCN10A; (+) strand; PAM type: NRG; PAM sequence: TGG
  source 1..20: mol_type = other DNA
tggtccactcccccactgcc

SEQ ID NO: 35942 - DNA, 20 bp, synthetic construct
  misc_feature 1..20: note = Description of Artificial Sequence: Synthetic oligonucleotide
  misc_feature 1..20: note = Target: SCN10A; (+) strand; PAM type: NRG; PAM sequence: TGG
  source 1..20: mol_type = other DNA
ccactcccccactgcctggc

SEQ ID NO: 35943 - DNA, 20 bp, synthetic construct
  misc_feature 1..20: note = Description of Artificial Sequence: Synthetic oligonucleotide
  misc_feature 1..20: note = Target: SCN10A; (+) strand; PAM type: NRG; PAM sequence: TAG
  source 1..20: mol_type = other DNA
cctggctggcacctgcccaa

SEQ ID NO: 35944 - DNA, 20 bp, synthetic construct
  misc_feature 1..20: note = Description of Artificial Sequence: Synthetic oligonucleotide
  misc_feature 1..20: note = Target: SCN10A; (+) strand; PAM type: NRG; PAM sequence: CAG
  source 1..20: mol_type = other DNA
ggctggcacctgcccaatag

SEQ ID NO: 35945 - DNA, 20 bp, synthetic construct
  misc_feature 1..20: note = Description of Artificial Sequence: Synthetic oligonucleotide
  misc_feature 1..20: note = Target: SCN10A; (+) strand; PAM type: NRG; PAM sequence: AGG
  source 1..20: mol_type = other DNA
gctggcacctgcccaatagc

SEQ ID NO: 35946 - DNA, 20 bp, synthetic construct
  misc_feature 1..20: note = Description of Artificial Sequence: Synthetic oligonucleotide
  misc_feature 1..20: note = Target: SCN10A; (+) strand; PAM type: NRG; PAM sequence: TGG
  source 1..20: mol_type = other DNA
cacctgcccaatagcaggcc

SEQ ID NO: 35947 - DNA, 20 bp, synthetic construct
  misc_feature 1..20: note = Description of Artificial Sequence: Synthetic oligonucleotide
  misc_feature 1..20: note = Target: SCN10A; (+) strand; PAM type: NRG; PAM sequence: CAG
  source 1..20: mol_type = other DNA
caatagcaggcctggcctct

SEQ ID NO: 35948 - DNA, 20 bp, synthetic construct
  misc_feature 1..20: note = Description of Artificial Sequence: Synthetic oligonucleotide
  misc_feature 1..20: note = Target: SCN10A; (+) strand; PAM type: NRG; PAM sequence: AGG
  source 1..20: mol_type = other DNA
aatagcaggcctggcctctc

SEQ ID NO: 35949 - DNA, 20 bp, synthetic construct
  misc_feature 1..20: note = Description of Artificial Sequence: Synthetic oligonucleotide
  misc_feature 1..20: note = Target: SCN10A; (+) strand; PAM type: NRG; PAM sequence: GGG
  source 1..20: mol_type = other DNA
atagcaggcctggcctctca

SEQ ID NO: 35950 - DNA, 20 bp, synthetic construct
  misc_feature 1..20: note = Description of Artificial Sequence: Synthetic oligonucleotide
  misc_feature 1..20: note = Target: SCN10A; (+) strand; PAM type: NRG; PAM sequence: GAG
  source 1..20: mol_type = other DNA
agcaggcctggcctctcagg

SEQ ID NO: 35951 - DNA, 20 bp, synthetic construct
  misc_feature 1..20: note = Description of Artificial Sequence: Synthetic oligonucleotide
  misc_feature 1..20: note = Target: SCN10A; (+) strand; PAM type: NRG; PAM sequence: GAG
  source 1..20: mol_type = other DNA
gcctggcctctcagggagct

SEQ ID NO: 35952 - DNA, 20 bp, synthetic construct
  misc_feature 1..20: note = Description of Artificial Sequence: Synthetic oligonucleotide
  misc_feature 1..20: note = Target: SCN10A; (+) strand; PAM type: NRG; PAM sequence: TAG
  source 1..20: mol_type = other DNA
cctctcagggagctgagctg

SEQ ID NO: 35953 - DNA, 20 bp, synthetic construct
  misc_feature 1..20: note = Description of Artificial Sequence: Synthetic oligonucleotide
  misc_feature 1..20: note = Target: SCN10A; (+) strand; PAM type: NRG; PAM sequence: GAG
  source 1..20: mol_type = other DNA
tctcagggagctgagctgta

SEQ ID NO: 35954 - DNA, 20 bp, synthetic construct
  misc_feature 1..20: note = Description of Artificial Sequence: Synthetic oligonucleotide
  misc_feature 1..20: note = Target: SCN10A; (+) strand; PAM type: NRG; PAM sequence: AGG
  source 1..20: mol_type = other DNA
ctcagggagctgagctgtag

SEQ ID NO: 35955 - DNA, 20 bp, synthetic construct
  misc_feature 1..20: note = Description of Artificial Sequence: Synthetic oligonucleotide
  misc_feature 1..20: note = Target: SCN10A; (+) strand; PAM type: NRG; PAM sequence: TAG
  source 1..20: mol_type = other DNA
agctgagctgtagaggtgtg

SEQ ID NO: 35956 - DNA, 20 bp, synthetic construct
  misc_feature 1..20: note = Description of Artificial Sequence: Synthetic oligonucleotide
  misc_feature 1..20: note = Target: SCN10A; (+) strand; PAM type: NRG; PAM sequence: TGG
  source 1..20: mol_type = other DNA
gagctgtagaggtgtgtaga

SEQ ID NO: 35957 - DNA, 20 bp, synthetic construct
  misc_feature 1..20: note = Description of Artificial Sequence: Synthetic oligonucleotide
  misc_feature 1..20: note = Target: SCN10A; (+) strand; PAM type: NRG; PAM sequence: AAG
  source 1..20: mol_type = other DNA
cccaacaactttaccacaaa

SEQ ID NO: 35958 - DNA, 20 bp, synthetic construct
  misc_feature 1..20: note = Description of Artificial Sequence: Synthetic oligonucleotide
  misc_feature 1..20: note = Target: SCN10A; (+) strand; PAM type: NRG; PAM sequence: AGG
  source 1..20: mol_type = other DNA
ccaacaactttaccacaaaa

SEQ ID NO: 35959 - DNA, 20 bp, synthetic construct
  misc_feature 1..20: note = Description of Artificial Sequence: Synthetic oligonucleotide
  misc_feature 1..20: note = Target: SCN10A; (+) strand; PAM type: NRG; PAM sequence: GAG
  source 1..20: mol_type = other DNA
ctttaccacaaaaaggactt

SEQ ID NO: 35960 - DNA, 20 bp, synthetic construct
  misc_feature 1..20: note = Description of Artificial Sequence: Synthetic oligonucleotide
  misc_feature 1..20: note = Target: SCN10A; (+) strand; PAM type: NRG; PAM sequence: TGG
  source 1..20: mol_type = other DNA
aaaaaggacttgagctgctc

SEQ ID NO: 35961 - DNA, 20 bp, synthetic construct
  misc_feature 1..20: note = Description of Artificial Sequence: Synthetic oligonucleotide
  misc_feature 1..20: note = Target: SCN10A; (+) strand; PAM type: NRG; PAM sequence: GAG
  source 1..20: mol_type = other DNA
aaaggacttgagctgctctg

SEQ ID NO: 35962 - DNA, 20 bp, synthetic construct
  misc_feature 1..20: note = Description of Artificial Sequence: Synthetic oligonucleotide
  misc_feature 1..20: note = Target: SCN10A; (+) strand; PAM type: NRG; PAM sequence: GAG
  source 1..20: mol_type = other DNA
tgctctggagccattgcctt

SEQ ID NO: 35963 - DNA, 20 bp, synthetic construct
  misc_feature 1..20: note = Description of Artificial Sequence: Synthetic oligonucleotide
  misc_feature 1..20: note = Target: SCN10A; (+) strand; PAM type: NRG; PAM sequence: TAG
  source 1..20: mol_type = other DNA
ccttgagaaatgccattatc

SEQ ID NO: 35964 - DNA, 20 bp, synthetic construct
  misc_feature 1..20: note = Description of Artificial Sequence: Synthetic oligonucleotide
  misc_feature 1..20: note = Target: SCN10A; (+) strand; PAM type: NRG; PAM sequence: CAG
  source 1..20: mol_type = other DNA
gagaaatgccattatctaga

SEQ ID NO: 35965 - DNA, 20 bp, synthetic construct
  misc_feature 1..20: note = Description of Artificial Sequence: Synthetic oligonucleotide
  misc_feature 1..20: note = Target: SCN10A; (+) strand; PAM type: NRG; PAM sequence: AAG
  source 1..20: mol_type = other DNA
aaatgccattatctagacag

SEQ ID NO: 35966 - DNA, 20 bp, synthetic construct
  misc_feature 1..20: note = Description of Artificial Sequence: Synthetic oligonucleotide
  misc_feature 1..20: note = Target: SCN10A; (+) strand; PAM type: NRG; PAM sequence: AGG
  source 1..20: mol_type = other DNA
aatgccattatctagacaga

SEQ ID NO: 35967 - DNA, 20 bp, synthetic construct
  misc_feature 1..20: note = Description of Artificial Sequence: Synthetic oligonucleotide
  misc_feature 1..20: note = Target: SCN10A; (+) strand; PAM type: NRG; PAM sequence: GAG
  source 1..20: mol_type = other DNA
tatctagacagaaggatgct

SEQ ID NO: 35968 - DNA, 20 bp, synthetic construct
  misc_feature 1..20: note = Description of Artificial Sequence: Synthetic oligonucleotide
  misc_feature 1..20: note = Target: SCN10A; (+) strand; PAM type: NRG; PAM sequence: AGG
  source 1..20: mol_type = other DNA
atctagacagaaggatgctg

SEQ ID NO: 35969 - DNA, 20 bp, synthetic construct
  misc_feature 1..20: note = Description of Artificial Sequence: Synthetic oligonucleotide
  misc_feature 1..20: note = Target: SCN10A; (+) strand; PAM type: NRG; PAM sequence: GGG
  source 1..20: mol_type = other DNA
tctagacagaaggatgctga

SEQ ID NO: 35970 - DNA, 20 bp, synthetic construct
  misc_feature 1..20: note = Description of Artificial Sequence: Synthetic oligonucleotide
  misc_feature 1..20: note = Target: SCN10A; (+) strand; PAM type: NRG; PAM sequence: GGG
  source 1..20: mol_type = other DNA
ctagacagaaggatgctgag

SEQ ID NO: 35971 - DNA, 20 bp, synthetic construct
  misc_feature 1..20: note = Description of Artificial Sequence: Synthetic oligonucleotide
  misc_feature 1..20: note = Target: SCN10A; (+) strand; PAM type: NRG; PAM sequence: TGG
  source 1..20: mol_type = other DNA
gaaggatgctgaggggctct

SEQ ID NO: 35972 - DNA, 20 bp, synthetic construct
  misc_feature 1..20: note = Description of Artificial Sequence: Synthetic oligonucleotide
  misc_feature 1..20: note = Target: SCN10A; (+) strand; PAM type: NRG; PAM sequence: AAG
  source 1..20: mol_type = other DNA
ggggctcttggtttacattt

SEQ ID NO: 35973 - DNA, 20 bp, synthetic construct
  misc_feature 1..20: note = Description of Artificial Sequence: Synthetic oligonucleotide
  misc_feature 1..20: note = Target: SCN10A; (+) strand; PAM type: NRG; PAM sequence: AAG
  source 1..20: mol_type = other DNA
cttggtttacatttaagtca

SEQ ID NO: 35974 - DNA, 20 bp, synthetic construct
  misc_feature 1..20: note = Description of Artificial Sequence: Synthetic oligonucleotide
  misc_feature 1..20: note = Target: SCN10A; (+) strand; PAM type: NRG; PAM sequence: AGG
  source 1..20: mol_type = other DNA
ttggtttacatttaagtcaa

SEQ ID NO: 35975 - DNA, 20 bp, synthetic construct
  misc_feature 1..20: note = Description of Artificial Sequence: Synthetic oligonucleotide
  misc_feature 1..20: note = Target: SCN10A; (+) strand; PAM type: NRG; PAM sequence: CAG
  source 1..20: mol_type = other DNA
aggcaaatgaaaactgatgt

SEQ ID NO: 35976 - DNA, 20 bp, synthetic construct
  misc_feature 1..20: note = Description of Artificial Sequence: Synthetic oligonucleotide
  misc_feature 1..20: note = Target: SCN10A; (+) strand; PAM type: NRG; PAM sequence: GAG
  source 1..20: mol_type = other DNA
tgtcagaacaaccctctcat

SEQ ID NO: 35977 - DNA, 20 bp, synthetic construct
  misc_feature 1..20: note = Description of Artificial Sequence: Synthetic oligonucleotide
  misc_feature 1..20: note = Target: SCN10A; (+) strand; PAM type: NRG; PAM sequence: AAG
  source 1..20: mol_type = other DNA
aacaaccctctcatgagcca

SEQ ID NO: 35978 - DNA, 20 bp, synthetic construct
  misc_feature 1..20: note = Description of Artificial Sequence: Synthetic oligonucleotide
  misc_feature 1..20: note = Target: SCN10A; (+) strand; PAM type: NRG; PAM sequence: AAG
  source 1..20: mol_type = other DNA
gagccaaagaaccaaatgcc

SEQ ID NO: 35979 - DNA, 20 bp, synthetic construct
  misc_feature 1..20: note = Description of Artificial Sequence: Synthetic oligonucleotide
  misc_feature 1..20: note = Target: SCN10A; (+) strand; PAM type: NRG; PAM sequence: AAG
  source 1..20: mol_type = other DNA
aatgccaagtgcatttgtga

SEQ ID NO: 35980 - DNA, 20 bp, synthetic construct
  misc_feature 1..20: note = Description of Artificial Sequence: Synthetic oligonucleotide
  misc_feature 1..20: note = Target: SCN10A; (+) strand; PAM type: NRG; PAM sequence: CAG
  source 1..20: mol_type = other DNA
caagtgcatttgtgaaagaa

SEQ ID NO: 35981 - DNA, 20 bp, synthetic construct
  misc_feature 1..20: note = Description of Artificial Sequence: Synthetic oligonucleotide
  misc_feature 1..20: note = Target: SCN10A; (+) strand; PAM type: NRG; PAM sequence: AAG
  source 1..20: mol_type = other DNA
catttgtgaaagaacagtcc

SEQ ID NO: 35982 - DNA, 20 bp, synthetic construct
  misc_feature 1..20: note = Description of Artificial Sequence: Synthetic oligonucleotide
  misc_feature 1..20: note = Target: SCN10A; (+) strand; PAM type: NRG; PAM sequence: AGG
  source 1..20: mol_type = other DNA
atttgtgaaagaacagtcca

SEQ ID NO: 35983 - DNA, 20 bp, synthetic construct
  misc_feature 1..20: note = Description of Artificial Sequence: Synthetic oligonucleotide
  misc_feature 1..20: note = Target: SCN10A; (+) strand; PAM type: NRG; PAM sequence: CAG
  source 1..20: mol_type = other DNA
caaatgctcctgcttgtttc

SEQ ID NO: 35984 - DNA, 20 bp, synthetic construct
  misc_feature 1..20: note = Description of Artificial Sequence: Synthetic oligonucleotide
  misc_feature 1..20: note = Target: SCN10A; (+) strand; PAM type: NRG; PAM sequence: CAG
  source 1..20: mol_type = other DNA
tcctgcttgtttccagtcct

SEQ ID NO: 35985 - DNA, 20 bp, synthetic construct
  misc_feature 1..20: note = Description of Artificial Sequence: Synthetic oligonucleotide
  misc_feature 1..20: note = Target: SCN10A; (+) strand; PAM type: NRG; PAM sequence: GAG
  source 1..20: mol_type = other DNA
tccagtcctcagctccaact

SEQ ID NO: 35986 - DNA, 20 bp, synthetic construct
  misc_feature 1..20: note = Description of Artificial Sequence: Synthetic oligonucleotide
  misc_feature 1..20: note = Target: SCN10A; (+) strand; PAM type: NRG; PAM sequence: TAG
  source 1..20: mol_type = other DNA
gtcctcagctccaactgaga

SEQ ID NO: 35987 - DNA, 20 bp, synthetic construct
  misc_feature 1..20: note = Description of Artificial Sequence: Synthetic oligonucleotide
  misc_feature 1..20: note = Target: SCN10A; (+) strand; PAM type: NRG; PAM sequence: TAG
  source 1..20: mol_type = other DNA
tccaactgagatagttttcc

SEQ ID NO: 35988 - DNA, 20 bp, synthetic construct
  misc_feature 1..20: note = Description of Artificial Sequence: Synthetic oligonucleotide
  misc_feature 1..20: note = Target: SCN10A; (+) strand; PAM type: NRG; PAM sequence: GAG
  source 1..20: mol_type = other DNA
actgagatagttttcctagt

SEQ ID NO: 35989 - DNA, 20 bp, synthetic construct
  misc_feature 1..20: note = Description of Artificial Sequence: Synthetic oligonucleotide
  misc_feature 1..20: note = Target: SCN10A; (+) strand; PAM type: NRG; PAM sequence: AAG
  source 1..20: mol_type = other DNA
gttttcctagtgagctgatg

SEQ ID NO: 35990 - DNA, 20 bp, synthetic construct
  misc_feature 1..20: note = Description of Artificial Sequence: Synthetic oligonucleotide
  misc_feature 1..20: note = Target: SCN10A; (+) strand; PAM type: NRG; PAM sequence: AGG
  source 1..20: mol_type = other DNA
ttttcctagtgagctgatga

SEQ ID NO: 35991 - DNA, 20 bp, synthetic construct
  misc_feature 1..20: note = Description of Artificial Sequence: Synthetic oligonucleotide
  misc_feature 1..20: note = Target: SCN10A; (+) strand; PAM type: NRG; PAM sequence: TGG
  source 1..20: mol_type = other DNA
tcctagtgagctgatgaagg

SEQ ID NO: 35992 - DNA, 20 bp, synthetic construct
  misc_feature 1..20: note = Description of Artificial Sequence: Synthetic oligonucleotide
  misc_feature 1..20: note = Target: SCN10A; (+) strand; PAM type: NRG; PAM sequence: GAG
  source 1..20: mol_type = other DNA
ctagtgagctgatgaaggtg

SEQ ID NO: 35993 - DNA, 20 bp, synthetic construct
  misc_feature 1..20: note = Description of Artificial Sequence: Synthetic oligonucleotide
  misc_feature 1..20: note = Target: SCN10A; (+) strand; PAM type: NRG; PAM sequence: CAG
  source 1..20: mol_type = other DNA
gatgaaggtggagcctcatg

SEQ ID NO: 35994 - DNA, 20 bp, synthetic construct
  misc_feature 1..20: note = Description of Artificial Sequence: Synthetic oligonucleotide
  misc_feature 1..20: note = Target: SCN10A; (+) strand; PAM type: NRG; PAM sequence: AGG
  source 1..20: mol_type = other DNA
atgaaggtggagcctcatgc

SEQ ID NO: 35995 - DNA, 20 bp, synthetic construct
  misc_feature 1..20: note = Description of Artificial Sequence: Synthetic oligonucleotide
  misc_feature 1..20: note = Target: SCN10A; (+) strand; PAM type: NRG; PAM sequence: CAG
  source 1..20: mol_type = other DNA
agcctcatgcaggctccaca

SEQ ID NO: 35996 - DNA, 20 bp, synthetic construct
  misc_feature 1..20: note = Description of Artificial Sequence: Synthetic oligonucleotide
  misc_feature 1..20: note = Target: SCN10A; (+) strand; PAM type: NRG; PAM sequence: AGG
  source 1..20: mol_type = other DNA
gcctcatgcaggctccacac

SEQ ID NO: 35997 - DNA, 20 bp, synthetic construct
  misc_feature 1..20: note = Description of Artificial Sequence: Synthetic oligonucleotide
  misc_feature 1..20: note = Target: SCN10A; (+) strand; PAM type: NRG; PAM sequence: TGG
  source 1..20: mol_type = other DNA
aggctccacacaggtcgacc

SEQ ID NO: 35998 - DNA, 20 bp, synthetic construct
  misc_feature 1..20: note = Description of Artificial Sequence: Synthetic oligonucleotide
  misc_feature 1..20: note = Target: SCN10A; (+) strand; PAM type: NRG; PAM sequence: GGG
  source 1..20: mol_type = other DNA
ggctccacacaggtcgacct

SEQ ID NO: 35999 - DNA, 20 bp, synthetic construct
  misc_feature 1..20: note = Description of Artificial Sequence: Synthetic oligonucleotide
  misc_feature 1..20: note = Target: SCN10A; (+) strand; PAM type: NRG; PAM sequence: TGG
  source 1..20: mol_type = other DNA
acaggtcgacctgggcaaca

SEQ ID NO: 36000 - DNA, 20 bp, synthetic construct
  misc_feature 1..20: note = Description of Artificial Sequence: Synthetic oligonucleotide
  misc_feature 1..20: note = Target: SCN10A; (+) strand; PAM type: NRG; PAM sequence: GAG
  source 1..20: mol_type = other DNA
aggtcgacctgggcaacatg

SEQ ID NO: 36001 - DNA, 20 bp, synthetic construct
  misc_feature 1..20: note = Description of Artificial Sequence: Synthetic oligonucleotide
  misc_feature 1..20: note = Target: SCN10A; (+) strand; PAM type: NRG; PAM sequence: CAG
  source 1..20: mol_type = other DNA
cctgggcaacatggagccgt

SEQ ID NO: 36002 - DNA, 20 bp, synthetic construct
  misc_feature 1..20: note = Description of Artificial Sequence: Synthetic oligonucleotide
  misc_feature 1..20: note = Target: SCN10A; (+) strand; PAM type: NRG; PAM sequence: CAG
  source 1..20: mol_type = other DNA
acatggagccgtcagcctct

SEQ ID NO: 36003 - DNA, 20 bp, synthetic construct
  misc_feature 1..20: note = Description of Artificial Sequence: Synthetic oligonucleotide
  misc_feature 1..20: note = Target: SCN10A; (+) strand; PAM type: NRG; PAM sequence: AGG
  source 1..20: mol_type = other DNA
catggagccgtcagcctctc

SEQ ID NO: 36004 - DNA, 20 bp, synthetic construct
  misc_feature 1..20: note = Description of Artificial Sequence: Synthetic oligonucleotide
  misc_feature 1..20: note = Target: SCN10A; (+) strand; PAM type: NRG; PAM sequence: TGG
  source 1..20: mol_type = other DNA
gccgtcagcctctcaggcac

SEQ ID NO: 36005 - DNA, 20 bp, synthetic construct
  misc_feature 1..20: note = Description of Artificial Sequence: Synthetic oligonucleotide
  misc_feature 1..20: note = Target: SCN10A; (+) strand; PAM type: NRG; PAM sequence: GGG
  source 1..20: mol_type = other DNA
ccgtcagcctctcaggcact

SEQ ID NO: 36006 - DNA, 20 bp, synthetic construct
  misc_feature 1..20: note = Description of Artificial Sequence: Synthetic oligonucleotide
  misc_feature 1..20: note = Target: SCN10A; (+) strand; PAM type: NRG; PAM sequence: GGG
  source 1..20: mol_type = other DNA
cgtcagcctctcaggcactg

SEQ ID NO: 36007 - DNA, 20 bp, synthetic construct
  misc_feature 1..20: note = Description of Artificial Sequence: Synthetic oligonucleotide
  misc_feature 1..20: note = Target: SCN10A; (+) strand; PAM type: NRG; PAM sequence: GGG
  source 1..20: mol_type = other DNA
gtcagcctctcaggcactgg

SEQ ID NO: 36008 - DNA, 20 bp, synthetic construct
  misc_feature 1..20: note = Description of Artificial Sequence: Synthetic oligonucleotide
  misc_feature 1..20: note = Target: SCN10A; (+) strand; PAM type: NRG; PAM sequence: GAG
  source 1..20: mol_type = other DNA
tcaggcactgggggtgttgt

SEQ ID NO: 36009 - DNA, 20 bp, synthetic construct
  misc_feature 1..20: note = Description of Artificial Sequence: Synthetic oligonucleotide
  misc_feature 1..20: note = Target: SCN10A; (+) strand; PAM type: NRG; PAM sequence: AAG
  source 1..20: mol_type = other DNA
gttgtgagctctgcttttcc

SEQ ID NO: 36010 - DNA, 20 bp, synthetic construct
  misc_feature 1..20: note = Description of Artificial Sequence: Synthetic oligonucleotide
  misc_feature 1..20: note = Target: SCN10A; (+) strand; PAM type: NRG; PAM sequence: CAG
  source 1..20: mol_type = other DNA
gctctgcttttccaagctct

SEQ ID NO: 36011 - DNA, 20 bp, synthetic construct
  misc_feature 1..20: note = Description of Artificial Sequence: Synthetic oligonucleotide
  misc_feature 1..20: note = Target: SCN10A; (+) strand; PAM type: NRG; PAM sequence: TGG
  source 1..20: mol_type = other DNA
cttttccaagctctcagcca

SEQ ID NO: 36012 - DNA, 20 bp, synthetic construct
  misc_feature 1..20: note = Description of Artificial Sequence: Synthetic oligonucleotide
  misc_feature 1..20: note = Target: SCN10A; (+) strand; PAM type: NRG; PAM sequence: GAG
  source 1..20: mol_type = other DNA
tttccaagctctcagccatg

SEQ ID NO: 36013 - DNA, 20 bp, synthetic construct
  misc_feature 1..20: note = Description of Artificial Sequence: Synthetic oligonucleotide
  misc_feature 1..20: note = Target: SCN10A; (+) strand; PAM type: NRG; PAM sequence: AGG
  source 1..20: mol_type = other DNA
ttccaagctctcagccatgg

SEQ ID NO: 36014 - DNA, 20 bp, synthetic construct
  misc_feature 1..20: note = Description of Artificial Sequence: Synthetic oligonucleotide
  misc_feature 1..20: note = Target: SCN10A; (+) strand; PAM type: NRG; PAM sequence: TGG
  source 1..20: mol_type = other DNA
caagctctcagccatggagg

SEQ ID NO: 36015 - DNA, 20 bp, synthetic construct
  misc_feature 1..20: note = Description of Artificial Sequence: Synthetic oligonucleotide
  misc_feature 1..20: note = Target: SCN10A; (+) strand; PAM type: NRG; PAM sequence: GGG
  source 1..20: mol_type = other DNA
aagctctcagccatggaggt

SEQ ID NO: 36016 - DNA, 20 bp, synthetic construct
  misc_feature 1..20: note = Description of Artificial Sequence: Synthetic oligonucleotide
  misc_feature 1..20: note = Target: SCN10A; (+) strand; PAM type: NRG; PAM sequence: GAG
  source 1..20: mol_type = other DNA
tctcagccatggaggtgggt

SEQ ID NO: 36017 - DNA, 20 bp, synthetic construct
  misc_feature 1..20: note = Description of Artificial Sequence: Synthetic oligonucleotide
  misc_feature 1..20: note = Target: SCN10A; (+) strand; PAM type: NRG; PAM sequence: TGG
  source 1..20: mol_type = other DNA
agccatggaggtgggtgaga

SEQ ID NO: 36018 - DNA, 20 bp, synthetic construct
  misc_feature 1..20: note = Description of Artificial Sequence: Synthetic oligonucleotide
  misc_feature 1..20: note = Target: SCN10A; (+) strand; PAM type: NRG; PAM sequence: GGG
  source 1..20: mol_type = other DNA
gccatggaggtgggtgagat

SEQ ID NO: 36019 - DNA, 20 bp, synthetic construct
  misc_feature 1..20: note = Description of Artificial Sequence: Synthetic oligonucleotide
  misc_feature 1..20: note = Target: SCN10A; (+) strand; PAM type: NRG; PAM sequence: AAG
  source 1..20: mol_type = other DNA
cctttttgatcttttgccta

SEQ ID NO: 36020 - DNA, 20 bp, synthetic construct
  misc_feature 1..20: note = Description of Artificial Sequence: Synthetic oligonucleotide
  misc_feature 1..20: note = Target: SCN10A; (+) strand; PAM type: NRG; PAM sequence: CAG
  source 1..20: mol_type = other DNA
tttctgctcatgccttcctc

SEQ ID NO: 36021 - DNA, 20 bp, synthetic construct
  misc_feature 1..20: note = Description of Artificial Sequence: Synthetic oligonucleotide
  misc_feature 1..20: note = Target: SCN10A; (+) strand; PAM type: NRG; PAM sequence: TGG
  source 1..20: mol_type = other DNA
ctgctcatgccttcctccag

SEQ ID NO: 36022 - DNA, 20 bp, synthetic construct
  misc_feature 1..20: note = Description of Artificial Sequence: Synthetic oligonucleotide
  misc_feature 1..20: note = Target: SCN10A; (+) strand; PAM type: NRG; PAM sequence: AAG
  source 1..20: mol_type = other DNA
atgccttcctccagtggcca

SEQ ID NO: 36023 - DNA, 20 bp, synthetic construct
  misc_feature 1..20: note = Description of Artificial Sequence: Synthetic oligonucleotide
  misc_feature 1..20: note = Target: SCN10A; (+) strand; PAM type: NRG; PAM sequence: CAG
  source 1..20: mol_type = other DNA
ccttcctccagtggccaaag

SEQ ID NO: 36024 - DNA, 20 bp, synthetic construct
  misc_feature 1..20: note = Description of Artificial Sequence: Synthetic oligonucleotide
  misc_feature 1..20: note = Target: SCN10A; (+) strand; PAM type: NRG; PAM sequence: CAG
  source 1..20: mol_type = other DNA
tcctccagtggccaaagcag

SEQ ID NO: 36025 - DNA, 20 bp, synthetic construct
  misc_feature 1..20: note = Description of Artificial Sequence: Synthetic oligonucleotide
  misc_feature 1..20: note = Target: SCN10A; (+) strand; PAM type: NRG; PAM sequence: AGG
  source 1..20: mol_type = other DNA
cctccagtggccaaagcagc

SEQ ID NO: 36026 - DNA, 20 bp, synthetic construct
  misc_feature 1..20: note = Description of Artificial Sequence: Synthetic oligonucleotide
  misc_feature 1..20: note = Target: SCN10A; (+) strand; PAM type: NRG; PAM sequence: CAG
  source 1..20: mol_type = other DNA
ccagtggccaaagcagcagg

SEQ ID NO: 36027 - DNA, 20 bp, synthetic construct
  misc_feature 1..20: note = Description of Artificial Sequence: Synthetic oligonucleotide
  misc_feature 1..20: note = Target: SCN10A; (+) strand; PAM type: NRG; PAM sequence: GAG
  source 1..20: mol_type = other DNA
agtggccaaagcagcaggca

SEQ ID NO: 36028 - DNA, 20 bp, synthetic construct
  misc_feature 1..20: note = Description of Artificial Sequence: Synthetic oligonucleotide
  misc_feature 1..20: note = Target: SCN10A; (+) strand; PAM type: NRG; PAM sequence: GAG
  source 1..20: mol_type = other DNA
ccaaagcagcaggcagagct

SEQ ID NO: 36029 - DNA, 20 bp, synthetic construct
  misc_feature 1..20: note = Description of Artificial Sequence: Synthetic oligonucleotide
  misc_feature 1..20: note = Target: SCN10A; (+) strand; PAM type: NRG; PAM sequence: AGG
  source 1..20: mol_type = other DNA
caaagcagcaggcagagctg

SEQ ID NO: 36030 - DNA, 20 bp, synthetic construct
  misc_feature 1..20: note = Description of Artificial Sequence: Synthetic oligonucleotide
  misc_feature 1..20: note = Target: SCN10A; (+) strand; PAM type: NRG; PAM sequence: GGG
  source 1..20: mol_type = other DNA
aaagcagcaggcagagctga

SEQ ID NO: 36031 - DNA, 20 bp, synthetic construct
  misc_feature 1..20: note = Description of Artificial Sequence: Synthetic oligonucleotide
  misc_feature 1..20: note = Target: SCN10A; (+) strand; PAM type: NRG; PAM sequence: GGG
  source 1..20: mol_type = other DNA
aagcagcaggcagagctgag

SEQ ID NO: 36032 - DNA, 20 bp, synthetic construct
  misc_feature 1..20: note = Description of Artificial Sequence: Synthetic oligonucleotide
  misc_feature 1..20: note = Target: SCN10A; (+) strand; PAM type: NRG; PAM sequence: TAG
  source 1..20: mol_type = other DNA
gctgaggggtcctcatccct

SEQ ID NO: 36033 - DNA, 20 bp, synthetic construct
  misc_feature 1..20: note = Description of Artificial Sequence: Synthetic oligonucleotide
  misc_feature 1..20: note = Target: SCN10A; (+) strand; PAM type: NRG; PAM sequence: TGG
  source 1..20: mol_type = other DNA
tcacattctgttctgccacc

SEQ ID NO: 36034 - DNA, 20 bp, synthetic construct
  misc_feature 1..20: note = Description of Artificial Sequence: Synthetic oligonucleotide
  misc_feature 1..20: note = Target: SCN10A; (+) strand; PAM type: NRG; PAM sequence: TGG
  source 1..20: mol_type = other DNA
ttctgttctgccacctggaa

SEQ ID NO: 36035 - DNA, 20 bp, synthetic construct
  misc_feature 1..20: note = Description of Artificial Sequence: Synthetic oligonucleotide
  misc_feature 1..20: note = Target: SCN10A; (+) strand; PAM type: NRG; PAM sequence: CAG
  source 1..20: mol_type = other DNA
gaaactatctcgtattcacc

SEQ ID NO: 36036 - DNA, 20 bp, synthetic construct
  misc_feature 1..20: note = Description of Artificial Sequence: Synthetic oligonucleotide
  misc_feature 1..20: note = Target: SCN10A; (+) strand; PAM type: NRG; PAM sequence: TGG
  source 1..20: mol_type = other DNA
tatctcgtattcacccagcc

SEQ ID NO: 36037 - DNA, 20 bp, synthetic construct
  misc_feature 1..20: note = Description of Artificial Sequence: Synthetic oligonucleotide
  misc_feature 1..20: note = Target: SCN10A; (+) strand; PAM type: NRG; PAM sequence: GAG
  source 1..20: mol_type = other DNA
tctcgtattcacccagcctg

SEQ ID NO: 36038 - DNA, 20 bp, synthetic construct
  misc_feature 1..20: note = Description of Artificial Sequence: Synthetic oligonucleotide
  misc_feature 1..20: note = Target: SCN10A; (+) strand; PAM type: NRG; PAM sequence: AAG
  source 1..20: mol_type = other DNA
gacatcctacctgcccttga

SEQ ID NO: 36039 - DNA, 20 bp, synthetic construct
  misc_feature 1..20: note = Description of Artificial Sequence: Synthetic oligonucleotide
  misc_feature 1..20: note = Target: SCN10A; (+) strand; PAM type: NRG; PAM sequence: CAG
  source 1..20: mol_type = other DNA
ctcacctcaaacaccacctc

SEQ ID NO: 36040 - DNA, 20 bp, synthetic construct
  misc_feature 1..20: note = Description of Artificial Sequence: Synthetic oligonucleotide
  misc_feature 1..20: note = Target: SCN10A; (+) strand; PAM type: NRG; PAM sequence: AGG
  source 1..20: mol_type = other DNA
tcacctcaaacaccacctcc

SEQ ID NO: 36041 - DNA, 20 bp, synthetic construct
  misc_feature 1..20: note = Description of Artificial Sequence: Synthetic oligonucleotide
  misc_feature 1..20: note = Target: SCN10A; (+) strand; PAM type: NRG; PAM sequence: AAG
  source 1..20: mol_type = other DNA
cctcaaacaccacctccagg

SEQ ID NO: 36042 - DNA, 20 bp, synthetic construct
  misc_feature 1..20: note = Description of Artificial Sequence: Synthetic oligonucleotide
  misc_feature 1..20: note = Target: SCN10A; (+) strand; PAM type: NRG; PAM sequence: CAG
  source 1..20: mol_type = other DNA
gccacctcactgtgtttgcc

SEQ ID NO: 36043 - DNA, 20 bp, synthetic construct
  misc_feature 1..20: note = Description of Artificial Sequence: Synthetic oligonucleotide
  misc_feature 1..20: note = Target: SCN10A; (+) strand; PAM type: NRG; PAM sequence: AAG
  source 1..20: mol_type = other DNA
ctgtgtttgcccagcctatg

SEQ ID NO: 36044 - DNA, 20 bp, synthetic construct
  misc_feature 1..20: note = Description of Artificial Sequence: Synthetic oligonucleotide
  misc_feature 1..20: note = Target: SCN10A; (+) strand; PAM type: NRG; PAM sequence: TAG
  source 1..20: mol_type = other DNA
tgcccagcctatgaagcctc

SEQ ID NO: 36045 - DNA, 20 bp, synthetic construct
  misc_feature 1..20: note = Description of Artificial Sequence: Synthetic oligonucleotide
  misc_feature 1..20: note = Target: SCN10A; (+) strand; PAM type: NRG; PAM sequence: AAG
  source 1..20: mol_type = other DNA
agcctatgaagcctctagta

SEQ ID NO: 36046 - DNA, 20 bp, synthetic construct
  misc_feature 1..20: note = Description of Artificial Sequence: Synthetic oligonucleotide
  misc_feature 1..20: note = Target: SCN10A; (+) strand; PAM type: NRG; PAM sequence: CAG
  source 1..20: mol_type = other DNA
agtaaagaacttgttttcca

SEQ ID NO: 36047 - DNA, 20 bp, synthetic construct
  misc_feature 1..20: note = Description of Artificial Sequence: Synthetic oligonucleotide
  misc_feature 1..20: note = Target: SCN10A; (+) strand; PAM type: NRG; PAM sequence: AGG
  source 1..20: mol_type = other DNA
gtaaagaacttgttttccac

SEQ ID NO: 36048 - DNA, 20 bp, synthetic construct
  misc_feature 1..20: note = Description of Artificial Sequence: Synthetic oligonucleotide
  misc_feature 1..20: note = Target: SCN10A; (+) strand; PAM type: NRG; PAM sequence: GGG
  source 1..20: mol_type = other DNA
taaagaacttgttttccaca

SEQ ID NO: 36049 - DNA, 20 bp, synthetic construct
  misc_feature 1..20: note = Description of Artificial Sequence: Synthetic oligonucleotide
  misc_feature 1..20: note = Target: SCN10A; (+) strand; PAM type: NRG; PAM sequence: TAG
  source 1..20: mol_type = other DNA
agaacttgttttccacaggg

SEQ ID NO: 36050 - DNA, 20 bp, synthetic construct
  misc_feature 1..20: note = Description of Artificial Sequence: Synthetic oligonucleotide
  misc_feature 1..20: note = Target: SCN10A; (+) strand; PAM type: NRG; PAM sequence: GAG
  source 1..20: mol_type = other DNA
gcatctttatgtctatgaat

SEQ ID NO: 36051 - DNA, 20 bp, synthetic construct
  misc_feature 1..20: note = Description of Artificial Sequence: Synthetic oligonucleotide
  misc_feature 1..20: note = Target: SCN10A; (+) strand; PAM type: NRG; PAM sequence: TAG
  source 1..20: mol_type = other DNA
atgaatgagaaattgcaaac

SEQ ID NO: 36052 - DNA, 20 bp, synthetic construct
  misc_feature 1..20: note = Description of Artificial Sequence: Synthetic oligonucleotide
  misc_feature 1..20: note = Target: SCN10A; (+) strand; PAM type: NRG; PAM sequence: CAG
  source 1..20: mol_type = other DNA
aatgagaaattgcaaactag

SEQ ID NO: 36053 - DNA, 20 bp, synthetic construct
  misc_feature 1..20: note = Description of Artificial Sequence: Synthetic oligonucleotide
  misc_feature 1..20: note = Target: SCN10A; (+) strand; PAM type: NRG; PAM sequence: TAG
  source 1..20: mol_type = other DNA
aattgcaaactagcagctta

SEQ ID NO: 36054 - DNA, 20 bp, synthetic construct
  misc_feature 1..20: note = Description of Artificial Sequence: Synthetic oligonucleotide
  misc_feature 1..20: note = Target: SCN10A; (+) strand; PAM type: NRG; PAM sequence: AGG
  source 1..20: mol_type = other DNA
attgcaaactagcagcttat

SEQ ID NO: 36055 - DNA, 20 bp, synthetic construct
  misc_feature 1..20: note = Description of Artificial Sequence: Synthetic oligonucleotide
  misc_feature 1..20: note = Target: SCN10A; (+) strand; PAM type: NRG; PAM sequence: TGG
  source 1..20: mol_type = other DNA
caaactagcagcttataggc

SEQ ID NO: 36056 - DNA, 20 bp, synthetic construct
  misc_feature 1..20: note = Description of Artificial Sequence: Synthetic oligonucleotide
  misc_feature 1..20: note = Target: SCN10A; (+) strand; PAM type: NRG; PAM sequence: TGG
  source 1..20: mol_type = other DNA
agcagcttataggctggatt

SEQ ID NO: 36057 - DNA, 20 bp, synthetic construct
  misc_feature 1..20: note = Description of Artificial Sequence: Synthetic oligonucleotide
  misc_feature 1..20: note = Target: SCN10A; (+) strand; PAM type: NRG; PAM sequence: CAG
  source 1..20: mol_type = other DNA
tataggctggatttggccca

SEQ ID NO: 36058 - DNA, 20 bp, synthetic construct
  misc_feature 1..20: note = Description of Artificial Sequence: Synthetic oligonucleotide
  misc_feature 1..20: note = Target: SCN10A; (+) strand; PAM type: NRG; PAM sequence: TGG
  source 1..20: mol_type = other DNA
gcccacagaaatattttgtt

SEQ ID NO: 36059 - DNA, 20 bp, synthetic construct
  misc_feature 1..20: note = Description of Artificial Sequence: Synthetic oligonucleotide
  misc_feature 1..20: note = Target: SCN10A; (+) strand; PAM type: NRG; PAM sequence: TAG
  source 1..20: mol_type = other DNA
ttgtttggcccaacaatatg

SEQ ID NO: 36060 - DNA, 20 bp, synthetic construct
  misc_feature 1..20: note = Description of Artificial Sequence: Synthetic oligonucleotide
  misc_feature 1..20: note = Target: SCN10A; (+) strand; PAM type: NRG; PAM sequence: TGG
  source 1..20: mol_type = other DNA
aacaatatgtagacattttt

SEQ ID NO: 36061 - DNA, 20 bp, synthetic construct
  misc_feature 1..20: note = Description of Artificial Sequence: Synthetic oligonucleotide
  misc_feature 1..20: note = Target: SCN10A; (+) strand; PAM type: NRG; PAM sequence: TAG
  source 1..20: mol_type = other DNA
tatgtagacattttttggaa

SEQ ID NO: 36062 - DNA, 20 bp, synthetic construct
  misc_feature 1..20: note = Description of Artificial Sequence: Synthetic oligonucleotide
  misc_feature 1..20: note = Target: SCN10A; (+) strand; PAM type: NRG; PAM sequence: AGG
  source 1..20: mol_type = other DNA
atgtagacattttttggaat

SEQ ID NO: 36063 - DNA, 20 bp, synthetic construct
  misc_feature 1..20: note = Description of Artificial Sequence: Synthetic oligonucleotide
  misc_feature 1..20: note = Target: SCN10A; (+) strand; PAM type: NRG; PAM sequence: TAG
  source 1..20: mol_type = other DNA
tagacattttttggaatagg

SEQ ID NO: 36064 - DNA, 20 bp, synthetic construct
  misc_feature 1..20: note = Description of Artificial Sequence: Synthetic oligonucleotide
  misc_feature 1..20: note = Target: SCN10A; (+) strand; PAM type: NRG; PAM sequence: CGG
  source 1..20: mol_type = other DNA
gaataggtagccaatgttta

SEQ ID NO: 36065 - DNA, 20 bp, synthetic construct
  misc_feature 1..20: note = Description of Artificial Sequence: Synthetic oligonucleotide
  misc_feature 1..20: note = Target: SCN10A; (+) strand; PAM type: NRG; PAM sequence: TGG
  source 1..20: mol_type = other DNA
aggtagccaatgtttacggt

SEQ ID NO: 36066 - DNA, 20 bp, synthetic construct
  misc_feature 1..20: note = Description of Artificial Sequence: Synthetic oligonucleotide
  misc_feature 1..20: note = Target: SCN10A; (+) strand; PAM type: NRG; PAM sequence: GGG
  source 1..20: mol_type = other DNA
ggtagccaatgtttacggtt

SEQ ID NO: 36067 - DNA, 20 bp, synthetic construct
  misc_feature 1..20: note = Description of Artificial Sequence: Synthetic oligonucleotide
  misc_feature 1..20: note = Target: SCN10A; (+) strand; PAM type: NRG; PAM sequence: GAG
  source 1..20: mol_type = other DNA
tagccaatgtttacggttgg

SEQ ID NO: 36068 - DNA, 20 bp, synthetic construct
  misc_feature 1..20: note = Description of Artificial Sequence: Synthetic oligonucleotide
  misc_feature 1..20: note = Target: SCN10A; (+) strand; PAM type: NRG; PAM sequence: AAG
  source 1..20: mol_type = other DNA
atttcctatctctattttaa

SEQ ID NO: 36069 - DNA, 20 bp, synthetic construct
  misc_feature 1..20: note = Description of Artificial Sequence: Synthetic oligonucleotide
  misc_feature 1..20: note = Target: SCN10A; (+) strand; PAM type: NRG; PAM sequence: TGG
  source 1..20: mol_type = other DNA
cctatctctattttaaaagt

SEQ ID NO: 36070 - DNA, 20 bp, synthetic construct
  misc_feature 1..20: note = Description of Artificial Sequence: Synthetic oligonucleotide
  misc_feature 1..20: note = Target: SCN10A; (+) strand; PAM type: NRG; PAM sequence: AAG
  source 1..20: mol_type = other DNA
atctctattttaaaagttgg

SEQ ID NO: 36071 - DNA, 20 bp, synthetic construct
  misc_feature 1..20: note = Description of Artificial Sequence: Synthetic oligonucleotide
  misc_feature 1..20: note = Target: SCN10A; (+) strand; PAM type: NRG; PAM sequence: GAG
  source 1..20: mol_type = other DNA
ctctattttaaaagttggaa

SEQ ID NO: 36072 - DNA, 20 bp, synthetic construct
  misc_feature 1..20: note = Description of Artificial Sequence: Synthetic oligonucleotide
  misc_feature 1..20: note = Target: SCN10A; (+) strand; PAM type: NRG; PAM sequence: TGG
  source 1..20: mol_type = other DNA
attttaaaagttggaagagc

SEQ ID NO: 36073 - DNA, 20 bp, synthetic construct
  misc_feature 1..20: note = Description of Artificial Sequence: Synthetic oligonucleotide
  misc_feature 1..20: note = Target: SCN10A; (+) strand; PAM type: NRG; PAM sequence: CAG
  source 1..20: mol_type = other DNA
aaagttggaagagctggaaa

SEQ ID NO: 36074 - DNA, 20 bp, synthetic construct
  misc_feature 1..20: note = Description of Artificial Sequence: Synthetic oligonucleotide
  misc_feature 1..20: note = Target: SCN10A; (+) strand; PAM type: NRG; PAM sequence: TGG
  source 1..20: mol_type = other DNA
agtgaacccacatttccaca

SEQ ID NO: 36075 - DNA, 20 bp, synthetic construct
  misc_feature 1..20: note = Description of Artificial Sequence: Synthetic oligonucleotide
  misc_feature 1..20: note = Target: SCN10A; (+) strand; PAM type: NRG; PAM sequence: AAG
  source 1..20: mol_type = other DNA
catttccacatggcaaccaa

SEQ ID NO: 36076 - DNA, 20 bp, synthetic construct
  misc_feature 1..20: note = Description of Artificial Sequence: Synthetic oligonucleotide
  misc_feature 1..20: note = Target: SCN10A; (+) strand; PAM type: NRG; PAM sequence: TGG
  source 1..20: mol_type = other DNA
tccacatggcaaccaaaagc

SEQ ID NO: 36077 - DNA, 20 bp, synthetic construct
  misc_feature 1..20: note = Description of Artificial Sequence: Synthetic oligonucleotide
  misc_feature 1..20: note = Target: SCN10A; (+) strand; PAM type: NRG; PAM sequence: GAG
  source 1..20: mol_type = other DNA
tggcaaccaaaagctggacc

SEQ ID NO: 36078 - DNA, 20 bp, synthetic construct
  misc_feature 1..20: note = Description of Artificial Sequence: Synthetic oligonucleotide
  misc_feature 1..20: note = Target: SCN10A; (+) strand; PAM type: NRG; PAM sequence: CAG
  source 1..20: mol_type = other DNA
caaccaaaagctggaccgag

SEQ ID NO: 36079 - DNA, 20 bp, synthetic construct
  misc_feature 1..20: note = Description of Artificial Sequence: Synthetic oligonucleotide
  misc_feature 1..20: note = Target: SCN10A; (+) strand; PAM type: NRG; PAM sequence: TGG
  source 1..20: mol_type = other DNA
ccaaaagctggaccgagcag

SEQ ID NO: 36080 - DNA, 20 bp, synthetic construct
  misc_feature 1..20: note = Description of Artificial Sequence: Synthetic oligonucleotide
  misc_feature 1..20: note = Target: SCN10A; (+) strand; PAM type: NRG; PAM sequence: GGG
  source 1..20: mol_type = other DNA
caaaagctggaccgagcagt

SEQ ID NO: 36081 - DNA, 20 bp, synthetic construct
  misc_feature 1..20: note = Description of Artificial Sequence: Synthetic oligonucleotide
  misc_feature 1..20: note = Target: SCN10A; (+) strand; PAM type: NRG; PAM sequence: GGG
  source 1..20: mol_type = other DNA
aaaagctggaccgagcagtg

SEQ ID NO: 36082 - DNA, 20 bp, synthetic construct
  misc_feature 1..20: note = Description of Artificial Sequence: Synthetic oligonucleotide
  misc_feature 1..20: note = Target: SCN10A; (+) strand; PAM type: NRG; PAM sequence: TAG
  source 1..20: mol_type = other DNA
agcagtggggctgtcccctt

SEQ ID NO: 36083 - DNA, 20 bp, synthetic construct
  misc_feature 1..20: note = Description of Artificial Sequence: Synthetic oligonucleotide
  misc_feature 1..20: note = Target: SCN10A; (+) strand; PAM type: NRG; PAM sequence: GAG
  source 1..20: mol_type = other DNA
cagtggggctgtccccttta

SEQ ID NO: 36084 - DNA, 20 bp, synthetic construct
  misc_feature 1..20: note = Description of Artificial Sequence: Synthetic oligonucleotide
  misc_feature 1..20: note = Target: SCN10A; (+) strand; PAM type: NRG; PAM sequence: AGG
  source 1..20: mol_type = other DNA
agtggggctgtcccctttag

SEQ ID NO: 36085 - DNA, 20 bp, synthetic construct
  misc_feature 1..20: note = Description of Artificial Sequence: Synthetic oligonucleotide
  misc_feature 1..20: note = Target: SCN10A; (+) strand; PAM type: NRG; PAM sequence: GAG
  source 1..20: mol_type = other DNA
tggggctgtcccctttagag

SEQ ID NO: 36086 - DNA, 20 bp, synthetic construct
  misc_feature 1..20: note = Description of Artificial Sequence: Synthetic oligonucleotide
  misc_feature 1..20: note = Target: SCN10A; (+) strand; PAM type: NRG; PAM sequence: AGG
  source 1..20: mol_type = other DNA
ggggctgtcccctttagagg

SEQ ID NO: 36087 - DNA, 20 bp, synthetic construct
  misc_feature 1..20: note = Description of Artificial Sequence: Synthetic oligonucleotide
  misc_feature 1..20: note = Target: SCN10A; (+) strand; PAM type: NRG; PAM sequence: CAG
  source 1..20: mol_type = other DNA
ttagaggaggcatgaactct

SEQ ID NO: 36088 - DNA, 20 bp, synthetic construct
  misc_feature 1..20: note = Description of Artificial Sequence: Synthetic oligonucleotide
  misc_feature 1..20: note = Target: SCN10A; (+) strand; PAM type: NRG; PAM sequence: TAG
  source 1..20: mol_type = other DNA
aggcatgaactctcagctcc

SEQ ID NO: 36089 - DNA, 20 bp, synthetic construct
  misc_feature 1..20: note = Description of Artificial Sequence: Synthetic oligonucleotide
  misc_feature 1..20: note = Target: SCN10A; (+) strand; PAM type: NRG; PAM sequence: AGG
  source 1..20: mol_type = other DNA
ggcatgaactctcagctcct

SEQ ID NO: 36090 - DNA, 20 bp, synthetic construct
  misc_feature 1..20: note = Description of Artificial Sequence: Synthetic oligonucleotide
  misc_feature 1..20: note = Target: SCN10A; (+) strand; PAM type: NRG; PAM sequence: TGG
  source 1..20: mol_type = other DNA
tcagctcctaggttccctcc

SEQ ID NO: 36091 - DNA, 20 bp, synthetic construct
  misc_feature 1..20: note = Description of Artificial Sequence: Synthetic oligonucleotide
  misc_feature 1..20: note = Target: SCN10A; (+) strand; PAM type: NRG; PAM sequence: TGG
  source 1..20: mol_type = other DNA
ctcatttgttgttatgaatc

SEQ ID NO: 36092 - DNA, 20 bp, synthetic construct
  misc_feature 1..20: note = Description of Artificial Sequence: Synthetic oligonucleotide
  misc_feature 1..20: note = Target: SCN10A; (+) strand; PAM type: NRG; PAM sequence: AAG
  source 1..20: mol_type = other DNA
gttatgaatctggcctctgt

SEQ ID NO: 36093 - DNA, 20 bp, synthetic construct
  misc_feature 1..20: note = Description of Artificial Sequence: Synthetic oligonucleotide
  misc_feature 1..20: note = Target: SCN10A; (+) strand; PAM type: NRG; PAM sequence: AAG
  source 1..20: mol_type = other DNA
tgtaagaattcgaaattgca

SEQ ID NO: 36094 - DNA, 20 bp, synthetic construct
  misc_feature 1..20: note = Description of Artificial Sequence: Synthetic oligonucleotide
  misc_feature 1..20: note = Target: SCN10A; (+) strand; PAM type: NRG; PAM sequence: GAG
  source 1..20: mol_type = other DNA
gtgttttttcctctacttgt

SEQ ID NO: 36095 - DNA, 20 bp, synthetic construct
  misc_feature 1..20: note = Description of Artificial Sequence: Synthetic oligonucleotide
  misc_feature 1..20: note = Target: SCN10A; (+) strand; PAM type: NRG; PAM sequence: AGG
  source 1..20: mol_type = other DNA
tgttttttcctctacttgtg

SEQ ID NO: 36096 - DNA, 20 bp, synthetic construct
  misc_feature 1..20: note = Description of Artificial Sequence: Synthetic oligonucleotide
  misc_feature 1..20: note = Target: SCN10A; (+) strand; PAM type: NRG; PAM sequence: GGG
  source 1..20: mol_type = other DNA
gttttttcctctacttgtga

SEQ ID NO: 36097 - DNA, 20 bp, synthetic construct
  misc_feature 1..20: note = Description of Artificial Sequence: Synthetic oligonucleotide
  misc_feature 1..20: note = Target: SCN10A; (+) strand; PAM type: NRG; PAM sequence: TGG
  source 1..20: mol_type = other DNA
ctctacttgtgagggtaatg

SEQ ID NO: 36098 - DNA, 20 bp, synthetic construct
  misc_feature 1..20: note = Description of Artificial Sequence: Synthetic oligonucleotide
  misc_feature 1..20: note = Target: SCN10A; (+) strand; PAM type: NRG; PAM sequence: TAG
  source 1..20: mol_type = other DNA
ttgtgagggtaatgtggcta

SEQ ID NO: 36099 - DNA, 20 bp, synthetic construct
  misc_feature 1..20: note = Description of Artificial Sequence: Synthetic oligonucleotide
  misc_feature 1..20: note = Target: SCN10A; (+) strand; PAM type: NRG; PAM sequence: TGG
  source 1..20: mol_type = other DNA
agggtaatgtggctatagaa

SEQ ID NO: 36100 - DNA, 20 bp, synthetic construct
  misc_feature 1..20: note = Description of Artificial Sequence: Synthetic oligonucleotide
  misc_feature 1..20: note = Target: SCN10A; (+) strand; PAM type: NRG; PAM sequence: GAG
  source 1..20: mol_type = other DNA
ggtaatgtggctatagaatg

SEQ ID NO: 36101 - DNA, 20 bp, synthetic construct
  misc_feature 1..20: note = Description of Artificial Sequence: Synthetic oligonucleotide
  misc_feature 1..20: note = Target: SCN10A; (+) strand; PAM type: NRG; PAM sequence: TAG
  source 1..20: mol_type = other DNA
atgtggctatagaatggagt

SEQ ID NO: 36102 - DNA, 20 bp, synthetic construct
  misc_feature 1..20: note = Description of Artificial Sequence: Synthetic oligonucleotide
  misc_feature 1..20: note = Target: SCN10A; (+) strand; PAM type: NRG; PAM sequence: AAG
  source 1..20: mol_type = other DNA
tggagttagctgtgatgatt

SEQ ID NO: 36103 - DNA, 20 bp, synthetic construct
  misc_feature 1..20: note = Description of Artificial Sequence: Synthetic oligonucleotide
  misc_feature 1..20: note = Target: SCN10A; (+) strand; PAM type: NRG; PAM sequence: TAG
  source 1..20: mol_type = other DNA
ttagctgtgatgattaagtg

SEQ ID NO: 36104 - DNA, 20 bp, synthetic construct
  misc_feature 1..20: note = Description of Artificial Sequence: Synthetic oligonucleotide
  misc_feature 1..20: note = Target: SCN10A; (+) strand; PAM type: NRG; PAM sequence: GAG
  source 1..20: mol_type = other DNA
agctgtgatgattaagtgta

SEQ ID NO: 36105 - DNA, 20 bp, synthetic construct
  misc_feature 1..20: note = Description of Artificial Sequence: Synthetic oligonucleotide
  misc_feature 1..20: note = Target: SCN10A; (+) strand; PAM type: NRG; PAM sequence: AAG
  source 1..20: mol_type = other DNA
gtagagcatttgacacaaat

SEQ ID NO: 36106 - DNA, 20 bp, synthetic construct
  misc_feature 1..20: note = Description of Artificial Sequence: Synthetic oligonucleotide
  misc_feature 1..20: note = Target: SCN10A; (+) strand; PAM type: NRG; PAM sequence: TGG
  source 1..20: mol_type = other DNA
catttgacacaaataagtat

SEQ ID NO: 36107 - DNA, 20 bp, synthetic construct
  misc_feature 1..20: note = Description of Artificial Sequence: Synthetic oligonucleotide
  misc_feature 1..20: note = Target: SCN10A; (+) strand; PAM type: NRG; PAM sequence: TGG
  source 1..20: mol_type = other DNA
aataagtattggttccttcc

SEQ ID NO: 36108 - DNA, 20 bp, synthetic construct
  misc_feature 1..20: note = Description of Artificial Sequence: Synthetic oligonucleotide
  misc_feature 1..20: note = Target: SCN10A; (+) strand; PAM type: NRG; PAM sequence: GGG
  source 1..20: mol_type = other DNA
ataagtattggttccttcct

SEQ ID NO: 36109 - DNA, 20 bp, synthetic construct
  misc_feature 1..20: note = Description of Artificial Sequence: Synthetic oligonucleotide
  misc_feature 1..20: note = Target: SCN10A; (+) strand; PAM type: NRG; PAM sequence: GGG
  source 1..20: mol_type = other DNA
taagtattggttccttcctg

SEQ ID NO: 36110 - DNA, 20 bp, synthetic construct
  misc_feature 1..20: note = Description of Artificial Sequence: Synthetic oligonucleotide
  misc_feature 1..20: note = Target: SCN10A; (+) strand; PAM type: NRG; PAM sequence: TAG
  source 1..20: mol_type = other DNA
gtattggttccttcctgggg

SEQ ID NO: 36111 - DNA, 20 bp, synthetic construct
  misc_feature 1..20: note = Description of Artificial Sequence: Synthetic oligonucleotide
  misc_feature 1..20: note = Target: SCN10A; (+) strand; PAM type: NRG; PAM sequence: TGG
  source 1..20: mol_type = other DNA
gggtagattatttattaaaa

SEQ ID NO: 36112 - DNA, 20 bp, synthetic construct
  misc_feature 1..20: note = Description of Artificial Sequence: Synthetic oligonucleotide
  misc_feature 1..20: note = Target: SCN10A; (+) strand; PAM type: NRG; PAM sequence: CAG
  source 1..20: mol_type = other DNA
ccctttccaatgtgactttt

SEQ ID NO: 36113 - DNA, 20 bp, synthetic construct
  misc_feature 1..20: note = Description of Artificial Sequence: Synthetic oligonucleotide
  misc_feature 1..20: note = Target: SCN10A; (+) strand; PAM type: NRG; PAM sequence: GAG
  source 1..20: mol_type = other DNA
acttttcagctctttccatt

SEQ ID NO: 36114 - DNA, 20 bp, synthetic construct
  misc_feature 1..20: note = Description of Artificial Sequence: Synthetic oligonucleotide
  misc_feature 1..20: note = Target: SCN10A; (+) strand; PAM type: NRG; PAM sequence: AAG
  source 1..20: mol_type = other DNA
gctctttccattgagtgatg

SEQ ID NO: 36115 - DNA, 20 bp, synthetic construct
  misc_feature 1..20: note = Description of Artificial Sequence: Synthetic oligonucleotide
  misc_feature 1..20: note = Target: SCN10A; (+) strand; PAM type: NRG; PAM sequence: TGG
  source 1..20: mol_type = other DNA
aagtctatttctctgtctct

SEQ ID NO: 36116 - DNA, 20 bp, synthetic construct
  misc_feature 1..20: note = Description of Artificial Sequence: Synthetic oligonucleotide
  misc_feature 1..20: note = Target: SCN10A; (+) strand; PAM type: NRG; PAM sequence: TGG
  source 1..20: mol_type = other DNA
tctgtctcttggatctctac

SEQ ID NO: 36117 - DNA, 20 bp, synthetic construct
  misc_feature 1..20: note = Description of Artificial Sequence: Synthetic oligonucleotide
  misc_feature 1..20: note = Target: SCN10A; (+) strand; PAM type: NRG; PAM sequence: TAG
  source 1..20: mol_type = other DNA
tactggactgcaacttgctt

SEQ ID NO: 36118 - DNA, 20 bp, synthetic construct
  misc_feature 1..20: note = Description of Artificial Sequence: Synthetic oligonucleotide
  misc_feature 1..20: note = Target: SCN10A; (+) strand; PAM type: NRG; PAM sequence: AAG
  source 1..20: mol_type = other DNA
gactgcaacttgctttagtc

SEQ ID NO: 36119 - DNA, 20 bp, synthetic construct
  misc_feature 1..20: note = Description of Artificial Sequence: Synthetic oligonucleotide
  misc_feature 1..20: note = Target: SCN10A; (+) strand; PAM type: NRG; PAM sequence: CAG
  source 1..20: mol_type = other DNA
tgctttagtcaagaatgtat

SEQ ID NO: 36120 - DNA, 20 bp, synthetic construct
  misc_feature 1..20: note = Description of Artificial Sequence: Synthetic oligonucleotide
  misc_feature 1..20: note = Target: SCN10A; (+) strand; PAM type: NRG; PAM sequence: AAG
  source 1..20: mol_type = other DNA
gaatgtatcagaatgtacaa

SEQ ID NO: 36121 - DNA, 20 bp, synthetic construct
  misc_feature 1..20: note = Description of Artificial Sequence: Synthetic oligonucleotide
  misc_feature 1..20: note = Target: SCN10A; (+) strand; PAM type: NRG; PAM sequence: AGG
  source 1..20: mol_type = other DNA
aatgtatcagaatgtacaaa

SEQ ID NO: 36122 - DNA, 20 bp, synthetic construct
  misc_feature 1..20: note = Description of Artificial Sequence: Synthetic oligonucleotide
  misc_feature 1..20: note = Target: SCN10A; (+) strand; PAM type: NRG; PAM sequence: TGG
  source 1..20: mol_type = other DNA
gtacaaaaggtacattgtgt

SEQ ID NO: 36123 - DNA, 20 bp, synthetic construct
  misc_feature 1..20: note = Description of Artificial Sequence: Synthetic oligonucleotide
  misc_feature 1..20: note = Target: SCN10A; (+) strand; PAM type: NRG; PAM sequence: AAG
  source 1..20: mol_type = other DNA
aggtacattgtgttggttct

SEQ ID NO: 36124 - DNA, 20 bp, synthetic construct
  misc_feature 1..20: note = Description of Artificial Sequence: Synthetic oligonucleotide
  misc_feature 1..20: note = Target: SCN10A; (+) strand; PAM type: NRG; PAM sequence: TAG
  source 1..20: mol_type = other DNA
cattgtgttggttctaagcc

SEQ ID NO: 36125 - DNA, 20 bp, synthetic construct
  misc_feature 1..20: note = Description of Artificial Sequence: Synthetic oligonucleotide
  misc_feature 1..20: note = Target: SCN10A; (+) strand; PAM type: NRG; PAM sequence: AGG
  source 1..20: mol_type = other DNA
attgtgttggttctaagcct

SEQ ID NO: 36126 - DNA, 20 bp, synthetic construct
  misc_feature 1..20: note = Description of Artificial Sequence: Synthetic oligonucleotide
  misc_feature 1..20: note = Target: SCN10A; (+) strand; PAM type: NRG; PAM sequence: AAG
  source 1..20: mol_type = other DNA
tggttctaagcctaggcctg

SEQ ID NO: 36127 - DNA, 20 bp, synthetic construct
  misc_feature 1..20: note = Description of Artificial Sequence: Synthetic oligonucleotide
  misc_feature 1..20: note = Target: SCN10A; (+) strand; PAM type: NRG; PAM sequence: AAG
  source 1..20: mol_type = other DNA
ttctaagcctaggcctgaag

SEQ ID NO: 36128 - DNA, 20 bp, synthetic construct
  misc_feature 1..20: note = Description of Artificial Sequence: Synthetic oligonucleotide
  misc_feature 1..20: note = Target: SCN10A; (+) strand; PAM type: NRG; PAM sequence: TGG
  source 1..20: mol_type = other DNA
gcaaacttccactgtttttc

SEQ ID NO: 36129 - DNA, 20 bp, synthetic construct
  misc_feature 1..20: note = Description of Artificial Sequence: Synthetic oligonucleotide
  misc_feature 1..20: note = Target: SCN10A; (+) strand; PAM type: NRG; PAM sequence: GGG
  source 1..20: mol_type = other DNA
caaacttccactgtttttct

SEQ ID NO: 36130 - DNA, 20 bp, synthetic construct
  misc_feature 1..20: note = Description of Artificial Sequence: Synthetic oligonucleotide
  misc_feature 1..20: note = Target: SCN10A; (+) strand; PAM type: NRG; PAM sequence: GAG
  source 1..20: mol_type = other DNA
ttttctgggaacactgccat

SEQ ID NO: 36131 - DNA, 20 bp, synthetic construct
  misc_feature 1..20: note = Description of Artificial Sequence: Synthetic oligonucleotide
  misc_feature 1..20: note = Target: SCN10A; (+) strand; PAM type: NRG; PAM sequence: CAG
  source 1..20: mol_type = other DNA
tgggaacactgccatgagaa

SEQ ID NO: 36132 - DNA, 20 bp, synthetic construct
  misc_feature 1..20: note = Description of Artificial Sequence: Synthetic oligonucleotide
  misc_feature 1..20: note = Target: SCN10A; (+) strand; PAM type: NRG; PAM sequence: AGG
  source 1..20: mol_type = other DNA
gggaacactgccatgagaac

SEQ ID NO: 36133 - DNA, 20 bp, synthetic construct
  misc_feature 1..20: note = Description of Artificial Sequence: Synthetic oligonucleotide
  misc_feature 1..20: note = Target: SCN10A; (+) strand; PAM type: NRG; PAM sequence: CAG
  source 1..20: mol_type = other DNA
cactgccatgagaacaggcc

SEQ ID NO: 36134 - DNA, 20 bp, synthetic construct
  misc_feature 1..20: note = Description of Artificial Sequence: Synthetic oligonucleotide
  misc_feature 1..20: note = Target: SCN10A; (+) strand; PAM type: NRG; PAM sequence: AGG
  source 1..20: mol_type = other DNA
actgccatgagaacaggccc

SEQ ID NO: 36135 - DNA, 20 bp, synthetic construct
  misc_feature 1..20: note = Description of Artificial Sequence: Synthetic oligonucleotide
  misc_feature 1..20: note = Target: SCN10A; (+) strand; PAM type: NRG; PAM sequence: TGG
  source 1..20: mol_type = other DNA
caggcccaggctaacctgtt

SEQ ID NO: 36136 - DNA, 20 bp, synthetic construct
  misc_feature 1..20: note = Description of Artificial Sequence: Synthetic oligonucleotide
  misc_feature 1..20: note = Target: SCN10A; (+) strand; PAM type: NRG; PAM sequence: GGG
  source 1..20: mol_type = other DNA
aggcccaggctaacctgttt

SEQ ID NO: 36137 - DNA, 20 bp, synthetic construct
  misc_feature 1..20: note = Description of Artificial Sequence: Synthetic oligonucleotide
  misc_feature 1..20: note = Target: SCN10A; (+) strand; PAM type: NRG; PAM sequence: GGG
  source 1..20: mol_type = other DNA
ggcccaggctaacctgtttg

SEQ ID NO: 36138 - DNA, 20 bp, synthetic construct
  misc_feature 1..20: note = Description of Artificial Sequence: Synthetic oligonucleotide
  misc_feature 1..20: note = Target: SCN10A; (+) strand; PAM type: NRG; PAM sequence: GGG
  source 1..20: mol_type = other DNA
gcccaggctaacctgtttgg

SEQ ID NO: 36139 - DNA, 20 bp, synthetic construct
  misc_feature 1..20: note = Description of Artificial Sequence: Synthetic oligonucleotide
  misc_feature 1..20: note = Target: SCN10A; (+) strand; PAM type: NRG; PAM sequence: GAG
  source 1..20: mol_type = other DNA
aggctaacctgtttgggggt

SEQ ID NO: 36140 - DNA, 20 bp, synthetic construct
  misc_feature 1..20: note = Description of Artificial Sequence: Synthetic oligonucleotide
  misc_feature 1..20: note = Target: SCN10A; (+) strand; PAM type: NRG; PAM sequence: GAG
  source 1..20: mol_type = other DNA
gctaacctgtttgggggtga

SEQ ID NO: 36141 - DNA, 20 bp, synthetic construct
  misc_feature 1..20: note = Description of Artificial Sequence: Synthetic oligonucleotide
  misc_feature 1..20: note = Target: SCN10A; (+) strand; PAM type: NRG; PAM sequence: AGG
  source 1..20: mol_type = other DNA
ctaacctgtttgggggtgag

SEQ ID NO: 36142 - DNA, 20 bp, synthetic construct
  misc_feature 1..20: note = Description of Artificial Sequence: Synthetic oligonucleotide
  misc_feature 1..20: note = Target: SCN10A; (+) strand; PAM type: NRG; PAM sequence: GAG
  source 1..20: mol_type = other DNA
ttgggggtgagaggccacat

SEQ ID NO: 36143 - DNA, 20 bp, synthetic construct
  misc_feature 1..20: note = Description of Artificial Sequence: Synthetic oligonucleotide
  misc_feature 1..20: note = Target: SCN10A; (+) strand; PAM type: NRG; PAM sequence: CAG
  source 1..20: mol_type = other DNA
ggggtgagaggccacatgag

SEQ ID NO: 36144 - DNA, 20 bp, synthetic construct
  misc_feature 1..20: note = Description of Artificial Sequence: Synthetic oligonucleotide
  misc_feature 1..20: note = Target: SCN10A; (+) strand; PAM type: NRG; PAM sequence: GAG
  source 1..20: mol_type = other DNA
ggtgagaggccacatgagca

SEQ ID NO: 36145 - DNA, 20 bp, synthetic construct
  misc_feature 1..20: note = Description of Artificial Sequence: Synthetic oligonucleotide
  misc_feature 1..20: note = Target: SCN10A; (+) strand; PAM type: NRG; PAM sequence: CAG
  source 1..20: mol_type = other DNA
agaggccacatgagcagaga

SEQ ID NO: 36146 - DNA, 20 bp, synthetic construct
  misc_feature 1..20: note = Description of Artificial Sequence: Synthetic oligonucleotide
  misc_feature 1..20: note = Target: SCN10A; (+) strand; PAM type: NRG; PAM sequence: AGG
  source 1..20: mol_type = other DNA
gaggccacatgagcagagac

SEQ ID NO: 36147 - DNA, 20 bp, synthetic construct
  misc_feature 1..20: note = Description of Artificial Sequence: Synthetic oligonucleotide
  misc_feature 1..20: note = Target: SCN10A; (+) strand; PAM type: NRG; PAM sequence: TAG
  source 1..20: mol_type = other DNA
tgagcagagacaggacgtcc

SEQ ID NO: 36148 - DNA, 20 bp, synthetic construct
  misc_feature 1..20: note = Description of Artificial Sequence: Synthetic oligonucleotide
  misc_feature 1..20: note = Target: SCN10A; (+) strand; PAM type: NRG; PAM sequence: CAG
  source 1..20: mol_type = other DNA
agagacaggacgtcctagac

SEQ ID NO: 36149 - DNA, 20 bp, synthetic construct
  misc_feature 1..20: note = Description of Artificial Sequence: Synthetic oligonucleotide
  misc_feature 1..20: note = Target: SCN10A; (+) strand; PAM type: NRG; PAM sequence: AAG
  source 1..20: mol_type = other DNA
gtcctagaccagccatctcc

SEQ ID NO: 36150 - DNA, 20 bp, synthetic construct
  misc_feature 1..20: note = Description of Artificial Sequence: Synthetic oligonucleotide
  misc_feature 1..20: note = Target: SCN10A; (+) strand; PAM type: NRG; PAM sequence: GAG
  source 1..20: mol_type = other DNA
ctgtctgcatatgcatgaat

SEQ ID NO: 36151 - DNA, 20 bp, synthetic construct
  misc_feature 1..20: note = Description of Artificial Sequence: Synthetic oligonucleotide
  misc_feature 1..20: note = Target: SCN10A; (+) strand; PAM type: NRG; PAM sequence: TAG
  source 1..20: mol_type = other DNA
tgcatatgcatgaatgagcc

SEQ ID NO: 36152 - DNA, 20 bp, synthetic construct
  misc_feature 1..20: note = Description of Artificial Sequence: Synthetic oligonucleotide
  misc_feature 1..20: note = Target: SCN10A; (+) strand; PAM type: NRG; PAM sequence: CAG
  source 1..20: mol_type = other DNA
acccaatgcccatctgatcc

SEQ ID NO: 36153 - DNA, 20 bp, synthetic construct
  misc_feature 1..20: note = Description of Artificial Sequence: Synthetic oligonucleotide
  misc_feature 1..20: note = Target: SCN10A; (+) strand; PAM type: NRG; PAM sequence: CAG
  source 1..20: mol_type = other DNA
cagtccaaaatgctgatgca

SEQ ID NO: 36154 - DNA, 20 bp, synthetic construct
  misc_feature 1..20: note = Description of Artificial Sequence: Synthetic oligonucleotide
  misc_feature 1..20: note = Target: SCN10A; (+) strand; PAM type: NRG; PAM sequence: TGG
  source 1..20: mol_type = other DNA
tgttttaattcacaaaattt

SEQ ID NO: 36155 - DNA, 20 bp, synthetic construct
  misc_feature 1..20: note = Description of Artificial Sequence: Synthetic oligonucleotide
  misc_feature 1..20: note = Target: SCN10A; (+) strand; PAM type: NRG; PAM sequence: GGG
  source 1..20: mol_type = other DNA
gttttaattcacaaaatttt

SEQ ID NO: 36156 - DNA, 20 bp, synthetic construct
  misc_feature 1..20: note = Description of Artificial Sequence: Synthetic oligonucleotide
  misc_feature 1..20: note = Target: SCN10A; (+) strand; PAM type: NRG; PAM sequence: GGG
  source 1..20: mol_type = other DNA
ttttaattcacaaaattttg

SEQ ID NO: 36157 - DNA, 20 bp, synthetic construct
  misc_feature 1..20: note = Description of Artificial Sequence: Synthetic oligonucleotide
  misc_feature 1..20: note = Target: SCN10A; (+) strand; PAM type: NRG; PAM sequence: CAG
  source 1..20: mol_type = other DNA
ttttggggtcatttgttaca

SEQ ID NO: 36158 - DNA, 20 bp, synthetic construct
  misc_feature 1..20: note = Description of Artificial Sequence: Synthetic oligonucleotide
  misc_feature 1..20: note = Target: SCN10A; (+) strand; PAM type: NRG; PAM sequence: AAG
  source 1..20: mol_type = other DNA
ggtcatttgttacacagcga

SEQ ID NO: 36159 - DNA, 20 bp, synthetic construct
  misc_feature 1..20: note = Description of Artificial Sequence: Synthetic oligonucleotide
  misc_feature 1..20: note = Target: SCN10A; (+) strand; PAM type: NRG; PAM sequence: GAG
  source 1..20: mol_type = other DNA
ctcatacattccctccccat

SEQ ID NO: 36160 - DNA, 20 bp, synthetic construct
  misc_feature 1..20: note = Description of Artificial Sequence: Synthetic oligonucleotide
  misc_feature 1..20: note = Target: SCN10A; (+) strand; PAM type: NRG; PAM sequence: TGG
  source 1..20: mol_type = other DNA
cattccctccccatgagctc

SEQ ID NO: 36161 - DNA, 20 bp, synthetic construct
  misc_feature 1..20: note = Description of Artificial Sequence: Synthetic oligonucleotide
  misc_feature 1..20: note = Target: SCN10A; (+) strand; PAM type: NRG; PAM sequence: GGG
  source 1..20: mol_type = other DNA
attccctccccatgagctct

SEQ ID NO: 36162 - DNA, 20 bp, synthetic construct
  misc_feature 1..20: note = Description of Artificial Sequence: Synthetic oligonucleotide
  misc_feature 1..20: note = Target: SCN10A; (+) strand; PAM type: NRG; PAM sequence: TGG
  source 1..20: mol_type = other DNA
cctccccatgagctctgggt

SEQ ID NO: 36163 - DNA, 20 bp, synthetic construct
  misc_feature 1..20: note = Description of Artificial Sequence: Synthetic oligonucleotide
  misc_feature 1..20: note = Target: SCN10A; (+) strand; PAM type: NRG; PAM sequence: AAG
  source 1..20: mol_type = other DNA
ccatgagctctgggttggca

SEQ ID NO: 36164 - DNA, 20 bp, synthetic construct
  misc_feature 1..20: note = Description of Artificial Sequence: Synthetic oligonucleotide
  misc_feature 1..20: note = Target: SCN10A; (+) strand; PAM type: NRG; PAM sequence: AGG
  source 1..20: mol_type = other DNA
catgagctctgggttggcaa

SEQ ID NO: 36165 - DNA, 20 bp, synthetic construct
  misc_feature 1..20: note = Description of Artificial Sequence: Synthetic oligonucleotide
  misc_feature 1..20: note = Target: SCN10A; (+) strand; PAM type: NRG; PAM sequence: CAG
  source 1..20: mol_type = other DNA
atttatttatacatctttcc

SEQ ID NO: 36166 - DNA, 20 bp, synthetic construct
  misc_feature 1..20: note = Description of Artificial Sequence: Synthetic oligonucleotide
  misc_feature 1..20: note = Target: SCN10A; (+) strand; PAM type: NRG; PAM sequence: AGG
  source 1..20: mol_type = other DNA
tttatttatacatctttccc

SEQ ID NO: 36167 - DNA, 20 bp, synthetic construct
  misc_feature 1..20: note = Description of Artificial Sequence: Synthetic oligonucleotide
  misc_feature 1..20: note = Target: SCN10A; (+) strand; PAM type: NRG; PAM sequence: AAG
  source 1..20: mol_type = other DNA
atctgtgcccataatatgcc

SEQ ID NO: 36168 - DNA, 20 bp, synthetic construct
  misc_feature 1..20: note = Description of Artificial Sequence: Synthetic oligonucleotide
  misc_feature 1..20: note = Target: SCN10A; (+) strand; PAM type: NRG; PAM sequence: AGG
  source 1..20: mol_type = other DNA
tctgtgcccataatatgcca

SEQ ID NO: 36169 - DNA, 20 bp, synthetic construct
  misc_feature 1..20: note = Description of Artificial Sequence: Synthetic oligonucleotide
  misc_feature 1..20: note = Target: SCN10A; (+) strand; PAM type: NRG; PAM sequence: AAG
  source 1..20: mol_type = other DNA
gcccataatatgccaaggac

SEQ ID NO: 36170 - DNA, 20 bp, synthetic construct
  misc_feature 1..20: note = Description of Artificial Sequence: Synthetic oligonucleotide
  misc_feature 1..20: note = Target: SCN10A; (+) strand; PAM type: NRG; PAM sequence: TGG
  source 1..20: mol_type = other DNA
ataatatgccaaggacaaga

SEQ ID NO: 36171 - DNA, 20 bp, synthetic construct
  misc_feature 1..20: note = Description of Artificial Sequence: Synthetic oligonucleotide
  misc_feature 1..20: note = Target: SCN10A; (+) strand; PAM type: NRG; PAM sequence: GAG
  source 1..20: mol_type = other DNA
aatatgccaaggacaagatg

SEQ ID NO: 36172 - DNA, 20 bp, synthetic construct
  misc_feature 1..20: note = Description of Artificial Sequence: Synthetic oligonucleotide
  misc_feature 1..20: note = Target: SCN10A; (+) strand; PAM type: NRG; PAM sequence: AAG
  source 1..20: mol_type = other DNA
atgccaaggacaagatggag

SEQ ID NO: 36173 - DNA, 20 bp, synthetic construct
  misc_feature 1..20: note = Description of Artificial Sequence: Synthetic oligonucleotide
  misc_feature 1..20: note = Target: SCN10A; (+) strand; PAM type: NRG; PAM sequence: AGG
  source 1..20: mol_type = other DNA
tgccaaggacaagatggaga

SEQ ID NO: 36174 - DNA, 20 bp, synthetic construct
  misc_feature 1..20: note = Description of Artificial Sequence: Synthetic oligonucleotide
  misc_feature 1..20: note = Target: SCN10A; (+) strand; PAM type: NRG; PAM sequence: TGG
  source 1..20: mol_type = other DNA
caagatggagaaggaattgt

SEQ ID NO: 36175 - DNA, 20 bp, synthetic construct
  misc_feature 1..20: note = Description of Artificial Sequence: Synthetic oligonucleotide
  misc_feature 1..20: note = Target: SCN10A; (+) strand; PAM type: NRG; PAM sequence: GGG
  source 1..20: mol_type = other DNA
aagatggagaaggaattgtt

SEQ ID NO: 36176 - DNA, 20 bp, synthetic construct
  misc_feature 1..20: note = Description of Artificial Sequence: Synthetic oligonucleotide
  misc_feature 1..20: note = Target: SCN10A; (+) strand; PAM type: NRG; PAM sequence: AAG
  source 1..20: mol_type = other DNA
gggcactcgtgctttgtcat

SEQ ID NO: 36177 - DNA, 20 bp, synthetic construct
  misc_feature 1..20: note = Description of Artificial Sequence: Synthetic oligonucleotide
  misc_feature 1..20: note = Target: SCN10A; (+) strand; PAM type: NRG; PAM sequence: TGG
  source 1..20: mol_type = other DNA
actcgtgctttgtcataagt

SEQ ID NO: 36178 - DNA, 20 bp, synthetic construct
  misc_feature 1..20: note = Description of Artificial Sequence: Synthetic oligonucleotide
  misc_feature 1..20: note = Target: SCN10A; (+) strand; PAM type: NRG; PAM sequence: GGG
  source 1..20: mol_type = other DNA
ctcgtgctttgtcataagtt

SEQ ID NO: 36179 - DNA, 20 bp, synthetic construct
  misc_feature 1..20: note = Description of Artificial Sequence: Synthetic oligonucleotide
  misc_feature 1..20: note = Target: SCN10A; (+) strand; PAM type: NRG; PAM sequence: GAG
  source 1..20: mol_type = other DNA
ataagttgggaactcaccct

SEQ ID NO: 36180 - DNA, 20 bp, synthetic construct
  misc_feature 1..20: note = Description of Artificial Sequence: Synthetic oligonucleotide
  misc_feature 1..20: note = Target: SCN10A; (+) strand; PAM type: NRG; PAM sequence: CAG
  source 1..20: mol_type = other DNA
gttgggaactcaccctgagt

SEQ ID NO: 36181 - DNA, 20 bp, synthetic construct
  misc_feature 1..20: note = Description of Artificial Sequence: Synthetic oligonucleotide
  misc_feature 1..20: note = Target: SCN10A; (+) strand; PAM type: NRG; PAM sequence: CAG
  source 1..20: mol_type = other DNA
gagtcagatccattgccaca

SEQ ID NO: 36182 - DNA, 20 bp, synthetic construct
  misc_feature 1..20: note = Description of Artificial Sequence: Synthetic oligonucleotide
  misc_feature 1..20: note = Target: SCN10A; (+) strand; PAM type: NRG; PAM sequence: AAG
  source 1..20: mol_type = other DNA
cagatccattgccacacagt

SEQ ID NO: 36183 - DNA, 20 bp, synthetic construct
  misc_feature 1..20: note = Description of Artificial Sequence: Synthetic oligonucleotide
  misc_feature 1..20: note = Target: SCN10A; (+) strand; PAM type: NRG; PAM sequence: AGG
  source 1..20: mol_type = other DNA
agatccattgccacacagta

SEQ ID NO: 36184 - DNA, 20 bp, synthetic construct
  misc_feature 1..20: note = Description of Artificial Sequence: Synthetic oligonucleotide
  misc_feature 1..20: note = Target: SCN10A; (+) strand; PAM type: NRG; PAM sequence: GGG
  source 1..20: mol_type = other DNA
gatccattgccacacagtaa

SEQ ID NO: 36185 - DNA, 20 bp, synthetic construct
  misc_feature 1..20: note = Description of Artificial Sequence: Synthetic oligonucleotide
  misc_feature 1..20: note = Target: SCN10A; (+) strand; PAM type: NRG; PAM sequence: GGG
  source 1..20: mol_type = other DNA
atccattgccacacagtaag

SEQ ID NO: 36186 - DNA, 20 bp, synthetic construct
  misc_feature 1..20: note = Description of Artificial Sequence: Synthetic oligonucleotide
  misc_feature 1..20: note = Target: SCN10A; (+) strand; PAM type: NRG; PAM sequence: CAG
  source 1..20: mol_type = other DNA
attgccacacagtaaggggt

SEQ ID NO: 36187 - DNA, 20 bp, synthetic construct
  misc_feature 1..20: note = Description of Artificial Sequence: Synthetic oligonucleotide
  misc_feature 1..20: note = Target: SCN10A; (+) strand; PAM type: NRG; PAM sequence: AAG
  source 1..20: mol_type = other DNA
gccacacagtaaggggtcag

SEQ ID NO: 36188 - DNA, 20 bp, synthetic construct
  misc_feature 1..20: note = Description of Artificial Sequence: Synthetic oligonucleotide
  misc_feature 1..20: note = Target: SCN10A; (+) strand; PAM type: NRG; PAM sequence: TAG
  source 1..20: mol_type = other DNA
aagtgcctcgcttatttatg

SEQ ID NO: 36189 - DNA, 20 bp, synthetic construct
  misc_feature 1..20: note = Description of Artificial Sequence: Synthetic oligonucleotide
  misc_feature 1..20: note = Target: SCN10A; (+) strand; PAM type: NRG; PAM sequence: AAG
  source 1..20: mol_type = other DNA
atttatgtagatatctgctg

SEQ ID NO: 36190 - DNA, 20 bp, synthetic construct
  misc_feature 1..20: note = Description of Artificial Sequence: Synthetic oligonucleotide
  misc_feature 1..20: note = Target: SCN10A; (+) strand; PAM type: NRG; PAM sequence: AAG
  source 1..20: mol_type = other DNA
atgtagatatctgctgaaga

SEQ ID NO: 36191 - DNA, 20 bp, synthetic construct
  misc_feature 1..20: note = Description of Artificial Sequence: Synthetic oligonucleotide
  misc_feature 1..20: note = Target: SCN10A; (+) strand; PAM type: NRG; PAM sequence: AGG
  source 1..20: mol_type = other DNA
tgtagatatctgctgaagaa

SEQ ID NO: 36192 - DNA, 20 bp, synthetic construct
  misc_feature 1..20: note = Description of Artificial Sequence: Synthetic oligonucleotide
  misc_feature 1..20: note = Target: SCN10A; (+) strand; PAM type: NRG; PAM sequence: AAG
  source 1..20: mol_type = other DNA
agatatctgctgaagaaagg

SEQ ID NO: 36193 - DNA, 20 bp, synthetic construct
  misc_feature 1..20: note = Description of Artificial Sequence: Synthetic oligonucleotide
  misc_feature 1..20: note = Target: SCN10A; (+) strand; PAM type: NRG; PAM sequence: AAG
  source 1..20: mol_type = other DNA
tctgctgaagaaaggaagaa

SEQ ID NO: 36194 - DNA, 20 bp, synthetic construct
  misc_feature 1..20: note = Description of Artificial Sequence: Synthetic oligonucleotide
  misc_feature 1..20: note = Target: SCN10A; (+) strand; PAM type: NRG; PAM sequence: AAG
  source 1..20: mol_type = other DNA
ctgaagaaaggaagaaaaga

SEQ ID NO: 36195 - DNA, 20 bp, synthetic construct
  misc_feature 1..20: note = Description of Artificial Sequence: Synthetic oligonucleotide
  misc_feature 1..20: note = Target: SCN10A; (+) strand; PAM type: NRG; PAM sequence: CAG
  source 1..20: mol_type = other DNA
aggaagaaaagaaagcctca

SEQ ID NO: 36196 - DNA, 20 bp, synthetic construct
  misc_feature 1..20: note = Description of Artificial Sequence: Synthetic oligonucleotide
  misc_feature 1..20: note = Target: SCN10A; (+) strand; PAM type: NRG; PAM sequence: TGG
  source 1..20: mol_type = other DNA
agaaaagaaagcctcacaga

SEQ ID NO: 36197 - DNA, 20 bp, synthetic construct
  misc_feature 1..20: note = Description of Artificial Sequence: Synthetic oligonucleotide
  misc_feature 1..20: note = Target: SCN10A; (+) strand; PAM type: NRG; PAM sequence: AAG
  source 1..20: mol_type = other DNA
ggttctgaaccctccaaccc

SEQ ID NO: 36198 - DNA, 20 bp, synthetic construct
  misc_feature 1..20: note = Description of Artificial Sequence: Synthetic oligonucleotide
  misc_feature 1..20: note = Target: SCN10A; (+) strand; PAM type: NRG; PAM sequence: TGG
  source 1..20: mol_type = other DNA
cctccaacccaagccttgtg

SEQ ID NO: 36199 - DNA, 20 bp, synthetic construct
  misc_feature 1..20: note = Description of Artificial Sequence: Synthetic oligonucleotide
  misc_feature 1..20: note = Target: SCN10A; (+) strand; PAM type: NRG; PAM sequence: AAG
  source 1..20: mol_type = other DNA
gtggtgaatgcaatattccc

SEQ ID NO: 36200 - DNA, 20 bp, synthetic construct
  misc_feature 1..20: note = Description of Artificial Sequence: Synthetic oligonucleotide
  misc_feature 1..20: note = Target: SCN10A; (+) strand; PAM type: NRG; PAM sequence: AAG
  source 1..20: mol_type = other DNA
caatattcccaagtcttcca

SEQ ID NO: 36201 - DNA, 20 bp, synthetic construct
  misc_feature 1..20: note = Description of Artificial Sequence: Synthetic oligonucleotide
  misc_feature 1..20: note = Target: SCN10A; (+) strand; PAM type: NRG; PAM sequence: GAG
  source 1..20: mol_type = other DNA
attcccaagtcttccaaagt

SEQ ID NO: 36202 - DNA, 20 bp, synthetic construct
  misc_feature 1..20: note = Description of Artificial Sequence: Synthetic oligonucleotide
  misc_feature 1..20: note = Target: SCN10A; (+) strand; PAM type: NRG; PAM sequence: TGG
  source 1..20: mol_type = other DNA
tcttccaaagtgagctcctt

SEQ ID NO: 36203 - DNA, 20 bp, synthetic construct
  misc_feature 1..20: note = Description of Artificial Sequence: Synthetic oligonucleotide
  misc_feature 1..20: note = Target: SCN10A; (+) strand; PAM type: NRG; PAM sequence: CAG
  source 1..20: mol_type = other DNA
ctcctttggctacatgtact

SEQ ID NO: 36204 - DNA, 20 bp, synthetic construct
  misc_feature 1..20: note = Description of Artificial Sequence: Synthetic oligonucleotide
  misc_feature 1..20: note = Target: SCN10A; (+) strand; PAM type: NRG; PAM sequence: TGG
  source 1..20: mol_type = other DNA
ctttggctacatgtactcag

SEQ ID NO: 36205 - DNA, 20 bp, synthetic construct
  misc_feature 1..20: note = Description of Artificial Sequence: Synthetic oligonucleotide
  misc_feature 1..20: note = Target: SCN10A; (+) strand; PAM type: NRG; PAM sequence: GGG
  source 1..20: mol_type = other DNA
tttggctacatgtactcagt

SEQ ID NO: 36206 - DNA, 20 bp, synthetic construct
  misc_feature 1..20: note = Description of Artificial Sequence: Synthetic oligonucleotide
  misc_feature 1..20: note = Target: SCN10A; (+) strand; PAM type: NRG; PAM sequence: TGG
  source 1..20: mol_type = other DNA
catgtactcagtgggcatgc

SEQ ID NO: 36207 - DNA, 20 bp, synthetic construct
  misc_feature 1..20: note = Description of Artificial Sequence: Synthetic oligonucleotide
  misc_feature 1..20: note = Target: SCN10A; (+) strand; PAM type: NRG; PAM sequence: GGG
  source 1..20: mol_type = other DNA
atgtactcagtgggcatgct

SEQ ID NO: 36208 - DNA, 20 bp, synthetic construct
  misc_feature 1..20: note = Description of Artificial Sequence: Synthetic oligonucleotide
  misc_feature 1..20: note = Target: SCN10A; (+) strand; PAM type: NRG; PAM sequence: TGG
  source 1..20: mol_type = other DNA
agtgggcatgctgggccaca

SEQ ID NO: 36209 - DNA, 20 bp, synthetic construct
  misc_feature 1..20: note = Description of Artificial Sequence: Synthetic oligonucleotide
  misc_feature 1..20: note = Target: SCN10A; (+) strand; PAM type: NRG; PAM sequence: AAG
  source 1..20: mol_type = other DNA
gggcatgctgggccacatgg

SEQ ID NO: 36210 - DNA, 20 bp, synthetic construct
  misc_feature 1..20: note = Description of Artificial Sequence: Synthetic oligonucleotide
  misc_feature 1..20: note = Target: SCN10A; (+) strand; PAM type: NRG; PAM sequence: AAG
  source 1..20: mol_type = other DNA
tgggccacatggaagttgta

SEQ ID NO: 36211 - DNA, 20 bp, synthetic construct
  misc_feature 1..20: note = Description of Artificial Sequence: Synthetic oligonucleotide
  misc_feature 1..20: note = Target: SCN10A; (+) strand; PAM type: NRG; PAM sequence: AAG
  source 1..20: mol_type = other DNA
gttgtaaagtcacatctgaa

SEQ ID NO: 36212 - DNA, 20 bp, synthetic construct
  misc_feature 1..20: note = Description of Artificial Sequence: Synthetic oligonucleotide
  misc_feature 1..20: note = Target: SCN10A; (+) strand; PAM type: NRG; PAM sequence: GAG
  source 1..20: mol_type = other DNA
tgtaaagtcacatctgaaaa

SEQ ID NO: 36213 - DNA, 20 bp, synthetic construct
  misc_feature 1..20: note = Description of Artificial Sequence: Synthetic oligonucleotide
  misc_feature 1..20: note = Target: SCN10A; (+) strand; PAM type: NRG; PAM sequence: AAG
  source 1..20: mol_type = other DNA
aaagtcacatctgaaaagag

SEQ ID NO: 36214 - DNA, 20 bp, synthetic construct
  misc_feature 1..20: note = Description of Artificial Sequence: Synthetic oligonucleotide
  misc_feature 1..20: note = Target: SCN10A; (+) strand; PAM type: NRG; PAM sequence: GAG
  source 1..20: mol_type = other DNA
agtcacatctgaaaagagaa

SEQ ID NO: 36215 - DNA, 20 bp, synthetic construct
  misc_feature 1..20: note = Description of Artificial Sequence: Synthetic oligonucleotide
  misc_feature 1..20: note = Target: SCN10A; (+) strand; PAM type: NRG; PAM sequence: AAG
  source 1..20: mol_type = other DNA
catctgaaaagagaagagct

SEQ ID NO: 36216 - DNA, 20 bp, synthetic construct
  misc_feature 1..20: note = Description of Artificial Sequence: Synthetic oligonucleotide
  misc_feature 1..20: note = Target: SCN10A; (+) strand; PAM type: NRG; PAM sequence: CAG
  source 1..20: mol_type = other DNA
ctgaaaagagaagagctaag

SEQ ID NO: 36217 - DNA, 20 bp, synthetic construct
  misc_feature 1..20: note = Description of Artificial Sequence: Synthetic oligonucleotide
  misc_feature 1..20: note = Target: SCN10A; (+) strand; PAM type: NRG; PAM sequence: CGG
  source 1..20: mol_type = other DNA
gaagagctaagcagtgactt

SEQ ID NO: 36218 - DNA, 20 bp, synthetic construct
  misc_feature 1..20: note = Description of Artificial Sequence: Synthetic oligonucleotide
  misc_feature 1..20: note = Target: SCN10A; (+) strand; PAM type: NRG; PAM sequence: CAG
  source 1..20: mol_type = other DNA
cttcggctctcaatctcccc

SEQ ID NO: 36219 - DNA, 20 bp, synthetic construct
  misc_feature 1..20: note = Description of Artificial Sequence: Synthetic oligonucleotide
  misc_feature 1..20: note = Target: SCN10A; (+) strand; PAM type: NRG; PAM sequence: CAG
  source 1..20: mol_type = other DNA
cggctctcaatctcccccag

SEQ ID NO: 36220 - DNA, 20 bp, synthetic construct
  misc_feature 1..20: note = Description of Artificial Sequence: Synthetic oligonucleotide
  misc_feature 1..20: note = Target: SCN10A; (+) strand; PAM type: NRG; PAM sequence: GAG
  source 1..20: mol_type = other DNA
gctctcaatctcccccagca

SEQ ID NO: 36221 - DNA, 20 bp, synthetic construct
  misc_feature 1..20: note = Description of Artificial Sequence: Synthetic oligonucleotide
  misc_feature 1..20: note = Target: SCN10A; (+) strand; PAM type: NRG; PAM sequence: AGG
  source 1..20: mol_type = other DNA
ctctcaatctcccccagcag

SEQ ID NO: 36222 - DNA, 20 bp, synthetic construct
  misc_feature 1..20: note = Description of Artificial Sequence: Synthetic oligonucleotide
  misc_feature 1..20: note = Target: SCN10A; (+) strand; PAM type: NRG; PAM sequence: TAG
  source 1..20: mol_type = other DNA
tcaatctcccccagcagagg

SEQ ID NO: 36223 - DNA, 20 bp, synthetic construct
  misc_feature 1..20: note = Description of Artificial Sequence: Synthetic oligonucleotide
  misc_feature 1..20: note = Target: SCN10A; (+) strand; PAM type: NRG; PAM sequence: TAG
  source 1..20: mol_type = other DNA
gaggtagaatgacttgcctc

SEQ ID NO: 36224 - DNA, 20 bp, synthetic construct
  misc_feature 1..20: note = Description of Artificial Sequence: Synthetic oligonucleotide
  misc_feature 1..20: note = Target: SCN10A; (+) strand; PAM type: NRG; PAM sequence: TGG
  source 1..20: mol_type = other DNA
atgacttgcctctagattta

SEQ ID NO: 36225 - DNA, 20 bp, synthetic construct
  misc_feature 1..20: note = Description of Artificial Sequence: Synthetic oligonucleotide
  misc_feature 1..20: note = Target: SCN10A; (+) strand; PAM type: NRG; PAM sequence: AAG
  source 1..20: mol_type = other DNA
tttatggctcatttccttgc

SEQ ID NO: 36226 - DNA, 20 bp, synthetic construct
  misc_feature 1..20: note = Description of Artificial Sequence: Synthetic oligonucleotide
  misc_feature 1..20: note = Target: SCN10A; (+) strand; PAM type: NRG; PAM sequence: GAG
  source 1..20: mol_type = other DNA
tatggctcatttccttgcaa

SEQ ID NO: 36227 - DNA, 20 bp, synthetic construct
  misc_feature 1..20: note = Description of Artificial Sequence: Synthetic oligonucleotide
  misc_feature 1..20: note = Target: SCN10A; (+) strand; PAM type: NRG; PAM sequence: AGG
  source 1..20: mol_type = other DNA
atggctcatttccttgcaag

SEQ ID NO: 36228 - DNA, 20 bp, synthetic construct
  misc_feature 1..20: note = Description of Artificial Sequence: Synthetic oligonucleotide
  misc_feature 1..20: note = Target: SCN10A; (+) strand; PAM type: NRG; PAM sequence: GGG
  source 1..20: mol_type = other DNA
tggctcatttccttgcaaga

SEQ ID NO: 36229 - DNA, 20 bp, synthetic construct
  misc_feature 1..20: note = Description of Artificial Sequence: Synthetic oligonucleotide
  misc_feature 1..20: note = Target: SCN10A; (+) strand; PAM type: NRG; PAM sequence: GAG
  source 1..20: mol_type = other DNA
ttccttgcaagagggatgct

SEQ ID NO: 36230 - DNA, 20 bp, synthetic construct
  misc_feature 1..20: note = Description of Artificial Sequence: Synthetic oligonucleotide
  misc_feature 1..20: note = Target: SCN10A; (+) strand; PAM type: NRG; PAM sequence: CAG
  source 1..20: mol_type = other DNA
gcaagagggatgctgagcaa

SEQ ID NO: 36231 - DNA, 20 bp, synthetic construct
  misc_feature 1..20: note = Description of Artificial Sequence: Synthetic oligonucleotide
  misc_feature 1..20: note = Target: SCN10A; (+) strand; PAM type: NRG; PAM sequence: AGG
  source 1..20: mol_type = other DNA
caagagggatgctgagcaac

SEQ ID NO: 36232 - DNA, 20 bp, synthetic construct
  misc_feature 1..20: note = Description of Artificial Sequence: Synthetic oligonucleotide
  misc_feature 1..20: note = Target: SCN10A; (+) strand; PAM type: NRG; PAM sequence: TAG
  source 1..20: mol_type = other DNA
ggatgctgagcaacaggaaa

SEQ ID NO: 36233 - DNA, 20 bp, synthetic construct
  misc_feature 1..20: note = Description of Artificial Sequence: Synthetic oligonucleotide
  misc_feature 1..20: note = Target: SCN10A; (+) strand; PAM type: NRG; PAM sequence: AAG
  source 1..20: mol_type = other DNA
acaggaaatagaatacccaa

SEQ ID NO: 36234 - DNA, 20 bp, synthetic construct
  misc_feature 1..20: note = Description of Artificial Sequence: Synthetic oligonucleotide
  misc_feature 1..20: note = Target: SCN10A; (+) strand; PAM type: NRG; PAM sequence: AAG
  source 1..20: mol_type = other DNA
ccaaaagtaaaacacaactc

SEQ ID NO: 36235 - DNA, 20 bp, synthetic construct
  misc_feature 1..20: note = Description of Artificial Sequence: Synthetic oligonucleotide
  misc_feature 1..20: note = Target: SCN10A; (+) strand; PAM type: NRG; PAM sequence: GAG
  source 1..20: mol_type = other DNA
aaaagtaaaacacaactcaa

SEQ ID NO: 36236 - DNA, 20 bp, synthetic construct
  misc_feature 1..20: note = Description of Artificial Sequence: Synthetic oligonucleotide
  misc_feature 1..20: note = Target: SCN10A; (+) strand; PAM type: NRG; PAM sequence: TGG
  source 1..20: mol_type = other DNA
acaactcaagagaaccattt

SEQ ID NO: 36237 - DNA, 20 bp, synthetic construct
  misc_feature 1..20: note = Description of Artificial Sequence: Synthetic oligonucleotide
  misc_feature 1..20: note = Target: SCN10A; (+) strand; PAM type: NRG; PAM sequence: CAG
  source 1..20: mol_type = other DNA
actcaagagaaccattttgg

SEQ ID NO: 36238 - DNA, 20 bp, synthetic construct
  misc_feature 1..20: note = Description of Artificial Sequence: Synthetic oligonucleotide
  misc_feature 1..20: note = Target: SCN10A; (+) strand; PAM type: NRG; PAM sequence: AGG
  source 1..20: mol_type = other DNA
ctcaagagaaccattttggc

SEQ ID NO: 36239 - DNA, 20 bp, synthetic construct
  misc_feature 1..20: note = Description of Artificial Sequence: Synthetic oligonucleotide
  misc_feature 1..20: note = Target: SCN10A; (+) strand; PAM type: NRG; PAM sequence: AAG
  source 1..20: mol_type = other DNA
agagaaccattttggcagga

SEQ ID NO: 36240 - DNA, 20 bp, synthetic construct
  misc_feature 1..20: note = Description of Artificial Sequence: Synthetic oligonucleotide
  misc_feature 1..20: note = Target: SCN10A; (+) strand; PAM type: NRG; PAM sequence: AGG
  source 1..20: mol_type = other DNA
gagaaccattttggcaggaa

SEQ ID NO: 36241 - DNA, 20 bp, synthetic construct
  misc_feature 1..20: note = Description of Artificial Sequence: Synthetic oligonucleotide
  misc_feature 1..20: note = Target: SCN10A; (+) strand; PAM type: NRG; PAM sequence: GGG
  source 1..20: mol_type = other DNA
agaaccattttggcaggaaa

SEQ ID NO: 36242 - DNA, 20 bp, synthetic construct
  misc_feature 1..20: note = Description of Artificial Sequence: Synthetic oligonucleotide
  misc_feature 1..20: note = Target: SCN10A; (+) strand; PAM type: NRG; PAM sequence: GGG
  source 1..20: mol_type = other DNA
gaaccattttggcaggaaag

SEQ ID NO: 36243 - DNA, 20 bp, synthetic construct
  misc_feature 1..20: note = Description of Artificial Sequence: Synthetic oligonucleotide
  misc_feature 1..20: note = Target: SCN10A; (+) strand; PAM type: NRG; PAM sequence: GAG
  source 1..20: mol_type = other DNA
accattttggcaggaaaggg

SEQ ID NO: 36244 - DNA, 20 bp, synthetic construct
  misc_feature 1..20: note = Description of Artificial Sequence: Synthetic oligonucleotide
  misc_feature 1..20: note = Target: SCN10A; (+) strand; PAM type: NRG; PAM sequence: CAG
  source 1..20: mol_type = other DNA
tatatgtctatacacacaca

SEQ ID NO: 36245 - DNA, 20 bp, synthetic construct
  misc_feature 1..20: note = Description of Artificial Sequence: Synthetic oligonucleotide
  misc_feature 1..20: note = Target: SCN10A; (+) strand; PAM type: NRG; PAM sequence: AGG
  source 1..20: mol_type = other DNA
atatgtctatacacacacac

SEQ ID NO: 36246 - DNA, 20 bp, synthetic construct
  misc_feature 1..20: note = Description of Artificial Sequence: Synthetic oligonucleotide
  misc_feature 1..20: note = Target: SCN10A; (+) strand; PAM type: NRG; PAM sequence: GGG
  source 1..20: mol_type = other DNA
tatgtctatacacacacaca

SEQ ID NO: 36247 - DNA, 20 bp, synthetic construct
  misc_feature 1..20: note = Description of Artificial Sequence: Synthetic oligonucleotide
  misc_feature 1..20: note = Target: SCN10A; (+) strand; PAM type: NRG; PAM sequence: GGG
  source 1..20: mol_type = other DNA
atgtctatacacacacacag

SEQ ID NO: 36248 - DNA, 20 bp, synthetic construct
  misc_feature 1..20: note = Description of Artificial Sequence: Synthetic oligonucleotide
  misc_feature 1..20: note = Target: SCN10A; (+) strand; PAM type: NRG; PAM sequence: AAG
  source 1..20: mol_type = other DNA
ccctgtccctatatgatacc

SEQ ID NO: 36249 - DNA, 20 bp, synthetic construct
  misc_feature 1..20: note = Description of Artificial Sequence: Synthetic oligonucleotide
  misc_feature 1..20: note = Target: SCN10A; (+) strand; PAM type: NRG; PAM sequence: AGG
  source 1..20: mol_type = other DNA
cctgtccctatatgatacca

SEQ ID NO: 36250 - DNA, 20 bp, synthetic construct
  misc_feature 1..20: note = Description of Artificial Sequence: Synthetic oligonucleotide
  misc_feature 1..20: note = Target: SCN10A; (+) strand; PAM type: NRG; PAM sequence: GGG
  source 1..20: mol_type = other DNA
ctgtccctatatgataccaa

SEQ ID NO: 36251 - DNA, 20 bp, synthetic construct
  misc_feature 1..20: note = Description of Artificial Sequence: Synthetic oligonucleotide
  misc_feature 1..20: note = Target: SCN10A; (+) strand; PAM type: NRG; PAM sequence: CAG
  source 1..20: mol_type = other DNA
tatgataccaagggtccaac

SEQ ID NO: 36252 - DNA, 20 bp, synthetic construct
  misc_feature 1..20: note = Description of Artificial Sequence: Synthetic oligonucleotide
  misc_feature 1..20: note = Target: SCN10A; (+) strand; PAM type: NRG; PAM sequence: TGG
  source 1..20: mol_type = other DNA
ccaagggtccaaccagacct

SEQ ID NO: 36253 - DNA, 20 bp, synthetic construct
  misc_feature 1..20: note = Description of Artificial Sequence: Synthetic oligonucleotide
  misc_feature 1..20: note = Target: SCN10A; (+) strand; PAM type: NRG; PAM sequence: TGG
  source 1..20: mol_type = other DNA
caaccagaccttggtcccta

SEQ ID NO: 36254 - DNA, 20 bp, synthetic construct
  misc_feature 1..20: note = Description of Artificial Sequence: Synthetic oligonucleotide
  misc_feature 1..20: note = Target: SCN10A; (+) strand; PAM type: NRG; PAM sequence: AAG
  source 1..20: mol_type = other DNA
ccagaccttggtccctatgg

SEQ ID NO: 36255 - DNA, 20 bp, synthetic construct
  misc_feature 1..20: note = Description of Artificial Sequence: Synthetic oligonucleotide
  misc_feature 1..20: note = Target: SCN10A; (+) strand; PAM type: NRG; PAM sequence: GAG
  source 1..20: mol_type = other DNA
agaccttggtccctatggaa

SEQ ID NO: 36256 - DNA, 20 bp, synthetic construct
  misc_feature 1..20: note = Description of Artificial Sequence: Synthetic oligonucleotide
  misc_feature 1..20: note = Target: SCN10A; (+) strand; PAM type: NRG; PAM sequence: GAG
  source 1..20: mol_type = other DNA
actccactcacgttttctgt

SEQ ID NO: 36257 - DNA, 20 bp, synthetic construct
  misc_feature 1..20: note = Description of Artificial Sequence: Synthetic oligonucleotide
  misc_feature 1..20: note = Target: SCN10A; (+) strand; PAM type: NRG; PAM sequence: GAG
  source 1..20: mol_type = other DNA
actcacgttttctgtgagat

SEQ ID NO: 36258 - DNA, 20 bp, synthetic construct
  misc_feature 1..20: note = Description of Artificial Sequence: Synthetic oligonucleotide
  misc_feature 1..20: note = Target: SCN10A; (+) strand; PAM type: NRG; PAM sequence: TAG
  source 1..20: mol_type = other DNA
cacgttttctgtgagatgag

SEQ ID NO: 36259 - DNA, 20 bp, synthetic construct
  misc_feature 1..20: note = Description of Artificial Sequence: Synthetic oligonucleotide
  misc_feature 1..20: note = Target: SCN10A; (+) strand; PAM type: NRG; PAM sequence: TGG
  source 1..20: mol_type = other DNA
ttttctgtgagatgagtagt

SEQ ID NO: 36260 - DNA, 20 bp, synthetic construct
  misc_feature 1..20: note = Description of Artificial Sequence: Synthetic oligonucleotide
  misc_feature 1..20: note = Target: SCN10A; (+) strand; PAM type: NRG; PAM sequence: CAG
  source 1..20: mol_type = other DNA
gtagttggttgtctcattga

SEQ ID NO: 36261 - DNA, 20 bp, synthetic construct
  misc_feature 1..20: note = Description of Artificial Sequence: Synthetic oligonucleotide
  misc_feature 1..20: note = Target: SCN10A; (+) strand; PAM type: NRG; PAM sequence: GAG
  source 1..20: mol_type = other DNA
ttcttgacacatttattttt

SEQ ID NO: 36262 - DNA, 20 bp, synthetic construct
  misc_feature 1..20: note = Description of Artificial Sequence: Synthetic oligonucleotide
  misc_feature 1..20: note = Target: SCN10A; (+) strand; PAM type: NRG; PAM sequence: AGG
  source 1..20: mol_type = other DNA
tcttgacacatttatttttg

SEQ ID NO: 36263 - DNA, 20 bp, synthetic construct
  misc_feature 1..20: note = Description of Artificial Sequence: Synthetic oligonucleotide
  misc_feature 1..20: note = Target: SCN10A; (+) strand; PAM type: NRG; PAM sequence: AAG
  source 1..20: mol_type = other DNA
tatttttgaggttgcccttg

SEQ ID NO: 36264 - DNA, 20 bp, synthetic construct
  misc_feature 1..20: note = Description of Artificial Sequence: Synthetic oligonucleotide
  misc_feature 1..20: note = Target: SCN10A; (+) strand; PAM type: NRG; PAM sequence: GAG
  source 1..20: mol_type = other DNA
tttttgaggttgcccttgaa

SEQ ID NO: 36265 - DNA, 20 bp, synthetic construct
  misc_feature 1..20: note = Description of Artificial Sequence: Synthetic oligonucleotide
  misc_feature 1..20: note = Target: SCN10A; (+) strand; PAM type: NRG; PAM sequence: CAG
  source 1..20: mol_type = other DNA
aggttgcccttgaagagttg

SEQ ID NO: 36266 - DNA, 20 bp, synthetic construct
  misc_feature 1..20: note = Description of Artificial Sequence: Synthetic oligonucleotide
  misc_feature 1..20: note = Target: SCN10A; (+) strand; PAM type: NRG; PAM sequence: AAG
  source 1..20: mol_type = other DNA
tgaagagttgcagccccacc

SEQ ID NO: 36267 - DNA, 20 bp, synthetic construct
  misc_feature 1..20: note = Description of Artificial Sequence: Synthetic oligonucleotide
  misc_feature 1..20: note = Target: SCN10A; (+) strand; PAM type: NRG; PAM sequence: AGG
  source 1..20: mol_type = other DNA
gaagagttgcagccccacca

SEQ ID NO: 36268 - DNA, 20 bp, synthetic construct
  misc_feature 1..20: note = Description of Artificial Sequence: Synthetic oligonucleotide
  misc_feature 1..20: note = Target: SCN10A; (+) strand; PAM type: NRG; PAM sequence: TAG
  source 1..20: mol_type = other DNA
cccaccaaggcaaaaacact

SEQ ID NO: 36269 - DNA, 20 bp, synthetic construct
  misc_feature 1..20: note = Description of Artificial Sequence: Synthetic oligonucleotide
  misc_feature 1..20: note = Target: SCN10A; (+) strand; PAM type: NRG; PAM sequence: AGG
  source 1..20: mol_type = other DNA
ccaccaaggcaaaaacactt

SEQ ID NO: 36270 - DNA, 20 bp, synthetic construct
  misc_feature 1..20: note = Description of Artificial Sequence: Synthetic oligonucleotide
  misc_feature 1..20: note = Target: SCN10A; (+) strand; PAM type: NRG; PAM sequence: CAG
  source 1..20: mol_type = other DNA
ccaaggcaaaaacacttagg

SEQ ID NO: 36271 - DNA, 20 bp, synthetic construct
  misc_feature 1..20: note = Description of Artificial Sequence: Synthetic oligonucleotide
  misc_feature 1..20: note = Target: SCN10A; (+) strand; PAM type: NRG; PAM sequence: AAG
  source 1..20: mol_type = other DNA
aggcaaaaacacttaggcag

SEQ ID NO: 36272 - DNA, 20 bp, synthetic construct
  misc_feature 1..20: note = Description of Artificial Sequence: Synthetic oligonucleotide
  misc_feature 1..20: note = Target: SCN10A; (+) strand; PAM type: NRG; PAM sequence: TGG
  source 1..20: mol_type = other DNA
aaaaacacttaggcagaaga

SEQ ID NO: 36273 - DNA, 20 bp, synthetic construct
  misc_feature 1..20: note = Description of Artificial Sequence: Synthetic oligonucleotide
  misc_feature 1..20: note = Target: SCN10A; (+) strand; PAM type: NRG; PAM sequence: GAG
  source 1..20: mol_type = other DNA
acacttaggcagaagatggt

SEQ ID NO: 36274 - DNA, 20 bp, synthetic construct
  misc_feature 1..20: note = Description of Artificial Sequence: Synthetic oligonucleotide
  misc_feature 1..20: note = Target: SCN10A; (+) strand; PAM type: NRG; PAM sequence: AGG
  source 1..20: mol_type = other DNA
cacttaggcagaagatggtg

SEQ ID NO: 36275 - DNA, 20 bp, synthetic construct
  misc_feature 1..20: note = Description of Artificial Sequence: Synthetic oligonucleotide
  misc_feature 1..20: note = Target: SCN10A; (+) strand; PAM type: NRG; PAM sequence: TGG
  source 1..20: mol_type = other DNA
taggcagaagatggtgagga

SEQ ID NO: 36276 - DNA, 20 bp, synthetic construct
  misc_feature 1..20: note = Description of Artificial Sequence: Synthetic oligonucleotide
  misc_feature 1..20: note = Target: SCN10A; (+) strand; PAM type: NRG; PAM sequence: CAG
  source 1..20: mol_type = other DNA
gatggtgaggatggtcacat

SEQ ID NO: 36277 - DNA, 20 bp, synthetic construct
  misc_feature 1..20: note = Description of Artificial Sequence: Synthetic oligonucleotide
  misc_feature 1..20: note = Target: SCN10A; (+) strand; PAM type: NRG; PAM sequence: CAG
  source 1..20: mol_type = other DNA
gtgaggatggtcacatcagc

SEQ ID NO: 36278 - DNA, 20 bp, synthetic construct
  misc_feature 1..20: note = Description of Artificial Sequence: Synthetic oligonucleotide
  misc_feature 1..20: note = Target: SCN10A; (+) strand; PAM type: NRG; PAM sequence: GAG
  source 1..20: mol_type = other DNA
catcagccagtttcttcact

SEQ ID NO: 36279 - DNA, 20 bp, synthetic construct
  misc_feature 1..20: note = Description of Artificial Sequence: Synthetic oligonucleotide
  misc_feature 1..20: note = Target: SCN10A; (+) strand; PAM type: NRG; PAM sequence: CAG
  source 1..20: mol_type = other DNA
agtttcttcactgagtgaat

SEQ ID NO: 36280 - DNA, 20 bp, synthetic construct
  misc_feature 1..20: note = Description of Artificial Sequence: Synthetic oligonucleotide
  misc_feature 1..20: note = Target: SCN10A; (+) strand; PAM type: NRG; PAM sequence: AGG
  source 1..20: mol_type = other DNA
gtttcttcactgagtgaatc

SEQ ID NO: 36281 - DNA, 20 bp, synthetic construct
  misc_feature 1..20: note = Description of Artificial Sequence: Synthetic oligonucleotide
  misc_feature 1..20: note = Target: SCN10A; (+) strand; PAM type: NRG; PAM sequence: GGG
  source 1..20: mol_type = other DNA
tttcttcactgagtgaatca

SEQ ID NO: 36282 - DNA, 20 bp, synthetic construct
  misc_feature 1..20: note = Description of Artificial Sequence: Synthetic oligonucleotide
  misc_feature 1..20: note = Target: SCN10A; (+) strand; PAM type: NRG; PAM sequence: CAG
  source 1..20: mol_type = other DNA
agggcccccacaatgacctt

SEQ ID NO: 36283 - DNA, 20 bp, synthetic construct
  misc_feature 1..20: note = Description of Artificial Sequence: Synthetic oligonucleotide
  misc_feature 1..20: note = Target: SCN10A; (+) strand; PAM type: NRG; PAM sequence: AGG
  source 1..20: mol_type = other DNA
gggcccccacaatgaccttc

SEQ ID NO: 36284 - DNA, 20 bp, synthetic construct
  misc_feature 1..20: note = Description of Artificial Sequence: Synthetic oligonucleotide
  misc_feature 1..20: note = Target: SCN10A; (+) strand; PAM type: NRG; PAM sequence: CGG
  source 1..20: mol_type = other DNA
cacaatgaccttcaggcctg

SEQ ID NO: 36285 - DNA, 20 bp, synthetic construct
  misc_feature 1..20: note = Description of Artificial Sequence: Synthetic oligonucleotide
  misc_feature 1..20: note = Target: SCN10A; (+) strand; PAM type: NRG; PAM sequence: GGG
  source 1..20: mol_type = other DNA
acaatgaccttcaggcctgc

SEQ ID NO: 36286 - DNA, 20 bp, synthetic construct
  misc_feature 1..20: note = Description of Artificial Sequence: Synthetic oligonucleotide
  misc_feature 1..20: note = Target: SCN10A; (+) strand; PAM type: NRG; PAM sequence: AAG
  source 1..20: mol_type = other DNA
atgaccttcaggcctgcggg

SEQ ID NO: 36287 - DNA, 20 bp, synthetic construct
  misc_feature 1..20: note = Description of Artificial Sequence: Synthetic oligonucleotide
  misc_feature 1..20: note = Target: SCN10A; (+) strand; PAM type: NRG; PAM sequence: CAG
  source 1..20: mol_type = other DNA
tcaggcctgcgggaagatga

SEQ ID NO: 36288 - DNA, 20 bp, synthetic construct
  misc_feature 1..20: note = Description of Artificial Sequence: Synthetic oligonucleotide
  misc_feature 1..20: note = Target: SCN10A; (+) strand; PAM type: NRG; PAM sequence: TGG
  source 1..20: mol_type = other DNA
ggcctgcgggaagatgacag

SEQ ID NO: 36289 - DNA, 20 bp, synthetic construct
  misc_feature 1..20: note = Description of Artificial Sequence: Synthetic oligonucleotide
  misc_feature 1..20: note = Target: SCN10A; (+) strand; PAM type: NRG; PAM sequence: TGG
  source 1..20: mol_type = other DNA
atgacagtggtatgaccaca

SEQ ID NO: 36290 - DNA, 20 bp, synthetic construct
  misc_feature 1..20: note = Description of Artificial Sequence: Synthetic oligonucleotide
  misc_feature 1..20: note = Target: SCN10A; (+) strand; PAM type: NRG; PAM sequence: GAG
  source 1..20: mol_type = other DNA
agtggtatgaccacatggat

SEQ ID NO: 36291 - DNA, 20 bp, synthetic construct
  misc_feature 1..20: note = Description of Artificial Sequence: Synthetic oligonucleotide
  misc_feature 1..20: note = Target: SCN10A; (+) strand; PAM type: NRG; PAM sequence: AGG
  source 1..20: mol_type = other DNA
gtggtatgaccacatggatg

SEQ ID NO: 36292 - DNA, 20 bp, synthetic construct
  misc_feature 1..20: note = Description of Artificial Sequence: Synthetic oligonucleotide
  misc_feature 1..20: note = Target: SCN10A; (+) strand; PAM type: NRG; PAM sequence: TAG
  source 1..20: mol_type = other DNA
gtatgaccacatggatgagg

SEQ ID NO: 36293 - DNA, 20 bp, synthetic construct
  misc_feature 1..20: note = Description of Artificial Sequence: Synthetic oligonucleotide
  misc_feature 1..20: note = Target: SCN10A; (+) strand; PAM type: NRG; PAM sequence: CGG
  source 1..20: mol_type = other DNA
catggatgaggtagcacaca

SEQ ID NO: 36294 - DNA, 20 bp, synthetic construct
  misc_feature 1..20: note = Description of Artificial Sequence: Synthetic oligonucleotide
  misc_feature 1..20: note = Target: SCN10A; (+) strand; PAM type: NRG; PAM sequence: GAG
  source 1..20: mol_type = other DNA
tggatgaggtagcacacacg

SEQ ID NO: 36295 - DNA, 20 bp, synthetic construct
  misc_feature 1..20: note = Description of Artificial Sequence: Synthetic oligonucleotide
  misc_feature 1..20: note = Target: SCN10A; (+) strand; PAM type: NRG; PAM sequence: TAG
  source 1..20: mol_type = other DNA
cggagcacacttcttcatct

SEQ ID NO: 36296 - DNA, 20 bp, synthetic construct
  misc_feature 1..20: note = Description of Artificial Sequence: Synthetic oligonucleotide
  misc_feature 1..20: note = Target: SCN10A; (+) strand; PAM type: NRG; PAM sequence: CAG
  source 1..20: mol_type = other DNA
tcctccttcatctctacata

SEQ ID NO: 36297 - DNA, 20 bp, synthetic construct
  misc_feature 1..20: note = Description of Artificial Sequence: Synthetic oligonucleotide
  misc_feature 1..20: note = Target: SCN10A; (+) strand; PAM type: NRG; PAM sequence: AGG
  source 1..20: mol_type = other DNA
cctccttcatctctacatac

SEQ ID NO: 36298 - DNA, 20 bp, synthetic construct
  misc_feature 1..20: note = Description of Artificial Sequence: Synthetic oligonucleotide
  misc_feature 1..20: note = Target: SCN10A; (+) strand; PAM type: NRG; PAM sequence: GAG
  source 1..20: mol_type = other DNA
tccttcatctctacatacag

SEQ ID NO: 36299 - DNA, 20 bp, synthetic construct
  misc_feature 1..20: note = Description of Artificial Sequence: Synthetic oligonucleotide
  misc_feature 1..20: note = Target: SCN10A; (+) strand; PAM type: NRG; PAM sequence: AAG
  source 1..20: mol_type = other DNA
catctctacatacaggagtg

SEQ ID NO: 36300 - DNA, 20 bp, synthetic construct
  misc_feature 1..20: note = Description of Artificial Sequence: Synthetic oligonucleotide
  misc_feature 1..20: note = Target: SCN10A; (+) strand; PAM type: NRG; PAM sequence: CAG
  source 1..20: mol_type = other DNA
agtgaagtatgtacacactc

SEQ ID NO: 36301 - DNA, 20 bp, synthetic construct
  misc_feature 1..20: note = Description of Artificial Sequence: Synthetic oligonucleotide
  misc_feature 1..20: note = Target: SCN10A; (+) strand; PAM type: NRG; PAM sequence: AGG
  source 1..20: mol_type = other DNA
gtgaagtatgtacacactcc

SEQ ID NO: 36302 - DNA, 20 bp, synthetic construct
  misc_feature 1..20: note = Description of Artificial Sequence: Synthetic oligonucleotide
  misc_feature 1..20: note = Target: SCN10A; (+) strand; PAM type: NRG; PAM sequence: GGG
  source 1..20: mol_type = other DNA
tgaagtatgtacacactcca

SEQ ID NO: 36303 - DNA, 20 bp, synthetic construct
  misc_feature 1..20: note = Description of Artificial Sequence: Synthetic oligonucleotide
  misc_feature 1..20: note = Target: SCN10A; (+) strand; PAM type: NRG; PAM sequence: CAG
  source 1..20: mol_type = other DNA
agtatgtacacactccaggg

SEQ ID NO: 36304 - DNA, 20 bp, synthetic construct
  misc_feature 1..20: note = Description of Artificial Sequence: Synthetic oligonucleotide
  misc_feature 1..20: note = Target: SCN10A; (+) strand; PAM type: NRG; PAM sequence: AAG
  source 1..20: mol_type = other DNA
acacactccagggcagttcc

SEQ ID NO: 36305 - DNA, 20 bp, synthetic construct
  misc_feature 1..20: note = Description of Artificial Sequence: Synthetic oligonucleotide
  misc_feature 1..20: note = Target: SCN10A; (+) strand; PAM type: NRG; PAM sequence: AAG
  source 1..20: mol_type = other DNA
tccaagacctttctcatccg

SEQ ID NO: 36306 - DNA, 20 bp, synthetic construct
  misc_feature 1..20: note = Description of Artificial Sequence: Synthetic oligonucleotide
  misc_feature 1..20: note = Target: SCN10A; (+) strand; PAM type: NRG; PAM sequence: GAG
  source 1..20: mol_type = other DNA
ccgaagcttgcatttactct

SEQ ID NO: 36307 - DNA, 20 bp, synthetic construct
  misc_feature 1..20: note = Description of Artificial Sequence: Synthetic oligonucleotide
  misc_feature 1..20: note = Target: SCN10A; (+) strand; PAM type: NRG; PAM sequence: GAG
  source 1..20: mol_type = other DNA
gaagcttgcatttactctga

SEQ ID NO: 36308 - DNA, 20 bp, synthetic construct
  misc_feature 1..20: note = Description of Artificial Sequence: Synthetic oligonucleotide
  misc_feature 1..20: note = Target: SCN10A; (+) strand; PAM type: NRG; PAM sequence: AGG
  source 1..20: mol_type = other DNA
aagcttgcatttactctgag

SEQ ID NO: 36309 - DNA, 20 bp, synthetic construct
  misc_feature 1..20: note = Description of Artificial Sequence: Synthetic oligonucleotide
  misc_feature 1..20: note = Target: SCN10A; (+) strand; PAM type: NRG; PAM sequence: CAG
  source 1..20: mol_type = other DNA
cttgcatttactctgagagg

SEQ ID NO: 36310 - DNA, 20 bp, synthetic construct
  misc_feature 1..20: note = Description of Artificial Sequence: Synthetic oligonucleotide
  misc_feature 1..20: note = Target: SCN10A; (+) strand; PAM type: NRG; PAM sequence: AGG
  source 1..20: mol_type = other DNA
ttgcatttactctgagaggc

SEQ ID NO: 36311 - DNA, 20 bp, synthetic construct
  misc_feature 1..20: note = Description of Artificial Sequence: Synthetic oligonucleotide
  misc_feature 1..20: note = Target: SCN10A; (+) strand; PAM type: NRG; PAM sequence: CAG
  source 1..20: mol_type = other DNA
catttactctgagaggcagg

SEQ ID NO: 36312 - DNA, 20 bp, synthetic construct
  misc_feature 1..20: note = Description of Artificial Sequence: Synthetic oligonucleotide
  misc_feature 1..20: note = Target: SCN10A; (+) strand; PAM type: NRG; PAM sequence: GAG
  source 1..20: mol_type = other DNA
tttactctgagaggcaggca

SEQ ID NO: 36313 - DNA, 20 bp, synthetic construct
  misc_feature 1..20: note = Description of Artificial Sequence: Synthetic oligonucleotide
  misc_feature 1..20: note = Target: SCN10A; (+) strand; PAM type: NRG; PAM sequence: GAG
  source 1..20: mol_type = other DNA
tactctgagaggcaggcaga

SEQ ID NO: 36314 - DNA, 20 bp, synthetic construct
  misc_feature 1..20: note = Description of Artificial Sequence: Synthetic oligonucleotide
  misc_feature 1..20: note = Target: SCN10A; (+) strand; PAM type: NRG; PAM sequence: CAG
  source 1..20: mol_type = other DNA
ctgagaggcaggcagagagt

SEQ ID NO: 36315 - DNA, 20 bp, synthetic construct
  misc_feature 1..20: note = Description of Artificial Sequence: Synthetic oligonucleotide
  misc_feature 1..20: note = Target: SCN10A; (+) strand; PAM type: NRG; PAM sequence: AGG
  source 1..20: mol_type = other DNA
tgagaggcaggcagagagtc

SEQ ID NO: 36316 - DNA, 20 bp, synthetic construct
  misc_feature 1..20: note = Description of Artificial Sequence: Synthetic oligonucleotide
  misc_feature 1..20: note = Target: SCN10A; (+) strand; PAM type: NRG; PAM sequence: GGG
  source 1..20: mol_type = other DNA
gagaggcaggcagagagtca

SEQ ID NO: 36317 - DNA, 20 bp, synthetic construct
  misc_feature 1..20: note = Description of Artificial Sequence: Synthetic oligonucleotide
  misc_feature 1..20: note = Target: SCN10A; (+) strand; PAM type: NRG; PAM sequence: GGG
  source 1..20: mol_type = other DNA
agaggcaggcagagagtcag

SEQ ID NO: 36318 - DNA, 20 bp, synthetic construct
  misc_feature 1..20: note = Description of Artificial Sequence: Synthetic oligonucleotide
  misc_feature 1..20: note = Target: SCN10A; (+) strand; PAM type: NRG; PAM sequence: AAG
  source 1..20: mol_type = other DNA
caggggctattctcattata

SEQ ID NO: 36319 - DNA, 20 bp, synthetic construct
  misc_feature 1..20: note = Description of Artificial Sequence: Synthetic oligonucleotide
  misc_feature 1..20: note = Target: SCN10A; (+) strand; PAM type: NRG; PAM sequence: GAG
  source 1..20: mol_type = other DNA
attataaagacgatgcaact

SEQ ID NO: 36320 - DNA, 20 bp, synthetic construct
  misc_feature 1..20: note = Description of Artificial Sequence: Synthetic oligonucleotide
  misc_feature 1..20: note = Target: SCN10A; (+) strand; PAM type: NRG; PAM sequence: CAG
  source 1..20: mol_type = other DNA
aagacgatgcaactgagacc

SEQ ID NO: 36321 - DNA, 20 bp, synthetic construct
  misc_feature 1..20: note = Description of Artificial Sequence: Synthetic oligonucleotide
  misc_feature 1..20: note = Target: SCN10A; (+) strand; PAM type: NRG; PAM sequence: AGG
  source 1..20: mol_type = other DNA
agacgatgcaactgagaccc

SEQ ID NO: 36322 - DNA, 20 bp, synthetic construct
  misc_feature 1..20: note = Description of Artificial Sequence: Synthetic oligonucleotide
  misc_feature 1..20: note = Target: SCN10A; (+) strand; PAM type: NRG; PAM sequence: GAG
  source 1..20: mol_type = other DNA
aatgcattttttatcatctt

SEQ ID NO: 36323 - DNA, 20 bp, synthetic construct
  misc_feature 1..20: note = Description of Artificial Sequence: Synthetic oligonucleotide
  misc_feature 1..20: note = Target: SCN10A; (+) strand; PAM type: NRG; PAM sequence: AGG
  source 1..20: mol_type = other DNA
atgcattttttatcatcttg

SEQ ID NO: 36324 - DNA, 20 bp, synthetic construct
  misc_feature 1..20: note = Description of Artificial Sequence: Synthetic oligonucleotide
  misc_feature 1..20: note = Target: SCN10A; (+) strand; PAM type: NRG; PAM sequence: TAG
  source 1..20: mol_type = other DNA
gctaataaaattcctgacac

SEQ ID NO: 36325 - DNA, 20 bp, synthetic construct
  misc_feature 1..20: note = Description of Artificial Sequence: Synthetic oligonucleotide
  misc_feature 1..20: note = Target: SCN10A; (+) strand; PAM type: NRG; PAM sequence: GAG
  source 1..20: mol_type = other DNA
caatttaaataatttatgct

SEQ ID NO: 36326 - DNA, 20 bp, synthetic construct
  misc_feature 1..20: note = Description of Artificial Sequence: Synthetic oligonucleotide
  misc_feature 1..20: note = Target: SCN10A; (+) strand; PAM type: NRG; PAM sequence: CAG
  source 1..20: mol_type = other DNA
tgctgagtacctactttttc

SEQ ID NO: 36327 - DNA, 20 bp, synthetic construct
  misc_feature 1..20: note = Description of Artificial Sequence: Synthetic oligonucleotide
  misc_feature 1..20: note = Target: SCN10A; (+) strand; PAM type: NRG; PAM sequence: AGG
  source 1..20: mol_type = other DNA
gctgagtacctactttttcc

SEQ ID NO: 36328 - DNA, 20 bp, synthetic construct
  misc_feature 1..20: note = Description of Artificial Sequence: Synthetic oligonucleotide
  misc_feature 1..20: note = Target: SCN10A; (+) strand; PAM type: NRG; PAM sequence: TAG
  source 1..20: mol_type = other DNA
actttttccaggcactgtgc

SEQ ID NO: 36329 - DNA, 20 bp, synthetic construct
  misc_feature 1..20: note = Description of Artificial Sequence: Synthetic oligonucleotide
  misc_feature 1..20: note = Target: SCN10A; (+) strand; PAM type: NRG; PAM sequence: AGG
  source 1..20: mol_type = other DNA
ctttttccaggcactgtgct

SEQ ID NO: 36330 - DNA, 20 bp, synthetic construct
  misc_feature 1..20: note = Description of Artificial Sequence: Synthetic oligonucleotide
  misc_feature 1..20: note = Target: SCN10A; (+) strand; PAM type: NRG; PAM sequence: AAG
  source 1..20: mol_type = other DNA
caggcactgtgctaggcatg

SEQ ID NO: 36331 - DNA, 20 bp, synthetic construct
  misc_feature 1..20: note = Description of Artificial Sequence: Synthetic oligonucleotide
  misc_feature 1..20: note = Target: SCN10A; (+) strand; PAM type: NRG; PAM sequence: CAG
  source 1..20: mol_type = other DNA
tgaagctactaacttcaccc

SEQ ID NO: 36332 - DNA, 20 bp, synthetic construct
  misc_feature 1..20: note = Description of Artificial Sequence: Synthetic oligonucleotide
  misc_feature 1..20: note = Target: SCN10A; (+) strand; PAM type: NRG; PAM sequence: TGG
  source 1..20: mol_type = other DNA
ctaacttcaccccagtaatt

SEQ ID NO: 36333 - DNA, 20 bp, synthetic construct
  misc_feature 1..20: note = Description of Artificial Sequence: Synthetic oligonucleotide
  misc_feature 1..20: note = Target: SCN10A; (+) strand; PAM type: NRG; PAM sequence: TGG
  source 1..20: mol_type = other DNA
tctgtctttctgcatgcatc

SEQ ID NO: 36334 - DNA, 20 bp, synthetic construct
  misc_feature 1..20: note = Description of Artificial Sequence: Synthetic oligonucleotide
  misc_feature 1..20: note = Target: SCN10A; (+) strand; PAM type: NRG; PAM sequence: GGG
  source 1..20: mol_type = other DNA
ctgtctttctgcatgcatct

SEQ ID NO: 36335 - DNA, 20 bp, synthetic construct
  misc_feature 1..20: note = Description of Artificial Sequence: Synthetic oligonucleotide
  misc_feature 1..20: note = Target: SCN10A; (+) strand; PAM type: NRG; PAM sequence: GAG
  source 1..20: mol_type = other DNA
gtctttctgcatgcatctgg

SEQ ID NO: 36336 - DNA, 20 bp, synthetic construct
  misc_feature 1..20: note = Description of Artificial Sequence: Synthetic oligonucleotide
  misc_feature 1..20: note = Target: SCN10A; (+) strand; PAM type: NRG; PAM sequence: AGG
  source 1..20: mol_type = other DNA
tctttctgcatgcatctggg

SEQ ID NO: 36337 - DNA, 20 bp, synthetic construct
  misc_feature 1..20: note = Description of Artificial Sequence: Synthetic oligonucleotide
  misc_feature 1..20: note = Target: SCN10A; (+) strand; PAM type: NRG; PAM sequence: CAG
  source 1..20: mol_type = other DNA
ttctgcatgcatctgggagg

SEQ ID NO: 36338 - DNA, 20 bp, synthetic construct
  misc_feature 1..20: note = Description of Artificial Sequence: Synthetic oligonucleotide
  misc_feature 1..20: note = Target: SCN10A; (+) strand; PAM type: NRG; PAM sequence: GAG
  source 1..20: mol_type = other DNA
atgcatctgggaggcagctt

SEQ ID NO: 36339 - DNA, 20 bp, synthetic construct
  misc_feature 1..20: note = Description of Artificial Sequence: Synthetic oligonucleotide
  misc_feature 1..20: note = Target: SCN10A; (+) strand; PAM type: NRG; PAM sequence: TGG
  source 1..20: mol_type = other DNA
ctgggaggcagcttgagact

SEQ ID NO: 36340 - DNA, 20 bp, synthetic construct
  misc_feature 1..20: note = Description of Artificial Sequence: Synthetic oligonucleotide
  misc_feature 1..20: note = Target: SCN10A; (+) strand; PAM type: NRG; PAM sequence: GGG
  source 1..20: mol_type = other DNA
tgggaggcagcttgagactt

SEQ ID NO: 36341 - DNA, 20 bp, synthetic construct
  misc_feature 1..20: note = Description of Artificial Sequence: Synthetic oligonucleotide
  misc_feature 1..20: note = Target: SCN10A; (+) strand; PAM type: NRG; PAM sequence: GAG
  source 1..20: mol_type = other DNA
acatgaacctcactgtgtgt

SEQ ID NO: 36342 - DNA, 20 bp, synthetic construct
  misc_feature 1..20: note = Description of Artificial Sequence: Synthetic oligonucleotide
  misc_feature 1..20: note = Target: SCN10A; (+) strand; PAM type: NRG; PAM sequence: GAG
  source 1..20: mol_type = other DNA
gtgtgtgtgtgtgtgtgtgt

SEQ ID NO: 36343 - DNA, 20 bp, synthetic construct
  misc_feature 1..20: note = Description of Artificial Sequence: Synthetic oligonucleotide
  misc_feature 1..20: note = Target: SCN10A; (+) strand; PAM type: NRG; PAM sequence: GAG
  source 1..20: mol_type = other DNA
gtgtgtgtgtgtgtgtgtga

SEQ ID NO: 36344 - DNA, 20 bp, synthetic construct
  misc_feature 1..20: note = Description of Artificial Sequence: Synthetic oligonucleotide
  misc_feature 1..20: note = Target: SCN10A; (+) strand; PAM type: NRG; PAM sequence: GAG
  source 1..20: mol_type = other DNA
gtgtgtgtgtgtgtgtgaga

SEQ ID NO: 36345 - DNA, 20 bp, synthetic construct
  misc_feature 1..20: note = Description of Artificial Sequence: Synthetic oligonucleotide
  misc_feature 1..20: note = Target: SCN10A; (+) strand; PAM type: NRG; PAM sequence: GAG
  source 1..20: mol_type = other DNA
gtgtgtgtgtgtgtgagaga

SEQ ID NO: 36346 - DNA, 20 bp, synthetic construct
  misc_feature 1..20: note = Description of Artificial Sequence: Synthetic oligonucleotide
  misc_feature 1..20: note = Target: SCN10A; (+) strand; PAM type: NRG; PAM sequence: GAG
  source 1..20: mol_type = other DNA
gtgtgtgtgtgtgagagaga

SEQ ID NO: 36347 - DNA, 20 bp, synthetic construct
  misc_feature 1..20: note = Description of Artificial Sequence: Synthetic oligonucleotide
  misc_feature 1..20: note = Target: SCN10A; (+) strand; PAM type: NRG; PAM sequence: GAG
  source 1..20: mol_type = other DNA
gtgtgtgtgtgagagagaga

SEQ ID NO: 36348 - DNA, 20 bp, synthetic construct
  misc_feature 1..20: note = Description of Artificial Sequence: Synthetic oligonucleotide
  misc_feature 1..20: note = Target: SCN10A; (+) strand; PAM type: NRG; PAM sequence: GAG
  source 1..20: mol_type = other DNA
gtgtgtgtgagagagagaga

SEQ ID NO: 36349 - DNA, 20 bp, synthetic construct
  misc_feature 1..20: note = Description of Artificial Sequence: Synthetic oligonucleotide
  misc_feature 1..20: note = Target: SCN10A; (+) strand; PAM type: NRG; PAM sequence: GAG
  source 1..20: mol_type = other DNA
gtgtgtgagagagagagaga

SEQ ID NO: 36350 - DNA, 20 bp, synthetic construct
  misc_feature 1..20: note = Description of Artificial Sequence: Synthetic oligonucleotide
  misc_feature 1..20: note = Target: SCN10A; (+) strand; PAM type: NRG; PAM sequence: GAG
  source 1..20: mol_type = other DNA
gtgtgagagagagagagaga

SEQ ID NO: 36351 - DNA, 20 bp, synthetic construct
  misc_feature 1..20: note = Description of Artificial Sequence: Synthetic oligonucleotide
  misc_feature 1..20: note = Target: SCN10A; (+) strand; PAM type: NRG; PAM sequence: GAG
  source 1..20: mol_type = other DNA
gtgagagagagagagagaga

SEQ ID NO: 36352 - DNA, 20 bp, synthetic construct
  misc_feature 1..20: note = Description of Artificial Sequence: Synthetic oligonucleotide
  misc_feature 1..20: note = Target: SCN10A; (+) strand; PAM type: NRG; PAM sequence: GAG
  source 1..20: mol_type = other DNA
gagagagagagagagagaga

SEQ ID NO: 36353 - DNA, 20 bp, synthetic construct
  misc_feature 1..20: note = Description of Artificial Sequence: Synthetic oligonucleotide
  misc_feature 1..20: note = Target: SCN10A; (+) strand; PAM type: NRG; PAM sequence: GAG
  source 1..20: mol_type = other DNA
gagagagagagagagagaga

SEQ ID NO: 36354 - DNA, 20 bp, synthetic construct
  misc_feature 1..20: note = Description of Artificial Sequence: Synthetic oligonucleotide
  misc_feature 1..20: note = Target: SCN10A; (+) strand; PAM type: NRG; PAM sequence: GAG
  source 1..20: mol_type = other DNA
gagagagagagagagagaga

SEQ ID NO: 36355 - DNA, 20 bp, synthetic construct
  misc_feature 1..20: note = Description of Artificial Sequence: Synthetic oligonucleotide
  misc_feature 1..20: note = Target: SCN10A; (+) strand; PAM type: NRG; PAM sequence: AAG
  source 1..20: mol_type = other DNA
gagagagagagagagagaga

SEQ ID NO: 36356 - DNA, 20 bp, synthetic construct
  misc_feature 1..20: note = Description of Artificial Sequence: Synthetic oligonucleotide
  misc_feature 1..20: note = Target: SCN10A; (+) strand; PAM type: NRG; PAM sequence: GAG
  source 1..20: mol_type = other DNA
gagagagagagagagagaaa

SEQ ID NO: 36357 - DNA, 20 bp, synthetic construct
  misc_feature 1..20: note = Description of Artificial Sequence: Synthetic oligonucleotide
  misc_feature 1..20: note = Target: SCN10A; (+) strand; PAM type: NRG; PAM sequence: GAG
  source 1..20: mol_type = other DNA
gagagagagagagagaaaga

SEQ ID NO: 36358 - DNA, 20 bp, synthetic construct
  misc_feature 1..20: note = Description of Artificial Sequence: Synthetic oligonucleotide
  misc_feature 1..20: note = Target: SCN10A; (+) strand; PAM type: NRG; PAM sequence: GAG
  source 1..20: mol_type = other DNA
gagagagagagagaaagaga

SEQ ID NO: 36359 - DNA, 20 bp, synthetic construct
  misc_feature 1..20: note = Description of Artificial Sequence: Synthetic oligonucleotide
  misc_feature 1..20: note = Target: SCN10A; (+) strand; PAM type: NRG; PAM sequence: GAG
  source 1..20: mol_type = other DNA
gagagagagagaaagagaga

SEQ ID NO: 36360 - DNA, 20 bp, synthetic construct
  misc_feature 1..20: note = Description of Artificial Sequence: Synthetic oligonucleotide
  misc_feature 1..20: note = Target: SCN10A; (+) strand; PAM type: NRG; PAM sequence: GAG
  source 1..20: mol_type = other DNA
gagagagagaaagagagaga

SEQ ID NO: 36361 - DNA, 20 bp, synthetic construct
  misc_feature 1..20: note = Description of Artificial Sequence: Synthetic oligonucleotide
  misc_feature 1..20: note = Target: SCN10A; (+) strand; PAM type: NRG; PAM sequence: GAG
  source 1..20: mol_type = other DNA
gagagagaaagagagagaga

SEQ ID NO: 36362 - DNA, 20 bp, synthetic construct
  misc_feature 1..20: note = Description of Artificial Sequence: Synthetic oligonucleotide
  misc_feature 1..20: note = Target: SCN10A; (+) strand; PAM type: NRG; PAM sequence: GAG
  source 1..20: mol_type = other DNA
gagagaaagagagagagaga

SEQ ID NO: 36363 - DNA, 20 bp, synthetic construct
  misc_feature 1..20: note = Description of Artificial Sequence: Synthetic oligonucleotide
  misc_feature 1..20: note = Target: SCN10A; (+) strand; PAM type: NRG; PAM sequence: AAG
  source 1..20: mol_type = other DNA
agagagagagagagagatgc

SEQ ID NO: 36364 - DNA, 20 bp, synthetic construct
  misc_feature 1..20: note = Description of Artificial Sequence: Synthetic oligonucleotide
  misc_feature 1..20: note = Target: SCN10A; (+) strand; PAM type: NRG; PAM sequence: GAG
  source 1..20: mol_type = other DNA
agagagagagagagatgcaa

SEQ ID NO: 36365 - DNA, 20 bp, synthetic construct
  misc_feature 1..20: note = Description of Artificial Sequence: Synthetic oligonucleotide
  misc_feature 1..20: note = Target: SCN10A; (+) strand; PAM type: NRG; PAM sequence: GAG
  source 1..20: mol_type = other DNA
agagagagagagatgcaaga

SEQ ID NO: 36366 - DNA, 20 bp, synthetic construct
  misc_feature 1..20: note = Description of Artificial Sequence: Synthetic oligonucleotide
  misc_feature 1..20: note = Target: SCN10A; (+) strand; PAM type: NRG; PAM sequence: TAG
  source 1..20: mol_type = other DNA
agagagagatgcaagagaga

SEQ ID NO: 36367 - DNA, 20 bp, synthetic construct
  misc_feature 1..20: note = Description of Artificial Sequence: Synthetic oligonucleotide
  misc_feature 1..20: note = Target: SCN10A; (+) strand; PAM type: NRG; PAM sequence: GAG
  source 1..20: mol_type = other DNA
agagagatgcaagagagata

SEQ ID NO: 36368 - DNA, 20 bp, synthetic construct
  misc_feature 1..20: note = Description of Artificial Sequence: Synthetic oligonucleotide
  misc_feature 1..20: note = Target: SCN10A; (+) strand; PAM type: NRG; PAM sequence: TAG
  source 1..20: mol_type = other DNA
gagatagagtgaaacaaaaa

SEQ ID NO: 36369 - DNA, 20 bp, synthetic construct
  misc_feature 1..20: note = Description of Artificial Sequence: Synthetic oligonucleotide
  misc_feature 1..20: note = Target: SCN10A; (+) strand; PAM type: NRG; PAM sequence: AAG
  source 1..20: mol_type = other DNA
gagtgaaacaaaaatagacc

SEQ ID NO: 36370 - DNA, 20 bp, synthetic construct
  misc_feature 1..20: note = Description of Artificial Sequence: Synthetic oligonucleotide
  misc_feature 1..20: note = Target: SCN10A; (+) strand; PAM type: NRG; PAM sequence: GAG
  source 1..20: mol_type = other DNA
gtgaaacaaaaatagaccaa

SEQ ID NO: 36371 - DNA, 20 bp, synthetic construct
  misc_feature 1..20: note = Description of Artificial Sequence: Synthetic oligonucleotide
  misc_feature 1..20: note = Target: SCN10A; (+) strand; PAM type: NRG; PAM sequence: AAG
  source 1..20: mol_type = other DNA
aacaaaaatagaccaagaga

SEQ ID NO: 36372 - DNA, 20 bp, synthetic construct
  misc_feature 1..20: note = Description of Artificial Sequence: Synthetic oligonucleotide
  misc_feature 1..20: note = Target: SCN10A; (+) strand; PAM type: NRG; PAM sequence: AAG
  source 1..20: mol_type = other DNA
aatagaccaagagaaagaaa

SEQ ID NO: 36373 - DNA, 20 bp, synthetic construct
  misc_feature 1..20: note = Description of Artificial Sequence: Synthetic oligonucleotide
  misc_feature 1..20: note = Target: SCN10A; (+) strand; PAM type: NRG; PAM sequence: AAG
  source 1..20: mol_type = other DNA
gaccaagagaaagaaaaaga

SEQ ID NO: 36374 - DNA, 20 bp, synthetic construct
  misc_feature 1..20: note = Description of Artificial Sequence: Synthetic oligonucleotide
  misc_feature 1..20: note = Target: SCN10A; (+) strand; PAM type: NRG; PAM sequence: GAG
  source 1..20: mol_type = other DNA
ccaagagaaagaaaaagaaa

SEQ ID NO: 36375 - DNA, 20 bp, synthetic construct
  misc_feature 1..20: note = Description of Artificial Sequence: Synthetic oligonucleotide
  misc_feature 1..20: note = Target: SCN10A; (+) strand; PAM type: NRG; PAM sequence: CAG
  source 1..20: mol_type = other DNA
gaaagaaaaagaaagagaca

SEQ ID NO: 36376 - DNA, 20 bp, synthetic construct
  misc_feature 1..20: note = Description of Artificial Sequence: Synthetic oligonucleotide
  misc_feature 1..20: note = Target: SCN10A; (+) strand; PAM type: NRG; PAM sequence: GAG
  source 1..20: mol_type = other DNA
aagaaaaagaaagagacaca

SEQ ID NO: 36377 - DNA, 20 bp, synthetic construct
  misc_feature 1..20: note = Description of Artificial Sequence: Synthetic oligonucleotide
  misc_feature 1..20: note = Target: SCN10A; (+) strand; PAM type: NRG; PAM sequence: CAG
  source 1..20: mol_type = other DNA
aagaaagagacacagagaaa

SEQ ID NO: 36378 - DNA, 20 bp, synthetic construct
  misc_feature 1..20: note = Description of Artificial Sequence: Synthetic oligonucleotide
  misc_feature 1..20: note = Target: SCN10A; (+) strand; PAM type: NRG; PAM sequence: GAG
  source 1..20: mol_type = other DNA
gaaagagacacagagaaaca

SEQ ID NO: 36379 - DNA, 20 bp, synthetic construct
  misc_feature 1..20: note = Description of Artificial Sequence: Synthetic oligonucleotide
  misc_feature 1..20: note = Target: SCN10A; (+) strand; PAM type: NRG; PAM sequence: GAG
  source 1..20: mol_type = other DNA
aagagacacagagaaacaga

SEQ ID NO: 36380 - DNA, 20 bp, synthetic construct
  misc_feature 1..20: note = Description of Artificial Sequence: Synthetic oligonucleotide
  misc_feature 1..20: note = Target: SCN10A; (+) strand; PAM type: NRG; PAM sequence: AGG
  source 1..20: mol_type = other DNA
agagacacagagaaacagag

SEQ ID NO: 36381 - DNA, 20 bp, synthetic construct
  misc_feature 1..20: note = Description of Artificial Sequence: Synthetic oligonucleotide
  misc_feature 1..20: note = Target: SCN10A; (+) strand; PAM type: NRG; PAM sequence: GAG
  source 1..20: mol_type = other DNA
acacagagaaacagagaggt

SEQ ID NO: 36382 - DNA, 20 bp, synthetic construct
  misc_feature 1..20: note = Description of Artificial Sequence: Synthetic oligonucleotide
  misc_feature 1..20: note = Target: SCN10A; (+) strand; PAM type: NRG; PAM sequence: TAG
  source 1..20: mol_type = other DNA
gagaaacagagaggtgagtt

SEQ ID NO: 36383 - DNA, 20 bp, synthetic construct
  misc_feature 1..20: note = Description of Artificial Sequence: Synthetic oligonucleotide
  misc_feature 1..20: note = Target: SCN10A; (+) strand; PAM type: NRG; PAM sequence: TAG
  source 1..20: mol_type = other DNA
cagagaggtgagtttagcaa

SEQ ID NO: 36384 - DNA, 20 bp, synthetic construct
  misc_feature 1..20: note = Description of Artificial Sequence: Synthetic oligonucleotide
  misc_feature 1..20: note = Target: SCN10A; (+) strand; PAM type: NRG; PAM sequence: AAG
  source 1..20: mol_type = other DNA
gaggtgagtttagcaataga

SEQ ID NO: 36385 - DNA, 20 bp, synthetic construct
  misc_feature 1..20: note = Description of Artificial Sequence: Synthetic oligonucleotide
  misc_feature 1..20: note = Target: SCN10A; (+) strand; PAM type: NRG; PAM sequence: GAG
  source 1..20: mol_type = other DNA
ggtgagtttagcaatagaaa

SEQ ID NO: 36386 - DNA, 20 bp, synthetic construct
  misc_feature 1..20: note = Description of Artificial Sequence: Synthetic oligonucleotide
  misc_feature 1..20: note = Target: SCN10A; (+) strand; PAM type: NRG; PAM sequence: AAG
  source 1..20: mol_type = other DNA
tagcaatagaaagagactat

SEQ ID NO: 36387 - DNA, 20 bp, synthetic construct
  misc_feature 1..20: note = Description of Artificial Sequence: Synthetic oligonucleotide
  misc_feature 1..20: note = Target: SCN10A; (+) strand; PAM type: NRG; PAM sequence: GAG
  source 1..20: mol_type = other DNA
aagagactataagaaacact

SEQ ID NO: 36388 - DNA, 20 bp, synthetic construct
  misc_feature 1..20: note = Description of Artificial Sequence: Synthetic oligonucleotide
  misc_feature 1..20: note = Target: SCN10A; (+) strand; PAM type: NRG; PAM sequence: CAG
  source 1..20: mol_type = other DNA
gactataagaaacactgaga

SEQ ID NO: 36389 - DNA, 20 bp, synthetic construct
  misc_feature 1..20: note = Description of Artificial Sequence: Synthetic oligonucleotide
  misc_feature 1..20: note = Target: SCN10A; (+) strand; PAM type: NRG; PAM sequence: TGG
  source 1..20: mol_type = other DNA
agaaacactgagacagtcac

SEQ ID NO: 36390 - DNA, 20 bp, synthetic construct
  misc_feature 1..20: note = Description of Artificial Sequence: Synthetic oligonucleotide
  misc_feature 1..20: note = Target: SCN10A; (+) strand; PAM type: NRG; PAM sequence: GGG
  source 1..20: mol_type = other DNA
gaaacactgagacagtcact

SEQ ID NO: 36391 - DNA, 20 bp, synthetic construct
  misc_feature 1..20: note = Description of Artificial Sequence: Synthetic oligonucleotide
  misc_feature 1..20: note = Target: SCN10A; (+) strand; PAM type: NRG; PAM sequence: GGG
  source 1..20: mol_type = other DNA
aaacactgagacagtcactg

SEQ ID NO: 36392 - DNA, 20 bp, synthetic construct
  misc_feature 1..20: note = Description of Artificial Sequence: Synthetic oligonucleotide
  misc_feature 1..20: note = Target: SCN10A; (+) strand; PAM type: NRG; PAM sequence: TAG
  source 1..20: mol_type = other DNA
gacagtcactggggcataaa

SEQ ID NO: 36393 - DNA, 20 bp, synthetic construct
  misc_feature 1..20: note = Description of Artificial Sequence: Synthetic oligonucleotide
  misc_feature 1..20: note = Target: SCN10A; (+) strand; PAM type: NRG; PAM sequence: AAG
  source 1..20: mol_type = other DNA
gcataaatagaacttgtgcc

SEQ ID NO: 36394 - DNA, 20 bp, synthetic construct
  misc_feature 1..20: note = Description of Artificial Sequence: Synthetic oligonucleotide
  misc_feature 1..20: note = Target: SCN10A; (+) strand; PAM type: NRG; PAM sequence: CAG
  source 1..20: mol_type = other DNA
aatagaacttgtgccaagca

SEQ ID NO: 36395 - DNA, 20 bp, synthetic construct
  misc_feature 1..20: note = Description of Artificial Sequence: Synthetic oligonucleotide
  misc_feature 1..20: note = Target: SCN10A; (+) strand; PAM type: NRG; PAM sequence: TGG
  source 1..20: mol_type = other DNA
gaacttgtgccaagcacagc

SEQ ID NO: 36396 - DNA, 20 bp, synthetic construct
  misc_feature 1..20: note = Description of Artificial Sequence: Synthetic oligonucleotide
  misc_feature 1..20: note = Target: SCN10A; (+) strand; PAM type: NRG; PAM sequence: CAG
  source 1..20: mol_type = other DNA
cttgtgccaagcacagctgg

SEQ ID NO: 36397 - DNA, 20 bp, synthetic construct
  misc_feature 1..20: note = Description of Artificial Sequence: Synthetic oligonucleotide
  misc_feature 1..20: note = Target: SCN10A; (+) strand; PAM type: NRG; PAM sequence: AAG
  source 1..20: mol_type = other DNA
gccaagcacagctggcagca

SEQ ID NO: 36398 - DNA, 20 bp, synthetic construct
  misc_feature 1..20: note = Description of Artificial Sequence: Synthetic oligonucleotide
  misc_feature 1..20: note = Target: SCN10A; (+) strand; PAM type: NRG; PAM sequence: AAG
  source 1..20: mol_type = other DNA
aagcacagctggcagcaaag

SEQ ID NO: 36399 - DNA, 20 bp, synthetic construct
  misc_feature 1..20: note = Description of Artificial Sequence: Synthetic oligonucleotide
  misc_feature 1..20: note = Target: SCN10A; (+) strand; PAM type: NRG; PAM sequence: AGG
  source 1..20: mol_type = other DNA
agcacagctggcagcaaaga

SEQ ID NO: 36400 - DNA, 20 bp, synthetic construct
  misc_feature 1..20: note = Description of Artificial Sequence: Synthetic oligonucleotide
  misc_feature 1..20: note = Target: SCN10A; (+) strand; PAM type: NRG; PAM sequence: AAG
  source 1..20: mol_type = other DNA
aaggatacacctgcttgttt

SEQ ID NO: 36401 - DNA, 20 bp, synthetic construct
  misc_feature 1..20: note = Description of Artificial Sequence: Synthetic oligonucleotide
  misc_feature 1..20: note = Target: SCN10A; (+) strand; PAM type: NRG; PAM sequence: AGG
  source 1..20: mol_type = other DNA
aggatacacctgcttgttta

SEQ ID NO: 36402 - DNA, 20 bp, synthetic construct
  misc_feature 1..20: note = Description of Artificial Sequence: Synthetic oligonucleotide
  misc_feature 1..20: note = Target: SCN10A; (+) strand; PAM type: NRG; PAM sequence: GAG
  source 1..20: mol_type = other DNA
gatacacctgcttgtttaag

SEQ ID NO: 36403 - DNA, 20 bp, synthetic construct
  misc_feature 1..20: note = Description of Artificial Sequence: Synthetic oligonucleotide
  misc_feature 1..20: note = Target: SCN10A; (+) strand; PAM type: NRG; PAM sequence: AGG
  source 1..20: mol_type = other DNA
atacacctgcttgtttaagg

SEQ ID NO: 36404 - DNA, 20 bp, synthetic construct
  misc_feature 1..20: note = Description of Artificial Sequence: Synthetic oligonucleotide
  misc_feature 1..20: note = Target: SCN10A; (+) strand; PAM type: NRG; PAM sequence: GGG
  source 1..20: mol_type = other DNA
tacacctgcttgtttaagga

SEQ ID NO: 36405 - DNA, 20 bp, synthetic construct
  misc_feature 1..20: note = Description of Artificial Sequence: Synthetic oligonucleotide
  misc_feature 1..20: note = Target: SCN10A; (+) strand; PAM type: NRG; PAM sequence: TGG
  source 1..20: mol_type = other DNA
ggagggatgatttgttgctc

SEQ ID NO: 36406 - DNA, 20 bp, synthetic construct
  misc_feature 1..20: note = Description of Artificial Sequence: Synthetic oligonucleotide
  misc_feature 1..20: note = Target: SCN10A; (+) strand; PAM type: NRG; PAM sequence: AAG
  source 1..20: mol_type = other DNA
ggatgatttgttgctctggt

SEQ ID NO: 36407 - DNA, 20 bp, synthetic construct
  misc_feature 1..20: note = Description of Artificial Sequence: Synthetic oligonucleotide
  misc_feature 1..20: note = Target: SCN10A; (+) strand; PAM type: NRG; PAM sequence: TGG
  source 1..20: mol_type = other DNA
gtaagtaaaatcaacttctt

SEQ ID NO: 36408 - DNA, 20 bp, synthetic construct
  misc_feature 1..20: note = Description of Artificial Sequence: Synthetic oligonucleotide
  misc_feature 1..20: note = Target: SCN10A; (+) strand; PAM type: NRG; PAM sequence: GGG
  source 1..20: mol_type = other DNA
taagtaaaatcaacttcttt

SEQ ID NO: 36409 - DNA, 20 bp, synthetic construct
  misc_feature 1..20: note = Description of Artificial Sequence: Synthetic oligonucleotide
  misc_feature 1..20: note = Target: SCN10A; (+) strand; PAM type: NRG; PAM sequence: GAG
  source 1..20: mol_type = other DNA
agtaaaatcaacttctttgg

SEQ ID NO: 36410 - DNA, 20 bp, synthetic construct
  misc_feature 1..20: note = Description of Artificial Sequence: Synthetic oligonucleotide
  misc_feature 1..20: note = Target: SCN10A; (+) strand; PAM type: NRG; PAM sequence: GAG
  source 1..20: mol_type = other DNA
taaaatcaacttctttggga

SEQ ID NO: 36411 - DNA, 20 bp, synthetic construct
  misc_feature 1..20: note = Description of Artificial Sequence: Synthetic oligonucleotide
  misc_feature 1..20: note = Target: SCN10A; (+) strand; PAM type: NRG; PAM sequence: CAG
  source 1..20: mol_type = other DNA
aatcaacttctttgggagag

SEQ ID NO: 36412 - DNA, 20 bp, synthetic construct
  misc_feature 1..20: note = Description of Artificial Sequence: Synthetic oligonucleotide
  misc_feature 1..20: note = Target: SCN10A; (+) strand; PAM type: NRG; PAM sequence: CAG
  source 1..20: mol_type = other DNA
tctttgggagagcagcttcg

SEQ ID NO: 36413 - DNA, 20 bp, synthetic construct
  misc_feature 1..20: note = Description of Artificial Sequence: Synthetic oligonucleotide
  misc_feature 1..20: note = Target: SCN10A; (+) strand; PAM type: NRG; PAM sequence: AGG
  source 1..20: mol_type = other DNA
ctttgggagagcagcttcgc

SEQ ID NO: 36414 - DNA, 20 bp, synthetic construct
  misc_feature 1..20: note = Description of Artificial Sequence: Synthetic oligonucleotide
  misc_feature 1..20: note = Target: SCN10A; (+) strand; PAM type: NRG; PAM sequence: TAG
  source 1..20: mol_type = other DNA
tgggagagcagcttcgcagg

SEQ ID NO: 36415 - DNA, 20 bp, synthetic construct
  misc_feature 1..20: note = Description of Artificial Sequence: Synthetic oligonucleotide
  misc_feature 1..20: note = Target: SCN10A; (+) strand; PAM type: NRG; PAM sequence: CAG
  source 1..20: mol_type = other DNA
gagagcagcttcgcaggtag

SEQ ID NO: 36416 - DNA, 20 bp, synthetic construct
  misc_feature 1..20: note = Description of Artificial Sequence: Synthetic oligonucleotide
  misc_feature 1..20: note = Target: SCN10A; (+) strand; PAM type: NRG; PAM sequence: AAG
  source 1..20: mol_type = other DNA
gcagcttcgcaggtagcaga

SEQ ID NO: 36417 - DNA, 20 bp, synthetic construct
  misc_feature 1..20: note = Description of Artificial Sequence: Synthetic oligonucleotide
  misc_feature 1..20: note = Target: SCN10A; (+) strand; PAM type: NRG; PAM sequence: GAG
  source 1..20: mol_type = other DNA
agcttcgcaggtagcagaaa

SEQ ID NO: 36418 - DNA, 20 bp, synthetic construct
  misc_feature 1..20: note = Description of Artificial Sequence: Synthetic oligonucleotide
  misc_feature 1..20: note = Target: SCN10A; (+) strand; PAM type: NRG; PAM sequence: CAG
  source 1..20: mol_type = other DNA
gtagcagaaagagctctgac

SEQ ID NO: 36419 - DNA, 20 bp, synthetic construct
  misc_feature 1..20: note = Description of Artificial Sequence: Synthetic oligonucleotide
  misc_feature 1..20: note = Target: SCN10A; (+) strand; PAM type: NRG; PAM sequence: AGG
  source 1..20: mol_type = other DNA
tagcagaaagagctctgacc

SEQ ID NO: 36420 - DNA, 20 bp, synthetic construct
  misc_feature 1..20: note = Description of Artificial Sequence: Synthetic oligonucleotide
  misc_feature 1..20: note = Target: SCN10A; (+) strand; PAM type: NRG; PAM sequence: GGG
  source 1..20: mol_type = other DNA
agcagaaagagctctgacca

SEQ ID NO: 36421 - DNA, 20 bp, synthetic construct
  misc_feature 1..20: note = Description of Artificial Sequence: Synthetic oligonucleotide
  misc_feature 1..20: note = Target: SCN10A; (+) strand; PAM type: NRG; PAM sequence: AAG
  source 1..20: mol_type = other DNA
agaaagagctctgaccaggg

SEQ ID NO: 36422 - DNA, 20 bp, synthetic construct
  misc_feature 1..20: note = Description of Artificial Sequence: Synthetic oligonucleotide
  misc_feature 1..20: note = Target: SCN10A; (+) strand; PAM type: NRG; PAM sequence: TAG
  source 1..20: mol_type = other DNA
ctctgaccagggaagcaatc

SEQ ID NO: 36423 - DNA, 20 bp, synthetic construct
  misc_feature 1..20: note = Description of Artificial Sequence: Synthetic oligonucleotide
  misc_feature 1..20: note = Target: SCN10A; (+) strand; PAM type: NRG; PAM sequence: AGG
  source 1..20: mol_type = other DNA
tctgaccagggaagcaatct

SEQ ID NO: 36424 - DNA, 20 bp, synthetic construct
  misc_feature 1..20: note = Description of Artificial Sequence: Synthetic oligonucleotide
  misc_feature 1..20: note = Target: SCN10A; (+) strand; PAM type: NRG; PAM sequence: TGG
  source 1..20: mol_type = other DNA
agcaatctaggatttatttt

SEQ ID NO: 36425 - DNA, 20 bp, synthetic construct
  misc_feature 1..20: note = Description of Artificial Sequence: Synthetic oligonucleotide
  misc_feature 1..20: note = Target: SCN10A; (+) strand; PAM type: NRG; PAM sequence: TAG
  source 1..20: mol_type = other DNA
atctaggatttatttttggt

SEQ ID NO: 36426 - DNA, 20 bp, synthetic construct
  misc_feature 1..20: note = Description of Artificial Sequence: Synthetic oligonucleotide
  misc_feature 1..20: note = Target: SCN10A; (+) strand; PAM type: NRG; PAM sequence: TGG
  source 1..20: mol_type = other DNA
ttatttttggttagtcattt

SEQ ID NO: 36427 - DNA, 20 bp, synthetic construct
  misc_feature 1..20: note = Description of Artificial Sequence: Synthetic oligonucleotide
  misc_feature 1..20: note = Target: SCN10A; (+) strand; PAM type: NRG; PAM sequence: CAG
  source 1..20: mol_type = other DNA
ttttggttagtcattttggt

SEQ ID NO: 36428 - DNA, 20 bp, synthetic construct
  misc_feature 1..20: note = Description of Artificial Sequence: Synthetic oligonucleotide
  misc_feature 1..20: note = Target: SCN10A; (+) strand; PAM type: NRG; PAM sequence: GAG
  source 1..20: mol_type = other DNA
tggtcagcaaataatccact

SEQ ID NO: 36429 - DNA, 20 bp, synthetic construct
  misc_feature 1..20: note = Description of Artificial Sequence: Synthetic oligonucleotide
  misc_feature 1..20: note = Target: SCN10A; (+) strand; PAM type: NRG; PAM sequence: CAG
  source 1..20: mol_type = other DNA
ccactgagcactacatgtgt

SEQ ID NO: 36430 - DNA, 20 bp, synthetic construct
  misc_feature 1..20: note = Description of Artificial Sequence: Synthetic oligonucleotide
  misc_feature 1..20: note = Target: SCN10A; (+) strand; PAM type: NRG; PAM sequence: TGG
  source 1..20: mol_type = other DNA
gcactacatgtgtcagtccc

SEQ ID NO: 36431 - DNA, 20 bp, synthetic construct
  misc_feature 1..20: note = Description of Artificial Sequence: Synthetic oligonucleotide
  misc_feature 1..20: note = Target: SCN10A; (+) strand; PAM type: NRG; PAM sequence: TGG
  source 1..20: mol_type = other DNA
acatgtgtcagtccctggac

SEQ ID NO: 36432 - DNA, 20 bp, synthetic construct
  misc_feature 1..20: note = Description of Artificial Sequence: Synthetic oligonucleotide
  misc_feature 1..20: note = Target: SCN10A; (+) strand; PAM type: NRG; PAM sequence: GGG
  source 1..20: mol_type = other DNA
catgtgtcagtccctggact

SEQ ID NO: 36433 - DNA, 20 bp, synthetic construct
  misc_feature 1..20: note = Description of Artificial Sequence: Synthetic oligonucleotide
  misc_feature 1..20: note = Target: SCN10A; (+) strand; PAM type: NRG; PAM sequence: GAG
  source 1..20: mol_type = other DNA
tgtgtcagtccctggactgg

SEQ ID NO: 36434 - DNA, 20 bp, synthetic construct
  misc_feature 1..20: note = Description of Artificial Sequence: Synthetic oligonucleotide
  misc_feature 1..20: note = Target: SCN10A; (+) strand; PAM type: NRG; PAM sequence: GAG
  source 1..20: mol_type = other DNA
cagtccctggactgggagct

SEQ ID NO: 36435 - DNA, 20 bp, synthetic construct
  misc_feature 1..20: note = Description of Artificial Sequence: Synthetic oligonucleotide
  misc_feature 1..20: note = Target: SCN10A; (+) strand; PAM type: NRG; PAM sequence: TGG
  source 1..20: mol_type = other DNA
ctggactgggagctgagtga

SEQ ID NO: 36436 - DNA, 20 bp, synthetic construct
  misc_feature 1..20: note = Description of Artificial Sequence: Synthetic oligonucleotide
  misc_feature 1..20: note = Target: SCN10A; (+) strand; PAM type: NRG; PAM sequence: AAG
  source 1..20: mol_type = other DNA
ctgggagctgagtgatggct

SEQ ID NO: 36437 - DNA, 20 bp, synthetic construct
  misc_feature 1..20: note = Description of Artificial Sequence: Synthetic oligonucleotide
  misc_feature 1..20: note = Target: SCN10A; (+) strand; PAM type: NRG; PAM sequence: AGG
  source 1..20: mol_type = other DNA
tgggagctgagtgatggcta

SEQ ID NO: 36438 - DNA, 20 bp, synthetic construct
  misc_feature 1..20: note = Description of Artificial Sequence: Synthetic oligonucleotide
  misc_feature 1..20: note = Target: SCN10A; (+) strand; PAM type: NRG; PAM sequence: CAG
  source 1..20: mol_type = other DNA
gagctgagtgatggctaagg

SEQ ID NO: 36439 - DNA, 20 bp, synthetic construct
  misc_feature 1..20: note = Description of Artificial Sequence: Synthetic oligonucleotide
  misc_feature 1..20: note = Target: SCN10A; (+) strand; PAM type: NRG; PAM sequence: CAG
  source 1..20: mol_type = other DNA
ctgagtgatggctaaggcag

SEQ ID NO: 36440 - DNA, 20 bp, synthetic construct
  misc_feature 1..20: note = Description of Artificial Sequence: Synthetic oligonucleotide
  misc_feature 1..20: note = Target: SCN10A; (+) strand; PAM type: NRG; PAM sequence: GAG
  source 1..20: mol_type = other DNA
ggctaaggcagcagcatgtc

SEQ ID NO: 36441 - DNA, 20 bp, synthetic construct
  misc_feature 1..20: note = Description of Artificial Sequence: Synthetic oligonucleotide
  misc_feature 1..20: note = Target: SCN10A; (+) strand; PAM type: NRG; PAM sequence: GAG
  source 1..20: mol_type = other DNA
agtgccgttgtctgacaatt

SEQ ID NO: 36442 - DNA, 20 bp, synthetic construct
  misc_feature 1..20: note = Description of Artificial Sequence: Synthetic oligonucleotide
  misc_feature 1..20: note = Target: SCN10A; (+) strand; PAM type: NRG; PAM sequence: AGG
  source 1..20: mol_type = other DNA
gtgccgttgtctgacaattg

SEQ ID NO: 36443 - DNA, 20 bp, synthetic construct
  misc_feature 1..20: note = Description of Artificial Sequence: Synthetic oligonucleotide
  misc_feature 1..20: note = Target: SCN10A; (+) strand; PAM type: NRG; PAM sequence: GGG
  source 1..20: mol_type = other DNA
tgccgttgtctgacaattga

SEQ ID NO: 36444 - DNA, 20 bp, synthetic construct
  misc_feature 1..20: note = Description of Artificial Sequence: Synthetic oligonucleotide
  misc_feature 1..20: note = Target: SCN10A; (+) strand; PAM type: NRG; PAM sequence: GGG
  source 1..20: mol_type = other DNA
gccgttgtctgacaattgag

SEQ ID NO: 36445 - DNA, 20 bp, synthetic construct
  misc_feature 1..20: note = Description of Artificial Sequence: Synthetic oligonucleotide
  misc_feature 1..20: note = Target: SCN10A; (+) strand; PAM type: NRG; PAM sequence: AAG
  source 1..20: mol_type = other DNA
ttgtctgacaattgagggga

SEQ ID NO: 36446 - DNA, 20 bp, synthetic construct
  misc_feature 1..20: note = Description of Artificial Sequence: Synthetic oligonucleotide
  misc_feature 1..20: note = Target: SCN10A; (+) strand; PAM type: NRG; PAM sequence: TAG
  source 1..20: mol_type = other DNA
acaattgaggggaaagtctg

SEQ ID NO: 36447 - DNA, 20 bp, synthetic construct
  misc_feature 1..20: note = Description of Artificial Sequence: Synthetic oligonucleotide
  misc_feature 1..20: note = Target: SCN10A; (+) strand; PAM type: NRG; PAM sequence: GAG
  source 1..20: mol_type = other DNA
ggaaagtctgtagcattact

SEQ ID NO: 36448 - DNA, 20 bp, synthetic construct
  misc_feature 1..20: note = Description of Artificial Sequence: Synthetic oligonucleotide
  misc_feature 1..20: note = Target: SCN10A; (+) strand; PAM type: NRG; PAM sequence: CAG
  source 1..20: mol_type = other DNA
aagtctgtagcattactgag

SEQ ID NO: 36449 - DNA, 20 bp, synthetic construct
  misc_feature 1..20: note = Description of Artificial Sequence: Synthetic oligonucleotide
  misc_feature 1..20: note = Target: SCN10A; (+) strand; PAM type: NRG; PAM sequence: TGG
  source 1..20: mol_type = other DNA
ctgtagcattactgagcaga

SEQ ID NO: 36450 - DNA, 20 bp, synthetic construct
  misc_feature 1..20: note = Description of Artificial Sequence: Synthetic oligonucleotide
  misc_feature 1..20: note = Target: SCN10A; (+) strand; PAM type: NRG; PAM sequence: GGG
  source 1..20: mol_type = other DNA
tgtagcattactgagcagat

SEQ ID NO: 36451 - DNA, 20 bp, synthetic construct
  misc_feature 1..20: note = Description of Artificial Sequence: Synthetic oligonucleotide
  misc_feature 1..20: note = Target: SCN10A; (+) strand; PAM type: NRG; PAM sequence: CAG
  source 1..20: mol_type = other DNA
ttactgagcagatgggcaca

SEQ ID NO: 36452 - DNA, 20 bp, synthetic construct
  misc_feature 1..20: note = Description of Artificial Sequence: Synthetic oligonucleotide
  misc_feature 1..20: note = Target: SCN10A; (+) strand; PAM type: NRG; PAM sequence: AGG
  source 1..20: mol_type = other DNA
tactgagcagatgggcacac

SEQ ID NO: 36453 - DNA, 20 bp, synthetic construct
  misc_feature 1..20: note = Description of Artificial Sequence: Synthetic oligonucleotide
  misc_feature 1..20: note = Target: SCN10A; (+) strand; PAM type: NRG; PAM sequence: GGG
  source 1..20: mol_type = other DNA
actgagcagatgggcacaca

SEQ ID NO: 36454 - DNA, 20 bp, synthetic construct
  misc_feature 1..20: note = Description of Artificial Sequence: Synthetic oligonucleotide
  misc_feature 1..20: note = Target: SCN10A; (+) strand; PAM type: NRG; PAM sequence: GGG
  source 1..20: mol_type = other DNA
ctgagcagatgggcacacag

SEQ ID NO: 36455 - DNA, 20 bp, synthetic construct
  misc_feature 1..20: note = Description of Artificial Sequence: Synthetic oligonucleotide
  misc_feature 1..20: note = Target: SCN10A; (+) strand; PAM type: NRG; PAM sequence: GAG
  source 1..20: mol_type = other DNA
gagcagatgggcacacaggg

SEQ ID NO: 36456 - DNA, 20 bp, synthetic construct
  misc_feature 1..20: note = Description of Artificial Sequence: Synthetic oligonucleotide
  misc_feature 1..20: note = Target: SCN10A; (+) strand; PAM type: NRG; PAM sequence: CAG
  source 1..20: mol_type = other DNA
cagatgggcacacaggggag

SEQ ID NO: 36457 - DNA, 20 bp, synthetic construct
  misc_feature 1..20: note = Description of Artificial Sequence: Synthetic oligonucleotide
  misc_feature 1..20: note = Target: SCN10A; (+) strand; PAM type: NRG; PAM sequence: AAG
  source 1..20: mol_type = other DNA
aggggagcagcccttaactg

SEQ ID NO: 36458 - DNA, 20 bp, synthetic construct
  misc_feature 1..20: note = Description of Artificial Sequence: Synthetic oligonucleotide
  misc_feature 1..20: note = Target: SCN10A; (+) strand; PAM type: NRG; PAM sequence: CAG
  source 1..20: mol_type = other DNA
gcagcccttaactgaagttc

SEQ ID NO: 36459 - DNA, 20 bp, synthetic construct
  misc_feature 1..20: note = Description of Artificial Sequence: Synthetic oligonucleotide
  misc_feature 1..20: note = Target: SCN10A; (+) strand; PAM type: NRG; PAM sequence: GAG
  source 1..20: mol_type = other DNA
agcccttaactgaagttcca

SEQ ID NO: 36460 - DNA, 20 bp, synthetic construct
  misc_feature 1..20: note = Description of Artificial Sequence: Synthetic oligonucleotide
  misc_feature 1..20: note = Target: SCN10A; (+) strand; PAM type: NRG; PAM sequence: AGG
  source 1..20: mol_type = other DNA
gcccttaactgaagttccag

SEQ ID NO: 36461 - DNA, 20 bp, synthetic construct
  misc_feature 1..20: note = Description of Artificial Sequence: Synthetic oligonucleotide
  misc_feature 1..20: note = Target: SCN10A; (+) strand; PAM type: NRG; PAM sequence: TGG
  source 1..20: mol_type = other DNA
cttaactgaagttccagagg

SEQ ID NO: 36462 - DNA, 20 bp, synthetic construct
  misc_feature 1..20: note = Description of Artificial Sequence: Synthetic oligonucleotide
  misc_feature 1..20: note = Target: SCN10A; (+) strand; PAM type: NRG; PAM sequence: GGG
  source 1..20: mol_type = other DNA
ttaactgaagttccagaggt

SEQ ID NO: 36463 - DNA, 20 bp, synthetic construct
  misc_feature 1..20: note = Description of Artificial Sequence: Synthetic oligonucleotide
  misc_feature 1..20: note = Target: SCN10A; (+) strand; PAM type: NRG; PAM sequence: TGG
  source 1..20: mol_type = other DNA
tgaagttccagaggtgggaa

SEQ ID NO: 36464 - DNA, 20 bp, synthetic construct
  misc_feature 1..20: note = Description of Artificial Sequence: Synthetic oligonucleotide
  misc_feature 1..20: note = Target: SCN10A; (+) strand; PAM type: NRG; PAM sequence: GGG
  source 1..20: mol_type = other DNA
gaagttccagaggtgggaat

SEQ ID NO: 36465 - DNA, 20 bp, synthetic construct
  misc_feature 1..20: note = Description of Artificial Sequence: Synthetic oligonucleotide
  misc_feature 1..20: note = Target: SCN10A; (+) strand; PAM type: NRG; PAM sequence: GGG
  source 1..20: mol_type = other DNA
aagttccagaggtgggaatg

SEQ ID NO: 36466 - DNA, 20 bp, synthetic construct
  misc_feature 1..20: note = Description of Artificial Sequence: Synthetic oligonucleotide
  misc_feature 1..20: note = Target: SCN10A; (+) strand; PAM type: NRG; PAM sequence: TGG
  source 1..20: mol_type = other DNA
ttccagaggtgggaatgggg

SEQ ID NO: 36467 - DNA, 20 bp, synthetic construct
  misc_feature 1..20: note = Description of Artificial Sequence: Synthetic oligonucleotide
  misc_feature 1..20: note = Target: SCN10A; (+) strand; PAM type: NRG; PAM sequence: GGG
  source 1..20: mol_type = other DNA
tccagaggtgggaatggggt

SEQ ID NO: 36468 - DNA, 20 bp, synthetic construct
  misc_feature 1..20: note = Description of Artificial Sequence: Synthetic oligonucleotide
  misc_feature 1..20: note = Target: SCN10A; (+) strand; PAM type: NRG; PAM sequence: TGG
  source 1..20: mol_type = other DNA
agaggtgggaatggggtggg

SEQ ID NO: 36469 - DNA, 20 bp, synthetic construct
  misc_feature 1..20: note = Description of Artificial Sequence: Synthetic oligonucleotide
  misc_feature 1..20: note = Target: SCN10A; (+) strand; PAM type: NRG; PAM sequence: GAG
  source 1..20: mol_type = other DNA
aggtgggaatggggtgggtg

SEQ ID NO: 36470 - DNA, 20 bp, synthetic construct
  misc_feature 1..20: note = Description of Artificial Sequence: Synthetic oligonucleotide
  misc_feature 1..20: note = Target: SCN10A; (+) strand; PAM type: NRG; PAM sequence: GAG
  source 1..20: mol_type = other DNA
gaatggggtgggtggagtgt

SEQ ID NO: 36471 - DNA, 20 bp, synthetic construct
  misc_feature 1..20: note = Description of Artificial Sequence: Synthetic oligonucleotide
  misc_feature 1..20: note = Target: SCN10A; (+) strand; PAM type: NRG; PAM sequence: AGG
  source 1..20: mol_type = other DNA
aatggggtgggtggagtgtg

SEQ ID NO: 36472 - DNA, 20 bp, synthetic construct
  misc_feature 1..20: note = Description of Artificial Sequence: Synthetic oligonucleotide
  misc_feature 1..20: note = Target: SCN10A; (+) strand; PAM type: NRG; PAM sequence: AAG
  source 1..20: mol_type = other DNA
ggggtgggtggagtgtgagg

SEQ ID NO: 36473 - DNA, 20 bp, synthetic construct
  misc_feature 1..20: note = Description of Artificial Sequence: Synthetic oligonucleotide
  misc_feature 1..20: note = Target: SCN10A; (+) strand; PAM type: NRG; PAM sequence: AGG
  source 1..20: mol_type = other DNA
gggtgggtggagtgtgagga

SEQ ID NO: 36474 - DNA, 20 bp, synthetic construct
  misc_feature 1..20: note = Description of Artificial Sequence: Synthetic oligonucleotide
  misc_feature 1..20: note = Target: SCN10A; (+) strand; PAM type: NRG; PAM sequence: TGG
  source 1..20: mol_type = other DNA
tgggtggagtgtgaggaagg

SEQ ID NO: 36475 - DNA, 20 bp, synthetic construct
  misc_feature 1..20: note = Description of Artificial Sequence: Synthetic oligonucleotide
  misc_feature 1..20: note = Target: SCN10A; (+) strand; PAM type: NRG; PAM sequence: GGG
  source 1..20: mol_type = other DNA
gggtggagtgtgaggaaggt

SEQ ID NO: 36476 - DNA, 20 bp, synthetic construct
  misc_feature 1..20: note = Description of Artificial Sequence: Synthetic oligonucleotide
  misc_feature 1..20: note = Target: SCN10A; (+) strand; PAM type: NRG; PAM sequence: CAG
  source 1..20: mol_type = other DNA
tgtgaggaaggtgggaaaac

SEQ ID NO: 36477 - DNA, 20 bp, synthetic construct
  misc_feature 1..20: note = Description of Artificial Sequence: Synthetic oligonucleotide
  misc_feature 1..20: note = Target: SCN10A; (+) strand; PAM type: NRG; PAM sequence: AGG
  source 1..20: mol_type = other DNA
gtgaggaaggtgggaaaacc

SEQ ID NO: 36478 - DNA, 20 bp, synthetic construct
  misc_feature 1..20: note = Description of Artificial Sequence: Synthetic oligonucleotide
  misc_feature 1..20: note = Target: SCN10A; (+) strand; PAM type: NRG; PAM sequence: GGG
  source 1..20: mol_type = other DNA
tgaggaaggtgggaaaacca

SEQ ID NO: 36479 - DNA, 20 bp, synthetic construct
  misc_feature 1..20: note = Description of Artificial Sequence: Synthetic oligonucleotide
  misc_feature 1..20: note = Target: SCN10A; (+) strand; PAM type: NRG; PAM sequence: GAG
  source 1..20: mol_type = other DNA
aggaaggtgggaaaaccagg

SEQ ID NO: 36480 - DNA, 20 bp, synthetic construct
  misc_feature 1..20: note = Description of Artificial Sequence: Synthetic oligonucleotide
  misc_feature 1..20: note = Target: SCN10A; (+) strand; PAM type: NRG; PAM sequence: AGG
  source 1..20: mol_type = other DNA
ggaaggtgggaaaaccaggg

SEQ ID NO: 36481 - DNA, 20 bp, synthetic construct
  misc_feature 1..20: note = Description of Artificial Sequence: Synthetic oligonucleotide
  misc_feature 1..20: note = Target: SCN10A; (+) strand; PAM type: NRG; PAM sequence: GAG
  source 1..20: mol_type = other DNA
aaggtgggaaaaccagggag

SEQ ID NO: 36482 - DNA, 20 bp, synthetic construct
  misc_feature 1..20: note = Description of Artificial Sequence: Synthetic oligonucleotide
  misc_feature 1..20: note = Target: SCN10A; (+) strand; PAM type: NRG; PAM sequence: AGG
  source 1..20: mol_type = other DNA
aggtgggaaaaccagggagg

SEQ ID NO: 36483 - DNA, 20 bp, synthetic construct
  misc_feature 1..20: note = Description of Artificial Sequence: Synthetic oligonucleotide
  misc_feature 1..20: note = Target: SCN10A; (+) strand; PAM type: NRG; PAM sequence: TGG
  source 1..20: mol_type = other DNA
ccagggaggaggtaaaacct

SEQ ID NO: 36484 - DNA, 20 bp, synthetic construct
  misc_feature 1..20: note = Description of Artificial Sequence: Synthetic oligonucleotide
  misc_feature 1..20: note = Target: SCN10A; (+) strand; PAM type: NRG; PAM sequence: CAG
  source 1..20: mol_type = other DNA
gggaggaggtaaaaccttgg

SEQ ID NO: 36485 - DNA, 20 bp, synthetic construct
  misc_feature 1..20: note = Description of Artificial Sequence: Synthetic oligonucleotide
  misc_feature 1..20: note = Target: SCN10A; (+) strand; PAM type: NRG; PAM sequence: GAG
  source 1..20: mol_type = other DNA
gaggaggtaaaaccttggca

SEQ ID NO: 36486 - DNA, 20 bp, synthetic construct
  misc_feature 1..20: note = Description of Artificial Sequence: Synthetic oligonucleotide
  misc_feature 1..20: note = Target: SCN10A; (+) strand; PAM type: NRG; PAM sequence: GAG
  source 1..20: mol_type = other DNA
taaaaccttggcagagccct

SEQ ID NO: 36487 - DNA, 20 bp, synthetic construct
  misc_feature 1..20: note = Description of Artificial Sequence: Synthetic oligonucleotide
  misc_feature 1..20: note = Target: SCN10A; (+) strand; PAM type: NRG; PAM sequence: AGG
  source 1..20: mol_type = other DNA
aaaaccttggcagagccctg

SEQ ID NO: 36488 - DNA, 20 bp, synthetic construct
  misc_feature 1..20: note = Description of Artificial Sequence: Synthetic oligonucleotide
  misc_feature 1..20: note = Target: SCN10A; (+) strand; PAM type: NRG; PAM sequence: GAG
  source 1..20: mol_type = other DNA
ttggcagagccctgaggaat

SEQ ID NO: 36489 - DNA, 20 bp, synthetic construct
  misc_feature 1..20: note = Description of Artificial Sequence: Synthetic oligonucleotide
  misc_feature 1..20: note = Target: SCN10A; (+) strand; PAM type: NRG; PAM sequence: GAG
  source 1..20: mol_type = other DNA
gagccctgaggaatgagtgt

SEQ ID NO: 36490 - DNA, 20 bp, synthetic construct
  misc_feature 1..20: note = Description of Artificial Sequence: Synthetic oligonucleotide
  misc_feature 1..20: note = Target: SCN10A; (+) strand; PAM type: NRG; PAM sequence: GAG
  source 1..20: mol_type = other DNA
ctgaggaatgagtgtgagtt

SEQ ID NO: 36491 - DNA, 20 bp, synthetic construct
  misc_feature 1..20: note = Description of Artificial Sequence: Synthetic oligonucleotide
  misc_feature 1..20: note = Target: SCN10A; (+) strand; PAM type: NRG; PAM sequence: AAG
  source 1..20: mol_type = other DNA
gaatgagtgtgagttgagta

SEQ ID NO: 36492 - DNA, 20 bp, synthetic construct
  misc_feature 1..20: note = Description of Artificial Sequence: Synthetic oligonucleotide
  misc_feature 1..20: note = Target: SCN10A; (+) strand; PAM type: NRG; PAM sequence: GAG
  source 1..20: mol_type = other DNA
atgagtgtgagttgagtaaa

SEQ ID NO: 36493 - DNA, 20 bp, synthetic construct
  misc_feature 1..20: note = Description of Artificial Sequence: Synthetic oligonucleotide
  misc_feature 1..20: note = Target: SCN10A; (+) strand; PAM type: NRG; PAM sequence: GAG
  source 1..20: mol_type = other DNA
gagtgtgagttgagtaaaga

SEQ ID NO: 36494 - DNA, 20 bp, synthetic construct
  misc_feature 1..20: note = Description of Artificial Sequence: Synthetic oligonucleotide
  misc_feature 1..20: note = Target: SCN10A; (+) strand; PAM type: NRG; PAM sequence: AGG
  source 1..20: mol_type = other DNA
agtgtgagttgagtaaagag

SEQ ID NO: 36495 - DNA, 20 bp, synthetic construct
  misc_feature 1..20: note = Description of Artificial Sequence: Synthetic oligonucleotide
  misc_feature 1..20: note = Target: SCN10A; (+) strand; PAM type: NRG; PAM sequence: GAG
  source 1..20: mol_type = other DNA
tgtgagttgagtaaagagag

SEQ ID NO: 36496 - DNA, 20 bp, synthetic construct
  misc_feature 1..20: note = Description of Artificial Sequence: Synthetic oligonucleotide
  misc_feature 1..20: note = Target: SCN10A; (+) strand; PAM type: NRG; PAM sequence: AGG
  source 1..20: mol_type = other DNA
gtgagttgagtaaagagagg

SEQ ID NO: 36497 - DNA, 20 bp, synthetic construct
  misc_feature 1..20: note = Description of Artificial Sequence: Synthetic oligonucleotide
  misc_feature 1..20: note = Target: SCN10A; (+) strand; PAM type: NRG; PAM sequence: AAG
  source 1..20: mol_type = other DNA
agttgagtaaagagaggagg

SEQ ID NO: 36498 - DNA, 20 bp, synthetic construct
  misc_feature 1..20: note = Description of Artificial Sequence: Synthetic oligonucleotide
  misc_feature 1..20: note = Target: SCN10A; (+) strand; PAM type: NRG; PAM sequence: AGG
  source 1..20: mol_type = other DNA
gttgagtaaagagaggagga

SEQ ID NO: 36499 - DNA, 20 bp, synthetic construct
  misc_feature 1..20: note = Description of Artificial Sequence: Synthetic oligonucleotide
  misc_feature 1..20: note = Target: SCN10A; (+) strand; PAM type: NRG; PAM sequence: CAG
  source 1..20: mol_type = other DNA
agagaggaggaaggatatcc

SEQ ID NO: 36500 - DNA, 20 bp, synthetic construct
  misc_feature 1..20: note = Description of Artificial Sequence: Synthetic oligonucleotide
  misc_feature 1..20: note = Target: SCN10A; (+) strand; PAM type: NRG; PAM sequence: AAG
  source 1..20: mol_type = other DNA
gaggaggaaggatatcccag

SEQ ID NO: 36501 - DNA, 20 bp, synthetic construct
  misc_feature 1..20: note = Description of Artificial Sequence: Synthetic oligonucleotide
  misc_feature 1..20: note = Target: SCN10A; (+) strand; PAM type: NRG; PAM sequence: AAG
  source 1..20: mol_type = other DNA
gaggaaggatatcccagaag

SEQ ID NO: 36502 - DNA, 20 bp, synthetic construct
  misc_feature 1..20: note = Description of Artificial Sequence: Synthetic oligonucleotide
  misc_feature 1..20: note = Target: SCN10A; (+) strand; PAM type: NRG; PAM sequence: AGG
  source 1..20: mol_type = other DNA
aggaaggatatcccagaaga

SEQ ID NO: 36503 - DNA, 20 bp, synthetic construct
  misc_feature 1..20: note = Description of Artificial Sequence: Synthetic oligonucleotide
  misc_feature 1..20: note = Target: SCN10A; (+) strand; PAM type: NRG; PAM sequence: GGG
  source 1..20: mol_type = other DNA
ggaaggatatcccagaagaa

SEQ ID NO: 36504 - DNA, 20 bp, synthetic construct
  misc_feature 1..20: note = Description of Artificial Sequence: Synthetic oligonucleotide
  misc_feature 1..20: note = Target: SCN10A; (+) strand; PAM type: NRG; PAM sequence: GGG
  source 1..20: mol_type = other DNA
gaaggatatcccagaagaag

SEQ ID NO: 36505 - DNA, 20 bp, synthetic construct
  misc_feature 1..20: note = Description of Artificial Sequence: Synthetic oligonucleotide
  misc_feature 1..20: note = Target: SCN10A; (+) strand; PAM type: NRG; PAM sequence: CAG
  source 1..20: mol_type = other DNA
ggatatcccagaagaagggg

SEQ ID NO: 36506 - DNA, 20 bp, synthetic construct
  misc_feature 1..20: note = Description of Artificial Sequence: Synthetic oligonucleotide
  misc_feature 1..20: note = Target: SCN10A; (+) strand; PAM type: NRG; PAM sequence: CAG
  source 1..20: mol_type = other DNA
tcccagaagaaggggcagca

SEQ ID NO: 36507 - DNA, 20 bp, synthetic construct
  misc_feature 1..20: note = Description of Artificial Sequence: Synthetic oligonucleotide
  misc_feature 1..20: note = Target: SCN10A; (+) strand; PAM type: NRG; PAM sequence: TAG
  source 1..20: mol_type = other DNA
cagaagaaggggcagcacag

SEQ ID NO: 36508 - DNA, 20 bp, synthetic construct
  misc_feature 1..20: note = Description of Artificial Sequence: Synthetic oligonucleotide
  misc_feature 1..20: note = Target: SCN10A; (+) strand; PAM type: NRG; PAM sequence: AAG
  source 1..20: mol_type = other DNA
aagaaggggcagcacagtag

SEQ ID NO: 36509 - DNA, 20 bp, synthetic construct
  misc_feature 1..20: note = Description of Artificial Sequence: Synthetic oligonucleotide
  misc_feature 1..20: note = Target: SCN10A; (+) strand; PAM type: NRG; PAM sequence: AGG
  source 1..20: mol_type = other DNA
agaaggggcagcacagtaga

SEQ ID NO: 36510 - DNA, 20 bp, synthetic construct
  misc_feature 1..20: note = Description of Artificial Sequence: Synthetic oligonucleotide
  misc_feature 1..20: note = Target: SCN10A; (+) strand; PAM type: NRG; PAM sequence: TGG
  source 1..20: mol_type = other DNA
ggggcagcacagtagaaggc

SEQ ID NO: 36511 - DNA, 20 bp, synthetic construct
  misc_feature 1..20: note = Description of Artificial Sequence: Synthetic oligonucleotide
  misc_feature 1..20: note = Target: SCN10A; (+) strand; PAM type: NRG; PAM sequence: GGG
  source 1..20: mol_type = other DNA
gggcagcacagtagaaggct

SEQ ID NO: 36512 - DNA, 20 bp, synthetic construct
  misc_feature 1..20: note = Description of Artificial Sequence: Synthetic oligonucleotide
  misc_feature 1..20: note = Target: SCN10A; (+) strand; PAM type: NRG; PAM sequence: GAG
  source 1..20: mol_type = other DNA
gcagcacagtagaaggctgg

SEQ ID NO: 36513 - DNA, 20 bp, synthetic construct
  misc_feature 1..20: note = Description of Artificial Sequence: Synthetic oligonucleotide
  misc_feature 1..20: note = Target: SCN10A; (+) strand; PAM type: NRG; PAM sequence: AGG
  source 1..20: mol_type = other DNA
cagcacagtagaaggctggg

SEQ ID NO: 36514 - DNA, 20 bp, synthetic construct
  misc_feature 1..20: note = Description of Artificial Sequence: Synthetic oligonucleotide
  misc_feature 1..20: note = Target: SCN10A; (+) strand; PAM type: NRG; PAM sequence: GAG
  source 1..20: mol_type = other DNA
acagtagaaggctgggaggt

SEQ ID NO: 36515 - DNA, 20 bp, synthetic construct
  misc_feature 1..20: note = Description of Artificial Sequence: Synthetic oligonucleotide
  misc_feature 1..20: note = Target: SCN10A; (+) strand; PAM type: NRG; PAM sequence: TGG
  source 1..20: mol_type = other DNA
gaaggctgggaggtgagcaa

SEQ ID NO: 36516 - DNA, 20 bp, synthetic construct
  misc_feature 1..20: note = Description of Artificial Sequence: Synthetic oligonucleotide
  misc_feature 1..20: note = Target: SCN10A; (+) strand; PAM type: NRG; PAM sequence: TGG
  source 1..20: mol_type = other DNA
ctgggaggtgagcaatggtg

SEQ ID NO: 36517 - DNA, 20 bp, synthetic construct
  misc_feature 1..20: note = Description of Artificial Sequence: Synthetic oligonucleotide
  misc_feature 1..20: note = Target: SCN10A; (+) strand; PAM type: NRG; PAM sequence: GAG
  source 1..20: mol_type = other DNA
gggaggtgagcaatggtgtg

SEQ ID NO: 36518 - DNA, 20 bp, synthetic construct
  misc_feature 1..20: note = Description of Artificial Sequence: Synthetic oligonucleotide
  misc_feature 1..20: note = Target: SCN10A; (+) strand; PAM type: NRG; PAM sequence: CAG
  source 1..20: mol_type = other DNA
gcaatggtgtggagtatttg

SEQ ID NO: 36519 - DNA, 20 bp, synthetic construct
  misc_feature 1..20: note = Description of Artificial Sequence: Synthetic oligonucleotide
  misc_feature 1..20: note = Target: SCN10A; (+) strand; PAM type: NRG; PAM sequence: TAG
  source 1..20: mol_type = other DNA
gtggagtatttgcagaaccg

SEQ ID NO: 36520 - DNA, 20 bp, synthetic construct
  misc_feature 1..20: note = Description of Artificial Sequence: Synthetic oligonucleotide
  misc_feature 1..20: note = Target: SCN10A; (+) strand; PAM type: NRG; PAM sequence: AGG
  source 1..20: mol_type = other DNA
tggagtatttgcagaaccgt

SEQ ID NO: 36521 - DNA, 20 bp, synthetic construct
  misc_feature 1..20: note = Description of Artificial Sequence: Synthetic oligonucleotide
  misc_feature 1..20: note = Target: SCN10A; (+) strand; PAM type: NRG; PAM sequence: TGG
  source 1..20: mol_type = other DNA
agtatttgcagaaccgtagg

SEQ ID NO: 36522 - DNA, 20 bp, synthetic construct
  misc_feature 1..20: note = Description of Artificial Sequence: Synthetic oligonucleotide
  misc_feature 1..20: note = Target: SCN10A; (+) strand; PAM type: NRG; PAM sequence: CAG
  source 1..20: mol_type = other DNA
gcagaaccgtaggtggattc

SEQ ID NO: 36523 - DNA, 20 bp, synthetic construct
  misc_feature 1..20: note = Description of Artificial Sequence: Synthetic oligonucleotide
  misc_feature 1..20: note = Target: SCN10A; (+) strand; PAM type: NRG; PAM sequence: GAG
  source 1..20: mol_type = other DNA
agaaccgtaggtggattcca

SEQ ID NO: 36524 - DNA, 20 bp, synthetic construct
  misc_feature 1..20: note = Description of Artificial Sequence: Synthetic oligonucleotide
  misc_feature 1..20: note = Target: SCN10A; (+) strand; PAM type: NRG; PAM sequence: TGG
  source 1..20: mol_type = other DNA
cgtaggtggattccagagca

SEQ ID NO: 36525 - DNA, 20 bp, synthetic construct
  misc_feature 1..20: note = Description of Artificial Sequence: Synthetic oligonucleotide
  misc_feature 1..20: note = Target: SCN10A; (+) strand; PAM type: NRG; PAM sequence: GAG
  source 1..20: mol_type = other DNA
ggtggattccagagcatggt

SEQ ID NO: 36526 - DNA, 20 bp, synthetic construct
  misc_feature 1..20: note = Description of Artificial Sequence: Synthetic oligonucleotide
  misc_feature 1..20: note = Target: SCN10A; (+) strand; PAM type: NRG; PAM sequence: GAG
  source 1..20: mol_type = other DNA
tccagagcatggtgagatgt

SEQ ID NO: 36527 - DNA, 20 bp, synthetic construct
  misc_feature 1..20: note = Description of Artificial Sequence: Synthetic oligonucleotide
  misc_feature 1..20: note = Target: SCN10A; (+) strand; PAM type: NRG; PAM sequence: AGG
  source 1..20: mol_type = other DNA
ccagagcatggtgagatgtg

SEQ ID NO: 36528 - DNA, 20 bp, synthetic construct
  misc_feature 1..20: note = Description of Artificial Sequence: Synthetic oligonucleotide
  misc_feature 1..20: note = Target: SCN10A; (+) strand; PAM type: NRG; PAM sequence: GAG
  source 1..20: mol_type = other DNA
agagcatggtgagatgtgag

SEQ ID NO: 36529 - DNA, 20 bp, synthetic construct
  misc_feature 1..20: note = Description of Artificial Sequence: Synthetic oligonucleotide
  misc_feature 1..20: note = Target: SCN10A; (+) strand; PAM type: NRG; PAM sequence: GAG
  source 1..20: mol_type = other DNA
agcatggtgagatgtgagga

SEQ ID NO: 36530 - DNA, 20 bp, synthetic construct
  misc_feature 1..20: note = Description of Artificial Sequence: Synthetic oligonucleotide
  misc_feature 1..20: note = Target: SCN10A; (+) strand; PAM type: NRG; PAM sequence: AGG
  source 1..20: mol_type = other DNA
gcatggtgagatgtgaggag

SEQ ID NO: 36531 - DNA, 20 bp, synthetic construct
  misc_feature 1..20: note = Description of Artificial Sequence: Synthetic oligonucleotide
  misc_feature 1..20: note = Target: SCN10A; (+) strand; PAM type: NRG; PAM sequence: GAG
  source 1..20: mol_type = other DNA
ggtgagatgtgaggagaggt

SEQ ID NO: 36532 - DNA, 20 bp, synthetic construct
  misc_feature 1..20: note = Description of Artificial Sequence: Synthetic oligonucleotide
  misc_feature 1..20: note = Target: SCN10A; (+) strand; PAM type: NRG; PAM sequence: GAG
  source 1..20: mol_type = other DNA
tgagatgtgaggagaggtga

SEQ ID NO: 36533 - DNA, 20 bp, synthetic construct
  misc_feature 1..20: note = Description of Artificial Sequence: Synthetic oligonucleotide
  misc_feature 1..20: note = Target: SCN10A; (+) strand; PAM type: NRG; PAM sequence: GAG
  source 1..20: mol_type = other DNA
tgtgaggagaggtgagagat

SEQ ID NO: 36534 - DNA, 20 bp, synthetic construct
  misc_feature 1..20: note = Description of Artificial Sequence: Synthetic oligonucleotide
  misc_feature 1..20: note = Target: SCN10A; (+) strand; PAM type: NRG; PAM sequence: AGG
  source 1..20: mol_type = other DNA
gtgaggagaggtgagagatg

SEQ ID NO: 36535 - DNA, 20 bp, synthetic construct
  misc_feature 1..20: note = Description of Artificial Sequence: Synthetic oligonucleotide
  misc_feature 1..20: note = Target: SCN10A; (+) strand; PAM type: NRG; PAM sequence: CAG
  source 1..20: mol_type = other DNA
aggagaggtgagagatgagg

SEQ ID NO: 36536 - DNA, 20 bp, synthetic construct
  misc_feature 1..20: note = Description of Artificial Sequence: Synthetic oligonucleotide
  misc_feature 1..20: note = Target: SCN10A; (+) strand; PAM type: NRG; PAM sequence: AAG
  source 1..20: mol_type = other DNA
agaggtgagagatgaggcag

SEQ ID NO: 36537 - DNA, 20 bp, synthetic construct
  misc_feature 1..20: note = Description of Artificial Sequence: Synthetic oligonucleotide
  misc_feature 1..20: note = Target: SCN10A; (+) strand; PAM type: NRG; PAM sequence: GAG
  source 1..20: mol_type = other DNA
aggtgagagatgaggcagaa

SEQ ID NO: 36538 - DNA, 20 bp, synthetic construct
  misc_feature 1..20: note = Description of Artificial Sequence: Synthetic oligonucleotide
  misc_feature 1..20: note = Target: SCN10A; (+) strand; PAM type: NRG; PAM sequence: CAG
  source 1..20: mol_type = other DNA
gagagatgaggcagaagaga

SEQ ID NO: 36539 - DNA, 20 bp, synthetic construct
  misc_feature 1..20: note = Description of Artificial Sequence: Synthetic oligonucleotide
  misc_feature 1..20: note = Target: SCN10A; (+) strand; PAM type: NRG; PAM sequence: TGG
  source 1..20: mol_type = other DNA
atgaggcagaagagacagta

SEQ ID NO: 36540 - DNA, 20 bp, synthetic construct
  misc_feature 1..20: note = Description of Artificial Sequence: Synthetic oligonucleotide
  misc_feature 1..20: note = Target: SCN10A; (+) strand; PAM type: NRG; PAM sequence: CAG
  source 1..20: mol_type = other DNA
ggcagaagagacagtatgga

SEQ ID NO: 36541 - DNA, 20 bp, synthetic construct
  misc_feature 1..20: note = Description of Artificial Sequence: Synthetic oligonucleotide
  misc_feature 1..20: note = Target: SCN10A; (+) strand; PAM type: NRG; PAM sequence: CAG
  source 1..20: mol_type = other DNA
aagagacagtatggacagac

SEQ ID NO: 36542 - DNA, 20 bp, synthetic construct
  misc_feature 1..20: note = Description of Artificial Sequence: Synthetic oligonucleotide
  misc_feature 1..20: note = Target: SCN10A; (+) strand; PAM type: NRG; PAM sequence: AGG
  source 1..20: mol_type = other DNA
agagacagtatggacagacc

SEQ ID NO: 36543 - DNA, 20 bp, synthetic construct
  misc_feature 1..20: note = Description of Artificial Sequence: Synthetic oligonucleotide
  misc_feature 1..20: note = Target: SCN10A; (+) strand; PAM type: NRG; PAM sequence: AAG
  source 1..20: mol_type = other DNA
acagaccaggtcttgcaaat

SEQ ID NO: 36544 - DNA, 20 bp, synthetic construct
  misc_feature 1..20: note = Description of Artificial Sequence: Synthetic oligonucleotide
  misc_feature 1..20: note = Target: SCN10A; (+) strand; PAM type: NRG; PAM sequence: CAG
  source 1..20: mol_type = other DNA
caggtcttgcaaataagact

SEQ ID NO: 36545 - DNA, 20 bp, synthetic construct
  misc_feature 1..20: note = Description of Artificial Sequence: Synthetic oligonucleotide
  misc_feature 1..20: note = Target: SCN10A; (+) strand; PAM type: NRG; PAM sequence: AGG
  source 1..20: mol_type = other DNA
aggtcttgcaaataagactc

SEQ ID NO: 36546 - DNA, 20 bp, synthetic construct
  misc_feature 1..20: note = Description of Artificial Sequence: Synthetic oligonucleotide
  misc_feature 1..20: note = Target: SCN10A; (+) strand; PAM type: NRG; PAM sequence: GGG
  source 1..20: mol_type = other DNA
ggtcttgcaaataagactca

SEQ ID NO: 36547 - DNA, 20 bp, synthetic construct
  misc_feature 1..20: note = Description of Artificial Sequence: Synthetic oligonucleotide
  misc_feature 1..20: note = Target: SCN10A; (+) strand; PAM type: NRG; PAM sequence: CAG
  source 1..20: mol_type = other DNA
aataagactcagggtcttcc

SEQ ID NO: 36548 - DNA, 20 bp, synthetic construct
  misc_feature 1..20: note = Description of Artificial Sequence: Synthetic oligonucleotide
  misc_feature 1..20: note = Target: SCN10A; (+) strand; PAM type: NRG; PAM sequence: GAG
  source 1..20: mol_type = other DNA
gactcagggtcttcccagtt

SEQ ID NO: 36549 - DNA, 20 bp, synthetic construct
  misc_feature 1..20: note = Description of Artificial Sequence: Synthetic oligonucleotide
  misc_feature 1..20: note = Target: SCN10A; (+) strand; PAM type: NRG; PAM sequence: GAG
  source 1..20: mol_type = other DNA
ctcagggtcttcccagttga

SEQ ID NO: 36550 - DNA, 20 bp, synthetic construct
  misc_feature 1..20: note = Description of Artificial Sequence: Synthetic oligonucleotide
  misc_feature 1..20: note = Target: SCN10A; (+) strand; PAM type: NRG; PAM sequence: AAG
  source 1..20: mol_type = other DNA
gggtcttcccagttgagagt

SEQ ID NO: 36551 - DNA, 20 bp, synthetic construct
  misc_feature 1..20: note = Description of Artificial Sequence: Synthetic oligonucleotide
  misc_feature 1..20: note = Target: SCN10A; (+) strand; PAM type: NRG; PAM sequence: GAG
  source 1..20: mol_type = other DNA
cttcccagttgagagtaagt

SEQ ID NO: 36552 - DNA, 20 bp, synthetic construct
  misc_feature 1..20: note = Description of Artificial Sequence: Synthetic oligonucleotide
  misc_feature 1..20: note = Target: SCN10A; (+) strand; PAM type: NRG; PAM sequence: GAG
  source 1..20: mol_type = other DNA
tcccagttgagagtaagtga

SEQ ID NO: 36553 - DNA, 20 bp, synthetic construct
  misc_feature 1..20: note = Description of Artificial Sequence: Synthetic oligonucleotide
  misc_feature 1..20: note = Target: SCN10A; (+) strand; PAM type: NRG; PAM sequence: GAG
  source 1..20: mol_type = other DNA
ccagttgagagtaagtgaga

SEQ ID NO: 36554 - DNA, 20 bp, synthetic construct
  misc_feature 1..20: note = Description of Artificial Sequence: Synthetic oligonucleotide
  misc_feature 1..20: note = Target: SCN10A; (+) strand; PAM type: NRG; PAM sequence: AAG
  source 1..20: mol_type = other DNA
gagtaagtgagagagatatg

SEQ ID NO: 36555 - DNA, 20 bp, synthetic construct
  misc_feature 1..20: note = Description of Artificial Sequence: Synthetic oligonucleotide
  misc_feature 1..20: note = Target: SCN10A; (+) strand; PAM type: NRG; PAM sequence: AGG
  source 1..20: mol_type = other DNA
agtaagtgagagagatatga

SEQ ID NO: 36556 - DNA, 20 bp, synthetic construct
  misc_feature 1..20: note = Description of Artificial Sequence: Synthetic oligonucleotide
  misc_feature 1..20: note = Target: SCN10A; (+) strand; PAM type: NRG; PAM sequence: GGG
  source 1..20: mol_type = other DNA
gtaagtgagagagatatgaa

SEQ ID NO: 36557 - DNA, 20 bp, synthetic construct
  misc_feature 1..20: note = Description of Artificial Sequence: Synthetic oligonucleotide
  misc_feature 1..20: note = Target: SCN10A; (+) strand; PAM type: NRG; PAM sequence: GGG
  source 1..20: mol_type = other DNA
taagtgagagagatatgaag

SEQ ID NO: 36558 - DNA, 20 bp, synthetic construct
  misc_feature 1..20: note = Description of Artificial Sequence: Synthetic oligonucleotide
  misc_feature 1..20: note = Target: SCN10A; (+) strand; PAM type: NRG; PAM sequence: CAG
  source 1..20: mol_type = other DNA
gtgagagagatatgaagggg

SEQ ID NO: 36559 - DNA, 20 bp, synthetic construct
  misc_feature 1..20: note = Description of Artificial Sequence: Synthetic oligonucleotide
  misc_feature 1..20: note = Target: SCN10A; (+) strand; PAM type: NRG; PAM sequence: AGG
  source 1..20: mol_type = other DNA
tgagagagatatgaaggggc

SEQ ID NO: 36560 - DNA, 20 bp, synthetic construct
  misc_feature 1..20: note = Description of Artificial Sequence: Synthetic oligonucleotide
  misc_feature 1..20: note = Target: SCN10A; (+) strand; PAM type: NRG; PAM sequence: CAG
  source 1..20: mol_type = other DNA
gagatatgaaggggcaggac

SEQ ID NO: 36561 - DNA, 20 bp, synthetic construct
  misc_feature 1..20: note = Description of Artificial Sequence: Synthetic oligonucleotide
  misc_feature 1..20: note = Target: SCN10A; (+) strand; PAM type: NRG; PAM sequence: AGG
  source 1..20: mol_type = other DNA
agatatgaaggggcaggacc

SEQ ID NO: 36562 - DNA, 20 bp, synthetic construct
  misc_feature 1..20: note = Description of Artificial Sequence: Synthetic oligonucleotide
  misc_feature 1..20: note = Target: SCN10A; (+) strand; PAM type: NRG; PAM sequence: GGG
  source 1..20: mol_type = other DNA
gatatgaaggggcaggacca

SEQ ID NO: 36563 - DNA, 20 bp, synthetic construct
  misc_feature 1..20: note = Description of Artificial Sequence: Synthetic oligonucleotide
  misc_feature 1..20: note = Target: SCN10A; (+) strand; PAM type: NRG; PAM sequence: AAG
  source 1..20: mol_type = other DNA
gcaggaccagggctctcttc

SEQ ID NO: 36564 - DNA, 20 bp, synthetic construct
  misc_feature 1..20: note = Description of Artificial Sequence: Synthetic oligonucleotide
  misc_feature 1..20: note = Target: SCN10A; (+) strand; PAM type: NRG; PAM sequence: GAG
  source 1..20: mol_type = other DNA
aggaccagggctctcttcaa

SEQ ID NO: 36565 - DNA, 20 bp, synthetic construct
  misc_feature 1..20: note = Description of Artificial Sequence: Synthetic oligonucleotide
  misc_feature 1..20: note = Target: SCN10A; (+) strand; PAM type: NRG; PAM sequence: AGG
  source 1..20: mol_type = other DNA
ggaccagggctctcttcaag

SEQ ID NO: 36566 - DNA, 20 bp, synthetic construct
  misc_feature 1..20: note = Description of Artificial Sequence: Synthetic oligonucleotide
  misc_feature 1..20: note = Target: SCN10A; (+) strand; PAM type: NRG; PAM sequence: CAG
  source 1..20: mol_type = other DNA
ctctcttcaagaggtgtgtc

SEQ ID NO: 36567 - DNA, 20 bp, synthetic construct
  misc_feature 1..20: note = Description of Artificial Sequence: Synthetic oligonucleotide
  misc_feature 1..20: note = Target: SCN10A; (+) strand; PAM type: NRG; PAM sequence: TGG
  source 1..20: mol_type = other DNA
tcttcaagaggtgtgtccag

SEQ ID NO: 36568 - DNA, 20 bp, synthetic construct
  misc_feature 1..20: note = Description of Artificial Sequence: Synthetic oligonucleotide
  misc_feature 1..20: note = Target: SCN10A; (+) strand; PAM type: NRG; PAM sequence: GGG
  source 1..20: mol_type = other DNA
cttcaagaggtgtgtccagt

SEQ ID NO: 36569 - DNA, 20 bp, synthetic construct
  misc_feature 1..20: note = Description of Artificial Sequence: Synthetic oligonucleotide
  misc_feature 1..20: note = Target: SCN10A; (+) strand; PAM type: NRG; PAM sequence: TGG
  source 1..20: mol_type = other DNA
gaggtgtgtccagtgggaat

SEQ ID NO: 36570 - DNA, 20 bp, synthetic construct
  misc_feature 1..20: note = Description of Artificial Sequence: Synthetic oligonucleotide
  misc_feature 1..20: note = Target: SCN10A; (+) strand; PAM type: NRG; PAM sequence: CAG
  source 1..20: mol_type = other DNA
gtgtgtccagtgggaattgg

SEQ ID NO: 36571 - DNA, 20 bp, synthetic construct
  misc_feature 1..20: note = Description of Artificial Sequence: Synthetic oligonucleotide
  misc_feature 1..20: note = Target: SCN10A; (+) strand; PAM type: NRG; PAM sequence: GAG
  source 1..20: mol_type = other DNA
gtgtccagtgggaattggca

SEQ ID NO: 36572 - DNA, 20 bp, synthetic construct
  misc_feature 1..20: note = Description of Artificial Sequence: Synthetic oligonucleotide
  misc_feature 1..20: note = Target: SCN10A; (+) strand; PAM type: NRG; PAM sequence: GAG
  source 1..20: mol_type = other DNA
gtccagtgggaattggcaga

SEQ ID NO: 36573 - DNA, 20 bp, synthetic construct
  misc_feature 1..20: note = Description of Artificial Sequence: Synthetic oligonucleotide
  misc_feature 1..20: note = Target: SCN10A; (+) strand; PAM type: NRG; PAM sequence: CAG
  source 1..20: mol_type = other DNA
gagtttcctatctttccctg

SEQ ID NO: 36574 - DNA, 20 bp, synthetic construct
  misc_feature 1..20: note = Description of Artificial Sequence: Synthetic oligonucleotide
  misc_feature 1..20: note = Target: SCN10A; (+) strand; PAM type: NRG; PAM sequence: GAG
  source 1..20: mol_type = other DNA
gtttcctatctttccctgca

SEQ ID NO: 36575 - DNA, 20 bp, synthetic construct
  misc_feature 1..20: note = Description of Artificial Sequence: Synthetic oligonucleotide
  misc_feature 1..20: note = Target: SCN10A; (+) strand; PAM type: NRG; PAM sequence: CAG
  source 1..20: mol_type = other DNA
cctatctttccctgcagagc

SEQ ID NO: 36576 - DNA, 20 bp, synthetic construct
  misc_feature 1..20: note = Description of Artificial Sequence: Synthetic oligonucleotide
  misc_feature 1..20: note = Target: SCN10A; (+) strand; PAM type: NRG; PAM sequence: AAG
  source 1..20: mol_type = other DNA
ctttccctgcagagccagac

SEQ ID NO: 36577 - DNA, 20 bp, synthetic construct
  misc_feature 1..20: note = Description of Artificial Sequence: Synthetic oligonucleotide
  misc_feature 1..20: note = Target: SCN10A; (+) strand; PAM type: NRG; PAM sequence: TGG
  source 1..20: mol_type = other DNA
ctgcagagccagacaagaaa

SEQ ID NO: 36578 - DNA, 20 bp, synthetic construct
  misc_feature 1..20: note = Description of Artificial Sequence: Synthetic oligonucleotide
  misc_feature 1..20: note = Target: SCN10A; (+) strand; PAM type: NRG; PAM sequence: TAG
  source 1..20: mol_type = other DNA
cagagccagacaagaaatgg

SEQ ID NO: 36579 - DNA, 20 bp, synthetic construct
  misc_feature 1..20: note = Description of Artificial Sequence: Synthetic oligonucleotide
  misc_feature 1..20: note = Target: SCN10A; (+) strand; PAM type: NRG; PAM sequence: AAG
  source 1..20: mol_type = other DNA
ccagacaagaaatggtagaa

SEQ ID NO: 36580 - DNA, 20 bp, synthetic construct
  misc_feature 1..20: note = Description of Artificial Sequence: Synthetic oligonucleotide
  misc_feature 1..20: note = Target: SCN10A; (+) strand; PAM type: NRG; PAM sequence: TAG
  source 1..20: mol_type = other DNA
ggtagaaaagacttccactc

SEQ ID NO: 36581 - DNA, 20 bp, synthetic construct
  misc_feature 1..20: note = Description of Artificial Sequence: Synthetic oligonucleotide
  misc_feature 1..20: note = Target: SCN10A; (+) strand; PAM type: NRG; PAM sequence: TGG
  source 1..20: mol_type = other DNA
aaaagacttccactctagaa

SEQ ID NO: 36582 - DNA, 20 bp, synthetic construct
  misc_feature 1..20: note = Description of Artificial Sequence: Synthetic oligonucleotide
  misc_feature 1..20: note = Target: SCN10A; (+) strand; PAM type: NRG; PAM sequence: GGG
  source 1..20: mol_type = other DNA
aaagacttccactctagaat

SEQ ID NO: 36583 - DNA, 20 bp, synthetic construct
  misc_feature 1..20: note = Description of Artificial Sequence: Synthetic oligonucleotide
  misc_feature 1..20: note = Target: SCN10A; (+) strand; PAM type: NRG; PAM sequence: CAG
  source 1..20: mol_type = other DNA
agaatgggtgtttctgttta

SEQ ID NO: 36584 - DNA, 20 bp, synthetic construct
  misc_feature 1..20: note = Description of Artificial Sequence: Synthetic oligonucleotide
  misc_feature 1..20: note = Target: SCN10A; (+) strand; PAM type: NRG; PAM sequence: AAG
  source 1..20: mol_type = other DNA
gggtgtttctgtttacagat

SEQ ID NO: 36585 - DNA, 20 bp, synthetic construct
  misc_feature 1..20: note = Description of Artificial Sequence: Synthetic oligonucleotide
  misc_feature 1..20: note = Target: SCN10A; (+) strand; PAM type: NRG; PAM sequence: GAG
  source 1..20: mol_type = other DNA
gtgtttctgtttacagataa

SEQ ID NO: 36586 - DNA, 20 bp, synthetic construct
  misc_feature 1..20: note = Description of Artificial Sequence: Synthetic oligonucleotide
  misc_feature 1..20: note = Target: SCN10A; (+) strand; PAM type: NRG; PAM sequence: TGG
  source 1..20: mol_type = other DNA
cagataagagaacgaattct

SEQ ID NO: 36587 - DNA, 20 bp, synthetic construct
  misc_feature 1..20: note = Description of Artificial Sequence: Synthetic oligonucleotide
  misc_feature 1..20: note = Target: SCN10A; (+) strand; PAM type: NRG; PAM sequence: GGG
  source 1..20: mol_type = other DNA
agataagagaacgaattctt

SEQ ID NO: 36588 - DNA, 20 bp, synthetic construct
  misc_feature 1..20: note = Description of Artificial Sequence: Synthetic oligonucleotide
  misc_feature 1..20: note = Target: SCN10A; (+) strand; PAM type: NRG; PAM sequence: GGG
  source 1..20: mol_type = other DNA
gataagagaacgaattcttg

SEQ ID NO: 36589 - DNA, 20 bp, synthetic construct
  misc_feature 1..20: note = Description of Artificial Sequence: Synthetic oligonucleotide
  misc_feature 1..20: note = Target: SCN10A; (+) strand; PAM type: NRG; PAM sequence: GAG
  source 1..20: mol_type = other DNA
agagaacgaattcttggggt

SEQ ID NO: 36590 - DNA, 20 bp, synthetic construct
  misc_feature 1..20: note = Description of Artificial Sequence: Synthetic oligonucleotide
  misc_feature 1..20: note = Target: SCN10A; (+) strand; PAM type: NRG; PAM sequence: GAG
  source 1..20: mol_type = other DNA
agaacgaattcttggggtga

SEQ ID NO: 36591 - DNA, 20 bp, synthetic construct
  misc_feature 1..20: note = Description of Artificial Sequence: Synthetic oligonucleotide
  misc_feature 1..20: note = Target: SCN10A; (+) strand; PAM type: NRG; PAM sequence: AGG
  source 1..20: mol_type = other DNA
gaacgaattcttggggtgag

SEQ ID NO: 36592 - DNA, 20 bp, synthetic construct
  misc_feature 1..20: note = Description of Artificial Sequence: Synthetic oligonucleotide
  misc_feature 1..20: note = Target: SCN10A; (+) strand; PAM type: NRG; PAM sequence: GAG
  source 1..20: mol_type = other DNA
acgaattcttggggtgagag

SEQ ID NO: 36593 - DNA, 20 bp, synthetic construct
  misc_feature 1..20: note = Description of Artificial Sequence: Synthetic oligonucleotide
  misc_feature 1..20: note = Target: SCN10A; (+) strand; PAM type: NRG; PAM sequence: GAG
  source 1..20: mol_type = other DNA
gaattcttggggtgagagga

SEQ ID NO: 36594 - DNA, 20 bp, synthetic construct
  misc_feature 1..20: note = Description of Artificial Sequence: Synthetic oligonucleotide
  misc_feature 1..20: note = Target: SCN10A; (+) strand; PAM type: NRG; PAM sequence: CAG
  source 1..20: mol_type = other DNA
ggtgagaggagagaacctat

SEQ ID NO: 36595 - DNA, 20 bp, synthetic construct
  misc_feature 1..20: note = Description of Artificial Sequence: Synthetic oligonucleotide
  misc_feature 1..20: note = Target: SCN10A; (+) strand; PAM type: NRG; PAM sequence: AGG
  source 1..20: mol_type = other DNA
gtgagaggagagaacctatc

SEQ ID NO: 36596 - DNA, 20 bp, synthetic construct
  misc_feature 1..20: note = Description of Artificial Sequence: Synthetic oligonucleotide
  misc_feature 1..20: note = Target: SCN10A; (+) strand; PAM type: NRG; PAM sequence: CAG
  source 1..20: mol_type = other DNA
ggagagaacctatcaggcca

SEQ ID NO: 36597 - DNA, 20 bp, synthetic construct
  misc_feature 1..20: note = Description of Artificial Sequence: Synthetic oligonucleotide
  misc_feature 1..20: note = Target: SCN10A; (+) strand; PAM type: NRG; PAM sequence: GAG
  source 1..20: mol_type = other DNA
agagaacctatcaggccaca

SEQ ID NO: 36598 - DNA, 20 bp, synthetic construct
  misc_feature 1..20: note = Description of Artificial Sequence: Synthetic oligonucleotide
  misc_feature 1..20: note = Target: SCN10A; (+) strand; PAM type: NRG; PAM sequence: AGG
  source 1..20: mol_type = other DNA
gagaacctatcaggccacag

SEQ ID NO: 36599 - DNA, 20 bp, synthetic construct
  misc_feature 1..20: note = Description of Artificial Sequence: Synthetic oligonucleotide
  misc_feature 1..20: note = Target: SCN10A; (+) strand; PAM type: NRG; PAM sequence: GGG
  source 1..20: mol_type = other DNA
agaacctatcaggccacaga

SEQ ID NO: 36600 - DNA, 20 bp, synthetic construct
  misc_feature 1..20: note = Description of Artificial Sequence: Synthetic oligonucleotide
  misc_feature 1..20: note = Target: SCN10A; (+) strand; PAM type: NRG; PAM sequence: GGG
  source 1..20: mol_type = other DNA
gaacctatcaggccacagag

SEQ ID NO: 36601 - DNA, 20 bp, synthetic construct
  misc_feature 1..20: note = Description of Artificial Sequence: Synthetic oligonucleotide
  misc_feature 1..20: note = Target: SCN10A; (+) strand; PAM type: NRG; PAM sequence: AAG
  source 1..20: mol_type = other DNA
cctatcaggccacagagggg

SEQ ID NO: 36602 - DNA, 20 bp, synthetic construct
  misc_feature 1..20: note = Description of Artificial Sequence: Synthetic oligonucleotide
  misc_feature 1..20: note = Target: SCN10A; (+) strand; PAM type: NRG; PAM sequence: AAG
  source 1..20: mol_type = other DNA
ggccacagaggggaagcatc

SEQ ID NO: 36603 - DNA, 20 bp, synthetic construct
  misc_feature 1..20: note = Description of Artificial Sequence: Synthetic oligonucleotide
  misc_feature 1..20: note = Target: SCN10A; (+) strand; PAM type: NRG; PAM sequence: CAG
  source 1..20: mol_type = other DNA
ggaagcatcaagtcccattt

SEQ ID NO: 36604 - DNA, 20 bp, synthetic construct
  misc_feature 1..20: note = Description of Artificial Sequence: Synthetic oligonucleotide
  misc_feature 1..20: note = Target: SCN10A; (+) strand; PAM type: NRG; PAM sequence: AAG
  source 1..20: mol_type = other DNA
gcatcaagtcccatttcaga

SEQ ID NO: 36605 - DNA, 20 bp, synthetic construct
  misc_feature 1..20: note = Description of Artificial Sequence: Synthetic oligonucleotide
  misc_feature 1..20: note = Target: SCN10A; (+) strand; PAM type: NRG; PAM sequence: TGG
  source 1..20: mol_type = other DNA
cagaaagtttgccttgtctc

SEQ ID NO: 36606 - DNA, 20 bp, synthetic construct
  misc_feature 1..20: note = Description of Artificial Sequence: Synthetic oligonucleotide
  misc_feature 1..20: note = Target: SCN10A; (+) strand; PAM type: NRG; PAM sequence: TGG
  source 1..20: mol_type = other DNA
catcctcaccatcaacctca

SEQ ID NO: 36607 - DNA, 20 bp, synthetic construct
  misc_feature 1..20: note = Description of Artificial Sequence: Synthetic oligonucleotide
  misc_feature 1..20: note = Target: SCN10A; (+) strand; PAM type: NRG; PAM sequence: GGG
  source 1..20: mol_type = other DNA
atcctcaccatcaacctcat

SEQ ID NO: 36608 - DNA, 20 bp, synthetic construct
  misc_feature 1..20: note = Description of Artificial Sequence: Synthetic oligonucleotide
  misc_feature 1..20: note = Target: SCN10A; (+) strand; PAM type: NRG; PAM sequence: GGG
  source 1..20: mol_type = other DNA
tcctcaccatcaacctcatg

SEQ ID NO: 36609 - DNA, 20 bp, synthetic construct
  misc_feature 1..20: note = Description of Artificial Sequence: Synthetic oligonucleotide
  misc_feature 1..20: note = Target: SCN10A; (+) strand; PAM type: NRG; PAM sequence: GGG
  source 1..20: mol_type = other DNA
cctcaccatcaacctcatgg

SEQ ID NO: 36610 - DNA, 20 bp, synthetic construct
  misc_feature 1..20: note = Description of Artificial Sequence: Synthetic oligonucleotide
  misc_feature 1..20: note = Target: SCN10A; (+) strand; PAM type: NRG; PAM sequence: AAG
  source 1..20: mol_type = other DNA
catcaacctcatgggggctg

SEQ ID NO: 36611 - DNA, 20 bp, synthetic construct
  misc_feature 1..20: note = Description of Artificial Sequence: Synthetic oligonucleotide
  misc_feature 1..20: note = Target: SCN10A; (+) strand; PAM type: NRG; PAM sequence: GAG
  source 1..20: mol_type = other DNA
tcaacctcatgggggctgaa

SEQ ID NO: 36612 - DNA, 20 bp, synthetic construct
  misc_feature 1..20: note = Description of Artificial Sequence: Synthetic oligonucleotide
  misc_feature 1..20: note = Target: SCN10A; (+) strand; PAM type: NRG; PAM sequence: TAG
  source 1..20: mol_type = other DNA
acctcatgggggctgaagag

SEQ ID NO: 36613 - DNA, 20 bp, synthetic construct
  misc_feature 1..20: note = Description of Artificial Sequence: Synthetic oligonucleotide
  misc_feature 1..20: note = Target: SCN10A; (+) strand; PAM type: NRG; PAM sequence: TGG
  source 1..20: mol_type = other DNA
gggggctgaagagtagtcgc

SEQ ID NO: 36614 - DNA, 20 bp, synthetic construct
  misc_feature 1..20: note = Description of Artificial Sequence: Synthetic oligonucleotide
  misc_feature 1..20: note = Target: SCN10A; (+) strand; PAM type: NRG; PAM sequence: GGG
  source 1..20: mol_type = other DNA
ggggctgaagagtagtcgct

SEQ ID NO: 36615 - DNA, 20 bp, synthetic construct
  misc_feature 1..20: note = Description of Artificial Sequence: Synthetic oligonucleotide
  misc_feature 1..20: note = Target: SCN10A; (+) strand; PAM type: NRG; PAM sequence: TGG
  source 1..20: mol_type = other DNA
aagagtagtcgctgggctac

SEQ ID NO: 36616 - DNA, 20 bp, synthetic construct
  misc_feature 1..20: note = Description of Artificial Sequence: Synthetic oligonucleotide
  misc_feature 1..20: note = Target: SCN10A; (+) strand; PAM type: NRG; PAM sequence: CAG
  source 1..20: mol_type = other DNA
agtcgctgggctactggtga

SEQ ID NO: 36617 - DNA, 20 bp, synthetic construct
  misc_feature 1..20: note = Description of Artificial Sequence: Synthetic oligonucleotide
  misc_feature 1..20: note = Target: SCN10A; (+) strand; PAM type: NRG; PAM sequence: TGG
  source 1..20: mol_type = other DNA
cgctgggctactggtgacag

SEQ ID NO: 36618 - DNA, 20 bp, synthetic construct
  misc_feature 1..20: note = Description of Artificial Sequence: Synthetic oligonucleotide
  misc_feature 1..20: note = Target: SCN10A; (+) strand; PAM type: NRG; PAM sequence: GAG
  source 1..20: mol_type = other DNA
ctgggctactggtgacagtg

SEQ ID NO: 36619 - DNA, 20 bp, synthetic construct
  misc_feature 1..20: note = Description of Artificial Sequence: Synthetic oligonucleotide
  misc_feature 1..20: note = Target: SCN10A; (+) strand; PAM type: NRG; PAM sequence: TAG
  source 1..20: mol_type = other DNA
actggtgacagtggagatct

SEQ ID NO: 36620 - DNA, 20 bp, synthetic construct
  misc_feature 1..20: note = Description of Artificial Sequence: Synthetic oligonucleotide
  misc_feature 1..20: note = Target: SCN10A; (+) strand; PAM type: NRG; PAM sequence: GAG
  source 1..20: mol_type = other DNA
tggtgacagtggagatctta

SEQ ID NO: 36621 - DNA, 20 bp, synthetic construct
  misc_feature 1..20: note = Description of Artificial Sequence: Synthetic oligonucleotide
  misc_feature 1..20: note = Target: SCN10A; (+) strand; PAM type: NRG; PAM sequence: AGG
  source 1..20: mol_type = other DNA
ggtgacagtggagatcttag

SEQ ID NO: 36622 - DNA, 20 bp, synthetic construct
  misc_feature 1..20: note = Description of Artificial Sequence: Synthetic oligonucleotide
  misc_feature 1..20: note = Target: SCN10A; (+) strand; PAM type: NRG; PAM sequence: GAG
  source 1..20: mol_type = other DNA
tcttagaggccccacacaat

SEQ ID NO: 36623 - DNA, 20 bp, synthetic construct
  misc_feature 1..20: note = Description of Artificial Sequence: Synthetic oligonucleotide
  misc_feature 1..20: note = Target: SCN10A; (+) strand; PAM type: NRG; PAM sequence: TGG
  source 1..20: mol_type = other DNA
ccccacacaatgagctttga

SEQ ID NO: 36624 - DNA, 20 bp, synthetic construct
  misc_feature 1..20: note = Description of Artificial Sequence: Synthetic oligonucleotide
  misc_feature 1..20: note = Target: SCN10A; (+) strand; PAM type: NRG; PAM sequence: CAG
  source 1..20: mol_type = other DNA
tacttttgtttctgaattct

SEQ ID NO: 36625 - DNA, 20 bp, synthetic construct
  misc_feature 1..20: note = Description of Artificial Sequence: Synthetic oligonucleotide
  misc_feature 1..20: note = Target: SCN10A; (+) strand; PAM type: NRG; PAM sequence: AAG
  source 1..20: mol_type = other DNA
tttctgaattctcagtaatc

SEQ ID NO: 36626 - DNA, 20 bp, synthetic construct
  misc_feature 1..20: note = Description of Artificial Sequence: Synthetic oligonucleotide
  misc_feature 1..20: note = Target: SCN10A; (+) strand; PAM type: NRG; PAM sequence: TGG
  source 1..20: mol_type = other DNA
tgcctaattcttttttcctc

SEQ ID NO: 36627 - DNA, 20 bp, synthetic construct
  misc_feature 1..20: note = Description of Artificial Sequence: Synthetic oligonucleotide
  misc_feature 1..20: note = Target: SCN10A; (+) strand; PAM type: NRG; PAM sequence: GGG
  source 1..20: mol_type = other DNA
gcctaattcttttttcctct

SEQ ID NO: 36628 - DNA, 20 bp, synthetic construct
  misc_feature 1..20: note = Description of Artificial Sequence: Synthetic oligonucleotide
  misc_feature 1..20: note = Target: SCN10A; (+) strand; PAM type: NRG; PAM sequence: AAG
  source 1..20: mol_type = other DNA
ttttttcctctgggtgtcta

SEQ ID NO: 36629 - DNA, 20 bp, synthetic construct
  misc_feature 1..20: note = Description of Artificial Sequence: Synthetic oligonucleotide
  misc_feature 1..20: note = Target: SCN10A; (+) strand; PAM type: NRG; PAM sequence: CAG
  source 1..20: mol_type = other DNA
ttcctctgggtgtctaaaga

SEQ ID NO: 36630 - DNA, 20 bp, synthetic construct
  misc_feature 1..20: note = Description of Artificial Sequence: Synthetic oligonucleotide
  misc_feature 1..20: note = Target: SCN10A; (+) strand; PAM type: NRG; PAM sequence: AGG
  source 1..20: mol_type = other DNA
tcctctgggtgtctaaagac

SEQ ID NO: 36631 - DNA, 20 bp, synthetic construct
  misc_feature 1..20: note = Description of Artificial Sequence: Synthetic oligonucleotide
  misc_feature 1..20: note = Target: SCN10A; (+) strand; PAM type: NRG; PAM sequence: TAG
  source 1..20: mol_type = other DNA
ggtgtctaaagacaggattt

SEQ ID NO: 36632 - DNA, 20 bp, synthetic construct
  misc_feature 1..20: note = Description of Artificial Sequence: Synthetic oligonucleotide
  misc_feature 1..20: note = Target: SCN10A; (+) strand; PAM type: NRG; PAM sequence: CGG
  source 1..20: mol_type = other DNA
aagacaggattttagaccta

SEQ ID NO: 36633 - DNA, 20 bp, synthetic construct
  misc_feature 1..20: note = Description of Artificial Sequence: Synthetic oligonucleotide
  misc_feature 1..20: note = Target: SCN10A; (+) strand; PAM type: NRG; PAM sequence: CAG
  source 1..20: mol_type = other DNA
ggattttagacctacggaaa

SEQ ID NO: 36634 - DNA, 20 bp, synthetic construct
  misc_feature 1..20: note = Description of Artificial Sequence: Synthetic oligonucleotide
  misc_feature 1..20: note = Target: SCN10A; (+) strand; PAM type: NRG; PAM sequence: AAG
  source 1..20: mol_type = other DNA
ttagacctacggaaacagtg

SEQ ID NO: 36635 - DNA, 20 bp, synthetic construct
  misc_feature 1..20: note = Description of Artificial Sequence: Synthetic oligonucleotide
  misc_feature 1..20: note = Target: SCN10A; (+) strand; PAM type: NRG; PAM sequence: TGG
  source 1..20: mol_type = other DNA
tacggaaacagtgaagatac

SEQ ID NO: 36636 - DNA, 20 bp, synthetic construct
  misc_feature 1..20: note = Description of Artificial Sequence: Synthetic oligonucleotide
  misc_feature 1..20: note = Target: SCN10A; (+) strand; PAM type: NRG; PAM sequence: GGG
  source 1..20: mol_type = other DNA
acggaaacagtgaagatact

SEQ ID NO: 36637 - DNA, 20 bp, synthetic construct
  misc_feature 1..20: note = Description of Artificial Sequence: Synthetic oligonucleotide
  misc_feature 1..20: note = Target: SCN10A; (+) strand; PAM type: NRG; PAM sequence: AAG
  source 1..20: mol_type = other DNA
ctcccttcctccccatttcc

SEQ ID NO: 36638 - DNA, 20 bp, synthetic construct
  misc_feature 1..20: note = Description of Artificial Sequence: Synthetic oligonucleotide
  misc_feature 1..20: note = Target: SCN10A; (+) strand; PAM type: NRG; PAM sequence: TAG
  source 1..20: mol_type = other DNA
catttccaagtttaatcctt

SEQ ID NO: 36639 - DNA, 20 bp, synthetic construct
  misc_feature 1..20: note = Description of Artificial Sequence: Synthetic oligonucleotide
  misc_feature 1..20: note = Target: SCN10A; (+) strand; PAM type: NRG; PAM sequence: AAG
  source 1..20: mol_type = other DNA
caagtttaatcctttagttt

SEQ ID NO: 36640 - DNA, 20 bp, synthetic construct
  misc_feature 1..20: note = Description of Artificial Sequence: Synthetic oligonucleotide
  misc_feature 1..20: note = Target: SCN10A; (+) strand; PAM type: NRG; PAM sequence: AGG
  source 1..20: mol_type = other DNA
aagtttaatcctttagttta

SEQ ID NO: 36641 - DNA, 20 bp, synthetic construct
  misc_feature 1..20: note = Description of Artificial Sequence: Synthetic oligonucleotide
  misc_feature 1..20: note = Target: SCN10A; (+) strand; PAM type: NRG; PAM sequence: GAG
  source 1..20: mol_type = other DNA
gtataaataaaaattcaact

SEQ ID NO: 36642 - DNA, 20 bp, synthetic construct
  misc_feature 1..20: note = Description of Artificial Sequence: Synthetic oligonucleotide
  misc_feature 1..20: note = Target: SCN10A; (+) strand; PAM type: NRG; PAM sequence: AGG
  source 1..20: mol_type = other DNA
tataaataaaaattcaactg

SEQ ID NO: 36643 - DNA, 20 bp, synthetic construct
  misc_feature 1..20: note = Description of Artificial Sequence: Synthetic oligonucleotide
  misc_feature 1..20: note = Target: SCN10A; (+) strand; PAM type: NRG; PAM sequence: GGG
  source 1..20: mol_type = other DNA
ataaataaaaattcaactga

SEQ ID NO: 36644 - DNA, 20 bp, synthetic construct
  misc_feature 1..20: note = Description of Artificial Sequence: Synthetic oligonucleotide
  misc_feature 1..20: note = Target: SCN10A; (+) strand; PAM type: NRG; PAM sequence: GGG
  source 1..20: mol_type = other DNA
taaataaaaattcaactgag

SEQ ID NO: 36645 - DNA, 20 bp, synthetic construct
  misc_feature 1..20: note = Description of Artificial Sequence: Synthetic oligonucleotide
  misc_feature 1..20: note = Target: SCN10A; (+) strand; PAM type: NRG; PAM sequence: CAG
  source 1..20: mol_type = other DNA
tcttgcctgaatcccacaac

SEQ ID NO: 36646 - DNA, 20 bp, synthetic construct
  misc_feature 1..20: note = Description of Artificial Sequence: Synthetic oligonucleotide
  misc_feature 1..20: note = Target: SCN10A; (+) strand; PAM type: NRG; PAM sequence: CAG
  source 1..20: mol_type = other DNA
cctgaatcccacaaccagaa

SEQ ID NO: 36647 - DNA, 20 bp, synthetic construct
  misc_feature 1..20: note = Description of Artificial Sequence: Synthetic oligonucleotide
  misc_feature 1..20: note = Target: SCN10A; (+) strand; PAM type: NRG; PAM sequence: AAG
  source 1..20: mol_type = other DNA
aatcccacaaccagaacaga

SEQ ID NO: 36648 - DNA, 20 bp, synthetic construct
  misc_feature 1..20: note = Description of Artificial Sequence: Synthetic oligonucleotide
  misc_feature 1..20: note = Target: SCN10A; (+) strand; PAM type: NRG; PAM sequence: AAG
  source 1..20: mol_type = other DNA
cacaaccagaacagaaagtg

SEQ ID NO: 36649 - DNA, 20 bp, synthetic construct
  misc_feature 1..20: note = Description of Artificial Sequence: Synthetic oligonucleotide
  misc_feature 1..20: note = Target: SCN10A; (+) strand; PAM type: NRG; PAM sequence: GAG
  source 1..20: mol_type = other DNA
tcctgttacgtattgattgt

SEQ ID NO: 36650 - DNA, 20 bp, synthetic construct
  misc_feature 1..20: note = Description of Artificial Sequence: Synthetic oligonucleotide
  misc_feature 1..20: note = Target: SCN10A; (+) strand; PAM type: NRG; PAM sequence: AGG
  source 1..20: mol_type = other DNA
cctgttacgtattgattgtg

SEQ ID NO: 36651 - DNA, 20 bp, synthetic construct
  misc_feature 1..20: note = Description of Artificial Sequence: Synthetic oligonucleotide
  misc_feature 1..20: note = Target: SCN10A; (+) strand; PAM type: NRG; PAM sequence: TGG
  source 1..20: mol_type = other DNA
gtattgattgtgaggccatg

SEQ ID NO: 36652 - DNA, 20 bp, synthetic construct
  misc_feature 1..20: note = Description of Artificial Sequence: Synthetic oligonucleotide
  misc_feature 1..20: note = Target: SCN10A; (+) strand; PAM type: NRG; PAM sequence: TGG
  source 1..20: mol_type = other DNA
ttgtgaggccatgtggtatg

SEQ ID NO: 36653 - DNA, 20 bp, synthetic construct
  misc_feature 1..20: note = Description of Artificial Sequence: Synthetic oligonucleotide
  misc_feature 1..20: note = Target: SCN10A; (+) strand; PAM type: NRG; PAM sequence: GGG
  source 1..20: mol_type = other DNA
tgtgaggccatgtggtatgt

SEQ ID NO: 36654 - DNA, 20 bp, synthetic construct
  misc_feature 1..20: note = Description of Artificial Sequence: Synthetic oligonucleotide
  misc_feature 1..20: note = Target: SCN10A; (+) strand; PAM type: NRG; PAM sequence: AAG
  source 1..20: mol_type = other DNA
gaggccatgtggtatgtggg

SEQ ID NO: 36655 - DNA, 20 bp, synthetic construct
  misc_feature 1..20: note = Description of Artificial Sequence: Synthetic oligonucleotide
  misc_feature 1..20: note = Target: SCN10A; (+) strand; PAM type: NRG; PAM sequence: GAG
  source 1..20: mol_type = other DNA
ggccatgtggtatgtgggaa

SEQ ID NO: 36656 - DNA, 20 bp, synthetic construct
  misc_feature 1..20: note = Description of Artificial Sequence: Synthetic oligonucleotide
  misc_feature 1..20: note = Target: SCN10A; (+) strand; PAM type: NRG; PAM sequence: TGG
  source 1..20: mol_type = other DNA
gtggtatgtgggaagagcac

SEQ ID NO: 36657 - DNA, 20 bp, synthetic construct
  misc_feature 1..20: note = Description of Artificial Sequence: Synthetic oligonucleotide
  misc_feature 1..20: note = Target: SCN10A; (+) strand; PAM type: NRG; PAM sequence: TAG
  source 1..20: mol_type = other DNA
atgtgggaagagcactggcc

SEQ ID NO: 36658 - DNA, 20 bp, synthetic construct
  misc_feature 1..20: note = Description of Artificial Sequence: Synthetic oligonucleotide
  misc_feature 1..20: note = Target: SCN10A; (+) strand; PAM type: NRG; PAM sequence: AGG
  source 1..20: mol_type = other DNA
tgtgggaagagcactggcct

SEQ ID NO: 36659 - DNA, 20 bp, synthetic construct
  misc_feature 1..20: note = Description of Artificial Sequence: Synthetic oligonucleotide
  misc_feature 1..20: note = Target: SCN10A; (+) strand; PAM type: NRG; PAM sequence: GAG
  source 1..20: mol_type = other DNA
tgggaagagcactggcctag

SEQ ID NO: 36660 - DNA, 20 bp, synthetic construct
  misc_feature 1..20: note = Description of Artificial Sequence: Synthetic oligonucleotide
  misc_feature 1..20: note = Target: SCN10A; (+) strand; PAM type: NRG; PAM sequence: TGG
  source 1..20: mol_type = other DNA
aagagcactggcctaggagt

SEQ ID NO: 36661 - DNA, 20 bp, synthetic construct
  misc_feature 1..20: note = Description of Artificial Sequence: Synthetic oligonucleotide
  misc_feature 1..20: note = Target: SCN10A; (+) strand; PAM type: NRG; PAM sequence: GGG
  source 1..20: mol_type = other DNA
agagcactggcctaggagtt

SEQ ID NO: 36662 - DNA, 20 bp, synthetic construct
  misc_feature 1..20: note = Description of Artificial Sequence: Synthetic oligonucleotide
  misc_feature 1..20: note = Target: SCN10A; (+) strand; PAM type: NRG; PAM sequence: TAG
  source 1..20: mol_type = other DNA
tggcctaggagttgggacaa

SEQ ID NO: 36663 - DNA, 20 bp, synthetic construct
  misc_feature 1..20: note = Description of Artificial Sequence: Synthetic oligonucleotide
  misc_feature 1..20: note = Target: SCN10A; (+) strand; PAM type: NRG; PAM sequence: AGG
  source 1..20: mol_type = other DNA
ggcctaggagttgggacaat

SEQ ID NO: 36664 - DNA, 20 bp, synthetic construct
  misc_feature 1..20: note = Description of Artificial Sequence: Synthetic oligonucleotide
  misc_feature 1..20: note = Target: SCN10A; (+) strand; PAM type: NRG; PAM sequence: CAG
  source 1..20: mol_type = other DNA
gagttgggacaataggcttc

SEQ ID NO: 36665 - DNA, 20 bp, synthetic construct
  misc_feature 1..20: note = Description of Artificial Sequence: Synthetic oligonucleotide
  misc_feature 1..20: note = Target: SCN10A; (+) strand; PAM type: NRG; PAM sequence: AGG
  source 1..20: mol_type = other DNA
agttgggacaataggcttcc

SEQ ID NO: 36666 - DNA, 20 bp, synthetic construct
  misc_feature 1..20: note = Description of Artificial Sequence: Synthetic oligonucleotide
  misc_feature 1..20: note = Target: SCN10A; (+) strand; PAM type: NRG; PAM sequence: TAG
  source 1..20: mol_type = other DNA
caggtcacactgtctcttac

SEQ ID NO: 36667 - DNA, 20 bp, synthetic construct
  misc_feature 1..20: note = Description of Artificial Sequence: Synthetic oligonucleotide
  misc_feature 1..20: note = Target: SCN10A; (+) strand; PAM type: NRG; PAM sequence: AAG
  source 1..20: mol_type = other DNA
cacactgtctcttactagtg

SEQ ID NO: 36668 - DNA, 20 bp, synthetic construct
  misc_feature 1..20: note = Description of Artificial Sequence: Synthetic oligonucleotide
  misc_feature 1..20: note = Target: SCN10A; (+) strand; PAM type: NRG; PAM sequence: GAG
  source 1..20: mol_type = other DNA
cactgtctcttactagtgaa

SEQ ID NO: 36669 - DNA, 20 bp, synthetic construct
  misc_feature 1..20: note = Description of Artificial Sequence: Synthetic oligonucleotide
  misc_feature 1..20: note = Target: SCN10A; (+) strand; PAM type: NRG; PAM sequence: AGG
  source 1..20: mol_type = other DNA
actgtctcttactagtgaag

SEQ ID NO: 36670 - DNA, 20 bp, synthetic construct
  misc_feature 1..20: note = Description of Artificial Sequence: Synthetic oligonucleotide
  misc_feature 1..20: note = Target: SCN10A; (+) strand; PAM type: NRG; PAM sequence: TGG
  source 1..20: mol_type = other DNA
tcttactagtgaagaggcct

SEQ ID NO: 36671 - DNA, 20 bp, synthetic construct
  misc_feature 1..20: note = Description of Artificial Sequence: Synthetic oligonucleotide
  misc_feature 1..20: note = Target: SCN10A; (+) strand; PAM type: NRG; PAM sequence: GGG
  source 1..20: mol_type = other DNA
cttactagtgaagaggcctt

SEQ ID NO: 36672 - DNA, 20 bp, synthetic construct
  misc_feature 1..20: note = Description of Artificial Sequence: Synthetic oligonucleotide
  misc_feature 1..20: note = Target: SCN10A; (+) strand; PAM type: NRG; PAM sequence: CAG
  source 1..20: mol_type = other DNA
ggtttatgtttcctatactc

SEQ ID NO: 36673 - DNA, 20 bp, synthetic construct
  misc_feature 1..20: note = Description of Artificial Sequence: Synthetic oligonucleotide
  misc_feature 1..20: note = Target: SCN10A; (+) strand; PAM type: NRG; PAM sequence: AGG
  source 1..20: mol_type = other DNA
gtttatgtttcctatactcc

SEQ ID NO: 36674 - DNA, 20 bp, synthetic construct
  misc_feature 1..20: note = Description of Artificial Sequence: Synthetic oligonucleotide
  misc_feature 1..20: note = Target: SCN10A; (+) strand; PAM type: NRG; PAM sequence: CAG
  source 1..20: mol_type = other DNA
gtttcctatactccaggcct

SEQ ID NO: 36675 - DNA, 20 bp, synthetic construct
  misc_feature 1..20: note = Description of Artificial Sequence: Synthetic oligonucleotide
  misc_feature 1..20: note = Target: SCN10A; (+) strand; PAM type: NRG; PAM sequence: AAG
  source 1..20: mol_type = other DNA
cctcagttcctttgtcttgt

SEQ ID NO: 36676 - DNA, 20 bp, synthetic construct
  misc_feature 1..20: note = Description of Artificial Sequence: Synthetic oligonucleotide
  misc_feature 1..20: note = Target: SCN10A; (+) strand; PAM type: NRG; PAM sequence: TGG
  source 1..20: mol_type = other DNA
cagttcctttgtcttgtaag

SEQ ID NO: 36677 - DNA, 20 bp, synthetic construct
  misc_feature 1..20: note = Description of Artificial Sequence: Synthetic oligonucleotide
  misc_feature 1..20: note = Target: SCN10A; (+) strand; PAM type: NRG; PAM sequence: GGG
  source 1..20: mol_type = other DNA
agttcctttgtcttgtaagt

SEQ ID NO: 36678 - DNA, 20 bp, synthetic construct
  misc_feature 1..20: note = Description of Artificial Sequence: Synthetic oligonucleotide
  misc_feature 1..20: note = Target: SCN10A; (+) strand; PAM type: NRG; PAM sequence: GGG
  source 1..20: mol_type = other DNA
gttcctttgtcttgtaagtg

SEQ ID NO: 36679 - DNA, 20 bp, synthetic construct
  misc_feature 1..20: note = Description of Artificial Sequence: Synthetic oligonucleotide
  misc_feature 1..20: note = Target: SCN10A; (+) strand; PAM type: NRG; PAM sequence: TAG
  source 1..20: mol_type = other DNA
tgtcttgtaagtggggacaa

SEQ ID NO: 36680 - DNA, 20 bp, synthetic construct
  misc_feature 1..20: note = Description of Artificial Sequence: Synthetic oligonucleotide
  misc_feature 1..20: note = Target: SCN10A; (+) strand; PAM type: NRG; PAM sequence: TGG
  source 1..20: mol_type = other DNA
ggggacaatagtctttgccc

SEQ ID NO: 36681 - DNA, 20 bp, synthetic construct
  misc_feature 1..20: note = Description of Artificial Sequence: Synthetic oligonucleotide
  misc_feature 1..20: note = Target: SCN10A; (+) strand; PAM type: NRG; PAM sequence: CAG
  source 1..20: mol_type = other DNA
gtctttgccctggaacctta

SEQ ID NO: 36682 - DNA, 20 bp, synthetic construct
  misc_feature 1..20: note = Description of Artificial Sequence: Synthetic oligonucleotide
  misc_feature 1..20: note = Target: SCN10A; (+) strand; PAM type: NRG; PAM sequence: AGG
  source 1..20: mol_type = other DNA
tctttgccctggaaccttac

SEQ ID NO: 36683 - DNA, 20 bp, synthetic construct
  misc_feature 1..20: note = Description of Artificial Sequence: Synthetic oligonucleotide
  misc_feature 1..20: note = Target: SCN10A; (+) strand; PAM type: NRG; PAM sequence: GGG
  source 1..20: mol_type = other DNA
ctttgccctggaaccttaca

SEQ ID NO: 36684 - DNA, 20 bp, synthetic construct
  misc_feature 1..20: note = Description of Artificial Sequence: Synthetic oligonucleotide
  misc_feature 1..20: note = Target: SCN10A; (+) strand; PAM type: NRG; PAM sequence: TAG
  source 1..20: mol_type = other DNA
tacagggttcttgtgaaaat

SEQ ID NO: 36685 - DNA, 20 bp, synthetic construct
  misc_feature 1..20: note = Description of Artificial Sequence: Synthetic oligonucleotide
  misc_feature 1..20: note = Target: SCN10A; (+) strand; PAM type: NRG; PAM sequence: GAG
  source 1..20: mol_type = other DNA
cagggttcttgtgaaaatta

SEQ ID NO: 36686 - DNA, 20 bp, synthetic construct
  misc_feature 1..20: note = Description of Artificial Sequence: Synthetic oligonucleotide
  misc_feature 1..20: note = Target: SCN10A; (+) strand; PAM type: NRG; PAM sequence: AAG
  source 1..20: mol_type = other DNA
ggttcttgtgaaaattagag

SEQ ID NO: 36687 - DNA, 20 bp, synthetic construct
  misc_feature 1..20: note = Description of Artificial Sequence: Synthetic oligonucleotide
  misc_feature 1..20: note = Target: SCN10A; (+) strand; PAM type: NRG; PAM sequence: AGG
  source 1..20: mol_type = other DNA
gttcttgtgaaaattagaga

SEQ ID NO: 36688 - DNA, 20 bp, synthetic construct
  misc_feature 1..20: note = Description of Artificial Sequence: Synthetic oligonucleotide
  misc_feature 1..20: note = Target: SCN10A; (+) strand; PAM type: NRG; PAM sequence: GGG
  source 1..20: mol_type = other DNA
ttcttgtgaaaattagagaa

SEQ ID NO: 36689 - DNA, 20 bp, synthetic construct
  misc_feature 1..20: note = Description of Artificial Sequence: Synthetic oligonucleotide
  misc_feature 1..20: note = Target: SCN10A; (+) strand; PAM type: NRG; PAM sequence: GAG
  source 1..20: mol_type = other DNA
cttgtgaaaattagagaagg

SEQ ID NO: 36690 - DNA, 20 bp, synthetic construct
  misc_feature 1..20: note = Description of Artificial Sequence: Synthetic oligonucleotide
  misc_feature 1..20: note = Target: SCN10A; (+) strand; PAM type: NRG; PAM sequence: TAG
  source 1..20: mol_type = other DNA
tgaaaattagagaagggagt

SEQ ID NO: 36691 - DNA, 20 bp, synthetic construct
  misc_feature 1..20: note = Description of Artificial Sequence: Synthetic oligonucleotide
  misc_feature 1..20: note = Target: SCN10A; (+) strand; PAM type: NRG; PAM sequence: AGG
  source 1..20: mol_type = other DNA
gaaaattagagaagggagtt

SEQ ID NO: 36692 - DNA, 20 bp, synthetic construct
  misc_feature 1..20: note = Description of Artificial Sequence: Synthetic oligonucleotide
  misc_feature 1..20: note = Target: SCN10A; (+) strand; PAM type: NRG; PAM sequence: TGG
  source 1..20: mol_type = other DNA
tctgtgaataaatgctcacc

SEQ ID NO: 36693 - DNA, 20 bp, synthetic construct
  misc_feature 1..20: note = Description of Artificial Sequence: Synthetic oligonucleotide
  misc_feature 1..20: note = Target: SCN10A; (+) strand; PAM type: NRG; PAM sequence: GGG
  source 1..20: mol_type = other DNA
ctgtgaataaatgctcacct

SEQ ID NO: 36694 - DNA, 20 bp, synthetic construct
  misc_feature 1..20: note = Description of Artificial Sequence: Synthetic oligonucleotide
  misc_feature 1..20: note = Target: SCN10A; (+) strand; PAM type: NRG; PAM sequence: CAG
  source 1..20: mol_type = other DNA
taaatgctcacctgggatca

SEQ ID NO: 36695 - DNA, 20 bp, synthetic construct
  misc_feature 1..20: note = Description of Artificial Sequence: Synthetic oligonucleotide
  misc_feature 1..20: note = Target: SCN10A; (+) strand; PAM type: NRG; PAM sequence: AAG
  source 1..20: mol_type = other DNA
gaaactgtttttaatgctct

SEQ ID NO: 36696 - DNA, 20 bp, synthetic construct
  misc_feature 1..20: note = Description of Artificial Sequence: Synthetic oligonucleotide
  misc_feature 1..20: note = Target: SCN10A; (+) strand; PAM type: NRG; PAM sequence: CAG
  source 1..20: mol_type = other DNA
ctaagaactctgaatgtccg

SEQ ID NO: 36697 - DNA, 20 bp, synthetic construct
  misc_feature 1..20: note = Description of Artificial Sequence: Synthetic oligonucleotide
  misc_feature 1..20: note = Target: SCN10A; (+) strand; PAM type: NRG; PAM sequence: AGG
  source 1..20: mol_type = other DNA
taagaactctgaatgtccgc

SEQ ID NO: 36698 - DNA, 20 bp, synthetic construct
  misc_feature 1..20: note = Description of Artificial Sequence: Synthetic oligonucleotide
  misc_feature 1..20: note = Target: SCN10A; (+) strand; PAM type: NRG; PAM sequence: GAG
  source 1..20: mol_type = other DNA
ctctgaatgtccgcaggcct

SEQ ID NO: 36699 - DNA, 20 bp, synthetic construct
  misc_feature 1..20: note = Description of Artificial Sequence: Synthetic oligonucleotide
  misc_feature 1..20: note = Target: SCN10A; (+) strand; PAM type: NRG; PAM sequence: CGG
  source 1..20: mol_type = other DNA
tccgcaggcctgagatccca

SEQ ID NO: 36700 - DNA, 20 bp, synthetic construct
  misc_feature 1..20: note = Description of Artificial Sequence: Synthetic oligonucleotide
  misc_feature 1..20: note = Target: SCN10A; (+) strand; PAM type: NRG; PAM sequence: GAG
  source 1..20: mol_type = other DNA
cgcaggcctgagatcccacg

SEQ ID NO: 36701 - DNA, 20 bp, synthetic construct
  misc_feature 1..20: note = Description of Artificial Sequence: Synthetic oligonucleotide
  misc_feature 1..20: note = Target: SCN10A; (+) strand; PAM type: NRG; PAM sequence: TAG
  source 1..20: mol_type = other DNA
ttgctgtgccaacatatctg

SEQ ID NO: 36702 - DNA, 20 bp, synthetic construct
  misc_feature 1..20: note = Description of Artificial Sequence: Synthetic oligonucleotide
  misc_feature 1..20: note = Target: SCN10A; (+) strand; PAM type: NRG; PAM sequence: AGG
  source 1..20: mol_type = other DNA
tgctgtgccaacatatctgt

SEQ ID NO: 36703 - DNA, 20 bp, synthetic construct
  misc_feature 1..20: note = Description of Artificial Sequence: Synthetic oligonucleotide
  misc_feature 1..20: note = Target: SCN10A; (+) strand; PAM type: NRG; PAM sequence: CAG
  source 1..20: mol_type = other DNA
tgccaacatatctgtaggac

SEQ ID NO: 36704 - DNA, 20 bp, synthetic construct
  misc_feature 1..20: note = Description of Artificial Sequence: Synthetic oligonucleotide
  misc_feature 1..20: note = Target: SCN10A; (+) strand; PAM type: NRG; PAM sequence: AAG
  source 1..20: mol_type = other DNA
caacatatctgtaggaccag

SEQ ID NO: 36705 - DNA, 20 bp, synthetic construct
  misc_feature 1..20: note = Description of Artificial Sequence: Synthetic oligonucleotide
  misc_feature 1..20: note = Target: SCN10A; (+) strand; PAM type: NRG; PAM sequence: TAG
  source 1..20: mol_type = other DNA
atatctgtaggaccagaagt

SEQ ID NO: 36706 - DNA, 20 bp, synthetic construct
  misc_feature 1..20: note = Description of Artificial Sequence: Synthetic oligonucleotide
  misc_feature 1..20: note = Target: SCN10A; (+) strand; PAM type: NRG; PAM sequence: CAG
  source 1..20: mol_type = other DNA
ctgtaggaccagaagttagt

SEQ ID NO: 36707 - DNA, 20 bp, synthetic construct
  misc_feature 1..20: note = Description of Artificial Sequence: Synthetic oligonucleotide
  misc_feature 1..20: note = Target: SCN10A; (+) strand; PAM type: NRG; PAM sequence: AAG
  source 1..20: mol_type = other DNA
aagttagtcagcatctctgc

SEQ ID NO: 36708 - DNA, 20 bp, synthetic construct
  misc_feature 1..20: note = Description of Artificial Sequence: Synthetic oligonucleotide
  misc_feature 1..20: note = Target: SCN10A; (+) strand; PAM type: NRG; PAM sequence: AAG
  source 1..20: mol_type = other DNA
tagtcagcatctctgcaagc

SEQ ID NO: 36709 - DNA, 20 bp, synthetic construct
  misc_feature 1..20: note = Description of Artificial Sequence: Synthetic oligonucleotide
  misc_feature 1..20: note = Target: SCN10A; (+) strand; PAM type: NRG; PAM sequence: AGG
  source 1..20: mol_type = other DNA
agtcagcatctctgcaagca

SEQ ID NO: 36710 - DNA, 20 bp, synthetic construct
  misc_feature 1..20: note = Description of Artificial Sequence: Synthetic oligonucleotide
  misc_feature 1..20: note = Target: SCN10A; (+) strand; PAM type: NRG; PAM sequence: GGG
  source 1..20: mol_type = other DNA
gtcagcatctctgcaagcaa

SEQ ID NO: 36711 - DNA, 20 bp, synthetic construct
  misc_feature 1..20: note = Description of Artificial Sequence: Synthetic oligonucleotide
  misc_feature 1..20: note = Target: SCN10A; (+) strand; PAM type: NRG; PAM sequence: TGG
  source 1..20: mol_type = other DNA
atctctgcaagcaagggtcc

SEQ ID NO: 36712 - DNA, 20 bp, synthetic construct
  misc_feature 1..20: note = Description of Artificial Sequence: Synthetic oligonucleotide
  misc_feature 1..20: note = Target: SCN10A; (+) strand; PAM type: NRG; PAM sequence: GGG
  source 1..20: mol_type = other DNA
tctctgcaagcaagggtcct

SEQ ID NO: 36713 - DNA, 20 bp, synthetic construct
  misc_feature 1..20: note = Description of Artificial Sequence: Synthetic oligonucleotide
  misc_feature 1..20: note = Target: SCN10A; (+) strand; PAM type: NRG; PAM sequence: GGG
  source 1..20: mol_type = other DNA
ctctgcaagcaagggtcctg

SEQ ID NO: 36714 - DNA, 20 bp, synthetic construct
  misc_feature 1..20: note = Description of Artificial Sequence: Synthetic oligonucleotide
  misc_feature 1..20: note = Target: SCN10A; (+) strand; PAM type: NRG; PAM sequence: CAG
  source 1..20: mol_type = other DNA
aagggtcctggggatgcatg

SEQ ID NO: 36715 - DNA, 20 bp, synthetic construct
  misc_feature 1..20: note = Description of Artificial Sequence: Synthetic oligonucleotide
  misc_feature 1..20: note = Target: SCN10A; (+) strand; PAM type: NRG; PAM sequence: AAG
  source 1..20: mol_type = other DNA
gggatgcatgcagcataaat

SEQ ID NO: 36716 - DNA, 20 bp, synthetic construct
  misc_feature 1..20: note = Description of Artificial Sequence: Synthetic oligonucleotide
  misc_feature 1..20: note = Target: SCN10A; (+) strand; PAM type: NRG; PAM sequence: AGG
  source 1..20: mol_type = other DNA
ggatgcatgcagcataaata

SEQ ID NO: 36717 - DNA, 20 bp, synthetic construct
  misc_feature 1..20: note = Description of Artificial Sequence: Synthetic oligonucleotide
  misc_feature 1..20: note = Target: SCN10A; (+) strand; PAM type: NRG; PAM sequence: TGG
  source 1..20: mol_type = other DNA
cagcataaataaggataacc

SEQ ID NO: 36718 - DNA, 20 bp, synthetic construct
  misc_feature 1..20: note = Description of Artificial Sequence: Synthetic oligonucleotide
  misc_feature 1..20: note = Target: SCN10A; (+) strand; PAM type: NRG; PAM sequence: GGG
  source 1..20: mol_type = other DNA
agcataaataaggataacct

SEQ ID NO: 36719 - DNA, 20 bp, synthetic construct
  misc_feature 1..20: note = Description of Artificial Sequence: Synthetic oligonucleotide
  misc_feature 1..20: note = Target: SCN10A; (+) strand; PAM type: NRG; PAM sequence: GGG
  source 1..20: mol_type = other DNA
gcataaataaggataacctg

SEQ ID NO: 36720 - DNA, 20 bp, synthetic construct
  misc_feature 1..20: note = Description of Artificial Sequence: Synthetic oligonucleotide
  misc_feature 1..20: note = Target: SCN10A; (+) strand; PAM type: NRG; PAM sequence: TAG
  source 1..20: mol_type = other DNA
aggataacctggggtatcat

SEQ ID NO: 36721 - DNA, 20 bp, synthetic construct
  misc_feature 1..20: note = Description of Artificial Sequence: Synthetic oligonucleotide
  misc_feature 1..20: note = Target: SCN10A; (+) strand; PAM type: NRG; PAM sequence: TAG
  source 1..20: mol_type = other DNA
aacctggggtatcattagcc

SEQ ID NO: 36722 - DNA, 20 bp, synthetic construct
  misc_feature 1..20: note = Description of Artificial Sequence: Synthetic oligonucleotide
  misc_feature 1..20: note = Target: SCN10A; (+) strand; PAM type: NRG; PAM sequence: AAG
  source 1..20: mol_type = other DNA
tggggtatcattagcctaga

SEQ ID NO: 36723 - DNA, 20 bp, synthetic construct
  misc_feature 1..20: note = Description of Artificial Sequence: Synthetic oligonucleotide
  misc_feature 1..20: note = Target: SCN10A; (+) strand; PAM type: NRG; PAM sequence: AGG
  source 1..20: mol_type = other DNA
ggggtatcattagcctagaa

SEQ ID NO: 36724 - DNA, 20 bp, synthetic construct
  misc_feature 1..20: note = Description of Artificial Sequence: Synthetic oligonucleotide
  misc_feature 1..20: note = Target: SCN10A; (+) strand; PAM type: NRG; PAM sequence: CAG
  source 1..20: mol_type = other DNA
tcattagcctagaaaggatg

SEQ ID NO: 36725 - DNA, 20 bp, synthetic construct
  misc_feature 1..20: note = Description of Artificial Sequence: Synthetic oligonucleotide
  misc_feature 1..20: note = Target: SCN10A; (+) strand; PAM type: NRG; PAM sequence: TGG
  source 1..20: mol_type = other DNA
agcctagaaaggatgcagaa

SEQ ID NO: 36726 - DNA, 20 bp, synthetic construct
  misc_feature 1..20: note = Description of Artificial Sequence: Synthetic oligonucleotide
  misc_feature 1..20: note = Target: SCN10A; (+) strand; PAM type: NRG; PAM sequence: TAG
  source 1..20: mol_type = other DNA
aaggatgcagaatggacact

SEQ ID NO: 36727 - DNA, 20 bp, synthetic construct
  misc_feature 1..20: note = Description of Artificial Sequence: Synthetic oligonucleotide
  misc_feature 1..20: note = Target: SCN10A; (+) strand; PAM type: NRG; PAM sequence: TAG
  source 1..20: mol_type = other DNA
cagaatggacacttagaatc

SEQ ID NO: 36728 - DNA, 20 bp, synthetic construct
  misc_feature 1..20: note = Description of Artificial Sequence: Synthetic oligonucleotide
  misc_feature 1..20: note = Target: SCN10A; (+) strand; PAM type: NRG; PAM sequence: TAG
  source 1..20: mol_type = other DNA
tctagtgacactgccatcta

SEQ ID NO: 36729 - DNA, 20 bp, synthetic construct
  misc_feature 1..20: note = Description of Artificial Sequence: Synthetic oligonucleotide
  misc_feature 1..20: note = Target: SCN10A; (+) strand; PAM type: NRG; PAM sequence: CAG
  source 1..20: mol_type = other DNA
ttcattattgcaacatcttt

SEQ ID NO: 36730 - DNA, 20 bp, synthetic construct
  misc_feature 1..20: note = Description of Artificial Sequence: Synthetic oligonucleotide
  misc_feature 1..20: note = Target: SCN10A; (+) strand; PAM type: NRG; PAM sequence: GAG
  source 1..20: mol_type = other DNA
cattattgcaacatctttca

SEQ ID NO: 36731 - DNA, 20 bp, synthetic construct
  misc_feature 1..20: note = Description of Artificial Sequence: Synthetic oligonucleotide
  misc_feature 1..20: note = Target: SCN10A; (+) strand; PAM type: NRG; PAM sequence: TGG
  source 1..20: mol_type = other DNA
tattgcaacatctttcagag

SEQ ID NO: 36732 - DNA, 20 bp, synthetic construct
  misc_feature 1..20: note = Description of Artificial Sequence: Synthetic oligonucleotide
  misc_feature 1..20: note = Target: SCN10A; (+) strand; PAM type: NRG; PAM sequence: GAG
  source 1..20: mol_type = other DNA
tctttcagagtggacccttt

SEQ ID NO: 36733 - DNA, 20 bp, synthetic construct
  misc_feature 1..20: note = Description of Artificial Sequence: Synthetic oligonucleotide
  misc_feature 1..20: note = Target: SCN10A; (+) strand; PAM type: NRG; PAM sequence: AAG
  source 1..20: mol_type = other DNA
ttcagagtggaccctttgag

SEQ ID NO: 36734 - DNA, 20 bp, synthetic construct
  misc_feature 1..20: note = Description of Artificial Sequence: Synthetic oligonucleotide
  misc_feature 1..20: note = Target: SCN10A; (+) strand; PAM type: NRG; PAM sequence: TAG
  source 1..20: mol_type = other DNA
tgagaagatgcattgtgatc

SEQ ID NO: 36735 - DNA, 20 bp, synthetic construct
  misc_feature 1..20: note = Description of Artificial Sequence: Synthetic oligonucleotide
  misc_feature 1..20: note = Target: SCN10A; (+) strand; PAM type: NRG; PAM sequence: AGG
  source 1..20: mol_type = other DNA
gagaagatgcattgtgatct

SEQ ID NO: 36736 - DNA, 20 bp, synthetic construct
  misc_feature 1..20: note = Description of Artificial Sequence: Synthetic oligonucleotide
  misc_feature 1..20: note = Target: SCN10A; (+) strand; PAM type: NRG; PAM sequence: TGG
  source 1..20: mol_type = other DNA
gatctaggcaacactgcatg

SEQ ID NO: 36737 - DNA, 20 bp, synthetic construct
  misc_feature 1..20: note = Description of Artificial Sequence: Synthetic oligonucleotide
  misc_feature 1..20: note = Target: SCN10A; (+) strand; PAM type: NRG; PAM sequence: CGG
  source 1..20: mol_type = other DNA
taggcaacactgcatgtgga

SEQ ID NO: 36738 - DNA, 20 bp, synthetic construct
  misc_feature 1..20: note = Description of Artificial Sequence: Synthetic oligonucleotide
  misc_feature 1..20: note = Target: SCN10A; (+) strand; PAM type: NRG; PAM sequence: CAG
  source 1..20: mol_type = other DNA
tgtggacggatcttcaaaca

SEQ ID NO: 36739 - DNA, 20 bp, synthetic construct
  misc_feature 1..20: note = Description of Artificial Sequence: Synthetic oligonucleotide
  misc_feature 1..20: note = Target: SCN10A; (+) strand; PAM type: NRG; PAM sequence: AGG
  source 1..20: mol_type = other DNA
gtggacggatcttcaaacac

SEQ ID NO: 36740 - DNA, 20 bp, synthetic construct
  misc_feature 1..20: note = Description of Artificial Sequence: Synthetic oligonucleotide
  misc_feature 1..20: note = Target: SCN10A; (+) strand; PAM type: NRG; PAM sequence: GAG
  source 1..20: mol_type = other DNA
ggacggatcttcaaacacag

SEQ ID NO: 36741 - DNA, 20 bp, synthetic construct
  misc_feature 1..20: note = Description of Artificial Sequence: Synthetic oligonucleotide
  misc_feature 1..20: note = Target: SCN10A; (+) strand; PAM type: NRG; PAM sequence: CAG
  source 1..20: mol_type = other DNA
aacacaggagtttgaccaac

SEQ ID NO: 36742 - DNA, 20 bp, synthetic construct
  misc_feature 1..20: note = Description of Artificial Sequence: Synthetic oligonucleotide
  misc_feature 1..20: note = Target: SCN10A; (+) strand; PAM type: NRG; PAM sequence: CAG
  source 1..20: mol_type = other DNA
gtttgaccaaccagtctcct

SEQ ID NO: 36743 - DNA, 20 bp, synthetic construct
  misc_feature 1..20: note = Description of Artificial Sequence: Synthetic oligonucleotide
  misc_feature 1..20: note = Target: SCN10A; (+) strand; PAM type: NRG; PAM sequence: CAG
  source 1..20: mol_type = other DNA
ctcctcagacactgatttct

SEQ ID NO: 36744 - DNA, 20 bp, synthetic construct
  misc_feature 1..20: note = Description of Artificial Sequence: Synthetic oligonucleotide
  misc_feature 1..20: note = Target: SCN10A; (+) strand; PAM type: NRG; PAM sequence: AAG
  source 1..20: mol_type = other DNA
ctcagacactgatttctcag

SEQ ID NO: 36745 - DNA, 20 bp, synthetic construct
  misc_feature 1..20: note = Description of Artificial Sequence: Synthetic oligonucleotide
  misc_feature 1..20: note = Target: SCN10A; (+) strand; PAM type: NRG; PAM sequence: AGG
  source 1..20: mol_type = other DNA
tcagacactgatttctcaga

SEQ ID NO: 36746 - DNA, 20 bp, synthetic construct
  misc_feature 1..20: note = Description of Artificial Sequence: Synthetic oligonucleotide
  misc_feature 1..20: note = Target: SCN10A; (+) strand; PAM type: NRG; PAM sequence: GAG
  source 1..20: mol_type = other DNA
agacactgatttctcagaag

SEQ ID NO: 36747 - DNA, 20 bp, synthetic construct
  misc_feature 1..20: note = Description of Artificial Sequence: Synthetic oligonucleotide
  misc_feature 1..20: note = Target: SCN10A; (+) strand; PAM type: NRG; PAM sequence: CAG
  source 1..20: mol_type = other DNA
tcagaaggagaccgccatgt

SEQ ID NO: 36748 - DNA, 20 bp, synthetic construct
  misc_feature 1..20: note = Description of Artificial Sequence: Synthetic oligonucleotide
  misc_feature 1..20: note = Target: SCN10A; (+) strand; PAM type: NRG; PAM sequence: AGG
  source 1..20: mol_type = other DNA
cagaaggagaccgccatgtc

SEQ ID NO: 36749 - DNA, 20 bp, synthetic construct
  misc_feature 1..20: note = Description of Artificial Sequence: Synthetic oligonucleotide
  misc_feature 1..20: note = Target: SCN10A; (+) strand; PAM type: NRG; PAM sequence: GGG
  source 1..20: mol_type = other DNA
agaaggagaccgccatgtca

SEQ ID NO: 36750 - DNA, 20 bp, synthetic construct
  misc_feature 1..20: note = Description of Artificial Sequence: Synthetic oligonucleotide
  misc_feature 1..20: note = Target: SCN10A; (+) strand; PAM type: NRG; PAM sequence: GGG
  source 1..20: mol_type = other DNA
gaaggagaccgccatgtcag

SEQ ID NO: 36751 - DNA, 20 bp, synthetic construct
  misc_feature 1..20: note = Description of Artificial Sequence: Synthetic oligonucleotide
  misc_feature 1..20: note = Target: SCN10A; (+) strand; PAM type: NRG; PAM sequence: GGG
  source 1..20: mol_type = other DNA
aaggagaccgccatgtcagg

SEQ ID NO: 36752 - DNA, 20 bp, synthetic construct
  misc_feature 1..20: note = Description of Artificial Sequence: Synthetic oligonucleotide
  misc_feature 1..20: note = Target: SCN10A; (+) strand; PAM type: NRG; PAM sequence: GGG
  source 1..20: mol_type = other DNA
aggagaccgccatgtcaggg

SEQ ID NO: 36753 - DNA, 20 bp, synthetic construct
  misc_feature 1..20: note = Description of Artificial Sequence: Synthetic oligonucleotide
  misc_feature 1..20: note = Target: SCN10A; (+) strand; PAM type: NRG; PAM sequence: AAG
  source 1..20: mol_type = other DNA
ccgccatgtcaggggggtac

SEQ ID NO: 36754 - DNA, 20 bp, synthetic construct
  misc_feature 1..20: note = Description of Artificial Sequence: Synthetic oligonucleotide
  misc_feature 1..20: note = Target: SCN10A; (+) strand; PAM type: NRG; PAM sequence: AGG
  source 1..20: mol_type = other DNA
cgccatgtcaggggggtaca

SEQ ID NO: 36755 - DNA, 20 bp, synthetic construct
  misc_feature 1..20: note = Description of Artificial Sequence: Synthetic oligonucleotide
  misc_feature 1..20: note = Target: SCN10A; (+) strand; PAM type: NRG; PAM sequence: TGG
  source 1..20: mol_type = other DNA
atgtcaggggggtacaaggc

SEQ ID NO: 36756 - DNA, 20 bp, synthetic construct
  misc_feature 1..20: note = Description of Artificial Sequence: Synthetic oligonucleotide
  misc_feature 1..20: note = Target: SCN10A; (+) strand; PAM type: NRG; PAM sequence: GGG
  source 1..20: mol_type = other DNA
tgtcaggggggtacaaggct

SEQ ID NO: 36757 - DNA, 20 bp, synthetic construct
  misc_feature 1..20: note = Description of Artificial Sequence: Synthetic oligonucleotide
  misc_feature 1..20: note = Target: SCN10A; (+) strand; PAM type: NRG; PAM sequence: CAG
  source 1..20: mol_type = other DNA
ccttttctgatccactgtga

SEQ ID NO: 36758 - DNA, 20 bp, synthetic construct
  misc_feature 1..20: note = Description of Artificial Sequence: Synthetic oligonucleotide
  misc_feature 1..20: note = Target: SCN10A; (+) strand; PAM type: NRG; PAM sequence: AGG
  source 1..20: mol_type = other DNA
cttttctgatccactgtgac

SEQ ID NO: 36759 - DNA, 20 bp, synthetic construct
  misc_feature 1..20: note = Description of Artificial Sequence: Synthetic oligonucleotide
  misc_feature 1..20: note = Target: SCN10A; (+) strand; PAM type: NRG; PAM sequence: CAG
  source 1..20: mol_type = other DNA
tgacaggctaactgttatct

SEQ ID NO: 36760 - DNA, 20 bp, synthetic construct
  misc_feature 1..20: note = Description of Artificial Sequence: Synthetic oligonucleotide
  misc_feature 1..20: note = Target: SCN10A; (+) strand; PAM type: NRG; PAM sequence: GAG
  source 1..20: mol_type = other DNA
ctaactgttatctcagattt

SEQ ID NO: 36761 - DNA, 20 bp, synthetic construct
  misc_feature 1..20: note = Description of Artificial Sequence: Synthetic oligonucleotide
  misc_feature 1..20: note = Target: SCN10A; (+) strand; PAM type: NRG; PAM sequence: AGG
  source 1..20: mol_type = other DNA
taactgttatctcagatttg

SEQ ID NO: 36762 - DNA, 20 bp, synthetic construct
  misc_feature 1..20: note = Description of Artificial Sequence: Synthetic oligonucleotide
  misc_feature 1..20: note = Target: SCN10A; (+) strand; PAM type: NRG; PAM sequence: TGG
  source 1..20: mol_type = other DNA
aggtctctgacatctcctca

SEQ ID NO: 36763 - DNA, 20 bp, synthetic construct
  misc_feature 1..20: note = Description of Artificial Sequence: Synthetic oligonucleotide
  misc_feature 1..20: note = Target: SCN10A; (+) strand; PAM type: NRG; PAM sequence: GGG
  source 1..20: mol_type = other DNA
ggtctctgacatctcctcat

SEQ ID NO: 36764 - DNA, 20 bp, synthetic construct
  misc_feature 1..20: note = Description of Artificial Sequence: Synthetic oligonucleotide
  misc_feature 1..20: note = Target: SCN10A; (+) strand; PAM type: NRG; PAM sequence: TGG
  source 1..20: mol_type = other DNA
ctgacatctcctcatgggca

SEQ ID NO: 36765 - DNA, 20 bp, synthetic construct
  misc_feature 1..20: note = Description of Artificial Sequence: Synthetic oligonucleotide
  misc_feature 1..20: note = Target: SCN10A; (+) strand; PAM type: NRG; PAM sequence: GGG
  source 1..20: mol_type = other DNA
tgacatctcctcatgggcat

SEQ ID NO: 36766 - DNA, 20 bp, synthetic construct
  misc_feature 1..20: note = Description of Artificial Sequence: Synthetic oligonucleotide
  misc_feature 1..20: note = Target: SCN10A; (+) strand; PAM type: NRG; PAM sequence: TGG
  source 1..20: mol_type = other DNA
catgggcatgggactaatct

SEQ ID NO: 36767 - DNA, 20 bp, synthetic construct
  misc_feature 1..20: note = Description of Artificial Sequence: Synthetic oligonucleotide
  misc_feature 1..20: note = Target: SCN10A; (+) strand; PAM type: NRG; PAM sequence: AAG
  source 1..20: mol_type = other DNA
ggcatgggactaatcttgga

SEQ ID NO: 36768 - DNA, 20 bp, synthetic construct
  misc_feature 1..20: note = Description of Artificial Sequence: Synthetic oligonucleotide
  misc_feature 1..20: note = Target: SCN10A; (+) strand; PAM type: NRG; PAM sequence: AAG
  source 1..20: mol_type = other DNA
atcttggaaagcaacccccg

SEQ ID NO: 36769 - DNA, 20 bp, synthetic construct
  misc_feature 1..20: note = Description of Artificial Sequence: Synthetic oligonucleotide
  misc_feature 1..20: note = Target: SCN10A; (+) strand; PAM type: NRG; PAM sequence: CGG
  source 1..20: mol_type = other DNA
ttggaaagcaacccccgaag

SEQ ID NO: 36770 - DNA, 20 bp, synthetic construct
  misc_feature 1..20: note = Description of Artificial Sequence: Synthetic oligonucleotide
  misc_feature 1..20: note = Target: SCN10A; (+) strand; PAM type: NRG; PAM sequence: TGG
  source 1..20: mol_type = other DNA
acccccgaagcggtactctg

SEQ ID NO: 36771 - DNA, 20 bp, synthetic construct
  misc_feature 1..20: note = Description of Artificial Sequence: Synthetic oligonucleotide
  misc_feature 1..20: note = Target: SCN10A; (+) strand; PAM type: NRG; PAM sequence: AAG
  source 1..20: mol_type = other DNA
ccgaagcggtactctgtggc

SEQ ID NO: 36772 - DNA, 20 bp, synthetic construct
  misc_feature 1..20: note = Description of Artificial Sequence: Synthetic oligonucleotide
  misc_feature 1..20: note = Target: SCN10A; (+) strand; PAM type: NRG; PAM sequence: CAG
  source 1..20: mol_type = other DNA
gtactctgtggcaagaaccc

SEQ ID NO: 36773 - DNA, 20 bp, synthetic construct
  misc_feature 1..20: note = Description of Artificial Sequence: Synthetic oligonucleotide
  misc_feature 1..20: note = Target: SCN10A; (+) strand; PAM type: NRG; PAM sequence: AGG
  source 1..20: mol_type = other DNA
tactctgtggcaagaacccc

SEQ ID NO: 36774 - DNA, 20 bp, synthetic construct
  misc_feature 1..20: note = Description of Artificial Sequence: Synthetic oligonucleotide
  misc_feature 1..20: note = Target: SCN10A; (+) strand; PAM type: NRG; PAM sequence: GAG
  source 1..20: mol_type = other DNA
caggccatacaattccaaat

SEQ ID NO: 36775 - DNA, 20 bp, synthetic construct
  misc_feature 1..20: note = Description of Artificial Sequence: Synthetic oligonucleotide
  misc_feature 1..20: note = Target: SCN10A; (+) strand; PAM type: NRG; PAM sequence: AGG
  source 1..20: mol_type = other DNA
aggccatacaattccaaatg

SEQ ID NO: 36776 - DNA, 20 bp, synthetic construct
  misc_feature 1..20: note = Description of Artificial Sequence: Synthetic oligonucleotide
  misc_feature 1..20: note = Target: SCN10A; (+) strand; PAM type: NRG; PAM sequence: AAG
  source 1..20: mol_type = other DNA
ccatacaattccaaatgagg

SEQ ID NO: 36777 - DNA, 20 bp, synthetic construct
  misc_feature 1..20: note = Description of Artificial Sequence: Synthetic oligonucleotide
  misc_feature 1..20: note = Target: SCN10A; (+) strand; PAM type: NRG; PAM sequence: GAG
  source 1..20: mol_type = other DNA
ccaaatgaggaagctgaact

SEQ ID NO: 36778 - DNA, 20 bp, synthetic construct
  misc_feature 1..20: note = Description of Artificial Sequence: Synthetic oligonucleotide
  misc_feature 1..20: note = Target: SCN10A; (+) strand; PAM type: NRG; PAM sequence: AAG
  source 1..20: mol_type = other DNA
gaggaagctgaactgagatg

SEQ ID NO: 36779 - DNA, 20 bp, synthetic construct
  misc_feature 1..20: note = Description of Artificial Sequence: Synthetic oligonucleotide
  misc_feature 1..20: note = Target: SCN10A; (+) strand; PAM type: NRG; PAM sequence: CAG
  source 1..20: mol_type = other DNA
ctgagatgaagaaccttctt

SEQ ID NO: 36780 - DNA, 20 bp, synthetic construct
  misc_feature 1..20: note = Description of Artificial Sequence: Synthetic oligonucleotide
  misc_feature 1..20: note = Target: SCN10A; (+) strand; PAM type: NRG; PAM sequence: GAG
  source 1..20: mol_type = other DNA
gagatgaagaaccttcttca

SEQ ID NO: 36781 - DNA, 20 bp, synthetic construct
  misc_feature 1..20: note = Description of Artificial Sequence: Synthetic oligonucleotide
  misc_feature 1..20: note = Target: SCN10A; (+) strand; PAM type: NRG; PAM sequence: GAG
  source 1..20: mol_type = other DNA
aagaaccttcttcagagtgt

SEQ ID NO: 36782 - DNA, 20 bp, synthetic construct
  misc_feature 1..20: note = Description of Artificial Sequence: Synthetic oligonucleotide
  misc_feature 1..20: note = Target: SCN10A; (+) strand; PAM type: NRG; PAM sequence: TGG
  source 1..20: mol_type = other DNA
ccttcttcagagtgtgagcc

SEQ ID NO: 36783 - DNA, 20 bp, synthetic construct
  misc_feature 1..20: note = Description of Artificial Sequence: Synthetic oligonucleotide
  misc_feature 1..20: note = Target: SCN10A; (+) strand; PAM type: NRG; PAM sequence: AAG
  source 1..20: mol_type = other DNA
gtgagcctggatacacccat

SEQ ID NO: 36784 - DNA, 20 bp, synthetic construct
  misc_feature 1..20: note = Description of Artificial Sequence: Synthetic oligonucleotide
  misc_feature 1..20: note = Target: SCN10A; (+) strand; PAM type: NRG; PAM sequence: TGG
  source 1..20: mol_type = other DNA
atacacccataagccccaca

SEQ ID NO: 36785 - DNA, 20 bp, synthetic construct
  misc_feature 1..20: note = Description of Artificial Sequence: Synthetic oligonucleotide
  misc_feature 1..20: note = Target: SCN10A; (+) strand; PAM type: NRG; PAM sequence: TAG
  source 1..20: mol_type = other DNA
tttattttattttatttcaa

SEQ ID NO: 36786 - DNA, 20 bp, synthetic construct
  misc_feature 1..20: note = Description of Artificial Sequence: Synthetic oligonucleotide
  misc_feature 1..20: note = Target: SCN10A; (+) strand; PAM type: NRG; PAM sequence: GAG
  source 1..20: mol_type = other DNA
tattttatttcaatagtttt

SEQ ID NO: 36787 - DNA, 20 bp, synthetic construct
  misc_feature 1..20: note = Description of Artificial Sequence: Synthetic oligonucleotide
  misc_feature 1..20: note = Target: SCN10A; (+) strand; PAM type: NRG; PAM sequence: AGG
  source 1..20: mol_type = other DNA
attttatttcaatagttttg

SEQ ID NO: 36788 - DNA, 20 bp, synthetic construct
  misc_feature 1..20: note = Description of Artificial Sequence: Synthetic oligonucleotide
  misc_feature 1..20: note = Target: SCN10A; (+) strand; PAM type: NRG; PAM sequence: GGG
  source 1..20: mol_type = other DNA
ttttatttcaatagttttga

SEQ ID NO: 36789 - DNA, 20 bp, synthetic construct
  misc_feature 1..20: note = Description of Artificial Sequence: Synthetic oligonucleotide
  misc_feature 1..20: note = Target: SCN10A; (+) strand; PAM type: NRG; PAM sequence: CAG
  source 1..20: mol_type = other DNA
tttcaatagttttgagggaa

SEQ ID NO: 36790 - DNA, 20 bp, synthetic construct
  misc_feature 1..20: note = Description of Artificial Sequence: Synthetic oligonucleotide
  misc_feature 1..20: note = Target: SCN10A; (+) strand; PAM type: NRG; PAM sequence: AGG
  source 1..20: mol_type = other DNA
ttcaatagttttgagggaac

SEQ ID NO: 36791 - DNA, 20 bp, synthetic construct
  misc_feature 1..20: note = Description of Artificial Sequence: Synthetic oligonucleotide
  misc_feature 1..20: note = Target: SCN10A; (+) strand; PAM type: NRG; PAM sequence: TGG
  source 1..20: mol_type = other DNA
aatagttttgagggaacagg

SEQ ID NO: 36792 - DNA, 20 bp, synthetic construct
  misc_feature 1..20: note = Description of Artificial Sequence: Synthetic oligonucleotide
  misc_feature 1..20: note = Target: SCN10A; (+) strand; PAM type: NRG; PAM sequence: TGG
  source 1..20: mol_type = other DNA
ttgagggaacaggtggtttt

SEQ ID NO: 36793 - DNA, 20 bp, synthetic construct
  misc_feature 1..20: note = Description of Artificial Sequence: Synthetic oligonucleotide
  misc_feature 1..20: note = Target: SCN10A; (+) strand; PAM type: NRG; PAM sequence: AAG
  source 1..20: mol_type = other DNA
tggtttttggttacatgaat

SEQ ID NO: 36794 - DNA, 20 bp, synthetic construct
  misc_feature 1..20: note = Description of Artificial Sequence: Synthetic oligonucleotide
  misc_feature 1..20: note = Target: SCN10A; (+) strand; PAM type: NRG; PAM sequence: TAG
  source 1..20: mol_type = other DNA
gttctttatttgtatttcaa

SEQ ID NO: 36795 - DNA, 20 bp, synthetic construct
  misc_feature 1..20: note = Description of Artificial Sequence: Synthetic oligonucleotide
  misc_feature 1..20: note = Target: SCN10A; (+) strand; PAM type: NRG; PAM sequence: TGG
  source 1..20: mol_type = other DNA
tatttgtatttcaatagttt

SEQ ID NO: 36796 - DNA, 20 bp, synthetic construct
  misc_feature 1..20: note = Description of Artificial Sequence: Synthetic oligonucleotide
  misc_feature 1..20: note = Target: SCN10A; (+) strand; PAM type: NRG; PAM sequence: GGG
  source 1..20: mol_type = other DNA
atttgtatttcaatagtttt

SEQ ID NO: 36797 - DNA, 20 bp, synthetic construct
  misc_feature 1..20: note = Description of Artificial Sequence: Synthetic oligonucleotide
  misc_feature 1..20: note = Target: SCN10A; (+) strand; PAM type: NRG; PAM sequence: CAG
  source 1..20: mol_type = other DNA
atttcaatagttttgggaaa

SEQ ID NO: 36798 - DNA, 20 bp, synthetic construct
  misc_feature 1..20: note = Description of Artificial Sequence: Synthetic oligonucleotide
  misc_feature 1..20: note = Target: SCN10A; (+) strand; PAM type: NRG; PAM sequence: AGG
  source 1..20: mol_type = other DNA
tttcaatagttttgggaaac

SEQ ID NO: 36799 - DNA, 20 bp, synthetic construct
  misc_feature 1..20: note = Description of Artificial Sequence: Synthetic oligonucleotide
  misc_feature 1..20: note = Target: SCN10A; (+) strand; PAM type: NRG; PAM sequence: TGG
  source 1..20: mol_type = other DNA
caatagttttgggaaacagg

SEQ ID NO: 36800 - DNA, 20 bp, synthetic construct
  misc_feature 1..20: note = Description of Artificial Sequence: Synthetic oligonucleotide
  misc_feature 1..20: note = Target: SCN10A; (+) strand; PAM type: NRG; PAM sequence: TGG
  source 1..20: mol_type = other DNA
ttttgggaaacaggtggtgt

SEQ ID NO: 36801 - DNA, 20 bp, synthetic construct
  misc_feature 1..20: note = Description of Artificial Sequence: Synthetic oligonucleotide
  misc_feature 1..20: note = Target: SCN10A; (+) strand; PAM type: NRG; PAM sequence: GGG
  source 1..20: mol_type = other DNA
tttgggaaacaggtggtgtt

SEQ ID NO: 36802 - DNA, 20 bp, synthetic construct
  misc_feature 1..20: note = Description of Artificial Sequence: Synthetic oligonucleotide
  misc_feature 1..20: note = Target: SCN10A; (+) strand; PAM type: NRG; PAM sequence: CAG
  source 1..20: mol_type = other DNA
acaggtggtgttgggttgca

SEQ ID NO: 36803 - DNA, 20 bp, synthetic construct
  misc_feature 1..20: note = Description of Artificial Sequence: Synthetic oligonucleotide
  misc_feature 1..20: note = Target: SCN10A; (+) strand; PAM type: NRG; PAM sequence: GAG
  source 1..20: mol_type = other DNA
attctttaacgctgatttct

SEQ ID NO: 36804 - DNA, 20 bp, synthetic construct
  misc_feature 1..20: note = Description of Artificial Sequence: Synthetic oligonucleotide
  misc_feature 1..20: note = Target: SCN10A; (+) strand; PAM type: NRG; PAM sequence: TGG
  source 1..20: mol_type = other DNA
aacgctgatttctgagattt

SEQ ID NO: 36805 - DNA, 20 bp, synthetic construct
  misc_feature 1..20: note = Description of Artificial Sequence: Synthetic oligonucleotide
  misc_feature 1..20: note = Target: SCN10A; (+) strand; PAM type: NRG; PAM sequence: GAG
  source 1..20: mol_type = other DNA
attttggtgcaccatcaccc

SEQ ID NO: 36806 - DNA, 20 bp, synthetic construct
  misc_feature 1..20: note = Description of Artificial Sequence: Synthetic oligonucleotide
  misc_feature 1..20: note = Target: SCN10A; (+) strand; PAM type: NRG; PAM sequence: CAG
  source 1..20: mol_type = other DNA
ttggtgcaccatcacccgag

SEQ ID NO: 36807 - DNA, 20 bp, synthetic construct
  misc_feature 1..20: note = Description of Artificial Sequence: Synthetic oligonucleotide
  misc_feature 1..20: note = Target: SCN10A; (+) strand; PAM type: NRG; PAM sequence: CAG
  source 1..20: mol_type = other DNA
cgagcagtgtacactgtacc

SEQ ID NO: 36808 - DNA, 20 bp, synthetic construct
  misc_feature 1..20: note = Description of Artificial Sequence: Synthetic oligonucleotide
  misc_feature 1..20: note = Target: SCN10A; (+) strand; PAM type: NRG; PAM sequence: TAG
  source 1..20: mol_type = other DNA
tgtacactgtacccagtgtg

SEQ ID NO: 36809 - DNA, 20 bp, synthetic construct
  misc_feature 1..20: note = Description of Artificial Sequence: Synthetic oligonucleotide
  misc_feature 1..20: note = Target: SCN10A; (+) strand; PAM type: NRG; PAM sequence: AAG
  source 1..20: mol_type = other DNA
ttcgtctcacctttcctccc

SEQ ID NO: 36810 - DNA, 20 bp, synthetic construct
  misc_feature 1..20: note = Description of Artificial Sequence: Synthetic oligonucleotide
  misc_feature 1..20: note = Target: SCN10A; (+) strand; PAM type: NRG; PAM sequence: AAG
  source 1..20: mol_type = other DNA
cctttcctcccaagtcccca

SEQ ID NO: 36811 - DNA, 20 bp, synthetic construct
  misc_feature 1..20: note = Description of Artificial Sequence: Synthetic oligonucleotide
  misc_feature 1..20: note = Target: SCN10A; (+) strand; PAM type: NRG; PAM sequence: CAG
  source 1..20: mol_type = other DNA
gttatgcctttgcatcctca

SEQ ID NO: 36812 - DNA, 20 bp, synthetic construct
  misc_feature 1..20: note = Description of Artificial Sequence: Synthetic oligonucleotide
  misc_feature 1..20: note = Target: SCN10A; (+) strand; PAM type: NRG; PAM sequence: TAG
  source 1..20: mol_type = other DNA
gcctttgcatcctcacagct

SEQ ID NO: 36813 - DNA, 20 bp, synthetic construct
  misc_feature 1..20: note = Description of Artificial Sequence: Synthetic oligonucleotide
  misc_feature 1..20: note = Target: SCN10A; (+) strand; PAM type: NRG; PAM sequence: AAG
  source 1..20: mol_type = other DNA
cttagctcctgcttgtaatt

SEQ ID NO: 36814 - DNA, 20 bp, synthetic construct
  misc_feature 1..20: note = Description of Artificial Sequence: Synthetic oligonucleotide
  misc_feature 1..20: note = Target: SCN10A; (+) strand; PAM type: NRG; PAM sequence: GAG
  source 1..20: mol_type = other DNA
atgcttgactttctattcct

SEQ ID NO: 36815 - DNA, 20 bp, synthetic construct
  misc_feature 1..20: note = Description of Artificial Sequence: Synthetic oligonucleotide
  misc_feature 1..20: note = Target: SCN10A; (+) strand; PAM type: NRG; PAM sequence: TAG
  source 1..20: mol_type = other DNA
tattcctgagttacttcatt

SEQ ID NO: 36816 - DNA, 20 bp, synthetic construct
  misc_feature 1..20: note = Description of Artificial Sequence: Synthetic oligonucleotide
  misc_feature 1..20: note = Target: SCN10A; (+) strand; PAM type: NRG; PAM sequence: TAG
  source 1..20: mol_type = other DNA
agttacttcatttagaataa

SEQ ID NO: 36817 - DNA, 20 bp, synthetic construct
  misc_feature 1..20: note = Description of Artificial Sequence: Synthetic oligonucleotide
  misc_feature 1..20: note = Target: SCN10A; (+) strand; PAM type: NRG; PAM sequence: CAG
  source 1..20: mol_type = other DNA
taatagtctccaactccatc

SEQ ID NO: 36818 - DNA, 20 bp, synthetic construct
  misc_feature 1..20: note = Description of Artificial Sequence: Synthetic oligonucleotide
  misc_feature 1..20: note = Target: SCN10A; (+) strand; PAM type: NRG; PAM sequence: GAG
  source 1..20: mol_type = other DNA
tttcattcctttttacaact

SEQ ID NO: 36819 - DNA, 20 bp, synthetic construct
  misc_feature 1..20: note = Description of Artificial Sequence: Synthetic oligonucleotide
  misc_feature 1..20: note = Target: SCN10A; (+) strand; PAM type: NRG; PAM sequence: TAG
  source 1..20: mol_type = other DNA
cattcctttttacaactgag

SEQ ID NO: 36820 - DNA, 20 bp, synthetic construct
  misc_feature 1..20: note = Description of Artificial Sequence: Synthetic oligonucleotide
  misc_feature 1..20: note = Target: SCN10A; (+) strand; PAM type: NRG; PAM sequence: TGG
  source 1..20: mol_type = other DNA
tacaactgagtagtattcca

SEQ ID NO: 36821 - DNA, 20 bp, synthetic construct
  misc_feature 1..20: note = Description of Artificial Sequence: Synthetic oligonucleotide
  misc_feature 1..20: note = Target: SCN10A; (+) strand; PAM type: NRG; PAM sequence: TGG
  source 1..20: mol_type = other DNA
tattttctttatgcacttgt

SEQ ID NO: 36822 - DNA, 20 bp, synthetic construct
  misc_feature 1..20: note = Description of Artificial Sequence: Synthetic oligonucleotide
  misc_feature 1..20: note = Target: SCN10A; (+) strand; PAM type: NRG; PAM sequence: TGG
  source 1..20: mol_type = other DNA
tttatgcacttgttggttga

SEQ ID NO: 36823 - DNA, 20 bp, synthetic construct
  misc_feature 1..20: note = Description of Artificial Sequence: Synthetic oligonucleotide
  misc_feature 1..20: note = Target: SCN10A; (+) strand; PAM type: NRG; PAM sequence: GGG
  source 1..20: mol_type = other DNA
ttatgcacttgttggttgat

SEQ ID NO: 36824 - DNA, 20 bp, synthetic construct
  misc_feature 1..20: note = Description of Artificial Sequence: Synthetic oligonucleotide
  misc_feature 1..20: note = Target: SCN10A; (+) strand; PAM type: NRG; PAM sequence: TAG
  source 1..20: mol_type = other DNA
cttgttggttgatgggcatt

SEQ ID NO: 36825 - DNA, 20 bp, synthetic construct
  misc_feature 1..20: note = Description of Artificial Sequence: Synthetic oligonucleotide
  misc_feature 1..20: note = Target: SCN10A; (+) strand; PAM type: NRG; PAM sequence: AGG
  source 1..20: mol_type = other DNA
ttgttggttgatgggcattt

SEQ ID NO: 36826 - DNA, 20 bp, synthetic construct
  misc_feature 1..20: note = Description of Artificial Sequence: Synthetic oligonucleotide
  misc_feature 1..20: note = Target: SCN10A; (+) strand; PAM type: NRG; PAM sequence: TGG
  source 1..20: mol_type = other DNA
tggttgatgggcatttaggc

SEQ ID NO: 36827 - DNA, 20 bp, synthetic construct
  misc_feature 1..20: note = Description of Artificial Sequence: Synthetic oligonucleotide
  misc_feature 1..20: note = Target: SCN10A; (+) strand; PAM type: NRG; PAM sequence: CAG
  source 1..20: mol_type = other DNA
aggctggttccatatttttg

SEQ ID NO: 36828 - DNA, 20 bp, synthetic construct
  misc_feature 1..20: note = Description of Artificial Sequence: Synthetic oligonucleotide
  misc_feature 1..20: note = Target: SCN10A; (+) strand; PAM type: NRG; PAM sequence: AAG
  source 1..20: mol_type = other DNA
gttgtaaactgtgctgctat

SEQ ID NO: 36829 - DNA, 20 bp, synthetic construct
  misc_feature 1..20: note = Description of Artificial Sequence: Synthetic oligonucleotide
  misc_feature 1..20: note = Target: SCN10A; (+) strand; PAM type: NRG; PAM sequence: AAG
  source 1..20: mol_type = other DNA
tgctataagcatgcatatgc

SEQ ID NO: 36830 - DNA, 20 bp, synthetic construct
  misc_feature 1..20: note = Description of Artificial Sequence: Synthetic oligonucleotide
  misc_feature 1..20: note = Target: SCN10A; (+) strand; PAM type: NRG; PAM sequence: TGG
  source 1..20: mol_type = other DNA
tgcaagtgtctttttaataa

SEQ ID NO: 36831 - DNA, 20 bp, synthetic construct
  misc_feature 1..20: note = Description of Artificial Sequence: Synthetic oligonucleotide
  misc_feature 1..20: note = Target: SCN10A; (+) strand; PAM type: NRG; PAM sequence: TGG
  source 1..20: mol_type = other DNA
aataatggcttattttcctc

SEQ ID NO: 36832 - DNA, 20 bp, synthetic construct
  misc_feature 1..20: note = Description of Artificial Sequence: Synthetic oligonucleotide
  misc_feature 1..20: note = Target: SCN10A; (+) strand; PAM type: NRG; PAM sequence: GGG
  source 1..20: mol_type = other DNA
ataatggcttattttcctct

SEQ ID NO: 36833 - DNA, 20 bp, synthetic construct
  misc_feature 1..20: note = Description of Artificial Sequence: Synthetic oligonucleotide
  misc_feature 1..20: note = Target: SCN10A; (+) strand; PAM type: NRG; PAM sequence: TAG
  source 1..20: mol_type = other DNA
atggcttattttcctctggg

SEQ ID NO: 36834 - DNA, 20 bp, synthetic construct
  misc_feature 1..20: note = Description of Artificial Sequence: Synthetic oligonucleotide
  misc_feature 1..20: note = Target: SCN10A; (+) strand; PAM type: NRG; PAM sequence: CAG
  source 1..20: mol_type = other DNA
ttttcctctgggtagatacc

SEQ ID NO: 36835 - DNA, 20 bp, synthetic construct
  misc_feature 1..20: note = Description of Artificial Sequence: Synthetic oligonucleotide
  misc_feature 1..20: note = Target: SCN10A; (+) strand; PAM type: NRG; PAM sequence: TAG
  source 1..20: mol_type = other DNA
tcctctgggtagatacccag

SEQ ID NO: 36836 - DNA, 20 bp, synthetic construct
  misc_feature 1..20: note = Description of Artificial Sequence: Synthetic oligonucleotide
  misc_feature 1..20: note = Target: SCN10A; (+) strand; PAM type: NRG; PAM sequence: TGG
  source 1..20: mol_type = other DNA
tctgggtagatacccagtag

SEQ ID NO: 36837 - DNA, 20 bp, synthetic construct
  misc_feature 1..20: note = Description of Artificial Sequence: Synthetic oligonucleotide
  misc_feature 1..20: note = Target: SCN10A; (+) strand; PAM type: NRG; PAM sequence: GGG
  source 1..20: mol_type = other DNA
ctgggtagatacccagtagt

SEQ ID NO: 36838 - DNA, 20 bp, synthetic construct
  misc_feature 1..20: note = Description of Artificial Sequence: Synthetic oligonucleotide
  misc_feature 1..20: note = Target: SCN10A; (+) strand; PAM type: NRG; PAM sequence: TGG
  source 1..20: mol_type = other DNA
atacccagtagtgggattgc

SEQ ID NO: 36839 - DNA, 20 bp, synthetic construct
  misc_feature 1..20: note = Description of Artificial Sequence: Synthetic oligonucleotide
  misc_feature 1..20: note = Target: SCN10A; (+) strand; PAM type: NRG; PAM sequence: TGG
  source 1..20: mol_type = other DNA
agtgggattgctggaccaaa

SEQ ID NO: 36840 - DNA, 20 bp, synthetic construct
  misc_feature 1..20: note = Description of Artificial Sequence: Synthetic oligonucleotide
  misc_feature 1..20: note = Target: SCN10A; (+) strand; PAM type: NRG; PAM sequence: TAG
  source 1..20: mol_type = other DNA
gggattgctggaccaaatgg

SEQ ID NO: 36841 - DNA, 20 bp, synthetic construct
  misc_feature 1..20: note = Description of Artificial Sequence: Synthetic oligonucleotide
  misc_feature 1..20: note = Target: SCN10A; (+) strand; PAM type: NRG; PAM sequence: TAG
  source 1..20: mol_type = other DNA
ccaaatggtagttctacttt

SEQ ID NO: 36842 - DNA, 20 bp, synthetic construct
  misc_feature 1..20: note = Description of Artificial Sequence: Synthetic oligonucleotide
  misc_feature 1..20: note = Target: SCN10A; (+) strand; PAM type: NRG; PAM sequence: AAG
  source 1..20: mol_type = other DNA
agttctacttttagttcttt

SEQ ID NO: 36843 - DNA, 20 bp, synthetic construct
  misc_feature 1..20: note = Description of Artificial Sequence: Synthetic oligonucleotide
  misc_feature 1..20: note = Target: SCN10A; (+) strand; PAM type: NRG; PAM sequence: AGG
  source 1..20: mol_type = other DNA
gttctacttttagttcttta

SEQ ID NO: 36844 - DNA, 20 bp, synthetic construct
  misc_feature 1..20: note = Description of Artificial Sequence: Synthetic oligonucleotide
  misc_feature 1..20: note = Target: SCN10A; (+) strand; PAM type: NRG; PAM sequence: TAG
  source 1..20: mol_type = other DNA
aatctccataacgttttcct

SEQ ID NO: 36845 - DNA, 20 bp, synthetic construct
  misc_feature 1..20: note = Description of Artificial Sequence: Synthetic oligonucleotide
  misc_feature 1..20: note = Target: SCN10A; (+) strand; PAM type: NRG; PAM sequence: TGG
  source 1..20: mol_type = other DNA
ctccataacgttttccttag

SEQ ID NO: 36846 - DNA, 20 bp, synthetic construct
  misc_feature 1..20: note = Description of Artificial Sequence: Synthetic oligonucleotide
  misc_feature 1..20: note = Target: SCN10A; (+) strand; PAM type: NRG; PAM sequence: TAG
  source 1..20: mol_type = other DNA
gttttccttagtggttgtac

SEQ ID NO: 36847 - DNA, 20 bp, synthetic construct
  misc_feature 1..20: note = Description of Artificial Sequence: Synthetic oligonucleotide
  misc_feature 1..20: note = Target: SCN10A; (+) strand; PAM type: NRG; PAM sequence: CAG
  source 1..20: mol_type = other DNA
gtactagtttacattcccac

SEQ ID NO: 36848 - DNA, 20 bp, synthetic construct
  misc_feature 1..20: note = Description of Artificial Sequence: Synthetic oligonucleotide
  misc_feature 1..20: note = Target: SCN10A; (+) strand; PAM type: NRG; PAM sequence: CAG
  source 1..20: mol_type = other DNA
ctagtttacattcccaccag

SEQ ID NO: 36849 - DNA, 20 bp, synthetic construct
  misc_feature 1..20: note = Description of Artificial Sequence: Synthetic oligonucleotide
  misc_feature 1..20: note = Target: SCN10A; (+) strand; PAM type: NRG; PAM sequence: TGG
  source 1..20: mol_type = other DNA
tgccaacatctattattttt

SEQ ID NO: 36850 - DNA, 20 bp, synthetic construct
  misc_feature 1..20: note = Description of Artificial Sequence: Synthetic oligonucleotide
  misc_feature 1..20: note = Target: SCN10A; (+) strand; PAM type: NRG; PAM sequence: TGG
  source 1..20: mol_type = other DNA
catctattattttttggtta

SEQ ID NO: 36851 - DNA, 20 bp, synthetic construct
  misc_feature 1..20: note = Description of Artificial Sequence: Synthetic oligonucleotide
  misc_feature 1..20: note = Target: SCN10A; (+) strand; PAM type: NRG; PAM sequence: CAG
  source 1..20: mol_type = other DNA
tttggttatggccattcttg

SEQ ID NO: 36852 - DNA, 20 bp, synthetic construct
  misc_feature 1..20: note = Description of Artificial Sequence: Synthetic oligonucleotide
  misc_feature 1..20: note = Target: SCN10A; (+) strand; PAM type: NRG; PAM sequence: AGG
  source 1..20: mol_type = other DNA
ttggttatggccattcttgc

SEQ ID NO: 36853 - DNA, 20 bp, synthetic construct
  misc_feature 1..20: note = Description of Artificial Sequence: Synthetic oligonucleotide
  misc_feature 1..20: note = Target: SCN10A; (+) strand; PAM type: NRG; PAM sequence: GAG
  source 1..20: mol_type = other DNA
ggttatggccattcttgcag

SEQ ID NO: 36854 - DNA, 20 bp, synthetic construct
  misc_feature 1..20: note = Description of Artificial Sequence: Synthetic oligonucleotide
  misc_feature 1..20: note = Target: SCN10A; (+) strand; PAM type: NRG; PAM sequence: AAG
  source 1..20: mol_type = other DNA
atggccattcttgcaggagt

SEQ ID NO: 36855 - DNA, 20 bp, synthetic construct
  misc_feature 1..20: note = Description of Artificial Sequence: Synthetic oligonucleotide
  misc_feature 1..20: note = Target: SCN10A; (+) strand; PAM type: NRG; PAM sequence: AGG
  source 1..20: mol_type = other DNA
tggccattcttgcaggagta

SEQ ID NO: 36856 - DNA, 20 bp, synthetic construct
  misc_feature 1..20: note = Description of Artificial Sequence: Synthetic oligonucleotide
  misc_feature 1..20: note = Target: SCN10A; (+) strand; PAM type: NRG; PAM sequence: TGG
  source 1..20: mol_type = other DNA
ccattcttgcaggagtaagg

SEQ ID NO: 36857 - DNA, 20 bp, synthetic construct
  misc_feature 1..20: note = Description of Artificial Sequence: Synthetic oligonucleotide
  misc_feature 1..20: note = Target: SCN10A; (+) strand; PAM type: NRG; PAM sequence: TGG
  source 1..20: mol_type = other DNA
agtaaggtggtatctcattg

SEQ ID NO: 36858 - DNA, 20 bp, synthetic construct
  misc_feature 1..20: note = Description of Artificial Sequence: Synthetic oligonucleotide
  misc_feature 1..20: note = Target: SCN10A; (+) strand; PAM type: NRG; PAM sequence: GAG
  source 1..20: mol_type = other DNA
ccctgataattaatgatgtt

SEQ ID NO: 36859 - DNA, 20 bp, synthetic construct
  misc_feature 1..20: note = Description of Artificial Sequence: Synthetic oligonucleotide
  misc_feature 1..20: note = Target: SCN10A; (+) strand; PAM type: NRG; PAM sequence: TGG
  source 1..20: mol_type = other DNA
catttttttttcctgttcat

SEQ ID NO: 36860 - DNA, 20 bp, synthetic construct
  misc_feature 1..20: note = Description of Artificial Sequence: Synthetic oligonucleotide
  misc_feature 1..20: note = Target: SCN10A; (+) strand; PAM type: NRG; PAM sequence: GAG
  source 1..20: mol_type = other DNA
ccatttatatatcttctttt

SEQ ID NO: 36861 - DNA, 20 bp, synthetic construct
  misc_feature 1..20: note = Description of Artificial Sequence: Synthetic oligonucleotide
  misc_feature 1..20: note = Target: SCN10A; (+) strand; PAM type: NRG; PAM sequence: TGG
  source 1..20: mol_type = other DNA
tcttgtcctttgcccacttt

SEQ ID NO: 36862 - DNA, 20 bp, synthetic construct
  misc_feature 1..20: note = Description of Artificial Sequence: Synthetic oligonucleotide
  misc_feature 1..20: note = Target: SCN10A; (+) strand; PAM type: NRG; PAM sequence: TGG
  source 1..20: mol_type = other DNA
gtcctttgcccacttttgga

SEQ ID NO: 36863 - DNA, 20 bp, synthetic construct
  misc_feature 1..20: note = Description of Artificial Sequence: Synthetic oligonucleotide
  misc_feature 1..20: note = Target: SCN10A; (+) strand; PAM type: NRG; PAM sequence: GGG
  source 1..20: mol_type = other DNA
tcctttgcccacttttggat

SEQ ID NO: 36864 - DNA, 20 bp, synthetic construct
  misc_feature 1..20: note = Description of Artificial Sequence: Synthetic oligonucleotide
  misc_feature 1..20: note = Target: SCN10A; (+) strand; PAM type: NRG; PAM sequence: TAG
  source 1..20: mol_type = other DNA
tgatttatttgtgtttctta

SEQ ID NO: 36865 - DNA, 20 bp, synthetic construct
  misc_feature 1..20: note = Description of Artificial Sequence: Synthetic oligonucleotide
  misc_feature 1..20: note = Target: SCN10A; (+) strand; PAM type: NRG; PAM sequence: TGG
  source 1..20: mol_type = other DNA
tttgtgtttcttatagatgc

SEQ ID NO: 36866 - DNA, 20 bp, synthetic construct
  misc_feature 1..20: note = Description of Artificial Sequence: Synthetic oligonucleotide
  misc_feature 1..20: note = Target: SCN10A; (+) strand; PAM type: NRG; PAM sequence: TAG
  source 1..20: mol_type = other DNA
ttcttatagatgctggatat

SEQ ID NO: 36867 - DNA, 20 bp, synthetic construct
  misc_feature 1..20: note = Description of Artificial Sequence: Synthetic oligonucleotide
  misc_feature 1..20: note = Target: SCN10A; (+) strand; PAM type: NRG; PAM sequence: TGG
  source 1..20: mol_type = other DNA
gctggatattagtcttttgc

SEQ ID NO: 36868 - DNA, 20 bp, synthetic construct
  misc_feature 1..20: note = Description of Artificial Sequence: Synthetic oligonucleotide
  misc_feature 1..20: note = Target: SCN10A; (+) strand; PAM type: NRG; PAM sequence: AAG
  source 1..20: mol_type = other DNA
ggatattagtcttttgctgg

SEQ ID NO: 36869 - DNA, 20 bp, synthetic construct
  misc_feature 1..20: note = Description of Artificial Sequence: Synthetic oligonucleotide
  misc_feature 1..20: note = Target: SCN10A; (+) strand; PAM type: NRG; PAM sequence: TAG
  source 1..20: mol_type = other DNA
ttagtcttttgctggaagca

SEQ ID NO: 36870 - DNA, 20 bp, synthetic construct
  misc_feature 1..20: note = Description of Artificial Sequence: Synthetic oligonucleotide
  misc_feature 1..20: note = Target: SCN10A; (+) strand; PAM type: NRG; PAM sequence: AAG
  source 1..20: mol_type = other DNA
tgctggaagcatagataaca

SEQ ID NO: 36871 - DNA, 20 bp, synthetic construct
  misc_feature 1..20: note = Description of Artificial Sequence: Synthetic oligonucleotide
  misc_feature 1..20: note = Target: SCN10A; (+) strand; PAM type: NRG; PAM sequence: TGG
  source 1..20: mol_type = other DNA
aagatttttctctcatccta

SEQ ID NO: 36872 - DNA, 20 bp, synthetic construct
  misc_feature 1..20: note = Description of Artificial Sequence: Synthetic oligonucleotide
  misc_feature 1..20: note = Target: SCN10A; (+) strand; PAM type: NRG; PAM sequence: GGG
  source 1..20: mol_type = other DNA
agatttttctctcatcctat

SEQ ID NO: 36873 - DNA, 20 bp, synthetic construct
  misc_feature 1..20: note = Description of Artificial Sequence: Synthetic oligonucleotide
  misc_feature 1..20: note = Target: SCN10A; (+) strand; PAM type: NRG; PAM sequence: TGG
  source 1..20: mol_type = other DNA
ctatgggttgtctgtttact

SEQ ID NO: 36874 - DNA, 20 bp, synthetic construct
  misc_feature 1..20: note = Description of Artificial Sequence: Synthetic oligonucleotide
  misc_feature 1..20: note = Target: SCN10A; (+) strand; PAM type: NRG; PAM sequence: CAG
  source 1..20: mol_type = other DNA
ttatttctcttgctgtgcaa

SEQ ID NO: 36875 - DNA, 20 bp, synthetic construct
  misc_feature 1..20: note = Description of Artificial Sequence: Synthetic oligonucleotide
  misc_feature 1..20: note = Target: SCN10A; (+) strand; PAM type: NRG; PAM sequence: TAG
  source 1..20: mol_type = other DNA
cttgctgtgcaacagctttt

SEQ ID NO: 36876 - DNA, 20 bp, synthetic construct
  misc_feature 1..20: note = Description of Artificial Sequence: Synthetic oligonucleotide
  misc_feature 1..20: note = Target: SCN10A; (+) strand; PAM type: NRG; PAM sequence: TAG
  source 1..20: mol_type = other DNA
caacagctttttagtttaat

SEQ ID NO: 36877 - DNA, 20 bp, synthetic construct
  misc_feature 1..20: note = Description of Artificial Sequence: Synthetic oligonucleotide
  misc_feature 1..20: note = Target: SCN10A; (+) strand; PAM type: NRG; PAM sequence: TGG
  source 1..20: mol_type = other DNA
ctatttatttttgtttttgt

SEQ ID NO: 36878 - DNA, 20 bp, synthetic construct
  misc_feature 1..20: note = Description of Artificial Sequence: Synthetic oligonucleotide
  misc_feature 1..20: note = Target: SCN10A; (+) strand; PAM type: NRG; PAM sequence: TGG
  source 1..20: mol_type = other DNA
tgtttttgttggatttgctt

SEQ ID NO: 36879 - DNA, 20 bp, synthetic construct
  misc_feature 1..20: note = Description of Artificial Sequence: Synthetic oligonucleotide
  misc_feature 1..20: note = Target: SCN10A; (+) strand; PAM type: NRG; PAM sequence: GGG
  source 1..20: mol_type = other DNA
gtttttgttggatttgcttt

SEQ ID NO: 36880 - DNA, 20 bp, synthetic construct
  misc_feature 1..20: note = Description of Artificial Sequence: Synthetic oligonucleotide
  misc_feature 1..20: note = Target: SCN10A; (+) strand; PAM type: NRG; PAM sequence: TGG
  source 1..20: mol_type = other DNA
ttggatttgctttgggtcct

SEQ ID NO: 36881 - DNA, 20 bp, synthetic construct
  misc_feature 1..20: note = Description of Artificial Sequence: Synthetic oligonucleotide
  misc_feature 1..20: note = Target: SCN10A; (+) strand; PAM type: NRG; PAM sequence: CAG
  source 1..20: mol_type = other DNA
atttgctttgggtccttggt

SEQ ID NO: 36882 - DNA, 20 bp, synthetic construct
  misc_feature 1..20: note = Description of Artificial Sequence: Synthetic oligonucleotide
  misc_feature 1..20: note = Target: SCN10A; (+) strand; PAM type: NRG; PAM sequence: AGG
  source 1..20: mol_type = other DNA
tttgctttgggtccttggtc

SEQ ID NO: 36883 - DNA, 20 bp, synthetic construct
  misc_feature 1..20: note = Description of Artificial Sequence: Synthetic oligonucleotide
  misc_feature 1..20: note = Target: SCN10A; (+) strand; PAM type: NRG; PAM sequence: AAG
  source 1..20: mol_type = other DNA
tggtcaggaacgttttgcct

SEQ ID NO: 36884 - DNA, 20 bp, synthetic construct
  misc_feature 1..20: note = Description of Artificial Sequence: Synthetic oligonucleotide
  misc_feature 1..20: note = Target: SCN10A; (+) strand; PAM type: NRG; PAM sequence: TAG
  source 1..20: mol_type = other DNA
gttttgcctaagccaatgtc

SEQ ID NO: 36885 - DNA, 20 bp, synthetic construct
  misc_feature 1..20: note = Description of Artificial Sequence: Synthetic oligonucleotide
  misc_feature 1..20: note = Target: SCN10A; (+) strand; PAM type: NRG; PAM sequence: AAG
  source 1..20: mol_type = other DNA
ttgcctaagccaatgtctag

SEQ ID NO: 36886 - DNA, 20 bp, synthetic construct
  misc_feature 1..20: note = Description of Artificial Sequence: Synthetic oligonucleotide
  misc_feature 1..20: note = Target: SCN10A; (+) strand; PAM type: NRG; PAM sequence: GAG
  source 1..20: mol_type = other DNA
gcctaagccaatgtctagaa

SEQ ID NO: 36887 - DNA, 20 bp, synthetic construct
  misc_feature 1..20: note = Description of Artificial Sequence: Synthetic oligonucleotide
  misc_feature 1..20: note = Target: SCN10A; (+) strand; PAM type: NRG; PAM sequence: TAG
  source 1..20: mol_type = other DNA
gtttttccaatgttatcttc

SEQ ID NO: 36888 - DNA, 20 bp, synthetic construct
  misc_feature 1..20: note = Description of Artificial Sequence: Synthetic oligonucleotide
  misc_feature 1..20: note = Target: SCN10A; (+) strand; PAM type: NRG; PAM sequence: CAG
  source 1..20: mol_type = other DNA
tctagaattttttataattt

SEQ ID NO: 36889 - DNA, 20 bp, synthetic construct
  misc_feature 1..20: note = Description of Artificial Sequence: Synthetic oligonucleotide
  misc_feature 1..20: note = Target: SCN10A; (+) strand; PAM type: NRG; PAM sequence: AGG
  source 1..20: mol_type = other DNA
ctagaattttttataatttc

SEQ ID NO: 36890 - DNA, 20 bp, synthetic construct
  misc_feature 1..20: note = Description of Artificial Sequence: Synthetic oligonucleotide
  misc_feature 1..20: note = Target: SCN10A; (+) strand; PAM type: NRG; PAM sequence: TAG
  source 1..20: mol_type = other DNA
ttttttataatttcaggtct

SEQ ID NO: 36891 - DNA, 20 bp, synthetic construct
  misc_feature 1..20: note = Description of Artificial Sequence: Synthetic oligonucleotide
  misc_feature 1..20: note = Target: SCN10A; (+) strand; PAM type: NRG; PAM sequence: AAG
  source 1..20: mol_type = other DNA
taatttcaggtcttagattt

SEQ ID NO: 36892 - DNA, 20 bp, synthetic construct
  misc_feature 1..20: note = Description of Artificial Sequence: Synthetic oligonucleotide
  misc_feature 1..20: note = Target: SCN10A; (+) strand; PAM type: NRG; PAM sequence: AAG
  source 1..20: mol_type = other DNA
tcttgaattgatttttgtat

SEQ ID NO: 36893 - DNA, 20 bp, synthetic construct
  misc_feature 1..20: note = Description of Artificial Sequence: Synthetic oligonucleotide
  misc_feature 1..20: note = Target: SCN10A; (+) strand; PAM type: NRG; PAM sequence: AGG
  source 1..20: mol_type = other DNA
cttgaattgatttttgtata

SEQ ID NO: 36894 - DNA, 20 bp, synthetic construct
  misc_feature 1..20: note = Description of Artificial Sequence: Synthetic oligonucleotide
  misc_feature 1..20: note = Target: SCN10A; (+) strand; PAM type: NRG; PAM sequence: GAG
  source 1..20: mol_type = other DNA
aattgatttttgtataaggt

SEQ ID NO: 36895 - DNA, 20 bp, synthetic construct
  misc_feature 1..20: note = Description of Artificial Sequence: Synthetic oligonucleotide
  misc_feature 1..20: note = Target: SCN10A; (+) strand; PAM type: NRG; PAM sequence: GAG
  source 1..20: mol_type = other DNA
ttgatttttgtataaggtga

SEQ ID NO: 36896 - DNA, 20 bp, synthetic construct
  misc_feature 1..20: note = Description of Artificial Sequence: Synthetic oligonucleotide
  misc_feature 1..20: note = Target: SCN10A; (+) strand; PAM type: NRG; PAM sequence: AAG
  source 1..20: mol_type = other DNA
tttgtataaggtgagagatg

SEQ ID NO: 36897 - DNA, 20 bp, synthetic construct
  misc_feature 1..20: note = Description of Artificial Sequence: Synthetic oligonucleotide
  misc_feature 1..20: note = Target: SCN10A; (+) strand; PAM type: NRG; PAM sequence: CAG
  source 1..20: mol_type = other DNA
taaggtgagagatgaagatt

SEQ ID NO: 36898 - DNA, 20 bp, synthetic construct
  misc_feature 1..20: note = Description of Artificial Sequence: Synthetic oligonucleotide
  misc_feature 1..20: note = Target: SCN10A; (+) strand; PAM type: NRG; PAM sequence: TGG
  source 1..20: mol_type = other DNA
cagtttctttcttccacatg

SEQ ID NO: 36899 - DNA, 20 bp, synthetic construct
  misc_feature 1..20: note = Description of Artificial Sequence: Synthetic oligonucleotide
  misc_feature 1..20: note = Target: SCN10A; (+) strand; PAM type: NRG; PAM sequence: CAG
  source 1..20: mol_type = other DNA
atgtggcttgctaattatcc

SEQ ID NO: 36900 - DNA, 20 bp, synthetic construct
  misc_feature 1..20: note = Description of Artificial Sequence: Synthetic oligonucleotide
  misc_feature 1..20: note = Target: SCN10A; (+) strand; PAM type: NRG; PAM sequence: TAG
  source 1..20: mol_type = other DNA
tcccagcaccatttgttgaa

SEQ ID NO: 36901 - DNA, 20 bp, synthetic construct
  misc_feature 1..20: note = Description of Artificial Sequence: Synthetic oligonucleotide
  misc_feature 1..20: note = Target: SCN10A; (+) strand; PAM type: NRG; PAM sequence: AGG
  source 1..20: mol_type = other DNA
cccagcaccatttgttgaat

SEQ ID NO: 36902 - DNA, 20 bp, synthetic construct
  misc_feature 1..20: note = Description of Artificial Sequence: Synthetic oligonucleotide
  misc_feature 1..20: note = Target: SCN10A; (+) strand; PAM type: NRG; PAM sequence: GGG
  source 1..20: mol_type = other DNA
ccagcaccatttgttgaata

SEQ ID NO: 36903 - DNA, 20 bp, synthetic construct
  misc_feature 1..20: note = Description of Artificial Sequence: Synthetic oligonucleotide
  misc_feature 1..20: note = Target: SCN10A; (+) strand; PAM type: NRG; PAM sequence: AAG
  source 1..20: mol_type = other DNA
cgtttttgtttgctttttca

SEQ ID NO: 36904 - DNA, 20 bp, synthetic construct
  misc_feature 1..20: note = Description of Artificial Sequence: Synthetic oligonucleotide
  misc_feature 1..20: note = Target: SCN10A; (+) strand; PAM type: NRG; PAM sequence: CAG
  source 1..20: mol_type = other DNA
ttgtttgctttttcaaagat

SEQ ID NO: 36905 - DNA, 20 bp, synthetic construct
  misc_feature 1..20: note = Description of Artificial Sequence: Synthetic oligonucleotide
  misc_feature 1..20: note = Target: SCN10A; (+) strand; PAM type: NRG; PAM sequence: AAG
  source 1..20: mol_type = other DNA
ttcaaagatcagttgcttgt

SEQ ID NO: 36906 - DNA, 20 bp, synthetic construct
  misc_feature 1..20: note = Description of Artificial Sequence: Synthetic oligonucleotide
  misc_feature 1..20: note = Target: SCN10A; (+) strand; PAM type: NRG; PAM sequence: TGG
  source 1..20: mol_type = other DNA
atcagttgcttgtaagtatt

SEQ ID NO: 36907 - DNA, 20 bp, synthetic construct
  misc_feature 1..20: note = Description of Artificial Sequence: Synthetic oligonucleotide
  misc_feature 1..20: note = Target: SCN10A; (+) strand; PAM type: NRG; PAM sequence: GAG
  source 1..20: mol_type = other DNA
aagtatttggctttatttct

SEQ ID NO: 36908 - DNA, 20 bp, synthetic construct
  misc_feature 1..20: note = Description of Artificial Sequence: Synthetic oligonucleotide
  misc_feature 1..20: note = Target: SCN10A; (+) strand; PAM type: NRG; PAM sequence: TGG
  source 1..20: mol_type = other DNA
agttctctattcttttccat

SEQ ID NO: 36909 - DNA, 20 bp, synthetic construct
  misc_feature 1..20: note = Description of Artificial Sequence: Synthetic oligonucleotide
  misc_feature 1..20: note = Target: SCN10A; (+) strand; PAM type: NRG; PAM sequence: CAG
  source 1..20: mol_type = other DNA
ctatgtgcttatttttatac

SEQ ID NO: 36910 - DNA, 20 bp, synthetic construct
  misc_feature 1..20: note = Description of Artificial Sequence: Synthetic oligonucleotide
  misc_feature 1..20: note = Target: SCN10A; (+) strand; PAM type: NRG; PAM sequence: TGG
  source 1..20: mol_type = other DNA
ataccagtatcatgctgttt

SEQ ID NO: 36911 - DNA, 20 bp, synthetic construct
  misc_feature 1..20: note = Description of Artificial Sequence: Synthetic oligonucleotide
  misc_feature 1..20: note = Target: SCN10A; (+) strand; PAM type: NRG; PAM sequence: CAG
  source 1..20: mol_type = other DNA
agtatcatgctgttttggta

SEQ ID NO: 36912 - DNA, 20 bp, synthetic construct
  misc_feature 1..20: note = Description of Artificial Sequence: Synthetic oligonucleotide
  misc_feature 1..20: note = Target: SCN10A; (+) strand; PAM type: NRG; PAM sequence: AGG
  source 1..20: mol_type = other DNA
gtatcatgctgttttggtac

SEQ ID NO: 36913 - DNA, 20 bp, synthetic construct
  misc_feature 1..20: note = Description of Artificial Sequence: Synthetic oligonucleotide
  misc_feature 1..20: note = Target: SCN10A; (+) strand; PAM type: NRG; PAM sequence: TAG
  source 1..20: mol_type = other DNA
ttttggtacaggctatacta

SEQ ID NO: 36914 - DNA, 20 bp, synthetic construct
  misc_feature 1..20: note = Description of Artificial Sequence: Synthetic oligonucleotide
  misc_feature 1..20: note = Target: SCN10A; (+) strand; PAM type: NRG; PAM sequence: TAG
  source 1..20: mol_type = other DNA
caggctatactatagccttg

SEQ ID NO: 36915 - DNA, 20 bp, synthetic construct
  misc_feature 1..20: note = Description of Artificial Sequence: Synthetic oligonucleotide
  misc_feature 1..20: note = Target: SCN10A; (+) strand; PAM type: NRG; PAM sequence: TAG
  source 1..20: mol_type = other DNA
tatactatagccttgtagta

SEQ ID NO: 36916 - DNA, 20 bp, synthetic construct
  misc_feature 1..20: note = Description of Artificial Sequence: Synthetic oligonucleotide
  misc_feature 1..20: note = Target: SCN10A; (+) strand; PAM type: NRG; PAM sequence: CAG
  source 1..20: mol_type = other DNA
cttgtagtatagtttgaaat

SEQ ID NO: 36917 - DNA, 20 bp, synthetic construct
  misc_feature 1..20: note = Description of Artificial Sequence: Synthetic oligonucleotide
  misc_feature 1..20: note = Target: SCN10A; (+) strand; PAM type: NRG; PAM sequence: AAG
  source 1..20: mol_type = other DNA
agtatagtttgaaatcagct

SEQ ID NO: 36918 - DNA, 20 bp, synthetic construct
  misc_feature 1..20: note = Description of Artificial Sequence: Synthetic oligonucleotide
  misc_feature 1..20: note = Target: SCN10A; (+) strand; PAM type: NRG; PAM sequence: AGG
  source 1..20: mol_type = other DNA
gtatagtttgaaatcagcta

SEQ ID NO: 36919 - DNA, 20 bp, synthetic construct
  misc_feature 1..20: note = Description of Artificial Sequence: Synthetic oligonucleotide
  misc_feature 1..20: note = Target: SCN10A; (+) strand; PAM type: NRG; PAM sequence: CAG
  source 1..20: mol_type = other DNA
atcagctaaggtgatgcctc

SEQ ID NO: 36920 - DNA, 20 bp, synthetic construct
  misc_feature 1..20: note = Description of Artificial Sequence: Synthetic oligonucleotide
  misc_feature 1..20: note = Target: SCN10A; (+) strand; PAM type: NRG; PAM sequence: TAG
  source 1..20: mol_type = other DNA
ccagatttgttattcttgct

SEQ ID NO: 36921 - DNA, 20 bp, synthetic construct
  misc_feature 1..20: note = Description of Artificial Sequence: Synthetic oligonucleotide
  misc_feature 1..20: note = Target: SCN10A; (+) strand; PAM type: NRG; PAM sequence: TGG
  source 1..20: mol_type = other DNA
attcttgcttagtcttgctt

SEQ ID NO: 36922 - DNA, 20 bp, synthetic construct
  misc_feature 1..20: note = Description of Artificial Sequence: Synthetic oligonucleotide
  misc_feature 1..20: note = Target: SCN10A; (+) strand; PAM type: NRG; PAM sequence: TGG
  source 1..20: mol_type = other DNA
ttagtcttgctttggctatg

SEQ ID NO: 36923 - DNA, 20 bp, synthetic construct
  misc_feature 1..20: note = Description of Artificial Sequence: Synthetic oligonucleotide
  misc_feature 1..20: note = Target: SCN10A; (+) strand; PAM type: NRG; PAM sequence: TGG
  source 1..20: mol_type = other DNA
tggctatgtggattcctttt

SEQ ID NO: 36924 - DNA, 20 bp, synthetic construct
  misc_feature 1..20: note = Description of Artificial Sequence: Synthetic oligonucleotide
  misc_feature 1..20: note = Target: SCN10A; (+) strand; PAM type: NRG; PAM sequence: TAG
  source 1..20: mol_type = other DNA
ttttggttccctatgaattt

SEQ ID NO: 36925 - DNA, 20 bp, synthetic construct
  misc_feature 1..20: note = Description of Artificial Sequence: Synthetic oligonucleotide
  misc_feature 1..20: note = Target: SCN10A; (+) strand; PAM type: NRG; PAM sequence: AGG
  source 1..20: mol_type = other DNA
tttggttccctatgaatttt

SEQ ID NO: 36926 - DNA, 20 bp, synthetic construct
  misc_feature 1..20: note = Description of Artificial Sequence: Synthetic oligonucleotide
  misc_feature 1..20: note = Target: SCN10A; (+) strand; PAM type: NRG; PAM sequence: GGG
  source 1..20: mol_type = other DNA
ttggttccctatgaatttta

SEQ ID NO: 36927 - DNA, 20 bp, synthetic construct
  misc_feature 1..20: note = Description of Artificial Sequence: Synthetic oligonucleotide
  misc_feature 1..20: note = Target: SCN10A; (+) strand; PAM type: NRG; PAM sequence: AAG
  source 1..20: mol_type = other DNA
ttgttatttctatttctgtg

SEQ ID NO: 36928 - DNA, 20 bp, synthetic construct
  misc_feature 1..20: note = Description of Artificial Sequence: Synthetic oligonucleotide
  misc_feature 1..20: note = Target: SCN10A; (+) strand; PAM type: NRG; PAM sequence: TGG
  source 1..20: mol_type = other DNA
tatttctgtgaagaatgatg

SEQ ID NO: 36929 - DNA, 20 bp, synthetic construct
  misc_feature 1..20: note = Description of Artificial Sequence: Synthetic oligonucleotide
  misc_feature 1..20: note = Target: SCN10A; (+) strand; PAM type: NRG; PAM sequence: TGG
  source 1..20: mol_type = other DNA
agaatgatgtggtacttcaa

SEQ ID NO: 36930 - DNA, 20 bp, synthetic construct
  misc_feature 1..20: note = Description of Artificial Sequence: Synthetic oligonucleotide
  misc_feature 1..20: note = Target: SCN10A; (+) strand; PAM type: NRG; PAM sequence: TGG
  source 1..20: mol_type = other DNA
ttgaatctgtatattgcttt

SEQ ID NO: 36931 - DNA, 20 bp, synthetic construct
  misc_feature 1..20: note = Description of Artificial Sequence: Synthetic oligonucleotide
  misc_feature 1..20: note = Target: SCN10A; (+) strand; PAM type: NRG; PAM sequence: CAG
  source 1..20: mol_type = other DNA
aatctgtatattgcttttgg

SEQ ID NO: 36932 - DNA, 20 bp, synthetic construct
  misc_feature 1..20: note = Description of Artificial Sequence: Synthetic oligonucleotide
  misc_feature 1..20: note = Target: SCN10A; (+) strand; PAM type: NRG; PAM sequence: AAG
  source 1..20: mol_type = other DNA
tgtatattgcttttggcagt

SEQ ID NO: 36933 - DNA, 20 bp, synthetic construct
  misc_feature 1..20: note = Description of Artificial Sequence: Synthetic oligonucleotide
  misc_feature 1..20: note = Target: SCN10A; (+) strand; PAM type: NRG; PAM sequence: AGG
  source 1..20: mol_type = other DNA
gtatattgcttttggcagta

SEQ ID NO: 36934 - DNA, 20 bp, synthetic construct
  misc_feature 1..20: note = Description of Artificial Sequence: Synthetic oligonucleotide
  misc_feature 1..20: note = Target: SCN10A; (+) strand; PAM type: NRG; PAM sequence: GAG
  source 1..20: mol_type = other DNA
tattgattttatccatccat

SEQ ID NO: 36935 - DNA, 20 bp, synthetic construct
  misc_feature 1..20: note = Description of Artificial Sequence: Synthetic oligonucleotide
  misc_feature 1..20: note = Target: SCN10A; (+) strand; PAM type: NRG; PAM sequence: TGG
  source 1..20: mol_type = other DNA
attttatccatccatgagca

SEQ ID NO: 36936 - DNA, 20 bp, synthetic construct
  misc_feature 1..20: note = Description of Artificial Sequence: Synthetic oligonucleotide
  misc_feature 1..20: note = Target: SCN10A; (+) strand; PAM type: NRG; PAM sequence: GGG
  source 1..20: mol_type = other DNA
ttttatccatccatgagcat

SEQ ID NO: 36937 - DNA, 20 bp, synthetic construct
  misc_feature 1..20: note = Description of Artificial Sequence: Synthetic oligonucleotide
  misc_feature 1..20: note = Target: SCN10A; (+) strand; PAM type: NRG; PAM sequence: TAG
  source 1..20: mol_type = other DNA
gtgtcatctgtgatttattt

SEQ ID NO: 36938 - DNA, 20 bp, synthetic construct
  misc_feature 1..20: note = Description of Artificial Sequence: Synthetic oligonucleotide
  misc_feature 1..20: note = Target: SCN10A; (+) strand; PAM type: NRG; PAM sequence: CAG
  source 1..20: mol_type = other DNA
tcatctgtgatttattttag

SEQ ID NO: 36939 - DNA, 20 bp, synthetic construct
  misc_feature 1..20: note = Description of Artificial Sequence: Synthetic oligonucleotide
  misc_feature 1..20: note = Target: SCN10A; (+) strand; PAM type: NRG; PAM sequence: TAG
  source 1..20: mol_type = other DNA
tttattttagcagtgttttg

SEQ ID NO: 36940 - DNA, 20 bp, synthetic construct
  misc_feature 1..20: note = Description of Artificial Sequence: Synthetic oligonucleotide
  misc_feature 1..20: note = Target: SCN10A; (+) strand; PAM type: NRG; PAM sequence: TAG
  source 1..20: mol_type = other DNA
gtgttttgtagttttccttg

SEQ ID NO: 36941 - DNA, 20 bp, synthetic construct
  misc_feature 1..20: note = Description of Artificial Sequence: Synthetic oligonucleotide
  misc_feature 1..20: note = Target: SCN10A; (+) strand; PAM type: NRG; PAM sequence: TGG
  source 1..20: mol_type = other DNA
gtagaaatctttcacctttt

SEQ ID NO: 36942 - DNA, 20 bp, synthetic construct
  misc_feature 1..20: note = Description of Artificial Sequence: Synthetic oligonucleotide
  misc_feature 1..20: note = Target: SCN10A; (+) strand; PAM type: NRG; PAM sequence: TAG
  source 1..20: mol_type = other DNA
aaatctttcacctttttggt

SEQ ID NO: 36943 - DNA, 20 bp, synthetic construct
  misc_feature 1..20: note = Description of Artificial Sequence: Synthetic oligonucleotide
  misc_feature 1..20: note = Target: SCN10A; (+) strand; PAM type: NRG; PAM sequence: AGG
  source 1..20: mol_type = other DNA
aatctttcacctttttggtt

SEQ ID NO: 36944 - DNA, 20 bp, synthetic construct
  misc_feature 1..20: note = Description of Artificial Sequence: Synthetic oligonucleotide
  misc_feature 1..20: note = Target: SCN10A; (+) strand; PAM type: NRG; PAM sequence: AAG
  source 1..20: mol_type = other DNA
ttttggttaggtatattcct

SEQ ID NO: 36945 - DNA, 20 bp, synthetic construct
  misc_feature 1..20: note = Description of Artificial Sequence: Synthetic oligonucleotide
  misc_feature 1..20: note = Target: SCN10A; (+) strand; PAM type: NRG; PAM sequence: CAG
  source 1..20: mol_type = other DNA
ttatttttgttttttttttg

SEQ ID NO: 36946 - DNA, 20 bp, synthetic construct
  misc_feature 1..20: note = Description of Artificial Sequence: Synthetic oligonucleotide
  misc_feature 1..20: note = Target: SCN10A; (+) strand; PAM type: NRG; PAM sequence: AAG
  source 1..20: mol_type = other DNA
tttttttgcagctgttgtaa

SEQ ID NO: 36947 - DNA, 20 bp, synthetic construct
  misc_feature 1..20: note = Description of Artificial Sequence: Synthetic oligonucleotide
  misc_feature 1..20: note = Target: SCN10A; (+) strand; PAM type: NRG; PAM sequence: AGG
  source 1..20: mol_type = other DNA
ttttttgcagctgttgtaaa

SEQ ID NO: 36948 - DNA, 20 bp, synthetic construct
  misc_feature 1..20: note = Description of Artificial Sequence: Synthetic oligonucleotide
  misc_feature 1..20: note = Target: SCN10A; (+) strand; PAM type: NRG; PAM sequence: GGG
  source 1..20: mol_type = other DNA
tttttgcagctgttgtaaaa

SEQ ID NO: 36949 - DNA, 20 bp, synthetic construct
  misc_feature 1..20: note = Description of Artificial Sequence: Synthetic oligonucleotide
  misc_feature 1..20: note = Target: SCN10A; (+) strand; PAM type: NRG; PAM sequence: GAG
  source 1..20: mol_type = other DNA
cagctgttgtaaaagggatt

SEQ ID NO: 36950 - DNA, 20 bp, synthetic construct
  misc_feature 1..20: note = Description of Artificial Sequence: Synthetic oligonucleotide
  misc_feature 1..20: note = Target: SCN10A; (+) strand; PAM type: NRG; PAM sequence: CAG
  source 1..20: mol_type = other DNA
tgagttcttgatttgttcct

SEQ ID NO: 36951 - DNA, 20 bp, synthetic construct
  misc_feature 1..20: note = Description of Artificial Sequence: Synthetic oligonucleotide
  misc_feature 1..20: note = Target: SCN10A; (+) strand; PAM type: NRG; PAM sequence: TGG
  source 1..20: mol_type = other DNA
tcttgatttgttcctcagct

SEQ ID NO: 36952 - DNA, 20 bp, synthetic construct
  misc_feature 1..20: note = Description of Artificial Sequence: Synthetic oligonucleotide
  misc_feature 1..20: note = Target: SCN10A; (+) strand; PAM type: NRG; PAM sequence: TGG
  source 1..20: mol_type = other DNA
ttgttcctcagcttggtttc

SEQ ID NO: 36953 - DNA, 20 bp, synthetic construct
  misc_feature 1..20: note = Description of Artificial Sequence: Synthetic oligonucleotide
  misc_feature 1..20: note = Target: SCN10A; (+) strand; PAM type: NRG; PAM sequence: TGG
  source 1..20: mol_type = other DNA
ttcctcagcttggtttctgg

SEQ ID NO: 36954 - DNA, 20 bp, synthetic construct
  misc_feature 1..20: note = Description of Artificial Sequence: Synthetic oligonucleotide
  misc_feature 1..20: note = Target: SCN10A; (+) strand; PAM type: NRG; PAM sequence: CAG
  source 1..20: mol_type = other DNA
gcttggtttctggtggtgta

SEQ ID NO: 36955 - DNA, 20 bp, synthetic construct
  misc_feature 1..20: note = Description of Artificial Sequence: Synthetic oligonucleotide
  misc_feature 1..20: note = Target: SCN10A; (+) strand; PAM type: NRG; PAM sequence: TAG
  source 1..20: mol_type = other DNA
tggtttctggtggtgtacag

SEQ ID NO: 36956 - DNA, 20 bp, synthetic construct
  misc_feature 1..20: note = Description of Artificial Sequence: Synthetic oligonucleotide
  misc_feature 1..20: note = Target: SCN10A; (+) strand; PAM type: NRG; PAM sequence: TAG
  source 1..20: mol_type = other DNA
actttactgaattcatttat

SEQ ID NO: 36957 - DNA, 20 bp, synthetic construct
  misc_feature 1..20: note = Description of Artificial Sequence: Synthetic oligonucleotide
  misc_feature 1..20: note = Target: SCN10A; (+) strand; PAM type: NRG; PAM sequence: TAG
  source 1..20: mol_type = other DNA
ctgaattcatttattagatc

SEQ ID NO: 36958 - DNA, 20 bp, synthetic construct
  misc_feature 1..20: note = Description of Artificial Sequence: Synthetic oligonucleotide
  misc_feature 1..20: note = Target: SCN10A; (+) strand; PAM type: NRG; PAM sequence: AGG
  source 1..20: mol_type = other DNA
tgaattcatttattagatct

SEQ ID NO: 36959 - DNA, 20 bp, synthetic construct
  misc_feature 1..20: note = Description of Artificial Sequence: Synthetic oligonucleotide
  misc_feature 1..20: note = Target: SCN10A; (+) strand; PAM type: NRG; PAM sequence: GAG
  source 1..20: mol_type = other DNA
aattcatttattagatctag

SEQ ID NO: 36960 - DNA, 20 bp, synthetic construct
  misc_feature 1..20: note = Description of Artificial Sequence: Synthetic oligonucleotide
  misc_feature 1..20: note = Target: SCN10A; (+) strand; PAM type: NRG; PAM sequence: TGG
  source 1..20: mol_type = other DNA
tattagatctaggagctttt

SEQ ID NO: 36961 - DNA, 20 bp, synthetic construct
  misc_feature 1..20: note = Description of Artificial Sequence: Synthetic oligonucleotide
  misc_feature 1..20: note = Target: SCN10A; (+) strand; PAM type: NRG; PAM sequence: GAG
  source 1..20: mol_type = other DNA
gatctaggagctttttggat

SEQ ID NO: 36962 - DNA, 20 bp, synthetic construct
  misc_feature 1..20: note = Description of Artificial Sequence: Synthetic oligonucleotide
  misc_feature 1..20: note = Target: SCN10A; (+) strand; PAM type: NRG; PAM sequence: TAG
  source 1..20: mol_type = other DNA
gagctttttggatgagtctt

SEQ ID NO: 36963 - DNA, 20 bp, synthetic construct
  misc_feature 1..20: note = Description of Artificial Sequence: Synthetic oligonucleotide
  misc_feature 1..20: note = Target: SCN10A; (+) strand; PAM type: NRG; PAM sequence: AGG
  source 1..20: mol_type = other DNA
agctttttggatgagtcttt

SEQ ID NO: 36964 - DNA, 20 bp, synthetic construct
  misc_feature 1..20: note = Description of Artificial Sequence: Synthetic oligonucleotide
  misc_feature 1..20: note = Target: SCN10A; (+) strand; PAM type: NRG; PAM sequence: GGG
  source 1..20: mol_type = other DNA
gctttttggatgagtcttta

SEQ ID NO: 36965 - DNA, 20 bp, synthetic construct
  misc_feature 1..20: note = Description of Artificial Sequence: Synthetic oligonucleotide
  misc_feature 1..20: note = Target: SCN10A; (+) strand; PAM type: NRG; PAM sequence: TAG
  source 1..20: mol_type = other DNA
gatgagtctttagggtttcc

SEQ ID NO: 36966 - DNA, 20 bp, synthetic construct
  misc_feature 1..20: note = Description of Artificial Sequence: Synthetic oligonucleotide
  misc_feature 1..20: note = Target: SCN10A; (+) strand; PAM type: NRG; PAM sequence: AGG
  source 1..20: mol_type = other DNA
atgagtctttagggtttcct

SEQ ID NO: 36967 - DNA, 20 bp, synthetic construct
  misc_feature 1..20: note = Description of Artificial Sequence: Synthetic oligonucleotide
  misc_feature 1..20: note = Target: SCN10A; (+) strand; PAM type: NRG; PAM sequence: TGG
  source 1..20: mol_type = other DNA
taggcatacgatcatatcat

SEQ ID NO: 36968 - DNA, 20 bp, synthetic construct
  misc_feature 1..20: note = Description of Artificial Sequence: Synthetic oligonucleotide
  misc_feature 1..20: note = Target: SCN10A; (+) strand; PAM type: NRG; PAM sequence: CAG
  source 1..20: mol_type = other DNA
acgatcatatcattggtgaa

SEQ ID NO: 36969 - DNA, 20 bp, synthetic construct
  misc_feature 1..20: note = Description of Artificial Sequence: Synthetic oligonucleotide
  misc_feature 1..20: note = Target: SCN10A; (+) strand; PAM type: NRG; PAM sequence: CAG
  source 1..20: mol_type = other DNA
atatcattggtgaacagcaa

SEQ ID NO: 36970 - DNA, 20 bp, synthetic construct
  misc_feature 1..20: note = Description of Artificial Sequence: Synthetic oligonucleotide
  misc_feature 1..20: note = Target: SCN10A; (+) strand; PAM type: NRG; PAM sequence: TGG
  source 1..20: mol_type = other DNA
tgacttcccctttactgatt

SEQ ID NO: 36971 - DNA, 20 bp, synthetic construct
  misc_feature 1..20: note = Description of Artificial Sequence: Synthetic oligonucleotide
  misc_feature 1..20: note = Target: SCN10A; (+) strand; PAM type: NRG; PAM sequence: TGG
  source 1..20: mol_type = other DNA
tttctcttgtctgattgctc

SEQ ID NO: 36972 - DNA, 20 bp, synthetic construct
  misc_feature 1..20: note = Description of Artificial Sequence: Synthetic oligonucleotide
  misc_feature 1..20: note = Target: SCN10A; (+) strand; PAM type: NRG; PAM sequence: TAG
  source 1..20: mol_type = other DNA
tcttgtctgattgctctggc

SEQ ID NO: 36973 - DNA, 20 bp, synthetic construct
  misc_feature 1..20: note = Description of Artificial Sequence: Synthetic oligonucleotide
  misc_feature 1..20: note = Target: SCN10A; (+) strand; PAM type: NRG; PAM sequence: AGG
  source 1..20: mol_type = other DNA
cttgtctgattgctctggct

SEQ ID NO: 36974 - DNA, 20 bp, synthetic construct
  misc_feature 1..20: note = Description of Artificial Sequence: Synthetic oligonucleotide
  misc_feature 1..20: note = Target: SCN10A; (+) strand; PAM type: NRG; PAM sequence: CAG
  source 1..20: mol_type = other DNA
attgctctggctaggacttc

SEQ ID NO: 36975 - DNA, 20 bp, synthetic construct
  misc_feature 1..20: note = Description of Artificial Sequence: Synthetic oligonucleotide
  misc_feature 1..20: note = Target: SCN10A; (+) strand; PAM type: NRG; PAM sequence: TGG
  source 1..20: mol_type = other DNA
taggacttccagtactatgt

SEQ ID NO: 36976 - DNA, 20 bp, synthetic construct
  misc_feature 1..20: note = Description of Artificial Sequence: Synthetic oligonucleotide
  misc_feature 1..20: note = Target: SCN10A; (+) strand; PAM type: NRG; PAM sequence: TAG
  source 1..20: mol_type = other DNA
acttccagtactatgttgga

SEQ ID NO: 36977 - DNA, 20 bp, synthetic construct
  misc_feature 1..20: note = Description of Artificial Sequence: Synthetic oligonucleotide
  misc_feature 1..20: note = Target: SCN10A; (+) strand; PAM type: NRG; PAM sequence: TGG
  source 1..20: mol_type = other DNA
agtactatgttggatagaaa

SEQ ID NO: 36978 - DNA, 20 bp, synthetic construct
  misc_feature 1..20: note = Description of Artificial Sequence: Synthetic oligonucleotide
  misc_feature 1..20: note = Target: SCN10A; (+) strand; PAM type: NRG; PAM sequence: AAG
  source 1..20: mol_type = other DNA
atgttggatagaaatggtga

SEQ ID NO: 36979 - DNA, 20 bp, synthetic construct
  misc_feature 1..20: note = Description of Artificial Sequence: Synthetic oligonucleotide
  misc_feature 1..20: note = Target: SCN10A; (+) strand; PAM type: NRG; PAM sequence: TGG
  source 1..20: mol_type = other DNA
ttggatagaaatggtgaaag

SEQ ID NO: 36980 - DNA, 20 bp, synthetic construct
  misc_feature 1..20: note = Description of Artificial Sequence: Synthetic oligonucleotide
  misc_feature 1..20: note = Target: SCN10A; (+) strand; PAM type: NRG; PAM sequence: GGG
  source 1..20: mol_type = other DNA
tggatagaaatggtgaaagt

SEQ ID NO: 36981 - DNA, 20 bp, synthetic construct
  misc_feature 1..20: note = Description of Artificial Sequence: Synthetic oligonucleotide
  misc_feature 1..20: note = Target: SCN10A; (+) strand; PAM type: NRG; PAM sequence: CAG
  source 1..20: mol_type = other DNA
tgggcatccttgtcttgttt

SEQ ID NO: 36982 - DNA, 20 bp, synthetic construct
  misc_feature 1..20: note = Description of Artificial Sequence: Synthetic oligonucleotide
  misc_feature 1..20: note = Target: SCN10A; (+) strand; PAM type: NRG; PAM sequence: CAG
  source 1..20: mol_type = other DNA
ccttgtcttgtttcagttct

SEQ ID NO: 36983 - DNA, 20 bp, synthetic construct
  misc_feature 1..20: note = Description of Artificial Sequence: Synthetic oligonucleotide
  misc_feature 1..20: note = Target: SCN10A; (+) strand; PAM type: NRG; PAM sequence: AGG
  source 1..20: mol_type = other DNA
cttgtcttgtttcagttctc

SEQ ID NO: 36984 - DNA, 20 bp, synthetic construct
  misc_feature 1..20: note = Description of Artificial Sequence: Synthetic oligonucleotide
  misc_feature 1..20: note = Target: SCN10A; (+) strand; PAM type: NRG; PAM sequence: GGG
  source 1..20: mol_type = other DNA
ttgtcttgtttcagttctca

SEQ ID NO: 36985 - DNA, 20 bp, synthetic construct
  misc_feature 1..20: note = Description of Artificial Sequence: Synthetic oligonucleotide
  misc_feature 1..20: note = Target: SCN10A; (+) strand; PAM type: NRG; PAM sequence: GGG
  source 1..20: mol_type = other DNA
tgtcttgtttcagttctcag

SEQ ID NO: 36986 - DNA, 20 bp, synthetic construct
  misc_feature 1..20: note = Description of Artificial Sequence: Synthetic oligonucleotide
  misc_feature 1..20: note = Target: SCN10A; (+) strand; PAM type: NRG; PAM sequence: GGG
  source 1..20: mol_type = other DNA
gtcttgtttcagttctcagg

SEQ ID NO: 36987 - DNA, 20 bp, synthetic construct
  misc_feature 1..20: note = Description of Artificial Sequence: Synthetic oligonucleotide
  misc_feature 1..20: note = Target: SCN10A; (+) strand; PAM type: NRG; PAM sequence: TGG
  source 1..20: mol_type = other DNA
gctttcaacttttccctgtt

SEQ ID NO: 36988 - DNA, 20 bp, synthetic construct
  misc_feature 1..20: note = Description of Artificial Sequence: Synthetic oligonucleotide
  misc_feature 1..20: note = Target: SCN10A; (+) strand; PAM type: NRG; PAM sequence: TGG
  source 1..20: mol_type = other DNA
ttccctgtttggtataatgt

SEQ ID NO: 36989 - DNA, 20 bp, synthetic construct
  misc_feature 1..20: note = Description of Artificial Sequence: Synthetic oligonucleotide
  misc_feature 1..20: note = Target: SCN10A; (+) strand; PAM type: NRG; PAM sequence: TGG
  source 1..20: mol_type = other DNA
gtttggtataatgttggctg

SEQ ID NO: 36990 - DNA, 20 bp, synthetic construct
  misc_feature 1..20: note = Description of Artificial Sequence: Synthetic oligonucleotide
  misc_feature 1..20: note = Target: SCN10A; (+) strand; PAM type: NRG; PAM sequence: TAG
  source 1..20: mol_type = other DNA
tgttggctgtggatttgtca

SEQ ID NO: 36991 - DNA, 20 bp, synthetic construct
  misc_feature 1..20: note = Description of Artificial Sequence: Synthetic oligonucleotide
  misc_feature 1..20: note = Target: SCN10A; (+) strand; PAM type: NRG; PAM sequence: TGG
  source 1..20: mol_type = other DNA
ggctgtggatttgtcataga

SEQ ID NO: 36992 - DNA, 20 bp, synthetic construct
  misc_feature 1..20: note = Description of Artificial Sequence: Synthetic oligonucleotide
  misc_feature 1..20: note = Target: SCN10A; (+) strand; PAM type: NRG; PAM sequence: TGG
  source 1..20: mol_type = other DNA
atagatggcttttattacct

SEQ ID NO: 36993 - DNA, 20 bp, synthetic construct
  misc_feature 1..20: note = Description of Artificial Sequence: Synthetic oligonucleotide
  misc_feature 1..20: note = Target: SCN10A; (+) strand; PAM type: NRG; PAM sequence: GAG
  source 1..20: mol_type = other DNA
agatggcttttattaccttg

SEQ ID NO: 36994 - DNA, 20 bp, synthetic construct
  misc_feature 1..20: note = Description of Artificial Sequence: Synthetic oligonucleotide
  misc_feature 1..20: note = Target: SCN10A; (+) strand; PAM type: NRG; PAM sequence: TGG
  source 1..20: mol_type = other DNA
atgtcccttctatgccaatt

SEQ ID NO: 36995 - DNA, 20 bp, synthetic construct
  misc_feature 1..20: note = Description of Artificial Sequence: Synthetic oligonucleotide
  misc_feature 1..20: note = Target: SCN10A; (+) strand; PAM type: NRG; PAM sequence: GAG
  source 1..20: mol_type = other DNA
ccttctatgccaatttggtt

SEQ ID NO: 36996 - DNA, 20 bp, synthetic construct
  misc_feature 1..20: note = Description of Artificial Sequence: Synthetic oligonucleotide
  misc_feature 1..20: note = Target: SCN10A; (+) strand; PAM type: NRG; PAM sequence: AGG
  source 1..20: mol_type = other DNA
cttctatgccaatttggttg

SEQ ID NO: 36997 - DNA, 20 bp, synthetic construct
  misc_feature 1..20: note = Description of Artificial Sequence: Synthetic oligonucleotide
  misc_feature 1..20: note = Target: SCN10A; (+) strand; PAM type: NRG; PAM sequence: GGG
  source 1..20: mol_type = other DNA
ttctatgccaatttggttga

SEQ ID NO: 36998 - DNA, 20 bp, synthetic construct
  misc_feature 1..20: note = Description of Artificial Sequence: Synthetic oligonucleotide
  misc_feature 1..20: note = Target: SCN10A; (+) strand; PAM type: NRG; PAM sequence: TGG
  source 1..20: mol_type = other DNA
gttgagggttttaatcataa

SEQ ID NO: 36999 - DNA, 20 bp, synthetic construct
  misc_feature 1..20: note = Description of Artificial Sequence: Synthetic oligonucleotide
  misc_feature 1..20: note = Target: SCN10A; (+) strand; PAM type: NRG; PAM sequence: GGG
  source 1..20: mol_type = other DNA
ttgagggttttaatcataat

SEQ ID NO: 37000 - DNA, 20 bp, synthetic construct
  misc_feature 1..20: note = Description of Artificial Sequence: Synthetic oligonucleotide
  misc_feature 1..20: note = Target: SCN10A; (+) strand; PAM type: NRG; PAM sequence: TGG
  source 1..20: mol_type = other DNA
ttttaatcataatgggatgc

SEQ ID NO: 37001 - DNA, 20 bp, synthetic construct
  misc_feature 1..20: note = Description of Artificial Sequence: Synthetic oligonucleotide
  misc_feature 1..20: note = Target: SCN10A; (+) strand; PAM type: NRG; PAM sequence: GAG
  source 1..20: mol_type = other DNA
atgcttttcctgcacctatt

SEQ ID NO: 37002 - DNA, 20 bp, synthetic construct
  misc_feature 1..20: note = Description of Artificial Sequence: Synthetic oligonucleotide
  misc_feature 1..20: note = Target: SCN10A; (+) strand; PAM type: NRG; PAM sequence: CAG
  source 1..20: mol_type = other DNA
aattctgtttatgtgacgtg

SEQ ID NO: 37003 - DNA, 20 bp, synthetic construct
  misc_feature 1..20: note = Description of Artificial Sequence: Synthetic oligonucleotide
  misc_feature 1..20: note = Target: SCN10A; (+) strand; PAM type: NRG; PAM sequence: TGG
  source 1..20: mol_type = other DNA
ttaaatcatccctacctccc

SEQ ID NO: 37004 - DNA, 20 bp, synthetic construct
  misc_feature 1..20: note = Description of Artificial Sequence: Synthetic oligonucleotide
  misc_feature 1..20: note = Target: SCN10A; (+) strand; PAM type: NRG; PAM sequence: TGG
  source 1..20: mol_type = other DNA
gtatgaaacccccttgatca

SEQ ID NO: 37005 - DNA, 20 bp, synthetic construct
  misc_feature 1..20: note = Description of Artificial Sequence: Synthetic oligonucleotide
  misc_feature 1..20: note = Target: SCN10A; (+) strand; PAM type: NRG; PAM sequence: TGG
  source 1..20: mol_type = other DNA
gatcatggtgtgttatcttt

SEQ ID NO: 37006 - DNA, 20 bp, synthetic construct
  misc_feature 1..20: note = Description of Artificial Sequence: Synthetic oligonucleotide
  misc_feature 1..20: note = Target: SCN10A; (+) strand; PAM type: NRG; PAM sequence: TGG
  source 1..20: mol_type = other DNA
gttatcttttggatatgtgt

SEQ ID NO: 37007 - DNA, 20 bp, synthetic construct
  misc_feature 1..20: note = Description of Artificial Sequence: Synthetic oligonucleotide
  misc_feature 1..20: note = Target: SCN10A; (+) strand; PAM type: NRG; PAM sequence: TAG
  source 1..20: mol_type = other DNA
ggatatgtgttggattcaat

SEQ ID NO: 37008 - DNA, 20 bp, synthetic construct
  misc_feature 1..20: note = Description of Artificial Sequence: Synthetic oligonucleotide
  misc_feature 1..20: note = Target: SCN10A; (+) strand; PAM type: NRG; PAM sequence: TAG
  source 1..20: mol_type = other DNA
atgtgttggattcaattagc

SEQ ID NO: 37009 - DNA, 20 bp, synthetic construct
  misc_feature 1..20: note = Description of Artificial Sequence: Synthetic oligonucleotide
  misc_feature 1..20: note = Target: SCN10A; (+) strand; PAM type: NRG; PAM sequence: GAG
  source 1..20: mol_type = other DNA
caattagctagcattttgtt

SEQ ID NO: 37010 - DNA, 20 bp, synthetic construct
  misc_feature 1..20: note = Description of Artificial Sequence: Synthetic oligonucleotide
  misc_feature 1..20: note = Target: SCN10A; (+) strand; PAM type: NRG; PAM sequence: AGG
  source 1..20: mol_type = other DNA
aattagctagcattttgttg

SEQ ID NO: 37011 - DNA, 20 bp, synthetic construct
  misc_feature 1..20: note = Description of Artificial Sequence: Synthetic oligonucleotide
  misc_feature 1..20: note = Target: SCN10A; (+) strand; PAM type: NRG; PAM sequence: CAG
  source 1..20: mol_type = other DNA
atttttgcatctatgttcat

SEQ ID NO: 37012 - DNA, 20 bp, synthetic construct
  misc_feature 1..20: note = Description of Artificial Sequence: Synthetic oligonucleotide
  misc_feature 1..20: note = Target: SCN10A; (+) strand; PAM type: NRG; PAM sequence: AGG
  source 1..20: mol_type = other DNA
tttttgcatctatgttcatc

SEQ ID NO: 37013 - DNA, 20 bp, synthetic construct
  misc_feature 1..20: note = Description of Artificial Sequence: Synthetic oligonucleotide
  misc_feature 1..20: note = Target: SCN10A; (+) strand; PAM type: NRG; PAM sequence: GGG
  source 1..20: mol_type = other DNA
ttttgcatctatgttcatca

SEQ ID NO: 37014 - DNA, 20 bp, synthetic construct
  misc_feature 1..20: note = Description of Artificial Sequence: Synthetic oligonucleotide
  misc_feature 1..20: note = Target: SCN10A; (+) strand; PAM type: NRG; PAM sequence: TAG
  source 1..20: mol_type = other DNA
ttcatcagggatattgtctg

SEQ ID NO: 37015 - DNA, 20 bp, synthetic construct
  misc_feature 1..20: note = Description of Artificial Sequence: Synthetic oligonucleotide
  misc_feature 1..20: note = Target: SCN10A; (+) strand; PAM type: NRG; PAM sequence: AAG
  source 1..20: mol_type = other DNA
tgtctgtagttcttttttaa

SEQ ID NO: 37016 - DNA, 20 bp, synthetic construct
  misc_feature 1..20: note = Description of Artificial Sequence: Synthetic oligonucleotide
  misc_feature 1..20: note = Target: SCN10A; (+) strand; PAM type: NRG; PAM sequence: TGG
  source 1..20: mol_type = other DNA
cttttttaaaagtccttttc

SEQ ID NO: 37017 - DNA, 20 bp, synthetic construct
  misc_feature 1..20: note = Description of Artificial Sequence: Synthetic oligonucleotide
  misc_feature 1..20: note = Target: SCN10A; (+) strand; PAM type: NRG; PAM sequence: TGG
  source 1..20: mol_type = other DNA
taaaagtccttttctggttt

SEQ ID NO: 37018 - DNA, 20 bp, synthetic construct
  misc_feature 1..20: note = Description of Artificial Sequence: Synthetic oligonucleotide
  misc_feature 1..20: note = Target: SCN10A; (+) strand; PAM type: NRG; PAM sequence: TAG
  source 1..20: mol_type = other DNA
tccttttctggttttggtat

SEQ ID NO: 37019 - DNA, 20 bp, synthetic construct
  misc_feature 1..20: note = Description of Artificial Sequence: Synthetic oligonucleotide
  misc_feature 1..20: note = Target: SCN10A; (+) strand; PAM type: NRG; PAM sequence: AGG
  source 1..20: mol_type = other DNA
ccttttctggttttggtatt

SEQ ID NO: 37020 - DNA, 20 bp, synthetic construct
  misc_feature 1..20: note = Description of Artificial Sequence: Synthetic oligonucleotide
  misc_feature 1..20: note = Target: SCN10A; (+) strand; PAM type: NRG; PAM sequence: GGG
  source 1..20: mol_type = other DNA
cttttctggttttggtatta

SEQ ID NO: 37021 - DNA, 20 bp, synthetic construct
  misc_feature 1..20: note = Description of Artificial Sequence: Synthetic oligonucleotide
  misc_feature 1..20: note = Target: SCN10A; (+) strand; PAM type: NRG; PAM sequence: TGG
  source 1..20: mol_type = other DNA
ttttggtattagggtgatac

SEQ ID NO: 37022 - DNA, 20 bp, synthetic construct
  misc_feature 1..20: note = Description of Artificial Sequence: Synthetic oligonucleotide
  misc_feature 1..20: note = Target: SCN10A; (+) strand; PAM type: NRG; PAM sequence: TAG
  source 1..20: mol_type = other DNA
actggcttcataaaatgatt

SEQ ID NO: 37023 - DNA, 20 bp, synthetic construct
  misc_feature 1..20: note = Description of Artificial Sequence: Synthetic oligonucleotide
  misc_feature 1..20: note = Target: SCN10A; (+) strand; PAM type: NRG; PAM sequence: AGG
  source 1..20: mol_type = other DNA
ctggcttcataaaatgattt

SEQ ID NO: 37024 - DNA, 20 bp, synthetic construct
  misc_feature 1..20: note = Description of Artificial Sequence: Synthetic oligonucleotide
  misc_feature 1..20: note = Target: SCN10A; (+) strand; PAM type: NRG; PAM sequence: GAG
  source 1..20: mol_type = other DNA
ggcttcataaaatgatttag

SEQ ID NO: 37025 - DNA, 20 bp, synthetic construct
  misc_feature 1..20: note = Description of Artificial Sequence: Synthetic oligonucleotide
  misc_feature 1..20: note = Target: SCN10A; (+) strand; PAM type: NRG; PAM sequence: AGG
  source 1..20: mol_type = other DNA
gcttcataaaatgatttagg

SEQ ID NO: 37026 - DNA, 20 bp, synthetic construct
  misc_feature 1..20: note = Description of Artificial Sequence: Synthetic oligonucleotide
  misc_feature 1..20: note = Target: SCN10A; (+) strand; PAM type: NRG; PAM sequence: TGG
  source 1..20: mol_type = other DNA
ttccctctttctgcatcttt

SEQ ID NO: 37027 - DNA, 20 bp, synthetic construct
  misc_feature 1..20: note = Description of Artificial Sequence: Synthetic oligonucleotide
  misc_feature 1..20: note = Target: SCN10A; (+) strand; PAM type: NRG; PAM sequence: TAG
  source 1..20: mol_type = other DNA
tctttctgcatcttttggaa

SEQ ID NO: 37028 - DNA, 20 bp, synthetic construct
  misc_feature 1..20: note = Description of Artificial Sequence: Synthetic oligonucleotide
  misc_feature 1..20: note = Target: SCN10A; (+) strand; PAM type: NRG; PAM sequence: TGG
  source 1..20: mol_type = other DNA
tggaatagtttcaataaaat

SEQ ID NO: 37029 - DNA, 20 bp, synthetic construct
  misc_feature 1..20: note = Description of Artificial Sequence: Synthetic oligonucleotide
  misc_feature 1..20: note = Target: SCN10A; (+) strand; PAM type: NRG; PAM sequence: TAG
  source 1..20: mol_type = other DNA
attcttctttgaatgtctga

SEQ ID NO: 37030 - DNA, 20 bp, synthetic construct
  misc_feature 1..20: note = Description of Artificial Sequence: Synthetic oligonucleotide
  misc_feature 1..20: note = Target: SCN10A; (+) strand; PAM type: NRG; PAM sequence: CAG
  source 1..20: mol_type = other DNA
tttgaatgtctgatagaatt

SEQ ID NO: 37031 - DNA, 20 bp, synthetic construct
  misc_feature 1..20: note = Description of Artificial Sequence: Synthetic oligonucleotide
  misc_feature 1..20: note = Target: SCN10A; (+) strand; PAM type: NRG; PAM sequence: CAG
  source 1..20: mol_type = other DNA
atagaattcagctgtgaatc

SEQ ID NO: 37032 - DNA, 20 bp, synthetic construct
  misc_feature 1..20: note = Description of Artificial Sequence: Synthetic oligonucleotide
  misc_feature 1..20: note = Target: SCN10A; (+) strand; PAM type: NRG; PAM sequence: TGG
  source 1..20: mol_type = other DNA
ctgtgaatccagtctgctcc

SEQ ID NO: 37033 - DNA, 20 bp, synthetic construct
  misc_feature 1..20: note = Description of Artificial Sequence: Synthetic oligonucleotide
  misc_feature 1..20: note = Target: SCN10A; (+) strand; PAM type: NRG; PAM sequence: TGG
  source 1..20: mol_type = other DNA
gctcctggactttttttcct

SEQ ID NO: 37034 - DNA, 20 bp, synthetic construct
  misc_feature 1..20: note = Description of Artificial Sequence: Synthetic oligonucleotide
  misc_feature 1..20: note = Target: SCN10A; (+) strand; PAM type: NRG; PAM sequence: TGG
  source 1..20: mol_type = other DNA
tcaatctcgctacttgttat

SEQ ID NO: 37035 - DNA, 20 bp, synthetic construct
  misc_feature 1..20: note = Description of Artificial Sequence: Synthetic oligonucleotide
  misc_feature 1..20: note = Target: SCN10A; (+) strand; PAM type: NRG; PAM sequence: TAG
  source 1..20: mol_type = other DNA
ctacttgttattggtctgtt

SEQ ID NO: 37036 - DNA, 20 bp, synthetic construct
  misc_feature 1..20: note = Description of Artificial Sequence: Synthetic oligonucleotide
  misc_feature 1..20: note = Target: SCN10A; (+) strand; PAM type: NRG; PAM sequence: GAG
  source 1..20: mol_type = other DNA
acttgttattggtctgttta

SEQ ID NO: 37037 - DNA, 20 bp, synthetic construct
  misc_feature 1..20: note = Description of Artificial Sequence: Synthetic oligonucleotide
  misc_feature 1..20: note = Target: SCN10A; (+) strand; PAM type: NRG; PAM sequence: AAG
  source 1..20: mol_type = other DNA
attactttctgatttaatct

SEQ ID NO: 37038 - DNA, 20 bp, synthetic construct
  misc_feature 1..20: note = Description of Artificial Sequence: Synthetic oligonucleotide
  misc_feature 1..20: note = Target: SCN10A; (+) strand; PAM type: NRG; PAM sequence: CAG
  source 1..20: mol_type = other DNA
ctttctgatttaatctaaga

SEQ ID NO: 37039 - DNA, 20 bp, synthetic construct
  misc_feature 1..20: note = Description of Artificial Sequence: Synthetic oligonucleotide
  misc_feature 1..20: note = Target: SCN10A; (+) strand; PAM type: NRG; PAM sequence: CAG
  source 1..20: mol_type = other DNA
ctaagacagttgtatatttc

SEQ ID NO: 37040 - DNA, 20 bp, synthetic construct
  misc_feature 1..20: note = Description of Artificial Sequence: Synthetic oligonucleotide
  misc_feature 1..20: note = Target: SCN10A; (+) strand; PAM type: NRG; PAM sequence: AGG
  source 1..20: mol_type = other DNA
taagacagttgtatatttcc

SEQ ID NO: 37041 - DNA, 20 bp, synthetic construct
  misc_feature 1..20: note = Description of Artificial Sequence: Synthetic oligonucleotide
  misc_feature 1..20: note = Target: SCN10A; (+) strand; PAM type: NRG; PAM sequence: TAG
  source 1..20: mol_type = other DNA
ttcatctcctctaaattttc

SEQ ID NO: 37042 - DNA, 20 bp, synthetic construct
  misc_feature 1..20: note = Description of Artificial Sequence: Synthetic oligonucleotide
  misc_feature 1..20: note = Target: SCN10A; (+) strand; PAM type: NRG; PAM sequence: AAG
  source 1..20: mol_type = other DNA
ttttctagtttgtgcaaata

SEQ ID NO: 37043 - DNA, 20 bp, synthetic construct
  misc_feature 1..20: note = Description of Artificial Sequence: Synthetic oligonucleotide
  misc_feature 1..20: note = Target: SCN10A; (+) strand; PAM type: NRG; PAM sequence: AGG
  source 1..20: mol_type = other DNA
tttctagtttgtgcaaataa

SEQ ID NO: 37044 - DNA, 20 bp, synthetic construct
  misc_feature 1..20: note = Description of Artificial Sequence: Synthetic oligonucleotide
  misc_feature 1..20: note = Target: SCN10A; (+) strand; PAM type: NRG; PAM sequence: TAG
  source 1..20: mol_type = other DNA
tgtgcaaataaaggtgttca

SEQ ID NO: 37045 - DNA, 20 bp, synthetic construct
  misc_feature 1..20: note = Description of Artificial Sequence: Synthetic oligonucleotide
  misc_feature 1..20: note = Target: SCN10A; (+) strand; PAM type: NRG; PAM sequence: TAG
  source 1..20: mol_type = other DNA
gcaaataaaggtgttcatag

SEQ ID NO: 37046 - DNA, 20 bp, synthetic construct
  misc_feature 1..20: note = Description of Artificial Sequence: Synthetic oligonucleotide
  misc_feature 1..20: note = Target: SCN10A; (+) strand; PAM type: NRG; PAM sequence: TGG
  source 1..20: mol_type = other DNA
attttttttttgtatttctg

SEQ ID NO: 37047 - DNA, 20 bp, synthetic construct
  misc_feature 1..20: note = Description of Artificial Sequence: Synthetic oligonucleotide
  misc_feature 1..20: note = Target: SCN10A; (+) strand; PAM type: NRG; PAM sequence: CAG
  source 1..20: mol_type = other DNA
tttttgtatttctgtggtat

SEQ ID NO: 37048 - DNA, 20 bp, synthetic construct
  misc_feature 1..20: note = Description of Artificial Sequence: Synthetic oligonucleotide
  misc_feature 1..20: note = Target: SCN10A; (+) strand; PAM type: NRG; PAM sequence: GAG
  source 1..20: mol_type = other DNA
ctcccattttatttctaatt

SEQ ID NO: 37049 - DNA, 20 bp, synthetic construct
  misc_feature 1..20: note = Description of Artificial Sequence: Synthetic oligonucleotide
  misc_feature 1..20: note = Target: SCN10A; (+) strand; PAM type: NRG; PAM sequence: TGG
  source 1..20: mol_type = other DNA
tatttctaattgagcttatt

SEQ ID NO: 37050 - DNA, 20 bp, synthetic construct
  misc_feature 1..20: note = Description of Artificial Sequence: Synthetic oligonucleotide
  misc_feature 1..20: note = Target: SCN10A; (+) strand; PAM type: NRG; PAM sequence: TGG
  source 1..20: mol_type = other DNA
gatcttctctcttcttttct

SEQ ID NO: 37051 - DNA, 20 bp, synthetic construct
  misc_feature 1..20: note = Description of Artificial Sequence: Synthetic oligonucleotide
  misc_feature 1..20: note = Target: SCN10A; (+) strand; PAM type: NRG; PAM sequence: TGG
  source 1..20: mol_type = other DNA
ttcttggttaatcttgccaa

SEQ ID NO: 37052 - DNA, 20 bp, synthetic construct
  misc_feature 1..20: note = Description of Artificial Sequence: Synthetic oligonucleotide
  misc_feature 1..20: note = Target: SCN10A; (+) strand; PAM type: NRG; PAM sequence: AAG
  source 1..20: mol_type = other DNA
caattttctatatcttttta

SEQ ID NO: 37053 - DNA, 20 bp, synthetic construct
  misc_feature 1..20: note = Description of Artificial Sequence: Synthetic oligonucleotide
  misc_feature 1..20: note = Target: SCN10A; (+) strand; PAM type: NRG; PAM sequence: TAG
  source 1..20: mol_type = other DNA
atttttatttgaatttcatt

SEQ ID NO: 37054 - DNA, 20 bp, synthetic construct
  misc_feature 1..20: note = Description of Artificial Sequence: Synthetic oligonucleotide
  misc_feature 1..20: note = Target: SCN10A; (+) strand; PAM type: NRG; PAM sequence: TGG
  source 1..20: mol_type = other DNA
gttattccttttcttctgct

SEQ ID NO: 37055 - DNA, 20 bp, synthetic construct
  misc_feature 1..20: note = Description of Artificial Sequence: Synthetic oligonucleotide
  misc_feature 1..20: note = Target: SCN10A; (+) strand; PAM type: NRG; PAM sequence: TGG
  source 1..20: mol_type = other DNA
tccttttcttctgcttggtt

SEQ ID NO: 37056 - DNA, 20 bp, synthetic construct
  misc_feature 1..20: note = Description of Artificial Sequence: Synthetic oligonucleotide
  misc_feature 1..20: note = Target: SCN10A; (+) strand; PAM type: NRG; PAM sequence: GGG
  source 1..20: mol_type = other DNA
ccttttcttctgcttggttt

SEQ ID NO: 37057 - DNA, 20 bp, synthetic construct
  misc_feature 1..20: note = Description of Artificial Sequence: Synthetic oligonucleotide
  misc_feature 1..20: note = Target: SCN10A; (+) strand; PAM type: NRG; PAM sequence: GAG
  source 1..20: mol_type = other DNA
tcttgtttctctaattcctt

SEQ ID NO: 37058 - DNA, 20 bp, synthetic construct
  misc_feature 1..20: note = Description of Artificial Sequence: Synthetic oligonucleotide
  misc_feature 1..20: note = Target: SCN10A; (+) strand; PAM type: NRG; PAM sequence: AGG
  source 1..20: mol_type = other DNA
cttgtttctctaattccttg

SEQ ID NO: 37059 - DNA, 20 bp, synthetic construct
  misc_feature 1..20: note = Description of Artificial Sequence: Synthetic oligonucleotide
  misc_feature 1..20: note = Target: SCN10A; (+) strand; PAM type: NRG; PAM sequence: TAG
  source 1..20: mol_type = other DNA
aattccttgaggtgtgacct

SEQ ID NO: 37060 - DNA, 20 bp, synthetic construct
  misc_feature 1..20: note = Description of Artificial Sequence: Synthetic oligonucleotide
  misc_feature 1..20: note = Target: SCN10A; (+) strand; PAM type: NRG; PAM sequence: TAG
  source 1..20: mol_type = other DNA
ctctttcatactttttgatg

SEQ ID NO: 37061 - DNA, 20 bp, synthetic construct
  misc_feature 1..20: note = Description of Artificial Sequence: Synthetic oligonucleotide
  misc_feature 1..20: note = Target: SCN10A; (+) strand; PAM type: NRG; PAM sequence: AGG
  source 1..20: mol_type = other DNA
tctttcatactttttgatgt

SEQ ID NO: 37062 - DNA, 20 bp, synthetic construct
  misc_feature 1..20: note = Description of Artificial Sequence: Synthetic oligonucleotide
  misc_feature 1..20: note = Target: SCN10A; (+) strand; PAM type: NRG; PAM sequence: GAG
  source 1..20: mol_type = other DNA
atgtaggtatttaatgctat

SEQ ID NO: 37063 - DNA, 20 bp, synthetic construct
  misc_feature 1..20: note = Description of Artificial Sequence: Synthetic oligonucleotide
  misc_feature 1..20: note = Target: SCN10A; (+) strand; PAM type: NRG; PAM sequence: TAG
  source 1..20: mol_type = other DNA
aatgctatgagctttcctct

SEQ ID NO: 37064 - DNA, 20 bp, synthetic construct
  misc_feature 1..20: note = Description of Artificial Sequence: Synthetic oligonucleotide
  misc_feature 1..20: note = Target: SCN10A; (+) strand; PAM type: NRG; PAM sequence: TAG
  source 1..20: mol_type = other DNA
ctttcctcttagcactgctt

SEQ ID NO: 37065 - DNA, 20 bp, synthetic construct
  misc_feature 1..20: note = Description of Artificial Sequence: Synthetic oligonucleotide
  misc_feature 1..20: note = Target: SCN10A; (+) strand; PAM type: NRG; PAM sequence: CAG
  source 1..20: mol_type = other DNA
gcactgctttagctgtatcc

SEQ ID NO: 37066 - DNA, 20 bp, synthetic construct
  misc_feature 1..20: note = Description of Artificial Sequence: Synthetic oligonucleotide
  misc_feature 1..20: note = Target: SCN10A; (+) strand; PAM type: NRG; PAM sequence: GAG
  source 1..20: mol_type = other DNA
actgctttagctgtatccca

SEQ ID NO: 37067 - DNA, 20 bp, synthetic construct
  misc_feature 1..20: note = Description of Artificial Sequence: Synthetic oligonucleotide
  misc_feature 1..20: note = Target: SCN10A; (+) strand; PAM type: NRG; PAM sequence: AGG
  source 1..20: mol_type = other DNA
ctgctttagctgtatcccag

SEQ ID NO: 37068 - DNA, 20 bp, synthetic construct
  misc_feature 1..20: note = Description of Artificial Sequence: Synthetic oligonucleotide
  misc_feature 1..20: note = Target: SCN10A; (+) strand; PAM type: NRG; PAM sequence: AAG
  source 1..20: mol_type = other DNA
tgtatcccagaggttttgat

SEQ ID NO: 37069 - DNA, 20 bp, synthetic construct
  misc_feature 1..20: note = Description of Artificial Sequence: Synthetic oligonucleotide
  misc_feature 1..20: note = Target: SCN10A; (+) strand; PAM type: NRG; PAM sequence: CAG
  source 1..20: mol_type = other DNA
gttgtgtgactattatcatt

SEQ ID NO: 37070 - DNA, 20 bp, synthetic construct
  misc_feature 1..20: note = Description of Artificial Sequence: Synthetic oligonucleotide
  misc_feature 1..20: note = Target: SCN10A; (+) strand; PAM type: NRG; PAM sequence: AAG
  source 1..20: mol_type = other DNA
ttgatttcattgttgaccca

SEQ ID NO: 37071 - DNA, 20 bp, synthetic construct
  misc_feature 1..20: note = Description of Artificial Sequence: Synthetic oligonucleotide
  misc_feature 1..20: note = Target: SCN10A; (+) strand; PAM type: NRG; PAM sequence: AAG
  source 1..20: mol_type = other DNA
tgttgacccaaagatcattc

SEQ ID NO: 37072 - DNA, 20 bp, synthetic construct
  misc_feature 1..20: note = Description of Artificial Sequence: Synthetic oligonucleotide
  misc_feature 1..20: note = Target: SCN10A; (+) strand; PAM type: NRG; PAM sequence: GAG
  source 1..20: mol_type = other DNA
ttgacccaaagatcattcaa

SEQ ID NO: 37073 - DNA, 20 bp, synthetic construct
  misc_feature 1..20: note = Description of Artificial Sequence: Synthetic oligonucleotide
  misc_feature 1..20: note = Target: SCN10A; (+) strand; PAM type: NRG; PAM sequence: CAG
  source 1..20: mol_type = other DNA
acccaaagatcattcaagag

SEQ ID NO: 37074 - DNA, 20 bp, synthetic construct
  misc_feature 1..20: note = Description of Artificial Sequence: Synthetic oligonucleotide
  misc_feature 1..20: note = Target: SCN10A; (+) strand; PAM type: NRG; PAM sequence: TAG
  source 1..20: mol_type = other DNA
tcattcaagagcagattgtt

SEQ ID NO: 37075 - DNA, 20 bp, synthetic construct
  misc_feature 1..20: note = Description of Artificial Sequence: Synthetic oligonucleotide
  misc_feature 1..20: note = Target: SCN10A; (+) strand; PAM type: NRG; PAM sequence: TAG
  source 1..20: mol_type = other DNA
ttagttttcatgtatttgta

SEQ ID NO: 37076 - DNA, 20 bp, synthetic construct
  misc_feature 1..20: note = Description of Artificial Sequence: Synthetic oligonucleotide
  misc_feature 1..20: note = Target: SCN10A; (+) strand; PAM type: NRG; PAM sequence: GAG
  source 1..20: mol_type = other DNA
tcatgtatttgtatagtttt

SEQ ID NO: 37077 - DNA, 20 bp, synthetic construct
  misc_feature 1..20: note = Description of Artificial Sequence: Synthetic oligonucleotide
  misc_feature 1..20: note = Target: SCN10A; (+) strand; PAM type: NRG; PAM sequence: AGG
  source 1..20: mol_type = other DNA
catgtatttgtatagttttg

SEQ ID NO: 37078 - DNA, 20 bp, synthetic construct
  misc_feature 1..20: note = Description of Artificial Sequence: Synthetic oligonucleotide
  misc_feature 1..20: note = Target: SCN10A; (+) strand; PAM type: NRG; PAM sequence: GGG
  source 1..20: mol_type = other DNA
atgtatttgtatagttttga

SEQ ID NO: 37079 - DNA, 20 bp, synthetic construct
  misc_feature 1..20: note = Description of Artificial Sequence: Synthetic oligonucleotide
  misc_feature 1..20: note = Target: SCN10A; (+) strand; PAM type: NRG; PAM sequence: TGG
  source 1..20: mol_type = other DNA
atagttttgagggtttcttt

SEQ ID NO: 37080 - DNA, 20 bp, synthetic construct
  misc_feature 1..20: note = Description of Artificial Sequence: Synthetic oligonucleotide
  misc_feature 1..20: note = Target: SCN10A; (+) strand; PAM type: NRG; PAM sequence: GAG
  source 1..20: mol_type = other DNA
agttttgagggtttcttttg

SEQ ID NO: 37081 - DNA, 20 bp, synthetic construct
  misc_feature 1..20: note = Description of Artificial Sequence: Synthetic oligonucleotide
  misc_feature 1..20: note = Target: SCN10A; (+) strand; PAM type: NRG; PAM sequence: GAG
  source 1..20: mol_type = other DNA
tttcttttggagttaactcc

SEQ ID NO: 37082 - DNA, 20 bp, synthetic construct
  misc_feature 1..20: note = Description of Artificial Sequence: Synthetic oligonucleotide
  misc_feature 1..20: note = Target: SCN10A; (+) strand; PAM type: NRG; PAM sequence: AGG
  source 1..20: mol_type = other DNA
ttcttttggagttaactccg

SEQ ID NO: 37083 - DNA, 20 bp, synthetic construct
  misc_feature 1..20: note = Description of Artificial Sequence: Synthetic oligonucleotide
  misc_feature 1..20: note = Target: SCN10A; (+) strand; PAM type: NRG; PAM sequence: GAG
  source 1..20: mol_type = other DNA
ggtttattcgactgtgctct

SEQ ID NO: 37084 - DNA, 20 bp, synthetic construct
  misc_feature 1..20: note = Description of Artificial Sequence: Synthetic oligonucleotide
  misc_feature 1..20: note = Target: SCN10A; (+) strand; PAM type: NRG; PAM sequence: GAG
  source 1..20: mol_type = other DNA
tttattcgactgtgctctga

SEQ ID NO: 37085 - DNA, 20 bp, synthetic construct
  misc_feature 1..20: note = Description of Artificial Sequence: Synthetic oligonucleotide
  misc_feature 1..20: note = Target: SCN10A; (+) strand; PAM type: NRG; PAM sequence: AGG
  source 1..20: mol_type = other DNA
ttattcgactgtgctctgag

SEQ ID NO: 37086 - DNA, 20 bp, synthetic construct
  misc_feature 1..20: note = Description of Artificial Sequence: Synthetic oligonucleotide
  misc_feature 1..20: note = Target: SCN10A; (+) strand; PAM type: NRG; PAM sequence: GAG
  source 1..20: mol_type = other DNA
tctattttcttaaatttatt

SEQ ID NO: 37087 - DNA, 20 bp, synthetic construct
  misc_feature 1..20: note = Description of Artificial Sequence: Synthetic oligonucleotide
  misc_feature 1..20: note = Target: SCN10A; (+) strand; PAM type: NRG; PAM sequence: TGG
  source 1..20: mol_type = other DNA
ttgttatgttatctatcacg

SEQ ID NO: 37088 - DNA, 20 bp, synthetic construct
  misc_feature 1..20: note = Description of Artificial Sequence: Synthetic oligonucleotide
  misc_feature 1..20: note = Target: SCN10A; (+) strand; PAM type: NRG; PAM sequence: TAG
  source 1..20: mol_type = other DNA
atctatcacgtggtctatct

SEQ ID NO: 37089 - DNA, 20 bp, synthetic construct
  misc_feature 1..20: note = Description of Artificial Sequence: Synthetic oligonucleotide
  misc_feature 1..20: note = Target: SCN10A; (+) strand; PAM type: NRG; PAM sequence: GAG
  source 1..20: mol_type = other DNA
ctatcacgtggtctatctta

SEQ ID NO: 37090 - DNA, 20 bp, synthetic construct
  misc_feature 1..20: note = Description of Artificial Sequence: Synthetic oligonucleotide
  misc_feature 1..20: note = Target: SCN10A; (+) strand; PAM type: NRG; PAM sequence: AAG
  source 1..20: mol_type = other DNA
atattccatgtgctgatgaa

SEQ ID NO: 37091 - DNA, 20 bp, synthetic construct
  misc_feature 1..20: note = Description of Artificial Sequence: Synthetic oligonucleotide
  misc_feature 1..20: note = Target: SCN10A; (+) strand; PAM type: NRG; PAM sequence: CAG
  source 1..20: mol_type = other DNA
tgaaaagaatgtatattctg

SEQ ID NO: 37092 - DNA, 20 bp, synthetic construct
  misc_feature 1..20: note = Description of Artificial Sequence: Synthetic oligonucleotide
  misc_feature 1..20: note = Target: SCN10A; (+) strand; PAM type: NRG; PAM sequence: TGG
  source 1..20: mol_type = other DNA
atgtatattctgcagttgtt

SEQ ID NO: 37093 - DNA, 20 bp, synthetic construct
  misc_feature 1..20: note = Description of Artificial Sequence: Synthetic oligonucleotide
  misc_feature 1..20: note = Target: SCN10A; (+) strand; PAM type: NRG; PAM sequence: TAG
  source 1..20: mol_type = other DNA
tatattctgcagttgtttgg

SEQ ID NO: 37094 - DNA, 20 bp, synthetic construct
  misc_feature 1..20: note = Description of Artificial Sequence: Synthetic oligonucleotide
  misc_feature 1..20: note = Target: SCN10A; (+) strand; PAM type: NRG; PAM sequence: AAG
  source 1..20: mol_type = other DNA
atgttttttaaatatctgtt

SEQ ID NO: 37095 - DNA, 20 bp, synthetic construct
  misc_feature 1..20: note = Description of Artificial Sequence: Synthetic oligonucleotide
  misc_feature 1..20: note = Target: SCN10A; (+) strand; PAM type: NRG; PAM sequence: TAG
  source 1..20: mol_type = other DNA
tctgttaagtccatttgttc

SEQ ID NO: 37096 - DNA, 20 bp, synthetic construct
  misc_feature 1..20: note = Description of Artificial Sequence: Synthetic oligonucleotide
  misc_feature 1..20: note = Target: SCN10A; (+) strand; PAM type: NRG; PAM sequence: AGG
  source 1..20: mol_type = other DNA
ctgttaagtccatttgttct

SEQ ID NO: 37097 - DNA, 20 bp, synthetic construct
  misc_feature 1..20: note = Description of Artificial Sequence: Synthetic oligonucleotide
  misc_feature 1..20: note = Target: SCN10A; (+) strand; PAM type: NRG; PAM sequence: CAG
  source 1..20: mol_type = other DNA
agtccatttgttctaggtta

SEQ ID NO: 37098 - DNA, 20 bp, synthetic construct
  misc_feature 1..20: note = Description of Artificial Sequence: Synthetic oligonucleotide
  misc_feature 1..20: note = Target: SCN10A; (+) strand; PAM type: NRG; PAM sequence: AAG
  source 1..20: mol_type = other DNA
tttgttctaggttacagttt

SEQ ID NO: 37099 - DNA, 20 bp, synthetic construct
  misc_feature 1..20: note = Description of Artificial Sequence: Synthetic oligonucleotide
  misc_feature 1..20: note = Target: SCN10A; (+) strand; PAM type: NRG; PAM sequence: TAG
  source 1..20: mol_type = other DNA
ttctgtcttgatgacctgtc

SEQ ID NO: 37100 - DNA, 20 bp, synthetic construct
  misc_feature 1..20: note = Description of Artificial Sequence: Synthetic oligonucleotide
  misc_feature 1..20: note = Target: SCN10A; (+) strand; PAM type: NRG; PAM sequence: CAG
  source 1..20: mol_type = other DNA
gatgacctgtctagtgctgt

SEQ ID NO: 37101 - DNA, 20 bp, synthetic construct
  misc_feature 1..20: note = Description of Artificial Sequence: Synthetic oligonucleotide
  misc_feature 1..20: note = Target: SCN10A; (+) strand; PAM type: NRG; PAM sequence: TGG
  source 1..20: mol_type = other DNA
gacctgtctagtgctgtcag

SEQ ID NO: 37102 - DNA, 20 bp, synthetic construct
  misc_feature 1..20: note = Description of Artificial Sequence: Synthetic oligonucleotide
  misc_feature 1..20: note = Target: SCN10A; (+) strand; PAM type: NRG; PAM sequence: TAG
  source 1..20: mol_type = other DNA
ttgctgtctatttcatttct

SEQ ID NO: 37103 - DNA, 20 bp, synthetic construct
  misc_feature 1..20: note = Description of Artificial Sequence: Synthetic oligonucleotide
  misc_feature 1..20: note = Target: SCN10A; (+) strand; PAM type: NRG; PAM sequence: AGG
  source 1..20: mol_type = other DNA
tgctgtctatttcatttctt

SEQ ID NO: 37104 - DNA, 20 bp, synthetic construct
  misc_feature 1..20: note = Description of Artificial Sequence: Synthetic oligonucleotide
  misc_feature 1..20: note = Target: SCN10A; (+) strand; PAM type: NRG; PAM sequence: TAG
  source 1..20: mol_type = other DNA
tctatttcatttcttaggtc

SEQ ID NO: 37105 - DNA, 20 bp, synthetic construct
  misc_feature 1..20: note = Description of Artificial Sequence: Synthetic oligonucleotide
  misc_feature 1..20: note = Target: SCN10A; (+) strand; PAM type: NRG; PAM sequence: TAG
  source 1..20: mol_type = other DNA
atttcatttcttaggtctag

SEQ ID NO: 37106 - DNA, 20 bp, synthetic construct
  misc_feature 1..20: note = Description of Artificial Sequence: Synthetic oligonucleotide
  misc_feature 1..20: note = Target: SCN10A; (+) strand; PAM type: NRG; PAM sequence: TGG
  source 1..20: mol_type = other DNA
tagtaattgttttataaatt

SEQ ID NO: 37107 - DNA, 20 bp, synthetic construct
  misc_feature 1..20: note = Description of Artificial Sequence: Synthetic oligonucleotide
  misc_feature 1..20: note = Target: SCN10A; (+) strand; PAM type: NRG; PAM sequence: GGG
  source 1..20: mol_type = other DNA
agtaattgttttataaattt

SEQ ID NO: 37108 - DNA, 20 bp, synthetic construct
  misc_feature 1..20: note = Description of Artificial Sequence: Synthetic oligonucleotide
  misc_feature 1..20: note = Target: SCN10A; (+) strand; PAM type: NRG; PAM sequence: GAG
  source 1..20: mol_type = other DNA
taattgttttataaatttgg

SEQ ID NO: 37109 - DNA, 20 bp, synthetic construct
  misc_feature 1..20: note = Description of Artificial Sequence: Synthetic oligonucleotide
  misc_feature 1..20: note = Target: SCN10A; (+) strand; PAM type: NRG; PAM sequence: CAG
  source 1..20: mol_type = other DNA
ttttataaatttgggagctc

SEQ ID NO: 37110 - DNA, 20 bp, synthetic construct
  misc_feature 1..20: note = Description of Artificial Sequence: Synthetic oligonucleotide
  misc_feature 1..20: note = Target: SCN10A; (+) strand; PAM type: NRG; PAM sequence: TAG
  source 1..20: mol_type = other DNA
aaatttgggagctccagtgt

SEQ ID NO: 37111 - DNA, 20 bp, synthetic construct
  misc_feature 1..20: note = Description of Artificial Sequence: Synthetic oligonucleotide
  misc_feature 1..20: note = Target: SCN10A; (+) strand; PAM type: NRG; PAM sequence: AGG
  source 1..20: mol_type = other DNA
aatttgggagctccagtgtt

SEQ ID NO: 37112 - DNA, 20 bp, synthetic construct
  misc_feature 1..20: note = Description of Artificial Sequence: Synthetic oligonucleotide
  misc_feature 1..20: note = Target: SCN10A; (+) strand; PAM type: NRG; PAM sequence: TAG
  source 1..20: mol_type = other DNA
gtgttaggtgcatatgtatt

SEQ ID NO: 37113 - DNA, 20 bp, synthetic construct
  misc_feature 1..20: note = Description of Artificial Sequence: Synthetic oligonucleotide
  misc_feature 1..20: note = Target: SCN10A; (+) strand; PAM type: NRG; PAM sequence: AGG
  source 1..20: mol_type = other DNA
tgttaggtgcatatgtattt

SEQ ID NO: 37114 - DNA, 20 bp, synthetic construct
  misc_feature 1..20: note = Description of Artificial Sequence: Synthetic oligonucleotide
  misc_feature 1..20: note = Target: SCN10A; (+) strand; PAM type: NRG; PAM sequence: TAG
  source 1..20: mol_type = other DNA
ggattatgatatttttccat

SEQ ID NO: 37115 - DNA, 20 bp, synthetic construct
  misc_feature 1..20: note = Description of Artificial Sequence: Synthetic oligonucleotide
  misc_feature 1..20: note = Target: SCN10A; (+) strand; PAM type: NRG; PAM sequence: AAG
  source 1..20: mol_type = other DNA
tttttaactgttgttgcttt

SEQ ID NO: 37116 - DNA, 20 bp, synthetic construct
  misc_feature 1..20: note = Description of Artificial Sequence: Synthetic oligonucleotide
  misc_feature 1..20: note = Target: SCN10A; (+) strand; PAM type: NRG; PAM sequence: AGG
  source 1..20: mol_type = other DNA
ttttaactgttgttgcttta

SEQ ID NO: 37117 - DNA, 20 bp, synthetic construct
  misc_feature 1..20: note = Description of Artificial Sequence: Synthetic oligonucleotide
  misc_feature 1..20: note = Target: SCN10A; (+) strand; PAM type: NRG; PAM sequence: AAG
  source 1..20: mol_type = other DNA
aggtctgttttctctgatat

SEQ ID NO: 37118 - DNA, 20 bp, synthetic construct
  misc_feature 1..20: note = Description of Artificial Sequence: Synthetic oligonucleotide
  misc_feature 1..20: note = Target: SCN10A; (+) strand; PAM type: NRG; PAM sequence: TAG
  source 1..20: mol_type = other DNA
tgttttctctgatataagaa

SEQ ID NO: 37119 - DNA, 20 bp, synthetic construct
  misc_feature 1..20: note = Description of Artificial Sequence: Synthetic oligonucleotide
  misc_feature 1..20: note = Target: SCN10A; (+) strand; PAM type: NRG; PAM sequence: TGG
  source 1..20: mol_type = other DNA
tagctactcctgcttgcttt

SEQ ID NO: 37120 - DNA, 20 bp, synthetic construct
  misc_feature 1..20: note = Description of Artificial Sequence: Synthetic oligonucleotide
  misc_feature 1..20: note = Target: SCN10A; (+) strand; PAM type: NRG; PAM sequence: TGG
  source 1..20: mol_type = other DNA
gcttttggtttccatttgca

SEQ ID NO: 37121 - DNA, 20 bp, synthetic construct
  misc_feature 1..20: note = Description of Artificial Sequence: Synthetic oligonucleotide
  misc_feature 1..20: note = Target: SCN10A; (+) strand; PAM type: NRG; PAM sequence: AAG
  source 1..20: mol_type = other DNA
ttttcccatctctttacctt

SEQ ID NO: 37122 - DNA, 20 bp, synthetic construct
  misc_feature 1..20: note = Description of Artificial Sequence: Synthetic oligonucleotide
  misc_feature 1..20: note = Target: SCN10A; (+) strand; PAM type: NRG; PAM sequence: TGG
  source 1..20: mol_type = other DNA
ctctttaccttaagtttatg

SEQ ID NO: 37123 - DNA, 20 bp, synthetic construct
  misc_feature 1..20: note = Description of Artificial Sequence: Synthetic oligonucleotide
  misc_feature 1..20: note = Target: SCN10A; (+) strand; PAM type: NRG; PAM sequence: TAG
  source 1..20: mol_type = other DNA
ttatgtggctccttatgtgt

SEQ ID NO: 37124 - DNA, 20 bp, synthetic construct
  misc_feature 1..20: note = Description of Artificial Sequence: Synthetic oligonucleotide
  misc_feature 1..20: note = Target: SCN10A; (+) strand; PAM type: NRG; PAM sequence: AGG
  source 1..20: mol_type = other DNA
tatgtggctccttatgtgtt

SEQ ID NO: 37125 - DNA, 20 bp, synthetic construct
  misc_feature 1..20: note = Description of Artificial Sequence: Synthetic oligonucleotide
  misc_feature 1..20: note = Target: SCN10A; (+) strand; PAM type: NRG; PAM sequence: GAG
  source 1..20: mol_type = other DNA
tggctccttatgtgttaggt

SEQ ID NO: 37126 - DNA, 20 bp, synthetic construct
  misc_feature 1..20: note = Description of Artificial Sequence: Synthetic oligonucleotide
  misc_feature 1..20: note = Target: SCN10A; (+) strand; PAM type: NRG; PAM sequence: AAG
  source 1..20: mol_type = other DNA
tgtgttaggtgagtctcttg

SEQ ID NO: 37127 - DNA, 20 bp, synthetic construct
  misc_feature 1..20: note = Description of Artificial Sequence: Synthetic oligonucleotide
  misc_feature 1..20: note = Target: SCN10A; (+) strand; PAM type: NRG; PAM sequence: CAG
  source 1..20: mol_type = other DNA
ttaggtgagtctcttgaaga

SEQ ID NO: 37128 - DNA, 20 bp, synthetic construct
  misc_feature 1..20: note = Description of Artificial Sequence: Synthetic oligonucleotide
  misc_feature 1..20: note = Target: SCN10A; (+) strand; PAM type: NRG; PAM sequence: TAG
  source 1..20: mol_type = other DNA
ggtgagtctcttgaagacag

SEQ ID NO: 37129 - DNA, 20 bp, synthetic construct
  misc_feature 1..20: note = Description of Artificial Sequence: Synthetic oligonucleotide
  misc_feature 1..20: note = Target: SCN10A; (+) strand; PAM type: NRG; PAM sequence: TGG
  source 1..20: mol_type = other DNA
tcttgaagacagtagatact

SEQ ID NO: 37130 - DNA, 20 bp, synthetic construct
  misc_feature 1..20: note = Description of Artificial Sequence: Synthetic oligonucleotide
  misc_feature 1..20: note = Target: SCN10A; (+) strand; PAM type: NRG; PAM sequence: TGG
  source 1..20: mol_type = other DNA
gaagacagtagatacttggt

SEQ ID NO: 37131 - DNA, 20 bp, synthetic construct
  misc_feature 1..20: note = Description of Artificial Sequence: Synthetic oligonucleotide
  misc_feature 1..20: note = Target: SCN10A; (+) strand; PAM type: NRG; PAM sequence: TGG
  source 1..20: mol_type = other DNA
gacagtagatacttggttgg

SEQ ID NO: 37132 - DNA, 20 bp, synthetic construct
  misc_feature 1..20: note = Description of Artificial Sequence: Synthetic oligonucleotide
  misc_feature 1..20: note = Target: SCN10A; (+) strand; PAM type: NRG; PAM sequence: AAG
  source 1..20: mol_type = other DNA
tctgcccttctgtatatttt

SEQ ID NO: 37133 - DNA, 20 bp, synthetic construct
  misc_feature 1..20: note = Description of Artificial Sequence: Synthetic oligonucleotide
  misc_feature 1..20: note = Target: SCN10A; (+) strand; PAM type: NRG; PAM sequence: TGG
  source 1..20: mol_type = other DNA
gcccttctgtatattttaag

SEQ ID NO: 37134 - DNA, 20 bp, synthetic construct
  misc_feature 1..20: note = Description of Artificial Sequence: Synthetic oligonucleotide
  misc_feature 1..20: note = Target: SCN10A; (+) strand; PAM type: NRG; PAM sequence: TAG
  source 1..20: mol_type = other DNA
tatattttaagtggatcatt

SEQ ID NO: 37135 - DNA, 20 bp, synthetic construct
  misc_feature 1..20: note = Description of Artificial Sequence: Synthetic oligonucleotide
  misc_feature 1..20: note = Target: SCN10A; (+) strand; PAM type: NRG; PAM sequence: AGG
  source 1..20: mol_type = other DNA
atattttaagtggatcattt

SEQ ID NO: 37136 - DNA, 20 bp, synthetic construct
  misc_feature 1..20: note = Description of Artificial Sequence: Synthetic oligonucleotide
  misc_feature 1..20: note = Target: SCN10A; (+) strand; PAM type: NRG; PAM sequence: GGG
  source 1..20: mol_type = other DNA
tattttaagtggatcattta

SEQ ID NO: 37137 - DNA, 20 bp, synthetic construct
  misc_feature 1..20: note = Description of Artificial Sequence: Synthetic oligonucleotide
  misc_feature 1..20: note = Target: SCN10A; (+) strand; PAM type: NRG; PAM sequence: CAG
  source 1..20: mol_type = other DNA
agggcatttacactcaacat

SEQ ID NO: 37138 - DNA, 20 bp, synthetic construct
  misc_feature 1..20: note = Description of Artificial Sequence: Synthetic oligonucleotide
  misc_feature 1..20: note = Target: SCN10A; (+) strand; PAM type: NRG; PAM sequence: GAG
  source 1..20: mol_type = other DNA
ttacactcaacatcagtatt

SEQ ID NO: 37139 - DNA, 20 bp, synthetic construct
  misc_feature 1..20: note = Description of Artificial Sequence: Synthetic oligonucleotide
  misc_feature 1..20: note = Target: SCN10A; (+) strand; PAM type: NRG; PAM sequence: GAG
  source 1..20: mol_type = other DNA
caacatcagtattgagatgt

SEQ ID NO: 37140 - DNA, 20 bp, synthetic construct
  misc_feature 1..20: note = Description of Artificial Sequence: Synthetic oligonucleotide
  misc_feature 1..20: note = Target: SCN10A; (+) strand; PAM type: NRG; PAM sequence: AGG
  source 1..20: mol_type = other DNA
aacatcagtattgagatgtg

SEQ ID NO: 37141 - DNA, 20 bp, synthetic construct
  misc_feature 1..20: note = Description of Artificial Sequence: Synthetic oligonucleotide
  misc_feature 1..20: note = Target: SCN10A; (+) strand; PAM type: NRG; PAM sequence: TAG
  source 1..20: mol_type = other DNA
tactcttctattcattatgc

SEQ ID NO: 37142 - DNA, 20 bp, synthetic construct
  misc_feature 1..20: note = Description of Artificial Sequence: Synthetic oligonucleotide
  misc_feature 1..20: note = Target: SCN10A; (+) strand; PAM type: NRG; PAM sequence: TAG
  source 1..20: mol_type = other DNA
tttattgtgttattgtttta

SEQ ID NO: 37143 - DNA, 20 bp, synthetic construct
  misc_feature 1..20: note = Description of Artificial Sequence: Synthetic oligonucleotide
  misc_feature 1..20: note = Target: SCN10A; (+) strand; PAM type: NRG; PAM sequence: AGG
  source 1..20: mol_type = other DNA
ttattgtgttattgttttat

SEQ ID NO: 37144 - DNA, 20 bp, synthetic construct
  misc_feature 1..20: note = Description of Artificial Sequence: Synthetic oligonucleotide
  misc_feature 1..20: note = Target: SCN10A; (+) strand; PAM type: NRG; PAM sequence: AAG
  source 1..20: mol_type = other DNA
tcctttgatatttatgcttt

SEQ ID NO: 37145 - DNA, 20 bp, synthetic construct
  misc_feature 1..20: note = Description of Artificial Sequence: Synthetic oligonucleotide
  misc_feature 1..20: note = Target: SCN10A; (+) strand; PAM type: NRG; PAM sequence: AGG
  source 1..20: mol_type = other DNA
cctttgatatttatgcttta

SEQ ID NO: 37146 - DNA, 20 bp, synthetic construct
  misc_feature 1..20: note = Description of Artificial Sequence: Synthetic oligonucleotide
  misc_feature 1..20: note = Target: SCN10A; (+) strand; PAM type: NRG; PAM sequence: GAG
  source 1..20: mol_type = other DNA
tttgatatttatgctttaag

SEQ ID NO: 37147 - DNA, 20 bp, synthetic construct
  misc_feature 1..20: note = Description of Artificial Sequence: Synthetic oligonucleotide
  misc_feature 1..20: note = Target: SCN10A; (+) strand; PAM type: NRG; PAM sequence: AGG
  source 1..20: mol_type = other DNA
ttgatatttatgctttaagg

SEQ ID NO: 37148 - DNA, 20 bp, synthetic construct
  misc_feature 1..20: note = Description of Artificial Sequence: Synthetic oligonucleotide
  misc_feature 1..20: note = Target: SCN10A; (+) strand; PAM type: NRG; PAM sequence: TGG
  source 1..20: mol_type = other DNA
gctttaaggaggttctattt

SEQ ID NO: 37149 - DNA, 20 bp, synthetic construct
  misc_feature 1..20: note = Description of Artificial Sequence: Synthetic oligonucleotide
  misc_feature 1..20: note = Target: SCN10A; (+) strand; PAM type: NRG; PAM sequence: AAG
  source 1..20: mol_type = other DNA
gttctattttggtgtatttt

SEQ ID NO: 37150 - DNA, 20 bp, synthetic construct
  misc_feature 1..20: note = Description of Artificial Sequence: Synthetic oligonucleotide
  misc_feature 1..20: note = Target: SCN10A; (+) strand; PAM type: NRG; PAM sequence: AGG
  source 1..20: mol_type = other DNA
ttctattttggtgtatttta

SEQ ID NO: 37151 - DNA, 20 bp, synthetic construct
  misc_feature 1..20: note = Description of Artificial Sequence: Synthetic oligonucleotide
  misc_feature 1..20: note = Target: SCN10A; (+) strand; PAM type: NRG; PAM sequence: AAG
  source 1..20: mol_type = other DNA
gtattttaaggttttatttc

SEQ ID NO: 37152 - DNA, 20 bp, synthetic construct
  misc_feature 1..20: note = Description of Artificial Sequence: Synthetic oligonucleotide
  misc_feature 1..20: note = Target: SCN10A; (+) strand; PAM type: NRG; PAM sequence: TAG
  source 1..20: mol_type = other DNA
taaggttttatttcaagatt

SEQ ID NO: 37153 - DNA, 20 bp, synthetic construct
  misc_feature 1..20: note = Description of Artificial Sequence: Synthetic oligonucleotide
  misc_feature 1..20: note = Target: SCN10A; (+) strand; PAM type: NRG; PAM sequence: TAG
  source 1..20: mol_type = other DNA
tcaagatttagaattccttt

SEQ ID NO: 37154 - DNA, 20 bp, synthetic construct
  misc_feature 1..20: note = Description of Artificial Sequence: Synthetic oligonucleotide
  misc_feature 1..20: note = Target: SCN10A; (+) strand; PAM type: NRG; PAM sequence: TAG
  source 1..20: mol_type = other DNA
attccttttagcatttcttg

SEQ ID NO: 37155 - DNA, 20 bp, synthetic construct
  misc_feature 1..20: note = Description of Artificial Sequence: Synthetic oligonucleotide
  misc_feature 1..20: note = Target: SCN10A; (+) strand; PAM type: NRG; PAM sequence: TGG
  source 1..20: mol_type = other DNA
tttagcatttcttgtagtgc

SEQ ID NO: 37156 - DNA, 20 bp, synthetic construct
  misc_feature 1..20: note = Description of Artificial Sequence: Synthetic oligonucleotide
  misc_feature 1..20: note = Target: SCN10A; (+) strand; PAM type: NRG; PAM sequence: TGG
  source 1..20: mol_type = other DNA
catttcttgtagtgctggct

SEQ ID NO: 37157 - DNA, 20 bp, synthetic construct
  misc_feature 1..20: note = Description of Artificial Sequence: Synthetic oligonucleotide
  misc_feature 1..20: note = Target: SCN10A; (+) strand; PAM type: NRG; PAM sequence: TAG
  source 1..20: mol_type = other DNA
ttcttgtagtgctggcttgg

SEQ ID NO: 37158 - DNA, 20 bp, synthetic construct
  misc_feature 1..20: note = Description of Artificial Sequence: Synthetic oligonucleotide
  misc_feature 1..20: note = Target: SCN10A; (+) strand; PAM type: NRG; PAM sequence: TGG
  source 1..20: mol_type = other DNA
ttgtagtgctggcttggtag

SEQ ID NO: 37159 - DNA, 20 bp, synthetic construct
  misc_feature 1..20: note = Description of Artificial Sequence: Synthetic oligonucleotide
  misc_feature 1..20: note = Target: SCN10A; (+) strand; PAM type: NRG; PAM sequence: AAG
  source 1..20: mol_type = other DNA
ttatcttgtcttcacttatg

SEQ ID NO: 37160 - DNA, 20 bp, synthetic construct
  misc_feature 1..20: note = Description of Artificial Sequence: Synthetic oligonucleotide
  misc_feature 1..20: note = Target: SCN10A; (+) strand; PAM type: NRG; PAM sequence: TAG
  source 1..20: mol_type = other DNA
ttgtcttcacttatgaagct

SEQ ID NO: 37161 - DNA, 20 bp, synthetic construct
  misc_feature 1..20: note = Description of Artificial Sequence: Synthetic oligonucleotide
  misc_feature 1..20: note = Target: SCN10A; (+) strand; PAM type: NRG; PAM sequence: TGG
  source 1..20: mol_type = other DNA
ttctcttcatacaatattct

SEQ ID NO: 37162 - DNA, 20 bp, synthetic construct
  misc_feature 1..20: note = Description of Artificial Sequence: Synthetic oligonucleotide
  misc_feature 1..20: note = Target: SCN10A; (+) strand; PAM type: NRG; PAM sequence: TGG
  source 1..20: mol_type = other DNA
cttcatacaatattcttggc

SEQ ID NO: 37163 - DNA, 20 bp, synthetic construct
  misc_feature 1..20: note = Description of Artificial Sequence: Synthetic oligonucleotide
  misc_feature 1..20: note = Target: SCN10A; (+) strand; PAM type: NRG; PAM sequence: CAG
  source 1..20: mol_type = other DNA
ggctggcaattattttgttt

SEQ ID NO: 37164 - DNA, 20 bp, synthetic construct
  misc_feature 1..20: note = Description of Artificial Sequence: Synthetic oligonucleotide
  misc_feature 1..20: note = Target: SCN10A; (+) strand; PAM type: NRG; PAM sequence: AGG
  source 1..20: mol_type = other DNA
gctggcaattattttgtttc

SEQ ID NO: 37165 - DNA, 20 bp, synthetic construct
  misc_feature 1..20: note = Description of Artificial Sequence: Synthetic oligonucleotide
  misc_feature 1..20: note = Target: SCN10A; (+) strand; PAM type: NRG; PAM sequence: GAG
  source 1..20: mol_type = other DNA
tggcaattattttgtttcag

SEQ ID NO: 37166 - DNA, 20 bp, synthetic construct
  misc_feature 1..20: note = Description of Artificial Sequence: Synthetic oligonucleotide
  misc_feature 1..20: note = Target: SCN10A; (+) strand; PAM type: NRG; PAM sequence: AGG
  source 1..20: mol_type = other DNA
ggcaattattttgtttcagg

SEQ ID NO: 37167 - DNA, 20 bp, synthetic construct
  misc_feature 1..20: note = Description of Artificial Sequence: Synthetic oligonucleotide
  misc_feature 1..20: note = Target: SCN10A; (+) strand; PAM type: NRG; PAM sequence: AAG
  source 1..20: mol_type = other DNA
tattttgtttcaggaggcta

SEQ ID NO: 37168 - DNA, 20 bp, synthetic construct
  misc_feature 1..20: note = Description of Artificial Sequence: Synthetic oligonucleotide
  misc_feature 1..20: note = Target: SCN10A; (+) strand; PAM type: NRG; PAM sequence: TGG
  source 1..20: mol_type = other DNA
ttgtttcaggaggctaaaga

SEQ ID NO: 37169 - DNA, 20 bp, synthetic construct
  misc_feature 1..20: note = Description of Artificial Sequence: Synthetic oligonucleotide
  misc_feature 1..20: note = Target: SCN10A; (+) strand; PAM type: NRG; PAM sequence: GGG
  source 1..20: mol_type = other DNA
tgtttcaggaggctaaagat

SEQ ID NO: 37170 - DNA, 20 bp, synthetic construct
  misc_feature 1..20: note = Description of Artificial Sequence: Synthetic oligonucleotide
  misc_feature 1..20: note = Target: SCN10A; (+) strand; PAM type: NRG; PAM sequence: TGG
  source 1..20: mol_type = other DNA
gatgggaccctaatcccttc

SEQ ID NO: 37171 - DNA, 20 bp, synthetic construct
  misc_feature 1..20: note = Description of Artificial Sequence: Synthetic oligonucleotide
  misc_feature 1..20: note = Target: SCN10A; (+) strand; PAM type: NRG; PAM sequence: AAG
  source 1..20: mol_type = other DNA
cctaatcccttctggcttgc

SEQ ID NO: 37172 - DNA, 20 bp, synthetic construct
  misc_feature 1..20: note = Description of Artificial Sequence: Synthetic oligonucleotide
  misc_feature 1..20: note = Target: SCN10A; (+) strand; PAM type: NRG; PAM sequence: AGG
  source 1..20: mol_type = other DNA
ctaatcccttctggcttgca

SEQ ID NO: 37173 - DNA, 20 bp, synthetic construct
  misc_feature 1..20: note = Description of Artificial Sequence: Synthetic oligonucleotide
  misc_feature 1..20: note = Target: SCN10A; (+) strand; PAM type: NRG; PAM sequence: CAG
  source 1..20: mol_type = other DNA
ccttctggcttgcaaggttt

SEQ ID NO: 37174 - DNA, 20 bp, synthetic construct
  misc_feature 1..20: note = Description of Artificial Sequence: Synthetic oligonucleotide
  misc_feature 1..20: note = Target: SCN10A; (+) strand; PAM type: NRG; PAM sequence: GAG
  source 1..20: mol_type = other DNA
tggcttgcaaggtttcagtt

SEQ ID NO: 37175 - DNA, 20 bp, synthetic construct
  misc_feature 1..20: note = Description of Artificial Sequence: Synthetic oligonucleotide
  misc_feature 1..20: note = Target: SCN10A; (+) strand; PAM type: NRG; PAM sequence: CAG
  source 1..20: mol_type = other DNA
gctgttaatcttatgtaaat

SEQ ID NO: 37176 - DNA, 20 bp, synthetic construct
  misc_feature 1..20: note = Description of Artificial Sequence: Synthetic oligonucleotide
  misc_feature 1..20: note = Target: SCN10A; (+) strand; PAM type: NRG; PAM sequence: TAG
  source 1..20: mol_type = other DNA
atcagataacctttccttta

SEQ ID NO: 37177 - DNA, 20 bp, synthetic construct
  misc_feature 1..20: note = Description of Artificial Sequence: Synthetic oligonucleotide
  misc_feature 1..20: note = Target: SCN10A; (+) strand; PAM type: NRG; PAM sequence: AGG
  source 1..20: mol_type = other DNA
tcagataacctttcctttat

SEQ ID NO: 37178 - DNA, 20 bp, synthetic construct
  misc_feature 1..20: note = Description of Artificial Sequence: Synthetic oligonucleotide
  misc_feature 1..20: note = Target: SCN10A; (+) strand; PAM type: NRG; PAM sequence: GAG
  source 1..20: mol_type = other DNA
ctttcctttataggttatct

SEQ ID NO: 37179 - DNA, 20 bp, synthetic construct
  misc_feature 1..20: note = Description of Artificial Sequence: Synthetic oligonucleotide
  misc_feature 1..20: note = Target: SCN10A; (+) strand; PAM type: NRG; PAM sequence: AGG
  source 1..20: mol_type = other DNA
tttcctttataggttatctg

SEQ ID NO: 37180 - DNA, 20 bp, synthetic construct
  misc_feature 1..20: note = Description of Artificial Sequence: Synthetic oligonucleotide
  misc_feature 1..20: note = Target: SCN10A; (+) strand; PAM type: NRG; PAM sequence: CAG
  source 1..20: mol_type = other DNA
tatctgaggcttttgtctca

SEQ ID NO: 37181 - DNA, 20 bp, synthetic construct
  misc_feature 1..20: note = Description of Artificial Sequence: Synthetic oligonucleotide
  misc_feature 1..20: note = Target: SCN10A; (+) strand; PAM type: NRG; PAM sequence: AAG
  source 1..20: mol_type = other DNA
gcttttgtctcacagctctt

SEQ ID NO: 37182 - DNA, 20 bp, synthetic construct
  misc_feature 1..20: note = Description of Artificial Sequence: Synthetic oligonucleotide
  misc_feature 1..20: note = Target: SCN10A; (+) strand; PAM type: NRG; PAM sequence: TAG
  source 1..20: mol_type = other DNA
tcttttctttgtcttgactt

SEQ ID NO: 37183 - DNA, 20 bp, synthetic construct
  misc_feature 1..20: note = Description of Artificial Sequence: Synthetic oligonucleotide
  misc_feature 1..20: note = Target: SCN10A; (+) strand; PAM type: NRG; PAM sequence: TAG
  source 1..20: mol_type = other DNA
taacctgatgtctatttgcc

SEQ ID NO: 37184 - DNA, 20 bp, synthetic construct
  misc_feature 1..20: note = Description of Artificial Sequence: Synthetic oligonucleotide
  misc_feature 1..20: note = Target: SCN10A; (+) strand; PAM type: NRG; PAM sequence: AGG
  source 1..20: mol_type = other DNA
aacctgatgtctatttgcct

SEQ ID NO: 37185 - DNA, 20 bp, synthetic construct
  misc_feature 1..20: note = Description of Artificial Sequence: Synthetic oligonucleotide
  misc_feature 1..20: note = Target: SCN10A; (+) strand; PAM type: NRG; PAM sequence: CAG
  source 1..20: mol_type = other DNA
atcttttttgtgacacattt

SEQ ID NO: 37186 - DNA, 20 bp, synthetic construct
  misc_feature 1..20: note = Description of Artificial Sequence: Synthetic oligonucleotide
  misc_feature 1..20: note = Target: SCN10A; (+) strand; PAM type: NRG; PAM sequence: GAG
  source 1..20: mol_type = other DNA
cttttttgtgacacatttca

SEQ ID NO: 37187 - DNA, 20 bp, synthetic construct
  misc_feature 1..20: note = Description of Artificial Sequence: Synthetic oligonucleotide
  misc_feature 1..20: note = Target: SCN10A; (+) strand; PAM type: NRG; PAM sequence: AGG
  source 1..20: mol_type = other DNA
ttttttgtgacacatttcag

SEQ ID NO: 37188 - DNA, 20 bp, synthetic construct
  misc_feature 1..20: note = Description of Artificial Sequence: Synthetic oligonucleotide
  misc_feature 1..20: note = Target: SCN10A; (+) strand; PAM type: NRG; PAM sequence: GAG
  source 1..20: mol_type = other DNA
acatttcagaggtattcttt

SEQ ID NO: 37189 - DNA, 20 bp, synthetic construct
  misc_feature 1..20: note = Description of Artificial Sequence: Synthetic oligonucleotide
  misc_feature 1..20: note = Target: SCN10A; (+) strand; PAM type: NRG; PAM sequence: TGG
  source 1..20: mol_type = other DNA
ttctttgagcttcttgtatt

SEQ ID NO: 37190 - DNA, 20 bp, synthetic construct
  misc_feature 1..20: note = Description of Artificial Sequence: Synthetic oligonucleotide
  misc_feature 1..20: note = Target: SCN10A; (+) strand; PAM type: NRG; PAM sequence: AAG
  source 1..20: mol_type = other DNA
tggatatctatatttctaac

SEQ ID NO: 37191 - DNA, 20 bp, synthetic construct
  misc_feature 1..20: note = Description of Artificial Sequence: Synthetic oligonucleotide
  misc_feature 1..20: note = Target: SCN10A; (+) strand; PAM type: NRG; PAM sequence: AGG
  source 1..20: mol_type = other DNA
ggatatctatatttctaaca

SEQ ID NO: 37192 - DNA, 20 bp, synthetic construct
  misc_feature 1..20: note = Description of Artificial Sequence: Synthetic oligonucleotide
  misc_feature 1..20: note = Target: SCN10A; (+) strand; PAM type: NRG; PAM sequence: CAG
  source 1..20: mol_type = other DNA
atctatatttctaacaaggc

SEQ ID NO: 37193 - DNA, 20 bp, synthetic construct
  misc_feature 1..20: note = Description of Artificial Sequence: Synthetic oligonucleotide
  misc_feature 1..20: note = Target: SCN10A; (+) strand; PAM type: NRG; PAM sequence: AGG
  source 1..20: mol_type = other DNA
tctatatttctaacaaggcc

SEQ ID NO: 37194 - DNA, 20 bp, synthetic construct
  misc_feature 1..20: note = Description of Artificial Sequence: Synthetic oligonucleotide
  misc_feature 1..20: note = Target: SCN10A; (+) strand; PAM type: NRG; PAM sequence: GGG
  source 1..20: mol_type = other DNA
ctatatttctaacaaggcca

SEQ ID NO: 37195 - DNA, 20 bp, synthetic construct
  misc_feature 1..20: note = Description of Artificial Sequence: Synthetic oligonucleotide
  misc_feature 1..20: note = Target: SCN10A; (+) strand; PAM type: NRG; PAM sequence: AAG
  source 1..20: mol_type = other DNA
tatttctaacaaggccaggg

SEQ ID NO: 37196 - DNA, 20 bp, synthetic construct
  misc_feature 1..20: note = Description of Artificial Sequence: Synthetic oligonucleotide
  misc_feature 1..20: note = Target: SCN10A; (+) strand; PAM type: NRG; PAM sequence: AAG
  source 1..20: mol_type = other DNA
cctcaattattccctcaaat

SEQ ID NO: 37197 - DNA, 20 bp, synthetic construct
  misc_feature 1..20: note = Description of Artificial Sequence: Synthetic oligonucleotide
  misc_feature 1..20: note = Target: SCN10A; (+) strand; PAM type: NRG; PAM sequence: TAG
  source 1..20: mol_type = other DNA
aaataagttttccaaacttt

SEQ ID NO: 37198 - DNA, 20 bp, synthetic construct
  misc_feature 1..20: note = Description of Artificial Sequence: Synthetic oligonucleotide
  misc_feature 1..20: note = Target: SCN10A; (+) strand; PAM type: NRG; PAM sequence: TGG
  source 1..20: mol_type = other DNA
tttagatttctattcttcct

SEQ ID NO: 37199 - DNA, 20 bp, synthetic construct
  misc_feature 1..20: note = Description of Artificial Sequence: Synthetic oligonucleotide
  misc_feature 1..20: note = Target: SCN10A; (+) strand; PAM type: NRG; PAM sequence: GGG
  source 1..20: mol_type = other DNA
ttagatttctattcttcctt

SEQ ID NO: 37200 - DNA, 20 bp, synthetic construct
  misc_feature 1..20: note = Description of Artificial Sequence: Synthetic oligonucleotide
  misc_feature 1..20: note = Target: SCN10A; (+) strand; PAM type: NRG; PAM sequence: TAG
  source 1..20: mol_type = other DNA
ttgggaacacccattattct

SEQ ID NO: 37201 - DNA, 20 bp, synthetic construct
  misc_feature 1..20: note = Description of Artificial Sequence: Synthetic oligonucleotide
  misc_feature 1..20: note = Target: SCN10A; (+) strand; PAM type: NRG; PAM sequence: AGG
  source 1..20: mol_type = other DNA
tgggaacacccattattctt

SEQ ID NO: 37202 - DNA, 20 bp, synthetic construct
  misc_feature 1..20: note = Description of Artificial Sequence: Synthetic oligonucleotide
  misc_feature 1..20: note = Target: SCN10A; (+) strand; PAM type: NRG; PAM sequence: TGG
  source 1..20: mol_type = other DNA
acacccattattcttaggtt

SEQ ID NO: 37203 - DNA, 20 bp, synthetic construct
  misc_feature 1..20: note = Description of Artificial Sequence: Synthetic oligonucleotide
  misc_feature 1..20: note = Target: SCN10A; (+) strand; PAM type: NRG; PAM sequence: TGG
  source 1..20: mol_type = other DNA
tcacatgattccaaatttat

SEQ ID NO: 37204 - DNA, 20 bp, synthetic construct
  misc_feature 1..20: note = Description of Artificial Sequence: Synthetic oligonucleotide
  misc_feature 1..20: note = Target: SCN10A; (+) strand; PAM type: NRG; PAM sequence: TAG
  source 1..20: mol_type = other DNA
ttctttctttttgtgtgtct

SEQ ID NO: 37205 - DNA, 20 bp, synthetic construct
  misc_feature 1..20: note = Description of Artificial Sequence: Synthetic oligonucleotide
  misc_feature 1..20: note = Target: SCN10A; (+) strand; PAM type: NRG; PAM sequence: TGG
  source 1..20: mol_type = other DNA
tctttttgtgtgtcttagtt

SEQ ID NO: 37206 - DNA, 20 bp, synthetic construct
  misc_feature 1..20: note = Description of Artificial Sequence: Synthetic oligonucleotide
  misc_feature 1..20: note = Target: SCN10A; (+) strand; PAM type: NRG; PAM sequence: GGG
  source 1..20: mol_type = other DNA
ctttttgtgtgtcttagttt

SEQ ID NO: 37207 - DNA, 20 bp, synthetic construct
  misc_feature 1..20: note = Description of Artificial Sequence: Synthetic oligonucleotide
  misc_feature 1..20: note = Target: SCN10A; (+) strand; PAM type: NRG; PAM sequence: AAG
  source 1..20: mol_type = other DNA
tcttagtttgggtctattaa

SEQ ID NO: 37208 - DNA, 20 bp, synthetic construct
  misc_feature 1..20: note = Description of Artificial Sequence: Synthetic oligonucleotide
  misc_feature 1..20: note = Target: SCN10A; (+) strand; PAM type: NRG; PAM sequence: GAG
  source 1..20: mol_type = other DNA
ctattaaaagctttgtcttc

SEQ ID NO: 37209 - DNA, 20 bp, synthetic construct
  misc_feature 1..20: note = Description of Artificial Sequence: Synthetic oligonucleotide
  misc_feature 1..20: note = Target: SCN10A; (+) strand; PAM type: NRG; PAM sequence: AAG
  source 1..20: mol_type = other DNA
agctttgtcttcgagctctg

SEQ ID NO: 37210 - DNA, 20 bp, synthetic construct
  misc_feature 1..20: note = Description of Artificial Sequence: Synthetic oligonucleotide
  misc_feature 1..20: note = Target: SCN10A; (+) strand; PAM type: NRG; PAM sequence: TAG
  source 1..20: mol_type = other DNA
gttctttcttctacttgttc

SEQ ID NO: 37211 - DNA, 20 bp, synthetic construct
  misc_feature 1..20: note = Description of Artificial Sequence: Synthetic oligonucleotide
  misc_feature 1..20: note = Target: SCN10A; (+) strand; PAM type: NRG; PAM sequence: AAG
  source 1..20: mol_type = other DNA
actgcattttgtatttctct

SEQ ID NO: 37212 - DNA, 20 bp, synthetic construct
  misc_feature 1..20: note = Description of Artificial Sequence: Synthetic oligonucleotide
  misc_feature 1..20: note = Target: SCN10A; (+) strand; PAM type: NRG; PAM sequence: GAG
  source 1..20: mol_type = other DNA
cattttgtatttctctaagt

SEQ ID NO: 37213 - DNA, 20 bp, synthetic construct
  misc_feature 1..20: note = Description of Artificial Sequence: Synthetic oligonucleotide
  misc_feature 1..20: note = Target: SCN10A; (+) strand; PAM type: NRG; PAM sequence: CAG
  source 1..20: mol_type = other DNA
ctaagtgagtcttccatttc

SEQ ID NO: 37214 - DNA, 20 bp, synthetic construct
  misc_feature 1..20: note = Description of Artificial Sequence: Synthetic oligonucleotide
  misc_feature 1..20: note = Target: SCN10A; (+) strand; PAM type: NRG; PAM sequence: AAG
  source 1..20: mol_type = other DNA
agtgagtcttccatttccag

SEQ ID NO: 37215 - DNA, 20 bp, synthetic construct
  misc_feature 1..20: note = Description of Artificial Sequence: Synthetic oligonucleotide
  misc_feature 1..20: note = Target: SCN10A; (+) strand; PAM type: NRG; PAM sequence: TGG
  source 1..20: mol_type = other DNA
tttctttatatctatttctc

SEQ ID NO: 37216 - DNA, 20 bp, synthetic construct
  misc_feature 1..20: note = Description of Artificial Sequence: Synthetic oligonucleotide
  misc_feature 1..20: note = Target: SCN10A; (+) strand; PAM type: NRG; PAM sequence: GAG
  source 1..20: mol_type = other DNA
tctttatatctatttctctg

SEQ ID NO: 37217 - DNA, 20 bp, synthetic construct
  misc_feature 1..20: note = Description of Artificial Sequence: Synthetic oligonucleotide
  misc_feature 1..20: note = Target: SCN10A; (+) strand; PAM type: NRG; PAM sequence: AAG
  source 1..20: mol_type = other DNA
gttgttttaaaaatttcttt

SEQ ID NO: 37218 - DNA, 20 bp, synthetic construct
  misc_feature 1..20: note = Description of Artificial Sequence: Synthetic oligonucleotide
  misc_feature 1..20: note = Target: SCN10A; (+) strand; PAM type: NRG; PAM sequence: TGG
  source 1..20: mol_type = other DNA
ttttaaaaatttctttaagt

SEQ ID NO: 37219 - DNA, 20 bp, synthetic construct
  misc_feature 1..20: note = Description of Artificial Sequence: Synthetic oligonucleotide
  misc_feature 1..20: note = Target: SCN10A; (+) strand; PAM type: NRG; PAM sequence: TGG
  source 1..20: mol_type = other DNA
agttggtttttatctttctc

SEQ ID NO: 37220 - DNA, 20 bp, synthetic construct
  misc_feature 1..20: note = Description of Artificial Sequence: Synthetic oligonucleotide
  misc_feature 1..20: note = Target: SCN10A; (+) strand; PAM type: NRG; PAM sequence: CAG
  source 1..20: mol_type = other DNA
tccttgaatcacttaataat

SEQ ID NO: 37221 - DNA, 20 bp, synthetic construct
  misc_feature 1..20: note = Description of Artificial Sequence: Synthetic oligonucleotide
  misc_feature 1..20: note = Target: SCN10A; (+) strand; PAM type: NRG; PAM sequence: GAG
  source 1..20: mol_type = other DNA
attctttttttttttttttt

SEQ ID NO: 37222 - DNA, 20 bp, synthetic construct
  misc_feature 1..20: note = Description of Artificial Sequence: Synthetic oligonucleotide
  misc_feature 1..20: note = Target: SCN10A; (+) strand; PAM type: NRG; PAM sequence: TGG
  source 1..20: mol_type = other DNA
ttttttttttttttttgaga

SEQ ID NO: 37223 - DNA, 20 bp, synthetic construct
  misc_feature 1..20: note = Description of Artificial Sequence: Synthetic oligonucleotide
  misc_feature 1..20: note = Target: SCN10A; (+) strand; PAM type: NRG; PAM sequence: CAG
  source 1..20: mol_type = other DNA
ggattttcactcttgttgcc

SEQ ID NO: 37224 - DNA, 20 bp, synthetic construct
  misc_feature 1..20: note = Description of Artificial Sequence: Synthetic oligonucleotide
  misc_feature 1..20: note = Target: SCN10A; (+) strand; PAM type: NRG; PAM sequence: AGG
  source 1..20: mol_type = other DNA
gattttcactcttgttgccc

SEQ ID NO: 37225 - DNA, 20 bp, synthetic construct
  misc_feature 1..20: note = Description of Artificial Sequence: Synthetic oligonucleotide
  misc_feature 1..20: note = Target: SCN10A; (+) strand; PAM type: NRG; PAM sequence: TGG
  source 1..20: mol_type = other DNA
ttcactcttgttgcccaggc

SEQ ID NO: 37226 - DNA, 20 bp, synthetic construct
  misc_feature 1..20: note = Description of Artificial Sequence: Synthetic oligonucleotide
  misc_feature 1..20: note = Target: SCN10A; (+) strand; PAM type: NRG; PAM sequence: GAG
  source 1..20: mol_type = other DNA
cactcttgttgcccaggctg

SEQ ID NO: 37227 - DNA, 20 bp, synthetic construct
  misc_feature 1..20: note = Description of Artificial Sequence: Synthetic oligonucleotide
  misc_feature 1..20: note = Target: SCN10A; (+) strand; PAM type: NRG; PAM sequence: TGG
  source 1..20: mol_type = other DNA
ttgcccaggctggagtgcaa

SEQ ID NO: 37228 - DNA, 20 bp, synthetic construct
  misc_feature 1..20: note = Description of Artificial Sequence: Synthetic oligonucleotide
  misc_feature 1..20: note = Target: SCN10A; (+) strand; PAM type: NRG; PAM sequence: CAG
  source 1..20: mol_type = other DNA
ggagtgcaatggcgcgatct

SEQ ID NO: 37229 - DNA, 20 bp, synthetic construct
  misc_feature 1..20: note = Description of Artificial Sequence: Synthetic oligonucleotide
  misc_feature 1..20: note = Target: SCN10A; (+) strand; PAM type: NRG; PAM sequence: CAG
  source 1..20: mol_type = other DNA
tcaccgcaacctctgcctcc

SEQ ID NO: 37230 - DNA, 20 bp, synthetic construct
  misc_feature 1..20: note = Description of Artificial Sequence: Synthetic oligonucleotide
  misc_feature 1..20: note = Target: SCN10A; (+) strand; PAM type: NRG; PAM sequence: AGG
  source 1..20: mol_type = other DNA
caccgcaacctctgcctccc

SEQ ID NO: 37231 - DNA, 20 bp, synthetic construct
  misc_feature 1..20: note = Description of Artificial Sequence: Synthetic oligonucleotide
  misc_feature 1..20: note = Target: SCN10A; (+) strand; PAM type: NRG; PAM sequence: AAG
  source 1..20: mol_type = other DNA
aacctctgcctcccaggttc

SEQ ID NO: 37232 - DNA, 20 bp, synthetic construct
  misc_feature 1..20: note = Description of Artificial Sequence: Synthetic oligonucleotide
  misc_feature 1..20: note = Target: SCN10A; (+) strand; PAM type: NRG; PAM sequence: CAG
  source 1..20: mol_type = other DNA
ttcaagcaattctcctgcct

SEQ ID NO: 37233 - DNA, 20 bp, synthetic construct
  misc_feature 1..20: note = Description of Artificial Sequence: Synthetic oligonucleotide
  misc_feature 1..20: note = Target: SCN10A; (+) strand; PAM type: NRG; PAM sequence: GAG
  source 1..20: mol_type = other DNA
ttctcctgcctcagtctcct

SEQ ID NO: 37234 - DNA, 20 bp, synthetic construct
  misc_feature 1..20: note = Description of Artificial Sequence: Synthetic oligonucleotide
  misc_feature 1..20: note = Target: SCN10A; (+) strand; PAM type: NRG; PAM sequence: TAG
  source 1..20: mol_type = other DNA
tcctgcctcagtctcctgag

SEQ ID NO: 37235 - DNA, 20 bp, synthetic construct
  misc_feature 1..20: note = Description of Artificial Sequence: Synthetic oligonucleotide
  misc_feature 1..20: note = Target: SCN10A; (+) strand; PAM type: NRG; PAM sequence: TGG
  source 1..20: mol_type = other DNA
gcctcagtctcctgagtagc

SEQ ID NO: 37236 - DNA, 20 bp, synthetic construct
  misc_feature 1..20: note = Description of Artificial Sequence: Synthetic oligonucleotide
  misc_feature 1..20: note = Target: SCN10A; (+) strand; PAM type: NRG; PAM sequence: GGG
  source 1..20: mol_type = other DNA
cctcagtctcctgagtagct

SEQ ID NO: 37237 - DNA, 20 bp, synthetic construct
  misc_feature 1..20: note = Description of Artificial Sequence: Synthetic oligonucleotide
  misc_feature 1..20: note = Target: SCN10A; (+) strand; PAM type: NRG; PAM sequence: CAG
  source 1..20: mol_type = other DNA
ctcctgagtagctgggatta

SEQ ID NO: 37238 - DNA, 20 bp, synthetic construct
  misc_feature 1..20: note = Description of Artificial Sequence: Synthetic oligonucleotide
  misc_feature 1..20: note = Target: SCN10A; (+) strand; PAM type: NRG; PAM sequence: AGG
  source 1..20: mol_type = other DNA
tcctgagtagctgggattac

SEQ ID NO: 37239 - DNA, 20 bp, synthetic construct
  misc_feature 1..20: note = Description of Artificial Sequence: Synthetic oligonucleotide
  misc_feature 1..20: note = Target: SCN10A; (+) strand; PAM type: NRG; PAM sequence: TAG
  source 1..20: mol_type = other DNA
caggcatgcaccaccacatc

SEQ ID NO: 37240 - DNA, 20 bp, synthetic construct
  misc_feature 1..20: note = Description of Artificial Sequence: Synthetic oligonucleotide
  misc_feature 1..20: note = Target: SCN10A; (+) strand; PAM type: NRG; PAM sequence: TAG
  source 1..20: mol_type = other DNA
ctagctaattttgtattttt

SEQ ID NO: 37241 - DNA, 20 bp, synthetic construct
  misc_feature 1..20: note = Description of Artificial Sequence: Synthetic oligonucleotide
  misc_feature 1..20: note = Target: SCN10A; (+) strand; PAM type: NRG; PAM sequence: TAG
  source 1..20: mol_type = other DNA
gctaattttgtattttttag

SEQ ID NO: 37242 - DNA, 20 bp, synthetic construct
  misc_feature 1..20: note = Description of Artificial Sequence: Synthetic oligonucleotide
  misc_feature 1..20: note = Target: SCN10A; (+) strand; PAM type: NRG; PAM sequence: GAG
  source 1..20: mol_type = other DNA
taattttgtattttttagta

SEQ ID NO: 37243 - DNA, 20 bp, synthetic construct
  misc_feature 1..20: note = Description of Artificial Sequence: Synthetic oligonucleotide
  misc_feature 1..20: note = Target: SCN10A; (+) strand; PAM type: NRG; PAM sequence: CGG
  source 1..20: mol_type = other DNA
tttgtattttttagtagaga

SEQ ID NO: 37244 - DNA, 20 bp, synthetic construct
  misc_feature 1..20: note = Description of Artificial Sequence: Synthetic oligonucleotide
  misc_feature 1..20: note = Target: SCN10A; (+) strand; PAM type: NRG; PAM sequence: GGG
  source 1..20: mol_type = other DNA
ttgtattttttagtagagac

SEQ ID NO: 37245 - DNA, 20 bp, synthetic construct
  misc_feature 1..20: note = Description of Artificial Sequence: Synthetic oligonucleotide
  misc_feature 1..20: note = Target: SCN10A; (+) strand; PAM type: NRG; PAM sequence: GGG
  source 1..20: mol_type = other DNA
tgtattttttagtagagacg

SEQ ID NO: 37246 - DNA, 20 bp, synthetic construct
  misc_feature 1..20: note = Description of Artificial Sequence: Synthetic oligonucleotide
  misc_feature 1..20: note = Target: SCN10A; (+) strand; PAM type: NRG; PAM sequence: TGG
  source 1..20: mol_type = other DNA
gagacggggtttctccatgt

SEQ ID NO: 37247 - DNA, 20 bp, synthetic construct
  misc_feature 1..20: note = Description of Artificial Sequence: Synthetic oligonucleotide
  misc_feature 1..20: note = Target: SCN10A; (+) strand; PAM type: NRG; PAM sequence: CAG
  source 1..20: mol_type = other DNA
gggtttctccatgttggctt

SEQ ID NO: 37248 - DNA, 20 bp, synthetic construct
  misc_feature 1..20: note = Description of Artificial Sequence: Synthetic oligonucleotide
  misc_feature 1..20: note = Target: SCN10A; (+) strand; PAM type: NRG; PAM sequence: AGG
  source 1..20: mol_type = other DNA
ggtttctccatgttggcttc

SEQ ID NO: 37249 - DNA, 20 bp, synthetic construct
  misc_feature 1..20: note = Description of Artificial Sequence: Synthetic oligonucleotide
  misc_feature 1..20: note = Target: SCN10A; (+) strand; PAM type: NRG; PAM sequence: TGG
  source 1..20: mol_type = other DNA
tctccatgttggcttcaggc

SEQ ID NO: 37250 - DNA, 20 bp, synthetic construct
  misc_feature 1..20: note = Description of Artificial Sequence: Synthetic oligonucleotide
  misc_feature 1..20: note = Target: SCN10A; (+) strand; PAM type: NRG; PAM sequence: CAG
  source 1..20: mol_type = other DNA
tggtcttgaacttctgacct

SEQ ID NO: 37251 - DNA, 20 bp, synthetic construct
  misc_feature 1..20: note = Description of Artificial Sequence: Synthetic oligonucleotide
  misc_feature 1..20: note = Target: SCN10A; (+) strand; PAM type: NRG; PAM sequence: AGG
  source 1..20: mol_type = other DNA
ggtcttgaacttctgacctc

SEQ ID NO: 37252 - DNA, 20 bp, synthetic construct
  misc_feature 1..20: note = Description of Artificial Sequence: Synthetic oligonucleotide
  misc_feature 1..20: note = Target: SCN10A; (+) strand; PAM type: NRG; PAM sequence: TGG
  source 1..20: mol_type = other DNA
ctcaggtgatctgcccacct

SEQ ID NO: 37253 - DNA, 20 bp, synthetic construct
  misc_feature 1..20: note = Description of Artificial Sequence: Synthetic oligonucleotide
  misc_feature 1..20: note = Target: SCN10A; (+) strand; PAM type: NRG; PAM sequence: AAG
  source 1..20: mol_type = other DNA
ctgcccaccttggcctccca

SEQ ID NO: 37254 - DNA, 20 bp, synthetic construct
  misc_feature 1..20: note = Description of Artificial Sequence: Synthetic oligonucleotide
  misc_feature 1..20: note = Target: SCN10A; (+) strand; PAM type: NRG; PAM sequence: GAG
  source 1..20: mol_type = other DNA
ccttggcctcccaaagtgct

SEQ ID NO: 37255 - DNA, 20 bp, synthetic construct
  misc_feature 1..20: note = Description of Artificial Sequence: Synthetic oligonucleotide
  misc_feature 1..20: note = Target: SCN10A; (+) strand; PAM type: NRG; PAM sequence: CAG
  source 1..20: mol_type = other DNA
ctcccaaagtgctgagatta

SEQ ID NO: 37256 - DNA, 20 bp, synthetic construct
  misc_feature 1..20: note = Description of Artificial Sequence: Synthetic oligonucleotide
  misc_feature 1..20: note = Target: SCN10A; (+) strand; PAM type: NRG; PAM sequence: AGG
  source 1..20: mol_type = other DNA
tcccaaagtgctgagattac

SEQ ID NO: 37257 - DNA, 20 bp, synthetic construct
  misc_feature 1..20: note = Description of Artificial Sequence: Synthetic oligonucleotide
  misc_feature 1..20: note = Target: SCN10A; (+) strand; PAM type: NRG; PAM sequence: GAG
  source 1..20: mol_type = other DNA
agtgctgagattacaggcgt

SEQ ID NO: 37258 - DNA, 20 bp, synthetic construct
  misc_feature 1..20: note = Description of Artificial Sequence: Synthetic oligonucleotide
  misc_feature 1..20: note = Target: SCN10A; (+) strand; PAM type: NRG; PAM sequence: CAG
  source 1..20: mol_type = other DNA
caggcgtgagctactgtgcc

SEQ ID NO: 37259 - DNA, 20 bp, synthetic construct
  misc_feature 1..20: note = Description of Artificial Sequence: Synthetic oligonucleotide
  misc_feature 1..20: note = Target: SCN10A; (+) strand; PAM type: NRG; PAM sequence: TGG
  source 1..20: mol_type = other DNA
ccagccctgaattctttatc

SEQ ID NO: 37260 - DNA, 20 bp, synthetic construct
  misc_feature 1..20: note = Description of Artificial Sequence: Synthetic oligonucleotide
  misc_feature 1..20: note = Target: SCN10A; (+) strand; PAM type: NRG; PAM sequence: CAG
  source 1..20: mol_type = other DNA
gaattctttatctggcaatt

SEQ ID NO: 37261 - DNA, 20 bp, synthetic construct
  misc_feature 1..20: note = Description of Artificial Sequence: Synthetic oligonucleotide
  misc_feature 1..20: note = Target: SCN10A; (+) strand; PAM type: NRG; PAM sequence: GAG
  source 1..20: mol_type = other DNA
attctttatctggcaattca

SEQ ID NO: 37262 - DNA, 20 bp, synthetic construct
  misc_feature 1..20: note = Description of Artificial Sequence: Synthetic oligonucleotide
  misc_feature 1..20: note = Target: SCN10A; (+) strand; PAM type: NRG; PAM sequence: TAG
  source 1..20: mol_type = other DNA
gcaattcagagatttcttct

SEQ ID NO: 37263 - DNA, 20 bp, synthetic construct
  misc_feature 1..20: note = Description of Artificial Sequence: Synthetic oligonucleotide
  misc_feature 1..20: note = Target: SCN10A; (+) strand; PAM type: NRG; PAM sequence: TGG
  source 1..20: mol_type = other DNA
tcagagatttcttcttagtt

SEQ ID NO: 37264 - DNA, 20 bp, synthetic construct
  misc_feature 1..20: note = Description of Artificial Sequence: Synthetic oligonucleotide
  misc_feature 1..20: note = Target: SCN10A; (+) strand; PAM type: NRG; PAM sequence: TGG
  source 1..20: mol_type = other DNA
tcttagtttggatccattgt

SEQ ID NO: 37265 - DNA, 20 bp, synthetic construct
  misc_feature 1..20: note = Description of Artificial Sequence: Synthetic oligonucleotide
  misc_feature 1..20: note = Target: SCN10A; (+) strand; PAM type: NRG; PAM sequence: GGG
  source 1..20: mol_type = other DNA
cttagtttggatccattgtt

SEQ ID NO: 37266 - DNA, 20 bp, synthetic construct
  misc_feature 1..20: note = Description of Artificial Sequence: Synthetic oligonucleotide
  misc_feature 1..20: note = Target: SCN10A; (+) strand; PAM type: NRG; PAM sequence: GGG
  source 1..20: mol_type = other DNA
ttagtttggatccattgttg

SEQ ID NO: 37267 - DNA, 20 bp, synthetic construct
  misc_feature 1..20: note = Description of Artificial Sequence: Synthetic oligonucleotide
  misc_feature 1..20: note = Target: SCN10A; (+) strand; PAM type: NRG; PAM sequence: GAG
  source 1..20: mol_type = other DNA
agtttggatccattgttggg

SEQ ID NO: 37268 - DNA, 20 bp, synthetic construct
  misc_feature 1..20: note = Description of Artificial Sequence: Synthetic oligonucleotide
  misc_feature 1..20: note = Target: SCN10A; (+) strand; PAM type: NRG; PAM sequence: TAG
  source 1..20: mol_type = other DNA
tggatccattgttggggagc

SEQ ID NO: 37269 - DNA, 20 bp, synthetic construct
  misc_feature 1..20: note = Description of Artificial Sequence: Synthetic oligonucleotide
  misc_feature 1..20: note = Target: SCN10A; (+) strand; PAM type: NRG; PAM sequence: GAG
  source 1..20: mol_type = other DNA
gggagctagtttgatctttt

SEQ ID NO: 37270 - DNA, 20 bp, synthetic construct
  misc_feature 1..20: note = Description of Artificial Sequence: Synthetic oligonucleotide
  misc_feature 1..20: note = Target: SCN10A; (+) strand; PAM type: NRG; PAM sequence: AGG
  source 1..20: mol_type = other DNA
ggagctagtttgatcttttg

SEQ ID NO: 37271 - DNA, 20 bp, synthetic construct
  misc_feature 1..20: note = Description of Artificial Sequence: Synthetic oligonucleotide
  misc_feature 1..20: note = Target: SCN10A; (+) strand; PAM type: NRG; PAM sequence: GGG
  source 1..20: mol_type = other DNA
gagctagtttgatcttttga

SEQ ID NO: 37272 - DNA, 20 bp, synthetic construct
  misc_feature 1..20: note = Description of Artificial Sequence: Synthetic oligonucleotide
  misc_feature 1..20: note = Target: SCN10A; (+) strand; PAM type: NRG; PAM sequence: GGG
  source 1..20: mol_type = other DNA
agctagtttgatcttttgag

SEQ ID NO: 37273 - DNA, 20 bp, synthetic construct
  misc_feature 1..20: note = Description of Artificial Sequence: Synthetic oligonucleotide
  misc_feature 1..20: note = Target: SCN10A; (+) strand; PAM type: NRG; PAM sequence: CAG
  source 1..20: mol_type = other DNA
accctcttttgtcatattac

SEQ ID NO: 37274 - DNA, 20 bp, synthetic construct
  misc_feature 1..20: note = Description of Artificial Sequence: Synthetic oligonucleotide
  misc_feature 1..20: note = Target: SCN10A; (+) strand; PAM type: NRG; PAM sequence: TGG
  source 1..20: mol_type = other DNA
tattaccagaattgcttttc

SEQ ID NO: 37275 - DNA, 20 bp, synthetic construct
  misc_feature 1..20: note = Description of Artificial Sequence: Synthetic oligonucleotide
  misc_feature 1..20: note = Target: SCN10A; (+) strand; PAM type: NRG; PAM sequence: GAG
  source 1..20: mol_type = other DNA
tttctggttccttctcattt

SEQ ID NO: 37276 - DNA, 20 bp, synthetic construct
  misc_feature 1..20: note = Description of Artificial Sequence: Synthetic oligonucleotide
  misc_feature 1..20: note = Target: SCN10A; (+) strand; PAM type: NRG; PAM sequence: TAG
  source 1..20: mol_type = other DNA
ctggttccttctcatttgag

SEQ ID NO: 37277 - DNA, 20 bp, synthetic construct
  misc_feature 1..20: note = Description of Artificial Sequence: Synthetic oligonucleotide
  misc_feature 1..20: note = Target: SCN10A; (+) strand; PAM type: NRG; PAM sequence: CAG
  source 1..20: mol_type = other DNA
ctcatttgagtagactattt

SEQ ID NO: 37278 - DNA, 20 bp, synthetic construct
  misc_feature 1..20: note = Description of Artificial Sequence: Synthetic oligonucleotide
  misc_feature 1..20: note = Target: SCN10A; (+) strand; PAM type: NRG; PAM sequence: GAG
  source 1..20: mol_type = other DNA
catttgagtagactatttca

SEQ ID NO: 37279 - DNA, 20 bp, synthetic construct
  misc_feature 1..20: note = Description of Artificial Sequence: Synthetic oligonucleotide
  misc_feature 1..20: note = Target: SCN10A; (+) strand; PAM type: NRG; PAM sequence: AAG
  source 1..20: mol_type = other DNA
gagtagactatttcagagaa

SEQ ID NO: 37280 - DNA, 20 bp, synthetic construct
  misc_feature 1..20: note = Description of Artificial Sequence: Synthetic oligonucleotide
  misc_feature 1..20: note = Target: SCN10A; (+) strand; PAM type: NRG; PAM sequence: TGG
  source 1..20: mol_type = other DNA
actatttcagagaaaagatc

SEQ ID NO: 37281 - DNA, 20 bp, synthetic construct
  misc_feature 1..20: note = Description of Artificial Sequence: Synthetic oligonucleotide
  misc_feature 1..20: note = Target: SCN10A; (+) strand; PAM type: NRG; PAM sequence: TGG
  source 1..20: mol_type = other DNA
agaaaagatctggaactgaa

SEQ ID NO: 37282 - DNA, 20 bp, synthetic construct
  misc_feature 1..20: note = Description of Artificial Sequence: Synthetic oligonucleotide
  misc_feature 1..20: note = Target: SCN10A; (+) strand; PAM type: NRG; PAM sequence: CAG
  source 1..20: mol_type = other DNA
ggaactgaatggctgttgtg

SEQ ID NO: 37283 - DNA, 20 bp, synthetic construct
  misc_feature 1..20: note = Description of Artificial Sequence: Synthetic oligonucleotide
  misc_feature 1..20: note = Target: SCN10A; (+) strand; PAM type: NRG; PAM sequence: TGG
  source 1..20: mol_type = other DNA
gtgcagattcttttgtttca

SEQ ID NO: 37284 - DNA, 20 bp, synthetic construct
  misc_feature 1..20: note = Description of Artificial Sequence: Synthetic oligonucleotide
  misc_feature 1..20: note = Target: SCN10A; (+) strand; PAM type: NRG; PAM sequence: GGG
  source 1..20: mol_type = other DNA
tgcagattcttttgtttcat

SEQ ID NO: 37285 - DNA, 20 bp, synthetic construct
  misc_feature 1..20: note = Description of Artificial Sequence: Synthetic oligonucleotide
  misc_feature 1..20: note = Target: SCN10A; (+) strand; PAM type: NRG; PAM sequence: TGG
  source 1..20: mol_type = other DNA
tcatgggtgatctcttgatg

SEQ ID NO: 37286 - DNA, 20 bp, synthetic construct
  misc_feature 1..20: note = Description of Artificial Sequence: Synthetic oligonucleotide
  misc_feature 1..20: note = Target: SCN10A; (+) strand; PAM type: NRG; PAM sequence: TGG
  source 1..20: mol_type = other DNA
tggtgctctccccaatcccc

SEQ ID NO: 37287 - DNA, 20 bp, synthetic construct
  misc_feature 1..20: note = Description of Artificial Sequence: Synthetic oligonucleotide
  misc_feature 1..20: note = Target: SCN10A; (+) strand; PAM type: NRG; PAM sequence: GGG
  source 1..20: mol_type = other DNA
ggtgctctccccaatcccct

SEQ ID NO: 37288 - DNA, 20 bp, synthetic construct
  misc_feature 1..20: note = Description of Artificial Sequence: Synthetic oligonucleotide
  misc_feature 1..20: note = Target: SCN10A; (+) strand; PAM type: NRG; PAM sequence: GGG
  source 1..20: mol_type = other DNA
gtgctctccccaatcccctg

SEQ ID NO: 37289 - DNA, 20 bp, synthetic construct
  misc_feature 1..20: note = Description of Artificial Sequence: Synthetic oligonucleotide
  misc_feature 1..20: note = Target: SCN10A; (+) strand; PAM type: NRG; PAM sequence: TGG
  source 1..20: mol_type = other DNA
tctccccaatcccctgggga

SEQ ID NO: 37290 - DNA, 20 bp, synthetic construct
  misc_feature 1..20: note = Description of Artificial Sequence: Synthetic oligonucleotide
  misc_feature 1..20: note = Target: SCN10A; (+) strand; PAM type: NRG; PAM sequence: GGG
  source 1..20: mol_type = other DNA
ctccccaatcccctggggat

SEQ ID NO: 37291 - DNA, 20 bp, synthetic construct
  misc_feature 1..20: note = Description of Artificial Sequence: Synthetic oligonucleotide
  misc_feature 1..20: note = Target: SCN10A; (+) strand; PAM type: NRG; PAM sequence: GGG
  source 1..20: mol_type = other DNA
tccccaatcccctggggatg

SEQ ID NO: 37292 - DNA, 20 bp, synthetic construct
  misc_feature 1..20: note = Description of Artificial Sequence: Synthetic oligonucleotide
  misc_feature 1..20: note = Target: SCN10A; (+) strand; PAM type: NRG; PAM sequence: GAG
  source 1..20: mol_type = other DNA
ccctggggatggggcttcct

SEQ ID NO: 37293 - DNA, 20 bp, synthetic construct
  misc_feature 1..20: note = Description of Artificial Sequence: Synthetic oligonucleotide
  misc_feature 1..20: note = Target: SCN10A; (+) strand; PAM type: NRG; PAM sequence: GAG
  source 1..20: mol_type = other DNA
ctggggatggggcttcctga

SEQ ID NO: 37294 - DNA, 20 bp, synthetic construct
  misc_feature 1..20: note = Description of Artificial Sequence: Synthetic oligonucleotide
  misc_feature 1..20: note = Target: SCN10A; (+) strand; PAM type: NRG; PAM sequence: TGG
  source 1..20: mol_type = other DNA
ggatggggcttcctgagagc

SEQ ID NO: 37295 - DNA, 20 bp, synthetic construct
  misc_feature 1..20: note = Description of Artificial Sequence: Synthetic oligonucleotide
  misc_feature 1..20: note = Target: SCN10A; (+) strand; PAM type: NRG; PAM sequence: CAG
  source 1..20: mol_type = other DNA
gcttcctgagagctggactg

SEQ ID NO: 37296 - DNA, 20 bp, synthetic construct
  misc_feature 1..20: note = Description of Artificial Sequence: Synthetic oligonucleotide
  misc_feature 1..20: note = Target: SCN10A; (+) strand; PAM type: NRG; PAM sequence: TGG
  source 1..20: mol_type = other DNA
agtgatcgttattgttcttc

SEQ ID NO: 37297 - DNA, 20 bp, synthetic construct
  misc_feature 1..20: note = Description of Artificial Sequence: Synthetic oligonucleotide
  misc_feature 1..20: note = Target: SCN10A; (+) strand; PAM type: NRG; PAM sequence: GGG
  source 1..20: mol_type = other DNA
gtgatcgttattgttcttct

SEQ ID NO: 37298 - DNA, 20 bp, synthetic construct
  misc_feature 1..20: note = Description of Artificial Sequence: Synthetic oligonucleotide
  misc_feature 1..20: note = Target: SCN10A; (+) strand; PAM type: NRG; PAM sequence: TAG
  source 1..20: mol_type = other DNA
cgttattgttcttctgggcc

SEQ ID NO: 37299 - DNA, 20 bp, synthetic construct
  misc_feature 1..20: note = Description of Artificial Sequence: Synthetic oligonucleotide
  misc_feature 1..20: note = Target: SCN10A; (+) strand; PAM type: NRG; PAM sequence: CAG
  source 1..20: mol_type = other DNA
ttcttctgggcctagccaca

SEQ ID NO: 37300 - DNA, 20 bp, synthetic construct
  misc_feature 1..20: note = Description of Artificial Sequence: Synthetic oligonucleotide
  misc_feature 1..20: note = Target: SCN10A; (+) strand; PAM type: NRG; PAM sequence: GAG
  source 1..20: mol_type = other DNA
cttctgggcctagccacaca

SEQ ID NO: 37301 - DNA, 20 bp, synthetic construct
  misc_feature 1..20: note = Description of Artificial Sequence: Synthetic oligonucleotide
  misc_feature 1..20: note = Target: SCN10A; (+) strand; PAM type: NRG; PAM sequence: AGG
  source 1..20: mol_type = other DNA
ttctgggcctagccacacag

SEQ ID NO: 37302 - DNA, 20 bp, synthetic construct
  misc_feature 1..20: note = Description of Artificial Sequence: Synthetic oligonucleotide
  misc_feature 1..20: note = Target: SCN10A; (+) strand; PAM type: NRG; PAM sequence: GGG
  source 1..20: mol_type = other DNA
tctgggcctagccacacaga

SEQ ID NO: 37303 - DNA, 20 bp, synthetic construct
  misc_feature 1..20: note = Description of Artificial Sequence: Synthetic oligonucleotide
  misc_feature 1..20: note = Target: SCN10A; (+) strand; PAM type: NRG; PAM sequence: GGG
  source 1..20: mol_type = other DNA
ctgggcctagccacacagag

SEQ ID NO: 37304 - DNA, 20 bp, synthetic construct
  misc_feature 1..20: note = Description of Artificial Sequence: Synthetic oligonucleotide
  misc_feature 1..20: note = Target: SCN10A; (+) strand; PAM type: NRG; PAM sequence: CAG
  source 1..20: mol_type = other DNA
tagccacacagaggggctac

SEQ ID NO: 37305 - DNA, 20 bp, synthetic construct
  misc_feature 1..20: note = Description of Artificial Sequence: Synthetic oligonucleotide
  misc_feature 1..20: note = Target: SCN10A; (+) strand; PAM type: NRG; PAM sequence: AGG
  source 1..20: mol_type = other DNA
agccacacagaggggctacc

SEQ ID NO: 37306 - DNA, 20 bp, synthetic construct
  misc_feature 1..20: note = Description of Artificial Sequence: Synthetic oligonucleotide
  misc_feature 1..20: note = Target: SCN10A; (+) strand; PAM type: NRG; PAM sequence: TGG
  source 1..20: mol_type = other DNA
acagaggggctaccaggctc

SEQ ID NO: 37307 - DNA, 20 bp, synthetic construct
  misc_feature 1..20: note = Description of Artificial Sequence: Synthetic oligonucleotide
  misc_feature 1..20: note = Target: SCN10A; (+) strand; PAM type: NRG; PAM sequence: GGG
  source 1..20: mol_type = other DNA
cagaggggctaccaggctct

SEQ ID NO: 37308 - DNA, 20 bp, synthetic construct
  misc_feature 1..20: note = Description of Artificial Sequence: Synthetic oligonucleotide
  misc_feature 1..20: note = Target: SCN10A; (+) strand; PAM type: NRG; PAM sequence: GGG
  source 1..20: mol_type = other DNA
agaggggctaccaggctctg

SEQ ID NO: 37309 - DNA, 20 bp, synthetic construct
  misc_feature 1..20: note = Description of Artificial Sequence: Synthetic oligonucleotide
  misc_feature 1..20: note = Target: SCN10A; (+) strand; PAM type: NRG; PAM sequence: TAG
  source 1..20: mol_type = other DNA
ggggctaccaggctctgggg

SEQ ID NO: 37310 - DNA, 20 bp, synthetic construct
  misc_feature 1..20: note = Description of Artificial Sequence: Synthetic oligonucleotide
  misc_feature 1..20: note = Target: SCN10A; (+) strand; PAM type: NRG; PAM sequence: TGG
  source 1..20: mol_type = other DNA
accaggctctggggtagtac

SEQ ID NO: 37311 - DNA, 20 bp, synthetic construct
  misc_feature 1..20: note = Description of Artificial Sequence: Synthetic oligonucleotide
  misc_feature 1..20: note = Target: SCN10A; (+) strand; PAM type: NRG; PAM sequence: GGG
  source 1..20: mol_type = other DNA
ccaggctctggggtagtact

SEQ ID NO: 37312 - DNA, 20 bp, synthetic construct
  misc_feature 1..20: note = Description of Artificial Sequence: Synthetic oligonucleotide
  misc_feature 1..20: note = Target: SCN10A; (+) strand; PAM type: NRG; PAM sequence: AAG
  source 1..20: mol_type = other DNA
tagtactgggaaatgcctgc

SEQ ID NO: 37313 - DNA, 20 bp, synthetic construct
  misc_feature 1..20: note = Description of Artificial Sequence: Synthetic oligonucleotide
  misc_feature 1..20: note = Target: SCN10A; (+) strand; PAM type: NRG; PAM sequence: GAG
  source 1..20: mol_type = other DNA
gtactgggaaatgcctgcaa

SEQ ID NO: 37314 - DNA, 20 bp, synthetic construct
  misc_feature 1..20: note = Description of Artificial Sequence: Synthetic oligonucleotide
  misc_feature 1..20: note = Target: SCN10A; (+) strand; PAM type: NRG; PAM sequence: AAG
  source 1..20: mol_type = other DNA
ctgtgatgtgattgatcttg

SEQ ID NO: 37315 - DNA, 20 bp, synthetic construct
  misc_feature 1..20: note = Description of Artificial Sequence: Synthetic oligonucleotide
  misc_feature 1..20: note = Target: SCN10A; (+) strand; PAM type: NRG; PAM sequence: CAG
  source 1..20: mol_type = other DNA
tgattgatcttgaagtctcc

SEQ ID NO: 37316 - DNA, 20 bp, synthetic construct
  misc_feature 1..20: note = Description of Artificial Sequence: Synthetic oligonucleotide
  misc_feature 1..20: note = Target: SCN10A; (+) strand; PAM type: NRG; PAM sequence: TGG
  source 1..20: mol_type = other DNA
atcttgaagtctcccagcca

SEQ ID NO: 37317 - DNA, 20 bp, synthetic construct
  misc_feature 1..20: note = Description of Artificial Sequence: Synthetic oligonucleotide
  misc_feature 1..20: note = Target: SCN10A; (+) strand; PAM type: NRG; PAM sequence: CAG
  source 1..20: mol_type = other DNA
agtctcccagccatggatat

SEQ ID NO: 37318 - DNA, 20 bp, synthetic construct
  misc_feature 1..20: note = Description of Artificial Sequence: Synthetic oligonucleotide
  misc_feature 1..20: note = Target: SCN10A; (+) strand; PAM type: NRG; PAM sequence: TGG
  source 1..20: mol_type = other DNA
atggatatcagcatctgttc

SEQ ID NO: 37319 - DNA, 20 bp, synthetic construct
  misc_feature 1..20: note = Description of Artificial Sequence: Synthetic oligonucleotide
  misc_feature 1..20: note = Target: SCN10A; (+) strand; PAM type: NRG; PAM sequence: AAG
  source 1..20: mol_type = other DNA
tatcagcatctgttctggtg

SEQ ID NO: 37320 - DNA, 20 bp, synthetic construct
  misc_feature 1..20: note = Description of Artificial Sequence: Synthetic oligonucleotide
  misc_feature 1..20: note = Target: SCN10A; (+) strand; PAM type: NRG; PAM sequence: AGG
  source 1..20: mol_type = other DNA
atcagcatctgttctggtga

SEQ ID NO: 37321 - DNA, 20 bp, synthetic construct
  misc_feature 1..20: note = Description of Artificial Sequence: Synthetic oligonucleotide
  misc_feature 1..20: note = Target: SCN10A; (+) strand; PAM type: NRG; PAM sequence: TGG
  source 1..20: mol_type = other DNA
agcatctgttctggtgaagg

SEQ ID NO: 37322 - DNA, 20 bp, synthetic construct
  misc_feature 1..20: note = Description of Artificial Sequence: Synthetic oligonucleotide
  misc_feature 1..20: note = Target: SCN10A; (+) strand; PAM type: NRG; PAM sequence: CAG
  source 1..20: mol_type = other DNA
atctgttctggtgaaggtgg

SEQ ID NO: 37323 - DNA, 20 bp, synthetic construct
  misc_feature 1..20: note = Description of Artificial Sequence: Synthetic oligonucleotide
  misc_feature 1..20: note = Target: SCN10A; (+) strand; PAM type: NRG; PAM sequence: GAG
  source 1..20: mol_type = other DNA
ctgttctggtgaaggtggca

SEQ ID NO: 37324 - DNA, 20 bp, synthetic construct
  misc_feature 1..20: note = Description of Artificial Sequence: Synthetic oligonucleotide
  misc_feature 1..20: note = Target: SCN10A; (+) strand; PAM type: NRG; PAM sequence: AGG
  source 1..20: mol_type = other DNA
tgttctggtgaaggtggcag

SEQ ID NO: 37325 - DNA, 20 bp, synthetic construct
  misc_feature 1..20: note = Description of Artificial Sequence: Synthetic oligonucleotide
  misc_feature 1..20: note = Target: SCN10A; (+) strand; PAM type: NRG; PAM sequence: AAG
  source 1..20: mol_type = other DNA
gtgaaggtggcagaggaatg

SEQ ID NO: 37326 - DNA, 20 bp, synthetic construct
  misc_feature 1..20: note = Description of Artificial Sequence: Synthetic oligonucleotide
  misc_feature 1..20: note = Target: SCN10A; (+) strand; PAM type: NRG; PAM sequence: TAG
  source 1..20: mol_type = other DNA
aaggtggcagaggaatgaag

SEQ ID NO: 37327 - DNA, 20 bp, synthetic construct
  misc_feature 1..20: note = Description of Artificial Sequence: Synthetic oligonucleotide
  misc_feature 1..20: note = Target: SCN10A; (+) strand; PAM type: NRG; PAM sequence: GAG
  source 1..20: mol_type = other DNA
ggtggcagaggaatgaagta

SEQ ID NO: 37328 - DNA, 20 bp, synthetic construct
  misc_feature 1..20: note = Description of Artificial Sequence: Synthetic oligonucleotide
  misc_feature 1..20: note = Target: SCN10A; (+) strand; PAM type: NRG; PAM sequence: GAG
  source 1..20: mol_type = other DNA
aggaatgaagtagagtctgt

SEQ ID NO: 37329 - DNA, 20 bp, synthetic construct
  misc_feature 1..20: note = Description of Artificial Sequence: Synthetic oligonucleotide
  misc_feature 1..20: note = Target: SCN10A; (+) strand; PAM type: NRG; PAM sequence: GAG
  source 1..20: mol_type = other DNA
gaatgaagtagagtctgtga

SEQ ID NO: 37330 - DNA, 20 bp, synthetic construct
  misc_feature 1..20: note = Description of Artificial Sequence: Synthetic oligonucleotide
  misc_feature 1..20: note = Target: SCN10A; (+) strand; PAM type: NRG; PAM sequence: TAG
  source 1..20: mol_type = other DNA
agtagagtctgtgagagtcc

SEQ ID NO: 37331 - DNA, 20 bp, synthetic construct
  misc_feature 1..20: note = Description of Artificial Sequence: Synthetic oligonucleotide
  misc_feature 1..20: note = Target: SCN10A; (+) strand; PAM type: NRG; PAM sequence: AGG
  source 1..20: mol_type = other DNA
gtagagtctgtgagagtcct

SEQ ID NO: 37332 - DNA, 20 bp, synthetic construct
  misc_feature 1..20: note = Description of Artificial Sequence: Synthetic oligonucleotide
  misc_feature 1..20: note = Target: SCN10A; (+) strand; PAM type: NRG; PAM sequence: TAG
  source 1..20: mol_type = other DNA
tctgtgagagtcctaggctg

SEQ ID NO: 37333 - DNA, 20 bp, synthetic construct
  misc_feature 1..20: note = Description of Artificial Sequence: Synthetic oligonucleotide
  misc_feature 1..20: note = Target: SCN10A; (+) strand; PAM type: NRG; PAM sequence: TAG
  source 1..20: mol_type = other DNA
tgagagtcctaggctgtaga

SEQ ID NO: 37334 - DNA, 20 bp, synthetic construct
  misc_feature 1..20: note = Description of Artificial Sequence: Synthetic oligonucleotide
  misc_feature 1..20: note = Target: SCN10A; (+) strand; PAM type: NRG; PAM sequence: TAG
  source 1..20: mol_type = other DNA
tcctaggctgtagatagatt

SEQ ID NO: 37335 - DNA, 20 bp, synthetic construct
  misc_feature 1..20: note = Description of Artificial Sequence: Synthetic oligonucleotide
  misc_feature 1..20: note = Target: SCN10A; (+) strand; PAM type: NRG; PAM sequence: TGG
  source 1..20: mol_type = other DNA
tgtagatagatttagtgtgc

SEQ ID NO: 37336 - DNA, 20 bp, synthetic construct
  misc_feature 1..20: note = Description of Artificial Sequence: Synthetic oligonucleotide
  misc_feature 1..20: note = Target: SCN10A; (+) strand; PAM type: NRG; PAM sequence: TAG
  source 1..20: mol_type = other DNA
gtgctggctttcttgaatgc

SEQ ID NO: 37337 - DNA, 20 bp, synthetic construct
  misc_feature 1..20: note = Description of Artificial Sequence: Synthetic oligonucleotide
  misc_feature 1..20: note = Target: SCN10A; (+) strand; PAM type: NRG; PAM sequence: TAG
  source 1..20: mol_type = other DNA
ttcttgaatgctagttatgt

SEQ ID NO: 37338 - DNA, 20 bp, synthetic construct
  misc_feature 1..20: note = Description of Artificial Sequence: Synthetic oligonucleotide
  misc_feature 1..20: note = Target: SCN10A; (+) strand; PAM type: NRG; PAM sequence: CAG
  source 1..20: mol_type = other DNA
ttgaatgctagttatgttag

SEQ ID NO: 37339 - DNA, 20 bp, synthetic construct
  misc_feature 1..20: note = Description of Artificial Sequence: Synthetic oligonucleotide
  misc_feature 1..20: note = Target: SCN10A; (+) strand; PAM type: NRG; PAM sequence: AAG
  source 1..20: mol_type = other DNA
tgctagttatgttagcagtg

SEQ ID NO: 37340 - DNA, 20 bp, synthetic construct
  misc_feature 1..20: note = Description of Artificial Sequence: Synthetic oligonucleotide
  misc_feature 1..20: note = Target: SCN10A; (+) strand; PAM type: NRG; PAM sequence: TGG
  source 1..20: mol_type = other DNA
ttagcagtgaagttgtcata

SEQ ID NO: 37341 - DNA, 20 bp, synthetic construct
  misc_feature 1..20: note = Description of Artificial Sequence: Synthetic oligonucleotide
  misc_feature 1..20: note = Target: SCN10A; (+) strand; PAM type: NRG; PAM sequence: CAG
  source 1..20: mol_type = other DNA
cagtgaagttgtcatatgga

SEQ ID NO: 37342 - DNA, 20 bp, synthetic construct
  misc_feature 1..20: note = Description of Artificial Sequence: Synthetic oligonucleotide
  misc_feature 1..20: note = Target: SCN10A; (+) strand; PAM type: NRG; PAM sequence: CAG
  source 1..20: mol_type = other DNA
agttgtcatatggacagact

SEQ ID NO: 37343 - DNA, 20 bp, synthetic construct
  misc_feature 1..20: note = Description of Artificial Sequence: Synthetic oligonucleotide
  misc_feature 1..20: note = Target: SCN10A; (+) strand; PAM type: NRG; PAM sequence: AGG
  source 1..20: mol_type = other DNA
gttgtcatatggacagactc

SEQ ID NO: 37344 - DNA, 20 bp, synthetic construct
  misc_feature 1..20: note = Description of Artificial Sequence: Synthetic oligonucleotide
  misc_feature 1..20: note = Target: SCN10A; (+) strand; PAM type: NRG; PAM sequence: TGG
  source 1..20: mol_type = other DNA
atggacagactcaggacgtc

SEQ ID NO: 37345 - DNA, 20 bp, synthetic construct
  misc_feature 1..20: note = Description of Artificial Sequence: Synthetic oligonucleotide
  misc_feature 1..20: note = Target: SCN10A; (+) strand; PAM type: NRG; PAM sequence: TAG
  source 1..20: mol_type = other DNA
acagactcaggacgtctggt

SEQ ID NO: 37346 - DNA, 20 bp, synthetic construct
  misc_feature 1..20: note = Description of Artificial Sequence: Synthetic oligonucleotide
  misc_feature 1..20: note = Target: SCN10A; (+) strand; PAM type: NRG; PAM sequence: CAG
  source 1..20: mol_type = other DNA
actcaggacgtctggttagc

SEQ ID NO: 37347 - DNA, 20 bp, synthetic construct
  misc_feature 1..20: note = Description of Artificial Sequence: Synthetic oligonucleotide
  misc_feature 1..20: note = Target: SCN10A; (+) strand; PAM type: NRG; PAM sequence: AGG
  source 1..20: mol_type = other DNA
ctcaggacgtctggttagcc

SEQ ID NO: 37348 - DNA, 20 bp, synthetic construct
  misc_feature 1..20: note = Description of Artificial Sequence: Synthetic oligonucleotide
  misc_feature 1..20: note = Target: SCN10A; (+) strand; PAM type: NRG; PAM sequence: CAG
  source 1..20: mol_type = other DNA
tctggttagccaggatgttg

SEQ ID NO: 37349 - DNA, 20 bp, synthetic construct
  misc_feature 1..20: note = Description of Artificial Sequence: Synthetic oligonucleotide
  misc_feature 1..20: note = Target: SCN10A; (+) strand; PAM type: NRG; PAM sequence: AGG
  source 1..20: mol_type = other DNA
ctggttagccaggatgttgc

SEQ ID NO: 37350 - DNA, 20 bp, synthetic construct
  misc_feature 1..20: note = Description of Artificial Sequence: Synthetic oligonucleotide
  misc_feature 1..20: note = Target: SCN10A; (+) strand; PAM type: NRG; PAM sequence: CAG
  source 1..20: mol_type = other DNA
gttagccaggatgttgcagg

SEQ ID NO: 37351 - DNA, 20 bp, synthetic construct
  misc_feature 1..20: note = Description of Artificial Sequence: Synthetic oligonucleotide
  misc_feature 1..20: note = Target: SCN10A; (+) strand; PAM type: NRG; PAM sequence: TGG
  source 1..20: mol_type = other DNA
gatgttgcaggcagtgcaac

SEQ ID NO: 37352 - DNA, 20 bp, synthetic construct
  misc_feature 1..20: note = Description of Artificial Sequence: Synthetic oligonucleotide
  misc_feature 1..20: note = Target: SCN10A; (+) strand; PAM type: NRG; PAM sequence: TGG
  source 1..20: mol_type = other DNA
ggttgttgttttctttttcc

SEQ ID NO: 37353 - DNA, 20 bp, synthetic construct
  misc_feature 1..20: note = Description of Artificial Sequence: Synthetic oligonucleotide
  misc_feature 1..20: note = Target: SCN10A; (+) strand; PAM type: NRG; PAM sequence: GGG
  source 1..20: mol_type = other DNA
gttgttgttttctttttcct

SEQ ID NO: 37354 - DNA, 20 bp, synthetic construct
  misc_feature 1..20: note = Description of Artificial Sequence: Synthetic oligonucleotide
  misc_feature 1..20: note = Target: SCN10A; (+) strand; PAM type: NRG; PAM sequence: AAG
  source 1..20: mol_type = other DNA
ttttctttttcctgggatca

SEQ ID NO: 37355 - DNA, 20 bp, synthetic construct
  misc_feature 1..20: note = Description of Artificial Sequence: Synthetic oligonucleotide
  misc_feature 1..20: note = Target: SCN10A; (+) strand; PAM type: NRG; PAM sequence: GAG
  source 1..20: mol_type = other DNA
gatcaaagttattctgtcat

SEQ ID NO: 37356 - DNA, 20 bp, synthetic construct
  misc_feature 1..20: note = Description of Artificial Sequence: Synthetic oligonucleotide
  misc_feature 1..20: note = Target: SCN10A; (+) strand; PAM type: NRG; PAM sequence: TGG
  source 1..20: mol_type = other DNA
tctgtcatgagttgctttaa

SEQ ID NO: 37357 - DNA, 20 bp, synthetic construct
  misc_feature 1..20: note = Description of Artificial Sequence: Synthetic oligonucleotide
  misc_feature 1..20: note = Target: SCN10A; (+) strand; PAM type: NRG; PAM sequence: GAG
  source 1..20: mol_type = other DNA
atgagttgctttaatggcct

SEQ ID NO: 37358 - DNA, 20 bp, synthetic construct
  misc_feature 1..20: note = Description of Artificial Sequence: Synthetic oligonucleotide
  misc_feature 1..20: note = Target: SCN10A; (+) strand; PAM type: NRG; PAM sequence: CAG
  source 1..20: mol_type = other DNA
ggcctgagctgtttgacctc

SEQ ID NO: 37359 - DNA, 20 bp, synthetic construct
  misc_feature 1..20: note = Description of Artificial Sequence: Synthetic oligonucleotide
  misc_feature 1..20: note = Target: SCN10A; (+) strand; PAM type: NRG; PAM sequence: CGG
  source 1..20: mol_type = other DNA
tgagctgtttgacctccagc

SEQ ID NO: 37360 - DNA, 20 bp, synthetic construct
  misc_feature 1..20: note = Description of Artificial Sequence: Synthetic oligonucleotide
  misc_feature 1..20: note = Target: SCN10A; (+) strand; PAM type: NRG; PAM sequence: TAG
  source 1..20: mol_type = other DNA
gctgtttgacctccagccgg

SEQ ID NO: 37361 - DNA, 20 bp, synthetic construct
  misc_feature 1..20: note = Description of Artificial Sequence: Synthetic oligonucleotide
  misc_feature 1..20: note = Target: SCN10A; (+) strand; PAM type: NRG; PAM sequence: AGG
  source 1..20: mol_type = other DNA
ctgtttgacctccagccggt

SEQ ID NO: 37362 - DNA, 20 bp, synthetic construct
  misc_feature 1..20: note = Description of Artificial Sequence: Synthetic oligonucleotide
  misc_feature 1..20: note = Target: SCN10A; (+) strand; PAM type: NRG; PAM sequence: AAG
  source 1..20: mol_type = other DNA
agccggtaggtgatgctttc

SEQ ID NO: 37363 - DNA, 20 bp, synthetic construct
  misc_feature 1..20: note = Description of Artificial Sequence: Synthetic oligonucleotide
  misc_feature 1..20: note = Target: SCN10A; (+) strand; PAM type: NRG; PAM sequence: GAG
  source 1..20: mol_type = other DNA
ccggtaggtgatgctttcaa

SEQ ID NO: 37364 - DNA, 20 bp, synthetic construct
  misc_feature 1..20: note = Description of Artificial Sequence: Synthetic oligonucleotide
  misc_feature 1..20: note = Target: SCN10A; (+) strand; PAM type: NRG; PAM sequence: GAG
  source 1..20: mol_type = other DNA
ggtaggtgatgctttcaaga

SEQ ID NO: 37365 - DNA, 20 bp, synthetic construct
  misc_feature 1..20: note = Description of Artificial Sequence: Synthetic oligonucleotide
  misc_feature 1..20: note = Target: SCN10A; (+) strand; PAM type: NRG; PAM sequence: TAG
  source 1..20: mol_type = other DNA
tgatgctttcaagagagcac

SEQ ID NO: 37366 - DNA, 20 bp, synthetic construct
  misc_feature 1..20: note = Description of Artificial Sequence: Synthetic oligonucleotide
  misc_feature 1..20: note = Target: SCN10A; (+) strand; PAM type: NRG; PAM sequence: TAG
  source 1..20: mol_type = other DNA
tcaagagagcactagtgcat

SEQ ID NO: 37367 - DNA, 20 bp, synthetic construct
  misc_feature 1..20: note = Description of Artificial Sequence: Synthetic oligonucleotide
  misc_feature 1..20: note = Target: SCN10A; (+) strand; PAM type: NRG; PAM sequence: TAG
  source 1..20: mol_type = other DNA
agagagcactagtgcattag

SEQ ID NO: 37368 - DNA, 20 bp, synthetic construct
  misc_feature 1..20: note = Description of Artificial Sequence: Synthetic oligonucleotide
  misc_feature 1..20: note = Target: SCN10A; (+) strand; PAM type: NRG; PAM sequence: AAG
  source 1..20: mol_type = other DNA
gagcactagtgcattagtag

SEQ ID NO: 37369 - DNA, 20 bp, synthetic construct
  misc_feature 1..20: note = Description of Artificial Sequence: Synthetic oligonucleotide
  misc_feature 1..20: note = Target: SCN10A; (+) strand; PAM type: NRG; PAM sequence: AGG
  source 1..20: mol_type = other DNA
agcactagtgcattagtaga

SEQ ID NO: 37370 - DNA, 20 bp, synthetic construct
  misc_feature 1..20: note = Description of Artificial Sequence: Synthetic oligonucleotide
  misc_feature 1..20: note = Target: SCN10A; (+) strand; PAM type: NRG; PAM sequence: GGG
  source 1..20: mol_type = other DNA
gcactagtgcattagtagaa

SEQ ID NO: 37371 - DNA, 20 bp, synthetic construct
  misc_feature 1..20: note = Description of Artificial Sequence: Synthetic oligonucleotide
  misc_feature 1..20: note = Target: SCN10A; (+) strand; PAM type: NRG; PAM sequence: GGG
  source 1..20: mol_type = other DNA
cactagtgcattagtagaag

SEQ ID NO: 37372 - DNA, 20 bp, synthetic construct
  misc_feature 1..20: note = Description of Artificial Sequence: Synthetic oligonucleotide
  misc_feature 1..20: note = Target: SCN10A; (+) strand; PAM type: NRG; PAM sequence: GGG
  source 1..20: mol_type = other DNA
actagtgcattagtagaagg

SEQ ID NO: 37373 - DNA, 20 bp, synthetic construct
  misc_feature 1..20: note = Description of Artificial Sequence: Synthetic oligonucleotide
  misc_feature 1..20: note = Target: SCN10A; (+) strand; PAM type: NRG; PAM sequence: AAG
  source 1..20: mol_type = other DNA
cattagtagaagggggatct

SEQ ID NO: 37374 - DNA, 20 bp, synthetic construct
  misc_feature 1..20: note = Description of Artificial Sequence: Synthetic oligonucleotide
  misc_feature 1..20: note = Target: SCN10A; (+) strand; PAM type: NRG; PAM sequence: AAG
  source 1..20: mol_type = other DNA
gggggatctaagctcaccct

SEQ ID NO: 37375 - DNA, 20 bp, synthetic construct
  misc_feature 1..20: note = Description of Artificial Sequence: Synthetic oligonucleotide
  misc_feature 1..20: note = Target: SCN10A; (+) strand; PAM type: NRG; PAM sequence: TGG
  source 1..20: mol_type = other DNA
gatctaagctcaccctaagt

SEQ ID NO: 37376 - DNA, 20 bp, synthetic construct
  misc_feature 1..20: note = Description of Artificial Sequence: Synthetic oligonucleotide
  misc_feature 1..20: note = Target: SCN10A; (+) strand; PAM type: NRG; PAM sequence: CAG
  source 1..20: mol_type = other DNA
taagctcaccctaagttggc

SEQ ID NO: 37377 - DNA, 20 bp, synthetic construct
  misc_feature 1..20: note = Description of Artificial Sequence: Synthetic oligonucleotide
  misc_feature 1..20: note = Target: SCN10A; (+) strand; PAM type: NRG; PAM sequence: AGG
  source 1..20: mol_type = other DNA
aagctcaccctaagttggcc

SEQ ID NO: 37378 - DNA, 20 bp, synthetic construct
  misc_feature 1..20: note = Description of Artificial Sequence: Synthetic oligonucleotide
  misc_feature 1..20: note = Target: SCN10A; (+) strand; PAM type: NRG; PAM sequence: GGG
  source 1..20: mol_type = other DNA
agctcaccctaagttggcca

SEQ ID NO: 37379 - DNA, 20 bp, synthetic construct
  misc_feature 1..20: note = Description of Artificial Sequence: Synthetic oligonucleotide
  misc_feature 1..20: note = Target: SCN10A; (+) strand; PAM type: NRG; PAM sequence: TAG
  source 1..20: mol_type = other DNA
gttggccagggtaaatattt

SEQ ID NO: 37380 - DNA, 20 bp, synthetic construct
  misc_feature 1..20: note = Description of Artificial Sequence: Synthetic oligonucleotide
  misc_feature 1..20: note = Target: SCN10A; (+) strand; PAM type: NRG; PAM sequence: TAG
  source 1..20: mol_type = other DNA
gggtaaatattttagtttct

SEQ ID NO: 37381 - DNA, 20 bp, synthetic construct
  misc_feature 1..20: note = Description of Artificial Sequence: Synthetic oligonucleotide
  misc_feature 1..20: note = Target: SCN10A; (+) strand; PAM type: NRG; PAM sequence: AGG
  source 1..20: mol_type = other DNA
ggtaaatattttagtttctt

SEQ ID NO: 37382 - DNA, 20 bp, synthetic construct
  misc_feature 1..20: note = Description of Artificial Sequence: Synthetic oligonucleotide
  misc_feature 1..20: note = Target: SCN10A; (+) strand; PAM type: NRG; PAM sequence: GAG
  source 1..20: mol_type = other DNA
attttagtttcttaggtgat

SEQ ID NO: 37383 - DNA, 20 bp, synthetic construct
  misc_feature 1..20: note = Description of Artificial Sequence: Synthetic oligonucleotide
  misc_feature 1..20: note = Target: SCN10A; (+) strand; PAM type: NRG; PAM sequence: CAG
  source 1..20: mol_type = other DNA
ttagtttcttaggtgatgag

SEQ ID NO: 37384 - DNA, 20 bp, synthetic construct
  misc_feature 1..20: note = Description of Artificial Sequence: Synthetic oligonucleotide
  misc_feature 1..20: note = Target: SCN10A; (+) strand; PAM type: NRG; PAM sequence: AGG
  source 1..20: mol_type = other DNA
tagtttcttaggtgatgagc

SEQ ID NO: 37385 - DNA, 20 bp, synthetic construct
  misc_feature 1..20: note = Description of Artificial Sequence: Synthetic oligonucleotide
  misc_feature 1..20: note = Target: SCN10A; (+) strand; PAM type: NRG; PAM sequence: GGG
  source 1..20: mol_type = other DNA
agtttcttaggtgatgagca

SEQ ID NO: 37386 - DNA, 20 bp, synthetic construct
  misc_feature 1..20: note = Description of Artificial Sequence: Synthetic oligonucleotide
  misc_feature 1..20: note = Target: SCN10A; (+) strand; PAM type: NRG; PAM sequence: AAG
  source 1..20: mol_type = other DNA
aggtgatgagcagggccata

SEQ ID NO: 37387 - DNA, 20 bp, synthetic construct
  misc_feature 1..20: note = Description of Artificial Sequence: Synthetic oligonucleotide
  misc_feature 1..20: note = Target: SCN10A; (+) strand; PAM type: NRG; PAM sequence: GAG
  source 1..20: mol_type = other DNA
agcagggccataaagcttcc

SEQ ID NO: 37388 - DNA, 20 bp, synthetic construct
  misc_feature 1..20: note = Description of Artificial Sequence: Synthetic oligonucleotide
  misc_feature 1..20: note = Target: SCN10A; (+) strand; PAM type: NRG; PAM sequence: GAG
  source 1..20: mol_type = other DNA
cagggccataaagcttccga

SEQ ID NO: 37389 - DNA, 20 bp, synthetic construct
  misc_feature 1..20: note = Description of Artificial Sequence: Synthetic oligonucleotide
  misc_feature 1..20: note = Target: SCN10A; (+) strand; PAM type: NRG; PAM sequence: TGG
  source 1..20: mol_type = other DNA
ataaagcttccgagagtttc

SEQ ID NO: 37390 - DNA, 20 bp, synthetic construct
  misc_feature 1..20: note = Description of Artificial Sequence: Synthetic oligonucleotide
  misc_feature 1..20: note = Target: SCN10A; (+) strand; PAM type: NRG; PAM sequence: GGG
  source 1..20: mol_type = other DNA
taaagcttccgagagtttct

SEQ ID NO: 37391 - DNA, 20 bp, synthetic construct
  misc_feature 1..20: note = Description of Artificial Sequence: Synthetic oligonucleotide
  misc_feature 1..20: note = Target: SCN10A; (+) strand; PAM type: NRG; PAM sequence: CAG
  source 1..20: mol_type = other DNA
gagtttctgggttttgtgtt

SEQ ID NO: 37392 - DNA, 20 bp, synthetic construct
  misc_feature 1..20: note = Description of Artificial Sequence: Synthetic oligonucleotide
  misc_feature 1..20: note = Target: SCN10A; (+) strand; PAM type: NRG; PAM sequence: AAG
  source 1..20: mol_type = other DNA
gggttttgtgttcagctacc

SEQ ID NO: 37393 - DNA, 20 bp, synthetic construct
  misc_feature 1..20: note = Description of Artificial Sequence: Synthetic oligonucleotide
  misc_feature 1..20: note = Target: SCN10A; (+) strand; PAM type: NRG; PAM sequence: AGG
  source 1..20: mol_type = other DNA
ggttttgtgttcagctacca

SEQ ID NO: 37394 - DNA, 20 bp, synthetic construct
  misc_feature 1..20: note = Description of Artificial Sequence: Synthetic oligonucleotide
  misc_feature 1..20: note = Target: SCN10A; (+) strand; PAM type: NRG; PAM sequence: CAG
  source 1..20: mol_type = other DNA
tttgtgttcagctaccaagg

SEQ ID NO: 37395 - DNA, 20 bp, synthetic construct
  misc_feature 1..20: note = Description of Artificial Sequence: Synthetic oligonucleotide
  misc_feature 1..20: note = Target: SCN10A; (+) strand; PAM type: NRG; PAM sequence: AGG
  source 1..20: mol_type = other DNA
ttgtgttcagctaccaaggc

SEQ ID NO: 37396 - DNA, 20 bp, synthetic construct
  misc_feature 1..20: note = Description of Artificial Sequence: Synthetic oligonucleotide
  misc_feature 1..20: note = Target: SCN10A; (+) strand; PAM type: NRG; PAM sequence: TAG
  source 1..20: mol_type = other DNA
tgttcagctaccaaggcagg

SEQ ID NO: 37397 - DNA, 20 bp, synthetic construct
  misc_feature 1..20: note = Description of Artificial Sequence: Synthetic oligonucleotide
  misc_feature 1..20: note = Target: SCN10A; (+) strand; PAM type: NRG; PAM sequence: AGG
  source 1..20: mol_type = other DNA
gttcagctaccaaggcaggt

SEQ ID NO: 37398 - DNA, 20 bp, synthetic construct
  misc_feature 1..20: note = Description of Artificial Sequence: Synthetic oligonucleotide
  misc_feature 1..20: note = Target: SCN10A; (+) strand; PAM type: NRG; PAM sequence: GGG
  source 1..20: mol_type = other DNA
ttcagctaccaaggcaggta

SEQ ID NO: 37399 - DNA, 20 bp, synthetic construct
  misc_feature 1..20: note = Description of Artificial Sequence: Synthetic oligonucleotide
  misc_feature 1..20: note = Target: SCN10A; (+) strand; PAM type: NRG; PAM sequence: CAG
  source 1..20: mol_type = other DNA
ggcaggtagggaaataccat

SEQ ID NO: 37400 - DNA, 20 bp, synthetic construct
  misc_feature 1..20: note = Description of Artificial Sequence: Synthetic oligonucleotide
  misc_feature 1..20: note = Target: SCN10A; (+) strand; PAM type: NRG; PAM sequence: AGG
  source 1..20: mol_type = other DNA
gcaggtagggaaataccatc

SEQ ID NO: 37401 - DNA, 20 bp, synthetic construct
  misc_feature 1..20: note = Description of Artificial Sequence: Synthetic oligonucleotide
  misc_feature 1..20: note = Target: SCN10A; (+) strand; PAM type: NRG; PAM sequence: TGG
  source 1..20: mol_type = other DNA
ggtagggaaataccatcagg

SEQ ID NO: 37402 - DNA, 20 bp, synthetic construct
  misc_feature 1..20: note = Description of Artificial Sequence: Synthetic oligonucleotide
  misc_feature 1..20: note = Target: SCN10A; (+) strand; PAM type: NRG; PAM sequence: GGG
  source 1..20: mol_type = other DNA
gtagggaaataccatcaggt

SEQ ID NO: 37403 - DNA, 20 bp, synthetic construct
  misc_feature 1..20: note = Description of Artificial Sequence: Synthetic oligonucleotide
  misc_feature 1..20: note = Target: SCN10A; (+) strand; PAM type: NRG; PAM sequence: GGG
  source 1..20: mol_type = other DNA
tagggaaataccatcaggtg

SEQ ID NO: 37404 - DNA, 20 bp, synthetic construct
  misc_feature 1..20: note = Description of Artificial Sequence: Synthetic oligonucleotide
  misc_feature 1..20: note = Target: SCN10A; (+) strand; PAM type: NRG; PAM sequence: GGG
  source 1..20: mol_type = other DNA
agggaaataccatcaggtgg

SEQ ID NO: 37405 - DNA, 20 bp, synthetic construct
  misc_feature 1..20: note = Description of Artificial Sequence: Synthetic oligonucleotide
  misc_feature 1..20: note = Target: SCN10A; (+) strand; PAM type: NRG; PAM sequence: CAG
  source 1..20: mol_type = other DNA
gaaataccatcaggtggggg

SEQ ID NO: 37406 - DNA, 20 bp, synthetic construct
  misc_feature 1..20: note = Description of Artificial Sequence: Synthetic oligonucleotide
  misc_feature 1..20: note = Target: SCN10A; (+) strand; PAM type: NRG; PAM sequence: AGG
  source 1..20: mol_type = other DNA
aaataccatcaggtgggggc

SEQ ID NO: 37407 - DNA, 20 bp, synthetic construct
  misc_feature 1..20: note = Description of Artificial Sequence: Synthetic oligonucleotide
  misc_feature 1..20: note = Target: SCN10A; (+) strand; PAM type: NRG; PAM sequence: GGG
  source 1..20: mol_type = other DNA
aataccatcaggtgggggca

SEQ ID NO: 37408 - DNA, 20 bp, synthetic construct
  misc_feature 1..20: note = Description of Artificial Sequence: Synthetic oligonucleotide
  misc_feature 1..20: note = Target: SCN10A; (+) strand; PAM type: NRG; PAM sequence: GGG
  source 1..20: mol_type = other DNA
ataccatcaggtgggggcag

SEQ ID NO: 37409 - DNA, 20 bp, synthetic construct
  misc_feature 1..20: note = Description of Artificial Sequence: Synthetic oligonucleotide
  misc_feature 1..20: note = Target: SCN10A; (+) strand; PAM type: NRG; PAM sequence: TAG
  source 1..20: mol_type = other DNA
ccatcaggtgggggcagggg

SEQ ID NO: 37410 - DNA, 20 bp, synthetic construct
  misc_feature 1..20: note = Description of Artificial Sequence: Synthetic oligonucleotide
  misc_feature 1..20: note = Target: SCN10A; (+) strand; PAM type: NRG; PAM sequence: AGG
  source 1..20: mol_type = other DNA
catcaggtgggggcaggggt

SEQ ID NO: 37411 - DNA, 20 bp, synthetic construct
  misc_feature 1..20: note = Description of Artificial Sequence: Synthetic oligonucleotide
  misc_feature 1..20: note = Target: SCN10A; (+) strand; PAM type: NRG; PAM sequence: GAG
  source 1..20: mol_type = other DNA
aggtgggggcaggggtaggt

SEQ ID NO: 37412 - DNA, 20 bp, synthetic construct
  misc_feature 1..20: note = Description of Artificial Sequence: Synthetic oligonucleotide
  misc_feature 1..20: note = Target: SCN10A; (+) strand; PAM type: NRG; PAM sequence: TAG
  source 1..20: mol_type = other DNA
ggggcaggggtaggtgagtc

SEQ ID NO: 37413 - DNA, 20 bp, synthetic construct
  misc_feature 1..20: note = Description of Artificial Sequence: Synthetic oligonucleotide
  misc_feature 1..20: note = Target: SCN10A; (+) strand; PAM type: NRG; PAM sequence: CAG
  source 1..20: mol_type = other DNA
ggggtaggtgagtctagact

SEQ ID NO: 37414 - DNA, 20 bp, synthetic construct
  misc_feature 1..20: note = Description of Artificial Sequence: Synthetic oligonucleotide
  misc_feature 1..20: note = Target: SCN10A; (+) strand; PAM type: NRG; PAM sequence: TGG
  source 1..20: mol_type = other DNA
gtctagactcagacccttct

SEQ ID NO: 37415 - DNA, 20 bp, synthetic construct
  misc_feature 1..20: note = Description of Artificial Sequence: Synthetic oligonucleotide
  misc_feature 1..20: note = Target: SCN10A; (+) strand; PAM type: NRG; PAM sequence: GGG
  source 1..20: mol_type = other DNA
tctagactcagacccttctt

SEQ ID NO: 37416 - DNA, 20 bp, synthetic construct
  misc_feature 1..20: note = Description of Artificial Sequence: Synthetic oligonucleotide
  misc_feature 1..20: note = Target: SCN10A; (+) strand; PAM type: NRG; PAM sequence: TAG
  source 1..20: mol_type = other DNA
agactcagacccttcttggg

SEQ ID NO: 37417 - DNA, 20 bp, synthetic construct
  misc_feature 1..20: note = Description of Artificial Sequence: Synthetic oligonucleotide
  misc_feature 1..20: note = Target: SCN10A; (+) strand; PAM type: NRG; PAM sequence: AGG
  source 1..20: mol_type = other DNA
gactcagacccttcttgggt

SEQ ID NO: 37418 - DNA, 20 bp, synthetic construct
  misc_feature 1..20: note = Description of Artificial Sequence: Synthetic oligonucleotide
  misc_feature 1..20: note = Target: SCN10A; (+) strand; PAM type: NRG; PAM sequence: GGG
  source 1..20: mol_type = other DNA
actcagacccttcttgggta

SEQ ID NO: 37419 - DNA, 20 bp, synthetic construct
  misc_feature 1..20: note = Description of Artificial Sequence: Synthetic oligonucleotide
  misc_feature 1..20: note = Target: SCN10A; (+) strand; PAM type: NRG; PAM sequence: TGG
  source 1..20: mol_type = other DNA
ttcttgggtagggattgctg

SEQ ID NO: 37420 - DNA, 20 bp, synthetic construct
  misc_feature 1..20: note = Description of Artificial Sequence: Synthetic oligonucleotide
  misc_feature 1..20: note = Target: SCN10A; (+) strand; PAM type: NRG; PAM sequence: TGG
  source 1..20: mol_type = other DNA
agggattgctgtggccactg

SEQ ID NO: 37421 - DNA, 20 bp, synthetic construct
  misc_feature 1..20: note = Description of Artificial Sequence: Synthetic oligonucleotide
  misc_feature 1..20: note = Target: SCN10A; (+) strand; PAM type: NRG; PAM sequence: TGG
  source 1..20: mol_type = other DNA
gattgctgtggccactgtgg

SEQ ID NO: 37422 - DNA, 20 bp, synthetic construct
  misc_feature 1..20: note = Description of Artificial Sequence: Synthetic oligonucleotide
  misc_feature 1..20: note = Target: SCN10A; (+) strand; PAM type: NRG; PAM sequence: TGG
  source 1..20: mol_type = other DNA
gctgtggccactgtggtgga

SEQ ID NO: 37423 - DNA, 20 bp, synthetic construct
  misc_feature 1..20: note = Description of Artificial Sequence: Synthetic oligonucleotide
  misc_feature 1..20: note = Target: SCN10A; (+) strand; PAM type: NRG; PAM sequence: GGG
  source 1..20: mol_type = other DNA
ctgtggccactgtggtggat

SEQ ID NO: 37424 - DNA, 20 bp, synthetic construct
  misc_feature 1..20: note = Description of Artificial Sequence: Synthetic oligonucleotide
  misc_feature 1..20: note = Target: SCN10A; (+) strand; PAM type: NRG; PAM sequence: GGG
  source 1..20: mol_type = other DNA
tgtggccactgtggtggatg

SEQ ID NO: 37425 - DNA, 20 bp, synthetic construct
  misc_feature 1..20: note = Description of Artificial Sequence: Synthetic oligonucleotide
  misc_feature 1..20: note = Target: SCN10A; (+) strand; PAM type: NRG; PAM sequence: GGG
  source 1..20: mol_type = other DNA
gtggccactgtggtggatgg

SEQ ID NO: 37426 - DNA, 20 bp, synthetic construct
  misc_feature 1..20: note = Description of Artificial Sequence: Synthetic oligonucleotide
  misc_feature 1..20: note = Target: SCN10A; (+) strand; PAM type: NRG; PAM sequence: TGG
  source 1..20: mol_type = other DNA
ccactgtggtggatgggggt

SEQ ID NO: 37427 - DNA, 20 bp, synthetic construct
  misc_feature 1..20: note = Description of Artificial Sequence: Synthetic oligonucleotide
  misc_feature 1..20: note = Target: SCN10A; (+) strand; PAM type: NRG; PAM sequence: CAG
  source 1..20: mol_type = other DNA
ggtggatgggggttggttct

SEQ ID NO: 37428 - DNA, 20 bp, synthetic construct
  misc_feature 1..20: note = Description of Artificial Sequence: Synthetic oligonucleotide
  misc_feature 1..20: note = Target: SCN10A; (+) strand; PAM type: NRG; PAM sequence: AGG
  source 1..20: mol_type = other DNA
gtggatgggggttggttctc

SEQ ID NO: 37429 - DNA, 20 bp, synthetic construct
  misc_feature 1..20: note = Description of Artificial Sequence: Synthetic oligonucleotide
  misc_feature 1..20: note = Target: SCN10A; (+) strand; PAM type: NRG; PAM sequence: CAG
  source 1..20: mol_type = other DNA
atgggggttggttctcaggc

SEQ ID NO: 37430 - DNA, 20 bp, synthetic construct
  misc_feature 1..20: note = Description of Artificial Sequence: Synthetic oligonucleotide
  misc_feature 1..20: note = Target: SCN10A; (+) strand; PAM type: NRG; PAM sequence: TGG
  source 1..20: mol_type = other DNA
ggggttggttctcaggccag

SEQ ID NO: 37431 - DNA, 20 bp, synthetic construct
  misc_feature 1..20: note = Description of Artificial Sequence: Synthetic oligonucleotide
  misc_feature 1..20: note = Target: SCN10A; (+) strand; PAM type: NRG; PAM sequence: GGG
  source 1..20: mol_type = other DNA
gggttggttctcaggccagt

SEQ ID NO: 37432 - DNA, 20 bp, synthetic construct
  misc_feature 1..20: note = Description of Artificial Sequence: Synthetic oligonucleotide
  misc_feature 1..20: note = Target: SCN10A; (+) strand; PAM type: NRG; PAM sequence: GGG
  source 1..20: mol_type = other DNA
ggttggttctcaggccagtg

SEQ ID NO: 37433 - DNA, 20 bp, synthetic construct
  misc_feature 1..20: note = Description of Artificial Sequence: Synthetic oligonucleotide
  misc_feature 1..20: note = Target: SCN10A; (+) strand; PAM type: NRG; PAM sequence: CAG
  source 1..20: mol_type = other DNA
aggccagtggggttgtgttc

SEQ ID NO: 37434 - DNA, 20 bp, synthetic construct
  misc_feature 1..20: note = Description of Artificial Sequence: Synthetic oligonucleotide
  misc_feature 1..20: note = Target: SCN10A; (+) strand; PAM type: NRG; PAM sequence: GAG
  source 1..20: mol_type = other DNA
gccagtggggttgtgttcca

SEQ ID NO: 37435 - DNA, 20 bp, synthetic construct
  misc_feature 1..20: note = Description of Artificial Sequence: Synthetic oligonucleotide
  misc_feature 1..20: note = Target: SCN10A; (+) strand; PAM type: NRG; PAM sequence: AGG
  source 1..20: mol_type = other DNA
ccagtggggttgtgttccag

SEQ ID NO: 37436 - DNA, 20 bp, synthetic construct
  misc_feature 1..20: note = Description of Artificial Sequence: Synthetic oligonucleotide
  misc_feature 1..20: note = Target: SCN10A; (+) strand; PAM type: NRG; PAM sequence: GGG
  source 1..20: mol_type = other DNA
cagtggggttgtgttccaga

SEQ ID NO: 37437 - DNA, 20 bp, synthetic construct
  misc_feature 1..20: note = Description of Artificial Sequence: Synthetic oligonucleotide
  misc_feature 1..20: note = Target: SCN10A; (+) strand; PAM type: NRG; PAM sequence: TGG
  source 1..20: mol_type = other DNA
ttgtgttccagagggaattt

SEQ ID NO: 37438 - DNA, 20 bp, synthetic construct
  misc_feature 1..20: note = Description of Artificial Sequence: Synthetic oligonucleotide
  misc_feature 1..20: note = Target: SCN10A; (+) strand; PAM type: NRG; PAM sequence: TAG
  source 1..20: mol_type = other DNA
tggctgcctctgctgtgcca

SEQ ID NO: 37439 - DNA, 20 bp, synthetic construct
  misc_feature 1..20: note = Description of Artificial Sequence: Synthetic oligonucleotide
  misc_feature 1..20: note = Target: SCN10A; (+) strand; PAM type: NRG; PAM sequence: GAG
  source 1..20: mol_type = other DNA
gctgcctctgctgtgccata

SEQ ID NO: 37440 - DNA, 20 bp, synthetic construct
  misc_feature 1..20: note = Description of Artificial Sequence: Synthetic oligonucleotide
  misc_feature 1..20: note = Target: SCN10A; (+) strand; PAM type: NRG; PAM sequence: CAG
  source 1..20: mol_type = other DNA
tgctgtgccatagagttctc

SEQ ID NO: 37441 - DNA, 20 bp, synthetic construct
  misc_feature 1..20: note = Description of Artificial Sequence: Synthetic oligonucleotide
  misc_feature 1..20: note = Target: SCN10A; (+) strand; PAM type: NRG; PAM sequence: AGG
  source 1..20: mol_type = other DNA
gctgtgccatagagttctcc

SEQ ID NO: 37442 - DNA, 20 bp, synthetic construct
  misc_feature 1..20: note = Description of Artificial Sequence: Synthetic oligonucleotide
  misc_feature 1..20: note = Target: SCN10A; (+) strand; PAM type: NRG; PAM sequence: GGG
  source 1..20: mol_type = other DNA
ctgtgccatagagttctcca

SEQ ID NO: 37443 - DNA, 20 bp, synthetic construct
  misc_feature 1..20: note = Description of Artificial Sequence: Synthetic oligonucleotide
  misc_feature 1..20: note = Target: SCN10A; (+) strand; PAM type: NRG; PAM sequence: AAG
  source 1..20: mol_type = other DNA
tgccatagagttctccaggg

SEQ ID NO: 37444 - DNA, 20 bp, synthetic construct
  misc_feature 1..20: note = Description of Artificial Sequence: Synthetic oligonucleotide
  misc_feature 1..20: note = Target: SCN10A; (+) strand; PAM type: NRG; PAM sequence: TGG
  source 1..20: mol_type = other DNA
catagagttctccagggaag

SEQ ID NO: 37445 - DNA, 20 bp, synthetic construct
  misc_feature 1..20: note = Description of Artificial Sequence: Synthetic oligonucleotide
  misc_feature 1..20: note = Target: SCN10A; (+) strand; PAM type: NRG; PAM sequence: GGG
  source 1..20: mol_type = other DNA
atagagttctccagggaagt

SEQ ID NO: 37446 - DNA, 20 bp, synthetic construct
  misc_feature 1..20: note = Description of Artificial Sequence: Synthetic oligonucleotide
  misc_feature 1..20: note = Target: SCN10A; (+) strand; PAM type: NRG; PAM sequence: GGG
  source 1..20: mol_type = other DNA
tagagttctccagggaagtg

SEQ ID NO: 37447 - DNA, 20 bp, synthetic construct
  misc_feature 1..20: note = Description of Artificial Sequence: Synthetic oligonucleotide
  misc_feature 1..20: note = Target: SCN10A; (+) strand; PAM type: NRG; PAM sequence: GGG
  source 1..20: mol_type = other DNA
agagttctccagggaagtgg

SEQ ID NO: 37448 - DNA, 20 bp, synthetic construct
  misc_feature 1..20: note = Description of Artificial Sequence: Synthetic oligonucleotide
  misc_feature 1..20: note = Target: SCN10A; (+) strand; PAM type: NRG; PAM sequence: TAG
  source 1..20: mol_type = other DNA
ttctccagggaagtggggga

SEQ ID NO: 37449 - DNA, 20 bp, synthetic construct
  misc_feature 1..20: note = Description of Artificial Sequence: Synthetic oligonucleotide
  misc_feature 1..20: note = Target: SCN10A; (+) strand; PAM type: NRG; PAM sequence: TAG
  source 1..20: mol_type = other DNA
gggaagtgggggatagctgc

SEQ ID NO: 37450 - DNA, 20 bp, synthetic construct
  misc_feature 1..20: note = Description of Artificial Sequence: Synthetic oligonucleotide
  misc_feature 1..20: note = Target: SCN10A; (+) strand; PAM type: NRG; PAM sequence: GAG
  source 1..20: mol_type = other DNA
agtgggggatagctgctagt

SEQ ID NO: 37451 - DNA, 20 bp, synthetic construct
  misc_feature 1..20: note = Description of Artificial Sequence: Synthetic oligonucleotide
  misc_feature 1..20: note = Target: SCN10A; (+) strand; PAM type: NRG; PAM sequence: GAG
  source 1..20: mol_type = other DNA
tgggggatagctgctagtga

SEQ ID NO: 37452 - DNA, 20 bp, synthetic construct
  misc_feature 1..20: note = Description of Artificial Sequence: Synthetic oligonucleotide
  misc_feature 1..20: note = Target: SCN10A; (+) strand; PAM type: NRG; PAM sequence: AGG
  source 1..20: mol_type = other DNA
gggggatagctgctagtgag

SEQ ID NO: 37453 - DNA, 20 bp, synthetic construct
  misc_feature 1..20: note = Description of Artificial Sequence: Synthetic oligonucleotide
  misc_feature 1..20: note = Target: SCN10A; (+) strand; PAM type: NRG; PAM sequence: TAG
  source 1..20: mol_type = other DNA
tgctagtgagaggcctcacc

SEQ ID NO: 37454 - DNA, 20 bp, synthetic construct
  misc_feature 1..20: note = Description of Artificial Sequence: Synthetic oligonucleotide
  misc_feature 1..20: note = Target: SCN10A; (+) strand; PAM type: NRG; PAM sequence: TAG
  source 1..20: mol_type = other DNA
ggcctcacctagctctcatg

SEQ ID NO: 37455 - DNA, 20 bp, synthetic construct
  misc_feature 1..20: note = Description of Artificial Sequence: Synthetic oligonucleotide
  misc_feature 1..20: note = Target: SCN10A; (+) strand; PAM type: NRG; PAM sequence: TGG
  source 1..20: mol_type = other DNA
tcacctagctctcatgtagt

SEQ ID NO: 37456 - DNA, 20 bp, synthetic construct
  misc_feature 1..20: note = Description of Artificial Sequence: Synthetic oligonucleotide
  misc_feature 1..20: note = Target: SCN10A; (+) strand; PAM type: NRG; PAM sequence: GAG
  source 1..20: mol_type = other DNA
ctagctctcatgtagttggt

SEQ ID NO: 37457 - DNA, 20 bp, synthetic construct
  misc_feature 1..20: note = Description of Artificial Sequence: Synthetic oligonucleotide
  misc_feature 1..20: note = Target: SCN10A; (+) strand; PAM type: NRG; PAM sequence: AGG
  source 1..20: mol_type = other DNA
tagctctcatgtagttggtg

SEQ ID NO: 37458 - DNA, 20 bp, synthetic construct
  misc_feature 1..20: note = Description of Artificial Sequence: Synthetic oligonucleotide
  misc_feature 1..20: note = Target: SCN10A; (+) strand; PAM type: NRG; PAM sequence: TGG
  source 1..20: mol_type = other DNA
tctcatgtagttggtgaggc

SEQ ID NO: 37459 - DNA, 20 bp, synthetic construct
  misc_feature 1..20: note = Description of Artificial Sequence: Synthetic oligonucleotide
  misc_feature 1..20: note = Target: SCN10A; (+) strand; PAM type: NRG; PAM sequence: CAG
  source 1..20: mol_type = other DNA
tgaggctggtcttgctcctg

SEQ ID NO: 37460 - DNA, 20 bp, synthetic construct
  misc_feature 1..20: note = Description of Artificial Sequence: Synthetic oligonucleotide
  misc_feature 1..20: note = Target: SCN10A; (+) strand; PAM type: NRG; PAM sequence: CAG
  source 1..20: mol_type = other DNA
tgctcctgcagtgccctact

SEQ ID NO: 37461 - DNA, 20 bp, synthetic construct
  misc_feature 1..20: note = Description of Artificial Sequence: Synthetic oligonucleotide
  misc_feature 1..20: note = Target: SCN10A; (+) strand; PAM type: NRG; PAM sequence: CAG
  source 1..20: mol_type = other DNA
gccctactcagaccttgccc

SEQ ID NO: 37462 - DNA, 20 bp, synthetic construct
  misc_feature 1..20: note = Description of Artificial Sequence: Synthetic oligonucleotide
  misc_feature 1..20: note = Target: SCN10A; (+) strand; PAM type: NRG; PAM sequence: AGG
  source 1..20: mol_type = other DNA
ccctactcagaccttgcccc

SEQ ID NO: 37463 - DNA, 20 bp, synthetic construct
  misc_feature 1..20: note = Description of Artificial Sequence: Synthetic oligonucleotide
  misc_feature 1..20: note = Target: SCN10A; (+) strand; PAM type: NRG; PAM sequence: GAG
  source 1..20: mol_type = other DNA
cagaccttgccccaggctgt

SEQ ID NO: 37464 - DNA, 20 bp, synthetic construct
  misc_feature 1..20: note = Description of Artificial Sequence: Synthetic oligonucleotide
  misc_feature 1..20: note = Target: SCN10A; (+) strand; PAM type: NRG; PAM sequence: GAG
  source 1..20: mol_type = other DNA
aggctgtgagcttccccact

SEQ ID NO: 37465 - DNA, 20 bp, synthetic construct
  misc_feature 1..20: note = Description of Artificial Sequence: Synthetic oligonucleotide
  misc_feature 1..20: note = Target: SCN10A; (+) strand; PAM type: NRG; PAM sequence: AAG
  source 1..20: mol_type = other DNA
tgtgagcttccccactgaga

SEQ ID NO: 37466 - DNA, 20 bp, synthetic construct
  misc_feature 1..20: note = Description of Artificial Sequence: Synthetic oligonucleotide
  misc_feature 1..20: note = Target: SCN10A; (+) strand; PAM type: NRG; PAM sequence: AAG
  source 1..20: mol_type = other DNA
agcttccccactgagaaaga

SEQ ID NO: 37467 - DNA, 20 bp, synthetic construct
  misc_feature 1..20: note = Description of Artificial Sequence: Synthetic oligonucleotide
  misc_feature 1..20: note = Target: SCN10A; (+) strand; PAM type: NRG; PAM sequence: TGG
  source 1..20: mol_type = other DNA
gagaaagaaagcatgacttt

SEQ ID NO: 37468 - DNA, 20 bp, synthetic construct
  misc_feature 1..20: note = Description of Artificial Sequence: Synthetic oligonucleotide
  misc_feature 1..20: note = Target: SCN10A; (+) strand; PAM type: NRG; PAM sequence: CAG
  source 1..20: mol_type = other DNA
catccctcactgtctgcttg

SEQ ID NO: 37469 - DNA, 20 bp, synthetic construct
  misc_feature 1..20: note = Description of Artificial Sequence: Synthetic oligonucleotide
  misc_feature 1..20: note = Target: SCN10A; (+) strand; PAM type: NRG; PAM sequence: TGG
  source 1..20: mol_type = other DNA
tgcagttcccatttgccccc

SEQ ID NO: 37470 - DNA, 20 bp, synthetic construct
  misc_feature 1..20: note = Description of Artificial Sequence: Synthetic oligonucleotide
  misc_feature 1..20: note = Target: SCN10A; (+) strand; PAM type: NRG; PAM sequence: AAG
  source 1..20: mol_type = other DNA
ttgccccctggattctgctc

SEQ ID NO: 37471 - DNA, 20 bp, synthetic construct
  misc_feature 1..20: note = Description of Artificial Sequence: Synthetic oligonucleotide
  misc_feature 1..20: note = Target: SCN10A; (+) strand; PAM type: NRG; PAM sequence: CAG
  source 1..20: mol_type = other DNA
tgctcaagaaaatttgtgcc

SEQ ID NO: 37472 - DNA, 20 bp, synthetic construct
  misc_feature 1..20: note = Description of Artificial Sequence: Synthetic oligonucleotide
  misc_feature 1..20: note = Target: SCN10A; (+) strand; PAM type: NRG; PAM sequence: TAG
  source 1..20: mol_type = other DNA
gttgaaattattactaattt

SEQ ID NO: 37473 - DNA, 20 bp, synthetic construct
  misc_feature 1..20: note = Description of Artificial Sequence: Synthetic oligonucleotide
  misc_feature 1..20: note = Target: SCN10A; (+) strand; PAM type: NRG; PAM sequence: TGG
  source 1..20: mol_type = other DNA
tgacccctccctgattccac

SEQ ID NO: 37474 - DNA, 20 bp, synthetic construct
  misc_feature 1..20: note = Description of Artificial Sequence: Synthetic oligonucleotide
  misc_feature 1..20: note = Target: SCN10A; (+) strand; PAM type: NRG; PAM sequence: AAG
  source 1..20: mol_type = other DNA
ttccactggctgccttcccc

SEQ ID NO: 37475 - DNA, 20 bp, synthetic construct
  misc_feature 1..20: note = Description of Artificial Sequence: Synthetic oligonucleotide
  misc_feature 1..20: note = Target: SCN10A; (+) strand; PAM type: NRG; PAM sequence: AGG
  source 1..20: mol_type = other DNA
tccactggctgccttcccca

SEQ ID NO: 37476 - DNA, 20 bp, synthetic construct
  misc_feature 1..20: note = Description of Artificial Sequence: Synthetic oligonucleotide
  misc_feature 1..20: note = Target: SCN10A; (+) strand; PAM type: NRG; PAM sequence: GGG
  source 1..20: mol_type = other DNA
ccactggctgccttccccaa

SEQ ID NO: 37477 - DNA, 20 bp, synthetic construct
  misc_feature 1..20: note = Description of Artificial Sequence: Synthetic oligonucleotide
  misc_feature 1..20: note = Target: SCN10A; (+) strand; PAM type: NRG; PAM sequence: GAG
  source 1..20: mol_type = other DNA
ccttccccaagggtgcctgt

SEQ ID NO: 37478 - DNA, 20 bp, synthetic construct
  misc_feature 1..20: note = Description of Artificial Sequence: Synthetic oligonucleotide
  misc_feature 1..20: note = Target: SCN10A; (+) strand; PAM type: NRG; PAM sequence: TAG
  source 1..20: mol_type = other DNA
ccaagggtgcctgtgagaca

SEQ ID NO: 37479 - DNA, 20 bp, synthetic construct
  misc_feature 1..20: note = Description of Artificial Sequence: Synthetic oligonucleotide
  misc_feature 1..20: note = Target: SCN10A; (+) strand; PAM type: NRG; PAM sequence: CAG
  source 1..20: mol_type = other DNA
gggtgcctgtgagacatagt

SEQ ID NO: 37480 - DNA, 20 bp, synthetic construct
  misc_feature 1..20: note = Description of Artificial Sequence: Synthetic oligonucleotide
  misc_feature 1..20: note = Target: SCN10A; (+) strand; PAM type: NRG; PAM sequence: AGG
  source 1..20: mol_type = other DNA
ggtgcctgtgagacatagtc

SEQ ID NO: 37481 - DNA, 20 bp, synthetic construct
  misc_feature 1..20: note = Description of Artificial Sequence: Synthetic oligonucleotide
  misc_feature 1..20: note = Target: SCN10A; (+) strand; PAM type: NRG; PAM sequence: GGG
  source 1..20: mol_type = other DNA
gtgcctgtgagacatagtca

SEQ ID NO: 37482 - DNA, 20 bp, synthetic construct
  misc_feature 1..20: note = Description of Artificial Sequence: Synthetic oligonucleotide
  misc_feature 1..20: note = Target: SCN10A; (+) strand; PAM type: NRG; PAM sequence: TGG
  source 1..20: mol_type = other DNA
ctgtgagacatagtcaggga

SEQ ID NO: 37483 - DNA, 20 bp, synthetic construct
  misc_feature 1..20: note = Description of Artificial Sequence: Synthetic oligonucleotide
  misc_feature 1..20: note = Target: SCN10A; (+) strand; PAM type: NRG; PAM sequence: TGG
  source 1..20: mol_type = other DNA
atagtcagggatggattccc

SEQ ID NO: 37484 - DNA, 20 bp, synthetic construct
  misc_feature 1..20: note = Description of Artificial Sequence: Synthetic oligonucleotide
  misc_feature 1..20: note = Target: SCN10A; (+) strand; PAM type: NRG; PAM sequence: AAG
  source 1..20: mol_type = other DNA
gggatggattccctggtctc

SEQ ID NO: 37485 - DNA, 20 bp, synthetic construct
  misc_feature 1..20: note = Description of Artificial Sequence: Synthetic oligonucleotide
  misc_feature 1..20: note = Target: SCN10A; (+) strand; PAM type: NRG; PAM sequence: TGG
  source 1..20: mol_type = other DNA
tggattccctggtctcaagc

SEQ ID NO: 37486 - DNA, 20 bp, synthetic construct
  misc_feature 1..20: note = Description of Artificial Sequence: Synthetic oligonucleotide
  misc_feature 1..20: note = Target: SCN10A; (+) strand; PAM type: NRG; PAM sequence: GAG
  source 1..20: mol_type = other DNA
gattccctggtctcaagctg

SEQ ID NO: 37487 - DNA, 20 bp, synthetic construct
  misc_feature 1..20: note = Description of Artificial Sequence: Synthetic oligonucleotide
  misc_feature 1..20: note = Target: SCN10A; (+) strand; PAM type: NRG; PAM sequence: TGG
  source 1..20: mol_type = other DNA
cctggtctcaagctggagac

SEQ ID NO: 37488 - DNA, 20 bp, synthetic construct
  misc_feature 1..20: note = Description of Artificial Sequence: Synthetic oligonucleotide
  misc_feature 1..20: note = Target: SCN10A; (+) strand; PAM type: NRG; PAM sequence: GGG
  source 1..20: mol_type = other DNA
ctggtctcaagctggagact

SEQ ID NO: 37489 - DNA, 20 bp, synthetic construct
  misc_feature 1..20: note = Description of Artificial Sequence: Synthetic oligonucleotide
  misc_feature 1..20: note = Target: SCN10A; (+) strand; PAM type: NRG; PAM sequence: GAG
  source 1..20: mol_type = other DNA
ggtctcaagctggagactgg

SEQ ID NO: 37490 - DNA, 20 bp, synthetic construct
  misc_feature 1..20: note = Description of Artificial Sequence: Synthetic oligonucleotide
  misc_feature 1..20: note = Target: SCN10A; (+) strand; PAM type: NRG; PAM sequence: AAG
  source 1..20: mol_type = other DNA
tggagactgggagtgcctac

SEQ ID NO: 37491 - DNA, 20 bp, synthetic construct
  misc_feature 1..20: note = Description of Artificial Sequence: Synthetic oligonucleotide
  misc_feature 1..20: note = Target: SCN10A; (+) strand; PAM type: NRG; PAM sequence: AGG
  source 1..20: mol_type = other DNA
ggagactgggagtgcctaca

SEQ ID NO: 37492 - DNA, 20 bp, synthetic construct
  misc_feature 1..20: note = Description of Artificial Sequence: Synthetic oligonucleotide
  misc_feature 1..20: note = Target: SCN10A; (+) strand; PAM type: NRG; PAM sequence: TGG
  source 1..20: mol_type = other DNA
ttctacttttatattttgtg

SEQ ID NO: 37493 - DNA, 20 bp, synthetic construct
  misc_feature 1..20: note = Description of Artificial Sequence: Synthetic oligonucleotide
  misc_feature 1..20: note = Target: SCN10A; (+) strand; PAM type: NRG; PAM sequence: CAG
  source 1..20: mol_type = other DNA
tcctaaatttatttacattc

SEQ ID NO: 37494 - DNA, 20 bp, synthetic construct
  misc_feature 1..20: note = Description of Artificial Sequence: Synthetic oligonucleotide
  misc_feature 1..20: note = Target: SCN10A; (+) strand; PAM type: NRG; PAM sequence: AGG
  source 1..20: mol_type = other DNA
cctaaatttatttacattcc

SEQ ID NO: 37495 - DNA, 20 bp, synthetic construct
  misc_feature 1..20: note = Description of Artificial Sequence: Synthetic oligonucleotide
  misc_feature 1..20: note = Target: SCN10A; (+) strand; PAM type: NRG; PAM sequence: AAG
  source 1..20: mol_type = other DNA
aatttatttacattccaggt

SEQ ID NO: 37496 - DNA, 20 bp, synthetic construct
  misc_feature 1..20: note = Description of Artificial Sequence: Synthetic oligonucleotide
  misc_feature 1..20: note = Target: SCN10A; (+) strand; PAM type: NRG; PAM sequence: AGG
  source 1..20: mol_type = other DNA
atttatttacattccaggta

SEQ ID NO: 37497 - DNA, 20 bp, synthetic construct
  misc_feature 1..20: note = Description of Artificial Sequence: Synthetic oligonucleotide
  misc_feature 1..20: note = Target: SCN10A; (+) strand; PAM type: NRG; PAM sequence: GGG
  source 1..20: mol_type = other DNA
tttatttacattccaggtaa

SEQ ID NO: 37498 - DNA, 20 bp, synthetic construct
  misc_feature 1..20: note = Description of Artificial Sequence: Synthetic oligonucleotide
  misc_feature 1..20: note = Target: SCN10A; (+) strand; PAM type: NRG; PAM sequence: TGG
  source 1..20: mol_type = other DNA
taaattcttctcctgtgatc

SEQ ID NO: 37499 - DNA, 20 bp, synthetic construct
  misc_feature 1..20: note = Description of Artificial Sequence: Synthetic oligonucleotide
  misc_feature 1..20: note = Target: SCN10A; (+) strand; PAM type: NRG; PAM sequence: CAG
  source 1..20: mol_type = other DNA
tctcctgtgatctggatttt

SEQ ID NO: 37500 - DNA, 20 bp, synthetic construct
  misc_feature 1..20: note = Description of Artificial Sequence: Synthetic oligonucleotide
  misc_feature 1..20: note = Target: SCN10A; (+) strand; PAM type: NRG; PAM sequence: CAG
  source 1..20: mol_type = other DNA
atctggattttcagattacc

SEQ ID NO: 37501 - DNA, 20 bp, synthetic construct
  misc_feature 1..20: note = Description of Artificial Sequence: Synthetic oligonucleotide
  misc_feature 1..20: note = Target: SCN10A; (+) strand; PAM type: NRG; PAM sequence: TGG
  source 1..20: mol_type = other DNA
ggattttcagattacccagt

SEQ ID NO: 37502 - DNA, 20 bp, synthetic construct
  misc_feature 1..20: note = Description of Artificial Sequence: Synthetic oligonucleotide
  misc_feature 1..20: note = Target: SCN10A; (+) strand; PAM type: NRG; PAM sequence: GGG
  source 1..20: mol_type = other DNA
gattttcagattacccagtt

SEQ ID NO: 37503 - DNA, 20 bp, synthetic construct
  misc_feature 1..20: note = Description of Artificial Sequence: Synthetic oligonucleotide
  misc_feature 1..20: note = Target: SCN10A; (+) strand; PAM type: NRG; PAM sequence: TGG
  source 1..20: mol_type = other DNA
acccagttgggatgtatgtt

SEQ ID NO: 37504 - DNA, 20 bp, synthetic construct
  misc_feature 1..20: note = Description of Artificial Sequence: Synthetic oligonucleotide
  misc_feature 1..20: note = Target: SCN10A; (+) strand; PAM type: NRG; PAM sequence: GAG
  source 1..20: mol_type = other DNA
ccagttgggatgtatgtttg

SEQ ID NO: 37505 - DNA, 20 bp, synthetic construct
  misc_feature 1..20: note = Description of Artificial Sequence: Synthetic oligonucleotide
  misc_feature 1..20: note = Target: SCN10A; (+) strand; PAM type: NRG; PAM sequence: AGG
  source 1..20: mol_type = other DNA
cagttgggatgtatgtttgg

SEQ ID NO: 37506 - DNA, 20 bp, synthetic construct
  misc_feature 1..20: note = Description of Artificial Sequence: Synthetic oligonucleotide
  misc_feature 1..20: note = Target: SCN10A; (+) strand; PAM type: NRG; PAM sequence: CAG
  source 1..20: mol_type = other DNA
ttgggatgtatgtttggagg

SEQ ID NO: 37507 - DNA, 20 bp, synthetic construct
  misc_feature 1..20: note = Description of Artificial Sequence: Synthetic oligonucleotide
  misc_feature 1..20: note = Target: SCN10A; (+) strand; PAM type: NRG; PAM sequence: AGG
  source 1..20: mol_type = other DNA
tgggatgtatgtttggaggc

SEQ ID NO: 37508 - DNA, 20 bp, synthetic construct
  misc_feature 1..20: note = Description of Artificial Sequence: Synthetic oligonucleotide
  misc_feature 1..20: note = Target: SCN10A; (+) strand; PAM type: NRG; PAM sequence: TGG
  source 1..20: mol_type = other DNA
ggtttccccccctcacactt

SEQ ID NO: 37509 - DNA, 20 bp, synthetic construct
  misc_feature 1..20: note = Description of Artificial Sequence: Synthetic oligonucleotide
  misc_feature 1..20: note = Target: SCN10A; (+) strand; PAM type: NRG; PAM sequence: GGG
  source 1..20: mol_type = other DNA
gtttccccccctcacacttt

SEQ ID NO: 37510 - DNA, 20 bp, synthetic construct
  misc_feature 1..20: note = Description of Artificial Sequence: Synthetic oligonucleotide
  misc_feature 1..20: note = Target: SCN10A; (+) strand; PAM type: NRG; PAM sequence: GAG
  source 1..20: mol_type = other DNA
ttccccccctcacactttgg

SEQ ID NO: 37511 - DNA, 20 bp, synthetic construct
  misc_feature 1..20: note = Description of Artificial Sequence: Synthetic oligonucleotide
  misc_feature 1..20: note = Target: SCN10A; (+) strand; PAM type: NRG; PAM sequence: CAG
  source 1..20: mol_type = other DNA
cctcacactttgggagctca

SEQ ID NO: 37512 - DNA, 20 bp, synthetic construct
  misc_feature 1..20: note = Description of Artificial Sequence: Synthetic oligonucleotide
  misc_feature 1..20: note = Target: SCN10A; (+) strand; PAM type: NRG; PAM sequence: CAG
  source 1..20: mol_type = other DNA
acagtttttcacctgtcttg

SEQ ID NO: 37513 - DNA, 20 bp, synthetic construct
  misc_feature 1..20: note = Description of Artificial Sequence: Synthetic oligonucleotide
  misc_feature 1..20: note = Target: SCN10A; (+) strand; PAM type: NRG; PAM sequence: CAG
  source 1..20: mol_type = other DNA
cacctgtcttgcagaatttc

SEQ ID NO: 37514 - DNA, 20 bp, synthetic construct
  misc_feature 1..20: note = Description of Artificial Sequence: Synthetic oligonucleotide
  misc_feature 1..20: note = Target: SCN10A; (+) strand; PAM type: NRG; PAM sequence: CAG
  source 1..20: mol_type = other DNA
ctgtcttgcagaatttccag

SEQ ID NO: 37515 - DNA, 20 bp, synthetic construct
  misc_feature 1..20: note = Description of Artificial Sequence: Synthetic oligonucleotide
  misc_feature 1..20: note = Target: SCN10A; (+) strand; PAM type: NRG; PAM sequence: AAG
  source 1..20: mol_type = other DNA
gcagtgtgccacttatttaa

SEQ ID NO: 37516 - DNA, 20 bp, synthetic construct
  misc_feature 1..20: note = Description of Artificial Sequence: Synthetic oligonucleotide
  misc_feature 1..20: note = Target: SCN10A; (+) strand; PAM type: NRG; PAM sequence: AGG
  source 1..20: mol_type = other DNA
cagtgtgccacttatttaaa

SEQ ID NO: 37517 - DNA, 20 bp, synthetic construct
  misc_feature 1..20: note = Description of Artificial Sequence: Synthetic oligonucleotide
  misc_feature 1..20: note = Target: SCN10A; (+) strand; PAM type: NRG; PAM sequence: CAG
  source 1..20: mol_type = other DNA
aaaggatctatgaattcttt

SEQ ID NO: 37518 - DNA, 20 bp, synthetic construct
  misc_feature 1..20: note = Description of Artificial Sequence: Synthetic oligonucleotide
  misc_feature 1..20: note = Target: SCN10A; (+) strand; PAM type: NRG; PAM sequence: TGG
  source 1..20: mol_type = other DNA
atgaattctttcagttctcc

SEQ ID NO: 37519 - DNA, 20 bp, synthetic construct
  misc_feature 1..20: note = Description of Artificial Sequence: Synthetic oligonucleotide
  misc_feature 1..20: note = Target: SCN10A; (+) strand; PAM type: NRG; PAM sequence: CAG
  source 1..20: mol_type = other DNA
gttctcctggtatattcctg

SEQ ID NO: 37520 - DNA, 20 bp, synthetic construct
  misc_feature 1..20: note = Description of Artificial Sequence: Synthetic oligonucleotide
  misc_feature 1..20: note = Target: SCN10A; (+) strand; PAM type: NRG; PAM sequence: TGG
  source 1..20: mol_type = other DNA
ctcctggtatattcctgcag

SEQ ID NO: 37521 - DNA, 20 bp, synthetic construct
  misc_feature 1..20: note = Description of Artificial Sequence: Synthetic oligonucleotide
  misc_feature 1..20: note = Target: SCN10A; (+) strand; PAM type: NRG; PAM sequence: TGG
  source 1..20: mol_type = other DNA
tatattcctgcagtggttct

SEQ ID NO: 37522 - DNA, 20 bp, synthetic construct
  misc_feature 1..20: note = Description of Artificial Sequence: Synthetic oligonucleotide
  misc_feature 1..20: note = Target: SCN10A; (+) strand; PAM type: NRG; PAM sequence: GAG
  source 1..20: mol_type = other DNA
tattcctgcagtggttcttg

SEQ ID NO: 37523 - DNA, 20 bp, synthetic construct
  misc_feature 1..20: note = Description of Artificial Sequence: Synthetic oligonucleotide
  misc_feature 1..20: note = Target: SCN10A; (+) strand; PAM type: NRG; PAM sequence: TGG
  source 1..20: mol_type = other DNA
gttcttggagcaaacgttca

SEQ ID NO: 37524 - DNA, 20 bp, synthetic construct
  misc_feature 1..20: note = Description of Artificial Sequence: Synthetic oligonucleotide
  misc_feature 1..20: note = Target: SCN10A; (+) strand; PAM type: NRG; PAM sequence: GAG
  source 1..20: mol_type = other DNA
ggagcaaacgttcatggtgt

SEQ ID NO: 37525 - DNA, 20 bp, synthetic construct
  misc_feature 1..20: note = Description of Artificial Sequence: Synthetic oligonucleotide
  misc_feature 1..20: note = Target: SCN10A; (+) strand; PAM type: NRG; PAM sequence: AAG
  source 1..20: mol_type = other DNA
tgagtctccacactctgtcc

SEQ ID NO: 37526 - DNA, 20 bp, synthetic construct
  misc_feature 1..20: note = Description of Artificial Sequence: Synthetic oligonucleotide
  misc_feature 1..20: note = Target: SCN10A; (+) strand; PAM type: NRG; PAM sequence: TGG
  source 1..20: mol_type = other DNA
gtctccacactctgtccaag

SEQ ID NO: 37527 - DNA, 20 bp, synthetic construct
  misc_feature 1..20: note = Description of Artificial Sequence: Synthetic oligonucleotide
  misc_feature 1..20: note = Target: SCN10A; (+) strand; PAM type: NRG; PAM sequence: GGG
  source 1..20: mol_type = other DNA
tctccacactctgtccaagt

SEQ ID NO: 37528 - DNA, 20 bp, synthetic construct
  misc_feature 1..20: note = Description of Artificial Sequence: Synthetic oligonucleotide
  misc_feature 1..20: note = Target: SCN10A; (+) strand; PAM type: NRG; PAM sequence: TAG
  source 1..20: mol_type = other DNA
tccaagtgggacctgcatgt

SEQ ID NO: 37529 - DNA, 20 bp, synthetic construct
  misc_feature 1..20: note = Description of Artificial Sequence: Synthetic oligonucleotide
  misc_feature 1..20: note = Target: SCN10A; (+) strand; PAM type: NRG; PAM sequence: CAG
  source 1..20: mol_type = other DNA
cccctctcctatcacacatg

SEQ ID NO: 37530 - DNA, 20 bp, synthetic construct
  misc_feature 1..20: note = Description of Artificial Sequence: Synthetic oligonucleotide
  misc_feature 1..20: note = Target: SCN10A; (+) strand; PAM type: NRG; PAM sequence: TAG
  source 1..20: mol_type = other DNA
atcacacatgcagatctgca

SEQ ID NO: 37531 - DNA, 20 bp, synthetic construct
  misc_feature 1..20: note = Description of Artificial Sequence: Synthetic oligonucleotide
  misc_feature 1..20: note = Target: SCN10A; (+) strand; PAM type: NRG; PAM sequence: GAG
  source 1..20: mol_type = other DNA
cacacatgcagatctgcata

SEQ ID NO: 37532 - DNA, 20 bp, synthetic construct
  misc_feature 1..20: note = Description of Artificial Sequence: Synthetic oligonucleotide
  misc_feature 1..20: note = Target: SCN10A; (+) strand; PAM type: NRG; PAM sequence: CAG
  source 1..20: mol_type = other DNA
gcatagagatatactcacgc

SEQ ID NO: 37533 - DNA, 20 bp, synthetic construct
  misc_feature 1..20: note = Description of Artificial Sequence: Synthetic oligonucleotide
  misc_feature 1..20: note = Target: SCN10A; (+) strand; PAM type: NRG; PAM sequence: AGG
  source 1..20: mol_type = other DNA
catagagatatactcacgcc

SEQ ID NO: 37534 - DNA, 20 bp, synthetic construct
  misc_feature 1..20: note = Description of Artificial Sequence: Synthetic oligonucleotide
  misc_feature 1..20: note = Target: SCN10A; (+) strand; PAM type: NRG; PAM sequence: GGG
  source 1..20: mol_type = other DNA
atagagatatactcacgcca

SEQ ID NO: 37535 - DNA, 20 bp, synthetic construct
  misc_feature 1..20: note = Description of Artificial Sequence: Synthetic oligonucleotide
  misc_feature 1..20: note = Target: SCN10A; (+) strand; PAM type: NRG; PAM sequence: CAG
  source 1..20: mol_type = other DNA
agggtaatgacgctaaaatc

SEQ ID NO: 37536 - DNA, 20 bp, synthetic construct
  misc_feature 1..20: note = Description of Artificial Sequence: Synthetic oligonucleotide
  misc_feature 1..20: note = Target: SCN10A; (+) strand; PAM type: NRG; PAM sequence: CAG
  source 1..20: mol_type = other DNA
taatgacgctaaaatccagc

SEQ ID NO: 37537 - DNA, 20 bp, synthetic construct
  misc_feature 1..20: note = Description of Artificial Sequence: Synthetic oligonucleotide
  misc_feature 1..20: note = Target: SCN10A; (+) strand; PAM type: NRG; PAM sequence: AAG
  source 1..20: mol_type = other DNA
gctaaaatccagccagttcc

SEQ ID NO: 37538 - DNA, 20 bp, synthetic construct
  misc_feature 1..20: note = Description of Artificial Sequence: Synthetic oligonucleotide
  misc_feature 1..20: note = Target: SCN10A; (+) strand; PAM type: NRG; PAM sequence: AGG
  source 1..20: mol_type = other DNA
ctaaaatccagccagttcca

SEQ ID NO: 37539 - DNA, 20 bp, synthetic construct
  misc_feature 1..20: note = Description of Artificial Sequence: Synthetic oligonucleotide
  misc_feature 1..20: note = Target: SCN10A; (+) strand; PAM type: NRG; PAM sequence: CAG
  source 1..20: mol_type = other DNA
agccagttccaaggatctct

SEQ ID NO: 37540 - DNA, 20 bp, synthetic construct
  misc_feature 1..20: note = Description of Artificial Sequence: Synthetic oligonucleotide
  misc_feature 1..20: note = Target: SCN10A; (+) strand; PAM type: NRG; PAM sequence: AGG
  source 1..20: mol_type = other DNA
gccagttccaaggatctctc

SEQ ID NO: 37541 - DNA, 20 bp, synthetic construct
  misc_feature 1..20: note = Description of Artificial Sequence: Synthetic oligonucleotide
  misc_feature 1..20: note = Target: SCN10A; (+) strand; PAM type: NRG; PAM sequence: TAG
  source 1..20: mol_type = other DNA
ctcaggtacgtgaactcatt

SEQ ID NO: 37542 - DNA, 20 bp, synthetic construct
  misc_feature 1..20: note = Description of Artificial Sequence: Synthetic oligonucleotide
  misc_feature 1..20: note = Target: SCN10A; (+) strand; PAM type: NRG; PAM sequence: CAG
  source 1..20: mol_type = other DNA
tttagacaaaatcctcttgc

SEQ ID NO: 37543 - DNA, 20 bp, synthetic construct
  misc_feature 1..20: note = Description of Artificial Sequence: Synthetic oligonucleotide
  misc_feature 1..20: note = Target: SCN10A; (+) strand; PAM type: NRG; PAM sequence: AAG
  source 1..20: mol_type = other DNA
ctcttgccagtatctttatc

SEQ ID NO: 37544 - DNA, 20 bp, synthetic construct
  misc_feature 1..20: note = Description of Artificial Sequence: Synthetic oligonucleotide
  misc_feature 1..20: note = Target: SCN10A; (+) strand; PAM type: NRG; PAM sequence: AGG
  source 1..20: mol_type = other DNA
tcttgccagtatctttatca

SEQ ID NO: 37545 - DNA, 20 bp, synthetic construct
  misc_feature 1..20: note = Description of Artificial Sequence: Synthetic oligonucleotide
  misc_feature 1..20: note = Target: SCN10A; (+) strand; PAM type: NRG; PAM sequence: AAG
  source 1..20: mol_type = other DNA
gtatctttatcaaggcttca

SEQ ID NO: 37546 - DNA, 20 bp, synthetic construct
  misc_feature 1..20: note = Description of Artificial Sequence: Synthetic oligonucleotide
  misc_feature 1..20: note = Target: SCN10A; (+) strand; PAM type: NRG; PAM sequence: AGG
  source 1..20: mol_type = other DNA
tatctttatcaaggcttcaa

SEQ ID NO: 37547 - DNA, 20 bp, synthetic construct
  misc_feature 1..20: note = Description of Artificial Sequence: Synthetic oligonucleotide
  misc_feature 1..20: note = Target: SCN10A; (+) strand; PAM type: NRG; PAM sequence: CAG
  source 1..20: mol_type = other DNA
ggcttcaaaggtgtaaatga

SEQ ID NO: 37548 - DNA, 20 bp, synthetic construct
  misc_feature 1..20: note = Description of Artificial Sequence: Synthetic oligonucleotide
  misc_feature 1..20: note = Target: SCN10A; (+) strand; PAM type: NRG; PAM sequence: AAG
  source 1..20: mol_type = other DNA
caaaggtgtaaatgacagtg

SEQ ID NO: 37549 - DNA, 20 bp, synthetic construct
  misc_feature 1..20: note = Description of Artificial Sequence: Synthetic oligonucleotide
  misc_feature 1..20: note = Target: SCN10A; (+) strand; PAM type: NRG; PAM sequence: TGG
  source 1..20: mol_type = other DNA
aatgacagtgaagacatatc

SEQ ID NO: 37550 - DNA, 20 bp, synthetic construct
  misc_feature 1..20: note = Description of Artificial Sequence: Synthetic oligonucleotide
  misc_feature 1..20: note = Target: SCN10A; (+) strand; PAM type: NRG; PAM sequence: GGG
  source 1..20: mol_type = other DNA
atgacagtgaagacatatct

SEQ ID NO: 37551 - DNA, 20 bp, synthetic construct
  misc_feature 1..20: note = Description of Artificial Sequence: Synthetic oligonucleotide
  misc_feature 1..20: note = Target: SCN10A; (+) strand; PAM type: NRG; PAM sequence: AAG
  source 1..20: mol_type = other DNA
acagtgaagacatatctggg

SEQ ID NO: 37552 - DNA, 20 bp, synthetic construct
  misc_feature 1..20: note = Description of Artificial Sequence: Synthetic oligonucleotide
  misc_feature 1..20: note = Target: SCN10A; (+) strand; PAM type: NRG; PAM sequence: AGG
  source 1..20: mol_type = other DNA
cagtgaagacatatctggga

SEQ ID NO: 37553 - DNA, 20 bp, synthetic construct
  misc_feature 1..20: note = Description of Artificial Sequence: Synthetic oligonucleotide
  misc_feature 1..20: note = Target: SCN10A; (+) strand; PAM type: NRG; PAM sequence: GAG
  source 1..20: mol_type = other DNA
gtgaagacatatctgggaag

SEQ ID NO: 37554 - DNA, 20 bp, synthetic construct
  misc_feature 1..20: note = Description of Artificial Sequence: Synthetic oligonucleotide
  misc_feature 1..20: note = Target: SCN10A; (+) strand; PAM type: NRG; PAM sequence: AGG
  source 1..20: mol_type = other DNA
tgaagacatatctgggaagg

SEQ ID NO: 37555 - DNA, 20 bp, synthetic construct
  misc_feature 1..20: note = Description of Artificial Sequence: Synthetic oligonucleotide
  misc_feature 1..20: note = Target: SCN10A; (+) strand; PAM type: NRG; PAM sequence: GGG
  source 1..20: mol_type = other DNA
gaagacatatctgggaagga

SEQ ID NO: 37556 - DNA, 20 bp, synthetic construct
  misc_feature 1..20: note = Description of Artificial Sequence: Synthetic oligonucleotide
  misc_feature 1..20: note = Target: SCN10A; (+) strand; PAM type: NRG; PAM sequence: TAG
  source 1..20: mol_type = other DNA
gacatatctgggaaggaggg

SEQ ID NO: 37557 - DNA, 20 bp, synthetic construct
  misc_feature 1..20: note = Description of Artificial Sequence: Synthetic oligonucleotide
  misc_feature 1..20: note = Target: SCN10A; (+) strand; PAM type: NRG; PAM sequence: AAG
  source 1..20: mol_type = other DNA
atctgggaaggagggtagaa

SEQ ID NO: 37558 - DNA, 20 bp, synthetic construct
  misc_feature 1..20: note = Description of Artificial Sequence: Synthetic oligonucleotide
  misc_feature 1..20: note = Target: SCN10A; (+) strand; PAM type: NRG; PAM sequence: AGG
  source 1..20: mol_type = other DNA
tctgggaaggagggtagaaa

SEQ ID NO: 37559 - DNA, 20 bp, synthetic construct
  misc_feature 1..20: note = Description of Artificial Sequence: Synthetic oligonucleotide
  misc_feature 1..20: note = Target: SCN10A; (+) strand; PAM type: NRG; PAM sequence: GAG
  source 1..20: mol_type = other DNA
tgggaaggagggtagaaaag

SEQ ID NO: 37560 - DNA, 20 bp, synthetic construct
  misc_feature 1..20: note = Description of Artificial Sequence: Synthetic oligonucleotide
  misc_feature 1..20: note = Target: SCN10A; (+) strand; PAM type: NRG; PAM sequence: TGG
  source 1..20: mol_type = other DNA
aaggagtgtcaactgtgcca

SEQ ID NO: 37561 - DNA, 20 bp, synthetic construct
  misc_feature 1..20: note = Description of Artificial Sequence: Synthetic oligonucleotide
  misc_feature 1..20: note = Target: SCN10A; (+) strand; PAM type: NRG; PAM sequence: GAG
  source 1..20: mol_type = other DNA
ggagtgtcaactgtgccatg

SEQ ID NO: 37562 - DNA, 20 bp, synthetic construct
  misc_feature 1..20: note = Description of Artificial Sequence: Synthetic oligonucleotide
  misc_feature 1..20: note = Target: SCN10A; (+) strand; PAM type: NRG; PAM sequence: CAG
  source 1..20: mol_type = other DNA
actgtgccatggagtgtact

SEQ ID NO: 37563 - DNA, 20 bp, synthetic construct
  misc_feature 1..20: note = Description of Artificial Sequence: Synthetic oligonucleotide
  misc_feature 1..20: note = Target: SCN10A; (+) strand; PAM type: NRG; PAM sequence: AGG
  source 1..20: mol_type = other DNA
ctgtgccatggagtgtactc

SEQ ID NO: 37564 - DNA, 20 bp, synthetic construct
  misc_feature 1..20: note = Description of Artificial Sequence: Synthetic oligonucleotide
  misc_feature 1..20: note = Target: SCN10A; (+) strand; PAM type: NRG; PAM sequence: GGG
  source 1..20: mol_type = other DNA
tgtgccatggagtgtactca

SEQ ID NO: 37565 - DNA, 20 bp, synthetic construct
  misc_feature 1..20: note = Description of Artificial Sequence: Synthetic oligonucleotide
  misc_feature 1..20: note = Target: SCN10A; (+) strand; PAM type: NRG; PAM sequence: GGG
  source 1..20: mol_type = other DNA
gtgccatggagtgtactcag

SEQ ID NO: 37566 - DNA, 20 bp, synthetic construct
  misc_feature 1..20: note = Description of Artificial Sequence: Synthetic oligonucleotide
  misc_feature 1..20: note = Target: SCN10A; (+) strand; PAM type: NRG; PAM sequence: GGG
  source 1..20: mol_type = other DNA
tgccatggagtgtactcagg

SEQ ID NO: 37567 - DNA, 20 bp, synthetic construct
  misc_feature 1..20: note = Description of Artificial Sequence: Synthetic oligonucleotide
  misc_feature 1..20: note = Target: SCN10A; (+) strand; PAM type: NRG; PAM sequence: CAG
  source 1..20: mol_type = other DNA
actcagggggttccttcttc

SEQ ID NO: 37568 - DNA, 20 bp, synthetic construct
  misc_feature 1..20: note = Description of Artificial Sequence: Synthetic oligonucleotide
  misc_feature 1..20: note = Target: SCN10A; (+) strand; PAM type: NRG; PAM sequence: AGG
  source 1..20: mol_type = other DNA
ctcagggggttccttcttcc

SEQ ID NO: 37569 - DNA, 20 bp, synthetic construct
  misc_feature 1..20: note = Description of Artificial Sequence: Synthetic oligonucleotide
  misc_feature 1..20: note = Target: SCN10A; (+) strand; PAM type: NRG; PAM sequence: GAG
  source 1..20: mol_type = other DNA
cagggggttccttcttccag

SEQ ID NO: 37570 - DNA, 20 bp, synthetic construct
  misc_feature 1..20: note = Description of Artificial Sequence: Synthetic oligonucleotide
  misc_feature 1..20: note = Target: SCN10A; (+) strand; PAM type: NRG; PAM sequence: AGG
  source 1..20: mol_type = other DNA
agggggttccttcttccagg

SEQ ID NO: 37571 - DNA, 20 bp, synthetic construct
  misc_feature 1..20: note = Description of Artificial Sequence: Synthetic oligonucleotide
  misc_feature 1..20: note = Target: SCN10A; (+) strand; PAM type: NRG; PAM sequence: GGG
  source 1..20: mol_type = other DNA
gggggttccttcttccagga

SEQ ID NO: 37572 - DNA, 20 bp, synthetic construct
  misc_feature 1..20: note = Description of Artificial Sequence: Synthetic oligonucleotide
  misc_feature 1..20: note = Target: SCN10A; (+) strand; PAM type: NRG; PAM sequence: GAG
  source 1..20: mol_type = other DNA
gggttccttcttccaggagg

SEQ ID NO: 37573 - DNA, 20 bp, synthetic construct
  misc_feature 1..20: note = Description of Artificial Sequence: Synthetic oligonucleotide
  misc_feature 1..20: note = Target: SCN10A; (+) strand; PAM type: NRG; PAM sequence: AGG
  source 1..20: mol_type = other DNA
ggttccttcttccaggaggg

SEQ ID NO: 37574 - DNA, 20 bp, synthetic construct
  misc_feature 1..20: note = Description of Artificial Sequence: Synthetic oligonucleotide
  misc_feature 1..20: note = Target: SCN10A; (+) strand; PAM type: NRG; PAM sequence: GGG
  source 1..20: mol_type = other DNA
gttccttcttccaggaggga

SEQ ID NO: 37575 - DNA, 20 bp, synthetic construct
  misc_feature 1..20: note = Description of Artificial Sequence: Synthetic oligonucleotide
  misc_feature 1..20: note = Target: SCN10A; (+) strand; PAM type: NRG; PAM sequence: AAG
  source 1..20: mol_type = other DNA
tgacctgctctgactgctcc

SEQ ID NO: 37576 - DNA, 20 bp, synthetic construct
  misc_feature 1..20: note = Description of Artificial Sequence: Synthetic oligonucleotide
  misc_feature 1..20: note = Target: SCN10A; (+) strand; PAM type: NRG; PAM sequence: AAG
  source 1..20: mol_type = other DNA
gctccaagaaaaaacatgca

SEQ ID NO: 37577 - DNA, 20 bp, synthetic construct
  misc_feature 1..20: note = Description of Artificial Sequence: Synthetic oligonucleotide
  misc_feature 1..20: note = Target: SCN10A; (+) strand; PAM type: NRG; PAM sequence: AAG
  source 1..20: mol_type = other DNA
aacatgcaaagaatatcacc

SEQ ID NO: 37578 - DNA, 20 bp, synthetic construct
  misc_feature 1..20: note = Description of Artificial Sequence: Synthetic oligonucleotide
  misc_feature 1..20: note = Target: SCN10A; (+) strand; PAM type: NRG; PAM sequence: AGG
  source 1..20: mol_type = other DNA
acatgcaaagaatatcacca

SEQ ID NO: 37579 - DNA, 20 bp, synthetic construct
  misc_feature 1..20: note = Description of Artificial Sequence: Synthetic oligonucleotide
  misc_feature 1..20: note = Target: SCN10A; (+) strand; PAM type: NRG; PAM sequence: GAG
  source 1..20: mol_type = other DNA
aagaatatcaccaaggtgat

SEQ ID NO: 37580 - DNA, 20 bp, synthetic construct
  misc_feature 1..20: note = Description of Artificial Sequence: Synthetic oligonucleotide
  misc_feature 1..20: note = Target: SCN10A; (+) strand; PAM type: NRG; PAM sequence: AGG
  source 1..20: mol_type = other DNA
agaatatcaccaaggtgatg

SEQ ID NO: 37581 - DNA, 20 bp, synthetic construct
  misc_feature 1..20: note = Description of Artificial Sequence: Synthetic oligonucleotide
  misc_feature 1..20: note = Target: SCN10A; (+) strand; PAM type: NRG; PAM sequence: GGG
  source 1..20: mol_type = other DNA
gaatatcaccaaggtgatga

SEQ ID NO: 37582 - DNA, 20 bp, synthetic construct
  misc_feature 1..20: note = Description of Artificial Sequence: Synthetic oligonucleotide
  misc_feature 1..20: note = Target: SCN10A; (+) strand; PAM type: NRG; PAM sequence: GGG
  source 1..20: mol_type = other DNA
aatatcaccaaggtgatgag

SEQ ID NO: 37583 - DNA, 20 bp, synthetic construct
  misc_feature 1..20: note = Description of Artificial Sequence: Synthetic oligonucleotide
  misc_feature 1..20: note = Target: SCN10A; (+) strand; PAM type: NRG; PAM sequence: GGG
  source 1..20: mol_type = other DNA
atatcaccaaggtgatgagg

SEQ ID NO: 37584 - DNA, 20 bp, synthetic construct
  misc_feature 1..20: note = Description of Artificial Sequence: Synthetic oligonucleotide
  misc_feature 1..20: note = Target: SCN10A; (+) strand; PAM type: NRG; PAM sequence: AAG
  source 1..20: mol_type = other DNA
tcaccaaggtgatgaggggg

SEQ ID NO: 37585 - DNA, 20 bp, synthetic construct
  misc_feature 1..20: note = Description of Artificial Sequence: Synthetic oligonucleotide
  misc_feature 1..20: note = Target: SCN10A; (+) strand; PAM type: NRG; PAM sequence: AAG
  source 1..20: mol_type = other DNA
ccaaggtgatgagggggaag

SEQ ID NO: 37586 - DNA, 20 bp, synthetic construct
  misc_feature 1..20: note = Description of Artificial Sequence: Synthetic oligonucleotide
  misc_feature 1..20: note = Target: SCN10A; (+) strand; PAM type: NRG; PAM sequence: AGG
  source 1..20: mol_type = other DNA
caaggtgatgagggggaaga

SEQ ID NO: 37587 - DNA, 20 bp, synthetic construct
  misc_feature 1..20: note = Description of Artificial Sequence: Synthetic oligonucleotide
  misc_feature 1..20: note = Target: SCN10A; (+) strand; PAM type: NRG; PAM sequence: AAG
  source 1..20: mol_type = other DNA
gtgatgagggggaagaaggt

SEQ ID NO: 37588 - DNA, 20 bp, synthetic construct
  misc_feature 1..20: note = Description of Artificial Sequence: Synthetic oligonucleotide
  misc_feature 1..20: note = Target: SCN10A; (+) strand; PAM type: NRG; PAM sequence: AGG
  source 1..20: mol_type = other DNA
tgatgagggggaagaaggta

SEQ ID NO: 37589 - DNA, 20 bp, synthetic construct
  misc_feature 1..20: note = Description of Artificial Sequence: Synthetic oligonucleotide
  misc_feature 1..20: note = Target: SCN10A; (+) strand; PAM type: NRG; PAM sequence: GAG
  source 1..20: mol_type = other DNA
atgagggggaagaaggtaag

SEQ ID NO: 37590 - DNA, 20 bp, synthetic construct
  misc_feature 1..20: note = Description of Artificial Sequence: Synthetic oligonucleotide
  misc_feature 1..20: note = Target: SCN10A; (+) strand; PAM type: NRG; PAM sequence: GAG
  source 1..20: mol_type = other DNA
gagggggaagaaggtaagga

SEQ ID NO: 37591 - DNA, 20 bp, synthetic construct
  misc_feature 1..20: note = Description of Artificial Sequence: Synthetic oligonucleotide
  misc_feature 1..20: note = Target: SCN10A; (+) strand; PAM type: NRG; PAM sequence: AGG
  source 1..20: mol_type = other DNA
agggggaagaaggtaaggag

SEQ ID NO: 37592 - DNA, 20 bp, synthetic construct
  misc_feature 1..20: note = Description of Artificial Sequence: Synthetic oligonucleotide
  misc_feature 1..20: note = Target: SCN10A; (+) strand; PAM type: NRG; PAM sequence: AAG
  source 1..20: mol_type = other DNA
agaaggtaaggagaggaaac

SEQ ID NO: 37593 - DNA, 20 bp, synthetic construct
  misc_feature 1..20: note = Description of Artificial Sequence: Synthetic oligonucleotide
  misc_feature 1..20: note = Target: SCN10A; (+) strand; PAM type: NRG; PAM sequence: CAG
  source 1..20: mol_type = other DNA
taaggagaggaaacaagaca

SEQ ID NO: 37594 - DNA, 20 bp, synthetic construct
  misc_feature 1..20: note = Description of Artificial Sequence: Synthetic oligonucleotide
  misc_feature 1..20: note = Target: SCN10A; (+) strand; PAM type: NRG; PAM sequence: GAG
  source 1..20: mol_type = other DNA
gaggaaacaagacacagact

SEQ ID NO: 37595 - DNA, 20 bp, synthetic construct
  misc_feature 1..20: note = Description of Artificial Sequence: Synthetic oligonucleotide
  misc_feature 1..20: note = Target: SCN10A; (+) strand; PAM type: NRG; PAM sequence: AGG
  source 1..20: mol_type = other DNA
aggaaacaagacacagactg

SEQ ID NO: 37596 - DNA, 20 bp, synthetic construct
  misc_feature 1..20: note = Description of Artificial Sequence: Synthetic oligonucleotide
  misc_feature 1..20: note = Target: SCN10A; (+) strand; PAM type: NRG; PAM sequence: GGG
  source 1..20: mol_type = other DNA
ggaaacaagacacagactga

SEQ ID NO: 37597 - DNA, 20 bp, synthetic construct
  misc_feature 1..20: note = Description of Artificial Sequence: Synthetic oligonucleotide
  misc_feature 1..20: note = Target: SCN10A; (+) strand; PAM type: NRG; PAM sequence: AAG
  source 1..20: mol_type = other DNA
aagacacagactgagggaaa

SEQ ID NO: 37598 - DNA, 20 bp, synthetic construct
  misc_feature 1..20: note = Description of Artificial Sequence: Synthetic oligonucleotide
  misc_feature 1..20: note = Target: SCN10A; (+) strand; PAM type: NRG; PAM sequence: AAG
  source 1..20: mol_type = other DNA
acacagactgagggaaaaag

SEQ ID NO: 37599 - DNA, 20 bp, synthetic construct
  misc_feature 1..20: note = Description of Artificial Sequence: Synthetic oligonucleotide
  misc_feature 1..20: note = Target: SCN10A; (+) strand; PAM type: NRG; PAM sequence: AGG
  source 1..20: mol_type = other DNA
cacagactgagggaaaaaga

SEQ ID NO: 37600 - DNA, 20 bp, synthetic construct
  misc_feature 1..20: note = Description of Artificial Sequence: Synthetic oligonucleotide
  misc_feature 1..20: note = Target: SCN10A; (+) strand; PAM type: NRG; PAM sequence: GGG
  source 1..20: mol_type = other DNA
acagactgagggaaaaagaa

SEQ ID NO: 37601 - DNA, 20 bp, synthetic construct
  misc_feature 1..20: note = Description of Artificial Sequence: Synthetic oligonucleotide
  misc_feature 1..20: note = Target: SCN10A; (+) strand; PAM type: NRG; PAM sequence: TAG
  source 1..20: mol_type = other DNA
aaaaagaagggccacacaaa

SEQ ID NO: 37602 - DNA, 20 bp, synthetic construct
  misc_feature 1..20: note = Description of Artificial Sequence: Synthetic oligonucleotide
  misc_feature 1..20: note = Target: SCN10A; (+) strand; PAM type: NRG; PAM sequence: TGG
  source 1..20: mol_type = other DNA
agaagggccacacaaataga

SEQ ID NO: 37603 - DNA, 20 bp, synthetic construct
  misc_feature 1..20: note = Description of Artificial Sequence: Synthetic oligonucleotide
  misc_feature 1..20: note = Target: SCN10A; (+) strand; PAM type: NRG; PAM sequence: GAG
  source 1..20: mol_type = other DNA
aagggccacacaaatagatg

SEQ ID NO: 37604 - DNA, 20 bp, synthetic construct
  misc_feature 1..20: note = Description of Artificial Sequence: Synthetic oligonucleotide
  misc_feature 1..20: note = Target: SCN10A; (+) strand; PAM type: NRG; PAM sequence: TGG
  source 1..20: mol_type = other DNA
ggccacacaaatagatggag

SEQ ID NO: 37605 - DNA, 20 bp, synthetic construct
  misc_feature 1..20: note = Description of Artificial Sequence: Synthetic oligonucleotide
  misc_feature 1..20: note = Target: SCN10A; (+) strand; PAM type: NRG; PAM sequence: GGG
  source 1..20: mol_type = other DNA
gccacacaaatagatggagt

SEQ ID NO: 37606 - DNA, 20 bp, synthetic construct
  misc_feature 1..20: note = Description of Artificial Sequence: Synthetic oligonucleotide
  misc_feature 1..20: note = Target: SCN10A; (+) strand; PAM type: NRG; PAM sequence: GGG
  source 1..20: mol_type = other DNA
ccacacaaatagatggagtg

SEQ ID NO: 37607 - DNA, 20 bp, synthetic construct
  misc_feature 1..20: note = Description of Artificial Sequence: Synthetic oligonucleotide
  misc_feature 1..20: note = Target: SCN10A; (+) strand; PAM type: NRG; PAM sequence: GAG
  source 1..20: mol_type = other DNA
acacaaatagatggagtggg

SEQ ID NO: 37608 - DNA, 20 bp, synthetic construct
  misc_feature 1..20: note = Description of Artificial Sequence: Synthetic oligonucleotide
  misc_feature 1..20: note = Target: SCN10A; (+) strand; PAM type: NRG; PAM sequence: AGG
  source 1..20: mol_type = other DNA
cacaaatagatggagtgggg

SEQ ID NO: 37609 - DNA, 20 bp, synthetic construct
  misc_feature 1..20: note = Description of Artificial Sequence: Synthetic oligonucleotide
  misc_feature 1..20: note = Target: SCN10A; (+) strand; PAM type: NRG; PAM sequence: GGG
  source 1..20: mol_type = other DNA
acaaatagatggagtgggga

SEQ ID NO: 37610 - DNA, 20 bp, synthetic construct
  misc_feature 1..20: note = Description of Artificial Sequence: Synthetic oligonucleotide
  misc_feature 1..20: note = Target: SCN10A; (+) strand; PAM type: NRG; PAM sequence: TGG
  source 1..20: mol_type = other DNA
ggagtggggagggatgtgtg

SEQ ID NO: 37611 - DNA, 20 bp, synthetic construct
  misc_feature 1..20: note = Description of Artificial Sequence: Synthetic oligonucleotide
  misc_feature 1..20: note = Target: SCN10A; (+) strand; PAM type: NRG; PAM sequence: TGG
  source 1..20: mol_type = other DNA
tggggagggatgtgtgtggc

SEQ ID NO: 37612 - DNA, 20 bp, synthetic construct
  misc_feature 1..20: note = Description of Artificial Sequence: Synthetic oligonucleotide
  misc_feature 1..20: note = Target: SCN10A; (+) strand; PAM type: NRG; PAM sequence: GGG
  source 1..20: mol_type = other DNA
ggggagggatgtgtgtggct

SEQ ID NO: 37613 - DNA, 20 bp, synthetic construct
  misc_feature 1..20: note = Description of Artificial Sequence: Synthetic oligonucleotide
  misc_feature 1..20: note = Target: SCN10A; (+) strand; PAM type: NRG; PAM sequence: CAG
  source 1..20: mol_type = other DNA
agggatgtgtgtggctggga

SEQ ID NO: 37614 - DNA, 20 bp, synthetic construct
  misc_feature 1..20: note = Description of Artificial Sequence: Synthetic oligonucleotide
  misc_feature 1..20: note = Target: SCN10A; (+) strand; PAM type: NRG; PAM sequence: CAG
  source 1..20: mol_type = other DNA
atgtgtgtggctgggacagc

SEQ ID NO: 37615 - DNA, 20 bp, synthetic construct
  misc_feature 1..20: note = Description of Artificial Sequence: Synthetic oligonucleotide
  misc_feature 1..20: note = Target: SCN10A; (+) strand; PAM type: NRG; PAM sequence: CAG
  source 1..20: mol_type = other DNA
tgtgtggctgggacagccag

SEQ ID NO: 37616 - DNA, 20 bp, synthetic construct
  misc_feature 1..20: note = Description of Artificial Sequence: Synthetic oligonucleotide
  misc_feature 1..20: note = Target: SCN10A; (+) strand; PAM type: NRG; PAM sequence: TGG
  source 1..20: mol_type = other DNA
gccagcagcttctgctgttc

SEQ ID NO: 37617 - DNA, 20 bp, synthetic construct
  misc_feature 1..20: note = Description of Artificial Sequence: Synthetic oligonucleotide
  misc_feature 1..20: note = Target: SCN10A; (+) strand; PAM type: NRG; PAM sequence: GGG
  source 1..20: mol_type = other DNA
ccagcagcttctgctgttct

SEQ ID NO: 37618 - DNA, 20 bp, synthetic construct
  misc_feature 1..20: note = Description of Artificial Sequence: Synthetic oligonucleotide
  misc_feature 1..20: note = Target: SCN10A; (+) strand; PAM type: NRG; PAM sequence: GGG
  source 1..20: mol_type = other DNA
cagcagcttctgctgttctg

SEQ ID NO: 37619 - DNA, 20 bp, synthetic construct
  misc_feature 1..20: note = Description of Artificial Sequence: Synthetic oligonucleotide
  misc_feature 1..20: note = Target: SCN10A; (+) strand; PAM type: NRG; PAM sequence: TAG
  source 1..20: mol_type = other DNA
agcttctgctgttctggggt

SEQ ID NO: 37620 - DNA, 20 bp, synthetic construct
  misc_feature 1..20: note = Description of Artificial Sequence: Synthetic oligonucleotide
  misc_feature 1..20: note = Target: SCN10A; (+) strand; PAM type: NRG; PAM sequence: AGG
  source 1..20: mol_type = other DNA
gcttctgctgttctggggtt

SEQ ID NO: 37621 - DNA, 20 bp, synthetic construct
  misc_feature 1..20: note = Description of Artificial Sequence: Synthetic oligonucleotide
  misc_feature 1..20: note = Target: SCN10A; (+) strand; PAM type: NRG; PAM sequence: CAG
  source 1..20: mol_type = other DNA
tctgctgttctggggttagg

SEQ ID NO: 37622 - DNA, 20 bp, synthetic construct
  misc_feature 1..20: note = Description of Artificial Sequence: Synthetic oligonucleotide
  misc_feature 1..20: note = Target: SCN10A; (+) strand; PAM type: NRG; PAM sequence: GAG
  source 1..20: mol_type = other DNA
tgctgttctggggttaggca

SEQ ID NO: 37623 - DNA, 20 bp, synthetic construct
  misc_feature 1..20: note = Description of Artificial Sequence: Synthetic oligonucleotide
  misc_feature 1..20: note = Target: SCN10A; (+) strand; PAM type: NRG; PAM sequence: AGG
  source 1..20: mol_type = other DNA
gctgttctggggttaggcag

SEQ ID NO: 37624 - DNA, 20 bp, synthetic construct
  misc_feature 1..20: note = Description of Artificial Sequence: Synthetic oligonucleotide
  misc_feature 1..20: note = Target: SCN10A; (+) strand; PAM type: NRG; PAM sequence: GGG
  source 1..20: mol_type = other DNA
ctgttctggggttaggcaga

SEQ ID NO: 37625 - DNA, 20 bp, synthetic construct
  misc_feature 1..20: note = Description of Artificial Sequence: Synthetic oligonucleotide
  misc_feature 1..20: note = Target: SCN10A; (+) strand; PAM type: NRG; PAM sequence: CAG
  source 1..20: mol_type = other DNA
ttctggggttaggcagaggg

SEQ ID NO: 37626 - DNA, 20 bp, synthetic construct
  misc_feature 1..20: note = Description of Artificial Sequence: Synthetic oligonucleotide
  misc_feature 1..20: note = Target: SCN10A; (+) strand; PAM type: NRG; PAM sequence: TAG
  source 1..20: mol_type = other DNA
tggggttaggcagagggcag

SEQ ID NO: 37627 - DNA, 20 bp, synthetic construct
  misc_feature 1..20: note = Description of Artificial Sequence: Synthetic oligonucleotide
  misc_feature 1..20: note = Target: SCN10A; (+) strand; PAM type: NRG; PAM sequence: CGG
  source 1..20: mol_type = other DNA
ggttaggcagagggcagtag

SEQ ID NO: 37628 - DNA, 20 bp, synthetic construct
  misc_feature 1..20: note = Description of Artificial Sequence: Synthetic oligonucleotide
  misc_feature 1..20: note = Target: SCN10A; (+) strand; PAM type: NRG; PAM sequence: GGG
  source 1..20: mol_type = other DNA
gttaggcagagggcagtagc

SEQ ID NO: 37629 - DNA, 20 bp, synthetic construct
  misc_feature 1..20: note = Description of Artificial Sequence: Synthetic oligonucleotide
  misc_feature 1..20: note = Target: SCN10A; (+) strand; PAM type: NRG; PAM sequence: AAG
  source 1..20: mol_type = other DNA
gcagagggcagtagcgggtg

SEQ ID NO: 37630 - DNA, 20 bp, synthetic construct
  misc_feature 1..20: note = Description of Artificial Sequence: Synthetic oligonucleotide
  misc_feature 1..20: note = Target: SCN10A; (+) strand; PAM type: NRG; PAM sequence: GAG
  source 1..20: mol_type = other DNA
agagggcagtagcgggtgaa

SEQ ID NO: 37631 - DNA, 20 bp, synthetic construct
  misc_feature 1..20: note = Description of Artificial Sequence: Synthetic oligonucleotide
  misc_feature 1..20: note = Target: SCN10A; (+) strand; PAM type: NRG; PAM sequence: AAG
  source 1..20: mol_type = other DNA
ggcagtagcgggtgaagagc

SEQ ID NO: 37632 - DNA, 20 bp, synthetic construct
  misc_feature 1..20: note = Description of Artificial Sequence: Synthetic oligonucleotide
  misc_feature 1..20: note = Target: SCN10A; (+) strand; PAM type: NRG; PAM sequence: AGG
  source 1..20: mol_type = other DNA
gcagtagcgggtgaagagca

SEQ ID NO: 37633 - DNA, 20 bp, synthetic construct
  misc_feature 1..20: note = Description of Artificial Sequence: Synthetic oligonucleotide
  misc_feature 1..20: note = Target: SCN10A; (+) strand; PAM type: NRG; PAM sequence: CAG
  source 1..20: mol_type = other DNA
attctcctgtttatgtctgc

SEQ ID NO: 37634 - DNA, 20 bp, synthetic construct
  misc_feature 1..20: note = Description of Artificial Sequence: Synthetic oligonucleotide
  misc_feature 1..20: note = Target: SCN10A; (+) strand; PAM type: NRG; PAM sequence: AGG
  source 1..20: mol_type = other DNA
ttctcctgtttatgtctgcc

SEQ ID NO: 37635 - DNA, 20 bp, synthetic construct
  misc_feature 1..20: note = Description of Artificial Sequence: Synthetic oligonucleotide
  misc_feature 1..20: note = Target: SCN10A; (+) strand; PAM type: NRG; PAM sequence: GGG
  source 1..20: mol_type = other DNA
tctcctgtttatgtctgcca

SEQ ID NO: 37636 - DNA, 20 bp, synthetic construct
  misc_feature 1..20: note = Description of Artificial Sequence: Synthetic oligonucleotide
  misc_feature 1..20: note = Target: SCN10A; (+) strand; PAM type: NRG; PAM sequence: AAG
  source 1..20: mol_type = other DNA
ccagggcctccctatcctgc

SEQ ID NO: 37637 - DNA, 20 bp, synthetic construct
  misc_feature 1..20: note = Description of Artificial Sequence: Synthetic oligonucleotide
  misc_feature 1..20: note = Target: SCN10A; (+) strand; PAM type: NRG; PAM sequence: AAG
  source 1..20: mol_type = other DNA
gggcctccctatcctgcaag

SEQ ID NO: 37638 - DNA, 20 bp, synthetic construct
  misc_feature 1..20: note = Description of Artificial Sequence: Synthetic oligonucleotide
  misc_feature 1..20: note = Target: SCN10A; (+) strand; PAM type: NRG; PAM sequence: TGG
  source 1..20: mol_type = other DNA
ctccctatcctgcaagaagc

SEQ ID NO: 37639 - DNA, 20 bp, synthetic construct
  misc_feature 1..20: note = Description of Artificial Sequence: Synthetic oligonucleotide
  misc_feature 1..20: note = Target: SCN10A; (+) strand; PAM type: NRG; PAM sequence: GAG
  source 1..20: mol_type = other DNA
ccctatcctgcaagaagctg

SEQ ID NO: 37640 - DNA, 20 bp, synthetic construct
  misc_feature 1..20: note = Description of Artificial Sequence: Synthetic oligonucleotide
  misc_feature 1..20: note = Target: SCN10A; (+) strand; PAM type: NRG; PAM sequence: AGG
  source 1..20: mol_type = other DNA
cctatcctgcaagaagctgg

SEQ ID NO: 37641 - DNA, 20 bp, synthetic construct
  misc_feature 1..20: note = Description of Artificial Sequence: Synthetic oligonucleotide
  misc_feature 1..20: note = Target: SCN10A; (+) strand; PAM type: NRG; PAM sequence: CAG
  source 1..20: mol_type = other DNA
gaggctcatctaaaaactcc

SEQ ID NO: 37642 - DNA, 20 bp, synthetic construct
  misc_feature 1..20: note = Description of Artificial Sequence: Synthetic oligonucleotide
  misc_feature 1..20: note = Target: SCN10A; (+) strand; PAM type: NRG; PAM sequence: TAG
  source 1..20: mol_type = other DNA
atctaaaaactcccagtttt

SEQ ID NO: 37643 - DNA, 20 bp, synthetic construct
  misc_feature 1..20: note = Description of Artificial Sequence: Synthetic oligonucleotide
  misc_feature 1..20: note = Target: SCN10A; (+) strand; PAM type: NRG; PAM sequence: TGG
  source 1..20: mol_type = other DNA
aactcccagtttttagaaac

SEQ ID NO: 37644 - DNA, 20 bp, synthetic construct
  misc_feature 1..20: note = Description of Artificial Sequence: Synthetic oligonucleotide
  misc_feature 1..20: note = Target: SCN10A; (+) strand; PAM type: NRG; PAM sequence: GAG
  source 1..20: mol_type = other DNA
ctcccagtttttagaaactg

SEQ ID NO: 37645 - DNA, 20 bp, synthetic construct
  misc_feature 1..20: note = Description of Artificial Sequence: Synthetic oligonucleotide
  misc_feature 1..20: note = Target: SCN10A; (+) strand; PAM type: NRG; PAM sequence: CAG
  source 1..20: mol_type = other DNA
agtttttagaaactggagtg

SEQ ID NO: 37646 - DNA, 20 bp, synthetic construct
  misc_feature 1..20: note = Description of Artificial Sequence: Synthetic oligonucleotide
  misc_feature 1..20: note = Target: SCN10A; (+) strand; PAM type: NRG; PAM sequence: GAG
  source 1..20: mol_type = other DNA
aaactggagtgcagactgat

SEQ ID NO: 37647 - DNA, 20 bp, synthetic construct
  misc_feature 1..20: note = Description of Artificial Sequence: Synthetic oligonucleotide
  misc_feature 1..20: note = Target: SCN10A; (+) strand; PAM type: NRG; PAM sequence: TGG
  source 1..20: mol_type = other DNA
ctggagtgcagactgatgag

SEQ ID NO: 37648 - DNA, 20 bp, synthetic construct
  misc_feature 1..20: note = Description of Artificial Sequence: Synthetic oligonucleotide
  misc_feature 1..20: note = Target: SCN10A; (+) strand; PAM type: NRG; PAM sequence: CAG
  source 1..20: mol_type = other DNA
gactgatgagtggtaactga

SEQ ID NO: 37649 - DNA, 20 bp, synthetic construct
  misc_feature 1..20: note = Description of Artificial Sequence: Synthetic oligonucleotide
  misc_feature 1..20: note = Target: SCN10A; (+) strand; PAM type: NRG; PAM sequence: GAG
  source 1..20: mol_type = other DNA
ctgatgagtggtaactgaca

SEQ ID NO: 37650 - DNA, 20 bp, synthetic construct
  misc_feature 1..20: note = Description of Artificial Sequence: Synthetic oligonucleotide
  misc_feature 1..20: note = Target: SCN10A; (+) strand; PAM type: NRG; PAM sequence: CAG
  source 1..20: mol_type = other DNA
atgagtggtaactgacagag

SEQ ID NO: 37651 - DNA, 20 bp, synthetic construct
  misc_feature 1..20: note = Description of Artificial Sequence: Synthetic oligonucleotide
  misc_feature 1..20: note = Target: SCN10A; (+) strand; PAM type: NRG; PAM sequence: AAG
  source 1..20: mol_type = other DNA
gtaactgacagagcagacct

SEQ ID NO: 37652 - DNA, 20 bp, synthetic construct
  misc_feature 1..20: note = Description of Artificial Sequence: Synthetic oligonucleotide
  misc_feature 1..20: note = Target: SCN10A; (+) strand; PAM type: NRG; PAM sequence: AAG
  source 1..20: mol_type = other DNA
ctgacagagcagacctaaga

SEQ ID NO: 37653 - DNA, 20 bp, synthetic construct
  misc_feature 1..20: note = Description of Artificial Sequence: Synthetic oligonucleotide
  misc_feature 1..20: note = Target: SCN10A; (+) strand; PAM type: NRG; PAM sequence: TGG
  source 1..20: mol_type = other DNA
gacctaagaaagctgaaaac

SEQ ID NO: 37654 - DNA, 20 bp, synthetic construct
  misc_feature 1..20: note = Description of Artificial Sequence: Synthetic oligonucleotide
  misc_feature 1..20: note = Target: SCN10A; (+) strand; PAM type: NRG; PAM sequence: AAG
  source 1..20: mol_type = other DNA
agaaagctgaaaactggctg

SEQ ID NO: 37655 - DNA, 20 bp, synthetic construct
  misc_feature 1..20: note = Description of Artificial Sequence: Synthetic oligonucleotide
  misc_feature 1..20: note = Target: SCN10A; (+) strand; PAM type: NRG; PAM sequence: CAG
  source 1..20: mol_type = other DNA
aagctgaaaactggctgaag

SEQ ID NO: 37656 - DNA, 20 bp, synthetic construct
  misc_feature 1..20: note = Description of Artificial Sequence: Synthetic oligonucleotide
  misc_feature 1..20: note = Target: SCN10A; (+) strand; PAM type: NRG; PAM sequence: AGG
  source 1..20: mol_type = other DNA
agctgaaaactggctgaagc

SEQ ID NO: 37657 - DNA, 20 bp, synthetic construct
  misc_feature 1..20: note = Description of Artificial Sequence: Synthetic oligonucleotide
  misc_feature 1..20: note = Target: SCN10A; (+) strand; PAM type: NRG; PAM sequence: GGG
  source 1..20: mol_type = other DNA
gctgaaaactggctgaagca

SEQ ID NO: 37658 - DNA, 20 bp, synthetic construct
  misc_feature 1..20: note = Description of Artificial Sequence: Synthetic oligonucleotide
  misc_feature 1..20: note = Target: SCN10A; (+) strand; PAM type: NRG; PAM sequence: CAG
  source 1..20: mol_type = other DNA
tggctgaagcagggaatacc

SEQ ID NO: 37659 - DNA, 20 bp, synthetic construct
  misc_feature 1..20: note = Description of Artificial Sequence: Synthetic oligonucleotide
  misc_feature 1..20: note = Target: SCN10A; (+) strand; PAM type: NRG; PAM sequence: AAG
  source 1..20: mol_type = other DNA
ctgaagcagggaatacccag

SEQ ID NO: 37660 - DNA, 20 bp, synthetic construct
  misc_feature 1..20: note = Description of Artificial Sequence: Synthetic oligonucleotide
  misc_feature 1..20: note = Target: SCN10A; (+) strand; PAM type: NRG; PAM sequence: AAG
  source 1..20: mol_type = other DNA
agcagggaatacccagaagc

SEQ ID NO: 37661 - DNA, 20 bp, synthetic construct
  misc_feature 1..20: note = Description of Artificial Sequence: Synthetic oligonucleotide
  misc_feature 1..20: note = Target: SCN10A; (+) strand; PAM type: NRG; PAM sequence: AAG
  source 1..20: mol_type = other DNA
ggaatacccagaagcaagcc

SEQ ID NO: 37662 - DNA, 20 bp, synthetic construct
  misc_feature 1..20: note = Description of Artificial Sequence: Synthetic oligonucleotide
  misc_feature 1..20: note = Target: SCN10A; (+) strand; PAM type: NRG; PAM sequence: CAG
  source 1..20: mol_type = other DNA
aagcaagccaagctatgctg

SEQ ID NO: 37663 - DNA, 20 bp, synthetic construct
  misc_feature 1..20: note = Description of Artificial Sequence: Synthetic oligonucleotide
  misc_feature 1..20: note = Target: SCN10A; (+) strand; PAM type: NRG; PAM sequence: GAG
  source 1..20: mol_type = other DNA
gcaagccaagctatgctgca

SEQ ID NO: 37664 - DNA, 20 bp, synthetic construct
  misc_feature 1..20: note = Description of Artificial Sequence: Synthetic oligonucleotide
  misc_feature 1..20: note = Target: SCN10A; (+) strand; PAM type: NRG; PAM sequence: CAG
  source 1..20: mol_type = other DNA
caagctatgctgcagagccc

SEQ ID NO: 37665 - DNA, 20 bp, synthetic construct
  misc_feature 1..20: note = Description of Artificial Sequence: Synthetic oligonucleotide
  misc_feature 1..20: note = Target: SCN10A; (+) strand; PAM type: NRG; PAM sequence: TGG
  source 1..20: mol_type = other DNA
tgcagagccccagaactgct

SEQ ID NO: 37666 - DNA, 20 bp, synthetic construct
  misc_feature 1..20: note = Description of Artificial Sequence: Synthetic oligonucleotide
  misc_feature 1..20: note = Target: SCN10A; (+) strand; PAM type: NRG; PAM sequence: TAG
  source 1..20: mol_type = other DNA
ccccagaactgcttggaact

SEQ ID NO: 37667 - DNA, 20 bp, synthetic construct
  misc_feature 1..20: note = Description of Artificial Sequence: Synthetic oligonucleotide
  misc_feature 1..20: note = Target: SCN10A; (+) strand; PAM type: NRG; PAM sequence: GAG
  source 1..20: mol_type = other DNA
ccagaactgcttggaactta

SEQ ID NO: 37668 - DNA, 20 bp, synthetic construct
  misc_feature 1..20: note = Description of Artificial Sequence: Synthetic oligonucleotide
  misc_feature 1..20: note = Target: SCN10A; (+) strand; PAM type: NRG; PAM sequence: AAG
  source 1..20: mol_type = other DNA
gcttggaacttagagatgct

SEQ ID NO: 37669 - DNA, 20 bp, synthetic construct
  misc_feature 1..20: note = Description of Artificial Sequence: Synthetic oligonucleotide
  misc_feature 1..20: note = Target: SCN10A; (+) strand; PAM type: NRG; PAM sequence: AAG
  source 1..20: mol_type = other DNA
gagatgctaagtatctctga

SEQ ID NO: 37670 - DNA, 20 bp, synthetic construct
  misc_feature 1..20: note = Description of Artificial Sequence: Synthetic oligonucleotide
  misc_feature 1..20: note = Target: SCN10A; (+) strand; PAM type: NRG; PAM sequence: AAG
  source 1..20: mol_type = other DNA
tgctaagtatctctgaaagc

SEQ ID NO: 37671 - DNA, 20 bp, synthetic construct
  misc_feature 1..20: note = Description of Artificial Sequence: Synthetic oligonucleotide
  misc_feature 1..20: note = Target: SCN10A; (+) strand; PAM type: NRG; PAM sequence: AGG
  source 1..20: mol_type = other DNA
gctaagtatctctgaaagca

SEQ ID NO: 37672 - DNA, 20 bp, synthetic construct
  misc_feature 1..20: note = Description of Artificial Sequence: Synthetic oligonucleotide
  misc_feature 1..20: note = Target: SCN10A; (+) strand; PAM type: NRG; PAM sequence: TGG
  source 1..20: mol_type = other DNA
gtatctctgaaagcaaggtt

SEQ ID NO: 37673 - DNA, 20 bp, synthetic construct
  misc_feature 1..20: note = Description of Artificial Sequence: Synthetic oligonucleotide
  misc_feature 1..20: note = Target: SCN10A; (+) strand; PAM type: NRG; PAM sequence: GGG
  source 1..20: mol_type = other DNA
tatctctgaaagcaaggttt

SEQ ID NO: 37674 - DNA, 20 bp, synthetic construct
  misc_feature 1..20: note = Description of Artificial Sequence: Synthetic oligonucleotide
  misc_feature 1..20: note = Target: SCN10A; (+) strand; PAM type: NRG; PAM sequence: GGG
  source 1..20: mol_type = other DNA
atctctgaaagcaaggtttg

SEQ ID NO: 37675 - DNA, 20 bp, synthetic construct
  misc_feature 1..20: note = Description of Artificial Sequence: Synthetic oligonucleotide
  misc_feature 1..20: note = Target: SCN10A; (+) strand; PAM type: NRG; PAM sequence: GGG
  source 1..20: mol_type = other DNA
tctctgaaagcaaggtttgg

SEQ ID NO: 37676 - DNA, 20 bp, synthetic construct
  misc_feature 1..20: note = Description of Artificial Sequence: Synthetic oligonucleotide
  misc_feature 1..20: note = Target: SCN10A; (+) strand; PAM type: NRG; PAM sequence: GAG
  source 1..20: mol_type = other DNA
tctgaaagcaaggtttgggg

SEQ ID NO: 37677 - DNA, 20 bp, synthetic construct
  misc_feature 1..20: note = Description of Artificial Sequence: Synthetic oligonucleotide
  misc_feature 1..20: note = Target: SCN10A; (+) strand; PAM type: NRG; PAM sequence: AGG
  source 1..20: mol_type = other DNA
ctgaaagcaaggtttggggg

SEQ ID NO: 37678 - DNA, 20 bp, synthetic construct
  misc_feature 1..20: note = Description of Artificial Sequence: Synthetic oligonucleotide
  misc_feature 1..20: note = Target: SCN10A; (+) strand; PAM type: NRG; PAM sequence: GGG
  source 1..20: mol_type = other DNA
tgaaagcaaggtttggggga

SEQ ID NO: 37679 - DNA, 20 bp, synthetic construct
  misc_feature 1..20: note = Description of Artificial Sequence: Synthetic oligonucleotide
  misc_feature 1..20: note = Target: SCN10A; (+) strand; PAM type: NRG; PAM sequence: AAG
  source 1..20: mol_type = other DNA
aaggtttgggggagggtgat

SEQ ID NO: 37680 - DNA, 20 bp, synthetic construct
  misc_feature 1..20: note = Description of Artificial Sequence: Synthetic oligonucleotide
  misc_feature 1..20: note = Target: SCN10A; (+) strand; PAM type: NRG; PAM sequence: TAG
  source 1..20: mol_type = other DNA
gtttgggggagggtgataag

SEQ ID NO: 37681 - DNA, 20 bp, synthetic construct
  misc_feature 1..20: note = Description of Artificial Sequence: Synthetic oligonucleotide
  misc_feature 1..20: note = Target: SCN10A; (+) strand; PAM type: NRG; PAM sequence: AGG
  source 1..20: mol_type = other DNA
tttgggggagggtgataagt

SEQ ID NO: 37682 - DNA, 20 bp, synthetic construct
  misc_feature 1..20: note = Description of Artificial Sequence: Synthetic oligonucleotide
  misc_feature 1..20: note = Target: SCN10A; (+) strand; PAM type: NRG; PAM sequence: GGG
  source 1..20: mol_type = other DNA
ttgggggagggtgataagta

SEQ ID NO: 37683 - DNA, 20 bp, synthetic construct
  misc_feature 1..20: note = Description of Artificial Sequence: Synthetic oligonucleotide
  misc_feature 1..20: note = Target: SCN10A; (+) strand; PAM type: NRG; PAM sequence: AAG
  source 1..20: mol_type = other DNA
agggtgataagtagggctga

SEQ ID NO: 37684 - DNA, 20 bp, synthetic construct
  misc_feature 1..20: note = Description of Artificial Sequence: Synthetic oligonucleotide
  misc_feature 1..20: note = Target: SCN10A; (+) strand; PAM type: NRG; PAM sequence: AAG
  source 1..20: mol_type = other DNA
gggctgaaagaattgcttga

SEQ ID NO: 37685 - DNA, 20 bp, synthetic construct
  misc_feature 1..20: note = Description of Artificial Sequence: Synthetic oligonucleotide
  misc_feature 1..20: note = Target: SCN10A; (+) strand; PAM type: NRG; PAM sequence: CAG
  source 1..20: mol_type = other DNA
aattgcttgaaagtttttta

SEQ ID NO: 37686 - DNA, 20 bp, synthetic construct
  misc_feature 1..20: note = Description of Artificial Sequence: Synthetic oligonucleotide
  misc_feature 1..20: note = Target: SCN10A; (+) strand; PAM type: NRG; PAM sequence: AGG
  source 1..20: mol_type = other DNA
attgcttgaaagttttttac

SEQ ID NO: 37687 - DNA, 20 bp, synthetic construct
  misc_feature 1..20: note = Description of Artificial Sequence: Synthetic oligonucleotide
  misc_feature 1..20: note = Target: SCN10A; (+) strand; PAM type: NRG; PAM sequence: CAG
  source 1..20: mol_type = other DNA
tgaaagttttttacaggaac

SEQ ID NO: 37688 - DNA, 20 bp, synthetic construct
  misc_feature 1..20: note = Description of Artificial Sequence: Synthetic oligonucleotide
  misc_feature 1..20: note = Target: SCN10A; (+) strand; PAM type: NRG; PAM sequence: GAG
  source 1..20: mol_type = other DNA
gttttttacaggaaccagtt

SEQ ID NO: 37689 - DNA, 20 bp, synthetic construct
  misc_feature 1..20: note = Description of Artificial Sequence: Synthetic oligonucleotide
  misc_feature 1..20: note = Target: SCN10A; (+) strand; PAM type: NRG; PAM sequence: TAG
  source 1..20: mol_type = other DNA
caggaaccagttgagctttc

SEQ ID NO: 37690 - DNA, 20 bp, synthetic construct
  misc_feature 1..20: note = Description of Artificial Sequence: Synthetic oligonucleotide
  misc_feature 1..20: note = Target: SCN10A; (+) strand; PAM type: NRG; PAM sequence: GAG
  source 1..20: mol_type = other DNA
ctttatgccatccattcaat

SEQ ID NO: 37691 - DNA, 20 bp, synthetic construct
  misc_feature 1..20: note = Description of Artificial Sequence: Synthetic oligonucleotide
  misc_feature 1..20: note = Target: SCN10A; (+) strand; PAM type: NRG; PAM sequence: CAG
  source 1..20: mol_type = other DNA
atgagaaactgtttctgctc

SEQ ID NO: 37692 - DNA, 20 bp, synthetic construct
  misc_feature 1..20: note = Description of Artificial Sequence: Synthetic oligonucleotide
  misc_feature 1..20: note = Target: SCN10A; (+) strand; PAM type: NRG; PAM sequence: TGG
  source 1..20: mol_type = other DNA
aactgtttctgctccagaaa

SEQ ID NO: 37693 - DNA, 20 bp, synthetic construct
  misc_feature 1..20: note = Description of Artificial Sequence: Synthetic oligonucleotide
  misc_feature 1..20: note = Target: SCN10A; (+) strand; PAM type: NRG; PAM sequence: TGG
  source 1..20: mol_type = other DNA
tttctgctccagaaatggat

SEQ ID NO: 37694 - DNA, 20 bp, synthetic construct
  misc_feature 1..20: note = Description of Artificial Sequence: Synthetic oligonucleotide
  misc_feature 1..20: note = Target: SCN10A; (+) strand; PAM type: NRG; PAM sequence: AAG
  source 1..20: mol_type = other DNA
gattggatgctcattttctt

SEQ ID NO: 37695 - DNA, 20 bp, synthetic construct
  misc_feature 1..20: note = Description of Artificial Sequence: Synthetic oligonucleotide
  misc_feature 1..20: note = Target: SCN10A; (+) strand; PAM type: NRG; PAM sequence: GAG
  source 1..20: mol_type = other DNA
ttggatgctcattttcttaa

SEQ ID NO: 37696 - DNA, 20 bp, synthetic construct
  misc_feature 1..20: note = Description of Artificial Sequence: Synthetic oligonucleotide
  misc_feature 1..20: note = Target: SCN10A; (+) strand; PAM type: NRG; PAM sequence: AAG
  source 1..20: mol_type = other DNA
gctcattttcttaagagttg

SEQ ID NO: 37697 - DNA, 20 bp, synthetic construct
  misc_feature 1..20: note = Description of Artificial Sequence: Synthetic oligonucleotide
  misc_feature 1..20: note = Target: SCN10A; (+) strand; PAM type: NRG; PAM sequence: AAG
  source 1..20: mol_type = other DNA
cattttcttaagagttgaag

SEQ ID NO: 37698 - DNA, 20 bp, synthetic construct
  misc_feature 1..20: note = Description of Artificial Sequence: Synthetic oligonucleotide
  misc_feature 1..20: note = Target: SCN10A; (+) strand; PAM type: NRG; PAM sequence: GAG
  source 1..20: mol_type = other DNA
ttttcttaagagttgaagaa

SEQ ID NO: 37699 - DNA, 20 bp, synthetic construct
  misc_feature 1..20: note = Description of Artificial Sequence: Synthetic oligonucleotide
  misc_feature 1..20: note = Target: SCN10A; (+) strand; PAM type: NRG; PAM sequence: AGG
  source 1..20: mol_type = other DNA
tttcttaagagttgaagaag

SEQ ID NO: 37700 - DNA, 20 bp, synthetic construct
  misc_feature 1..20: note = Description of Artificial Sequence: Synthetic oligonucleotide
  misc_feature 1..20: note = Target: SCN10A; (+) strand; PAM type: NRG; PAM sequence: GGG
  source 1..20: mol_type = other DNA
ttcttaagagttgaagaaga

SEQ ID NO: 37701 - DNA, 20 bp, synthetic construct
  misc_feature 1..20: note = Description of Artificial Sequence: Synthetic oligonucleotide
  misc_feature 1..20: note = Target: SCN10A; (+) strand; PAM type: NRG; PAM sequence: CAG
  source 1..20: mol_type = other DNA
agagttgaagaagagggaaa

SEQ ID NO: 37702 - DNA, 20 bp, synthetic construct
  misc_feature 1..20: note = Description of Artificial Sequence: Synthetic oligonucleotide
  misc_feature 1..20: note = Target: SCN10A; (+) strand; PAM type: NRG; PAM sequence: AAG
  source 1..20: mol_type = other DNA
catactgaaaaatgcatata

SEQ ID NO: 37703 - DNA, 20 bp, synthetic construct
  misc_feature 1..20: note = Description of Artificial Sequence: Synthetic oligonucleotide
  misc_feature 1..20: note = Target: SCN10A; (+) strand; PAM type: NRG; PAM sequence: AAG
  source 1..20: mol_type = other DNA
tgaaaaatgcatataaagaa

SEQ ID NO: 37704 - DNA, 20 bp, synthetic construct
  misc_feature 1..20: note = Description of Artificial Sequence: Synthetic oligonucleotide
  misc_feature 1..20: note = Target: SCN10A; (+) strand; PAM type: NRG; PAM sequence: AAG
  source 1..20: mol_type = other DNA
aagaaaagtttacctactga

SEQ ID NO: 37705 - DNA, 20 bp, synthetic construct
  misc_feature 1..20: note = Description of Artificial Sequence: Synthetic oligonucleotide
  misc_feature 1..20: note = Target: SCN10A; (+) strand; PAM type: NRG; PAM sequence: AGG
  source 1..20: mol_type = other DNA
agaaaagtttacctactgaa

SEQ ID NO: 37706 - DNA, 20 bp, synthetic construct
  misc_feature 1..20: note = Description of Artificial Sequence: Synthetic oligonucleotide
  misc_feature 1..20: note = Target: SCN10A; (+) strand; PAM type: NRG; PAM sequence: AAG
  source 1..20: mol_type = other DNA
attcacttctgctcctcgtt

SEQ ID NO: 37707 - DNA, 20 bp, synthetic construct
  misc_feature 1..20: note = Description of Artificial Sequence: Synthetic oligonucleotide
  misc_feature 1..20: note = Target: SCN10A; (+) strand; PAM type: NRG; PAM sequence: CAG
  source 1..20: mol_type = other DNA
tctgctcctcgttaagtttc

SEQ ID NO: 37708 - DNA, 20 bp, synthetic construct
  misc_feature 1..20: note = Description of Artificial Sequence: Synthetic oligonucleotide
  misc_feature 1..20: note = Target: SCN10A; (+) strand; PAM type: NRG; PAM sequence: AAG
  source 1..20: mol_type = other DNA
gctcctcgttaagtttccag

SEQ ID NO: 37709 - DNA, 20 bp, synthetic construct
  misc_feature 1..20: note = Description of Artificial Sequence: Synthetic oligonucleotide
  misc_feature 1..20: note = Target: SCN10A; (+) strand; PAM type: NRG; PAM sequence: TGG
  source 1..20: mol_type = other DNA
taagtttccagaagataatc

SEQ ID NO: 37710 - DNA, 20 bp, synthetic construct
  misc_feature 1..20: note = Description of Artificial Sequence: Synthetic oligonucleotide
  misc_feature 1..20: note = Target: SCN10A; (+) strand; PAM type: NRG; PAM sequence: TAG
  source 1..20: mol_type = other DNA
ttccagaagataatctggtt

SEQ ID NO: 37711 - DNA, 20 bp, synthetic construct
  misc_feature 1..20: note = Description of Artificial Sequence: Synthetic oligonucleotide
  misc_feature 1..20: note = Target: SCN10A; (+) strand; PAM type: NRG; PAM sequence: GAG
  source 1..20: mol_type = other DNA
ccagaagataatctggttta

SEQ ID NO: 37712 - DNA, 20 bp, synthetic construct
  misc_feature 1..20: note = Description of Artificial Sequence: Synthetic oligonucleotide
  misc_feature 1..20: note = Target: SCN10A; (+) strand; PAM type: NRG; PAM sequence: AAG
  source 1..20: mol_type = other DNA
aatctggtttagagcccatg

SEQ ID NO: 37713 - DNA, 20 bp, synthetic construct
  misc_feature 1..20: note = Description of Artificial Sequence: Synthetic oligonucleotide
  misc_feature 1..20: note = Target: SCN10A; (+) strand; PAM type: NRG; PAM sequence: CAG
  source 1..20: mol_type = other DNA
tgctgcacttttaacatgaa

SEQ ID NO: 37714 - DNA, 20 bp, synthetic construct
  misc_feature 1..20: note = Description of Artificial Sequence: Synthetic oligonucleotide
  misc_feature 1..20: note = Target: SCN10A; (+) strand; PAM type: NRG; PAM sequence: CAG
  source 1..20: mol_type = other DNA
gcacttttaacatgaacagc

SEQ ID NO: 37715 - DNA, 20 bp, synthetic construct
  misc_feature 1..20: note = Description of Artificial Sequence: Synthetic oligonucleotide
  misc_feature 1..20: note = Target: SCN10A; (+) strand; PAM type: NRG; PAM sequence: AAG
  source 1..20: mol_type = other DNA
tttaacatgaacagccagcc

SEQ ID NO: 37716 - DNA, 20 bp, synthetic construct
  misc_feature 1..20: note = Description of Artificial Sequence: Synthetic oligonucleotide
  misc_feature 1..20: note = Target: SCN10A; (+) strand; PAM type: NRG; PAM sequence: AGG
  source 1..20: mol_type = other DNA
ttaacatgaacagccagcca

SEQ ID NO: 37717 - DNA, 20 bp, synthetic construct
  misc_feature 1..20: note = Description of Artificial Sequence: Synthetic oligonucleotide
  misc_feature 1..20: note = Target: SCN10A; (+) strand; PAM type: NRG; PAM sequence: GAG
  source 1..20: mol_type = other DNA
aacatgaacagccagccaag

SEQ ID NO: 37718 - DNA, 20 bp, synthetic construct
  misc_feature 1..20: note = Description of Artificial Sequence: Synthetic oligonucleotide
  misc_feature 1..20: note = Target: SCN10A; (+) strand; PAM type: NRG; PAM sequence: CAG
  source 1..20: mol_type = other DNA
aacagccagccaaggagcat

SEQ ID NO: 37719 - DNA, 20 bp, synthetic construct
  misc_feature 1..20: note = Description of Artificial Sequence: Synthetic oligonucleotide
  misc_feature 1..20: note = Target: SCN10A; (+) strand; PAM type: NRG; PAM sequence: AGG
  source 1..20: mol_type = other DNA
acagccagccaaggagcatc

SEQ ID NO: 37720 - DNA, 20 bp, synthetic construct
  misc_feature 1..20: note = Description of Artificial Sequence: Synthetic oligonucleotide
  misc_feature 1..20: note = Target: SCN10A; (+) strand; PAM type: NRG; PAM sequence: AAG
  source 1..20: mol_type = other DNA
caaggagcatcaggaatttg

SEQ ID NO: 37721 - DNA, 20 bp, synthetic construct
  misc_feature 1..20: note = Description of Artificial Sequence: Synthetic oligonucleotide
  misc_feature 1..20: note = Target: SCN10A; (+) strand; PAM type: NRG; PAM sequence: AGG
  source 1..20: mol_type = other DNA
aaggagcatcaggaatttga

SEQ ID NO: 37722 - DNA, 20 bp, synthetic construct
  misc_feature 1..20: note = Description of Artificial Sequence: Synthetic oligonucleotide
  misc_feature 1..20: note = Target: SCN10A; (+) strand; PAM type: NRG; PAM sequence: CAG
  source 1..20: mol_type = other DNA
ttgaaggatgcttctaacac

SEQ ID NO: 37723 - DNA, 20 bp, synthetic construct
  misc_feature 1..20: note = Description of Artificial Sequence: Synthetic oligonucleotide
  misc_feature 1..20: note = Target: SCN10A; (+) strand; PAM type: NRG; PAM sequence: AAG
  source 1..20: mol_type = other DNA
gcttctaacaccagaaacca

SEQ ID NO: 37724 - DNA, 20 bp, synthetic construct
  misc_feature 1..20: note = Description of Artificial Sequence: Synthetic oligonucleotide
  misc_feature 1..20: note = Target: SCN10A; (+) strand; PAM type: NRG; PAM sequence: AAG
  source 1..20: mol_type = other DNA
caactgaaaaaaaaaaaaaa

SEQ ID NO: 37725 - DNA, 20 bp, synthetic construct
  misc_feature 1..20: note = Description of Artificial Sequence: Synthetic oligonucleotide
  misc_feature 1..20: note = Target: SCN10A; (+) strand; PAM type: NRG; PAM sequence: AAG
  source 1..20: mol_type = other DNA
gaaaaaaaaaaaaaaaagaa

SEQ ID NO: 37726 - DNA, 20 bp, synthetic construct
  misc_feature 1..20: note = Description of Artificial Sequence: Synthetic oligonucleotide
  misc_feature 1..20: note = Target: SCN10A; (+) strand; PAM type: NRG; PAM sequence: AAG
  source 1..20: mol_type = other DNA
aaaaaaaaaaaagaaaagaa

SEQ ID NO: 37727 - DNA, 20 bp, synthetic construct
  misc_feature 1..20: note = Description of Artificial Sequence: Synthetic oligonucleotide
  misc_feature 1..20: note = Target: SCN10A; (+) strand; PAM type: NRG; PAM sequence: AAG
  source 1..20: mol_type = other DNA
aaaaaaagaaaagaaaagaa

SEQ ID NO: 37728 - DNA, 20 bp, synthetic construct
  misc_feature 1..20: note = Description of Artificial Sequence: Synthetic oligonucleotide
  misc_feature 1..20: note = Target: SCN10A; (+) strand; PAM type: NRG; PAM sequence: AAG
  source 1..20: mol_type = other DNA
agaaaagaaaagaaaagaaa

SEQ ID NO: 37729 - DNA, 20 bp, synthetic construct
  misc_feature 1..20: note = Description of Artificial Sequence: Synthetic oligonucleotide
  misc_feature 1..20: note = Target: SCN10A; (+) strand; PAM type: NRG; PAM sequence: GAG
  source 1..20: mol_type = other DNA
aaaagaaaagaaaagaaaaa

SEQ ID NO: 37730 - DNA, 20 bp, synthetic construct
  misc_feature 1..20: note = Description of Artificial Sequence: Synthetic oligonucleotide
  misc_feature 1..20: note = Target: SCN10A; (+) strand; PAM type: NRG; PAM sequence: AAG
  source 1..20: mol_type = other DNA
gaaaagaaaaagagacaata

SEQ ID NO: 37731 - DNA, 20 bp, synthetic construct
  misc_feature 1..20: note = Description of Artificial Sequence: Synthetic oligonucleotide
  misc_feature 1..20: note = Target: SCN10A; (+) strand; PAM type: NRG; PAM sequence: GAG
  source 1..20: mol_type = other DNA
aaagaaaaagagacaataaa

SEQ ID NO: 37732 - DNA, 20 bp, synthetic construct
  misc_feature 1..20: note = Description of Artificial Sequence: Synthetic oligonucleotide
  misc_feature 1..20: note = Target: SCN10A; (+) strand; PAM type: NRG; PAM sequence: AGG
  source 1..20: mol_type = other DNA
aagaaaaagagacaataaag

SEQ ID NO: 37733 - DNA, 20 bp, synthetic construct
  misc_feature 1..20: note = Description of Artificial Sequence: Synthetic oligonucleotide
  misc_feature 1..20: note = Target: SCN10A; (+) strand; PAM type: NRG; PAM sequence: GGG
  source 1..20: mol_type = other DNA
agaaaaagagacaataaaga

SEQ ID NO: 37734 - DNA, 20 bp, synthetic construct
  misc_feature 1..20: note = Description of Artificial Sequence: Synthetic oligonucleotide
  misc_feature 1..20: note = Target: SCN10A; (+) strand; PAM type: NRG; PAM sequence: CAG
  source 1..20: mol_type = other DNA
aaaagagacaataaagaggg

SEQ ID NO: 37735 - DNA, 20 bp, synthetic construct
  misc_feature 1..20: note = Description of Artificial Sequence: Synthetic oligonucleotide
  misc_feature 1..20: note = Target: SCN10A; (+) strand; PAM type: NRG; PAM sequence: AAG
  source 1..20: mol_type = other DNA
agagacaataaagagggcag

SEQ ID NO: 37736 - DNA, 20 bp, synthetic construct
  misc_feature 1..20: note = Description of Artificial Sequence: Synthetic oligonucleotide
  misc_feature 1..20: note = Target: SCN10A; (+) strand; PAM type: NRG; PAM sequence: AAG
  source 1..20: mol_type = other DNA
gacaataaagagggcagaag

SEQ ID NO: 37737 - DNA, 20 bp, synthetic construct
  misc_feature 1..20: note = Description of Artificial Sequence: Synthetic oligonucleotide
  misc_feature 1..20: note = Target: SCN10A; (+) strand; PAM type: NRG; PAM sequence: GAG
  source 1..20: mol_type = other DNA
caataaagagggcagaagaa

SEQ ID NO: 37738 - DNA, 20 bp, synthetic construct
  misc_feature 1..20: note = Description of Artificial Sequence: Synthetic oligonucleotide
  misc_feature 1..20: note = Target: SCN10A; (+) strand; PAM type: NRG; PAM sequence: TAG
  source 1..20: mol_type = other DNA
aaagagggcagaagaagagt

SEQ ID NO: 37739 - DNA, 20 bp, synthetic construct
  misc_feature 1..20: note = Description of Artificial Sequence: Synthetic oligonucleotide
  misc_feature 1..20: note = Target: SCN10A; (+) strand; PAM type: NRG; PAM sequence: GAG
  source 1..20: mol_type = other DNA
agagggcagaagaagagtta

SEQ ID NO: 37740 - DNA, 20 bp, synthetic construct
  misc_feature 1..20: note = Description of Artificial Sequence: Synthetic oligonucleotide
  misc_feature 1..20: note = Target: SCN10A; (+) strand; PAM type: NRG; PAM sequence: TGG
  source 1..20: mol_type = other DNA
ttagagaaataaaactgtat

SEQ ID NO: 37741 - DNA, 20 bp, synthetic construct
  misc_feature 1..20: note = Description of Artificial Sequence: Synthetic oligonucleotide
  misc_feature 1..20: note = Target: SCN10A; (+) strand; PAM type: NRG; PAM sequence: CAG
  source 1..20: mol_type = other DNA
agaaataaaactgtattggc

SEQ ID NO: 37742 - DNA, 20 bp, synthetic construct
  misc_feature 1..20: note = Description of Artificial Sequence: Synthetic oligonucleotide
  misc_feature 1..20: note = Target: SCN10A; (+) strand; PAM type: NRG; PAM sequence: AGG
  source 1..20: mol_type = other DNA
gaaataaaactgtattggcc

SEQ ID NO: 37743 - DNA, 20 bp, synthetic construct
  misc_feature 1..20: note = Description of Artificial Sequence: Synthetic oligonucleotide
  misc_feature 1..20: note = Target: SCN10A; (+) strand; PAM type: NRG; PAM sequence: TGG
  source 1..20: mol_type = other DNA
actgtattggccaggcgctg

SEQ ID NO: 37744 - DNA, 20 bp, synthetic construct
  misc_feature 1..20: note = Description of Artificial Sequence: Synthetic oligonucleotide
  misc_feature 1..20: note = Target: SCN10A; (+) strand; PAM type: NRG; PAM sequence: CAG
  source 1..20: mol_type = other DNA
gtggctcacgcctgtaatcg

SEQ ID NO: 37745 - DNA, 20 bp, synthetic construct
  misc_feature 1..20: note = Description of Artificial Sequence: Synthetic oligonucleotide
  misc_feature 1..20: note = Target: SCN10A; (+) strand; PAM type: NRG; PAM sequence: TGG
  source 1..20: mol_type = other DNA
cgcctgtaatcgcagcactt

SEQ ID NO: 37746 - DNA, 20 bp, synthetic construct
  misc_feature 1..20: note = Description of Artificial Sequence: Synthetic oligonucleotide
  misc_feature 1..20: note = Target: SCN10A; (+) strand; PAM type: NRG; PAM sequence: GGG
  source 1..20: mol_type = other DNA
gcctgtaatcgcagcacttt

SEQ ID NO: 37747 - DNA, 20 bp, synthetic construct
  misc_feature 1..20: note = Description of Artificial Sequence: Synthetic oligonucleotide
  misc_feature 1..20: note = Target: SCN10A; (+) strand; PAM type: NRG; PAM sequence: GAG
  source 1..20: mol_type = other DNA
ctgtaatcgcagcactttgg

SEQ ID NO: 37748 - DNA, 20 bp, synthetic construct
  misc_feature 1..20: note = Description of Artificial Sequence: Synthetic oligonucleotide
  misc_feature 1..20: note = Target: SCN10A; (+) strand; PAM type: NRG; PAM sequence: AGG
  source 1..20: mol_type = other DNA
tgtaatcgcagcactttggg

SEQ ID NO: 37749 - DNA, 20 bp, synthetic construct
  misc_feature 1..20: note = Description of Artificial Sequence: Synthetic oligonucleotide
  misc_feature 1..20: note = Target: SCN10A; (+) strand; PAM type: NRG; PAM sequence: GAG
  source 1..20: mol_type = other DNA
tcgcagcactttgggaggcc

SEQ ID NO: 37750 - DNA, 20 bp, synthetic construct
  misc_feature 1..20: note = Description of Artificial Sequence: Synthetic oligonucleotide
  misc_feature 1..20: note = Target: SCN10A; (+) strand; PAM type: NRG; PAM sequence: AGG
  source 1..20: mol_type = other DNA
cgcagcactttgggaggccg

SEQ ID NO: 37751 - DNA, 20 bp, synthetic construct
  misc_feature 1..20: note = Description of Artificial Sequence: Synthetic oligonucleotide
  misc_feature 1..20: note = Target: SCN10A; (+) strand; PAM type: NRG; PAM sequence: CGG
  source 1..20: mol_type = other DNA
agcactttgggaggccgagg

SEQ ID NO: 37752 - DNA, 20 bp, synthetic construct
  misc_feature 1..20: note = Description of Artificial Sequence: Synthetic oligonucleotide
  misc_feature 1..20: note = Target: SCN10A; (+) strand; PAM type: NRG; PAM sequence: GGG
  source 1..20: mol_type = other DNA
gcactttgggaggccgaggc

SEQ ID NO: 37753 - DNA, 20 bp, synthetic construct
  misc_feature 1..20: note = Description of Artificial Sequence: Synthetic oligonucleotide
  misc_feature 1..20: note = Target: SCN10A; (+) strand; PAM type: NRG; PAM sequence: CAG
  source 1..20: mol_type = other DNA
ctttgggaggccgaggcggg

SEQ ID NO: 37754 - DNA, 20 bp, synthetic construct
  misc_feature 1..20: note = Description of Artificial Sequence: Synthetic oligonucleotide
  misc_feature 1..20: note = Target: SCN10A; (+) strand; PAM type: NRG; PAM sequence: GAG
  source 1..20: mol_type = other DNA
ggccgaggcgggcagattac

SEQ ID NO: 37755 - DNA, 20 bp, synthetic construct
  misc_feature 1..20: note = Description of Artificial Sequence: Synthetic oligonucleotide
  misc_feature 1..20: note = Target: SCN10A; (+) strand; PAM type: NRG; PAM sequence: AGG
  source 1..20: mol_type = other DNA
gccgaggcgggcagattacg

SEQ ID NO: 37756 - DNA, 20 bp, synthetic construct
  misc_feature 1..20: note = Description of Artificial Sequence: Synthetic oligonucleotide
  misc_feature 1..20: note = Target: SCN10A; (+) strand; PAM type: NRG; PAM sequence: CAG
  source 1..20: mol_type = other DNA
aggcgggcagattacgaggt

SEQ ID NO: 37757 - DNA, 20 bp, synthetic construct
  misc_feature 1..20: note = Description of Artificial Sequence: Synthetic oligonucleotide
  misc_feature 1..20: note = Target: SCN10A; (+) strand; PAM type: NRG; PAM sequence: AGG
  source 1..20: mol_type = other DNA
ggcgggcagattacgaggtc

SEQ ID NO: 37758 - DNA, 20 bp, synthetic construct
  misc_feature 1..20: note = Description of Artificial Sequence: Synthetic oligonucleotide
  misc_feature 1..20: note = Target: SCN10A; (+) strand; PAM type: NRG; PAM sequence: GAG
  source 1..20: mol_type = other DNA
cgggcagattacgaggtcag

SEQ ID NO: 37759 - DNA, 20 bp, synthetic construct
  misc_feature 1..20: note = Description of Artificial Sequence: Synthetic oligonucleotide
  misc_feature 1..20: note = Target: SCN10A; (+) strand; PAM type: NRG; PAM sequence: GAG
  source 1..20: mol_type = other DNA
gattacgaggtcaggagatc

SEQ ID NO: 37760 - DNA, 20 bp, synthetic construct
  misc_feature 1..20: note = Description of Artificial Sequence: Synthetic oligonucleotide
  misc_feature 1..20: note = Target: SCN10A; (+) strand; PAM type: NRG; PAM sequence: TGG
  source 1..20: mol_type = other DNA
tcaggagatcgagaccatcc

SEQ ID NO: 37761 - DNA, 20 bp, synthetic construct
  misc_feature 1..20: note = Description of Artificial Sequence: Synthetic oligonucleotide
  misc_feature 1..20: note = Target: SCN10A; (+) strand; PAM type: NRG; PAM sequence: CGG
  source 1..20: mol_type = other DNA
cgagaccatcctggctaacg

SEQ ID NO: 37762 - DNA, 20 bp, synthetic construct
  misc_feature 1..20: note = Description of Artificial Sequence: Synthetic oligonucleotide
  misc_feature 1..20: note = Target: SCN10A; (+) strand; PAM type: NRG; PAM sequence: TAG
  source 1..20: mol_type = other DNA
ctactaaaaatacaaaaaat

SEQ ID NO: 37763 - DNA, 20 bp, synthetic construct
  misc_feature 1..20: note = Description of Artificial Sequence: Synthetic oligonucleotide
  misc_feature 1..20: note = Target: SCN10A; (+) strand; PAM type: NRG; PAM sequence: CGG
  source 1..20: mol_type = other DNA
taaaaatacaaaaaattagc

SEQ ID NO: 37764 - DNA, 20 bp, synthetic construct
  misc_feature 1..20: note = Description of Artificial Sequence: Synthetic oligonucleotide
  misc_feature 1..20: note = Target: SCN10A; (+) strand; PAM type: NRG; PAM sequence: GGG
  source 1..20: mol_type = other DNA
aaaaatacaaaaaattagcc

SEQ ID NO: 37765 - DNA, 20 bp, synthetic construct
  misc_feature 1..20: note = Description of Artificial Sequence: Synthetic oligonucleotide
  misc_feature 1..20: note = Target: SCN10A; (+) strand; PAM type: NRG; PAM sequence: TGG
  source 1..20: mol_type = other DNA
aaaaaattagccgggcgcct

SEQ ID NO: 37766 - DNA, 20 bp, synthetic construct
  misc_feature 1..20: note = Description of Artificial Sequence: Synthetic oligonucleotide
  misc_feature 1..20: note = Target: SCN10A; (+) strand; PAM type: NRG; PAM sequence: CGG
  source 1..20: mol_type = other DNA
aaattagccgggcgccttgg

SEQ ID NO: 37767 - DNA, 20 bp, synthetic construct
  misc_feature 1..20: note = Description of Artificial Sequence: Synthetic oligonucleotide
  misc_feature 1..20: note = Target: SCN10A; (+) strand; PAM type: NRG; PAM sequence: GGG
  source 1..20: mol_type = other DNA
aattagccgggcgccttggc

SEQ ID NO: 37768 - DNA, 20 bp, synthetic construct
  misc_feature 1..20: note = Description of Artificial Sequence: Synthetic oligonucleotide
  misc_feature 1..20: note = Target: SCN10A; (+) strand; PAM type: NRG; PAM sequence: TAG
  source 1..20: mol_type = other DNA
ggcgccttggcgggcacctg

SEQ ID NO: 37769 - DNA, 20 bp, synthetic construct
  misc_feature 1..20: note = Description of Artificial Sequence: Synthetic oligonucleotide
  misc_feature 1..20: note = Target: SCN10A; (+) strand; PAM type: NRG; PAM sequence: CAG
  source 1..20: mol_type = other DNA
ttggcgggcacctgtagttc

SEQ ID NO: 37770 - DNA, 20 bp, synthetic construct
  misc_feature 1..20: note = Description of Artificial Sequence: Synthetic oligonucleotide
  misc_feature 1..20: note = Target: SCN10A; (+) strand; PAM type: NRG; PAM sequence: CGG
  source 1..20: mol_type = other DNA
acctgtagttccagctactc

SEQ ID NO: 37771 - DNA, 20 bp, synthetic construct
  misc_feature 1..20: note = Description of Artificial Sequence: Synthetic oligonucleotide
  misc_feature 1..20: note = Target: SCN10A; (+) strand; PAM type: NRG; PAM sequence: GAG
  source 1..20: mol_type = other DNA
ctgtagttccagctactccg

SEQ ID NO: 37772 - DNA, 20 bp, synthetic construct
  misc_feature 1..20: note = Description of Artificial Sequence: Synthetic oligonucleotide
  misc_feature 1..20: note = Target: SCN10A; (+) strand; PAM type: NRG; PAM sequence: AGG
  source 1..20: mol_type = other DNA
tgtagttccagctactccgg

SEQ ID NO: 37773 - DNA, 20 bp, synthetic construct
  misc_feature 1..20: note = Description of Artificial Sequence: Synthetic oligonucleotide
  misc_feature 1..20: note = Target: SCN10A; (+) strand; PAM type: NRG; PAM sequence: GAG
  source 1..20: mol_type = other DNA
ttccagctactccggaggct

SEQ ID NO: 37774 - DNA, 20 bp, synthetic construct
  misc_feature 1..20: note = Description of Artificial Sequence: Synthetic oligonucleotide
  misc_feature 1..20: note = Target: SCN10A; (+) strand; PAM type: NRG; PAM sequence: AGG
  source 1..20: mol_type = other DNA
tccagctactccggaggctg

SEQ ID NO: 37775 - DNA, 20 bp, synthetic construct
  misc_feature 1..20: note = Description of Artificial Sequence: Synthetic oligonucleotide
  misc_feature 1..20: note = Target: SCN10A; (+) strand; PAM type: NRG; PAM sequence: CGG
  source 1..20: mol_type = other DNA
agctactccggaggctgagg

SEQ ID NO: 37776 - DNA, 20 bp, synthetic construct
  misc_feature 1..20: note = Description of Artificial Sequence: Synthetic oligonucleotide
  misc_feature 1..20: note = Target: SCN10A; (+) strand; PAM type: NRG; PAM sequence: GGG
  source 1..20: mol_type = other DNA
gctactccggaggctgaggc

SEQ ID NO: 37777 - DNA, 20 bp, synthetic construct
  misc_feature 1..20: note = Description of Artificial Sequence: Synthetic oligonucleotide
  misc_feature 1..20: note = Target: SCN10A; (+) strand; PAM type: NRG; PAM sequence: GAG
  source 1..20: mol_type = other DNA
tactccggaggctgaggcgg

SEQ ID NO: 37778 - DNA, 20 bp, synthetic construct
  misc_feature 1..20: note = Description of Artificial Sequence: Synthetic oligonucleotide
  misc_feature 1..20: note = Target: SCN10A; (+) strand; PAM type: NRG; PAM sequence: TGG
  source 1..20: mol_type = other DNA
cggaggctgaggcgggagaa

SEQ ID NO: 37779 - DNA, 20 bp, synthetic construct
  misc_feature 1..20: note = Description of Artificial Sequence: Synthetic oligonucleotide
  misc_feature 1..20: note = Target: SCN10A; (+) strand; PAM type: NRG; PAM sequence: CGG
  source 1..20: mol_type = other DNA
gcgggagaatggcgtgaacc

SEQ ID NO: 37780 - DNA, 20 bp, synthetic construct
  misc_feature 1..20: note = Description of Artificial Sequence: Synthetic oligonucleotide
  misc_feature 1..20: note = Target: SCN10A; (+) strand; PAM type: NRG; PAM sequence: GGG
  source 1..20: mol_type = other DNA
cgggagaatggcgtgaaccc

SEQ ID NO: 37781 - DNA, 20 bp, synthetic construct
  misc_feature 1..20: note = Description of Artificial Sequence: Synthetic oligonucleotide
  misc_feature 1..20: note = Target: SCN10A; (+) strand; PAM type: NRG; PAM sequence: GAG
  source 1..20: mol_type = other DNA
ggagaatggcgtgaacccgg

SEQ ID NO: 37782 - DNA, 20 bp, synthetic construct
  misc_feature 1..20: note = Description of Artificial Sequence: Synthetic oligonucleotide
  misc_feature 1..20: note = Target: SCN10A; (+) strand; PAM type: NRG; PAM sequence: AGG
  source 1..20: mol_type = other DNA
gagaatggcgtgaacccggg

SEQ ID NO: 37783 - DNA, 20 bp, synthetic construct
  misc_feature 1..20: note = Description of Artificial Sequence: Synthetic oligonucleotide
  misc_feature 1..20: note = Target: SCN10A; (+) strand; PAM type: NRG; PAM sequence: CGG
  source 1..20: mol_type = other DNA
aatggcgtgaacccgggagg

SEQ ID NO: 37784 - DNA, 20 bp, synthetic construct
  misc_feature 1..20: note = Description of Artificial Sequence: Synthetic oligonucleotide
  misc_feature 1..20: note = Target: SCN10A; (+) strand; PAM type: NRG; PAM sequence: GAG
  source 1..20: mol_type = other DNA
tggcgtgaacccgggaggcg

SEQ ID NO: 37785 - DNA, 20 bp, synthetic construct
  misc_feature 1..20: note = Description of Artificial Sequence: Synthetic oligonucleotide
  misc_feature 1..20: note = Target: SCN10A; (+) strand; PAM type: NRG; PAM sequence: CAG
  source 1..20: mol_type = other DNA
aacccgggaggcggagcttg

SEQ ID NO: 37786 - DNA, 20 bp, synthetic construct
  misc_feature 1..20: note = Description of Artificial Sequence: Synthetic oligonucleotide
  misc_feature 1..20: note = Target: SCN10A; (+) strand; PAM type: NRG; PAM sequence: GAG
  source 1..20: mol_type = other DNA
cgggaggcggagcttgcagt

SEQ ID NO: 37787 - DNA, 20 bp, synthetic construct
  misc_feature 1..20: note = Description of Artificial Sequence: Synthetic oligonucleotide
  misc_feature 1..20: note = Target: SCN10A; (+) strand; PAM type: NRG; PAM sequence: TAG
  source 1..20: mol_type = other DNA
ggcggagcttgcagtgagcc

SEQ ID NO: 37788 - DNA, 20 bp, synthetic construct
  misc_feature 1..20: note = Description of Artificial Sequence: Synthetic oligonucleotide
  misc_feature 1..20: note = Target: SCN10A; (+) strand; PAM type: NRG; PAM sequence: CAG
  source 1..20: mol_type = other DNA
tagatcgcgtcactgcactc

SEQ ID NO: 37789 - DNA, 20 bp, synthetic construct
  misc_feature 1..20: note = Description of Artificial Sequence: Synthetic oligonucleotide
  misc_feature 1..20: note = Target: SCN10A; (+) strand; PAM type: NRG; PAM sequence: TGG
  source 1..20: mol_type = other DNA
cgcgtcactgcactccagtc

SEQ ID NO: 37790 - DNA, 20 bp, synthetic construct
  misc_feature 1..20: note = Description of Artificial Sequence: Synthetic oligonucleotide
  misc_feature 1..20: note = Target: SCN10A; (+) strand; PAM type: NRG; PAM sequence: GGG
  source 1..20: mol_type = other DNA
gcgtcactgcactccagtct

SEQ ID NO: 37791 - DNA, 20 bp, synthetic construct
  misc_feature 1..20: note = Description of Artificial Sequence: Synthetic oligonucleotide
  misc_feature 1..20: note = Target: SCN10A; (+) strand; PAM type: NRG; PAM sequence: CAG
  source 1..20: mol_type = other DNA
ctgcactccagtctgggtga

SEQ ID NO: 37792 - DNA, 20 bp, synthetic construct
  misc_feature 1..20: note = Description of Artificial Sequence: Synthetic oligonucleotide
  misc_feature 1..20: note = Target: SCN10A; (+) strand; PAM type: NRG; PAM sequence: GAG
  source 1..20: mol_type = other DNA
gcactccagtctgggtgaca

SEQ ID NO: 37793 - DNA, 20 bp, synthetic construct
  misc_feature 1..20: note = Description of Artificial Sequence: Synthetic oligonucleotide
  misc_feature 1..20: note = Target: SCN10A; (+) strand; PAM type: NRG; PAM sequence: AAG
  source 1..20: mol_type = other DNA
tccagtctgggtgacagagc

SEQ ID NO: 37794 - DNA, 20 bp, synthetic construct
  misc_feature 1..20: note = Description of Artificial Sequence: Synthetic oligonucleotide
  misc_feature 1..20: note = Target: SCN10A; (+) strand; PAM type: NRG; PAM sequence: CAG
  source 1..20: mol_type = other DNA
ctccaaaacaacaacaacaa

SEQ ID NO: 37795 - DNA, 20 bp, synthetic construct
  misc_feature 1..20: note = Description of Artificial Sequence: Synthetic oligonucleotide
  misc_feature 1..20: note = Target: SCN10A; (+) strand; PAM type: NRG; PAM sequence: TAG
  source 1..20: mol_type = other DNA
aaaacctgtactaatatttt

SEQ ID NO: 37796 - DNA, 20 bp, synthetic construct
  misc_feature 1..20: note = Description of Artificial Sequence: Synthetic oligonucleotide
  misc_feature 1..20: note = Target: SCN10A; (+) strand; PAM type: NRG; PAM sequence: GAG
  source 1..20: mol_type = other DNA
aacctgtactaatattttta

SEQ ID NO: 37797 - DNA, 20 bp, synthetic construct
  misc_feature 1..20: note = Description of Artificial Sequence: Synthetic oligonucleotide
  misc_feature 1..20: note = Target: SCN10A; (+) strand; PAM type: NRG; PAM sequence: GAG
  source 1..20: mol_type = other DNA
cctgtactaatatttttaga

SEQ ID NO: 37798 - DNA, 20 bp, synthetic construct
  misc_feature 1..20: note = Description of Artificial Sequence: Synthetic oligonucleotide
  misc_feature 1..20: note = Target: SCN10A; (+) strand; PAM type: NRG; PAM sequence: AAG
  source 1..20: mol_type = other DNA
actaatatttttagagagtt

SEQ ID NO: 37799 - DNA, 20 bp, synthetic construct
  misc_feature 1..20: note = Description of Artificial Sequence: Synthetic oligonucleotide
  misc_feature 1..20: note = Target: SCN10A; (+) strand; PAM type: NRG; PAM sequence: GAG
  source 1..20: mol_type = other DNA
taatatttttagagagttaa

SEQ ID NO: 37800 - DNA, 20 bp, synthetic construct
  misc_feature 1..20: note = Description of Artificial Sequence: Synthetic oligonucleotide
  misc_feature 1..20: note = Target: SCN10A; (+) strand; PAM type: NRG; PAM sequence: AGG
  source 1..20: mol_type = other DNA
aatatttttagagagttaag

SEQ ID NO: 37801 - DNA, 20 bp, synthetic construct
  misc_feature 1..20: note = Description of Artificial Sequence: Synthetic oligonucleotide
  misc_feature 1..20: note = Target: SCN10A; (+) strand; PAM type: NRG; PAM sequence: GAG
  source 1..20: mol_type = other DNA
tttttagagagttaagaggt

SEQ ID NO: 37802 - DNA, 20 bp, synthetic construct
  misc_feature 1..20: note = Description of Artificial Sequence: Synthetic oligonucleotide
  misc_feature 1..20: note = Target: SCN10A; (+) strand; PAM type: NRG; PAM sequence: AAG
  source 1..20: mol_type = other DNA
ttagagagttaagaggtgag

SEQ ID NO: 37803 - DNA, 20 bp, synthetic construct
  misc_feature 1..20: note = Description of Artificial Sequence: Synthetic oligonucleotide
  misc_feature 1..20: note = Target: SCN10A; (+) strand; PAM type: NRG; PAM sequence: GAG
  source 1..20: mol_type = other DNA
agagagttaagaggtgagaa

SEQ ID NO: 37804 - DNA, 20 bp, synthetic construct
  misc_feature 1..20: note = Description of Artificial Sequence: Synthetic oligonucleotide
  misc_feature 1..20: note = Target: SCN10A; (+) strand; PAM type: NRG; PAM sequence: AGG
  source 1..20: mol_type = other DNA
gagagttaagaggtgagaag

SEQ ID NO: 37805 - DNA, 20 bp, synthetic construct
  misc_feature 1..20: note = Description of Artificial Sequence: Synthetic oligonucleotide
  misc_feature 1..20: note = Target: SCN10A; (+) strand; PAM type: NRG; PAM sequence: TAG
  source 1..20: mol_type = other DNA
gtgagaagaggctccacgta

SEQ ID NO: 37806 - DNA, 20 bp, synthetic construct
  misc_feature 1..20: note = Description of Artificial Sequence: Synthetic oligonucleotide
  misc_feature 1..20: note = Target: SCN10A; (+) strand; PAM type: NRG; PAM sequence: AAG
  source 1..20: mol_type = other DNA
agaggctccacgtatagaac

SEQ ID NO: 37807 - DNA, 20 bp, synthetic construct
  misc_feature 1..20: note = Description of Artificial Sequence: Synthetic oligonucleotide
  misc_feature 1..20: note = Target: SCN10A; (+) strand; PAM type: NRG; PAM sequence: GAG
  source 1..20: mol_type = other DNA
aggctccacgtatagaacaa

SEQ ID NO: 37808 - DNA, 20 bp, synthetic construct
  misc_feature 1..20: note = Description of Artificial Sequence: Synthetic oligonucleotide
  misc_feature 1..20: note = Target: SCN10A; (+) strand; PAM type: NRG; PAM sequence: CAG
  source 1..20: mol_type = other DNA
ctccacgtatagaacaagag

SEQ ID NO: 37809 - DNA, 20 bp, synthetic construct
  misc_feature 1..20: note = Description of Artificial Sequence: Synthetic oligonucleotide
  misc_feature 1..20: note = Target: SCN10A; (+) strand; PAM type: NRG; PAM sequence: AAG
  source 1..20: mol_type = other DNA
cacgtatagaacaagagcag

SEQ ID NO: 37810 - DNA, 20 bp, synthetic construct
  misc_feature 1..20: note = Description of Artificial Sequence: Synthetic oligonucleotide
  misc_feature 1..20: note = Target: SCN10A; (+) strand; PAM type: NRG; PAM sequence: AGG
  source 1..20: mol_type = other DNA
acgtatagaacaagagcaga

SEQ ID NO: 37811 - DNA, 20 bp, synthetic construct
  misc_feature 1..20: note = Description of Artificial Sequence: Synthetic oligonucleotide
  misc_feature 1..20: note = Target: SCN10A; (+) strand; PAM type: NRG; PAM sequence: AAG
  source 1..20: mol_type = other DNA
caagagcagaaggatgtaaa

SEQ ID NO: 37812 - DNA, 20 bp, synthetic construct
  misc_feature 1..20: note = Description of Artificial Sequence: Synthetic oligonucleotide
  misc_feature 1..20: note = Target: SCN10A; (+) strand; PAM type: NRG; PAM sequence: AAG
  source 1..20: mol_type = other DNA
ggatgtaaaaagtaccttca

SEQ ID NO: 37813 - DNA, 20 bp, synthetic construct
  misc_feature 1..20: note = Description of Artificial Sequence: Synthetic oligonucleotide
  misc_feature 1..20: note = Target: SCN10A; (+) strand; PAM type: NRG; PAM sequence: TGG
  source 1..20: mol_type = other DNA
aagtaccttcaaagacaaaa

SEQ ID NO: 37814 - DNA, 20 bp, synthetic construct
  misc_feature 1..20: note = Description of Artificial Sequence: Synthetic oligonucleotide
  misc_feature 1..20: note = Target: SCN10A; (+) strand; PAM type: NRG; PAM sequence: TAG
  source 1..20: mol_type = other DNA
ttttgaaaacaaaaatatga

SEQ ID NO: 37815 - DNA, 20 bp, synthetic construct
  misc_feature 1..20: note = Description of Artificial Sequence: Synthetic oligonucleotide
  misc_feature 1..20: note = Target: SCN10A; (+) strand; PAM type: NRG; PAM sequence: AAG
  source 1..20: mol_type = other DNA
aaacaaaaatatgatagcaa

SEQ ID NO: 37816 - DNA, 20 bp, synthetic construct
  misc_feature 1..20: note = Description of Artificial Sequence: Synthetic oligonucleotide
  misc_feature 1..20: note = Target: SCN10A; (+) strand; PAM type: NRG; PAM sequence: TAG
  source 1..20: mol_type = other DNA
tagcaaaagtaaaacactaa

SEQ ID NO: 37817 - DNA, 20 bp, synthetic construct
  misc_feature 1..20: note = Description of Artificial Sequence: Synthetic oligonucleotide
  misc_feature 1..20: note = Target: SCN10A; (+) strand; PAM type: NRG; PAM sequence: AGG
  source 1..20: mol_type = other DNA
agcaaaagtaaaacactaat

SEQ ID NO: 37818 - DNA, 20 bp, synthetic construct
  misc_feature 1..20: note = Description of Artificial Sequence: Synthetic oligonucleotide
  misc_feature 1..20: note = Target: SCN10A; (+) strand; PAM type: NRG; PAM sequence: CGG
  source 1..20: mol_type = other DNA
aaaagtaaaacactaatagg

SEQ ID NO: 37819 - DNA, 20 bp, synthetic construct
  misc_feature 1..20: note = Description of Artificial Sequence: Synthetic oligonucleotide
  misc_feature 1..20: note = Target: SCN10A; (+) strand; PAM type: NRG; PAM sequence: AAG
  source 1..20: mol_type = other DNA
aataggcggacttgtaaata

SEQ ID NO: 37820 - DNA, 20 bp, synthetic construct
  misc_feature 1..20: note = Description of Artificial Sequence: Synthetic oligonucleotide
  misc_feature 1..20: note = Target: SCN10A; (+) strand; PAM type: NRG; PAM sequence: TGG
  source 1..20: mol_type = other DNA
cggacttgtaaataaagttt

SEQ ID NO: 37821 - DNA, 20 bp, synthetic construct
  misc_feature 1..20: note = Description of Artificial Sequence: Synthetic oligonucleotide
  misc_feature 1..20: note = Target: SCN10A; (+) strand; PAM type: NRG; PAM sequence: CAG
  source 1..20: mol_type = other DNA
ataaagttttggaaatctca

SEQ ID NO: 37822 - DNA, 20 bp, synthetic construct
  misc_feature 1..20: note = Description of Artificial Sequence: Synthetic oligonucleotide
  misc_feature 1..20: note = Target: SCN10A; (+) strand; PAM type: NRG; PAM sequence: AGG
  source 1..20: mol_type = other DNA
taaagttttggaaatctcac

SEQ ID NO: 37823 - DNA, 20 bp, synthetic construct
  misc_feature 1..20: note = Description of Artificial Sequence: Synthetic oligonucleotide
  misc_feature 1..20: note = Target: SCN10A; (+) strand; PAM type: NRG; PAM sequence: AAG
  source 1..20: mol_type = other DNA
agttttggaaatctcacagg

SEQ ID NO: 37824 - DNA, 20 bp, synthetic construct
  misc_feature 1..20: note = Description of Artificial Sequence: Synthetic oligonucleotide
  misc_feature 1..20: note = Target: SCN10A; (+) strand; PAM type: NRG; PAM sequence: TGG
  source 1..20: mol_type = other DNA
tttggaaatctcacaggaag

SEQ ID NO: 37825 - DNA, 20 bp, synthetic construct
  misc_feature 1..20: note = Description of Artificial Sequence: Synthetic oligonucleotide
  misc_feature 1..20: note = Target: SCN10A; (+) strand; PAM type: NRG; PAM sequence: AAG
  source 1..20: mol_type = other DNA
tcacaggaagtggaacaaaa

SEQ ID NO: 37826 - DNA, 20 bp, synthetic construct
  misc_feature 1..20: note = Description of Artificial Sequence: Synthetic oligonucleotide
  misc_feature 1..20: note = Target: SCN10A; (+) strand; PAM type: NRG; PAM sequence: CAG
  source 1..20: mol_type = other DNA
caggaagtggaacaaaaaag

SEQ ID NO: 37827 - DNA, 20 bp, synthetic construct
  misc_feature 1..20: note = Description of Artificial Sequence: Synthetic oligonucleotide
  misc_feature 1..20: note = Target: SCN10A; (+) strand; PAM type: NRG; PAM sequence: TGG
  source 1..20: mol_type = other DNA
gtggaacaaaaaagcagaaa

SEQ ID NO: 37828 - DNA, 20 bp, synthetic construct
  misc_feature 1..20: note = Description of Artificial Sequence: Synthetic oligonucleotide
  misc_feature 1..20: note = Target: SCN10A; (+) strand; PAM type: NRG; PAM sequence: TAG
  source 1..20: mol_type = other DNA
aacaaaaaagcagaaatgga

SEQ ID NO: 37829 - DNA, 20 bp, synthetic construct
  misc_feature 1..20: note = Description of Artificial Sequence: Synthetic oligonucleotide
  misc_feature 1..20: note = Target: SCN10A; (+) strand; PAM type: NRG; PAM sequence: AGG
  source 1..20: mol_type = other DNA
acaaaaaagcagaaatggat

SEQ ID NO: 37830 - DNA, 20 bp, synthetic construct
  misc_feature 1..20: note = Description of Artificial Sequence: Synthetic oligonucleotide
  misc_feature 1..20: note = Target: SCN10A; (+) strand; PAM type: NRG; PAM sequence: AAG
  source 1..20: mol_type = other DNA
aaaaagcagaaatggatagg

SEQ ID NO: 37831 - DNA, 20 bp, synthetic construct
  misc_feature 1..20: note = Description of Artificial Sequence: Synthetic oligonucleotide
  misc_feature 1..20: note = Target: SCN10A; (+) strand; PAM type: NRG; PAM sequence: AAG
  source 1..20: mol_type = other DNA
aatggataggaagtgataaa

SEQ ID NO: 37832 - DNA, 20 bp, synthetic construct
  misc_feature 1..20: note = Description of Artificial Sequence: Synthetic oligonucleotide
  misc_feature 1..20: note = Target: SCN10A; (+) strand; PAM type: NRG; PAM sequence: TAG
  source 1..20: mol_type = other DNA
gtgataaaaagtttgaaaat

SEQ ID NO: 37833 - DNA, 20 bp, synthetic construct
  misc_feature 1..20: note = Description of Artificial Sequence: Synthetic oligonucleotide
  misc_feature 1..20: note = Target: SCN10A; (+) strand; PAM type: NRG; PAM sequence: GAG
  source 1..20: mol_type = other DNA
gataaaaagtttgaaaatta

SEQ ID NO: 37834 - DNA, 20 bp, synthetic construct
  misc_feature 1..20: note = Description of Artificial Sequence: Synthetic oligonucleotide
  misc_feature 1..20: note = Target: SCN10A; (+) strand; PAM type: NRG; PAM sequence: CAG
  source 1..20: mol_type = other DNA
aagtttgaaaattagagaat

SEQ ID NO: 37835 - DNA, 20 bp, synthetic construct
  misc_feature 1..20: note = Description of Artificial Sequence: Synthetic oligonucleotide
  misc_feature 1..20: note = Target: SCN10A; (+) strand; PAM type: NRG; PAM sequence: TAG
  source 1..20: mol_type = other DNA
tgaaaattagagaatcagac

SEQ ID NO: 37836 - DNA, 20 bp, synthetic construct
  misc_feature 1..20: note = Description of Artificial Sequence: Synthetic oligonucleotide
  misc_feature 1..20: note = Target: SCN10A; (+) strand; PAM type: NRG; PAM sequence: AGG
  source 1..20: mol_type = other DNA
gaaaattagagaatcagact

SEQ ID NO: 37837 - DNA, 20 bp, synthetic construct
  misc_feature 1..20: note = Description of Artificial Sequence: Synthetic oligonucleotide
  misc_feature 1..20: note = Target: SCN10A; (+) strand; PAM type: NRG; PAM sequence: GAG
  source 1..20: mol_type = other DNA
aaattagagaatcagactag

SEQ ID NO: 37838 - DNA, 20 bp, synthetic construct
  misc_feature 1..20: note = Description of Artificial Sequence: Synthetic oligonucleotide
  misc_feature 1..20: note = Target: SCN10A; (+) strand; PAM type: NRG; PAM sequence: AGG
  source 1..20: mol_type = other DNA
aattagagaatcagactagg

SEQ ID NO: 37839 - DNA, 20 bp, synthetic construct
  misc_feature 1..20: note = Description of Artificial Sequence: Synthetic oligonucleotide
  misc_feature 1..20: note = Target: SCN10A; (+) strand; PAM type: NRG; PAM sequence: TAG
  source 1..20: mol_type = other DNA
gaggtatattgtttgactaa

SEQ ID NO: 37840 - DNA, 20 bp, synthetic construct
  misc_feature 1..20: note = Description of Artificial Sequence: Synthetic oligonucleotide
  misc_feature 1..20: note = Target: SCN10A; (+) strand; PAM type: NRG; PAM sequence: AGG
  source 1..20: mol_type = other DNA
aggtatattgtttgactaat

SEQ ID NO: 37841 - DNA, 20 bp, synthetic construct
  misc_feature 1..20: note = Description of Artificial Sequence: Synthetic oligonucleotide
  misc_feature 1..20: note = Target: SCN10A; (+) strand; PAM type: NRG; PAM sequence: GAG
  source 1..20: mol_type = other DNA
gtatattgtttgactaatag

SEQ ID NO: 37842 - DNA, 20 bp, synthetic construct
  misc_feature 1..20: note = Description of Artificial Sequence: Synthetic oligonucleotide
  misc_feature 1..20: note = Target: SCN10A; (+) strand; PAM type: NRG; PAM sequence: AGG
  source 1..20: mol_type = other DNA
tatattgtttgactaatagg

SEQ ID NO: 37843 - DNA, 20 bp, synthetic construct
  misc_feature 1..20: note = Description of Artificial Sequence: Synthetic oligonucleotide
  misc_feature 1..20: note = Target: SCN10A; (+) strand; PAM type: NRG; PAM sequence: TAG
  source 1..20: mol_type = other DNA
tgtttgactaataggaggtc

SEQ ID NO: 37844 - DNA, 20 bp, synthetic construct
  misc_feature 1..20: note = Description of Artificial Sequence: Synthetic oligonucleotide
  misc_feature 1..20: note = Target: SCN10A; (+) strand; PAM type: NRG; PAM sequence: AAG
  source 1..20: mol_type = other DNA
tgactaataggaggtctaga

SEQ ID NO: 37845 - DNA, 20 bp, synthetic construct
  misc_feature 1..20: note = Description of Artificial Sequence: Synthetic oligonucleotide
  misc_feature 1..20: note = Target: SCN10A; (+) strand; PAM type: NRG; PAM sequence: TAG
  source 1..20: mol_type = other DNA
taggaggtctagaaagaaat

SEQ ID NO: 37846 - DNA, 20 bp, synthetic construct
  misc_feature 1..20: note = Description of Artificial Sequence: Synthetic oligonucleotide
  misc_feature 1..20: note = Target: SCN10A; (+) strand; PAM type: NRG; PAM sequence: AAG
  source 1..20: mol_type = other DNA
gaggtctagaaagaaattag

SEQ ID NO: 37847 - DNA, 20 bp, synthetic construct
  misc_feature 1..20: note = Description of Artificial Sequence: Synthetic oligonucleotide
  misc_feature 1..20: note = Target: SCN10A; (+) strand; PAM type: NRG; PAM sequence: GAG
  source 1..20: mol_type = other DNA
gaaagaaattagaagacaat

SEQ ID NO: 37848 - DNA, 20 bp, synthetic construct
  misc_feature 1..20: note = Description of Artificial Sequence: Synthetic oligonucleotide
  misc_feature 1..20: note = Target: SCN10A; (+) strand; PAM type: NRG; PAM sequence: AAG
  source 1..20: mol_type = other DNA
gaaattagaagacaatgagc

SEQ ID NO: 37849 - DNA, 20 bp, synthetic construct
  misc_feature 1..20: note = Description of Artificial Sequence: Synthetic oligonucleotide
  misc_feature 1..20: note = Target: SCN10A; (+) strand; PAM type: NRG; PAM sequence: AGG
  source 1..20: mol_type = other DNA
aaattagaagacaatgagca

SEQ ID NO: 37850 - DNA, 20 bp, synthetic construct
  misc_feature 1..20: note = Description of Artificial Sequence: Synthetic oligonucleotide
  misc_feature 1..20: note = Target: SCN10A; (+) strand; PAM type: NRG; PAM sequence: AAG
  source 1..20: mol_type = other DNA
tgagcaaggccttcaaaatt

SEQ ID NO: 37851 - DNA, 20 bp, synthetic construct
  misc_feature 1..20: note = Description of Artificial Sequence: Synthetic oligonucleotide
  misc_feature 1..20: note = Target: SCN10A; (+) strand; PAM type: NRG; PAM sequence: GAG
  source 1..20: mol_type = other DNA
agcaaggccttcaaaattaa

SEQ ID NO: 37852 - DNA, 20 bp, synthetic construct
  misc_feature 1..20: note = Description of Artificial Sequence: Synthetic oligonucleotide
  misc_feature 1..20: note = Target: SCN10A; (+) strand; PAM type: NRG; PAM sequence: AGG
  source 1..20: mol_type = other DNA
gcaaggccttcaaaattaag

SEQ ID NO: 37853 - DNA, 20 bp, synthetic construct
  misc_feature 1..20: note = Description of Artificial Sequence: Synthetic oligonucleotide
  misc_feature 1..20: note = Target: SCN10A; (+) strand; PAM type: NRG; PAM sequence: GGG
  source 1..20: mol_type = other DNA
caaggccttcaaaattaaga

SEQ ID NO: 37854 - DNA, 20 bp, synthetic construct
  misc_feature 1..20: note = Description of Artificial Sequence: Synthetic oligonucleotide
  misc_feature 1..20: note = Target: SCN10A; (+) strand; PAM type: NRG; PAM sequence: CAG
  source 1..20: mol_type = other DNA
gagggaaataatttctaata

SEQ ID NO: 37855 - DNA, 20 bp, synthetic construct
  misc_feature 1..20: note = Description of Artificial Sequence: Synthetic oligonucleotide
  misc_feature 1..20: note = Target: SCN10A; (+) strand; PAM type: NRG; PAM sequence: AAG
  source 1..20: mol_type = other DNA
ggaaataatttctaatacag

SEQ ID NO: 37856 - DNA, 20 bp, synthetic construct
  misc_feature 1..20: note = Description of Artificial Sequence: Synthetic oligonucleotide
  misc_feature 1..20: note = Target: SCN10A; (+) strand; PAM type: NRG; PAM sequence: TAG
  source 1..20: mol_type = other DNA
ctaatacagaagtctttccc

SEQ ID NO: 37857 - DNA, 20 bp, synthetic construct
  misc_feature 1..20: note = Description of Artificial Sequence: Synthetic oligonucleotide
  misc_feature 1..20: note = Target: SCN10A; (+) strand; PAM type: NRG; PAM sequence: AAG
  source 1..20: mol_type = other DNA
tttccctagccaaactgtca

SEQ ID NO: 37858 - DNA, 20 bp, synthetic construct
  misc_feature 1..20: note = Description of Artificial Sequence: Synthetic oligonucleotide
  misc_feature 1..20: note = Target: SCN10A; (+) strand; PAM type: NRG; PAM sequence: AAG
  source 1..20: mol_type = other DNA
ccctagccaaactgtcaaag

SEQ ID NO: 37859 - DNA, 20 bp, synthetic construct
  misc_feature 1..20: note = Description of Artificial Sequence: Synthetic oligonucleotide
  misc_feature 1..20: note = Target: SCN10A; (+) strand; PAM type: NRG; PAM sequence: AGG
  source 1..20: mol_type = other DNA
cctagccaaactgtcaaaga

SEQ ID NO: 37860 - DNA, 20 bp, synthetic construct
  misc_feature 1..20: note = Description of Artificial Sequence: Synthetic oligonucleotide
  misc_feature 1..20: note = Target: SCN10A; (+) strand; PAM type: NRG; PAM sequence: TAG
  source 1..20: mol_type = other DNA
agccaaactgtcaaagaagg

SEQ ID NO: 37861 - DNA, 20 bp, synthetic construct
  misc_feature 1..20: note = Description of Artificial Sequence: Synthetic oligonucleotide
  misc_feature 1..20: note = Target: SCN10A; (+) strand; PAM type: NRG; PAM sequence: AAG
  source 1..20: mol_type = other DNA
caaagaaggtagaatatatg

SEQ ID NO: 37862 - DNA, 20 bp, synthetic construct
  misc_feature 1..20: note = Description of Artificial Sequence: Synthetic oligonucleotide
  misc_feature 1..20: note = Target: SCN10A; (+) strand; PAM type: NRG; PAM sequence: TGG
  source 1..20: mol_type = other DNA
aggtagaatatatgaagtct

SEQ ID NO: 37863 - DNA, 20 bp, synthetic construct
  misc_feature 1..20: note = Description of Artificial Sequence: Synthetic oligonucleotide
  misc_feature 1..20: note = Target: SCN10A; (+) strand; PAM type: NRG; PAM sequence: GGG
  source 1..20: mol_type = other DNA
ggtagaatatatgaagtctt

SEQ ID NO: 37864 - DNA, 20 bp, synthetic construct
  misc_feature 1..20: note = Description of Artificial Sequence: Synthetic oligonucleotide
  misc_feature 1..20: note = Target: SCN10A; (+) strand; PAM type: NRG; PAM sequence: TAG
  source 1..20: mol_type = other DNA
gtcttgggaaatgtacttct

SEQ ID NO: 37865 - DNA, 20 bp, synthetic construct
  misc_feature 1..20: note = Description of Artificial Sequence: Synthetic oligonucleotide
  misc_feature 1..20: note = Target: SCN10A; (+) strand; PAM type: NRG; PAM sequence: AAG
  source 1..20: mol_type = other DNA
tcttagttacccttctaata

SEQ ID NO: 37866 - DNA, 20 bp, synthetic construct
  misc_feature 1..20: note = Description of Artificial Sequence: Synthetic oligonucleotide
  misc_feature 1..20: note = Target: SCN10A; (+) strand; PAM type: NRG; PAM sequence: TAG
  source 1..20: mol_type = other DNA
tacccttctaataaagttac

SEQ ID NO: 37867 - DNA, 20 bp, synthetic construct
  misc_feature 1..20: note = Description of Artificial Sequence: Synthetic oligonucleotide
  misc_feature 1..20: note = Target: SCN10A; (+) strand; PAM type: NRG; PAM sequence: AAG
  source 1..20: mol_type = other DNA
ccttctaataaagttactag

SEQ ID NO: 37868 - DNA, 20 bp, synthetic construct
  misc_feature 1..20: note = Description of Artificial Sequence: Synthetic oligonucleotide
  misc_feature 1..20: note = Target: SCN10A; (+) strand; PAM type: NRG; PAM sequence: TGG
  source 1..20: mol_type = other DNA
ctaataaagttactagaagc

SEQ ID NO: 37869 - DNA, 20 bp, synthetic construct
  misc_feature 1..20: note = Description of Artificial Sequence: Synthetic oligonucleotide
  misc_feature 1..20: note = Target: SCN10A; (+) strand; PAM type: NRG; PAM sequence: GGG
  source 1..20: mol_type = other DNA
taataaagttactagaagct

SEQ ID NO: 37870 - DNA, 20 bp, synthetic construct
  misc_feature 1..20: note = Description of Artificial Sequence: Synthetic oligonucleotide
  misc_feature 1..20: note = Target: SCN10A; (+) strand; PAM type: NRG; PAM sequence: TGG
  source 1..20: mol_type = other DNA
aagttactagaagctgggca

SEQ ID NO: 37871 - DNA, 20 bp, synthetic construct
  misc_feature 1..20: note = Description of Artificial Sequence: Synthetic oligonucleotide
  misc_feature 1..20: note = Target: SCN10A; (+) strand; PAM type: NRG; PAM sequence: TGG
  source 1..20: mol_type = other DNA
ttactagaagctgggcatgg

SEQ ID NO: 37872 - DNA, 20 bp, synthetic construct
  misc_feature 1..20: note = Description of Artificial Sequence: Synthetic oligonucleotide
  misc_feature 1..20: note = Target: SCN10A; (+) strand; PAM type: NRG; PAM sequence: TAG
  source 1..20: mol_type = other DNA
ggcatggtggtatgtacctg

SEQ ID NO: 37873 - DNA, 20 bp, synthetic construct
  misc_feature 1..20: note = Description of Artificial Sequence: Synthetic oligonucleotide
  misc_feature 1..20: note = Target: SCN10A; (+) strand; PAM type: NRG; PAM sequence: TGG
  source 1..20: mol_type = other DNA
tacctgtagtcctaactact

SEQ ID NO: 37874 - DNA, 20 bp, synthetic construct
  misc_feature 1..20: note = Description of Artificial Sequence: Synthetic oligonucleotide
  misc_feature 1..20: note = Target: SCN10A; (+) strand; PAM type: NRG; PAM sequence: GGG
  source 1..20: mol_type = other DNA
acctgtagtcctaactactt

SEQ ID NO: 37875 - DNA, 20 bp, synthetic construct
  misc_feature 1..20: note = Description of Artificial Sequence: Synthetic oligonucleotide
  misc_feature 1..20: note = Target: SCN10A; (+) strand; PAM type: NRG; PAM sequence: GAG
  source 1..20: mol_type = other DNA
ctgtagtcctaactacttgg

SEQ ID NO: 37876 - DNA, 20 bp, synthetic construct
  misc_feature 1..20: note = Description of Artificial Sequence: Synthetic oligonucleotide
  misc_feature 1..20: note = Target: SCN10A; (+) strand; PAM type: NRG; PAM sequence: AGG
  source 1..20: mol_type = other DNA
tgtagtcctaactacttggg

SEQ ID NO: 37877 - DNA, 20 bp, synthetic construct
  misc_feature 1..20: note = Description of Artificial Sequence: Synthetic oligonucleotide
  misc_feature 1..20: note = Target: SCN10A; (+) strand; PAM type: NRG; PAM sequence: GAG
  source 1..20: mol_type = other DNA
tcctaactacttgggaggtt

SEQ ID NO: 37878 - DNA, 20 bp, synthetic construct
  misc_feature 1..20: note = Description of Artificial Sequence: Synthetic oligonucleotide
  misc_feature 1..20: note = Target: SCN10A; (+) strand; PAM type: NRG; PAM sequence: AGG
  source 1..20: mol_type = other DNA
cctaactacttgggaggttg

SEQ ID NO: 37879 - DNA, 20 bp, synthetic construct
  misc_feature 1..20: note = Description of Artificial Sequence: Synthetic oligonucleotide
  misc_feature 1..20: note = Target: SCN10A; (+) strand; PAM type: NRG; PAM sequence: CAG
  source 1..20: mol_type = other DNA
aactacttgggaggttgagg

SEQ ID NO: 37880 - DNA, 20 bp, synthetic construct
  misc_feature 1..20: note = Description of Artificial Sequence: Synthetic oligonucleotide
  misc_feature 1..20: note = Target: SCN10A; (+) strand; PAM type: NRG; PAM sequence: AGG
  source 1..20: mol_type = other DNA
actacttgggaggttgaggc

SEQ ID NO: 37881 - DNA, 20 bp, synthetic construct
  misc_feature 1..20: note = Description of Artificial Sequence: Synthetic oligonucleotide
  misc_feature 1..20: note = Target: SCN10A; (+) strand; PAM type: NRG; PAM sequence: GAG
  source 1..20: mol_type = other DNA
tacttgggaggttgaggcag

SEQ ID NO: 37882 - DNA, 20 bp, synthetic construct
  misc_feature 1..20: note = Description of Artificial Sequence: Synthetic oligonucleotide
  misc_feature 1..20: note = Target: SCN10A; (+) strand; PAM type: NRG; PAM sequence: AGG
  source 1..20: mol_type = other DNA
acttgggaggttgaggcagg

SEQ ID NO: 37883 - DNA, 20 bp, synthetic construct
  misc_feature 1..20: note = Description of Artificial Sequence: Synthetic oligonucleotide
  misc_feature 1..20: note = Target: SCN10A; (+) strand; PAM type: NRG; PAM sequence: CAG
  source 1..20: mol_type = other DNA
gcaggaggatcacttgaacc

SEQ ID NO: 37884 - DNA, 20 bp, synthetic construct
  misc_feature 1..20: note = Description of Artificial Sequence: Synthetic oligonucleotide
  misc_feature 1..20: note = Target: SCN10A; (+) strand; PAM type: NRG; PAM sequence: AGG
  source 1..20: mol_type = other DNA
caggaggatcacttgaaccc

SEQ ID NO: 37885 - DNA, 20 bp, synthetic construct
  misc_feature 1..20: note = Description of Artificial Sequence: Synthetic oligonucleotide
  misc_feature 1..20: note = Target: SCN10A; (+) strand; PAM type: NRG; PAM sequence: GAG
  source 1..20: mol_type = other DNA
ggaggatcacttgaacccag

SEQ ID NO: 37886 - DNA, 20 bp, synthetic construct
  misc_feature 1..20: note = Description of Artificial Sequence: Synthetic oligonucleotide
  misc_feature 1..20: note = Target: SCN10A; (+) strand; PAM type: NRG; PAM sequence: GAG
  source 1..20: mol_type = other DNA
tcacttgaacccaggagttt

SEQ ID NO: 37887 - DNA, 20 bp, synthetic construct
  misc_feature 1..20: note = Description of Artificial Sequence: Synthetic oligonucleotide
  misc_feature 1..20: note = Target: SCN10A; (+) strand; PAM type: NRG; PAM sequence: AGG
  source 1..20: mol_type = other DNA
cacttgaacccaggagtttg

SEQ ID NO: 37888 - DNA, 20 bp, synthetic construct
  misc_feature 1..20: note = Description of Artificial Sequence: Synthetic oligonucleotide
  misc_feature 1..20: note = Target: SCN10A; (+) strand; PAM type: NRG; PAM sequence: CAG
  source 1..20: mol_type = other DNA
acccaggagtttgaggccaa

SEQ ID NO: 37889 - DNA, 20 bp, synthetic construct
  misc_feature 1..20: note = Description of Artificial Sequence: Synthetic oligonucleotide
  misc_feature 1..20: note = Target: SCN10A; (+) strand; PAM type: NRG; PAM sequence: TGG
  source 1..20: mol_type = other DNA
ggagtttgaggccaacagcc

SEQ ID NO: 37890 - DNA, 20 bp, synthetic construct
  misc_feature 1..20: note = Description of Artificial Sequence: Synthetic oligonucleotide
  misc_feature 1..20: note = Target: SCN10A; (+) strand; PAM type: NRG; PAM sequence: GGG
  source 1..20: mol_type = other DNA
gagtttgaggccaacagcct

SEQ ID NO: 37891 - DNA, 20 bp, synthetic construct
  misc_feature 1..20: note = Description of Artificial Sequence: Synthetic oligonucleotide
  misc_feature 1..20: note = Target: SCN10A; (+) strand; PAM type: NRG; PAM sequence: CAG
  source 1..20: mol_type = other DNA
tttgaggccaacagcctggg

SEQ ID NO: 37892 - DNA, 20 bp, synthetic construct
  misc_feature 1..20: note = Description of Artificial Sequence: Synthetic oligonucleotide
  misc_feature 1..20: note = Target: SCN10A; (+) strand; PAM type: NRG; PAM sequence: TAG
  source 1..20: mol_type = other DNA
ggccaacagcctgggcagca

SEQ ID NO: 37893 - DNA, 20 bp, synthetic construct
  misc_feature 1..20: note = Description of Artificial Sequence: Synthetic oligonucleotide
  misc_feature 1..20: note = Target: SCN10A; (+) strand; PAM type: NRG; PAM sequence: GAG
  source 1..20: mol_type = other DNA
ccaacagcctgggcagcata

SEQ ID NO: 37894 - DNA, 20 bp, synthetic construct
  misc_feature 1..20: note = Description of Artificial Sequence: Synthetic oligonucleotide
  misc_feature 1..20: note = Target: SCN10A; (+) strand; PAM type: NRG; PAM sequence: GAG
  source 1..20: mol_type = other DNA
aacagcctgggcagcataga

SEQ ID NO: 37895 - DNA, 20 bp, synthetic construct
  misc_feature 1..20: note = Description of Artificial Sequence: Synthetic oligonucleotide
  misc_feature 1..20: note = Target: SCN10A; (+) strand; PAM type: NRG; PAM sequence: TAG
  source 1..20: mol_type = other DNA
gtcttaaaaaaaaatgttac

SEQ ID NO: 37896 - DNA, 20 bp, synthetic construct
  misc_feature 1..20: note = Description of Artificial Sequence: Synthetic oligonucleotide
  misc_feature 1..20: note = Target: SCN10A; (+) strand; PAM type: NRG; PAM sequence: GAG
  source 1..20: mol_type = other DNA
cttaaaaaaaaatgttacta

SEQ ID NO: 37897 - DNA, 20 bp, synthetic construct
  misc_feature 1..20: note = Description of Artificial Sequence: Synthetic oligonucleotide
  misc_feature 1..20: note = Target: SCN10A; (+) strand; PAM type: NRG; PAM sequence: AGG
  source 1..20: mol_type = other DNA
ttaaaaaaaaatgttactag

SEQ ID NO: 37898 - DNA, 20 bp, synthetic construct
  misc_feature 1..20: note = Description of Artificial Sequence: Synthetic oligonucleotide
  misc_feature 1..20: note = Target: SCN10A; (+) strand; PAM type: NRG; PAM sequence: AAG
  source 1..20: mol_type = other DNA
aggatatgctccattcaaac

SEQ ID NO: 37899 - DNA, 20 bp, synthetic construct
  misc_feature 1..20: note = Description of Artificial Sequence: Synthetic oligonucleotide
  misc_feature 1..20: note = Target: SCN10A; (+) strand; PAM type: NRG; PAM sequence: CAG
  source 1..20: mol_type = other DNA
caagaaacatatatgcgatc

SEQ ID NO: 37900 - DNA, 20 bp, synthetic construct
  misc_feature 1..20: note = Description of Artificial Sequence: Synthetic oligonucleotide
  misc_feature 1..20: note = Target: SCN10A; (+) strand; PAM type: NRG; PAM sequence: AGG
  source 1..20: mol_type = other DNA
aagaaacatatatgcgatcc

SEQ ID NO: 37901 - DNA, 20 bp, synthetic construct
  misc_feature 1..20: note = Description of Artificial Sequence: Synthetic oligonucleotide
  misc_feature 1..20: note = Target: SCN10A; (+) strand; PAM type: NRG; PAM sequence: GGG
  source 1..20: mol_type = other DNA
agaaacatatatgcgatcca

SEQ ID NO: 37902 - DNA, 20 bp, synthetic construct
  misc_feature 1..20: note = Description of Artificial Sequence: Synthetic oligonucleotide
  misc_feature 1..20: note = Target: SCN10A; (+) strand; PAM type: NRG; PAM sequence: AAG
  source 1..20: mol_type = other DNA
aacatatatgcgatccaggg

SEQ ID NO: 37903 - DNA, 20 bp, synthetic construct
  misc_feature 1..20: note = Description of Artificial Sequence: Synthetic oligonucleotide
  misc_feature 1..20: note = Target: SCN10A; (+) strand; PAM type: NRG; PAM sequence: GAG
  source 1..20: mol_type = other DNA
catatatgcgatccagggaa

SEQ ID NO: 37904 - DNA, 20 bp, synthetic construct
  misc_feature 1..20: note = Description of Artificial Sequence: Synthetic oligonucleotide
  misc_feature 1..20: note = Target: SCN10A; (+) strand; PAM type: NRG; PAM sequence: AGG
  source 1..20: mol_type = other DNA
atatatgcgatccagggaag

SEQ ID NO: 37905 - DNA, 20 bp, synthetic construct
  misc_feature 1..20: note = Description of Artificial Sequence: Synthetic oligonucleotide
  misc_feature 1..20: note = Target: SCN10A; (+) strand; PAM type: NRG; PAM sequence: AAG
  source 1..20: mol_type = other DNA
gcgatccagggaagaggcaa

SEQ ID NO: 37906 - DNA, 20 bp, synthetic construct
  misc_feature 1..20: note = Description of Artificial Sequence: Synthetic oligonucleotide
  misc_feature 1..20: note = Target: SCN10A; (+) strand; PAM type: NRG; PAM sequence: AGG
  source 1..20: mol_type = other DNA
cgatccagggaagaggcaaa

SEQ ID NO: 37907 - DNA, 20 bp, synthetic construct
  misc_feature 1..20: note = Description of Artificial Sequence: Synthetic oligonucleotide
  misc_feature 1..20: note = Target: SCN10A; (+) strand; PAM type: NRG; PAM sequence: AAG
  source 1..20: mol_type = other DNA
aggcaaaaggaatccaaaaa

SEQ ID NO: 37908 - DNA, 20 bp, synthetic construct
  misc_feature 1..20: note = Description of Artificial Sequence: Synthetic oligonucleotide
  misc_feature 1..20: note = Target: SCN10A; (+) strand; PAM type: NRG; PAM sequence: AAG
  source 1..20: mol_type = other DNA
aggaatccaaaaaaagaatg

SEQ ID NO: 37909 - DNA, 20 bp, synthetic construct
  misc_feature 1..20: note = Description of Artificial Sequence: Synthetic oligonucleotide
  misc_feature 1..20: note = Target: SCN10A; (+) strand; PAM type: NRG; PAM sequence: AAG
  source 1..20: mol_type = other DNA
aatccaaaaaaagaatgaag

SEQ ID NO: 37910 - DNA, 20 bp, synthetic construct
  misc_feature 1..20: note = Description of Artificial Sequence: Synthetic oligonucleotide
  misc_feature 1..20: note = Target: SCN10A; (+) strand; PAM type: NRG; PAM sequence: TAG
  source 1..20: mol_type = other DNA
aatgaagaagaaaaaatctc

SEQ ID NO: 37911 - DNA, 20 bp, synthetic construct
  misc_feature 1..20: note = Description of Artificial Sequence: Synthetic oligonucleotide
  misc_feature 1..20: note = Target: SCN10A; (+) strand; PAM type: NRG; PAM sequence: CAG
  source 1..20: mol_type = other DNA
aagaaaaaatctctagaaaa

SEQ ID NO: 37912 - DNA, 20 bp, synthetic construct
  misc_feature 1..20: note = Description of Artificial Sequence: Synthetic oligonucleotide
  misc_feature 1..20: note = Target: SCN10A; (+) strand; PAM type: NRG; PAM sequence: CAG
  source 1..20: mol_type = other DNA
tctagaaaacagctgtgcat

SEQ ID NO: 37913 - DNA, 20 bp, synthetic construct
  misc_feature 1..20: note = Description of Artificial Sequence: Synthetic oligonucleotide
  misc_feature 1..20: note = Target: SCN10A; (+) strand; PAM type: NRG; PAM sequence: AGG
  source 1..20: mol_type = other DNA
ctagaaaacagctgtgcatc

SEQ ID NO: 37914 - DNA, 20 bp, synthetic construct
  misc_feature 1..20: note = Description of Artificial Sequence: Synthetic oligonucleotide
  misc_feature 1..20: note = Target: SCN10A; (+) strand; PAM type: NRG; PAM sequence: TAG
  source 1..20: mol_type = other DNA
aaacagctgtgcatcaggcc

SEQ ID NO: 37915 - DNA, 20 bp, synthetic construct
  misc_feature 1..20: note = Description of Artificial Sequence: Synthetic oligonucleotide
  misc_feature 1..20: note = Target: SCN10A; (+) strand; PAM type: NRG; PAM sequence: TAG
  source 1..20: mol_type = other DNA
catcaggcctagaaaacatc

SEQ ID NO: 37916 - DNA, 20 bp, synthetic construct
  misc_feature 1..20: note = Description of Artificial Sequence: Synthetic oligonucleotide
  misc_feature 1..20: note = Target: SCN10A; (+) strand; PAM type: NRG; PAM sequence: AGG
  source 1..20: mol_type = other DNA
atcaggcctagaaaacatct

SEQ ID NO: 37917 - DNA, 20 bp, synthetic construct
  misc_feature 1..20: note = Description of Artificial Sequence: Synthetic oligonucleotide
  misc_feature 1..20: note = Target: SCN10A; (+) strand; PAM type: NRG; PAM sequence: CAG
  source 1..20: mol_type = other DNA
ggcctagaaaacatctaggt

SEQ ID NO: 37918 - DNA, 20 bp, synthetic construct
  misc_feature 1..20: note = Description of Artificial Sequence: Synthetic oligonucleotide
  misc_feature 1..20: note = Target: SCN10A; (+) strand; PAM type: NRG; PAM sequence: GAG
  source 1..20: mol_type = other DNA
gaaaacatctaggtcagaat

SEQ ID NO: 37919 - DNA, 20 bp, synthetic construct
  misc_feature 1..20: note = Description of Artificial Sequence: Synthetic oligonucleotide
  misc_feature 1..20: note = Target: SCN10A; (+) strand; PAM type: NRG; PAM sequence: AGG
  source 1..20: mol_type = other DNA
aaaacatctaggtcagaatg

SEQ ID NO: 37920 - DNA, 20 bp, synthetic construct
  misc_feature 1..20: note = Description of Artificial Sequence: Synthetic oligonucleotide
  misc_feature 1..20: note = Target: SCN10A; (+) strand; PAM type: NRG; PAM sequence: CAG
  source 1..20: mol_type = other DNA
acatctaggtcagaatgagg

SEQ ID NO: 37921 - DNA, 20 bp, synthetic construct
  misc_feature 1..20: note = Description of Artificial Sequence: Synthetic oligonucleotide
  misc_feature 1..20: note = Target: SCN10A; (+) strand; PAM type: NRG; PAM sequence: AAG
  source 1..20: mol_type = other DNA
tctaggtcagaatgaggcag

SEQ ID NO: 37922 - DNA, 20 bp, synthetic construct
  misc_feature 1..20: note = Description of Artificial Sequence: Synthetic oligonucleotide
  misc_feature 1..20: note = Target: SCN10A; (+) strand; PAM type: NRG; PAM sequence: AAG
  source 1..20: mol_type = other DNA
tcagaatgaggcagaagatg

SEQ ID NO: 37923 - DNA, 20 bp, synthetic construct
  misc_feature 1..20: note = Description of Artificial Sequence: Synthetic oligonucleotide
  misc_feature 1..20: note = Target: SCN10A; (+) strand; PAM type: NRG; PAM sequence: TAG
  source 1..20: mol_type = other DNA
aggcagaagatgaagtactc

SEQ ID NO: 37924 - DNA, 20 bp, synthetic construct
  misc_feature 1..20: note = Description of Artificial Sequence: Synthetic oligonucleotide
  misc_feature 1..20: note = Target: SCN10A; (+) strand; PAM type: NRG; PAM sequence: TAG
  source 1..20: mol_type = other DNA
tactctagctgtgattccca

SEQ ID NO: 37925 - DNA, 20 bp, synthetic construct
  misc_feature 1..20: note = Description of Artificial Sequence: Synthetic oligonucleotide
  misc_feature 1..20: note = Target: SCN10A; (+) strand; PAM type: NRG; PAM sequence: AGG
  source 1..20: mol_type = other DNA
actctagctgtgattcccat

SEQ ID NO: 37926 - DNA, 20 bp, synthetic construct
  misc_feature 1..20: note = Description of Artificial Sequence: Synthetic oligonucleotide
  misc_feature 1..20: note = Target: SCN10A; (+) strand; PAM type: NRG; PAM sequence: AAG
  source 1..20: mol_type = other DNA
tgatgtgtgcaaataaattg

SEQ ID NO: 37927 - DNA, 20 bp, synthetic construct
  misc_feature 1..20: note = Description of Artificial Sequence: Synthetic oligonucleotide
  misc_feature 1..20: note = Target: SCN10A; (+) strand; PAM type: NRG; PAM sequence: TGG
  source 1..20: mol_type = other DNA
tgaagcaacaattaaacatc

SEQ ID NO: 37928 - DNA, 20 bp, synthetic construct
  misc_feature 1..20: note = Description of Artificial Sequence: Synthetic oligonucleotide
  misc_feature 1..20: note = Target: SCN10A; (+) strand; PAM type: NRG; PAM sequence: GAG
  source 1..20: mol_type = other DNA
aagcaacaattaaacatctg

SEQ ID NO: 37929 - DNA, 20 bp, synthetic construct
  misc_feature 1..20: note = Description of Artificial Sequence: Synthetic oligonucleotide
  misc_feature 1..20: note = Target: SCN10A; (+) strand; PAM type: NRG; PAM sequence: AAG
  source 1..20: mol_type = other DNA
caacaattaaacatctggag

SEQ ID NO: 37930 - DNA, 20 bp, synthetic construct
  misc_feature 1..20: note = Description of Artificial Sequence: Synthetic oligonucleotide
  misc_feature 1..20: note = Target: SCN10A; (+) strand; PAM type: NRG; PAM sequence: GAG
  source 1..20: mol_type = other DNA
acaattaaacatctggagaa

SEQ ID NO: 37931 - DNA, 20 bp, synthetic construct
  misc_feature 1..20: note = Description of Artificial Sequence: Synthetic oligonucleotide
  misc_feature 1..20: note = Target: SCN10A; (+) strand; PAM type: NRG; PAM sequence: TGG
  source 1..20: mol_type = other DNA
taaacatctggagaagagtt

SEQ ID NO: 37932 - DNA, 20 bp, synthetic construct
  misc_feature 1..20: note = Description of Artificial Sequence: Synthetic oligonucleotide
  misc_feature 1..20: note = Target: SCN10A; (+) strand; PAM type: NRG; PAM sequence: GGG
  source 1..20: mol_type = other DNA
aaacatctggagaagagttt

SEQ ID NO: 37933 - DNA, 20 bp, synthetic construct
  misc_feature 1..20: note = Description of Artificial Sequence: Synthetic oligonucleotide
  misc_feature 1..20: note = Target: SCN10A; (+) strand; PAM type: NRG; PAM sequence: TAG
  source 1..20: mol_type = other DNA
agaagagtttgggaacaaat

SEQ ID NO: 37934 - DNA, 20 bp, synthetic construct
  misc_feature 1..20: note = Description of Artificial Sequence: Synthetic oligonucleotide
  misc_feature 1..20: note = Target: SCN10A; (+) strand; PAM type: NRG; PAM sequence: AGG
  source 1..20: mol_type = other DNA
gaagagtttgggaacaaatt

SEQ ID NO: 37935 - DNA, 20 bp, synthetic construct
  misc_feature 1..20: note = Description of Artificial Sequence: Synthetic oligonucleotide
  misc_feature 1..20: note = Target: SCN10A; (+) strand; PAM type: NRG; PAM sequence: GGG
  source 1..20: mol_type = other DNA
aagagtttgggaacaaatta

SEQ ID NO: 37936 - DNA, 20 bp, synthetic construct
  misc_feature 1..20: note = Description of Artificial Sequence: Synthetic oligonucleotide
  misc_feature 1..20: note = Target: SCN10A; (+) strand; PAM type: NRG; PAM sequence: TAG
  source 1..20: mol_type = other DNA
gggaacaaattagggataaa

SEQ ID NO: 37937 - DNA, 20 bp, synthetic construct
  misc_feature 1..20: note = Description of Artificial Sequence: Synthetic oligonucleotide
  misc_feature 1..20: note = Target: SCN10A; (+) strand; PAM type: NRG; PAM sequence: GAG
  source 1..20: mol_type = other DNA
ttagggataaatagaaaact

SEQ ID NO: 37938 - DNA, 20 bp, synthetic construct
  misc_feature 1..20: note = Description of Artificial Sequence: Synthetic oligonucleotide
  misc_feature 1..20: note = Target: SCN10A; (+) strand; PAM type: NRG; PAM sequence: AAG
  source 1..20: mol_type = other DNA
ataaaatccttattaactcc

SEQ ID NO: 37939 - DNA, 20 bp, synthetic construct
  misc_feature 1..20: note = Description of Artificial Sequence: Synthetic oligonucleotide
  misc_feature 1..20: note = Target: SCN10A; (+) strand; PAM type: NRG; PAM sequence: AGG
  source 1..20: mol_type = other DNA
taaaatccttattaactcca

SEQ ID NO: 37940 - DNA, 20 bp, synthetic construct
  misc_feature 1..20: note = Description of Artificial Sequence: Synthetic oligonucleotide
  misc_feature 1..20: note = Target: SCN10A; (+) strand; PAM type: NRG; PAM sequence: AAG
  source 1..20: mol_type = other DNA
atccttattaactccaagga

SEQ ID NO: 37941 - DNA, 20 bp, synthetic construct
  misc_feature 1..20: note = Description of Artificial Sequence: Synthetic oligonucleotide
  misc_feature 1..20: note = Target: SCN10A; (+) strand; PAM type: NRG; PAM sequence: AAG
  source 1..20: mol_type = other DNA
aagcaaaaacattgtgcaaa

SEQ ID NO: 37942 - DNA, 20 bp, synthetic construct
  misc_feature 1..20: note = Description of Artificial Sequence: Synthetic oligonucleotide
  misc_feature 1..20: note = Target: SCN10A; (+) strand; PAM type: NRG; PAM sequence: AGG
  source 1..20: mol_type = other DNA
agcaaaaacattgtgcaaaa

SEQ ID NO: 37943 - DNA, 20 bp, synthetic construct
  misc_feature 1..20: note = Description of Artificial Sequence: Synthetic oligonucleotide
  misc_feature 1..20: note = Target: SCN10A; (+) strand; PAM type: NRG; PAM sequence: TAG
  source 1..20: mol_type = other DNA
cattgtgcaaaaaggaaata

SEQ ID NO: 37944 - DNA, 20 bp, synthetic construct
  misc_feature 1..20: note = Description of Artificial Sequence: Synthetic oligonucleotide
  misc_feature 1..20: note = Target: SCN10A; (+) strand; PAM type: NRG; PAM sequence: AAG
  source 1..20: mol_type = other DNA
gcaaaaaggaaatatagtca

SEQ ID NO: 37945 - DNA, 20 bp, synthetic construct
  misc_feature 1..20: note = Description of Artificial Sequence: Synthetic oligonucleotide
  misc_feature 1..20: note = Target: SCN10A; (+) strand; PAM type: NRG; PAM sequence: CAG
  source 1..20: mol_type = other DNA
tcaaagtacactgcatgaca

SEQ ID NO: 37946 - DNA, 20 bp, synthetic construct
  misc_feature 1..20: note = Description of Artificial Sequence: Synthetic oligonucleotide
  misc_feature 1..20: note = Target: SCN10A; (+) strand; PAM type: NRG; PAM sequence: CAG
  source 1..20: mol_type = other DNA
ctgcatgacacagctgtaaa

SEQ ID NO: 37947 - DNA, 20 bp, synthetic construct
  misc_feature 1..20: note = Description of Artificial Sequence: Synthetic oligonucleotide
  misc_feature 1..20: note = Target: SCN10A; (+) strand; PAM type: NRG; PAM sequence: TAG
  source 1..20: mol_type = other DNA
agctgtaaacagtgtttact

SEQ ID NO: 37948 - DNA, 20 bp, synthetic construct
  misc_feature 1..20: note = Description of Artificial Sequence: Synthetic oligonucleotide
  misc_feature 1..20: note = Target: SCN10A; (+) strand; PAM type: NRG; PAM sequence: TAG
  source 1..20: mol_type = other DNA
atgtaatgtaattatatatg

SEQ ID NO: 37949 - DNA, 20 bp, synthetic construct
  misc_feature 1..20: note = Description of Artificial Sequence: Synthetic oligonucleotide
  misc_feature 1..20: note = Target: SCN10A; (+) strand; PAM type: NRG; PAM sequence: TGG
  source 1..20: mol_type = other DNA
ttatatatgtagtcatacaa

SEQ ID NO: 37950 - DNA, 20 bp, synthetic construct
  misc_feature 1..20: note = Description of Artificial Sequence: Synthetic oligonucleotide
  misc_feature 1..20: note = Target: SCN10A; (+) strand; PAM type: NRG; PAM sequence: AAG
  source 1..20: mol_type = other DNA
attatctgatgatctaactg

SEQ ID NO: 37951 - DNA, 20 bp, synthetic construct
  misc_feature 1..20: note = Description of Artificial Sequence: Synthetic oligonucleotide
  misc_feature 1..20: note = Target: SCN10A; (+) strand; PAM type: NRG; PAM sequence: CAG
  source 1..20: mol_type = other DNA
agattacaatataactgtaa

SEQ ID NO: 37952 - DNA, 20 bp, synthetic construct
  misc_feature 1..20: note = Description of Artificial Sequence: Synthetic oligonucleotide
  misc_feature 1..20: note = Target: SCN10A; (+) strand; PAM type: NRG; PAM sequence: AGG
  source 1..20: mol_type = other DNA
gattacaatataactgtaac

SEQ ID NO: 37953 - DNA, 20 bp, synthetic construct
  misc_feature 1..20: note = Description of Artificial Sequence: Synthetic oligonucleotide
  misc_feature 1..20: note = Target: SCN10A; (+) strand; PAM type: NRG; PAM sequence: AAG
  source 1..20: mol_type = other DNA
tacaatataactgtaacagg

SEQ ID NO: 37954 - DNA, 20 bp, synthetic construct
  misc_feature 1..20: note = Description of Artificial Sequence: Synthetic oligonucleotide
  misc_feature 1..20: note = Target: SCN10A; (+) strand; PAM type: NRG; PAM sequence: GAG
  source 1..20: mol_type = other DNA
tataactgtaacaggaagat

SEQ ID NO: 37955 - DNA, 20 bp, synthetic construct
  misc_feature 1..20: note = Description of Artificial Sequence: Synthetic oligonucleotide
  misc_feature 1..20: note = Target: SCN10A; (+) strand; PAM type: NRG; PAM sequence: AGG
  source 1..20: mol_type = other DNA
ataactgtaacaggaagatg

SEQ ID NO: 37956 - DNA, 20 bp, synthetic construct
  misc_feature 1..20: note = Description of Artificial Sequence: Synthetic oligonucleotide
  misc_feature 1..20: note = Target: SCN10A; (+) strand; PAM type: NRG; PAM sequence: GGG
  source 1..20: mol_type = other DNA
taactgtaacaggaagatga

SEQ ID NO: 37957 - DNA, 20 bp, synthetic construct
  misc_feature 1..20: note = Description of Artificial Sequence: Synthetic oligonucleotide
  misc_feature 1..20: note = Target: SCN10A; (+) strand; PAM type: NRG; PAM sequence: GAG
  source 1..20: mol_type = other DNA
tgtaacaggaagatgagggt

SEQ ID NO: 37958 - DNA, 20 bp, synthetic construct
  misc_feature 1..20: note = Description of Artificial Sequence: Synthetic oligonucleotide
  misc_feature 1..20: note = Target: SCN10A; (+) strand; PAM type: NRG; PAM sequence: GAG
  source 1..20: mol_type = other DNA
taacaggaagatgagggtga

SEQ ID NO: 37959 - DNA, 20 bp, synthetic construct
  misc_feature 1..20: note = Description of Artificial Sequence: Synthetic oligonucleotide
  misc_feature 1..20: note = Target: SCN10A; (+) strand; PAM type: NRG; PAM sequence: AGG
  source 1..20: mol_type = other DNA
aacaggaagatgagggtgag

SEQ ID NO: 37960 - DNA, 20 bp, synthetic construct
  misc_feature 1..20: note = Description of Artificial Sequence: Synthetic oligonucleotide
  misc_feature 1..20: note = Target: SCN10A; (+) strand; PAM type: NRG; PAM sequence: GAG
  source 1..20: mol_type = other DNA
agatgagggtgagaggaaat

SEQ ID NO: 37961 - DNA, 20 bp, synthetic construct
  misc_feature 1..20: note = Description of Artificial Sequence: Synthetic oligonucleotide
  misc_feature 1..20: note = Target: SCN10A; (+) strand; PAM type: NRG; PAM sequence: TGG
  source 1..20: mol_type = other DNA
ggtgagaggaaatgagtttg

SEQ ID NO: 37962 - DNA, 20 bp, synthetic construct
  misc_feature 1..20: note = Description of Artificial Sequence: Synthetic oligonucleotide
  misc_feature 1..20: note = Target: SCN10A; (+) strand; PAM type: NRG; PAM sequence: TGG
  source 1..20: mol_type = other DNA
aggaaatgagtttgtggatg

SEQ ID NO: 37963 - DNA, 20 bp, synthetic construct
  misc_feature 1..20: note = Description of Artificial Sequence: Synthetic oligonucleotide
  misc_feature 1..20: note = Target: SCN10A; (+) strand; PAM type: NRG; PAM sequence: AAG
  source 1..20: mol_type = other DNA
gagtttgtggatgtggcctt

SEQ ID NO: 37964 - DNA, 20 bp, synthetic construct
  misc_feature 1..20: note = Description of Artificial Sequence: Synthetic oligonucleotide
  misc_feature 1..20: note = Target: SCN10A; (+) strand; PAM type: NRG; PAM sequence: TAG
  source 1..20: mol_type = other DNA
ccttaagttttttctcataa

SEQ ID NO: 37965 - DNA, 20 bp, synthetic construct
  misc_feature 1..20: note = Description of Artificial Sequence: Synthetic oligonucleotide
  misc_feature 1..20: note = Target: SCN10A; (+) strand; PAM type: NRG; PAM sequence: AGG
  source 1..20: mol_type = other DNA
cttaagttttttctcataat

SEQ ID NO: 37966 - DNA, 20 bp, synthetic construct
  misc_feature 1..20: note = Description of Artificial Sequence: Synthetic oligonucleotide
  misc_feature 1..20: note = Target: SCN10A; (+) strand; PAM type: NRG; PAM sequence: AAG
  source 1..20: mol_type = other DNA
aagttttttctcataatagg

SEQ ID NO: 37967 - DNA, 20 bp, synthetic construct
  misc_feature 1..20: note = Description of Artificial Sequence: Synthetic oligonucleotide
  misc_feature 1..20: note = Target: SCN10A; (+) strand; PAM type: NRG; PAM sequence: CAG
  source 1..20: mol_type = other DNA
aggaagccaataaataacat

SEQ ID NO: 37968 - DNA, 20 bp, synthetic construct
  misc_feature 1..20: note = Description of Artificial Sequence: Synthetic oligonucleotide
  misc_feature 1..20: note = Target: SCN10A; (+) strand; PAM type: NRG; PAM sequence: TAG
  source 1..20: mol_type = other DNA
gaaattgaaaaattaaaaat

SEQ ID NO: 37969 - DNA, 20 bp, synthetic construct
  misc_feature 1..20: note = Description of Artificial Sequence: Synthetic oligonucleotide
  misc_feature 1..20: note = Target: SCN10A; (+) strand; PAM type: NRG; PAM sequence: GAG
  source 1..20: mol_type = other DNA
aaattaaaaattagtattat

SEQ ID NO: 37970 - DNA, 20 bp, synthetic construct
  misc_feature 1..20: note = Description of Artificial Sequence: Synthetic oligonucleotide
  misc_feature 1..20: note = Target: SCN10A; (+) strand; PAM type: NRG; PAM sequence: TGG
  source 1..20: mol_type = other DNA
tagtattatgagtatattat

SEQ ID NO: 37971 - DNA, 20 bp, synthetic construct
  misc_feature 1..20: note = Description of Artificial Sequence: Synthetic oligonucleotide
  misc_feature 1..20: note = Target: SCN10A; (+) strand; PAM type: NRG; PAM sequence: GAG
  source 1..20: mol_type = other DNA
gtattatgagtatattattg

SEQ ID NO: 37972 - DNA, 20 bp, synthetic construct
  misc_feature 1..20: note = Description of Artificial Sequence: Synthetic oligonucleotide
  misc_feature 1..20: note = Target: SCN10A; (+) strand; PAM type: NRG; PAM sequence: TAG
  source 1..20: mol_type = other DNA
tatgagtatattattggaga

SEQ ID NO: 37973 - DNA, 20 bp, synthetic construct
  misc_feature 1..20: note = Description of Artificial Sequence: Synthetic oligonucleotide
  misc_feature 1..20: note = Target: SCN10A; (+) strand; PAM type: NRG; PAM sequence: AGG
  source 1..20: mol_type = other DNA
atgagtatattattggagat

SEQ ID NO: 37974 - DNA, 20 bp, synthetic construct
  misc_feature 1..20: note = Description of Artificial Sequence: Synthetic oligonucleotide
  misc_feature 1..20: note = Target: SCN10A; (+) strand; PAM type: NRG; PAM sequence: GGG
  source 1..20: mol_type = other DNA
tgagtatattattggagata

SEQ ID NO: 37975 - DNA, 20 bp, synthetic construct
  misc_feature 1..20: note = Description of Artificial Sequence: Synthetic oligonucleotide
  misc_feature 1..20: note = Target: SCN10A; (+) strand; PAM type: NRG; PAM sequence: GAG
  source 1..20: mol_type = other DNA
agtatattattggagatagg

SEQ ID NO: 37976 - DNA, 20 bp, synthetic construct
  misc_feature 1..20: note = Description of Artificial Sequence: Synthetic oligonucleotide
  misc_feature 1..20: note = Target: SCN10A; (+) strand; PAM type: NRG; PAM sequence: AGG
  source 1..20: mol_type = other DNA
gtatattattggagataggg

SEQ ID NO: 37977 - DNA, 20 bp, synthetic construct
  misc_feature 1..20: note = Description of Artificial Sequence: Synthetic oligonucleotide
  misc_feature 1..20: note = Target: SCN10A; (+) strand; PAM type: NRG; PAM sequence: CAG
  source 1..20: mol_type = other DNA
tattggagatagggaggtat

SEQ ID NO: 37978 - DNA, 20 bp, synthetic construct
  misc_feature 1..20: note = Description of Artificial Sequence: Synthetic oligonucleotide
  misc_feature 1..20: note = Target: SCN10A; (+) strand; PAM type: NRG; PAM sequence: AAG
  source 1..20: mol_type = other DNA
tggagatagggaggtatcag

SEQ ID NO: 37979 - DNA, 20 bp, synthetic construct
  misc_feature 1..20: note = Description of Artificial Sequence: Synthetic oligonucleotide
  misc_feature 1..20: note = Target: SCN10A; (+) strand; PAM type: NRG; PAM sequence: CAG
  source 1..20: mol_type = other DNA
tagggaggtatcagaagaca

SEQ ID NO: 37980 - DNA, 20 bp, synthetic construct
  misc_feature 1..20: note = Description of Artificial Sequence: Synthetic oligonucleotide
  misc_feature 1..20: note = Target: SCN10A; (+) strand; PAM type: NRG; PAM sequence: AGG
  source 1..20: mol_type = other DNA
agggaggtatcagaagacac

SEQ ID NO: 37981 - DNA, 20 bp, synthetic construct
  misc_feature 1..20: note = Description of Artificial Sequence: Synthetic oligonucleotide
  misc_feature 1..20: note = Target: SCN10A; (+) strand; PAM type: NRG; PAM sequence: AAG
  source 1..20: mol_type = other DNA
tcagaagacacaggtaaaaa

SEQ ID NO: 37982 - DNA, 20 bp, synthetic construct
  misc_feature 1..20: note = Description of Artificial Sequence: Synthetic oligonucleotide
  misc_feature 1..20: note = Target: SCN10A; (+) strand; PAM type: NRG; PAM sequence: AAG
  source 1..20: mol_type = other DNA
acacaggtaaaaaaagctaa

SEQ ID NO: 37983 - DNA, 20 bp, synthetic construct
  misc_feature 1..20: note = Description of Artificial Sequence: Synthetic oligonucleotide
  misc_feature 1..20: note = Target: SCN10A; (+) strand; PAM type: NRG; PAM sequence: TGG
  source 1..20: mol_type = other DNA
caggtaaaaaaagctaaaag

SEQ ID NO: 37984 - DNA, 20 bp, synthetic construct
  misc_feature 1..20: note = Description of Artificial Sequence: Synthetic oligonucleotide
  misc_feature 1..20: note = Target: SCN10A; (+) strand; PAM type: NRG; PAM sequence: TGG
  source 1..20: mol_type = other DNA
gtaaaaaaagctaaaagtgg

SEQ ID NO: 37985 - DNA, 20 bp, synthetic construct
  misc_feature 1..20: note = Description of Artificial Sequence: Synthetic oligonucleotide
  misc_feature 1..20: note = Target: SCN10A; (+) strand; PAM type: NRG; PAM sequence: TGG
  source 1..20: mol_type = other DNA
aagctaaaagtggtggcctc

SEQ ID NO: 37986 - DNA, 20 bp, synthetic construct
  misc_feature 1..20: note = Description of Artificial Sequence: Synthetic oligonucleotide
  misc_feature 1..20: note = Target: SCN10A; (+) strand; PAM type: NRG; PAM sequence: AAG
  source 1..20: mol_type = other DNA
taaaagtggtggcctctgga

SEQ ID NO: 37987 - DNA, 20 bp, synthetic construct
  misc_feature 1..20: note = Description of Artificial Sequence: Synthetic oligonucleotide
  misc_feature 1..20: note = Target: SCN10A; (+) strand; PAM type: NRG; PAM sequence: AAG
  source 1..20: mol_type = other DNA
aagtggtggcctctggaaag

SEQ ID NO: 37988 - DNA, 20 bp, synthetic construct
  misc_feature 1..20: note = Description of Artificial Sequence: Synthetic oligonucleotide
  misc_feature 1..20: note = Target: SCN10A; (+) strand; PAM type: NRG; PAM sequence: GAG
  source 1..20: mol_type = other DNA
gtggtggcctctggaaagaa

SEQ ID NO: 37989 - DNA, 20 bp, synthetic construct
  misc_feature 1..20: note = Description of Artificial Sequence: Synthetic oligonucleotide
  misc_feature 1..20: note = Target: SCN10A; (+) strand; PAM type: NRG; PAM sequence: GAG
  source 1..20: mol_type = other DNA
ggcctctggaaagaagagat

SEQ ID NO: 37990 - DNA, 20 bp, synthetic construct
  misc_feature 1..20: note = Description of Artificial Sequence: Synthetic oligonucleotide
  misc_feature 1..20: note = Target: SCN10A; (+) strand; PAM type: NRG; PAM sequence: CAG
  source 1..20: mol_type = other DNA
gaaattgctgttttttttgt

SEQ ID NO: 37991 - DNA, 20 bp, synthetic construct
  misc_feature 1..20: note = Description of Artificial Sequence: Synthetic oligonucleotide
  misc_feature 1..20: note = Target: SCN10A; (+) strand; PAM type: NRG; PAM sequence: AAG
  source 1..20: mol_type = other DNA
aacatatatgtcttaaataa

SEQ ID NO: 37992 - DNA, 20 bp, synthetic construct
  misc_feature 1..20: note = Description of Artificial Sequence: Synthetic oligonucleotide
  misc_feature 1..20: note = Target: SCN10A; (+) strand; PAM type: NRG; PAM sequence: AAG
  source 1..20: mol_type = other DNA
tatgtcttaaataaaagtaa

SEQ ID NO: 37993 - DNA, 20 bp, synthetic construct
  misc_feature 1..20: note = Description of Artificial Sequence: Synthetic oligonucleotide
  misc_feature 1..20: note = Target: SCN10A; (+) strand; PAM type: NRG; PAM sequence: AAG
  source 1..20: mol_type = other DNA
cttaaataaaagtaaaagtc

SEQ ID NO: 37994 - DNA, 20 bp, synthetic construct
  misc_feature 1..20: note = Description of Artificial Sequence: Synthetic oligonucleotide
  misc_feature 1..20: note = Target: SCN10A; (+) strand; PAM type: NRG; PAM sequence: AAG
  source 1..20: mol_type = other DNA
aaagtaaaagtcaagttaaa

SEQ ID NO: 37995 - DNA, 20 bp, synthetic construct
  misc_feature 1..20: note = Description of Artificial Sequence: Synthetic oligonucleotide
  misc_feature 1..20: note = Target: SCN10A; (+) strand; PAM type: NRG; PAM sequence: GAG
  source 1..20: mol_type = other DNA
taattttttttcacatctgt

SEQ ID NO: 37996 - DNA, 20 bp, synthetic construct
  misc_feature 1..20: note = Description of Artificial Sequence: Synthetic oligonucleotide
  misc_feature 1..20: note = Target: SCN10A; (+) strand; PAM type: NRG; PAM sequence: GAG
  source 1..20: mol_type = other DNA
attttttttcacatctgtga

SEQ ID NO: 37997 - DNA, 20 bp, synthetic construct
  misc_feature 1..20: note = Description of Artificial Sequence: Synthetic oligonucleotide
  misc_feature 1..20: note = Target: SCN10A; (+) strand; PAM type: NRG; PAM sequence: AGG
  source 1..20: mol_type = other DNA
ttttttttcacatctgtgag

SEQ ID NO: 37998 - DNA, 20 bp, synthetic construct
  misc_feature 1..20: note = Description of Artificial Sequence: Synthetic oligonucleotide
  misc_feature 1..20: note = Target: SCN10A; (+) strand; PAM type: NRG; PAM sequence: GAG
  source 1..20: mol_type = other DNA
ttttttcacatctgtgagag

SEQ ID NO: 37999 - DNA, 20 bp, synthetic construct
  misc_feature 1..20: note = Description of Artificial Sequence: Synthetic oligonucleotide
  misc_feature 1..20: note = Target: SCN10A; (+) strand; PAM type: NRG; PAM sequence: TAG
  source 1..20: mol_type = other DNA
aaatcgtgtttgaaatcatt

SEQ ID NO: 38000 - DNA, 20 bp, synthetic construct
  misc_feature 1..20: note = Description of Artificial Sequence: Synthetic oligonucleotide
  misc_feature 1..20: note = Target: SCN10A; (+) strand; PAM type: NRG; PAM sequence: AGG
  source 1..20: mol_type = other DNA
aatcgtgtttgaaatcattt

SEQ ID NO: 38001 - DNA, 20 bp, synthetic construct
  misc_feature 1..20: note = Description of Artificial Sequence: Synthetic oligonucleotide
  misc_feature 1..20: note = Target: SCN10A; (+) strand; PAM type: NRG; PAM sequence: TGG
  source 1..20: mol_type = other DNA
atcatttaggaatctatatc

SEQ ID NO: 38002 - DNA, 20 bp, synthetic construct
  misc_feature 1..20: note = Description of Artificial Sequence: Synthetic oligonucleotide
  misc_feature 1..20: note = Target: SCN10A; (+) strand; PAM type: NRG; PAM sequence: TAG
  source 1..20: mol_type = other DNA
ggaatctatatctggttgca

SEQ ID NO: 38003 - DNA, 20 bp, synthetic construct
  misc_feature 1..20: note = Description of Artificial Sequence: Synthetic oligonucleotide
  misc_feature 1..20: note = Target: SCN10A; (+) strand; PAM type: NRG; PAM sequence: GAG
  source 1..20: mol_type = other DNA
atctggttgcatagctgctt

SEQ ID NO: 38004 - DNA, 20 bp, synthetic construct
  misc_feature 1..20: note = Description of Artificial Sequence: Synthetic oligonucleotide
  misc_feature 1..20: note = Target: SCN10A; (+) strand; PAM type: NRG; PAM sequence: CAG
  source 1..20: mol_type = other DNA
tgcatagctgcttgagctgt

SEQ ID NO: 38005 - DNA, 20 bp, synthetic construct
  misc_feature 1..20: note = Description of Artificial Sequence: Synthetic oligonucleotide
  misc_feature 1..20: note = Target: SCN10A; (+) strand; PAM type: NRG; PAM sequence: TGG
  source 1..20: mol_type = other DNA
tgtcagcttccatatcttgt

SEQ ID NO: 38006 - DNA, 20 bp, synthetic construct
  misc_feature 1..20: note = Description of Artificial Sequence: Synthetic oligonucleotide
  misc_feature 1..20: note = Target: SCN10A; (+) strand; PAM type: NRG; PAM sequence: TAG
  source 1..20: mol_type = other DNA
actctttatgttttctaaat

SEQ ID NO: 38007 - DNA, 20 bp, synthetic construct
  misc_feature 1..20: note = Description of Artificial Sequence: Synthetic oligonucleotide
  misc_feature 1..20: note = Target: SCN10A; (+) strand; PAM type: NRG; PAM sequence: CAG
  source 1..20: mol_type = other DNA
taaattagaaaatcttaact

SEQ ID NO: 38008 - DNA, 20 bp, synthetic construct
  misc_feature 1..20: note = Description of Artificial Sequence: Synthetic oligonucleotide
  misc_feature 1..20: note = Target: SCN10A; (+) strand; PAM type: NRG; PAM sequence: TAG
  source 1..20: mol_type = other DNA
aaaatcttaactcagaatta

SEQ ID NO: 38009 - DNA, 20 bp, synthetic construct
  misc_feature 1..20: note = Description of Artificial Sequence: Synthetic oligonucleotide
  misc_feature 1..20: note = Target: SCN10A; (+) strand; PAM type: NRG; PAM sequence: AGG
  source 1..20: mol_type = other DNA
aaatcttaactcagaattat

SEQ ID NO: 38010 - DNA, 20 bp, synthetic construct
  misc_feature 1..20: note = Description of Artificial Sequence: Synthetic oligonucleotide
  misc_feature 1..20: note = Target: SCN10A; (+) strand; PAM type: NRG; PAM sequence: TGG
  source 1..20: mol_type = other DNA
aactcagaattataggttgt

SEQ ID NO: 38011 - DNA, 20 bp, synthetic construct
  misc_feature 1..20: note = Description of Artificial Sequence: Synthetic oligonucleotide
  misc_feature 1..20: note = Target: SCN10A; (+) strand; PAM type: NRG; PAM sequence: GGG
  source 1..20: mol_type = other DNA
actcagaattataggttgtt

SEQ ID NO: 38012 - DNA, 20 bp, synthetic construct
  misc_feature 1..20: note = Description of Artificial Sequence: Synthetic oligonucleotide
  misc_feature 1..20: note = Target: SCN10A; (+) strand; PAM type: NRG; PAM sequence: AAG
  source 1..20: mol_type = other DNA
cagaattataggttgttggg

SEQ ID NO: 38013 - DNA, 20 bp, synthetic construct
  misc_feature 1..20: note = Description of Artificial Sequence: Synthetic oligonucleotide
  misc_feature 1..20: note = Target: SCN10A; (+) strand; PAM type: NRG; PAM sequence: TGG
  source 1..20: mol_type = other DNA
aggttgttgggaagctttga

SEQ ID NO: 38014 - DNA, 20 bp, synthetic construct
  misc_feature 1..20: note = Description of Artificial Sequence: Synthetic oligonucleotide
  misc_feature 1..20: note = Target: SCN10A; (+) strand; PAM type: NRG; PAM sequence: TGG
  source 1..20: mol_type = other DNA
gaagctttgatggatatttc

SEQ ID NO: 38015 - DNA, 20 bp, synthetic construct
  misc_feature 1..20: note = Description of Artificial Sequence: Synthetic oligonucleotide
  misc_feature 1..20: note = Target: SCN10A; (+) strand; PAM type: NRG; PAM sequence: CAG
  source 1..20: mol_type = other DNA
ctggtttgtcaaatcaaaca

SEQ ID NO: 38016 - DNA, 20 bp, synthetic construct
  misc_feature 1..20: note = Description of Artificial Sequence: Synthetic oligonucleotide
  misc_feature 1..20: note = Target: SCN10A; (+) strand; PAM type: NRG; PAM sequence: CAG
  source 1..20: mol_type = other DNA
tgtcaaatcaaacacagacc

SEQ ID NO: 38017 - DNA, 20 bp, synthetic construct
  misc_feature 1..20: note = Description of Artificial Sequence: Synthetic oligonucleotide
  misc_feature 1..20: note = Target: SCN10A; (+) strand; PAM type: NRG; PAM sequence: TGG
  source 1..20: mol_type = other DNA
aaacacagacccagaaatta

SEQ ID NO: 38018 - DNA, 20 bp, synthetic construct
  misc_feature 1..20: note = Description of Artificial Sequence: Synthetic oligonucleotide
  misc_feature 1..20: note = Target: SCN10A; (+) strand; PAM type: NRG; PAM sequence: GAG
  source 1..20: mol_type = other DNA
acacagacccagaaattatg

SEQ ID NO: 38019 - DNA, 20 bp, synthetic construct
  misc_feature 1..20: note = Description of Artificial Sequence: Synthetic oligonucleotide
  misc_feature 1..20: note = Target: SCN10A; (+) strand; PAM type: NRG; PAM sequence: GAG
  source 1..20: mol_type = other DNA
acagacccagaaattatgga

SEQ ID NO: 38020 - DNA, 20 bp, synthetic construct
  misc_feature 1..20: note = Description of Artificial Sequence: Synthetic oligonucleotide
  misc_feature 1..20: note = Target: SCN10A; (+) strand; PAM type: NRG; PAM sequence: GAG
  source 1..20: mol_type = other DNA
agacccagaaattatggaga

SEQ ID NO: 38021 - DNA, 20 bp, synthetic construct
  misc_feature 1..20: note = Description of Artificial Sequence: Synthetic oligonucleotide
  misc_feature 1..20: note = Target: SCN10A; (+) strand; PAM type: NRG; PAM sequence: AAG
  source 1..20: mol_type = other DNA
tatggagagagtgctctcta

SEQ ID NO: 38022 - DNA, 20 bp, synthetic construct
  misc_feature 1..20: note = Description of Artificial Sequence: Synthetic oligonucleotide
  misc_feature 1..20: note = Target: SCN10A; (+) strand; PAM type: NRG; PAM sequence: CAG
  source 1..20: mol_type = other DNA
tgctctctaaagactatttt

SEQ ID NO: 38023 - DNA, 20 bp, synthetic construct
  misc_feature 1..20: note = Description of Artificial Sequence: Synthetic oligonucleotide
  misc_feature 1..20: note = Target: SCN10A; (+) strand; PAM type: NRG; PAM sequence: CAG
  source 1..20: mol_type = other DNA
gactattttcagtgcttcac

SEQ ID NO: 38024 - DNA, 20 bp, synthetic construct
  misc_feature 1..20: note = Description of Artificial Sequence: Synthetic oligonucleotide
  misc_feature 1..20: note = Target: SCN10A; (+) strand; PAM type: NRG; PAM sequence: AAG
  source 1..20: mol_type = other DNA
tattttcagtgcttcaccag

SEQ ID NO: 38025 - DNA, 20 bp, synthetic construct
  misc_feature 1..20: note = Description of Artificial Sequence: Synthetic oligonucleotide
  misc_feature 1..20: note = Target: SCN10A; (+) strand; PAM type: NRG; PAM sequence: AGG
  source 1..20: mol_type = other DNA
attttcagtgcttcaccaga

SEQ ID NO: 38026 - DNA, 20 bp, synthetic construct
  misc_feature 1..20: note = Description of Artificial Sequence: Synthetic oligonucleotide
  misc_feature 1..20: note = Target: SCN10A; (+) strand; PAM type: NRG; PAM sequence: AAG
  source 1..20: mol_type = other DNA
tcagtgcttcaccagaaggc

SEQ ID NO: 38027 - DNA, 20 bp, synthetic construct
  misc_feature 1..20: note = Description of Artificial Sequence: Synthetic oligonucleotide
  misc_feature 1..20: note = Target: SCN10A; (+) strand; PAM type: NRG; PAM sequence: CAG
  source 1..20: mol_type = other DNA
tcaccagaaggcaagtgccc

SEQ ID NO: 38028 - DNA, 20 bp, synthetic construct
  misc_feature 1..20: note = Description of Artificial Sequence: Synthetic oligonucleotide
  misc_feature 1..20: note = Target: SCN10A; (+) strand; PAM type: NRG; PAM sequence: CAG
  source 1..20: mol_type = other DNA
aggcaagtgccccagctcaa

SEQ ID NO: 38029 - DNA, 20 bp, synthetic construct
  misc_feature 1..20: note = Description of Artificial Sequence: Synthetic oligonucleotide
  misc_feature 1..20: note = Target: SCN10A; (+) strand; PAM type: NRG; PAM sequence: CAG
  source 1..20: mol_type = other DNA
caagtgccccagctcaacag

SEQ ID NO: 38030 - DNA, 20 bp, synthetic construct
  misc_feature 1..20: note = Description of Artificial Sequence: Synthetic oligonucleotide
  misc_feature 1..20: note = Target: SCN10A; (+) strand; PAM type: NRG; PAM sequence: TGG
  source 1..20: mol_type = other DNA
cccagctcaacagcagctaa

SEQ ID NO: 38031 - DNA, 20 bp, synthetic construct
  misc_feature 1..20: note = Description of Artificial Sequence: Synthetic oligonucleotide
  misc_feature 1..20: note = Target: SCN10A; (+) strand; PAM type: NRG; PAM sequence: GAG
  source 1..20: mol_type = other DNA
cagctcaacagcagctaatg

SEQ ID NO: 38032 - DNA, 20 bp, synthetic construct
  misc_feature 1..20: note = Description of Artificial Sequence: Synthetic oligonucleotide
  misc_feature 1..20: note = Target: SCN10A; (+) strand; PAM type: NRG; PAM sequence: TGG
  source 1..20: mol_type = other DNA
atggagttgcatcctctctt

SEQ ID NO: 38033 - DNA, 20 bp, synthetic construct
  misc_feature 1..20: note = Description of Artificial Sequence: Synthetic oligonucleotide
  misc_feature 1..20: note = Target: SCN10A; (+) strand; PAM type: NRG; PAM sequence: TGG
  source 1..20: mol_type = other DNA
gagttgcatcctctctttgg

SEQ ID NO: 38034 - DNA, 20 bp, synthetic construct
  misc_feature 1..20: note = Description of Artificial Sequence: Synthetic oligonucleotide
  misc_feature 1..20: note = Target: SCN10A; (+) strand; PAM type: NRG; PAM sequence: TGG
  source 1..20: mol_type = other DNA
atcctctctttggtggtatt

SEQ ID NO: 38035 - DNA, 20 bp, synthetic construct
  misc_feature 1..20: note = Description of Artificial Sequence: Synthetic oligonucleotide
  misc_feature 1..20: note = Target: SCN10A; (+) strand; PAM type: NRG; PAM sequence: AAG
  source 1..20: mol_type = other DNA
ttggtggtatttggctctgc

SEQ ID NO: 38036 - DNA, 20 bp, synthetic construct
  misc_feature 1..20: note = Description of Artificial Sequence: Synthetic oligonucleotide
  misc_feature 1..20: note = Target: SCN10A; (+) strand; PAM type: NRG; PAM sequence: AGG
  source 1..20: mol_type = other DNA
tggtggtatttggctctgca

SEQ ID NO: 38037 - DNA, 20 bp, synthetic construct
  misc_feature 1..20: note = Description of Artificial Sequence: Synthetic oligonucleotide
  misc_feature 1..20: note = Target: SCN10A; (+) strand; PAM type: NRG; PAM sequence: TGG
  source 1..20: mol_type = other DNA
tgcaaggtatttcttgatgt

SEQ ID NO: 38038 - DNA, 20 bp, synthetic construct
  misc_feature 1..20: note = Description of Artificial Sequence: Synthetic oligonucleotide
  misc_feature 1..20: note = Target: SCN10A; (+) strand; PAM type: NRG; PAM sequence: GGG
  source 1..20: mol_type = other DNA
gcaaggtatttcttgatgtt

SEQ ID NO: 38039 - DNA, 20 bp, synthetic construct
  misc_feature 1..20: note = Description of Artificial Sequence: Synthetic oligonucleotide
  misc_feature 1..20: note = Target: SCN10A; (+) strand; PAM type: NRG; PAM sequence: CAG
  source 1..20: mol_type = other DNA
tatttcttgatgttgggttg

SEQ ID NO: 38040 - DNA, 20 bp, synthetic construct
  misc_feature 1..20: note = Description of Artificial Sequence: Synthetic oligonucleotide
  misc_feature 1..20: note = Target: SCN10A; (+) strand; PAM type: NRG; PAM sequence: CAG
  source 1..20: mol_type = other DNA
tgatgttgggttgcagcatt

SEQ ID NO: 38041 - DNA, 20 bp, synthetic construct
  misc_feature 1..20: note = Description of Artificial Sequence: Synthetic oligonucleotide
  misc_feature 1..20: note = Target: SCN10A; (+) strand; PAM type: NRG; PAM sequence: AAG
  source 1..20: mol_type = other DNA
attcagatgtaatttttaat

SEQ ID NO: 38042 - DNA, 20 bp, synthetic construct
  misc_feature 1..20: note = Description of Artificial Sequence: Synthetic oligonucleotide
  misc_feature 1..20: note = Target: SCN10A; (+) strand; PAM type: NRG; PAM sequence: AAG
  source 1..20: mol_type = other DNA
agcccaatgtgttatttcct

SEQ ID NO: 38043 - DNA, 20 bp, synthetic construct
  misc_feature 1..20: note = Description of Artificial Sequence: Synthetic oligonucleotide
  misc_feature 1..20: note = Target: SCN10A; (+) strand; PAM type: NRG; PAM sequence: TGG
  source 1..20: mol_type = other DNA
tatttcctaagtgctttttc

SEQ ID NO: 38044 - DNA, 20 bp, synthetic construct
  misc_feature 1..20: note = Description of Artificial Sequence: Synthetic oligonucleotide
  misc_feature 1..20: note = Target: SCN10A; (+) strand; PAM type: NRG; PAM sequence: AAG
  source 1..20: mol_type = other DNA
agtgctttttctggtgaatg

SEQ ID NO: 38045 - DNA, 20 bp, synthetic construct
  misc_feature 1..20: note = Description of Artificial Sequence: Synthetic oligonucleotide
  misc_feature 1..20: note = Target: SCN10A; (+) strand; PAM type: NRG; PAM sequence: TGG
  source 1..20: mol_type = other DNA
tggtgaatgaagaaaatcat

SEQ ID NO: 38046 - DNA, 20 bp, synthetic construct
  misc_feature 1..20: note = Description of Artificial Sequence: Synthetic oligonucleotide
  misc_feature 1..20: note = Target: SCN10A; (+) strand; PAM type: NRG; PAM sequence: GGG
  source 1..20: mol_type = other DNA
ggtgaatgaagaaaatcatt

SEQ ID NO: 38047 - DNA, 20 bp, synthetic construct
  misc_feature 1..20: note = Description of Artificial Sequence: Synthetic oligonucleotide
  misc_feature 1..20: note = Target: SCN10A; (+) strand; PAM type: NRG; PAM sequence: TGG
  source 1..20: mol_type = other DNA
tgaagaaaatcattgggtat

SEQ ID NO: 38048 - DNA, 20 bp, synthetic construct
  misc_feature 1..20: note = Description of Artificial Sequence: Synthetic oligonucleotide
  misc_feature 1..20: note = Target: SCN10A; (+) strand; PAM type: NRG; PAM sequence: GGG
  source 1..20: mol_type = other DNA
gaagaaaatcattgggtatt

SEQ ID NO: 38049 - DNA, 20 bp, synthetic construct
  misc_feature 1..20: note = Description of Artificial Sequence: Synthetic oligonucleotide
  misc_feature 1..20: note = Target: SCN10A; (+) strand; PAM type: NRG; PAM sequence: AAG
  source 1..20: mol_type = other DNA
aatcattgggtattgggaaa

SEQ ID NO: 38050 - DNA, 20 bp, synthetic construct
  misc_feature 1..20: note = Description of Artificial Sequence: Synthetic oligonucleotide
  misc_feature 1..20: note = Target: SCN10A; (+) strand; PAM type: NRG; PAM sequence: AAG
  source 1..20: mol_type = other DNA
ttgggtattgggaaaaagtc

SEQ ID NO: 38051 - DNA, 20 bp, synthetic construct
  misc_feature 1..20: note = Description of Artificial Sequence: Synthetic oligonucleotide
  misc_feature 1..20: note = Target: SCN10A; (+) strand; PAM type: NRG; PAM sequence: CAG
  source 1..20: mol_type = other DNA
ttgggaaaaagtcaagttct

SEQ ID NO: 38052 - DNA, 20 bp, synthetic construct
  misc_feature 1..20: note = Description of Artificial Sequence: Synthetic oligonucleotide
  misc_feature 1..20: note = Target: SCN10A; (+) strand; PAM type: NRG; PAM sequence: GAG
  source 1..20: mol_type = other DNA
aagtcaagttctcagccgtt

SEQ ID NO: 38053 - DNA, 20 bp, synthetic construct
  misc_feature 1..20: note = Description of Artificial Sequence: Synthetic oligonucleotide
  misc_feature 1..20: note = Target: SCN10A; (+) strand; PAM type: NRG; PAM sequence: CAG
  source 1..20: mol_type = other DNA
ttgttacaaatcccgatatt

SEQ ID NO: 38054 - DNA, 20 bp, synthetic construct
  misc_feature 1..20: note = Description of Artificial Sequence: Synthetic oligonucleotide
  misc_feature 1..20: note = Target: SCN10A; (+) strand; PAM type: NRG; PAM sequence: AGG
  source 1..20: mol_type = other DNA
tgttacaaatcccgatattc

SEQ ID NO: 38055 - DNA, 20 bp, synthetic construct
  misc_feature 1..20: note = Description of Artificial Sequence: Synthetic oligonucleotide
  misc_feature 1..20: note = Target: SCN10A; (+) strand; PAM type: NRG; PAM sequence: AAG
  source 1..20: mol_type = other DNA
atattcaggctctgaaaaca

SEQ ID NO: 38056 - DNA, 20 bp, synthetic construct
  misc_feature 1..20: note = Description of Artificial Sequence: Synthetic oligonucleotide
  misc_feature 1..20: note = Target: SCN10A; (+) strand; PAM type: NRG; PAM sequence: TGG
  source 1..20: mol_type = other DNA
cataatattcaaattctgaa

SEQ ID NO: 38057 - DNA, 20 bp, synthetic construct
  misc_feature 1..20: note = Description of Artificial Sequence: Synthetic oligonucleotide
  misc_feature 1..20: note = Target: SCN10A; (+) strand; PAM type: NRG; PAM sequence: GAG
  source 1..20: mol_type = other DNA
caaattctgaatggatcact

SEQ ID NO: 38058 - DNA, 20 bp, synthetic construct
  misc_feature 1..20: note = Description of Artificial Sequence: Synthetic oligonucleotide
  misc_feature 1..20: note = Target: SCN10A; (+) strand; PAM type: NRG; PAM sequence: TGG
  source 1..20: mol_type = other DNA
ccaacttgtattcataaaaa

SEQ ID NO: 38059 - DNA, 20 bp, synthetic construct
  misc_feature 1..20: note = Description of Artificial Sequence: Synthetic oligonucleotide
  misc_feature 1..20: note = Target: SCN10A; (+) strand; PAM type: NRG; PAM sequence: AAG
  source 1..20: mol_type = other DNA
ttatttttaaaactctgtgt

SEQ ID NO: 38060 - DNA, 20 bp, synthetic construct
  misc_feature 1..20: note = Description of Artificial Sequence: Synthetic oligonucleotide
  misc_feature 1..20: note = Target: SCN10A; (+) strand; PAM type: NRG; PAM sequence: CAG
  source 1..20: mol_type = other DNA
tgtaagcccttcccatttgc

SEQ ID NO: 38061 - DNA, 20 bp, synthetic construct
  misc_feature 1..20: note = Description of Artificial Sequence: Synthetic oligonucleotide
  misc_feature 1..20: note = Target: SCN10A; (+) strand; PAM type: NRG; PAM sequence: AAG
  source 1..20: mol_type = other DNA
cccttcccatttgccagcca

SEQ ID NO: 38062 - DNA, 20 bp, synthetic construct
  misc_feature 1..20: note = Description of Artificial Sequence: Synthetic oligonucleotide
  misc_feature 1..20: note = Target: SCN10A; (+) strand; PAM type: NRG; PAM sequence: CAG
  source 1..20: mol_type = other DNA
atttgccagccaaagcaatt

SEQ ID NO: 38063 - DNA, 20 bp, synthetic construct
  misc_feature 1..20: note = Description of Artificial Sequence: Synthetic oligonucleotide
  misc_feature 1..20: note = Target: SCN10A; (+) strand; PAM type: NRG; PAM sequence: TGG
  source 1..20: mol_type = other DNA
ccagccaaagcaattcagtg

SEQ ID NO: 38064 - DNA, 20 bp, synthetic construct
  misc_feature 1..20: note = Description of Artificial Sequence: Synthetic oligonucleotide
  misc_feature 1..20: note = Target: SCN10A; (+) strand; PAM type: NRG; PAM sequence: GGG
  source 1..20: mol_type = other DNA
cagccaaagcaattcagtgt

SEQ ID NO: 38065 - DNA, 20 bp, synthetic construct
  misc_feature 1..20: note = Description of Artificial Sequence: Synthetic oligonucleotide
  misc_feature 1..20: note = Target: SCN10A; (+) strand; PAM type: NRG; PAM sequence: GAG
  source 1..20: mol_type = other DNA
gccaaagcaattcagtgtgg

SEQ ID NO: 38066 - DNA, 20 bp, synthetic construct
  misc_feature 1..20: note = Description of Artificial Sequence: Synthetic oligonucleotide
  misc_feature 1..20: note = Target: SCN10A; (+) strand; PAM type: NRG; PAM sequence: GAG
  source 1..20: mol_type = other DNA
caaagcaattcagtgtggga

SEQ ID NO: 38067 - DNA, 20 bp, synthetic construct
  misc_feature 1..20: note = Description of Artificial Sequence: Synthetic oligonucleotide
  misc_feature 1..20: note = Target: SCN10A; (+) strand; PAM type: NRG; PAM sequence: CAG
  source 1..20: mol_type = other DNA
agcaattcagtgtgggagag

SEQ ID NO: 38068 - DNA, 20 bp, synthetic construct
  misc_feature 1..20: note = Description of Artificial Sequence: Synthetic oligonucleotide
  misc_feature 1..20: note = Target: SCN10A; (+) strand; PAM type: NRG; PAM sequence: CAG
  source 1..20: mol_type = other DNA
ctcttactcacttttcattt

SEQ ID NO: 38069 - DNA, 20 bp, synthetic construct
  misc_feature 1..20: note = Description of Artificial Sequence: Synthetic oligonucleotide
  misc_feature 1..20: note = Target: SCN10A; (+) strand; PAM type: NRG; PAM sequence: CAG
  source 1..20: mol_type = other DNA
actcacttttcatttcagcc

SEQ ID NO: 38070 - DNA, 20 bp, synthetic construct
  misc_feature 1..20: note = Description of Artificial Sequence: Synthetic oligonucleotide
  misc_feature 1..20: note = Target: SCN10A; (+) strand; PAM type: NRG; PAM sequence: TAG
  source 1..20: mol_type = other DNA
cacttttcatttcagcccag

SEQ ID NO: 38071 - DNA, 20 bp, synthetic construct
  misc_feature 1..20: note = Description of Artificial Sequence: Synthetic oligonucleotide
  misc_feature 1..20: note = Target: SCN10A; (+) strand; PAM type: NRG; PAM sequence: AGG
  source 1..20: mol_type = other DNA
acttttcatttcagcccagt

SEQ ID NO: 38072 - DNA, 20 bp, synthetic construct
  misc_feature 1..20: note = Description of Artificial Sequence: Synthetic oligonucleotide
  misc_feature 1..20: note = Target: SCN10A; (+) strand; PAM type: NRG; PAM sequence: AAG
  source 1..20: mol_type = other DNA
catttcagcccagtaggcca

SEQ ID NO: 38073 - DNA, 20 bp, synthetic construct
  misc_feature 1..20: note = Description of Artificial Sequence: Synthetic oligonucleotide
  misc_feature 1..20: note = Target: SCN10A; (+) strand; PAM type: NRG; PAM sequence: GAG
  source 1..20: mol_type = other DNA
tttcagcccagtaggccaaa

SEQ ID NO: 38074 - DNA, 20 bp, synthetic construct
  misc_feature 1..20: note = Description of Artificial Sequence: Synthetic oligonucleotide
  misc_feature 1..20: note = Target: SCN10A; (+) strand; PAM type: NRG; PAM sequence: AAG
  source 1..20: mol_type = other DNA
aggccaaagagatgtacact

SEQ ID NO: 38075 - DNA, 20 bp, synthetic construct
  misc_feature 1..20: note = Description of Artificial Sequence: Synthetic oligonucleotide
  misc_feature 1..20: note = Target: SCN10A; (+) strand; PAM type: NRG; PAM sequence: CAG
  source 1..20: mol_type = other DNA
gtacactaagtgaccacaat

SEQ ID NO: 38076 - DNA, 20 bp, synthetic construct
  misc_feature 1..20: note = Description of Artificial Sequence: Synthetic oligonucleotide
  misc_feature 1..20: note = Target: SCN10A; (+) strand; PAM type: NRG; PAM sequence: CAG
  source 1..20: mol_type = other DNA
atttccactgtgtacctcaa

SEQ ID NO: 38077 - DNA, 20 bp, synthetic construct
  misc_feature 1..20: note = Description of Artificial Sequence: Synthetic oligonucleotide
  misc_feature 1..20: note = Target: SCN10A; (+) strand; PAM type: NRG; PAM sequence: CAG
  source 1..20: mol_type = other DNA
tgtgtacctcaacagcaaat

SEQ ID NO: 38078 - DNA, 20 bp, synthetic construct
  misc_feature 1..20: note = Description of Artificial Sequence: Synthetic oligonucleotide
  misc_feature 1..20: note = Target: SCN10A; (+) strand; PAM type: NRG; PAM sequence: TGG
  source 1..20: mol_type = other DNA
ctcaacagcaaatcagaatc

SEQ ID NO: 38079 - DNA, 20 bp, synthetic construct
  misc_feature 1..20: note = Description of Artificial Sequence: Synthetic oligonucleotide
  misc_feature 1..20: note = Target: SCN10A; (+) strand; PAM type: NRG; PAM sequence: GAG
  source 1..20: mol_type = other DNA
caacagcaaatcagaatctg

SEQ ID NO: 38080 - DNA, 20 bp, synthetic construct
  misc_feature 1..20: note = Description of Artificial Sequence: Synthetic oligonucleotide
  misc_feature 1..20: note = Target: SCN10A; (+) strand; PAM type: NRG; PAM sequence: AGG
  source 1..20: mol_type = other DNA
aacagcaaatcagaatctgg

SEQ ID NO: 38081 - DNA, 20 bp, synthetic construct
  misc_feature 1..20: note = Description of Artificial Sequence: Synthetic oligonucleotide
  misc_feature 1..20: note = Target: SCN10A; (+) strand; PAM type: NRG; PAM sequence: CAG
  source 1..20: mol_type = other DNA
cagaatctggaggcatatta

SEQ ID NO: 38082 - DNA, 20 bp, synthetic construct
  misc_feature 1..20: note = Description of Artificial Sequence: Synthetic oligonucleotide
  misc_feature 1..20: note = Target: SCN10A; (+) strand; PAM type: NRG; PAM sequence: CAG
  source 1..20: mol_type = other DNA
ggaggcatattacagacccc

SEQ ID NO: 38083 - DNA, 20 bp, synthetic construct
  misc_feature 1..20: note = Description of Artificial Sequence: Synthetic oligonucleotide
  misc_feature 1..20: note = Target: SCN10A; (+) strand; PAM type: NRG; PAM sequence: AAG
  source 1..20: mol_type = other DNA
cccagctgcgttccgtgaat

SEQ ID NO: 38084 - DNA, 20 bp, synthetic construct
  misc_feature 1..20: note = Description of Artificial Sequence: Synthetic oligonucleotide
  misc_feature 1..20: note = Target: SCN10A; (+) strand; PAM type: NRG; PAM sequence: AGG
  source 1..20: mol_type = other DNA
ccagctgcgttccgtgaata

SEQ ID NO: 38085 - DNA, 20 bp, synthetic construct
  misc_feature 1..20: note = Description of Artificial Sequence: Synthetic oligonucleotide
  misc_feature 1..20: note = Target: SCN10A; (+) strand; PAM type: NRG; PAM sequence: TAG
  source 1..20: mol_type = other DNA
tccgtgaataaggtatgcac

SEQ ID NO: 38086 - DNA, 20 bp, synthetic construct
  misc_feature 1..20: note = Description of Artificial Sequence: Synthetic oligonucleotide
  misc_feature 1..20: note = Target: SCN10A; (+) strand; PAM type: NRG; PAM sequence: TGG
  source 1..20: mol_type = other DNA
aataaggtatgcactagcat

SEQ ID NO: 38087 - DNA, 20 bp, synthetic construct
  misc_feature 1..20: note = Description of Artificial Sequence: Synthetic oligonucleotide
  misc_feature 1..20: note = Target: SCN10A; (+) strand; PAM type: NRG; PAM sequence: GGG
  source 1..20: mol_type = other DNA
ataaggtatgcactagcatt

SEQ ID NO: 38088 - DNA, 20 bp, synthetic construct
  misc_feature 1..20: note = Description of Artificial Sequence: Synthetic oligonucleotide
  misc_feature 1..20: note = Target: SCN10A; (+) strand; PAM type: NRG; PAM sequence: TGG
  source 1..20: mol_type = other DNA
tatgcactagcattgggatc

SEQ ID NO: 38089 - DNA, 20 bp, synthetic construct
  misc_feature 1..20: note = Description of Artificial Sequence: Synthetic oligonucleotide
  misc_feature 1..20: note = Target: SCN10A; (+) strand; PAM type: NRG; PAM sequence: GGG
  source 1..20: mol_type = other DNA
atgcactagcattgggatct

SEQ ID NO: 38090 - DNA, 20 bp, synthetic construct
  misc_feature 1..20: note = Description of Artificial Sequence: Synthetic oligonucleotide
  misc_feature 1..20: note = Target: SCN10A; (+) strand; PAM type: NRG; PAM sequence: GAG
  source 1..20: mol_type = other DNA
gcactagcattgggatctgg

SEQ ID NO: 38091 - DNA, 20 bp, synthetic construct
  misc_feature 1..20: note = Description of Artificial Sequence: Synthetic oligonucleotide
  misc_feature 1..20: note = Target: SCN10A; (+) strand; PAM type: NRG; PAM sequence: CAG
  source 1..20: mol_type = other DNA
ctagcattgggatctgggag

SEQ ID NO: 38092 - DNA, 20 bp, synthetic construct
  misc_feature 1..20: note = Description of Artificial Sequence: Synthetic oligonucleotide
  misc_feature 1..20: note = Target: SCN10A; (+) strand; PAM type: NRG; PAM sequence: TGG
  source 1..20: mol_type = other DNA
tgggagcagcatcttctatc

SEQ ID NO: 38093 - DNA, 20 bp, synthetic construct
  misc_feature 1..20: note = Description of Artificial Sequence: Synthetic oligonucleotide
  misc_feature 1..20: note = Target: SCN10A; (+) strand; PAM type: NRG; PAM sequence: TAG
  source 1..20: mol_type = other DNA
agcagcatcttctatctgga

SEQ ID NO: 38094 - DNA, 20 bp, synthetic construct
  misc_feature 1..20: note = Description of Artificial Sequence: Synthetic oligonucleotide
  misc_feature 1..20: note = Target: SCN10A; (+) strand; PAM type: NRG; PAM sequence: TGG
  source 1..20: mol_type = other DNA
acctttccttgctgaccatg

SEQ ID NO: 38095 - DNA, 20 bp, synthetic construct
  misc_feature 1..20: note = Description of Artificial Sequence: Synthetic oligonucleotide
  misc_feature 1..20: note = Target: SCN10A; (+) strand; PAM type: NRG; PAM sequence: TGG
  source 1..20: mol_type = other DNA
ttccttgctgaccatgtggc

SEQ ID NO: 38096 - DNA, 20 bp, synthetic construct
  misc_feature 1..20: note = Description of Artificial Sequence: Synthetic oligonucleotide
  misc_feature 1..20: note = Target: SCN10A; (+) strand; PAM type: NRG; PAM sequence: GAG
  source 1..20: mol_type = other DNA
ccttgctgaccatgtggctg

SEQ ID NO: 38097 - DNA, 20 bp, synthetic construct
  misc_feature 1..20: note = Description of Artificial Sequence: Synthetic oligonucleotide
  misc_feature 1..20: note = Target: SCN10A; (+) strand; PAM type: NRG; PAM sequence: TGG
  source 1..20: mol_type = other DNA
tgtggctggagtttcttcaa

SEQ ID NO: 38098 - DNA, 20 bp, synthetic construct
  misc_feature 1..20: note = Description of Artificial Sequence: Synthetic oligonucleotide
  misc_feature 1..20: note = Target: SCN10A; (+) strand; PAM type: NRG; PAM sequence: AAG
  source 1..20: mol_type = other DNA
acctttcctcttttaaaaaa

SEQ ID NO: 38099 - DNA, 20 bp, synthetic construct
  misc_feature 1..20: note = Description of Artificial Sequence: Synthetic oligonucleotide
  misc_feature 1..20: note = Target: SCN10A; (+) strand; PAM type: NRG; PAM sequence: TGG
  source 1..20: mol_type = other DNA
cctcttttaaaaaaaagttt

SEQ ID NO: 38100 - DNA, 20 bp, synthetic construct
  misc_feature 1..20: note = Description of Artificial Sequence: Synthetic oligonucleotide
  misc_feature 1..20: note = Target: SCN10A; (+) strand; PAM type: NRG; PAM sequence: AAG
  source 1..20: mol_type = other DNA
ttaccactttcaccattttt

SEQ ID NO: 38101 - DNA, 20 bp, synthetic construct
  misc_feature 1..20: note = Description of Artificial Sequence: Synthetic oligonucleotide
  misc_feature 1..20: note = Target: SCN10A; (+) strand; PAM type: NRG; PAM sequence: TAG
  source 1..20: mol_type = other DNA
ccatttttaagtacacaatt

SEQ ID NO: 38102 - DNA, 20 bp, synthetic construct
  misc_feature 1..20: note = Description of Artificial Sequence: Synthetic oligonucleotide
  misc_feature 1..20: note = Target: SCN10A; (+) strand; PAM type: NRG; PAM sequence: TGG
  source 1..20: mol_type = other DNA
tttttaagtacacaatttag

SEQ ID NO: 38103 - DNA, 20 bp, synthetic construct
  misc_feature 1..20: note = Description of Artificial Sequence: Synthetic oligonucleotide
  misc_feature 1..20: note = Target: SCN10A; (+) strand; PAM type: NRG; PAM sequence: AAG
  source 1..20: mol_type = other DNA
gtacacaatttagtggcatt

SEQ ID NO: 38104 - DNA, 20 bp, synthetic construct
  misc_feature 1..20: note = Description of Artificial Sequence: Synthetic oligonucleotide
  misc_feature 1..20: note = Target: SCN10A; (+) strand; PAM type: NRG; PAM sequence: CAG
  source 1..20: mol_type = other DNA
ttagtggcattaagtacatt

SEQ ID NO: 38105 - DNA, 20 bp, synthetic construct
  misc_feature 1..20: note = Description of Artificial Sequence: Synthetic oligonucleotide
  misc_feature 1..20: note = Target: SCN10A; (+) strand; PAM type: NRG; PAM sequence: TGG
  source 1..20: mol_type = other DNA
attaagtacattcagtattg

SEQ ID NO: 38106 - DNA, 20 bp, synthetic construct
  misc_feature 1..20: note = Description of Artificial Sequence: Synthetic oligonucleotide
  misc_feature 1..20: note = Target: SCN10A; (+) strand; PAM type: NRG; PAM sequence: CAG
  source 1..20: mol_type = other DNA
aacttttttataatcccgaa

SEQ ID NO: 38107 - DNA, 20 bp, synthetic construct
  misc_feature 1..20: note = Description of Artificial Sequence: Synthetic oligonucleotide
  misc_feature 1..20: note = Target: SCN10A; (+) strand; PAM type: NRG; PAM sequence: TGG
  source 1..20: mol_type = other DNA
aactccccattccccctctc

SEQ ID NO: 38108 - DNA, 20 bp, synthetic construct
  misc_feature 1..20: note = Description of Artificial Sequence: Synthetic oligonucleotide
  misc_feature 1..20: note = Target: SCN10A; (+) strand; PAM type: NRG; PAM sequence: TAG
  source 1..20: mol_type = other DNA
ctccatgaatttgcctgttc

SEQ ID NO: 38109 - DNA, 20 bp, synthetic construct
  misc_feature 1..20: note = Description of Artificial Sequence: Synthetic oligonucleotide
  misc_feature 1..20: note = Target: SCN10A; (+) strand; PAM type: NRG; PAM sequence: AGG
  source 1..20: mol_type = other DNA
tccatgaatttgcctgttct

SEQ ID NO: 38110 - DNA, 20 bp, synthetic construct
  misc_feature 1..20: note = Description of Artificial Sequence: Synthetic oligonucleotide
  misc_feature 1..20: note = Target: SCN10A; (+) strand; PAM type: NRG; PAM sequence: AAG
  source 1..20: mol_type = other DNA
cctgttctaggtacctacta

SEQ ID NO: 38111 - DNA, 20 bp, synthetic construct
  misc_feature 1..20: note = Description of Artificial Sequence: Synthetic oligonucleotide
  misc_feature 1..20: note = Target: SCN10A; (+) strand; PAM type: NRG; PAM sequence: AGG
  source 1..20: mol_type = other DNA
ctgttctaggtacctactaa

SEQ ID NO: 38112 - DNA, 20 bp, synthetic construct
  misc_feature 1..20: note = Description of Artificial Sequence: Synthetic oligonucleotide
  misc_feature 1..20: note = Target: SCN10A; (+) strand; PAM type: NRG; PAM sequence: TGG
  source 1..20: mol_type = other DNA
ttctaggtacctactaaagg

SEQ ID NO: 38113 - DNA, 20 bp, synthetic construct
  misc_feature 1..20: note = Description of Artificial Sequence: Synthetic oligonucleotide
  misc_feature 1..20: note = Target: SCN10A; (+) strand; PAM type: NRG; PAM sequence: GAG
  source 1..20: mol_type = other DNA
acatttgttcttttgcgttt

SEQ ID NO: 38114 - DNA, 20 bp, synthetic construct
  misc_feature 1..20: note = Description of Artificial Sequence: Synthetic oligonucleotide
  misc_feature 1..20: note = Target: SCN10A; (+) strand; PAM type: NRG; PAM sequence: TAG
  source 1..20: mol_type = other DNA
tgcgtttgagttattttact

SEQ ID NO: 38115 - DNA, 20 bp, synthetic construct
  misc_feature 1..20: note = Description of Artificial Sequence: Synthetic oligonucleotide
  misc_feature 1..20: note = Target: SCN10A; (+) strand; PAM type: NRG; PAM sequence: TGG
  source 1..20: mol_type = other DNA
acaatgctttgtcaatgttg

SEQ ID NO: 38116 - DNA, 20 bp, synthetic construct
  misc_feature 1..20: note = Description of Artificial Sequence: Synthetic oligonucleotide
  misc_feature 1..20: note = Target: SCN10A; (+) strand; PAM type: NRG; PAM sequence: CAG
  source 1..20: mol_type = other DNA
gtcaatgttgtggcatgtat

SEQ ID NO: 38117 - DNA, 20 bp, synthetic construct
  misc_feature 1..20: note = Description of Artificial Sequence: Synthetic oligonucleotide
  misc_feature 1..20: note = Target: SCN10A; (+) strand; PAM type: NRG; PAM sequence: TGG
  source 1..20: mol_type = other DNA
tttatccattcatctgttga

SEQ ID NO: 38118 - DNA, 20 bp, synthetic construct
  misc_feature 1..20: note = Description of Artificial Sequence: Synthetic oligonucleotide
  misc_feature 1..20: note = Target: SCN10A; (+) strand; PAM type: NRG; PAM sequence: TGG
  source 1..20: mol_type = other DNA
catctgttgatggacatatt

SEQ ID NO: 38119 - DNA, 20 bp, synthetic construct
  misc_feature 1..20: note = Description of Artificial Sequence: Synthetic oligonucleotide
  misc_feature 1..20: note = Target: SCN10A; (+) strand; PAM type: NRG; PAM sequence: TAG
  source 1..20: mol_type = other DNA
aataacgctgctacaaacat

SEQ ID NO: 38120 - DNA, 20 bp, synthetic construct
  misc_feature 1..20: note = Description of Artificial Sequence: Synthetic oligonucleotide
  misc_feature 1..20: note = Target: SCN10A; (+) strand; PAM type: NRG; PAM sequence: AAG
  source 1..20: mol_type = other DNA
tgctacaaacattagtgcat

SEQ ID NO: 38121 - DNA, 20 bp, synthetic construct
  misc_feature 1..20: note = Description of Artificial Sequence: Synthetic oligonucleotide
  misc_feature 1..20: note = Target: SCN10A; (+) strand; PAM type: NRG; PAM sequence: AAG
  source 1..20: mol_type = other DNA
ataagccaacatacctttta

SEQ ID NO: 38122 - DNA, 20 bp, synthetic construct
  misc_feature 1..20: note = Description of Artificial Sequence: Synthetic oligonucleotide
  misc_feature 1..20: note = Target: SCN10A; (+) strand; PAM type: NRG; PAM sequence: TAG
  source 1..20: mol_type = other DNA
accttttaaagtctgtttca

SEQ ID NO: 38123 - DNA, 20 bp, synthetic construct
  misc_feature 1..20: note = Description of Artificial Sequence: Synthetic oligonucleotide
  misc_feature 1..20: note = Target: SCN10A; (+) strand; PAM type: NRG; PAM sequence: AGG
  source 1..20: mol_type = other DNA
ccttttaaagtctgtttcat

SEQ ID NO: 38124 - DNA, 20 bp, synthetic construct
  misc_feature 1..20: note = Description of Artificial Sequence: Synthetic oligonucleotide
  misc_feature 1..20: note = Target: SCN10A; (+) strand; PAM type: NRG; PAM sequence: CAG
  source 1..20: mol_type = other DNA
aaactaatttttaattaaac

SEQ ID NO: 38125 - DNA, 20 bp, synthetic construct
  misc_feature 1..20: note = Description of Artificial Sequence: Synthetic oligonucleotide
  misc_feature 1..20: note = Target: SCN10A; (+) strand; PAM type: NRG; PAM sequence: GAG
  source 1..20: mol_type = other DNA
actaatttttaattaaacca

SEQ ID NO: 38126 - DNA, 20 bp, synthetic construct
  misc_feature 1..20: note = Description of Artificial Sequence: Synthetic oligonucleotide
  misc_feature 1..20: note = Target: SCN10A; (+) strand; PAM type: NRG; PAM sequence: GAG
  source 1..20: mol_type = other DNA
taatttttaattaaaccaga

SEQ ID NO: 38127 - DNA, 20 bp, synthetic construct
  misc_feature 1..20: note = Description of Artificial Sequence: Synthetic oligonucleotide
  misc_feature 1..20: note = Target: SCN10A; (+) strand; PAM type: NRG; PAM sequence: TAG
  source 1..20: mol_type = other DNA
gagagctcttcttttaaaat

SEQ ID NO: 38128 - DNA, 20 bp, synthetic construct
  misc_feature 1..20: note = Description of Artificial Sequence: Synthetic oligonucleotide
  misc_feature 1..20: note = Target: SCN10A; (+) strand; PAM type: NRG; PAM sequence: TAG
  source 1..20: mol_type = other DNA
aaaattagcttcatgataaa

SEQ ID NO: 38129 - DNA, 20 bp, synthetic construct
  misc_feature 1..20: note = Description of Artificial Sequence: Synthetic oligonucleotide
  misc_feature 1..20: note = Target: SCN10A; (+) strand; PAM type: NRG; PAM sequence: AAG
  source 1..20: mol_type = other DNA
ttcatgataaatagaacaaa

SEQ ID NO: 38130 - DNA, 20 bp, synthetic construct
  misc_feature 1..20: note = Description of Artificial Sequence: Synthetic oligonucleotide
  misc_feature 1..20: note = Target: SCN10A; (+) strand; PAM type: NRG; PAM sequence: GAG
  source 1..20: mol_type = other DNA
aaatagaacaaaaagtcact

SEQ ID NO: 38131 - DNA, 20 bp, synthetic construct
  misc_feature 1..20: note = Description of Artificial Sequence: Synthetic oligonucleotide
  misc_feature 1..20: note = Target: SCN10A; (+) strand; PAM type: NRG; PAM sequence: TAG
  source 1..20: mol_type = other DNA
ctgagtctttcccatatata

SEQ ID NO: 38132 - DNA, 20 bp, synthetic construct
  misc_feature 1..20: note = Description of Artificial Sequence: Synthetic oligonucleotide
  misc_feature 1..20: note = Target: SCN10A; (+) strand; PAM type: NRG; PAM sequence: AAG
  source 1..20: mol_type = other DNA
tctttcccatatatatagtg

SEQ ID NO: 38133 - DNA, 20 bp, synthetic construct
  misc_feature 1..20: note = Description of Artificial Sequence: Synthetic oligonucleotide
  misc_feature 1..20: note = Target: SCN10A; (+) strand; PAM type: NRG; PAM sequence: TAG
  source 1..20: mol_type = other DNA
gctgacaacttacttattca

SEQ ID NO: 38134 - DNA, 20 bp, synthetic construct
  misc_feature 1..20: note = Description of Artificial Sequence: Synthetic oligonucleotide
  misc_feature 1..20: note = Target: SCN10A; (+) strand; PAM type: NRG; PAM sequence: CAG
  source 1..20: mol_type = other DNA
atgtctgctcgtatacctaa

SEQ ID NO: 38135 - DNA, 20 bp, synthetic construct
  misc_feature 1..20: note = Description of Artificial Sequence: Synthetic oligonucleotide
  misc_feature 1..20: note = Target: SCN10A; (+) strand; PAM type: NRG; PAM sequence: CAG
  source 1..20: mol_type = other DNA
cagtcattgactttaaatgc

SEQ ID NO: 38136 - DNA, 20 bp, synthetic construct
  misc_feature 1..20: note = Description of Artificial Sequence: Synthetic oligonucleotide
  misc_feature 1..20: note = Target: SCN10A; (+) strand; PAM type: NRG; PAM sequence: AAG
  source 1..20: mol_type = other DNA
ttaaatgccagtcacattat

SEQ ID NO: 38137 - DNA, 20 bp, synthetic construct
  misc_feature 1..20: note = Description of Artificial Sequence: Synthetic oligonucleotide
  misc_feature 1..20: note = Target: SCN10A; (+) strand; PAM type: NRG; PAM sequence: AGG
  source 1..20: mol_type = other DNA
taaatgccagtcacattata

SEQ ID NO: 38138 - DNA, 20 bp, synthetic construct
  misc_feature 1..20: note = Description of Artificial Sequence: Synthetic oligonucleotide
  misc_feature 1..20: note = Target: SCN10A; (+) strand; PAM type: NRG; PAM sequence: AAG
  source 1..20: mol_type = other DNA
ggaatgcaatacttctaatt

SEQ ID NO: 38139 - DNA, 20 bp, synthetic construct
  misc_feature 1..20: note = Description of Artificial Sequence: Synthetic oligonucleotide
  misc_feature 1..20: note = Target: SCN10A; (+) strand; PAM type: NRG; PAM sequence: AGG
  source 1..20: mol_type = other DNA
gaatgcaatacttctaatta

SEQ ID NO: 38140 - DNA, 20 bp, synthetic construct
  misc_feature 1..20: note = Description of Artificial Sequence: Synthetic oligonucleotide
  misc_feature 1..20: note = Target: SCN10A; (+) strand; PAM type: NRG; PAM sequence: TGG
  source 1..20: mol_type = other DNA
cacaatatttgtaattgatt

SEQ ID NO: 38141 - DNA, 20 bp, synthetic construct
  misc_feature 1..20: note = Description of Artificial Sequence: Synthetic oligonucleotide
  misc_feature 1..20: note = Target: SCN10A; (+) strand; PAM type: NRG; PAM sequence: TGG
  source 1..20: mol_type = other DNA
tttgtaattgatttggaaac

SEQ ID NO: 38142 - DNA, 20 bp, synthetic construct
  misc_feature 1..20: note = Description of Artificial Sequence: Synthetic oligonucleotide
  misc_feature 1..20: note = Target: SCN10A; (+) strand; PAM type: NRG; PAM sequence: CAG
  source 1..20: mol_type = other DNA
aaactggttttgtatcttac

SEQ ID NO: 38143 - DNA, 20 bp, synthetic construct
  misc_feature 1..20: note = Description of Artificial Sequence: Synthetic oligonucleotide
  misc_feature 1..20: note = Target: SCN10A; (+) strand; PAM type: NRG; PAM sequence: CAG
  source 1..20: mol_type = other DNA
ctggttttgtatcttaccag

SEQ ID NO: 38144 - DNA, 20 bp, synthetic construct
  misc_feature 1..20: note = Description of Artificial Sequence: Synthetic oligonucleotide
  misc_feature 1..20: note = Target: SCN10A; (+) strand; PAM type: NRG; PAM sequence: AGG
  source 1..20: mol_type = other DNA
tggttttgtatcttaccagc

SEQ ID NO: 38145 - DNA, 20 bp, synthetic construct
  misc_feature 1..20: note = Description of Artificial Sequence: Synthetic oligonucleotide
  misc_feature 1..20: note = Target: SCN10A; (+) strand; PAM type: NRG; PAM sequence: GAG
  source 1..20: mol_type = other DNA
gttttgtatcttaccagcag

SEQ ID NO: 38146 - DNA, 20 bp, synthetic construct
  misc_feature 1..20: note = Description of Artificial Sequence: Synthetic oligonucleotide
  misc_feature 1..20: note = Target: SCN10A; (+) strand; PAM type: NRG; PAM sequence: GAG
  source 1..20: mol_type = other DNA
attgtgcttatttttgatat

SEQ ID NO: 38147 - DNA, 20 bp, synthetic construct
  misc_feature 1..20: note = Description of Artificial Sequence: Synthetic oligonucleotide
  misc_feature 1..20: note = Target: SCN10A; (+) strand; PAM type: NRG; PAM sequence: AGG
  source 1..20: mol_type = other DNA
ttgtgcttatttttgatatg

SEQ ID NO: 38148 - DNA, 20 bp, synthetic construct
  misc_feature 1..20: note = Description of Artificial Sequence: Synthetic oligonucleotide
  misc_feature 1..20: note = Target: SCN10A; (+) strand; PAM type: NRG; PAM sequence: TAG
  source 1..20: mol_type = other DNA
gaggatgaatgatgactcta

SEQ ID NO: 38149 - DNA, 20 bp, synthetic construct
  misc_feature 1..20: note = Description of Artificial Sequence: Synthetic oligonucleotide
  misc_feature 1..20: note = Target: SCN10A; (+) strand; PAM type: NRG; PAM sequence: TGG
  source 1..20: mol_type = other DNA
aaattttcacaattttatac

SEQ ID NO: 38150 - DNA, 20 bp, synthetic construct
  misc_feature 1..20: note = Description of Artificial Sequence: Synthetic oligonucleotide
  misc_feature 1..20: note = Target: SCN10A; (+) strand; PAM type: NRG; PAM sequence: GGG
  source 1..20: mol_type = other DNA
aattttcacaattttatact

SEQ ID NO: 38151 - DNA, 20 bp, synthetic construct
  misc_feature 1..20: note = Description of Artificial Sequence: Synthetic oligonucleotide
  misc_feature 1..20: note = Target: SCN10A; (+) strand; PAM type: NRG; PAM sequence: AAG
  source 1..20: mol_type = other DNA
ttcacaattttatactggga

SEQ ID NO: 38152 - DNA, 20 bp, synthetic construct
  misc_feature 1..20: note = Description of Artificial Sequence: Synthetic oligonucleotide
  misc_feature 1..20: note = Target: SCN10A; (+) strand; PAM type: NRG; PAM sequence: TAG
  source 1..20: mol_type = other DNA
aaagccttattttgtgcttg

SEQ ID NO: 38153 - DNA, 20 bp, synthetic construct
  misc_feature 1..20: note = Description of Artificial Sequence: Synthetic oligonucleotide
  misc_feature 1..20: note = Target: SCN10A; (+) strand; PAM type: NRG; PAM sequence: TAG
  source 1..20: mol_type = other DNA
gccttattttgtgcttgtag

SEQ ID NO: 38154 - DNA, 20 bp, synthetic construct
  misc_feature 1..20: note = Description of Artificial Sequence: Synthetic oligonucleotide
  misc_feature 1..20: note = Target: SCN10A; (+) strand; PAM type: NRG; PAM sequence: GAG
  source 1..20: mol_type = other DNA
cttattttgtgcttgtagta

SEQ ID NO: 38155 - DNA, 20 bp, synthetic construct
  misc_feature 1..20: note = Description of Artificial Sequence: Synthetic oligonucleotide
  misc_feature 1..20: note = Target: SCN10A; (+) strand; PAM type: NRG; PAM sequence: TGG
  source 1..20: mol_type = other DNA
ttgtagtagagatattcaat

SEQ ID NO: 38156 - DNA, 20 bp, synthetic construct
  misc_feature 1..20: note = Description of Artificial Sequence: Synthetic oligonucleotide
  misc_feature 1..20: note = Target: SCN10A; (+) strand; PAM type: NRG; PAM sequence: AAG
  source 1..20: mol_type = other DNA
gagatattcaattggtttaa

SEQ ID NO: 38157 - DNA, 20 bp, synthetic construct
  misc_feature 1..20: note = Description of Artificial Sequence: Synthetic oligonucleotide
  misc_feature 1..20: note = Target: SCN10A; (+) strand; PAM type: NRG; PAM sequence: TGG
  source 1..20: mol_type = other DNA
atattcaattggtttaaaag

SEQ ID NO: 38158 - DNA, 20 bp, synthetic construct
  misc_feature 1..20: note = Description of Artificial Sequence: Synthetic oligonucleotide
  misc_feature 1..20: note = Target: SCN10A; (+) strand; PAM type: NRG; PAM sequence: GGG
  source 1..20: mol_type = other DNA
tattcaattggtttaaaagt

SEQ ID NO: 38159 - DNA, 20 bp, synthetic construct
  misc_feature 1..20: note = Description of Artificial Sequence: Synthetic oligonucleotide
  misc_feature 1..20: note = Target: SCN10A; (+) strand; PAM type: NRG; PAM sequence: GGG
  source 1..20: mol_type = other DNA
attcaattggtttaaaagtg

SEQ ID NO: 38160 - DNA, 20 bp, synthetic construct
  misc_feature 1..20: note = Description of Artificial Sequence: Synthetic oligonucleotide
  misc_feature 1..20: note = Target: SCN10A; (+) strand; PAM type: NRG; PAM sequence: TGG
  source 1..20: mol_type = other DNA
gtggggttgataaactttat

SEQ ID NO: 38161 - DNA, 20 bp, synthetic construct
  misc_feature 1..20: note = Description of Artificial Sequence: Synthetic oligonucleotide
  misc_feature 1..20: note = Target: SCN10A; (+) strand; PAM type: NRG; PAM sequence: TGG
  source 1..20: mol_type = other DNA
aactttattggaaaataata

SEQ ID NO: 38162 - DNA, 20 bp, synthetic construct
  misc_feature 1..20: note = Description of Artificial Sequence: Synthetic oligonucleotide
  misc_feature 1..20: note = Target: SCN10A; (+) strand; PAM type: NRG; PAM sequence: AAG
  source 1..20: mol_type = other DNA
tttattggaaaataatatgg

SEQ ID NO: 38163 - DNA, 20 bp, synthetic construct
  misc_feature 1..20: note = Description of Artificial Sequence: Synthetic oligonucleotide
  misc_feature 1..20: note = Target: SCN10A; (+) strand; PAM type: NRG; PAM sequence: TAG
  source 1..20: mol_type = other DNA
aaataatatggaagttttga

SEQ ID NO: 38164 - DNA, 20 bp, synthetic construct
  misc_feature 1..20: note = Description of Artificial Sequence: Synthetic oligonucleotide
  misc_feature 1..20: note = Target: SCN10A; (+) strand; PAM type: NRG; PAM sequence: TAG
  source 1..20: mol_type = other DNA
tcattacttgacaaaaacgt

SEQ ID NO: 38165 - DNA, 20 bp, synthetic construct
  misc_feature 1..20: note = Description of Artificial Sequence: Synthetic oligonucleotide
  misc_feature 1..20: note = Target: SCN10A; (+) strand; PAM type: NRG; PAM sequence: CAG
  source 1..20: mol_type = other DNA
ttacttgacaaaaacgttag

SEQ ID NO: 38166 - DNA, 20 bp, synthetic construct
  misc_feature 1..20: note = Description of Artificial Sequence: Synthetic oligonucleotide
  misc_feature 1..20: note = Target: SCN10A; (+) strand; PAM type: NRG; PAM sequence: TGG
  source 1..20: mol_type = other DNA
aacgttagcagataataaat

SEQ ID NO: 38167 - DNA, 20 bp, synthetic construct
  misc_feature 1..20: note = Description of Artificial Sequence: Synthetic oligonucleotide
  misc_feature 1..20: note = Target: SCN10A; (+) strand; PAM type: NRG; PAM sequence: GGG
  source 1..20: mol_type = other DNA
acgttagcagataataaatt

SEQ ID NO: 38168 - DNA, 20 bp, synthetic construct
  misc_feature 1..20: note = Description of Artificial Sequence: Synthetic oligonucleotide
  misc_feature 1..20: note = Target: SCN10A; (+) strand; PAM type: NRG; PAM sequence: TAG
  source 1..20: mol_type = other DNA
gcagataataaattgggtac

SEQ ID NO: 38169 - DNA, 20 bp, synthetic construct
  misc_feature 1..20: note = Description of Artificial Sequence: Synthetic oligonucleotide
  misc_feature 1..20: note = Target: SCN10A; (+) strand; PAM type: NRG; PAM sequence: AGG
  source 1..20: mol_type = other DNA
cagataataaattgggtact

SEQ ID NO: 38170 - DNA, 20 bp, synthetic construct
  misc_feature 1..20: note = Description of Artificial Sequence: Synthetic oligonucleotide
  misc_feature 1..20: note = Target: SCN10A; (+) strand; PAM type: NRG; PAM sequence: AAG
  source 1..20: mol_type = other DNA
taaattgggtactaggacaa

SEQ ID NO: 38171 - DNA, 20 bp, synthetic construct
  misc_feature 1..20: note = Description of Artificial Sequence: Synthetic oligonucleotide
  misc_feature 1..20: note = Target: SCN10A; (+) strand; PAM type: NRG; PAM sequence: AGG
  source 1..20: mol_type = other DNA
aaattgggtactaggacaaa

SEQ ID NO: 38172 - DNA, 20 bp, synthetic construct
  misc_feature 1..20: note = Description of Artificial Sequence: Synthetic oligonucleotide
  misc_feature 1..20: note = Target: SCN10A; (+) strand; PAM type: NRG; PAM sequence: TGG
  source 1..20: mol_type = other DNA
tactaggacaaaaggatcat

SEQ ID NO: 38173 - DNA, 20 bp, synthetic construct
  misc_feature 1..20: note = Description of Artificial Sequence: Synthetic oligonucleotide
  misc_feature 1..20: note = Target: SCN10A; (+) strand; PAM type: NRG; PAM sequence: TGG
  source 1..20: mol_type = other DNA
attatcattattcattgtca

SEQ ID NO: 38174 - DNA, 20 bp, synthetic construct
  misc_feature 1..20: note = Description of Artificial Sequence: Synthetic oligonucleotide
  misc_feature 1..20: note = Target: SCN10A; (+) strand; PAM type: NRG; PAM sequence: TGG
  source 1..20: mol_type = other DNA
ttttcttatatatttttgtc

SEQ ID NO: 38175 - DNA, 20 bp, synthetic construct
  misc_feature 1..20: note = Description of Artificial Sequence: Synthetic oligonucleotide
  misc_feature 1..20: note = Target: SCN10A; (+) strand; PAM type: NRG; PAM sequence: TGG
  source 1..20: mol_type = other DNA
tatatatttttgtctggttt

SEQ ID NO: 38176 - DNA, 20 bp, synthetic construct
  misc_feature 1..20: note = Description of Artificial Sequence: Synthetic oligonucleotide
  misc_feature 1..20: note = Target: SCN10A; (+) strand; PAM type: NRG; PAM sequence: GGG
  source 1..20: mol_type = other DNA
atatatttttgtctggtttt

SEQ ID NO: 38177 - DNA, 20 bp, synthetic construct
  misc_feature 1..20: note = Description of Artificial Sequence: Synthetic oligonucleotide
  misc_feature 1..20: note = Target: SCN10A; (+) strand; PAM type: NRG; PAM sequence: GAG
  source 1..20: mol_type = other DNA
atatttttgtctggttttgg

SEQ ID NO: 38178 - DNA, 20 bp, synthetic construct
  misc_feature 1..20: note = Description of Artificial Sequence: Synthetic oligonucleotide
  misc_feature 1..20: note = Target: SCN10A; (+) strand; PAM type: NRG; PAM sequence: CAG
  source 1..20: mol_type = other DNA
tccacttgtctcatgacaaa

SEQ ID NO: 38179 - DNA, 20 bp, synthetic construct
  misc_feature 1..20: note = Description of Artificial Sequence: Synthetic oligonucleotide
  misc_feature 1..20: note = Target: SCN10A; (+) strand; PAM type: NRG; PAM sequence: TGG
  source 1..20: mol_type = other DNA
catgctttgtatttttacaa

SEQ ID NO: 38180 - DNA, 20 bp, synthetic construct
  misc_feature 1..20: note = Description of Artificial Sequence: Synthetic oligonucleotide
  misc_feature 1..20: note = Target: SCN10A; (+) strand; PAM type: NRG; PAM sequence: GAG
  source 1..20: mol_type = other DNA
tgctttgtatttttacaatg

SEQ ID NO: 38181 - DNA, 20 bp, synthetic construct
  misc_feature 1..20: note = Description of Artificial Sequence: Synthetic oligonucleotide
  misc_feature 1..20: note = Target: SCN10A; (+) strand; PAM type: NRG; PAM sequence: AGG
  source 1..20: mol_type = other DNA
gctttgtatttttacaatgg

SEQ ID NO: 38182 - DNA, 20 bp, synthetic construct
  misc_feature 1..20: note = Description of Artificial Sequence: Synthetic oligonucleotide
  misc_feature 1..20: note = Target: SCN10A; (+) strand; PAM type: NRG; PAM sequence: TAG
  source 1..20: mol_type = other DNA
tgtgaccttatttcacattg

SEQ ID NO: 38183 - DNA, 20 bp, synthetic construct
  misc_feature 1..20: note = Description of Artificial Sequence: Synthetic oligonucleotide
  misc_feature 1..20: note = Target: SCN10A; (+) strand; PAM type: NRG; PAM sequence: AGG
  source 1..20: mol_type = other DNA
gtgaccttatttcacattgt

SEQ ID NO: 38184 - DNA, 20 bp, synthetic construct
  misc_feature 1..20: note = Description of Artificial Sequence: Synthetic oligonucleotide
  misc_feature 1..20: note = Target: SCN10A; (+) strand; PAM type: NRG; PAM sequence: CAG
  source 1..20: mol_type = other DNA
ttatcattattgttatgctt

SEQ ID NO: 38185 - DNA, 20 bp, synthetic construct
  misc_feature 1..20: note = Description of Artificial Sequence: Synthetic oligonucleotide
  misc_feature 1..20: note = Target: SCN10A; (+) strand; PAM type: NRG; PAM sequence: AAG
  source 1..20: mol_type = other DNA
gcttcagaaaaccactttcg

SEQ ID NO: 38186 - DNA, 20 bp, synthetic construct
  misc_feature 1..20: note = Description of Artificial Sequence: Synthetic oligonucleotide
  misc_feature 1..20: note = Target: SCN10A; (+) strand; PAM type: NRG; PAM sequence: AAG
  source 1..20: mol_type = other DNA
ttgaattgtgatattatgca

SEQ ID NO: 38187 - DNA, 20 bp, synthetic construct
  misc_feature 1..20: note = Description of Artificial Sequence: Synthetic oligonucleotide
  misc_feature 1..20: note = Target: SCN10A; (+) strand; PAM type: NRG; PAM sequence: CAG
  source 1..20: mol_type = other DNA
tgtgatattatgcaaagcga

SEQ ID NO: 38188 - DNA, 20 bp, synthetic construct
  misc_feature 1..20: note = Description of Artificial Sequence: Synthetic oligonucleotide
  misc_feature 1..20: note = Target: SCN10A; (+) strand; PAM type: NRG; PAM sequence: TGG
  source 1..20: mol_type = other DNA
atgcaaagcgacagtaataa

SEQ ID NO: 38189 - DNA, 20 bp, synthetic construct
  misc_feature 1..20: note = Description of Artificial Sequence: Synthetic oligonucleotide
  misc_feature 1..20: note = Target: SCN10A; (+) strand; PAM type: NRG; PAM sequence: AAG
  source 1..20: mol_type = other DNA
acagtaataatggcaaatgc

SEQ ID NO: 38190 - DNA, 20 bp, synthetic construct
  misc_feature 1..20: note = Description of Artificial Sequence: Synthetic oligonucleotide
  misc_feature 1..20: note = Target: SCN10A; (+) strand; PAM type: NRG; PAM sequence: AAG
  source 1..20: mol_type = other DNA
atggcaaatgcaagtctgac

SEQ ID NO: 38191 - DNA, 20 bp, synthetic construct
  misc_feature 1..20: note = Description of Artificial Sequence: Synthetic oligonucleotide
  misc_feature 1..20: note = Target: SCN10A; (+) strand; PAM type: NRG; PAM sequence: CAG
  source 1..20: mol_type = other DNA
tgacaagtgtaaataactgt

SEQ ID NO: 38192 - DNA, 20 bp, synthetic construct
  misc_feature 1..20: note = Description of Artificial Sequence: Synthetic oligonucleotide
  misc_feature 1..20: note = Target: SCN10A; (+) strand; PAM type: NRG; PAM sequence: AGG
  source 1..20: mol_type = other DNA
gacaagtgtaaataactgtc

SEQ ID NO: 38193 - DNA, 20 bp, synthetic construct
  misc_feature 1..20: note = Description of Artificial Sequence: Synthetic oligonucleotide
  misc_feature 1..20: note = Target: SCN10A; (+) strand; PAM type: NRG; PAM sequence: TAG
  source 1..20: mol_type = other DNA
caggtgacaataaaatacat

SEQ ID NO: 38194 - DNA, 20 bp, synthetic construct
  misc_feature 1..20: note = Description of Artificial Sequence: Synthetic oligonucleotide
  misc_feature 1..20: note = Target: SCN10A; (+) strand; PAM type: NRG; PAM sequence: AAG
  source 1..20: mol_type = other DNA
gacaataaaatacattagtc

SEQ ID NO: 38195 - DNA, 20 bp, synthetic construct
  misc_feature 1..20: note = Description of Artificial Sequence: Synthetic oligonucleotide
  misc_feature 1..20: note = Target: SCN10A; (+) strand; PAM type: NRG; PAM sequence: CAG
  source 1..20: mol_type = other DNA
ttaaccattatgaatgaaat

SEQ ID NO: 38196 - DNA, 20 bp, synthetic construct
  misc_feature 1..20: note = Description of Artificial Sequence: Synthetic oligonucleotide
  misc_feature 1..20: note = Target: SCN10A; (+) strand; PAM type: NRG; PAM sequence: AAG
  source 1..20: mol_type = other DNA
atgaatgaaatcagtttttg

SEQ ID NO: 38197 - DNA, 20 bp, synthetic construct
  misc_feature 1..20: note = Description of Artificial Sequence: Synthetic oligonucleotide
  misc_feature 1..20: note = Target: SCN10A; (+) strand; PAM type: NRG; PAM sequence: AAG
  source 1..20: mol_type = other DNA
actgtttttgaaaacataaa

SEQ ID NO: 38198 - DNA, 20 bp, synthetic construct
  misc_feature 1..20: note = Description of Artificial Sequence: Synthetic oligonucleotide
  misc_feature 1..20: note = Target: SCN10A; (+) strand; PAM type: NRG; PAM sequence: TAG
  source 1..20: mol_type = other DNA
tttttgaaaacataaaaagt

SEQ ID NO: 38199 - DNA, 20 bp, synthetic construct
  misc_feature 1..20: note = Description of Artificial Sequence: Synthetic oligonucleotide
  misc_feature 1..20: note = Target: SCN10A; (+) strand; PAM type: NRG; PAM sequence: TAG
  source 1..20: mol_type = other DNA
taataattaatcttacatgt

SEQ ID NO: 38200 - DNA, 20 bp, synthetic construct
  misc_feature 1..20: note = Description of Artificial Sequence: Synthetic oligonucleotide
  misc_feature 1..20: note = Target: SCN10A; (+) strand; PAM type: NRG; PAM sequence: TAG
  source 1..20: mol_type = other DNA
attttaaaattatatgtgca

SEQ ID NO: 38201 - DNA, 20 bp, synthetic construct
  misc_feature 1..20: note = Description of Artificial Sequence: Synthetic oligonucleotide
  misc_feature 1..20: note = Target: SCN10A; (+) strand; PAM type: NRG; PAM sequence: GAG
  source 1..20: mol_type = other DNA
tttaaaattatatgtgcata

SEQ ID NO: 38202 - DNA, 20 bp, synthetic construct
  misc_feature 1..20: note = Description of Artificial Sequence: Synthetic oligonucleotide
  misc_feature 1..20: note = Target: SCN10A; (+) strand; PAM type: NRG; PAM sequence: TAG
  source 1..20: mol_type = other DNA
tatatgtgcatagagatcct

SEQ ID NO: 38203 - DNA, 20 bp, synthetic construct
  misc_feature 1..20: note = Description of Artificial Sequence: Synthetic oligonucleotide
  misc_feature 1..20: note = Target: SCN10A; (+) strand; PAM type: NRG; PAM sequence: GAG
  source 1..20: mol_type = other DNA
agatccttagatcacttgtt

SEQ ID NO: 38204 - DNA, 20 bp, synthetic construct
  misc_feature 1..20: note = Description of Artificial Sequence: Synthetic oligonucleotide
  misc_feature 1..20: note = Target: SCN10A; (+) strand; PAM type: NRG; PAM sequence: TAG
  source 1..20: mol_type = other DNA
tcacttgttgagaaacattg

SEQ ID NO: 38205 - DNA, 20 bp, synthetic construct
  misc_feature 1..20: note = Description of Artificial Sequence: Synthetic oligonucleotide
  misc_feature 1..20: note = Target: SCN10A; (+) strand; PAM type: NRG; PAM sequence: AGG
  source 1..20: mol_type = other DNA
cacttgttgagaaacattgt

SEQ ID NO: 38206 - DNA, 20 bp, synthetic construct
  misc_feature 1..20: note = Description of Artificial Sequence: Synthetic oligonucleotide
  misc_feature 1..20: note = Target: SCN10A; (+) strand; PAM type: NRG; PAM sequence: GAG
  source 1..20: mol_type = other DNA
cttgttgagaaacattgtag

SEQ ID NO: 38207 - DNA, 20 bp, synthetic construct
  misc_feature 1..20: note = Description of Artificial Sequence: Synthetic oligonucleotide
  misc_feature 1..20: note = Target: SCN10A; (+) strand; PAM type: NRG; PAM sequence: TGG
  source 1..20: mol_type = other DNA
ttgagaaacattgtaggaga

SEQ ID NO: 38208 - DNA, 20 bp, synthetic construct
  misc_feature 1..20: note = Description of Artificial Sequence: Synthetic oligonucleotide
  misc_feature 1..20: note = Target: SCN10A; (+) strand; PAM type: NRG; PAM sequence: GAG
  source 1..20: mol_type = other DNA
gagaaacattgtaggagatg

SEQ ID NO: 38209 - DNA, 20 bp, synthetic construct
  misc_feature 1..20: note = Description of Artificial Sequence: Synthetic oligonucleotide
  misc_feature 1..20: note = Target: SCN10A; (+) strand; PAM type: NRG; PAM sequence: GAG
  source 1..20: mol_type = other DNA
gaaacattgtaggagatgga

SEQ ID NO: 38210 - DNA, 20 bp, synthetic construct
  misc_feature 1..20: note = Description of Artificial Sequence: Synthetic oligonucleotide
  misc_feature 1..20: note = Target: SCN10A; (+) strand; PAM type: NRG; PAM sequence: GAG
  source 1..20: mol_type = other DNA
aacattgtaggagatggaga

SEQ ID NO: 38211 - DNA, 20 bp, synthetic construct
  misc_feature 1..20: note = Description of Artificial Sequence: Synthetic oligonucleotide
  misc_feature 1..20: note = Target: SCN10A; (+) strand; PAM type: NRG; PAM sequence: AAG
  source 1..20: mol_type = other DNA
atgaattgctctgctaaaca

SEQ ID NO: 38212 - DNA, 20 bp, synthetic construct
  misc_feature 1..20: note = Description of Artificial Sequence: Synthetic oligonucleotide
  misc_feature 1..20: note = Target: SCN10A; (+) strand; PAM type: NRG; PAM sequence: AAG
  source 1..20: mol_type = other DNA
attgctctgctaaacaaagt

SEQ ID NO: 38213 - DNA, 20 bp, synthetic construct
  misc_feature 1..20: note = Description of Artificial Sequence: Synthetic oligonucleotide
  misc_feature 1..20: note = Target: SCN10A; (+) strand; PAM type: NRG; PAM sequence: AAG
  source 1..20: mol_type = other DNA
ctgctaaacaaagtaagaat

SEQ ID NO: 38214 - DNA, 20 bp, synthetic construct
  misc_feature 1..20: note = Description of Artificial Sequence: Synthetic oligonucleotide
  misc_feature 1..20: note = Target: SCN10A; (+) strand; PAM type: NRG; PAM sequence: TGG
  source 1..20: mol_type = other DNA
taaacaaagtaagaataagt

SEQ ID NO: 38215 - DNA, 20 bp, synthetic construct
  misc_feature 1..20: note = Description of Artificial Sequence: Synthetic oligonucleotide
  misc_feature 1..20: note = Target: SCN10A; (+) strand; PAM type: NRG; PAM sequence: GAG
  source 1..20: mol_type = other DNA
aacaaagtaagaataagttg

SEQ ID NO: 38216 - DNA, 20 bp, synthetic construct
  misc_feature 1..20: note = Description of Artificial Sequence: Synthetic oligonucleotide
  misc_feature 1..20: note = Target: SCN10A; (+) strand; PAM type: NRG; PAM sequence: CAG
  source 1..20: mol_type = other DNA
taagaataagttggagttcc

SEQ ID NO: 38217 - DNA, 20 bp, synthetic construct
  misc_feature 1..20: note = Description of Artificial Sequence: Synthetic oligonucleotide
  misc_feature 1..20: note = Target: SCN10A; (+) strand; PAM type: NRG; PAM sequence: AGG
  source 1..20: mol_type = other DNA
aagaataagttggagttccc

SEQ ID NO: 38218 - DNA, 20 bp, synthetic construct
  misc_feature 1..20: note = Description of Artificial Sequence: Synthetic oligonucleotide
  misc_feature 1..20: note = Target: SCN10A; (+) strand; PAM type: NRG; PAM sequence: GGG
  source 1..20: mol_type = other DNA
agaataagttggagttccca

SEQ ID NO: 38219 - DNA, 20 bp, synthetic construct
  misc_feature 1..20: note = Description of Artificial Sequence: Synthetic oligonucleotide
  misc_feature 1..20: note = Target: SCN10A; (+) strand; PAM type: NRG; PAM sequence: GAG
  source 1..20: mol_type = other DNA
tggagttcccagggacaatt

SEQ ID NO: 38220 - DNA, 20 bp, synthetic construct
  misc_feature 1..20: note = Description of Artificial Sequence: Synthetic oligonucleotide
  misc_feature 1..20: note = Target: SCN10A; (+) strand; PAM type: NRG; PAM sequence: AGG
  source 1..20: mol_type = other DNA
ggagttcccagggacaattg

SEQ ID NO: 38221 - DNA, 20 bp, synthetic construct
  misc_feature 1..20: note = Description of Artificial Sequence: Synthetic oligonucleotide
  misc_feature 1..20: note = Target: SCN10A; (+) strand; PAM type: NRG; PAM sequence: GAG
  source 1..20: mol_type = other DNA
agttcccagggacaattgag

SEQ ID NO: 38222 - DNA, 20 bp, synthetic construct
  misc_feature 1..20: note = Description of Artificial Sequence: Synthetic oligonucleotide
  misc_feature 1..20: note = Target: SCN10A; (+) strand; PAM type: NRG; PAM sequence: GAG
  source 1..20: mol_type = other DNA
ttcccagggacaattgagga

SEQ ID NO: 38223 - DNA, 20 bp, synthetic construct
  misc_feature 1..20: note = Description of Artificial Sequence: Synthetic oligonucleotide
  misc_feature 1..20: note = Target: SCN10A; (+) strand; PAM type: NRG; PAM sequence: GAG
  source 1..20: mol_type = other DNA
cccagggacaattgaggaga

SEQ ID NO: 38224 - DNA, 20 bp, synthetic construct
  misc_feature 1..20: note = Description of Artificial Sequence: Synthetic oligonucleotide
  misc_feature 1..20: note = Target: SCN10A; (+) strand; PAM type: NRG; PAM sequence: TGG
  source 1..20: mol_type = other DNA
gggacaattgaggagagagt

SEQ ID NO: 38225 - DNA, 20 bp, synthetic construct
  misc_feature 1..20: note = Description of Artificial Sequence: Synthetic oligonucleotide
  misc_feature 1..20: note = Target: SCN10A; (+) strand; PAM type: NRG; PAM sequence: AAG
  source 1..20: mol_type = other DNA
gagagagttggaacatccca

SEQ ID NO: 38226 - DNA, 20 bp, synthetic construct
  misc_feature 1..20: note = Description of Artificial Sequence: Synthetic oligonucleotide
  misc_feature 1..20: note = Target: SCN10A; (+) strand; PAM type: NRG; PAM sequence: AGG
  source 1..20: mol_type = other DNA
agagagttggaacatcccaa

SEQ ID NO: 38227 - DNA, 20 bp, synthetic construct
  misc_feature 1..20: note = Description of Artificial Sequence: Synthetic oligonucleotide
  misc_feature 1..20: note = Target: SCN10A; (+) strand; PAM type: NRG; PAM sequence: GGG
  source 1..20: mol_type = other DNA
gagagttggaacatcccaaa

SEQ ID NO: 38228 - DNA, 20 bp, synthetic construct
  misc_feature 1..20: note = Description of Artificial Sequence: Synthetic oligonucleotide
  misc_feature 1..20: note = Target: SCN10A; (+) strand; PAM type: NRG; PAM sequence: CAG
  source 1..20: mol_type = other DNA
gttggaacatcccaaaggga

SEQ ID NO: 38229 - DNA, 20 bp, synthetic construct
  misc_feature 1..20: note = Description of Artificial Sequence: Synthetic oligonucleotide
  misc_feature 1..20: note = Target: SCN10A; (+) strand; PAM type: NRG; PAM sequence: AAG
  source 1..20: mol_type = other DNA
cccaaagggacagtttatga

SEQ ID NO: 38230 - DNA, 20 bp, synthetic construct
  misc_feature 1..20: note = Description of Artificial Sequence: Synthetic oligonucleotide
  misc_feature 1..20: note = Target: SCN10A; (+) strand; PAM type: NRG; PAM sequence: AAG
  source 1..20: mol_type = other DNA
aaagggacagtttatgaaag

SEQ ID NO: 38231 - DNA, 20 bp, synthetic construct
  misc_feature 1..20: note = Description of Artificial Sequence: Synthetic oligonucleotide
  misc_feature 1..20: note = Target: SCN10A; (+) strand; PAM type: NRG; PAM sequence: CAG
  source 1..20: mol_type = other DNA
cagtttatgaaagaagatta

SEQ ID NO: 38232 - DNA, 20 bp, synthetic construct
  misc_feature 1..20: note = Description of Artificial Sequence: Synthetic oligonucleotide
  misc_feature 1..20: note = Target: SCN10A; (+) strand; PAM type: NRG; PAM sequence: AGG
  source 1..20: mol_type = other DNA
agtttatgaaagaagattac

SEQ ID NO: 38233 - DNA, 20 bp, synthetic construct
  misc_feature 1..20: note = Description of Artificial Sequence: Synthetic oligonucleotide
  misc_feature 1..20: note = Target: SCN10A; (+) strand; PAM type: NRG; PAM sequence: CAG
  source 1..20: mol_type = other DNA
tatgaaagaagattacaggc

SEQ ID NO: 38234 - DNA, 20 bp, synthetic construct
  misc_feature 1..20: note = Description of Artificial Sequence: Synthetic oligonucleotide
  misc_feature 1..20: note = Target: SCN10A; (+) strand; PAM type: NRG; PAM sequence: TAG
  source 1..20: mol_type = other DNA
gattacaggccagcctcatt

SEQ ID NO: 38235 - DNA, 20 bp, synthetic construct
  misc_feature 1..20: note = Description of Artificial Sequence: Synthetic oligonucleotide
  misc_feature 1..20: note = Target: SCN10A; (+) strand; PAM type: NRG; PAM sequence: TAG
  source 1..20: mol_type = other DNA
gccagcctcatttagcaaaa

SEQ ID NO: 38236 - DNA, 20 bp, synthetic construct
  misc_feature 1..20: note = Description of Artificial Sequence: Synthetic oligonucleotide
  misc_feature 1..20: note = Target: SCN10A; (+) strand; PAM type: NRG; PAM sequence: CAG
  source 1..20: mol_type = other DNA
gaaatacacctaattgaatc

SEQ ID NO: 38237 - DNA, 20 bp, synthetic construct
  misc_feature 1..20: note = Description of Artificial Sequence: Synthetic oligonucleotide
  misc_feature 1..20: note = Target: SCN10A; (+) strand; PAM type: NRG; PAM sequence: CAG
  source 1..20: mol_type = other DNA
attgaatccagcaaaatgat

SEQ ID NO: 38238 - DNA, 20 bp, synthetic construct
  misc_feature 1..20: note = Description of Artificial Sequence: Synthetic oligonucleotide
  misc_feature 1..20: note = Target: SCN10A; (+) strand; PAM type: NRG; PAM sequence: TGG
  source 1..20: mol_type = other DNA
aatccagcaaaatgatcagc

SEQ ID NO: 38239 - DNA, 20 bp, synthetic construct
  misc_feature 1..20: note = Description of Artificial Sequence: Synthetic oligonucleotide
  misc_feature 1..20: note = Target: SCN10A; (+) strand; PAM type: NRG; PAM sequence: TAG
  source 1..20: mol_type = other DNA
tcagctggaaccattaaaaa

SEQ ID NO: 38240 - DNA, 20 bp, synthetic construct
  misc_feature 1..20: note = Description of Artificial Sequence: Synthetic oligonucleotide
  misc_feature 1..20: note = Target: SCN10A; (+) strand; PAM type: NRG; PAM sequence: TAG
  source 1..20: mol_type = other DNA
aaatagactaacaaacctgt

SEQ ID NO: 38241 - DNA, 20 bp, synthetic construct
  misc_feature 1..20: note = Description of Artificial Sequence: Synthetic oligonucleotide
  misc_feature 1..20: note = Target: SCN10A; (+) strand; PAM type: NRG; PAM sequence: CAG
  source 1..20: mol_type = other DNA
ctaacaaacctgttagttta

SEQ ID NO: 38242 - DNA, 20 bp, synthetic construct
  misc_feature 1..20: note = Description of Artificial Sequence: Synthetic oligonucleotide
  misc_feature 1..20: note = Target: SCN10A; (+) strand; PAM type: NRG; PAM sequence: CAG
  source 1..20: mol_type = other DNA
ttacagatttactatactaa

SEQ ID NO: 38243 - DNA, 20 bp, synthetic construct
  misc_feature 1..20: note = Description of Artificial Sequence: Synthetic oligonucleotide
  misc_feature 1..20: note = Target: SCN10A; (+) strand; PAM type: NRG; PAM sequence: AAG
  source 1..20: mol_type = other DNA
tttactatactaacagatga

SEQ ID NO: 38244 - DNA, 20 bp, synthetic construct
  misc_feature 1..20: note = Description of Artificial Sequence: Synthetic oligonucleotide
  misc_feature 1..20: note = Target: SCN10A; (+) strand; PAM type: NRG; PAM sequence: TAG
  source 1..20: mol_type = other DNA
aataaatataaaaatactga

SEQ ID NO: 38245 - DNA, 20 bp, synthetic construct
  misc_feature 1..20: note = Description of Artificial Sequence: Synthetic oligonucleotide
  misc_feature 1..20: note = Target: SCN10A; (+) strand; PAM type: NRG; PAM sequence: AAG
  source 1..20: mol_type = other DNA
aaatataaaaatactgatag

SEQ ID NO: 38246 - DNA, 20 bp, synthetic construct
  misc_feature 1..20: note = Description of Artificial Sequence: Synthetic oligonucleotide
  misc_feature 1..20: note = Target: SCN10A; (+) strand; PAM type: NRG; PAM sequence: AAG
  source 1..20: mol_type = other DNA
ccaacacccattcatgatga

SEQ ID NO: 38247 - DNA, 20 bp, synthetic construct
  misc_feature 1..20: note = Description of Artificial Sequence: Synthetic oligonucleotide
  misc_feature 1..20: note = Target: SCN10A; (+) strand; PAM type: NRG; PAM sequence: AAG
  source 1..20: mol_type = other DNA
tgatgaaagtctcaacaaac

SEQ ID NO: 38248 - DNA, 20 bp, synthetic construct
  misc_feature 1..20: note = Description of Artificial Sequence: Synthetic oligonucleotide
  misc_feature 1..20: note = Target: SCN10A; (+) strand; PAM type: NRG; PAM sequence: TGG
  source 1..20: mol_type = other DNA
aagtctcaacaaacaagaaa

SEQ ID NO: 38249 - DNA, 20 bp, synthetic construct
  misc_feature 1..20: note = Description of Artificial Sequence: Synthetic oligonucleotide
  misc_feature 1..20: note = Target: SCN10A; (+) strand; PAM type: NRG; PAM sequence: AAG
  source 1..20: mol_type = other DNA
atggaaaaaattgatataaa

SEQ ID NO: 38250 - DNA, 20 bp, synthetic construct
  misc_feature 1..20: note = Description of Artificial Sequence: Synthetic oligonucleotide
  misc_feature 1..20: note = Target: SCN10A; (+) strand; PAM type: NRG; PAM sequence: GAG
  source 1..20: mol_type = other DNA
ttgatataaaaagtaattat

SEQ ID NO: 38251 - DNA, 20 bp, synthetic construct
  misc_feature 1..20: note = Description of Artificial Sequence: Synthetic oligonucleotide
  misc_feature 1..20: note = Target: SCN10A; (+) strand; PAM type: NRG; PAM sequence: TAG
  source 1..20: mol_type = other DNA
gactctcataaacatcataa

SEQ ID NO: 38252 - DNA, 20 bp, synthetic construct
  misc_feature 1..20: note = Description of Artificial Sequence: Synthetic oligonucleotide
  misc_feature 1..20: note = Target: SCN10A; (+) strand; PAM type: NRG; PAM sequence: TAG
  source 1..20: mol_type = other DNA
acatcataatagtgaaacat

SEQ ID NO: 38253 - DNA, 20 bp, synthetic construct
  misc_feature 1..20: note = Description of Artificial Sequence: Synthetic oligonucleotide
  misc_feature 1..20: note = Target: SCN10A; (+) strand; PAM type: NRG; PAM sequence: AAG
  source 1..20: mol_type = other DNA
tcataatagtgaaacattag

SEQ ID NO: 38254 - DNA, 20 bp, synthetic construct
  misc_feature 1..20: note = Description of Artificial Sequence: Synthetic oligonucleotide
  misc_feature 1..20: note = Target: SCN10A; (+) strand; PAM type: NRG; PAM sequence: AAG
  source 1..20: mol_type = other DNA
gaagcacacactttaaaatc

SEQ ID NO: 38255 - DNA, 20 bp, synthetic construct
  misc_feature 1..20: note = Description of Artificial Sequence: Synthetic oligonucleotide
  misc_feature 1..20: note = Target: SCN10A; (+) strand; PAM type: NRG; PAM sequence: GAG
  source 1..20: mol_type = other DNA
agcacacactttaaaatcaa

SEQ ID NO: 38256 - DNA, 20 bp, synthetic construct
  misc_feature 1..20: note = Description of Artificial Sequence: Synthetic oligonucleotide
  misc_feature 1..20: note = Target: SCN10A; (+) strand; PAM type: NRG; PAM sequence: TAG
  source 1..20: mol_type = other DNA
aataaatatgctcactgtca

SEQ ID NO: 38257 - DNA, 20 bp, synthetic construct
  misc_feature 1..20: note = Description of Artificial Sequence: Synthetic oligonucleotide
  misc_feature 1..20: note = Target: SCN10A; (+) strand; PAM type: NRG; PAM sequence: AAG
  source 1..20: mol_type = other DNA
tttgaattaccatcttgttg

SEQ ID NO: 38258 - DNA, 20 bp, synthetic construct
  misc_feature 1..20: note = Description of Artificial Sequence: Synthetic oligonucleotide
  misc_feature 1..20: note = Target: SCN10A; (+) strand; PAM type: NRG; PAM sequence: AGG
  source 1..20: mol_type = other DNA
ttgaattaccatcttgttga

SEQ ID NO: 38259 - DNA, 20 bp, synthetic construct
  misc_feature 1..20: note = Description of Artificial Sequence: Synthetic oligonucleotide
  misc_feature 1..20: note = Target: SCN10A; (+) strand; PAM type: NRG; PAM sequence: CGG
  source 1..20: mol_type = other DNA
taccatcttgttgaaggtcc

SEQ ID NO: 38260 - DNA, 20 bp, synthetic construct
  misc_feature 1..20: note = Description of Artificial Sequence: Synthetic oligonucleotide
  misc_feature 1..20: note = Target: SCN10A; (+) strand; PAM type: NRG; PAM sequence: AAG
  source 1..20: mol_type = other DNA
aaggtcccggccaattcaat

SEQ ID NO: 38261 - DNA, 20 bp, synthetic construct
  misc_feature 1..20: note = Description of Artificial Sequence: Synthetic oligonucleotide
  misc_feature 1..20: note = Target: SCN10A; (+) strand; PAM type: NRG; PAM sequence: CAG
  source 1..20: mol_type = other DNA
tcccggccaattcaataaga

SEQ ID NO: 38262 - DNA, 20 bp, synthetic construct
  misc_feature 1..20: note = Description of Artificial Sequence: Synthetic oligonucleotide
  misc_feature 1..20: note = Target: SCN10A; (+) strand; PAM type: NRG; PAM sequence: AGG
  source 1..20: mol_type = other DNA
cccggccaattcaataagac

SEQ ID NO: 38263 - DNA, 20 bp, synthetic construct
  misc_feature 1..20: note = Description of Artificial Sequence: Synthetic oligonucleotide
  misc_feature 1..20: note = Target: SCN10A; (+) strand; PAM type: NRG; PAM sequence: AAG
  source 1..20: mol_type = other DNA
ataagacaggaaaaataaaa

SEQ ID NO: 38264 - DNA, 20 bp, synthetic construct
  misc_feature 1..20: note = Description of Artificial Sequence: Synthetic oligonucleotide
  misc_feature 1..20: note = Target: SCN10A; (+) strand; PAM type: NRG; PAM sequence: TGG
  source 1..20: mol_type = other DNA
agacaggaaaaataaaaaag

SEQ ID NO: 38265 - DNA, 20 bp, synthetic construct
  misc_feature 1..20: note = Description of Artificial Sequence: Synthetic oligonucleotide
  misc_feature 1..20: note = Target: SCN10A; (+) strand; PAM type: NRG; PAM sequence: AAG
  source 1..20: mol_type = other DNA
gaaaaataaaaaagtggtat

SEQ ID NO: 38266 - DNA, 20 bp, synthetic construct
  misc_feature 1..20: note = Description of Artificial Sequence: Synthetic oligonucleotide
  misc_feature 1..20: note = Target: SCN10A; (+) strand; PAM type: NRG; PAM sequence: AAG
  source 1..20: mol_type = other DNA
aaagtggtataagaatcata

SEQ ID NO: 38267 - DNA, 20 bp, synthetic construct
  misc_feature 1..20: note = Description of Artificial Sequence: Synthetic oligonucleotide
  misc_feature 1..20: note = Target: SCN10A; (+) strand; PAM type: NRG; PAM sequence: AGG
  source 1..20: mol_type = other DNA
aagtggtataagaatcataa

SEQ ID NO: 38268 - DNA, 20 bp, synthetic construct
  misc_feature 1..20: note = Description of Artificial Sequence: Synthetic oligonucleotide
  misc_feature 1..20: note = Target: SCN10A; (+) strand; PAM type: NRG; PAM sequence: AAG
  source 1..20: mol_type = other DNA
tggtataagaatcataaagg

SEQ ID NO: 38269 - DNA, 20 bp, synthetic construct
  misc_feature 1..20: note = Description of Artificial Sequence: Synthetic oligonucleotide
  misc_feature 1..20: note = Target: SCN10A; (+) strand; PAM type: NRG; PAM sequence: AAG
  source 1..20: mol_type = other DNA
agaatcataaaggaagaaac

SEQ ID NO: 38270 - DNA, 20 bp, synthetic construct
  misc_feature 1..20: note = Description of Artificial Sequence: Synthetic oligonucleotide
  misc_feature 1..20: note = Target: SCN10A; (+) strand; PAM type: NRG; PAM sequence: CAG
  source 1..20: mol_type = other DNA
aacaagtttgtcattatttg

SEQ ID NO: 38271 - DNA, 20 bp, synthetic construct
  misc_feature 1..20: note = Description of Artificial Sequence: Synthetic oligonucleotide
  misc_feature 1..20: note = Target: SCN10A; (+) strand; PAM type: NRG; PAM sequence: TAG
  source 1..20: mol_type = other DNA
agataatataactgtctaaa

SEQ ID NO: 38272 - DNA, 20 bp, synthetic construct
  misc_feature 1..20: note = Description of Artificial Sequence: Synthetic oligonucleotide
  misc_feature 1..20: note = Target: SCN10A; (+) strand; PAM type: NRG; PAM sequence: AGG
  source 1..20: mol_type = other DNA
gataatataactgtctaaat

SEQ ID NO: 38273 - DNA, 20 bp, synthetic construct
  misc_feature 1..20: note = Description of Artificial Sequence: Synthetic oligonucleotide
  misc_feature 1..20: note = Target: SCN10A; (+) strand; PAM type: NRG; PAM sequence: AAG
  source 1..20: mol_type = other DNA
aatataactgtctaaatagg

SEQ ID NO: 38274 - DNA, 20 bp, synthetic construct
  misc_feature 1..20: note = Description of Artificial Sequence: Synthetic oligonucleotide
  misc_feature 1..20: note = Target: SCN10A; (+) strand; PAM type: NRG; PAM sequence: AAG
  source 1..20: mol_type = other DNA
actgtctaaataggaagtcc

SEQ ID NO: 38275 - DNA, 20 bp, synthetic construct
  misc_feature 1..20: note = Description of Artificial Sequence: Synthetic oligonucleotide
  misc_feature 1..20: note = Target: SCN10A; (+) strand; PAM type: NRG; PAM sequence: AGG
  source 1..20: mol_type = other DNA
ctgtctaaataggaagtcca

SEQ ID NO: 38276 - DNA, 20 bp, synthetic construct
  misc_feature 1..20: note = Description of Artificial Sequence: Synthetic oligonucleotide
  misc_feature 1..20: note = Target: SCN10A; (+) strand; PAM type: NRG; PAM sequence: GGG
  source 1..20: mol_type = other DNA
tgtctaaataggaagtccaa

SEQ ID NO: 38277 - DNA, 20 bp, synthetic construct
  misc_feature 1..20: note = Description of Artificial Sequence: Synthetic oligonucleotide
  misc_feature 1..20: note = Target: SCN10A; (+) strand; PAM type: NRG; PAM sequence: CAG
  source 1..20: mol_type = other DNA
aggaagtccaagggaatcta

SEQ ID NO: 38278 - DNA, 20 bp, synthetic construct
  misc_feature 1..20: note = Description of Artificial Sequence: Synthetic oligonucleotide
  misc_feature 1..20: note = Target: SCN10A; (+) strand; PAM type: NRG; PAM sequence: AAG
  source 1..20: mol_type = other DNA
ctacagaaaaatttaacttt

SEQ ID NO: 38279 - DNA, 20 bp, synthetic construct
  misc_feature 1..20: note = Description of Artificial Sequence: Synthetic oligonucleotide
  misc_feature 1..20: note = Target: SCN10A; (+) strand; PAM type: NRG; PAM sequence: AGG
  source 1..20: mol_type = other DNA
tacagaaaaatttaacttta

SEQ ID NO: 38280 - DNA, 20 bp, synthetic construct
  misc_feature 1..20: note = Description of Artificial Sequence: Synthetic oligonucleotide
  misc_feature 1..20: note = Target: SCN10A; (+) strand; PAM type: NRG; PAM sequence: GAG
  source 1..20: mol_type = other DNA
cagaaaaatttaactttaag

SEQ ID NO: 38281 - DNA, 20 bp, synthetic construct
  misc_feature 1..20: note = Description of Artificial Sequence: Synthetic oligonucleotide
  misc_feature 1..20: note = Target: SCN10A; (+) strand; PAM type: NRG; PAM sequence: CAG
  source 1..20: mol_type = other DNA
aaatttaactttaaggagct

SEQ ID NO: 38282 - DNA, 20 bp, synthetic construct
  misc_feature 1..20: note = Description of Artificial Sequence: Synthetic oligonucleotide
  misc_feature 1..20: note = Target: SCN10A; (+) strand; PAM type: NRG; PAM sequence: CAG
  source 1..20: mol_type = other DNA
tttaactttaaggagctcag

SEQ ID NO: 38283 - DNA, 20 bp, synthetic construct
  misc_feature 1..20: note = Description of Artificial Sequence: Synthetic oligonucleotide
  misc_feature 1..20: note = Target: SCN10A; (+) strand; PAM type: NRG; PAM sequence: AGG
  source 1..20: mol_type = other DNA
ttaactttaaggagctcagc

SEQ ID NO: 38284 - DNA, 20 bp, synthetic construct
  misc_feature 1..20: note = Description of Artificial Sequence: Synthetic oligonucleotide
  misc_feature 1..20: note = Target: SCN10A; (+) strand; PAM type: NRG; PAM sequence: GGG
  source 1..20: mol_type = other DNA
taactttaaggagctcagca

SEQ ID NO: 38285 - DNA, 20 bp, synthetic construct
  misc_feature 1..20: note = Description of Artificial Sequence: Synthetic oligonucleotide
  misc_feature 1..20: note = Target: SCN10A; (+) strand; PAM type: NRG; PAM sequence: TGG
  source 1..20: mol_type = other DNA
aaggagctcagcagggttgc

SEQ ID NO: 38286 - DNA, 20 bp, synthetic construct
  misc_feature 1..20: note = Description of Artificial Sequence: Synthetic oligonucleotide
  misc_feature 1..20: note = Target: SCN10A; (+) strand; PAM type: NRG; PAM sequence: TAG
  source 1..20: mol_type = other DNA
ctggatgcaaaatcactata

SEQ ID NO: 38287 - DNA, 20 bp, synthetic construct
  misc_feature 1..20: note = Description of Artificial Sequence: Synthetic oligonucleotide
  misc_feature 1..20: note = Target: SCN10A; (+) strand; PAM type: NRG; PAM sequence: AAG
  source 1..20: mol_type = other DNA
atatagaaattaataatatt

SEQ ID NO: 38288 - DNA, 20 bp, synthetic construct
  misc_feature 1..20: note = Description of Artificial Sequence: Synthetic oligonucleotide
  misc_feature 1..20: note = Target: SCN10A; (+) strand; PAM type: NRG; PAM sequence: CAG
  source 1..20: mol_type = other DNA
agaaattaataatattaaga

SEQ ID NO: 38289 - DNA, 20 bp, synthetic construct
  misc_feature 1..20: note = Description of Artificial Sequence: Synthetic oligonucleotide
  misc_feature 1..20: note = Target: SCN10A; (+) strand; PAM type: NRG; PAM sequence: TAG
  source 1..20: mol_type = other DNA
ttaataatattaagacagtt

SEQ ID NO: 38290 - DNA, 20 bp, synthetic construct
  misc_feature 1..20: note = Description of Artificial Sequence: Synthetic oligonucleotide
  misc_feature 1..20: note = Target: SCN10A; (+) strand; PAM type: NRG; PAM sequence: AAG
  source 1..20: mol_type = other DNA
taagacagtttagcaataat

SEQ ID NO: 38291 - DNA, 20 bp, synthetic construct
  misc_feature 1..20: note = Description of Artificial Sequence: Synthetic oligonucleotide
  misc_feature 1..20: note = Target: SCN10A; (+) strand; PAM type: NRG; PAM sequence: TAG
  source 1..20: mol_type = other DNA
tagcaataataagtattcaa

SEQ ID NO: 38292 - DNA, 20 bp, synthetic construct
  misc_feature 1..20: note = Description of Artificial Sequence: Synthetic oligonucleotide
  misc_feature 1..20: note = Target: SCN10A; (+) strand; PAM type: NRG; PAM sequence: AGG
  source 1..20: mol_type = other DNA
agcaataataagtattcaat

SEQ ID NO: 38293 - DNA, 20 bp, synthetic construct
  misc_feature 1..20: note = Description of Artificial Sequence: Synthetic oligonucleotide
  misc_feature 1..20: note = Target: SCN10A; (+) strand; PAM type: NRG; PAM sequence: GGG
  source 1..20: mol_type = other DNA
gcaataataagtattcaata

SEQ ID NO: 38294 - DNA, 20 bp, synthetic construct
  misc_feature 1..20: note = Description of Artificial Sequence: Synthetic oligonucleotide
  misc_feature 1..20: note = Target: SCN10A; (+) strand; PAM type: NRG; PAM sequence: TAG
  source 1..20: mol_type = other DNA
aaccaaaattgcaatgtacc

SEQ ID NO: 38295 - DNA, 20 bp, synthetic construct
  misc_feature 1..20: note = Description of Artificial Sequence: Synthetic oligonucleotide
  misc_feature 1..20: note = Target: SCN10A; (+) strand; PAM type: NRG; PAM sequence: AGG
  source 1..20: mol_type = other DNA
accaaaattgcaatgtacct

SEQ ID NO: 38296 - DNA, 20 bp, synthetic construct
  misc_feature 1..20: note = Description of Artificial Sequence: Synthetic oligonucleotide
  misc_feature 1..20: note = Target: SCN10A; (+) strand; PAM type: NRG; PAM sequence: AAG
  source 1..20: mol_type = other DNA
attgcaatgtacctaggaaa

SEQ ID NO: 38297 - DNA, 20 bp, synthetic construct
  misc_feature 1..20: note = Description of Artificial Sequence: Synthetic oligonucleotide
  misc_feature 1..20: note = Target: SCN10A; (+) strand; PAM type: NRG; PAM sequence: TAG
  source 1..20: mol_type = other DNA
gaaaaagacattataaaatg

SEQ ID NO: 38298 - DNA, 20 bp, synthetic construct
  misc_feature 1..20: note = Description of Artificial Sequence: Synthetic oligonucleotide
  misc_feature 1..20: note = Target: SCN10A; (+) strand; PAM type: NRG; PAM sequence: AAG
  source 1..20: mol_type = other DNA
taaaatgtagaaaaatatta

SEQ ID NO: 38299 - DNA, 20 bp, synthetic construct
  misc_feature 1..20: note = Description of Artificial Sequence: Synthetic oligonucleotide
  misc_feature 1..20: note = Target: SCN10A; (+) strand; PAM type: NRG; PAM sequence: AAG
  source 1..20: mol_type = other DNA
aatgtagaaaaatattaaag

SEQ ID NO: 38300 - DNA, 20 bp, synthetic construct
  misc_feature 1..20: note = Description of Artificial Sequence: Synthetic oligonucleotide
  misc_feature 1..20: note = Target: SCN10A; (+) strand; PAM type: NRG; PAM sequence: AAG
  source 1..20: mol_type = other DNA
aaagaagacctgtataaatt

SEQ ID NO: 38301 - DNA, 20 bp, synthetic construct
  misc_feature 1..20: note = Description of Artificial Sequence: Synthetic oligonucleotide
  misc_feature 1..20: note = Target: SCN10A; (+) strand; PAM type: NRG; PAM sequence: GAG
  source 1..20: mol_type = other DNA
agaagacctgtataaattaa

SEQ ID NO: 38302 - DNA, 20 bp, synthetic construct
  misc_feature 1..20: note = Description of Artificial Sequence: Synthetic oligonucleotide
  misc_feature 1..20: note = Target: SCN10A; (+) strand; PAM type: NRG; PAM sequence: TGG
  source 1..20: mol_type = other DNA
agatctgccatactgatgtg

SEQ ID NO: 38303 - DNA, 20 bp, synthetic construct
  misc_feature 1..20: note = Description of Artificial Sequence: Synthetic oligonucleotide
  misc_feature 1..20: note = Target: SCN10A; (+) strand; PAM type: NRG; PAM sequence: GGG
  source 1..20: mol_type = other DNA
gatctgccatactgatgtgt

SEQ ID NO: 38304 - DNA, 20 bp, synthetic construct
  misc_feature 1..20: note = Description of Artificial Sequence: Synthetic oligonucleotide
  misc_feature 1..20: note = Target: SCN10A; (+) strand; PAM type: NRG; PAM sequence: AAG
  source 1..20: mol_type = other DNA
ctgccatactgatgtgtggg

SEQ ID NO: 38305 - DNA, 20 bp, synthetic construct
  misc_feature 1..20: note = Description of Artificial Sequence: Synthetic oligonucleotide
  misc_feature 1..20: note = Target: SCN10A; (+) strand; PAM type: NRG; PAM sequence: AGG
  source 1..20: mol_type = other DNA
tgccatactgatgtgtggga

SEQ ID NO: 38306 - DNA, 20 bp, synthetic construct
  misc_feature 1..20: note = Description of Artificial Sequence: Synthetic oligonucleotide
  misc_feature 1..20: note = Target: SCN10A; (+) strand; PAM type: NRG; PAM sequence: TGG
  source 1..20: mol_type = other DNA
aaggcttcgtattgtaaatg

SEQ ID NO: 38307 - DNA, 20 bp, synthetic construct
  misc_feature 1..20: note = Description of Artificial Sequence: Synthetic oligonucleotide
  misc_feature 1..20: note = Target: SCN10A; (+) strand; PAM type: NRG; PAM sequence: TGG
  source 1..20: mol_type = other DNA
aaatgtggcgattcttcctg

SEQ ID NO: 38308 - DNA, 20 bp, synthetic construct
  misc_feature 1..20: note = Description of Artificial Sequence: Synthetic oligonucleotide
  misc_feature 1..20: note = Target: SCN10A; (+) strand; PAM type: NRG; PAM sequence: CAG
  source 1..20: mol_type = other DNA
cctgtggtgataaatcaatt

SEQ ID NO: 38309 - DNA, 20 bp, synthetic construct
  misc_feature 1..20: note = Description of Artificial Sequence: Synthetic oligonucleotide
  misc_feature 1..20: note = Target: SCN10A; (+) strand; PAM type: NRG; PAM sequence: AAG
  source 1..20: mol_type = other DNA
attcagtgcattaccaaaca

SEQ ID NO: 38310 - DNA, 20 bp, synthetic construct
  misc_feature 1..20: note = Description of Artificial Sequence: Synthetic oligonucleotide
  misc_feature 1..20: note = Target: SCN10A; (+) strand; PAM type: NRG; PAM sequence: CAG
  source 1..20: mol_type = other DNA
attaccaaacaaagtttcca

SEQ ID NO: 38311 - DNA, 20 bp, synthetic construct
  misc_feature 1..20: note = Description of Artificial Sequence: Synthetic oligonucleotide
  misc_feature 1..20: note = Target: SCN10A; (+) strand; PAM type: NRG; PAM sequence: GAG
  source 1..20: mol_type = other DNA
taccaaacaaagtttccaca

SEQ ID NO: 38312 - DNA, 20 bp, synthetic construct
  misc_feature 1..20: note = Description of Artificial Sequence: Synthetic oligonucleotide
  misc_feature 1..20: note = Target: SCN10A; (+) strand; PAM type: NRG; PAM sequence: AAG
  source 1..20: mol_type = other DNA
caaagtttccacagagttgt

SEQ ID NO: 38313 - DNA, 20 bp, synthetic construct
  misc_feature 1..20: note = Description of Artificial Sequence: Synthetic oligonucleotide
  misc_feature 1..20: note = Target: SCN10A; (+) strand; PAM type: NRG; PAM sequence: AAG
  source 1..20: mol_type = other DNA
tttccacagagttgtaagaa

SEQ ID NO: 38314 - DNA, 20 bp, synthetic construct
  misc_feature 1..20: note = Description of Artificial Sequence: Synthetic oligonucleotide
  misc_feature 1..20: note = Target: SCN10A; (+) strand; PAM type: NRG; PAM sequence: GAG
  source 1..20: mol_type = other DNA
tccacagagttgtaagaaaa

SEQ ID NO: 38315 - DNA, 20 bp, synthetic construct
  misc_feature 1..20: note = Description of Artificial Sequence: Synthetic oligonucleotide
  misc_feature 1..20: note = Target: SCN10A; (+) strand; PAM type: NRG; PAM sequence: TGG
  source 1..20: mol_type = other DNA
cagagttgtaagaaaagagc

SEQ ID NO: 38316 - DNA, 20 bp, synthetic construct
  misc_feature 1..20: note = Description of Artificial Sequence: Synthetic oligonucleotide
  misc_feature 1..20: note = Target: SCN10A; (+) strand; PAM type: NRG; PAM sequence: TGG
  source 1..20: mol_type = other DNA
atgtgacccttaaactgata

SEQ ID NO: 38317 - DNA, 20 bp, synthetic construct
  misc_feature 1..20: note = Description of Artificial Sequence: Synthetic oligonucleotide
  misc_feature 1..20: note = Target: SCN10A; (+) strand; PAM type: NRG; PAM sequence: AAG
  source 1..20: mol_type = other DNA
acccttaaactgatatggaa

SEQ ID NO: 38318 - DNA, 20 bp, synthetic construct
  misc_feature 1..20: note = Description of Artificial Sequence: Synthetic oligonucleotide
  misc_feature 1..20: note = Target: SCN10A; (+) strand; PAM type: NRG; PAM sequence: AAG
  source 1..20: mol_type = other DNA
taaactgatatggaaaagta

SEQ ID NO: 38319 - DNA, 20 bp, synthetic construct
  misc_feature 1..20: note = Description of Artificial Sequence: Synthetic oligonucleotide
  misc_feature 1..20: note = Target: SCN10A; (+) strand; PAM type: NRG; PAM sequence: AAG
  source 1..20: mol_type = other DNA
atatggaaaagtaaagaaac

SEQ ID NO: 38320 - DNA, 20 bp, synthetic construct
  misc_feature 1..20: note = Description of Artificial Sequence: Synthetic oligonucleotide
  misc_feature 1..20: note = Target: SCN10A; (+) strand; PAM type: NRG; PAM sequence: AAG
  source 1..20: mol_type = other DNA
caagaaccaaaataattttc

SEQ ID NO: 38321 - DNA, 20 bp, synthetic construct
  misc_feature 1..20: note = Description of Artificial Sequence: Synthetic oligonucleotide
  misc_feature 1..20: note = Target: SCN10A; (+) strand; PAM type: NRG; PAM sequence: AAG
  source 1..20: mol_type = other DNA
gaaccaaaataattttcaag

SEQ ID NO: 38322 - DNA, 20 bp, synthetic construct
  misc_feature 1..20: note = Description of Artificial Sequence: Synthetic oligonucleotide
  misc_feature 1..20: note = Target: SCN10A; (+) strand; PAM type: NRG; PAM sequence: AAG
  source 1..20: mol_type = other DNA
taattttcaagaagacaaat

SEQ ID NO: 38323 - DNA, 20 bp, synthetic construct
  misc_feature 1..20: note = Description of Artificial Sequence: Synthetic oligonucleotide
  misc_feature 1..20: note = Target: SCN10A; (+) strand; PAM type: NRG; PAM sequence: AGG
  source 1..20: mol_type = other DNA
aattttcaagaagacaaata

SEQ ID NO: 38324 - DNA, 20 bp, synthetic construct
  misc_feature 1..20: note = Description of Artificial Sequence: Synthetic oligonucleotide
  misc_feature 1..20: note = Target: SCN10A; (+) strand; PAM type: NRG; PAM sequence: GAG
  source 1..20: mol_type = other DNA
ttttcaagaagacaaataag

SEQ ID NO: 38325 - DNA, 20 bp, synthetic construct
  misc_feature 1..20: note = Description of Artificial Sequence: Synthetic oligonucleotide
  misc_feature 1..20: note = Target: SCN10A; (+) strand; PAM type: NRG; PAM sequence: AGG
  source 1..20: mol_type = other DNA
tttcaagaagacaaataagg

SEQ ID NO: 38326 - DNA, 20 bp, synthetic construct
  misc_feature 1..20: note = Description of Artificial Sequence: Synthetic oligonucleotide
  misc_feature 1..20: note = Target: SCN10A; (+) strand; PAM type: NRG; PAM sequence: GGG
  source 1..20: mol_type = other DNA
ttcaagaagacaaataagga

SEQ ID NO: 38327 - DNA, 20 bp, synthetic construct
  misc_feature 1..20: note = Description of Artificial Sequence: Synthetic oligonucleotide
  misc_feature 1..20: note = Target: SCN10A; (+) strand; PAM type: NRG; PAM sequence: GGG
  source 1..20: mol_type = other DNA
tcaagaagacaaataaggag

SEQ ID NO: 38328 - DNA, 20 bp, synthetic construct
  misc_feature 1..20: note = Description of Artificial Sequence: Synthetic oligonucleotide
  misc_feature 1..20: note = Target: SCN10A; (+) strand; PAM type: NRG; PAM sequence: CAG
  source 1..20: mol_type = other DNA
ggaggggcatgtgaatcgac

SEQ ID NO: 38329 - DNA, 20 bp, synthetic construct
  misc_feature 1..20: note = Description of Artificial Sequence: Synthetic oligonucleotide
  misc_feature 1..20: note = Target: SCN10A; (+) strand; PAM type: NRG; PAM sequence: AGG
  source 1..20: mol_type = other DNA
gaggggcatgtgaatcgacc

SEQ ID NO: 38330 - DNA, 20 bp, synthetic construct
  misc_feature 1..20: note = Description of Artificial Sequence: Synthetic oligonucleotide
  misc_feature 1..20: note = Target: SCN10A; (+) strand; PAM type: NRG; PAM sequence: TAG
  source 1..20: mol_type = other DNA
gaccaggtcaaatcttacta

SEQ ID NO: 38331 - DNA, 20 bp, synthetic construct
  misc_feature 1..20: note = Description of Artificial Sequence: Synthetic oligonucleotide
  misc_feature 1..20: note = Target: SCN10A; (+) strand; PAM type: NRG; PAM sequence: GAG
  source 1..20: mol_type = other DNA
ccaggtcaaatcttactata

SEQ ID NO: 38332 - DNA, 20 bp, synthetic construct
  misc_feature 1..20: note = Description of Artificial Sequence: Synthetic oligonucleotide
  misc_feature 1..20: note = Target: SCN10A; (+) strand; PAM type: NRG; PAM sequence: TGG
  source 1..20: mol_type = other DNA
atagagcatttaaatccacg

SEQ ID NO: 38333 - DNA, 20 bp, synthetic construct
  misc_feature 1..20: note = Description of Artificial Sequence: Synthetic oligonucleotide
  misc_feature 1..20: note = Target: SCN10A; (+) strand; PAM type: NRG; PAM sequence: CAG
  source 1..20: mol_type = other DNA
aaatccacgtggtgttgact

SEQ ID NO: 38334 - DNA, 20 bp, synthetic construct
  misc_feature 1..20: note = Description of Artificial Sequence: Synthetic oligonucleotide
  misc_feature 1..20: note = Target: SCN10A; (+) strand; PAM type: NRG; PAM sequence: AGG
  source 1..20: mol_type = other DNA
aatccacgtggtgttgactc

SEQ ID NO: 38335 - DNA, 20 bp, synthetic construct
  misc_feature 1..20: note = Description of Artificial Sequence: Synthetic oligonucleotide
  misc_feature 1..20: note = Target: SCN10A; (+) strand; PAM type: NRG; PAM sequence: GAG
  source 1..20: mol_type = other DNA
ttgactcaggatgtgacaat

SEQ ID NO: 38336 - DNA, 20 bp, synthetic construct
  misc_feature 1..20: note = Description of Artificial Sequence: Synthetic oligonucleotide
  misc_feature 1..20: note = Target: SCN10A; (+) strand; PAM type: NRG; PAM sequence: TGG
  source 1..20: mol_type = other DNA
ggatgtgacaatgagattac

SEQ ID NO: 38337 - DNA, 20 bp, synthetic construct
  misc_feature 1..20: note = Description of Artificial Sequence: Synthetic oligonucleotide
  misc_feature 1..20: note = Target: SCN10A; (+) strand; PAM type: NRG; PAM sequence: GGG
  source 1..20: mol_type = other DNA
gatgtgacaatgagattact

SEQ ID NO: 38338 - DNA, 20 bp, synthetic construct
  misc_feature 1..20: note = Description of Artificial Sequence: Synthetic oligonucleotide
  misc_feature 1..20: note = Target: SCN10A; (+) strand; PAM type: NRG; PAM sequence: GAG
  source 1..20: mol_type = other DNA
tgtgacaatgagattactgg

SEQ ID NO: 38339 - DNA, 20 bp, synthetic construct
  misc_feature 1..20: note = Description of Artificial Sequence: Synthetic oligonucleotide
  misc_feature 1..20: note = Target: SCN10A; (+) strand; PAM type: NRG; PAM sequence: CAG
  source 1..20: mol_type = other DNA
aatgagattactgggagaaa

SEQ ID NO: 38340 - DNA, 20 bp, synthetic construct
  misc_feature 1..20: note = Description of Artificial Sequence: Synthetic oligonucleotide
  misc_feature 1..20: note = Target: SCN10A; (+) strand; PAM type: NRG; PAM sequence: CAG
  source 1..20: mol_type = other DNA
attactgggagaaacagatt

SEQ ID NO: 38341 - DNA, 20 bp, synthetic construct
  misc_feature 1..20: note = Description of Artificial Sequence: Synthetic oligonucleotide
  misc_feature 1..20: note = Target: SCN10A; (+) strand; PAM type: NRG; PAM sequence: TAG
  source 1..20: mol_type = other DNA
actgggagaaacagattcag

SEQ ID NO: 38342 - DNA, 20 bp, synthetic construct
  misc_feature 1..20: note = Description of Artificial Sequence: Synthetic oligonucleotide
  misc_feature 1..20: note = Target: SCN10A; (+) strand; PAM type: NRG; PAM sequence: TGG
  source 1..20: mol_type = other DNA
agaaacagattcagtagaca

SEQ ID NO: 38343 - DNA, 20 bp, synthetic construct
  misc_feature 1..20: note = Description of Artificial Sequence: Synthetic oligonucleotide
  misc_feature 1..20: note = Target: SCN10A; (+) strand; PAM type: NRG; PAM sequence: GGG
  source 1..20: mol_type = other DNA
gaaacagattcagtagacat

SEQ ID NO: 38344 - DNA, 20 bp, synthetic construct
  misc_feature 1..20: note = Description of Artificial Sequence: Synthetic oligonucleotide
  misc_feature 1..20: note = Target: SCN10A; (+) strand; PAM type: NRG; PAM sequence: TGG
  source 1..20: mol_type = other DNA
attcagtagacatgggaatc

SEQ ID NO: 38345 - DNA, 20 bp, synthetic construct
  misc_feature 1..20: note = Description of Artificial Sequence: Synthetic oligonucleotide
  misc_feature 1..20: note = Target: SCN10A; (+) strand; PAM type: NRG; PAM sequence: TGG
  source 1..20: mol_type = other DNA
agacatgggaatctggtgca

SEQ ID NO: 38346 - DNA, 20 bp, synthetic construct
  misc_feature 1..20: note = Description of Artificial Sequence: Synthetic oligonucleotide
  misc_feature 1..20: note = Target: SCN10A; (+) strand; PAM type: NRG; PAM sequence: CAG
  source 1..20: mol_type = other DNA
catgggaatctggtgcatgg

SEQ ID NO: 38347 - DNA, 20 bp, synthetic construct
  misc_feature 1..20: note = Description of Artificial Sequence: Synthetic oligonucleotide
  misc_feature 1..20: note = Target: SCN10A; (+) strand; PAM type: NRG; PAM sequence: AAG
  source 1..20: mol_type = other DNA
gggaatctggtgcatggcag

SEQ ID NO: 38348 - DNA, 20 bp, synthetic construct
  misc_feature 1..20: note = Description of Artificial Sequence: Synthetic oligonucleotide
  misc_feature 1..20: note = Target: SCN10A; (+) strand; PAM type: NRG; PAM sequence: CAG
  source 1..20: mol_type = other DNA
aatctggtgcatggcagaag

SEQ ID NO: 38349 - DNA, 20 bp, synthetic construct
  misc_feature 1..20: note = Description of Artificial Sequence: Synthetic oligonucleotide
  misc_feature 1..20: note = Target: SCN10A; (+) strand; PAM type: NRG; PAM sequence: TGG
  source 1..20: mol_type = other DNA
ctggtgcatggcagaagcag

SEQ ID NO: 38350 - DNA, 20 bp, synthetic construct
  misc_feature 1..20: note = Description of Artificial Sequence: Synthetic oligonucleotide
  misc_feature 1..20: note = Target: SCN10A; (+) strand; PAM type: NRG; PAM sequence: TAG
  source 1..20: mol_type = other DNA
gtgcatggcagaagcagtgg

SEQ ID NO: 38351 - DNA, 20 bp, synthetic construct
  misc_feature 1..20: note = Description of Artificial Sequence: Synthetic oligonucleotide
  misc_feature 1..20: note = Target: SCN10A; (+) strand; PAM type: NRG; PAM sequence: AGG
  source 1..20: mol_type = other DNA
tgcatggcagaagcagtggt

SEQ ID NO: 38352 - DNA, 20 bp, synthetic construct
  misc_feature 1..20: note = Description of Artificial Sequence: Synthetic oligonucleotide
  misc_feature 1..20: note = Target: SCN10A; (+) strand; PAM type: NRG; PAM sequence: TGG
  source 1..20: mol_type = other DNA
aagcagtggtaggaaccact

SEQ ID NO: 38353 - DNA, 20 bp, synthetic construct
  misc_feature 1..20: note = Description of Artificial Sequence: Synthetic oligonucleotide
  misc_feature 1..20: note = Target: SCN10A; (+) strand; PAM type: NRG; PAM sequence: GGG
  source 1..20: mol_type = other DNA
agcagtggtaggaaccactt

SEQ ID NO: 38354 - DNA, 20 bp, synthetic construct
  misc_feature 1..20: note = Description of Artificial Sequence: Synthetic oligonucleotide
  misc_feature 1..20: note = Target: SCN10A; (+) strand; PAM type: NRG; PAM sequence: TGG
  source 1..20: mol_type = other DNA
tgatgtattgaaaaaaatgt

SEQ ID NO: 38355 - DNA, 20 bp, synthetic construct
  misc_feature 1..20: note = Description of Artificial Sequence: Synthetic oligonucleotide
  misc_feature 1..20: note = Target: SCN10A; (+) strand; PAM type: NRG; PAM sequence: TGG
  source 1..20: mol_type = other DNA
aaatgttggaataatccata

SEQ ID NO: 38356 - DNA, 20 bp, synthetic construct
  misc_feature 1..20: note = Description of Artificial Sequence: Synthetic oligonucleotide
  misc_feature 1..20: note = Target: SCN10A; (+) strand; PAM type: NRG; PAM sequence: TGG
  source 1..20: mol_type = other DNA
taatccatatggaaaaatat

SEQ ID NO: 38357 - DNA, 20 bp, synthetic construct
  misc_feature 1..20: note = Description of Artificial Sequence: Synthetic oligonucleotide
  misc_feature 1..20: note = Target: SCN10A; (+) strand; PAM type: NRG; PAM sequence: AAG
  source 1..20: mol_type = other DNA
tccatatggaaaaatattgg

SEQ ID NO: 38358 - DNA, 20 bp, synthetic construct
  misc_feature 1..20: note = Description of Artificial Sequence: Synthetic oligonucleotide
  misc_feature 1..20: note = Target: SCN10A; (+) strand; PAM type: NRG; PAM sequence: TAG
  source 1..20: mol_type = other DNA
acacatacaaaaataaattc

SEQ ID NO: 38359 - DNA, 20 bp, synthetic construct
  misc_feature 1..20: note = Description of Artificial Sequence: Synthetic oligonucleotide
  misc_feature 1..20: note = Target: SCN10A; (+) strand; PAM type: NRG; PAM sequence: AGG
  source 1..20: mol_type = other DNA
cacatacaaaaataaattct

SEQ ID NO: 38360 - DNA, 20 bp, synthetic construct
  misc_feature 1..20: note = Description of Artificial Sequence: Synthetic oligonucleotide
  misc_feature 1..20: note = Target: SCN10A; (+) strand; PAM type: NRG; PAM sequence: GAG
  source 1..20: mol_type = other DNA
catacaaaaataaattctag

SEQ ID NO: 38361 - DNA, 20 bp, synthetic construct
  misc_feature 1..20: note = Description of Artificial Sequence: Synthetic oligonucleotide
  misc_feature 1..20: note = Target: SCN10A; (+) strand; PAM type: NRG; PAM sequence: TAG
  source 1..20: mol_type = other DNA
gagattgaaatacctaaatg

SEQ ID NO: 38362 - DNA, 20 bp, synthetic construct
  misc_feature 1..20: note = Description of Artificial Sequence: Synthetic oligonucleotide
  misc_feature 1..20: note = Target: SCN10A; (+) strand; PAM type: NRG; PAM sequence: AAG
  source 1..20: mol_type = other DNA
ttgaaatacctaaatgtaga

SEQ ID NO: 38363 - DNA, 20 bp, synthetic construct
  misc_feature 1..20: note = Description of Artificial Sequence: Synthetic oligonucleotide
  misc_feature 1..20: note = Target: SCN10A; (+) strand; PAM type: NRG; PAM sequence: AGG
  source 1..20: mol_type = other DNA
tgaaatacctaaatgtagaa

SEQ ID NO: 38364 - DNA, 20 bp, synthetic construct
  misc_feature 1..20: note = Description of Artificial Sequence: Synthetic oligonucleotide
  misc_feature 1..20: note = Target: SCN10A; (+) strand; PAM type: NRG; PAM sequence: GAG
  source 1..20: mol_type = other DNA
gaaaggaaaactgtaacttt

SEQ ID NO: 38365 - DNA, 20 bp, synthetic construct
  misc_feature 1..20: note = Description of Artificial Sequence: Synthetic oligonucleotide
  misc_feature 1..20: note = Target: SCN10A; (+) strand; PAM type: NRG; PAM sequence: AGG
  source 1..20: mol_type = other DNA
aaaggaaaactgtaactttg

SEQ ID NO: 38366 - DNA, 20 bp, synthetic construct
  misc_feature 1..20: note = Description of Artificial Sequence: Synthetic oligonucleotide
  misc_feature 1..20: note = Target: SCN10A; (+) strand; PAM type: NRG; PAM sequence: GAG
  source 1..20: mol_type = other DNA
aggaaaactgtaactttgag

SEQ ID NO: 38367 - DNA, 20 bp, synthetic construct
  misc_feature 1..20: note = Description of Artificial Sequence: Synthetic oligonucleotide
  misc_feature 1..20: note = Target: SCN10A; (+) strand; PAM type: NRG; PAM sequence: CAG
  source 1..20: mol_type = other DNA
gtaactttgaggagaaaaca

SEQ ID NO: 38368 - DNA, 20 bp, synthetic construct
  misc_feature 1..20: note = Description of Artificial Sequence: Synthetic oligonucleotide
  misc_feature 1..20: note = Target: SCN10A; (+) strand; PAM type: NRG; PAM sequence: AGG
  source 1..20: mol_type = other DNA
taactttgaggagaaaacac

SEQ ID NO: 38369 - DNA, 20 bp, synthetic construct
  misc_feature 1..20: note = Description of Artificial Sequence: Synthetic oligonucleotide
  misc_feature 1..20: note = Target: SCN10A; (+) strand; PAM type: NRG; PAM sequence: TGG
  source 1..20: mol_type = other DNA
aacacaggataatatcttta

SEQ ID NO: 38370 - DNA, 20 bp, synthetic construct
  misc_feature 1..20: note = Description of Artificial Sequence: Synthetic oligonucleotide
  misc_feature 1..20: note = Target: SCN10A; (+) strand; PAM type: NRG; PAM sequence: TGG
  source 1..20: mol_type = other DNA
tatctttatggaatactata

SEQ ID NO: 38371 - DNA, 20 bp, synthetic construct
  misc_feature 1..20: note = Description of Artificial Sequence: Synthetic oligonucleotide
  misc_feature 1..20: note = Target: SCN10A; (+) strand; PAM type: NRG; PAM sequence: TAG
  source 1..20: mol_type = other DNA
gcaataaaaaatgaatgaat

SEQ ID NO: 38372 - DNA, 20 bp, synthetic construct
  misc_feature 1..20: note = Description of Artificial Sequence: Synthetic oligonucleotide
  misc_feature 1..20: note = Target: SCN10A; (+) strand; PAM type: NRG; PAM sequence: AGG
  source 1..20: mol_type = other DNA
caataaaaaatgaatgaatt

SEQ ID NO: 38373 - DNA, 20 bp, synthetic construct
  misc_feature 1..20: note = Description of Artificial Sequence: Synthetic oligonucleotide
  misc_feature 1..20: note = Target: SCN10A; (+) strand; PAM type: NRG; PAM sequence: TGG
  source 1..20: mol_type = other DNA
taggtctacatgtatccatt

SEQ ID NO: 38374 - DNA, 20 bp, synthetic construct
  misc_feature 1..20: note = Description of Artificial Sequence: Synthetic oligonucleotide
  misc_feature 1..20: note = Target: SCN10A; (+) strand; PAM type: NRG; PAM sequence: GGG
  source 1..20: mol_type = other DNA
aggtctacatgtatccattt

SEQ ID NO: 38375 - DNA, 20 bp, synthetic construct
  misc_feature 1..20: note = Description of Artificial Sequence: Synthetic oligonucleotide
  misc_feature 1..20: note = Target: SCN10A; (+) strand; PAM type: NRG; PAM sequence: CAG
  source 1..20: mol_type = other DNA
aaaacataattttaaaacat

SEQ ID NO: 38376 - DNA, 20 bp, synthetic construct
  misc_feature 1..20: note = Description of Artificial Sequence: Synthetic oligonucleotide
  misc_feature 1..20: note = Target: SCN10A; (+) strand; PAM type: NRG; PAM sequence: AAG
  source 1..20: mol_type = other DNA
taattttaaaacatcagata

SEQ ID NO: 38377 - DNA, 20 bp, synthetic construct
  misc_feature 1..20: note = Description of Artificial Sequence: Synthetic oligonucleotide
  misc_feature 1..20: note = Target: SCN10A; (+) strand; PAM type: NRG; PAM sequence: CAG
  source 1..20: mol_type = other DNA
gcacacatataaaatgataa

SEQ ID NO: 38378 - DNA, 20 bp, synthetic construct
  misc_feature 1..20: note = Description of Artificial Sequence: Synthetic oligonucleotide
  misc_feature 1..20: note = Target: SCN10A; (+) strand; PAM type: NRG; PAM sequence: AAG
  source 1..20: mol_type = other DNA
aacagttccataaatttgaa

SEQ ID NO: 38379 - DNA, 20 bp, synthetic construct
  misc_feature 1..20: note = Description of Artificial Sequence: Synthetic oligonucleotide
  misc_feature 1..20: note = Target: SCN10A; (+) strand; PAM type: NRG; PAM sequence: CAG
  source 1..20: mol_type = other DNA
aaatcaatactttatgcatg

SEQ ID NO: 38380 - DNA, 20 bp, synthetic construct
  misc_feature 1..20: note = Description of Artificial Sequence: Synthetic oligonucleotide
  misc_feature 1..20: note = Target: SCN10A; (+) strand; PAM type: NRG; PAM sequence: CAG
  source 1..20: mol_type = other DNA
aacacccacttccccgtttg

SEQ ID NO: 38381 - DNA, 20 bp, synthetic construct
  misc_feature 1..20: note = Description of Artificial Sequence: Synthetic oligonucleotide
  misc_feature 1..20: note = Target: SCN10A; (+) strand; PAM type: NRG; PAM sequence: TAG
  source 1..20: mol_type = other DNA
acccacttccccgtttgcag

SEQ ID NO: 38382 - DNA, 20 bp, synthetic construct
  misc_feature 1..20: note = Description of Artificial Sequence: Synthetic oligonucleotide
  misc_feature 1..20: note = Target: SCN10A; (+) strand; PAM type: NRG; PAM sequence: CAG
  source 1..20: mol_type = other DNA
ttccccgtttgcagtagatt

SEQ ID NO: 38383 - DNA, 20 bp, synthetic construct
  misc_feature 1..20: note = Description of Artificial Sequence: Synthetic oligonucleotide
  misc_feature 1..20: note = Target: SCN10A; (+) strand; PAM type: NRG; PAM sequence: CAG
  source 1..20: mol_type = other DNA
tcatttcacatgttctttgc

SEQ ID NO: 38384 - DNA, 20 bp, synthetic construct
  misc_feature 1..20: note = Description of Artificial Sequence: Synthetic oligonucleotide
  misc_feature 1..20: note = Target: SCN10A; (+) strand; PAM type: NRG; PAM sequence: AGG
  source 1..20: mol_type = other DNA
catttcacatgttctttgcc

SEQ ID NO: 38385 - DNA, 20 bp, synthetic construct
  misc_feature 1..20: note = Description of Artificial Sequence: Synthetic oligonucleotide
  misc_feature 1..20: note = Target: SCN10A; (+) strand; PAM type: NRG; PAM sequence: GAG
  source 1..20: mol_type = other DNA
tcacatgttctttgccaggt

SEQ ID NO: 38386 - DNA, 20 bp, synthetic construct
  misc_feature 1..20: note = Description of Artificial Sequence: Synthetic oligonucleotide
  misc_feature 1..20: note = Target: SCN10A; (+) strand; PAM type: NRG; PAM sequence: AAG
  source 1..20: mol_type = other DNA
caaattgctataatttgtca

SEQ ID NO: 38387 - DNA, 20 bp, synthetic construct
  misc_feature 1..20: note = Description of Artificial Sequence: Synthetic oligonucleotide
  misc_feature 1..20: note = Target: SCN10A; (+) strand; PAM type: NRG; PAM sequence: AGG
  source 1..20: mol_type = other DNA
aaattgctataatttgtcaa

SEQ ID NO: 38388 - DNA, 20 bp, synthetic construct
  misc_feature 1..20: note = Description of Artificial Sequence: Synthetic oligonucleotide
  misc_feature 1..20: note = Target: SCN10A; (+) strand; PAM type: NRG; PAM sequence: CAG
  source 1..20: mol_type = other DNA
ataatttgtcaaaggttttc

SEQ ID NO: 38389 - DNA, 20 bp, synthetic construct
  misc_feature 1..20: note = Description of Artificial Sequence: Synthetic oligonucleotide
  misc_feature 1..20: note = Target: SCN10A; (+) strand; PAM type: NRG; PAM sequence: TAG
  source 1..20: mol_type = other DNA
ttccagaatattgttatgct

SEQ ID NO: 38390 - DNA, 20 bp, synthetic construct
  misc_feature 1..20: note = Description of Artificial Sequence: Synthetic oligonucleotide
  misc_feature 1..20: note = Target: SCN10A; (+) strand; PAM type: NRG; PAM sequence: GAG
  source 1..20: mol_type = other DNA
ccagaatattgttatgctta

SEQ ID NO: 38391 - DNA, 20 bp, synthetic construct
  misc_feature 1..20: note = Description of Artificial Sequence: Synthetic oligonucleotide
  misc_feature 1..20: note = Target: SCN10A; (+) strand; PAM type: NRG; PAM sequence: AGG
  source 1..20: mol_type = other DNA
cagaatattgttatgcttag

SEQ ID NO: 38392 - DNA, 20 bp, synthetic construct
  misc_feature 1..20: note = Description of Artificial Sequence: Synthetic oligonucleotide
  misc_feature 1..20: note = Target: SCN10A; (+) strand; PAM type: NRG; PAM sequence: GAG
  source 1..20: mol_type = other DNA
atattgttatgcttagaggt

SEQ ID NO: 38393 - DNA, 20 bp, synthetic construct
  misc_feature 1..20: note = Description of Artificial Sequence: Synthetic oligonucleotide
  misc_feature 1..20: note = Target: SCN10A; (+) strand; PAM type: NRG; PAM sequence: TAG
  source 1..20: mol_type = other DNA
atgcttagaggtgagtgtcc

SEQ ID NO: 38394 - DNA, 20 bp, synthetic construct
  misc_feature 1..20: note = Description of Artificial Sequence: Synthetic oligonucleotide
  misc_feature 1..20: note = Target: SCN10A; (+) strand; PAM type: NRG; PAM sequence: AGG
  source 1..20: mol_type = other DNA
tgcttagaggtgagtgtcct

SEQ ID NO: 38395 - DNA, 20 bp, synthetic construct
  misc_feature 1..20: note = Description of Artificial Sequence: Synthetic oligonucleotide
  misc_feature 1..20: note = Target: SCN10A; (+) strand; PAM type: NRG; PAM sequence: GGG
  source 1..20: mol_type = other DNA
gcttagaggtgagtgtccta

SEQ ID NO: 38396 - DNA, 20 bp, synthetic construct
  misc_feature 1..20: note = Description of Artificial Sequence: Synthetic oligonucleotide
  misc_feature 1..20: note = Target: SCN10A; (+) strand; PAM type: NRG; PAM sequence: AAG
  source 1..20: mol_type = other DNA
tgagtgtcctagggtcatca

SEQ ID NO: 38397 - DNA, 20 bp, synthetic construct
  misc_feature 1..20: note = Description of Artificial Sequence: Synthetic oligonucleotide
  misc_feature 1..20: note = Target: SCN10A; (+) strand; PAM type: NRG; PAM sequence: GAG
  source 1..20: mol_type = other DNA
agtgtcctagggtcatcaaa

SEQ ID NO: 38398 - DNA, 20 bp, synthetic construct
  misc_feature 1..20: note = Description of Artificial Sequence: Synthetic oligonucleotide
  misc_feature 1..20: note = Target: SCN10A; (+) strand; PAM type: NRG; PAM sequence: CAG
  source 1..20: mol_type = other DNA
cttcaatgattctctgaaac

SEQ ID NO: 38399 - DNA, 20 bp, synthetic construct
  misc_feature 1..20: note = Description of Artificial Sequence: Synthetic oligonucleotide
  misc_feature 1..20: note = Target: SCN10A; (+) strand; PAM type: NRG; PAM sequence: AGG
  source 1..20: mol_type = other DNA
ttcaatgattctctgaaacc

SEQ ID NO: 38400 - DNA, 20 bp, synthetic construct
  misc_feature 1..20: note = Description of Artificial Sequence: Synthetic oligonucleotide
  misc_feature 1..20: note = Target: SCN10A; (+) strand; PAM type: NRG; PAM sequence: GGG
  source 1..20: mol_type = other DNA
tcaatgattctctgaaacca

SEQ ID NO: 38401 - DNA, 20 bp, synthetic construct
  misc_feature 1..20: note = Description of Artificial Sequence: Synthetic oligonucleotide
  misc_feature 1..20: note = Target: SCN10A; (+) strand; PAM type: NRG; PAM sequence: TGG
  source 1..20: mol_type = other DNA
gattctctgaaaccagggca

SEQ ID NO: 38402 - DNA, 20 bp, synthetic construct
  misc_feature 1..20: note = Description of Artificial Sequence: Synthetic oligonucleotide
  misc_feature 1..20: note = Target: SCN10A; (+) strand; PAM type: NRG; PAM sequence: GGG
  source 1..20: mol_type = other DNA
attctctgaaaccagggcat

SEQ ID NO: 38403 - DNA, 20 bp, synthetic construct
  misc_feature 1..20: note = Description of Artificial Sequence: Synthetic oligonucleotide
  misc_feature 1..20: note = Target: SCN10A; (+) strand; PAM type: NRG; PAM sequence: GGG
  source 1..20: mol_type = other DNA
ttctctgaaaccagggcatg

SEQ ID NO: 38404 - DNA, 20 bp, synthetic construct
  misc_feature 1..20: note = Description of Artificial Sequence: Synthetic oligonucleotide
  misc_feature 1..20: note = Target: SCN10A; (+) strand; PAM type: NRG; PAM sequence: GAG
  source 1..20: mol_type = other DNA
ctctgaaaccagggcatggg

SEQ ID NO: 38405 - DNA, 20 bp, synthetic construct
  misc_feature 1..20: note = Description of Artificial Sequence: Synthetic oligonucleotide
  misc_feature 1..20: note = Target: SCN10A; (+) strand; PAM type: NRG; PAM sequence: GAG
  source 1..20: mol_type = other DNA
ctgaaaccagggcatgggga

SEQ ID NO: 38406 - DNA, 20 bp, synthetic construct
  misc_feature 1..20: note = Description of Artificial Sequence: Synthetic oligonucleotide
  misc_feature 1..20: note = Target: SCN10A; (+) strand; PAM type: NRG; PAM sequence: TAG
  source 1..20: mol_type = other DNA
aaaccagggcatggggagag

SEQ ID NO: 38407 - DNA, 20 bp, synthetic construct
  misc_feature 1..20: note = Description of Artificial Sequence: Synthetic oligonucleotide
  misc_feature 1..20: note = Target: SCN10A; (+) strand; PAM type: NRG; PAM sequence: AGG
  source 1..20: mol_type = other DNA
aaccagggcatggggagagt

SEQ ID NO: 38408 - DNA, 20 bp, synthetic construct
  misc_feature 1..20: note = Description of Artificial Sequence: Synthetic oligonucleotide
  misc_feature 1..20: note = Target: SCN10A; (+) strand; PAM type: NRG; PAM sequence: AAG
  source 1..20: mol_type = other DNA
agggcatggggagagtagga

SEQ ID NO: 38409 - DNA, 20 bp, synthetic construct
  misc_feature 1..20: note = Description of Artificial Sequence: Synthetic oligonucleotide
  misc_feature 1..20: note = Target: SCN10A; (+) strand; PAM type: NRG; PAM sequence: TAG
  source 1..20: mol_type = other DNA
tggggagagtaggaaagttc

SEQ ID NO: 38410 - DNA, 20 bp, synthetic construct
  misc_feature 1..20: note = Description of Artificial Sequence: Synthetic oligonucleotide
  misc_feature 1..20: note = Target: SCN10A; (+) strand; PAM type: NRG; PAM sequence: TGG
  source 1..20: mol_type = other DNA
cccctgctctctttaccttc

SEQ ID NO: 38411 - DNA, 20 bp, synthetic construct
  misc_feature 1..20: note = Description of Artificial Sequence: Synthetic oligonucleotide
  misc_feature 1..20: note = Target: SCN10A; (+) strand; PAM type: NRG; PAM sequence: GAG
  source 1..20: mol_type = other DNA
taccttctggtgcccaatct

SEQ ID NO: 38412 - DNA, 20 bp, synthetic construct
  misc_feature 1..20: note = Description of Artificial Sequence: Synthetic oligonucleotide
  misc_feature 1..20: note = Target: SCN10A; (+) strand; PAM type: NRG; PAM sequence: AGG
  source 1..20: mol_type = other DNA
accttctggtgcccaatctg

SEQ ID NO: 38413 - DNA, 20 bp, synthetic construct
  misc_feature 1..20: note = Description of Artificial Sequence: Synthetic oligonucleotide
  misc_feature 1..20: note = Target: SCN10A; (+) strand; PAM type: NRG; PAM sequence: AAG
  source 1..20: mol_type = other DNA
ttctggtgcccaatctgagg

SEQ ID NO: 38414 - DNA, 20 bp, synthetic construct
  misc_feature 1..20: note = Description of Artificial Sequence: Synthetic oligonucleotide
  misc_feature 1..20: note = Target: SCN10A; (+) strand; PAM type: NRG; PAM sequence: TAG
  source 1..20: mol_type = other DNA
ccaatctgaggaagaacctc

SEQ ID NO: 38415 - DNA, 20 bp, synthetic construct
  misc_feature 1..20: note = Description of Artificial Sequence: Synthetic oligonucleotide
  misc_feature 1..20: note = Target: SCN10A; (+) strand; PAM type: NRG; PAM sequence: AAG
  source 1..20: mol_type = other DNA
agaacctctagtttcttccc

SEQ ID NO: 38416 - DNA, 20 bp, synthetic construct
  misc_feature 1..20: note = Description of Artificial Sequence: Synthetic oligonucleotide
  misc_feature 1..20: note = Target: SCN10A; (+) strand; PAM type: NRG; PAM sequence: AAG
  source 1..20: mol_type = other DNA
tctagtttcttcccaagcaa

SEQ ID NO: 38417 - DNA, 20 bp, synthetic construct
  misc_feature 1..20: note = Description of Artificial Sequence: Synthetic oligonucleotide
  misc_feature 1..20: note = Target: SCN10A; (+) strand; PAM type: NRG; PAM sequence: GAG
  source 1..20: mol_type = other DNA
tagtttcttcccaagcaaaa

SEQ ID NO: 38418 - DNA, 20 bp, synthetic construct
  misc_feature 1..20: note = Description of Artificial Sequence: Synthetic oligonucleotide
  misc_feature 1..20: note = Target: SCN10A; (+) strand; PAM type: NRG; PAM sequence: AGG
  source 1..20: mol_type = other DNA
agtttcttcccaagcaaaag

SEQ ID NO: 38419 - DNA, 20 bp, synthetic construct
  misc_feature 1..20: note = Description of Artificial Sequence: Synthetic oligonucleotide
  misc_feature 1..20: note = Target: SCN10A; (+) strand; PAM type: NRG; PAM sequence: GGG
  source 1..20: mol_type = other DNA
gtttcttcccaagcaaaaga

SEQ ID NO: 38420 - DNA, 20 bp, synthetic construct
  misc_feature 1..20: note = Description of Artificial Sequence: Synthetic oligonucleotide
  misc_feature 1..20: note = Target: SCN10A; (+) strand; PAM type: NRG; PAM sequence: GGG
  source 1..20: mol_type = other DNA
tttcttcccaagcaaaagag

SEQ ID NO: 38421 - DNA, 20 bp, synthetic construct
  misc_feature 1..20: note = Description of Artificial Sequence: Synthetic oligonucleotide
  misc_feature 1..20: note = Target: SCN10A; (+) strand; PAM type: NRG; PAM sequence: TAG
  source 1..20: mol_type = other DNA
tcccaagcaaaagaggggat

SEQ ID NO: 38422 - DNA, 20 bp, synthetic construct
  misc_feature 1..20: note = Description of Artificial Sequence: Synthetic oligonucleotide
  misc_feature 1..20: note = Target: SCN10A; (+) strand; PAM type: NRG; PAM sequence: TGG
  source 1..20: mol_type = other DNA
caaaagaggggattagaaaa

SEQ ID NO: 38423 - DNA, 20 bp, synthetic construct
  misc_feature 1..20: note = Description of Artificial Sequence: Synthetic oligonucleotide
  misc_feature 1..20: note = Target: SCN10A; (+) strand; PAM type: NRG; PAM sequence: AAG
  source 1..20: mol_type = other DNA
atctatctttatctttccac

SEQ ID NO: 38424 - DNA, 20 bp, synthetic construct
  misc_feature 1..20: note = Description of Artificial Sequence: Synthetic oligonucleotide
  misc_feature 1..20: note = Target: SCN10A; (+) strand; PAM type: NRG; PAM sequence: CAG
  source 1..20: mol_type = other DNA
tatctttatctttccacaag

SEQ ID NO: 38425 - DNA, 20 bp, synthetic construct
  misc_feature 1..20: note = Description of Artificial Sequence: Synthetic oligonucleotide
  misc_feature 1..20: note = Target: SCN10A; (+) strand; PAM type: NRG; PAM sequence: CAG
  source 1..20: mol_type = other DNA
tttatctttccacaagcaga

SEQ ID NO: 38426 - DNA, 20 bp, synthetic construct
  misc_feature 1..20: note = Description of Artificial Sequence: Synthetic oligonucleotide
  misc_feature 1..20: note = Target: SCN10A; (+) strand; PAM type: NRG; PAM sequence: TAG
  source 1..20: mol_type = other DNA
tctttccacaagcagacaga

SEQ ID NO: 38427 - DNA, 20 bp, synthetic construct
  misc_feature 1..20: note = Description of Artificial Sequence: Synthetic oligonucleotide
  misc_feature 1..20: note = Target: SCN10A; (+) strand; PAM type: NRG; PAM sequence: AGG
  source 1..20: mol_type = other DNA
ctttccacaagcagacagat

SEQ ID NO: 38428 - DNA, 20 bp, synthetic construct
  misc_feature 1..20: note = Description of Artificial Sequence: Synthetic oligonucleotide
  misc_feature 1..20: note = Target: SCN10A; (+) strand; PAM type: NRG; PAM sequence: CAG
  source 1..20: mol_type = other DNA
tccacaagcagacagatagg

SEQ ID NO: 38429 - DNA, 20 bp, synthetic construct
  misc_feature 1..20: note = Description of Artificial Sequence: Synthetic oligonucleotide
  misc_feature 1..20: note = Target: SCN10A; (+) strand; PAM type: NRG; PAM sequence: AGG
  source 1..20: mol_type = other DNA
ccacaagcagacagataggc

SEQ ID NO: 38430 - DNA, 20 bp, synthetic construct
  misc_feature 1..20: note = Description of Artificial Sequence: Synthetic oligonucleotide
  misc_feature 1..20: note = Target: SCN10A; (+) strand; PAM type: NRG; PAM sequence: CAG
  source 1..20: mol_type = other DNA
cagacagataggcaggcacg

SEQ ID NO: 38431 - DNA, 20 bp, synthetic construct
  misc_feature 1..20: note = Description of Artificial Sequence: Synthetic oligonucleotide
  misc_feature 1..20: note = Target: SCN10A; (+) strand; PAM type: NRG; PAM sequence: AAG
  source 1..20: mol_type = other DNA
cagataggcaggcacgcaga

SEQ ID NO: 38432 - DNA, 20 bp, synthetic construct
  misc_feature 1..20: note = Description of Artificial Sequence: Synthetic oligonucleotide
  misc_feature 1..20: note = Target: SCN10A; (+) strand; PAM type: NRG; PAM sequence: TAG
  source 1..20: mol_type = other DNA
ggcaggcacgcagaaagaca

SEQ ID NO: 38433 - DNA, 20 bp, synthetic construct
  misc_feature 1..20: note = Description of Artificial Sequence: Synthetic oligonucleotide
  misc_feature 1..20: note = Target: SCN10A; (+) strand; PAM type: NRG; PAM sequence: GAG
  source 1..20: mol_type = other DNA
caggcacgcagaaagacata

SEQ ID NO: 38434 - DNA, 20 bp, synthetic construct
  misc_feature 1..20: note = Description of Artificial Sequence: Synthetic oligonucleotide
  misc_feature 1..20: note = Target: SCN10A; (+) strand; PAM type: NRG; PAM sequence: CAG
  source 1..20: mol_type = other DNA
agacatagagctaccattat

SEQ ID NO: 38435 - DNA, 20 bp, synthetic construct
  misc_feature 1..20: note = Description of Artificial Sequence: Synthetic oligonucleotide
  misc_feature 1..20: note = Target: SCN10A; (+) strand; PAM type: NRG; PAM sequence: CAG
  source 1..20: mol_type = other DNA
catagagctaccattatcag

SEQ ID NO: 38436 - DNA, 20 bp, synthetic construct
  misc_feature 1..20: note = Description of Artificial Sequence: Synthetic oligonucleotide
  misc_feature 1..20: note = Target: SCN10A; (+) strand; PAM type: NRG; PAM sequence: AGG
  source 1..20: mol_type = other DNA
atagagctaccattatcagc

SEQ ID NO: 38437 - DNA, 20 bp, synthetic construct
  misc_feature 1..20: note = Description of Artificial Sequence: Synthetic oligonucleotide
  misc_feature 1..20: note = Target: SCN10A; (+) strand; PAM type: NRG; PAM sequence: AAG
  source 1..20: mol_type = other DNA
tatcagcaggtaattgtgca

SEQ ID NO: 38438 - DNA, 20 bp, synthetic construct
  misc_feature 1..20: note = Description of Artificial Sequence: Synthetic oligonucleotide
  misc_feature 1..20: note = Target: SCN10A; (+) strand; PAM type: NRG; PAM sequence: CAG
  source 1..20: mol_type = other DNA
attgtgcaaagctaatgttt

SEQ ID NO: 38439 - DNA, 20 bp, synthetic construct
  misc_feature 1..20: note = Description of Artificial Sequence: Synthetic oligonucleotide
  misc_feature 1..20: note = Target: SCN10A; (+) strand; PAM type: NRG; PAM sequence: AAG
  source 1..20: mol_type = other DNA
tgcaaagctaatgtttcagc

SEQ ID NO: 38440 - DNA, 20 bp, synthetic construct
  misc_feature 1..20: note = Description of Artificial Sequence: Synthetic oligonucleotide
  misc_feature 1..20: note = Target: SCN10A; (+) strand; PAM type: NRG; PAM sequence: AGG
  source 1..20: mol_type = other DNA
gcaaagctaatgtttcagca

SEQ ID NO: 38441 - DNA, 20 bp, synthetic construct
  misc_feature 1..20: note = Description of Artificial Sequence: Synthetic oligonucleotide
  misc_feature 1..20: note = Target: SCN10A; (+) strand; PAM type: NRG; PAM sequence: TGG
  source 1..20: mol_type = other DNA
aatgtttcagcaaggaataa

SEQ ID NO: 38442 - DNA, 20 bp, synthetic construct
  misc_feature 1..20: note = Description of Artificial Sequence: Synthetic oligonucleotide
  misc_feature 1..20: note = Target: SCN10A; (+) strand; PAM type: NRG; PAM sequence: AAG
  source 1..20: mol_type = other DNA
gtttcagcaaggaataatgg

SEQ ID NO: 38443 - DNA, 20 bp, synthetic construct
  misc_feature 1..20: note = Description of Artificial Sequence: Synthetic oligonucleotide
  misc_feature 1..20: note = Target: SCN10A; (+) strand; PAM type: NRG; PAM sequence: AGG
  source 1..20: mol_type = other DNA
tttcagcaaggaataatgga

SEQ ID NO: 38444 - DNA, 20 bp, synthetic construct
  misc_feature 1..20: note = Description of Artificial Sequence: Synthetic oligonucleotide
  misc_feature 1..20: note = Target: SCN10A; (+) strand; PAM type: NRG; PAM sequence: GGG
  source 1..20: mol_type = other DNA
ttcagcaaggaataatggaa

SEQ ID NO: 38445 - DNA, 20 bp, synthetic construct
  misc_feature 1..20: note = Description of Artificial Sequence: Synthetic oligonucleotide
  misc_feature 1..20: note = Target: SCN10A; (+) strand; PAM type: NRG; PAM sequence: GAG
  source 1..20: mol_type = other DNA
cagcaaggaataatggaagg

SEQ ID NO: 38446 - DNA, 20 bp, synthetic construct
  misc_feature 1..20: note = Description of Artificial Sequence: Synthetic oligonucleotide
  misc_feature 1..20: note = Target: SCN10A; (+) strand; PAM type: NRG; PAM sequence: AGG
  source 1..20: mol_type = other DNA
agcaaggaataatggaaggg

SEQ ID NO: 38447 - DNA, 20 bp, synthetic construct
  misc_feature 1..20: note = Description of Artificial Sequence: Synthetic oligonucleotide
  misc_feature 1..20: note = Target: SCN10A; (+) strand; PAM type: NRG; PAM sequence: GGG
  source 1..20: mol_type = other DNA
gcaaggaataatggaaggga

SEQ ID NO: 38448 - DNA, 20 bp, synthetic construct
  misc_feature 1..20: note = Description of Artificial Sequence: Synthetic oligonucleotide
  misc_feature 1..20: note = Target: SCN10A; (+) strand; PAM type: NRG; PAM sequence: AAG
  source 1..20: mol_type = other DNA
aggaataatggaagggaggg

SEQ ID NO: 38449 - DNA, 20 bp, synthetic construct
  misc_feature 1..20: note = Description of Artificial Sequence: Synthetic oligonucleotide
  misc_feature 1..20: note = Target: SCN10A; (+) strand; PAM type: NRG; PAM sequence: AAG
  source 1..20: mol_type = other DNA
taatggaagggagggaagat

SEQ ID NO: 38450 - DNA, 20 bp, synthetic construct
  misc_feature 1..20: note = Description of Artificial Sequence: Synthetic oligonucleotide
  misc_feature 1..20: note = Target: SCN10A; (+) strand; PAM type: NRG; PAM sequence: AGG
  source 1..20: mol_type = other DNA
aatggaagggagggaagata

SEQ ID NO: 38451 - DNA, 20 bp, synthetic construct
  misc_feature 1..20: note = Description of Artificial Sequence: Synthetic oligonucleotide
  misc_feature 1..20: note = Target: SCN10A; (+) strand; PAM type: NRG; PAM sequence: AAG
  source 1..20: mol_type = other DNA
agggagggaagataaggaaa

SEQ ID NO: 38452 - DNA, 20 bp, synthetic construct
  misc_feature 1..20: note = Description of Artificial Sequence: Synthetic oligonucleotide
  misc_feature 1..20: note = Target: SCN10A; (+) strand; PAM type: NRG; PAM sequence: AAG
  source 1..20: mol_type = other DNA
ataaggaaaaagattgtgtt

SEQ ID NO: 38453 - DNA, 20 bp, synthetic construct
  misc_feature 1..20: note = Description of Artificial Sequence: Synthetic oligonucleotide
  misc_feature 1..20: note = Target: SCN10A; (+) strand; PAM type: NRG; PAM sequence: TGG
  source 1..20: mol_type = other DNA
aaaagattgtgttaagaaca

SEQ ID NO: 38454 - DNA, 20 bp, synthetic construct
  misc_feature 1..20: note = Description of Artificial Sequence: Synthetic oligonucleotide
  misc_feature 1..20: note = Target: SCN10A; (+) strand; PAM type: NRG; PAM sequence: AAG
  source 1..20: mol_type = other DNA
tgtgttaagaacatggcaat

SEQ ID NO: 38455 - DNA, 20 bp, synthetic construct
  misc_feature 1..20: note = Description of Artificial Sequence: Synthetic oligonucleotide
  misc_feature 1..20: note = Target: SCN10A; (+) strand; PAM type: NRG; PAM sequence: TGG
  source 1..20: mol_type = other DNA
taagaacatggcaataagat

SEQ ID NO: 38456 - DNA, 20 bp, synthetic construct
  misc_feature 1..20: note = Description of Artificial Sequence: Synthetic oligonucleotide
  misc_feature 1..20: note = Target: SCN10A; (+) strand; PAM type: NRG; PAM sequence: TGG
  source 1..20: mol_type = other DNA
attggtttctgattcctcac

SEQ ID NO: 38457 - DNA, 20 bp, synthetic construct
  misc_feature 1..20: note = Description of Artificial Sequence: Synthetic oligonucleotide
  misc_feature 1..20: note = Target: SCN10A; (+) strand; PAM type: NRG; PAM sequence: AAG
  source 1..20: mol_type = other DNA
acaatttaatgctttttcaa

SEQ ID NO: 38458 - DNA, 20 bp, synthetic construct
  misc_feature 1..20: note = Description of Artificial Sequence: Synthetic oligonucleotide
  misc_feature 1..20: note = Target: SCN10A; (+) strand; PAM type: NRG; PAM sequence: CAG
  source 1..20: mol_type = other DNA
aatgctttttcaaaagtata

SEQ ID NO: 38459 - DNA, 20 bp, synthetic construct
  misc_feature 1..20: note = Description of Artificial Sequence: Synthetic oligonucleotide
  misc_feature 1..20: note = Target: SCN10A; (+) strand; PAM type: NRG; PAM sequence: TGG
  source 1..20: mol_type = other DNA
aaagtatacagcatgatctt

SEQ ID NO: 38460 - DNA, 20 bp, synthetic construct
  misc_feature 1..20: note = Description of Artificial Sequence: Synthetic oligonucleotide
  misc_feature 1..20: note = Target: SCN10A; (+) strand; PAM type: NRG; PAM sequence: GAG
  source 1..20: mol_type = other DNA
agtatacagcatgatctttg

SEQ ID NO: 38461 - DNA, 20 bp, synthetic construct
  misc_feature 1..20: note = Description of Artificial Sequence: Synthetic oligonucleotide
  misc_feature 1..20: note = Target: SCN10A; (+) strand; PAM type: NRG; PAM sequence: CAG
  source 1..20: mol_type = other DNA
cagcatgatctttggagccc

SEQ ID NO: 38462 - DNA, 20 bp, synthetic construct
  misc_feature 1..20: note = Description of Artificial Sequence: Synthetic oligonucleotide
  misc_feature 1..20: note = Target: SCN10A; (+) strand; PAM type: NRG; PAM sequence: AAG
  source 1..20: mol_type = other DNA
ttggagccccagtctatccc

SEQ ID NO: 38463 - DNA, 20 bp, synthetic construct
  misc_feature 1..20: note = Description of Artificial Sequence: Synthetic oligonucleotide
  misc_feature 1..20: note = Target: SCN10A; (+) strand; PAM type: NRG; PAM sequence: AGG
  source 1..20: mol_type = other DNA
tggagccccagtctatccca

SEQ ID NO: 38464 - DNA, 20 bp, synthetic construct
  misc_feature 1..20: note = Description of Artificial Sequence: Synthetic oligonucleotide
  misc_feature 1..20: note = Target: SCN10A; (+) strand; PAM type: NRG; PAM sequence: TGG
  source 1..20: mol_type = other DNA
ggacatttattatcttcctc

SEQ ID NO: 38465 - DNA, 20 bp, synthetic construct
  misc_feature 1..20: note = Description of Artificial Sequence: Synthetic oligonucleotide
  misc_feature 1..20: note = Target: SCN10A; (+) strand; PAM type: NRG; PAM sequence: GGG
  source 1..20: mol_type = other DNA
gacatttattatcttcctct

SEQ ID NO: 38466 - DNA, 20 bp, synthetic construct
  misc_feature 1..20: note = Description of Artificial Sequence: Synthetic oligonucleotide
  misc_feature 1..20: note = Target: SCN10A; (+) strand; PAM type: NRG; PAM sequence: CAG
  source 1..20: mol_type = other DNA
attatcttcctctgggttct

SEQ ID NO: 38467 - DNA, 20 bp, synthetic construct
  misc_feature 1..20: note = Description of Artificial Sequence: Synthetic oligonucleotide
  misc_feature 1..20: note = Target: SCN10A; (+) strand; PAM type: NRG; PAM sequence: TAG
  source 1..20: mol_type = other DNA
cctctgggttctcagcaaca

SEQ ID NO: 38468 - DNA, 20 bp, synthetic construct
  misc_feature 1..20: note = Description of Artificial Sequence: Synthetic oligonucleotide
  misc_feature 1..20: note = Target: SCN10A; (+) strand; PAM type: NRG; PAM sequence: AGG
  source 1..20: mol_type = other DNA
ctctgggttctcagcaacat

SEQ ID NO: 38469 - DNA, 20 bp, synthetic construct
  misc_feature 1..20: note = Description of Artificial Sequence: Synthetic oligonucleotide
  misc_feature 1..20: note = Target: SCN10A; (+) strand; PAM type: NRG; PAM sequence: TGG
  source 1..20: mol_type = other DNA
gcaacataggaaacaactaa

SEQ ID NO: 38470 - DNA, 20 bp, synthetic construct
  misc_feature 1..20: note = Description of Artificial Sequence: Synthetic oligonucleotide
  misc_feature 1..20: note = Target: SCN10A; (+) strand; PAM type: NRG; PAM sequence: AAG
  source 1..20: mol_type = other DNA
ttatcaatttgcatttcaaa

SEQ ID NO: 38471 - DNA, 20 bp, synthetic construct
  misc_feature 1..20: note = Description of Artificial Sequence: Synthetic oligonucleotide
  misc_feature 1..20: note = Target: SCN10A; (+) strand; PAM type: NRG; PAM sequence: TAG
  source 1..20: mol_type = other DNA
tgcatttcaaaaagaaaatc

SEQ ID NO: 38472 - DNA, 20 bp, synthetic construct
  misc_feature 1..20: note = Description of Artificial Sequence: Synthetic oligonucleotide
  misc_feature 1..20: note = Target: SCN10A; (+) strand; PAM type: NRG; PAM sequence: GAG
  source 1..20: mol_type = other DNA
tctagtctgattatttccac

SEQ ID NO: 38473 - DNA, 20 bp, synthetic construct
  misc_feature 1..20: note = Description of Artificial Sequence: Synthetic oligonucleotide
  misc_feature 1..20: note = Target: SCN10A; (+) strand; PAM type: NRG; PAM sequence: AGG
  source 1..20: mol_type = other DNA
ctagtctgattatttccacg

SEQ ID NO: 38474 - DNA, 20 bp, synthetic construct
  misc_feature 1..20: note = Description of Artificial Sequence: Synthetic oligonucleotide
  misc_feature 1..20: note = Target: SCN10A; (+) strand; PAM type: NRG; PAM sequence: AAG
  source 1..20: mol_type = other DNA
ctgattatttccacgaggcc

SEQ ID NO: 38475 - DNA, 20 bp, synthetic construct
  misc_feature 1..20: note = Description of Artificial Sequence: Synthetic oligonucleotide
  misc_feature 1..20: note = Target: SCN10A; (+) strand; PAM type: NRG; PAM sequence: AGG
  source 1..20: mol_type = other DNA
tgattatttccacgaggcca

SEQ ID NO: 38476 - DNA, 20 bp, synthetic construct
  misc_feature 1..20: note = Description of Artificial Sequence: Synthetic oligonucleotide
  misc_feature 1..20: note = Target: SCN10A; (+) strand; PAM type: NRG; PAM sequence: CAG
  source 1..20: mol_type = other DNA
atacctgtcacataaattcc

SEQ ID NO: 38477 - DNA, 20 bp, synthetic construct
  misc_feature 1..20: note = Description of Artificial Sequence: Synthetic oligonucleotide
  misc_feature 1..20: note = Target: SCN10A; (+) strand; PAM type: NRG; PAM sequence: AGG
  source 1..20: mol_type = other DNA
tacctgtcacataaattccc

SEQ ID NO: 38478 - DNA, 20 bp, synthetic construct
  misc_feature 1..20: note = Description of Artificial Sequence: Synthetic oligonucleotide
  misc_feature 1..20: note = Target: SCN10A; (+) strand; PAM type: NRG; PAM sequence: TAG
  source 1..20: mol_type = other DNA
ttcccaggattgtgaccata

SEQ ID NO: 38479 - DNA, 20 bp, synthetic construct
  misc_feature 1..20: note = Description of Artificial Sequence: Synthetic oligonucleotide
  misc_feature 1..20: note = Target: SCN10A; (+) strand; PAM type: NRG; PAM sequence: AGG
  source 1..20: mol_type = other DNA
tcccaggattgtgaccatat

SEQ ID NO: 38480 - DNA, 20 bp, synthetic construct
  misc_feature 1..20: note = Description of Artificial Sequence: Synthetic oligonucleotide
  misc_feature 1..20: note = Target: SCN10A; (+) strand; PAM type: NRG; PAM sequence: TAG
  source 1..20: mol_type = other DNA
caggattgtgaccatatagg

SEQ ID NO: 38481 - DNA, 20 bp, synthetic construct
  misc_feature 1..20: note = Description of Artificial Sequence: Synthetic oligonucleotide
  misc_feature 1..20: note = Target: SCN10A; (+) strand; PAM type: NRG; PAM sequence: TAG
  source 1..20: mol_type = other DNA
tgtatatgttatacttttca

SEQ ID NO: 38482 - DNA, 20 bp, synthetic construct
  misc_feature 1..20: note = Description of Artificial Sequence: Synthetic oligonucleotide
  misc_feature 1..20: note = Target: SCN10A; (+) strand; PAM type: NRG; PAM sequence: AAG
  source 1..20: mol_type = other DNA
cttttcatagtgtgcatata

SEQ ID NO: 38483 - DNA, 20 bp, synthetic construct
  misc_feature 1..20: note = Description of Artificial Sequence: Synthetic oligonucleotide
  misc_feature 1..20: note = Target: SCN10A; (+) strand; PAM type: NRG; PAM sequence: AGG
  source 1..20: mol_type = other DNA
ttttcatagtgtgcatataa

SEQ ID NO: 38484 - DNA, 20 bp, synthetic construct
  misc_feature 1..20: note = Description of Artificial Sequence: Synthetic oligonucleotide
  misc_feature 1..20: note = Target: SCN10A; (+) strand; PAM type: NRG; PAM sequence: GGG
  source 1..20: mol_type = other DNA
tttcatagtgtgcatataaa

SEQ ID NO: 38485 - DNA, 20 bp, synthetic construct
  misc_feature 1..20: note = Description of Artificial Sequence: Synthetic oligonucleotide
  misc_feature 1..20: note = Target: SCN10A; (+) strand; PAM type: NRG; PAM sequence: CAG
  source 1..20: mol_type = other DNA
tataaagggaattatgtcaa

SEQ ID NO: 38486 - DNA, 20 bp, synthetic construct
  misc_feature 1..20: note = Description of Artificial Sequence: Synthetic oligonucleotide
  misc_feature 1..20: note = Target: SCN10A; (+) strand; PAM type: NRG; PAM sequence: CAG
  source 1..20: mol_type = other DNA
agggaattatgtcaacagtt

SEQ ID NO: 38487 - DNA, 20 bp, synthetic construct
  misc_feature 1..20: note = Description of Artificial Sequence: Synthetic oligonucleotide
  misc_feature 1..20: note = Target: SCN10A; (+) strand; PAM type: NRG; PAM sequence: AAG
  source 1..20: mol_type = other DNA
agttaatacaaaatctccta

SEQ ID NO: 38488 - DNA, 20 bp, synthetic construct
  misc_feature 1..20: note = Description of Artificial Sequence: Synthetic oligonucleotide
  misc_feature 1..20: note = Target: SCN10A; (+) strand; PAM type: NRG; PAM sequence: TGG
  source 1..20: mol_type = other DNA
atacaaaatctcctaaagaa

SEQ ID NO: 38489 - DNA, 20 bp, synthetic construct
  misc_feature 1..20: note = Description of Artificial Sequence: Synthetic oligonucleotide
  misc_feature 1..20: note = Target: SCN10A; (+) strand; PAM type: NRG; PAM sequence: TGG
  source 1..20: mol_type = other DNA
agaatggatttgataattac

SEQ ID NO: 38490 - DNA, 20 bp, synthetic construct
  misc_feature 1..20: note = Description of Artificial Sequence: Synthetic oligonucleotide
  misc_feature 1..20: note = Target: SCN10A; (+) strand; PAM type: NRG; PAM sequence: GGG
  source 1..20: mol_type = other DNA
gaatggatttgataattact

SEQ ID NO: 38491 - DNA, 20 bp, synthetic construct
  misc_feature 1..20: note = Description of Artificial Sequence: Synthetic oligonucleotide
  misc_feature 1..20: note = Target: SCN10A; (+) strand; PAM type: NRG; PAM sequence: TGG
  source 1..20: mol_type = other DNA
gatttgataattactgggaa

SEQ ID NO: 38492 - DNA, 20 bp, synthetic construct
  misc_feature 1..20: note = Description of Artificial Sequence: Synthetic oligonucleotide
  misc_feature 1..20: note = Target: SCN10A; (+) strand; PAM type: NRG; PAM sequence: AAG
  source 1..20: mol_type = other DNA
tgataattactgggaatgga

SEQ ID NO: 38493 - DNA, 20 bp, synthetic construct
  misc_feature 1..20: note = Description of Artificial Sequence: Synthetic oligonucleotide
  misc_feature 1..20: note = Target: SCN10A; (+) strand; PAM type: NRG; PAM sequence: AGG
  source 1..20: mol_type = other DNA
gataattactgggaatggaa

SEQ ID NO: 38494 - DNA, 20 bp, synthetic construct
  misc_feature 1..20: note = Description of Artificial Sequence: Synthetic oligonucleotide
  misc_feature 1..20: note = Target: SCN10A; (+) strand; PAM type: NRG; PAM sequence: TGG
  source 1..20: mol_type = other DNA
gaatggaaaggatccaactt

SEQ ID NO: 38495 - DNA, 20 bp, synthetic construct
  misc_feature 1..20: note = Description of Artificial Sequence: Synthetic oligonucleotide
  misc_feature 1..20: note = Target: SCN10A; (+) strand; PAM type: NRG; PAM sequence: AAG
  source 1..20: mol_type = other DNA
tggaaaggatccaactttgg

SEQ ID NO: 38496 - DNA, 20 bp, synthetic construct
  misc_feature 1..20: note = Description of Artificial Sequence: Synthetic oligonucleotide
  misc_feature 1..20: note = Target: SCN10A; (+) strand; PAM type: NRG; PAM sequence: TGG
  source 1..20: mol_type = other DNA
tccaactttggaagacgatt

SEQ ID NO: 38497 - DNA, 20 bp, synthetic construct
  misc_feature 1..20: note = Description of Artificial Sequence: Synthetic oligonucleotide
  misc_feature 1..20: note = Target: SCN10A; (+) strand; PAM type: NRG; PAM sequence: TGG
  source 1..20: mol_type = other DNA
aaatgtacacccctttgacc

SEQ ID NO: 38498 - DNA, 20 bp, synthetic construct
  misc_feature 1..20: note = Description of Artificial Sequence: Synthetic oligonucleotide
  misc_feature 1..20: note = Target: SCN10A; (+) strand; PAM type: NRG; PAM sequence: TAG
  source 1..20: mol_type = other DNA
tgacctggcaattctacttc

SEQ ID NO: 38499 - DNA, 20 bp, synthetic construct
  misc_feature 1..20: note = Description of Artificial Sequence: Synthetic oligonucleotide
  misc_feature 1..20: note = Target: SCN10A; (+) strand; PAM type: NRG; PAM sequence: AAG
  source 1..20: mol_type = other DNA
ttactcatattatgtgtaca

SEQ ID NO: 38500 - DNA, 20 bp, synthetic construct
  misc_feature 1..20: note = Description of Artificial Sequence: Synthetic oligonucleotide
  misc_feature 1..20: note = Target: SCN10A; (+) strand; PAM type: NRG; PAM sequence: AAG
  source 1..20: mol_type = other DNA
gtgtacaaagatacatgtgt

SEQ ID NO: 38501 - DNA, 20 bp, synthetic construct
  misc_feature 1..20: note = Description of Artificial Sequence: Synthetic oligonucleotide
  misc_feature 1..20: note = Target: SCN10A; (+) strand; PAM type: NRG; PAM sequence: AGG
  source 1..20: mol_type = other DNA
tgtacaaagatacatgtgta

SEQ ID NO: 38502 - DNA, 20 bp, synthetic construct
  misc_feature 1..20: note = Description of Artificial Sequence: Synthetic oligonucleotide
  misc_feature 1..20: note = Target: SCN10A; (+) strand; PAM type: NRG; PAM sequence: TGG
  source 1..20: mol_type = other DNA
ctcaccaaaaaattaatatg

SEQ ID NO: 38503 - DNA, 20 bp, synthetic construct
  misc_feature 1..20: note = Description of Artificial Sequence: Synthetic oligonucleotide
  misc_feature 1..20: note = Target: SCN10A; (+) strand; PAM type: NRG; PAM sequence: TGG
  source 1..20: mol_type = other DNA
accaaaaaattaatatgtgg

SEQ ID NO: 38504 - DNA, 20 bp, synthetic construct
  misc_feature 1..20: note = Description of Artificial Sequence: Synthetic oligonucleotide
  misc_feature 1..20: note = Target: SCN10A; (+) strand; PAM type: NRG; PAM sequence: GAG
  source 1..20: mol_type = other DNA
aatatgtggtggcaaaatat

SEQ ID NO: 38505 - DNA, 20 bp, synthetic construct
  misc_feature 1..20: note = Description of Artificial Sequence: Synthetic oligonucleotide
  misc_feature 1..20: note = Target: SCN10A; (+) strand; PAM type: NRG; PAM sequence: AGG
  source 1..20: mol_type = other DNA
atatgtggtggcaaaatatg

SEQ ID NO: 38506 - DNA, 20 bp, synthetic construct
  misc_feature 1..20: note = Description of Artificial Sequence: Synthetic oligonucleotide
  misc_feature 1..20: note = Target: SCN10A; (+) strand; PAM type: NRG; PAM sequence: TAG
  source 1..20: mol_type = other DNA
taaatgtgaatgtctatcaa

SEQ ID NO: 38507 - DNA, 20 bp, synthetic construct
  misc_feature 1..20: note = Description of Artificial Sequence: Synthetic oligonucleotide
  misc_feature 1..20: note = Target: SCN10A; (+) strand; PAM type: NRG; PAM sequence: AGG
  source 1..20: mol_type = other DNA
aaatgtgaatgtctatcaat

SEQ ID NO: 38508 - DNA, 20 bp, synthetic construct
  misc_feature 1..20: note = Description of Artificial Sequence: Synthetic oligonucleotide
  misc_feature 1..20: note = Target: SCN10A; (+) strand; PAM type: NRG; PAM sequence: TAG
  source 1..20: mol_type = other DNA
aatgtctatcaataggaaaa

SEQ ID NO: 38509 - DNA, 20 bp, synthetic construct
  misc_feature 1..20: note = Description of Artificial Sequence: Synthetic oligonucleotide
  misc_feature 1..20: note = Target: SCN10A; (+) strand; PAM type: NRG; PAM sequence: CAG
  source 1..20: mol_type = other DNA
ccatgcaaatgaaatctgtt

SEQ ID NO: 38510 - DNA, 20 bp, synthetic construct
  misc_feature 1..20: note = Description of Artificial Sequence: Synthetic oligonucleotide
  misc_feature 1..20: note = Target: SCN10A; (+) strand; PAM type: NRG; PAM sequence: CAG
  source 1..20: mol_type = other DNA
ttcagctaatttctataaaa

SEQ ID NO: 38511 - DNA, 20 bp, synthetic construct
  misc_feature 1..20: note = Description of Artificial Sequence: Synthetic oligonucleotide
  misc_feature 1..20: note = Target: SCN10A; (+) strand; PAM type: NRG; PAM sequence: TGG
  source 1..20: mol_type = other DNA
ttctataaaacagctgctgc

SEQ ID NO: 38512 - DNA, 20 bp, synthetic construct
  misc_feature 1..20: note = Description of Artificial Sequence: Synthetic oligonucleotide
  misc_feature 1..20: note = Target: SCN10A; (+) strand; PAM type: NRG; PAM sequence: GGG
  source 1..20: mol_type = other DNA
tctataaaacagctgctgct

SEQ ID NO: 38513 - DNA, 20 bp, synthetic construct
  misc_feature 1..20: note = Description of Artificial Sequence: Synthetic oligonucleotide
  misc_feature 1..20: note = Target: SCN10A; (+) strand; PAM type: NRG; PAM sequence: TGG
  source 1..20: mol_type = other DNA
agctgctgctgggatttttt

SEQ ID NO: 38514 - DNA, 20 bp, synthetic construct
  misc_feature 1..20: note = Description of Artificial Sequence: Synthetic oligonucleotide
  misc_feature 1..20: note = Target: SCN10A; (+) strand; PAM type: NRG; PAM sequence: GGG
  source 1..20: mol_type = other DNA
gctgctgctgggattttttt

SEQ ID NO: 38515 - DNA, 20 bp, synthetic construct
  misc_feature 1..20: note = Description of Artificial Sequence: Synthetic oligonucleotide
  misc_feature 1..20: note = Target: SCN10A; (+) strand; PAM type: NRG; PAM sequence: GGG
  source 1..20: mol_type = other DNA
ctgctgctgggatttttttg

SEQ ID NO: 38516 - DNA, 20 bp, synthetic construct
  misc_feature 1..20: note = Description of Artificial Sequence: Synthetic oligonucleotide
  misc_feature 1..20: note = Target: SCN10A; (+) strand; PAM type: NRG; PAM sequence: TAG
  source 1..20: mol_type = other DNA
tggggatgtcattgaattta

SEQ ID NO: 38517 - DNA, 20 bp, synthetic construct
  misc_feature 1..20: note = Description of Artificial Sequence: Synthetic oligonucleotide
  misc_feature 1..20: note = Target: SCN10A; (+) strand; PAM type: NRG; PAM sequence: TGG
  source 1..20: mol_type = other DNA
attgaatttatagactaatt

SEQ ID NO: 38518 - DNA, 20 bp, synthetic construct
  misc_feature 1..20: note = Description of Artificial Sequence: Synthetic oligonucleotide
  misc_feature 1..20: note = Target: SCN10A; (+) strand; PAM type: NRG; PAM sequence: GGG
  source 1..20: mol_type = other DNA
ttgaatttatagactaattt

SEQ ID NO: 38519 - DNA, 20 bp, synthetic construct
  misc_feature 1..20: note = Description of Artificial Sequence: Synthetic oligonucleotide
  misc_feature 1..20: note = Target: SCN10A; (+) strand; PAM type: NRG; PAM sequence: CAG
  source 1..20: mol_type = other DNA
aatttatagactaatttggg

SEQ ID NO: 38520 - DNA, 20 bp, synthetic construct
  misc_feature 1..20: note = Description of Artificial Sequence: Synthetic oligonucleotide
  misc_feature 1..20: note = Target: SCN10A; (+) strand; PAM type: NRG; PAM sequence: CAG
  source 1..20: mol_type = other DNA
caattatgaatcttctaatc

SEQ ID NO: 38521 - DNA, 20 bp, synthetic construct
  misc_feature 1..20: note = Description of Artificial Sequence: Synthetic oligonucleotide
  misc_feature 1..20: note = Target: SCN10A; (+) strand; PAM type: NRG; PAM sequence: GAG
  source 1..20: mol_type = other DNA
atcttctaatccagtcacat

SEQ ID NO: 38522 - DNA, 20 bp, synthetic construct
  misc_feature 1..20: note = Description of Artificial Sequence: Synthetic oligonucleotide
  misc_feature 1..20: note = Target: SCN10A; (+) strand; PAM type: NRG; PAM sequence: TAG
  source 1..20: mol_type = other DNA
gagacatcctttaattcatt

SEQ ID NO: 38523 - DNA, 20 bp, synthetic construct
  misc_feature 1..20: note = Description of Artificial Sequence: Synthetic oligonucleotide
  misc_feature 1..20: note = Target: SCN10A; (+) strand; PAM type: NRG; PAM sequence: AGG
  source 1..20: mol_type = other DNA
agacatcctttaattcattt

SEQ ID NO: 38524 - DNA, 20 bp, synthetic construct
  misc_feature 1..20: note = Description of Artificial Sequence: Synthetic oligonucleotide
  misc_feature 1..20: note = Target: SCN10A; (+) strand; PAM type: NRG; PAM sequence: TAG
  source 1..20: mol_type = other DNA
aataatgctgtattattttt

SEQ ID NO: 38525 - DNA, 20 bp, synthetic construct
  misc_feature 1..20: note = Description of Artificial Sequence: Synthetic oligonucleotide
  misc_feature 1..20: note = Target: SCN10A; (+) strand; PAM type: NRG; PAM sequence: AAG
  source 1..20: mol_type = other DNA
ctgtattattttttagtata

SEQ ID NO: 38526 - DNA, 20 bp, synthetic construct
  misc_feature 1..20: note = Description of Artificial Sequence: Synthetic oligonucleotide
  misc_feature 1..20: note = Target: SCN10A; (+) strand; PAM type: NRG; PAM sequence: AGG
  source 1..20: mol_type = other DNA
tgtattattttttagtataa

SEQ ID NO: 38527 - DNA, 20 bp, synthetic construct
  misc_feature 1..20: note = Description of Artificial Sequence: Synthetic oligonucleotide
  misc_feature 1..20: note = Target: SCN10A; (+) strand; PAM type: NRG; PAM sequence: CAG
  source 1..20: mol_type = other DNA
tcttgtgcatatttttacaa

SEQ ID NO: 38528 - DNA, 20 bp, synthetic construct
  misc_feature 1..20: note = Description of Artificial Sequence: Synthetic oligonucleotide
  misc_feature 1..20: note = Target: SCN10A; (+) strand; PAM type: NRG; PAM sequence: TGG
  source 1..20: mol_type = other DNA
catatttttacaacagcatt

SEQ ID NO: 38529 - DNA, 20 bp, synthetic construct
  misc_feature 1..20: note = Description of Artificial Sequence: Synthetic oligonucleotide
  misc_feature 1..20: note = Target: SCN10A; (+) strand; PAM type: NRG; PAM sequence: TAG
  source 1..20: mol_type = other DNA
acaacagcatttggatttat

SEQ ID NO: 38530 - DNA, 20 bp, synthetic construct
  misc_feature 1..20: note = Description of Artificial Sequence: Synthetic oligonucleotide
  misc_feature 1..20: note = Target: SCN10A; (+) strand; PAM type: NRG; PAM sequence: TAG
  source 1..20: mol_type = other DNA
ttcatttgttatcctttttc

SEQ ID NO: 38531 - DNA, 20 bp, synthetic construct
  misc_feature 1..20: note = Description of Artificial Sequence: Synthetic oligonucleotide
  misc_feature 1..20: note = Target: SCN10A; (+) strand; PAM type: NRG; PAM sequence: TAG
  source 1..20: mol_type = other DNA
tatcctttttctagttttgt

SEQ ID NO: 38532 - DNA, 20 bp, synthetic construct
  misc_feature 1..20: note = Description of Artificial Sequence: Synthetic oligonucleotide
  misc_feature 1..20: note = Target: SCN10A; (+) strand; PAM type: NRG; PAM sequence: AGG
  source 1..20: mol_type = other DNA
atcctttttctagttttgtt

SEQ ID NO: 38533 - DNA, 20 bp, synthetic construct
  misc_feature 1..20: note = Description of Artificial Sequence: Synthetic oligonucleotide
  misc_feature 1..20: note = Target: SCN10A; (+) strand; PAM type: NRG; PAM sequence: CAG
  source 1..20: mol_type = other DNA
gtctttaaataatttctttt

SEQ ID NO: 38534 - DNA, 20 bp, synthetic construct
  misc_feature 1..20: note = Description of Artificial Sequence: Synthetic oligonucleotide
  misc_feature 1..20: note = Target: SCN10A; (+) strand; PAM type: NRG; PAM sequence: TAG
  source 1..20: mol_type = other DNA
atgtctttaactgcactctc

SEQ ID NO: 38535 - DNA, 20 bp, synthetic construct
  misc_feature 1..20: note = Description of Artificial Sequence: Synthetic oligonucleotide
  misc_feature 1..20: note = Target: SCN10A; (+) strand; PAM type: NRG; PAM sequence: AGG
  source 1..20: mol_type = other DNA
tgtctttaactgcactctct

SEQ ID NO: 38536 - DNA, 20 bp, synthetic construct
  misc_feature 1..20: note = Description of Artificial Sequence: Synthetic oligonucleotide
  misc_feature 1..20: note = Target: SCN10A; (+) strand; PAM type: NRG; PAM sequence: TAG
  source 1..20: mol_type = other DNA
ccctcgaaattatataattt

SEQ ID NO: 38537 - DNA, 20 bp, synthetic construct
  misc_feature 1..20: note = Description of Artificial Sequence: Synthetic oligonucleotide
  misc_feature 1..20: note = Target: SCN10A; (+) strand; PAM type: NRG; PAM sequence: TAG
  source 1..20: mol_type = other DNA
aattatataattttagttta

SEQ ID NO: 38538 - DNA, 20 bp, synthetic construct
  misc_feature 1..20: note = Description of Artificial Sequence: Synthetic oligonucleotide
  misc_feature 1..20: note = Target: SCN10A; (+) strand; PAM type: NRG; PAM sequence: AAG
  source 1..20: mol_type = other DNA
ttatagtttgtcttttgtcc

SEQ ID NO: 38539 - DNA, 20 bp, synthetic construct
  misc_feature 1..20: note = Description of Artificial Sequence: Synthetic oligonucleotide
  misc_feature 1..20: note = Target: SCN10A; (+) strand; PAM type: NRG; PAM sequence: AAG
  source 1..20: mol_type = other DNA
cttttgtccaagaattcttt

SEQ ID NO: 38540 - DNA, 20 bp, synthetic construct
  misc_feature 1..20: note = Description of Artificial Sequence: Synthetic oligonucleotide
  misc_feature 1..20: note = Target: SCN10A; (+) strand; PAM type: NRG; PAM sequence: GAG
  source 1..20: mol_type = other DNA
tttgtccaagaattctttaa

SEQ ID NO: 38541 - DNA, 20 bp, synthetic construct
  misc_feature 1..20: note = Description of Artificial Sequence: Synthetic oligonucleotide
  misc_feature 1..20: note = Target: SCN10A; (+) strand; PAM type: NRG; PAM sequence: GAG
  source 1..20: mol_type = other DNA
tgtccaagaattctttaaga

SEQ ID NO: 38542 - DNA, 20 bp, synthetic construct
  misc_feature 1..20: note = Description of Artificial Sequence: Synthetic oligonucleotide
  misc_feature 1..20: note = Target: SCN10A; (+) strand; PAM type: NRG; PAM sequence: AAG
  source 1..20: mol_type = other DNA
agagatttttaaaaattatc

SEQ ID NO: 38543 - DNA, 20 bp, synthetic construct
  misc_feature 1..20: note = Description of Artificial Sequence: Synthetic oligonucleotide
  misc_feature 1..20: note = Target: SCN10A; (+) strand; PAM type: NRG; PAM sequence: TGG
  source 1..20: mol_type = other DNA
gatttttaaaaattatcaag

SEQ ID NO: 38544 - DNA, 20 bp, synthetic construct
  misc_feature 1..20: note = Description of Artificial Sequence: Synthetic oligonucleotide
  misc_feature 1..20: note = Target: SCN10A; (+) strand; PAM type: NRG; PAM sequence: AAG
  source 1..20: mol_type = other DNA
tttaaaaattatcaagtgga

SEQ ID NO: 38545 - DNA, 20 bp, synthetic construct
  misc_feature 1..20: note = Description of Artificial Sequence: Synthetic oligonucleotide
  misc_feature 1..20: note = Target: SCN10A; (+) strand; PAM type: NRG; PAM sequence: TGG
  source 1..20: mol_type = other DNA
tcctctcatttcattaaatt

SEQ ID NO: 38546 - DNA, 20 bp, synthetic construct
  misc_feature 1..20: note = Description of Artificial Sequence: Synthetic oligonucleotide
  misc_feature 1..20: note = Target: SCN10A; (+) strand; PAM type: NRG; PAM sequence: CAG
  source 1..20: mol_type = other DNA
taactctatttcattatgat

SEQ ID NO: 38547 - DNA, 20 bp, synthetic construct
  misc_feature 1..20: note = Description of Artificial Sequence: Synthetic oligonucleotide
  misc_feature 1..20: note = Target: SCN10A; (+) strand; PAM type: NRG; PAM sequence: GAG
  source 1..20: mol_type = other DNA
actctatttcattatgatca

SEQ ID NO: 38548 - DNA, 20 bp, synthetic construct
  misc_feature 1..20: note = Description of Artificial Sequence: Synthetic oligonucleotide
  misc_feature 1..20: note = Target: SCN10A; (+) strand; PAM type: NRG; PAM sequence: TGG
  source 1..20: mol_type = other DNA
tctatattatttccactttc

SEQ ID NO: 38549 - DNA, 20 bp, synthetic construct
  misc_feature 1..20: note = Description of Artificial Sequence: Synthetic oligonucleotide
  misc_feature 1..20: note = Target: SCN10A; (+) strand; PAM type: NRG; PAM sequence: GAG
  source 1..20: mol_type = other DNA
tatattatttccactttctg

SEQ ID NO: 38550 - DNA, 20 bp, synthetic construct
  misc_feature 1..20: note = Description of Artificial Sequence: Synthetic oligonucleotide
  misc_feature 1..20: note = Target: SCN10A; (+) strand; PAM type: NRG; PAM sequence: GAG
  source 1..20: mol_type = other DNA
tccactttctggagcttatt

SEQ ID NO: 38551 - DNA, 20 bp, synthetic construct
  misc_feature 1..20: note = Description of Artificial Sequence: Synthetic oligonucleotide
  misc_feature 1..20: note = Target: SCN10A; (+) strand; PAM type: NRG; PAM sequence: AGG
  source 1..20: mol_type = other DNA
ccactttctggagcttattg

SEQ ID NO: 38552 - DNA, 20 bp, synthetic construct
  misc_feature 1..20: note = Description of Artificial Sequence: Synthetic oligonucleotide
  misc_feature 1..20: note = Target: SCN10A; (+) strand; PAM type: NRG; PAM sequence: TGG
  source 1..20: mol_type = other DNA
gcttattgaggtttttgtca

SEQ ID NO: 38553 - DNA, 20 bp, synthetic construct
  misc_feature 1..20: note = Description of Artificial Sequence: Synthetic oligonucleotide
  misc_feature 1..20: note = Target: SCN10A; (+) strand; PAM type: NRG; PAM sequence: TGG
  source 1..20: mol_type = other DNA
ttttgtcatggcttaatatt

SEQ ID NO: 38554 - DNA, 20 bp, synthetic construct
  misc_feature 1..20: note = Description of Artificial Sequence: Synthetic oligonucleotide
  misc_feature 1..20: note = Target: SCN10A; (+) strand; PAM type: NRG; PAM sequence: TGG
  source 1..20: mol_type = other DNA
aatatttggtttgatatgtt

SEQ ID NO: 38555 - DNA, 20 bp, synthetic construct
  misc_feature 1..20: note = Description of Artificial Sequence: Synthetic oligonucleotide
  misc_feature 1..20: note = Target: SCN10A; (+) strand; PAM type: NRG; PAM sequence: AAG
  source 1..20: mol_type = other DNA
gatatgtttggttttttgaa

SEQ ID NO: 38556 - DNA, 20 bp, synthetic construct
  misc_feature 1..20: note = Description of Artificial Sequence: Synthetic oligonucleotide
  misc_feature 1..20: note = Target: SCN10A; (+) strand; PAM type: NRG; PAM sequence: AGG
  source 1..20: mol_type = other DNA
atatgtttggttttttgaaa

SEQ ID NO: 38557 - DNA, 20 bp, synthetic construct
  misc_feature 1..20: note = Description of Artificial Sequence: Synthetic oligonucleotide
  misc_feature 1..20: note = Target: SCN10A; (+) strand; PAM type: NRG; PAM sequence: GAG
  source 1..20: mol_type = other DNA
atgtttggttttttgaaaag

SEQ ID NO: 38558 - DNA, 20 bp, synthetic construct
  misc_feature 1..20: note = Description of Artificial Sequence: Synthetic oligonucleotide
  misc_feature 1..20: note = Target: SCN10A; (+) strand; PAM type: NRG; PAM sequence: AGG
  source 1..20: mol_type = other DNA
tgtttggttttttgaaaagg

SEQ ID NO: 38559 - DNA, 20 bp, synthetic construct
  misc_feature 1..20: note = Description of Artificial Sequence: Synthetic oligonucleotide
  misc_feature 1..20: note = Target: SCN10A; (+) strand; PAM type: NRG; PAM sequence: TAG
  source 1..20: mol_type = other DNA
ggaggtgcattttctattgt

SEQ ID NO: 38560 - DNA, 20 bp, synthetic construct
  misc_feature 1..20: note = Description of Artificial Sequence: Synthetic oligonucleotide
  misc_feature 1..20: note = Target: SCN10A; (+) strand; PAM type: NRG; PAM sequence: AGG
  source 1..20: mol_type = other DNA
gaggtgcattttctattgtt

SEQ ID NO: 38561 - DNA, 20 bp, synthetic construct
  misc_feature 1..20: note = Description of Artificial Sequence: Synthetic oligonucleotide
  misc_feature 1..20: note = Target: SCN10A; (+) strand; PAM type: NRG; PAM sequence: GGG
  source 1..20: mol_type = other DNA
aggtgcattttctattgtta

SEQ ID NO: 38562 - DNA, 20 bp, synthetic construct
  misc_feature 1..20: note = Description of Artificial Sequence: Synthetic oligonucleotide
  misc_feature 1..20: note = Target: SCN10A; (+) strand; PAM type: NRG; PAM sequence: AAG
  source 1..20: mol_type = other DNA
tgcattttctattgttaggg

SEQ ID NO: 38563 - DNA, 20 bp, synthetic construct
  misc_feature 1..20: note = Description of Artificial Sequence: Synthetic oligonucleotide
  misc_feature 1..20: note = Target: SCN10A; (+) strand; PAM type: NRG; PAM sequence: AGG
  source 1..20: mol_type = other DNA
gcattttctattgttaggga

SEQ ID NO: 38564 - DNA, 20 bp, synthetic construct
  misc_feature 1..20: note = Description of Artificial Sequence: Synthetic oligonucleotide
  misc_feature 1..20: note = Target: SCN10A; (+) strand; PAM type: NRG; PAM sequence: TAG
  source 1..20: mol_type = other DNA
ttttctattgttagggaagg

SEQ ID NO: 38565 - DNA, 20 bp, synthetic construct
  misc_feature 1..20: note = Description of Artificial Sequence: Synthetic oligonucleotide
  misc_feature 1..20: note = Target: SCN10A; (+) strand; PAM type: NRG; PAM sequence: CAG
  source 1..20: mol_type = other DNA
gtagtttgctatatattaat

SEQ ID NO: 38566 - DNA, 20 bp, synthetic construct
  misc_feature 1..20: note = Description of Artificial Sequence: Synthetic oligonucleotide
  misc_feature 1..20: note = Target: SCN10A; (+) strand; PAM type: NRG; PAM sequence: TAG
  source 1..20: mol_type = other DNA
cattatattaattatattac

SEQ ID NO: 38567 - DNA, 20 bp, synthetic construct
  misc_feature 1..20: note = Description of Artificial Sequence: Synthetic oligonucleotide
  misc_feature 1..20: note = Target: SCN10A; (+) strand; PAM type: NRG; PAM sequence: AGG
  source 1..20: mol_type = other DNA
attatattaattatattact

SEQ ID NO: 38568 - DNA, 20 bp, synthetic construct
  misc_feature 1..20: note = Description of Artificial Sequence: Synthetic oligonucleotide
  misc_feature 1..20: note = Target: SCN10A; (+) strand; PAM type: NRG; PAM sequence: TGG
  source 1..20: mol_type = other DNA
taatacatttgatctgttat

SEQ ID NO: 38569 - DNA, 20 bp, synthetic construct
  misc_feature 1..20: note = Description of Artificial Sequence: Synthetic oligonucleotide
  misc_feature 1..20: note = Target: SCN10A; (+) strand; PAM type: NRG; PAM sequence: AAG
  source 1..20: mol_type = other DNA
ttgccatcttatttgttgca

SEQ ID NO: 38570 - DNA, 20 bp, synthetic construct
  misc_feature 1..20: note = Description of Artificial Sequence: Synthetic oligonucleotide
  misc_feature 1..20: note = Target: SCN10A; (+) strand; PAM type: NRG; PAM sequence: TAG
  source 1..20: mol_type = other DNA
tcttatttgttgcaaagata

SEQ ID NO: 38571 - DNA, 20 bp, synthetic construct
  misc_feature 1..20: note = Description of Artificial Sequence: Synthetic oligonucleotide
  misc_feature 1..20: note = Target: SCN10A; (+) strand; PAM type: NRG; PAM sequence: GAG
  source 1..20: mol_type = other DNA
ctatttcatgctttttgacc

SEQ ID NO: 38572 - DNA, 20 bp, synthetic construct
  misc_feature 1..20: note = Description of Artificial Sequence: Synthetic oligonucleotide
  misc_feature 1..20: note = Target: SCN10A; (+) strand; PAM type: NRG; PAM sequence: TGG
  source 1..20: mol_type = other DNA
tttctctgatattaaaatca

SEQ ID NO: 38573 - DNA, 20 bp, synthetic construct
  misc_feature 1..20: note = Description of Artificial Sequence: Synthetic oligonucleotide
  misc_feature 1..20: note = Target: SCN10A; (+) strand; PAM type: NRG; PAM sequence: TAG
  source 1..20: mol_type = other DNA
tcttttgaattctataattt

SEQ ID NO: 38574 - DNA, 20 bp, synthetic construct
  misc_feature 1..20: note = Description of Artificial Sequence: Synthetic oligonucleotide
  misc_feature 1..20: note = Target: SCN10A; (+) strand; PAM type: NRG; PAM sequence: GAG
  source 1..20: mol_type = other DNA
tagcctttctgtatcaccgt

SEQ ID NO: 38575 - DNA, 20 bp, synthetic construct
  misc_feature 1..20: note = Description of Artificial Sequence: Synthetic oligonucleotide
  misc_feature 1..20: note = Target: SCN10A; (+) strand; PAM type: NRG; PAM sequence: AGG
  source 1..20: mol_type = other DNA
agcctttctgtatcaccgtg

SEQ ID NO: 38576 - DNA, 20 bp, synthetic construct
  misc_feature 1..20: note = Description of Artificial Sequence: Synthetic oligonucleotide
  misc_feature 1..20: note = Target: SCN10A; (+) strand; PAM type: NRG; PAM sequence: GAG
  source 1..20: mol_type = other DNA
cctttctgtatcaccgtgag

SEQ ID NO: 38577 - DNA, 20 bp, synthetic construct
  misc_feature 1..20: note = Description of Artificial Sequence: Synthetic oligonucleotide
  misc_feature 1..20: note = Target: SCN10A; (+) strand; PAM type: NRG; PAM sequence: TAG
  source 1..20: mol_type = other DNA
agtattttttttattcaaca

SEQ ID NO: 38578 - DNA, 20 bp, synthetic construct
  misc_feature 1..20: note = Description of Artificial Sequence: Synthetic oligonucleotide
  misc_feature 1..20: note = Target: SCN10A; (+) strand; PAM type: NRG; PAM sequence: GAG
  source 1..20: mol_type = other DNA
tattttttttattcaacata

SEQ ID NO: 38579 - DNA, 20 bp, synthetic construct
  misc_feature 1..20: note = Description of Artificial Sequence: Synthetic oligonucleotide
  misc_feature 1..20: note = Target: SCN10A; (+) strand; PAM type: NRG; PAM sequence: TGG
  source 1..20: mol_type = other DNA
ttttttattcaacatagagt

SEQ ID NO: 38580 - DNA, 20 bp, synthetic construct
  misc_feature 1..20: note = Description of Artificial Sequence: Synthetic oligonucleotide
  misc_feature 1..20: note = Target: SCN10A; (+) strand; PAM type: NRG; PAM sequence: GGG
  source 1..20: mol_type = other DNA
tttttattcaacatagagtt

SEQ ID NO: 38581 - DNA, 20 bp, synthetic construct
  misc_feature 1..20: note = Description of Artificial Sequence: Synthetic oligonucleotide
  misc_feature 1..20: note = Target: SCN10A; (+) strand; PAM type: NRG; PAM sequence: TAG
  source 1..20: mol_type = other DNA
ggtattgctttgtaatgtaa

SEQ ID NO: 38582 - DNA, 20 bp, synthetic construct
  misc_feature 1..20: note = Description of Artificial Sequence: Synthetic oligonucleotide
  misc_feature 1..20: note = Target: SCN10A; (+) strand; PAM type: NRG; PAM sequence: AGG
  source 1..20: mol_type = other DNA
gtattgctttgtaatgtaat

SEQ ID NO: 38583 - DNA, 20 bp, synthetic construct
  misc_feature 1..20: note = Description of Artificial Sequence: Synthetic oligonucleotide
  misc_feature 1..20: note = Target: SCN10A; (+) strand; PAM type: NRG; PAM sequence: TAG
  source 1..20: mol_type = other DNA
gtaataggcatttttaaaaa

SEQ ID NO: 38584 - DNA, 20 bp, synthetic construct
  misc_feature 1..20: note = Description of Artificial Sequence: Synthetic oligonucleotide
  misc_feature 1..20: note = Target: SCN10A; (+) strand; PAM type: NRG; PAM sequence: AGG
  source 1..20: mol_type = other DNA
taataggcatttttaaaaat

SEQ ID NO: 38585 - DNA, 20 bp, synthetic construct
  misc_feature 1..20: note = Description of Artificial Sequence: Synthetic oligonucleotide
  misc_feature 1..20: note = Target: SCN10A; (+) strand; PAM type: NRG; PAM sequence: GAG
  source 1..20: mol_type = other DNA
aggcatttttaaaaataggt

SEQ ID NO: 38586 - DNA, 20 bp, synthetic construct
  misc_feature 1..20: note = Description of Artificial Sequence: Synthetic oligonucleotide
  misc_feature 1..20: note = Target: SCN10A; (+) strand; PAM type: NRG; PAM sequence: TAG
  source 1..20: mol_type = other DNA
gagtaaaatccatttatatt

SEQ ID NO: 38587 - DNA, 20 bp, synthetic construct
  misc_feature 1..20: note = Description of Artificial Sequence: Synthetic oligonucleotide
  misc_feature 1..20: note = Target: SCN10A; (+) strand; PAM type: NRG; PAM sequence: CAG
  source 1..20: mol_type = other DNA
atttatatttagtgacatga

SEQ ID NO: 38588 - DNA, 20 bp, synthetic construct
  misc_feature 1..20: note = Description of Artificial Sequence: Synthetic oligonucleotide
  misc_feature 1..20: note = Target: SCN10A; (+) strand; PAM type: NRG; PAM sequence: TAG
  source 1..20: mol_type = other DNA
agtgacatgacagatttgct

SEQ ID NO: 38589 - DNA, 20 bp, synthetic construct
  misc_feature 1..20: note = Description of Artificial Sequence: Synthetic oligonucleotide
  misc_feature 1..20: note = Target: SCN10A; (+) strand; PAM type: NRG; PAM sequence: TAG
  source 1..20: mol_type = other DNA
atgacagatttgcttagtct

SEQ ID NO: 38590 - DNA, 20 bp, synthetic construct
  misc_feature 1..20: note = Description of Artificial Sequence: Synthetic oligonucleotide
  misc_feature 1..20: note = Target: SCN10A; (+) strand; PAM type: NRG; PAM sequence: TAG
  source 1..20: mol_type = other DNA
attatttcatatgacgtatt

SEQ ID NO: 38591 - DNA, 20 bp, synthetic construct
  misc_feature 1..20: note = Description of Artificial Sequence: Synthetic oligonucleotide
  misc_feature 1..20: note = Target: SCN10A; (+) strand; PAM type: NRG; PAM sequence: TAG
  source 1..20: mol_type = other DNA
gtatttagtttttaaaatat

SEQ ID NO: 38592 - DNA, 20 bp, synthetic construct
  misc_feature 1..20: note = Description of Artificial Sequence: Synthetic oligonucleotide
  misc_feature 1..20: note = Target: SCN10A; (+) strand; PAM type: NRG; PAM sequence: AGG
  source 1..20: mol_type = other DNA
tatttagtttttaaaatatt

SEQ ID NO: 38593 - DNA, 20 bp, synthetic construct
  misc_feature 1..20: note = Description of Artificial Sequence: Synthetic oligonucleotide
  misc_feature 1..20: note = Target: SCN10A; (+) strand; PAM type: NRG; PAM sequence: TGG
  source 1..20: mol_type = other DNA
tagtttttaaaatattaggt

SEQ ID NO: 38594 - DNA, 20 bp, synthetic construct
  misc_feature 1..20: note = Description of Artificial Sequence: Synthetic oligonucleotide
  misc_feature 1..20: note = Target: SCN10A; (+) strand; PAM type: NRG; PAM sequence: AAG
  source 1..20: mol_type = other DNA
aaaatattaggttggtacaa

SEQ ID NO: 38595 - DNA, 20 bp, synthetic construct
  misc_feature 1..20: note = Description of Artificial Sequence: Synthetic oligonucleotide
  misc_feature 1..20: note = Target: SCN10A; (+) strand; PAM type: NRG; PAM sequence: TGG
  source 1..20: mol_type = other DNA
ggttggtacaaaagtaattg

SEQ ID NO: 38596 - DNA, 20 bp, synthetic construct
  misc_feature 1..20: note = Description of Artificial Sequence: Synthetic oligonucleotide
  misc_feature 1..20: note = Target: SCN10A; (+) strand; PAM type: NRG; PAM sequence: TGG
  source 1..20: mol_type = other DNA
tgaaatttgccgtttgatat

SEQ ID NO: 38597 - DNA, 20 bp, synthetic construct
  misc_feature 1..20: note = Description of Artificial Sequence: Synthetic oligonucleotide
  misc_feature 1..20: note = Target: SCN10A; (+) strand; PAM type: NRG; PAM sequence: TAG
  source 1..20: mol_type = other DNA
tgtttattttatatttattt

SEQ ID NO: 38598 - DNA, 20 bp, synthetic construct
  misc_feature 1..20: note = Description of Artificial Sequence: Synthetic oligonucleotide
  misc_feature 1..20: note = Target: SCN10A; (+) strand; PAM type: NRG; PAM sequence: TGG
  source 1..20: mol_type = other DNA
tttatatttattttagacta

SEQ ID NO: 38599 - DNA, 20 bp, synthetic construct
  misc_feature 1..20: note = Description of Artificial Sequence: Synthetic oligonucleotide
  misc_feature 1..20: note = Target: SCN10A; (+) strand; PAM type: NRG; PAM sequence: AAG
  source 1..20: mol_type = other DNA
tggaaattatgttatacaaa

SEQ ID NO: 38600 - DNA, 20 bp, synthetic construct
  misc_feature 1..20: note = Description of Artificial Sequence: Synthetic oligonucleotide
  misc_feature 1..20: note = Target: SCN10A; (+) strand; PAM type: NRG; PAM sequence: GAG
  source 1..20: mol_type = other DNA
gttatacaaaaagcaaattc

SEQ ID NO: 38601 - DNA, 20 bp, synthetic construct
  misc_feature 1..20: note = Description of Artificial Sequence: Synthetic oligonucleotide
  misc_feature 1..20: note = Target: SCN10A; (+) strand; PAM type: NRG; PAM sequence: GAG
  source 1..20: mol_type = other DNA
ttcgagcgattttcttattt

SEQ ID NO: 38602 - DNA, 20 bp, synthetic construct
  misc_feature 1..20: note = Description of Artificial Sequence: Synthetic oligonucleotide
  misc_feature 1..20: note = Target: SCN10A; (+) strand; PAM type: NRG; PAM sequence: TGG
  source 1..20: mol_type = other DNA
tttcttatttgagttcaaaa

SEQ ID NO: 38603 - DNA, 20 bp, synthetic construct
  misc_feature 1..20: note = Description of Artificial Sequence: Synthetic oligonucleotide
  misc_feature 1..20: note = Target: SCN10A; (+) strand; PAM type: NRG; PAM sequence: GGG
  source 1..20: mol_type = other DNA
ttcttatttgagttcaaaat

SEQ ID NO: 38604 - DNA, 20 bp, synthetic construct
  misc_feature 1..20: note = Description of Artificial Sequence: Synthetic oligonucleotide
  misc_feature 1..20: note = Target: SCN10A; (+) strand; PAM type: NRG; PAM sequence: AAG
  source 1..20: mol_type = other DNA
tgagttcaaaatgggttgta

SEQ ID NO: 38605 - DNA, 20 bp, synthetic construct
  misc_feature 1..20: note = Description of Artificial Sequence: Synthetic oligonucleotide
  misc_feature 1..20: note = Target: SCN10A; (+) strand; PAM type: NRG; PAM sequence: CAG
  source 1..20: mol_type = other DNA
gttcaaaatgggttgtaaag

SEQ ID NO: 38606 - DNA, 20 bp, synthetic construct
  misc_feature 1..20: note = Description of Artificial Sequence: Synthetic oligonucleotide
  misc_feature 1..20: note = Target: SCN10A; (+) strand; PAM type: NRG; PAM sequence: CAG
  source 1..20: mol_type = other DNA
caaaatgggttgtaaagcag

SEQ ID NO: 38607 - DNA, 20 bp, synthetic construct
  misc_feature 1..20: note = Description of Artificial Sequence: Synthetic oligonucleotide
  misc_feature 1..20: note = Target: SCN10A; (+) strand; PAM type: NRG; PAM sequence: GAG
  source 1..20: mol_type = other DNA
aaatgggttgtaaagcagca

SEQ ID NO: 38608 - DNA, 20 bp, synthetic construct
  misc_feature 1..20: note = Description of Artificial Sequence: Synthetic oligonucleotide
  misc_feature 1..20: note = Target: SCN10A; (+) strand; PAM type: NRG; PAM sequence: TGG
  source 1..20: mol_type = other DNA
ctcaacatcaacaacgcatt

SEQ ID NO: 38609 - DNA, 20 bp, synthetic construct
  misc_feature 1..20: note = Description of Artificial Sequence: Synthetic oligonucleotide
  misc_feature 1..20: note = Target: SCN10A; (+) strand; PAM type: NRG; PAM sequence: CAG
  source 1..20: mol_type = other DNA
catcaacaacgcatttggcc

SEQ ID NO: 38610 - DNA, 20 bp, synthetic construct
  misc_feature 1..20: note = Description of Artificial Sequence: Synthetic oligonucleotide
  misc_feature 1..20: note = Target: SCN10A; (+) strand; PAM type: NRG; PAM sequence: AGG
  source 1..20: mol_type = other DNA
atcaacaacgcatttggccc

SEQ ID NO: 38611 - DNA, 20 bp, synthetic construct
  misc_feature 1..20: note = Description of Artificial Sequence: Synthetic oligonucleotide
  misc_feature 1..20: note = Target: SCN10A; (+) strand; PAM type: NRG; PAM sequence: GGG
  source 1..20: mol_type = other DNA
tcaacaacgcatttggccca

SEQ ID NO: 38612 - DNA, 20 bp, synthetic construct
  misc_feature 1..20: note = Description of Artificial Sequence: Synthetic oligonucleotide
  misc_feature 1..20: note = Target: SCN10A; (+) strand; PAM type: NRG; PAM sequence: AAG
  source 1..20: mol_type = other DNA
tggcccagggattgctaaca

SEQ ID NO: 38613 - DNA, 20 bp, synthetic construct
  misc_feature 1..20: note = Description of Artificial Sequence: Synthetic oligonucleotide
  misc_feature 1..20: note = Target: SCN10A; (+) strand; PAM type: NRG; PAM sequence: AGG
  source 1..20: mol_type = other DNA
ggcccagggattgctaacaa

SEQ ID NO: 38614 - DNA, 20 bp, synthetic construct
  misc_feature 1..20: note = Description of Artificial Sequence: Synthetic oligonucleotide
  misc_feature 1..20: note = Target: SCN10A; (+) strand; PAM type: NRG; PAM sequence: CAG
  source 1..20: mol_type = other DNA
agggattgctaacaaaggta

SEQ ID NO: 38615 - DNA, 20 bp, synthetic construct
  misc_feature 1..20: note = Description of Artificial Sequence: Synthetic oligonucleotide
  misc_feature 1..20: note = Target: SCN10A; (+) strand; PAM type: NRG; PAM sequence: CAG
  source 1..20: mol_type = other DNA
ttgctaacaaaggtacagtg

SEQ ID NO: 38616 - DNA, 20 bp, synthetic construct
  misc_feature 1..20: note = Description of Artificial Sequence: Synthetic oligonucleotide
  misc_feature 1..20: note = Target: SCN10A; (+) strand; PAM type: NRG; PAM sequence: TGG
  source 1..20: mol_type = other DNA
ctaacaaaggtacagtgcag

SEQ ID NO: 38617 - DNA, 20 bp, synthetic construct
  misc_feature 1..20: note = Description of Artificial Sequence: Synthetic oligonucleotide
  misc_feature 1..20: note = Target: SCN10A; (+) strand; PAM type: NRG; PAM sequence: TGG
  source 1..20: mol_type = other DNA
acaaaggtacagtgcagtgg

SEQ ID NO: 38618 - DNA, 20 bp, synthetic construct
  misc_feature 1..20: note = Description of Artificial Sequence: Synthetic oligonucleotide
  misc_feature 1..20: note = Target: SCN10A; (+) strand; PAM type: NRG; PAM sequence: AAG
  source 1..20: mol_type = other DNA
gtacagtgcagtggtggttc

SEQ ID NO: 38619 - DNA, 20 bp, synthetic construct
  misc_feature 1..20: note = Description of Artificial Sequence: Synthetic oligonucleotide
  misc_feature 1..20: note = Target: SCN10A; (+) strand; PAM type: NRG; PAM sequence: AAG
  source 1..20: mol_type = other DNA
cagtgcagtggtggttcaag

SEQ ID NO: 38620 - DNA, 20 bp, synthetic construct
  misc_feature 1..20: note = Description of Artificial Sequence: Synthetic oligonucleotide
  misc_feature 1..20: note = Target: SCN10A; (+) strand; PAM type: NRG; PAM sequence: AAG
  source 1..20: mol_type = other DNA
gtggttcaagaagttttgca

SEQ ID NO: 38621 - DNA, 20 bp, synthetic construct
  misc_feature 1..20: note = Description of Artificial Sequence: Synthetic oligonucleotide
  misc_feature 1..20: note = Target: SCN10A; (+) strand; PAM type: NRG; PAM sequence: AGG
  source 1..20: mol_type = other DNA
tggttcaagaagttttgcaa

SEQ ID NO: 38622 - DNA, 20 bp, synthetic construct
  misc_feature 1..20: note = Description of Artificial Sequence: Synthetic oligonucleotide
  misc_feature 1..20: note = Target: SCN10A; (+) strand; PAM type: NRG; PAM sequence: GAG
  source 1..20: mol_type = other DNA
gttcaagaagttttgcaaag

SEQ ID NO: 38623 - DNA, 20 bp, synthetic construct
  misc_feature 1..20: note = Description of Artificial Sequence: Synthetic oligonucleotide
  misc_feature 1..20: note = Target: SCN10A; (+) strand; PAM type: NRG; PAM sequence: GAG
  source 1..20: mol_type = other DNA
agaagttttgcaaaggagat

SEQ ID NO: 38624 - DNA, 20 bp, synthetic construct
  misc_feature 1..20: note = Description of Artificial Sequence: Synthetic oligonucleotide
  misc_feature 1..20: note = Target: SCN10A; (+) strand; PAM type: NRG; PAM sequence: AAG
  source 1..20: mol_type = other DNA
caaaggagatgagaaccttg

SEQ ID NO: 38625 - DNA, 20 bp, synthetic construct
  misc_feature 1..20: note = Description of Artificial Sequence: Synthetic oligonucleotide
  misc_feature 1..20: note = Target: SCN10A; (+) strand; PAM type: NRG; PAM sequence: GAG
  source 1..20: mol_type = other DNA
gagatgagaaccttgaagat

SEQ ID NO: 38626 - DNA, 20 bp, synthetic construct
  misc_feature 1..20: note = Description of Artificial Sequence: Synthetic oligonucleotide
  misc_feature 1..20: note = Target: SCN10A; (+) strand; PAM type: NRG; PAM sequence: AGG
  source 1..20: mol_type = other DNA
agatgagaaccttgaagatg

SEQ ID NO: 38627 - DNA, 20 bp, synthetic construct
  misc_feature 1..20: note = Description of Artificial Sequence: Synthetic oligonucleotide
  misc_feature 1..20: note = Target: SCN10A; (+) strand; PAM type: NRG; PAM sequence: GAG
  source 1..20: mol_type = other DNA
atgagaaccttgaagatgag

SEQ ID NO: 38628 - DNA, 20 bp, synthetic construct
  misc_feature 1..20: note = Description of Artificial Sequence: Synthetic oligonucleotide
  misc_feature 1..20: note = Target: SCN10A; (+) strand; PAM type: NRG; PAM sequence: GAG
  source 1..20: mol_type = other DNA
gagaaccttgaagatgagga

SEQ ID NO: 38629 - DNA, 20 bp, synthetic construct
  misc_feature 1..20: note = Description of Artificial Sequence: Synthetic oligonucleotide
  misc_feature 1..20: note = Target: SCN10A; (+) strand; PAM type: NRG; PAM sequence: TAG
  source 1..20: mol_type = other DNA
aaccttgaagatgaggagag

SEQ ID NO: 38630 - DNA, 20 bp, synthetic construct
  misc_feature 1..20: note = Description of Artificial Sequence: Synthetic oligonucleotide
  misc_feature 1..20: note = Target: SCN10A; (+) strand; PAM type: NRG; PAM sequence: TGG
  source 1..20: mol_type = other DNA
cttgaagatgaggagagtag

SEQ ID NO: 38631 - DNA, 20 bp, synthetic construct
  misc_feature 1..20: note = Description of Artificial Sequence: Synthetic oligonucleotide
  misc_feature 1..20: note = Target: SCN10A; (+) strand; PAM type: NRG; PAM sequence: TGG
  source 1..20: mol_type = other DNA
aagatgaggagagtagtggc

SEQ ID NO: 38632 - DNA, 20 bp, synthetic construct
  misc_feature 1..20: note = Description of Artificial Sequence: Synthetic oligonucleotide
  misc_feature 1..20: note = Target: SCN10A; (+) strand; PAM type: NRG; PAM sequence: TGG
  source 1..20: mol_type = other DNA
ggagagtagtggctggccat

SEQ ID NO: 38633 - DNA, 20 bp, synthetic construct
  misc_feature 1..20: note = Description of Artificial Sequence: Synthetic oligonucleotide
  misc_feature 1..20: note = Target: SCN10A; (+) strand; PAM type: NRG; PAM sequence: AAG
  source 1..20: mol_type = other DNA
gagtagtggctggccattgg

SEQ ID NO: 38634 - DNA, 20 bp, synthetic construct
  misc_feature 1..20: note = Description of Artificial Sequence: Synthetic oligonucleotide
  misc_feature 1..20: note = Target: SCN10A; (+) strand; PAM type: NRG; PAM sequence: GAG
  source 1..20: mol_type = other DNA
gaagttgacaatgaccaatt

SEQ ID NO: 38635 - DNA, 20 bp, synthetic construct
  misc_feature 1..20: note = Description of Artificial Sequence: Synthetic oligonucleotide
  misc_feature 1..20: note = Target: SCN10A; (+) strand; PAM type: NRG; PAM sequence: GAG
  source 1..20: mol_type = other DNA
agttgacaatgaccaattga

SEQ ID NO: 38636 - DNA, 20 bp, synthetic construct
  misc_feature 1..20: note = Description of Artificial Sequence: Synthetic oligonucleotide
  misc_feature 1..20: note = Target: SCN10A; (+) strand; PAM type: NRG; PAM sequence: AAG
  source 1..20: mol_type = other DNA
ccaattgagagcaatcatcg

SEQ ID NO: 38637 - DNA, 20 bp, synthetic construct
  misc_feature 1..20: note = Description of Artificial Sequence: Synthetic oligonucleotide
  misc_feature 1..20: note = Target: SCN10A; (+) strand; PAM type: NRG; PAM sequence: AAG
  source 1..20: mol_type = other DNA
tgatcctcttacaactgcac

SEQ ID NO: 38638 - DNA, 20 bp, synthetic construct
  misc_feature 1..20: note = Description of Artificial Sequence: Synthetic oligonucleotide
  misc_feature 1..20: note = Target: SCN10A; (+) strand; PAM type: NRG; PAM sequence: AAG
  source 1..20: mol_type = other DNA
tcctcttacaactgcacaag

SEQ ID NO: 38639 - DNA, 20 bp, synthetic construct
  misc_feature 1..20: note = Description of Artificial Sequence: Synthetic oligonucleotide
  misc_feature 1..20: note = Target: SCN10A; (+) strand; PAM type: NRG; PAM sequence: GAG
  source 1..20: mol_type = other DNA
ttacaactgcacaagaagct

SEQ ID NO: 38640 - DNA, 20 bp, synthetic construct
  misc_feature 1..20: note = Description of Artificial Sequence: Synthetic oligonucleotide
  misc_feature 1..20: note = Target: SCN10A; (+) strand; PAM type: NRG; PAM sequence: AGG
  source 1..20: mol_type = other DNA
tacaactgcacaagaagctg

SEQ ID NO: 38641 - DNA, 20 bp, synthetic construct
  misc_feature 1..20: note = Description of Artificial Sequence: Synthetic oligonucleotide
  misc_feature 1..20: note = Target: SCN10A; (+) strand; PAM type: NRG; PAM sequence: AAG
  source 1..20: mol_type = other DNA
aactgcacaagaagctgagg

SEQ ID NO: 38642 - DNA, 20 bp, synthetic construct
  misc_feature 1..20: note = Description of Artificial Sequence: Synthetic oligonucleotide
  misc_feature 1..20: note = Target: SCN10A; (+) strand; PAM type: NRG; PAM sequence: CGG
  source 1..20: mol_type = other DNA
actcatcgttgaccattcta

SEQ ID NO: 38643 - DNA, 20 bp, synthetic construct
  misc_feature 1..20: note = Description of Artificial Sequence: Synthetic oligonucleotide
  misc_feature 1..20: note = Target: SCN10A; (+) strand; PAM type: NRG; PAM sequence: CGG
  source 1..20: mol_type = other DNA
ttgaccattctacggtcatt

SEQ ID NO: 38644 - DNA, 20 bp, synthetic construct
  misc_feature 1..20: note = Description of Artificial Sequence: Synthetic oligonucleotide
  misc_feature 1..20: note = Target: SCN10A; (+) strand; PAM type: NRG; PAM sequence: CAG
  source 1..20: mol_type = other DNA
accattctacggtcattcgg

SEQ ID NO: 38645 - DNA, 20 bp, synthetic construct
  misc_feature 1..20: note = Description of Artificial Sequence: Synthetic oligonucleotide
  misc_feature 1..20: note = Target: SCN10A; (+) strand; PAM type: NRG; PAM sequence: AAG
  source 1..20: mol_type = other DNA
ctacggtcattcggcagttg

SEQ ID NO: 38646 - DNA, 20 bp, synthetic construct
  misc_feature 1..20: note = Description of Artificial Sequence: Synthetic oligonucleotide
  misc_feature 1..20: note = Target: SCN10A; (+) strand; PAM type: NRG; PAM sequence: TGG
  source 1..20: mol_type = other DNA
attcggcagttgaagcaaat

SEQ ID NO: 38647 - DNA, 20 bp, synthetic construct
  misc_feature 1..20: note = Description of Artificial Sequence: Synthetic oligonucleotide
  misc_feature 1..20: note = Target: SCN10A; (+) strand; PAM type: NRG; PAM sequence: AAG
  source 1..20: mol_type = other DNA
ggcagttgaagcaaattgga

SEQ ID NO: 38648 - DNA, 20 bp, synthetic construct
  misc_feature 1..20: note = Description of Artificial Sequence: Synthetic oligonucleotide
  misc_feature 1..20: note = Target: SCN10A; (+) strand; PAM type: NRG; PAM sequence: AGG
  source 1..20: mol_type = other DNA
gcagttgaagcaaattggaa

SEQ ID NO: 38649 - DNA, 20 bp, synthetic construct
  misc_feature 1..20: note = Description of Artificial Sequence: Synthetic oligonucleotide
  misc_feature 1..20: note = Target: SCN10A; (+) strand; PAM type: NRG; PAM sequence: CAG
  source 1..20: mol_type = other DNA
agcaaattggaaaggtgaaa

SEQ ID NO: 38650 - DNA, 20 bp, synthetic construct
  misc_feature 1..20: note = Description of Artificial Sequence: Synthetic oligonucleotide
  misc_feature 1..20: note = Target: SCN10A; (+) strand; PAM type: NRG; PAM sequence: TGG
  source 1..20: mol_type = other DNA
aggtgaaacagctccataaa

SEQ ID NO: 38651 - DNA, 20 bp, synthetic construct
  misc_feature 1..20: note = Description of Artificial Sequence: Synthetic oligonucleotide
  misc_feature 1..20: note = Target: SCN10A; (+) strand; PAM type: NRG; PAM sequence: GGG
  source 1..20: mol_type = other DNA
ggtgaaacagctccataaat

SEQ ID NO: 38652 - DNA, 20 bp, synthetic construct
  misc_feature 1..20: note = Description of Artificial Sequence: Synthetic oligonucleotide
  misc_feature 1..20: note = Target: SCN10A; (+) strand; PAM type: NRG; PAM sequence: AAG
  source 1..20: mol_type = other DNA
tccataaatgggtgcctcat

SEQ ID NO: 38653 - DNA, 20 bp, synthetic construct
  misc_feature 1..20: note = Description of Artificial Sequence: Synthetic oligonucleotide
  misc_feature 1..20: note = Target: SCN10A; (+) strand; PAM type: NRG; PAM sequence: AAG
  source 1..20: mol_type = other DNA
aaatgggtgcctcataagct

SEQ ID NO: 38654 - DNA, 20 bp, synthetic construct
  misc_feature 1..20: note = Description of Artificial Sequence: Synthetic oligonucleotide
  misc_feature 1..20: note = Target: SCN10A; (+) strand; PAM type: NRG; PAM sequence: AGG
  source 1..20: mol_type = other DNA
aatgggtgcctcataagcta

SEQ ID NO: 38655 - DNA, 20 bp, synthetic construct
  misc_feature 1..20: note = Description of Artificial Sequence: Synthetic oligonucleotide
  misc_feature 1..20: note = Target: SCN10A; (+) strand; PAM type: NRG; PAM sequence: AAG
  source 1..20: mol_type = other DNA
tttaaaaaatcgtcattttg

SEQ ID NO: 38656 - DNA, 20 bp, synthetic construct
  misc_feature 1..20: note = Description of Artificial Sequence: Synthetic oligonucleotide
  misc_feature 1..20: note = Target: SCN10A; (+) strand; PAM type: NRG; PAM sequence: CAG
  source 1..20: mol_type = other DNA
aaaatgaactatttcttaat

SEQ ID NO: 38657 - DNA, 20 bp, synthetic construct
  misc_feature 1..20: note = Description of Artificial Sequence: Synthetic oligonucleotide
  misc_feature 1..20: note = Target: SCN10A; (+) strand; PAM type: NRG; PAM sequence: AAG
  source 1..20: mol_type = other DNA
agattgtgatgtgcgataaa

SEQ ID NO: 38658 - DNA, 20 bp, synthetic construct
  misc_feature 1..20: note = Description of Artificial Sequence: Synthetic oligonucleotide
  misc_feature 1..20: note = Target: SCN10A; (+) strand; PAM type: NRG; PAM sequence: TGG
  source 1..20: mol_type = other DNA
agtgaattttacttgacaac

SEQ ID NO: 38659 - DNA, 20 bp, synthetic construct
  misc_feature 1..20: note = Description of Artificial Sequence: Synthetic oligonucleotide
  misc_feature 1..20: note = Target: SCN10A; (+) strand; PAM type: NRG; PAM sequence: CAG
  source 1..20: mol_type = other DNA
acttgacaactggcaatgac

SEQ ID NO: 38660 - DNA, 20 bp, synthetic construct
  misc_feature 1..20: note = Description of Artificial Sequence: Synthetic oligonucleotide
  misc_feature 1..20: note = Target: SCN10A; (+) strand; PAM type: NRG; PAM sequence: TGG
  source 1..20: mol_type = other DNA
acaactggcaatgaccagct

SEQ ID NO: 38661 - DNA, 20 bp, synthetic construct
  misc_feature 1..20: note = Description of Artificial Sequence: Synthetic oligonucleotide
  misc_feature 1..20: note = Target: SCN10A; (+) strand; PAM type: NRG; PAM sequence: TGG
  source 1..20: mol_type = other DNA
actggcaatgaccagcttgg

SEQ ID NO: 38662 - DNA, 20 bp, synthetic construct
  misc_feature 1..20: note = Description of Artificial Sequence: Synthetic oligonucleotide
  misc_feature 1..20: note = Target: SCN10A; (+) strand; PAM type: NRG; PAM sequence: TGG
  source 1..20: mol_type = other DNA
gcaatgaccagcttggtggc

SEQ ID NO: 38663 - DNA, 20 bp, synthetic construct
  misc_feature 1..20: note = Description of Artificial Sequence: Synthetic oligonucleotide
  misc_feature 1..20: note = Target: SCN10A; (+) strand; PAM type: NRG; PAM sequence: GAG
  source 1..20: mol_type = other DNA
accagcttggtggctggact

SEQ ID NO: 38664 - DNA, 20 bp, synthetic construct
  misc_feature 1..20: note = Description of Artificial Sequence: Synthetic oligonucleotide
  misc_feature 1..20: note = Target: SCN10A; (+) strand; PAM type: NRG; PAM sequence: AAG
  source 1..20: mol_type = other DNA
agcttggtggctggactgag

SEQ ID NO: 38665 - DNA, 20 bp, synthetic construct
  misc_feature 1..20: note = Description of Artificial Sequence: Synthetic oligonucleotide
  misc_feature 1..20: note = Target: SCN10A; (+) strand; PAM type: NRG; PAM sequence: AAG
  source 1..20: mol_type = other DNA
ttggtggctggactgagaag

SEQ ID NO: 38666 - DNA, 20 bp, synthetic construct
  misc_feature 1..20: note = Description of Artificial Sequence: Synthetic oligonucleotide
  misc_feature 1..20: note = Target: SCN10A; (+) strand; PAM type: NRG; PAM sequence: AAG
  source 1..20: mol_type = other DNA
tggactgagaagaagctcca

SEQ ID NO: 38667 - DNA, 20 bp, synthetic construct
  misc_feature 1..20: note = Description of Artificial Sequence: Synthetic oligonucleotide
  misc_feature 1..20: note = Target: SCN10A; (+) strand; PAM type: NRG; PAM sequence: AAG
  source 1..20: mol_type = other DNA
aacccaacttgcaccaaaaa

SEQ ID NO: 38668 - DNA, 20 bp, synthetic construct
  misc_feature 1..20: note = Description of Artificial Sequence: Synthetic oligonucleotide
  misc_feature 1..20: note = Target: SCN10A; (+) strand; PAM type: NRG; PAM sequence: TGG
  source 1..20: mol_type = other DNA
acttgcaccaaaaaaagtcg

SEQ ID NO: 38669 - DNA, 20 bp, synthetic construct
  misc_feature 1..20: note = Description of Artificial Sequence: Synthetic oligonucleotide
  misc_feature 1..20: note = Target: SCN10A; (+) strand; PAM type: NRG; PAM sequence: TGG
  source 1..20: mol_type = other DNA
aaaaagtcgtggtcactgct

SEQ ID NO: 38670 - DNA, 20 bp, synthetic construct
  misc_feature 1..20: note = Description of Artificial Sequence: Synthetic oligonucleotide
  misc_feature 1..20: note = Target: SCN10A; (+) strand; PAM type: NRG; PAM sequence: TGG
  source 1..20: mol_type = other DNA
aagtcgtggtcactgcttgg

SEQ ID NO: 38671 - DNA, 20 bp, synthetic construct
  misc_feature 1..20: note = Description of Artificial Sequence: Synthetic oligonucleotide
  misc_feature 1..20: note = Target: SCN10A; (+) strand; PAM type: NRG; PAM sequence: CGG
  source 1..20: mol_type = other DNA
actgcttggtggtctgctgc

SEQ ID NO: 38672 - DNA, 20 bp, synthetic construct
  misc_feature 1..20: note = Description of Artificial Sequence: Synthetic oligonucleotide
  misc_feature 1..20: note = Target: SCN10A; (+) strand; PAM type: NRG; PAM sequence: CAG
  source 1..20: mol_type = other DNA
gctgccggtctgatctacta

SEQ ID NO: 38673 - DNA, 20 bp, synthetic construct
  misc_feature 1..20: note = Description of Artificial Sequence: Synthetic oligonucleotide
  misc_feature 1..20: note = Target: SCN10A; (+) strand; PAM type: NRG; PAM sequence: CAG
  source 1..20: mol_type = other DNA
tactacagctttctgaatcc

SEQ ID NO: 38674 - DNA, 20 bp, synthetic construct
  misc_feature 1..20: note = Description of Artificial Sequence: Synthetic oligonucleotide
  misc_feature 1..20: note = Target: SCN10A; (+) strand; PAM type: NRG; PAM sequence: AAG
  source 1..20: mol_type = other DNA
cagctttctgaatcccagca

SEQ ID NO: 38675 - DNA, 20 bp, synthetic construct
  misc_feature 1..20: note = Description of Artificial Sequence: Synthetic oligonucleotide
  misc_feature 1..20: note = Target: SCN10A; (+) strand; PAM type: NRG; PAM sequence: GAG
  source 1..20: mol_type = other DNA
ccagcaaagccattacatct

SEQ ID NO: 38676 - DNA, 20 bp, synthetic construct
  misc_feature 1..20: note = Description of Artificial Sequence: Synthetic oligonucleotide
  misc_feature 1..20: note = Target: SCN10A; (+) strand; PAM type: NRG; PAM sequence: CAG
  source 1..20: mol_type = other DNA
ttacatctgagaaatatgtt

SEQ ID NO: 38677 - DNA, 20 bp, synthetic construct
  misc_feature 1..20: note = Description of Artificial Sequence: Synthetic oligonucleotide
  misc_feature 1..20: note = Target: SCN10A; (+) strand; PAM type: NRG; PAM sequence: GAG
  source 1..20: mol_type = other DNA
aatatgttcagcaaatcgat

SEQ ID NO: 38678 - DNA, 20 bp, synthetic construct
  misc_feature 1..20: note = Description of Artificial Sequence: Synthetic oligonucleotide
  misc_feature 1..20: note = Target: SCN10A; (+) strand; PAM type: NRG; PAM sequence: CAG
  source 1..20: mol_type = other DNA
cagcaaatcgatgagatgca

SEQ ID NO: 38679 - DNA, 20 bp, synthetic construct
  misc_feature 1..20: note = Description of Artificial Sequence: Synthetic oligonucleotide
  misc_feature 1..20: note = Target: SCN10A; (+) strand; PAM type: NRG; PAM sequence: AAG
  source 1..20: mol_type = other DNA
tgagatgcacagaaaactgc

SEQ ID NO: 38680 - DNA, 20 bp, synthetic construct
  misc_feature 1..20: note = Description of Artificial Sequence: Synthetic oligonucleotide
  misc_feature 1..20: note = Target: SCN10A; (+) strand; PAM type: NRG; PAM sequence: AGG
  source 1..20: mol_type = other DNA
gagatgcacagaaaactgca

SEQ ID NO: 38681 - DNA, 20 bp, synthetic construct
  misc_feature 1..20: note = Description of Artificial Sequence: Synthetic oligonucleotide
  misc_feature 1..20: note = Target: SCN10A; (+) strand; PAM type: NRG; PAM sequence: CAG
  source 1..20: mol_type = other DNA
acagaaaactgcaaggcctg

SEQ ID NO: 38682 - DNA, 20 bp, synthetic construct
  misc_feature 1..20: note = Description of Artificial Sequence: Synthetic oligonucleotide
  misc_feature 1..20: note = Target: SCN10A; (+) strand; PAM type: NRG; PAM sequence: TGG
  source 1..20: mol_type = other DNA
aaaactgcaaggcctgcagc

SEQ ID NO: 38683 - DNA, 20 bp, synthetic construct
  misc_feature 1..20: note = Description of Artificial Sequence: Synthetic oligonucleotide
  misc_feature 1..20: note = Target: SCN10A; (+) strand; PAM type: NRG; PAM sequence: TGG
  source 1..20: mol_type = other DNA
gcaaggcctgcagctggcat

SEQ ID NO: 38684 - DNA, 20 bp, synthetic construct
  misc_feature 1..20: note = Description of Artificial Sequence: Synthetic oligonucleotide
  misc_feature 1..20: note = Target: SCN10A; (+) strand; PAM type: NRG; PAM sequence: CAG
  source 1..20: mol_type = other DNA
ctgcagctggcattggtcaa

SEQ ID NO: 38685 - DNA, 20 bp, synthetic construct
  misc_feature 1..20: note = Description of Artificial Sequence: Synthetic oligonucleotide
  misc_feature 1..20: note = Target: SCN10A; (+) strand; PAM type: NRG; PAM sequence: AAG
  source 1..20: mol_type = other DNA
agctggcattggtcaacaga

SEQ ID NO: 38686 - DNA, 20 bp, synthetic construct
  misc_feature 1..20: note = Description of Artificial Sequence: Synthetic oligonucleotide
  misc_feature 1..20: note = Target: SCN10A; (+) strand; PAM type: NRG; PAM sequence: AGG
  source 1..20: mol_type = other DNA
gctggcattggtcaacagaa

SEQ ID NO: 38687 - DNA, 20 bp, synthetic construct
  misc_feature 1..20: note = Description of Artificial Sequence: Synthetic oligonucleotide
  misc_feature 1..20: note = Target: SCN10A; (+) strand; PAM type: NRG; PAM sequence: GGG
  source 1..20: mol_type = other DNA
ctggcattggtcaacagaaa

SEQ ID NO: 38688 - DNA, 20 bp, synthetic construct
  misc_feature 1..20: note = Description of Artificial Sequence: Synthetic oligonucleotide
  misc_feature 1..20: note = Target: SCN10A; (+) strand; PAM type: NRG; PAM sequence: CAG
  source 1..20: mol_type = other DNA
actgcatgtcacacaaccaa

SEQ ID NO: 38689 - DNA, 20 bp, synthetic construct
  misc_feature 1..20: note = Description of Artificial Sequence: Synthetic oligonucleotide
  misc_feature 1..20: note = Target: SCN10A; (+) strand; PAM type: NRG; PAM sequence: AAG
  source 1..20: mol_type = other DNA
acaaccaacagttacttcaa

SEQ ID NO: 38690 - DNA, 20 bp, synthetic construct
  misc_feature 1..20: note = Description of Artificial Sequence: Synthetic oligonucleotide
  misc_feature 1..20: note = Target: SCN10A; (+) strand; PAM type: NRG; PAM sequence: TGG
  source 1..20: mol_type = other DNA
acttcaaaagttgaatgaat

SEQ ID NO: 38691 - DNA, 20 bp, synthetic construct
  misc_feature 1..20: note = Description of Artificial Sequence: Synthetic oligonucleotide
  misc_feature 1..20: note = Target: SCN10A; (+) strand; PAM type: NRG; PAM sequence: GGG
  source 1..20: mol_type = other DNA
cttcaaaagttgaatgaatt

SEQ ID NO: 38692 - DNA, 20 bp, synthetic construct
  misc_feature 1..20: note = Description of Artificial Sequence: Synthetic oligonucleotide
  misc_feature 1..20: note = Target: SCN10A; (+) strand; PAM type: NRG; PAM sequence: AAG
  source 1..20: mol_type = other DNA
gttgaatgaattgggctatg

SEQ ID NO: 38693 - DNA, 20 bp, synthetic construct
  misc_feature 1..20: note = Description of Artificial Sequence: Synthetic oligonucleotide
  misc_feature 1..20: note = Target: SCN10A; (+) strand; PAM type: NRG; PAM sequence: AAG
  source 1..20: mol_type = other DNA
caaccaactaccacttcttc

SEQ ID NO: 38694 - DNA, 20 bp, synthetic construct
  misc_feature 1..20: note = Description of Artificial Sequence: Synthetic oligonucleotide
  misc_feature 1..20: note = Target: SCN10A; (+) strand; PAM type: NRG; PAM sequence: CAG
  source 1..20: mol_type = other DNA
agcatctgaacaactttttg

SEQ ID NO: 38695 - DNA, 20 bp, synthetic construct
  misc_feature 1..20: note = Description of Artificial Sequence: Synthetic oligonucleotide
  misc_feature 1..20: note = Target: SCN10A; (+) strand; PAM type: NRG; PAM sequence: AGG
  source 1..20: mol_type = other DNA
gcatctgaacaactttttgc

SEQ ID NO: 38696 - DNA, 20 bp, synthetic construct
  misc_feature 1..20: note = Description of Artificial Sequence: Synthetic oligonucleotide
  misc_feature 1..20: note = Target: SCN10A; (+) strand; PAM type: NRG; PAM sequence: CAG
  source 1..20: mol_type = other DNA
aggtgaaacacttccataac

SEQ ID NO: 38697 - DNA, 20 bp, synthetic construct
  misc_feature 1..20: note = Description of Artificial Sequence: Synthetic oligonucleotide
  misc_feature 1..20: note = Target: SCN10A; (+) strand; PAM type: NRG; PAM sequence: CGG
  source 1..20: mol_type = other DNA
tgaaacacttccataaccag

SEQ ID NO: 38698 - DNA, 20 bp, synthetic construct
  misc_feature 1..20: note = Description of Artificial Sequence: Synthetic oligonucleotide
  misc_feature 1..20: note = Target: SCN10A; (+) strand; PAM type: NRG; PAM sequence: GGG
  source 1..20: mol_type = other DNA
gaaacacttccataaccagc

SEQ ID NO: 38699 - DNA, 20 bp, synthetic construct
  misc_feature 1..20: note = Description of Artificial Sequence: Synthetic oligonucleotide
  misc_feature 1..20: note = Target: SCN10A; (+) strand; PAM type: NRG; PAM sequence: CAG
  source 1..20: mol_type = other DNA
cttccataaccagcgggatg

SEQ ID NO: 38700 - DNA, 20 bp, synthetic construct
  misc_feature 1..20: note = Description of Artificial Sequence: Synthetic oligonucleotide
  misc_feature 1..20: note = Target: SCN10A; (+) strand; PAM type: NRG; PAM sequence: AAG
  source 1..20: mol_type = other DNA
ggatgcagaaaatgccttcc

SEQ ID NO: 38701 - DNA, 20 bp, synthetic construct
  misc_feature 1..20: note = Description of Artificial Sequence: Synthetic oligonucleotide
  misc_feature 1..20: note = Target: SCN10A; (+) strand; PAM type: NRG; PAM sequence: GAG
  source 1..20: mol_type = other DNA
atgcagaaaatgccttccaa

SEQ ID NO: 38702 - DNA, 20 bp, synthetic construct
  misc_feature 1..20: note = Description of Artificial Sequence: Synthetic oligonucleotide
  misc_feature 1..20: note = Target: SCN10A; (+) strand; PAM type: NRG; PAM sequence: AAG
  source 1..20: mol_type = other DNA
caagagttcattgaatccca

SEQ ID NO: 38703 - DNA, 20 bp, synthetic construct
  misc_feature 1..20: note = Description of Artificial Sequence: Synthetic oligonucleotide
  misc_feature 1..20: note = Target: SCN10A; (+) strand; PAM type: NRG; PAM sequence: TGG
  source 1..20: mol_type = other DNA
gttcattgaatcccaaagca

SEQ ID NO: 38704 - DNA, 20 bp, synthetic construct
  misc_feature 1..20: note = Description of Artificial Sequence: Synthetic oligonucleotide
  misc_feature 1..20: note = Target: SCN10A; (+) strand; PAM type: NRG; PAM sequence: CAG
  source 1..20: mol_type = other DNA
aagcatggatttttatgcta

SEQ ID NO: 38705 - DNA, 20 bp, synthetic construct
  misc_feature 1..20: note = Description of Artificial Sequence: Synthetic oligonucleotide
  misc_feature 1..20: note = Target: SCN10A; (+) strand; PAM type: NRG; PAM sequence: AGG
  source 1..20: mol_type = other DNA
agcatggatttttatgctac

SEQ ID NO: 38706 - DNA, 20 bp, synthetic construct
  misc_feature 1..20: note = Description of Artificial Sequence: Synthetic oligonucleotide
  misc_feature 1..20: note = Target: SCN10A; (+) strand; PAM type: NRG; PAM sequence: TGG
  source 1..20: mol_type = other DNA
taaacaaactcatttctcat

SEQ ID NO: 38707 - DNA, 20 bp, synthetic construct
  misc_feature 1..20: note = Description of Artificial Sequence: Synthetic oligonucleotide
  misc_feature 1..20: note = Target: SCN10A; (+) strand; PAM type: NRG; PAM sequence: TGG
  source 1..20: mol_type = other DNA
caaaaatgtgttgattgtaa

SEQ ID NO: 38708 - DNA, 20 bp, synthetic construct
  misc_feature 1..20: note = Description of Artificial Sequence: Synthetic oligonucleotide
  misc_feature 1..20: note = Target: SCN10A; (+) strand; PAM type: NRG; PAM sequence: AAG
  source 1..20: mol_type = other DNA
ggttcctactttgattaata

SEQ ID NO: 38709 - DNA, 20 bp, synthetic construct
  misc_feature 1..20: note = Description of Artificial Sequence: Synthetic oligonucleotide
  misc_feature 1..20: note = Target: SCN10A; (+) strand; PAM type: NRG; PAM sequence: GAG
  source 1..20: mol_type = other DNA
tgattaataaagatgtgttt

SEQ ID NO: 38710 - DNA, 20 bp, synthetic construct
  misc_feature 1..20: note = Description of Artificial Sequence: Synthetic oligonucleotide
  misc_feature 1..20: note = Target: SCN10A; (+) strand; PAM type: NRG; PAM sequence: TAG
  source 1..20: mol_type = other DNA
aataaagatgtgtttgagcc

SEQ ID NO: 38711 - DNA, 20 bp, synthetic construct
  misc_feature 1..20: note = Description of Artificial Sequence: Synthetic oligonucleotide
  misc_feature 1..20: note = Target: SCN10A; (+) strand; PAM type: NRG; PAM sequence: TGG
  source 1..20: mol_type = other DNA
ttataatgatttaatattta

SEQ ID NO: 38712 - DNA, 20 bp, synthetic construct
  misc_feature 1..20: note = Description of Artificial Sequence: Synthetic oligonucleotide
  misc_feature 1..20: note = Target: SCN10A; (+) strand; PAM type: NRG; PAM sequence: TGG
  source 1..20: mol_type = other DNA
ttttgtaccttttcattatt

SEQ ID NO: 38713 - DNA, 20 bp, synthetic construct
  misc_feature 1..20: note = Description of Artificial Sequence: Synthetic oligonucleotide
  misc_feature 1..20: note = Target: SCN10A; (+) strand; PAM type: NRG; PAM sequence: CAG
  source 1..20: mol_type = other DNA
tttttgatgtacaattcttc

SEQ ID NO: 38714 - DNA, 20 bp, synthetic construct
  misc_feature 1..20: note = Description of Artificial Sequence: Synthetic oligonucleotide
  misc_feature 1..20: note = Target: SCN10A; (+) strand; PAM type: NRG; PAM sequence: TAG
  source 1..20: mol_type = other DNA
tgtacaattcttccagtatt

SEQ ID NO: 38715 - DNA, 20 bp, synthetic construct
  misc_feature 1..20: note = Description of Artificial Sequence: Synthetic oligonucleotide
  misc_feature 1..20: note = Target: SCN10A; (+) strand; PAM type: NRG; PAM sequence: GAG
  source 1..20: mol_type = other DNA
tacaattcttccagtattta

SEQ ID NO: 38716 - DNA, 20 bp, synthetic construct
  misc_feature 1..20: note = Description of Artificial Sequence: Synthetic oligonucleotide
  misc_feature 1..20: note = Target: SCN10A; (+) strand; PAM type: NRG; PAM sequence: TAG
  source 1..20: mol_type = other DNA
tattatttgttacaaatata

SEQ ID NO: 38717 - DNA, 20 bp, synthetic construct
  misc_feature 1..20: note = Description of Artificial Sequence: Synthetic oligonucleotide
  misc_feature 1..20: note = Target: SCN10A; (+) strand; PAM type: NRG; PAM sequence: AAG
  source 1..20: mol_type = other DNA
tacaaatatatagattacta

SEQ ID NO: 38718 - DNA, 20 bp, synthetic construct
  misc_feature 1..20: note = Description of Artificial Sequence: Synthetic oligonucleotide
  misc_feature 1..20: note = Target: SCN10A; (+) strand; PAM type: NRG; PAM sequence: GAG
  source 1..20: mol_type = other DNA
caaatatatagattactaaa

SEQ ID NO: 38719 - DNA, 20 bp, synthetic construct
  misc_feature 1..20: note = Description of Artificial Sequence: Synthetic oligonucleotide
  misc_feature 1..20: note = Target: SCN10A; (+) strand; PAM type: NRG; PAM sequence: TAG
  source 1..20: mol_type = other DNA
aagagtttgtatctttatcc

SEQ ID NO: 38720 - DNA, 20 bp, synthetic construct
  misc_feature 1..20: note = Description of Artificial Sequence: Synthetic oligonucleotide
  misc_feature 1..20: note = Target: SCN10A; (+) strand; PAM type: NRG; PAM sequence: TGG
  source 1..20: mol_type = other DNA
agtttgtatctttatcctag

SEQ ID NO: 38721 - DNA, 20 bp, synthetic construct
  misc_feature 1..20: note = Description of Artificial Sequence: Synthetic oligonucleotide
  misc_feature 1..20: note = Target: SCN10A; (+) strand; PAM type: NRG; PAM sequence: AAG
  source 1..20: mol_type = other DNA
atcctagtggttgtctttat

SEQ ID NO: 38722 - DNA, 20 bp, synthetic construct
  misc_feature 1..20: note = Description of Artificial Sequence: Synthetic oligonucleotide
  misc_feature 1..20: note = Target: SCN10A; (+) strand; PAM type: NRG; PAM sequence: TAG
  source 1..20: mol_type = other DNA
accgtgtaatacattgtcct

SEQ ID NO: 38723 - DNA, 20 bp, synthetic construct
  misc_feature 1..20: note = Description of Artificial Sequence: Synthetic oligonucleotide
  misc_feature 1..20: note = Target: SCN10A; (+) strand; PAM type: NRG; PAM sequence: TGG
  source 1..20: mol_type = other DNA
caaaatctctcatttccatt

SEQ ID NO: 38724 - DNA, 20 bp, synthetic construct
  misc_feature 1..20: note = Description of Artificial Sequence: Synthetic oligonucleotide
  misc_feature 1..20: note = Target: SCN10A; (+) strand; PAM type: NRG; PAM sequence: AAG
  source 1..20: mol_type = other DNA
gtgcttacctttgtactgtc

SEQ ID NO: 38725 - DNA, 20 bp, synthetic construct
  misc_feature 1..20: note = Description of Artificial Sequence: Synthetic oligonucleotide
  misc_feature 1..20: note = Target: SCN10A; (+) strand; PAM type: NRG; PAM sequence: TAG
  source 1..20: mol_type = other DNA
tctttaacttcttgttatta

SEQ ID NO: 38726 - DNA, 20 bp, synthetic construct
  misc_feature 1..20: note = Description of Artificial Sequence: Synthetic oligonucleotide
  misc_feature 1..20: note = Target: SCN10A; (+) strand; PAM type: NRG; PAM sequence: AAG
  source 1..20: mol_type = other DNA
ttaacttcttgttattatag

SEQ ID NO: 38727 - DNA, 20 bp, synthetic construct
  misc_feature 1..20: note = Description of Artificial Sequence: Synthetic oligonucleotide
  misc_feature 1..20: note = Target: SCN10A; (+) strand; PAM type: NRG; PAM sequence: CAG
  source 1..20: mol_type = other DNA
acttcttgttattatagaag

SEQ ID NO: 38728 - DNA, 20 bp, synthetic construct
  misc_feature 1..20: note = Description of Artificial Sequence: Synthetic oligonucleotide
  misc_feature 1..20: note = Target: SCN10A; (+) strand; PAM type: NRG; PAM sequence: CAG
  source 1..20: mol_type = other DNA
tcttgttattatagaagcag

SEQ ID NO: 38729 - DNA, 20 bp, synthetic construct
  misc_feature 1..20: note = Description of Artificial Sequence: Synthetic oligonucleotide
  misc_feature 1..20: note = Target: SCN10A; (+) strand; PAM type: NRG; PAM sequence: AAG
  source 1..20: mol_type = other DNA
gttattatagaagcagcagt

SEQ ID NO: 38730 - DNA, 20 bp, synthetic construct
  misc_feature 1..20: note = Description of Artificial Sequence: Synthetic oligonucleotide
  misc_feature 1..20: note = Target: SCN10A; (+) strand; PAM type: NRG; PAM sequence: CAG
  source 1..20: mol_type = other DNA
ttgtatcatgtcaacacttg

SEQ ID NO: 38731 - DNA, 20 bp, synthetic construct
  misc_feature 1..20: note = Description of Artificial Sequence: Synthetic oligonucleotide
  misc_feature 1..20: note = Target: SCN10A; (+) strand; PAM type: NRG; PAM sequence: AGG
  source 1..20: mol_type = other DNA
tgtatcatgtcaacacttgc

SEQ ID NO: 38732 - DNA, 20 bp, synthetic construct
  misc_feature 1..20: note = Description of Artificial Sequence: Synthetic oligonucleotide
  misc_feature 1..20: note = Target: SCN10A; (+) strand; PAM type: NRG; PAM sequence: GGG
  source 1..20: mol_type = other DNA
gtatcatgtcaacacttgca

SEQ ID NO: 38733 - DNA, 20 bp, synthetic construct
  misc_feature 1..20: note = Description of Artificial Sequence: Synthetic oligonucleotide
  misc_feature 1..20: note = Target: SCN10A; (+) strand; PAM type: NRG; PAM sequence: TGG
  source 1..20: mol_type = other DNA
gtcaacacttgcagggcctc

SEQ ID NO: 38734 - DNA, 20 bp, synthetic construct
  misc_feature 1..20: note = Description of Artificial Sequence: Synthetic oligonucleotide
  misc_feature 1..20: note = Target: SCN10A; (+) strand; PAM type: NRG; PAM sequence: GGG
  source 1..20: mol_type = other DNA
tcaacacttgcagggcctct

SEQ ID NO: 38735 - DNA, 20 bp, synthetic construct
  misc_feature 1..20: note = Description of Artificial Sequence: Synthetic oligonucleotide
  misc_feature 1..20: note = Target: SCN10A; (+) strand; PAM type: NRG; PAM sequence: GGG
  source 1..20: mol_type = other DNA
caacacttgcagggcctctg

SEQ ID NO: 38736 - DNA, 20 bp, synthetic construct
  misc_feature 1..20: note = Description of Artificial Sequence: Synthetic oligonucleotide
  misc_feature 1..20: note = Target: SCN10A; (+) strand; PAM type: NRG; PAM sequence: TGG
  source 1..20: mol_type = other DNA
gcagggcctctggggcttgt

SEQ ID NO: 38737 - DNA, 20 bp, synthetic construct
  misc_feature 1..20: note = Description of Artificial Sequence: Synthetic oligonucleotide
  misc_feature 1..20: note = Target: SCN10A; (+) strand; PAM type: NRG; PAM sequence: GGG
  source 1..20: mol_type = other DNA
cagggcctctggggcttgtt

SEQ ID NO: 38738 - DNA, 20 bp, synthetic construct
  misc_feature 1..20: note = Description of Artificial Sequence: Synthetic oligonucleotide
  misc_feature 1..20: note = Target: SCN10A; (+) strand; PAM type: NRG; PAM sequence: CAG
  source 1..20: mol_type = other DNA
ggcctctggggcttgttggg

SEQ ID NO: 38739 - DNA, 20 bp, synthetic construct
  misc_feature 1..20: note = Description of Artificial Sequence: Synthetic oligonucleotide
  misc_feature 1..20: note = Target: SCN10A; (+) strand; PAM type: NRG; PAM sequence: CGG
  source 1..20: mol_type = other DNA
ctctggggcttgttgggcag

SEQ ID NO: 38740 - DNA, 20 bp, synthetic construct
  misc_feature 1..20: note = Description of Artificial Sequence: Synthetic oligonucleotide
  misc_feature 1..20: note = Target: SCN10A; (+) strand; PAM type: NRG; PAM sequence: GGG
  source 1..20: mol_type = other DNA
tctggggcttgttgggcagc

SEQ ID NO: 38741 - DNA, 20 bp, synthetic construct
  misc_feature 1..20: note = Description of Artificial Sequence: Synthetic oligonucleotide
  misc_feature 1..20: note = Target: SCN10A; (+) strand; PAM type: NRG; PAM sequence: GGG
  source 1..20: mol_type = other DNA
ctggggcttgttgggcagcg

SEQ ID NO: 38742 - DNA, 20 bp, synthetic construct
  misc_feature 1..20: note = Description of Artificial Sequence: Synthetic oligonucleotide
  misc_feature 1..20: note = Target: SCN10A; (+) strand; PAM type: NRG; PAM sequence: GGG
  source 1..20: mol_type = other DNA
tggggcttgttgggcagcgg

SEQ ID NO: 38743 - DNA, 20 bp, synthetic construct
  misc_feature 1..20: note = Description of Artificial Sequence: Synthetic oligonucleotide
  misc_feature 1..20: note = Target: SCN10A; (+) strand; PAM type: NRG; PAM sequence: CGG
  source 1..20: mol_type = other DNA
ggcttgttgggcagcggggg

SEQ ID NO: 38744 - DNA, 20 bp, synthetic construct
  misc_feature 1..20: note = Description of Artificial Sequence: Synthetic oligonucleotide
  misc_feature 1..20: note = Target: SCN10A; (+) strand; PAM type: NRG; PAM sequence: TGG
  source 1..20: mol_type = other DNA
ttctcatttttatccccctc

SEQ ID NO: 38745 - DNA, 20 bp, synthetic construct
  misc_feature 1..20: note = Description of Artificial Sequence: Synthetic oligonucleotide
  misc_feature 1..20: note = Target: SCN10A; (+) strand; PAM type: NRG; PAM sequence: GAG
  source 1..20: mol_type = other DNA
ctcatttttatccccctctg

SEQ ID NO: 38746 - DNA, 20 bp, synthetic construct
  misc_feature 1..20: note = Description of Artificial Sequence: Synthetic oligonucleotide
  misc_feature 1..20: note = Target: SCN10A; (+) strand; PAM type: NRG; PAM sequence: AGG
  source 1..20: mol_type = other DNA
tcatttttatccccctctgg

SEQ ID NO: 38747 - DNA, 20 bp, synthetic construct
  misc_feature 1..20: note = Description of Artificial Sequence: Synthetic oligonucleotide
  misc_feature 1..20: note = Target: SCN10A; (+) strand; PAM type: NRG; PAM sequence: TGG
  source 1..20: mol_type = other DNA
atccccctctggaggcaccg

SEQ ID NO: 38748 - DNA, 20 bp, synthetic construct
  misc_feature 1..20: note = Description of Artificial Sequence: Synthetic oligonucleotide
  misc_feature 1..20: note = Target: SCN10A; (+) strand; PAM type: NRG; PAM sequence: AAG
  source 1..20: mol_type = other DNA
ttaacaaaccctgatctgct

SEQ ID NO: 38749 - DNA, 20 bp, synthetic construct
  misc_feature 1..20: note = Description of Artificial Sequence: Synthetic oligonucleotide
  misc_feature 1..20: note = Target: SCN10A; (+) strand; PAM type: NRG; PAM sequence: TGG
  source 1..20: mol_type = other DNA
accacttctccacccacttt

SEQ ID NO: 38750 - DNA, 20 bp, synthetic construct
  misc_feature 1..20: note = Description of Artificial Sequence: Synthetic oligonucleotide
  misc_feature 1..20: note = Target: SCN10A; (+) strand; PAM type: NRG; PAM sequence: AAG
  source 1..20: mol_type = other DNA
ccacccacttttggtcttcc

SEQ ID NO: 38751 - DNA, 20 bp, synthetic construct
  misc_feature 1..20: note = Description of Artificial Sequence: Synthetic oligonucleotide
  misc_feature 1..20: note = Target: SCN10A; (+) strand; PAM type: NRG; PAM sequence: TGG
  source 1..20: mol_type = other DNA
cccccgtgctgtcattctat

SEQ ID NO: 38752 - DNA, 20 bp, synthetic construct
  misc_feature 1..20: note = Description of Artificial Sequence: Synthetic oligonucleotide
  misc_feature 1..20: note = Target: SCN10A; (+) strand; PAM type: NRG; PAM sequence: GAG
  source 1..20: mol_type = other DNA
tgtcattctattggcatttt

SEQ ID NO: 38753 - DNA, 20 bp, synthetic construct
  misc_feature 1..20: note = Description of Artificial Sequence: Synthetic oligonucleotide
  misc_feature 1..20: note = Target: SCN10A; (+) strand; PAM type: NRG; PAM sequence: GAG
  source 1..20: mol_type = other DNA
tcattctattggcattttga

SEQ ID NO: 38754 - DNA, 20 bp, synthetic construct
  misc_feature 1..20: note = Description of Artificial Sequence: Synthetic oligonucleotide
  misc_feature 1..20: note = Target: SCN10A; (+) strand; PAM type: NRG; PAM sequence: AGG
  source 1..20: mol_type = other DNA
cattctattggcattttgag

SEQ ID NO: 38755 - DNA, 20 bp, synthetic construct
  misc_feature 1..20: note = Description of Artificial Sequence: Synthetic oligonucleotide
  misc_feature 1..20: note = Target: SCN10A; (+) strand; PAM type: NRG; PAM sequence: GGG
  source 1..20: mol_type = other DNA
attctattggcattttgaga

SEQ ID NO: 38756 - DNA, 20 bp, synthetic construct
  misc_feature 1..20: note = Description of Artificial Sequence: Synthetic oligonucleotide
  misc_feature 1..20: note = Target: SCN10A; (+) strand; PAM type: NRG; PAM sequence: TGG
  source 1..20: mol_type = other DNA
ctattggcattttgagaggg

SEQ ID NO: 38757 - DNA, 20 bp, synthetic construct
  misc_feature 1..20: note = Description of Artificial Sequence: Synthetic oligonucleotide
  misc_feature 1..20: note = Target: SCN10A; (+) strand; PAM type: NRG; PAM sequence: GGG
  source 1..20: mol_type = other DNA
tattggcattttgagagggt

SEQ ID NO: 38758 - DNA, 20 bp, synthetic construct
  misc_feature 1..20: note = Description of Artificial Sequence: Synthetic oligonucleotide
  misc_feature 1..20: note = Target: SCN10A; (+) strand; PAM type: NRG; PAM sequence: GGG
  source 1..20: mol_type = other DNA
attggcattttgagagggtg

SEQ ID NO: 38759 - DNA, 20 bp, synthetic construct
  misc_feature 1..20: note = Description of Artificial Sequence: Synthetic oligonucleotide
  misc_feature 1..20: note = Target: SCN10A; (+) strand; PAM type: NRG; PAM sequence: AAG
  source 1..20: mol_type = other DNA
gttttacattaaaactccaa

SEQ ID NO: 38760 - DNA, 20 bp, synthetic construct
  misc_feature 1..20: note = Description of Artificial Sequence: Synthetic oligonucleotide
  misc_feature 1..20: note = Target: SCN10A; (+) strand; PAM type: NRG; PAM sequence: AAG
  source 1..20: mol_type = other DNA
ttacattaaaactccaaaag

SEQ ID NO: 38761 - DNA, 20 bp, synthetic construct
  misc_feature 1..20: note = Description of Artificial Sequence: Synthetic oligonucleotide
  misc_feature 1..20: note = Target: SCN10A; (+) strand; PAM type: NRG; PAM sequence: TAG
  source 1..20: mol_type = other DNA
ttaaaactccaaaagaagca

SEQ ID NO: 38762 - DNA, 20 bp, synthetic construct
  misc_feature 1..20: note = Description of Artificial Sequence: Synthetic oligonucleotide
  misc_feature 1..20: note = Target: SCN10A; (+) strand; PAM type: NRG; PAM sequence: TAG
  source 1..20: mol_type = other DNA
gattttgtgatttctctact

SEQ ID NO: 38763 - DNA, 20 bp, synthetic construct
  misc_feature 1..20: note = Description of Artificial Sequence: Synthetic oligonucleotide
  misc_feature 1..20: note = Target: SCN10A; (+) strand; PAM type: NRG; PAM sequence: CAG
  source 1..20: mol_type = other DNA
catcttctgatttatatttt

SEQ ID NO: 38764 - DNA, 20 bp, synthetic construct
  misc_feature 1..20: note = Description of Artificial Sequence: Synthetic oligonucleotide
  misc_feature 1..20: note = Target: SCN10A; (+) strand; PAM type: NRG; PAM sequence: TGG
  source 1..20: mol_type = other DNA
gtgttctgcattttttgcaa

SEQ ID NO: 38765 - DNA, 20 bp, synthetic construct
  misc_feature 1..20: note = Description of Artificial Sequence: Synthetic oligonucleotide
  misc_feature 1..20: note = Target: SCN10A; (+) strand; PAM type: NRG; PAM sequence: TGG
  source 1..20: mol_type = other DNA
catttattttaaaaaattat

SEQ ID NO: 38766 - DNA, 20 bp, synthetic construct
  misc_feature 1..20: note = Description of Artificial Sequence: Synthetic oligonucleotide
  misc_feature 1..20: note = Target: SCN10A; (+) strand; PAM type: NRG; PAM sequence: GGG
  source 1..20: mol_type = other DNA
atttattttaaaaaattatt

SEQ ID NO: 38767 - DNA, 20 bp, synthetic construct
  misc_feature 1..20: note = Description of Artificial Sequence: Synthetic oligonucleotide
  misc_feature 1..20: note = Target: SCN10A; (+) strand; PAM type: NRG; PAM sequence: TAG
  source 1..20: mol_type = other DNA
taaaacaaatgtttgtgtat

SEQ ID NO: 38768 - DNA, 20 bp, synthetic construct
  misc_feature 1..20: note = Description of Artificial Sequence: Synthetic oligonucleotide
  misc_feature 1..20: note = Target: SCN10A; (+) strand; PAM type: NRG; PAM sequence: CAG
  source 1..20: mol_type = other DNA
acaaatgtttgtgtattagt

SEQ ID NO: 38769 - DNA, 20 bp, synthetic construct
  misc_feature 1..20: note = Description of Artificial Sequence: Synthetic oligonucleotide
  misc_feature 1..20: note = Target: SCN10A; (+) strand; PAM type: NRG; PAM sequence: TAG
  source 1..20: mol_type = other DNA
gttgccttaacaaaatacca

SEQ ID NO: 38770 - DNA, 20 bp, synthetic construct
  misc_feature 1..20: note = Description of Artificial Sequence: Synthetic oligonucleotide
  misc_feature 1..20: note = Target: SCN10A; (+) strand; PAM type: NRG; PAM sequence: TGG
  source 1..20: mol_type = other DNA
cttaacaaaataccatagac

SEQ ID NO: 38771 - DNA, 20 bp, synthetic construct
  misc_feature 1..20: note = Description of Artificial Sequence: Synthetic oligonucleotide
  misc_feature 1..20: note = Target: SCN10A; (+) strand; PAM type: NRG; PAM sequence: GGG
  source 1..20: mol_type = other DNA
ttaacaaaataccatagact

SEQ ID NO: 38772 - DNA, 20 bp, synthetic construct
  misc_feature 1..20: note = Description of Artificial Sequence: Synthetic oligonucleotide
  misc_feature 1..20: note = Target: SCN10A; (+) strand; PAM type: NRG; PAM sequence: TGG
  source 1..20: mol_type = other DNA
acaaaataccatagactggg

SEQ ID NO: 38773 - DNA, 20 bp, synthetic construct
  misc_feature 1..20: note = Description of Artificial Sequence: Synthetic oligonucleotide
  misc_feature 1..20: note = Target: SCN10A; (+) strand; PAM type: NRG; PAM sequence: CAG
  source 1..20: mol_type = other DNA
agactgggtggcttatgcaa

SEQ ID NO: 38774 - DNA, 20 bp, synthetic construct
  misc_feature 1..20: note = Description of Artificial Sequence: Synthetic oligonucleotide
  misc_feature 1..20: note = Target: SCN10A; (+) strand; PAM type: NRG; PAM sequence: TGG
  source 1..20: mol_type = other DNA
aatttattttctcacaaatc

SEQ ID NO: 38775 - DNA, 20 bp, synthetic construct
  misc_feature 1..20: note = Description of Artificial Sequence: Synthetic oligonucleotide
  misc_feature 1..20: note = Target: SCN10A; (+) strand; PAM type: NRG; PAM sequence: GAG
  source 1..20: mol_type = other DNA
tttattttctcacaaatctg

SEQ ID NO: 38776 - DNA, 20 bp, synthetic construct
  misc_feature 1..20: note = Description of Artificial Sequence: Synthetic oligonucleotide
  misc_feature 1..20: note = Target: SCN10A; (+) strand; PAM type: NRG; PAM sequence: AGG
  source 1..20: mol_type = other DNA
ttattttctcacaaatctgg

SEQ ID NO: 38777 - DNA, 20 bp, synthetic construct
  misc_feature 1..20: note = Description of Artificial Sequence: Synthetic oligonucleotide
  misc_feature 1..20: note = Target: SCN10A; (+) strand; PAM type: NRG; PAM sequence: AAG
  source 1..20: mol_type = other DNA
tctcacaaatctggaggttg

SEQ ID NO: 38778 - DNA, 20 bp, synthetic construct
  misc_feature 1..20: note = Description of Artificial Sequence: Synthetic oligonucleotide
  misc_feature 1..20: note = Target: SCN10A; (+) strand; PAM type: NRG; PAM sequence: GAG
  source 1..20: mol_type = other DNA
aaatctggaggttgaagcct

SEQ ID NO: 38779 - DNA, 20 bp, synthetic construct
  misc_feature 1..20: note = Description of Artificial Sequence: Synthetic oligonucleotide
  misc_feature 1..20: note = Target: SCN10A; (+) strand; PAM type: NRG; PAM sequence: TGG
  source 1..20: mol_type = other DNA
tggaggttgaagcctgagat

SEQ ID NO: 38780 - DNA, 20 bp, synthetic construct
  misc_feature 1..20: note = Description of Artificial Sequence: Synthetic oligonucleotide
  misc_feature 1..20: note = Target: SCN10A; (+) strand; PAM type: NRG; PAM sequence: GGG
  source 1..20: mol_type = other DNA
ggaggttgaagcctgagatt

SEQ ID NO: 38781 - DNA, 20 bp, synthetic construct
  misc_feature 1..20: note = Description of Artificial Sequence: Synthetic oligonucleotide
  misc_feature 1..20: note = Target: SCN10A; (+) strand; PAM type: NRG; PAM sequence: CAG
  source 1..20: mol_type = other DNA
gaagcctgagattgggatgt

SEQ ID NO: 38782 - DNA, 20 bp, synthetic construct
  misc_feature 1..20: note = Description of Artificial Sequence: Synthetic oligonucleotide
  misc_feature 1..20: note = Target: SCN10A; (+) strand; PAM type: NRG; PAM sequence: TAG
  source 1..20: mol_type = other DNA
ctgagattgggatgtcagca

SEQ ID NO: 38783 - DNA, 20 bp, synthetic construct
  misc_feature 1..20: note = Description of Artificial Sequence: Synthetic oligonucleotide
  misc_feature 1..20: note = Target: SCN10A; (+) strand; PAM type: NRG; PAM sequence: TGG
  source 1..20: mol_type = other DNA
gattgggatgtcagcatagt

SEQ ID NO: 38784 - DNA, 20 bp, synthetic construct
  misc_feature 1..20: note = Description of Artificial Sequence: Synthetic oligonucleotide
  misc_feature 1..20: note = Target: SCN10A; (+) strand; PAM type: NRG; PAM sequence: GGG
  source 1..20: mol_type = other DNA
attgggatgtcagcatagtt

SEQ ID NO: 38785 - DNA, 20 bp, synthetic construct
  misc_feature 1..20: note = Description of Artificial Sequence: Synthetic oligonucleotide
  misc_feature 1..20: note = Target: SCN10A; (+) strand; PAM type: NRG; PAM sequence: TGG
  source 1..20: mol_type = other DNA
gatgtcagcatagttgggtc

SEQ ID NO: 38786 - DNA, 20 bp, synthetic construct
  misc_feature 1..20: note = Description of Artificial Sequence: Synthetic oligonucleotide
  misc_feature 1..20: note = Target: SCN10A; (+) strand; PAM type: NRG; PAM sequence: GGG
  source 1..20: mol_type = other DNA
atgtcagcatagttgggtct

SEQ ID NO: 38787 - DNA, 20 bp, synthetic construct
  misc_feature 1..20: note = Description of Artificial Sequence: Synthetic oligonucleotide
  misc_feature 1..20: note = Target: SCN10A; (+) strand; PAM type: NRG; PAM sequence: AAG
  source 1..20: mol_type = other DNA
cagcatagttgggtctggga

SEQ ID NO: 38788 - DNA, 20 bp, synthetic construct
  misc_feature 1..20: note = Description of Artificial Sequence: Synthetic oligonucleotide
  misc_feature 1..20: note = Target: SCN10A; (+) strand; PAM type: NRG; PAM sequence: TAG
  source 1..20: mol_type = other DNA
tctgggaaagactctctttc

SEQ ID NO: 38789 - DNA, 20 bp, synthetic construct
  misc_feature 1..20: note = Description of Artificial Sequence: Synthetic oligonucleotide
  misc_feature 1..20: note = Target: SCN10A; (+) strand; PAM type: NRG; PAM sequence: TAG
  source 1..20: mol_type = other DNA
aagactctctttctagctta

SEQ ID NO: 38790 - DNA, 20 bp, synthetic construct
  misc_feature 1..20: note = Description of Artificial Sequence: Synthetic oligonucleotide
  misc_feature 1..20: note = Target: SCN10A; (+) strand; PAM type: NRG; PAM sequence: AAG
  source 1..20: mol_type = other DNA
tgtccttgtgttctcacaca

SEQ ID NO: 38791 - DNA, 20 bp, synthetic construct
  misc_feature 1..20: note = Description of Artificial Sequence: Synthetic oligonucleotide
  misc_feature 1..20: note = Target: SCN10A; (+) strand; PAM type: NRG; PAM sequence: AGG
  source 1..20: mol_type = other DNA
gtccttgtgttctcacacaa

SEQ ID NO: 38792 - DNA, 20 bp, synthetic construct
  misc_feature 1..20: note = Description of Artificial Sequence: Synthetic oligonucleotide
  misc_feature 1..20: note = Target: SCN10A; (+) strand; PAM type: NRG; PAM sequence: GGG
  source 1..20: mol_type = other DNA
tccttgtgttctcacacaaa

SEQ ID NO: 38793 - DNA, 20 bp, synthetic construct
  misc_feature 1..20: note = Description of Artificial Sequence: Synthetic oligonucleotide
  misc_feature 1..20: note = Target: SCN10A; (+) strand; PAM type: NRG; PAM sequence: GGG
  source 1..20: mol_type = other DNA
ccttgtgttctcacacaaag

SEQ ID NO: 38794 - DNA, 20 bp, synthetic construct
  misc_feature 1..20: note = Description of Artificial Sequence: Synthetic oligonucleotide
  misc_feature 1..20: note = Target: SCN10A; (+) strand; PAM type: NRG; PAM sequence: GAG
  source 1..20: mol_type = other DNA
ttgtgttctcacacaaaggg

SEQ ID NO: 38795 - DNA, 20 bp, synthetic construct
  misc_feature 1..20: note = Description of Artificial Sequence: Synthetic oligonucleotide
  misc_feature 1..20: note = Target: SCN10A; (+) strand; PAM type: NRG; PAM sequence: AAG
  source 1..20: mol_type = other DNA
gttctcacacaaaggggaga

SEQ ID NO: 38796 - DNA, 20 bp, synthetic construct
  misc_feature 1..20: note = Description of Artificial Sequence: Synthetic oligonucleotide
  misc_feature 1..20: note = Target: SCN10A; (+) strand; PAM type: NRG; PAM sequence: AAG
  source 1..20: mol_type = other DNA
aagctgtctctttctcttat

SEQ ID NO: 38797 - DNA, 20 bp, synthetic construct
  misc_feature 1..20: note = Description of Artificial Sequence: Synthetic oligonucleotide
  misc_feature 1..20: note = Target: SCN10A; (+) strand; PAM type: NRG; PAM sequence: AGG
  source 1..20: mol_type = other DNA
agctgtctctttctcttata

SEQ ID NO: 38798 - DNA, 20 bp, synthetic construct
  misc_feature 1..20: note = Description of Artificial Sequence: Synthetic oligonucleotide
  misc_feature 1..20: note = Target: SCN10A; (+) strand; PAM type: NRG; PAM sequence: CAG
  source 1..20: mol_type = other DNA
tctttctcttataaggacac

SEQ ID NO: 38799 - DNA, 20 bp, synthetic construct
  misc_feature 1..20: note = Description of Artificial Sequence: Synthetic oligonucleotide
  misc_feature 1..20: note = Target: SCN10A; (+) strand; PAM type: NRG; PAM sequence: AAG
  source 1..20: mol_type = other DNA
ggacaccagttctaccactt

SEQ ID NO: 38800 - DNA, 20 bp, synthetic construct
  misc_feature 1..20: note = Description of Artificial Sequence: Synthetic oligonucleotide
  misc_feature 1..20: note = Target: SCN10A; (+) strand; PAM type: NRG; PAM sequence: AGG
  source 1..20: mol_type = other DNA
gacaccagttctaccactta

SEQ ID NO: 38801 - DNA, 20 bp, synthetic construct
  misc_feature 1..20: note = Description of Artificial Sequence: Synthetic oligonucleotide
  misc_feature 1..20: note = Target: SCN10A; (+) strand; PAM type: NRG; PAM sequence: GGG
  source 1..20: mol_type = other DNA
acaccagttctaccacttaa

SEQ ID NO: 38802 - DNA, 20 bp, synthetic construct
  misc_feature 1..20: note = Description of Artificial Sequence: Synthetic oligonucleotide
  misc_feature 1..20: note = Target: SCN10A; (+) strand; PAM type: NRG; PAM sequence: TAG
  source 1..20: mol_type = other DNA
atttaacccaatcacctcct

SEQ ID NO: 38803 - DNA, 20 bp, synthetic construct
  misc_feature 1..20: note = Description of Artificial Sequence: Synthetic oligonucleotide
  misc_feature 1..20: note = Target: SCN10A; (+) strand; PAM type: NRG; PAM sequence: GAG
  source 1..20: mol_type = other DNA
ttaacccaatcacctcctta

SEQ ID NO: 38804 - DNA, 20 bp, synthetic construct
  misc_feature 1..20: note = Description of Artificial Sequence: Synthetic oligonucleotide
  misc_feature 1..20: note = Target: SCN10A; (+) strand; PAM type: NRG; PAM sequence: AGG
  source 1..20: mol_type = other DNA
taacccaatcacctccttag

SEQ ID NO: 38805 - DNA, 20 bp, synthetic construct
  misc_feature 1..20: note = Description of Artificial Sequence: Synthetic oligonucleotide
  misc_feature 1..20: note = Target: SCN10A; (+) strand; PAM type: NRG; PAM sequence: TAG
  source 1..20: mol_type = other DNA
tagaggcccaatctccaaca

SEQ ID NO: 38806 - DNA, 20 bp, synthetic construct
  misc_feature 1..20: note = Description of Artificial Sequence: Synthetic oligonucleotide
  misc_feature 1..20: note = Target: SCN10A; (+) strand; PAM type: NRG; PAM sequence: TGG
  source 1..20: mol_type = other DNA
caatctccaacatagcaaca

SEQ ID NO: 38807 - DNA, 20 bp, synthetic construct
  misc_feature 1..20: note = Description of Artificial Sequence: Synthetic oligonucleotide
  misc_feature 1..20: note = Target: SCN10A; (+) strand; PAM type: NRG; PAM sequence: GGG
  source 1..20: mol_type = other DNA
aatctccaacatagcaacat

SEQ ID NO: 38808 - DNA, 20 bp, synthetic construct
  misc_feature 1..20: note = Description of Artificial Sequence: Synthetic oligonucleotide
  misc_feature 1..20: note = Target: SCN10A; (+) strand; PAM type: NRG; PAM sequence: GGG
  source 1..20: mol_type = other DNA
atctccaacatagcaacatg

SEQ ID NO: 38809 - DNA, 20 bp, synthetic construct
  misc_feature 1..20: note = Description of Artificial Sequence: Synthetic oligonucleotide
  misc_feature 1..20: note = Target: SCN10A; (+) strand; PAM type: NRG; PAM sequence: GGG
  source 1..20: mol_type = other DNA
tctccaacatagcaacatgg

SEQ ID NO: 38810 - DNA, 20 bp, synthetic construct
  misc_feature 1..20: note = Description of Artificial Sequence: Synthetic oligonucleotide
  misc_feature 1..20: note = Target: SCN10A; (+) strand; PAM type: NRG; PAM sequence: GGG
  source 1..20: mol_type = other DNA
ctccaacatagcaacatggg

SEQ ID NO: 38811 - DNA, 20 bp, synthetic construct
  misc_feature 1..20: note = Description of Artificial Sequence: Synthetic oligonucleotide
  misc_feature 1..20: note = Target: SCN10A; (+) strand; PAM type: NRG; PAM sequence: GAG
  source 1..20: mol_type = other DNA
tgtttcaacatttgaatttt

SEQ ID NO: 38812 - DNA, 20 bp, synthetic construct
  misc_feature 1..20: note = Description of Artificial Sequence: Synthetic oligonucleotide
  misc_feature 1..20: note = Target: SCN10A; (+) strand; PAM type: NRG; PAM sequence: AGG
  source 1..20: mol_type = other DNA
gtttcaacatttgaattttg

SEQ ID NO: 38813 - DNA, 20 bp, synthetic construct
  misc_feature 1..20: note = Description of Artificial Sequence: Synthetic oligonucleotide
  misc_feature 1..20: note = Target: SCN10A; (+) strand; PAM type: NRG; PAM sequence: GGG
  source 1..20: mol_type = other DNA
tttcaacatttgaattttga

SEQ ID NO: 38814 - DNA, 20 bp, synthetic construct
  misc_feature 1..20: note = Description of Artificial Sequence: Synthetic oligonucleotide
  misc_feature 1..20: note = Target: SCN10A; (+) strand; PAM type: NRG; PAM sequence: GGG
  source 1..20: mol_type = other DNA
ttcaacatttgaattttgag

SEQ ID NO: 38815 - DNA, 20 bp, synthetic construct
  misc_feature 1..20: note = Description of Artificial Sequence: Synthetic oligonucleotide
  misc_feature 1..20: note = Target: SCN10A; (+) strand; PAM type: NRG; PAM sequence: TAG
  source 1..20: mol_type = other DNA
aggggacaaaattcactcca

SEQ ID NO: 38816 - DNA, 20 bp, synthetic construct
  misc_feature 1..20: note = Description of Artificial Sequence: Synthetic oligonucleotide
  misc_feature 1..20: note = Target: SCN10A; (+) strand; PAM type: NRG; PAM sequence: CAG
  source 1..20: mol_type = other DNA
ggacaaaattcactccatag

SEQ ID NO: 38817 - DNA, 20 bp, synthetic construct
  misc_feature 1..20: note = Description of Artificial Sequence: Synthetic oligonucleotide
  misc_feature 1..20: note = Target: SCN10A; (+) strand; PAM type: NRG; PAM sequence: TGG
  source 1..20: mol_type = other DNA
caactacccatgccataaaa

SEQ ID NO: 38818 - DNA, 20 bp, synthetic construct
  misc_feature 1..20: note = Description of Artificial Sequence: Synthetic oligonucleotide
  misc_feature 1..20: note = Target: SCN10A; (+) strand; PAM type: NRG; PAM sequence: CAG
  source 1..20: mol_type = other DNA
gccataaaatggaacgtgac

SEQ ID NO: 38819 - DNA, 20 bp, synthetic construct
  misc_feature 1..20: note = Description of Artificial Sequence: Synthetic oligonucleotide
  misc_feature 1..20: note = Target: SCN10A; (+) strand; PAM type: NRG; PAM sequence: CAG
  source 1..20: mol_type = other DNA
gaacgtgaccagcacttcac

SEQ ID NO: 38820 - DNA, 20 bp, synthetic construct
  misc_feature 1..20: note = Description of Artificial Sequence: Synthetic oligonucleotide
  misc_feature 1..20: note = Target: SCN10A; (+) strand; PAM type: NRG; PAM sequence: TGG
  source 1..20: mol_type = other DNA
acatcctccctcttctgccc

SEQ ID NO: 38821 - DNA, 20 bp, synthetic construct
  misc_feature 1..20: note = Description of Artificial Sequence: Synthetic oligonucleotide
  misc_feature 1..20: note = Target: SCN10A; (+) strand; PAM type: NRG; PAM sequence: GAG
  source 1..20: mol_type = other DNA
atcctccctcttctgccctg

SEQ ID NO: 38822 - DNA, 20 bp, synthetic construct
  misc_feature 1..20: note = Description of Artificial Sequence: Synthetic oligonucleotide
  misc_feature 1..20: note = Target: SCN10A; (+) strand; PAM type: NRG; PAM sequence: AGG
  source 1..20: mol_type = other DNA
tcctccctcttctgccctgg

SEQ ID NO: 38823 - DNA, 20 bp, synthetic construct
  misc_feature 1..20: note = Description of Artificial Sequence: Synthetic oligonucleotide
  misc_feature 1..20: note = Target: SCN10A; (+) strand; PAM type: NRG; PAM sequence: TGG
  source 1..20: mol_type = other DNA
gccactattctcctaatttt

SEQ ID NO: 38824 - DNA, 20 bp, synthetic construct
  misc_feature 1..20: note = Description of Artificial Sequence: Synthetic oligonucleotide
  misc_feature 1..20: note = Target: SCN10A; (+) strand; PAM type: NRG; PAM sequence: AAG
  source 1..20: mol_type = other DNA
attgatgctttttacttcat

SEQ ID NO: 38825 - DNA, 20 bp, synthetic construct
  misc_feature 1..20: note = Description of Artificial Sequence: Synthetic oligonucleotide
  misc_feature 1..20: note = Target: SCN10A; (+) strand; PAM type: NRG; PAM sequence: TAG
  source 1..20: mol_type = other DNA
gtatgcattcctaaacaaaa

SEQ ID NO: 38826 - DNA, 20 bp, synthetic construct
  misc_feature 1..20: note = Description of Artificial Sequence: Synthetic oligonucleotide
  misc_feature 1..20: note = Target: SCN10A; (+) strand; PAM type: NRG; PAM sequence: TAG
  source 1..20: mol_type = other DNA
cattcctaaacaaaatagtt

SEQ ID NO: 38827 - DNA, 20 bp, synthetic construct
  misc_feature 1..20: note = Description of Artificial Sequence: Synthetic oligonucleotide
  misc_feature 1..20: note = Target: SCN10A; (+) strand; PAM type: NRG; PAM sequence: TGG
  source 1..20: mol_type = other DNA
tttatgtaatcctttgcatt

SEQ ID NO: 38828 - DNA, 20 bp, synthetic construct
  misc_feature 1..20: note = Description of Artificial Sequence: Synthetic oligonucleotide
  misc_feature 1..20: note = Target: SCN10A; (+) strand; PAM type: NRG; PAM sequence: AAG
  source 1..20: mol_type = other DNA
ttgttcaatattactttctt

SEQ ID NO: 38829 - DNA, 20 bp, synthetic construct
  misc_feature 1..20: note = Description of Artificial Sequence: Synthetic oligonucleotide
  misc_feature 1..20: note = Target: SCN10A; (+) strand; PAM type: NRG; PAM sequence: CAG
  source 1..20: mol_type = other DNA
gactcatccttattgttgtg

SEQ ID NO: 38830 - DNA, 20 bp, synthetic construct
  misc_feature 1..20: note = Description of Artificial Sequence: Synthetic oligonucleotide
  misc_feature 1..20: note = Target: SCN10A; (+) strand; PAM type: NRG; PAM sequence: AAG
  source 1..20: mol_type = other DNA
cttattgttgtgcagcacta

SEQ ID NO: 38831 - DNA, 20 bp, synthetic construct
  misc_feature 1..20: note = Description of Artificial Sequence: Synthetic oligonucleotide
  misc_feature 1..20: note = Target: SCN10A; (+) strand; PAM type: NRG; PAM sequence: AAG
  source 1..20: mol_type = other DNA
ttattaatttttattgctgt

SEQ ID NO: 38832 - DNA, 20 bp, synthetic construct
  misc_feature 1..20: note = Description of Artificial Sequence: Synthetic oligonucleotide
  misc_feature 1..20: note = Target: SCN10A; (+) strand; PAM type: NRG; PAM sequence: TAG
  source 1..20: mol_type = other DNA
tgctgtaagttttctcattt

SEQ ID NO: 38833 - DNA, 20 bp, synthetic construct
  misc_feature 1..20: note = Description of Artificial Sequence: Synthetic oligonucleotide
  misc_feature 1..20: note = Target: SCN10A; (+) strand; PAM type: NRG; PAM sequence: CAG
  source 1..20: mol_type = other DNA
tttctcattttagaatataa

SEQ ID NO: 38834 - DNA, 20 bp, synthetic construct
  misc_feature 1..20: note = Description of Artificial Sequence: Synthetic oligonucleotide
  misc_feature 1..20: note = Target: SCN10A; (+) strand; PAM type: NRG; PAM sequence: TAG
  source 1..20: mol_type = other DNA
attttagaatataacagaaa

SEQ ID NO: 38835 - DNA, 20 bp, synthetic construct
  misc_feature 1..20: note = Description of Artificial Sequence: Synthetic oligonucleotide
  misc_feature 1..20: note = Target: SCN10A; (+) strand; PAM type: NRG; PAM sequence: AAG
  source 1..20: mol_type = other DNA
agaaatagttaatgtactca

SEQ ID NO: 38836 - DNA, 20 bp, synthetic construct
  misc_feature 1..20: note = Description of Artificial Sequence: Synthetic oligonucleotide
  misc_feature 1..20: note = Target: SCN10A; (+) strand; PAM type: NRG; PAM sequence: TGG
  source 1..20: mol_type = other DNA
gttaatgtactcaaagttta

SEQ ID NO: 38837 - DNA, 20 bp, synthetic construct
  misc_feature 1..20: note = Description of Artificial Sequence: Synthetic oligonucleotide
  misc_feature 1..20: note = Target: SCN10A; (+) strand; PAM type: NRG; PAM sequence: GAG
  source 1..20: mol_type = other DNA
ctcaaagtttatggacattt

SEQ ID NO: 38838 - DNA, 20 bp, synthetic construct
  misc_feature 1..20: note = Description of Artificial Sequence: Synthetic oligonucleotide
  misc_feature 1..20: note = Target: SCN10A; (+) strand; PAM type: NRG; PAM sequence: TGG
  source 1..20: mol_type = other DNA
aaagtttatggacatttgag

SEQ ID NO: 38839 - DNA, 20 bp, synthetic construct
  misc_feature 1..20: note = Description of Artificial Sequence: Synthetic oligonucleotide
  misc_feature 1..20: note = Target: SCN10A; (+) strand; PAM type: NRG; PAM sequence: CGG
  source 1..20: mol_type = other DNA
atggacatttgagtggtttc

SEQ ID NO: 38840 - DNA, 20 bp, synthetic construct
  misc_feature 1..20: note = Description of Artificial Sequence: Synthetic oligonucleotide
  misc_feature 1..20: note = Target: SCN10A; (+) strand; PAM type: NRG; PAM sequence: TGG
  source 1..20: mol_type = other DNA
catttgagtggtttccggtt

SEQ ID NO: 38841 - DNA, 20 bp, synthetic construct
  misc_feature 1..20: note = Description of Artificial Sequence: Synthetic oligonucleotide
  misc_feature 1..20: note = Target: SCN10A; (+) strand; PAM type: NRG; PAM sequence: GGG
  source 1..20: mol_type = other DNA
atttgagtggtttccggttt

SEQ ID NO: 38842 - DNA, 20 bp, synthetic construct
  misc_feature 1..20: note = Description of Artificial Sequence: Synthetic oligonucleotide
  misc_feature 1..20: note = Target: SCN10A; (+) strand; PAM type: NRG; PAM sequence: GGG
  source 1..20: mol_type = other DNA
tttgagtggtttccggtttg

SEQ ID NO: 38843 - DNA, 20 bp, synthetic construct
  misc_feature 1..20: note = Description of Artificial Sequence: Synthetic oligonucleotide
  misc_feature 1..20: note = Target: SCN10A; (+) strand; PAM type: NRG; PAM sequence: TGG
  source 1..20: mol_type = other DNA
tttccggtttggggttttta

SEQ ID NO: 38844 - DNA, 20 bp, synthetic construct
  misc_feature 1..20: note = Description of Artificial Sequence: Synthetic oligonucleotide
  misc_feature 1..20: note = Target: SCN10A; (+) strand; PAM type: NRG; PAM sequence: GGG
  source 1..20: mol_type = other DNA
ttccggtttggggtttttat

SEQ ID NO: 38845 - DNA, 20 bp, synthetic construct
  misc_feature 1..20: note = Description of Artificial Sequence: Synthetic oligonucleotide
  misc_feature 1..20: note = Target: SCN10A; (+) strand; PAM type: NRG; PAM sequence: TAG
  source 1..20: mol_type = other DNA
aatgttcataaactttcttg

SEQ ID NO: 38846 - DNA, 20 bp, synthetic construct
  misc_feature 1..20: note = Description of Artificial Sequence: Synthetic oligonucleotide
  misc_feature 1..20: note = Target: SCN10A; (+) strand; PAM type: NRG; PAM sequence: TGG
  source 1..20: mol_type = other DNA
actttcttgtagctgtaatc

SEQ ID NO: 38847 - DNA, 20 bp, synthetic construct
  misc_feature 1..20: note = Description of Artificial Sequence: Synthetic oligonucleotide
  misc_feature 1..20: note = Target: SCN10A; (+) strand; PAM type: NRG; PAM sequence: AAG
  source 1..20: mol_type = other DNA
agctgtaatctggtgtccac

SEQ ID NO: 38848 - DNA, 20 bp, synthetic construct
  misc_feature 1..20: note = Description of Artificial Sequence: Synthetic oligonucleotide
  misc_feature 1..20: note = Target: SCN10A; (+) strand; PAM type: NRG; PAM sequence: TAG
  source 1..20: mol_type = other DNA
gtacatatttctgttaaaca

SEQ ID NO: 38849 - DNA, 20 bp, synthetic construct
  misc_feature 1..20: note = Description of Artificial Sequence: Synthetic oligonucleotide
  misc_feature 1..20: note = Target: SCN10A; (+) strand; PAM type: NRG; PAM sequence: AGG
  source 1..20: mol_type = other DNA
tacatatttctgttaaacat

SEQ ID NO: 38850 - DNA, 20 bp, synthetic construct
  misc_feature 1..20: note = Description of Artificial Sequence: Synthetic oligonucleotide
  misc_feature 1..20: note = Target: SCN10A; (+) strand; PAM type: NRG; PAM sequence: AAG
  source 1..20: mol_type = other DNA
tctgttaaacataggtacct

SEQ ID NO: 38851 - DNA, 20 bp, synthetic construct
  misc_feature 1..20: note = Description of Artificial Sequence: Synthetic oligonucleotide
  misc_feature 1..20: note = Target: SCN10A; (+) strand; PAM type: NRG; PAM sequence: AGG
  source 1..20: mol_type = other DNA
ctgttaaacataggtaccta

SEQ ID NO: 38852 - DNA, 20 bp, synthetic construct
  misc_feature 1..20: note = Description of Artificial Sequence: Synthetic oligonucleotide
  misc_feature 1..20: note = Target: SCN10A; (+) strand; PAM type: NRG; PAM sequence: GGG
  source 1..20: mol_type = other DNA
tgttaaacataggtacctaa

SEQ ID NO: 38853 - DNA, 20 bp, synthetic construct
  misc_feature 1..20: note = Description of Artificial Sequence: Synthetic oligonucleotide
  misc_feature 1..20: note = Target: SCN10A; (+) strand; PAM type: NRG; PAM sequence: TAG
  source 1..20: mol_type = other DNA
ataggtacctaagggtgtaa

SEQ ID NO: 38854 - DNA, 20 bp, synthetic construct
  misc_feature 1..20: note = Description of Artificial Sequence: Synthetic oligonucleotide
  misc_feature 1..20: note = Target: SCN10A; (+) strand; PAM type: NRG; PAM sequence: AAG
  source 1..20: mol_type = other DNA
ggtacctaagggtgtaatag

SEQ ID NO: 38855 - DNA, 20 bp, synthetic construct
  misc_feature 1..20: note = Description of Artificial Sequence: Synthetic oligonucleotide
  misc_feature 1..20: note = Target: SCN10A; (+) strand; PAM type: NRG; PAM sequence: CAG
  source 1..20: mol_type = other DNA
aagggtgtaatagaagaata

SEQ ID NO: 38856 - DNA, 20 bp, synthetic construct
  misc_feature 1..20: note = Description of Artificial Sequence: Synthetic oligonucleotide
  misc_feature 1..20: note = Target: SCN10A; (+) strand; PAM type: NRG; PAM sequence: TAG
  source 1..20: mol_type = other DNA
atgtatgcttacacctttac

SEQ ID NO: 38857 - DNA, 20 bp, synthetic construct
  misc_feature 1..20: note = Description of Artificial Sequence: Synthetic oligonucleotide
  misc_feature 1..20: note = Target: SCN10A; (+) strand; PAM type: NRG; PAM sequence: AAG
  source 1..20: mol_type = other DNA
ataataccccttgctttcca

SEQ ID NO: 38858 - DNA, 20 bp, synthetic construct
  misc_feature 1..20: note = Description of Artificial Sequence: Synthetic oligonucleotide
  misc_feature 1..20: note = Target: SCN10A; (+) strand; PAM type: NRG; PAM sequence: GAG
  source 1..20: mol_type = other DNA
aataccccttgctttccaaa

SEQ ID NO: 38859 - DNA, 20 bp, synthetic construct
  misc_feature 1..20: note = Description of Artificial Sequence: Synthetic oligonucleotide
  misc_feature 1..20: note = Target: SCN10A; (+) strand; PAM type: NRG; PAM sequence: AGG
  source 1..20: mol_type = other DNA
ataccccttgctttccaaag

SEQ ID NO: 38860 - DNA, 20 bp, synthetic construct
  misc_feature 1..20: note = Description of Artificial Sequence: Synthetic oligonucleotide
  misc_feature 1..20: note = Target: SCN10A; (+) strand; PAM type: NRG; PAM sequence: CAG
  source 1..20: mol_type = other DNA
gtccaaatttacactcccac

SEQ ID NO: 38861 - DNA, 20 bp, synthetic construct
  misc_feature 1..20: note = Description of Artificial Sequence: Synthetic oligonucleotide
  misc_feature 1..20: note = Target: SCN10A; (+) strand; PAM type: NRG; PAM sequence: CAG
  source 1..20: mol_type = other DNA
caaatttacactcccaccag

SEQ ID NO: 38862 - DNA, 20 bp, synthetic construct
  misc_feature 1..20: note = Description of Artificial Sequence: Synthetic oligonucleotide
  misc_feature 1..20: note = Target: SCN10A; (+) strand; PAM type: NRG; PAM sequence: GAG
  source 1..20: mol_type = other DNA
cactcccaccagcagtgtgt

SEQ ID NO: 38863 - DNA, 20 bp, synthetic construct
  misc_feature 1..20: note = Description of Artificial Sequence: Synthetic oligonucleotide
  misc_feature 1..20: note = Target: SCN10A; (+) strand; PAM type: NRG; PAM sequence: TGG
  source 1..20: mol_type = other DNA
tccatgtcattcccaatact

SEQ ID NO: 38864 - DNA, 20 bp, synthetic construct
  misc_feature 1..20: note = Description of Artificial Sequence: Synthetic oligonucleotide
  misc_feature 1..20: note = Target: SCN10A; (+) strand; PAM type: NRG; PAM sequence: CAG
  source 1..20: mol_type = other DNA
atgaacatgtaataaaatct

SEQ ID NO: 38865 - DNA, 20 bp, synthetic construct
  misc_feature 1..20: note = Description of Artificial Sequence: Synthetic oligonucleotide
  misc_feature 1..20: note = Target: SCN10A; (+) strand; PAM type: NRG; PAM sequence: AAG
  source 1..20: mol_type = other DNA
gcaactctttgatttaaaaa

SEQ ID NO: 38866 - DNA, 20 bp, synthetic construct
  misc_feature 1..20: note = Description of Artificial Sequence: Synthetic oligonucleotide
  misc_feature 1..20: note = Target: SCN10A; (+) strand; PAM type: NRG; PAM sequence: AGG
  source 1..20: mol_type = other DNA
caactctttgatttaaaaaa

SEQ ID NO: 38867 - DNA, 20 bp, synthetic construct
  misc_feature 1..20: note = Description of Artificial Sequence: Synthetic oligonucleotide
  misc_feature 1..20: note = Target: SCN10A; (+) strand; PAM type: NRG; PAM sequence: AAG
  source 1..20: mol_type = other DNA
ctttgatttaaaaaaaggtt

SEQ ID NO: 38868 - DNA, 20 bp, synthetic construct
  misc_feature 1..20: note = Description of Artificial Sequence: Synthetic oligonucleotide
  misc_feature 1..20: note = Target: SCN10A; (+) strand; PAM type: NRG; PAM sequence: TGG
  source 1..20: mol_type = other DNA
agaatactttcatatgttta

SEQ ID NO: 38869 - DNA, 20 bp, synthetic construct
  misc_feature 1..20: note = Description of Artificial Sequence: Synthetic oligonucleotide
  misc_feature 1..20: note = Target: SCN10A; (+) strand; PAM type: NRG; PAM sequence: TGG
  source 1..20: mol_type = other DNA
ttcatatgtttatggccatt

SEQ ID NO: 38870 - DNA, 20 bp, synthetic construct
  misc_feature 1..20: note = Description of Artificial Sequence: Synthetic oligonucleotide
  misc_feature 1..20: note = Target: SCN10A; (+) strand; PAM type: NRG; PAM sequence: AAG
  source 1..20: mol_type = other DNA
tttggatttccacttttgta

SEQ ID NO: 38871 - DNA, 20 bp, synthetic construct
  misc_feature 1..20: note = Description of Artificial Sequence: Synthetic oligonucleotide
  misc_feature 1..20: note = Target: SCN10A; (+) strand; PAM type: NRG; PAM sequence: AAG
  source 1..20: mol_type = other DNA
caaattttgtgctattttac

SEQ ID NO: 38872 - DNA, 20 bp, synthetic construct
  misc_feature 1..20: note = Description of Artificial Sequence: Synthetic oligonucleotide
  misc_feature 1..20: note = Target: SCN10A; (+) strand; PAM type: NRG; PAM sequence: TGG
  source 1..20: mol_type = other DNA
attttgtgctattttacaag

SEQ ID NO: 38873 - DNA, 20 bp, synthetic construct
  misc_feature 1..20: note = Description of Artificial Sequence: Synthetic oligonucleotide
  misc_feature 1..20: note = Target: SCN10A; (+) strand; PAM type: NRG; PAM sequence: TAG
  source 1..20: mol_type = other DNA
acatttttctaattgatttg

SEQ ID NO: 38874 - DNA, 20 bp, synthetic construct
  misc_feature 1..20: note = Description of Artificial Sequence: Synthetic oligonucleotide
  misc_feature 1..20: note = Target: SCN10A; (+) strand; PAM type: NRG; PAM sequence: GAG
  source 1..20: mol_type = other DNA
atttttctaattgatttgta

SEQ ID NO: 38875 - DNA, 20 bp, synthetic construct
  misc_feature 1..20: note = Description of Artificial Sequence: Synthetic oligonucleotide
  misc_feature 1..20: note = Target: SCN10A; (+) strand; PAM type: NRG; PAM sequence: AAG
  source 1..20: mol_type = other DNA
gagttcattactctgaatat

SEQ ID NO: 38876 - DNA, 20 bp, synthetic construct
  misc_feature 1..20: note = Description of Artificial Sequence: Synthetic oligonucleotide
  misc_feature 1..20: note = Target: SCN10A; (+) strand; PAM type: NRG; PAM sequence: AAG
  source 1..20: mol_type = other DNA
cttgctttttcatgctctta

SEQ ID NO: 38877 - DNA, 20 bp, synthetic construct
  misc_feature 1..20: note = Description of Artificial Sequence: Synthetic oligonucleotide
  misc_feature 1..20: note = Target: SCN10A; (+) strand; PAM type: NRG; PAM sequence: TAG
  source 1..20: mol_type = other DNA
ctgatgaacattcttaatta

SEQ ID NO: 38878 - DNA, 20 bp, synthetic construct
  misc_feature 1..20: note = Description of Artificial Sequence: Synthetic oligonucleotide
  misc_feature 1..20: note = Target: SCN10A; (+) strand; PAM type: NRG; PAM sequence: CAG
  source 1..20: mol_type = other DNA
tatagtatactaaaatgtat

SEQ ID NO: 38879 - DNA, 20 bp, synthetic construct
  misc_feature 1..20: note = Description of Artificial Sequence: Synthetic oligonucleotide
  misc_feature 1..20: note = Target: SCN10A; (+) strand; PAM type: NRG; PAM sequence: TAG
  source 1..20: mol_type = other DNA
tgtatcagttttttcctgta

SEQ ID NO: 38880 - DNA, 20 bp, synthetic construct
  misc_feature 1..20: note = Description of Artificial Sequence: Synthetic oligonucleotide
  misc_feature 1..20: note = Target: SCN10A; (+) strand; PAM type: NRG; PAM sequence: TAG
  source 1..20: mol_type = other DNA
tcagttttttcctgtatagt

SEQ ID NO: 38881 - DNA, 20 bp, synthetic construct
  misc_feature 1..20: note = Description of Artificial Sequence: Synthetic oligonucleotide
  misc_feature 1..20: note = Target: SCN10A; (+) strand; PAM type: NRG; PAM sequence: AAG
  source 1..20: mol_type = other DNA
ttcttgtgtcatatgtaata

SEQ ID NO: 38882 - DNA, 20 bp, synthetic construct
  misc_feature 1..20: note = Description of Artificial Sequence: Synthetic oligonucleotide
  misc_feature 1..20: note = Target: SCN10A; (+) strand; PAM type: NRG; PAM sequence: TAG
  source 1..20: mol_type = other DNA
atatgtaataaagtttttct

SEQ ID NO: 38883 - DNA, 20 bp, synthetic construct
  misc_feature 1..20: note = Description of Artificial Sequence: Synthetic oligonucleotide
  misc_feature 1..20: note = Target: SCN10A; (+) strand; PAM type: NRG; PAM sequence: GAG
  source 1..20: mol_type = other DNA
aataaagtttttcttagtct

SEQ ID NO: 38884 - DNA, 20 bp, synthetic construct
  misc_feature 1..20: note = Description of Artificial Sequence: Synthetic oligonucleotide
  misc_feature 1..20: note = Target: SCN10A; (+) strand; PAM type: NRG; PAM sequence: AGG
  source 1..20: mol_type = other DNA
ataaagtttttcttagtctg

SEQ ID NO: 38885 - DNA, 20 bp, synthetic construct
  misc_feature 1..20: note = Description of Artificial Sequence: Synthetic oligonucleotide
  misc_feature 1..20: note = Target: SCN10A; (+) strand; PAM type: NRG; PAM sequence: AAG
  source 1..20: mol_type = other DNA
tttcttagtctgaggtcata

SEQ ID NO: 38886 - DNA, 20 bp, synthetic construct
  misc_feature 1..20: note = Description of Artificial Sequence: Synthetic oligonucleotide
  misc_feature 1..20: note = Target: SCN10A; (+) strand; PAM type: NRG; PAM sequence: AAG
  source 1..20: mol_type = other DNA
ctttgttttttcctttcaaa

SEQ ID NO: 38887 - DNA, 20 bp, synthetic construct
  misc_feature 1..20: note = Description of Artificial Sequence: Synthetic oligonucleotide
  misc_feature 1..20: note = Target: SCN10A; (+) strand; PAM type: NRG; PAM sequence: AAG
  source 1..20: mol_type = other DNA
aaagcttatccaccacgatc

SEQ ID NO: 38888 - DNA, 20 bp, synthetic construct
  misc_feature 1..20: note = Description of Artificial Sequence: Synthetic oligonucleotide
  misc_feature 1..20: note = Target: SCN10A; (+) strand; PAM type: NRG; PAM sequence: CGG
  source 1..20: mol_type = other DNA
cttatccaccacgatcaagt

SEQ ID NO: 38889 - DNA, 20 bp, synthetic construct
  misc_feature 1..20: note = Description of Artificial Sequence: Synthetic oligonucleotide
  misc_feature 1..20: note = Target: SCN10A; (+) strand; PAM type: NRG; PAM sequence: TGG
  source 1..20: mol_type = other DNA
gatcaagtcggcttcatacc

SEQ ID NO: 38890 - DNA, 20 bp, synthetic construct
  misc_feature 1..20: note = Description of Artificial Sequence: Synthetic oligonucleotide
  misc_feature 1..20: note = Target: SCN10A; (+) strand; PAM type: NRG; PAM sequence: GGG
  source 1..20: mol_type = other DNA
atcaagtcggcttcatacct

SEQ ID NO: 38891 - DNA, 20 bp, synthetic construct
  misc_feature 1..20: note = Description of Artificial Sequence: Synthetic oligonucleotide
  misc_feature 1..20: note = Target: SCN10A; (+) strand; PAM type: NRG; PAM sequence: AAG
  source 1..20: mol_type = other DNA
cggcttcatacctgggatca

SEQ ID NO: 38892 - DNA, 20 bp, synthetic construct
  misc_feature 1..20: note = Description of Artificial Sequence: Synthetic oligonucleotide
  misc_feature 1..20: note = Target: SCN10A; (+) strand; PAM type: NRG; PAM sequence: TGG
  source 1..20: mol_type = other DNA
ttcatacctgggatcaaagc

SEQ ID NO: 38893 - DNA, 20 bp, synthetic construct
  misc_feature 1..20: note = Description of Artificial Sequence: Synthetic oligonucleotide
  misc_feature 1..20: note = Target: SCN10A; (+) strand; PAM type: NRG; PAM sequence: AAG
  source 1..20: mol_type = other DNA
aaagctggttcaacatacgc

SEQ ID NO: 38894 - DNA, 20 bp, synthetic construct
  misc_feature 1..20: note = Description of Artificial Sequence: Synthetic oligonucleotide
  misc_feature 1..20: note = Target: SCN10A; (+) strand; PAM type: NRG; PAM sequence: CAG
  source 1..20: mol_type = other DNA
aacgtaatccatcacacaaa

SEQ ID NO: 38895 - DNA, 20 bp, synthetic construct
  misc_feature 1..20: note = Description of Artificial Sequence: Synthetic oligonucleotide
  misc_feature 1..20: note = Target: SCN10A; (+) strand; PAM type: NRG; PAM sequence: TAG
  source 1..20: mol_type = other DNA
aaaccacgtgattatctcaa

SEQ ID NO: 38896 - DNA, 20 bp, synthetic construct
  misc_feature 1..20: note = Description of Artificial Sequence: Synthetic oligonucleotide
  misc_feature 1..20: note = Target: SCN10A; (+) strand; PAM type: NRG; PAM sequence: CAG
  source 1..20: mol_type = other DNA
cgtgattatctcaatagatg

SEQ ID NO: 38897 - DNA, 20 bp, synthetic construct
  misc_feature 1..20: note = Description of Artificial Sequence: Synthetic oligonucleotide
  misc_feature 1..20: note = Target: SCN10A; (+) strand; PAM type: NRG; PAM sequence: AAG
  source 1..20: mol_type = other DNA
ttatctcaatagatgcagaa

SEQ ID NO: 38898 - DNA, 20 bp, synthetic construct
  misc_feature 1..20: note = Description of Artificial Sequence: Synthetic oligonucleotide
  misc_feature 1..20: note = Target: SCN10A; (+) strand; PAM type: NRG; PAM sequence: AGG
  source 1..20: mol_type = other DNA
tatctcaatagatgcagaaa

SEQ ID NO: 38899 - DNA, 20 bp, synthetic construct
  misc_feature 1..20: note = Description of Artificial Sequence: Synthetic oligonucleotide
  misc_feature 1..20: note = Target: SCN10A; (+) strand; PAM type: NRG; PAM sequence: AAG
  source 1..20: mol_type = other DNA
tcaacacccattcatgctaa

SEQ ID NO: 38900 - DNA, 20 bp, synthetic construct
  misc_feature 1..20: note = Description of Artificial Sequence: Synthetic oligonucleotide
  misc_feature 1..20: note = Target: SCN10A; (+) strand; PAM type: NRG; PAM sequence: TAG
  source 1..20: mol_type = other DNA
gctaaaagctctcaataaac

SEQ ID NO: 38901 - DNA, 20 bp, synthetic construct
  misc_feature 1..20: note = Description of Artificial Sequence: Synthetic oligonucleotide
  misc_feature 1..20: note = Target: SCN10A; (+) strand; PAM type: NRG; PAM sequence: AGG
  source 1..20: mol_type = other DNA
ctaaaagctctcaataaact

SEQ ID NO: 38902 - DNA, 20 bp, synthetic construct
  misc_feature 1..20: note = Description of Artificial Sequence: Synthetic oligonucleotide
  misc_feature 1..20: note = Target: SCN10A; (+) strand; PAM type: NRG; PAM sequence: TGG
  source 1..20: mol_type = other DNA
ctcaataaactaggtattga

SEQ ID NO: 38903 - DNA, 20 bp, synthetic construct
  misc_feature 1..20: note = Description of Artificial Sequence: Synthetic oligonucleotide
  misc_feature 1..20: note = Target: SCN10A; (+) strand; PAM type: NRG; PAM sequence: AAG
  source 1..20: mol_type = other DNA
ggaatgtatctcaaaataat

SEQ ID NO: 38904 - DNA, 20 bp, synthetic construct
  misc_feature 1..20: note = Description of Artificial Sequence: Synthetic oligonucleotide
  misc_feature 1..20: note = Target: SCN10A; (+) strand; PAM type: NRG; PAM sequence: AAG
  source 1..20: mol_type = other DNA
taataagaactatttatgac

SEQ ID NO: 38905 - DNA, 20 bp, synthetic construct
  misc_feature 1..20: note = Description of Artificial Sequence: Synthetic oligonucleotide
  misc_feature 1..20: note = Target: SCN10A; (+) strand; PAM type: NRG; PAM sequence: CAG
  source 1..20: mol_type = other DNA
aactatttatgacaagcccc

SEQ ID NO: 38906 - DNA, 20 bp, synthetic construct
  misc_feature 1..20: note = Description of Artificial Sequence: Synthetic oligonucleotide
  misc_feature 1..20: note = Target: SCN10A; (+) strand; PAM type: NRG; PAM sequence: TGG
  source 1..20: mol_type = other DNA
ccagccaatatcatactgaa

SEQ ID NO: 38907 - DNA, 20 bp, synthetic construct
  misc_feature 1..20: note = Description of Artificial Sequence: Synthetic oligonucleotide
  misc_feature 1..20: note = Target: SCN10A; (+) strand; PAM type: NRG; PAM sequence: GGG
  source 1..20: mol_type = other DNA
cagccaatatcatactgaat

SEQ ID NO: 38908 - DNA, 20 bp, synthetic construct
  misc_feature 1..20: note = Description of Artificial Sequence: Synthetic oligonucleotide
  misc_feature 1..20: note = Target: SCN10A; (+) strand; PAM type: NRG; PAM sequence: TGG
  source 1..20: mol_type = other DNA
catactgaatgggcaaaaac

SEQ ID NO: 38909 - DNA, 20 bp, synthetic construct
  misc_feature 1..20: note = Description of Artificial Sequence: Synthetic oligonucleotide
  misc_feature 1..20: note = Target: SCN10A; (+) strand; PAM type: NRG; PAM sequence: AAG
  source 1..20: mol_type = other DNA
actgaatgggcaaaaactgg

SEQ ID NO: 38910 - DNA, 20 bp, synthetic construct
  misc_feature 1..20: note = Description of Artificial Sequence: Synthetic oligonucleotide
  misc_feature 1..20: note = Target: SCN10A; (+) strand; PAM type: NRG; PAM sequence: CAG
  source 1..20: mol_type = other DNA
gaagcatttcctttgaaaac

SEQ ID NO: 38911 - DNA, 20 bp, synthetic construct
  misc_feature 1..20: note = Description of Artificial Sequence: Synthetic oligonucleotide
  misc_feature 1..20: note = Target: SCN10A; (+) strand; PAM type: NRG; PAM sequence: AAG
  source 1..20: mol_type = other DNA
tttcctttgaaaaccagcac

SEQ ID NO: 38912 - DNA, 20 bp, synthetic construct
  misc_feature 1..20: note = Description of Artificial Sequence: Synthetic oligonucleotide
  misc_feature 1..20: note = Target: SCN10A; (+) strand; PAM type: NRG; PAM sequence: AAG
  source 1..20: mol_type = other DNA
tttgaaaaccagcacaagac

SEQ ID NO: 38913 - DNA, 20 bp, synthetic construct
  misc_feature 1..20: note = Description of Artificial Sequence: Synthetic oligonucleotide
  misc_feature 1..20: note = Target: SCN10A; (+) strand; PAM type: NRG; PAM sequence: TAG
  source 1..20: mol_type = other DNA
ctcaccactcttattcaaca

SEQ ID NO: 38914 - DNA, 20 bp, synthetic construct
  misc_feature 1..20: note = Description of Artificial Sequence: Synthetic oligonucleotide
  misc_feature 1..20: note = Target: SCN10A; (+) strand; PAM type: NRG; PAM sequence: TGG
  source 1..20: mol_type = other DNA
actcttattcaacatagtat

SEQ ID NO: 38915 - DNA, 20 bp, synthetic construct
  misc_feature 1..20: note = Description of Artificial Sequence: Synthetic oligonucleotide
  misc_feature 1..20: note = Target: SCN10A; (+) strand; PAM type: NRG; PAM sequence: AAG
  source 1..20: mol_type = other DNA
cttattcaacatagtattgg

SEQ ID NO: 38916 - DNA, 20 bp, synthetic construct
  misc_feature 1..20: note = Description of Artificial Sequence: Synthetic oligonucleotide
  misc_feature 1..20: note = Target: SCN10A; (+) strand; PAM type: NRG; PAM sequence: TGG
  source 1..20: mol_type = other DNA
caacatagtattggaagttc

SEQ ID NO: 38917 - DNA, 20 bp, synthetic construct
  misc_feature 1..20: note = Description of Artificial Sequence: Synthetic oligonucleotide
  misc_feature 1..20: note = Target: SCN10A; (+) strand; PAM type: NRG; PAM sequence: CAG
  source 1..20: mol_type = other DNA
atagtattggaagttctggc

SEQ ID NO: 38918 - DNA, 20 bp, synthetic construct
  misc_feature 1..20: note = Description of Artificial Sequence: Synthetic oligonucleotide
  misc_feature 1..20: note = Target: SCN10A; (+) strand; PAM type: NRG; PAM sequence: AGG
  source 1..20: mol_type = other DNA
tagtattggaagttctggcc

SEQ ID NO: 38919 - DNA, 20 bp, synthetic construct
  misc_feature 1..20: note = Description of Artificial Sequence: Synthetic oligonucleotide
  misc_feature 1..20: note = Target: SCN10A; (+) strand; PAM type: NRG; PAM sequence: GGG
  source 1..20: mol_type = other DNA
agtattggaagttctggcca

SEQ ID NO: 38920 - DNA, 20 bp, synthetic construct
  misc_feature 1..20: note = Description of Artificial Sequence: Synthetic oligonucleotide
  misc_feature 1..20: note = Target: SCN10A; (+) strand; PAM type: NRG; PAM sequence: CAG
  source 1..20: mol_type = other DNA
gaagttctggccagggcgat

SEQ ID NO: 38921 - DNA, 20 bp, synthetic construct
  misc_feature 1..20: note = Description of Artificial Sequence: Synthetic oligonucleotide
  misc_feature 1..20: note = Target: SCN10A; (+) strand; PAM type: NRG; PAM sequence: AGG
  source 1..20: mol_type = other DNA
aagttctggccagggcgatc

SEQ ID NO: 38922 - DNA, 20 bp, synthetic construct
  misc_feature 1..20: note = Description of Artificial Sequence: Synthetic oligonucleotide
  misc_feature 1..20: note = Target: SCN10A; (+) strand; PAM type: NRG; PAM sequence: AAG
  source 1..20: mol_type = other DNA
tctggccagggcgatcaggc

SEQ ID NO: 38923 - DNA, 20 bp, synthetic construct
  misc_feature 1..20: note = Description of Artificial Sequence: Synthetic oligonucleotide
  misc_feature 1..20: note = Target: SCN10A; (+) strand; PAM type: NRG; PAM sequence: GAG
  source 1..20: mol_type = other DNA
tggccagggcgatcaggcaa

SEQ ID NO: 38924 - DNA, 20 bp, synthetic construct
  misc_feature 1..20: note = Description of Artificial Sequence: Synthetic oligonucleotide
  misc_feature 1..20: note = Target: SCN10A; (+) strand; PAM type: NRG; PAM sequence: AAG
  source 1..20: mol_type = other DNA
cagggcgatcaggcaagaga

SEQ ID NO: 38925 - DNA, 20 bp, synthetic construct
  misc_feature 1..20: note = Description of Artificial Sequence: Synthetic oligonucleotide
  misc_feature 1..20: note = Target: SCN10A; (+) strand; PAM type: NRG; PAM sequence: AAG
  source 1..20: mol_type = other DNA
atcaggcaagagaaagaaat

SEQ ID NO: 38926 - DNA, 20 bp, synthetic construct
  misc_feature 1..20: note = Description of Artificial Sequence: Synthetic oligonucleotide
  misc_feature 1..20: note = Target: SCN10A; (+) strand; PAM type: NRG; PAM sequence: AGG
  source 1..20: mol_type = other DNA
tcaggcaagagaaagaaata

SEQ ID NO: 38927 - DNA, 20 bp, synthetic construct
  misc_feature 1..20: note = Description of Artificial Sequence: Synthetic oligonucleotide
  misc_feature 1..20: note = Target: SCN10A; (+) strand; PAM type: NRG; PAM sequence: GGG
  source 1..20: mol_type = other DNA
caggcaagagaaagaaataa

SEQ ID NO: 38928 - DNA, 20 bp, synthetic construct
  misc_feature 1..20: note = Description of Artificial Sequence: Synthetic oligonucleotide
  misc_feature 1..20: note = Target: SCN10A; (+) strand; PAM type: NRG; PAM sequence: GGG
  source 1..20: mol_type = other DNA
aggcaagagaaagaaataag

SEQ ID NO: 38929 - DNA, 20 bp, synthetic construct
  misc_feature 1..20: note = Description of Artificial Sequence: Synthetic oligonucleotide
  misc_feature 1..20: note = Target: SCN10A; (+) strand; PAM type: NRG; PAM sequence: TAG
  source 1..20: mol_type = other DNA
agaaataaggggtattcaaa

SEQ ID NO: 38930 - DNA, 20 bp, synthetic construct
  misc_feature 1..20: note = Description of Artificial Sequence: Synthetic oligonucleotide
  misc_feature 1..20: note = Target: SCN10A; (+) strand; PAM type: NRG; PAM sequence: AGG
  source 1..20: mol_type = other DNA
gaaataaggggtattcaaat

SEQ ID NO: 38931 - DNA, 20 bp, synthetic construct
  misc_feature 1..20: note = Description of Artificial Sequence: Synthetic oligonucleotide
  misc_feature 1..20: note = Target: SCN10A; (+) strand; PAM type: NRG; PAM sequence: AAG
  source 1..20: mol_type = other DNA
aaggggtattcaaataggaa

SEQ ID NO: 38932 - DNA, 20 bp, synthetic construct
  misc_feature 1..20: note = Description of Artificial Sequence: Synthetic oligonucleotide
  misc_feature 1..20: note = Target: SCN10A; (+) strand; PAM type: NRG; PAM sequence: GAG
  source 1..20: mol_type = other DNA
ggggtattcaaataggaaaa

SEQ ID NO: 38933 - DNA, 20 bp, synthetic construct
  misc_feature 1..20: note = Description of Artificial Sequence: Synthetic oligonucleotide
  misc_feature 1..20: note = Target: SCN10A; (+) strand; PAM type: NRG; PAM sequence: AGG
  source 1..20: mol_type = other DNA
gggtattcaaataggaaaag

SEQ ID NO: 38934 - DNA, 20 bp, synthetic construct
  misc_feature 1..20: note = Description of Artificial Sequence: Synthetic oligonucleotide
  misc_feature 1..20: note = Target: SCN10A; (+) strand; PAM type: NRG; PAM sequence: AAG
  source 1..20: mol_type = other DNA
tattcaaataggaaaagagg

SEQ ID NO: 38935 - DNA, 20 bp, synthetic construct
  misc_feature 1..20: note = Description of Artificial Sequence: Synthetic oligonucleotide
  misc_feature 1..20: note = Target: SCN10A; (+) strand; PAM type: NRG; PAM sequence: CAG
  source 1..20: mol_type = other DNA
agtcaaattgtctctgtttg

SEQ ID NO: 38936 - DNA, 20 bp, synthetic construct
  misc_feature 1..20: note = Description of Artificial Sequence: Synthetic oligonucleotide
  misc_feature 1..20: note = Target: SCN10A; (+) strand; PAM type: NRG; PAM sequence: TAG
  source 1..20: mol_type = other DNA
agatgacatgactgtatatt

SEQ ID NO: 38937 - DNA, 20 bp, synthetic construct
  misc_feature 1..20: note = Description of Artificial Sequence: Synthetic oligonucleotide
  misc_feature 1..20: note = Target: SCN10A; (+) strand; PAM type: NRG; PAM sequence: CAG
  source 1..20: mol_type = other DNA
tttagaaaaccccatcatct

SEQ ID NO: 38938 - DNA, 20 bp, synthetic construct
  misc_feature 1..20: note = Description of Artificial Sequence: Synthetic oligonucleotide
  misc_feature 1..20: note = Target: SCN10A; (+) strand; PAM type: NRG; PAM sequence: AAG
  source 1..20: mol_type = other DNA
tctcagcccaaaatctcctt

SEQ ID NO: 38939 - DNA, 20 bp, synthetic construct
  misc_feature 1..20: note = Description of Artificial Sequence: Synthetic oligonucleotide
  misc_feature 1..20: note = Target: SCN10A; (+) strand; PAM type: NRG; PAM sequence: AAG
  source 1..20: mol_type = other DNA
caaaatctccttaagctgat

SEQ ID NO: 38940 - DNA, 20 bp, synthetic construct
  misc_feature 1..20: note = Description of Artificial Sequence: Synthetic oligonucleotide
  misc_feature 1..20: note = Target: SCN10A; (+) strand; PAM type: NRG; PAM sequence: CAG
  source 1..20: mol_type = other DNA
cttaagctgataagcaactt

SEQ ID NO: 38941 - DNA, 20 bp, synthetic construct
  misc_feature 1..20: note = Description of Artificial Sequence: Synthetic oligonucleotide
  misc_feature 1..20: note = Target: SCN10A; (+) strand; PAM type: NRG; PAM sequence: AAG
  source 1..20: mol_type = other DNA
gctgataagcaacttcagca

SEQ ID NO: 38942 - DNA, 20 bp, synthetic construct
  misc_feature 1..20: note = Description of Artificial Sequence: Synthetic oligonucleotide
  misc_feature 1..20: note = Target: SCN10A; (+) strand; PAM type: NRG; PAM sequence: CAG
  source 1..20: mol_type = other DNA
aagcaacttcagcaaagtct

SEQ ID NO: 38943 - DNA, 20 bp, synthetic construct
  misc_feature 1..20: note = Description of Artificial Sequence: Synthetic oligonucleotide
  misc_feature 1..20: note = Target: SCN10A; (+) strand; PAM type: NRG; PAM sequence: AGG
  source 1..20: mol_type = other DNA
agcaacttcagcaaagtctc

SEQ ID NO: 38944 - DNA, 20 bp, synthetic construct
  misc_feature 1..20: note = Description of Artificial Sequence: Synthetic oligonucleotide
  misc_feature 1..20: note = Target: SCN10A; (+) strand; PAM type: NRG; PAM sequence: AAG
  source 1..20: mol_type = other DNA
aatcaatgtgcaaaaatcac

SEQ ID NO: 38945 - DNA, 20 bp, synthetic construct
  misc_feature 1..20: note = Description of Artificial Sequence: Synthetic oligonucleotide
  misc_feature 1..20: note = Target: SCN10A; (+) strand; PAM type: NRG; PAM sequence: CAG
  source 1..20: mol_type = other DNA
gcattcccatacaccaataa

SEQ ID NO: 38946 - DNA, 20 bp, synthetic construct
  misc_feature 1..20: note = Description of Artificial Sequence: Synthetic oligonucleotide
  misc_feature 1..20: note = Target: SCN10A; (+) strand; PAM type: NRG; PAM sequence: GAG
  source 1..20: mol_type = other DNA
acaccaataacagacaaacc

SEQ ID NO: 38947 - DNA, 20 bp, synthetic construct
  misc_feature 1..20: note = Description of Artificial Sequence: Synthetic oligonucleotide
  misc_feature 1..20: note = Target: SCN10A; (+) strand; PAM type: NRG; PAM sequence: GAG
  source 1..20: mol_type = other DNA
accaataacagacaaaccga

SEQ ID NO: 38948 - DNA, 20 bp, synthetic construct
  misc_feature 1..20: note = Description of Artificial Sequence: Synthetic oligonucleotide
  misc_feature 1..20: note = Target: SCN10A; (+) strand; PAM type: NRG; PAM sequence: GAG
  source 1..20: mol_type = other DNA
caaaccgagagccaaatcat

SEQ ID NO: 38949 - DNA, 20 bp, synthetic construct
  misc_feature 1..20: note = Description of Artificial Sequence: Synthetic oligonucleotide
  misc_feature 1..20: note = Target: SCN10A; (+) strand; PAM type: NRG; PAM sequence: AAG
  source 1..20: mol_type = other DNA
tcccattcacaattgcaaca

SEQ ID NO: 38950 - DNA, 20 bp, synthetic construct
  misc_feature 1..20: note = Description of Artificial Sequence: Synthetic oligonucleotide
  misc_feature 1..20: note = Target: SCN10A; (+) strand; PAM type: NRG; PAM sequence: GAG
  source 1..20: mol_type = other DNA
ccattcacaattgcaacaaa

SEQ ID NO: 38951 - DNA, 20 bp, synthetic construct
  misc_feature 1..20: note = Description of Artificial Sequence: Synthetic oligonucleotide
  misc_feature 1..20: note = Target: SCN10A; (+) strand; PAM type: NRG; PAM sequence: TAG
  source 1..20: mol_type = other DNA
aacaaagagaataaaatatc

SEQ ID NO: 38952 - DNA, 20 bp, synthetic construct
  misc_feature 1..20: note = Description of Artificial Sequence: Synthetic oligonucleotide
  misc_feature 1..20: note = Target: SCN10A; (+) strand; PAM type: NRG; PAM sequence: AAG
  source 1..20: mol_type = other DNA
tatctagaaatacaacttac

SEQ ID NO: 38953 - DNA, 20 bp, synthetic construct
  misc_feature 1..20: note = Description of Artificial Sequence: Synthetic oligonucleotide
  misc_feature 1..20: note = Target: SCN10A; (+) strand; PAM type: NRG; PAM sequence: AGG
  source 1..20: mol_type = other DNA
atctagaaatacaacttaca

SEQ ID NO: 38954 - DNA, 20 bp, synthetic construct
  misc_feature 1..20: note = Description of Artificial Sequence: Synthetic oligonucleotide
  misc_feature 1..20: note = Target: SCN10A; (+) strand; PAM type: NRG; PAM sequence: GGG
  source 1..20: mol_type = other DNA
tctagaaatacaacttacaa

SEQ ID NO: 38955 - DNA, 20 bp, synthetic construct
  misc_feature 1..20: note = Description of Artificial Sequence: Synthetic oligonucleotide
  misc_feature 1..20: note = Target: SCN10A; (+) strand; PAM type: NRG; PAM sequence: AAG
  source 1..20: mol_type = other DNA
tacaacttacaagggatgtg

SEQ ID NO: 38956 - DNA, 20 bp, synthetic construct
  misc_feature 1..20: note = Description of Artificial Sequence: Synthetic oligonucleotide
  misc_feature 1..20: note = Target: SCN10A; (+) strand; PAM type: NRG; PAM sequence: AGG
  source 1..20: mol_type = other DNA
acaacttacaagggatgtga

SEQ ID NO: 38957 - DNA, 20 bp, synthetic construct
  misc_feature 1..20: note = Description of Artificial Sequence: Synthetic oligonucleotide
  misc_feature 1..20: note = Target: SCN10A; (+) strand; PAM type: NRG; PAM sequence: AAG
  source 1..20: mol_type = other DNA
gggatgtgaaggacctcttc

SEQ ID NO: 38958 - DNA, 20 bp, synthetic construct
  misc_feature 1..20: note = Description of Artificial Sequence: Synthetic oligonucleotide
  misc_feature 1..20: note = Target: SCN10A; (+) strand; PAM type: NRG; PAM sequence: AGG
  source 1..20: mol_type = other DNA
ggatgtgaaggacctcttca

SEQ ID NO: 38959 - DNA, 20 bp, synthetic construct
  misc_feature 1..20: note = Description of Artificial Sequence: Synthetic oligonucleotide
  misc_feature 1..20: note = Target: SCN10A; (+) strand; PAM type: NRG; PAM sequence: GAG
  source 1..20: mol_type = other DNA
atgtgaaggacctcttcaag

SEQ ID NO: 38960 - DNA, 20 bp, synthetic construct
  misc_feature 1..20: note = Description of Artificial Sequence: Synthetic oligonucleotide
  misc_feature 1..20: note = Target: SCN10A; (+) strand; PAM type: NRG; PAM sequence: AAG
  source 1..20: mol_type = other DNA
agaactaaaaatcactgctc

SEQ ID NO: 38961 - DNA, 20 bp, synthetic construct
  misc_feature 1..20: note = Description of Artificial Sequence: Synthetic oligonucleotide
  misc_feature 1..20: note = Target: SCN10A; (+) strand; PAM type: NRG; PAM sequence: AGG
  source 1..20: mol_type = other DNA
gaactaaaaatcactgctca

SEQ ID NO: 38962 - DNA, 20 bp, synthetic construct
  misc_feature 1..20: note = Description of Artificial Sequence: Synthetic oligonucleotide
  misc_feature 1..20: note = Target: SCN10A; (+) strand; PAM type: NRG; PAM sequence: AAG
  source 1..20: mol_type = other DNA
aaatcactgctcaaggaaat

SEQ ID NO: 38963 - DNA, 20 bp, synthetic construct
  misc_feature 1..20: note = Description of Artificial Sequence: Synthetic oligonucleotide
  misc_feature 1..20: note = Target: SCN10A; (+) strand; PAM type: NRG; PAM sequence: GAG
  source 1..20: mol_type = other DNA
atcactgctcaaggaaataa

SEQ ID NO: 38964 - DNA, 20 bp, synthetic construct
  misc_feature 1..20: note = Description of Artificial Sequence: Synthetic oligonucleotide
  misc_feature 1..20: note = Target: SCN10A; (+) strand; PAM type: NRG; PAM sequence: GAG
  source 1..20: mol_type = other DNA
cactgctcaaggaaataaga

SEQ ID NO: 38965 - DNA, 20 bp, synthetic construct
  misc_feature 1..20: note = Description of Artificial Sequence: Synthetic oligonucleotide
  misc_feature 1..20: note = Target: SCN10A; (+) strand; PAM type: NRG; PAM sequence: AGG
  source 1..20: mol_type = other DNA
actgctcaaggaaataagag

SEQ ID NO: 38966 - DNA, 20 bp, synthetic construct
  misc_feature 1..20: note = Description of Artificial Sequence: Synthetic oligonucleotide
  misc_feature 1..20: note = Target: SCN10A; (+) strand; PAM type: NRG; PAM sequence: TGG
  source 1..20: mol_type = other DNA
taagagaggacacaaataaa

SEQ ID NO: 38967 - DNA, 20 bp, synthetic construct
  misc_feature 1..20: note = Description of Artificial Sequence: Synthetic oligonucleotide
  misc_feature 1..20: note = Target: SCN10A; (+) strand; PAM type: NRG; PAM sequence: TGG
  source 1..20: mol_type = other DNA
ggaaaaacattccatgctca

SEQ ID NO: 38968 - DNA, 20 bp, synthetic construct
  misc_feature 1..20: note = Description of Artificial Sequence: Synthetic oligonucleotide
  misc_feature 1..20: note = Target: SCN10A; (+) strand; PAM type: NRG; PAM sequence: TAG
  source 1..20: mol_type = other DNA
aaacattccatgctcatgga

SEQ ID NO: 38969 - DNA, 20 bp, synthetic construct
  misc_feature 1..20: note = Description of Artificial Sequence: Synthetic oligonucleotide
  misc_feature 1..20: note = Target: SCN10A; (+) strand; PAM type: NRG; PAM sequence: AGG
  source 1..20: mol_type = other DNA
aacattccatgctcatggat

SEQ ID NO: 38970 - DNA, 20 bp, synthetic construct
  misc_feature 1..20: note = Description of Artificial Sequence: Synthetic oligonucleotide
  misc_feature 1..20: note = Target: SCN10A; (+) strand; PAM type: NRG; PAM sequence: TGG
  source 1..20: mol_type = other DNA
aaaaatcaatattgtgaaaa

SEQ ID NO: 38971 - DNA, 20 bp, synthetic construct
  misc_feature 1..20: note = Description of Artificial Sequence: Synthetic oligonucleotide
  misc_feature 1..20: note = Target: SCN10A; (+) strand; PAM type: NRG; PAM sequence: AAG
  source 1..20: mol_type = other DNA
gaaaatggccatactgccca

SEQ ID NO: 38972 - DNA, 20 bp, synthetic construct
  misc_feature 1..20: note = Description of Artificial Sequence: Synthetic oligonucleotide
  misc_feature 1..20: note = Target: SCN10A; (+) strand; PAM type: NRG; PAM sequence: TAG
  source 1..20: mol_type = other DNA
atactgcccaaagtaattta

SEQ ID NO: 38973 - DNA, 20 bp, synthetic construct
  misc_feature 1..20: note = Description of Artificial Sequence: Synthetic oligonucleotide
  misc_feature 1..20: note = Target: SCN10A; (+) strand; PAM type: NRG; PAM sequence: AAG
  source 1..20: mol_type = other DNA
gattcaatgttatccccatc

SEQ ID NO: 38974 - DNA, 20 bp, synthetic construct
  misc_feature 1..20: note = Description of Artificial Sequence: Synthetic oligonucleotide
  misc_feature 1..20: note = Target: SCN10A; (+) strand; PAM type: NRG; PAM sequence: CAG
  source 1..20: mol_type = other DNA
gctaccactgactttcttca

SEQ ID NO: 38975 - DNA, 20 bp, synthetic construct
  misc_feature 1..20: note = Description of Artificial Sequence: Synthetic oligonucleotide
  misc_feature 1..20: note = Target: SCN10A; (+) strand; PAM type: NRG; PAM sequence: TAG
  source 1..20: mol_type = other DNA
actgactttcttcacagaat

SEQ ID NO: 38976 - DNA, 20 bp, synthetic construct
  misc_feature 1..20: note = Description of Artificial Sequence: Synthetic oligonucleotide
  misc_feature 1..20: note = Target: SCN10A; (+) strand; PAM type: NRG; PAM sequence: TGG
  source 1..20: mol_type = other DNA
aatctactttaaatttcatg

SEQ ID NO: 38977 - DNA, 20 bp, synthetic construct
  misc_feature 1..20: note = Description of Artificial Sequence: Synthetic oligonucleotide
  misc_feature 1..20: note = Target: SCN10A; (+) strand; PAM type: NRG; PAM sequence: AAG
  source 1..20: mol_type = other DNA
aaatttcatgtggaacaaaa

SEQ ID NO: 38978 - DNA, 20 bp, synthetic construct
  misc_feature 1..20: note = Description of Artificial Sequence: Synthetic oligonucleotide
  misc_feature 1..20: note = Target: SCN10A; (+) strand; PAM type: NRG; PAM sequence: GAG
  source 1..20: mol_type = other DNA
atttcatgtggaacaaaaaa

SEQ ID NO: 38979 - DNA, 20 bp, synthetic construct
  misc_feature 1..20: note = Description of Artificial Sequence: Synthetic oligonucleotide
  misc_feature 1..20: note = Target: SCN10A; (+) strand; PAM type: NRG; PAM sequence: TAG
  source 1..20: mol_type = other DNA
ggaacaaaaaagagcccgca

SEQ ID NO: 38980 - DNA, 20 bp, synthetic construct
  misc_feature 1..20: note = Description of Artificial Sequence: Synthetic oligonucleotide
  misc_feature 1..20: note = Target: SCN10A; (+) strand; PAM type: NRG; PAM sequence: AAG
  source 1..20: mol_type = other DNA
aaaaaagagcccgcatagtc

SEQ ID NO: 38981 - DNA, 20 bp, synthetic construct
  misc_feature 1..20: note = Description of Artificial Sequence: Synthetic oligonucleotide
  misc_feature 1..20: note = Target: SCN10A; (+) strand; PAM type: NRG; PAM sequence: AAG
  source 1..20: mol_type = other DNA
cgcatagtcaagacaattct

SEQ ID NO: 38982 - DNA, 20 bp, synthetic construct
  misc_feature 1..20: note = Description of Artificial Sequence: Synthetic oligonucleotide
  misc_feature 1..20: note = Target: SCN10A; (+) strand; PAM type: NRG; PAM sequence: AAG
  source 1..20: mol_type = other DNA
tcaagacaattctaagcaaa

SEQ ID NO: 38983 - DNA, 20 bp, synthetic construct
  misc_feature 1..20: note = Description of Artificial Sequence: Synthetic oligonucleotide
  misc_feature 1..20: note = Target: SCN10A; (+) strand; PAM type: NRG; PAM sequence: AAG
  source 1..20: mol_type = other DNA
agacaattctaagcaaaaag

SEQ ID NO: 38984 - DNA, 20 bp, synthetic construct
  misc_feature 1..20: note = Description of Artificial Sequence: Synthetic oligonucleotide
  misc_feature 1..20: note = Target: SCN10A; (+) strand; PAM type: NRG; PAM sequence: AAG
  source 1..20: mol_type = other DNA
aattctaagcaaaaagaaga

SEQ ID NO: 38985 - DNA, 20 bp, synthetic construct
  misc_feature 1..20: note = Description of Artificial Sequence: Synthetic oligonucleotide
  misc_feature 1..20: note = Target: SCN10A; (+) strand; PAM type: NRG; PAM sequence: TGG
  source 1..20: mol_type = other DNA
ctaagcaaaaagaagaaagt

SEQ ID NO: 38986 - DNA, 20 bp, synthetic construct
  misc_feature 1..20: note = Description of Artificial Sequence: Synthetic oligonucleotide
  misc_feature 1..20: note = Target: SCN10A; (+) strand; PAM type: NRG; PAM sequence: GAG
  source 1..20: mol_type = other DNA
aagcaaaaagaagaaagttg

SEQ ID NO: 38987 - DNA, 20 bp, synthetic construct
  misc_feature 1..20: note = Description of Artificial Sequence: Synthetic oligonucleotide
  misc_feature 1..20: note = Target: SCN10A; (+) strand; PAM type: NRG; PAM sequence: AGG
  source 1..20: mol_type = other DNA
agcaaaaagaagaaagttgg

SEQ ID NO: 38988 - DNA, 20 bp, synthetic construct
  misc_feature 1..20: note = Description of Artificial Sequence: Synthetic oligonucleotide
  misc_feature 1..20: note = Target: SCN10A; (+) strand; PAM type: NRG; PAM sequence: AAG
  source 1..20: mol_type = other DNA
gcatcacgctacctgacttc

SEQ ID NO: 38989 - DNA, 20 bp, synthetic construct
  misc_feature 1..20: note = Description of Artificial Sequence: Synthetic oligonucleotide
  misc_feature 1..20: note = Target: SCN10A; (+) strand; PAM type: NRG; PAM sequence: AAG
  source 1..20: mol_type = other DNA
tgacttcaagctatactaca

SEQ ID NO: 38990 - DNA, 20 bp, synthetic construct
  misc_feature 1..20: note = Description of Artificial Sequence: Synthetic oligonucleotide
  misc_feature 1..20: note = Target: SCN10A; (+) strand; PAM type: NRG; PAM sequence: CAG
  source 1..20: mol_type = other DNA
caagctatactacaaagcta

SEQ ID NO: 38991 - DNA, 20 bp, synthetic construct
  misc_feature 1..20: note = Description of Artificial Sequence: Synthetic oligonucleotide
  misc_feature 1..20: note = Target: SCN10A; (+) strand; PAM type: NRG; PAM sequence: CAG
  source 1..20: mol_type = other DNA
caaagctacagtaaccaaaa

SEQ ID NO: 38992 - DNA, 20 bp, synthetic construct
  misc_feature 1..20: note = Description of Artificial Sequence: Synthetic oligonucleotide
  misc_feature 1..20: note = Target: SCN10A; (+) strand; PAM type: NRG; PAM sequence: GAG
  source 1..20: mol_type = other DNA
gctacagtaaccaaaacagc

SEQ ID NO: 38993 - DNA, 20 bp, synthetic construct
  misc_feature 1..20: note = Description of Artificial Sequence: Synthetic oligonucleotide
  misc_feature 1..20: note = Target: SCN10A; (+) strand; PAM type: NRG; PAM sequence: AGG
  source 1..20: mol_type = other DNA
ctacagtaaccaaaacagcg

SEQ ID NO: 38994 - DNA, 20 bp, synthetic construct
  misc_feature 1..20: note = Description of Artificial Sequence: Synthetic oligonucleotide
  misc_feature 1..20: note = Target: SCN10A; (+) strand; PAM type: NRG; PAM sequence: TGG
  source 1..20: mol_type = other DNA
taaccaaaacagcgaggtac

SEQ ID NO: 38995 - DNA, 20 bp, synthetic construct
  misc_feature 1..20: note = Description of Artificial Sequence: Synthetic oligonucleotide
  misc_feature 1..20: note = Target: SCN10A; (+) strand; PAM type: NRG; PAM sequence: CAG
  source 1..20: mol_type = other DNA
gcgaggtactggtaccaaaa

SEQ ID NO: 38996 - DNA, 20 bp, synthetic construct
  misc_feature 1..20: note = Description of Artificial Sequence: Synthetic oligonucleotide
  misc_feature 1..20: note = Target: SCN10A; (+) strand; PAM type: NRG; PAM sequence: TAG
  source 1..20: mol_type = other DNA
ctggtaccaaaacagatatc

SEQ ID NO: 38997 - DNA, 20 bp, synthetic construct
  misc_feature 1..20: note = Description of Artificial Sequence: Synthetic oligonucleotide
  misc_feature 1..20: note = Target: SCN10A; (+) strand; PAM type: NRG; PAM sequence: TGG
  source 1..20: mol_type = other DNA
aaaacagatatctagaccaa

SEQ ID NO: 38998 - DNA, 20 bp, synthetic construct
  misc_feature 1..20: note = Description of Artificial Sequence: Synthetic oligonucleotide
  misc_feature 1..20: note = Target: SCN10A; (+) strand; PAM type: NRG; PAM sequence: CAG
  source 1..20: mol_type = other DNA
agatatctagaccaatggaa

SEQ ID NO: 38999 - DNA, 20 bp, synthetic construct
  misc_feature 1..20: note = Description of Artificial Sequence: Synthetic oligonucleotide
  misc_feature 1..20: note = Target: SCN10A; (+) strand; PAM type: NRG; PAM sequence: CAG
  source 1..20: mol_type = other DNA
tctagaccaatggaacagaa

SEQ ID NO: 39000 - DNA, 20 bp, synthetic construct
  misc_feature 1..20: note = Description of Artificial Sequence: Synthetic oligonucleotide
  misc_feature 1..20: note = Target: SCN10A; (+) strand; PAM type: NRG; PAM sequence: GAG
  source 1..20: mol_type = other DNA
tagaccaatggaacagaaca

SEQ ID NO: 39001 - DNA, 20 bp, synthetic construct
  misc_feature 1..20: note = Description of Artificial Sequence: Synthetic oligonucleotide
  misc_feature 1..20: note = Target: SCN10A; (+) strand; PAM type: NRG; PAM sequence: AGG
  source 1..20: mol_type = other DNA
agaccaatggaacagaacag

SEQ ID NO: 39002 - DNA, 20 bp, synthetic construct
  misc_feature 1..20: note = Description of Artificial Sequence: Synthetic oligonucleotide
  misc_feature 1..20: note = Target: SCN10A; (+) strand; PAM type: NRG; PAM sequence: CAG
  source 1..20: mol_type = other DNA
atggaacagaacagaggcct

SEQ ID NO: 39003 - DNA, 20 bp, synthetic construct
  misc_feature 1..20: note = Description of Artificial Sequence: Synthetic oligonucleotide
  misc_feature 1..20: note = Target: SCN10A; (+) strand; PAM type: NRG; PAM sequence: AAG
  source 1..20: mol_type = other DNA
gaacagaacagaggcctcag

SEQ ID NO: 39004 - DNA, 20 bp, synthetic construct
  misc_feature 1..20: note = Description of Artificial Sequence: Synthetic oligonucleotide
  misc_feature 1..20: note = Target: SCN10A; (+) strand; PAM type: NRG; PAM sequence: AAG
  source 1..20: mol_type = other DNA
atctttgacaaacttgacaa

SEQ ID NO: 39005 - DNA, 20 bp, synthetic construct
  misc_feature 1..20: note = Description of Artificial Sequence: Synthetic oligonucleotide
  misc_feature 1..20: note = Target: SCN10A; (+) strand; PAM type: NRG; PAM sequence: AAG
  source 1..20: mol_type = other DNA
ttgacaaacttgacaaaagc

SEQ ID NO: 39006 - DNA, 20 bp, synthetic construct
  misc_feature 1..20: note = Description of Artificial Sequence: Synthetic oligonucleotide
  misc_feature 1..20: note = Target: SCN10A; (+) strand; PAM type: NRG; PAM sequence: TGG
  source 1..20: mol_type = other DNA
aacttgacaaaagcaagcaa

SEQ ID NO: 39007 - DNA, 20 bp, synthetic construct
  misc_feature 1..20: note = Description of Artificial Sequence: Synthetic oligonucleotide
  misc_feature 1..20: note = Target: SCN10A; (+) strand; PAM type: NRG; PAM sequence: GGG
  source 1..20: mol_type = other DNA
acttgacaaaagcaagcaat

SEQ ID NO: 39008 - DNA, 20 bp, synthetic construct
  misc_feature 1..20: note = Description of Artificial Sequence: Synthetic oligonucleotide
  misc_feature 1..20: note = Target: SCN10A; (+) strand; PAM type: NRG; PAM sequence: GGG
  source 1..20: mol_type = other DNA
cttgacaaaagcaagcaatg

SEQ ID NO: 39009 - DNA, 20 bp, synthetic construct
  misc_feature 1..20: note = Description of Artificial Sequence: Synthetic oligonucleotide
  misc_feature 1..20: note = Target: SCN10A; (+) strand; PAM type: NRG; PAM sequence: AAG
  source 1..20: mol_type = other DNA
acaaaagcaagcaatgggga

SEQ ID NO: 39010 - DNA, 20 bp, synthetic construct
  misc_feature 1..20: note = Description of Artificial Sequence: Synthetic oligonucleotide
  misc_feature 1..20: note = Target: SCN10A; (+) strand; PAM type: NRG; PAM sequence: AGG
  source 1..20: mol_type = other DNA
caaaagcaagcaatggggaa

SEQ ID NO: 39011 - DNA, 20 bp, synthetic construct
  misc_feature 1..20: note = Description of Artificial Sequence: Synthetic oligonucleotide
  misc_feature 1..20: note = Target: SCN10A; (+) strand; PAM type: NRG; PAM sequence: TGG
  source 1..20: mol_type = other DNA
aggattccctatttaataaa

SEQ ID NO: 39012 - DNA, 20 bp, synthetic construct
  misc_feature 1..20: note = Description of Artificial Sequence: Synthetic oligonucleotide
  misc_feature 1..20: note = Target: SCN10A; (+) strand; PAM type: NRG; PAM sequence: TGG
  source 1..20: mol_type = other DNA
tccctatttaataaatggtg

SEQ ID NO: 39013 - DNA, 20 bp, synthetic construct
  misc_feature 1..20: note = Description of Artificial Sequence: Synthetic oligonucleotide
  misc_feature 1..20: note = Target: SCN10A; (+) strand; PAM type: NRG; PAM sequence: GGG
  source 1..20: mol_type = other DNA
ccctatttaataaatggtgt

SEQ ID NO: 39014 - DNA, 20 bp, synthetic construct
  misc_feature 1..20: note = Description of Artificial Sequence: Synthetic oligonucleotide
  misc_feature 1..20: note = Target: SCN10A; (+) strand; PAM type: NRG; PAM sequence: GGG
  source 1..20: mol_type = other DNA
cctatttaataaatggtgtg

SEQ ID NO: 39015 - DNA, 20 bp, synthetic construct
  misc_feature 1..20: note = Description of Artificial Sequence: Synthetic oligonucleotide
  misc_feature 1..20: note = Target: SCN10A; (+) strand; PAM type: NRG; PAM sequence: TGG
  source 1..20: mol_type = other DNA
ataaatggtgtggggaaaac

SEQ ID NO: 39016 - DNA, 20 bp, synthetic construct
  misc_feature 1..20: note = Description of Artificial Sequence: Synthetic oligonucleotide
  misc_feature 1..20: note = Target: SCN10A; (+) strand; PAM type: NRG; PAM sequence: TAG
  source 1..20: mol_type = other DNA
atggtgtggggaaaactggc

SEQ ID NO: 39017 - DNA, 20 bp, synthetic construct
  misc_feature 1..20: note = Description of Artificial Sequence: Synthetic oligonucleotide
  misc_feature 1..20: note = Target: SCN10A; (+) strand; PAM type: NRG; PAM sequence: TAG
  source 1..20: mol_type = other DNA
tggggaaaactggctagcct

SEQ ID NO: 39018 - DNA, 20 bp, synthetic construct
  misc_feature 1..20: note = Description of Artificial Sequence: Synthetic oligonucleotide
  misc_feature 1..20: note = Target: SCN10A; (+) strand; PAM type: NRG; PAM sequence: AGG
  source 1..20: mol_type = other DNA
ggggaaaactggctagcctt

SEQ ID NO: 39019 - DNA, 20 bp, synthetic construct
  misc_feature 1..20: note = Description of Artificial Sequence: Synthetic oligonucleotide
  misc_feature 1..20: note = Target: SCN10A; (+) strand; PAM type: NRG; PAM sequence: CAG
  source 1..20: mol_type = other DNA
gaaaactggctagccttagg

SEQ ID NO: 39020 - DNA, 20 bp, synthetic construct
  misc_feature 1..20: note = Description of Artificial Sequence: Synthetic oligonucleotide
  misc_feature 1..20: note = Target: SCN10A; (+) strand; PAM type: NRG; PAM sequence: TAG
  source 1..20: mol_type = other DNA
cttaggcagaaaattgaaac

SEQ ID NO: 39021 - DNA, 20 bp, synthetic construct
  misc_feature 1..20: note = Description of Artificial Sequence: Synthetic oligonucleotide
  misc_feature 1..20: note = Target: SCN10A; (+) strand; PAM type: NRG; PAM sequence: AAG
  source 1..20: mol_type = other DNA
ccttacacaaaaattaactc

SEQ ID NO: 39022 - DNA, 20 bp, synthetic construct
  misc_feature 1..20: note = Description of Artificial Sequence: Synthetic oligonucleotide
  misc_feature 1..20: note = Target: SCN10A; (+) strand; PAM type: NRG; PAM sequence: TAG
  source 1..20: mol_type = other DNA
acacaaaaattaactcaaga

SEQ ID NO: 39023 - DNA, 20 bp, synthetic construct
  misc_feature 1..20: note = Description of Artificial Sequence: Synthetic oligonucleotide
  misc_feature 1..20: note = Target: SCN10A; (+) strand; PAM type: NRG; PAM sequence: AAG
  source 1..20: mol_type = other DNA
aattaactcaagatagatta

SEQ ID NO: 39024 - DNA, 20 bp, synthetic construct
  misc_feature 1..20: note = Description of Artificial Sequence: Synthetic oligonucleotide
  misc_feature 1..20: note = Target: SCN10A; (+) strand; PAM type: NRG; PAM sequence: AAG
  source 1..20: mol_type = other DNA
tagattaaagacttaaacat

SEQ ID NO: 39025 - DNA, 20 bp, synthetic construct
  misc_feature 1..20: note = Description of Artificial Sequence: Synthetic oligonucleotide
  misc_feature 1..20: note = Target: SCN10A; (+) strand; PAM type: NRG; PAM sequence: TAG
  source 1..20: mol_type = other DNA
acctaaaaccataaaaaccc

SEQ ID NO: 39026 - DNA, 20 bp, synthetic construct
  misc_feature 1..20: note = Description of Artificial Sequence: Synthetic oligonucleotide
  misc_feature 1..20: note = Target: SCN10A; (+) strand; PAM type: NRG; PAM sequence: AAG
  source 1..20: mol_type = other DNA
taaaaccataaaaaccctag

SEQ ID NO: 39027 - DNA, 20 bp, synthetic construct
  misc_feature 1..20: note = Description of Artificial Sequence: Synthetic oligonucleotide
  misc_feature 1..20: note = Target: SCN10A; (+) strand; PAM type: NRG; PAM sequence: TAG
  source 1..20: mol_type = other DNA
aaaaaccctagaagaaaacc

SEQ ID NO: 39028 - DNA, 20 bp, synthetic construct
  misc_feature 1..20: note = Description of Artificial Sequence: Synthetic oligonucleotide
  misc_feature 1..20: note = Target: SCN10A; (+) strand; PAM type: NRG; PAM sequence: AGG
  source 1..20: mol_type = other DNA
aaaaccctagaagaaaacct

SEQ ID NO: 39029 - DNA, 20 bp, synthetic construct
  misc_feature 1..20: note = Description of Artificial Sequence: Synthetic oligonucleotide
  misc_feature 1..20: note = Target: SCN10A; (+) strand; PAM type: NRG; PAM sequence: CAG
  source 1..20: mol_type = other DNA
aaaacctaggcaataccctt

SEQ ID NO: 39030 - DNA, 20 bp, synthetic construct
  misc_feature 1..20: note = Description of Artificial Sequence: Synthetic oligonucleotide
  misc_feature 1..20: note = Target: SCN10A; (+) strand; PAM type: NRG; PAM sequence: AGG
  source 1..20: mol_type = other DNA
aaacctaggcaatacccttc

SEQ ID NO: 39031 - DNA, 20 bp, synthetic construct
  misc_feature 1..20: note = Description of Artificial Sequence: Synthetic oligonucleotide
  misc_feature 1..20: note = Target: SCN10A; (+) strand; PAM type: NRG; PAM sequence: TAG
  source 1..20: mol_type = other DNA
aggcaatacccttcaggaca

SEQ ID NO: 39032 - DNA, 20 bp, synthetic construct
  misc_feature 1..20: note = Description of Artificial Sequence: Synthetic oligonucleotide
  misc_feature 1..20: note = Target: SCN10A; (+) strand; PAM type: NRG; PAM sequence: AGG
  source 1..20: mol_type = other DNA
ggcaatacccttcaggacat

SEQ ID NO: 39033 - DNA, 20 bp, synthetic construct
  misc_feature 1..20: note = Description of Artificial Sequence: Synthetic oligonucleotide
  misc_feature 1..20: note = Target: SCN10A; (+) strand; PAM type: NRG; PAM sequence: TGG
  source 1..20: mol_type = other DNA
tacccttcaggacataggca

SEQ ID NO: 39034 - DNA, 20 bp, synthetic construct
  misc_feature 1..20: note = Description of Artificial Sequence: Synthetic oligonucleotide
  misc_feature 1..20: note = Target: SCN10A; (+) strand; PAM type: NRG; PAM sequence: GGG
  source 1..20: mol_type = other DNA
acccttcaggacataggcat

SEQ ID NO: 39035 - DNA, 20 bp, synthetic construct
  misc_feature 1..20: note = Description of Artificial Sequence: Synthetic oligonucleotide
  misc_feature 1..20: note = Target: SCN10A; (+) strand; PAM type: NRG; PAM sequence: AAG
  source 1..20: mol_type = other DNA
tcaggacataggcatgggca

SEQ ID NO: 39036 - DNA, 20 bp, synthetic construct
  misc_feature 1..20: note = Description of Artificial Sequence: Synthetic oligonucleotide
  misc_feature 1..20: note = Target: SCN10A; (+) strand; PAM type: NRG; PAM sequence: AGG
  source 1..20: mol_type = other DNA
caggacataggcatgggcaa

SEQ ID NO: 39037 - DNA, 20 bp, synthetic construct
  misc_feature 1..20: note = Description of Artificial Sequence: Synthetic oligonucleotide
  misc_feature 1..20: note = Target: SCN10A; (+) strand; PAM type: NRG; PAM sequence: AAG
  source 1..20: mol_type = other DNA
ctttatgactaacacatcaa

SEQ ID NO: 39038 - DNA, 20 bp, synthetic construct
  misc_feature 1..20: note = Description of Artificial Sequence: Synthetic oligonucleotide
  misc_feature 1..20: note = Target: SCN10A; (+) strand; PAM type: NRG; PAM sequence: TGG
  source 1..20: mol_type = other DNA
gactaacacatcaaaagcaa

SEQ ID NO: 39039 - DNA, 20 bp, synthetic construct
  misc_feature 1..20: note = Description of Artificial Sequence: Synthetic oligonucleotide
  misc_feature 1..20: note = Target: SCN10A; (+) strand; PAM type: NRG; PAM sequence: AAG
  source 1..20: mol_type = other DNA
atcaaaagcaatggtgacaa

SEQ ID NO: 39040 - DNA, 20 bp, synthetic construct
  misc_feature 1..20: note = Description of Artificial Sequence: Synthetic oligonucleotide
  misc_feature 1..20: note = Target: SCN10A; (+) strand; PAM type: NRG; PAM sequence: TGG
  source 1..20: mol_type = other DNA
caaaagccaaaattgacaaa

SEQ ID NO: 39041 - DNA, 20 bp, synthetic construct
  misc_feature 1..20: note = Description of Artificial Sequence: Synthetic oligonucleotide
  misc_feature 1..20: note = Target: SCN10A; (+) strand; PAM type: NRG; PAM sequence: AAG
  source 1..20: mol_type = other DNA
aatggaatccaattaaacta

SEQ ID NO: 39042 - DNA, 20 bp, synthetic construct
  misc_feature 1..20: note = Description of Artificial Sequence: Synthetic oligonucleotide
  misc_feature 1..20: note = Target: SCN10A; (+) strand; PAM type: NRG; PAM sequence: GAG
  source 1..20: mol_type = other DNA
tggaatccaattaaactaaa

SEQ ID NO: 39043 - DNA, 20 bp, synthetic construct
  misc_feature 1..20: note = Description of Artificial Sequence: Synthetic oligonucleotide
  misc_feature 1..20: note = Target: SCN10A; (+) strand; PAM type: NRG; PAM sequence: CAG
  source 1..20: mol_type = other DNA
taaactaaagagcttctgca

SEQ ID NO: 39044 - DNA, 20 bp, synthetic construct
  misc_feature 1..20: note = Description of Artificial Sequence: Synthetic oligonucleotide
  misc_feature 1..20: note = Target: SCN10A; (+) strand; PAM type: NRG; PAM sequence: AAG
  source 1..20: mol_type = other DNA
aaagagcttctgcacagcaa

SEQ ID NO: 39045 - DNA, 20 bp, synthetic construct
  misc_feature 1..20: note = Description of Artificial Sequence: Synthetic oligonucleotide
  misc_feature 1..20: note = Target: SCN10A; (+) strand; PAM type: NRG; PAM sequence: CAG
  source 1..20: mol_type = other DNA
acagcaaaagaaactatcat

SEQ ID NO: 39046 - DNA, 20 bp, synthetic construct
  misc_feature 1..20: note = Description of Artificial Sequence: Synthetic oligonucleotide
  misc_feature 1..20: note = Target: SCN10A; (+) strand; PAM type: NRG; PAM sequence: GAG
  source 1..20: mol_type = other DNA
agcaaaagaaactatcatca

SEQ ID NO: 39047 - DNA, 20 bp, synthetic construct
  misc_feature 1..20: note = Description of Artificial Sequence: Synthetic oligonucleotide
  misc_feature 1..20: note = Target: SCN10A; (+) strand; PAM type: NRG; PAM sequence: TAG
  source 1..20: mol_type = other DNA
gaaactatcatcagagtgaa

SEQ ID NO: 39048 - DNA, 20 bp, synthetic construct
  misc_feature 1..20: note = Description of Artificial Sequence: Synthetic oligonucleotide
  misc_feature 1..20: note = Target: SCN10A; (+) strand; PAM type: NRG; PAM sequence: AGG
  source 1..20: mol_type = other DNA
aaactatcatcagagtgaat

SEQ ID NO: 39049 - DNA, 20 bp, synthetic construct
  misc_feature 1..20: note = Description of Artificial Sequence: Synthetic oligonucleotide
  misc_feature 1..20: note = Target: SCN10A; (+) strand; PAM type: NRG; PAM sequence: CAG
  source 1..20: mol_type = other DNA
cagagtgaataggtaaccta

SEQ ID NO: 39050 - DNA, 20 bp, synthetic construct
  misc_feature 1..20: note = Description of Artificial Sequence: Synthetic oligonucleotide
  misc_feature 1..20: note = Target: SCN10A; (+) strand; PAM type: NRG; PAM sequence: TGG
  source 1..20: mol_type = other DNA
tgaataggtaacctacagaa

SEQ ID NO: 39051 - DNA, 20 bp, synthetic construct
  misc_feature 1..20: note = Description of Artificial Sequence: Synthetic oligonucleotide
  misc_feature 1..20: note = Target: SCN10A; (+) strand; PAM type: NRG; PAM sequence: GGG
  source 1..20: mol_type = other DNA
gaataggtaacctacagaat

SEQ ID NO: 39052 - DNA, 20 bp, synthetic construct
  misc_feature 1..20: note = Description of Artificial Sequence: Synthetic oligonucleotide
  misc_feature 1..20: note = Target: SCN10A; (+) strand; PAM type: NRG; PAM sequence: GAG
  source 1..20: mol_type = other DNA
ataggtaacctacagaatgg

SEQ ID NO: 39053 - DNA, 20 bp, synthetic construct
  misc_feature 1..20: note = Description of Artificial Sequence: Synthetic oligonucleotide
  misc_feature 1..20: note = Target: SCN10A; (+) strand; PAM type: NRG; PAM sequence: AAG
  source 1..20: mol_type = other DNA
tgcaatctatcaatctgaca

SEQ ID NO: 39054 - DNA, 20 bp, synthetic construct
  misc_feature 1..20: note = Description of Artificial Sequence: Synthetic oligonucleotide
  misc_feature 1..20: note = Target: SCN10A; (+) strand; PAM type: NRG; PAM sequence: AGG
  source 1..20: mol_type = other DNA
gcaatctatcaatctgacaa

SEQ ID NO: 39055 - DNA, 20 bp, synthetic construct
  misc_feature 1..20: note = Description of Artificial Sequence: Synthetic oligonucleotide
  misc_feature 1..20: note = Target: SCN10A; (+) strand; PAM type: NRG; PAM sequence: GGG
  source 1..20: mol_type = other DNA
caatctatcaatctgacaaa

SEQ ID NO: 39056 - DNA, 20 bp, synthetic construct
  misc_feature 1..20: note = Description of Artificial Sequence: Synthetic oligonucleotide
  misc_feature 1..20: note = Target: SCN10A; (+) strand; PAM type: NRG; PAM sequence: CAG
  source 1..20: mol_type = other DNA
tctgacaaagggctaatatc

SEQ ID NO: 39057 - DNA, 20 bp, synthetic construct
  misc_feature 1..20: note = Description of Artificial Sequence: Synthetic oligonucleotide
  misc_feature 1..20: note = Target: SCN10A; (+) strand; PAM type: NRG; PAM sequence: AAG
  source 1..20: mol_type = other DNA
aaaaacttaaacaaatttac

SEQ ID NO: 39058 - DNA, 20 bp, synthetic construct
  misc_feature 1..20: note = Description of Artificial Sequence: Synthetic oligonucleotide
  misc_feature 1..20: note = Target: SCN10A; (+) strand; PAM type: NRG; PAM sequence: AAG
  source 1..20: mol_type = other DNA
gaaaaaacaactccatcaaa

SEQ ID NO: 39059 - DNA, 20 bp, synthetic construct
  misc_feature 1..20: note = Description of Artificial Sequence: Synthetic oligonucleotide
  misc_feature 1..20: note = Target: SCN10A; (+) strand; PAM type: NRG; PAM sequence: TGG
  source 1..20: mol_type = other DNA
aaaacaactccatcaaaaag

SEQ ID NO: 39060 - DNA, 20 bp, synthetic construct
  misc_feature 1..20: note = Description of Artificial Sequence: Synthetic oligonucleotide
  misc_feature 1..20: note = Target: SCN10A; (+) strand; PAM type: NRG; PAM sequence: GGG
  source 1..20: mol_type = other DNA
aaacaactccatcaaaaagt

SEQ ID NO: 39061 - DNA, 20 bp, synthetic construct
  misc_feature 1..20: note = Description of Artificial Sequence: Synthetic oligonucleotide
  misc_feature 1..20: note = Target: SCN10A; (+) strand; PAM type: NRG; PAM sequence: AAG
  source 1..20: mol_type = other DNA
actccatcaaaaagtgggca

SEQ ID NO: 39062 - DNA, 20 bp, synthetic construct
  misc_feature 1..20: note = Description of Artificial Sequence: Synthetic oligonucleotide
  misc_feature 1..20: note = Target: SCN10A; (+) strand; PAM type: NRG; PAM sequence: AGG
  source 1..20: mol_type = other DNA
ctccatcaaaaagtgggcaa

SEQ ID NO: 39063 - DNA, 20 bp, synthetic construct
  misc_feature 1..20: note = Description of Artificial Sequence: Synthetic oligonucleotide
  misc_feature 1..20: note = Target: SCN10A; (+) strand; PAM type: NRG; PAM sequence: CAG
  source 1..20: mol_type = other DNA
aagtgggcaaaggatatgaa

SEQ ID NO: 39064 - DNA, 20 bp, synthetic construct
  misc_feature 1..20: note = Description of Artificial Sequence: Synthetic oligonucleotide
  misc_feature 1..20: note = Target: SCN10A; (+) strand; PAM type: NRG; PAM sequence: AAG
  source 1..20: mol_type = other DNA
tatgaacagacacttctcaa

SEQ ID NO: 39065 - DNA, 20 bp, synthetic construct
  misc_feature 1..20: note = Description of Artificial Sequence: Synthetic oligonucleotide
  misc_feature 1..20: note = Target: SCN10A; (+) strand; PAM type: NRG; PAM sequence: AAG
  source 1..20: mol_type = other DNA
gaacagacacttctcaaaag

SEQ ID NO: 39066 - DNA, 20 bp, synthetic construct
  misc_feature 1..20: note = Description of Artificial Sequence: Synthetic oligonucleotide
  misc_feature 1..20: note = Target: SCN10A; (+) strand; PAM type: NRG; PAM sequence: CAG
  source 1..20: mol_type = other DNA
ctcaaaagaagacatttatg

SEQ ID NO: 39067 - DNA, 20 bp, synthetic construct
  misc_feature 1..20: note = Description of Artificial Sequence: Synthetic oligonucleotide
  misc_feature 1..20: note = Target: SCN10A; (+) strand; PAM type: NRG; PAM sequence: AAG
  source 1..20: mol_type = other DNA
gccaataaacatatgataaa

SEQ ID NO: 39068 - DNA, 20 bp, synthetic construct
  misc_feature 1..20: note = Description of Artificial Sequence: Synthetic oligonucleotide
  misc_feature 1..20: note = Target: SCN10A; (+) strand; PAM type: NRG; PAM sequence: TGG
  source 1..20: mol_type = other DNA
gataaaaagctcatcatcac

SEQ ID NO: 39069 - DNA, 20 bp, synthetic construct
  misc_feature 1..20: note = Description of Artificial Sequence: Synthetic oligonucleotide
  misc_feature 1..20: note = Target: SCN10A; (+) strand; PAM type: NRG; PAM sequence: TAG
  source 1..20: mol_type = other DNA
agctcatcatcactggtcat

SEQ ID NO: 39070 - DNA, 20 bp, synthetic construct
  misc_feature 1..20: note = Description of Artificial Sequence: Synthetic oligonucleotide
  misc_feature 1..20: note = Target: SCN10A; (+) strand; PAM type: NRG; PAM sequence: GAG
  source 1..20: mol_type = other DNA
ctcatcatcactggtcatta

SEQ ID NO: 39071 - DNA, 20 bp, synthetic construct
  misc_feature 1..20: note = Description of Artificial Sequence: Synthetic oligonucleotide
  misc_feature 1..20: note = Target: SCN10A; (+) strand; PAM type: NRG; PAM sequence: CAG
  source 1..20: mol_type = other DNA
actggtcattagagaaatgc

SEQ ID NO: 39072 - DNA, 20 bp, synthetic construct
  misc_feature 1..20: note = Description of Artificial Sequence: Synthetic oligonucleotide
  misc_feature 1..20: note = Target: SCN10A; (+) strand; PAM type: NRG; PAM sequence: GAG
  source 1..20: mol_type = other DNA
atgccagtcaaaaccacaat

SEQ ID NO: 39073 - DNA, 20 bp, synthetic construct
  misc_feature 1..20: note = Description of Artificial Sequence: Synthetic oligonucleotide
  misc_feature 1..20: note = Target: SCN10A; (+) strand; PAM type: NRG; PAM sequence: TGG
  source 1..20: mol_type = other DNA
cagtcaaaaccacaatgaga

SEQ ID NO: 39074 - DNA, 20 bp, synthetic construct
  misc_feature 1..20: note = Description of Artificial Sequence: Synthetic oligonucleotide
  misc_feature 1..20: note = Target: SCN10A; (+) strand; PAM type: NRG; PAM sequence: GAG
  source 1..20: mol_type = other DNA
gtcaaaaccacaatgagatg

SEQ ID NO: 39075 - DNA, 20 bp, synthetic construct
  misc_feature 1..20: note = Description of Artificial Sequence: Synthetic oligonucleotide
  misc_feature 1..20: note = Target: SCN10A; (+) strand; PAM type: NRG; PAM sequence: CAG
  source 1..20: mol_type = other DNA
aatgagatggagtctcatac

SEQ ID NO: 39076 - DNA, 20 bp, synthetic construct
  misc_feature 1..20: note = Description of Artificial Sequence: Synthetic oligonucleotide
  misc_feature 1..20: note = Target: SCN10A; (+) strand; PAM type: NRG; PAM sequence: TAG
  source 1..20: mol_type = other DNA
agatggagtctcataccagt

SEQ ID NO: 39077 - DNA, 20 bp, synthetic construct
  misc_feature 1..20: note = Description of Artificial Sequence: Synthetic oligonucleotide
  misc_feature 1..20: note = Target: SCN10A; (+) strand; PAM type: NRG; PAM sequence: TGG
  source 1..20: mol_type = other DNA
gagtctcataccagttagaa

SEQ ID NO: 39078 - DNA, 20 bp, synthetic construct
  misc_feature 1..20: note = Description of Artificial Sequence: Synthetic oligonucleotide
  misc_feature 1..20: note = Target: SCN10A; (+) strand; PAM type: NRG; PAM sequence: GAG
  source 1..20: mol_type = other DNA
gtctcataccagttagaatg

SEQ ID NO: 39079 - DNA, 20 bp, synthetic construct
  misc_feature 1..20: note = Description of Artificial Sequence: Synthetic oligonucleotide
  misc_feature 1..20: note = Target: SCN10A; (+) strand; PAM type: NRG; PAM sequence: AAG
  source 1..20: mol_type = other DNA
ttagaatggagatcattaaa

SEQ ID NO: 39080 - DNA, 20 bp, synthetic construct
  misc_feature 1..20: note = Description of Artificial Sequence: Synthetic oligonucleotide
  misc_feature 1..20: note = Target: SCN10A; (+) strand; PAM type: NRG; PAM sequence: CAG
  source 1..20: mol_type = other DNA
aatggagatcattaaaaagt

SEQ ID NO: 39081 - DNA, 20 bp, synthetic construct
  misc_feature 1..20: note = Description of Artificial Sequence: Synthetic oligonucleotide
  misc_feature 1..20: note = Target: SCN10A; (+) strand; PAM type: NRG; PAM sequence: AGG
  source 1..20: mol_type = other DNA
atggagatcattaaaaagtc

SEQ ID NO: 39082 - DNA, 20 bp, synthetic construct
  misc_feature 1..20: note = Description of Artificial Sequence: Synthetic oligonucleotide
  misc_feature 1..20: note = Target: SCN10A; (+) strand; PAM type: NRG; PAM sequence: CAG
  source 1..20: mol_type = other DNA
attaaaaagtcaggaaacaa

SEQ ID NO: 39083 - DNA, 20 bp, synthetic construct
  misc_feature 1..20: note = Description of Artificial Sequence: Synthetic oligonucleotide
  misc_feature 1..20: note = Target: SCN10A; (+) strand; PAM type: NRG; PAM sequence: TGG
  source 1..20: mol_type = other DNA
agtcaggaaacaacagatgc

SEQ ID NO: 39084 - DNA, 20 bp, synthetic construct
  misc_feature 1..20: note = Description of Artificial Sequence: Synthetic oligonucleotide
  misc_feature 1..20: note = Target: SCN10A; (+) strand; PAM type: NRG; PAM sequence: GAG
  source 1..20: mol_type = other DNA
tcaggaaacaacagatgctg

SEQ ID NO: 39085 - DNA, 20 bp, synthetic construct
  misc_feature 1..20: note = Description of Artificial Sequence: Synthetic oligonucleotide
  misc_feature 1..20: note = Target: SCN10A; (+) strand; PAM type: NRG; PAM sequence: GAG
  source 1..20: mol_type = other DNA
aggaaacaacagatgctgga

SEQ ID NO: 39086 - DNA, 20 bp, synthetic construct
  misc_feature 1..20: note = Description of Artificial Sequence: Synthetic oligonucleotide
  misc_feature 1..20: note = Target: SCN10A; (+) strand; PAM type: NRG; PAM sequence: AGG
  source 1..20: mol_type = other DNA
ggaaacaacagatgctggag

SEQ ID NO: 39087 - DNA, 20 bp, synthetic construct
  misc_feature 1..20: note = Description of Artificial Sequence: Synthetic oligonucleotide
  misc_feature 1..20: note = Target: SCN10A; (+) strand; PAM type: NRG; PAM sequence: TGG
  source 1..20: mol_type = other DNA
aacagatgctggagaggatg

SEQ ID NO: 39088 - DNA, 20 bp, synthetic construct
  misc_feature 1..20: note = Description of Artificial Sequence: Synthetic oligonucleotide
  misc_feature 1..20: note = Target: SCN10A; (+) strand; PAM type: NRG; PAM sequence: GAG
  source 1..20: mol_type = other DNA
cagatgctggagaggatgtg

SEQ ID NO: 39089 - DNA, 20 bp, synthetic construct
  misc_feature 1..20: note = Description of Artificial Sequence: Synthetic oligonucleotide
  misc_feature 1..20: note = Target: SCN10A; (+) strand; PAM type: NRG; PAM sequence: GAG
  source 1..20: mol_type = other DNA
gatgctggagaggatgtgga

SEQ ID NO: 39090 - DNA, 20 bp, synthetic construct
  misc_feature 1..20: note = Description of Artificial Sequence: Synthetic oligonucleotide
  misc_feature 1..20: note = Target: SCN10A; (+) strand; PAM type: NRG; PAM sequence: TAG
  source 1..20: mol_type = other DNA
ctggagaggatgtggagaga

SEQ ID NO: 39091 - DNA, 20 bp, synthetic construct
  misc_feature 1..20: note = Description of Artificial Sequence: Synthetic oligonucleotide
  misc_feature 1..20: note = Target: SCN10A; (+) strand; PAM type: NRG; PAM sequence: AGG
  source 1..20: mol_type = other DNA
tggagaggatgtggagagat

SEQ ID NO: 39092 - DNA, 20 bp, synthetic construct
  misc_feature 1..20: note = Description of Artificial Sequence: Synthetic oligonucleotide
  misc_feature 1..20: note = Target: SCN10A; (+) strand; PAM type: NRG; PAM sequence: TGG
  source 1..20: mol_type = other DNA
taggaatgcttttacactgt

SEQ ID NO: 39093 - DNA, 20 bp, synthetic construct
  misc_feature 1..20: note = Description of Artificial Sequence: Synthetic oligonucleotide
  misc_feature 1..20: note = Target: SCN10A; (+) strand; PAM type: NRG; PAM sequence: TGG
  source 1..20: mol_type = other DNA
gaatgcttttacactgttgg

SEQ ID NO: 39094 - DNA, 20 bp, synthetic construct
  misc_feature 1..20: note = Description of Artificial Sequence: Synthetic oligonucleotide
  misc_feature 1..20: note = Target: SCN10A; (+) strand; PAM type: NRG; PAM sequence: GGG
  source 1..20: mol_type = other DNA
aatgcttttacactgttggt

SEQ ID NO: 39095 - DNA, 20 bp, synthetic construct
  misc_feature 1..20: note = Description of Artificial Sequence: Synthetic oligonucleotide
  misc_feature 1..20: note = Target: SCN10A; (+) strand; PAM type: NRG; PAM sequence: GAG
  source 1..20: mol_type = other DNA
tgcttttacactgttggtgg

SEQ ID NO: 39096 - DNA, 20 bp, synthetic construct
  misc_feature 1..20: note = Description of Artificial Sequence: Synthetic oligonucleotide
  misc_feature 1..20: note = Target: SCN10A; (+) strand; PAM type: NRG; PAM sequence: TAG
  source 1..20: mol_type = other DNA
ctgttggtgggagtgtaaat

SEQ ID NO: 39097 - DNA, 20 bp, synthetic construct
  misc_feature 1..20: note = Description of Artificial Sequence: Synthetic oligonucleotide
  misc_feature 1..20: note = Target: SCN10A; (+) strand; PAM type: NRG; PAM sequence: TGG
  source 1..20: mol_type = other DNA
gtaaattagttcaaccattg

SEQ ID NO: 39098 - DNA, 20 bp, synthetic construct
  misc_feature 1..20: note = Description of Artificial Sequence: Synthetic oligonucleotide
  misc_feature 1..20: note = Target: SCN10A; (+) strand; PAM type: NRG; PAM sequence: AAG
  source 1..20: mol_type = other DNA
aattagttcaaccattgtgg

SEQ ID NO: 39099 - DNA, 20 bp, synthetic construct
  misc_feature 1..20: note = Description of Artificial Sequence: Synthetic oligonucleotide
  misc_feature 1..20: note = Target: SCN10A; (+) strand; PAM type: NRG; PAM sequence: CAG
  source 1..20: mol_type = other DNA
agttcaaccattgtggaaga

SEQ ID NO: 39100 - DNA, 20 bp, synthetic construct
  misc_feature 1..20: note = Description of Artificial Sequence: Synthetic oligonucleotide
  misc_feature 1..20: note = Target: SCN10A; (+) strand; PAM type: NRG; PAM sequence: TGG
  source 1..20: mol_type = other DNA
aaccattgtggaagacagtg

SEQ ID NO: 39101 - DNA, 20 bp, synthetic construct
  misc_feature 1..20: note = Description of Artificial Sequence: Synthetic oligonucleotide
  misc_feature 1..20: note = Target: SCN10A; (+) strand; PAM type: NRG; PAM sequence: AAG
  source 1..20: mol_type = other DNA
agacagtgtggtgattcctc

SEQ ID NO: 39102 - DNA, 20 bp, synthetic construct
  misc_feature 1..20: note = Description of Artificial Sequence: Synthetic oligonucleotide
  misc_feature 1..20: note = Target: SCN10A; (+) strand; PAM type: NRG; PAM sequence: AGG
  source 1..20: mol_type = other DNA
gacagtgtggtgattcctca

SEQ ID NO: 39103 - DNA, 20 bp, synthetic construct
  misc_feature 1..20: note = Description of Artificial Sequence: Synthetic oligonucleotide
  misc_feature 1..20: note = Target: SCN10A; (+) strand; PAM type: NRG; PAM sequence: TAG
  source 1..20: mol_type = other DNA
gtggtgattcctcaaggatc

SEQ ID NO: 39104 - DNA, 20 bp, synthetic construct
  misc_feature 1..20: note = Description of Artificial Sequence: Synthetic oligonucleotide
  misc_feature 1..20: note = Target: SCN10A; (+) strand; PAM type: NRG; PAM sequence: CAG
  source 1..20: mol_type = other DNA
attcctcaaggatctagaac

SEQ ID NO: 39105 - DNA, 20 bp, synthetic construct
  misc_feature 1..20: note = Description of Artificial Sequence: Synthetic oligonucleotide
  misc_feature 1..20: note = Target: SCN10A; (+) strand; PAM type: NRG; PAM sequence: CAG
  source 1..20: mol_type = other DNA
accagaaacaccatttgacc

SEQ ID NO: 39106 - DNA, 20 bp, synthetic construct
  misc_feature 1..20: note = Description of Artificial Sequence: Synthetic oligonucleotide
  misc_feature 1..20: note = Target: SCN10A; (+) strand; PAM type: NRG; PAM sequence: TGG
  source 1..20: mol_type = other DNA
tgacccagcaattccattac

SEQ ID NO: 39107 - DNA, 20 bp, synthetic construct
  misc_feature 1..20: note = Description of Artificial Sequence: Synthetic oligonucleotide
  misc_feature 1..20: note = Target: SCN10A; (+) strand; PAM type: NRG; PAM sequence: GGG
  source 1..20: mol_type = other DNA
gacccagcaattccattact

SEQ ID NO: 39108 - DNA, 20 bp, synthetic construct
  misc_feature 1..20: note = Description of Artificial Sequence: Synthetic oligonucleotide
  misc_feature 1..20: note = Target: SCN10A; (+) strand; PAM type: NRG; PAM sequence: AAG
  source 1..20: mol_type = other DNA
cattactgggtatataccca

SEQ ID NO: 39109 - DNA, 20 bp, synthetic construct
  misc_feature 1..20: note = Description of Artificial Sequence: Synthetic oligonucleotide
  misc_feature 1..20: note = Target: SCN10A; (+) strand; PAM type: NRG; PAM sequence: AGG
  source 1..20: mol_type = other DNA
attactgggtatatacccaa

SEQ ID NO: 39110 - DNA, 20 bp, synthetic construct
  misc_feature 1..20: note = Description of Artificial Sequence: Synthetic oligonucleotide
  misc_feature 1..20: note = Target: SCN10A; (+) strand; PAM type: NRG; PAM sequence: AAG
  source 1..20: mol_type = other DNA
ttataaattattctactata

SEQ ID NO: 39111 - DNA, 20 bp, synthetic construct
  misc_feature 1..20: note = Description of Artificial Sequence: Synthetic oligonucleotide
  misc_feature 1..20: note = Target: SCN10A; (+) strand; PAM type: NRG; PAM sequence: AAG
  source 1..20: mol_type = other DNA
ttattctactataaagatac

SEQ ID NO: 39112 - DNA, 20 bp, synthetic construct
  misc_feature 1..20: note = Description of Artificial Sequence: Synthetic oligonucleotide
  misc_feature 1..20: note = Target: SCN10A; (+) strand; PAM type: NRG; PAM sequence: TGG
  source 1..20: mol_type = other DNA
aagcatgcgtatgtttattg

SEQ ID NO: 39113 - DNA, 20 bp, synthetic construct
  misc_feature 1..20: note = Description of Artificial Sequence: Synthetic oligonucleotide
  misc_feature 1..20: note = Target: SCN10A; (+) strand; PAM type: NRG; PAM sequence: TAG
  source 1..20: mol_type = other DNA
tattgtggcactattgacaa

SEQ ID NO: 39114 - DNA, 20 bp, synthetic construct
  misc_feature 1..20: note = Description of Artificial Sequence: Synthetic oligonucleotide
  misc_feature 1..20: note = Target: SCN10A; (+) strand; PAM type: NRG; PAM sequence: AAG
  source 1..20: mol_type = other DNA
tggcactattgacaatagca

SEQ ID NO: 39115 - DNA, 20 bp, synthetic construct
  misc_feature 1..20: note = Description of Artificial Sequence: Synthetic oligonucleotide
  misc_feature 1..20: note = Target: SCN10A; (+) strand; PAM type: NRG; PAM sequence: TGG
  source 1..20: mol_type = other DNA
tattgacaatagcaaagact

SEQ ID NO: 39116 - DNA, 20 bp, synthetic construct
  misc_feature 1..20: note = Description of Artificial Sequence: Synthetic oligonucleotide
  misc_feature 1..20: note = Target: SCN10A; (+) strand; PAM type: NRG; PAM sequence: CAG
  source 1..20: mol_type = other DNA
gaactaacccaaacgcccat

SEQ ID NO: 39117 - DNA, 20 bp, synthetic construct
  misc_feature 1..20: note = Description of Artificial Sequence: Synthetic oligonucleotide
  misc_feature 1..20: note = Target: SCN10A; (+) strand; PAM type: NRG; PAM sequence: TAG
  source 1..20: mol_type = other DNA
acccaaacgcccatcagtga

SEQ ID NO: 39118 - DNA, 20 bp, synthetic construct
  misc_feature 1..20: note = Description of Artificial Sequence: Synthetic oligonucleotide
  misc_feature 1..20: note = Target: SCN10A; (+) strand; PAM type: NRG; PAM sequence: TGG
  source 1..20: mol_type = other DNA
aacgcccatcagtgatagac

SEQ ID NO: 39119 - DNA, 20 bp, synthetic construct
  misc_feature 1..20: note = Description of Artificial Sequence: Synthetic oligonucleotide
  misc_feature 1..20: note = Target: SCN10A; (+) strand; PAM type: NRG; PAM sequence: AAG
  source 1..20: mol_type = other DNA
catcagtgatagactggata

SEQ ID NO: 39120 - DNA, 20 bp, synthetic construct
  misc_feature 1..20: note = Description of Artificial Sequence: Synthetic oligonucleotide
  misc_feature 1..20: note = Target: SCN10A; (+) strand; PAM type: NRG; PAM sequence: TGG
  source 1..20: mol_type = other DNA
tagactggataaagaaaata

SEQ ID NO: 39121 - DNA, 20 bp, synthetic construct
  misc_feature 1..20: note = Description of Artificial Sequence: Synthetic oligonucleotide
  misc_feature 1..20: note = Target: SCN10A; (+) strand; PAM type: NRG; PAM sequence: TGG
  source 1..20: mol_type = other DNA
aatatggcacatatacacca

SEQ ID NO: 39122 - DNA, 20 bp, synthetic construct
  misc_feature 1..20: note = Description of Artificial Sequence: Synthetic oligonucleotide
  misc_feature 1..20: note = Target: SCN10A; (+) strand; PAM type: NRG; PAM sequence: CAG
  source 1..20: mol_type = other DNA
atacaccatggaatactatg

SEQ ID NO: 39123 - DNA, 20 bp, synthetic construct
  misc_feature 1..20: note = Description of Artificial Sequence: Synthetic oligonucleotide
  misc_feature 1..20: note = Target: SCN10A; (+) strand; PAM type: NRG; PAM sequence: AAG
  source 1..20: mol_type = other DNA
aatactatgcagccataaaa

SEQ ID NO: 39124 - DNA, 20 bp, synthetic construct
  misc_feature 1..20: note = Description of Artificial Sequence: Synthetic oligonucleotide
  misc_feature 1..20: note = Target: SCN10A; (+) strand; PAM type: NRG; PAM sequence: AGG
  source 1..20: mol_type = other DNA
atactatgcagccataaaaa

SEQ ID NO: 39125 - DNA, 20 bp, synthetic construct
  misc_feature 1..20: note = Description of Artificial Sequence: Synthetic oligonucleotide
  misc_feature 1..20: note = Target: SCN10A; (+) strand; PAM type: NRG; PAM sequence: GGG
  source 1..20: mol_type = other DNA
tactatgcagccataaaaaa

SEQ ID NO: 39126 - DNA, 20 bp, synthetic construct
  misc_feature 1..20: note = Description of Artificial Sequence: Synthetic oligonucleotide
  misc_feature 1..20: note = Target: SCN10A; (+) strand; PAM type: NRG; PAM sequence: GAG
  source 1..20: mol_type = other DNA
atgcagccataaaaaagggt

SEQ ID NO: 39127 - DNA, 20 bp, synthetic construct
  misc_feature 1..20: note = Description of Artificial Sequence: Synthetic oligonucleotide
  misc_feature 1..20: note = Target: SCN10A; (+) strand; PAM type: NRG; PAM sequence: CAG
  source 1..20: mol_type = other DNA
gggtgagttcatgttctttg

SEQ ID NO: 39128 - DNA, 20 bp, synthetic construct
  misc_feature 1..20: note = Description of Artificial Sequence: Synthetic oligonucleotide
  misc_feature 1..20: note = Target: SCN10A; (+) strand; PAM type: NRG; PAM sequence: AGG
  source 1..20: mol_type = other DNA
ggtgagttcatgttctttgc

SEQ ID NO: 39129 - DNA, 20 bp, synthetic construct
  misc_feature 1..20: note = Description of Artificial Sequence: Synthetic oligonucleotide
  misc_feature 1..20: note = Target: SCN10A; (+) strand; PAM type: NRG; PAM sequence: GGG
  source 1..20: mol_type = other DNA
gtgagttcatgttctttgca

SEQ ID NO: 39130 - DNA, 20 bp, synthetic construct
  misc_feature 1..20: note = Description of Artificial Sequence: Synthetic oligonucleotide
  misc_feature 1..20: note = Target: SCN10A; (+) strand; PAM type: NRG; PAM sequence: TGG
  source 1..20: mol_type = other DNA
tcatgttctttgcagggaca

SEQ ID NO: 39131 - DNA, 20 bp, synthetic construct
  misc_feature 1..20: note = Description of Artificial Sequence: Synthetic oligonucleotide
  misc_feature 1..20: note = Target: SCN10A; (+) strand; PAM type: NRG; PAM sequence: AAG
  source 1..20: mol_type = other DNA
tctttgcagggacatggatg

SEQ ID NO: 39132 - DNA, 20 bp, synthetic construct
  misc_feature 1..20: note = Description of Artificial Sequence: Synthetic oligonucleotide
  misc_feature 1..20: note = Target: SCN10A; (+) strand; PAM type: NRG; PAM sequence: TGG
  source 1..20: mol_type = other DNA
tgcagggacatggatgaagc

SEQ ID NO: 39133 - DNA, 20 bp, synthetic construct
  misc_feature 1..20: note = Description of Artificial Sequence: Synthetic oligonucleotide
  misc_feature 1..20: note = Target: SCN10A; (+) strand; PAM type: NRG; PAM sequence: CAG
  source 1..20: mol_type = other DNA
aagctggaaaccatcattct

SEQ ID NO: 39134 - DNA, 20 bp, synthetic construct
  misc_feature 1..20: note = Description of Artificial Sequence: Synthetic oligonucleotide
  misc_feature 1..20: note = Target: SCN10A; (+) strand; PAM type: NRG; PAM sequence: AAG
  source 1..20: mol_type = other DNA
cattctcagcaaactgacat

SEQ ID NO: 39135 - DNA, 20 bp, synthetic construct
  misc_feature 1..20: note = Description of Artificial Sequence: Synthetic oligonucleotide
  misc_feature 1..20: note = Target: SCN10A; (+) strand; PAM type: NRG; PAM sequence: CAG
  source 1..20: mol_type = other DNA
tcagcaaactgacataagaa

SEQ ID NO: 39136 - DNA, 20 bp, synthetic construct
  misc_feature 1..20: note = Description of Artificial Sequence: Synthetic oligonucleotide
  misc_feature 1..20: note = Target: SCN10A; (+) strand; PAM type: NRG; PAM sequence: TAG
  source 1..20: mol_type = other DNA
acaccgcatgttctcactca

SEQ ID NO: 39137 - DNA, 20 bp, synthetic construct
  misc_feature 1..20: note = Description of Artificial Sequence: Synthetic oligonucleotide
  misc_feature 1..20: note = Target: SCN10A; (+) strand; PAM type: NRG; PAM sequence: AGG
  source 1..20: mol_type = other DNA
caccgcatgttctcactcat

SEQ ID NO: 39138 - DNA, 20 bp, synthetic construct
  misc_feature 1..20: note = Description of Artificial Sequence: Synthetic oligonucleotide
  misc_feature 1..20: note = Target: SCN10A; (+) strand; PAM type: NRG; PAM sequence: TGG
  source 1..20: mol_type = other DNA
cgcatgttctcactcatagg

SEQ ID NO: 39139 - DNA, 20 bp, synthetic construct
  misc_feature 1..20: note = Description of Artificial Sequence: Synthetic oligonucleotide
  misc_feature 1..20: note = Target: SCN10A; (+) strand; PAM type: NRG; PAM sequence: GGG
  source 1..20: mol_type = other DNA
gcatgttctcactcataggt

SEQ ID NO: 39140 - DNA, 20 bp, synthetic construct
  misc_feature 1..20: note = Description of Artificial Sequence: Synthetic oligonucleotide
  misc_feature 1..20: note = Target: SCN10A; (+) strand; PAM type: NRG; PAM sequence: GAG
  source 1..20: mol_type = other DNA
atgttctcactcataggtgg

SEQ ID NO: 39141 - DNA, 20 bp, synthetic construct
  misc_feature 1..20: note = Description of Artificial Sequence: Synthetic oligonucleotide
  misc_feature 1..20: note = Target: SCN10A; (+) strand; PAM type: NRG; PAM sequence: GAG
  source 1..20: mol_type = other DNA
ataggtgggagatgaacaat

SEQ ID NO: 39142 - DNA, 20 bp, synthetic construct
  misc_feature 1..20: note = Description of Artificial Sequence: Synthetic oligonucleotide
  misc_feature 1..20: note = Target: SCN10A; (+) strand; PAM type: NRG; PAM sequence: GAG
  source 1..20: mol_type = other DNA
aggtgggagatgaacaatga

SEQ ID NO: 39143 - DNA, 20 bp, synthetic construct
  misc_feature 1..20: note = Description of Artificial Sequence: Synthetic oligonucleotide
  misc_feature 1..20: note = Target: SCN10A; (+) strand; PAM type: NRG; PAM sequence: TGG
  source 1..20: mol_type = other DNA
agatgaacaatgagagcacg

SEQ ID NO: 39144 - DNA, 20 bp, synthetic construct
  misc_feature 1..20: note = Description of Artificial Sequence: Synthetic oligonucleotide
  misc_feature 1..20: note = Target: SCN10A; (+) strand; PAM type: NRG; PAM sequence: CAG
  source 1..20: mol_type = other DNA
acaatgagagcacgtggata

SEQ ID NO: 39145 - DNA, 20 bp, synthetic construct
  misc_feature 1..20: note = Description of Artificial Sequence: Synthetic oligonucleotide
  misc_feature 1..20: note = Target: SCN10A; (+) strand; PAM type: NRG; PAM sequence: AGG
  source 1..20: mol_type = other DNA
caatgagagcacgtggatac

SEQ ID NO: 39146 - DNA, 20 bp, synthetic construct
  misc_feature 1..20: note = Description of Artificial Sequence: Synthetic oligonucleotide
  misc_feature 1..20: note = Target: SCN10A; (+) strand; PAM type: NRG; PAM sequence: GGG
  source 1..20: mol_type = other DNA
aatgagagcacgtggataca

SEQ ID NO: 39147 - DNA, 20 bp, synthetic construct
  misc_feature 1..20: note = Description of Artificial Sequence: Synthetic oligonucleotide
  misc_feature 1..20: note = Target: SCN10A; (+) strand; PAM type: NRG; PAM sequence: GAG
  source 1..20: mol_type = other DNA
tgagagcacgtggatacagg

SEQ ID NO: 39148 - DNA, 20 bp, synthetic construct
  misc_feature 1..20: note = Description of Artificial Sequence: Synthetic oligonucleotide
  misc_feature 1..20: note = Target: SCN10A; (+) strand; PAM type: NRG; PAM sequence: AGG
  source 1..20: mol_type = other DNA
gagagcacgtggatacaggg

SEQ ID NO: 39149 - DNA, 20 bp, synthetic construct
  misc_feature 1..20: note = Description of Artificial Sequence: Synthetic oligonucleotide
  misc_feature 1..20: note = Target: SCN10A; (+) strand; PAM type: NRG; PAM sequence: GGG
  source 1..20: mol_type = other DNA
agagcacgtggatacaggga

SEQ ID NO: 39150 - DNA, 20 bp, synthetic construct
  misc_feature 1..20: note = Description of Artificial Sequence: Synthetic oligonucleotide
  misc_feature 1..20: note = Target: SCN10A; (+) strand; PAM type: NRG; PAM sequence: GGG
  source 1..20: mol_type = other DNA
gagcacgtggatacagggag

SEQ ID NO: 39151 - DNA, 20 bp, synthetic construct
  misc_feature 1..20: note = Description of Artificial Sequence: Synthetic oligonucleotide
  misc_feature 1..20: note = Target: SCN10A; (+) strand; PAM type: NRG; PAM sequence: GGG
  source 1..20: mol_type = other DNA
agcacgtggatacagggagg

SEQ ID NO: 39152 - DNA, 20 bp, synthetic construct
  misc_feature 1..20: note = Description of Artificial Sequence: Synthetic oligonucleotide
  misc_feature 1..20: note = Target: SCN10A; (+) strand; PAM type: NRG; PAM sequence: CAG
  source 1..20: mol_type = other DNA
gggagggggacatcacacac

SEQ ID NO: 39153 - DNA, 20 bp, synthetic construct
  misc_feature 1..20: note = Description of Artificial Sequence: Synthetic oligonucleotide
  misc_feature 1..20: note = Target: SCN10A; (+) strand; PAM type: NRG; PAM sequence: AGG
  source 1..20: mol_type = other DNA
ggagggggacatcacacacc

SEQ ID NO: 39154 - DNA, 20 bp, synthetic construct
  misc_feature 1..20: note = Description of Artificial Sequence: Synthetic oligonucleotide
  misc_feature 1..20: note = Target: SCN10A; (+) strand; PAM type: NRG; PAM sequence: GGG
  source 1..20: mol_type = other DNA
gagggggacatcacacacca

SEQ ID NO: 39155 - DNA, 20 bp, synthetic construct
  misc_feature 1..20: note = Description of Artificial Sequence: Synthetic oligonucleotide
  misc_feature 1..20: note = Target: SCN10A; (+) strand; PAM type: NRG; PAM sequence: GAG
  source 1..20: mol_type = other DNA
atcacacaccagggcctgtt

SEQ ID NO: 39156 - DNA, 20 bp, synthetic construct
  misc_feature 1..20: note = Description of Artificial Sequence: Synthetic oligonucleotide
  misc_feature 1..20: note = Target: SCN10A; (+) strand; PAM type: NRG; PAM sequence: AGG
  source 1..20: mol_type = other DNA
tcacacaccagggcctgttg

SEQ ID NO: 39157 - DNA, 20 bp, synthetic construct
  misc_feature 1..20: note = Description of Artificial Sequence: Synthetic oligonucleotide
  misc_feature 1..20: note = Target: SCN10A; (+) strand; PAM type: NRG; PAM sequence: GGG
  source 1..20: mol_type = other DNA
cacacaccagggcctgttga

SEQ ID NO: 39158 - DNA, 20 bp, synthetic construct
  misc_feature 1..20: note = Description of Artificial Sequence: Synthetic oligonucleotide
  misc_feature 1..20: note = Target: SCN10A; (+) strand; PAM type: NRG; PAM sequence: GGG
  source 1..20: mol_type = other DNA
acacaccagggcctgttgag

SEQ ID NO: 39159 - DNA, 20 bp, synthetic construct
  misc_feature 1..20: note = Description of Artificial Sequence: Synthetic oligonucleotide
  misc_feature 1..20: note = Target: SCN10A; (+) strand; PAM type: NRG; PAM sequence: TGG
  source 1..20: mol_type = other DNA
accagggcctgttgaggggt

SEQ ID NO: 39160 - DNA, 20 bp, synthetic construct
  misc_feature 1..20: note = Description of Artificial Sequence: Synthetic oligonucleotide
  misc_feature 1..20: note = Target: SCN10A; (+) strand; PAM type: NRG; PAM sequence: GGG
  source 1..20: mol_type = other DNA
ccagggcctgttgaggggtt

SEQ ID NO: 39161 - DNA, 20 bp, synthetic construct
  misc_feature 1..20: note = Description of Artificial Sequence: Synthetic oligonucleotide
  misc_feature 1..20: note = Target: SCN10A; (+) strand; PAM type: NRG; PAM sequence: GGG
  source 1..20: mol_type = other DNA
cagggcctgttgaggggttg

SEQ ID NO: 39162 - DNA, 20 bp, synthetic construct
  misc_feature 1..20: note = Description of Artificial Sequence: Synthetic oligonucleotide
  misc_feature 1..20: note = Target: SCN10A; (+) strand; PAM type: NRG; PAM sequence: GGG
  source 1..20: mol_type = other DNA
agggcctgttgaggggttgg

SEQ ID NO: 39163 - DNA, 20 bp, synthetic construct
  misc_feature 1..20: note = Description of Artificial Sequence: Synthetic oligonucleotide
  misc_feature 1..20: note = Target: SCN10A; (+) strand; PAM type: NRG; PAM sequence: TAG
  source 1..20: mol_type = other DNA
cctgttgaggggttgggggc

SEQ ID NO: 39164 - DNA, 20 bp, synthetic construct
  misc_feature 1..20: note = Description of Artificial Sequence: Synthetic oligonucleotide
  misc_feature 1..20: note = Target: SCN10A; (+) strand; PAM type: NRG; PAM sequence: AGG
  source 1..20: mol_type = other DNA
ctgttgaggggttgggggct

SEQ ID NO: 39165 - DNA, 20 bp, synthetic construct
  misc_feature 1..20: note = Description of Artificial Sequence: Synthetic oligonucleotide
  misc_feature 1..20: note = Target: SCN10A; (+) strand; PAM type: NRG; PAM sequence: GGG
  source 1..20: mol_type = other DNA
tgttgaggggttgggggcta

SEQ ID NO: 39166 - DNA, 20 bp, synthetic construct
  misc_feature 1..20: note = Description of Artificial Sequence: Synthetic oligonucleotide
  misc_feature 1..20: note = Target: SCN10A; (+) strand; PAM type: NRG; PAM sequence: GGG
  source 1..20: mol_type = other DNA
gttgaggggttgggggctag

SEQ ID NO: 39167 - DNA, 20 bp, synthetic construct
  misc_feature 1..20: note = Description of Artificial Sequence: Synthetic oligonucleotide
  misc_feature 1..20: note = Target: SCN10A; (+) strand; PAM type: NRG; PAM sequence: GAG
  source 1..20: mol_type = other DNA
tgaggggttgggggctaggg

SEQ ID NO: 39168 - DNA, 20 bp, synthetic construct
  misc_feature 1..20: note = Description of Artificial Sequence: Synthetic oligonucleotide
  misc_feature 1..20: note = Target: SCN10A; (+) strand; PAM type: NRG; PAM sequence: AGG
  source 1..20: mol_type = other DNA
gaggggttgggggctagggg

SEQ ID NO: 39169 - DNA, 20 bp, synthetic construct
  misc_feature 1..20: note = Description of Artificial Sequence: Synthetic oligonucleotide
  misc_feature 1..20: note = Target: SCN10A; (+) strand; PAM type: NRG; PAM sequence: GGG
  source 1..20: mol_type = other DNA
aggggttgggggctagggga

SEQ ID NO: 39170 - DNA, 20 bp, synthetic construct
  misc_feature 1..20: note = Description of Artificial Sequence: Synthetic oligonucleotide
  misc_feature 1..20: note = Target: SCN10A; (+) strand; PAM type: NRG; PAM sequence: TAG
  source 1..20: mol_type = other DNA
gttgggggctaggggaggga

SEQ ID NO: 39171 - DNA, 20 bp, synthetic construct
  misc_feature 1..20: note = Description of Artificial Sequence: Synthetic oligonucleotide
  misc_feature 1..20: note = Target: SCN10A; (+) strand; PAM type: NRG; PAM sequence: TAG
  source 1..20: mol_type = other DNA
ggctaggggagggatagcat

SEQ ID NO: 39172 - DNA, 20 bp, synthetic construct
  misc_feature 1..20: note = Description of Artificial Sequence: Synthetic oligonucleotide
  misc_feature 1..20: note = Target: SCN10A; (+) strand; PAM type: NRG; PAM sequence: AGG
  source 1..20: mol_type = other DNA
gctaggggagggatagcatt

SEQ ID NO: 39173 - DNA, 20 bp, synthetic construct
  misc_feature 1..20: note = Description of Artificial Sequence: Synthetic oligonucleotide
  misc_feature 1..20: note = Target: SCN10A; (+) strand; PAM type: NRG; PAM sequence: GAG
  source 1..20: mol_type = other DNA
taggggagggatagcattag

SEQ ID NO: 39174 - DNA, 20 bp, synthetic construct
  misc_feature 1..20: note = Description of Artificial Sequence: Synthetic oligonucleotide
  misc_feature 1..20: note = Target: SCN10A; (+) strand; PAM type: NRG; PAM sequence: TAG
  source 1..20: mol_type = other DNA
attaggagaaatacctaatg

SEQ ID NO: 39175 - DNA, 20 bp, synthetic construct
  misc_feature 1..20: note = Description of Artificial Sequence: Synthetic oligonucleotide
  misc_feature 1..20: note = Target: SCN10A; (+) strand; PAM type: NRG; PAM sequence: TGG
  source 1..20: mol_type = other DNA
gaaatacctaatgtagatga

SEQ ID NO: 39176 - DNA, 20 bp, synthetic construct
  misc_feature 1..20: note = Description of Artificial Sequence: Synthetic oligonucleotide
  misc_feature 1..20: note = Target: SCN10A; (+) strand; PAM type: NRG; PAM sequence: GGG
  source 1..20: mol_type = other DNA
aaatacctaatgtagatgat

SEQ ID NO: 39177 - DNA, 20 bp, synthetic construct
  misc_feature 1..20: note = Description of Artificial Sequence: Synthetic oligonucleotide
  misc_feature 1..20: note = Target: SCN10A; (+) strand; PAM type: NRG; PAM sequence: TGG
  source 1..20: mol_type = other DNA
taatgtagatgatgggttga

SEQ ID NO: 39178 - DNA, 20 bp, synthetic construct
  misc_feature 1..20: note = Description of Artificial Sequence: Synthetic oligonucleotide
  misc_feature 1..20: note = Target: SCN10A; (+) strand; PAM type: NRG; PAM sequence: GGG
  source 1..20: mol_type = other DNA
aatgtagatgatgggttgat

SEQ ID NO: 39179 - DNA, 20 bp, synthetic construct
  misc_feature 1..20: note = Description of Artificial Sequence: Synthetic oligonucleotide
  misc_feature 1..20: note = Target: SCN10A; (+) strand; PAM type: NRG; PAM sequence: CAG
  source 1..20: mol_type = other DNA
agatgatgggttgatgggtg

SEQ ID NO: 39180 - DNA, 20 bp, synthetic construct
  misc_feature 1..20: note = Description of Artificial Sequence: Synthetic oligonucleotide
  misc_feature 1..20: note = Target: SCN10A; (+) strand; PAM type: NRG; PAM sequence: CAG
  source 1..20: mol_type = other DNA
cactttctgcacatgtaccc

SEQ ID NO: 39181 - DNA, 20 bp, synthetic construct
  misc_feature 1..20: note = Description of Artificial Sequence: Synthetic oligonucleotide
  misc_feature 1..20: note = Target: SCN10A; (+) strand; PAM type: NRG; PAM sequence: AAG
  source 1..20: mol_type = other DNA
cacatgtaccccagaactta

SEQ ID NO: 39182 - DNA, 20 bp, synthetic construct
  misc_feature 1..20: note = Description of Artificial Sequence: Synthetic oligonucleotide
  misc_feature 1..20: note = Target: SCN10A; (+) strand; PAM type: NRG; PAM sequence: AAG
  source 1..20: mol_type = other DNA
acttaaagtaaaatttaaaa

SEQ ID NO: 39183 - DNA, 20 bp, synthetic construct
  misc_feature 1..20: note = Description of Artificial Sequence: Synthetic oligonucleotide
  misc_feature 1..20: note = Target: SCN10A; (+) strand; PAM type: NRG; PAM sequence: AGG
  source 1..20: mol_type = other DNA
cttaaagtaaaatttaaaaa

SEQ ID NO: 39184 - DNA, 20 bp, synthetic construct
  misc_feature 1..20: note = Description of Artificial Sequence: Synthetic oligonucleotide
  misc_feature 1..20: note = Target: SCN10A; (+) strand; PAM type: NRG; PAM sequence: GGG
  source 1..20: mol_type = other DNA
ttaaagtaaaatttaaaaaa

SEQ ID NO: 39185 - DNA, 20 bp, synthetic construct
  misc_feature 1..20: note = Description of Artificial Sequence: Synthetic oligonucleotide
  misc_feature 1..20: note = Target: SCN10A; (+) strand; PAM type: NRG; PAM sequence: AAG
  source 1..20: mol_type = other DNA
ttatatatttgcatttcaca

SEQ ID NO: 39186 - DNA, 20 bp, synthetic construct
  misc_feature 1..20: note = Description of Artificial Sequence: Synthetic oligonucleotide
  misc_feature 1..20: note = Target: SCN10A; (+) strand; PAM type: NRG; PAM sequence: AAG
  source 1..20: mol_type = other DNA
atatttgcatttcacaaagc

SEQ ID NO: 39187 - DNA, 20 bp, synthetic construct
  misc_feature 1..20: note = Description of Artificial Sequence: Synthetic oligonucleotide
  misc_feature 1..20: note = Target: SCN10A; (+) strand; PAM type: NRG; PAM sequence: GAG
  source 1..20: mol_type = other DNA
ttgcatttcacaaagcaagt

SEQ ID NO: 39188 - DNA, 20 bp, synthetic construct
  misc_feature 1..20: note = Description of Artificial Sequence: Synthetic oligonucleotide
  misc_feature 1..20: note = Target: SCN10A; (+) strand; PAM type: NRG; PAM sequence: AGG
  source 1..20: mol_type = other DNA
tgcatttcacaaagcaagtg

SEQ ID NO: 39189 - DNA, 20 bp, synthetic construct
  misc_feature 1..20: note = Description of Artificial Sequence: Synthetic oligonucleotide
  misc_feature 1..20: note = Target: SCN10A; (+) strand; PAM type: NRG; PAM sequence: TAG
  source 1..20: mol_type = other DNA
aagtgaggtgttgatccacc

SEQ ID NO: 39190 - DNA, 20 bp, synthetic construct
  misc_feature 1..20: note = Description of Artificial Sequence: Synthetic oligonucleotide
  misc_feature 1..20: note = Target: SCN10A; (+) strand; PAM type: NRG; PAM sequence: TGG
  source 1..20: mol_type = other DNA
ctagaattgattcttgtgtg

SEQ ID NO: 39191 - DNA, 20 bp, synthetic construct
  misc_feature 1..20: note = Description of Artificial Sequence: Synthetic oligonucleotide
  misc_feature 1..20: note = Target: SCN10A; (+) strand; PAM type: NRG; PAM sequence: AAG
  source 1..20: mol_type = other DNA
tgattcttgtgtgtggtgca

SEQ ID NO: 39192 - DNA, 20 bp, synthetic construct
  misc_feature 1..20: note = Description of Artificial Sequence: Synthetic oligonucleotide
  misc_feature 1..20: note = Target: SCN10A; (+) strand; PAM type: NRG; PAM sequence: TGG
  source 1..20: mol_type = other DNA
tcttgtgtgtggtgcaaagt

SEQ ID NO: 39193 - DNA, 20 bp, synthetic construct
  misc_feature 1..20: note = Description of Artificial Sequence: Synthetic oligonucleotide
  misc_feature 1..20: note = Target: SCN10A; (+) strand; PAM type: NRG; PAM sequence: TAG
  source 1..20: mol_type = other DNA
gcaaagttggatgtttaatg

SEQ ID NO: 39194 - DNA, 20 bp, synthetic construct
  misc_feature 1..20: note = Description of Artificial Sequence: Synthetic oligonucleotide
  misc_feature 1..20: note = Target: SCN10A; (+) strand; PAM type: NRG; PAM sequence: CAG
  source 1..20: mol_type = other DNA
gatgtttaatgtagtttttc

SEQ ID NO: 39195 - DNA, 20 bp, synthetic construct
  misc_feature 1..20: note = Description of Artificial Sequence: Synthetic oligonucleotide
  misc_feature 1..20: note = Target: SCN10A; (+) strand; PAM type: NRG; PAM sequence: GAG
  source 1..20: mol_type = other DNA
tttaatgtagtttttccagt

SEQ ID NO: 39196 - DNA, 20 bp, synthetic construct
  misc_feature 1..20: note = Description of Artificial Sequence: Synthetic oligonucleotide
  misc_feature 1..20: note = Target: SCN10A; (+) strand; PAM type: NRG; PAM sequence: CAG
  source 1..20: mol_type = other DNA
cagtgagattcctaattctt

SEQ ID NO: 39197 - DNA, 20 bp, synthetic construct
  misc_feature 1..20: note = Description of Artificial Sequence: Synthetic oligonucleotide
  misc_feature 1..20: note = Target: SCN10A; (+) strand; PAM type: NRG; PAM sequence: AAG
  source 1..20: mol_type = other DNA
ttcttcagcatcattttttg

SEQ ID NO: 39198 - DNA, 20 bp, synthetic construct
  misc_feature 1..20: note = Description of Artificial Sequence: Synthetic oligonucleotide
  misc_feature 1..20: note = Target: SCN10A; (+) strand; PAM type: NRG; PAM sequence: TGG
  source 1..20: mol_type = other DNA
ccgccttttccctgctgttc

SEQ ID NO: 39199 - DNA, 20 bp, synthetic construct
  misc_feature 1..20: note = Description of Artificial Sequence: Synthetic oligonucleotide
  misc_feature 1..20: note = Target: SCN10A; (+) strand; PAM type: NRG; PAM sequence: GGG
  source 1..20: mol_type = other DNA
cgccttttccctgctgttct

SEQ ID NO: 39200 - DNA, 20 bp, synthetic construct
  misc_feature 1..20: note = Description of Artificial Sequence: Synthetic oligonucleotide
  misc_feature 1..20: note = Target: SCN10A; (+) strand; PAM type: NRG; PAM sequence: GGG
  source 1..20: mol_type = other DNA
gccttttccctgctgttctg

SEQ ID NO: 39201 - DNA, 20 bp, synthetic construct
  misc_feature 1..20: note = Description of Artificial Sequence: Synthetic oligonucleotide
  misc_feature 1..20: note = Target: SCN10A; (+) strand; PAM type: NRG; PAM sequence: TAG
  source 1..20: mol_type = other DNA
ggtgccaccttttcacacat

SEQ ID NO: 39202 - DNA, 20 bp, synthetic construct
  misc_feature 1..20: note = Description of Artificial Sequence: Synthetic oligonucleotide
  misc_feature 1..20: note = Target: SCN10A; (+) strand; PAM type: NRG; PAM sequence: TGG
  source 1..20: mol_type = other DNA
ttagatgtttacatatgtgt

SEQ ID NO: 39203 - DNA, 20 bp, synthetic construct
  misc_feature 1..20: note = Description of Artificial Sequence: Synthetic oligonucleotide
  misc_feature 1..20: note = Target: SCN10A; (+) strand; PAM type: NRG; PAM sequence: TGG
  source 1..20: mol_type = other DNA
catatgtgttggtctgttta

SEQ ID NO: 39204 - DNA, 20 bp, synthetic construct
  misc_feature 1..20: note = Description of Artificial Sequence: Synthetic oligonucleotide
  misc_feature 1..20: note = Target: SCN10A; (+) strand; PAM type: NRG; PAM sequence: TGG
  source 1..20: mol_type = other DNA
tctgaccaatcttacaccaa

SEQ ID NO: 39205 - DNA, 20 bp, synthetic construct
  misc_feature 1..20: note = Description of Artificial Sequence: Synthetic oligonucleotide
  misc_feature 1..20: note = Target: SCN10A; (+) strand; PAM type: NRG; PAM sequence: TAG
  source 1..20: mol_type = other DNA
caatggcacactgcttcaat

SEQ ID NO: 39206 - DNA, 20 bp, synthetic construct
  misc_feature 1..20: note = Description of Artificial Sequence: Synthetic oligonucleotide
  misc_feature 1..20: note = Target: SCN10A; (+) strand; PAM type: NRG; PAM sequence: GAG
  source 1..20: mol_type = other DNA
atggcacactgcttcaatta

SEQ ID NO: 39207 - DNA, 20 bp, synthetic construct
  misc_feature 1..20: note = Description of Artificial Sequence: Synthetic oligonucleotide
  misc_feature 1..20: note = Target: SCN10A; (+) strand; PAM type: NRG; PAM sequence: TAG
  source 1..20: mol_type = other DNA
ctgcttcaattagagcttta

SEQ ID NO: 39208 - DNA, 20 bp, synthetic construct
  misc_feature 1..20: note = Description of Artificial Sequence: Synthetic oligonucleotide
  misc_feature 1..20: note = Target: SCN10A; (+) strand; PAM type: NRG; PAM sequence: CAG
  source 1..20: mol_type = other DNA
ttatagtaaatctcgacatc

SEQ ID NO: 39209 - DNA, 20 bp, synthetic construct
  misc_feature 1..20: note = Description of Artificial Sequence: Synthetic oligonucleotide
  misc_feature 1..20: note = Target: SCN10A; (+) strand; PAM type: NRG; PAM sequence: TAG
  source 1..20: mol_type = other DNA
tagtaaatctcgacatccag

SEQ ID NO: 39210 - DNA, 20 bp, synthetic construct
  misc_feature 1..20: note = Description of Artificial Sequence: Synthetic oligonucleotide
  misc_feature 1..20: note = Target: SCN10A; (+) strand; PAM type: NRG; PAM sequence: GAG
  source 1..20: mol_type = other DNA
atctcgacatccagtagaat

SEQ ID NO: 39211 - DNA, 20 bp, synthetic construct
  misc_feature 1..20: note = Description of Artificial Sequence: Synthetic oligonucleotide
  misc_feature 1..20: note = Target: SCN10A; (+) strand; PAM type: NRG; PAM sequence: AAG
  source 1..20: mol_type = other DNA
actttgtatttcttcctcaa

SEQ ID NO: 39212 - DNA, 20 bp, synthetic construct
  misc_feature 1..20: note = Description of Artificial Sequence: Synthetic oligonucleotide
  misc_feature 1..20: note = Target: SCN10A; (+) strand; PAM type: NRG; PAM sequence: TGG
  source 1..20: mol_type = other DNA
tttcttcctcaaaagtttct

SEQ ID NO: 39213 - DNA, 20 bp, synthetic construct
  misc_feature 1..20: note = Description of Artificial Sequence: Synthetic oligonucleotide
  misc_feature 1..20: note = Target: SCN10A; (+) strand; PAM type: NRG; PAM sequence: GAG
  source 1..20: mol_type = other DNA
aaaatttcatgtaaactttt

SEQ ID NO: 39214 - DNA, 20 bp, synthetic construct
  misc_feature 1..20: note = Description of Artificial Sequence: Synthetic oligonucleotide
  misc_feature 1..20: note = Target: SCN10A; (+) strand; PAM type: NRG; PAM sequence: AGG
  source 1..20: mol_type = other DNA
aaatttcatgtaaacttttg

SEQ ID NO: 39215 - DNA, 20 bp, synthetic construct
  misc_feature 1..20: note = Description of Artificial Sequence: Synthetic oligonucleotide
  misc_feature 1..20: note = Target: SCN10A; (+) strand; PAM type: NRG; PAM sequence: AAG
  source 1..20: mol_type = other DNA
tttcatgtaaacttttgagg

SEQ ID NO: 39216 - DNA, 20 bp, synthetic construct
  misc_feature 1..20: note = Description of Artificial Sequence: Synthetic oligonucleotide
  misc_feature 1..20: note = Target: SCN10A; (+) strand; PAM type: NRG; PAM sequence: AAG
  source 1..20: mol_type = other DNA
cttttgaggaagaaaattta

SEQ ID NO: 39217 - DNA, 20 bp, synthetic construct
  misc_feature 1..20: note = Description of Artificial Sequence: Synthetic oligonucleotide
  misc_feature 1..20: note = Target: SCN10A; (+) strand; PAM type: NRG; PAM sequence: AAG
  source 1..20: mol_type = other DNA
ggaagaaaatttaaagttta

SEQ ID NO: 39218 - DNA, 20 bp, synthetic construct
  misc_feature 1..20: note = Description of Artificial Sequence: Synthetic oligonucleotide
  misc_feature 1..20: note = Target: SCN10A; (+) strand; PAM type: NRG; PAM sequence: AAG
  source 1..20: mol_type = other DNA
tttaaagtttaaagtttgtc

SEQ ID NO: 39219 - DNA, 20 bp, synthetic construct
  misc_feature 1..20: note = Description of Artificial Sequence: Synthetic oligonucleotide
  misc_feature 1..20: note = Target: SCN10A; (+) strand; PAM type: NRG; PAM sequence: AAG
  source 1..20: mol_type = other DNA
agtttgtcaagtaataccaa

SEQ ID NO: 39220 - DNA, 20 bp, synthetic construct
  misc_feature 1..20: note = Description of Artificial Sequence: Synthetic oligonucleotide
  misc_feature 1..20: note = Target: SCN10A; (+) strand; PAM type: NRG; PAM sequence: AAG
  source 1..20: mol_type = other DNA
ttgtcaagtaataccaaaag

SEQ ID NO: 39221 - DNA, 20 bp, synthetic construct
  misc_feature 1..20: note = Description of Artificial Sequence: Synthetic oligonucleotide
  misc_feature 1..20: note = Target: SCN10A; (+) strand; PAM type: NRG; PAM sequence: GAG
  source 1..20: mol_type = other DNA
gcctgttgaaatattgattt

SEQ ID NO: 39222 - DNA, 20 bp, synthetic construct
  misc_feature 1..20: note = Description of Artificial Sequence: Synthetic oligonucleotide
  misc_feature 1..20: note = Target: SCN10A; (+) strand; PAM type: NRG; PAM sequence: AGG
  source 1..20: mol_type = other DNA
cctgttgaaatattgatttg

SEQ ID NO: 39223 - DNA, 20 bp, synthetic construct
  misc_feature 1..20: note = Description of Artificial Sequence: Synthetic oligonucleotide
  misc_feature 1..20: note = Target: SCN10A; (+) strand; PAM type: NRG; PAM sequence: TGG
  source 1..20: mol_type = other DNA
ttaaatttattaatcatttt

SEQ ID NO: 39224 - DNA, 20 bp, synthetic construct
  misc_feature 1..20: note = Description of Artificial Sequence: Synthetic oligonucleotide
  misc_feature 1..20: note = Target: SCN10A; (+) strand; PAM type: NRG; PAM sequence: GGG
  source 1..20: mol_type = other DNA
taaatttattaatcattttt

SEQ ID NO: 39225 - DNA, 20 bp, synthetic construct
  misc_feature 1..20: note = Description of Artificial Sequence: Synthetic oligonucleotide
  misc_feature 1..20: note = Target: SCN10A; (+) strand; PAM type: NRG; PAM sequence: GAG
  source 1..20: mol_type = other DNA
aatttattaatcatttttgg

SEQ ID NO: 39226 - DNA, 20 bp, synthetic construct
  misc_feature 1..20: note = Description of Artificial Sequence: Synthetic oligonucleotide
  misc_feature 1..20: note = Target: SCN10A; (+) strand; PAM type: NRG; PAM sequence: GAG
  source 1..20: mol_type = other DNA
ttgggagtctttacaatatt

SEQ ID NO: 39227 - DNA, 20 bp, synthetic construct
  misc_feature 1..20: note = Description of Artificial Sequence: Synthetic oligonucleotide
  misc_feature 1..20: note = Target: SCN10A; (+) strand; PAM type: NRG; PAM sequence: GAG
  source 1..20: mol_type = other DNA
aatattgagactttgaatct

SEQ ID NO: 39228 - DNA, 20 bp, synthetic construct
  misc_feature 1..20: note = Description of Artificial Sequence: Synthetic oligonucleotide
  misc_feature 1..20: note = Target: SCN10A; (+) strand; PAM type: NRG; PAM sequence: TGG
  source 1..20: mol_type = other DNA
aacatgtctccccactgatt

SEQ ID NO: 39229 - DNA, 20 bp, synthetic construct
  misc_feature 1..20: note = Description of Artificial Sequence: Synthetic oligonucleotide
  misc_feature 1..20: note = Target: SCN10A; (+) strand; PAM type: NRG; PAM sequence: TAG
  source 1..20: mol_type = other DNA
acttattataattttcctta

SEQ ID NO: 39230 - DNA, 20 bp, synthetic construct
  misc_feature 1..20: note = Description of Artificial Sequence: Synthetic oligonucleotide
  misc_feature 1..20: note = Target: SCN10A; (+) strand; PAM type: NRG; PAM sequence: GAG
  source 1..20: mol_type = other DNA
ttattataattttccttata

SEQ ID NO: 39231 - DNA, 20 bp, synthetic construct
  misc_feature 1..20: note = Description of Artificial Sequence: Synthetic oligonucleotide
  misc_feature 1..20: note = Target: SCN10A; (+) strand; PAM type: NRG; PAM sequence: TAG
  source 1..20: mol_type = other DNA
tactttgataatcttattcc

SEQ ID NO: 39232 - DNA, 20 bp, synthetic construct
  misc_feature 1..20: note = Description of Artificial Sequence: Synthetic oligonucleotide
  misc_feature 1..20: note = Target: SCN10A; (+) strand; PAM type: NRG; PAM sequence: CAG
  source 1..20: mol_type = other DNA
tacttgacattttaaaatgc

SEQ ID NO: 39233 - DNA, 20 bp, synthetic construct
  misc_feature 1..20: note = Description of Artificial Sequence: Synthetic oligonucleotide
  misc_feature 1..20: note = Target: SCN10A; (+) strand; PAM type: NRG; PAM sequence: TGG
  source 1..20: mol_type = other DNA
ttttaaaatgccagtgtaaa

SEQ ID NO: 39234 - DNA, 20 bp, synthetic construct
  misc_feature 1..20: note = Description of Artificial Sequence: Synthetic oligonucleotide
  misc_feature 1..20: note = Target: SCN10A; (+) strand; PAM type: NRG; PAM sequence: TAG
  source 1..20: mol_type = other DNA
aactattttctgtttgttgc

SEQ ID NO: 39235 - DNA, 20 bp, synthetic construct
  misc_feature 1..20: note = Description of Artificial Sequence: Synthetic oligonucleotide
  misc_feature 1..20: note = Target: SCN10A; (+) strand; PAM type: NRG; PAM sequence: CAG
  source 1..20: mol_type = other DNA
tatgtatgttaatttgtacc

SEQ ID NO: 39236 - DNA, 20 bp, synthetic construct
  misc_feature 1..20: note = Description of Artificial Sequence: Synthetic oligonucleotide
  misc_feature 1..20: note = Target: SCN10A; (+) strand; PAM type: NRG; PAM sequence: TAG
  source 1..20: mol_type = other DNA
taattcttactgtttatctc

SEQ ID NO: 39237 - DNA, 20 bp, synthetic construct
  misc_feature 1..20: note = Description of Artificial Sequence: Synthetic oligonucleotide
  misc_feature 1..20: note = Target: SCN10A; (+) strand; PAM type: NRG; PAM sequence: AGG
  source 1..20: mol_type = other DNA
aattcttactgtttatctct

SEQ ID NO: 39238 - DNA, 20 bp, synthetic construct
  misc_feature 1..20: note = Description of Artificial Sequence: Synthetic oligonucleotide
  misc_feature 1..20: note = Target: SCN10A; (+) strand; PAM type: NRG; PAM sequence: TGG
  source 1..20: mol_type = other DNA
tgtttatctctaggttatgt

SEQ ID NO: 39239 - DNA, 20 bp, synthetic construct
  misc_feature 1..20: note = Description of Artificial Sequence: Synthetic oligonucleotide
  misc_feature 1..20: note = Target: SCN10A; (+) strand; PAM type: NRG; PAM sequence: CGG
  source 1..20: mol_type = other DNA
ttatctgtaaattacatctt

SEQ ID NO: 39240 - DNA, 20 bp, synthetic construct
  misc_feature 1..20: note = Description of Artificial Sequence: Synthetic oligonucleotide
  misc_feature 1..20: note = Target: SCN10A; (+) strand; PAM type: NRG; PAM sequence: TGG
  source 1..20: mol_type = other DNA
ttttctttgctttactatgc

SEQ ID NO: 39241 - DNA, 20 bp, synthetic construct
  misc_feature 1..20: note = Description of Artificial Sequence: Synthetic oligonucleotide
  misc_feature 1..20: note = Target: SCN10A; (+) strand; PAM type: NRG; PAM sequence: GAG
  source 1..20: mol_type = other DNA
tttgctttactatgctggct

SEQ ID NO: 39242 - DNA, 20 bp, synthetic construct
  misc_feature 1..20: note = Description of Artificial Sequence: Synthetic oligonucleotide
  misc_feature 1..20: note = Target: SCN10A; (+) strand; PAM type: NRG; PAM sequence: AAG
  source 1..20: mol_type = other DNA
tggctgagacctcctttaca

SEQ ID NO: 39243 - DNA, 20 bp, synthetic construct
  misc_feature 1..20: note = Description of Artificial Sequence: Synthetic oligonucleotide
  misc_feature 1..20: note = Target: SCN10A; (+) strand; PAM type: NRG; PAM sequence: TGG
  source 1..20: mol_type = other DNA
ctgagacctcctttacaaag

SEQ ID NO: 39244 - DNA, 20 bp, synthetic construct
  misc_feature 1..20: note = Description of Artificial Sequence: Synthetic oligonucleotide
  misc_feature 1..20: note = Target: SCN10A; (+) strand; PAM type: NRG; PAM sequence: GAG
  source 1..20: mol_type = other DNA
ctcctttacaaagtggaact

SEQ ID NO: 39245 - DNA, 20 bp, synthetic construct
  misc_feature 1..20: note = Description of Artificial Sequence: Synthetic oligonucleotide
  misc_feature 1..20: note = Target: SCN10A; (+) strand; PAM type: NRG; PAM sequence: AAG
  source 1..20: mol_type = other DNA
ctttacaaagtggaactgag

SEQ ID NO: 39246 - DNA, 20 bp, synthetic construct
  misc_feature 1..20: note = Description of Artificial Sequence: Synthetic oligonucleotide
  misc_feature 1..20: note = Target: SCN10A; (+) strand; PAM type: NRG; PAM sequence: CAG
  source 1..20: mol_type = other DNA
caaagtggaactgagaagaa

SEQ ID NO: 39247 - DNA, 20 bp, synthetic construct
  misc_feature 1..20: note = Description of Artificial Sequence: Synthetic oligonucleotide
  misc_feature 1..20: note = Target: SCN10A; (+) strand; PAM type: NRG; PAM sequence: TGG
  source 1..20: mol_type = other DNA
ctgagaagaacagacatctt

SEQ ID NO: 39248 - DNA, 20 bp, synthetic construct
  misc_feature 1..20: note = Description of Artificial Sequence: Synthetic oligonucleotide
  misc_feature 1..20: note = Target: SCN10A; (+) strand; PAM type: NRG; PAM sequence: AAG
  source 1..20: mol_type = other DNA
ttttttttcttttgatctca

SEQ ID NO: 39249 - DNA, 20 bp, synthetic construct
  misc_feature 1..20: note = Description of Artificial Sequence: Synthetic oligonucleotide
  misc_feature 1..20: note = Target: SCN10A; (+) strand; PAM type: NRG; PAM sequence: AGG
  source 1..20: mol_type = other DNA
tttttttcttttgatctcaa

SEQ ID NO: 39250 - DNA, 20 bp, synthetic construct
  misc_feature 1..20: note = Description of Artificial Sequence: Synthetic oligonucleotide
  misc_feature 1..20: note = Target: SCN10A; (+) strand; PAM type: NRG; PAM sequence: GGG
  source 1..20: mol_type = other DNA
ttttttcttttgatctcaaa

SEQ ID NO: 39251 - DNA, 20 bp, synthetic construct
  misc_feature 1..20: note = Description of Artificial Sequence: Synthetic oligonucleotide
  misc_feature 1..20: note = Target: SCN10A; (+) strand; PAM type: NRG; PAM sequence: AAG
  source 1..20: mol_type = other DNA
ttcttttgatctcaaaggga

SEQ ID NO: 39252 - DNA, 20 bp, synthetic construct
  misc_feature 1..20: note = Description of Artificial Sequence: Synthetic oligonucleotide
  misc_feature 1..20: note = Target: SCN10A; (+) strand; PAM type: NRG; PAM sequence: AAG
  source 1..20: mol_type = other DNA
agctttccatgttcacaatt

SEQ ID NO: 39253 - DNA, 20 bp, synthetic construct
  misc_feature 1..20: note = Description of Artificial Sequence: Synthetic oligonucleotide
  misc_feature 1..20: note = Target: SCN10A; (+) strand; PAM type: NRG; PAM sequence: CAG
  source 1..20: mol_type = other DNA
aaacaatgaataccctttat

SEQ ID NO: 39254 - DNA, 20 bp, synthetic construct
  misc_feature 1..20: note = Description of Artificial Sequence: Synthetic oligonucleotide
  misc_feature 1..20: note = Target: SCN10A; (+) strand; PAM type: NRG; PAM sequence: GAG
  source 1..20: mol_type = other DNA
acaatgaataccctttatca

SEQ ID NO: 39255 - DNA, 20 bp, synthetic construct
  misc_feature 1..20: note = Description of Artificial Sequence: Synthetic oligonucleotide
  misc_feature 1..20: note = Target: SCN10A; (+) strand; PAM type: NRG; PAM sequence: AAG
  source 1..20: mol_type = other DNA
ttttaaaattattatacttt

SEQ ID NO: 39256 - DNA, 20 bp, synthetic construct
  misc_feature 1..20: note = Description of Artificial Sequence: Synthetic oligonucleotide
  misc_feature 1..20: note = Target: SCN10A; (+) strand; PAM type: NRG; PAM sequence: TGG
  source 1..20: mol_type = other DNA
aattattatactttaagttc

SEQ ID NO: 39257 - DNA, 20 bp, synthetic construct
  misc_feature 1..20: note = Description of Artificial Sequence: Synthetic oligonucleotide
  misc_feature 1..20: note = Target: SCN10A; (+) strand; PAM type: NRG; PAM sequence: GGG
  source 1..20: mol_type = other DNA
attattatactttaagttct

SEQ ID NO: 39258 - DNA, 20 bp, synthetic construct
  misc_feature 1..20: note = Description of Artificial Sequence: Synthetic oligonucleotide
  misc_feature 1..20: note = Target: SCN10A; (+) strand; PAM type: NRG; PAM sequence: GGG
  source 1..20: mol_type = other DNA
ttattatactttaagttctg

SEQ ID NO: 39259 - DNA, 20 bp, synthetic construct
  misc_feature 1..20: note = Description of Artificial Sequence: Synthetic oligonucleotide
  misc_feature 1..20: note = Target: SCN10A; (+) strand; PAM type: NRG; PAM sequence: CAG
  source 1..20: mol_type = other DNA
taagttctggggtacatgtg

SEQ ID NO: 39260 - DNA, 20 bp, synthetic construct
  misc_feature 1..20: note = Description of Artificial Sequence: Synthetic oligonucleotide
  misc_feature 1..20: note = Target: SCN10A; (+) strand; PAM type: NRG; PAM sequence: CGG
  source 1..20: mol_type = other DNA
ggtacatgtgcagaacgtgc

SEQ ID NO: 39261 - DNA, 20 bp, synthetic construct
  misc_feature 1..20: note = Description of Artificial Sequence: Synthetic oligonucleotide
  misc_feature 1..20: note = Target: SCN10A; (+) strand; PAM type: NRG; PAM sequence: TAG
  source 1..20: mol_type = other DNA
gaacgtgccggtttgttaca

SEQ ID NO: 39262 - DNA, 20 bp, synthetic construct
  misc_feature 1..20: note = Description of Artificial Sequence: Synthetic oligonucleotide
  misc_feature 1..20: note = Target: SCN10A; (+) strand; PAM type: NRG; PAM sequence: AGG
  source 1..20: mol_type = other DNA
aacgtgccggtttgttacat

SEQ ID NO: 39263 - DNA, 20 bp, synthetic construct
  misc_feature 1..20: note = Description of Artificial Sequence: Synthetic oligonucleotide
  misc_feature 1..20: note = Target: SCN10A; (+) strand; PAM type: NRG; PAM sequence: TGG
  source 1..20: mol_type = other DNA
acataggtgtacccgtgcca

SEQ ID NO: 39264 - DNA, 20 bp, synthetic construct
  misc_feature 1..20: note = Description of Artificial Sequence: Synthetic oligonucleotide
  misc_feature 1..20: note = Target: SCN10A; (+) strand; PAM type: NRG; PAM sequence: TGG
  source 1..20: mol_type = other DNA
taggtgtacccgtgccatgg

SEQ ID NO: 39265 - DNA, 20 bp, synthetic construct
  misc_feature 1..20: note = Description of Artificial Sequence: Synthetic oligonucleotide
  misc_feature 1..20: note = Target: SCN10A; (+) strand; PAM type: NRG; PAM sequence: TAG
  source 1..20: mol_type = other DNA
cttcaacccgtcatttacat

SEQ ID NO: 39266 - DNA, 20 bp, synthetic construct
  misc_feature 1..20: note = Description of Artificial Sequence: Synthetic oligonucleotide
  misc_feature 1..20: note = Target: SCN10A; (+) strand; PAM type: NRG; PAM sequence: AGG
  source 1..20: mol_type = other DNA
ttcaacccgtcatttacatt

SEQ ID NO: 39267 - DNA, 20 bp, synthetic construct
  misc_feature 1..20: note = Description of Artificial Sequence: Synthetic oligonucleotide
  misc_feature 1..20: note = Target: SCN10A; (+) strand; PAM type: NRG; PAM sequence: TAG
  source 1..20: mol_type = other DNA
tcctaatgctatccctcccc

SEQ ID NO: 39268 - DNA, 20 bp, synthetic construct
  misc_feature 1..20: note = Description of Artificial Sequence: Synthetic oligonucleotide
  misc_feature 1..20: note = Target: SCN10A; (+) strand; PAM type: NRG; PAM sequence: CAG
  source 1..20: mol_type = other DNA
cctagccccccacccctcaa

SEQ ID NO: 39269 - DNA, 20 bp, synthetic construct
  misc_feature 1..20: note = Description of Artificial Sequence: Synthetic oligonucleotide
  misc_feature 1..20: note = Target: SCN10A; (+) strand; PAM type: NRG; PAM sequence: AGG
  source 1..20: mol_type = other DNA
ctagccccccacccctcaac

SEQ ID NO: 39270 - DNA, 20 bp, synthetic construct
  misc_feature 1..20: note = Description of Artificial Sequence: Synthetic oligonucleotide
  misc_feature 1..20: note = Target: SCN10A; (+) strand; PAM type: NRG; PAM sequence: CAG
  source 1..20: mol_type = other DNA
ccccacccctcaacaggccc

SEQ ID NO: 39271 - DNA, 20 bp, synthetic construct
  misc_feature 1..20: note = Description of Artificial Sequence: Synthetic oligonucleotide
  misc_feature 1..20: note = Target: SCN10A; (+) strand; PAM type: NRG; PAM sequence: GAG
  source 1..20: mol_type = other DNA
attgttcaactcccacttat

SEQ ID NO: 39272 - DNA, 20 bp, synthetic construct
  misc_feature 1..20: note = Description of Artificial Sequence: Synthetic oligonucleotide
  misc_feature 1..20: note = Target: SCN10A; (+) strand; PAM type: NRG; PAM sequence: GAG
  source 1..20: mol_type = other DNA
ttcaactcccacttatgagt

SEQ ID NO: 39273 - DNA, 20 bp, synthetic construct
  misc_feature 1..20: note = Description of Artificial Sequence: Synthetic oligonucleotide
  misc_feature 1..20: note = Target: SCN10A; (+) strand; PAM type: NRG; PAM sequence: CGG
  source 1..20: mol_type = other DNA
cacttatgagtgagaacata

SEQ ID NO: 39274 - DNA, 20 bp, synthetic construct
  misc_feature 1..20: note = Description of Artificial Sequence: Synthetic oligonucleotide
  misc_feature 1..20: note = Target: SCN10A; (+) strand; PAM type: NRG; PAM sequence: TGG
  source 1..20: mol_type = other DNA
gagtgagaacatacggtgtt

SEQ ID NO: 39275 - DNA, 20 bp, synthetic construct
  misc_feature 1..20: note = Description of Artificial Sequence: Synthetic oligonucleotide
  misc_feature 1..20: note = Target: SCN10A; (+) strand; PAM type: NRG; PAM sequence: TAG
  source 1..20: mol_type = other DNA
ttggttttctgttcttgtgt

SEQ ID NO: 39276 - DNA, 20 bp, synthetic construct
  misc_feature 1..20: note = Description of Artificial Sequence: Synthetic oligonucleotide
  misc_feature 1..20: note = Target: SCN10A; (+) strand; PAM type: NRG; PAM sequence: GAG
  source 1..20: mol_type = other DNA
tgttcttgtgttagtttgct

SEQ ID NO: 39277 - DNA, 20 bp, synthetic construct
  misc_feature 1..20: note = Description of Artificial Sequence: Synthetic oligonucleotide
  misc_feature 1..20: note = Target: SCN10A; (+) strand; PAM type: NRG; PAM sequence: TGG
  source 1..20: mol_type = other DNA
tgttagtttgctgagaatga

SEQ ID NO: 39278 - DNA, 20 bp, synthetic construct
  misc_feature 1..20: note = Description of Artificial Sequence: Synthetic oligonucleotide
  misc_feature 1..20: note = Target: SCN10A; (+) strand; PAM type: NRG; PAM sequence: CAG
  source 1..20: mol_type = other DNA
ttgctgagaatgatggtttc

SEQ ID NO: 39279 - DNA, 20 bp, synthetic construct
  misc_feature 1..20: note = Description of Artificial Sequence: Synthetic oligonucleotide
  misc_feature 1..20: note = Target: SCN10A; (+) strand; PAM type: NRG; PAM sequence: AAG
  source 1..20: mol_type = other DNA
gcttcatccatgtccctgca

SEQ ID NO: 39280 - DNA, 20 bp, synthetic construct
  misc_feature 1..20: note = Description of Artificial Sequence: Synthetic oligonucleotide
  misc_feature 1..20: note = Target: SCN10A; (+) strand; PAM type: NRG; PAM sequence: AGG
  source 1..20: mol_type = other DNA
cttcatccatgtccctgcaa

SEQ ID NO: 39281 - DNA, 20 bp, synthetic construct
  misc_feature 1..20: note = Description of Artificial Sequence: Synthetic oligonucleotide
  misc_feature 1..20: note = Target: SCN10A; (+) strand; PAM type: NRG; PAM sequence: TAG
  source 1..20: mol_type = other DNA
catccttttttatgactgca

SEQ ID NO: 39282 - DNA, 20 bp, synthetic construct
  misc_feature 1..20: note = Description of Artificial Sequence: Synthetic oligonucleotide
  misc_feature 1..20: note = Target: SCN10A; (+) strand; PAM type: NRG; PAM sequence: TGG
  source 1..20: mol_type = other DNA
tatgactgcatagcattcca

SEQ ID NO: 39283 - DNA, 20 bp, synthetic construct
  misc_feature 1..20: note = Description of Artificial Sequence: Synthetic oligonucleotide
  misc_feature 1..20: note = Target: SCN10A; (+) strand; PAM type: NRG; PAM sequence: AAG
  source 1..20: mol_type = other DNA
ccttctatttcaacttttct

SEQ ID NO: 39284 - DNA, 20 bp, synthetic construct
  misc_feature 1..20: note = Description of Artificial Sequence: Synthetic oligonucleotide
  misc_feature 1..20: note = Target: SCN10A; (+) strand; PAM type: NRG; PAM sequence: TGG
  source 1..20: mol_type = other DNA
taagaatttaaaattataaa

SEQ ID NO: 39285 - DNA, 20 bp, synthetic construct
  misc_feature 1..20: note = Description of Artificial Sequence: Synthetic oligonucleotide
  misc_feature 1..20: note = Target: SCN10A; (+) strand; PAM type: NRG; PAM sequence: TAG
  source 1..20: mol_type = other DNA
taaactttatcaaatgattt

SEQ ID NO: 39286 - DNA, 20 bp, synthetic construct
  misc_feature 1..20: note = Description of Artificial Sequence: Synthetic oligonucleotide
  misc_feature 1..20: note = Target: SCN10A; (+) strand; PAM type: NRG; PAM sequence: AAG
  source 1..20: mol_type = other DNA
aaatgattttagcatcaatt

SEQ ID NO: 39287 - DNA, 20 bp, synthetic construct
  misc_feature 1..20: note = Description of Artificial Sequence: Synthetic oligonucleotide
  misc_feature 1..20: note = Target: SCN10A; (+) strand; PAM type: NRG; PAM sequence: AAG
  source 1..20: mol_type = other DNA
tgattttagcatcaattaag

SEQ ID NO: 39288 - DNA, 20 bp, synthetic construct
  misc_feature 1..20: note = Description of Artificial Sequence: Synthetic oligonucleotide
  misc_feature 1..20: note = Target: SCN10A; (+) strand; PAM type: NRG; PAM sequence: TGG
  source 1..20: mol_type = other DNA
atataacgtattttctgttg

SEQ ID NO: 39289 - DNA, 20 bp, synthetic construct
  misc_feature 1..20: note = Description of Artificial Sequence: Synthetic oligonucleotide
  misc_feature 1..20: note = Target: SCN10A; (+) strand; PAM type: NRG; PAM sequence: TAG
  source 1..20: mol_type = other DNA
gcatgcattactgttatgat

SEQ ID NO: 39290 - DNA, 20 bp, synthetic construct
  misc_feature 1..20: note = Description of Artificial Sequence: Synthetic oligonucleotide
  misc_feature 1..20: note = Target: SCN10A; (+) strand; PAM type: NRG; PAM sequence: AAG
  source 1..20: mol_type = other DNA
aaaaaaaaaaaaaaaaaaaa

SEQ ID NO: 39291 - DNA, 20 bp, synthetic construct
  misc_feature 1..20: note = Description of Artificial Sequence: Synthetic oligonucleotide
  misc_feature 1..20: note = Target: SCN10A; (+) strand; PAM type: NRG; PAM sequence: AAG
  source 1..20: mol_type = other DNA
aaaaaaaaaaaaaaaaaaga

SEQ ID NO: 39292 - DNA, 20 bp, synthetic construct
  misc_feature 1..20: note = Description of Artificial Sequence: Synthetic oligonucleotide
  misc_feature 1..20: note = Target: SCN10A; (+) strand; PAM type: NRG; PAM sequence: AAG
  source 1..20: mol_type = other DNA
aaaaaaaagaaagctctgca

SEQ ID NO: 39293 - DNA, 20 bp, synthetic construct
  misc_feature 1..20: note = Description of Artificial Sequence: Synthetic oligonucleotide
  misc_feature 1..20: note = Target: SCN10A; (+) strand; PAM type: NRG; PAM sequence: AAG
  source 1..20: mol_type = other DNA
agcacctgttattataacca

SEQ ID NO: 39294 - DNA, 20 bp, synthetic construct
  misc_feature 1..20: note = Description of Artificial Sequence: Synthetic oligonucleotide
  misc_feature 1..20: note = Target: SCN10A; (+) strand; PAM type: NRG; PAM sequence: AGG
  source 1..20: mol_type = other DNA
gcacctgttattataaccaa

SEQ ID NO: 39295 - DNA, 20 bp, synthetic construct
  misc_feature 1..20: note = Description of Artificial Sequence: Synthetic oligonucleotide
  misc_feature 1..20: note = Target: SCN10A; (+) strand; PAM type: NRG; PAM sequence: TAG
  source 1..20: mol_type = other DNA
tattataaccaaaggtatgt

SEQ ID NO: 39296 - DNA, 20 bp, synthetic construct
  misc_feature 1..20: note = Description of Artificial Sequence: Synthetic oligonucleotide
  misc_feature 1..20: note = Target: SCN10A; (+) strand; PAM type: NRG; PAM sequence: AGG
  source 1..20: mol_type = other DNA
attataaccaaaggtatgtt

SEQ ID NO: 39297 - DNA, 20 bp, synthetic construct
  misc_feature 1..20: note = Description of Artificial Sequence: Synthetic oligonucleotide
  misc_feature 1..20: note = Target: SCN10A; (+) strand; PAM type: NRG; PAM sequence: AAG
  source 1..20: mol_type = other DNA
accaaaggtatgttaggttc

SEQ ID NO: 39298 - DNA, 20 bp, synthetic construct
  misc_feature 1..20: note = Description of Artificial Sequence: Synthetic oligonucleotide
  misc_feature 1..20: note = Target: SCN10A; (+) strand; PAM type: NRG; PAM sequence: TGG
  source 1..20: mol_type = other DNA
aaggtatgttaggttcaagc

SEQ ID NO: 39299 - DNA, 20 bp, synthetic construct
  misc_feature 1..20: note = Description of Artificial Sequence: Synthetic oligonucleotide
  misc_feature 1..20: note = Target: SCN10A; (+) strand; PAM type: NRG; PAM sequence: GAG
  source 1..20: mol_type = other DNA
ggtatgttaggttcaagctg

SEQ ID NO: 39300 - DNA, 20 bp, synthetic construct
  misc_feature 1..20: note = Description of Artificial Sequence: Synthetic oligonucleotide
  misc_feature 1..20: note = Target: SCN10A; (+) strand; PAM type: NRG; PAM sequence: TGG
  source 1..20: mol_type = other DNA
atgttaggttcaagctggag

SEQ ID NO: 39301 - DNA, 20 bp, synthetic construct
  misc_feature 1..20: note = Description of Artificial Sequence: Synthetic oligonucleotide
  misc_feature 1..20: note = Target: SCN10A; (+) strand; PAM type: NRG; PAM sequence: AAG
  source 1..20: mol_type = other DNA
ttaggttcaagctggagtgg

SEQ ID NO: 39302 - DNA, 20 bp, synthetic construct
  misc_feature 1..20: note = Description of Artificial Sequence: Synthetic oligonucleotide
  misc_feature 1..20: note = Target: SCN10A; (+) strand; PAM type: NRG; PAM sequence: CAG
  source 1..20: mol_type = other DNA
tggagtggaagcatccctcc

SEQ ID NO: 39303 - DNA, 20 bp, synthetic construct
  misc_feature 1..20: note = Description of Artificial Sequence: Synthetic oligonucleotide
  misc_feature 1..20: note = Target: SCN10A; (+) strand; PAM type: NRG; PAM sequence: TGG
  source 1..20: mol_type = other DNA
aagcatccctcccagatgtg

SEQ ID NO: 39304 - DNA, 20 bp, synthetic construct
  misc_feature 1..20: note = Description of Artificial Sequence: Synthetic oligonucleotide
  misc_feature 1..20: note = Target: SCN10A; (+) strand; PAM type: NRG; PAM sequence: TGG
  source 1..20: mol_type = other DNA
ccctcccagatgtgtggata

SEQ ID NO: 39305 - DNA, 20 bp, synthetic construct
  misc_feature 1..20: note = Description of Artificial Sequence: Synthetic oligonucleotide
  misc_feature 1..20: note = Target: SCN10A; (+) strand; PAM type: NRG; PAM sequence: TGG
  source 1..20: mol_type = other DNA
gtgtggatatggaatgtttt

SEQ ID NO: 39306 - DNA, 20 bp, synthetic construct
  misc_feature 1..20: note = Description of Artificial Sequence: Synthetic oligonucleotide
  misc_feature 1..20: note = Target: SCN10A; (+) strand; PAM type: NRG; PAM sequence: CAG
  source 1..20: mol_type = other DNA
gaatgtttttggaaaactcc

SEQ ID NO: 39307 - DNA, 20 bp, synthetic construct
  misc_feature 1..20: note = Description of Artificial Sequence: Synthetic oligonucleotide
  misc_feature 1..20: note = Target: SCN10A; (+) strand; PAM type: NRG; PAM sequence: TAG
  source 1..20: mol_type = other DNA
actcccagattctgaaacta

SEQ ID NO: 39308 - DNA, 20 bp, synthetic construct
  misc_feature 1..20: note = Description of Artificial Sequence: Synthetic oligonucleotide
  misc_feature 1..20: note = Target: SCN10A; (+) strand; PAM type: NRG; PAM sequence: AGG
  source 1..20: mol_type = other DNA
ctcccagattctgaaactat

SEQ ID NO: 39309 - DNA, 20 bp, synthetic construct
  misc_feature 1..20: note = Description of Artificial Sequence: Synthetic oligonucleotide
  misc_feature 1..20: note = Target: SCN10A; (+) strand; PAM type: NRG; PAM sequence: GGG
  source 1..20: mol_type = other DNA
tcccagattctgaaactata

SEQ ID NO: 39310 - DNA, 20 bp, synthetic construct
  misc_feature 1..20: note = Description of Artificial Sequence: Synthetic oligonucleotide
  misc_feature 1..20: note = Target: SCN10A; (+) strand; PAM type: NRG; PAM sequence: GGG
  source 1..20: mol_type = other DNA
cccagattctgaaactatag

SEQ ID NO: 39311 - DNA, 20 bp, synthetic construct
  misc_feature 1..20: note = Description of Artificial Sequence: Synthetic oligonucleotide
  misc_feature 1..20: note = Target: SCN10A; (+) strand; PAM type: NRG; PAM sequence: TAG
  source 1..20: mol_type = other DNA
aggggtttcacccactaacc

SEQ ID NO: 39312 - DNA, 20 bp, synthetic construct
  misc_feature 1..20: note = Description of Artificial Sequence: Synthetic oligonucleotide
  misc_feature 1..20: note = Target: SCN10A; (+) strand; PAM type: NRG; PAM sequence: AGG
  source 1..20: mol_type = other DNA
ggggtttcacccactaacct

SEQ ID NO: 39313 - DNA, 20 bp, synthetic construct
  misc_feature 1..20: note = Description of Artificial Sequence: Synthetic oligonucleotide
  misc_feature 1..20: note = Target: SCN10A; (+) strand; PAM type: NRG; PAM sequence: GGG
  source 1..20: mol_type = other DNA
gggtttcacccactaaccta

SEQ ID NO: 39314 - DNA, 20 bp, synthetic construct
  misc_feature 1..20: note = Description of Artificial Sequence: Synthetic oligonucleotide
  misc_feature 1..20: note = Target: SCN10A; (+) strand; PAM type: NRG; PAM sequence: TAG
  source 1..20: mol_type = other DNA
cacccactaacctagggaaa

SEQ ID NO: 39315 - DNA, 20 bp, synthetic construct
  misc_feature 1..20: note = Description of Artificial Sequence: Synthetic oligonucleotide
  misc_feature 1..20: note = Target: SCN10A; (+) strand; PAM type: NRG; PAM sequence: CAG
  source 1..20: mol_type = other DNA
ctagggaaatagaataactt

SEQ ID NO: 39316 - DNA, 20 bp, synthetic construct
  misc_feature 1..20: note = Description of Artificial Sequence: Synthetic oligonucleotide
  misc_feature 1..20: note = Target: SCN10A; (+) strand; PAM type: NRG; PAM sequence: AGG
  source 1..20: mol_type = other DNA
tagggaaatagaataacttc

SEQ ID NO: 39317 - DNA, 20 bp, synthetic construct
  misc_feature 1..20: note = Description of Artificial Sequence: Synthetic oligonucleotide
  misc_feature 1..20: note = Target: SCN10A; (+) strand; PAM type: NRG; PAM sequence: AAG
  source 1..20: mol_type = other DNA
agaataacttcaggaatact

SEQ ID NO: 39318 - DNA, 20 bp, synthetic construct
  misc_feature 1..20: note = Description of Artificial Sequence: Synthetic oligonucleotide
  misc_feature 1..20: note = Target: SCN10A; (+) strand; PAM type: NRG; PAM sequence: AGG
  source 1..20: mol_type = other DNA
gaataacttcaggaatacta

SEQ ID NO: 39319 - DNA, 20 bp, synthetic construct
  misc_feature 1..20: note = Description of Artificial Sequence: Synthetic oligonucleotide
  misc_feature 1..20: note = Target: SCN10A; (+) strand; PAM type: NRG; PAM sequence: GAG
  source 1..20: mol_type = other DNA
aggaatactaaggttacttt

SEQ ID NO: 39320 - DNA, 20 bp, synthetic construct
  misc_feature 1..20: note = Description of Artificial Sequence: Synthetic oligonucleotide
  misc_feature 1..20: note = Target: SCN10A; (+) strand; PAM type: NRG; PAM sequence: AGG
  source 1..20: mol_type = other DNA
ggaatactaaggttactttg

SEQ ID NO: 39321 - DNA, 20 bp, synthetic construct
  misc_feature 1..20: note = Description of Artificial Sequence: Synthetic oligonucleotide
  misc_feature 1..20: note = Target: SCN10A; (+) strand; PAM type: NRG; PAM sequence: AAG
  source 1..20: mol_type = other DNA
aggttactttgaggcatatg

SEQ ID NO: 39322 - DNA, 20 bp, synthetic construct
  misc_feature 1..20: note = Description of Artificial Sequence: Synthetic oligonucleotide
  misc_feature 1..20: note = Target: SCN10A; (+) strand; PAM type: NRG; PAM sequence: CAG
  source 1..20: mol_type = other DNA
atgaagcatgataacttaaa

SEQ ID NO: 39323 - DNA, 20 bp, synthetic construct
  misc_feature 1..20: note = Description of Artificial Sequence: Synthetic oligonucleotide
  misc_feature 1..20: note = Target: SCN10A; (+) strand; PAM type: NRG; PAM sequence: GAG
  source 1..20: mol_type = other DNA
acttaaacagcttcatttat

SEQ ID NO: 39324 - DNA, 20 bp, synthetic construct
  misc_feature 1..20: note = Description of Artificial Sequence: Synthetic oligonucleotide
  misc_feature 1..20: note = Target: SCN10A; (+) strand; PAM type: NRG; PAM sequence: CAG
  source 1..20: mol_type = other DNA
gttattttctaaatatactc

SEQ ID NO: 39325 - DNA, 20 bp, synthetic construct
  misc_feature 1..20: note = Description of Artificial Sequence: Synthetic oligonucleotide
  misc_feature 1..20: note = Target: SCN10A; (+) strand; PAM type: NRG; PAM sequence: GAG
  source 1..20: mol_type = other DNA
tattttctaaatatactcca

SEQ ID NO: 39326 - DNA, 20 bp, synthetic construct
  misc_feature 1..20: note = Description of Artificial Sequence: Synthetic oligonucleotide
  misc_feature 1..20: note = Target: SCN10A; (+) strand; PAM type: NRG; PAM sequence: TAG
  source 1..20: mol_type = other DNA
actccagagccatttgttct

SEQ ID NO: 39327 - DNA, 20 bp, synthetic construct
  misc_feature 1..20: note = Description of Artificial Sequence: Synthetic oligonucleotide
  misc_feature 1..20: note = Target: SCN10A; (+) strand; PAM type: NRG; PAM sequence: CAG
  source 1..20: mol_type = other DNA
atttgttcttagttctgtct

SEQ ID NO: 39328 - DNA, 20 bp, synthetic construct
  misc_feature 1..20: note = Description of Artificial Sequence: Synthetic oligonucleotide
  misc_feature 1..20: note = Target: SCN10A; (+) strand; PAM type: NRG; PAM sequence: TAG
  source 1..20: mol_type = other DNA
ttgctcctgtctctctttca

SEQ ID NO: 39329 - DNA, 20 bp, synthetic construct
  misc_feature 1..20: note = Description of Artificial Sequence: Synthetic oligonucleotide
  misc_feature 1..20: note = Target: SCN10A; (+) strand; PAM type: NRG; PAM sequence: CAG
  source 1..20: mol_type = other DNA
ctcctgtctctctttcatag

SEQ ID NO: 39330 - DNA, 20 bp, synthetic construct
  misc_feature 1..20: note = Description of Artificial Sequence: Synthetic oligonucleotide
  misc_feature 1..20: note = Target: SCN10A; (+) strand; PAM type: NRG; PAM sequence: AGG
  source 1..20: mol_type = other DNA
tcctgtctctctttcatagc

SEQ ID NO: 39331 - DNA, 20 bp, synthetic construct
  misc_feature 1..20: note = Description of Artificial Sequence: Synthetic oligonucleotide
  misc_feature 1..20: note = Target: SCN10A; (+) strand; PAM type: NRG; PAM sequence: AAG
  source 1..20: mol_type = other DNA
ttcatagcaggccttctcaa

SEQ ID NO: 39332 - DNA, 20 bp, synthetic construct
  misc_feature 1..20: note = Description of Artificial Sequence: Synthetic oligonucleotide
  misc_feature 1..20: note = Target: SCN10A; (+) strand; PAM type: NRG; PAM sequence: AAG
  source 1..20: mol_type = other DNA
ctcaaaagcataccttctct

SEQ ID NO: 39333 - DNA, 20 bp, synthetic construct
  misc_feature 1..20: note = Description of Artificial Sequence: Synthetic oligonucleotide
  misc_feature 1..20: note = Target: SCN10A; (+) strand; PAM type: NRG; PAM sequence: AGG
  source 1..20: mol_type = other DNA
tcaaaagcataccttctcta

SEQ ID NO: 39334 - DNA, 20 bp, synthetic construct
  misc_feature 1..20: note = Description of Artificial Sequence: Synthetic oligonucleotide
  misc_feature 1..20: note = Target: SCN10A; (+) strand; PAM type: NRG; PAM sequence: TAG
  source 1..20: mol_type = other DNA
catacatttgtgtgtgcatc

SEQ ID NO: 39335 - DNA, 20 bp, synthetic construct
  misc_feature 1..20: note = Description of Artificial Sequence: Synthetic oligonucleotide
  misc_feature 1..20: note = Target: SCN10A; (+) strand; PAM type: NRG; PAM sequence: CAG
  source 1..20: mol_type = other DNA
acatttgtgtgtgcatctag

SEQ ID NO: 39336 - DNA, 20 bp, synthetic construct
  misc_feature 1..20: note = Description of Artificial Sequence: Synthetic oligonucleotide
  misc_feature 1..20: note = Target: SCN10A; (+) strand; PAM type: NRG; PAM sequence: AGG
  source 1..20: mol_type = other DNA
catttgtgtgtgcatctagc

SEQ ID NO: 39337 - DNA, 20 bp, synthetic construct
  misc_feature 1..20: note = Description of Artificial Sequence: Synthetic oligonucleotide
  misc_feature 1..20: note = Target: SCN10A; (+) strand; PAM type: NRG; PAM sequence: GAG
  source 1..20: mol_type = other DNA
tgtgtgtgcatctagcaggt

SEQ ID NO: 39338 - DNA, 20 bp, synthetic construct
  misc_feature 1..20: note = Description of Artificial Sequence: Synthetic oligonucleotide
  misc_feature 1..20: note = Target: SCN10A; (+) strand; PAM type: NRG; PAM sequence: GAG
  source 1..20: mol_type = other DNA
tgtgcatctagcaggtgagt

SEQ ID NO: 39339 - DNA, 20 bp, synthetic construct
  misc_feature 1..20: note = Description of Artificial Sequence: Synthetic oligonucleotide
  misc_feature 1..20: note = Target: SCN10A; (+) strand; PAM type: NRG; PAM sequence: TGG
  source 1..20: mol_type = other DNA
gtgagtgagtgtgtgtgtgt

SEQ ID NO: 39340 - DNA, 20 bp, synthetic construct
  misc_feature 1..20: note = Description of Artificial Sequence: Synthetic oligonucleotide
  misc_feature 1..20: note = Target: SCN10A; (+) strand; PAM type: NRG; PAM sequence: GGG
  source 1..20: mol_type = other DNA
tgagtgagtgtgtgtgtgtt

SEQ ID NO: 39341 - DNA, 20 bp, synthetic construct
  misc_feature 1..20: note = Description of Artificial Sequence: Synthetic oligonucleotide
  misc_feature 1..20: note = Target: SCN10A; (+) strand; PAM type: NRG; PAM sequence: GGG
  source 1..20: mol_type = other DNA
gagtgagtgtgtgtgtgttg

SEQ ID NO: 39342 - DNA, 20 bp, synthetic construct
  misc_feature 1..20: note = Description of Artificial Sequence: Synthetic oligonucleotide
  misc_feature 1..20: note = Target: SCN10A; (+) strand; PAM type: NRG; PAM sequence: GGG
  source 1..20: mol_type = other DNA
agtgagtgtgtgtgtgttgg

SEQ ID NO: 39343 - DNA, 20 bp, synthetic construct
  misc_feature 1..20: note = Description of Artificial Sequence: Synthetic oligonucleotide
  misc_feature 1..20: note = Target: SCN10A; (+) strand; PAM type: NRG; PAM sequence: GGG
  source 1..20: mol_type = other DNA
gtgagtgtgtgtgtgttggg

SEQ ID NO: 39344 - DNA, 20 bp, synthetic construct
  misc_feature 1..20: note = Description of Artificial Sequence: Synthetic oligonucleotide
  misc_feature 1..20: note = Target: SCN10A; (+) strand; PAM type: NRG; PAM sequence: GGG
  source 1..20: mol_type = other DNA
tgagtgtgtgtgtgttgggg

SEQ ID NO: 39345 - DNA, 20 bp, synthetic construct
  misc_feature 1..20: note = Description of Artificial Sequence: Synthetic oligonucleotide
  misc_feature 1..20: note = Target: SCN10A; (+) strand; PAM type: NRG; PAM sequence: GGG
  source 1..20: mol_type = other DNA
gagtgtgtgtgtgttggggg

SEQ ID NO: 39346 - DNA, 20 bp, synthetic construct
  misc_feature 1..20: note = Description of Artificial Sequence: Synthetic oligonucleotide
  misc_feature 1..20: note = Target: SCN10A; (+) strand; PAM type: NRG; PAM sequence: GGG
  source 1..20: mol_type = other DNA
agtgtgtgtgtgttgggggg

SEQ ID NO: 39347 - DNA, 20 bp, synthetic construct
  misc_feature 1..20: note = Description of Artificial Sequence: Synthetic oligonucleotide
  misc_feature 1..20: note = Target: SCN10A; (+) strand; PAM type: NRG; PAM sequence: TGG
  source 1..20: mol_type = other DNA
gtgtgtgtgttggggggggg

SEQ ID NO: 39348 - DNA, 20 bp, synthetic construct
  misc_feature 1..20: note = Description of Artificial Sequence: Synthetic oligonucleotide
  misc_feature 1..20: note = Target: SCN10A; (+) strand; PAM type: NRG; PAM sequence: GGG
  source 1..20: mol_type = other DNA
tgtgtgtgttgggggggggt

SEQ ID NO: 39349 - DNA, 20 bp, synthetic construct
  misc_feature 1..20: note = Description of Artificial Sequence: Synthetic oligonucleotide
  misc_feature 1..20: note = Target: SCN10A; (+) strand; PAM type: NRG; PAM sequence: GGG
  source 1..20: mol_type = other DNA
gtgtgtgttgggggggggtg

SEQ ID NO: 39350 - DNA, 20 bp, synthetic construct
  misc_feature 1..20: note = Description of Artificial Sequence: Synthetic oligonucleotide
  misc_feature 1..20: note = Target: SCN10A; (+) strand; PAM type: NRG; PAM sequence: GGG
  source 1..20: mol_type = other DNA
tgtgtgttgggggggggtgg

SEQ ID NO: 39351 - DNA, 20 bp, synthetic construct
  misc_feature 1..20: note = Description of Artificial Sequence: Synthetic oligonucleotide
  misc_feature 1..20: note = Target: SCN10A; (+) strand; PAM type: NRG; PAM sequence: GAG
  source 1..20: mol_type = other DNA
tgttgggggggggtgggggc

SEQ ID NO: 39352 - DNA, 20 bp, synthetic construct
  misc_feature 1..20: note = Description of Artificial Sequence: Synthetic oligonucleotide
  misc_feature 1..20: note = Target: SCN10A; (+) strand; PAM type: NRG; PAM sequence: AGG
  source 1..20: mol_type = other DNA
gttgggggggggtgggggcg

SEQ ID NO: 39353 - DNA, 20 bp, synthetic construct
  misc_feature 1..20: note = Description of Artificial Sequence: Synthetic oligonucleotide
  misc_feature 1..20: note = Target: SCN10A; (+) strand; PAM type: NRG; PAM sequence: GAG
  source 1..20: mol_type = other DNA
tgggggggggtgggggcgag

SEQ ID NO: 39354 - DNA, 20 bp, synthetic construct
  misc_feature 1..20: note = Description of Artificial Sequence: Synthetic oligonucleotide
  misc_feature 1..20: note = Target: SCN10A; (+) strand; PAM type: NRG; PAM sequence: CAG
  source 1..20: mol_type = other DNA
ggcgaggagactcatcttcc

SEQ ID NO: 39355 - DNA, 20 bp, synthetic construct
  misc_feature 1..20: note = Description of Artificial Sequence: Synthetic oligonucleotide
  misc_feature 1..20: note = Target: SCN10A; (+) strand; PAM type: NRG; PAM sequence: AGG
  source 1..20: mol_type = other DNA
gcgaggagactcatcttccc

SEQ ID NO: 39356 - DNA, 20 bp, synthetic construct
  misc_feature 1..20: note = Description of Artificial Sequence: Synthetic oligonucleotide
  misc_feature 1..20: note = Target: SCN10A; (+) strand; PAM type: NRG; PAM sequence: TAG
  source 1..20: mol_type = other DNA
ctcatcttcccaggccacct

SEQ ID NO: 39357 - DNA, 20 bp, synthetic construct
  misc_feature 1..20: note = Description of Artificial Sequence: Synthetic oligonucleotide
  misc_feature 1..20: note = Target: SCN10A; (+) strand; PAM type: NRG; PAM sequence: TGG
  source 1..20: mol_type = other DNA
ccaggccaccttagactttc

SEQ ID NO: 39358 - DNA, 20 bp, synthetic construct
  misc_feature 1..20: note = Description of Artificial Sequence: Synthetic oligonucleotide
  misc_feature 1..20: note = Target: SCN10A; (+) strand; PAM type: NRG; PAM sequence: GGG
  source 1..20: mol_type = other DNA
caggccaccttagactttct

SEQ ID NO: 39359 - DNA, 20 bp, synthetic construct
  misc_feature 1..20: note = Description of Artificial Sequence: Synthetic oligonucleotide
  misc_feature 1..20: note = Target: SCN10A; (+) strand; PAM type: NRG; PAM sequence: GGG
  source 1..20: mol_type = other DNA
aggccaccttagactttctg

SEQ ID NO: 39360 - DNA, 20 bp, synthetic construct
  misc_feature 1..20: note = Description of Artificial Sequence: Synthetic oligonucleotide
  misc_feature 1..20: note = Target: SCN10A; (+) strand; PAM type: NRG; PAM sequence: TGG
  source 1..20: mol_type = other DNA
caccttagactttctggggc

SEQ ID NO: 39361 - DNA, 20 bp, synthetic construct
  misc_feature 1..20: note = Description of Artificial Sequence: Synthetic oligonucleotide
  misc_feature 1..20: note = Target: SCN10A; (+) strand; PAM type: NRG; PAM sequence: GGG
  source 1..20: mol_type = other DNA
accttagactttctggggct

SEQ ID NO: 39362 - DNA, 20 bp, synthetic construct
  misc_feature 1..20: note = Description of Artificial Sequence: Synthetic oligonucleotide
  misc_feature 1..20: note = Target: SCN10A; (+) strand; PAM type: NRG; PAM sequence: CAG
  source 1..20: mol_type = other DNA
gactttctggggctgggact

SEQ ID NO: 39363 - DNA, 20 bp, synthetic construct
  misc_feature 1..20: note = Description of Artificial Sequence: Synthetic oligonucleotide
  misc_feature 1..20: note = Target: SCN10A; (+) strand; PAM type: NRG; PAM sequence: AGG
  source 1..20: mol_type = other DNA
actttctggggctgggactc

SEQ ID NO: 39364 - DNA, 20 bp, synthetic construct
  misc_feature 1..20: note = Description of Artificial Sequence: Synthetic oligonucleotide
  misc_feature 1..20: note = Target: SCN10A; (+) strand; PAM type: NRG; PAM sequence: CAG
  source 1..20: mol_type = other DNA
tccccaaaaattgcaatatg

SEQ ID NO: 39365 - DNA, 20 bp, synthetic construct
  misc_feature 1..20: note = Description of Artificial Sequence: Synthetic oligonucleotide
  misc_feature 1..20: note = Target: SCN10A; (+) strand; PAM type: NRG; PAM sequence: AAG
  source 1..20: mol_type = other DNA
aaaattgcaatatgcagcca

SEQ ID NO: 39366 - DNA, 20 bp, synthetic construct
  misc_feature 1..20: note = Description of Artificial Sequence: Synthetic oligonucleotide
  misc_feature 1..20: note = Target: SCN10A; (+) strand; PAM type: NRG; PAM sequence: GAG
  source 1..20: mol_type = other DNA
tgcaatatgcagccaaagtt

SEQ ID NO: 39367 - DNA, 20 bp, synthetic construct
  misc_feature 1..20: note = Description of Artificial Sequence: Synthetic oligonucleotide
  misc_feature 1..20: note = Target: SCN10A; (+) strand; PAM type: NRG; PAM sequence: CAG
  source 1..20: mol_type = other DNA
tgtttatgaaacaaatctca

SEQ ID NO: 39368 - DNA, 20 bp, synthetic construct
  misc_feature 1..20: note = Description of Artificial Sequence: Synthetic oligonucleotide
  misc_feature 1..20: note = Target: SCN10A; (+) strand; PAM type: NRG; PAM sequence: AAG
  source 1..20: mol_type = other DNA
ttatgaaacaaatctcacag

SEQ ID NO: 39369 - DNA, 20 bp, synthetic construct
  misc_feature 1..20: note = Description of Artificial Sequence: Synthetic oligonucleotide
  misc_feature 1..20: note = Target: SCN10A; (+) strand; PAM type: NRG; PAM sequence: AGG
  source 1..20: mol_type = other DNA
tatgaaacaaatctcacaga

SEQ ID NO: 39370 - DNA, 20 bp, synthetic construct
  misc_feature 1..20: note = Description of Artificial Sequence: Synthetic oligonucleotide
  misc_feature 1..20: note = Target: SCN10A; (+) strand; PAM type: NRG; PAM sequence: GAG
  source 1..20: mol_type = other DNA
tgaaacaaatctcacagaag

SEQ ID NO: 39371 - DNA, 20 bp, synthetic construct
  misc_feature 1..20: note = Description of Artificial Sequence: Synthetic oligonucleotide
  misc_feature 1..20: note = Target: SCN10A; (+) strand; PAM type: NRG; PAM sequence: GAG
  source 1..20: mol_type = other DNA
aaacaaatctcacagaagga

SEQ ID NO: 39372 - DNA, 20 bp, synthetic construct
  misc_feature 1..20: note = Description of Artificial Sequence: Synthetic oligonucleotide
  misc_feature 1..20: note = Target: SCN10A; (+) strand; PAM type: NRG; PAM sequence: TGG
  source 1..20: mol_type = other DNA
atctcacagaaggagagacc

SEQ ID NO: 39373 - DNA, 20 bp, synthetic construct
  misc_feature 1..20: note = Description of Artificial Sequence: Synthetic oligonucleotide
  misc_feature 1..20: note = Target: SCN10A; (+) strand; PAM type: NRG; PAM sequence: AAG
  source 1..20: mol_type = other DNA
ggagagacctggttattaca

SEQ ID NO: 39374 - DNA, 20 bp, synthetic construct
  misc_feature 1..20: note = Description of Artificial Sequence: Synthetic oligonucleotide
  misc_feature 1..20: note = Target: SCN10A; (+) strand; PAM type: NRG; PAM sequence: TAG
  source 1..20: mol_type = other DNA
ctggttattacaaagacata

SEQ ID NO: 39375 - DNA, 20 bp, synthetic construct
  misc_feature 1..20: note = Description of Artificial Sequence: Synthetic oligonucleotide
  misc_feature 1..20: note = Target: SCN10A; (+) strand; PAM type: NRG; PAM sequence: GAG
  source 1..20: mol_type = other DNA
tacaaagacatatagacaat

SEQ ID NO: 39376 - DNA, 20 bp, synthetic construct
  misc_feature 1..20: note = Description of Artificial Sequence: Synthetic oligonucleotide
  misc_feature 1..20: note = Target: SCN10A; (+) strand; PAM type: NRG; PAM sequence: CAG
  source 1..20: mol_type = other DNA
gacatatagacaatgagatt

SEQ ID NO: 39377 - DNA, 20 bp, synthetic construct
  misc_feature 1..20: note = Description of Artificial Sequence: Synthetic oligonucleotide
  misc_feature 1..20: note = Target: SCN10A; (+) strand; PAM type: NRG; PAM sequence: GAG
  source 1..20: mol_type = other DNA
agattcagcattacccacat

SEQ ID NO: 39378 - DNA, 20 bp, synthetic construct
  misc_feature 1..20: note = Description of Artificial Sequence: Synthetic oligonucleotide
  misc_feature 1..20: note = Target: SCN10A; (+) strand; PAM type: NRG; PAM sequence: AGG
  source 1..20: mol_type = other DNA
gattcagcattacccacatg

SEQ ID NO: 39379 - DNA, 20 bp, synthetic construct
  misc_feature 1..20: note = Description of Artificial Sequence: Synthetic oligonucleotide
  misc_feature 1..20: note = Target: SCN10A; (+) strand; PAM type: NRG; PAM sequence: TGG
  source 1..20: mol_type = other DNA
agcattacccacatgaggca

SEQ ID NO: 39380 - DNA, 20 bp, synthetic construct
  misc_feature 1..20: note = Description of Artificial Sequence: Synthetic oligonucleotide
  misc_feature 1..20: note = Target: SCN10A; (+) strand; PAM type: NRG; PAM sequence: CAG
  source 1..20: mol_type = other DNA
attacccacatgaggcatgg

SEQ ID NO: 39381 - DNA, 20 bp, synthetic construct
  misc_feature 1..20: note = Description of Artificial Sequence: Synthetic oligonucleotide
  misc_feature 1..20: note = Target: SCN10A; (+) strand; PAM type: NRG; PAM sequence: AGG
  source 1..20: mol_type = other DNA
ttacccacatgaggcatggc

SEQ ID NO: 39382 - DNA, 20 bp, synthetic construct
  misc_feature 1..20: note = Description of Artificial Sequence: Synthetic oligonucleotide
  misc_feature 1..20: note = Target: SCN10A; (+) strand; PAM type: NRG; PAM sequence: AAG
  source 1..20: mol_type = other DNA
aggcatggcaggataaataa

SEQ ID NO: 39383 - DNA, 20 bp, synthetic construct
  misc_feature 1..20: note = Description of Artificial Sequence: Synthetic oligonucleotide
  misc_feature 1..20: note = Target: SCN10A; (+) strand; PAM type: NRG; PAM sequence: AAG
  source 1..20: mol_type = other DNA
ggcaggataaataaaagaca

SEQ ID NO: 39384 - DNA, 20 bp, synthetic construct
  misc_feature 1..20: note = Description of Artificial Sequence: Synthetic oligonucleotide
  misc_feature 1..20: note = Target: SCN10A; (+) strand; PAM type: NRG; PAM sequence: AAG
  source 1..20: mol_type = other DNA
aataaaagacaaagactgcc

SEQ ID NO: 39385 - DNA, 20 bp, synthetic construct
  misc_feature 1..20: note = Description of Artificial Sequence: Synthetic oligonucleotide
  misc_feature 1..20: note = Target: SCN10A; (+) strand; PAM type: NRG; PAM sequence: AAG
  source 1..20: mol_type = other DNA
aagacaaagactgccaagtg

SEQ ID NO: 39386 - DNA, 20 bp, synthetic construct
  misc_feature 1..20: note = Description of Artificial Sequence: Synthetic oligonucleotide
  misc_feature 1..20: note = Target: SCN10A; (+) strand; PAM type: NRG; PAM sequence: AGG
  source 1..20: mol_type = other DNA
agacaaagactgccaagtga

SEQ ID NO: 39387 - DNA, 20 bp, synthetic construct
  misc_feature 1..20: note = Description of Artificial Sequence: Synthetic oligonucleotide
  misc_feature 1..20: note = Target: SCN10A; (+) strand; PAM type: NRG; PAM sequence: AAG
  source 1..20: mol_type = other DNA
caaagactgccaagtgaagg

SEQ ID NO: 39388 - DNA, 20 bp, synthetic construct
  misc_feature 1..20: note = Description of Artificial Sequence: Synthetic oligonucleotide
  misc_feature 1..20: note = Target: SCN10A; (+) strand; PAM type: NRG; PAM sequence: AAG
  source 1..20: mol_type = other DNA
actgccaagtgaaggaagaa

SEQ ID NO: 39389 - DNA, 20 bp, synthetic construct
  misc_feature 1..20: note = Description of Artificial Sequence: Synthetic oligonucleotide
  misc_feature 1..20: note = Target: SCN10A; (+) strand; PAM type: NRG; PAM sequence: AAG
  source 1..20: mol_type = other DNA
ccaagtgaaggaagaaaaga

SEQ ID NO: 39390 - DNA, 20 bp, synthetic construct
  misc_feature 1..20: note = Description of Artificial Sequence: Synthetic oligonucleotide
  misc_feature 1..20: note = Target: SCN10A; (+) strand; PAM type: NRG; PAM sequence: AAG
  source 1..20: mol_type = other DNA
aaggaagaaaagaaagcaaa

SEQ ID NO: 39391 - DNA, 20 bp, synthetic construct
  misc_feature 1..20: note = Description of Artificial Sequence: Synthetic oligonucleotide
  misc_feature 1..20: note = Target: SCN10A; (+) strand; PAM type: NRG; PAM sequence: GAG
  source 1..20: mol_type = other DNA
ggaagaaaagaaagcaaaaa

SEQ ID NO: 39392 - DNA, 20 bp, synthetic construct
  misc_feature 1..20: note = Description of Artificial Sequence: Synthetic oligonucleotide
  misc_feature 1..20: note = Target: SCN10A; (+) strand; PAM type: NRG; PAM sequence: TGG
  source 1..20: mol_type = other DNA
gaaaagaaagcaaaaagaga

SEQ ID NO: 39393 - DNA, 20 bp, synthetic construct
  misc_feature 1..20: note = Description of Artificial Sequence: Synthetic oligonucleotide
  misc_feature 1..20: note = Target: SCN10A; (+) strand; PAM type: NRG; PAM sequence: TAG
  source 1..20: mol_type = other DNA
aagagatggtacaataatga

SEQ ID NO: 39394 - DNA, 20 bp, synthetic construct
  misc_feature 1..20: note = Description of Artificial Sequence: Synthetic oligonucleotide
  misc_feature 1..20: note = Target: SCN10A; (+) strand; PAM type: NRG; PAM sequence: TGG
  source 1..20: mol_type = other DNA
tctactcactcaattttctc

SEQ ID NO: 39395 - DNA, 20 bp, synthetic construct
  misc_feature 1..20: note = Description of Artificial Sequence: Synthetic oligonucleotide
  misc_feature 1..20: note = Target: SCN10A; (+) strand; PAM type: NRG; PAM sequence: AAG
  source 1..20: mol_type = other DNA
actcactcaattttctctgg

SEQ ID NO: 39396 - DNA, 20 bp, synthetic construct
  misc_feature 1..20: note = Description of Artificial Sequence: Synthetic oligonucleotide
  misc_feature 1..20: note = Target: SCN10A; (+) strand; PAM type: NRG; PAM sequence: AGG
  source 1..20: mol_type = other DNA
ctcactcaattttctctgga

SEQ ID NO: 39397 - DNA, 20 bp, synthetic construct
  misc_feature 1..20: note = Description of Artificial Sequence: Synthetic oligonucleotide
  misc_feature 1..20: note = Target: SCN10A; (+) strand; PAM type: NRG; PAM sequence: CAG
  source 1..20: mol_type = other DNA
ctcaattttctctggaaggt

SEQ ID NO: 39398 - DNA, 20 bp, synthetic construct
  misc_feature 1..20: note = Description of Artificial Sequence: Synthetic oligonucleotide
  misc_feature 1..20: note = Target: SCN10A; (+) strand; PAM type: NRG; PAM sequence: CGG
  source 1..20: mol_type = other DNA
ttttctctggaaggtcagtt

SEQ ID NO: 39399 - DNA, 20 bp, synthetic construct
  misc_feature 1..20: note = Description of Artificial Sequence: Synthetic oligonucleotide
  misc_feature 1..20: note = Target: SCN10A; (+) strand; PAM type: NRG; PAM sequence: GGG
  source 1..20: mol_type = other DNA
tttctctggaaggtcagttc

SEQ ID NO: 39400 - DNA, 20 bp, synthetic construct
  misc_feature 1..20: note = Description of Artificial Sequence: Synthetic oligonucleotide
  misc_feature 1..20: note = Target: SCN10A; (+) strand; PAM type: NRG; PAM sequence: TAG
  source 1..20: mol_type = other DNA
gcacacacaattaaccaaaa

SEQ ID NO: 39401 - DNA, 20 bp, synthetic construct
  misc_feature 1..20: note = Description of Artificial Sequence: Synthetic oligonucleotide
  misc_feature 1..20: note = Target: SCN10A; (+) strand; PAM type: NRG; PAM sequence: AAG
  source 1..20: mol_type = other DNA
aaataaactgaaccacctga

SEQ ID NO: 39402 - DNA, 20 bp, synthetic construct
  misc_feature 1..20: note = Description of Artificial Sequence: Synthetic oligonucleotide
  misc_feature 1..20: note = Target: SCN10A; (+) strand; PAM type: NRG; PAM sequence: AGG
  source 1..20: mol_type = other DNA
aataaactgaaccacctgaa

SEQ ID NO: 39403 - DNA, 20 bp, synthetic construct
  misc_feature 1..20: note = Description of Artificial Sequence: Synthetic oligonucleotide
  misc_feature 1..20: note = Target: SCN10A; (+) strand; PAM type: NRG; PAM sequence: AAG
  source 1..20: mol_type = other DNA
ccacctgaaaggcctgtgtt

SEQ ID NO: 39404 - DNA, 20 bp, synthetic construct
  misc_feature 1..20: note = Description of Artificial Sequence: Synthetic oligonucleotide
  misc_feature 1..20: note = Target: SCN10A; (+) strand; PAM type: NRG; PAM sequence: AGG
  source 1..20: mol_type = other DNA
cacctgaaaggcctgtgtta

SEQ ID NO: 39405 - DNA, 20 bp, synthetic construct
  misc_feature 1..20: note = Description of Artificial Sequence: Synthetic oligonucleotide
  misc_feature 1..20: note = Target: SCN10A; (+) strand; PAM type: NRG; PAM sequence: AAG
  source 1..20: mol_type = other DNA
gaaaggcctgtgttaaggaa

SEQ ID NO: 39406 - DNA, 20 bp, synthetic construct
  misc_feature 1..20: note = Description of Artificial Sequence: Synthetic oligonucleotide
  misc_feature 1..20: note = Target: SCN10A; (+) strand; PAM type: NRG; PAM sequence: GAG
  source 1..20: mol_type = other DNA
gcctgtgttaaggaaaagct

SEQ ID NO: 39407 - DNA, 20 bp, synthetic construct
  misc_feature 1..20: note = Description of Artificial Sequence: Synthetic oligonucleotide
  misc_feature 1..20: note = Target: SCN10A; (+) strand; PAM type: NRG; PAM sequence: AAG
  source 1..20: mol_type = other DNA
aaggaaaagctgagatcacc

SEQ ID NO: 39408 - DNA, 20 bp, synthetic construct
  misc_feature 1..20: note = Description of Artificial Sequence: Synthetic oligonucleotide
  misc_feature 1..20: note = Target: SCN10A; (+) strand; PAM type: NRG; PAM sequence: TAG
  source 1..20: mol_type = other DNA
caagtctctgtgatgtcatc

SEQ ID NO: 39409 - DNA, 20 bp, synthetic construct
  misc_feature 1..20: note = Description of Artificial Sequence: Synthetic oligonucleotide
  misc_feature 1..20: note = Target: SCN10A; (+) strand; PAM type: NRG; PAM sequence: AGG
  source 1..20: mol_type = other DNA
aagtctctgtgatgtcatct

SEQ ID NO: 39410 - DNA, 20 bp, synthetic construct
  misc_feature 1..20: note = Description of Artificial Sequence: Synthetic oligonucleotide
  misc_feature 1..20: note = Target: SCN10A; (+) strand; PAM type: NRG; PAM sequence: TAG
  source 1..20: mol_type = other DNA
atgattacattcataaatct

SEQ ID NO: 39411 - DNA, 20 bp, synthetic construct
  misc_feature 1..20: note = Description of Artificial Sequence: Synthetic oligonucleotide
  misc_feature 1..20: note = Target: SCN10A; (+) strand; PAM type: NRG; PAM sequence: TAG
  source 1..20: mol_type = other DNA
tcataaatcttagccaatat

SEQ ID NO: 39412 - DNA, 20 bp, synthetic construct
  misc_feature 1..20: note = Description of Artificial Sequence: Synthetic oligonucleotide
  misc_feature 1..20: note = Target: SCN10A; (+) strand; PAM type: NRG; PAM sequence: GAG
  source 1..20: mol_type = other DNA
aataaccactaacatttact

SEQ ID NO: 39413 - DNA, 20 bp, synthetic construct
  misc_feature 1..20: note = Description of Artificial Sequence: Synthetic oligonucleotide
  misc_feature 1..20: note = Target: SCN10A; (+) strand; PAM type: NRG; PAM sequence: AAG
  source 1..20: mol_type = other DNA
ctaacatttactgagtgcct

SEQ ID NO: 39414 - DNA, 20 bp, synthetic construct
  misc_feature 1..20: note = Description of Artificial Sequence: Synthetic oligonucleotide
  misc_feature 1..20: note = Target: SCN10A; (+) strand; PAM type: NRG; PAM sequence: TAG
  source 1..20: mol_type = other DNA
catttactgagtgcctaagc

SEQ ID NO: 39415 - DNA, 20 bp, synthetic construct
  misc_feature 1..20: note = Description of Artificial Sequence: Synthetic oligonucleotide
  misc_feature 1..20: note = Target: SCN10A; (+) strand; PAM type: NRG; PAM sequence: AGG
  source 1..20: mol_type = other DNA
atttactgagtgcctaagct

SEQ ID NO: 39416 - DNA, 20 bp, synthetic construct
  misc_feature 1..20: note = Description of Artificial Sequence: Synthetic oligonucleotide
  misc_feature 1..20: note = Target: SCN10A; (+) strand; PAM type: NRG; PAM sequence: GAG
  source 1..20: mol_type = other DNA
ctgagtgcctaagctaggct

SEQ ID NO: 39417 - DNA, 20 bp, synthetic construct
  misc_feature 1..20: note = Description of Artificial Sequence: Synthetic oligonucleotide
  misc_feature 1..20: note = Target: SCN10A; (+) strand; PAM type: NRG; PAM sequence: CAG
  source 1..20: mol_type = other DNA
cttctaatacaactgatcta

SEQ ID NO: 39418 - DNA, 20 bp, synthetic construct
  misc_feature 1..20: note = Description of Artificial Sequence: Synthetic oligonucleotide
  misc_feature 1..20: note = Target: SCN10A; (+) strand; PAM type: NRG; PAM sequence: AGG
  source 1..20: mol_type = other DNA
ttctaatacaactgatctac

SEQ ID NO: 39419 - DNA, 20 bp, synthetic construct
  misc_feature 1..20: note = Description of Artificial Sequence: Synthetic oligonucleotide
  misc_feature 1..20: note = Target: SCN10A; (+) strand; PAM type: NRG; PAM sequence: TGG
  source 1..20: mol_type = other DNA
taatacaactgatctacagg

SEQ ID NO: 39420 - DNA, 20 bp, synthetic construct
  misc_feature 1..20: note = Description of Artificial Sequence: Synthetic oligonucleotide
  misc_feature 1..20: note = Target: SCN10A; (+) strand; PAM type: NRG; PAM sequence: GGG
  source 1..20: mol_type = other DNA
aatacaactgatctacaggt

SEQ ID NO: 39421 - DNA, 20 bp, synthetic construct
  misc_feature 1..20: note = Description of Artificial Sequence: Synthetic oligonucleotide
  misc_feature 1..20: note = Target: SCN10A; (+) strand; PAM type: NRG; PAM sequence: AAG
  source 1..20: mol_type = other DNA
gtataaatatctacattttg

SEQ ID NO: 39422 - DNA, 20 bp, synthetic construct
  misc_feature 1..20: note = Description of Artificial Sequence: Synthetic oligonucleotide
  misc_feature 1..20: note = Target: SCN10A; (+) strand; PAM type: NRG; PAM sequence: GAG
  source 1..20: mol_type = other DNA
aatatctacattttgaagct

SEQ ID NO: 39423 - DNA, 20 bp, synthetic construct
  misc_feature 1..20: note = Description of Artificial Sequence: Synthetic oligonucleotide
  misc_feature 1..20: note = Target: SCN10A; (+) strand; PAM type: NRG; PAM sequence: CAG
  source 1..20: mol_type = other DNA
tacattttgaagctgagaaa

SEQ ID NO: 39424 - DNA, 20 bp, synthetic construct
  misc_feature 1..20: note = Description of Artificial Sequence: Synthetic oligonucleotide
  misc_feature 1..20: note = Target: SCN10A; (+) strand; PAM type: NRG; PAM sequence: AGG
  source 1..20: mol_type = other DNA
acattttgaagctgagaaac

SEQ ID NO: 39425 - DNA, 20 bp, synthetic construct
  misc_feature 1..20: note = Description of Artificial Sequence: Synthetic oligonucleotide
  misc_feature 1..20: note = Target: SCN10A; (+) strand; PAM type: NRG; PAM sequence: AAG
  source 1..20: mol_type = other DNA
aacaggctgacaaaaaataa

SEQ ID NO: 39426 - DNA, 20 bp, synthetic construct
  misc_feature 1..20: note = Description of Artificial Sequence: Synthetic oligonucleotide
  misc_feature 1..20: note = Target: SCN10A; (+) strand; PAM type: NRG; PAM sequence: CAG
  source 1..20: mol_type = other DNA
aaaagttaaataacttttct

SEQ ID NO: 39427 - DNA, 20 bp, synthetic construct
  misc_feature 1..20: note = Description of Artificial Sequence: Synthetic oligonucleotide
  misc_feature 1..20: note = Target: SCN10A; (+) strand; PAM type: NRG; PAM sequence: AGG
  source 1..20: mol_type = other DNA
aaagttaaataacttttctc

SEQ ID NO: 39428 - DNA, 20 bp, synthetic construct
  misc_feature 1..20: note = Description of Artificial Sequence: Synthetic oligonucleotide
  misc_feature 1..20: note = Target: SCN10A; (+) strand; PAM type: NRG; PAM sequence: CAG
  source 1..20: mol_type = other DNA
ataacttttctcaggtcatg

SEQ ID NO: 39429 - DNA, 20 bp, synthetic construct
  misc_feature 1..20: note = Description of Artificial Sequence: Synthetic oligonucleotide
  misc_feature 1..20: note = Target: SCN10A; (+) strand; PAM type: NRG; PAM sequence: TAG
  source 1..20: mol_type = other DNA
cttttctcaggtcatgcagc

SEQ ID NO: 39430 - DNA, 20 bp, synthetic construct
  misc_feature 1..20: note = Description of Artificial Sequence: Synthetic oligonucleotide
  misc_feature 1..20: note = Target: SCN10A; (+) strand; PAM type: NRG; PAM sequence: CAG
  source 1..20: mol_type = other DNA
gcagctagtcaaccatgctg

SEQ ID NO: 39431 - DNA, 20 bp, synthetic construct
  misc_feature 1..20: note = Description of Artificial Sequence: Synthetic oligonucleotide
  misc_feature 1..20: note = Target: SCN10A; (+) strand; PAM type: NRG; PAM sequence: GAG
  source 1..20: mol_type = other DNA
agctagtcaaccatgctgca

SEQ ID NO: 39432 - DNA, 20 bp, synthetic construct
  misc_feature 1..20: note = Description of Artificial Sequence: Synthetic oligonucleotide
  misc_feature 1..20: note = Target: SCN10A; (+) strand; PAM type: NRG; PAM sequence: GAG
  source 1..20: mol_type = other DNA
tctgtttgataacaaactct

SEQ ID NO: 39433 - DNA, 20 bp, synthetic construct
  misc_feature 1..20: note = Description of Artificial Sequence: Synthetic oligonucleotide
  misc_feature 1..20: note = Target: SCN10A; (+) strand; PAM type: NRG; PAM sequence: AAG
  source 1..20: mol_type = other DNA
tttgataacaaactctgagc

SEQ ID NO: 39434 - DNA, 20 bp, synthetic construct
  misc_feature 1..20: note = Description of Artificial Sequence: Synthetic oligonucleotide
  misc_feature 1..20: note = Target: SCN10A; (+) strand; PAM type: NRG; PAM sequence: TAG
  source 1..20: mol_type = other DNA
ataacaaactctgagcaaga

SEQ ID NO: 39435 - DNA, 20 bp, synthetic construct
  misc_feature 1..20: note = Description of Artificial Sequence: Synthetic oligonucleotide
  misc_feature 1..20: note = Target: SCN10A; (+) strand; PAM type: NRG; PAM sequence: AAG
  source 1..20: mol_type = other DNA
acaaactctgagcaagatag

SEQ ID NO: 39436 - DNA, 20 bp, synthetic construct
  misc_feature 1..20: note = Description of Artificial Sequence: Synthetic oligonucleotide
  misc_feature 1..20: note = Target: SCN10A; (+) strand; PAM type: NRG; PAM sequence: AGG
  source 1..20: mol_type = other DNA
caaactctgagcaagataga

SEQ ID NO: 39437 - DNA, 20 bp, synthetic construct
  misc_feature 1..20: note = Description of Artificial Sequence: Synthetic oligonucleotide
  misc_feature 1..20: note = Target: SCN10A; (+) strand; PAM type: NRG; PAM sequence: CAG
  source 1..20: mol_type = other DNA
ctgagcaagatagaaggaaa

SEQ ID NO: 39438 - DNA, 20 bp, synthetic construct
  misc_feature 1..20: note = Description of Artificial Sequence: Synthetic oligonucleotide
  misc_feature 1..20: note = Target: SCN10A; (+) strand; PAM type: NRG; PAM sequence: AAG
  source 1..20: mol_type = other DNA
caaaatgtccttctgccccg

SEQ ID NO: 39439 - DNA, 20 bp, synthetic construct
  misc_feature 1..20: note = Description of Artificial Sequence: Synthetic oligonucleotide
  misc_feature 1..20: note = Target: SCN10A; (+) strand; PAM type: NRG; PAM sequence: CAG
  source 1..20: mol_type = other DNA
ctgccccgaagccttcattt

SEQ ID NO: 39440 - DNA, 20 bp, synthetic construct
  misc_feature 1..20: note = Description of Artificial Sequence: Synthetic oligonucleotide
  misc_feature 1..20: note = Target: SCN10A; (+) strand; PAM type: NRG; PAM sequence: TGG
  source 1..20: mol_type = other DNA
cttcatttcagtatacaaaa

SEQ ID NO: 39441 - DNA, 20 bp, synthetic construct
  misc_feature 1..20: note = Description of Artificial Sequence: Synthetic oligonucleotide
  misc_feature 1..20: note = Target: SCN10A; (+) strand; PAM type: NRG; PAM sequence: TGG
  source 1..20: mol_type = other DNA
aaatggcctgaaatttcatc

SEQ ID NO: 39442 - DNA, 20 bp, synthetic construct
  misc_feature 1..20: note = Description of Artificial Sequence: Synthetic oligonucleotide
  misc_feature 1..20: note = Target: SCN10A; (+) strand; PAM type: NRG; PAM sequence: AAG
  source 1..20: mol_type = other DNA
aaatgtcttttttattctaa

SEQ ID NO: 39443 - DNA, 20 bp, synthetic construct
  misc_feature 1..20: note = Description of Artificial Sequence: Synthetic oligonucleotide
  misc_feature 1..20: note = Target: SCN10A; (+) strand; PAM type: NRG; PAM sequence: AAG
  source 1..20: mol_type = other DNA
cttttttattctaaaagaca

SEQ ID NO: 39444 - DNA, 20 bp, synthetic construct
  misc_feature 1..20: note = Description of Artificial Sequence: Synthetic oligonucleotide
  misc_feature 1..20: note = Target: SCN10A; (+) strand; PAM type: NRG; PAM sequence: AAG
  source 1..20: mol_type = other DNA
ttattctaaaagacaaagaa

SEQ ID NO: 39445 - DNA, 20 bp, synthetic construct
  misc_feature 1..20: note = Description of Artificial Sequence: Synthetic oligonucleotide
  misc_feature 1..20: note = Target: SCN10A; (+) strand; PAM type: NRG; PAM sequence: TAG
  source 1..20: mol_type = other DNA
tctaaaagacaaagaaaagt

SEQ ID NO: 39446 - DNA, 20 bp, synthetic construct
  misc_feature 1..20: note = Description of Artificial Sequence: Synthetic oligonucleotide
  misc_feature 1..20: note = Target: SCN10A; (+) strand; PAM type: NRG; PAM sequence: TGG
  source 1..20: mol_type = other DNA
acaaagaaaagttagaaact

SEQ ID NO: 39447 - DNA, 20 bp, synthetic construct
  misc_feature 1..20: note = Description of Artificial Sequence: Synthetic oligonucleotide
  misc_feature 1..20: note = Target: SCN10A; (+) strand; PAM type: NRG; PAM sequence: GAG
  source 1..20: mol_type = other DNA
aaagaaaagttagaaacttg

SEQ ID NO: 39448 - DNA, 20 bp, synthetic construct
  misc_feature 1..20: note = Description of Artificial Sequence: Synthetic oligonucleotide
  misc_feature 1..20: note = Target: SCN10A; (+) strand; PAM type: NRG; PAM sequence: AAG
  source 1..20: mol_type = other DNA
aaagttagaaacttggagat

SEQ ID NO: 39449 - DNA, 20 bp, synthetic construct
  misc_feature 1..20: note = Description of Artificial Sequence: Synthetic oligonucleotide
  misc_feature 1..20: note = Target: SCN10A; (+) strand; PAM type: NRG; PAM sequence: AAG
  source 1..20: mol_type = other DNA
tagaaacttggagataagtg

SEQ ID NO: 39450 - DNA, 20 bp, synthetic construct
  misc_feature 1..20: note = Description of Artificial Sequence: Synthetic oligonucleotide
  misc_feature 1..20: note = Target: SCN10A; (+) strand; PAM type: NRG; PAM sequence: GAG
  source 1..20: mol_type = other DNA
gaaacttggagataagtgaa

SEQ ID NO: 39451 - DNA, 20 bp, synthetic construct
  misc_feature 1..20: note = Description of Artificial Sequence: Synthetic oligonucleotide
  misc_feature 1..20: note = Target: SCN10A; (+) strand; PAM type: NRG; PAM sequence: AGG
  source 1..20: mol_type = other DNA
aaacttggagataagtgaag

SEQ ID NO: 39452 - DNA, 20 bp, synthetic construct
  misc_feature 1..20: note = Description of Artificial Sequence: Synthetic oligonucleotide
  misc_feature 1..20: note = Target: SCN10A; (+) strand; PAM type: NRG; PAM sequence: TGG
  source 1..20: mol_type = other DNA
tgaagaggtacaaactttca

SEQ ID NO: 39453 - DNA, 20 bp, synthetic construct
  misc_feature 1..20: note = Description of Artificial Sequence: Synthetic oligonucleotide
  misc_feature 1..20: note = Target: SCN10A; (+) strand; PAM type: NRG; PAM sequence: GGG
  source 1..20: mol_type = other DNA
gaagaggtacaaactttcat

SEQ ID NO: 39454 - DNA, 20 bp, synthetic construct
  misc_feature 1..20: note = Description of Artificial Sequence: Synthetic oligonucleotide
  misc_feature 1..20: note = Target: SCN10A; (+) strand; PAM type: NRG; PAM sequence: TAG
  source 1..20: mol_type = other DNA
gtacaaactttcatgggaat

SEQ ID NO: 39455 - DNA, 20 bp, synthetic construct
  misc_feature 1..20: note = Description of Artificial Sequence: Synthetic oligonucleotide
  misc_feature 1..20: note = Target: SCN10A; (+) strand; PAM type: NRG; PAM sequence: CAG
  source 1..20: mol_type = other DNA
ttcatgggaattagtttcat

SEQ ID NO: 39456 - DNA, 20 bp, synthetic construct
  misc_feature 1..20: note = Description of Artificial Sequence: Synthetic oligonucleotide
  misc_feature 1..20: note = Target: SCN10A; (+) strand; PAM type: NRG; PAM sequence: TGG
  source 1..20: mol_type = other DNA
attagtttcatcagattgtt

SEQ ID NO: 39457 - DNA, 20 bp, synthetic construct
  misc_feature 1..20: note = Description of Artificial Sequence: Synthetic oligonucleotide
  misc_feature 1..20: note = Target: SCN10A; (+) strand; PAM type: NRG; PAM sequence: GGG
  source 1..20: mol_type = other DNA
ttagtttcatcagattgttt

SEQ ID NO: 39458 - DNA, 20 bp, synthetic construct
  misc_feature 1..20: note = Description of Artificial Sequence: Synthetic oligonucleotide
  misc_feature 1..20: note = Target: SCN10A; (+) strand; PAM type: NRG; PAM sequence: TAG
  source 1..20: mol_type = other DNA
atcagattgtttgggtaact

SEQ ID NO: 39459 - DNA, 20 bp, synthetic construct
  misc_feature 1..20: note = Description of Artificial Sequence: Synthetic oligonucleotide
  misc_feature 1..20: note = Target: SCN10A; (+) strand; PAM type: NRG; PAM sequence: GAG
  source 1..20: mol_type = other DNA
attgtttgggtaacttagtt

SEQ ID NO: 39460 - DNA, 20 bp, synthetic construct
  misc_feature 1..20: note = Description of Artificial Sequence: Synthetic oligonucleotide
  misc_feature 1..20: note = Target: SCN10A; (+) strand; PAM type: NRG; PAM sequence: CAG
  source 1..20: mol_type = other DNA
ttgggtaacttagttgagat

SEQ ID NO: 39461 - DNA, 20 bp, synthetic construct
  misc_feature 1..20: note = Description of Artificial Sequence: Synthetic oligonucleotide
  misc_feature 1..20: note = Target: SCN10A; (+) strand; PAM type: NRG; PAM sequence: GAG
  source 1..20: mol_type = other DNA
tagttgagatcagttccacc

SEQ ID NO: 39462 - DNA, 20 bp, synthetic construct
  misc_feature 1..20: note = Description of Artificial Sequence: Synthetic oligonucleotide
  misc_feature 1..20: note = Target: SCN10A; (+) strand; PAM type: NRG; PAM sequence: AGG
  source 1..20: mol_type = other DNA
agttgagatcagttccaccg

SEQ ID NO: 39463 - DNA, 20 bp, synthetic construct
  misc_feature 1..20: note = Description of Artificial Sequence: Synthetic oligonucleotide
  misc_feature 1..20: note = Target: SCN10A; (+) strand; PAM type: NRG; PAM sequence: TGG
  source 1..20: mol_type = other DNA
gatcagttccaccgaggaaa

SEQ ID NO: 39464 - DNA, 20 bp, synthetic construct
  misc_feature 1..20: note = Description of Artificial Sequence: Synthetic oligonucleotide
  misc_feature 1..20: note = Target: SCN10A; (+) strand; PAM type: NRG; PAM sequence: TGG
  source 1..20: mol_type = other DNA
ccaccgaggaaatggtcttc

SEQ ID NO: 39465 - DNA, 20 bp, synthetic construct
  misc_feature 1..20: note = Description of Artificial Sequence: Synthetic oligonucleotide
  misc_feature 1..20: note = Target: SCN10A; (+) strand; PAM type: NRG; PAM sequence: GGG
  source 1..20: mol_type = other DNA
caccgaggaaatggtcttct

SEQ ID NO: 39466 - DNA, 20 bp, synthetic construct
  misc_feature 1..20: note = Description of Artificial Sequence: Synthetic oligonucleotide
  misc_feature 1..20: note = Target: SCN10A; (+) strand; PAM type: NRG; PAM sequence: TAG
  source 1..20: mol_type = other DNA
cgaggaaatggtcttctggg

SEQ ID NO: 39467 - DNA, 20 bp, synthetic construct
  misc_feature 1..20: note = Description of Artificial Sequence: Synthetic oligonucleotide
  misc_feature 1..20: note = Target: SCN10A; (+) strand; PAM type: NRG; PAM sequence: AGG
  source 1..20: mol_type = other DNA
gaggaaatggtcttctgggt

SEQ ID NO: 39468 - DNA, 20 bp, synthetic construct
  misc_feature 1..20: note = Description of Artificial Sequence: Synthetic oligonucleotide
  misc_feature 1..20: note = Target: SCN10A; (+) strand; PAM type: NRG; PAM sequence: CGG
  source 1..20: mol_type = other DNA
aatggtcttctgggtaggaa

SEQ ID NO: 39469 - DNA, 20 bp, synthetic construct
  misc_feature 1..20: note = Description of Artificial Sequence: Synthetic oligonucleotide
  misc_feature 1..20: note = Target: SCN10A; (+) strand; PAM type: NRG; PAM sequence: TGG
  source 1..20: mol_type = other DNA
ggtcttctgggtaggaacgg

SEQ ID NO: 39470 - DNA, 20 bp, synthetic construct
  misc_feature 1..20: note = Description of Artificial Sequence: Synthetic oligonucleotide
  misc_feature 1..20: note = Target: SCN10A; (+) strand; PAM type: NRG; PAM sequence: GAG
  source 1..20: mol_type = other DNA
tcttctgggtaggaacggtg

SEQ ID NO: 39471 - DNA, 20 bp, synthetic construct
  misc_feature 1..20: note = Description of Artificial Sequence: Synthetic oligonucleotide
  misc_feature 1..20: note = Target: SCN10A; (+) strand; PAM type: NRG; PAM sequence: AGG
  source 1..20: mol_type = other DNA
cttctgggtaggaacggtgg

SEQ ID NO: 39472 - DNA, 20 bp, synthetic construct
  misc_feature 1..20: note = Description of Artificial Sequence: Synthetic oligonucleotide
  misc_feature 1..20: note = Target: SCN10A; (+) strand; PAM type: NRG; PAM sequence: CAG
  source 1..20: mol_type = other DNA
ctgggtaggaacggtggagg

SEQ ID NO: 39473 - DNA, 20 bp, synthetic construct
  misc_feature 1..20: note = Description of Artificial Sequence: Synthetic oligonucleotide
  misc_feature 1..20: note = Target: SCN10A; (+) strand; PAM type: NRG; PAM sequence: AGG
  source 1..20: mol_type = other DNA
tgggtaggaacggtggaggc

SEQ ID NO: 39474 - DNA, 20 bp, synthetic construct
  misc_feature 1..20: note = Description of Artificial Sequence: Synthetic oligonucleotide
  misc_feature 1..20: note = Target: SCN10A; (+) strand; PAM type: NRG; PAM sequence: CAG
  source 1..20: mol_type = other DNA
aggaacggtggaggcaggca

SEQ ID NO: 39475 - DNA, 20 bp, synthetic construct
  misc_feature 1..20: note = Description of Artificial Sequence: Synthetic oligonucleotide
  misc_feature 1..20: note = Target: SCN10A; (+) strand; PAM type: NRG; PAM sequence: AGG
  source 1..20: mol_type = other DNA
ggaacggtggaggcaggcac

SEQ ID NO: 39476 - DNA, 20 bp, synthetic construct
  misc_feature 1..20: note = Description of Artificial Sequence: Synthetic oligonucleotide
  misc_feature 1..20: note = Target: SCN10A; (+) strand; PAM type: NRG; PAM sequence: GGG
  source 1..20: mol_type = other DNA
gaacggtggaggcaggcaca

SEQ ID NO: 39477 - DNA, 20 bp, synthetic construct
  misc_feature 1..20: note = Description of Artificial Sequence: Synthetic oligonucleotide
  misc_feature 1..20: note = Target: SCN10A; (+) strand; PAM type: NRG; PAM sequence: TGG
  source 1..20: mol_type = other DNA
ggcacagggaaatgaaatac

SEQ ID NO: 39478 - DNA, 20 bp, synthetic construct
  misc_feature 1..20: note = Description of Artificial Sequence: Synthetic oligonucleotide
  misc_feature 1..20: note = Target: SCN10A; (+) strand; PAM type: NRG; PAM sequence: CAG
  source 1..20: mol_type = other DNA
agggaaatgaaatactggct

SEQ ID NO: 39479 - DNA, 20 bp, synthetic construct
  misc_feature 1..20: note = Description of Artificial Sequence: Synthetic oligonucleotide
  misc_feature 1..20: note = Target: SCN10A; (+) strand; PAM type: NRG; PAM sequence: AGG
  source 1..20: mol_type = other DNA
gggaaatgaaatactggctc

SEQ ID NO: 39480 - DNA, 20 bp, synthetic construct
  misc_feature 1..20: note = Description of Artificial Sequence: Synthetic oligonucleotide
  misc_feature 1..20: note = Target: SCN10A; (+) strand; PAM type: NRG; PAM sequence: AAG
  source 1..20: mol_type = other DNA
aaatgaaatactggctcagg

SEQ ID NO: 39481 - DNA, 20 bp, synthetic construct
  misc_feature 1..20: note = Description of Artificial Sequence: Synthetic oligonucleotide
  misc_feature 1..20: note = Target: SCN10A; (+) strand; PAM type: NRG; PAM sequence: AAG
  source 1..20: mol_type = other DNA
tggctcaggaagaaaacccc

SEQ ID NO: 39482 - DNA, 20 bp, synthetic construct
  misc_feature 1..20: note = Description of Artificial Sequence: Synthetic oligonucleotide
  misc_feature 1..20: note = Target: SCN10A; (+) strand; PAM type: NRG; PAM sequence: TAG
  source 1..20: mol_type = other DNA
ctcaggaagaaaaccccaag

SEQ ID NO: 39483 - DNA, 20 bp, synthetic construct
  misc_feature 1..20: note = Description of Artificial Sequence: Synthetic oligonucleotide
  misc_feature 1..20: note = Target: SCN10A; (+) strand; PAM type: NRG; PAM sequence: AGG
  source 1..20: mol_type = other DNA
tcaggaagaaaaccccaagt

SEQ ID NO: 39484 - DNA, 20 bp, synthetic construct
  misc_feature 1..20: note = Description of Artificial Sequence: Synthetic oligonucleotide
  misc_feature 1..20: note = Target: SCN10A; (+) strand; PAM type: NRG; PAM sequence: TAG
  source 1..20: mol_type = other DNA
aagaaaaccccaagtaggat

SEQ ID NO: 39485 - DNA, 20 bp, synthetic construct
  misc_feature 1..20: note = Description of Artificial Sequence: Synthetic oligonucleotide
  misc_feature 1..20: note = Target: SCN10A; (+) strand; PAM type: NRG; PAM sequence: AGG
  source 1..20: mol_type = other DNA
agaaaaccccaagtaggatt

SEQ ID NO: 39486 - DNA, 20 bp, synthetic construct
  misc_feature 1..20: note = Description of Artificial Sequence: Synthetic oligonucleotide
  misc_feature 1..20: note = Target: SCN10A; (+) strand; PAM type: NRG; PAM sequence: TGG
  source 1..20: mol_type = other DNA
aaccccaagtaggattaggc

SEQ ID NO: 39487 - DNA, 20 bp, synthetic construct
  misc_feature 1..20: note = Description of Artificial Sequence: Synthetic oligonucleotide
  misc_feature 1..20: note = Target: SCN10A; (+) strand; PAM type: NRG; PAM sequence: GAG
  source 1..20: mol_type = other DNA
ccccaagtaggattaggctg

SEQ ID NO: 39488 - DNA, 20 bp, synthetic construct
  misc_feature 1..20: note = Description of Artificial Sequence: Synthetic oligonucleotide
  misc_feature 1..20: note = Target: SCN10A; (+) strand; PAM type: NRG; PAM sequence: TGG
  source 1..20: mol_type = other DNA
caagtaggattaggctggag

SEQ ID NO: 39489 - DNA, 20 bp, synthetic construct
  misc_feature 1..20: note = Description of Artificial Sequence: Synthetic oligonucleotide
  misc_feature 1..20: note = Target: SCN10A; (+) strand; PAM type: NRG; PAM sequence: GAG
  source 1..20: mol_type = other DNA
agtaggattaggctggagtg

SEQ ID NO: 39490 - DNA, 20 bp, synthetic construct
  misc_feature 1..20: note = Description of Artificial Sequence: Synthetic oligonucleotide
  misc_feature 1..20: note = Target: SCN10A; (+) strand; PAM type: NRG; PAM sequence: TAG
  source 1..20: mol_type = other DNA
ctggagtggagaactctgaa

SEQ ID NO: 39491 - DNA, 20 bp, synthetic construct
  misc_feature 1..20: note = Description of Artificial Sequence: Synthetic oligonucleotide
  misc_feature 1..20: note = Target: SCN10A; (+) strand; PAM type: NRG; PAM sequence: TAG
  source 1..20: mol_type = other DNA
agtggagaactctgaatagc

SEQ ID NO: 39492 - DNA, 20 bp, synthetic construct
  misc_feature 1..20: note = Description of Artificial Sequence: Synthetic oligonucleotide
  misc_feature 1..20: note = Target: SCN10A; (+) strand; PAM type: NRG; PAM sequence: GAG
  source 1..20: mol_type = other DNA
tggagaactctgaatagcta

SEQ ID NO: 39493 - DNA, 20 bp, synthetic construct
  misc_feature 1..20: note = Description of Artificial Sequence: Synthetic oligonucleotide
  misc_feature 1..20: note = Target: SCN10A; (+) strand; PAM type: NRG; PAM sequence: TGG
  source 1..20: mol_type = other DNA
agaactctgaatagctagag

SEQ ID NO: 39494 - DNA, 20 bp, synthetic construct
  misc_feature 1..20: note = Description of Artificial Sequence: Synthetic oligonucleotide
  misc_feature 1..20: note = Target: SCN10A; (+) strand; PAM type: NRG; PAM sequence: GAG
  source 1..20: mol_type = other DNA
aactctgaatagctagagtg

SEQ ID NO: 39495 - DNA, 20 bp, synthetic construct
  misc_feature 1..20: note = Description of Artificial Sequence: Synthetic oligonucleotide
  misc_feature 1..20: note = Target: SCN10A; (+) strand; PAM type: NRG; PAM sequence: CAG
  source 1..20: mol_type = other DNA
gctagagtggagaatattga

SEQ ID NO: 39496 - DNA, 20 bp, synthetic construct
  misc_feature 1..20: note = Description of Artificial Sequence: Synthetic oligonucleotide
  misc_feature 1..20: note = Target: SCN10A; (+) strand; PAM type: NRG; PAM sequence: CAG
  source 1..20: mol_type = other DNA
agagtggagaatattgacag

SEQ ID NO: 39497 - DNA, 20 bp, synthetic construct
  misc_feature 1..20: note = Description of Artificial Sequence: Synthetic oligonucleotide
  misc_feature 1..20: note = Target: SCN10A; (+) strand; PAM type: NRG; PAM sequence: TGG
  source 1..20: mol_type = other DNA
agaatattgacagcagacta

SEQ ID NO: 39498 - DNA, 20 bp, synthetic construct
  misc_feature 1..20: note = Description of Artificial Sequence: Synthetic oligonucleotide
  misc_feature 1..20: note = Target: SCN10A; (+) strand; PAM type: NRG; PAM sequence: GGG
  source 1..20: mol_type = other DNA
gaatattgacagcagactat

SEQ ID NO: 39499 - DNA, 20 bp, synthetic construct
  misc_feature 1..20: note = Description of Artificial Sequence: Synthetic oligonucleotide
  misc_feature 1..20: note = Target: SCN10A; (+) strand; PAM type: NRG; PAM sequence: AAG
  source 1..20: mol_type = other DNA
ttgacagcagactatgggca

SEQ ID NO: 39500 - DNA, 20 bp, synthetic construct
  misc_feature 1..20: note = Description of Artificial Sequence: Synthetic oligonucleotide
  misc_feature 1..20: note = Target: SCN10A; (+) strand; PAM type: NRG; PAM sequence: AGG
  source 1..20: mol_type = other DNA
tgacagcagactatgggcaa

SEQ ID NO: 39501 - DNA, 20 bp, synthetic construct
  misc_feature 1..20: note = Description of Artificial Sequence: Synthetic oligonucleotide
  misc_feature 1..20: note = Target: SCN10A; (+) strand; PAM type: NRG; PAM sequence: GGG
  source 1..20: mol_type = other DNA
gacagcagactatgggcaaa

SEQ ID NO: 39502 - DNA, 20 bp, synthetic construct
  misc_feature 1..20: note = Description of Artificial Sequence: Synthetic oligonucleotide
  misc_feature 1..20: note = Target: SCN10A; (+) strand; PAM type: NRG; PAM sequence: AAG
  source 1..20: mol_type = other DNA
atgggcaaagggattatcaa

SEQ ID NO: 39503 - DNA, 20 bp, synthetic construct
  misc_feature 1..20: note = Description of Artificial Sequence: Synthetic oligonucleotide
  misc_feature 1..20: note = Target: SCN10A; (+) strand; PAM type: NRG; PAM sequence: AGG
  source 1..20: mol_type = other DNA
tgggcaaagggattatcaaa

SEQ ID NO: 39504 - DNA, 20 bp, synthetic construct
  misc_feature 1..20: note = Description of Artificial Sequence: Synthetic oligonucleotide
  misc_feature 1..20: note = Target: SCN10A; (+) strand; PAM type: NRG; PAM sequence: GGG
  source 1..20: mol_type = other DNA
gggcaaagggattatcaaaa

SEQ ID NO: 39505 - DNA, 20 bp, synthetic construct
  misc_feature 1..20: note = Description of Artificial Sequence: Synthetic oligonucleotide
  misc_feature 1..20: note = Target: SCN10A; (+) strand; PAM type: NRG; PAM sequence: GGG
  source 1..20: mol_type = other DNA
ggcaaagggattatcaaaag

SEQ ID NO: 39506 - DNA, 20 bp, synthetic construct
  misc_feature 1..20: note = Description of Artificial Sequence: Synthetic oligonucleotide
  misc_feature 1..20: note = Target: SCN10A; (+) strand; PAM type: NRG; PAM sequence: GAG
  source 1..20: mol_type = other DNA
caaagggattatcaaaaggg

SEQ ID NO: 39507 - DNA, 20 bp, synthetic construct
  misc_feature 1..20: note = Description of Artificial Sequence: Synthetic oligonucleotide
  misc_feature 1..20: note = Target: SCN10A; (+) strand; PAM type: NRG; PAM sequence: AGG
  source 1..20: mol_type = other DNA
aaagggattatcaaaagggg

SEQ ID NO: 39508 - DNA, 20 bp, synthetic construct
  misc_feature 1..20: note = Description of Artificial Sequence: Synthetic oligonucleotide
  misc_feature 1..20: note = Target: SCN10A; (+) strand; PAM type: NRG; PAM sequence: GGG
  source 1..20: mol_type = other DNA
aagggattatcaaaagggga

SEQ ID NO: 39509 - DNA, 20 bp, synthetic construct
  misc_feature 1..20: note = Description of Artificial Sequence: Synthetic oligonucleotide
  misc_feature 1..20: note = Target: SCN10A; (+) strand; PAM type: NRG; PAM sequence: GAG
  source 1..20: mol_type = other DNA
gggattatcaaaaggggagg

SEQ ID NO: 39510 - DNA, 20 bp, synthetic construct
  misc_feature 1..20: note = Description of Artificial Sequence: Synthetic oligonucleotide
  misc_feature 1..20: note = Target: SCN10A; (+) strand; PAM type: NRG; PAM sequence: AAG
  source 1..20: mol_type = other DNA
aaaggggagggagacattga

SEQ ID NO: 39511 - DNA, 20 bp, synthetic construct
  misc_feature 1..20: note = Description of Artificial Sequence: Synthetic oligonucleotide
  misc_feature 1..20: note = Target: SCN10A; (+) strand; PAM type: NRG; PAM sequence: AGG
  source 1..20: mol_type = other DNA
aaggggagggagacattgaa

SEQ ID NO: 39512 - DNA, 20 bp, synthetic construct
  misc_feature 1..20: note = Description of Artificial Sequence: Synthetic oligonucleotide
  misc_feature 1..20: note = Target: SCN10A; (+) strand; PAM type: NRG; PAM sequence: AAG
  source 1..20: mol_type = other DNA
gggagggagacattgaaagg

SEQ ID NO: 39513 - DNA, 20 bp, synthetic construct
  misc_feature 1..20: note = Description of Artificial Sequence: Synthetic oligonucleotide
  misc_feature 1..20: note = Target: SCN10A; (+) strand; PAM type: NRG; PAM sequence: AGG
  source 1..20: mol_type = other DNA
ggagggagacattgaaagga

SEQ ID NO: 39514 - DNA, 20 bp, synthetic construct
  misc_feature 1..20: note = Description of Artificial Sequence: Synthetic oligonucleotide
  misc_feature 1..20: note = Target: SCN10A; (+) strand; PAM type: NRG; PAM sequence: TGG
  source 1..20: mol_type = other DNA
gggagacattgaaaggaagg

SEQ ID NO: 39515 - DNA, 20 bp, synthetic construct
  misc_feature 1..20: note = Description of Artificial Sequence: Synthetic oligonucleotide
  misc_feature 1..20: note = Target: SCN10A; (+) strand; PAM type: NRG; PAM sequence: GGG
  source 1..20: mol_type = other DNA
ggagacattgaaaggaaggt

SEQ ID NO: 39516 - DNA, 20 bp, synthetic construct
  misc_feature 1..20: note = Description of Artificial Sequence: Synthetic oligonucleotide
  misc_feature 1..20: note = Target: SCN10A; (+) strand; PAM type: NRG; PAM sequence: TGG
  source 1..20: mol_type = other DNA
gacattgaaaggaaggtggg

SEQ ID NO: 39517 - DNA, 20 bp, synthetic construct
  misc_feature 1..20: note = Description of Artificial Sequence: Synthetic oligonucleotide
  misc_feature 1..20: note = Target: SCN10A; (+) strand; PAM type: NRG; PAM sequence: AAG
  source 1..20: mol_type = other DNA
attgaaaggaaggtgggtgg

SEQ ID NO: 39518 - DNA, 20 bp, synthetic construct
  misc_feature 1..20: note = Description of Artificial Sequence: Synthetic oligonucleotide
  misc_feature 1..20: note = Target: SCN10A; (+) strand; PAM type: NRG; PAM sequence: AGG
  source 1..20: mol_type = other DNA
ttgaaaggaaggtgggtgga

SEQ ID NO: 39519 - DNA, 20 bp, synthetic construct
  misc_feature 1..20: note = Description of Artificial Sequence: Synthetic oligonucleotide
  misc_feature 1..20: note = Target: SCN10A; (+) strand; PAM type: NRG; PAM sequence: GGG
  source 1..20: mol_type = other DNA
tgaaaggaaggtgggtggaa

SEQ ID NO: 39520 - DNA, 20 bp, synthetic construct
  misc_feature 1..20: note = Description of Artificial Sequence: Synthetic oligonucleotide
  misc_feature 1..20: note = Target: SCN10A; (+) strand; PAM type: NRG; PAM sequence: GGG
  source 1..20: mol_type = other DNA
gaaaggaaggtgggtggaag

SEQ ID NO: 39521 - DNA, 20 bp, synthetic construct
  misc_feature 1..20: note = Description of Artificial Sequence: Synthetic oligonucleotide
  misc_feature 1..20: note = Target: SCN10A; (+) strand; PAM type: NRG; PAM sequence: TAG
  source 1..20: mol_type = other DNA
aggtgggtggaaggggaaaa

SEQ ID NO: 39522 - DNA, 20 bp, synthetic construct
  misc_feature 1..20: note = Description of Artificial Sequence: Synthetic oligonucleotide
  misc_feature 1..20: note = Target: SCN10A; (+) strand; PAM type: NRG; PAM sequence: AAG
  source 1..20: mol_type = other DNA
tgggtggaaggggaaaatag

SEQ ID NO: 39523 - DNA, 20 bp, synthetic construct
  misc_feature 1..20: note = Description of Artificial Sequence: Synthetic oligonucleotide
  misc_feature 1..20: note = Target: SCN10A; (+) strand; PAM type: NRG; PAM sequence: AGG
  source 1..20: mol_type = other DNA
gggtggaaggggaaaataga

SEQ ID NO: 39524 - DNA, 20 bp, synthetic construct
  misc_feature 1..20: note = Description of Artificial Sequence: Synthetic oligonucleotide
  misc_feature 1..20: note = Target: SCN10A; (+) strand; PAM type: NRG; PAM sequence: GGG
  source 1..20: mol_type = other DNA
ggtggaaggggaaaatagaa

SEQ ID NO: 39525 - DNA, 20 bp, synthetic construct
  misc_feature 1..20: note = Description of Artificial Sequence: Synthetic oligonucleotide
  misc_feature 1..20: note = Target: SCN10A; (+) strand; PAM type: NRG; PAM sequence: AAG
  source 1..20: mol_type = other DNA
ggaaggggaaaatagaaggg

SEQ ID NO: 39526 - DNA, 20 bp, synthetic construct
  misc_feature 1..20: note = Description of Artificial Sequence: Synthetic oligonucleotide
  misc_feature 1..20: note = Target: SCN10A; (+) strand; PAM type: NRG; PAM sequence: TGG
  source 1..20: mol_type = other DNA
aaatagaagggaagaaatgt

SEQ ID NO: 39527 - DNA, 20 bp, synthetic construct
  misc_feature 1..20: note = Description of Artificial Sequence: Synthetic oligonucleotide
  misc_feature 1..20: note = Target: SCN10A; (+) strand; PAM type: NRG; PAM sequence: TGG
  source 1..20: mol_type = other DNA
tagaagggaagaaatgttgg

SEQ ID NO: 39528 - DNA, 20 bp, synthetic construct
  misc_feature 1..20: note = Description of Artificial Sequence: Synthetic oligonucleotide
  misc_feature 1..20: note = Target: SCN10A; (+) strand; PAM type: NRG; PAM sequence: GGG
  source 1..20: mol_type = other DNA
agaagggaagaaatgttggt

SEQ ID NO: 39529 - DNA, 20 bp, synthetic construct
  misc_feature 1..20: note = Description of Artificial Sequence: Synthetic oligonucleotide
  misc_feature 1..20: note = Target: SCN10A; (+) strand; PAM type: NRG; PAM sequence: GGG
  source 1..20: mol_type = other DNA
gaagggaagaaatgttggtg

SEQ ID NO: 39530 - DNA, 20 bp, synthetic construct
  misc_feature 1..20: note = Description of Artificial Sequence: Synthetic oligonucleotide
  misc_feature 1..20: note = Target: SCN10A; (+) strand; PAM type: NRG; PAM sequence: GAG
  source 1..20: mol_type = other DNA
agggaagaaatgttggtggg

SEQ ID NO: 39531 - DNA, 20 bp, synthetic construct
  misc_feature 1..20: note = Description of Artificial Sequence: Synthetic oligonucleotide
  misc_feature 1..20: note = Target: SCN10A; (+) strand; PAM type: NRG; PAM sequence: AAG
  source 1..20: mol_type = other DNA
atgttggtggggagaatcta

SEQ ID NO: 39532 - DNA, 20 bp, synthetic construct
  misc_feature 1..20: note = Description of Artificial Sequence: Synthetic oligonucleotide
  misc_feature 1..20: note = Target: SCN10A; (+) strand; PAM type: NRG; PAM sequence: AGG
  source 1..20: mol_type = other DNA
tgttggtggggagaatctaa

SEQ ID NO: 39533 - DNA, 20 bp, synthetic construct
  misc_feature 1..20: note = Description of Artificial Sequence: Synthetic oligonucleotide
  misc_feature 1..20: note = Target: SCN10A; (+) strand; PAM type: NRG; PAM sequence: TGG
  source 1..20: mol_type = other DNA
aaaggtaaattgttcccact

SEQ ID NO: 39534 - DNA, 20 bp, synthetic construct
  misc_feature 1..20: note = Description of Artificial Sequence: Synthetic oligonucleotide
  misc_feature 1..20: note = Target: SCN10A; (+) strand; PAM type: NRG; PAM sequence: TAG
  source 1..20: mol_type = other DNA
tcccacttggacatttttct

SEQ ID NO: 39535 - DNA, 20 bp, synthetic construct
  misc_feature 1..20: note = Description of Artificial Sequence: Synthetic oligonucleotide
  misc_feature 1..20: note = Target: SCN10A; (+) strand; PAM type: NRG; PAM sequence: AGG
  source 1..20: mol_type = other DNA
cccacttggacatttttctt

SEQ ID NO: 39536 - DNA, 20 bp, synthetic construct
  misc_feature 1..20: note = Description of Artificial Sequence: Synthetic oligonucleotide
  misc_feature 1..20: note = Target: SCN10A; (+) strand; PAM type: NRG; PAM sequence: TAG
  source 1..20: mol_type = other DNA
ttggacatttttcttaggaa

SEQ ID NO: 39537 - DNA, 20 bp, synthetic construct
  misc_feature 1..20: note = Description of Artificial Sequence: Synthetic oligonucleotide
  misc_feature 1..20: note = Target: SCN10A; (+) strand; PAM type: NRG; PAM sequence: TGG
  source 1..20: mol_type = other DNA
acatttttcttaggaatagc

SEQ ID NO: 39538 - DNA, 20 bp, synthetic construct
  misc_feature 1..20: note = Description of Artificial Sequence: Synthetic oligonucleotide
  misc_feature 1..20: note = Target: SCN10A; (+) strand; PAM type: NRG; PAM sequence: GGG
  source 1..20: mol_type = other DNA
catttttcttaggaatagct

SEQ ID NO: 39539 - DNA, 20 bp, synthetic construct
  misc_feature 1..20: note = Description of Artificial Sequence: Synthetic oligonucleotide
  misc_feature 1..20: note = Target: SCN10A; (+) strand; PAM type: NRG; PAM sequence: CAG
  source 1..20: mol_type = other DNA
aggaatagctgggctcccaa

SEQ ID NO: 39540 - DNA, 20 bp, synthetic construct
  misc_feature 1..20: note = Description of Artificial Sequence: Synthetic oligonucleotide
  misc_feature 1..20: note = Target: SCN10A; (+) strand; PAM type: NRG; PAM sequence: AAG
  source 1..20: mol_type = other DNA
ggctcccaacagtgcttcct

SEQ ID NO: 39541 - DNA, 20 bp, synthetic construct
  misc_feature 1..20: note = Description of Artificial Sequence: Synthetic oligonucleotide
  misc_feature 1..20: note = Target: SCN10A; (+) strand; PAM type: NRG; PAM sequence: AGG
  source 1..20: mol_type = other DNA
gctcccaacagtgcttccta

SEQ ID NO: 39542 - DNA, 20 bp, synthetic construct
  misc_feature 1..20: note = Description of Artificial Sequence: Synthetic oligonucleotide
  misc_feature 1..20: note = Target: SCN10A; (+) strand; PAM type: NRG; PAM sequence: AAG
  source 1..20: mol_type = other DNA
ctaaggaaaaataaaacttg

SEQ ID NO: 39543 - DNA, 20 bp, synthetic construct
  misc_feature 1..20: note = Description of Artificial Sequence: Synthetic oligonucleotide
  misc_feature 1..20: note = Target: SCN10A; (+) strand; PAM type: NRG; PAM sequence: CAG
  source 1..20: mol_type = other DNA
ttgaagataaacttgaccta

SEQ ID NO: 39544 - DNA, 20 bp, synthetic construct
  misc_feature 1..20: note = Description of Artificial Sequence: Synthetic oligonucleotide
  misc_feature 1..20: note = Target: SCN10A; (+) strand; PAM type: NRG; PAM sequence: GAG
  source 1..20: mol_type = other DNA
gaagataaacttgacctaca

SEQ ID NO: 39545 - DNA, 20 bp, synthetic construct
  misc_feature 1..20: note = Description of Artificial Sequence: Synthetic oligonucleotide
  misc_feature 1..20: note = Target: SCN10A; (+) strand; PAM type: NRG; PAM sequence: GAG
  source 1..20: mol_type = other DNA
agataaacttgacctacaga

SEQ ID NO: 39546 - DNA, 20 bp, synthetic construct
  misc_feature 1..20: note = Description of Artificial Sequence: Synthetic oligonucleotide
  misc_feature 1..20: note = Target: SCN10A; (+) strand; PAM type: NRG; PAM sequence: GAG
  source 1..20: mol_type = other DNA
ataaacttgacctacagaga

SEQ ID NO: 39547 - DNA, 20 bp, synthetic construct
  misc_feature 1..20: note = Description of Artificial Sequence: Synthetic oligonucleotide
  misc_feature 1..20: note = Target: SCN10A; (+) strand; PAM type: NRG; PAM sequence: GAG
  source 1..20: mol_type = other DNA
caacactcatttttcaattt

SEQ ID NO: 39548 - DNA, 20 bp, synthetic construct
  misc_feature 1..20: note = Description of Artificial Sequence: Synthetic oligonucleotide
  misc_feature 1..20: note = Target: SCN10A; (+) strand; PAM type: NRG; PAM sequence: CAG
  source 1..20: mol_type = other DNA
cactcatttttcaatttgag

SEQ ID NO: 39549 - DNA, 20 bp, synthetic construct
  misc_feature 1..20: note = Description of Artificial Sequence: Synthetic oligonucleotide
  misc_feature 1..20: note = Target: SCN10A; (+) strand; PAM type: NRG; PAM sequence: AAG
  source 1..20: mol_type = other DNA
tcatttttcaatttgagcag

SEQ ID NO: 39550 - DNA, 20 bp, synthetic construct
  misc_feature 1..20: note = Description of Artificial Sequence: Synthetic oligonucleotide
  misc_feature 1..20: note = Target: SCN10A; (+) strand; PAM type: NRG; PAM sequence: TAG
  source 1..20: mol_type = other DNA
agaagtatttaaatgtattt

SEQ ID NO: 39551 - DNA, 20 bp, synthetic construct
  misc_feature 1..20: note = Description of Artificial Sequence: Synthetic oligonucleotide
  misc_feature 1..20: note = Target: SCN10A; (+) strand; PAM type: NRG; PAM sequence: TAG
  source 1..20: mol_type = other DNA
tgtaaatgccttgatgtgtc

SEQ ID NO: 39552 - DNA, 20 bp, synthetic construct
  misc_feature 1..20: note = Description of Artificial Sequence: Synthetic oligonucleotide
  misc_feature 1..20: note = Target: SCN10A; (+) strand; PAM type: NRG; PAM sequence: CAG
  source 1..20: mol_type = other DNA
ccttgatgtgtctagtttta

SEQ ID NO: 39553 - DNA, 20 bp, synthetic construct
  misc_feature 1..20: note = Description of Artificial Sequence: Synthetic oligonucleotide
  misc_feature 1..20: note = Target: SCN10A; (+) strand; PAM type: NRG; PAM sequence: TAG
  source 1..20: mol_type = other DNA
tgtctagttttacagttact

SEQ ID NO: 39554 - DNA, 20 bp, synthetic construct
  misc_feature 1..20: note = Description of Artificial Sequence: Synthetic oligonucleotide
  misc_feature 1..20: note = Target: SCN10A; (+) strand; PAM type: NRG; PAM sequence: AGG
  source 1..20: mol_type = other DNA
gtctagttttacagttactt

SEQ ID NO: 39555 - DNA, 20 bp, synthetic construct
  misc_feature 1..20: note = Description of Artificial Sequence: Synthetic oligonucleotide
  misc_feature 1..20: note = Target: SCN10A; (+) strand; PAM type: NRG; PAM sequence: AAG
  source 1..20: mol_type = other DNA
aggaacacatctattatgaa

SEQ ID NO: 39556 - DNA, 20 bp, synthetic construct
  misc_feature 1..20: note = Description of Artificial Sequence: Synthetic oligonucleotide
  misc_feature 1..20: note = Target: SCN10A; (+) strand; PAM type: NRG; PAM sequence: AGG
  source 1..20: mol_type = other DNA
ggaacacatctattatgaaa

SEQ ID NO: 39557 - DNA, 20 bp, synthetic construct
  misc_feature 1..20: note = Description of Artificial Sequence: Synthetic oligonucleotide
  misc_feature 1..20: note = Target: SCN10A; (+) strand; PAM type: NRG; PAM sequence: AAG
  source 1..20: mol_type = other DNA
tgctgacttacaattaaatt

SEQ ID NO: 39558 - DNA, 20 bp, synthetic construct
  misc_feature 1..20: note = Description of Artificial Sequence: Synthetic oligonucleotide
  misc_feature 1..20: note = Target: SCN10A; (+) strand; PAM type: NRG; PAM sequence: TGG
  source 1..20: mol_type = other DNA
aattaagaaatatgctcaca

SEQ ID NO: 39559 - DNA, 20 bp, synthetic construct
  misc_feature 1..20: note = Description of Artificial Sequence: Synthetic oligonucleotide
  misc_feature 1..20: note = Target: SCN10A; (+) strand; PAM type: NRG; PAM sequence: GGG
  source 1..20: mol_type = other DNA
attaagaaatatgctcacat

SEQ ID NO: 39560 - DNA, 20 bp, synthetic construct
  misc_feature 1..20: note = Description of Artificial Sequence: Synthetic oligonucleotide
  misc_feature 1..20: note = Target: SCN10A; (+) strand; PAM type: NRG; PAM sequence: GGG
  source 1..20: mol_type = other DNA
ttaagaaatatgctcacatg

SEQ ID NO: 39561 - DNA, 20 bp, synthetic construct
  misc_feature 1..20: note = Description of Artificial Sequence: Synthetic oligonucleotide
  misc_feature 1..20: note = Target: SCN10A; (+) strand; PAM type: NRG; PAM sequence: GGG
  source 1..20: mol_type = other DNA
taagaaatatgctcacatgg

SEQ ID NO: 39562 - DNA, 20 bp, synthetic construct
  misc_feature 1..20: note = Description of Artificial Sequence: Synthetic oligonucleotide
  misc_feature 1..20: note = Target: SCN10A; (+) strand; PAM type: NRG; PAM sequence: GGG
  source 1..20: mol_type = other DNA
aagaaatatgctcacatggg

SEQ ID NO: 39563 - DNA, 20 bp, synthetic construct
  misc_feature 1..20: note = Description of Artificial Sequence: Synthetic oligonucleotide
  misc_feature 1..20: note = Target: SCN10A; (+) strand; PAM type: NRG; PAM sequence: AAG
  source 1..20: mol_type = other DNA
atggggggaaatgttaatcc

SEQ ID NO: 39564 - DNA, 20 bp, synthetic construct
  misc_feature 1..20: note = Description of Artificial Sequence: Synthetic oligonucleotide
  misc_feature 1..20: note = Target: SCN10A; (+) strand; PAM type: NRG; PAM sequence: AGG
  source 1..20: mol_type = other DNA
tggggggaaatgttaatcca

SEQ ID NO: 39565 - DNA, 20 bp, synthetic construct
  misc_feature 1..20: note = Description of Artificial Sequence: Synthetic oligonucleotide
  misc_feature 1..20: note = Target: SCN10A; (+) strand; PAM type: NRG; PAM sequence: AAG
  source 1..20: mol_type = other DNA
ccaattctacaaatatttaa

SEQ ID NO: 39566 - DNA, 20 bp, synthetic construct
  misc_feature 1..20: note = Description of Artificial Sequence: Synthetic oligonucleotide
  misc_feature 1..20: note = Target: SCN10A; (+) strand; PAM type: NRG; PAM sequence: TAG
  source 1..20: mol_type = other DNA
atatatcttatgtataatat

SEQ ID NO: 39567 - DNA, 20 bp, synthetic construct
  misc_feature 1..20: note = Description of Artificial Sequence: Synthetic oligonucleotide
  misc_feature 1..20: note = Target: SCN10A; (+) strand; PAM type: NRG; PAM sequence: TAG
  source 1..20: mol_type = other DNA
attagttatgaaaacattca

SEQ ID NO: 39568 - DNA, 20 bp, synthetic construct
  misc_feature 1..20: note = Description of Artificial Sequence: Synthetic oligonucleotide
  misc_feature 1..20: note = Target: SCN10A; (+) strand; PAM type: NRG; PAM sequence: TAG
  source 1..20: mol_type = other DNA
acattcatagcaaatgtgat

SEQ ID NO: 39569 - DNA, 20 bp, synthetic construct
  misc_feature 1..20: note = Description of Artificial Sequence: Synthetic oligonucleotide
  misc_feature 1..20: note = Target: SCN10A; (+) strand; PAM type: NRG; PAM sequence: TGG
  source 1..20: mol_type = other DNA
tgtgattagaattatatttt

SEQ ID NO: 39570 - DNA, 20 bp, synthetic construct
  misc_feature 1..20: note = Description of Artificial Sequence: Synthetic oligonucleotide
  misc_feature 1..20: note = Target: SCN10A; (+) strand; PAM type: NRG; PAM sequence: TAG
  source 1..20: mol_type = other DNA
ttttggtgaaatattaataa

SEQ ID NO: 39571 - DNA, 20 bp, synthetic construct
  misc_feature 1..20: note = Description of Artificial Sequence: Synthetic oligonucleotide
  misc_feature 1..20: note = Target: SCN10A; (+) strand; PAM type: NRG; PAM sequence: AGG
  source 1..20: mol_type = other DNA
tttggtgaaatattaataat

SEQ ID NO: 39572 - DNA, 20 bp, synthetic construct
  misc_feature 1..20: note = Description of Artificial Sequence: Synthetic oligonucleotide
  misc_feature 1..20: note = Target: SCN10A; (+) strand; PAM type: NRG; PAM sequence: GGG
  source 1..20: mol_type = other DNA
ttggtgaaatattaataata

SEQ ID NO: 39573 - DNA, 20 bp, synthetic construct
  misc_feature 1..20: note = Description of Artificial Sequence: Synthetic oligonucleotide
  misc_feature 1..20: note = Target: SCN10A; (+) strand; PAM type: NRG; PAM sequence: GAG
  source 1..20: mol_type = other DNA
aatattaataatagggccct

SEQ ID NO: 39574 - DNA, 20 bp, synthetic construct
  misc_feature 1..20: note = Description of Artificial Sequence: Synthetic oligonucleotide
  misc_feature 1..20: note = Target: SCN10A; (+) strand; PAM type: NRG; PAM sequence: TAG
  source 1..20: mol_type = other DNA
taatagggccctgagaattc

SEQ ID NO: 39575 - DNA, 20 bp, synthetic construct
  misc_feature 1..20: note = Description of Artificial Sequence: Synthetic oligonucleotide
  misc_feature 1..20: note = Target: SCN10A; (+) strand; PAM type: NRG; PAM sequence: TGG
  source 1..20: mol_type = other DNA
ctgagaattctagtatcttt

SEQ ID NO: 39576 - DNA, 20 bp, synthetic construct
  misc_feature 1..20: note = Description of Artificial Sequence: Synthetic oligonucleotide
  misc_feature 1..20: note = Target: SCN10A; (+) strand; PAM type: NRG; PAM sequence: GGG
  source 1..20: mol_type = other DNA
tgagaattctagtatctttt

SEQ ID NO: 39577 - DNA, 20 bp, synthetic construct
  misc_feature 1..20: note = Description of Artificial Sequence: Synthetic oligonucleotide
  misc_feature 1..20: note = Target: SCN10A; (+) strand; PAM type: NRG; PAM sequence: GGG
  source 1..20: mol_type = other DNA
gagaattctagtatcttttg

SEQ ID NO: 39578 - DNA, 20 bp, synthetic construct
  misc_feature 1..20: note = Description of Artificial Sequence: Synthetic oligonucleotide
  misc_feature 1..20: note = Target: SCN10A; (+) strand; PAM type: NRG; PAM sequence: TGG
  source 1..20: mol_type = other DNA
attctagtatcttttggggc

SEQ ID NO: 39579 - DNA, 20 bp, synthetic construct
  misc_feature 1..20: note = Description of Artificial Sequence: Synthetic oligonucleotide
  misc_feature 1..20: note = Target: SCN10A; (+) strand; PAM type: NRG; PAM sequence: GAG
  source 1..20: mol_type = other DNA
tctagtatcttttggggctg

SEQ ID NO: 39580 - DNA, 20 bp, synthetic construct
  misc_feature 1..20: note = Description of Artificial Sequence: Synthetic oligonucleotide
  misc_feature 1..20: note = Target: SCN10A; (+) strand; PAM type: NRG; PAM sequence: GAG
  source 1..20: mol_type = other DNA
gctggagttaccaaatttat

SEQ ID NO: 39581 - DNA, 20 bp, synthetic construct
  misc_feature 1..20: note = Description of Artificial Sequence: Synthetic oligonucleotide
  misc_feature 1..20: note = Target: SCN10A; (+) strand; PAM type: NRG; PAM sequence: CAG
  source 1..20: mol_type = other DNA
aaatttatgagatttaaatg

SEQ ID NO: 39582 - DNA, 20 bp, synthetic construct
  misc_feature 1..20: note = Description of Artificial Sequence: Synthetic oligonucleotide
  misc_feature 1..20: note = Target: SCN10A; (+) strand; PAM type: NRG; PAM sequence: GAG
  source 1..20: mol_type = other DNA
atttaaatgcagacttttgt

SEQ ID NO: 39583 - DNA, 20 bp, synthetic construct
  misc_feature 1..20: note = Description of Artificial Sequence: Synthetic oligonucleotide
  misc_feature 1..20: note = Target: SCN10A; (+) strand; PAM type: NRG; PAM sequence: AGG
  source 1..20: mol_type = other DNA
tttaaatgcagacttttgtg

SEQ ID NO: 39584 - DNA, 20 bp, synthetic construct
  misc_feature 1..20: note = Description of Artificial Sequence: Synthetic oligonucleotide
  misc_feature 1..20: note = Target: SCN10A; (+) strand; PAM type: NRG; PAM sequence: AAG
  source 1..20: mol_type = other DNA
aaatgcagacttttgtgagg

SEQ ID NO: 39585 - DNA, 20 bp, synthetic construct
  misc_feature 1..20: note = Description of Artificial Sequence: Synthetic oligonucleotide
  misc_feature 1..20: note = Target: SCN10A; (+) strand; PAM type: NRG; PAM sequence: GAG
  source 1..20: mol_type = other DNA
atgcagacttttgtgaggaa

SEQ ID NO: 39586 - DNA, 20 bp, synthetic construct
  misc_feature 1..20: note = Description of Artificial Sequence: Synthetic oligonucleotide
  misc_feature 1..20: note = Target: SCN10A; (+) strand; PAM type: NRG; PAM sequence: CAG
  source 1..20: mol_type = other DNA
tgaggaagagaccccctcaa

SEQ ID NO: 39587 - DNA, 20 bp, synthetic construct
  misc_feature 1..20: note = Description of Artificial Sequence: Synthetic oligonucleotide
  misc_feature 1..20: note = Target: SCN10A; (+) strand; PAM type: NRG; PAM sequence: CAG
  source 1..20: mol_type = other DNA
ccctcaacagcttttctgtc

SEQ ID NO: 39588 - DNA, 20 bp, synthetic construct
  misc_feature 1..20: note = Description of Artificial Sequence: Synthetic oligonucleotide
  misc_feature 1..20: note = Target: SCN10A; (+) strand; PAM type: NRG; PAM sequence: AAG
  source 1..20: mol_type = other DNA
tgtccagctgtgactctacc

SEQ ID NO: 39589 - DNA, 20 bp, synthetic construct
  misc_feature 1..20: note = Description of Artificial Sequence: Synthetic oligonucleotide
  misc_feature 1..20: note = Target: SCN10A; (+) strand; PAM type: NRG; PAM sequence: AAG
  source 1..20: mol_type = other DNA
ttatttactcatcaaatctc

SEQ ID NO: 39590 - DNA, 20 bp, synthetic construct
  misc_feature 1..20: note = Description of Artificial Sequence: Synthetic oligonucleotide
  misc_feature 1..20: note = Target: SCN10A; (+) strand; PAM type: NRG; PAM sequence: AAG
  source 1..20: mol_type = other DNA
actcatcaaatctcaagatg

SEQ ID NO: 39591 - DNA, 20 bp, synthetic construct
  misc_feature 1..20: note = Description of Artificial Sequence: Synthetic oligonucleotide
  misc_feature 1..20: note = Target: SCN10A; (+) strand; PAM type: NRG; PAM sequence: GAG
  source 1..20: mol_type = other DNA
tcatcaaatctcaagatgaa

SEQ ID NO: 39592 - DNA, 20 bp, synthetic construct
  misc_feature 1..20: note = Description of Artificial Sequence: Synthetic oligonucleotide
  misc_feature 1..20: note = Target: SCN10A; (+) strand; PAM type: NRG; PAM sequence: TGG
  source 1..20: mol_type = other DNA
aagatgaagagaatattcac

SEQ ID NO: 39593 - DNA, 20 bp, synthetic construct
  misc_feature 1..20: note = Description of Artificial Sequence: Synthetic oligonucleotide
  misc_feature 1..20: note = Target: SCN10A; (+) strand; PAM type: NRG; PAM sequence: TGG
  source 1..20: mol_type = other DNA
gagaatattcactggtcact

SEQ ID NO: 39594 - DNA, 20 bp, synthetic construct
  misc_feature 1..20: note = Description of Artificial Sequence: Synthetic oligonucleotide
  misc_feature 1..20: note = Target: SCN10A; (+) strand; PAM type: NRG; PAM sequence: TAG
  source 1..20: mol_type = other DNA
actggtcacttggttctttt

SEQ ID NO: 39595 - DNA, 20 bp, synthetic construct
  misc_feature 1..20: note = Description of Artificial Sequence: Synthetic oligonucleotide
  misc_feature 1..20: note = Target: SCN10A; (+) strand; PAM type: NRG; PAM sequence: AGG
  source 1..20: mol_type = other DNA
ctggtcacttggttcttttt

SEQ ID NO: 39596 - DNA, 20 bp, synthetic construct
  misc_feature 1..20: note = Description of Artificial Sequence: Synthetic oligonucleotide
  misc_feature 1..20: note = Target: SCN10A; (+) strand; PAM type: NRG; PAM sequence: GGG
  source 1..20: mol_type = other DNA
tggtcacttggttcttttta

SEQ ID NO: 39597 - DNA, 20 bp, synthetic construct
  misc_feature 1..20: note = Description of Artificial Sequence: Synthetic oligonucleotide
  misc_feature 1..20: note = Target: SCN10A; (+) strand; PAM type: NRG; PAM sequence: GGG
  source 1..20: mol_type = other DNA
ggtcacttggttctttttag

SEQ ID NO: 39598 - DNA, 20 bp, synthetic construct
  misc_feature 1..20: note = Description of Artificial Sequence: Synthetic oligonucleotide
  misc_feature 1..20: note = Target: SCN10A; (+) strand; PAM type: NRG; PAM sequence: TAG
  source 1..20: mol_type = other DNA
taggggattttatttctaat

SEQ ID NO: 39599 - DNA, 20 bp, synthetic construct
  misc_feature 1..20: note = Description of Artificial Sequence: Synthetic oligonucleotide
  misc_feature 1..20: note = Target: SCN10A; (+) strand; PAM type: NRG; PAM sequence: CAG
  source 1..20: mol_type = other DNA
ttagctgtttcttacttatc

SEQ ID NO: 39600 - DNA, 20 bp, synthetic construct
  misc_feature 1..20: note = Description of Artificial Sequence: Synthetic oligonucleotide
  misc_feature 1..20: note = Target: SCN10A; (+) strand; PAM type: NRG; PAM sequence: CAG
  source 1..20: mol_type = other DNA
ttatccagatgtaattcaac

SEQ ID NO: 39601 - DNA, 20 bp, synthetic construct
  misc_feature 1..20: note = Description of Artificial Sequence: Synthetic oligonucleotide
  misc_feature 1..20: note = Target: SCN10A; (+) strand; PAM type: NRG; PAM sequence: AAG
  source 1..20: mol_type = other DNA
taattcaaccagaatccata

SEQ ID NO: 39602 - DNA, 20 bp, synthetic construct
  misc_feature 1..20: note = Description of Artificial Sequence: Synthetic oligonucleotide
  misc_feature 1..20: note = Target: SCN10A; (+) strand; PAM type: NRG; PAM sequence: GAG
  source 1..20: mol_type = other DNA
attcaaccagaatccataaa

SEQ ID NO: 39603 - DNA, 20 bp, synthetic construct
  misc_feature 1..20: note = Description of Artificial Sequence: Synthetic oligonucleotide
  misc_feature 1..20: note = Target: SCN10A; (+) strand; PAM type: NRG; PAM sequence: AGG
  source 1..20: mol_type = other DNA
ttcaaccagaatccataaag

SEQ ID NO: 39604 - DNA, 20 bp, synthetic construct
  misc_feature 1..20: note = Description of Artificial Sequence: Synthetic oligonucleotide
  misc_feature 1..20: note = Target: SCN10A; (+) strand; PAM type: NRG; PAM sequence: GAG
  source 1..20: mol_type = other DNA
caaccagaatccataaagag

SEQ ID NO: 39605 - DNA, 20 bp, synthetic construct
  misc_feature 1..20: note = Description of Artificial Sequence: Synthetic oligonucleotide
  misc_feature 1..20: note = Target: SCN10A; (+) strand; PAM type: NRG; PAM sequence: AAG
  source 1..20: mol_type = other DNA
taattgtatatattttgaaa

SEQ ID NO: 39606 - DNA, 20 bp, synthetic construct
  misc_feature 1..20: note = Description of Artificial Sequence: Synthetic oligonucleotide
  misc_feature 1..20: note = Target: SCN10A; (+) strand; PAM type: NRG; PAM sequence: AAG
  source 1..20: mol_type = other DNA
tgaaaaagcaacaactaccc

SEQ ID NO: 39607 - DNA, 20 bp, synthetic construct
  misc_feature 1..20: note = Description of Artificial Sequence: Synthetic oligonucleotide
  misc_feature 1..20: note = Target: SCN10A; (+) strand; PAM type: NRG; PAM sequence: CAG
  source 1..20: mol_type = other DNA
aaaagcaacaactacccaag

SEQ ID NO: 39608 - DNA, 20 bp, synthetic construct
  misc_feature 1..20: note = Description of Artificial Sequence: Synthetic oligonucleotide
  misc_feature 1..20: note = Target: SCN10A; (+) strand; PAM type: NRG; PAM sequence: GAG
  source 1..20: mol_type = other DNA
aagcaacaactacccaagca

SEQ ID NO: 39609 - DNA, 20 bp, synthetic construct
  misc_feature 1..20: note = Description of Artificial Sequence: Synthetic oligonucleotide
  misc_feature 1..20: note = Target: SCN10A; (+) strand; PAM type: NRG; PAM sequence: GAG
  source 1..20: mol_type = other DNA
ccaagcagagacgacacatt

SEQ ID NO: 39610 - DNA, 20 bp, synthetic construct
  misc_feature 1..20: note = Description of Artificial Sequence: Synthetic oligonucleotide
  misc_feature 1..20: note = Target: SCN10A; (+) strand; PAM type: NRG; PAM sequence: GAG
  source 1..20: mol_type = other DNA
aagcagagacgacacattga

SEQ ID NO: 39611 - DNA, 20 bp, synthetic construct
  misc_feature 1..20: note = Description of Artificial Sequence: Synthetic oligonucleotide
  misc_feature 1..20: note = Target: SCN10A; (+) strand; PAM type: NRG; PAM sequence: TAG
  source 1..20: mol_type = other DNA
tccaccctacttcctcactg

SEQ ID NO: 39612 - DNA, 20 bp, synthetic construct
  misc_feature 1..20: note = Description of Artificial Sequence: Synthetic oligonucleotide
  misc_feature 1..20: note = Target: SCN10A; (+) strand; PAM type: NRG; PAM sequence: CAG
  source 1..20: mol_type = other DNA
actgtagatactgctctacg

SEQ ID NO: 39613 - DNA, 20 bp, synthetic construct
  misc_feature 1..20: note = Description of Artificial Sequence: Synthetic oligonucleotide
  misc_feature 1..20: note = Target: SCN10A; (+) strand; PAM type: NRG; PAM sequence: AGG
  source 1..20: mol_type = other DNA
ctgtagatactgctctacgc

SEQ ID NO: 39614 - DNA, 20 bp, synthetic construct
  misc_feature 1..20: note = Description of Artificial Sequence: Synthetic oligonucleotide
  misc_feature 1..20: note = Target: SCN10A; (+) strand; PAM type: NRG; PAM sequence: CAG
  source 1..20: mol_type = other DNA
atactgctctacgcaggatg

SEQ ID NO: 39615 - DNA, 20 bp, synthetic construct
  misc_feature 1..20: note = Description of Artificial Sequence: Synthetic oligonucleotide
  misc_feature 1..20: note = Target: SCN10A; (+) strand; PAM type: NRG; PAM sequence: AGG
  source 1..20: mol_type = other DNA
tactgctctacgcaggatgc

SEQ ID NO: 39616 - DNA, 20 bp, synthetic construct
  misc_feature 1..20: note = Description of Artificial Sequence: Synthetic oligonucleotide
  misc_feature 1..20: note = Target: SCN10A; (+) strand; PAM type: NRG; PAM sequence: TGG
  source 1..20: mol_type = other DNA
gctctacgcaggatgcaggc

SEQ ID NO: 39617 - DNA, 20 bp, synthetic construct
  misc_feature 1..20: note = Description of Artificial Sequence: Synthetic oligonucleotide
  misc_feature 1..20: note = Target: SCN10A; (+) strand; PAM type: NRG; PAM sequence: TAG
  source 1..20: mol_type = other DNA
tgcaggctggacttcttaac

SEQ ID NO: 39618 - DNA, 20 bp, synthetic construct
  misc_feature 1..20: note = Description of Artificial Sequence: Synthetic oligonucleotide
  misc_feature 1..20: note = Target: SCN10A; (+) strand; PAM type: NRG; PAM sequence: TGG
  source 1..20: mol_type = other DNA
ggacttcttaactagctaca

SEQ ID NO: 39619 - DNA, 20 bp, synthetic construct
  misc_feature 1..20: note = Description of Artificial Sequence: Synthetic oligonucleotide
  misc_feature 1..20: note = Target: SCN10A; (+) strand; PAM type: NRG; PAM sequence: TGG
  source 1..20: mol_type = other DNA
cttaactagctacatggtct

SEQ ID NO: 39620 - DNA, 20 bp, synthetic construct
  misc_feature 1..20: note = Description of Artificial Sequence: Synthetic oligonucleotide
  misc_feature 1..20: note = Target: SCN10A; (+) strand; PAM type: NRG; PAM sequence: CAG
  source 1..20: mol_type = other DNA
tacttaatgcctctgtgtgt

SEQ ID NO: 39621 - DNA, 20 bp, synthetic construct
  misc_feature 1..20: note = Description of Artificial Sequence: Synthetic oligonucleotide
  misc_feature 1..20: note = Target: SCN10A; (+) strand; PAM type: NRG; PAM sequence: TGG
  source 1..20: mol_type = other DNA
cagtttcattatctgtaaaa

SEQ ID NO: 39622 - DNA, 20 bp, synthetic construct
  misc_feature 1..20: note = Description of Artificial Sequence: Synthetic oligonucleotide
  misc_feature 1..20: note = Target: SCN10A; (+) strand; PAM type: NRG; PAM sequence: GGG
  source 1..20: mol_type = other DNA
agtttcattatctgtaaaat

SEQ ID NO: 39623 - DNA, 20 bp, synthetic construct
  misc_feature 1..20: note = Description of Artificial Sequence: Synthetic oligonucleotide
  misc_feature 1..20: note = Target: SCN10A; (+) strand; PAM type: NRG; PAM sequence: GGG
  source 1..20: mol_type = other DNA
gtttcattatctgtaaaatg

SEQ ID NO: 39624 - DNA, 20 bp, synthetic construct
  misc_feature 1..20: note = Description of Artificial Sequence: Synthetic oligonucleotide
  misc_feature 1..20: note = Target: SCN10A; (+) strand; PAM type: NRG; PAM sequence: TGG
  source 1..20: mol_type = other DNA
cattatctgtaaaatgggga

SEQ ID NO: 39625 - DNA, 20 bp, synthetic construct
  misc_feature 1..20: note = Description of Artificial Sequence: Synthetic oligonucleotide
  misc_feature 1..20: note = Target: SCN10A; (+) strand; PAM type: NRG; PAM sequence: CAG
  source 1..20: mol_type = other DNA
ggggatggtaatctctactt

SEQ ID NO: 39626 - DNA, 20 bp, synthetic construct
  misc_feature 1..20: note = Description of Artificial Sequence: Synthetic oligonucleotide
  misc_feature 1..20: note = Target: SCN10A; (+) strand; PAM type: NRG; PAM sequence: GAG
  source 1..20: mol_type = other DNA
ggatggtaatctctacttca

SEQ ID NO: 39627 - DNA, 20 bp, synthetic construct
  misc_feature 1..20: note = Description of Artificial Sequence: Synthetic oligonucleotide
  misc_feature 1..20: note = Target: SCN10A; (+) strand; PAM type: NRG; PAM sequence: AGG
  source 1..20: mol_type = other DNA
gatggtaatctctacttcag

SEQ ID NO: 39628 - DNA, 20 bp, synthetic construct
  misc_feature 1..20: note = Description of Artificial Sequence: Synthetic oligonucleotide
  misc_feature 1..20: note = Target: SCN10A; (+) strand; PAM type: NRG; PAM sequence: TGG
  source 1..20: mol_type = other DNA
agaggcttttgaactgatga

SEQ ID NO: 39629 - DNA, 20 bp, synthetic construct
  misc_feature 1..20: note = Description of Artificial Sequence: Synthetic oligonucleotide
  misc_feature 1..20: note = Target: SCN10A; (+) strand; PAM type: NRG; PAM sequence: TAG
  source 1..20: mol_type = other DNA
ctgatgatggtattgacact

SEQ ID NO: 39630 - DNA, 20 bp, synthetic construct
  misc_feature 1..20: note = Description of Artificial Sequence: Synthetic oligonucleotide
  misc_feature 1..20: note = Target: SCN10A; (+) strand; PAM type: NRG; PAM sequence: AGG
  source 1..20: mol_type = other DNA
tgatgatggtattgacactt

SEQ ID NO: 39631 - DNA, 20 bp, synthetic construct
  misc_feature 1..20: note = Description of Artificial Sequence: Synthetic oligonucleotide
  misc_feature 1..20: note = Target: SCN10A; (+) strand; PAM type: NRG; PAM sequence: AAG
  source 1..20: mol_type = other DNA
tgatggtattgacacttagg

SEQ ID NO: 39632 - DNA, 20 bp, synthetic construct
  misc_feature 1..20: note = Description of Artificial Sequence: Synthetic oligonucleotide
  misc_feature 1..20: note = Target: SCN10A; (+) strand; PAM type: NRG; PAM sequence: TAG
  source 1..20: mol_type = other DNA
attgacacttaggaagtatt

SEQ ID NO: 39633 - DNA, 20 bp, synthetic construct
  misc_feature 1..20: note = Description of Artificial Sequence: Synthetic oligonucleotide
  misc_feature 1..20: note = Target: SCN10A; (+) strand; PAM type: NRG; PAM sequence: AAG
  source 1..20: mol_type = other DNA
acacttaggaagtatttagc

SEQ ID NO: 39634 - DNA, 20 bp, synthetic construct
  misc_feature 1..20: note = Description of Artificial Sequence: Synthetic oligonucleotide
  misc_feature 1..20: note = Target: SCN10A; (+) strand; PAM type: NRG; PAM sequence: GAG
  source 1..20: mol_type = other DNA
ttaggaagtatttagcaagt

SEQ ID NO: 39635 - DNA, 20 bp, synthetic construct
  misc_feature 1..20: note = Description of Artificial Sequence: Synthetic oligonucleotide
  misc_feature 1..20: note = Target: SCN10A; (+) strand; PAM type: NRG; PAM sequence: GAG
  source 1..20: mol_type = other DNA
aggaagtatttagcaagtga

SEQ ID NO: 39636 - DNA, 20 bp, synthetic construct
  misc_feature 1..20: note = Description of Artificial Sequence: Synthetic oligonucleotide
  misc_feature 1..20: note = Target: SCN10A; (+) strand; PAM type: NRG; PAM sequence: TAG
  source 1..20: mol_type = other DNA
tgtcattaaatatccttctg

SEQ ID NO: 39637 - DNA, 20 bp, synthetic construct
  misc_feature 1..20: note = Description of Artificial Sequence: Synthetic oligonucleotide
  misc_feature 1..20: note = Target: SCN10A; (+) strand; PAM type: NRG; PAM sequence: AAG
  source 1..20: mol_type = other DNA
tctgtagaatctgaaaattc

SEQ ID NO: 39638 - DNA, 20 bp, synthetic construct
  misc_feature 1..20: note = Description of Artificial Sequence: Synthetic oligonucleotide
  misc_feature 1..20: note = Target: SCN10A; (+) strand; PAM type: NRG; PAM sequence: CAG
  source 1..20: mol_type = other DNA
gaatctgaaaattcaagatt

SEQ ID NO: 39639 - DNA, 20 bp, synthetic construct
  misc_feature 1..20: note = Description of Artificial Sequence: Synthetic oligonucleotide
  misc_feature 1..20: note = Target: SCN10A; (+) strand; PAM type: NRG; PAM sequence: CAG
  source 1..20: mol_type = other DNA
tgaaaattcaagattcagct

SEQ ID NO: 39640 - DNA, 20 bp, synthetic construct
  misc_feature 1..20: note = Description of Artificial Sequence: Synthetic oligonucleotide
  misc_feature 1..20: note = Target: SCN10A; (+) strand; PAM type: NRG; PAM sequence: TGG
  source 1..20: mol_type = other DNA
tcagaaaacgtaattcttgc

SEQ ID NO: 39641 - DNA, 20 bp, synthetic construct
  misc_feature 1..20: note = Description of Artificial Sequence: Synthetic oligonucleotide
  misc_feature 1..20: note = Target: SCN10A; (+) strand; PAM type: NRG; PAM sequence: CAG
  source 1..20: mol_type = other DNA
aaaacgtaattcttgctggc

SEQ ID NO: 39642 - DNA, 20 bp, synthetic construct
  misc_feature 1..20: note = Description of Artificial Sequence: Synthetic oligonucleotide
  misc_feature 1..20: note = Target: SCN10A; (+) strand; PAM type: NRG; PAM sequence: CAG
  source 1..20: mol_type = other DNA
cgtaattcttgctggccagc

SEQ ID NO: 39643 - DNA, 20 bp, synthetic construct
  misc_feature 1..20: note = Description of Artificial Sequence: Synthetic oligonucleotide
  misc_feature 1..20: note = Target: SCN10A; (+) strand; PAM type: NRG; PAM sequence: AAG
  source 1..20: mol_type = other DNA
attcttgctggccagccaga

SEQ ID NO: 39644 - DNA, 20 bp, synthetic construct
  misc_feature 1..20: note = Description of Artificial Sequence: Synthetic oligonucleotide
  misc_feature 1..20: note = Target: SCN10A; (+) strand; PAM type: NRG; PAM sequence: AAG
  source 1..20: mol_type = other DNA
cagaaagaaaaaaatgtaaa

SEQ ID NO: 39645 - DNA, 20 bp, synthetic construct
  misc_feature 1..20: note = Description of Artificial Sequence: Synthetic oligonucleotide
  misc_feature 1..20: note = Target: SCN10A; (+) strand; PAM type: NRG; PAM sequence: GAG
  source 1..20: mol_type = other DNA
gaaagaaaaaaatgtaaaaa

SEQ ID NO: 39646 - DNA, 20 bp, synthetic construct
  misc_feature 1..20: note = Description of Artificial Sequence: Synthetic oligonucleotide
  misc_feature 1..20: note = Target: SCN10A; (+) strand; PAM type: NRG; PAM sequence: AAG
  source 1..20: mol_type = other DNA
aaacgtaatgcaacttcatc

SEQ ID NO: 39647 - DNA, 20 bp, synthetic construct
  misc_feature 1..20: note = Description of Artificial Sequence: Synthetic oligonucleotide
  misc_feature 1..20: note = Target: SCN10A; (+) strand; PAM type: NRG; PAM sequence: CAG
  source 1..20: mol_type = other DNA
tgcaacttcatcaagctgtg

SEQ ID NO: 39648 - DNA, 20 bp, synthetic construct
  misc_feature 1..20: note = Description of Artificial Sequence: Synthetic oligonucleotide
  misc_feature 1..20: note = Target: SCN10A; (+) strand; PAM type: NRG; PAM sequence: GAG
  source 1..20: mol_type = other DNA
aagctgtgcagcttcatgtt

SEQ ID NO: 39649 - DNA, 20 bp, synthetic construct
  misc_feature 1..20: note = Description of Artificial Sequence: Synthetic oligonucleotide
  misc_feature 1..20: note = Target: SCN10A; (+) strand; PAM type: NRG; PAM sequence: CAG
  source 1..20: mol_type = other DNA
gcagcttcatgttgagtgtg

SEQ ID NO: 39650 - DNA, 20 bp, synthetic construct
  misc_feature 1..20: note = Description of Artificial Sequence: Synthetic oligonucleotide
  misc_feature 1..20: note = Target: SCN10A; (+) strand; PAM type: NRG; PAM sequence: TAG
  source 1..20: mol_type = other DNA
cttcatgttgagtgtgcaga

SEQ ID NO: 39651 - DNA, 20 bp, synthetic construct
  misc_feature 1..20: note = Description of Artificial Sequence: Synthetic oligonucleotide
  misc_feature 1..20: note = Target: SCN10A; (+) strand; PAM type: NRG; PAM sequence: AAG
  source 1..20: mol_type = other DNA
tgcagatagatgactgtgcc

SEQ ID NO: 39652 - DNA, 20 bp, synthetic construct
  misc_feature 1..20: note = Description of Artificial Sequence: Synthetic oligonucleotide
  misc_feature 1..20: note = Target: SCN10A; (+) strand; PAM type: NRG; PAM sequence: AGG
  source 1..20: mol_type = other DNA
gcagatagatgactgtgcca

SEQ ID NO: 39653 - DNA, 20 bp, synthetic construct
  misc_feature 1..20: note = Description of Artificial Sequence: Synthetic oligonucleotide
  misc_feature 1..20: note = Target: SCN10A; (+) strand; PAM type: NRG; PAM sequence: CAG
  source 1..20: mol_type = other DNA
gatgactgtgccaaggttac

SEQ ID NO: 39654 - DNA, 20 bp, synthetic construct
  misc_feature 1..20: note = Description of Artificial Sequence: Synthetic oligonucleotide
  misc_feature 1..20: note = Target: SCN10A; (+) strand; PAM type: NRG; PAM sequence: CAG
  source 1..20: mol_type = other DNA
ccagctcaatgacaactgtc

SEQ ID NO: 39655 - DNA, 20 bp, synthetic construct
  misc_feature 1..20: note = Description of Artificial Sequence: Synthetic oligonucleotide
  misc_feature 1..20: note = Target: SCN10A; (+) strand; PAM type: NRG; PAM sequence: CAG
  source 1..20: mol_type = other DNA
agaaatccaacaatctgcct

SEQ ID NO: 39656 - DNA, 20 bp, synthetic construct
  misc_feature 1..20: note = Description of Artificial Sequence: Synthetic oligonucleotide
  misc_feature 1..20: note = Target: SCN10A; (+) strand; PAM type: NRG; PAM sequence: GAG
  source 1..20: mol_type = other DNA
aaatccaacaatctgcctca

SEQ ID NO: 39657 - DNA, 20 bp, synthetic construct
  misc_feature 1..20: note = Description of Artificial Sequence: Synthetic oligonucleotide
  misc_feature 1..20: note = Target: SCN10A; (+) strand; PAM type: NRG; PAM sequence: TAG
  source 1..20: mol_type = other DNA
ccaacaatctgcctcagagt

SEQ ID NO: 39658 - DNA, 20 bp, synthetic construct
  misc_feature 1..20: note = Description of Artificial Sequence: Synthetic oligonucleotide
  misc_feature 1..20: note = Target: SCN10A; (+) strand; PAM type: NRG; PAM sequence: AGG
  source 1..20: mol_type = other DNA
caacaatctgcctcagagtt

SEQ ID NO: 39659 - DNA, 20 bp, synthetic construct
  misc_feature 1..20: note = Description of Artificial Sequence: Synthetic oligonucleotide
  misc_feature 1..20: note = Target: SCN10A; (+) strand; PAM type: NRG; PAM sequence: GGG
  source 1..20: mol_type = other DNA
aacaatctgcctcagagtta

SEQ ID NO: 39660 - DNA, 20 bp, synthetic construct
  misc_feature 1..20: note = Description of Artificial Sequence: Synthetic oligonucleotide
  misc_feature 1..20: note = Target: SCN10A; (+) strand; PAM type: NRG; PAM sequence: GAG
  source 1..20: mol_type = other DNA
caatctgcctcagagttagg

SEQ ID NO: 39661 - DNA, 20 bp, synthetic construct
  misc_feature 1..20: note = Description of Artificial Sequence: Synthetic oligonucleotide
  misc_feature 1..20: note = Target: SCN10A; (+) strand; PAM type: NRG; PAM sequence: CAG
  source 1..20: mol_type = other DNA
tctgcctcagagttagggag

SEQ ID NO: 39662 - DNA, 20 bp, synthetic construct
  misc_feature 1..20: note = Description of Artificial Sequence: Synthetic oligonucleotide
  misc_feature 1..20: note = Target: SCN10A; (+) strand; PAM type: NRG; PAM sequence: AGG
  source 1..20: mol_type = other DNA
ctgcctcagagttagggagc

SEQ ID NO: 39663 - DNA, 20 bp, synthetic construct
  misc_feature 1..20: note = Description of Artificial Sequence: Synthetic oligonucleotide
  misc_feature 1..20: note = Target: SCN10A; (+) strand; PAM type: NRG; PAM sequence: GGG
  source 1..20: mol_type = other DNA
tgcctcagagttagggagca

SEQ ID NO: 39664 - DNA, 20 bp, synthetic construct
  misc_feature 1..20: note = Description of Artificial Sequence: Synthetic oligonucleotide
  misc_feature 1..20: note = Target: SCN10A; (+) strand; PAM type: NRG; PAM sequence: TAG
  source 1..20: mol_type = other DNA
ctcagagttagggagcaggg

SEQ ID NO: 39665 - DNA, 20 bp, synthetic construct
  misc_feature 1..20: note = Description of Artificial Sequence: Synthetic oligonucleotide
  misc_feature 1..20: note = Target: SCN10A; (+) strand; PAM type: NRG; PAM sequence: AAG
  source 1..20: mol_type = other DNA
ggtagaactcttttttactg

SEQ ID NO: 39666 - DNA, 20 bp, synthetic construct
  misc_feature 1..20: note = Description of Artificial Sequence: Synthetic oligonucleotide
  misc_feature 1..20: note = Target: SCN10A; (+) strand; PAM type: NRG; PAM sequence: AAG
  source 1..20: mol_type = other DNA
cttttttactgaagccttct

SEQ ID NO: 39667 - DNA, 20 bp, synthetic construct
  misc_feature 1..20: note = Description of Artificial Sequence: Synthetic oligonucleotide
  misc_feature 1..20: note = Target: SCN10A; (+) strand; PAM type: NRG; PAM sequence: AAG
  source 1..20: mol_type = other DNA
ttactgaagccttctaagaa

SEQ ID NO: 39668 - DNA, 20 bp, synthetic construct
  misc_feature 1..20: note = Description of Artificial Sequence: Synthetic oligonucleotide
  misc_feature 1..20: note = Target: SCN10A; (+) strand; PAM type: NRG; PAM sequence: AGG
  source 1..20: mol_type = other DNA
tactgaagccttctaagaaa

SEQ ID NO: 39669 - DNA, 20 bp, synthetic construct
  misc_feature 1..20: note = Description of Artificial Sequence: Synthetic oligonucleotide
  misc_feature 1..20: note = Target: SCN10A; (+) strand; PAM type: NRG; PAM sequence: TGG
  source 1..20: mol_type = other DNA
gaagccttctaagaaaaggc

SEQ ID NO: 39670 - DNA, 20 bp, synthetic construct
  misc_feature 1..20: note = Description of Artificial Sequence: Synthetic oligonucleotide
  misc_feature 1..20: note = Target: SCN10A; (+) strand; PAM type: NRG; PAM sequence: CAG
  source 1..20: mol_type = other DNA
aaaggctggttaccatttgt

SEQ ID NO: 39671 - DNA, 20 bp, synthetic construct
  misc_feature 1..20: note = Description of Artificial Sequence: Synthetic oligonucleotide
  misc_feature 1..20: note = Target: SCN10A; (+) strand; PAM type: NRG; PAM sequence: AGG
  source 1..20: mol_type = other DNA
aaggctggttaccatttgtc

SEQ ID NO: 39672 - DNA, 20 bp, synthetic construct
  misc_feature 1..20: note = Description of Artificial Sequence: Synthetic oligonucleotide
  misc_feature 1..20: note = Target: SCN10A; (+) strand; PAM type: NRG; PAM sequence: GAG
  source 1..20: mol_type = other DNA
ttaccatttgtcaggcaact

SEQ ID NO: 39673 - DNA, 20 bp, synthetic construct
  misc_feature 1..20: note = Description of Artificial Sequence: Synthetic oligonucleotide
  misc_feature 1..20: note = Target: SCN10A; (+) strand; PAM type: NRG; PAM sequence: AGG
  source 1..20: mol_type = other DNA
taccatttgtcaggcaactg

SEQ ID NO: 39674 - DNA, 20 bp, synthetic construct
  misc_feature 1..20: note = Description of Artificial Sequence: Synthetic oligonucleotide
  misc_feature 1..20: note = Target: SCN10A; (+) strand; PAM type: NRG; PAM sequence: CAG
  source 1..20: mol_type = other DNA
catttgtcaggcaactgagg

SEQ ID NO: 39675 - DNA, 20 bp, synthetic construct
  misc_feature 1..20: note = Description of Artificial Sequence: Synthetic oligonucleotide
  misc_feature 1..20: note = Target: SCN10A; (+) strand; PAM type: NRG; PAM sequence: AGG
  source 1..20: mol_type = other DNA
atttgtcaggcaactgaggc

SEQ ID NO: 39676 - DNA, 20 bp, synthetic construct
  misc_feature 1..20: note = Description of Artificial Sequence: Synthetic oligonucleotide
  misc_feature 1..20: note = Target: SCN10A; (+) strand; PAM type: NRG; PAM sequence: AAG
  source 1..20: mol_type = other DNA
cttgtacatcaacctcctgc

SEQ ID NO: 39677 - DNA, 20 bp, synthetic construct
  misc_feature 1..20: note = Description of Artificial Sequence: Synthetic oligonucleotide
  misc_feature 1..20: note = Target: SCN10A; (+) strand; PAM type: NRG; PAM sequence: CAG
  source 1..20: mol_type = other DNA
tacatcaacctcctgcaagc

SEQ ID NO: 39678 - DNA, 20 bp, synthetic construct
  misc_feature 1..20: note = Description of Artificial Sequence: Synthetic oligonucleotide
  misc_feature 1..20: note = Target: SCN10A; (+) strand; PAM type: NRG; PAM sequence: AGG
  source 1..20: mol_type = other DNA
acatcaacctcctgcaagcc

SEQ ID NO: 39679 - DNA, 20 bp, synthetic construct
  misc_feature 1..20: note = Description of Artificial Sequence: Synthetic oligonucleotide
  misc_feature 1..20: note = Target: SCN10A; (+) strand; PAM type: NRG; PAM sequence: GGG
  source 1..20: mol_type = other DNA
catcaacctcctgcaagcca

SEQ ID NO: 39680 - DNA, 20 bp, synthetic construct
  misc_feature 1..20: note = Description of Artificial Sequence: Synthetic oligonucleotide
  misc_feature 1..20: note = Target: SCN10A; (+) strand; PAM type: NRG; PAM sequence: AAG
  source 1..20: mol_type = other DNA
ccagggctaaatttgtcata

SEQ ID NO: 39681 - DNA, 20 bp, synthetic construct
  misc_feature 1..20: note = Description of Artificial Sequence: Synthetic oligonucleotide
  misc_feature 1..20: note = Target: SCN10A; (+) strand; PAM type: NRG; PAM sequence: AAG
  source 1..20: mol_type = other DNA
ttccaatccttccgatgacc

SEQ ID NO: 39682 - DNA, 20 bp, synthetic construct
  misc_feature 1..20: note = Description of Artificial Sequence: Synthetic oligonucleotide
  misc_feature 1..20: note = Target: SCN10A; (+) strand; PAM type: NRG; PAM sequence: AGG
  source 1..20: mol_type = other DNA
tccaatccttccgatgacca

SEQ ID NO: 39683 - DNA, 20 bp, synthetic construct
  misc_feature 1..20: note = Description of Artificial Sequence: Synthetic oligonucleotide
  misc_feature 1..20: note = Target: SCN10A; (+) strand; PAM type: NRG; PAM sequence: TAG
  source 1..20: mol_type = other DNA
cttccgatgaccaaggatct

SEQ ID NO: 39684 - DNA, 20 bp, synthetic construct
  misc_feature 1..20: note = Description of Artificial Sequence: Synthetic oligonucleotide
  misc_feature 1..20: note = Target: SCN10A; (+) strand; PAM type: NRG; PAM sequence: AGG
  source 1..20: mol_type = other DNA
ttccgatgaccaaggatctt

SEQ ID NO: 39685 - DNA, 20 bp, synthetic construct
  misc_feature 1..20: note = Description of Artificial Sequence: Synthetic oligonucleotide
  misc_feature 1..20: note = Target: SCN10A; (+) strand; PAM type: NRG; PAM sequence: TAG
  source 1..20: mol_type = other DNA
gaccaaggatcttaggtcat

SEQ ID NO: 39686 - DNA, 20 bp, synthetic construct
  misc_feature 1..20: note = Description of Artificial Sequence: Synthetic oligonucleotide
  misc_feature 1..20: note = Target: SCN10A; (+) strand; PAM type: NRG; PAM sequence: AGG
  source 1..20: mol_type = other DNA
accaaggatcttaggtcatt

SEQ ID NO: 39687 - DNA, 20 bp, synthetic construct
  misc_feature 1..20: note = Description of Artificial Sequence: Synthetic oligonucleotide
  misc_feature 1..20: note = Target: SCN10A; (+) strand; PAM type: NRG; PAM sequence: TAG
  source 1..20: mol_type = other DNA
ggtcattaggatctttccat

SEQ ID NO: 39688 - DNA, 20 bp, synthetic construct
  misc_feature 1..20: note = Description of Artificial Sequence: Synthetic oligonucleotide
  misc_feature 1..20: note = Target: SCN10A; (+) strand; PAM type: NRG; PAM sequence: AGG
  source 1..20: mol_type = other DNA
gtcattaggatctttccatt

SEQ ID NO: 39689 - DNA, 20 bp, synthetic construct
  misc_feature 1..20: note = Description of Artificial Sequence: Synthetic oligonucleotide
  misc_feature 1..20: note = Target: SCN10A; (+) strand; PAM type: NRG; PAM sequence: CAG
  source 1..20: mol_type = other DNA
atctttccattaggatcacc

SEQ ID NO: 39690 - DNA, 20 bp, synthetic construct
  misc_feature 1..20: note = Description of Artificial Sequence: Synthetic oligonucleotide
  misc_feature 1..20: note = Target: SCN10A; (+) strand; PAM type: NRG; PAM sequence: AGG
  source 1..20: mol_type = other DNA
tctttccattaggatcaccc

SEQ ID NO: 39691 - DNA, 20 bp, synthetic construct
  misc_feature 1..20: note = Description of Artificial Sequence: Synthetic oligonucleotide
  misc_feature 1..20: note = Target: SCN10A; (+) strand; PAM type: NRG; PAM sequence: AAG
  source 1..20: mol_type = other DNA
ttccattaggatcacccagg

SEQ ID NO: 39692 - DNA, 20 bp, synthetic construct
  misc_feature 1..20: note = Description of Artificial Sequence: Synthetic oligonucleotide
  misc_feature 1..20: note = Target: SCN10A; (+) strand; PAM type: NRG; PAM sequence: TAG
  source 1..20: mol_type = other DNA
aggatcacccaggaagatct

SEQ ID NO: 39693 - DNA, 20 bp, synthetic construct
  misc_feature 1..20: note = Description of Artificial Sequence: Synthetic oligonucleotide
  misc_feature 1..20: note = Target: SCN10A; (+) strand; PAM type: NRG; PAM sequence: AGG
  source 1..20: mol_type = other DNA
ggatcacccaggaagatctt

SEQ ID NO: 39694 - DNA, 20 bp, synthetic construct
  misc_feature 1..20: note = Description of Artificial Sequence: Synthetic oligonucleotide
  misc_feature 1..20: note = Target: SCN10A; (+) strand; PAM type: NRG; PAM sequence: AAG
  source 1..20: mol_type = other DNA
gatcttaggaaaccaaacca

SEQ ID NO: 39695 - DNA, 20 bp, synthetic construct
  misc_feature 1..20: note = Description of Artificial Sequence: Synthetic oligonucleotide
  misc_feature 1..20: note = Target: SCN10A; (+) strand; PAM type: NRG; PAM sequence: TAG
  source 1..20: mol_type = other DNA
ccaaagtatcttttttctac

SEQ ID NO: 39696 - DNA, 20 bp, synthetic construct
  misc_feature 1..20: note = Description of Artificial Sequence: Synthetic oligonucleotide
  misc_feature 1..20: note = Target: SCN10A; (+) strand; PAM type: NRG; PAM sequence: TGG
  source 1..20: mol_type = other DNA
gtatcttttttctactagtt

SEQ ID NO: 39697 - DNA, 20 bp, synthetic construct
  misc_feature 1..20: note = Description of Artificial Sequence: Synthetic oligonucleotide
  misc_feature 1..20: note = Target: SCN10A; (+) strand; PAM type: NRG; PAM sequence: AAG
  source 1..20: mol_type = other DNA
tgccttgcaaaatcccctga

SEQ ID NO: 39698 - DNA, 20 bp, synthetic construct
  misc_feature 1..20: note = Description of Artificial Sequence: Synthetic oligonucleotide
  misc_feature 1..20: note = Target: SCN10A; (+) strand; PAM type: NRG; PAM sequence: CAG
  source 1..20: mol_type = other DNA
cttgcaaaatcccctgaaag

SEQ ID NO: 39699 - DNA, 20 bp, synthetic construct
  misc_feature 1..20: note = Description of Artificial Sequence: Synthetic oligonucleotide
  misc_feature 1..20: note = Target: SCN10A; (+) strand; PAM type: NRG; PAM sequence: TAG
  source 1..20: mol_type = other DNA
attacctaaaacaattcata

SEQ ID NO: 39700 - DNA, 20 bp, synthetic construct
  misc_feature 1..20: note = Description of Artificial Sequence: Synthetic oligonucleotide
  misc_feature 1..20: note = Target: SCN10A; (+) strand; PAM type: NRG; PAM sequence: TAG
  source 1..20: mol_type = other DNA
acctaaaacaattcatatag

SEQ ID NO: 39701 - DNA, 20 bp, synthetic construct
  misc_feature 1..20: note = Description of Artificial Sequence: Synthetic oligonucleotide
  misc_feature 1..20: note = Target: SCN10A; (+) strand; PAM type: NRG; PAM sequence: CAG
  source 1..20: mol_type = other DNA
caatgtgtctctaatcatta

SEQ ID NO: 39702 - DNA, 20 bp, synthetic construct
  misc_feature 1..20: note = Description of Artificial Sequence: Synthetic oligonucleotide
  misc_feature 1..20: note = Target: SCN10A; (+) strand; PAM type: NRG; PAM sequence: TGG
  source 1..20: mol_type = other DNA
ctaatcattacagtcttgta

SEQ ID NO: 39703 - DNA, 20 bp, synthetic construct
  misc_feature 1..20: note = Description of Artificial Sequence: Synthetic oligonucleotide
  misc_feature 1..20: note = Target: SCN10A; (+) strand; PAM type: NRG; PAM sequence: CAG
  source 1..20: mol_type = other DNA
gtcttgtatggcatgaacat

SEQ ID NO: 39704 - DNA, 20 bp, synthetic construct
  misc_feature 1..20: note = Description of Artificial Sequence: Synthetic oligonucleotide
  misc_feature 1..20: note = Target: SCN10A; (+) strand; PAM type: NRG; PAM sequence: TAG
  source 1..20: mol_type = other DNA
tattgacattttaaacctgc

SEQ ID NO: 39705 - DNA, 20 bp, synthetic construct
  misc_feature 1..20: note = Description of Artificial Sequence: Synthetic oligonucleotide
  misc_feature 1..20: note = Target: SCN10A; (+) strand; PAM type: NRG; PAM sequence: TAG
  source 1..20: mol_type = other DNA
tgacattttaaacctgctag

SEQ ID NO: 39706 - DNA, 20 bp, synthetic construct
  misc_feature 1..20: note = Description of Artificial Sequence: Synthetic oligonucleotide
  misc_feature 1..20: note = Target: SCN10A; (+) strand; PAM type: NRG; PAM sequence: GAG
  source 1..20: mol_type = other DNA
taaacctgctagtagttttt

SEQ ID NO: 39707 - DNA, 20 bp, synthetic construct
  misc_feature 1..20: note = Description of Artificial Sequence: Synthetic oligonucleotide
  misc_feature 1..20: note = Target: SCN10A; (+) strand; PAM type: NRG; PAM sequence: CAG
  source 1..20: mol_type = other DNA
tgagtaatttgtgatgttaa

SEQ ID NO: 39708 - DNA, 20 bp, synthetic construct
  misc_feature 1..20: note = Description of Artificial Sequence: Synthetic oligonucleotide
  misc_feature 1..20: note = Target: SCN10A; (+) strand; PAM type: NRG; PAM sequence: GAG
  source 1..20: mol_type = other DNA
aacagtgccccatgaccaat

SEQ ID NO: 39709 - DNA, 20 bp, synthetic construct
  misc_feature 1..20: note = Description of Artificial Sequence: Synthetic oligonucleotide
  misc_feature 1..20: note = Target: SCN10A; (+) strand; PAM type: NRG; PAM sequence: AGG
  source 1..20: mol_type = other DNA
acagtgccccatgaccaatg

SEQ ID NO: 39710 - DNA, 20 bp, synthetic construct
  misc_feature 1..20: note = Description of Artificial Sequence: Synthetic oligonucleotide
  misc_feature 1..20: note = Target: SCN10A; (+) strand; PAM type: NRG; PAM sequence: GAG
  source 1..20: mol_type = other DNA
atgaccaatgaggtcccatt

SEQ ID NO: 39711 - DNA, 20 bp, synthetic construct
  misc_feature 1..20: note = Description of Artificial Sequence: Synthetic oligonucleotide
  misc_feature 1..20: note = Target: SCN10A; (+) strand; PAM type: NRG; PAM sequence: TGG
  source 1..20: mol_type = other DNA
tatgtgtgctcttcccatca

SEQ ID NO: 39712 - DNA, 20 bp, synthetic construct
  misc_feature 1..20: note = Description of Artificial Sequence: Synthetic oligonucleotide
  misc_feature 1..20: note = Target: SCN10A; (+) strand; PAM type: NRG; PAM sequence: TGG
  source 1..20: mol_type = other DNA
ggtctgttttccttgccctc

SEQ ID NO: 39713 - DNA, 20 bp, synthetic construct
  misc_feature 1..20: note = Description of Artificial Sequence: Synthetic oligonucleotide
  misc_feature 1..20: note = Target: SCN10A; (+) strand; PAM type: NRG; PAM sequence: GGG
  source 1..20: mol_type = other DNA
gtctgttttccttgccctct

SEQ ID NO: 39714 - DNA, 20 bp, synthetic construct
  misc_feature 1..20: note = Description of Artificial Sequence: Synthetic oligonucleotide
  misc_feature 1..20: note = Target: SCN10A; (+) strand; PAM type: NRG; PAM sequence: GAG
  source 1..20: mol_type = other DNA
ctgttttccttgccctctgg

SEQ ID NO: 39715 - DNA, 20 bp, synthetic construct
  misc_feature 1..20: note = Description of Artificial Sequence: Synthetic oligonucleotide
  misc_feature 1..20: note = Target: SCN10A; (+) strand; PAM type: NRG; PAM sequence: AGG
  source 1..20: mol_type = other DNA
tgttttccttgccctctggg

SEQ ID NO: 39716 - DNA, 20 bp, synthetic construct
  misc_feature 1..20: note = Description of Artificial Sequence: Synthetic oligonucleotide
  misc_feature 1..20: note = Target: SCN10A; (+) strand; PAM type: NRG; PAM sequence: CAG
  source 1..20: mol_type = other DNA
ggaggtgctgctcttttgcc

SEQ ID NO: 39717 - DNA, 20 bp, synthetic construct
  misc_feature 1..20: note = Description of Artificial Sequence: Synthetic oligonucleotide
  misc_feature 1..20: note = Target: SCN10A; (+) strand; PAM type: NRG; PAM sequence: AAG
  source 1..20: mol_type = other DNA
gtgctgctcttttgcccagt

SEQ ID NO: 39718 - DNA, 20 bp, synthetic construct
  misc_feature 1..20: note = Description of Artificial Sequence: Synthetic oligonucleotide
  misc_feature 1..20: note = Target: SCN10A; (+) strand; PAM type: NRG; PAM sequence: CAG
  source 1..20: mol_type = other DNA
ctgctcttttgcccagtaag

SEQ ID NO: 39719 - DNA, 20 bp, synthetic construct
  misc_feature 1..20: note = Description of Artificial Sequence: Synthetic oligonucleotide
  misc_feature 1..20: note = Target: SCN10A; (+) strand; PAM type: NRG; PAM sequence: CAG
  source 1..20: mol_type = other DNA
cccagtaagcagccacttct

SEQ ID NO: 39720 - DNA, 20 bp, synthetic construct
  misc_feature 1..20: note = Description of Artificial Sequence: Synthetic oligonucleotide
  misc_feature 1..20: note = Target: SCN10A; (+) strand; PAM type: NRG; PAM sequence: TGG
  source 1..20: mol_type = other DNA
taagcagccacttctcagca

SEQ ID NO: 39721 - DNA, 20 bp, synthetic construct
  misc_feature 1..20: note = Description of Artificial Sequence: Synthetic oligonucleotide
  misc_feature 1..20: note = Target: SCN10A; (+) strand; PAM type: NRG; PAM sequence: TGG
  source 1..20: mol_type = other DNA
gccacttctcagcatggcta

SEQ ID NO: 39722 - DNA, 20 bp, synthetic construct
  misc_feature 1..20: note = Description of Artificial Sequence: Synthetic oligonucleotide
  misc_feature 1..20: note = Target: SCN10A; (+) strand; PAM type: NRG; PAM sequence: CAG
  source 1..20: mol_type = other DNA
ttctcagcatggctatggca

SEQ ID NO: 39723 - DNA, 20 bp, synthetic construct
  misc_feature 1..20: note = Description of Artificial Sequence: Synthetic oligonucleotide
  misc_feature 1..20: note = Target: SCN10A; (+) strand; PAM type: NRG; PAM sequence: GAG
  source 1..20: mol_type = other DNA
ctcagcatggctatggcaca

SEQ ID NO: 39724 - DNA, 20 bp, synthetic construct
  misc_feature 1..20: note = Description of Artificial Sequence: Synthetic oligonucleotide
  misc_feature 1..20: note = Target: SCN10A; (+) strand; PAM type: NRG; PAM sequence: AAG
  source 1..20: mol_type = other DNA
atgcctatctcatctgccca

SEQ ID NO: 39725 - DNA, 20 bp, synthetic construct
  misc_feature 1..20: note = Description of Artificial Sequence: Synthetic oligonucleotide
  misc_feature 1..20: note = Target: SCN10A; (+) strand; PAM type: NRG; PAM sequence: AAG
  source 1..20: mol_type = other DNA
cctatctcatctgcccaaag

SEQ ID NO: 39726 - DNA, 20 bp, synthetic construct
  misc_feature 1..20: note = Description of Artificial Sequence: Synthetic oligonucleotide
  misc_feature 1..20: note = Target: SCN10A; (+) strand; PAM type: NRG; PAM sequence: AGG
  source 1..20: mol_type = other DNA
ctatctcatctgcccaaaga

SEQ ID NO: 39727 - DNA, 20 bp, synthetic construct
  misc_feature 1..20: note = Description of Artificial Sequence: Synthetic oligonucleotide
  misc_feature 1..20: note = Target: SCN10A; (+) strand; PAM type: NRG; PAM sequence: TGG
  source 1..20: mol_type = other DNA
tcatctgcccaaagaaggct

SEQ ID NO: 39728 - DNA, 20 bp, synthetic construct
  misc_feature 1..20: note = Description of Artificial Sequence: Synthetic oligonucleotide
  misc_feature 1..20: note = Target: SCN10A; (+) strand; PAM type: NRG; PAM sequence: GGG
  source 1..20: mol_type = other DNA
catctgcccaaagaaggctt

SEQ ID NO: 39729 - DNA, 20 bp, synthetic construct
  misc_feature 1..20: note = Description of Artificial Sequence: Synthetic oligonucleotide
  misc_feature 1..20: note = Target: SCN10A; (+) strand; PAM type: NRG; PAM sequence: TGG
  source 1..20: mol_type = other DNA
tcttactgcctgttgtgttg

SEQ ID NO: 39730 - DNA, 20 bp, synthetic construct
  misc_feature 1..20: note = Description of Artificial Sequence: Synthetic oligonucleotide
  misc_feature 1..20: note = Target: SCN10A; (+) strand; PAM type: NRG; PAM sequence: GGG
  source 1..20: mol_type = other DNA
cttactgcctgttgtgttgt

SEQ ID NO: 39731 - DNA, 20 bp, synthetic construct
  misc_feature 1..20: note = Description of Artificial Sequence: Synthetic oligonucleotide
  misc_feature 1..20: note = Target: SCN10A; (+) strand; PAM type: NRG; PAM sequence: GGG
  source 1..20: mol_type = other DNA
ttactgcctgttgtgttgtg

SEQ ID NO: 39732 - DNA, 20 bp, synthetic construct
  misc_feature 1..20: note = Description of Artificial Sequence: Synthetic oligonucleotide
  misc_feature 1..20: note = Target: SCN10A; (+) strand; PAM type: NRG; PAM sequence: AAG
  source 1..20: mol_type = other DNA
tgcctgttgtgttgtgggga

SEQ ID NO: 39733 - DNA, 20 bp, synthetic construct
  misc_feature 1..20: note = Description of Artificial Sequence: Synthetic oligonucleotide
  misc_feature 1..20: note = Target: SCN10A; (+) strand; PAM type: NRG; PAM sequence: CGG
  source 1..20: mol_type = other DNA
ctgttgtgttgtggggaaag

SEQ ID NO: 39734 - DNA, 20 bp, synthetic construct
  misc_feature 1..20: note = Description of Artificial Sequence: Synthetic oligonucleotide
  misc_feature 1..20: note = Target: SCN10A; (+) strand; PAM type: NRG; PAM sequence: TGG
  source 1..20: mol_type = other DNA
ggaaagcggaccacacaccg

SEQ ID NO: 39735 - DNA, 20 bp, synthetic construct
  misc_feature 1..20: note = Description of Artificial Sequence: Synthetic oligonucleotide
  misc_feature 1..20: note = Target: SCN10A; (+) strand; PAM type: NRG; PAM sequence: GAG
  source 1..20: mol_type = other DNA
agcggaccacacaccgtggt

SEQ ID NO: 39736 - DNA, 20 bp, synthetic construct
  misc_feature 1..20: note = Description of Artificial Sequence: Synthetic oligonucleotide
  misc_feature 1..20: note = Target: SCN10A; (+) strand; PAM type: NRG; PAM sequence: TGG
  source 1..20: mol_type = other DNA
caccgtggtgagaatgtgtc

SEQ ID NO: 39737 - DNA, 20 bp, synthetic construct
  misc_feature 1..20: note = Description of Artificial Sequence: Synthetic oligonucleotide
  misc_feature 1..20: note = Target: SCN10A; (+) strand; PAM type: NRG; PAM sequence: GGG
  source 1..20: mol_type = other DNA
accgtggtgagaatgtgtct

SEQ ID NO: 39738 - DNA, 20 bp, synthetic construct
  misc_feature 1..20: note = Description of Artificial Sequence: Synthetic oligonucleotide
  misc_feature 1..20: note = Target: SCN10A; (+) strand; PAM type: NRG; PAM sequence: GGG
  source 1..20: mol_type = other DNA
ccgtggtgagaatgtgtctg

SEQ ID NO: 39739 - DNA, 20 bp, synthetic construct
  misc_feature 1..20: note = Description of Artificial Sequence: Synthetic oligonucleotide
  misc_feature 1..20: note = Target: SCN10A; (+) strand; PAM type: NRG; PAM sequence: GGG
  source 1..20: mol_type = other DNA
cgtggtgagaatgtgtctgg

SEQ ID NO: 39740 - DNA, 20 bp, synthetic construct
  misc_feature 1..20: note = Description of Artificial Sequence: Synthetic oligonucleotide
  misc_feature 1..20: note = Target: SCN10A; (+) strand; PAM type: NRG; PAM sequence: CAG
  source 1..20: mol_type = other DNA
gagaatgtgtctgggggcat

SEQ ID NO: 39741 - DNA, 20 bp, synthetic construct
  misc_feature 1..20: note = Description of Artificial Sequence: Synthetic oligonucleotide
  misc_feature 1..20: note = Target: SCN10A; (+) strand; PAM type: NRG; PAM sequence: AAG
  source 1..20: mol_type = other DNA
tcagcaaacctcccctcata

SEQ ID NO: 39742 - DNA, 20 bp, synthetic construct
  misc_feature 1..20: note = Description of Artificial Sequence: Synthetic oligonucleotide
  misc_feature 1..20: note = Target: SCN10A; (+) strand; PAM type: NRG; PAM sequence: GAG
  source 1..20: mol_type = other DNA
agcaaacctcccctcataaa

SEQ ID NO: 39743 - DNA, 20 bp, synthetic construct
  misc_feature 1..20: note = Description of Artificial Sequence: Synthetic oligonucleotide
  misc_feature 1..20: note = Target: SCN10A; (+) strand; PAM type: NRG; PAM sequence: AGG
  source 1..20: mol_type = other DNA
gcaaacctcccctcataaag

SEQ ID NO: 39744 - DNA, 20 bp, synthetic construct
  misc_feature 1..20: note = Description of Artificial Sequence: Synthetic oligonucleotide
  misc_feature 1..20: note = Target: SCN10A; (+) strand; PAM type: NRG; PAM sequence: AAG
  source 1..20: mol_type = other DNA
tcataaagaggatgtttttc

SEQ ID NO: 39745 - DNA, 20 bp, synthetic construct
  misc_feature 1..20: note = Description of Artificial Sequence: Synthetic oligonucleotide
  misc_feature 1..20: note = Target: SCN10A; (+) strand; PAM type: NRG; PAM sequence: CAG
  source 1..20: mol_type = other DNA
tttttcaagttgtgcatcca

SEQ ID NO: 39746 - DNA, 20 bp, synthetic construct
  misc_feature 1..20: note = Description of Artificial Sequence: Synthetic oligonucleotide
  misc_feature 1..20: note = Target: SCN10A; (+) strand; PAM type: NRG; PAM sequence: AGG
  source 1..20: mol_type = other DNA
ttttcaagttgtgcatccac

SEQ ID NO: 39747 - DNA, 20 bp, synthetic construct
  misc_feature 1..20: note = Description of Artificial Sequence: Synthetic oligonucleotide
  misc_feature 1..20: note = Target: SCN10A; (+) strand; PAM type: NRG; PAM sequence: TAG
  source 1..20: mol_type = other DNA
tgtgcatccacaggtgtgtc

SEQ ID NO: 39748 - DNA, 20 bp, synthetic construct
  misc_feature 1..20: note = Description of Artificial Sequence: Synthetic oligonucleotide
  misc_feature 1..20: note = Target: SCN10A; (+) strand; PAM type: NRG; PAM sequence: TAG
  source 1..20: mol_type = other DNA
atccacaggtgtgtctagat

SEQ ID NO: 39749 - DNA, 20 bp, synthetic construct
  misc_feature 1..20: note = Description of Artificial Sequence: Synthetic oligonucleotide
  misc_feature 1..20: note = Target: SCN10A; (+) strand; PAM type: NRG; PAM sequence: GAG
  source 1..20: mol_type = other DNA
aggtgtgtctagattagtct

SEQ ID NO: 39750 - DNA, 20 bp, synthetic construct
  misc_feature 1..20: note = Description of Artificial Sequence: Synthetic oligonucleotide
  misc_feature 1..20: note = Target: SCN10A; (+) strand; PAM type: NRG; PAM sequence: AGG
  source 1..20: mol_type = other DNA
ggtgtgtctagattagtctg

SEQ ID NO: 39751 - DNA, 20 bp, synthetic construct
  misc_feature 1..20: note = Description of Artificial Sequence: Synthetic oligonucleotide
  misc_feature 1..20: note = Target: SCN10A; (+) strand; PAM type: NRG; PAM sequence: TGG
  source 1..20: mol_type = other DNA
taaacacttcttctgtgtct

SEQ ID NO: 39752 - DNA, 20 bp, synthetic construct
  misc_feature 1..20: note = Description of Artificial Sequence: Synthetic oligonucleotide
  misc_feature 1..20: note = Target: SCN10A; (+) strand; PAM type: NRG; PAM sequence: GGG
  source 1..20: mol_type = other DNA
aaacacttcttctgtgtctt

SEQ ID NO: 39753 - DNA, 20 bp, synthetic construct
  misc_feature 1..20: note = Description of Artificial Sequence: Synthetic oligonucleotide
  misc_feature 1..20: note = Target: SCN10A; (+) strand; PAM type: NRG; PAM sequence: TGG
  source 1..20: mol_type = other DNA
tctgtgtcttgggactgctt

SEQ ID NO: 39754 - DNA, 20 bp, synthetic construct
  misc_feature 1..20: note = Description of Artificial Sequence: Synthetic oligonucleotide
  misc_feature 1..20: note = Target: SCN10A; (+) strand; PAM type: NRG; PAM sequence: GGG
  source 1..20: mol_type = other DNA
ctgtgtcttgggactgcttt

SEQ ID NO: 39755 - DNA, 20 bp, synthetic construct
  misc_feature 1..20: note = Description of Artificial Sequence: Synthetic oligonucleotide
  misc_feature 1..20: note = Target: SCN10A; (+) strand; PAM type: NRG; PAM sequence: GGG
  source 1..20: mol_type = other DNA
tgtgtcttgggactgctttg

SEQ ID NO: 39756 - DNA, 20 bp, synthetic construct
  misc_feature 1..20: note = Description of Artificial Sequence: Synthetic oligonucleotide
  misc_feature 1..20: note = Target: SCN10A; (+) strand; PAM type: NRG; PAM sequence: TGG
  source 1..20: mol_type = other DNA
cttgggactgctttggggtg

SEQ ID NO: 39757 - DNA, 20 bp, synthetic construct
  misc_feature 1..20: note = Description of Artificial Sequence: Synthetic oligonucleotide
  misc_feature 1..20: note = Target: SCN10A; (+) strand; PAM type: NRG; PAM sequence: GGG
  source 1..20: mol_type = other DNA
ttgggactgctttggggtgt

SEQ ID NO: 39758 - DNA, 20 bp, synthetic construct
  misc_feature 1..20: note = Description of Artificial Sequence: Synthetic oligonucleotide
  misc_feature 1..20: note = Target: SCN10A; (+) strand; PAM type: NRG; PAM sequence: AAG
  source 1..20: mol_type = other DNA
ttggggtgtgggacacatta

SEQ ID NO: 39759 - DNA, 20 bp, synthetic construct
  misc_feature 1..20: note = Description of Artificial Sequence: Synthetic oligonucleotide
  misc_feature 1..20: note = Target: SCN10A; (+) strand; PAM type: NRG; PAM sequence: AGG
  source 1..20: mol_type = other DNA
tggggtgtgggacacattaa

SEQ ID NO: 39760 - DNA, 20 bp, synthetic construct
  misc_feature 1..20: note = Description of Artificial Sequence: Synthetic oligonucleotide
  misc_feature 1..20: note = Target: SCN10A; (+) strand; PAM type: NRG; PAM sequence: AAG
  source 1..20: mol_type = other DNA
gtgggacacattaaaggccc

SEQ ID NO: 39761 - DNA, 20 bp, synthetic construct
  misc_feature 1..20: note = Description of Artificial Sequence: Synthetic oligonucleotide
  misc_feature 1..20: note = Target: SCN10A; (+) strand; PAM type: NRG; PAM sequence: TGG
  source 1..20: mol_type = other DNA
taatgacctcattgtacttt

SEQ ID NO: 39762 - DNA, 20 bp, synthetic construct
  misc_feature 1..20: note = Description of Artificial Sequence: Synthetic oligonucleotide
  misc_feature 1..20: note = Target: SCN10A; (+) strand; PAM type: NRG; PAM sequence: GGG
  source 1..20: mol_type = other DNA
aatgacctcattgtactttt

SEQ ID NO: 39763 - DNA, 20 bp, synthetic construct
  misc_feature 1..20: note = Description of Artificial Sequence: Synthetic oligonucleotide
  misc_feature 1..20: note = Target: SCN10A; (+) strand; PAM type: NRG; PAM sequence: TGG
  source 1..20: mol_type = other DNA
ttgtacttttgggattcaat

SEQ ID NO: 39764 - DNA, 20 bp, synthetic construct
  misc_feature 1..20: note = Description of Artificial Sequence: Synthetic oligonucleotide
  misc_feature 1..20: note = Target: SCN10A; (+) strand; PAM type: NRG; PAM sequence: AAG
  source 1..20: mol_type = other DNA
cttttgggattcaattggat

SEQ ID NO: 39765 - DNA, 20 bp, synthetic construct
  misc_feature 1..20: note = Description of Artificial Sequence: Synthetic oligonucleotide
  misc_feature 1..20: note = Target: SCN10A; (+) strand; PAM type: NRG; PAM sequence: AGG
  source 1..20: mol_type = other DNA
ttttgggattcaattggata

SEQ ID NO: 39766 - DNA, 20 bp, synthetic construct
  misc_feature 1..20: note = Description of Artificial Sequence: Synthetic oligonucleotide
  misc_feature 1..20: note = Target: SCN10A; (+) strand; PAM type: NRG; PAM sequence: GGG
  source 1..20: mol_type = other DNA
tttgggattcaattggataa

SEQ ID NO: 39767 - DNA, 20 bp, synthetic construct
  misc_feature 1..20: note = Description of Artificial Sequence: Synthetic oligonucleotide
  misc_feature 1..20: note = Target: SCN10A; (+) strand; PAM type: NRG; PAM sequence: AAG
  source 1..20: mol_type = other DNA
ggctctgttgctaacctcta

SEQ ID NO: 39768 - DNA, 20 bp, synthetic construct
  misc_feature 1..20: note = Description of Artificial Sequence: Synthetic oligonucleotide
  misc_feature 1..20: note = Target: SCN10A; (+) strand; PAM type: NRG; PAM sequence: AAG
  source 1..20: mol_type = other DNA
tctgttgctaacctctaaag

SEQ ID NO: 39769 - DNA, 20 bp, synthetic construct
  misc_feature 1..20: note = Description of Artificial Sequence: Synthetic oligonucleotide
  misc_feature 1..20: note = Target: SCN10A; (+) strand; PAM type: NRG; PAM sequence: AGG
  source 1..20: mol_type = other DNA
ctgttgctaacctctaaaga

SEQ ID NO: 39770 - DNA, 20 bp, synthetic construct
  misc_feature 1..20: note = Description of Artificial Sequence: Synthetic oligonucleotide
  misc_feature 1..20: note = Target: SCN10A; (+) strand; PAM type: NRG; PAM sequence: TGG
  source 1..20: mol_type = other DNA
ctaacctctaaagaaggtac

SEQ ID NO: 39771 - DNA, 20 bp, synthetic construct
  misc_feature 1..20: note = Description of Artificial Sequence: Synthetic oligonucleotide
  misc_feature 1..20: note = Target: SCN10A; (+) strand; PAM type: NRG; PAM sequence: CAG
  source 1..20: mol_type = other DNA
tctaaagaaggtactggaca

SEQ ID NO: 39772 - DNA, 20 bp, synthetic construct
  misc_feature 1..20: note = Description of Artificial Sequence: Synthetic oligonucleotide
  misc_feature 1..20: note = Target: SCN10A; (+) strand; PAM type: NRG; PAM sequence: TAG
  source 1..20: mol_type = other DNA
aaagaaggtactggacacag

SEQ ID NO: 39773 - DNA, 20 bp, synthetic construct
  misc_feature 1..20: note = Description of Artificial Sequence: Synthetic oligonucleotide
  misc_feature 1..20: note = Target: SCN10A; (+) strand; PAM type: NRG; PAM sequence: AGG
  source 1..20: mol_type = other DNA
aagaaggtactggacacagt

SEQ ID NO: 39774 - DNA, 20 bp, synthetic construct
  misc_feature 1..20: note = Description of Artificial Sequence: Synthetic oligonucleotide
  misc_feature 1..20: note = Target: SCN10A; (+) strand; PAM type: NRG; PAM sequence: AAG
  source 1..20: mol_type = other DNA
aggtactggacacagtaggc

SEQ ID NO: 39775 - DNA, 20 bp, synthetic construct
  misc_feature 1..20: note = Description of Artificial Sequence: Synthetic oligonucleotide
  misc_feature 1..20: note = Target: SCN10A; (+) strand; PAM type: NRG; PAM sequence: AGG
  source 1..20: mol_type = other DNA
ggtactggacacagtaggca

SEQ ID NO: 39776 - DNA, 20 bp, synthetic construct
  misc_feature 1..20: note = Description of Artificial Sequence: Synthetic oligonucleotide
  misc_feature 1..20: note = Target: SCN10A; (+) strand; PAM type: NRG; PAM sequence: TGG
  source 1..20: mol_type = other DNA
caaggtctaattgtaacacg

SEQ ID NO: 39777 - DNA, 20 bp, synthetic construct
  misc_feature 1..20: note = Description of Artificial Sequence: Synthetic oligonucleotide
  misc_feature 1..20: note = Target: SCN10A; (+) strand; PAM type: NRG; PAM sequence: AAG
  source 1..20: mol_type = other DNA
ggtctaattgtaacacgtgg

SEQ ID NO: 39778 - DNA, 20 bp, synthetic construct
  misc_feature 1..20: note = Description of Artificial Sequence: Synthetic oligonucleotide
  misc_feature 1..20: note = Target: SCN10A; (+) strand; PAM type: NRG; PAM sequence: GAG
  source 1..20: mol_type = other DNA
tctaattgtaacacgtggaa

SEQ ID NO: 39779 - DNA, 20 bp, synthetic construct
  misc_feature 1..20: note = Description of Artificial Sequence: Synthetic oligonucleotide
  misc_feature 1..20: note = Target: SCN10A; (+) strand; PAM type: NRG; PAM sequence: AGG
  source 1..20: mol_type = other DNA
ctaattgtaacacgtggaag

SEQ ID NO: 39780 - DNA, 20 bp, synthetic construct
  misc_feature 1..20: note = Description of Artificial Sequence: Synthetic oligonucleotide
  misc_feature 1..20: note = Target: SCN10A; (+) strand; PAM type: NRG; PAM sequence: AAG
  source 1..20: mol_type = other DNA
gtggaagaggcaatcgtgca

SEQ ID NO: 39781 - DNA, 20 bp, synthetic construct
  misc_feature 1..20: note = Description of Artificial Sequence: Synthetic oligonucleotide
  misc_feature 1..20: note = Target: SCN10A; (+) strand; PAM type: NRG; PAM sequence: AGG
  source 1..20: mol_type = other DNA
tggaagaggcaatcgtgcaa

SEQ ID NO: 39782 - DNA, 20 bp, synthetic construct
  misc_feature 1..20: note = Description of Artificial Sequence: Synthetic oligonucleotide
  misc_feature 1..20: note = Target: SCN10A; (+) strand; PAM type: NRG; PAM sequence: GAG
  source 1..20: mol_type = other DNA
ggcaatcgtgcaaaggatat

SEQ ID NO: 39783 - DNA, 20 bp, synthetic construct
  misc_feature 1..20: note = Description of Artificial Sequence: Synthetic oligonucleotide
  misc_feature 1..20: note = Target: SCN10A; (+) strand; PAM type: NRG; PAM sequence: TGG
  source 1..20: mol_type = other DNA
aatcgtgcaaaggatatgag

SEQ ID NO: 39784 - DNA, 20 bp, synthetic construct
  misc_feature 1..20: note = Description of Artificial Sequence: Synthetic oligonucleotide
  misc_feature 1..20: note = Target: SCN10A; (+) strand; PAM type: NRG; PAM sequence: CAG
  source 1..20: mol_type = other DNA
gtgcaaaggatatgagtgga

SEQ ID NO: 39785 - DNA, 20 bp, synthetic construct
  misc_feature 1..20: note = Description of Artificial Sequence: Synthetic oligonucleotide
  misc_feature 1..20: note = Target: SCN10A; (+) strand; PAM type: NRG; PAM sequence: TGG
  source 1..20: mol_type = other DNA
tgagtggacagacactttga

SEQ ID NO: 39786 - DNA, 20 bp, synthetic construct
  misc_feature 1..20: note = Description of Artificial Sequence: Synthetic oligonucleotide
  misc_feature 1..20: note = Target: SCN10A; (+) strand; PAM type: NRG; PAM sequence: CAG
  source 1..20: mol_type = other DNA
ttgatggccgttcttctgat

SEQ ID NO: 39787 - DNA, 20 bp, synthetic construct
  misc_feature 1..20: note = Description of Artificial Sequence: Synthetic oligonucleotide
  misc_feature 1..20: note = Target: SCN10A; (+) strand; PAM type: NRG; PAM sequence: AGG
  source 1..20: mol_type = other DNA
tgatggccgttcttctgatc

SEQ ID NO: 39788 - DNA, 20 bp, synthetic construct
  misc_feature 1..20: note = Description of Artificial Sequence: Synthetic oligonucleotide
  misc_feature 1..20: note = Target: SCN10A; (+) strand; PAM type: NRG; PAM sequence: AAG
  source 1..20: mol_type = other DNA
cgttcttctgatcaggttga

SEQ ID NO: 39789 - DNA, 20 bp, synthetic construct
  misc_feature 1..20: note = Description of Artificial Sequence: Synthetic oligonucleotide
  misc_feature 1..20: note = Target: SCN10A; (+) strand; PAM type: NRG; PAM sequence: AGG
  source 1..20: mol_type = other DNA
gttcttctgatcaggttgaa

SEQ ID NO: 39790 - DNA, 20 bp, synthetic construct
  misc_feature 1..20: note = Description of Artificial Sequence: Synthetic oligonucleotide
  misc_feature 1..20: note = Target: SCN10A; (+) strand; PAM type: NRG; PAM sequence: TAG
  source 1..20: mol_type = other DNA
atcaggttgaaaggactgaa

SEQ ID NO: 39791 - DNA, 20 bp, synthetic construct
  misc_feature 1..20: note = Description of Artificial Sequence: Synthetic oligonucleotide
  misc_feature 1..20: note = Target: SCN10A; (+) strand; PAM type: NRG; PAM sequence: CAG
  source 1..20: mol_type = other DNA
ttgaaaggactgaatagcca

SEQ ID NO: 39792 - DNA, 20 bp, synthetic construct
  misc_feature 1..20: note = Description of Artificial Sequence: Synthetic oligonucleotide
  misc_feature 1..20: note = Target: SCN10A; (+) strand; PAM type: NRG; PAM sequence: AGG
  source 1..20: mol_type = other DNA
tgaaaggactgaatagccac

SEQ ID NO: 39793 - DNA, 20 bp, synthetic construct
  misc_feature 1..20: note = Description of Artificial Sequence: Synthetic oligonucleotide
  misc_feature 1..20: note = Target: SCN10A; (+) strand; PAM type: NRG; PAM sequence: GGG
  source 1..20: mol_type = other DNA
gaaaggactgaatagccaca

SEQ ID NO: 39794 - DNA, 20 bp, synthetic construct
  misc_feature 1..20: note = Description of Artificial Sequence: Synthetic oligonucleotide
  misc_feature 1..20: note = Target: SCN10A; (+) strand; PAM type: NRG; PAM sequence: GAG
  source 1..20: mol_type = other DNA
actgaatagccacagggccc

SEQ ID NO: 39795 - DNA, 20 bp, synthetic construct
  misc_feature 1..20: note = Description of Artificial Sequence: Synthetic oligonucleotide
  misc_feature 1..20: note = Target: SCN10A; (+) strand; PAM type: NRG; PAM sequence: TGG
  source 1..20: mol_type = other DNA
gaatagccacagggcccgag

SEQ ID NO: 39796 - DNA, 20 bp, synthetic construct
  misc_feature 1..20: note = Description of Artificial Sequence: Synthetic oligonucleotide
  misc_feature 1..20: note = Target: SCN10A; (+) strand; PAM type: NRG; PAM sequence: CGG
  source 1..20: mol_type = other DNA
gggcccgagtggcactaaac

SEQ ID NO: 39797 - DNA, 20 bp, synthetic construct
  misc_feature 1..20: note = Description of Artificial Sequence: Synthetic oligonucleotide
  misc_feature 1..20: note = Target: SCN10A; (+) strand; PAM type: NRG; PAM sequence: GGG
  source 1..20: mol_type = other DNA
ggcccgagtggcactaaacc

SEQ ID NO: 39798 - DNA, 20 bp, synthetic construct
  misc_feature 1..20: note = Description of Artificial Sequence: Synthetic oligonucleotide
  misc_feature 1..20: note = Target: SCN10A; (+) strand; PAM type: NRG; PAM sequence: TGG
  source 1..20: mol_type = other DNA
agtggcactaaaccgggaaa

SEQ ID NO: 39799 - DNA, 20 bp, synthetic construct
  misc_feature 1..20: note = Description of Artificial Sequence: Synthetic oligonucleotide
  misc_feature 1..20: note = Target: SCN10A; (+) strand; PAM type: NRG; PAM sequence: CAG
  source 1..20: mol_type = other DNA
gaaatggtcctccctttgtt

SEQ ID NO: 39800 - DNA, 20 bp, synthetic construct
  misc_feature 1..20: note = Description of Artificial Sequence: Synthetic oligonucleotide
  misc_feature 1..20: note = Target: SCN10A; (+) strand; PAM type: NRG; PAM sequence: CAG
  source 1..20: mol_type = other DNA
atgtctgaaacaaaacaaaa

SEQ ID NO: 39801 - DNA, 20 bp, synthetic construct
  misc_feature 1..20: note = Description of Artificial Sequence: Synthetic oligonucleotide
  misc_feature 1..20: note = Target: SCN10A; (+) strand; PAM type: NRG; PAM sequence: AAG
  source 1..20: mol_type = other DNA
ctgaaacaaaacaaaacaga

SEQ ID NO: 39802 - DNA, 20 bp, synthetic construct
  misc_feature 1..20: note = Description of Artificial Sequence: Synthetic oligonucleotide
  misc_feature 1..20: note = Target: SCN10A; (+) strand; PAM type: NRG; PAM sequence: TGG
  source 1..20: mol_type = other DNA
aaacaaaacaaaacagaaag

SEQ ID NO: 39803 - DNA, 20 bp, synthetic construct
  misc_feature 1..20: note = Description of Artificial Sequence: Synthetic oligonucleotide
  misc_feature 1..20: note = Target: SCN10A; (+) strand; PAM type: NRG; PAM sequence: GAG
  source 1..20: mol_type = other DNA
acagaaagtggacctccaat

SEQ ID NO: 39804 - DNA, 20 bp, synthetic construct
  misc_feature 1..20: note = Description of Artificial Sequence: Synthetic oligonucleotide
  misc_feature 1..20: note = Target: SCN10A; (+) strand; PAM type: NRG; PAM sequence: AAG
  source 1..20: mol_type = other DNA
gtggacctccaatgagaaac

SEQ ID NO: 39805 - DNA, 20 bp, synthetic construct
  misc_feature 1..20: note = Description of Artificial Sequence: Synthetic oligonucleotide
  misc_feature 1..20: note = Target: SCN10A; (+) strand; PAM type: NRG; PAM sequence: GAG
  source 1..20: mol_type = other DNA
acaaccatgtttttaaacat

SEQ ID NO: 39806 - DNA, 20 bp, synthetic construct
  misc_feature 1..20: note = Description of Artificial Sequence: Synthetic oligonucleotide
  misc_feature 1..20: note = Target: SCN10A; (+) strand; PAM type: NRG; PAM sequence: GAG
  source 1..20: mol_type = other DNA
aaccatgtttttaaacatga

SEQ ID NO: 39807 - DNA, 20 bp, synthetic construct
  misc_feature 1..20: note = Description of Artificial Sequence: Synthetic oligonucleotide
  misc_feature 1..20: note = Target: SCN10A; (+) strand; PAM type: NRG; PAM sequence: AGG
  source 1..20: mol_type = other DNA
accatgtttttaaacatgag

SEQ ID NO: 39808 - DNA, 20 bp, synthetic construct
  misc_feature 1..20: note = Description of Artificial Sequence: Synthetic oligonucleotide
  misc_feature 1..20: note = Target: SCN10A; (+) strand; PAM type: NRG; PAM sequence: CAG
  source 1..20: mol_type = other DNA
aaacatgagaggcattatct

SEQ ID NO: 39809 - DNA, 20 bp, synthetic construct
  misc_feature 1..20: note = Description of Artificial Sequence: Synthetic oligonucleotide
  misc_feature 1..20: note = Target: SCN10A; (+) strand; PAM type: NRG; PAM sequence: AGG
  source 1..20: mol_type = other DNA
aacatgagaggcattatctc

SEQ ID NO: 39810 - DNA, 20 bp, synthetic construct
  misc_feature 1..20: note = Description of Artificial Sequence: Synthetic oligonucleotide
  misc_feature 1..20: note = Target: SCN10A; (+) strand; PAM type: NRG; PAM sequence: GAG
  source 1..20: mol_type = other DNA
aggcattatctcaggcttat

SEQ ID NO: 39811 - DNA, 20 bp, synthetic construct
  misc_feature 1..20: note = Description of Artificial Sequence: Synthetic oligonucleotide
  misc_feature 1..20: note = Target: SCN10A; (+) strand; PAM type: NRG; PAM sequence: AAG
  source 1..20: mol_type = other DNA
attatctcaggcttatgagc

SEQ ID NO: 39812 - DNA, 20 bp, synthetic construct
  misc_feature 1..20: note = Description of Artificial Sequence: Synthetic oligonucleotide
  misc_feature 1..20: note = Target: SCN10A; (+) strand; PAM type: NRG; PAM sequence: AAG
  source 1..20: mol_type = other DNA
atctcaggcttatgagcaag

SEQ ID NO: 39813 - DNA, 20 bp, synthetic construct
  misc_feature 1..20: note = Description of Artificial Sequence: Synthetic oligonucleotide
  misc_feature 1..20: note = Target: SCN10A; (+) strand; PAM type: NRG; PAM sequence: AGG
  source 1..20: mol_type = other DNA
tctcaggcttatgagcaaga

SEQ ID NO: 39814 - DNA, 20 bp, synthetic construct
  misc_feature 1..20: note = Description of Artificial Sequence: Synthetic oligonucleotide
  misc_feature 1..20: note = Target: SCN10A; (+) strand; PAM type: NRG; PAM sequence: GGG
  source 1..20: mol_type = other DNA
ctcaggcttatgagcaagaa

SEQ ID NO: 39815 - DNA, 20 bp, synthetic construct
  misc_feature 1..20: note = Description of Artificial Sequence: Synthetic oligonucleotide
  misc_feature 1..20: note = Target: SCN10A; (+) strand; PAM type: NRG; PAM sequence: TGG
  source 1..20: mol_type = other DNA
cttatgagcaagaagggctc

SEQ ID NO: 39816 - DNA, 20 bp, synthetic construct
  misc_feature 1..20: note = Description of Artificial Sequence: Synthetic oligonucleotide
  misc_feature 1..20: note = Target: SCN10A; (+) strand; PAM type: NRG; PAM sequence: GGG
  source 1..20: mol_type = other DNA
ttatgagcaagaagggctct

SEQ ID NO: 39817 - DNA, 20 bp, synthetic construct
  misc_feature 1..20: note = Description of Artificial Sequence: Synthetic oligonucleotide
  misc_feature 1..20: note = Target: SCN10A; (+) strand; PAM type: NRG; PAM sequence: CAG
  source 1..20: mol_type = other DNA
aagaagggctctgggaacta

SEQ ID NO: 39818 - DNA, 20 bp, synthetic construct
  misc_feature 1..20: note = Description of Artificial Sequence: Synthetic oligonucleotide
  misc_feature 1..20: note = Target: SCN10A; (+) strand; PAM type: NRG; PAM sequence: AGG
  source 1..20: mol_type = other DNA
agaagggctctgggaactac

SEQ ID NO: 39819 - DNA, 20 bp, synthetic construct
  misc_feature 1..20: note = Description of Artificial Sequence: Synthetic oligonucleotide
  misc_feature 1..20: note = Target: SCN10A; (+) strand; PAM type: NRG; PAM sequence: GAG
  source 1..20: mol_type = other DNA
tctgggaactacaggtcaat

SEQ ID NO: 39820 - DNA, 20 bp, synthetic construct
  misc_feature 1..20: note = Description of Artificial Sequence: Synthetic oligonucleotide
  misc_feature 1..20: note = Target: SCN10A; (+) strand; PAM type: NRG; PAM sequence: GAG
  source 1..20: mol_type = other DNA
tgggaactacaggtcaatga

SEQ ID NO: 39821 - DNA, 20 bp, synthetic construct
  misc_feature 1..20: note = Description of Artificial Sequence: Synthetic oligonucleotide
  misc_feature 1..20: note = Target: SCN10A; (+) strand; PAM type: NRG; PAM sequence: CAG
  source 1..20: mol_type = other DNA
aggtcaatgagagtcaaatg

SEQ ID NO: 39822 - DNA, 20 bp, synthetic construct
  misc_feature 1..20: note = Description of Artificial Sequence: Synthetic oligonucleotide
  misc_feature 1..20: note = Target: SCN10A; (+) strand; PAM type: NRG; PAM sequence: AGG
  source 1..20: mol_type = other DNA
ggtcaatgagagtcaaatgc

SEQ ID NO: 39823 - DNA, 20 bp, synthetic construct
  misc_feature 1..20: note = Description of Artificial Sequence: Synthetic oligonucleotide
  misc_feature 1..20: note = Target: SCN10A; (+) strand; PAM type: NRG; PAM sequence: CAG
  source 1..20: mol_type = other DNA
atgagagtcaaatgcaggta

SEQ ID NO: 39824 - DNA, 20 bp, synthetic construct
  misc_feature 1..20: note = Description of Artificial Sequence: Synthetic oligonucleotide
  misc_feature 1..20: note = Target: SCN10A; (+) strand; PAM type: NRG; PAM sequence: GAG
  source 1..20: mol_type = other DNA
gagagtcaaatgcaggtaca

SEQ ID NO: 39825 - DNA, 20 bp, synthetic construct
  misc_feature 1..20: note = Description of Artificial Sequence: Synthetic oligonucleotide
  misc_feature 1..20: note = Target: SCN10A; (+) strand; PAM type: NRG; PAM sequence: GAG
  source 1..20: mol_type = other DNA
gagtcaaatgcaggtacaga

SEQ ID NO: 39826 - DNA, 20 bp, synthetic construct
  misc_feature 1..20: note = Description of Artificial Sequence: Synthetic oligonucleotide
  misc_feature 1..20: note = Target: SCN10A; (+) strand; PAM type: NRG; PAM sequence: AGG
  source 1..20: mol_type = other DNA
agtcaaatgcaggtacagag

SEQ ID NO: 39827 - DNA, 20 bp, synthetic construct
  misc_feature 1..20: note = Description of Artificial Sequence: Synthetic oligonucleotide
  misc_feature 1..20: note = Target: SCN10A; (+) strand; PAM type: NRG; PAM sequence: CAG
  source 1..20: mol_type = other DNA
caaatgcaggtacagagagg

SEQ ID NO: 39828 - DNA, 20 bp, synthetic construct
  misc_feature 1..20: note = Description of Artificial Sequence: Synthetic oligonucleotide
  misc_feature 1..20: note = Target: SCN10A; (+) strand; PAM type: NRG; PAM sequence: GAG
  source 1..20: mol_type = other DNA
aatgcaggtacagagaggca

SEQ ID NO: 39829 - DNA, 20 bp, synthetic construct
  misc_feature 1..20: note = Description of Artificial Sequence: Synthetic oligonucleotide
  misc_feature 1..20: note = Target: SCN10A; (+) strand; PAM type: NRG; PAM sequence: GAG
  source 1..20: mol_type = other DNA
tgcaggtacagagaggcaga

SEQ ID NO: 39830 - DNA, 20 bp, synthetic construct
  misc_feature 1..20: note = Description of Artificial Sequence: Synthetic oligonucleotide
  misc_feature 1..20: note = Target: SCN10A; (+) strand; PAM type: NRG; PAM sequence: AGG
  source 1..20: mol_type = other DNA
gcaggtacagagaggcagag

SEQ ID NO: 39831 - DNA, 20 bp, synthetic construct
  misc_feature 1..20: note = Description of Artificial Sequence: Synthetic oligonucleotide
  misc_feature 1..20: note = Target: SCN10A; (+) strand; PAM type: NRG; PAM sequence: AAG
  source 1..20: mol_type = other DNA
acagagaggcagagaggatc

SEQ ID NO: 39832 - DNA, 20 bp, synthetic construct
  misc_feature 1..20: note = Description of Artificial Sequence: Synthetic oligonucleotide
  misc_feature 1..20: note = Target: SCN10A; (+) strand; PAM type: NRG; PAM sequence: AGG
  source 1..20: mol_type = other DNA
cagagaggcagagaggatca

SEQ ID NO: 39833 - DNA, 20 bp, synthetic construct
  misc_feature 1..20: note = Description of Artificial Sequence: Synthetic oligonucleotide
  misc_feature 1..20: note = Target: SCN10A; (+) strand; PAM type: NRG; PAM sequence: AAG
  source 1..20: mol_type = other DNA
cagagaggatcaaggactaa

SEQ ID NO: 39834 - DNA, 20 bp, synthetic construct
  misc_feature 1..20: note = Description of Artificial Sequence: Synthetic oligonucleotide
  misc_feature 1..20: note = Target: SCN10A; (+) strand; PAM type: NRG; PAM sequence: CAG
  source 1..20: mol_type = other DNA
aagccatatcctcaccctct

SEQ ID NO: 39835 - DNA, 20 bp, synthetic construct
  misc_feature 1..20: note = Description of Artificial Sequence: Synthetic oligonucleotide
  misc_feature 1..20: note = Target: SCN10A; (+) strand; PAM type: NRG; PAM sequence: AAG
  source 1..20: mol_type = other DNA
catatcctcaccctctcagc

SEQ ID NO: 39836 - DNA, 20 bp, synthetic construct
  misc_feature 1..20: note = Description of Artificial Sequence: Synthetic oligonucleotide
  misc_feature 1..20: note = Target: SCN10A; (+) strand; PAM type: NRG; PAM sequence: TGG
  source 1..20: mol_type = other DNA
ctcagcaagatcctcatctc

SEQ ID NO: 39837 - DNA, 20 bp, synthetic construct
  misc_feature 1..20: note = Description of Artificial Sequence: Synthetic oligonucleotide
  misc_feature 1..20: note = Target: SCN10A; (+) strand; PAM type: NRG; PAM sequence: GGG
  source 1..20: mol_type = other DNA
tcagcaagatcctcatctct

SEQ ID NO: 39838 - DNA, 20 bp, synthetic construct
  misc_feature 1..20: note = Description of Artificial Sequence: Synthetic oligonucleotide
  misc_feature 1..20: note = Target: SCN10A; (+) strand; PAM type: NRG; PAM sequence: CAG
  source 1..20: mol_type = other DNA
atcctcatctctgggactga

SEQ ID NO: 39839 - DNA, 20 bp, synthetic construct
  misc_feature 1..20: note = Description of Artificial Sequence: Synthetic oligonucleotide
  misc_feature 1..20: note = Target: SCN10A; (+) strand; PAM type: NRG; PAM sequence: AAG
  source 1..20: mol_type = other DNA
tctgggactgacagtgcacc

SEQ ID NO: 39840 - DNA, 20 bp, synthetic construct
  misc_feature 1..20: note = Description of Artificial Sequence: Synthetic oligonucleotide
  misc_feature 1..20: note = Target: SCN10A; (+) strand; PAM type: NRG; PAM sequence: GAG
  source 1..20: mol_type = other DNA
gactgacagtgcaccaagat

SEQ ID NO: 39841 - DNA, 20 bp, synthetic construct
  misc_feature 1..20: note = Description of Artificial Sequence: Synthetic oligonucleotide
  misc_feature 1..20: note = Target: SCN10A; (+) strand; PAM type: NRG; PAM sequence: GAG
  source 1..20: mol_type = other DNA
tgcaccaagatgagcccact

SEQ ID NO: 39842 - DNA, 20 bp, synthetic construct
  misc_feature 1..20: note = Description of Artificial Sequence: Synthetic oligonucleotide
  misc_feature 1..20: note = Target: SCN10A; (+) strand; PAM type: NRG; PAM sequence: AGG
  source 1..20: mol_type = other DNA
gcaccaagatgagcccactg

SEQ ID NO: 39843 - DNA, 20 bp, synthetic construct
  misc_feature 1..20: note = Description of Artificial Sequence: Synthetic oligonucleotide
  misc_feature 1..20: note = Target: SCN10A; (+) strand; PAM type: NRG; PAM sequence: GGG
  source 1..20: mol_type = other DNA
caccaagatgagcccactga

SEQ ID NO: 39844 - DNA, 20 bp, synthetic construct
  misc_feature 1..20: note = Description of Artificial Sequence: Synthetic oligonucleotide
  misc_feature 1..20: note = Target: SCN10A; (+) strand; PAM type: NRG; PAM sequence: TGG
  source 1..20: mol_type = other DNA
gcccactgagggtactttaa

SEQ ID NO: 39845 - DNA, 20 bp, synthetic construct
  misc_feature 1..20: note = Description of Artificial Sequence: Synthetic oligonucleotide
  misc_feature 1..20: note = Target: SCN10A; (+) strand; PAM type: NRG; PAM sequence: CAG
  source 1..20: mol_type = other DNA
actgagggtactttaatgga

SEQ ID NO: 39846 - DNA, 20 bp, synthetic construct
  misc_feature 1..20: note = Description of Artificial Sequence: Synthetic oligonucleotide
  misc_feature 1..20: note = Target: SCN10A; (+) strand; PAM type: NRG; PAM sequence: CAG
  source 1..20: mol_type = other DNA
agggtactttaatggacaga

SEQ ID NO: 39847 - DNA, 20 bp, synthetic construct
  misc_feature 1..20: note = Description of Artificial Sequence: Synthetic oligonucleotide
  misc_feature 1..20: note = Target: SCN10A; (+) strand; PAM type: NRG; PAM sequence: CAG
  source 1..20: mol_type = other DNA
atggacagacagccaatcct

SEQ ID NO: 39848 - DNA, 20 bp, synthetic construct
  misc_feature 1..20: note = Description of Artificial Sequence: Synthetic oligonucleotide
  misc_feature 1..20: note = Target: SCN10A; (+) strand; PAM type: NRG; PAM sequence: AGG
  source 1..20: mol_type = other DNA
tggacagacagccaatcctc

SEQ ID NO: 39849 - DNA, 20 bp, synthetic construct
  misc_feature 1..20: note = Description of Artificial Sequence: Synthetic oligonucleotide
  misc_feature 1..20: note = Target: SCN10A; (+) strand; PAM type: NRG; PAM sequence: TGG
  source 1..20: mol_type = other DNA
cagacagccaatcctcaggc

SEQ ID NO: 39850 - DNA, 20 bp, synthetic construct
  misc_feature 1..20: note = Description of Artificial Sequence: Synthetic oligonucleotide
  misc_feature 1..20: note = Target: SCN10A; (+) strand; PAM type: NRG; PAM sequence: AAG
  source 1..20: mol_type = other DNA
cagccaatcctcaggctggt

SEQ ID NO: 39851 - DNA, 20 bp, synthetic construct
  misc_feature 1..20: note = Description of Artificial Sequence: Synthetic oligonucleotide
  misc_feature 1..20: note = Target: SCN10A; (+) strand; PAM type: NRG; PAM sequence: GAG
  source 1..20: mol_type = other DNA
gccaatcctcaggctggtaa

SEQ ID NO: 39852 - DNA, 20 bp, synthetic construct
  misc_feature 1..20: note = Description of Artificial Sequence: Synthetic oligonucleotide
  misc_feature 1..20: note = Target: SCN10A; (+) strand; PAM type: NRG; PAM sequence: AGG
  source 1..20: mol_type = other DNA
ccaatcctcaggctggtaag

SEQ ID NO: 39853 - DNA, 20 bp, synthetic construct
  misc_feature 1..20: note = Description of Artificial Sequence: Synthetic oligonucleotide
  misc_feature 1..20: note = Target: SCN10A; (+) strand; PAM type: NRG; PAM sequence: CAG
  source 1..20: mol_type = other DNA
ctggtaagaggtgttatgcc

SEQ ID NO: 39854 - DNA, 20 bp, synthetic construct
  misc_feature 1..20: note = Description of Artificial Sequence: Synthetic oligonucleotide
  misc_feature 1..20: note = Target: SCN10A; (+) strand; PAM type: NRG; PAM sequence: AGG
  source 1..20: mol_type = other DNA
tggtaagaggtgttatgccc

SEQ ID NO: 39855 - DNA, 20 bp, synthetic construct
  misc_feature 1..20: note = Description of Artificial Sequence: Synthetic oligonucleotide
  misc_feature 1..20: note = Target: SCN10A; (+) strand; PAM type: NRG; PAM sequence: GGG
  source 1..20: mol_type = other DNA
ggtaagaggtgttatgccca

SEQ ID NO: 39856 - DNA, 20 bp, synthetic construct
  misc_feature 1..20: note = Description of Artificial Sequence: Synthetic oligonucleotide
  misc_feature 1..20: note = Target: SCN10A; (+) strand; PAM type: NRG; PAM sequence: GGG
  source 1..20: mol_type = other DNA
gtaagaggtgttatgcccag

SEQ ID NO: 39857 - DNA, 20 bp, synthetic construct
  misc_feature 1..20: note = Description of Artificial Sequence: Synthetic oligonucleotide
  misc_feature 1..20: note = Target: SCN10A; (+) strand; PAM type: NRG; PAM sequence: GAG
  source 1..20: mol_type = other DNA
aagaggtgttatgcccaggg

SEQ ID NO: 39858 - DNA, 20 bp, synthetic construct
  misc_feature 1..20: note = Description of Artificial Sequence: Synthetic oligonucleotide
  misc_feature 1..20: note = Target: SCN10A; (+) strand; PAM type: NRG; PAM sequence: AGG
  source 1..20: mol_type = other DNA
agaggtgttatgcccagggg

SEQ ID NO: 39859 - DNA, 20 bp, synthetic construct
  misc_feature 1..20: note = Description of Artificial Sequence: Synthetic oligonucleotide
  misc_feature 1..20: note = Target: SCN10A; (+) strand; PAM type: NRG; PAM sequence: TGG
  source 1..20: mol_type = other DNA
ttatgcccaggggaggactc

SEQ ID NO: 39860 - DNA, 20 bp, synthetic construct
  misc_feature 1..20: note = Description of Artificial Sequence: Synthetic oligonucleotide
  misc_feature 1..20: note = Target: SCN10A; (+) strand; PAM type: NRG; PAM sequence: CAG
  source 1..20: mol_type = other DNA
ccaggggaggactctggcaa

SEQ ID NO: 39861 - DNA, 20 bp, synthetic construct
  misc_feature 1..20: note = Description of Artificial Sequence: Synthetic oligonucleotide
  misc_feature 1..20: note = Target: SCN10A; (+) strand; PAM type: NRG; PAM sequence: AGG
  source 1..20: mol_type = other DNA
caggggaggactctggcaac

SEQ ID NO: 39862 - DNA, 20 bp, synthetic construct
  misc_feature 1..20: note = Description of Artificial Sequence: Synthetic oligonucleotide
  misc_feature 1..20: note = Target: SCN10A; (+) strand; PAM type: NRG; PAM sequence: TGG
  source 1..20: mol_type = other DNA
ggaggactctggcaacagga

SEQ ID NO: 39863 - DNA, 20 bp, synthetic construct
  misc_feature 1..20: note = Description of Artificial Sequence: Synthetic oligonucleotide
  misc_feature 1..20: note = Target: SCN10A; (+) strand; PAM type: NRG; PAM sequence: AAG
  source 1..20: mol_type = other DNA
actctggcaacaggatggtg

SEQ ID NO: 39864 - DNA, 20 bp, synthetic construct
  misc_feature 1..20: note = Description of Artificial Sequence: Synthetic oligonucleotide
  misc_feature 1..20: note = Target: SCN10A; (+) strand; PAM type: NRG; PAM sequence: TGG
  source 1..20: mol_type = other DNA
gcaacaggatggtgaagtta

SEQ ID NO: 39865 - DNA, 20 bp, synthetic construct
  misc_feature 1..20: note = Description of Artificial Sequence: Synthetic oligonucleotide
  misc_feature 1..20: note = Target: SCN10A; (+) strand; PAM type: NRG; PAM sequence: AAG
  source 1..20: mol_type = other DNA
catttaatttctcttctgac

SEQ ID NO: 39866 - DNA, 20 bp, synthetic construct
  misc_feature 1..20: note = Description of Artificial Sequence: Synthetic oligonucleotide
  misc_feature 1..20: note = Target: SCN10A; (+) strand; PAM type: NRG; PAM sequence: GAG
  source 1..20: mol_type = other DNA
tttaatttctcttctgacaa

SEQ ID NO: 39867 - DNA, 20 bp, synthetic construct
  misc_feature 1..20: note = Description of Artificial Sequence: Synthetic oligonucleotide
  misc_feature 1..20: note = Target: SCN10A; (+) strand; PAM type: NRG; PAM sequence: TGG
  source 1..20: mol_type = other DNA
ctgtctcttaaatcctctcc

SEQ ID NO: 39868 - DNA, 20 bp, synthetic construct
  misc_feature 1..20: note = Description of Artificial Sequence: Synthetic oligonucleotide
  misc_feature 1..20: note = Target: SCN10A; (+) strand; PAM type: NRG; PAM sequence: GAG
  source 1..20: mol_type = other DNA
ctctcctggtttctccctct

SEQ ID NO: 39869 - DNA, 20 bp, synthetic construct
  misc_feature 1..20: note = Description of Artificial Sequence: Synthetic oligonucleotide
  misc_feature 1..20: note = Target: SCN10A; (+) strand; PAM type: NRG; PAM sequence: AGG
  source 1..20: mol_type = other DNA
tctcctggtttctccctctg

SEQ ID NO: 39870 - DNA, 20 bp, synthetic construct
  misc_feature 1..20: note = Description of Artificial Sequence: Synthetic oligonucleotide
  misc_feature 1..20: note = Target: SCN10A; (+) strand; PAM type: NRG; PAM sequence: TAG
  source 1..20: mol_type = other DNA
ggtttctccctctgaggatt

SEQ ID NO: 39871 - DNA, 20 bp, synthetic construct
  misc_feature 1..20: note = Description of Artificial Sequence: Synthetic oligonucleotide
  misc_feature 1..20: note = Target: SCN10A; (+) strand; PAM type: NRG; PAM sequence: AGG
  source 1..20: mol_type = other DNA
gtttctccctctgaggattt

SEQ ID NO: 39872 - DNA, 20 bp, synthetic construct
  misc_feature 1..20: note = Description of Artificial Sequence: Synthetic oligonucleotide
  misc_feature 1..20: note = Target: SCN10A; (+) strand; PAM type: NRG; PAM sequence: GAG
  source 1..20: mol_type = other DNA
ttctccctctgaggatttag

SEQ ID NO: 39873 - DNA, 20 bp, synthetic construct
  misc_feature 1..20: note = Description of Artificial Sequence: Synthetic oligonucleotide
  misc_feature 1..20: note = Target: SCN10A; (+) strand; PAM type: NRG; PAM sequence: AGG
  source 1..20: mol_type = other DNA
tctccctctgaggatttagg

SEQ ID NO: 39874 - DNA, 20 bp, synthetic construct
  misc_feature 1..20: note = Description of Artificial Sequence: Synthetic oligonucleotide
  misc_feature 1..20: note = Target: SCN10A; (+) strand; PAM type: NRG; PAM sequence: TGG
  source 1..20: mol_type = other DNA
tttaggaggatatgaactct

SEQ ID NO: 39875 - DNA, 20 bp, synthetic construct
  misc_feature 1..20: note = Description of Artificial Sequence: Synthetic oligonucleotide
  misc_feature 1..20: note = Target: SCN10A; (+) strand; PAM type: NRG; PAM sequence: TGG
  source 1..20: mol_type = other DNA
gaggatatgaactcttggca

SEQ ID NO: 39876 - DNA, 20 bp, synthetic construct
  misc_feature 1..20: note = Description of Artificial Sequence: Synthetic oligonucleotide
  misc_feature 1..20: note = Target: SCN10A; (+) strand; PAM type: NRG; PAM sequence: GGG
  source 1..20: mol_type = other DNA
aggatatgaactcttggcat

SEQ ID NO: 39877 - DNA, 20 bp, synthetic construct
  misc_feature 1..20: note = Description of Artificial Sequence: Synthetic oligonucleotide
  misc_feature 1..20: note = Target: SCN10A; (+) strand; PAM type: NRG; PAM sequence: GAG
  source 1..20: mol_type = other DNA
gatatgaactcttggcatgg

SEQ ID NO: 39878 - DNA, 20 bp, synthetic construct
  misc_feature 1..20: note = Description of Artificial Sequence: Synthetic oligonucleotide
  misc_feature 1..20: note = Target: SCN10A; (+) strand; PAM type: NRG; PAM sequence: GAG
  source 1..20: mol_type = other DNA
tatgaactcttggcatggga

SEQ ID NO: 39879 - DNA, 20 bp, synthetic construct
  misc_feature 1..20: note = Description of Artificial Sequence: Synthetic oligonucleotide
  misc_feature 1..20: note = Target: SCN10A; (+) strand; PAM type: NRG; PAM sequence: AGG
  source 1..20: mol_type = other DNA
atgaactcttggcatgggag

SEQ ID NO: 39880 - DNA, 20 bp, synthetic construct
  misc_feature 1..20: note = Description of Artificial Sequence: Synthetic oligonucleotide
  misc_feature 1..20: note = Target: SCN10A; (+) strand; PAM type: NRG; PAM sequence: GAG
  source 1..20: mol_type = other DNA
gaactcttggcatgggagag

SEQ ID NO: 39881 - DNA, 20 bp, synthetic construct
  misc_feature 1..20: note = Description of Artificial Sequence: Synthetic oligonucleotide
  misc_feature 1..20: note = Target: SCN10A; (+) strand; PAM type: NRG; PAM sequence: AGG
  source 1..20: mol_type = other DNA
aactcttggcatgggagagg

SEQ ID NO: 39882 - DNA, 20 bp, synthetic construct
  misc_feature 1..20: note = Description of Artificial Sequence: Synthetic oligonucleotide
  misc_feature 1..20: note = Target: SCN10A; (+) strand; PAM type: NRG; PAM sequence: AAG
  source 1..20: mol_type = other DNA
tcttggcatgggagaggagg

SEQ ID NO: 39883 - DNA, 20 bp, synthetic construct
  misc_feature 1..20: note = Description of Artificial Sequence: Synthetic oligonucleotide
  misc_feature 1..20: note = Target: SCN10A; (+) strand; PAM type: NRG; PAM sequence: AAG
  source 1..20: mol_type = other DNA
ggcatgggagaggaggaaga

SEQ ID NO: 39884 - DNA, 20 bp, synthetic construct
  misc_feature 1..20: note = Description of Artificial Sequence: Synthetic oligonucleotide
  misc_feature 1..20: note = Target: SCN10A; (+) strand; PAM type: NRG; PAM sequence: CAG
  source 1..20: mol_type = other DNA
agaggaggaagaaagatatt

SEQ ID NO: 39885 - DNA, 20 bp, synthetic construct
  misc_feature 1..20: note = Description of Artificial Sequence: Synthetic oligonucleotide
  misc_feature 1..20: note = Target: SCN10A; (+) strand; PAM type: NRG; PAM sequence: TAG
  source 1..20: mol_type = other DNA
tgcctttttatttactctgc

SEQ ID NO: 39886 - DNA, 20 bp, synthetic construct
  misc_feature 1..20: note = Description of Artificial Sequence: Synthetic oligonucleotide
  misc_feature 1..20: note = Target: SCN10A; (+) strand; PAM type: NRG; PAM sequence: GAG
  source 1..20: mol_type = other DNA
ttactctgctagccatattt

SEQ ID NO: 39887 - DNA, 20 bp, synthetic construct
  misc_feature 1..20: note = Description of Artificial Sequence: Synthetic oligonucleotide
  misc_feature 1..20: note = Target: SCN10A; (+) strand; PAM type: NRG; PAM sequence: TGG
  source 1..20: mol_type = other DNA
tctgctagccatatttgaga

SEQ ID NO: 39888 - DNA, 20 bp, synthetic construct
  misc_feature 1..20: note = Description of Artificial Sequence: Synthetic oligonucleotide
  misc_feature 1..20: note = Target: SCN10A; (+) strand; PAM type: NRG; PAM sequence: TGG
  source 1..20: mol_type = other DNA
aacatgcattcaccattttt

SEQ ID NO: 39889 - DNA, 20 bp, synthetic construct
  misc_feature 1..20: note = Description of Artificial Sequence: Synthetic oligonucleotide
  misc_feature 1..20: note = Target: SCN10A; (+) strand; PAM type: NRG; PAM sequence: TAG
  source 1..20: mol_type = other DNA
attcaccattttttggctcg

SEQ ID NO: 39890 - DNA, 20 bp, synthetic construct
  misc_feature 1..20: note = Description of Artificial Sequence: Synthetic oligonucleotide
  misc_feature 1..20: note = Target: SCN10A; (+) strand; PAM type: NRG; PAM sequence: CAG
  source 1..20: mol_type = other DNA
agaacatcaaaaatacaaca

SEQ ID NO: 39891 - DNA, 20 bp, synthetic construct
  misc_feature 1..20: note = Description of Artificial Sequence: Synthetic oligonucleotide
  misc_feature 1..20: note = Target: SCN10A; (+) strand; PAM type: NRG; PAM sequence: AGG
  source 1..20: mol_type = other DNA
gaacatcaaaaatacaacac

SEQ ID NO: 39892 - DNA, 20 bp, synthetic construct
  misc_feature 1..20: note = Description of Artificial Sequence: Synthetic oligonucleotide
  misc_feature 1..20: note = Target: SCN10A; (+) strand; PAM type: NRG; PAM sequence: GAG
  source 1..20: mol_type = other DNA
atcaaaaatacaacacaggt

SEQ ID NO: 39893 - DNA, 20 bp, synthetic construct
  misc_feature 1..20: note = Description of Artificial Sequence: Synthetic oligonucleotide
  misc_feature 1..20: note = Target: SCN10A; (+) strand; PAM type: NRG; PAM sequence: AAG
  source 1..20: mol_type = other DNA
caggtgagataattgtcatg

SEQ ID NO: 39894 - DNA, 20 bp, synthetic construct
  misc_feature 1..20: note = Description of Artificial Sequence: Synthetic oligonucleotide
  misc_feature 1..20: note = Target: SCN10A; (+) strand; PAM type: NRG; PAM sequence: AAG
  source 1..20: mol_type = other DNA
gtgagataattgtcatgaag

SEQ ID NO: 39895 - DNA, 20 bp, synthetic construct
  misc_feature 1..20: note = Description of Artificial Sequence: Synthetic oligonucleotide
  misc_feature 1..20: note = Target: SCN10A; (+) strand; PAM type: NRG; PAM sequence: CAG
  source 1..20: mol_type = other DNA
attctcaaactttttgattt

SEQ ID NO: 39896 - DNA, 20 bp, synthetic construct
  misc_feature 1..20: note = Description of Artificial Sequence: Synthetic oligonucleotide
  misc_feature 1..20: note = Target: SCN10A; (+) strand; PAM type: NRG; PAM sequence: AGG
  source 1..20: mol_type = other DNA
ttctcaaactttttgatttc

SEQ ID NO: 39897 - DNA, 20 bp, synthetic construct
  misc_feature 1..20: note = Description of Artificial Sequence: Synthetic oligonucleotide
  misc_feature 1..20: note = Target: SCN10A; (+) strand; PAM type: NRG; PAM sequence: GGG
  source 1..20: mol_type = other DNA
tctcaaactttttgatttca

SEQ ID NO: 39898 - DNA, 20 bp, synthetic construct
  misc_feature 1..20: note = Description of Artificial Sequence: Synthetic oligonucleotide
  misc_feature 1..20: note = Target: SCN10A; (+) strand; PAM type: NRG; PAM sequence: GAG
  source 1..20: mol_type = other DNA
tattactctcaaaccttatt

SEQ ID NO: 39899 - DNA, 20 bp, synthetic construct
  misc_feature 1..20: note = Description of Artificial Sequence: Synthetic oligonucleotide
  misc_feature 1..20: note = Target: SCN10A; (+) strand; PAM type: NRG; PAM sequence: AGG
  source 1..20: mol_type = other DNA
attactctcaaaccttattg

SEQ ID NO: 39900 - DNA, 20 bp, synthetic construct
  misc_feature 1..20: note = Description of Artificial Sequence: Synthetic oligonucleotide
  misc_feature 1..20: note = Target: SCN10A; (+) strand; PAM type: NRG; PAM sequence: CAG
  source 1..20: mol_type = other DNA
tgatacctttttgtttatgc

SEQ ID NO: 39901 - DNA, 20 bp, synthetic construct
  misc_feature 1..20: note = Description of Artificial Sequence: Synthetic oligonucleotide
  misc_feature 1..20: note = Target: SCN10A; (+) strand; PAM type: NRG; PAM sequence: TAG
  source 1..20: mol_type = other DNA
cagatatatgtatatcatat

SEQ ID NO: 39902 - DNA, 20 bp, synthetic construct
  misc_feature 1..20: note = Description of Artificial Sequence: Synthetic oligonucleotide
  misc_feature 1..20: note = Target: SCN10A; (+) strand; PAM type: NRG; PAM sequence: TAG
  source 1..20: mol_type = other DNA
tatacctatatatacataac

SEQ ID NO: 39903 - DNA, 20 bp, synthetic construct
  misc_feature 1..20: note = Description of Artificial Sequence: Synthetic oligonucleotide
  misc_feature 1..20: note = Target: SCN10A; (+) strand; PAM type: NRG; PAM sequence: TGG
  source 1..20: mol_type = other DNA
tatatacataactagctaca

SEQ ID NO: 39904 - DNA, 20 bp, synthetic construct
  misc_feature 1..20: note = Description of Artificial Sequence: Synthetic oligonucleotide
  misc_feature 1..20: note = Target: SCN10A; (+) strand; PAM type: NRG; PAM sequence: TAG
  source 1..20: mol_type = other DNA
acataactagctacatggtc

SEQ ID NO: 39905 - DNA, 20 bp, synthetic construct
  misc_feature 1..20: note = Description of Artificial Sequence: Synthetic oligonucleotide
  misc_feature 1..20: note = Target: SCN10A; (+) strand; PAM type: NRG; PAM sequence: TAG
  source 1..20: mol_type = other DNA
tctagttgtatgtatataca

SEQ ID NO: 39906 - DNA, 20 bp, synthetic construct
  misc_feature 1..20: note = Description of Artificial Sequence: Synthetic oligonucleotide
  misc_feature 1..20: note = Target: SCN10A; (+) strand; PAM type: NRG; PAM sequence: TAG
  source 1..20: mol_type = other DNA
catagttgtatgtatatata

SEQ ID NO: 39907 - DNA, 20 bp, synthetic construct
  misc_feature 1..20: note = Description of Artificial Sequence: Synthetic oligonucleotide
  misc_feature 1..20: note = Target: SCN10A; (+) strand; PAM type: NRG; PAM sequence: TAG
  source 1..20: mol_type = other DNA
gtatgtatatatatagtgta

SEQ ID NO: 39908 - DNA, 20 bp, synthetic construct
  misc_feature 1..20: note = Description of Artificial Sequence: Synthetic oligonucleotide
  misc_feature 1..20: note = Target: SCN10A; (+) strand; PAM type: NRG; PAM sequence: TAG
  source 1..20: mol_type = other DNA
tgtgtatatatatctcatat

SEQ ID NO: 39909 - DNA, 20 bp, synthetic construct
  misc_feature 1..20: note = Description of Artificial Sequence: Synthetic oligonucleotide
  misc_feature 1..20: note = Target: SCN10A; (+) strand; PAM type: NRG; PAM sequence: CAG
  source 1..20: mol_type = other DNA
catattagaaattcaaaact

SEQ ID NO: 39910 - DNA, 20 bp, synthetic construct
  misc_feature 1..20: note = Description of Artificial Sequence: Synthetic oligonucleotide
  misc_feature 1..20: note = Target: SCN10A; (+) strand; PAM type: NRG; PAM sequence: AGG
  source 1..20: mol_type = other DNA
atattagaaattcaaaactc

SEQ ID NO: 39911 - DNA, 20 bp, synthetic construct
  misc_feature 1..20: note = Description of Artificial Sequence: Synthetic oligonucleotide
  misc_feature 1..20: note = Target: SCN10A; (+) strand; PAM type: NRG; PAM sequence: CGG
  source 1..20: mol_type = other DNA
actcaggaaattttaaaaca

SEQ ID NO: 39912 - DNA, 20 bp, synthetic construct
  misc_feature 1..20: note = Description of Artificial Sequence: Synthetic oligonucleotide
  misc_feature 1..20: note = Target: SCN10A; (+) strand; PAM type: NRG; PAM sequence: GGG
  source 1..20: mol_type = other DNA
ctcaggaaattttaaaacac

SEQ ID NO: 39913 - DNA, 20 bp, synthetic construct
  misc_feature 1..20: note = Description of Artificial Sequence: Synthetic oligonucleotide
  misc_feature 1..20: note = Target: SCN10A; (+) strand; PAM type: NRG; PAM sequence: CAG
  source 1..20: mol_type = other DNA
ttttaaaacacgggaatata

SEQ ID NO: 39914 - DNA, 20 bp, synthetic construct
  misc_feature 1..20: note = Description of Artificial Sequence: Synthetic oligonucleotide
  misc_feature 1..20: note = Target: SCN10A; (+) strand; PAM type: NRG; PAM sequence: AGG
  source 1..20: mol_type = other DNA
tttaaaacacgggaatatac

SEQ ID NO: 39915 - DNA, 20 bp, synthetic construct
  misc_feature 1..20: note = Description of Artificial Sequence: Synthetic oligonucleotide
  misc_feature 1..20: note = Target: SCN10A; (+) strand; PAM type: NRG; PAM sequence: CAG
  source 1..20: mol_type = other DNA
gaatatacaggcacacattc

SEQ ID NO: 39916 - DNA, 20 bp, synthetic construct
  misc_feature 1..20: note = Description of Artificial Sequence: Synthetic oligonucleotide
  misc_feature 1..20: note = Target: SCN10A; (+) strand; PAM type: NRG; PAM sequence: TAG
  source 1..20: mol_type = other DNA
tatacaggcacacattccag

SEQ ID NO: 39917 - DNA, 20 bp, synthetic construct
  misc_feature 1..20: note = Description of Artificial Sequence: Synthetic oligonucleotide
  misc_feature 1..20: note = Target: SCN10A; (+) strand; PAM type: NRG; PAM sequence: TAG
  source 1..20: mol_type = other DNA
gcacacattccagtagcttt

SEQ ID NO: 39918 - DNA, 20 bp, synthetic construct
  misc_feature 1..20: note = Description of Artificial Sequence: Synthetic oligonucleotide
  misc_feature 1..20: note = Target: SCN10A; (+) strand; PAM type: NRG; PAM sequence: GAG
  source 1..20: mol_type = other DNA
acacattccagtagctttta

SEQ ID NO: 39919 - DNA, 20 bp, synthetic construct
  misc_feature 1..20: note = Description of Artificial Sequence: Synthetic oligonucleotide
  misc_feature 1..20: note = Target: SCN10A; (+) strand; PAM type: NRG; PAM sequence: TAG
  source 1..20: mol_type = other DNA
atgacatcatcccccatcaa

SEQ ID NO: 39920 - DNA, 20 bp, synthetic construct
  misc_feature 1..20: note = Description of Artificial Sequence: Synthetic oligonucleotide
  misc_feature 1..20: note = Target: SCN10A; (+) strand; PAM type: NRG; PAM sequence: AAG
  source 1..20: mol_type = other DNA
attcaccaatgtatgatcat

SEQ ID NO: 39921 - DNA, 20 bp, synthetic construct
  misc_feature 1..20: note = Description of Artificial Sequence: Synthetic oligonucleotide
  misc_feature 1..20: note = Target: SCN10A; (+) strand; PAM type: NRG; PAM sequence: GAG
  source 1..20: mol_type = other DNA
tcaccaatgtatgatcataa

SEQ ID NO: 39922 - DNA, 20 bp, synthetic construct
  misc_feature 1..20: note = Description of Artificial Sequence: Synthetic oligonucleotide
  misc_feature 1..20: note = Target: SCN10A; (+) strand; PAM type: NRG; PAM sequence: AAG
  source 1..20: mol_type = other DNA
caatgtatgatcataagaga

SEQ ID NO: 39923 - DNA, 20 bp, synthetic construct
  misc_feature 1..20: note = Description of Artificial Sequence: Synthetic oligonucleotide
  misc_feature 1..20: note = Target: SCN10A; (+) strand; PAM type: NRG; PAM sequence: AAG
  source 1..20: mol_type = other DNA
ataagagaaagtgtgtgaaa

SEQ ID NO: 39924 - DNA, 20 bp, synthetic construct
  misc_feature 1..20: note = Description of Artificial Sequence: Synthetic oligonucleotide
  misc_feature 1..20: note = Target: SCN10A; (+) strand; PAM type: NRG; PAM sequence: AAG
  source 1..20: mol_type = other DNA
gaaaaagacaaattacatcc

SEQ ID NO: 39925 - DNA, 20 bp, synthetic construct
  misc_feature 1..20: note = Description of Artificial Sequence: Synthetic oligonucleotide
  misc_feature 1..20: note = Target: SCN10A; (+) strand; PAM type: NRG; PAM sequence: TAG
  source 1..20: mol_type = other DNA
atccaagtattgttatacaa

SEQ ID NO: 39926 - DNA, 20 bp, synthetic construct
  misc_feature 1..20: note = Description of Artificial Sequence: Synthetic oligonucleotide
  misc_feature 1..20: note = Target: SCN10A; (+) strand; PAM type: NRG; PAM sequence: CAG
  source 1..20: mol_type = other DNA
attttataaacccactaaaa

SEQ ID NO: 39927 - DNA, 20 bp, synthetic construct
  misc_feature 1..20: note = Description of Artificial Sequence: Synthetic oligonucleotide
  misc_feature 1..20: note = Target: SCN10A; (+) strand; PAM type: NRG; PAM sequence: TGG
  source 1..20: mol_type = other DNA
taaacccactaaaacagttt

SEQ ID NO: 39928 - DNA, 20 bp, synthetic construct
  misc_feature 1..20: note = Description of Artificial Sequence: Synthetic oligonucleotide
  misc_feature 1..20: note = Target: SCN10A; (+) strand; PAM type: NRG; PAM sequence: GGG
  source 1..20: mol_type = other DNA
aaacccactaaaacagtttt

SEQ ID NO: 39929 - DNA, 20 bp, synthetic construct
  misc_feature 1..20: note = Description of Artificial Sequence: Synthetic oligonucleotide
  misc_feature 1..20: note = Target: SCN10A; (+) strand; PAM type: NRG; PAM sequence: GGG
  source 1..20: mol_type = other DNA
aacccactaaaacagttttg

SEQ ID NO: 39930 - DNA, 20 bp, synthetic construct
  misc_feature 1..20: note = Description of Artificial Sequence: Synthetic oligonucleotide
  misc_feature 1..20: note = Target: SCN10A; (+) strand; PAM type: NRG; PAM sequence: CAG
  source 1..20: mol_type = other DNA
taaaacagttttggggacac

SEQ ID NO: 39931 - DNA, 20 bp, synthetic construct
  misc_feature 1..20: note = Description of Artificial Sequence: Synthetic oligonucleotide
  misc_feature 1..20: note = Target: SCN10A; (+) strand; PAM type: NRG; PAM sequence: AGG
  source 1..20: mol_type = other DNA
aaaacagttttggggacacc

SEQ ID NO: 39932 - DNA, 20 bp, synthetic construct
  misc_feature 1..20: note = Description of Artificial Sequence: Synthetic oligonucleotide
  misc_feature 1..20: note = Target: SCN10A; (+) strand; PAM type: NRG; PAM sequence: GGG
  source 1..20: mol_type = other DNA
aaacagttttggggacacca

SEQ ID NO: 39933 - DNA, 20 bp, synthetic construct
  misc_feature 1..20: note = Description of Artificial Sequence: Synthetic oligonucleotide
  misc_feature 1..20: note = Target: SCN10A; (+) strand; PAM type: NRG; PAM sequence: GGG
  source 1..20: mol_type = other DNA
aacagttttggggacaccag

SEQ ID NO: 39934 - DNA, 20 bp, synthetic construct
  misc_feature 1..20: note = Description of Artificial Sequence: Synthetic oligonucleotide
  misc_feature 1..20: note = Target: SCN10A; (+) strand; PAM type: NRG; PAM sequence: AAG
  source 1..20: mol_type = other DNA
ttggggacaccaggggttcc

SEQ ID NO: 39935 - DNA, 20 bp, synthetic construct
  misc_feature 1..20: note = Description of Artificial Sequence: Synthetic oligonucleotide
  misc_feature 1..20: note = Target: SCN10A; (+) strand; PAM type: NRG; PAM sequence: TAG
  source 1..20: mol_type = other DNA
caccaggggttccaagatca

SEQ ID NO: 39936 - DNA, 20 bp, synthetic construct
  misc_feature 1..20: note = Description of Artificial Sequence: Synthetic oligonucleotide
  misc_feature 1..20: note = Target: SCN10A; (+) strand; PAM type: NRG; PAM sequence: GAG
  source 1..20: mol_type = other DNA
ggggttccaagatcatagtt

SEQ ID NO: 39937 - DNA, 20 bp, synthetic construct
  misc_feature 1..20: note = Description of Artificial Sequence: Synthetic oligonucleotide
  misc_feature 1..20: note = Target: SCN10A; (+) strand; PAM type: NRG; PAM sequence: AGG
  source 1..20: mol_type = other DNA
gggttccaagatcatagttg

SEQ ID NO: 39938 - DNA, 20 bp, synthetic construct
  misc_feature 1..20: note = Description of Artificial Sequence: Synthetic oligonucleotide
  misc_feature 1..20: note = Target: SCN10A; (+) strand; PAM type: NRG; PAM sequence: TGG
  source 1..20: mol_type = other DNA
agatcatagttgaggaccac

SEQ ID NO: 39939 - DNA, 20 bp, synthetic construct
  misc_feature 1..20: note = Description of Artificial Sequence: Synthetic oligonucleotide
  misc_feature 1..20: note = Target: SCN10A; (+) strand; PAM type: NRG; PAM sequence: AAG
  source 1..20: mol_type = other DNA
catgctcctcccccaacctc

SEQ ID NO: 39940 - DNA, 20 bp, synthetic construct
  misc_feature 1..20: note = Description of Artificial Sequence: Synthetic oligonucleotide
  misc_feature 1..20: note = Target: SCN10A; (+) strand; PAM type: NRG; PAM sequence: AAG
  source 1..20: mol_type = other DNA
atgtctgctctccacctgca

SEQ ID NO: 39941 - DNA, 20 bp, synthetic construct
  misc_feature 1..20: note = Description of Artificial Sequence: Synthetic oligonucleotide
  misc_feature 1..20: note = Target: SCN10A; (+) strand; PAM type: NRG; PAM sequence: GAG
  source 1..20: mol_type = other DNA
gtctgctctccacctgcaaa

SEQ ID NO: 39942 - DNA, 20 bp, synthetic construct
  misc_feature 1..20: note = Description of Artificial Sequence: Synthetic oligonucleotide
  misc_feature 1..20: note = Target: SCN10A; (+) strand; PAM type: NRG; PAM sequence: TGG
  source 1..20: mol_type = other DNA
gcaaagagacccaactcctc

SEQ ID NO: 39943 - DNA, 20 bp, synthetic construct
  misc_feature 1..20: note = Description of Artificial Sequence: Synthetic oligonucleotide
  misc_feature 1..20: note = Target: SCN10A; (+) strand; PAM type: NRG; PAM sequence: GAG
  source 1..20: mol_type = other DNA
aaagagacccaactcctctg

SEQ ID NO: 39944 - DNA, 20 bp, synthetic construct
  misc_feature 1..20: note = Description of Artificial Sequence: Synthetic oligonucleotide
  misc_feature 1..20: note = Target: SCN10A; (+) strand; PAM type: NRG; PAM sequence: AGG
  source 1..20: mol_type = other DNA
aagagacccaactcctctgg

SEQ ID NO: 39945 - DNA, 20 bp, synthetic construct
  misc_feature 1..20: note = Description of Artificial Sequence: Synthetic oligonucleotide
  misc_feature 1..20: note = Target: SCN10A; (+) strand; PAM type: NRG; PAM sequence: CAG
  source 1..20: mol_type = other DNA
cccaactcctctggaggccc

SEQ ID NO: 39946 - DNA, 20 bp, synthetic construct
  misc_feature 1..20: note = Description of Artificial Sequence: Synthetic oligonucleotide
  misc_feature 1..20: note = Target: SCN10A; (+) strand; PAM type: NRG; PAM sequence: AGG
  source 1..20: mol_type = other DNA
ccaactcctctggaggcccc

SEQ ID NO: 39947 - DNA, 20 bp, synthetic construct
  misc_feature 1..20: note = Description of Artificial Sequence: Synthetic oligonucleotide
  misc_feature 1..20: note = Target: SCN10A; (+) strand; PAM type: NRG; PAM sequence: CAG
  source 1..20: mol_type = other DNA
ctcctctggaggccccaggc

SEQ ID NO: 39948 - DNA, 20 bp, synthetic construct
  misc_feature 1..20: note = Description of Artificial Sequence: Synthetic oligonucleotide
  misc_feature 1..20: note = Target: SCN10A; (+) strand; PAM type: NRG; PAM sequence: GAG
  source 1..20: mol_type = other DNA
cctctggaggccccaggcca

SEQ ID NO: 39949 - DNA, 20 bp, synthetic construct
  misc_feature 1..20: note = Description of Artificial Sequence: Synthetic oligonucleotide
  misc_feature 1..20: note = Target: SCN10A; (+) strand; PAM type: NRG; PAM sequence: AGG
  source 1..20: mol_type = other DNA
ctctggaggccccaggccag

SEQ ID NO: 39950 - DNA, 20 bp, synthetic construct
  misc_feature 1..20: note = Description of Artificial Sequence: Synthetic oligonucleotide
  misc_feature 1..20: note = Target: SCN10A; (+) strand; PAM type: NRG; PAM sequence: AAG
  source 1..20: mol_type = other DNA
ccccaggccagaggtcatcc

SEQ ID NO: 39951 - DNA, 20 bp, synthetic construct
  misc_feature 1..20: note = Description of Artificial Sequence: Synthetic oligonucleotide
  misc_feature 1..20: note = Target: SCN10A; (+) strand; PAM type: NRG; PAM sequence: AGG
  source 1..20: mol_type = other DNA
cccaggccagaggtcatcca

SEQ ID NO: 39952 - DNA, 20 bp, synthetic construct
  misc_feature 1..20: note = Description of Artificial Sequence: Synthetic oligonucleotide
  misc_feature 1..20: note = Target: SCN10A; (+) strand; PAM type: NRG; PAM sequence: GGG
  source 1..20: mol_type = other DNA
ccaggccagaggtcatccaa

SEQ ID NO: 39953 - DNA, 20 bp, synthetic construct
  misc_feature 1..20: note = Description of Artificial Sequence: Synthetic oligonucleotide
  misc_feature 1..20: note = Target: SCN10A; (+) strand; PAM type: NRG; PAM sequence: CAG
  source 1..20: mol_type = other DNA
ccagaggtcatccaagggaa

SEQ ID NO: 39954 - DNA, 20 bp, synthetic construct
  misc_feature 1..20: note = Description of Artificial Sequence: Synthetic oligonucleotide
  misc_feature 1..20: note = Target: SCN10A; (+) strand; PAM type: NRG; PAM sequence: AAG
  source 1..20: mol_type = other DNA
gaacagccaactttccctga

SEQ ID NO: 39955 - DNA, 20 bp, synthetic construct
  misc_feature 1..20: note = Description of Artificial Sequence: Synthetic oligonucleotide
  misc_feature 1..20: note = Target: SCN10A; (+) strand; PAM type: NRG; PAM sequence: CAG
  source 1..20: mol_type = other DNA
aactttccctgaaagctctg

SEQ ID NO: 39956 - DNA, 20 bp, synthetic construct
  misc_feature 1..20: note = Description of Artificial Sequence: Synthetic oligonucleotide
  misc_feature 1..20: note = Target: SCN10A; (+) strand; PAM type: NRG; PAM sequence: CAG
  source 1..20: mol_type = other DNA
tttccctgaaagctctgcag

SEQ ID NO: 39957 - DNA, 20 bp, synthetic construct
  misc_feature 1..20: note = Description of Artificial Sequence: Synthetic oligonucleotide
  misc_feature 1..20: note = Target: SCN10A; (+) strand; PAM type: NRG; PAM sequence: AAG
  source 1..20: mol_type = other DNA
gcagcagttatctgcttttg

SEQ ID NO: 39958 - DNA, 20 bp, synthetic construct
  misc_feature 1..20: note = Description of Artificial Sequence: Synthetic oligonucleotide
  misc_feature 1..20: note = Target: SCN10A; (+) strand; PAM type: NRG; PAM sequence: TGG
  source 1..20: mol_type = other DNA
gttatctgcttttgaagatg

SEQ ID NO: 39959 - DNA, 20 bp, synthetic construct
  misc_feature 1..20: note = Description of Artificial Sequence: Synthetic oligonucleotide
  misc_feature 1..20: note = Target: SCN10A; (+) strand; PAM type: NRG; PAM sequence: GGG
  source 1..20: mol_type = other DNA
ttatctgcttttgaagatgt

SEQ ID NO: 39960 - DNA, 20 bp, synthetic construct
  misc_feature 1..20: note = Description of Artificial Sequence: Synthetic oligonucleotide
  misc_feature 1..20: note = Target: SCN10A; (+) strand; PAM type: NRG; PAM sequence: TAG
  source 1..20: mol_type = other DNA
tgcttttgaagatgtgggtt

SEQ ID NO: 39961 - DNA, 20 bp, synthetic construct
  misc_feature 1..20: note = Description of Artificial Sequence: Synthetic oligonucleotide
  misc_feature 1..20: note = Target: SCN10A; (+) strand; PAM type: NRG; PAM sequence: TAG
  source 1..20: mol_type = other DNA
tttgaagatgtgggtttagt

SEQ ID NO: 39962 - DNA, 20 bp, synthetic construct
  misc_feature 1..20: note = Description of Artificial Sequence: Synthetic oligonucleotide
  misc_feature 1..20: note = Target: SCN10A; (+) strand; PAM type: NRG; PAM sequence: AAG
  source 1..20: mol_type = other DNA
ataaatgtcataaaaattca

SEQ ID NO: 39963 - DNA, 20 bp, synthetic construct
  misc_feature 1..20: note = Description of Artificial Sequence: Synthetic oligonucleotide
  misc_feature 1..20: note = Target: SCN10A; (+) strand; PAM type: NRG; PAM sequence: GAG
  source 1..20: mol_type = other DNA
aaatgtcataaaaattcaaa

SEQ ID NO: 39964 - DNA, 20 bp, synthetic construct
  misc_feature 1..20: note = Description of Artificial Sequence: Synthetic oligonucleotide
  misc_feature 1..20: note = Target: SCN10A; (+) strand; PAM type: NRG; PAM sequence: AAG
  source 1..20: mol_type = other DNA
attcaaagagatcatcaaat

SEQ ID NO: 39965 - DNA, 20 bp, synthetic construct
  misc_feature 1..20: note = Description of Artificial Sequence: Synthetic oligonucleotide
  misc_feature 1..20: note = Target: SCN10A; (+) strand; PAM type: NRG; PAM sequence: TAG
  source 1..20: mol_type = other DNA
aaagagatcatcaaataagt

SEQ ID NO: 39966 - DNA, 20 bp, synthetic construct
  misc_feature 1..20: note = Description of Artificial Sequence: Synthetic oligonucleotide
  misc_feature 1..20: note = Target: SCN10A; (+) strand; PAM type: NRG; PAM sequence: GAG
  source 1..20: mol_type = other DNA
agagatcatcaaataagtta

SEQ ID NO: 39967 - DNA, 20 bp, synthetic construct
  misc_feature 1..20: note = Description of Artificial Sequence: Synthetic oligonucleotide
  misc_feature 1..20: note = Target: SCN10A; (+) strand; PAM type: NRG; PAM sequence: TGG
  source 1..20: mol_type = other DNA
atatatatatatattttttt

SEQ ID NO: 39968 - DNA, 20 bp, synthetic construct
  misc_feature 1..20: note = Description of Artificial Sequence: Synthetic oligonucleotide
  misc_feature 1..20: note = Target: SCN10A; (+) strand; PAM type: NRG; PAM sequence: CGG
  source 1..20: mol_type = other DNA
atattttttttggttgttaa

SEQ ID NO: 39969 - DNA, 20 bp, synthetic construct
  misc_feature 1..20: note = Description of Artificial Sequence: Synthetic oligonucleotide
  misc_feature 1..20: note = Target: SCN10A; (+) strand; PAM type: NRG; PAM sequence: TAG
  source 1..20: mol_type = other DNA
ttggttgttaacggaatctt

SEQ ID NO: 39970 - DNA, 20 bp, synthetic construct
  misc_feature 1..20: note = Description of Artificial Sequence: Synthetic oligonucleotide
  misc_feature 1..20: note = Target: SCN10A; (+) strand; PAM type: NRG; PAM sequence: CAG
  source 1..20: mol_type = other DNA
gttgttaacggaatctttag

SEQ ID NO: 39971 - DNA, 20 bp, synthetic construct
  misc_feature 1..20: note = Description of Artificial Sequence: Synthetic oligonucleotide
  misc_feature 1..20: note = Target: SCN10A; (+) strand; PAM type: NRG; PAM sequence: CAG
  source 1..20: mol_type = other DNA
tagcagactgccacatcacc

SEQ ID NO: 39972 - DNA, 20 bp, synthetic construct
  misc_feature 1..20: note = Description of Artificial Sequence: Synthetic oligonucleotide
  misc_feature 1..20: note = Target: SCN10A; (+) strand; PAM type: NRG; PAM sequence: AGG
  source 1..20: mol_type = other DNA
agcagactgccacatcaccc

SEQ ID NO: 39973 - DNA, 20 bp, synthetic construct
  misc_feature 1..20: note = Description of Artificial Sequence: Synthetic oligonucleotide
  misc_feature 1..20: note = Target: SCN10A; (+) strand; PAM type: NRG; PAM sequence: GGG
  source 1..20: mol_type = other DNA
gcagactgccacatcaccca

SEQ ID NO: 39974 - DNA, 20 bp, synthetic construct
  misc_feature 1..20: note = Description of Artificial Sequence: Synthetic oligonucleotide
  misc_feature 1..20: note = Target: SCN10A; (+) strand; PAM type: NRG; PAM sequence: AAG
  source 1..20: mol_type = other DNA
ctgccacatcacccagggcc

SEQ ID NO: 39975 - DNA, 20 bp, synthetic construct
  misc_feature 1..20: note = Description of Artificial Sequence: Synthetic oligonucleotide
  misc_feature 1..20: note = Target: SCN10A; (+) strand; PAM type: NRG; PAM sequence: AGG
  source 1..20: mol_type = other DNA
tgccacatcacccagggcca

SEQ ID NO: 39976 - DNA, 20 bp, synthetic construct
  misc_feature 1..20: note = Description of Artificial Sequence: Synthetic oligonucleotide
  misc_feature 1..20: note = Target: SCN10A; (+) strand; PAM type: NRG; PAM sequence: GAG
  source 1..20: mol_type = other DNA
ccacatcacccagggccaag

SEQ ID NO: 39977 - DNA, 20 bp, synthetic construct
  misc_feature 1..20: note = Description of Artificial Sequence: Synthetic oligonucleotide
  misc_feature 1..20: note = Target: SCN10A; (+) strand; PAM type: NRG; PAM sequence: AGG
  source 1..20: mol_type = other DNA
cacatcacccagggccaagg

SEQ ID NO: 39978 - DNA, 20 bp, synthetic construct
  misc_feature 1..20: note = Description of Artificial Sequence: Synthetic oligonucleotide
  misc_feature 1..20: note = Target: SCN10A; (+) strand; PAM type: NRG; PAM sequence: TGG
  source 1..20: mol_type = other DNA
cagggccaaggaggactttc

SEQ ID NO: 39979 - DNA, 20 bp, synthetic construct
  misc_feature 1..20: note = Description of Artificial Sequence: Synthetic oligonucleotide
  misc_feature 1..20: note = Target: SCN10A; (+) strand; PAM type: NRG; PAM sequence: GGG
  source 1..20: mol_type = other DNA
agggccaaggaggactttct

SEQ ID NO: 39980 - DNA, 20 bp, synthetic construct
  misc_feature 1..20: note = Description of Artificial Sequence: Synthetic oligonucleotide
  misc_feature 1..20: note = Target: SCN10A; (+) strand; PAM type: NRG; PAM sequence: TGG
  source 1..20: mol_type = other DNA
ccaaggaggactttctgggc

SEQ ID NO: 39981 - DNA, 20 bp, synthetic construct
  misc_feature 1..20: note = Description of Artificial Sequence: Synthetic oligonucleotide
  misc_feature 1..20: note = Target: SCN10A; (+) strand; PAM type: NRG; PAM sequence: GGG
  source 1..20: mol_type = other DNA
caaggaggactttctgggct

SEQ ID NO: 39982 - DNA, 20 bp, synthetic construct
  misc_feature 1..20: note = Description of Artificial Sequence: Synthetic oligonucleotide
  misc_feature 1..20: note = Target: SCN10A; (+) strand; PAM type: NRG; PAM sequence: TGG
  source 1..20: mol_type = other DNA
ggaggactttctgggctggg

SEQ ID NO: 39983 - DNA, 20 bp, synthetic construct
  misc_feature 1..20: note = Description of Artificial Sequence: Synthetic oligonucleotide
  misc_feature 1..20: note = Target: SCN10A; (+) strand; PAM type: NRG; PAM sequence: GGG
  source 1..20: mol_type = other DNA
gaggactttctgggctgggt

SEQ ID NO: 39984 - DNA, 20 bp, synthetic construct
  misc_feature 1..20: note = Description of Artificial Sequence: Synthetic oligonucleotide
  misc_feature 1..20: note = Target: SCN10A; (+) strand; PAM type: NRG; PAM sequence: GAG
  source 1..20: mol_type = other DNA
tttctgggctgggtgggacc

SEQ ID NO: 39985 - DNA, 20 bp, synthetic construct
  misc_feature 1..20: note = Description of Artificial Sequence: Synthetic oligonucleotide
  misc_feature 1..20: note = Target: SCN10A; (+) strand; PAM type: NRG; PAM sequence: AAG
  source 1..20: mol_type = other DNA
gggaccgagacttcctctcc

SEQ ID NO: 39986 - DNA, 20 bp, synthetic construct
  misc_feature 1..20: note = Description of Artificial Sequence: Synthetic oligonucleotide
  misc_feature 1..20: note = Target: SCN10A; (+) strand; PAM type: NRG; PAM sequence: GAG
  source 1..20: mol_type = other DNA
gaccgagacttcctctccaa

SEQ ID NO: 39987 - DNA, 20 bp, synthetic construct
  misc_feature 1..20: note = Description of Artificial Sequence: Synthetic oligonucleotide
  misc_feature 1..20: note = Target: SCN10A; (+) strand; PAM type: NRG; PAM sequence: GAG
  source 1..20: mol_type = other DNA
agacttcctctccaagagct

SEQ ID NO: 39988 - DNA, 20 bp, synthetic construct
  misc_feature 1..20: note = Description of Artificial Sequence: Synthetic oligonucleotide
  misc_feature 1..20: note = Target: SCN10A; (+) strand; PAM type: NRG; PAM sequence: GAG
  source 1..20: mol_type = other DNA
acttcctctccaagagctga

SEQ ID NO: 39989 - DNA, 20 bp, synthetic construct
  misc_feature 1..20: note = Description of Artificial Sequence: Synthetic oligonucleotide
  misc_feature 1..20: note = Target: SCN10A; (+) strand; PAM type: NRG; PAM sequence: CAG
  source 1..20: mol_type = other DNA
tcctctccaagagctgagag

SEQ ID NO: 39990 - DNA, 20 bp, synthetic construct
  misc_feature 1..20: note = Description of Artificial Sequence: Synthetic oligonucleotide
  misc_feature 1..20: note = Target: SCN10A; (+) strand; PAM type: NRG; PAM sequence: TAG
  source 1..20: mol_type = other DNA
ctgagagcagacattcctac

SEQ ID NO: 39991 - DNA, 20 bp, synthetic construct
  misc_feature 1..20: note = Description of Artificial Sequence: Synthetic oligonucleotide
  misc_feature 1..20: note = Target: SCN10A; (+) strand; PAM type: NRG; PAM sequence: TAG
  source 1..20: mol_type = other DNA
agagcagacattcctactag

SEQ ID NO: 39992 - DNA, 20 bp, synthetic construct
  misc_feature 1..20: note = Description of Artificial Sequence: Synthetic oligonucleotide
  misc_feature 1..20: note = Target: SCN10A; (+) strand; PAM type: NRG; PAM sequence: CGG
  source 1..20: mol_type = other DNA
tcctactagtagctcttacc

SEQ ID NO: 39993 - DNA, 20 bp, synthetic construct
  misc_feature 1..20: note = Description of Artificial Sequence: Synthetic oligonucleotide
  misc_feature 1..20: note = Target: SCN10A; (+) strand; PAM type: NRG; PAM sequence: TAG
  source 1..20: mol_type = other DNA
ctcttacccggtgtgtgctg

SEQ ID NO: 39994 - DNA, 20 bp, synthetic construct
  misc_feature 1..20: note = Description of Artificial Sequence: Synthetic oligonucleotide
  misc_feature 1..20: note = Target: SCN10A; (+) strand; PAM type: NRG; PAM sequence: CGG
  source 1..20: mol_type = other DNA
acccggtgtgtgctgtagaa

SEQ ID NO: 39995 - DNA, 20 bp, synthetic construct
  misc_feature 1..20: note = Description of Artificial Sequence: Synthetic oligonucleotide
  misc_feature 1..20: note = Target: SCN10A; (+) strand; PAM type: NRG; PAM sequence: TAG
  source 1..20: mol_type = other DNA
tgtgtgctgtagaacggatc

SEQ ID NO: 39996 - DNA, 20 bp, synthetic construct
  misc_feature 1..20: note = Description of Artificial Sequence: Synthetic oligonucleotide
  misc_feature 1..20: note = Target: SCN10A; (+) strand; PAM type: NRG; PAM sequence: CAG
  source 1..20: mol_type = other DNA
tagaacggatctagatcctc

SEQ ID NO: 39997 - DNA, 20 bp, synthetic construct
  misc_feature 1..20: note = Description of Artificial Sequence: Synthetic oligonucleotide
  misc_feature 1..20: note = Target: SCN10A; (+) strand; PAM type: NRG; PAM sequence: AGG
  source 1..20: mol_type = other DNA
agaacggatctagatcctcc

SEQ ID NO: 39998 - DNA, 20 bp, synthetic construct
  misc_feature 1..20: note = Description of Artificial Sequence: Synthetic oligonucleotide
  misc_feature 1..20: note = Target: SCN10A; (+) strand; PAM type: NRG; PAM sequence: GGG
  source 1..20: mol_type = other DNA
gaacggatctagatcctcca

SEQ ID NO: 39999 - DNA, 20 bp, synthetic construct
  misc_feature 1..20: note = Description of Artificial Sequence: Synthetic oligonucleotide
  misc_feature 1..20: note = Target: SCN10A; (+) strand; PAM type: NRG; PAM sequence: GGG
  source 1..20: mol_type = other DNA
aacggatctagatcctccag

SEQ ID NO: 40000 - DNA, 20 bp, synthetic construct
  misc_feature 1..20: note = Description of Artificial Sequence: Synthetic oligonucleotide
  misc_feature 1..20: note = Target: SCN10A; (+) strand; PAM type: NRG; PAM sequence: CAG
  source 1..20: mol_type = other DNA
tcctccaggggctccccgat

SEQ ID NO: 40001 - DNA, 20 bp, synthetic construct
  misc_feature 1..20: note = Description of Artificial Sequence: Synthetic oligonucleotide
  misc_feature 1..20: note = Target: SCN10A; (+) strand; PAM type: NRG; PAM sequence: TGG
  source 1..20: mol_type = other DNA
ggctccccgatcagttctgc

SEQ ID NO: 40002 - DNA, 20 bp, synthetic construct
  misc_feature 1..20: note = Description of Artificial Sequence: Synthetic oligonucleotide
  misc_feature 1..20: note = Target: SCN10A; (+) strand; PAM type: NRG; PAM sequence: GGG
  source 1..20: mol_type = other DNA
gctccccgatcagttctgct

SEQ ID NO: 40003 - DNA, 20 bp, synthetic construct
  misc_feature 1..20: note = Description of Artificial Sequence: Synthetic oligonucleotide
  misc_feature 1..20: note = Target: SCN10A; (+) strand; PAM type: NRG; PAM sequence: GAG
  source 1..20: mol_type = other DNA
tccccgatcagttctgctgg

SEQ ID NO: 40004 - DNA, 20 bp, synthetic construct
  misc_feature 1..20: note = Description of Artificial Sequence: Synthetic oligonucleotide
  misc_feature 1..20: note = Target: SCN10A; (+) strand; PAM type: NRG; PAM sequence: TAG
  source 1..20: mol_type = other DNA
gttctgctgggagctcacca

SEQ ID NO: 40005 - DNA, 20 bp, synthetic construct
  misc_feature 1..20: note = Description of Artificial Sequence: Synthetic oligonucleotide
  misc_feature 1..20: note = Target: SCN10A; (+) strand; PAM type: NRG; PAM sequence: TGG
  source 1..20: mol_type = other DNA
tgggagctcaccatagaact

SEQ ID NO: 40006 - DNA, 20 bp, synthetic construct
  misc_feature 1..20: note = Description of Artificial Sequence: Synthetic oligonucleotide
  misc_feature 1..20: note = Target: SCN10A; (+) strand; PAM type: NRG; PAM sequence: GGG
  source 1..20: mol_type = other DNA
gggagctcaccatagaactt

SEQ ID NO: 40007 - DNA, 20 bp, synthetic construct
  misc_feature 1..20: note = Description of Artificial Sequence: Synthetic oligonucleotide
  misc_feature 1..20: note = Target: SCN10A; (+) strand; PAM type: NRG; PAM sequence: CAG
  source 1..20: mol_type = other DNA
agctcaccatagaacttggg

SEQ ID NO: 40008 - DNA, 20 bp, synthetic construct
  misc_feature 1..20: note = Description of Artificial Sequence: Synthetic oligonucleotide
  misc_feature 1..20: note = Target: SCN10A; (+) strand; PAM type: NRG; PAM sequence: TGG
  source 1..20: mol_type = other DNA
caccatagaacttgggcagc

SEQ ID NO: 40009 - DNA, 20 bp, synthetic construct
  misc_feature 1..20: note = Description of Artificial Sequence: Synthetic oligonucleotide
  misc_feature 1..20: note = Target: SCN10A; (+) strand; PAM type: NRG; PAM sequence: CAG
  source 1..20: mol_type = other DNA
agaacttgggcagctggttg

SEQ ID NO: 40010 - DNA, 20 bp, synthetic construct
  misc_feature 1..20: note = Description of Artificial Sequence: Synthetic oligonucleotide
  misc_feature 1..20: note = Target: SCN10A; (+) strand; PAM type: NRG; PAM sequence: AGG
  source 1..20: mol_type = other DNA
gaacttgggcagctggttgc

SEQ ID NO: 40011 - DNA, 20 bp, synthetic construct
  misc_feature 1..20: note = Description of Artificial Sequence: Synthetic oligonucleotide
  misc_feature 1..20: note = Target: SCN10A; (+) strand; PAM type: NRG; PAM sequence: AAG
  source 1..20: mol_type = other DNA
gcagctggttgcaggctttc

SEQ ID NO: 40012 - DNA, 20 bp, synthetic construct
  misc_feature 1..20: note = Description of Artificial Sequence: Synthetic oligonucleotide
  misc_feature 1..20: note = Target: SCN10A; (+) strand; PAM type: NRG; PAM sequence: CAG
  source 1..20: mol_type = other DNA
tggttgcaggctttcaagtc

SEQ ID NO: 40013 - DNA, 20 bp, synthetic construct
  misc_feature 1..20: note = Description of Artificial Sequence: Synthetic oligonucleotide
  misc_feature 1..20: note = Target: SCN10A; (+) strand; PAM type: NRG; PAM sequence: TGG
  source 1..20: mol_type = other DNA
tgcaggctttcaagtccagc

SEQ ID NO: 40014 - DNA, 20 bp, synthetic construct
  misc_feature 1..20: note = Description of Artificial Sequence: Synthetic oligonucleotide
  misc_feature 1..20: note = Target: SCN10A; (+) strand; PAM type: NRG; PAM sequence: GGG
  source 1..20: mol_type = other DNA
gcaggctttcaagtccagct

SEQ ID NO: 40015 - DNA, 20 bp, synthetic construct
  misc_feature 1..20: note = Description of Artificial Sequence: Synthetic oligonucleotide
  misc_feature 1..20: note = Target: SCN10A; (+) strand; PAM type: NRG; PAM sequence: GGG
  source 1..20: mol_type = other DNA
caggctttcaagtccagctg

SEQ ID NO: 40016 - DNA, 20 bp, synthetic construct
  misc_feature 1..20: note = Description of Artificial Sequence: Synthetic oligonucleotide
  misc_feature 1..20: note = Target: SCN10A; (+) strand; PAM type: NRG; PAM sequence: GAG
  source 1..20: mol_type = other DNA
tttcaagtccagctggggcc

SEQ ID NO: 40017 - DNA, 20 bp, synthetic construct
  misc_feature 1..20: note = Description of Artificial Sequence: Synthetic oligonucleotide
  misc_feature 1..20: note = Target: SCN10A; (+) strand; PAM type: NRG; PAM sequence: AGG
  source 1..20: mol_type = other DNA
ttcaagtccagctggggccg

SEQ ID NO: 40018 - DNA, 20 bp, synthetic construct
  misc_feature 1..20: note = Description of Artificial Sequence: Synthetic oligonucleotide
  misc_feature 1..20: note = Target: SCN10A; (+) strand; PAM type: NRG; PAM sequence: TGG
  source 1..20: mol_type = other DNA
ggggccgaggcttctcttct

SEQ ID NO: 40019 - DNA, 20 bp, synthetic construct
  misc_feature 1..20: note = Description of Artificial Sequence: Synthetic oligonucleotide
  misc_feature 1..20: note = Target: SCN10A; (+) strand; PAM type: NRG; PAM sequence: TGG
  source 1..20: mol_type = other DNA
ctgctccctatgcttctctc

SEQ ID NO: 40020 - DNA, 20 bp, synthetic construct
  misc_feature 1..20: note = Description of Artificial Sequence: Synthetic oligonucleotide
  misc_feature 1..20: note = Target: SCN10A; (+) strand; PAM type: NRG; PAM sequence: TGG
  source 1..20: mol_type = other DNA
ggctttctttgttccctgct

SEQ ID NO: 40021 - DNA, 20 bp, synthetic construct
  misc_feature 1..20: note = Description of Artificial Sequence: Synthetic oligonucleotide
  misc_feature 1..20: note = Target: SCN10A; (+) strand; PAM type: NRG; PAM sequence: CAG
  source 1..20: mol_type = other DNA
tttctttgttccctgcttgg

SEQ ID NO: 40022 - DNA, 20 bp, synthetic construct
  misc_feature 1..20: note = Description of Artificial Sequence: Synthetic oligonucleotide
  misc_feature 1..20: note = Target: SCN10A; (+) strand; PAM type: NRG; PAM sequence: CAG
  source 1..20: mol_type = other DNA
atttgcttctctatctccac

SEQ ID NO: 40023 - DNA, 20 bp, synthetic construct
  misc_feature 1..20: note = Description of Artificial Sequence: Synthetic oligonucleotide
  misc_feature 1..20: note = Target: SCN10A; (+) strand; PAM type: NRG; PAM sequence: CGG
  source 1..20: mol_type = other DNA
tctatctccaccagtgactc

SEQ ID NO: 40024 - DNA, 20 bp, synthetic construct
  misc_feature 1..20: note = Description of Artificial Sequence: Synthetic oligonucleotide
  misc_feature 1..20: note = Target: SCN10A; (+) strand; PAM type: NRG; PAM sequence: GAG
  source 1..20: mol_type = other DNA
tatctccaccagtgactccg

SEQ ID NO: 40025 - DNA, 20 bp, synthetic construct
  misc_feature 1..20: note = Description of Artificial Sequence: Synthetic oligonucleotide
  misc_feature 1..20: note = Target: SCN10A; (+) strand; PAM type: NRG; PAM sequence: AAG
  source 1..20: mol_type = other DNA
ccaccagtgactccggagta

SEQ ID NO: 40026 - DNA, 20 bp, synthetic construct
  misc_feature 1..20: note = Description of Artificial Sequence: Synthetic oligonucleotide
  misc_feature 1..20: note = Target: SCN10A; (+) strand; PAM type: NRG; PAM sequence: CGG
  source 1..20: mol_type = other DNA
gtgactccggagtaaagcga

SEQ ID NO: 40027 - DNA, 20 bp, synthetic construct
  misc_feature 1..20: note = Description of Artificial Sequence: Synthetic oligonucleotide
  misc_feature 1..20: note = Target: SCN10A; (+) strand; PAM type: NRG; PAM sequence: AAG
  source 1..20: mol_type = other DNA
actccggagtaaagcgacgg

SEQ ID NO: 40028 - DNA, 20 bp, synthetic construct
  misc_feature 1..20: note = Description of Artificial Sequence: Synthetic oligonucleotide
  misc_feature 1..20: note = Target: SCN10A; (+) strand; PAM type: NRG; PAM sequence: TAG
  source 1..20: mol_type = other DNA
agtaaagcgacggaagttgt

SEQ ID NO: 40029 - DNA, 20 bp, synthetic construct
  misc_feature 1..20: note = Description of Artificial Sequence: Synthetic oligonucleotide
  misc_feature 1..20: note = Target: SCN10A; (+) strand; PAM type: NRG; PAM sequence: GAG
  source 1..20: mol_type = other DNA
cgacggaagttgttagtttc

SEQ ID NO: 40030 - DNA, 20 bp, synthetic construct
  misc_feature 1..20: note = Description of Artificial Sequence: Synthetic oligonucleotide
  misc_feature 1..20: note = Target: SCN10A; (+) strand; PAM type: NRG; PAM sequence: AGG
  source 1..20: mol_type = other DNA
gacggaagttgttagtttcg

SEQ ID NO: 40031 - DNA, 20 bp, synthetic construct
  misc_feature 1..20: note = Description of Artificial Sequence: Synthetic oligonucleotide
  misc_feature 1..20: note = Target: SCN10A; (+) strand; PAM type: NRG; PAM sequence: GGG
  source 1..20: mol_type = other DNA
acggaagttgttagtttcga

SEQ ID NO: 40032 - DNA, 20 bp, synthetic construct
  misc_feature 1..20: note = Description of Artificial Sequence: Synthetic oligonucleotide
  misc_feature 1..20: note = Target: SCN10A; (+) strand; PAM type: NRG; PAM sequence: TGG
  source 1..20: mol_type = other DNA
gttagtttcgagggatccaa

SEQ ID NO: 40033 - DNA, 20 bp, synthetic construct
  misc_feature 1..20: note = Description of Artificial Sequence: Synthetic oligonucleotide
  misc_feature 1..20: note = Target: SCN10A; (+) strand; PAM type: NRG; PAM sequence: GGG
  source 1..20: mol_type = other DNA
ttagtttcgagggatccaat

SEQ ID NO: 40034 - DNA, 20 bp, synthetic construct
  misc_feature 1..20: note = Description of Artificial Sequence: Synthetic oligonucleotide
  misc_feature 1..20: note = Target: SCN10A; (+) strand; PAM type: NRG; PAM sequence: GGG
  source 1..20: mol_type = other DNA
tagtttcgagggatccaatg

SEQ ID NO: 40035 - DNA, 20 bp, synthetic construct
  misc_feature 1..20: note = Description of Artificial Sequence: Synthetic oligonucleotide
  misc_feature 1..20: note = Target: SCN10A; (+) strand; PAM type: NRG; PAM sequence: CAG
  source 1..20: mol_type = other DNA
tccatcttctcattcttctt

SEQ ID NO: 40036 - DNA, 20 bp, synthetic construct
  misc_feature 1..20: note = Description of Artificial Sequence: Synthetic oligonucleotide
  misc_feature 1..20: note = Target: SCN10A; (+) strand; PAM type: NRG; PAM sequence: AGG
  source 1..20: mol_type = other DNA
ccatcttctcattcttcttc

SEQ ID NO: 40037 - DNA, 20 bp, synthetic construct
  misc_feature 1..20: note = Description of Artificial Sequence: Synthetic oligonucleotide
  misc_feature 1..20: note = Target: SCN10A; (+) strand; PAM type: NRG; PAM sequence: AAG
  source 1..20: mol_type = other DNA
tcttctcattcttcttcagg

SEQ ID NO: 40038 - DNA, 20 bp, synthetic construct
  misc_feature 1..20: note = Description of Artificial Sequence: Synthetic oligonucleotide
  misc_feature 1..20: note = Target: SCN10A; (+) strand; PAM type: NRG; PAM sequence: AAG
  source 1..20: mol_type = other DNA
ggaagtatttatactcttat

SEQ ID NO: 40039 - DNA, 20 bp, synthetic construct
  misc_feature 1..20: note = Description of Artificial Sequence: Synthetic oligonucleotide
  misc_feature 1..20: note = Target: SCN10A; (+) strand; PAM type: NRG; PAM sequence: GAG
  source 1..20: mol_type = other DNA
aagtatttatactcttataa

SEQ ID NO: 40040 - DNA, 20 bp, synthetic construct
  misc_feature 1..20: note = Description of Artificial Sequence: Synthetic oligonucleotide
  misc_feature 1..20: note = Target: SCN10A; (+) strand; PAM type: NRG; PAM sequence: TGG
  source 1..20: mol_type = other DNA
tatttatactcttataagag

SEQ ID NO: 40041 - DNA, 20 bp, synthetic construct
  misc_feature 1..20: note = Description of Artificial Sequence: Synthetic oligonucleotide
  misc_feature 1..20: note = Target: SCN10A; (+) strand; PAM type: NRG; PAM sequence: CAG
  source 1..20: mol_type = other DNA
tataagagtggacataacca

SEQ ID NO: 40042 - DNA, 20 bp, synthetic construct
  misc_feature 1..20: note = Description of Artificial Sequence: Synthetic oligonucleotide
  misc_feature 1..20: note = Target: SCN10A; (+) strand; PAM type: NRG; PAM sequence: GAG
  source 1..20: mol_type = other DNA
taagagtggacataaccaca

SEQ ID NO: 40043 - DNA, 20 bp, synthetic construct
  misc_feature 1..20: note = Description of Artificial Sequence: Synthetic oligonucleotide
  misc_feature 1..20: note = Target: SCN10A; (+) strand; PAM type: NRG; PAM sequence: GAG
  source 1..20: mol_type = other DNA
agagtggacataaccacaga

SEQ ID NO: 40044 - DNA, 20 bp, synthetic construct
  misc_feature 1..20: note = Description of Artificial Sequence: Synthetic oligonucleotide
  misc_feature 1..20: note = Target: SCN10A; (+) strand; PAM type: NRG; PAM sequence: AGG
  source 1..20: mol_type = other DNA
gagtggacataaccacagag

SEQ ID NO: 40045 - DNA, 20 bp, synthetic construct
  misc_feature 1..20: note = Description of Artificial Sequence: Synthetic oligonucleotide
  misc_feature 1..20: note = Target: SCN10A; (+) strand; PAM type: NRG; PAM sequence: CAG
  source 1..20: mol_type = other DNA
acataaccacagagaggtga

SEQ ID NO: 40046 - DNA, 20 bp, synthetic construct
  misc_feature 1..20: note = Description of Artificial Sequence: Synthetic oligonucleotide
  misc_feature 1..20: note = Target: SCN10A; (+) strand; PAM type: NRG; PAM sequence: TGG
  source 1..20: mol_type = other DNA
agaggtgacagcttgcccac

SEQ ID NO: 40047 - DNA, 20 bp, synthetic construct
  misc_feature 1..20: note = Description of Artificial Sequence: Synthetic oligonucleotide
  misc_feature 1..20: note = Target: SCN10A; (+) strand; PAM type: NRG; PAM sequence: CAG
  source 1..20: mol_type = other DNA
atctgtcccatcttgattgt

SEQ ID NO: 40048 - DNA, 20 bp, synthetic construct
  misc_feature 1..20: note = Description of Artificial Sequence: Synthetic oligonucleotide
  misc_feature 1..20: note = Target: SCN10A; (+) strand; PAM type: NRG; PAM sequence: CAG
  source 1..20: mol_type = other DNA
tcccatcttgattgtcagaa

SEQ ID NO: 40049 - DNA, 20 bp, synthetic construct
  misc_feature 1..20: note = Description of Artificial Sequence: Synthetic oligonucleotide
  misc_feature 1..20: note = Target: SCN10A; (+) strand; PAM type: NRG; PAM sequence: TGG
  source 1..20: mol_type = other DNA
ccttctcccaccctcatatc

SEQ ID NO: 40050 - DNA, 20 bp, synthetic construct
  misc_feature 1..20: note = Description of Artificial Sequence: Synthetic oligonucleotide
  misc_feature 1..20: note = Target: SCN10A; (+) strand; PAM type: NRG; PAM sequence: TGG
  source 1..20: mol_type = other DNA
cccctccctgaactcacact

SEQ ID NO: 40051 - DNA, 20 bp, synthetic construct
  misc_feature 1..20: note = Description of Artificial Sequence: Synthetic oligonucleotide
  misc_feature 1..20: note = Target: SCN10A; (+) strand; PAM type: NRG; PAM sequence: CAG
  source 1..20: mol_type = other DNA
aactcacacttggctcctcc

SEQ ID NO: 40052 - DNA, 20 bp, synthetic construct
  misc_feature 1..20: note = Description of Artificial Sequence: Synthetic oligonucleotide
  misc_feature 1..20: note = Target: SCN10A; (+) strand; PAM type: NRG; PAM sequence: AGG
  source 1..20: mol_type = other DNA
actcacacttggctcctccc

SEQ ID NO: 40053 - DNA, 20 bp, synthetic construct
  misc_feature 1..20: note = Description of Artificial Sequence: Synthetic oligonucleotide
  misc_feature 1..20: note = Target: SCN10A; (+) strand; PAM type: NRG; PAM sequence: AAG
  source 1..20: mol_type = other DNA
ccaggaacccattcccctgc

SEQ ID NO: 40054 - DNA, 20 bp, synthetic construct
  misc_feature 1..20: note = Description of Artificial Sequence: Synthetic oligonucleotide
  misc_feature 1..20: note = Target: SCN10A; (+) strand; PAM type: NRG; PAM sequence: AGG
  source 1..20: mol_type = other DNA
caggaacccattcccctgca

SEQ ID NO: 40055 - DNA, 20 bp, synthetic construct
  misc_feature 1..20: note = Description of Artificial Sequence: Synthetic oligonucleotide
  misc_feature 1..20: note = Target: SCN10A; (+) strand; PAM type: NRG; PAM sequence: CAG
  source 1..20: mol_type = other DNA
ccattcccctgcaaggcatt

SEQ ID NO: 40056 - DNA, 20 bp, synthetic construct
  misc_feature 1..20: note = Description of Artificial Sequence: Synthetic oligonucleotide
  misc_feature 1..20: note = Target: SCN10A; (+) strand; PAM type: NRG; PAM sequence: AGG
  source 1..20: mol_type = other DNA
cattcccctgcaaggcattc

SEQ ID NO: 40057 - DNA, 20 bp, synthetic construct
  misc_feature 1..20: note = Description of Artificial Sequence: Synthetic oligonucleotide
  misc_feature 1..20: note = Target: SCN10A; (+) strand; PAM type: NRG; PAM sequence: GGG
  source 1..20: mol_type = other DNA
attcccctgcaaggcattca

SEQ ID NO: 40058 - DNA, 20 bp, synthetic construct
  misc_feature 1..20: note = Description of Artificial Sequence: Synthetic oligonucleotide
  misc_feature 1..20: note = Target: SCN10A; (+) strand; PAM type: NRG; PAM sequence: GGG
  source 1..20: mol_type = other DNA
ttcccctgcaaggcattcag

SEQ ID NO: 40059 - DNA, 20 bp, synthetic construct
  misc_feature 1..20: note = Description of Artificial Sequence: Synthetic oligonucleotide
  misc_feature 1..20: note = Target: SCN10A; (+) strand; PAM type: NRG; PAM sequence: GAG
  source 1..20: mol_type = other DNA
cccctgcaaggcattcaggg

SEQ ID NO: 40060 - DNA, 20 bp, synthetic construct
  misc_feature 1..20: note = Description of Artificial Sequence: Synthetic oligonucleotide
  misc_feature 1..20: note = Target: SCN10A; (+) strand; PAM type: NRG; PAM sequence: AGG
  source 1..20: mol_type = other DNA
ccctgcaaggcattcagggg

SEQ ID NO: 40061 - DNA, 20 bp, synthetic construct
  misc_feature 1..20: note = Description of Artificial Sequence: Synthetic oligonucleotide
  misc_feature 1..20: note = Target: SCN10A; (+) strand; PAM type: NRG; PAM sequence: CAG
  source 1..20: mol_type = other DNA
ctgtttattcaaccctcctc

SEQ ID NO: 40062 - DNA, 20 bp, synthetic construct
  misc_feature 1..20: note = Description of Artificial Sequence: Synthetic oligonucleotide
  misc_feature 1..20: note = Target: SCN10A; (+) strand; PAM type: NRG; PAM sequence: AGG
  source 1..20: mol_type = other DNA
tgtttattcaaccctcctcc

SEQ ID NO: 40063 - DNA, 20 bp, synthetic construct
  misc_feature 1..20: note = Description of Artificial Sequence: Synthetic oligonucleotide
  misc_feature 1..20: note = Target: SCN10A; (+) strand; PAM type: NRG; PAM sequence: CAG
  source 1..20: mol_type = other DNA
caaccctcctccaggtgcct

SEQ ID NO: 40064 - DNA, 20 bp, synthetic construct
  misc_feature 1..20: note = Description of Artificial Sequence: Synthetic oligonucleotide
  misc_feature 1..20: note = Target: SCN10A; (+) strand; PAM type: NRG; PAM sequence: AGG
  source 1..20: mol_type = other DNA
aaccctcctccaggtgcctc

SEQ ID NO: 40065 - DNA, 20 bp, synthetic construct
  misc_feature 1..20: note = Description of Artificial Sequence: Synthetic oligonucleotide
  misc_feature 1..20: note = Target: SCN10A; (+) strand; PAM type: NRG; PAM sequence: GGG
  source 1..20: mol_type = other DNA
accctcctccaggtgcctca

SEQ ID NO: 40066 - DNA, 20 bp, synthetic construct
  misc_feature 1..20: note = Description of Artificial Sequence: Synthetic oligonucleotide
  misc_feature 1..20: note = Target: SCN10A; (+) strand; PAM type: NRG; PAM sequence: CAG
  source 1..20: mol_type = other DNA
taccatcctaccaccaccac

SEQ ID NO: 40067 - DNA, 20 bp, synthetic construct
  misc_feature 1..20: note = Description of Artificial Sequence: Synthetic oligonucleotide
  misc_feature 1..20: note = Target: SCN10A; (+) strand; PAM type: NRG; PAM sequence: TAG
  source 1..20: mol_type = other DNA
cctaccaccaccaccagatt

SEQ ID NO: 40068 - DNA, 20 bp, synthetic construct
  misc_feature 1..20: note = Description of Artificial Sequence: Synthetic oligonucleotide
  misc_feature 1..20: note = Target: SCN10A; (+) strand; PAM type: NRG; PAM sequence: CAG
  source 1..20: mol_type = other DNA
ctgccctctctcctcatttc

SEQ ID NO: 40069 - DNA, 20 bp, synthetic construct
  misc_feature 1..20: note = Description of Artificial Sequence: Synthetic oligonucleotide
  misc_feature 1..20: note = Target: SCN10A; (+) strand; PAM type: NRG; PAM sequence: AGG
  source 1..20: mol_type = other DNA
tgccctctctcctcatttcc

SEQ ID NO: 40070 - DNA, 20 bp, synthetic construct
  misc_feature 1..20: note = Description of Artificial Sequence: Synthetic oligonucleotide
  misc_feature 1..20: note = Target: SCN10A; (+) strand; PAM type: NRG; PAM sequence: GAG
  source 1..20: mol_type = other DNA
tcctcatttccaggaccact

SEQ ID NO: 40071 - DNA, 20 bp, synthetic construct
  misc_feature 1..20: note = Description of Artificial Sequence: Synthetic oligonucleotide
  misc_feature 1..20: note = Target: SCN10A; (+) strand; PAM type: NRG; PAM sequence: CAG
  source 1..20: mol_type = other DNA
tttccaggaccactgagttc

SEQ ID NO: 40072 - DNA, 20 bp, synthetic construct
  misc_feature 1..20: note = Description of Artificial Sequence: Synthetic oligonucleotide
  misc_feature 1..20: note = Target: SCN10A; (+) strand; PAM type: NRG; PAM sequence: AGG
  source 1..20: mol_type = other DNA
ttccaggaccactgagttcc

SEQ ID NO: 40073 - DNA, 20 bp, synthetic construct
  misc_feature 1..20: note = Description of Artificial Sequence: Synthetic oligonucleotide
  misc_feature 1..20: note = Target: SCN10A; (+) strand; PAM type: NRG; PAM sequence: AAG
  source 1..20: mol_type = other DNA
gcactctcccatattcatca

SEQ ID NO: 40074 - DNA, 20 bp, synthetic construct
  misc_feature 1..20: note = Description of Artificial Sequence: Synthetic oligonucleotide
  misc_feature 1..20: note = Target: SCN10A; (+) strand; PAM type: NRG; PAM sequence: TGG
  source 1..20: mol_type = other DNA
cccatattcatcaaagactt

SEQ ID NO: 40075 - DNA, 20 bp, synthetic construct
  misc_feature 1..20: note = Description of Artificial Sequence: Synthetic oligonucleotide
  misc_feature 1..20: note = Target: SCN10A; (+) strand; PAM type: NRG; PAM sequence: TAG
  source 1..20: mol_type = other DNA
tcatcaaagactttggttta

SEQ ID NO: 40076 - DNA, 20 bp, synthetic construct
  misc_feature 1..20: note = Description of Artificial Sequence: Synthetic oligonucleotide
  misc_feature 1..20: note = Target: SCN10A; (+) strand; PAM type: NRG; PAM sequence: AAG
  source 1..20: mol_type = other DNA
tttatagtctactttatctt

SEQ ID NO: 40077 - DNA, 20 bp, synthetic construct
  misc_feature 1..20: note = Description of Artificial Sequence: Synthetic oligonucleotide
  misc_feature 1..20: note = Target: SCN10A; (+) strand; PAM type: NRG; PAM sequence: TGG
  source 1..20: mol_type = other DNA
ccacctgtttgaatttcatt

SEQ ID NO: 40078 - DNA, 20 bp, synthetic construct
  misc_feature 1..20: note = Description of Artificial Sequence: Synthetic oligonucleotide
  misc_feature 1..20: note = Target: SCN10A; (+) strand; PAM type: NRG; PAM sequence: AAG
  source 1..20: mol_type = other DNA
tgaatttcatttggacctcc

SEQ ID NO: 40079 - DNA, 20 bp, synthetic construct
  misc_feature 1..20: note = Description of Artificial Sequence: Synthetic oligonucleotide
  misc_feature 1..20: note = Target: SCN10A; (+) strand; PAM type: NRG; PAM sequence: TGG
  source 1..20: mol_type = other DNA
catttggacctccaagttac

SEQ ID NO: 40080 - DNA, 20 bp, synthetic construct
  misc_feature 1..20: note = Description of Artificial Sequence: Synthetic oligonucleotide
  misc_feature 1..20: note = Target: SCN10A; (+) strand; PAM type: NRG; PAM sequence: GAG
  source 1..20: mol_type = other DNA
tttggacctccaagttactg

SEQ ID NO: 40081 - DNA, 20 bp, synthetic construct
  misc_feature 1..20: note = Description of Artificial Sequence: Synthetic oligonucleotide
  misc_feature 1..20: note = Target: SCN10A; (+) strand; PAM type: NRG; PAM sequence: CAG
  source 1..20: mol_type = other DNA
tccaagttactggagaactc

SEQ ID NO: 40082 - DNA, 20 bp, synthetic construct
  misc_feature 1..20: note = Description of Artificial Sequence: Synthetic oligonucleotide
  misc_feature 1..20: note = Target: SCN10A; (+) strand; PAM type: NRG; PAM sequence: TGG
  source 1..20: mol_type = other DNA
actggagaactccagattat

SEQ ID NO: 40083 - DNA, 20 bp, synthetic construct
  misc_feature 1..20: note = Description of Artificial Sequence: Synthetic oligonucleotide
  misc_feature 1..20: note = Target: SCN10A; (+) strand; PAM type: NRG; PAM sequence: GAG
  source 1..20: mol_type = other DNA
tggagaactccagattattg

SEQ ID NO: 40084 - DNA, 20 bp, synthetic construct
  misc_feature 1..20: note = Description of Artificial Sequence: Synthetic oligonucleotide
  misc_feature 1..20: note = Target: SCN10A; (+) strand; PAM type: NRG; PAM sequence: TGG
  source 1..20: mol_type = other DNA
agattattggagaatttcat

SEQ ID NO: 40085 - DNA, 20 bp, synthetic construct
  misc_feature 1..20: note = Description of Artificial Sequence: Synthetic oligonucleotide
  misc_feature 1..20: note = Target: SCN10A; (+) strand; PAM type: NRG; PAM sequence: GGG
  source 1..20: mol_type = other DNA
gattattggagaatttcatt

SEQ ID NO: 40086 - DNA, 20 bp, synthetic construct
  misc_feature 1..20: note = Description of Artificial Sequence: Synthetic oligonucleotide
  misc_feature 1..20: note = Target: SCN10A; (+) strand; PAM type: NRG; PAM sequence: TGG
  source 1..20: mol_type = other DNA
attgggacctccaatttctc

SEQ ID NO: 40087 - DNA, 20 bp, synthetic construct
  misc_feature 1..20: note = Description of Artificial Sequence: Synthetic oligonucleotide
  misc_feature 1..20: note = Target: SCN10A; (+) strand; PAM type: NRG; PAM sequence: GGG
  source 1..20: mol_type = other DNA
ttgggacctccaatttctct

SEQ ID NO: 40088 - DNA, 20 bp, synthetic construct
  misc_feature 1..20: note = Description of Artificial Sequence: Synthetic oligonucleotide
  misc_feature 1..20: note = Target: SCN10A; (+) strand; PAM type: NRG; PAM sequence: CAG
  source 1..20: mol_type = other DNA
tccaatttctctgggacctc

SEQ ID NO: 40089 - DNA, 20 bp, synthetic construct
  misc_feature 1..20: note = Description of Artificial Sequence: Synthetic oligonucleotide
  misc_feature 1..20: note = Target: SCN10A; (+) strand; PAM type: NRG; PAM sequence: AGG
  source 1..20: mol_type = other DNA
ccaatttctctgggacctcc

SEQ ID NO: 40090 - DNA, 20 bp, synthetic construct
  misc_feature 1..20: note = Description of Artificial Sequence: Synthetic oligonucleotide
  misc_feature 1..20: note = Target: SCN10A; (+) strand; PAM type: NRG; PAM sequence: CAG
  source 1..20: mol_type = other DNA
ttctctgggacctccaggtt

SEQ ID NO: 40091 - DNA, 20 bp, synthetic construct
  misc_feature 1..20: note = Description of Artificial Sequence: Synthetic oligonucleotide
  misc_feature 1..20: note = Target: SCN10A; (+) strand; PAM type: NRG; PAM sequence: TGG
  source 1..20: mol_type = other DNA
ggacctccaggttcagtctg

SEQ ID NO: 40092 - DNA, 20 bp, synthetic construct
  misc_feature 1..20: note = Description of Artificial Sequence: Synthetic oligonucleotide
  misc_feature 1..20: note = Target: SCN10A; (+) strand; PAM type: NRG; PAM sequence: CAG
  source 1..20: mol_type = other DNA
tgaacacttttccccataac

SEQ ID NO: 40093 - DNA, 20 bp, synthetic construct
  misc_feature 1..20: note = Description of Artificial Sequence: Synthetic oligonucleotide
  misc_feature 1..20: note = Target: SCN10A; (+) strand; PAM type: NRG; PAM sequence: TAG
  source 1..20: mol_type = other DNA
acttttccccataaccagat

SEQ ID NO: 40094 - DNA, 20 bp, synthetic construct
  misc_feature 1..20: note = Description of Artificial Sequence: Synthetic oligonucleotide
  misc_feature 1..20: note = Target: SCN10A; (+) strand; PAM type: NRG; PAM sequence: TGG
  source 1..20: mol_type = other DNA
ccataaccagattagacctg

SEQ ID NO: 40095 - DNA, 20 bp, synthetic construct
  misc_feature 1..20: note = Description of Artificial Sequence: Synthetic oligonucleotide
  misc_feature 1..20: note = Target: SCN10A; (+) strand; PAM type: NRG; PAM sequence: AAG
  source 1..20: mol_type = other DNA
tcacccttatcctaaatccc

SEQ ID NO: 40096 - DNA, 20 bp, synthetic construct
  misc_feature 1..20: note = Description of Artificial Sequence: Synthetic oligonucleotide
  misc_feature 1..20: note = Target: SCN10A; (+) strand; PAM type: NRG; PAM sequence: AGG
  source 1..20: mol_type = other DNA
cacccttatcctaaatccca

SEQ ID NO: 40097 - DNA, 20 bp, synthetic construct
  misc_feature 1..20: note = Description of Artificial Sequence: Synthetic oligonucleotide
  misc_feature 1..20: note = Target: SCN10A; (+) strand; PAM type: NRG; PAM sequence: AAG
  source 1..20: mol_type = other DNA
ttatcctaaatcccaaggct

SEQ ID NO: 40098 - DNA, 20 bp, synthetic construct
  misc_feature 1..20: note = Description of Artificial Sequence: Synthetic oligonucleotide
  misc_feature 1..20: note = Target: SCN10A; (+) strand; PAM type: NRG; PAM sequence: TAG
  source 1..20: mol_type = other DNA
atcccaaggctaagtcaatc

SEQ ID NO: 40099 - DNA, 20 bp, synthetic construct
  misc_feature 1..20: note = Description of Artificial Sequence: Synthetic oligonucleotide
  misc_feature 1..20: note = Target: SCN10A; (+) strand; PAM type: NRG; PAM sequence: CAG
  source 1..20: mol_type = other DNA
aaggctaagtcaatctagaa

SEQ ID NO: 40100 - DNA, 20 bp, synthetic construct
  misc_feature 1..20: note = Description of Artificial Sequence: Synthetic oligonucleotide
  misc_feature 1..20: note = Target: SCN10A; (+) strand; PAM type: NRG; PAM sequence: GAG
  source 1..20: mol_type = other DNA
aacagttcccctgaactgct

SEQ ID NO: 40101 - DNA, 20 bp, synthetic construct
  misc_feature 1..20: note = Description of Artificial Sequence: Synthetic oligonucleotide
  misc_feature 1..20: note = Target: SCN10A; (+) strand; PAM type: NRG; PAM sequence: AGG
  source 1..20: mol_type = other DNA
acagttcccctgaactgctg

SEQ ID NO: 40102 - DNA, 20 bp, synthetic construct
  misc_feature 1..20: note = Description of Artificial Sequence: Synthetic oligonucleotide
  misc_feature 1..20: note = Target: SCN10A; (+) strand; PAM type: NRG; PAM sequence: GGG
  source 1..20: mol_type = other DNA
cagttcccctgaactgctga

SEQ ID NO: 40103 - DNA, 20 bp, synthetic construct
  misc_feature 1..20: note = Description of Artificial Sequence: Synthetic oligonucleotide
  misc_feature 1..20: note = Target: SCN10A; (+) strand; PAM type: NRG; PAM sequence: GGG
  source 1..20: mol_type = other DNA
agttcccctgaactgctgag

SEQ ID NO: 40104 - DNA, 20 bp, synthetic construct
  misc_feature 1..20: note = Description of Artificial Sequence: Synthetic oligonucleotide
  misc_feature 1..20: note = Target: SCN10A; (+) strand; PAM type: NRG; PAM sequence: TGG
  source 1..20: mol_type = other DNA
cctgaactgctgaggggtta

SEQ ID NO: 40105 - DNA, 20 bp, synthetic construct
  misc_feature 1..20: note = Description of Artificial Sequence: Synthetic oligonucleotide
  misc_feature 1..20: note = Target: SCN10A; (+) strand; PAM type: NRG; PAM sequence: GGG
  source 1..20: mol_type = other DNA
ctgaactgctgaggggttat

SEQ ID NO: 40106 - DNA, 20 bp, synthetic construct
  misc_feature 1..20: note = Description of Artificial Sequence: Synthetic oligonucleotide
  misc_feature 1..20: note = Target: SCN10A; (+) strand; PAM type: NRG; PAM sequence: GGG
  source 1..20: mol_type = other DNA
tgaactgctgaggggttatg

SEQ ID NO: 40107 - DNA, 20 bp, synthetic construct
  misc_feature 1..20: note = Description of Artificial Sequence: Synthetic oligonucleotide
  misc_feature 1..20: note = Target: SCN10A; (+) strand; PAM type: NRG; PAM sequence: CAG
  source 1..20: mol_type = other DNA
tgaggggttatggggaacct

SEQ ID NO: 40108 - DNA, 20 bp, synthetic construct
  misc_feature 1..20: note = Description of Artificial Sequence: Synthetic oligonucleotide
  misc_feature 1..20: note = Target: SCN10A; (+) strand; PAM type: NRG; PAM sequence: TGG
  source 1..20: mol_type = other DNA
tggggaacctcagtattgcc

SEQ ID NO: 40109 - DNA, 20 bp, synthetic construct
  misc_feature 1..20: note = Description of Artificial Sequence: Synthetic oligonucleotide
  misc_feature 1..20: note = Target: SCN10A; (+) strand; PAM type: NRG; PAM sequence: GGG
  source 1..20: mol_type = other DNA
ggggaacctcagtattgcct

SEQ ID NO: 40110 - DNA, 20 bp, synthetic construct
  misc_feature 1..20: note = Description of Artificial Sequence: Synthetic oligonucleotide
  misc_feature 1..20: note = Target: SCN10A; (+) strand; PAM type: NRG; PAM sequence: TGG
  source 1..20: mol_type = other DNA
agtattgcctgggaatcata

SEQ ID NO: 40111 - DNA, 20 bp, synthetic construct
  misc_feature 1..20: note = Description of Artificial Sequence: Synthetic oligonucleotide
  misc_feature 1..20: note = Target: SCN10A; (+) strand; PAM type: NRG; PAM sequence: TAG
  source 1..20: mol_type = other DNA
tgggaatcatatggtatccc

SEQ ID NO: 40112 - DNA, 20 bp, synthetic construct
  misc_feature 1..20: note = Description of Artificial Sequence: Synthetic oligonucleotide
  misc_feature 1..20: note = Target: SCN10A; (+) strand; PAM type: NRG; PAM sequence: CAG
  source 1..20: mol_type = other DNA
aatcatatggtatccctagt

SEQ ID NO: 40113 - DNA, 20 bp, synthetic construct
  misc_feature 1..20: note = Description of Artificial Sequence: Synthetic oligonucleotide
  misc_feature 1..20: note = Target: SCN10A; (+) strand; PAM type: NRG; PAM sequence: CAG
  source 1..20: mol_type = other DNA
catatggtatccctagtcag

SEQ ID NO: 40114 - DNA, 20 bp, synthetic construct
  misc_feature 1..20: note = Description of Artificial Sequence: Synthetic oligonucleotide
  misc_feature 1..20: note = Target: SCN10A; (+) strand; PAM type: NRG; PAM sequence: TAG
  source 1..20: mol_type = other DNA
ccctagtcagcagtttcttc

SEQ ID NO: 40115 - DNA, 20 bp, synthetic construct
  misc_feature 1..20: note = Description of Artificial Sequence: Synthetic oligonucleotide
  misc_feature 1..20: note = Target: SCN10A; (+) strand; PAM type: NRG; PAM sequence: GAG
  source 1..20: mol_type = other DNA
tcagcagtttcttctagtct

SEQ ID NO: 40116 - DNA, 20 bp, synthetic construct
  misc_feature 1..20: note = Description of Artificial Sequence: Synthetic oligonucleotide
  misc_feature 1..20: note = Target: SCN10A; (+) strand; PAM type: NRG; PAM sequence: AGG
  source 1..20: mol_type = other DNA
cagcagtttcttctagtctg

SEQ ID NO: 40117 - DNA, 20 bp, synthetic construct
  misc_feature 1..20: note = Description of Artificial Sequence: Synthetic oligonucleotide
  misc_feature 1..20: note = Target: SCN10A; (+) strand; PAM type: NRG; PAM sequence: CAG
  source 1..20: mol_type = other DNA
ctattccctgtcttcccttg

SEQ ID NO: 40118 - DNA, 20 bp, synthetic construct
  misc_feature 1..20: note = Description of Artificial Sequence: Synthetic oligonucleotide
  misc_feature 1..20: note = Target: SCN10A; (+) strand; PAM type: NRG; PAM sequence: AAG
  source 1..20: mol_type = other DNA
tccctgtcttcccttgcagt

SEQ ID NO: 40119 - DNA, 20 bp, synthetic construct
  misc_feature 1..20: note = Description of Artificial Sequence: Synthetic oligonucleotide
  misc_feature 1..20: note = Target: SCN10A; (+) strand; PAM type: NRG; PAM sequence: TAG
  source 1..20: mol_type = other DNA
aagccaatgaccatatttcc

SEQ ID NO: 40120 - DNA, 20 bp, synthetic construct
  misc_feature 1..20: note = Description of Artificial Sequence: Synthetic oligonucleotide
  misc_feature 1..20: note = Target: SCN10A; (+) strand; PAM type: NRG; PAM sequence: TGG
  source 1..20: mol_type = other DNA
tgaccatatttcctagttca

SEQ ID NO: 40121 - DNA, 20 bp, synthetic construct
  misc_feature 1..20: note = Description of Artificial Sequence: Synthetic oligonucleotide
  misc_feature 1..20: note = Target: SCN10A; (+) strand; PAM type: NRG; PAM sequence: GAG
  source 1..20: mol_type = other DNA
accatatttcctagttcatg

SEQ ID NO: 40122 - DNA, 20 bp, synthetic construct
  misc_feature 1..20: note = Description of Artificial Sequence: Synthetic oligonucleotide
  misc_feature 1..20: note = Target: SCN10A; (+) strand; PAM type: NRG; PAM sequence: CAG
  source 1..20: mol_type = other DNA
tcctagttcatggagaaaaa

SEQ ID NO: 40123 - DNA, 20 bp, synthetic construct
  misc_feature 1..20: note = Description of Artificial Sequence: Synthetic oligonucleotide
  misc_feature 1..20: note = Target: SCN10A; (+) strand; PAM type: NRG; PAM sequence: CAG
  source 1..20: mol_type = other DNA
ctccaactcacctgtgtctg

SEQ ID NO: 40124 - DNA, 20 bp, synthetic construct
  misc_feature 1..20: note = Description of Artificial Sequence: Synthetic oligonucleotide
  misc_feature 1..20: note = Target: SCN10A; (+) strand; PAM type: NRG; PAM sequence: GAG
  source 1..20: mol_type = other DNA
cttcccttctcttacaacat

SEQ ID NO: 40125 - DNA, 20 bp, synthetic construct
  misc_feature 1..20: note = Description of Artificial Sequence: Synthetic oligonucleotide
  misc_feature 1..20: note = Target: SCN10A; (+) strand; PAM type: NRG; PAM sequence: GAG
  source 1..20: mol_type = other DNA
tcccttctcttacaacatga

SEQ ID NO: 40126 - DNA, 20 bp, synthetic construct
  misc_feature 1..20: note = Description of Artificial Sequence: Synthetic oligonucleotide
  misc_feature 1..20: note = Target: SCN10A; (+) strand; PAM type: NRG; PAM sequence: AGG
  source 1..20: mol_type = other DNA
cccttctcttacaacatgag

SEQ ID NO: 40127 - DNA, 20 bp, synthetic construct
  misc_feature 1..20: note = Description of Artificial Sequence: Synthetic oligonucleotide
  misc_feature 1..20: note = Target: SCN10A; (+) strand; PAM type: NRG; PAM sequence: AAG
  source 1..20: mol_type = other DNA
gaggtatcttcctacattct

SEQ ID NO: 40128 - DNA, 20 bp, synthetic construct
  misc_feature 1..20: note = Description of Artificial Sequence: Synthetic oligonucleotide
  misc_feature 1..20: note = Target: SCN10A; (+) strand; PAM type: NRG; PAM sequence: AGG
  source 1..20: mol_type = other DNA
aggtatcttcctacattcta

SEQ ID NO: 40129 - DNA, 20 bp, synthetic construct
  misc_feature 1..20: note = Description of Artificial Sequence: Synthetic oligonucleotide
  misc_feature 1..20: note = Target: SCN10A; (+) strand; PAM type: NRG; PAM sequence: TAG
  source 1..20: mol_type = other DNA
accattcctttccctctgct

SEQ ID NO: 40130 - DNA, 20 bp, synthetic construct
  misc_feature 1..20: note = Description of Artificial Sequence: Synthetic oligonucleotide
  misc_feature 1..20: note = Target: SCN10A; (+) strand; PAM type: NRG; PAM sequence: AGG
  source 1..20: mol_type = other DNA
ccattcctttccctctgctt

SEQ ID NO: 40131 - DNA, 20 bp, synthetic construct
  misc_feature 1..20: note = Description of Artificial Sequence: Synthetic oligonucleotide
  misc_feature 1..20: note = Target: SCN10A; (+) strand; PAM type: NRG; PAM sequence: CAG
  source 1..20: mol_type = other DNA
ttttctctctccttgtctgc

SEQ ID NO: 40132 - DNA, 20 bp, synthetic construct
  misc_feature 1..20: note = Description of Artificial Sequence: Synthetic oligonucleotide
  misc_feature 1..20: note = Target: SCN10A; (+) strand; PAM type: NRG; PAM sequence: CAG
  source 1..20: mol_type = other DNA
gtctgccagctctttcctat

SEQ ID NO: 40133 - DNA, 20 bp, synthetic construct
  misc_feature 1..20: note = Description of Artificial Sequence: Synthetic oligonucleotide
  misc_feature 1..20: note = Target: SCN10A; (+) strand; PAM type: NRG; PAM sequence: AAG
  source 1..20: mol_type = other DNA
ctctttcctatcagcattta

SEQ ID NO: 40134 - DNA, 20 bp, synthetic construct
  misc_feature 1..20: note = Description of Artificial Sequence: Synthetic oligonucleotide
  misc_feature 1..20: note = Target: SCN10A; (+) strand; PAM type: NRG; PAM sequence: CAG
  source 1..20: mol_type = other DNA
ttaaaaactttcccttgatg

SEQ ID NO: 40135 - DNA, 20 bp, synthetic construct
  misc_feature 1..20: note = Description of Artificial Sequence: Synthetic oligonucleotide
  misc_feature 1..20: note = Target: SCN10A; (+) strand; PAM type: NRG; PAM sequence: GAG
  source 1..20: mol_type = other DNA
aaaaactttcccttgatgca

SEQ ID NO: 40136 - DNA, 20 bp, synthetic construct
  misc_feature 1..20: note = Description of Artificial Sequence: Synthetic oligonucleotide
  misc_feature 1..20: note = Target: SCN10A; (+) strand; PAM type: NRG; PAM sequence: CAG
  source 1..20: mol_type = other DNA
cccttgatgcagagcccatc

SEQ ID NO: 40137 - DNA, 20 bp, synthetic construct
  misc_feature 1..20: note = Description of Artificial Sequence: Synthetic oligonucleotide
  misc_feature 1..20: note = Target: SCN10A; (+) strand; PAM type: NRG; PAM sequence: AGG
  source 1..20: mol_type = other DNA
ccttgatgcagagcccatcc

SEQ ID NO: 40138 - DNA, 20 bp, synthetic construct
  misc_feature 1..20: note = Description of Artificial Sequence: Synthetic oligonucleotide
  misc_feature 1..20: note = Target: SCN10A; (+) strand; PAM type: NRG; PAM sequence: TGG
  source 1..20: mol_type = other DNA
tcctctctcctgttctctat

SEQ ID NO: 40139 - DNA, 20 bp, synthetic construct
  misc_feature 1..20: note = Description of Artificial Sequence: Synthetic oligonucleotide
  misc_feature 1..20: note = Target: SCN10A; (+) strand; PAM type: NRG; PAM sequence: AAG
  source 1..20: mol_type = other DNA
ttctctattggcttttaata

SEQ ID NO: 40140 - DNA, 20 bp, synthetic construct
  misc_feature 1..20: note = Description of Artificial Sequence: Synthetic oligonucleotide
  misc_feature 1..20: note = Target: SCN10A; (+) strand; PAM type: NRG; PAM sequence: AGG
  source 1..20: mol_type = other DNA
tctctattggcttttaataa

SEQ ID NO: 40141 - DNA, 20 bp, synthetic construct
  misc_feature 1..20: note = Description of Artificial Sequence: Synthetic oligonucleotide
  misc_feature 1..20: note = Target: SCN10A; (+) strand; PAM type: NRG; PAM sequence: CAG
  source 1..20: mol_type = other DNA
ttacttctactcactgtttc

SEQ ID NO: 40142 - DNA, 20 bp, synthetic construct
  misc_feature 1..20: note = Description of Artificial Sequence: Synthetic oligonucleotide
  misc_feature 1..20: note = Target: SCN10A; (+) strand; PAM type: NRG; PAM sequence: CAG
  source 1..20: mol_type = other DNA
cactgtttccagtcactttt

SEQ ID NO: 40143 - DNA, 20 bp, synthetic construct
  misc_feature 1..20: note = Description of Artificial Sequence: Synthetic oligonucleotide
  misc_feature 1..20: note = Target: SCN10A; (+) strand; PAM type: NRG; PAM sequence: AAG
  source 1..20: mol_type = other DNA
cagtcacttttcagtctttg

SEQ ID NO: 40144 - DNA, 20 bp, synthetic construct
  misc_feature 1..20: note = Description of Artificial Sequence: Synthetic oligonucleotide
  misc_feature 1..20: note = Target: SCN10A; (+) strand; PAM type: NRG; PAM sequence: TGG
  source 1..20: mol_type = other DNA
acttttcagtctttgaagct

SEQ ID NO: 40145 - DNA, 20 bp, synthetic construct
  misc_feature 1..20: note = Description of Artificial Sequence: Synthetic oligonucleotide
  misc_feature 1..20: note = Target: SCN10A; (+) strand; PAM type: NRG; PAM sequence: CAG
  source 1..20: mol_type = other DNA
ctcactaaaatgcttccttg

SEQ ID NO: 40146 - DNA, 20 bp, synthetic construct
  misc_feature 1..20: note = Description of Artificial Sequence: Synthetic oligonucleotide
  misc_feature 1..20: note = Target: SCN10A; (+) strand; PAM type: NRG; PAM sequence: AGG
  source 1..20: mol_type = other DNA
tcactaaaatgcttccttgc

SEQ ID NO: 40147 - DNA, 20 bp, synthetic construct
  misc_feature 1..20: note = Description of Artificial Sequence: Synthetic oligonucleotide
  misc_feature 1..20: note = Target: SCN10A; (+) strand; PAM type: NRG; PAM sequence: GGG
  source 1..20: mol_type = other DNA
cactaaaatgcttccttgca

SEQ ID NO: 40148 - DNA, 20 bp, synthetic construct
  misc_feature 1..20: note = Description of Artificial Sequence: Synthetic oligonucleotide
  misc_feature 1..20: note = Target: SCN10A; (+) strand; PAM type: NRG; PAM sequence: AAG
  source 1..20: mol_type = other DNA
atgcttccttgcagggatac

SEQ ID NO: 40149 - DNA, 20 bp, synthetic construct
  misc_feature 1..20: note = Description of Artificial Sequence: Synthetic oligonucleotide
  misc_feature 1..20: note = Target: SCN10A; (+) strand; PAM type: NRG; PAM sequence: GAG
  source 1..20: mol_type = other DNA
gcttccttgcagggatacaa

SEQ ID NO: 40150 - DNA, 20 bp, synthetic construct
  misc_feature 1..20: note = Description of Artificial Sequence: Synthetic oligonucleotide
  misc_feature 1..20: note = Target: SCN10A; (+) strand; PAM type: NRG; PAM sequence: TGG
  source 1..20: mol_type = other DNA
ggatacaagagattgccttg

SEQ ID NO: 40151 - DNA, 20 bp, synthetic construct
  misc_feature 1..20: note = Description of Artificial Sequence: Synthetic oligonucleotide
  misc_feature 1..20: note = Target: SCN10A; (+) strand; PAM type: NRG; PAM sequence: AAG
  source 1..20: mol_type = other DNA
aagagattgccttgtggcta

SEQ ID NO: 40152 - DNA, 20 bp, synthetic construct
  misc_feature 1..20: note = Description of Artificial Sequence: Synthetic oligonucleotide
  misc_feature 1..20: note = Target: SCN10A; (+) strand; PAM type: NRG; PAM sequence: CAG
  source 1..20: mol_type = other DNA
gattgccttgtggctaaagt

SEQ ID NO: 40153 - DNA, 20 bp, synthetic construct
  misc_feature 1..20: note = Description of Artificial Sequence: Synthetic oligonucleotide
  misc_feature 1..20: note = Target: SCN10A; (+) strand; PAM type: NRG; PAM sequence: AGG
  source 1..20: mol_type = other DNA
attgccttgtggctaaagtc

SEQ ID NO: 40154 - DNA, 20 bp, synthetic construct
  misc_feature 1..20: note = Description of Artificial Sequence: Synthetic oligonucleotide
  misc_feature 1..20: note = Target: SCN10A; (+) strand; PAM type: NRG; PAM sequence: GGG
  source 1..20: mol_type = other DNA
ttgccttgtggctaaagtca

SEQ ID NO: 40155 - DNA, 20 bp, synthetic construct
  misc_feature 1..20: note = Description of Artificial Sequence: Synthetic oligonucleotide
  misc_feature 1..20: note = Target: SCN10A; (+) strand; PAM type: NRG; PAM sequence: GGG
  source 1..20: mol_type = other DNA
tgccttgtggctaaagtcag

SEQ ID NO: 40156 - DNA, 20 bp, synthetic construct
  misc_feature 1..20: note = Description of Artificial Sequence: Synthetic oligonucleotide
  misc_feature 1..20: note = Target: SCN10A; (+) strand; PAM type: NRG; PAM sequence: GGG
  source 1..20: mol_type = other DNA
gccttgtggctaaagtcagg

SEQ ID NO: 40157 - DNA, 20 bp, synthetic construct
  misc_feature 1..20: note = Description of Artificial Sequence: Synthetic oligonucleotide
  misc_feature 1..20: note = Target: SCN10A; (+) strand; PAM type: NRG; PAM sequence: CAG
  source 1..20: mol_type = other DNA
taaagtcagggggcccttct

SEQ ID NO: 40158 - DNA, 20 bp, synthetic construct
  misc_feature 1..20: note = Description of Artificial Sequence: Synthetic oligonucleotide
  misc_feature 1..20: note = Target: SCN10A; (+) strand; PAM type: NRG; PAM sequence: GAG
  source 1..20: mol_type = other DNA
ctttttcttttttttttttt

SEQ ID NO: 40159 - DNA, 20 bp, synthetic construct
  misc_feature 1..20: note = Description of Artificial Sequence: Synthetic oligonucleotide
  misc_feature 1..20: note = Target: SCN10A; (+) strand; PAM type: NRG; PAM sequence: CAG
  source 1..20: mol_type = other DNA
ttctttttttttttttgaga

SEQ ID NO: 40160 - DNA, 20 bp, synthetic construct
  misc_feature 1..20: note = Description of Artificial Sequence: Synthetic oligonucleotide
  misc_feature 1..20: note = Target: SCN10A; (+) strand; PAM type: NRG; PAM sequence: AGG
  source 1..20: mol_type = other DNA
tctttttttttttttgagac

SEQ ID NO: 40161 - DNA, 20 bp, synthetic construct
  misc_feature 1..20: note = Description of Artificial Sequence: Synthetic oligonucleotide
  misc_feature 1..20: note = Target: SCN10A; (+) strand; PAM type: NRG; PAM sequence: GGG
  source 1..20: mol_type = other DNA
ctttttttttttttgagaca

SEQ ID NO: 40162 - DNA, 20 bp, synthetic construct
  misc_feature 1..20: note = Description of Artificial Sequence: Synthetic oligonucleotide
  misc_feature 1..20: note = Target: SCN10A; (+) strand; PAM type: NRG; PAM sequence: CGG
  source 1..20: mol_type = other DNA
gacagggtatcactgtcacc

SEQ ID NO: 40163 - DNA, 20 bp, synthetic construct
  misc_feature 1..20: note = Description of Artificial Sequence: Synthetic oligonucleotide
  misc_feature 1..20: note = Target: SCN10A; (+) strand; PAM type: NRG; PAM sequence: TAG
  source 1..20: mol_type = other DNA
ggtatcactgtcacccggac

SEQ ID NO: 40164 - DNA, 20 bp, synthetic construct
  misc_feature 1..20: note = Description of Artificial Sequence: Synthetic oligonucleotide
  misc_feature 1..20: note = Target: SCN10A; (+) strand; PAM type: NRG; PAM sequence: GAG
  source 1..20: mol_type = other DNA
tatcactgtcacccggacta

SEQ ID NO: 40165 - DNA, 20 bp, synthetic construct
  misc_feature 1..20: note = Description of Artificial Sequence: Synthetic oligonucleotide
  misc_feature 1..20: note = Target: SCN10A; (+) strand; PAM type: NRG; PAM sequence: CAG
  source 1..20: mol_type = other DNA
ctgtcacccggactagagtg

SEQ ID NO: 40166 - DNA, 20 bp, synthetic construct
  misc_feature 1..20: note = Description of Artificial Sequence: Synthetic oligonucleotide
  misc_feature 1..20: note = Target: SCN10A; (+) strand; PAM type: NRG; PAM sequence: TGG
  source 1..20: mol_type = other DNA
tcacccggactagagtgcag

SEQ ID NO: 40167 - DNA, 20 bp, synthetic construct
  misc_feature 1..20: note = Description of Artificial Sequence: Synthetic oligonucleotide
  misc_feature 1..20: note = Target: SCN10A; (+) strand; PAM type: NRG; PAM sequence: TGG
  source 1..20: mol_type = other DNA
tcactgcaacctctgtctcc

SEQ ID NO: 40168 - DNA, 20 bp, synthetic construct
  misc_feature 1..20: note = Description of Artificial Sequence: Synthetic oligonucleotide
  misc_feature 1..20: note = Target: SCN10A; (+) strand; PAM type: NRG; PAM sequence: GGG
  source 1..20: mol_type = other DNA
cactgcaacctctgtctcct

SEQ ID NO: 40169 - DNA, 20 bp, synthetic construct
  misc_feature 1..20: note = Description of Artificial Sequence: Synthetic oligonucleotide
  misc_feature 1..20: note = Target: SCN10A; (+) strand; PAM type: NRG; PAM sequence: AAG
  source 1..20: mol_type = other DNA
aacctctgtctcctgggctc

SEQ ID NO: 40170 - DNA, 20 bp, synthetic construct
  misc_feature 1..20: note = Description of Artificial Sequence: Synthetic oligonucleotide
  misc_feature 1..20: note = Target: SCN10A; (+) strand; PAM type: NRG; PAM sequence: CAG
  source 1..20: mol_type = other DNA
ctcaagcaattctcccacct

SEQ ID NO: 40171 - DNA, 20 bp, synthetic construct
  misc_feature 1..20: note = Description of Artificial Sequence: Synthetic oligonucleotide
  misc_feature 1..20: note = Target: SCN10A; (+) strand; PAM type: NRG; PAM sequence: TAG
  source 1..20: mol_type = other DNA
tcccacctcagcctcccgaa

SEQ ID NO: 40172 - DNA, 20 bp, synthetic construct
  misc_feature 1..20: note = Description of Artificial Sequence: Synthetic oligonucleotide
  misc_feature 1..20: note = Target: SCN10A; (+) strand; PAM type: NRG; PAM sequence: TGG
  source 1..20: mol_type = other DNA
acctcagcctcccgaatagc

SEQ ID NO: 40173 - DNA, 20 bp, synthetic construct
  misc_feature 1..20: note = Description of Artificial Sequence: Synthetic oligonucleotide
  misc_feature 1..20: note = Target: SCN10A; (+) strand; PAM type: NRG; PAM sequence: GGG
  source 1..20: mol_type = other DNA
cctcagcctcccgaatagct

SEQ ID NO: 40174 - DNA, 20 bp, synthetic construct
  misc_feature 1..20: note = Description of Artificial Sequence: Synthetic oligonucleotide
  misc_feature 1..20: note = Target: SCN10A; (+) strand; PAM type: NRG; PAM sequence: TAG
  source 1..20: mol_type = other DNA
cctcccgaatagctgggcta

SEQ ID NO: 40175 - DNA, 20 bp, synthetic construct
  misc_feature 1..20: note = Description of Artificial Sequence: Synthetic oligonucleotide
  misc_feature 1..20: note = Target: SCN10A; (+) strand; PAM type: NRG; PAM sequence: AGG
  source 1..20: mol_type = other DNA
ctcccgaatagctgggctat

SEQ ID NO: 40176 - DNA, 20 bp, synthetic construct
  misc_feature 1..20: note = Description of Artificial Sequence: Synthetic oligonucleotide
  misc_feature 1..20: note = Target: SCN10A; (+) strand; PAM type: NRG; PAM sequence: CGG
  source 1..20: mol_type = other DNA
taggcacatgtcaccacact

SEQ ID NO: 40177 - DNA, 20 bp, synthetic construct
  misc_feature 1..20: note = Description of Artificial Sequence: Synthetic oligonucleotide
  misc_feature 1..20: note = Target: SCN10A; (+) strand; PAM type: NRG; PAM sequence: TAG
  source 1..20: mol_type = other DNA
cacatgtcaccacactcggc

SEQ ID NO: 40178 - DNA, 20 bp, synthetic construct
  misc_feature 1..20: note = Description of Artificial Sequence: Synthetic oligonucleotide
  misc_feature 1..20: note = Target: SCN10A; (+) strand; PAM type: NRG; PAM sequence: TAG
  source 1..20: mol_type = other DNA
gttttgaaaaaatttttttg

SEQ ID NO: 40179 - DNA, 20 bp, synthetic construct
  misc_feature 1..20: note = Description of Artificial Sequence: Synthetic oligonucleotide
  misc_feature 1..20: note = Target: SCN10A; (+) strand; PAM type: NRG; PAM sequence: AGG
  source 1..20: mol_type = other DNA
ttttgaaaaaatttttttgt

SEQ ID NO: 40180 - DNA, 20 bp, synthetic construct
  misc_feature 1..20: note = Description of Artificial Sequence: Synthetic oligonucleotide
  misc_feature 1..20: note = Target: SCN10A; (+) strand; PAM type: NRG; PAM sequence: CAG
  source 1..20: mol_type = other DNA
tgaaaaaatttttttgtagg

SEQ ID NO: 40181 - DNA, 20 bp, synthetic construct
  misc_feature 1..20: note = Description of Artificial Sequence: Synthetic oligonucleotide
  misc_feature 1..20: note = Target: SCN10A; (+) strand; PAM type: NRG; PAM sequence: CAG
  source 1..20: mol_type = other DNA
cagtgtaccactatattgtc

SEQ ID NO: 40182 - DNA, 20 bp, synthetic construct
  misc_feature 1..20: note = Description of Artificial Sequence: Synthetic oligonucleotide
  misc_feature 1..20: note = Target: SCN10A; (+) strand; PAM type: NRG; PAM sequence: AGG
  source 1..20: mol_type = other DNA
agtgtaccactatattgtcc

SEQ ID NO: 40183 - DNA, 20 bp, synthetic construct
  misc_feature 1..20: note = Description of Artificial Sequence: Synthetic oligonucleotide
  misc_feature 1..20: note = Target: SCN10A; (+) strand; PAM type: NRG; PAM sequence: CAG
  source 1..20: mol_type = other DNA
tatattgtccaggcccatct

SEQ ID NO: 40184 - DNA, 20 bp, synthetic construct
  misc_feature 1..20: note = Description of Artificial Sequence: Synthetic oligonucleotide
  misc_feature 1..20: note = Target: SCN10A; (+) strand; PAM type: NRG; PAM sequence: TGG
  source 1..20: mol_type = other DNA
catctcagttcttatcttga

SEQ ID NO: 40185 - DNA, 20 bp, synthetic construct
  misc_feature 1..20: note = Description of Artificial Sequence: Synthetic oligonucleotide
  misc_feature 1..20: note = Target: SCN10A; (+) strand; PAM type: NRG; PAM sequence: TGG
  source 1..20: mol_type = other DNA
tcttatcttgatggtcctat

SEQ ID NO: 40186 - DNA, 20 bp, synthetic construct
  misc_feature 1..20: note = Description of Artificial Sequence: Synthetic oligonucleotide
  misc_feature 1..20: note = Target: SCN10A; (+) strand; PAM type: NRG; PAM sequence: TGG
  source 1..20: mol_type = other DNA
ccttaaaatactgtatattt

SEQ ID NO: 40187 - DNA, 20 bp, synthetic construct
  misc_feature 1..20: note = Description of Artificial Sequence: Synthetic oligonucleotide
  misc_feature 1..20: note = Target: SCN10A; (+) strand; PAM type: NRG; PAM sequence: TGG
  source 1..20: mol_type = other DNA
tggctaccatgacactctct

SEQ ID NO: 40188 - DNA, 20 bp, synthetic construct
  misc_feature 1..20: note = Description of Artificial Sequence: Synthetic oligonucleotide
  misc_feature 1..20: note = Target: SCN10A; (+) strand; PAM type: NRG; PAM sequence: CAG
  source 1..20: mol_type = other DNA
actttctctcttctccttct

SEQ ID NO: 40189 - DNA, 20 bp, synthetic construct
  misc_feature 1..20: note = Description of Artificial Sequence: Synthetic oligonucleotide
  misc_feature 1..20: note = Target: SCN10A; (+) strand; PAM type: NRG; PAM sequence: CAG
  source 1..20: mol_type = other DNA
cttctcagtctctcctttct

SEQ ID NO: 40190 - DNA, 20 bp, synthetic construct
  misc_feature 1..20: note = Description of Artificial Sequence: Synthetic oligonucleotide
  misc_feature 1..20: note = Target: SCN10A; (+) strand; PAM type: NRG; PAM sequence: TGG
  source 1..20: mol_type = other DNA
ccatacatgattgtgaataa

SEQ ID NO: 40191 - DNA, 20 bp, synthetic construct
  misc_feature 1..20: note = Description of Artificial Sequence: Synthetic oligonucleotide
  misc_feature 1..20: note = Target: SCN10A; (+) strand; PAM type: NRG; PAM sequence: CAG
  source 1..20: mol_type = other DNA
ggcactctatcttttgtttt

SEQ ID NO: 40192 - DNA, 20 bp, synthetic construct
  misc_feature 1..20: note = Description of Artificial Sequence: Synthetic oligonucleotide
  misc_feature 1..20: note = Target: SCN10A; (+) strand; PAM type: NRG; PAM sequence: TAG
  source 1..20: mol_type = other DNA
tgttttcagaataataacaa

SEQ ID NO: 40193 - DNA, 20 bp, synthetic construct
  misc_feature 1..20: note = Description of Artificial Sequence: Synthetic oligonucleotide
  misc_feature 1..20: note = Target: SCN10A; (+) strand; PAM type: NRG; PAM sequence: CAG
  source 1..20: mol_type = other DNA
aacaatagtaacaacttcaa

SEQ ID NO: 40194 - DNA, 20 bp, synthetic construct
  misc_feature 1..20: note = Description of Artificial Sequence: Synthetic oligonucleotide
  misc_feature 1..20: note = Target: SCN10A; (+) strand; PAM type: NRG; PAM sequence: TAG
  source 1..20: mol_type = other DNA
agtaacaacttcaacagcgc

SEQ ID NO: 40195 - DNA, 20 bp, synthetic construct
  misc_feature 1..20: note = Description of Artificial Sequence: Synthetic oligonucleotide
  misc_feature 1..20: note = Target: SCN10A; (+) strand; PAM type: NRG; PAM sequence: GAG
  source 1..20: mol_type = other DNA
caacagcgctagcatttact

SEQ ID NO: 40196 - DNA, 20 bp, synthetic construct
  misc_feature 1..20: note = Description of Artificial Sequence: Synthetic oligonucleotide
  misc_feature 1..20: note = Target: SCN10A; (+) strand; PAM type: NRG; PAM sequence: CAG
  source 1..20: mol_type = other DNA
actgagattccactgtattt

SEQ ID NO: 40197 - DNA, 20 bp, synthetic construct
  misc_feature 1..20: note = Description of Artificial Sequence: Synthetic oligonucleotide
  misc_feature 1..20: note = Target: SCN10A; (+) strand; PAM type: NRG; PAM sequence: TGG
  source 1..20: mol_type = other DNA
ttccactgtatttcagactc

SEQ ID NO: 40198 - DNA, 20 bp, synthetic construct
  misc_feature 1..20: note = Description of Artificial Sequence: Synthetic oligonucleotide
  misc_feature 1..20: note = Target: SCN10A; (+) strand; PAM type: NRG; PAM sequence: AAG
  source 1..20: mol_type = other DNA
tgtatttcagactctggatt

SEQ ID NO: 40199 - DNA, 20 bp, synthetic construct
  misc_feature 1..20: note = Description of Artificial Sequence: Synthetic oligonucleotide
  misc_feature 1..20: note = Target: SCN10A; (+) strand; PAM type: NRG; PAM sequence: AAG
  source 1..20: mol_type = other DNA
taactatcactgtacctgtg

SEQ ID NO: 40200 - DNA, 20 bp, synthetic construct
  misc_feature 1..20: note = Description of Artificial Sequence: Synthetic oligonucleotide
  misc_feature 1..20: note = Target: SCN10A; (+) strand; PAM type: NRG; PAM sequence: AAG
  source 1..20: mol_type = other DNA
attatctctaatatataaat

SEQ ID NO: 40201 - DNA, 20 bp, synthetic construct
  misc_feature 1..20: note = Description of Artificial Sequence: Synthetic oligonucleotide
  misc_feature 1..20: note = Target: SCN10A; (+) strand; PAM type: NRG; PAM sequence: CAG
  source 1..20: mol_type = other DNA
ctaatatataaataagatac

SEQ ID NO: 40202 - DNA, 20 bp, synthetic construct
  misc_feature 1..20: note = Description of Artificial Sequence: Synthetic oligonucleotide
  misc_feature 1..20: note = Target: SCN10A; (+) strand; PAM type: NRG; PAM sequence: GAG
  source 1..20: mol_type = other DNA
aatatataaataagatacca

SEQ ID NO: 40203 - DNA, 20 bp, synthetic construct
  misc_feature 1..20: note = Description of Artificial Sequence: Synthetic oligonucleotide
  misc_feature 1..20: note = Target: SCN10A; (+) strand; PAM type: NRG; PAM sequence: CAG
  source 1..20: mol_type = other DNA
atataaataagataccagag

SEQ ID NO: 40204 - DNA, 20 bp, synthetic construct
  misc_feature 1..20: note = Description of Artificial Sequence: Synthetic oligonucleotide
  misc_feature 1..20: note = Target: SCN10A; (+) strand; PAM type: NRG; PAM sequence: AAG
  source 1..20: mol_type = other DNA
aataagataccagagcagca

SEQ ID NO: 40205 - DNA, 20 bp, synthetic construct
  misc_feature 1..20: note = Description of Artificial Sequence: Synthetic oligonucleotide
  misc_feature 1..20: note = Target: SCN10A; (+) strand; PAM type: NRG; PAM sequence: AAG
  source 1..20: mol_type = other DNA
gcagcaaagttaaaatttcc

SEQ ID NO: 40206 - DNA, 20 bp, synthetic construct
  misc_feature 1..20: note = Description of Artificial Sequence: Synthetic oligonucleotide
  misc_feature 1..20: note = Target: SCN10A; (+) strand; PAM type: NRG; PAM sequence: GAG
  source 1..20: mol_type = other DNA
tccaagatcacattactaat

SEQ ID NO: 40207 - DNA, 20 bp, synthetic construct
  misc_feature 1..20: note = Description of Artificial Sequence: Synthetic oligonucleotide
  misc_feature 1..20: note = Target: SCN10A; (+) strand; PAM type: NRG; PAM sequence: TGG
  source 1..20: mol_type = other DNA
aagatcacattactaatgag

SEQ ID NO: 40208 - DNA, 20 bp, synthetic construct
  misc_feature 1..20: note = Description of Artificial Sequence: Synthetic oligonucleotide
  misc_feature 1..20: note = Target: SCN10A; (+) strand; PAM type: NRG; PAM sequence: CAG
  source 1..20: mol_type = other DNA
atcacattactaatgagtgg

SEQ ID NO: 40209 - DNA, 20 bp, synthetic construct
  misc_feature 1..20: note = Description of Artificial Sequence: Synthetic oligonucleotide
  misc_feature 1..20: note = Target: SCN10A; (+) strand; PAM type: NRG; PAM sequence: CGG
  source 1..20: mol_type = other DNA
attactaatgagtggcagaa

SEQ ID NO: 40210 - DNA, 20 bp, synthetic construct
  misc_feature 1..20: note = Description of Artificial Sequence: Synthetic oligonucleotide
  misc_feature 1..20: note = Target: SCN10A; (+) strand; PAM type: NRG; PAM sequence: CAG
  source 1..20: mol_type = other DNA
ggcagaacggtacttaaact

SEQ ID NO: 40211 - DNA, 20 bp, synthetic construct
  misc_feature 1..20: note = Description of Artificial Sequence: Synthetic oligonucleotide
  misc_feature 1..20: note = Target: SCN10A; (+) strand; PAM type: NRG; PAM sequence: AGG
  source 1..20: mol_type = other DNA
gcagaacggtacttaaactc

SEQ ID NO: 40212 - DNA, 20 bp, synthetic construct
  misc_feature 1..20: note = Description of Artificial Sequence: Synthetic oligonucleotide
  misc_feature 1..20: note = Target: SCN10A; (+) strand; PAM type: NRG; PAM sequence: TGG
  source 1..20: mol_type = other DNA
gtatgtttgccacaatctct

SEQ ID NO: 40213 - DNA, 20 bp, synthetic construct
  misc_feature 1..20: note = Description of Artificial Sequence: Synthetic oligonucleotide
  misc_feature 1..20: note = Target: SCN10A; (+) strand; PAM type: NRG; PAM sequence: CAG
  source 1..20: mol_type = other DNA
cttcacttctcatttatatg

SEQ ID NO: 40214 - DNA, 20 bp, synthetic construct
  misc_feature 1..20: note = Description of Artificial Sequence: Synthetic oligonucleotide
  misc_feature 1..20: note = Target: SCN10A; (+) strand; PAM type: NRG; PAM sequence: GAG
  source 1..20: mol_type = other DNA
tcatttatatgcagatgact

SEQ ID NO: 40215 - DNA, 20 bp, synthetic construct
  misc_feature 1..20: note = Description of Artificial Sequence: Synthetic oligonucleotide
  misc_feature 1..20: note = Target: SCN10A; (+) strand; PAM type: NRG; PAM sequence: TAG
  source 1..20: mol_type = other DNA
gatgactgagtctttatctg

SEQ ID NO: 40216 - DNA, 20 bp, synthetic construct
  misc_feature 1..20: note = Description of Artificial Sequence: Synthetic oligonucleotide
  misc_feature 1..20: note = Target: SCN10A; (+) strand; PAM type: NRG; PAM sequence: CAG
  source 1..20: mol_type = other DNA
gagtctttatctgtagctct

SEQ ID NO: 40217 - DNA, 20 bp, synthetic construct
  misc_feature 1..20: note = Description of Artificial Sequence: Synthetic oligonucleotide
  misc_feature 1..20: note = Target: SCN10A; (+) strand; PAM type: NRG; PAM sequence: AAG
  source 1..20: mol_type = other DNA
tctttatctgtagctctcag

SEQ ID NO: 40218 - DNA, 20 bp, synthetic construct
  misc_feature 1..20: note = Description of Artificial Sequence: Synthetic oligonucleotide
  misc_feature 1..20: note = Target: SCN10A; (+) strand; PAM type: NRG; PAM sequence: TGG
  source 1..20: mol_type = other DNA
ctgtagctctcagaagtcca

SEQ ID NO: 40219 - DNA, 20 bp, synthetic construct
  misc_feature 1..20: note = Description of Artificial Sequence: Synthetic oligonucleotide
  misc_feature 1..20: note = Target: SCN10A; (+) strand; PAM type: NRG; PAM sequence: GGG
  source 1..20: mol_type = other DNA
tgtagctctcagaagtccat

SEQ ID NO: 40220 - DNA, 20 bp, synthetic construct
  misc_feature 1..20: note = Description of Artificial Sequence: Synthetic oligonucleotide
  misc_feature 1..20: note = Target: SCN10A; (+) strand; PAM type: NRG; PAM sequence: GGG
  source 1..20: mol_type = other DNA
gtagctctcagaagtccatg

SEQ ID NO: 40221 - DNA, 20 bp, synthetic construct
  misc_feature 1..20: note = Description of Artificial Sequence: Synthetic oligonucleotide
  misc_feature 1..20: note = Target: SCN10A; (+) strand; PAM type: NRG; PAM sequence: CAG
  source 1..20: mol_type = other DNA
tctcagaagtccatggggct

SEQ ID NO: 40222 - DNA, 20 bp, synthetic construct
  misc_feature 1..20: note = Description of Artificial Sequence: Synthetic oligonucleotide
  misc_feature 1..20: note = Target: SCN10A; (+) strand; PAM type: NRG; PAM sequence: CAG
  source 1..20: mol_type = other DNA
ttcatttgatctctccactt

SEQ ID NO: 40223 - DNA, 20 bp, synthetic construct
  misc_feature 1..20: note = Description of Artificial Sequence: Synthetic oligonucleotide
  misc_feature 1..20: note = Target: SCN10A; (+) strand; PAM type: NRG; PAM sequence: GAG
  source 1..20: mol_type = other DNA
tctccacttcagtgtctcat

SEQ ID NO: 40224 - DNA, 20 bp, synthetic construct
  misc_feature 1..20: note = Description of Artificial Sequence: Synthetic oligonucleotide
  misc_feature 1..20: note = Target: SCN10A; (+) strand; PAM type: NRG; PAM sequence: AAG
  source 1..20: mol_type = other DNA
cagtgtctcatgagcacctc

SEQ ID NO: 40225 - DNA, 20 bp, synthetic construct
  misc_feature 1..20: note = Description of Artificial Sequence: Synthetic oligonucleotide
  misc_feature 1..20: note = Target: SCN10A; (+) strand; PAM type: NRG; PAM sequence: CAG
  source 1..20: mol_type = other DNA
tctcatgagcacctcaagct

SEQ ID NO: 40226 - DNA, 20 bp, synthetic construct
  misc_feature 1..20: note = Description of Artificial Sequence: Synthetic oligonucleotide
  misc_feature 1..20: note = Target: SCN10A; (+) strand; PAM type: NRG; PAM sequence: TAG
  source 1..20: mol_type = other DNA
ctatgtctttttactgccat

SEQ ID NO: 40227 - DNA, 20 bp, synthetic construct
  misc_feature 1..20: note = Description of Artificial Sequence: Synthetic oligonucleotide
  misc_feature 1..20: note = Target: SCN10A; (+) strand; PAM type: NRG; PAM sequence: TAG
  source 1..20: mol_type = other DNA
ttactgccattagccccaaa

SEQ ID NO: 40228 - DNA, 20 bp, synthetic construct
  misc_feature 1..20: note = Description of Artificial Sequence: Synthetic oligonucleotide
  misc_feature 1..20: note = Target: SCN10A; (+) strand; PAM type: NRG; PAM sequence: TGG
  source 1..20: mol_type = other DNA
ttctgtgtctgtccacaacc

SEQ ID NO: 40229 - DNA, 20 bp, synthetic construct
  misc_feature 1..20: note = Description of Artificial Sequence: Synthetic oligonucleotide
  misc_feature 1..20: note = Target: SCN10A; (+) strand; PAM type: NRG; PAM sequence: GGG
  source 1..20: mol_type = other DNA
tctgtgtctgtccacaacct

SEQ ID NO: 40230 - DNA, 20 bp, synthetic construct
  misc_feature 1..20: note = Description of Artificial Sequence: Synthetic oligonucleotide
  misc_feature 1..20: note = Target: SCN10A; (+) strand; PAM type: NRG; PAM sequence: TAG
  source 1..20: mol_type = other DNA
tccacatacaatcaaacatc

SEQ ID NO: 40231 - DNA, 20 bp, synthetic construct
  misc_feature 1..20: note = Description of Artificial Sequence: Synthetic oligonucleotide
  misc_feature 1..20: note = Target: SCN10A; (+) strand; PAM type: NRG; PAM sequence: TGG
  source 1..20: mol_type = other DNA
taacctctccatcatactgc

SEQ ID NO: 40232 - DNA, 20 bp, synthetic construct
  misc_feature 1..20: note = Description of Artificial Sequence: Synthetic oligonucleotide
  misc_feature 1..20: note = Target: SCN10A; (+) strand; PAM type: NRG; PAM sequence: TGG
  source 1..20: mol_type = other DNA
tccaatcactgtcatctcac

SEQ ID NO: 40233 - DNA, 20 bp, synthetic construct
  misc_feature 1..20: note = Description of Artificial Sequence: Synthetic oligonucleotide
  misc_feature 1..20: note = Target: SCN10A; (+) strand; PAM type: NRG; PAM sequence: TAG
  source 1..20: mol_type = other DNA
gtgtcattttgattcccctt

SEQ ID NO: 40234 - DNA, 20 bp, synthetic construct
  misc_feature 1..20: note = Description of Artificial Sequence: Synthetic oligonucleotide
  misc_feature 1..20: note = Target: SCN10A; (+) strand; PAM type: NRG; PAM sequence: CAG
  source 1..20: mol_type = other DNA
ctttctaacctattctccaa

SEQ ID NO: 40235 - DNA, 20 bp, synthetic construct
  misc_feature 1..20: note = Description of Artificial Sequence: Synthetic oligonucleotide
  misc_feature 1..20: note = Target: SCN10A; (+) strand; PAM type: NRG; PAM sequence: TGG
  source 1..20: mol_type = other DNA
tctaacctattctccaacag

SEQ ID NO: 40236 - DNA, 20 bp, synthetic construct
  misc_feature 1..20: note = Description of Artificial Sequence: Synthetic oligonucleotide
  misc_feature 1..20: note = Target: SCN10A; (+) strand; PAM type: NRG; PAM sequence: TGG
  source 1..20: mol_type = other DNA
atatttctaaaatgaaaatc

SEQ ID NO: 40237 - DNA, 20 bp, synthetic construct
  misc_feature 1..20: note = Description of Artificial Sequence: Synthetic oligonucleotide
  misc_feature 1..20: note = Target: SCN10A; (+) strand; PAM type: NRG; PAM sequence: AAG
  source 1..20: mol_type = other DNA
ctttatttaaaatcattcta

SEQ ID NO: 40238 - DNA, 20 bp, synthetic construct
  misc_feature 1..20: note = Description of Artificial Sequence: Synthetic oligonucleotide
  misc_feature 1..20: note = Target: SCN10A; (+) strand; PAM type: NRG; PAM sequence: TAG
  source 1..20: mol_type = other DNA
aatcattctaaagctctcca

SEQ ID NO: 40239 - DNA, 20 bp, synthetic construct
  misc_feature 1..20: note = Description of Artificial Sequence: Synthetic oligonucleotide
  misc_feature 1..20: note = Target: SCN10A; (+) strand; PAM type: NRG; PAM sequence: AAG
  source 1..20: mol_type = other DNA
taaagctctccatagcactc

SEQ ID NO: 40240 - DNA, 20 bp, synthetic construct
  misc_feature 1..20: note = Description of Artificial Sequence: Synthetic oligonucleotide
  misc_feature 1..20: note = Target: SCN10A; (+) strand; PAM type: NRG; PAM sequence: CAG
  source 1..20: mol_type = other DNA
aaactgtgcgctgacctctc

SEQ ID NO: 40241 - DNA, 20 bp, synthetic construct
  misc_feature 1..20: note = Description of Artificial Sequence: Synthetic oligonucleotide
  misc_feature 1..20: note = Target: SCN10A; (+) strand; PAM type: NRG; PAM sequence: TGG
  source 1..20: mol_type = other DNA
gtgcgctgacctctccagca

SEQ ID NO: 40242 - DNA, 20 bp, synthetic construct
  misc_feature 1..20: note = Description of Artificial Sequence: Synthetic oligonucleotide
  misc_feature 1..20: note = Target: SCN10A; (+) strand; PAM type: NRG; PAM sequence: TAG
  source 1..20: mol_type = other DNA
cgctgacctctccagcatgg

SEQ ID NO: 40243 - DNA, 20 bp, synthetic construct
  misc_feature 1..20: note = Description of Artificial Sequence: Synthetic oligonucleotide
  misc_feature 1..20: note = Target: SCN10A; (+) strand; PAM type: NRG; PAM sequence: CAG
  source 1..20: mol_type = other DNA
ctctccagcatggtagtccc

SEQ ID NO: 40244 - DNA, 20 bp, synthetic construct
  misc_feature 1..20: note = Description of Artificial Sequence: Synthetic oligonucleotide
  misc_feature 1..20: note = Target: SCN10A; (+) strand; PAM type: NRG; PAM sequence: AAG
  source 1..20: mol_type = other DNA
cccagccacactacttttat

SEQ ID NO: 40245 - DNA, 20 bp, synthetic construct
  misc_feature 1..20: note = Description of Artificial Sequence: Synthetic oligonucleotide
  misc_feature 1..20: note = Target: SCN10A; (+) strand; PAM type: NRG; PAM sequence: AAG
  source 1..20: mol_type = other DNA
gacccattcttttttatgtt

SEQ ID NO: 40246 - DNA, 20 bp, synthetic construct
  misc_feature 1..20: note = Description of Artificial Sequence: Synthetic oligonucleotide
  misc_feature 1..20: note = Target: SCN10A; (+) strand; PAM type: NRG; PAM sequence: AGG
  source 1..20: mol_type = other DNA
acccattcttttttatgtta

SEQ ID NO: 40247 - DNA, 20 bp, synthetic construct
  misc_feature 1..20: note = Description of Artificial Sequence: Synthetic oligonucleotide
  misc_feature 1..20: note = Target: SCN10A; (+) strand; PAM type: NRG; PAM sequence: TGG
  source 1..20: mol_type = other DNA
tctttccactttattttgtc

SEQ ID NO: 40248 - DNA, 20 bp, synthetic construct
  misc_feature 1..20: note = Description of Artificial Sequence: Synthetic oligonucleotide
  misc_feature 1..20: note = Target: SCN10A; (+) strand; PAM type: NRG; PAM sequence: TGG
  source 1..20: mol_type = other DNA
ctctcttattcttgtactct

SEQ ID NO: 40249 - DNA, 20 bp, synthetic construct
  misc_feature 1..20: note = Description of Artificial Sequence: Synthetic oligonucleotide
  misc_feature 1..20: note = Target: SCN10A; (+) strand; PAM type: NRG; PAM sequence: GAG
  source 1..20: mol_type = other DNA
attcttgtactcttggcttt

SEQ ID NO: 40250 - DNA, 20 bp, synthetic construct
  misc_feature 1..20: note = Description of Artificial Sequence: Synthetic oligonucleotide
  misc_feature 1..20: note = Target: SCN10A; (+) strand; PAM type: NRG; PAM sequence: AAG
  source 1..20: mol_type = other DNA
ttccatttctgacctatatg

SEQ ID NO: 40251 - DNA, 20 bp, synthetic construct
  misc_feature 1..20: note = Description of Artificial Sequence: Synthetic oligonucleotide
  misc_feature 1..20: note = Target: SCN10A; (+) strand; PAM type: NRG; PAM sequence: TAG
  source 1..20: mol_type = other DNA
gacctatatgaagtctatgt

SEQ ID NO: 40252 - DNA, 20 bp, synthetic construct
  misc_feature 1..20: note = Description of Artificial Sequence: Synthetic oligonucleotide
  misc_feature 1..20: note = Target: SCN10A; (+) strand; PAM type: NRG; PAM sequence: AGG
  source 1..20: mol_type = other DNA
acctatatgaagtctatgtt

SEQ ID NO: 40253 - DNA, 20 bp, synthetic construct
  misc_feature 1..20: note = Description of Artificial Sequence: Synthetic oligonucleotide
  misc_feature 1..20: note = Target: SCN10A; (+) strand; PAM type: NRG; PAM sequence: AAG
  source 1..20: mol_type = other DNA
tattgtttctaccaaattgt

SEQ ID NO: 40254 - DNA, 20 bp, synthetic construct
  misc_feature 1..20: note = Description of Artificial Sequence: Synthetic oligonucleotide
  misc_feature 1..20: note = Target: SCN10A; (+) strand; PAM type: NRG; PAM sequence: CAG
  source 1..20: mol_type = other DNA
tttctaccaaattgtaagct

SEQ ID NO: 40255 - DNA, 20 bp, synthetic construct
  misc_feature 1..20: note = Description of Artificial Sequence: Synthetic oligonucleotide
  misc_feature 1..20: note = Target: SCN10A; (+) strand; PAM type: NRG; PAM sequence: GAG
  source 1..20: mol_type = other DNA
taccaaattgtaagctcagt

SEQ ID NO: 40256 - DNA, 20 bp, synthetic construct
  misc_feature 1..20: note = Description of Artificial Sequence: Synthetic oligonucleotide
  misc_feature 1..20: note = Target: SCN10A; (+) strand; PAM type: NRG; PAM sequence: GAG
  source 1..20: mol_type = other DNA
ccaaattgtaagctcagtga

SEQ ID NO: 40257 - DNA, 20 bp, synthetic construct
  misc_feature 1..20: note = Description of Artificial Sequence: Synthetic oligonucleotide
  misc_feature 1..20: note = Target: SCN10A; (+) strand; PAM type: NRG; PAM sequence: TGG
  source 1..20: mol_type = other DNA
attgtaagctcagtgagagc

SEQ ID NO: 40258 - DNA, 20 bp, synthetic construct
  misc_feature 1..20: note = Description of Artificial Sequence: Synthetic oligonucleotide
  misc_feature 1..20: note = Target: SCN10A; (+) strand; PAM type: NRG; PAM sequence: CAG
  source 1..20: mol_type = other DNA
ggactcacatctattttgtt

SEQ ID NO: 40259 - DNA, 20 bp, synthetic construct
  misc_feature 1..20: note = Description of Artificial Sequence: Synthetic oligonucleotide
  misc_feature 1..20: note = Target: SCN10A; (+) strand; PAM type: NRG; PAM sequence: CAG
  source 1..20: mol_type = other DNA
tttgttcagcattgattttc

SEQ ID NO: 40260 - DNA, 20 bp, synthetic construct
  misc_feature 1..20: note = Description of Artificial Sequence: Synthetic oligonucleotide
  misc_feature 1..20: note = Target: SCN10A; (+) strand; PAM type: NRG; PAM sequence: TAG
  source 1..20: mol_type = other DNA
agcattgattttccagaacc

SEQ ID NO: 40261 - DNA, 20 bp, synthetic construct
  misc_feature 1..20: note = Description of Artificial Sequence: Synthetic oligonucleotide
  misc_feature 1..20: note = Target: SCN10A; (+) strand; PAM type: NRG; PAM sequence: CAG
  source 1..20: mol_type = other DNA
tgattttccagaacctagta

SEQ ID NO: 40262 - DNA, 20 bp, synthetic construct
  misc_feature 1..20: note = Description of Artificial Sequence: Synthetic oligonucleotide
  misc_feature 1..20: note = Target: SCN10A; (+) strand; PAM type: NRG; PAM sequence: TGG
  source 1..20: mol_type = other DNA
ccagaacctagtacagtgcc

SEQ ID NO: 40263 - DNA, 20 bp, synthetic construct
  misc_feature 1..20: note = Description of Artificial Sequence: Synthetic oligonucleotide
  misc_feature 1..20: note = Target: SCN10A; (+) strand; PAM type: NRG; PAM sequence: TAG
  source 1..20: mol_type = other DNA
gtacagtgcctggaactaac

SEQ ID NO: 40264 - DNA, 20 bp, synthetic construct
  misc_feature 1..20: note = Description of Artificial Sequence: Synthetic oligonucleotide
  misc_feature 1..20: note = Target: SCN10A; (+) strand; PAM type: NRG; PAM sequence: CAG
  source 1..20: mol_type = other DNA
tgcctggaactaactagata

SEQ ID NO: 40265 - DNA, 20 bp, synthetic construct
  misc_feature 1..20: note = Description of Artificial Sequence: Synthetic oligonucleotide
  misc_feature 1..20: note = Target: SCN10A; (+) strand; PAM type: NRG; PAM sequence: TAG
  source 1..20: mol_type = other DNA
ggaactaactagatacagaa

SEQ ID NO: 40266 - DNA, 20 bp, synthetic construct
  misc_feature 1..20: note = Description of Artificial Sequence: Synthetic oligonucleotide
  misc_feature 1..20: note = Target: SCN10A; (+) strand; PAM type: NRG; PAM sequence: TAG
  source 1..20: mol_type = other DNA
ctaactagatacagaataga

SEQ ID NO: 40267 - DNA, 20 bp, synthetic construct
  misc_feature 1..20: note = Description of Artificial Sequence: Synthetic oligonucleotide
  misc_feature 1..20: note = Target: SCN10A; (+) strand; PAM type: NRG; PAM sequence: TAG
  source 1..20: mol_type = other DNA
atagatagttgttgcatgaa

SEQ ID NO: 40268 - DNA, 20 bp, synthetic construct
  misc_feature 1..20: note = Description of Artificial Sequence: Synthetic oligonucleotide
  misc_feature 1..20: note = Target: SCN10A; (+) strand; PAM type: NRG; PAM sequence: GAG
  source 1..20: mol_type = other DNA
agatagttgttgcatgaata

SEQ ID NO: 40269 - DNA, 20 bp, synthetic construct
  misc_feature 1..20: note = Description of Artificial Sequence: Synthetic oligonucleotide
  misc_feature 1..20: note = Target: SCN10A; (+) strand; PAM type: NRG; PAM sequence: TGG
  source 1..20: mol_type = other DNA
tgttgcatgaatagagataa

SEQ ID NO: 40270 - DNA, 20 bp, synthetic construct
  misc_feature 1..20: note = Description of Artificial Sequence: Synthetic oligonucleotide
  misc_feature 1..20: note = Target: SCN10A; (+) strand; PAM type: NRG; PAM sequence: TAG
  source 1..20: mol_type = other DNA
gagataatggcgaaacttaa

SEQ ID NO: 40271 - DNA, 20 bp, synthetic construct
  misc_feature 1..20: note = Description of Artificial Sequence: Synthetic oligonucleotide
  misc_feature 1..20: note = Target: SCN10A; (+) strand; PAM type: NRG; PAM sequence: AAG
  source 1..20: mol_type = other DNA
acttaatagctgaaaaacta

SEQ ID NO: 40272 - DNA, 20 bp, synthetic construct
  misc_feature 1..20: note = Description of Artificial Sequence: Synthetic oligonucleotide
  misc_feature 1..20: note = Target: SCN10A; (+) strand; PAM type: NRG; PAM sequence: CAG
  source 1..20: mol_type = other DNA
aaactaaagaacattttgtt

SEQ ID NO: 40273 - DNA, 20 bp, synthetic construct
  misc_feature 1..20: note = Description of Artificial Sequence: Synthetic oligonucleotide
  misc_feature 1..20: note = Target: SCN10A; (+) strand; PAM type: NRG; PAM sequence: CAG
  source 1..20: mol_type = other DNA
acattttgttcagaaaaatg

SEQ ID NO: 40274 - DNA, 20 bp, synthetic construct
  misc_feature 1..20: note = Description of Artificial Sequence: Synthetic oligonucleotide
  misc_feature 1..20: note = Target: SCN10A; (+) strand; PAM type: NRG; PAM sequence: CAG
  source 1..20: mol_type = other DNA
gaaaaatgcagcaaaaatca

SEQ ID NO: 40275 - DNA, 20 bp, synthetic construct
  misc_feature 1..20: note = Description of Artificial Sequence: Synthetic oligonucleotide
  misc_feature 1..20: note = Target: SCN10A; (+) strand; PAM type: NRG; PAM sequence: TAG
  source 1..20: mol_type = other DNA
aaaaatcacagatccaataa

SEQ ID NO: 40276 - DNA, 20 bp, synthetic construct
  misc_feature 1..20: note = Description of Artificial Sequence: Synthetic oligonucleotide
  misc_feature 1..20: note = Target: SCN10A; (+) strand; PAM type: NRG; PAM sequence: AGG
  source 1..20: mol_type = other DNA
aaaatcacagatccaataat

SEQ ID NO: 40277 - DNA, 20 bp, synthetic construct
  misc_feature 1..20: note = Description of Artificial Sequence: Synthetic oligonucleotide
  misc_feature 1..20: note = Target: SCN10A; (+) strand; PAM type: NRG; PAM sequence: AAG
  source 1..20: mol_type = other DNA
agatccaataataggaatat

SEQ ID NO: 40278 - DNA, 20 bp, synthetic construct
  misc_feature 1..20: note = Description of Artificial Sequence: Synthetic oligonucleotide
  misc_feature 1..20: note = Target: SCN10A; (+) strand; PAM type: NRG; PAM sequence: AGG
  source 1..20: mol_type = other DNA
gatccaataataggaatata

SEQ ID NO: 40279 - DNA, 20 bp, synthetic construct
  misc_feature 1..20: note = Description of Artificial Sequence: Synthetic oligonucleotide
  misc_feature 1..20: note = Target: SCN10A; (+) strand; PAM type: NRG; PAM sequence: AAG
  source 1..20: mol_type = other DNA
aataggaatataaggaacca

SEQ ID NO: 40280 - DNA, 20 bp, synthetic construct
  misc_feature 1..20: note = Description of Artificial Sequence: Synthetic oligonucleotide
  misc_feature 1..20: note = Target: SCN10A; (+) strand; PAM type: NRG; PAM sequence: GAG
  source 1..20: mol_type = other DNA
taggaatataaggaaccaaa

SEQ ID NO: 40281 - DNA, 20 bp, synthetic construct
  misc_feature 1..20: note = Description of Artificial Sequence: Synthetic oligonucleotide
  misc_feature 1..20: note = Target: SCN10A; (+) strand; PAM type: NRG; PAM sequence: GAG
  source 1..20: mol_type = other DNA
aaggaaccaaagagattatt

SEQ ID NO: 40282 - DNA, 20 bp, synthetic construct
  misc_feature 1..20: note = Description of Artificial Sequence: Synthetic oligonucleotide
  misc_feature 1..20: note = Target: SCN10A; (+) strand; PAM type: NRG; PAM sequence: AAG
  source 1..20: mol_type = other DNA
ttgagtctattgacatttta

SEQ ID NO: 40283 - DNA, 20 bp, synthetic construct
  misc_feature 1..20: note = Description of Artificial Sequence: Synthetic oligonucleotide
  misc_feature 1..20: note = Target: SCN10A; (+) strand; PAM type: NRG; PAM sequence: AAG
  source 1..20: mol_type = other DNA
tttaaagctcacacacccca

SEQ ID NO: 40284 - DNA, 20 bp, synthetic construct
  misc_feature 1..20: note = Description of Artificial Sequence: Synthetic oligonucleotide
  misc_feature 1..20: note = Target: SCN10A; (+) strand; PAM type: NRG; PAM sequence: AAG
  source 1..20: mol_type = other DNA
agctcacacaccccaaagtc

SEQ ID NO: 40285 - DNA, 20 bp, synthetic construct
  misc_feature 1..20: note = Description of Artificial Sequence: Synthetic oligonucleotide
  misc_feature 1..20: note = Target: SCN10A; (+) strand; PAM type: NRG; PAM sequence: CAG
  source 1..20: mol_type = other DNA
tcacacaccccaaagtcaag

SEQ ID NO: 40286 - DNA, 20 bp, synthetic construct
  misc_feature 1..20: note = Description of Artificial Sequence: Synthetic oligonucleotide
  misc_feature 1..20: note = Target: SCN10A; (+) strand; PAM type: NRG; PAM sequence: TGG
  source 1..20: mol_type = other DNA
acaccccaaagtcaagcaga

SEQ ID NO: 40287 - DNA, 20 bp, synthetic construct
  misc_feature 1..20: note = Description of Artificial Sequence: Synthetic oligonucleotide
  misc_feature 1..20: note = Target: SCN10A; (+) strand; PAM type: NRG; PAM sequence: TGG
  source 1..20: mol_type = other DNA
ccccaaagtcaagcagatgg

SEQ ID NO: 40288 - DNA, 20 bp, synthetic construct
  misc_feature 1..20: note = Description of Artificial Sequence: Synthetic oligonucleotide
  misc_feature 1..20: note = Target: SCN10A; (+) strand; PAM type: NRG; PAM sequence: CAG
  source 1..20: mol_type = other DNA
caaagtcaagcagatggtgg

SEQ ID NO: 40289 - DNA, 20 bp, synthetic construct
  misc_feature 1..20: note = Description of Artificial Sequence: Synthetic oligonucleotide
  misc_feature 1..20: note = Target: SCN10A; (+) strand; PAM type: NRG; PAM sequence: GAG
  source 1..20: mol_type = other DNA
aagtcaagcagatggtggca

SEQ ID NO: 40290 - DNA, 20 bp, synthetic construct
  misc_feature 1..20: note = Description of Artificial Sequence: Synthetic oligonucleotide
  misc_feature 1..20: note = Target: SCN10A; (+) strand; PAM type: NRG; PAM sequence: AGG
  source 1..20: mol_type = other DNA
agtcaagcagatggtggcag

SEQ ID NO: 40291 - DNA, 20 bp, synthetic construct
  misc_feature 1..20: note = Description of Artificial Sequence: Synthetic oligonucleotide
  misc_feature 1..20: note = Target: SCN10A; (+) strand; PAM type: NRG; PAM sequence: CAG
  source 1..20: mol_type = other DNA
caagcagatggtggcagagg

SEQ ID NO: 40292 - DNA, 20 bp, synthetic construct
  misc_feature 1..20: note = Description of Artificial Sequence: Synthetic oligonucleotide
  misc_feature 1..20: note = Target: SCN10A; (+) strand; PAM type: NRG; PAM sequence: TGG
  source 1..20: mol_type = other DNA
taaatcaaatacccctatga

SEQ ID NO: 40293 - DNA, 20 bp, synthetic construct
  misc_feature 1..20: note = Description of Artificial Sequence: Synthetic oligonucleotide
  misc_feature 1..20: note = Target: SCN10A; (+) strand; PAM type: NRG; PAM sequence: GAG
  source 1..20: mol_type = other DNA
aatcaaatacccctatgatg

SEQ ID NO: 40294 - DNA, 20 bp, synthetic construct
  misc_feature 1..20: note = Description of Artificial Sequence: Synthetic oligonucleotide
  misc_feature 1..20: note = Target: SCN10A; (+) strand; PAM type: NRG; PAM sequence: TAG
  source 1..20: mol_type = other DNA
ctgcttgctcccaccatacc

SEQ ID NO: 40295 - DNA, 20 bp, synthetic construct
  misc_feature 1..20: note = Description of Artificial Sequence: Synthetic oligonucleotide
  misc_feature 1..20: note = Target: SCN10A; (+) strand; PAM type: NRG; PAM sequence: GAG
  source 1..20: mol_type = other DNA
gcttgctcccaccataccta

SEQ ID NO: 40296 - DNA, 20 bp, synthetic construct
  misc_feature 1..20: note = Description of Artificial Sequence: Synthetic oligonucleotide
  misc_feature 1..20: note = Target: SCN10A; (+) strand; PAM type: NRG; PAM sequence: AGG
  source 1..20: mol_type = other DNA
cttgctcccaccatacctag

SEQ ID NO: 40297 - DNA, 20 bp, synthetic construct
  misc_feature 1..20: note = Description of Artificial Sequence: Synthetic oligonucleotide
  misc_feature 1..20: note = Target: SCN10A; (+) strand; PAM type: NRG; PAM sequence: TAG
  source 1..20: mol_type = other DNA
aatccaatacctctgtgata

SEQ ID NO: 40298 - DNA, 20 bp, synthetic construct
  misc_feature 1..20: note = Description of Artificial Sequence: Synthetic oligonucleotide
  misc_feature 1..20: note = Target: SCN10A; (+) strand; PAM type: NRG; PAM sequence: CAG
  source 1..20: mol_type = other DNA
tagacactgcttattgtcac

SEQ ID NO: 40299 - DNA, 20 bp, synthetic construct
  misc_feature 1..20: note = Description of Artificial Sequence: Synthetic oligonucleotide
  misc_feature 1..20: note = Target: SCN10A; (+) strand; PAM type: NRG; PAM sequence: TAG
  source 1..20: mol_type = other DNA
ctgcttattgtcaccagccc

SEQ ID NO: 40300 - DNA, 20 bp, synthetic construct
  misc_feature 1..20: note = Description of Artificial Sequence: Synthetic oligonucleotide
  misc_feature 1..20: note = Target: SCN10A; (+) strand; PAM type: NRG; PAM sequence: GAG
  source 1..20: mol_type = other DNA
gcttattgtcaccagcccta

SEQ ID NO: 40301 - DNA, 20 bp, synthetic construct
  misc_feature 1..20: note = Description of Artificial Sequence: Synthetic oligonucleotide
  misc_feature 1..20: note = Target: SCN10A; (+) strand; PAM type: NRG; PAM sequence: AGG
  source 1..20: mol_type = other DNA
cttattgtcaccagccctag

SEQ ID NO: 40302 - DNA, 20 bp, synthetic construct
  misc_feature 1..20: note = Description of Artificial Sequence: Synthetic oligonucleotide
  misc_feature 1..20: note = Target: SCN10A; (+) strand; PAM type: NRG; PAM sequence: CAG
  source 1..20: mol_type = other DNA
attgtcaccagccctagagg

SEQ ID NO: 40303 - DNA, 20 bp, synthetic construct
  misc_feature 1..20: note = Description of Artificial Sequence: Synthetic oligonucleotide
  misc_feature 1..20: note = Target: SCN10A; (+) strand; PAM type: NRG; PAM sequence: TGG
  source 1..20: mol_type = other DNA
accagccctagaggcagctc

SEQ ID NO: 40304 - DNA, 20 bp, synthetic construct
  misc_feature 1..20: note = Description of Artificial Sequence: Synthetic oligonucleotide
  misc_feature 1..20: note = Target: SCN10A; (+) strand; PAM type: NRG; PAM sequence: TAG
  source 1..20: mol_type = other DNA
tggtacccaatacccatatg

SEQ ID NO: 40305 - DNA, 20 bp, synthetic construct
  misc_feature 1..20: note = Description of Artificial Sequence: Synthetic oligonucleotide
  misc_feature 1..20: note = Target: SCN10A; (+) strand; PAM type: NRG; PAM sequence: AGG
  source 1..20: mol_type = other DNA
ggtacccaatacccatatgt

SEQ ID NO: 40306 - DNA, 20 bp, synthetic construct
  misc_feature 1..20: note = Description of Artificial Sequence: Synthetic oligonucleotide
  misc_feature 1..20: note = Target: SCN10A; (+) strand; PAM type: NRG; PAM sequence: GAG
  source 1..20: mol_type = other DNA
tacccaatacccatatgtag

SEQ ID NO: 40307 - DNA, 20 bp, synthetic construct
  misc_feature 1..20: note = Description of Artificial Sequence: Synthetic oligonucleotide
  misc_feature 1..20: note = Target: SCN10A; (+) strand; PAM type: NRG; PAM sequence: AGG
  source 1..20: mol_type = other DNA
acccaatacccatatgtagg

SEQ ID NO: 40308 - DNA, 20 bp, synthetic construct
  misc_feature 1..20: note = Description of Artificial Sequence: Synthetic oligonucleotide
  misc_feature 1..20: note = Target: SCN10A; (+) strand; PAM type: NRG; PAM sequence: TGG
  source 1..20: mol_type = other DNA
ccatatgtaggaggctctgc

SEQ ID NO: 40309 - DNA, 20 bp, synthetic construct
  misc_feature 1..20: note = Description of Artificial Sequence: Synthetic oligonucleotide
  misc_feature 1..20: note = Target: SCN10A; (+) strand; PAM type: NRG; PAM sequence: CAG
  source 1..20: mol_type = other DNA
gaggctctgctggttgtcac

SEQ ID NO: 40310 - DNA, 20 bp, synthetic construct
  misc_feature 1..20: note = Description of Artificial Sequence: Synthetic oligonucleotide
  misc_feature 1..20: note = Target: SCN10A; (+) strand; PAM type: NRG; PAM sequence: AAG
  source 1..20: mol_type = other DNA
accagtccttccatgcattg

SEQ ID NO: 40311 - DNA, 20 bp, synthetic construct
  misc_feature 1..20: note = Description of Artificial Sequence: Synthetic oligonucleotide
  misc_feature 1..20: note = Target: SCN10A; (+) strand; PAM type: NRG; PAM sequence: TGG
  source 1..20: mol_type = other DNA
ccttccatgcattgaagtcc

SEQ ID NO: 40312 - DNA, 20 bp, synthetic construct
  misc_feature 1..20: note = Description of Artificial Sequence: Synthetic oligonucleotide
  misc_feature 1..20: note = Target: SCN10A; (+) strand; PAM type: NRG; PAM sequence: GGG
  source 1..20: mol_type = other DNA
cttccatgcattgaagtcct

SEQ ID NO: 40313 - DNA, 20 bp, synthetic construct
  misc_feature 1..20: note = Description of Artificial Sequence: Synthetic oligonucleotide
  misc_feature 1..20: note = Target: SCN10A; (+) strand; PAM type: NRG; PAM sequence: GAG
  source 1..20: mol_type = other DNA
tccatgcattgaagtcctgg

SEQ ID NO: 40314 - DNA, 20 bp, synthetic construct
  misc_feature 1..20: note = Description of Artificial Sequence: Synthetic oligonucleotide
  misc_feature 1..20: note = Target: SCN10A; (+) strand; PAM type: NRG; PAM sequence: AGG
  source 1..20: mol_type = other DNA
ccatgcattgaagtcctggg

SEQ ID NO: 40315 - DNA, 20 bp, synthetic construct
  misc_feature 1..20: note = Description of Artificial Sequence: Synthetic oligonucleotide
  misc_feature 1..20: note = Target: SCN10A; (+) strand; PAM type: NRG; PAM sequence: GAG
  source 1..20: mol_type = other DNA
atgcattgaagtcctgggag

SEQ ID NO: 40316 - DNA, 20 bp, synthetic construct
  misc_feature 1..20: note = Description of Artificial Sequence: Synthetic oligonucleotide
  misc_feature 1..20: note = Target: SCN10A; (+) strand; PAM type: NRG; PAM sequence: GAG
  source 1..20: mol_type = other DNA
gtcctccattactttcttct

SEQ ID NO: 40317 - DNA, 20 bp, synthetic construct
  misc_feature 1..20: note = Description of Artificial Sequence: Synthetic oligonucleotide
  misc_feature 1..20: note = Target: SCN10A; (+) strand; PAM type: NRG; PAM sequence: GAG
  source 1..20: mol_type = other DNA
cctccattactttcttctga

SEQ ID NO: 40318 - DNA, 20 bp, synthetic construct
  misc_feature 1..20: note = Description of Artificial Sequence: Synthetic oligonucleotide
  misc_feature 1..20: note = Target: SCN10A; (+) strand; PAM type: NRG; PAM sequence: TAG
  source 1..20: mol_type = other DNA
cctctcctcctgcctatttg

SEQ ID NO: 40319 - DNA, 20 bp, synthetic construct
  misc_feature 1..20: note = Description of Artificial Sequence: Synthetic oligonucleotide
  misc_feature 1..20: note = Target: SCN10A; (+) strand; PAM type: NRG; PAM sequence: CGG
  source 1..20: mol_type = other DNA
tgtagttgatctgtttctta

SEQ ID NO: 40320 - DNA, 20 bp, synthetic construct
  misc_feature 1..20: note = Description of Artificial Sequence: Synthetic oligonucleotide
  misc_feature 1..20: note = Target: SCN10A; (+) strand; PAM type: NRG; PAM sequence: AAG
  source 1..20: mol_type = other DNA
gtttcttacggaacttttca

SEQ ID NO: 40321 - DNA, 20 bp, synthetic construct
  misc_feature 1..20: note = Description of Artificial Sequence: Synthetic oligonucleotide
  misc_feature 1..20: note = Target: SCN10A; (+) strand; PAM type: NRG; PAM sequence: TAG
  source 1..20: mol_type = other DNA
tcttctattttcttctaact

SEQ ID NO: 40322 - DNA, 20 bp, synthetic construct
  misc_feature 1..20: note = Description of Artificial Sequence: Synthetic oligonucleotide
  misc_feature 1..20: note = Target: SCN10A; (+) strand; PAM type: NRG; PAM sequence: AAG
  source 1..20: mol_type = other DNA
tctattttcttctaacttag

SEQ ID NO: 40323 - DNA, 20 bp, synthetic construct
  misc_feature 1..20: note = Description of Artificial Sequence: Synthetic oligonucleotide
  misc_feature 1..20: note = Target: SCN10A; (+) strand; PAM type: NRG; PAM sequence: TGG
  source 1..20: mol_type = other DNA
tgcccaaattctgattaaca

SEQ ID NO: 40324 - DNA, 20 bp, synthetic construct
  misc_feature 1..20: note = Description of Artificial Sequence: Synthetic oligonucleotide
  misc_feature 1..20: note = Target: SCN10A; (+) strand; PAM type: NRG; PAM sequence: CAG
  source 1..20: mol_type = other DNA
cattcaaacactgttgactt

SEQ ID NO: 40325 - DNA, 20 bp, synthetic construct
  misc_feature 1..20: note = Description of Artificial Sequence: Synthetic oligonucleotide
  misc_feature 1..20: note = Target: SCN10A; (+) strand; PAM type: NRG; PAM sequence: GAG
  source 1..20: mol_type = other DNA
gtctttaattcttcccttct

SEQ ID NO: 40326 - DNA, 20 bp, synthetic construct
  misc_feature 1..20: note = Description of Artificial Sequence: Synthetic oligonucleotide
  misc_feature 1..20: note = Target: SCN10A; (+) strand; PAM type: NRG; PAM sequence: AAG
  source 1..20: mol_type = other DNA
ttcttcccttctgagaaaca

SEQ ID NO: 40327 - DNA, 20 bp, synthetic construct
  misc_feature 1..20: note = Description of Artificial Sequence: Synthetic oligonucleotide
  misc_feature 1..20: note = Target: SCN10A; (+) strand; PAM type: NRG; PAM sequence: AAG
  source 1..20: mol_type = other DNA
ccttctgagaaacaaagatt

SEQ ID NO: 40328 - DNA, 20 bp, synthetic construct
  misc_feature 1..20: note = Description of Artificial Sequence: Synthetic oligonucleotide
  misc_feature 1..20: note = Target: SCN10A; (+) strand; PAM type: NRG; PAM sequence: TAG
  source 1..20: mol_type = other DNA
ttaactttctcttccttgtc

SEQ ID NO: 40329 - DNA, 20 bp, synthetic construct
  misc_feature 1..20: note = Description of Artificial Sequence: Synthetic oligonucleotide
  misc_feature 1..20: note = Target: SCN10A; (+) strand; PAM type: NRG; PAM sequence: AGG
  source 1..20: mol_type = other DNA
taactttctcttccttgtct

SEQ ID NO: 40330 - DNA, 20 bp, synthetic construct
  misc_feature 1..20: note = Description of Artificial Sequence: Synthetic oligonucleotide
  misc_feature 1..20: note = Target: SCN10A; (+) strand; PAM type: NRG; PAM sequence: GGG
  source 1..20: mol_type = other DNA
aactttctcttccttgtcta

SEQ ID NO: 40331 - DNA, 20 bp, synthetic construct
  misc_feature 1..20: note = Description of Artificial Sequence: Synthetic oligonucleotide
  misc_feature 1..20: note = Target: SCN10A; (+) strand; PAM type: NRG; PAM sequence: GGG
  source 1..20: mol_type = other DNA
actttctcttccttgtctag

SEQ ID NO: 40332 - DNA, 20 bp, synthetic construct
  misc_feature 1..20: note = Description of Artificial Sequence: Synthetic oligonucleotide
  misc_feature 1..20: note = Target: SCN10A; (+) strand; PAM type: NRG; PAM sequence: GAG
  source 1..20: mol_type = other DNA
tttctcttccttgtctaggg

SEQ ID NO: 40333 - DNA, 20 bp, synthetic construct
  misc_feature 1..20: note = Description of Artificial Sequence: Synthetic oligonucleotide
  misc_feature 1..20: note = Target: SCN10A; (+) strand; PAM type: NRG; PAM sequence: AAG
  source 1..20: mol_type = other DNA
ctcttccttgtctaggggag

SEQ ID NO: 40334 - DNA, 20 bp, synthetic construct
  misc_feature 1..20: note = Description of Artificial Sequence: Synthetic oligonucleotide
  misc_feature 1..20: note = Target: SCN10A; (+) strand; PAM type: NRG; PAM sequence: GAG
  source 1..20: mol_type = other DNA
cttccttgtctaggggagaa

SEQ ID NO: 40335 - DNA, 20 bp, synthetic construct
  misc_feature 1..20: note = Description of Artificial Sequence: Synthetic oligonucleotide
  misc_feature 1..20: note = Target: SCN10A; (+) strand; PAM type: NRG; PAM sequence: TAG
  source 1..20: mol_type = other DNA
taggggagaagagatactta

SEQ ID NO: 40336 - DNA, 20 bp, synthetic construct
  misc_feature 1..20: note = Description of Artificial Sequence: Synthetic oligonucleotide
  misc_feature 1..20: note = Target: SCN10A; (+) strand; PAM type: NRG; PAM sequence: TGG
  source 1..20: mol_type = other DNA
gagaagagatacttatagtt

SEQ ID NO: 40337 - DNA, 20 bp, synthetic construct
  misc_feature 1..20: note = Description of Artificial Sequence: Synthetic oligonucleotide
  misc_feature 1..20: note = Target: SCN10A; (+) strand; PAM type: NRG; PAM sequence: CAG
  source 1..20: mol_type = other DNA
ttggaaccaaatttgaatcc

SEQ ID NO: 40338 - DNA, 20 bp, synthetic construct
  misc_feature 1..20: note = Description of Artificial Sequence: Synthetic oligonucleotide
  misc_feature 1..20: note = Target: SCN10A; (+) strand; PAM type: NRG; PAM sequence: AGG
  source 1..20: mol_type = other DNA
tggaaccaaatttgaatccc

SEQ ID NO: 40339 - DNA, 20 bp, synthetic construct
  misc_feature 1..20: note = Description of Artificial Sequence: Synthetic oligonucleotide
  misc_feature 1..20: note = Target: SCN10A; (+) strand; PAM type: NRG; PAM sequence: CAG
  source 1..20: mol_type = other DNA
caaatttgaatcccaggact

SEQ ID NO: 40340 - DNA, 20 bp, synthetic construct
  misc_feature 1..20: note = Description of Artificial Sequence: Synthetic oligonucleotide
  misc_feature 1..20: note = Target: SCN10A; (+) strand; PAM type: NRG; PAM sequence: TAG
  source 1..20: mol_type = other DNA
aatcccaggactcagttgtt

SEQ ID NO: 40341 - DNA, 20 bp, synthetic construct
  misc_feature 1..20: note = Description of Artificial Sequence: Synthetic oligonucleotide
  misc_feature 1..20: note = Target: SCN10A; (+) strand; PAM type: NRG; PAM sequence: AAG
  source 1..20: mol_type = other DNA
cagttgtttagtaacaatgc

SEQ ID NO: 40342 - DNA, 20 bp, synthetic construct
  misc_feature 1..20: note = Description of Artificial Sequence: Synthetic oligonucleotide
  misc_feature 1..20: note = Target: SCN10A; (+) strand; PAM type: NRG; PAM sequence: CAG
  source 1..20: mol_type = other DNA
taacaatgcaagaattctct

SEQ ID NO: 40343 - DNA, 20 bp, synthetic construct
  misc_feature 1..20: note = Description of Artificial Sequence: Synthetic oligonucleotide
  misc_feature 1..20: note = Target: SCN10A; (+) strand; PAM type: NRG; PAM sequence: TGG
  source 1..20: mol_type = other DNA
aagaattctctcagtgacac

SEQ ID NO: 40344 - DNA, 20 bp, synthetic construct
  misc_feature 1..20: note = Description of Artificial Sequence: Synthetic oligonucleotide
  misc_feature 1..20: note = Target: SCN10A; (+) strand; PAM type: NRG; PAM sequence: GAG
  source 1..20: mol_type = other DNA
tgacactggaatgcaatgtt

SEQ ID NO: 40345 - DNA, 20 bp, synthetic construct
  misc_feature 1..20: note = Description of Artificial Sequence: Synthetic oligonucleotide
  misc_feature 1..20: note = Target: SCN10A; (+) strand; PAM type: NRG; PAM sequence: AGG
  source 1..20: mol_type = other DNA
gacactggaatgcaatgttg

SEQ ID NO: 40346 - DNA, 20 bp, synthetic construct
  misc_feature 1..20: note = Description of Artificial Sequence: Synthetic oligonucleotide
  misc_feature 1..20: note = Target: SCN10A; (+) strand; PAM type: NRG; PAM sequence: GAG
  source 1..20: mol_type = other DNA
ggaatgcaatgttgaggatt

SEQ ID NO: 40347 - DNA, 20 bp, synthetic construct
  misc_feature 1..20: note = Description of Artificial Sequence: Synthetic oligonucleotide
  misc_feature 1..20: note = Target: SCN10A; (+) strand; PAM type: NRG; PAM sequence: CAG
  source 1..20: mol_type = other DNA
gcaatgttgaggattgagaa

SEQ ID NO: 40348 - DNA, 20 bp, synthetic construct
  misc_feature 1..20: note = Description of Artificial Sequence: Synthetic oligonucleotide
  misc_feature 1..20: note = Target: SCN10A; (+) strand; PAM type: NRG; PAM sequence: AGG
  source 1..20: mol_type = other DNA
caatgttgaggattgagaac

SEQ ID NO: 40349 - DNA, 20 bp, synthetic construct
  misc_feature 1..20: note = Description of Artificial Sequence: Synthetic oligonucleotide
  misc_feature 1..20: note = Target: SCN10A; (+) strand; PAM type: NRG; PAM sequence: AAG
  source 1..20: mol_type = other DNA
tgaggattgagaacaggact

SEQ ID NO: 40350 - DNA, 20 bp, synthetic construct
  misc_feature 1..20: note = Description of Artificial Sequence: Synthetic oligonucleotide
  misc_feature 1..20: note = Target: SCN10A; (+) strand; PAM type: NRG; PAM sequence: CAG
  source 1..20: mol_type = other DNA
gattgagaacaggactaagc

SEQ ID NO: 40351 - DNA, 20 bp, synthetic construct
  misc_feature 1..20: note = Description of Artificial Sequence: Synthetic oligonucleotide
  misc_feature 1..20: note = Target: SCN10A; (+) strand; PAM type: NRG; PAM sequence: CAG
  source 1..20: mol_type = other DNA
acaggactaagccagaattc

SEQ ID NO: 40352 - DNA, 20 bp, synthetic construct
  misc_feature 1..20: note = Description of Artificial Sequence: Synthetic oligonucleotide
  misc_feature 1..20: note = Target: SCN10A; (+) strand; PAM type: NRG; PAM sequence: AGG
  source 1..20: mol_type = other DNA
caggactaagccagaattcc

SEQ ID NO: 40353 - DNA, 20 bp, synthetic construct
  misc_feature 1..20: note = Description of Artificial Sequence: Synthetic oligonucleotide
  misc_feature 1..20: note = Target: SCN10A; (+) strand; PAM type: NRG; PAM sequence: TGG
  source 1..20: mol_type = other DNA
taagccagaattccaggtcc

SEQ ID NO: 40354 - DNA, 20 bp, synthetic construct
  misc_feature 1..20: note = Description of Artificial Sequence: Synthetic oligonucleotide
  misc_feature 1..20: note = Target: SCN10A; (+) strand; PAM type: NRG; PAM sequence: GAG
  source 1..20: mol_type = other DNA
agccagaattccaggtcctg

SEQ ID NO: 40355 - DNA, 20 bp, synthetic construct
  misc_feature 1..20: note = Description of Artificial Sequence: Synthetic oligonucleotide
  misc_feature 1..20: note = Target: SCN10A; (+) strand; PAM type: NRG; PAM sequence: TGG
  source 1..20: mol_type = other DNA
agaattccaggtcctggagc

SEQ ID NO: 40356 - DNA, 20 bp, synthetic construct
  misc_feature 1..20: note = Description of Artificial Sequence: Synthetic oligonucleotide
  misc_feature 1..20: note = Target: SCN10A; (+) strand; PAM type: NRG; PAM sequence: GAG
  source 1..20: mol_type = other DNA
aattccaggtcctggagctg

SEQ ID NO: 40357 - DNA, 20 bp, synthetic construct
  misc_feature 1..20: note = Description of Artificial Sequence: Synthetic oligonucleotide
  misc_feature 1..20: note = Target: SCN10A; (+) strand; PAM type: NRG; PAM sequence: GAG
  source 1..20: mol_type = other DNA
aggtcctggagctggagctt

SEQ ID NO: 40358 - DNA, 20 bp, synthetic construct
  misc_feature 1..20: note = Description of Artificial Sequence: Synthetic oligonucleotide
  misc_feature 1..20: note = Target: SCN10A; (+) strand; PAM type: NRG; PAM sequence: AGG
  source 1..20: mol_type = other DNA
ggtcctggagctggagcttg

SEQ ID NO: 40359 - DNA, 20 bp, synthetic construct
  misc_feature 1..20: note = Description of Artificial Sequence: Synthetic oligonucleotide
  misc_feature 1..20: note = Target: SCN10A; (+) strand; PAM type: NRG; PAM sequence: AAG
  source 1..20: mol_type = other DNA
ggagctggagcttgaggtca

SEQ ID NO: 40360 - DNA, 20 bp, synthetic construct
  misc_feature 1..20: note = Description of Artificial Sequence: Synthetic oligonucleotide
  misc_feature 1..20: note = Target: SCN10A; (+) strand; PAM type: NRG; PAM sequence: CAG
  source 1..20: mol_type = other DNA
gctggagcttgaggtcaaag

SEQ ID NO: 40361 - DNA, 20 bp, synthetic construct
  misc_feature 1..20: note = Description of Artificial Sequence: Synthetic oligonucleotide
  misc_feature 1..20: note = Target: SCN10A; (+) strand; PAM type: NRG; PAM sequence: CAG
  source 1..20: mol_type = other DNA
gcttgaggtcaaagcagact

SEQ ID NO: 40362 - DNA, 20 bp, synthetic construct
  misc_feature 1..20: note = Description of Artificial Sequence: Synthetic oligonucleotide
  misc_feature 1..20: note = Target: SCN10A; (+) strand; PAM type: NRG; PAM sequence: GAG
  source 1..20: mol_type = other DNA
gtcaaagcagactcagctat

SEQ ID NO: 40363 - DNA, 20 bp, synthetic construct
  misc_feature 1..20: note = Description of Artificial Sequence: Synthetic oligonucleotide
  misc_feature 1..20: note = Target: SCN10A; (+) strand; PAM type: NRG; PAM sequence: TGG
  source 1..20: mol_type = other DNA
ccaaatgaccataattattc

SEQ ID NO: 40364 - DNA, 20 bp, synthetic construct
  misc_feature 1..20: note = Description of Artificial Sequence: Synthetic oligonucleotide
  misc_feature 1..20: note = Target: SCN10A; (+) strand; PAM type: NRG; PAM sequence: GGG
  source 1..20: mol_type = other DNA
caaatgaccataattattct

SEQ ID NO: 40365 - DNA, 20 bp, synthetic construct
  misc_feature 1..20: note = Description of Artificial Sequence: Synthetic oligonucleotide
  misc_feature 1..20: note = Target: SCN10A; (+) strand; PAM type: NRG; PAM sequence: CAG
  source 1..20: mol_type = other DNA
tgggctaccataaatccctc

SEQ ID NO: 40366 - DNA, 20 bp, synthetic construct
  misc_feature 1..20: note = Description of Artificial Sequence: Synthetic oligonucleotide
  misc_feature 1..20: note = Target: SCN10A; (+) strand; PAM type: NRG; PAM sequence: AAG
  source 1..20: mol_type = other DNA
taccataaatccctccagct

SEQ ID NO: 40367 - DNA, 20 bp, synthetic construct
  misc_feature 1..20: note = Description of Artificial Sequence: Synthetic oligonucleotide
  misc_feature 1..20: note = Target: SCN10A; (+) strand; PAM type: NRG; PAM sequence: AGG
  source 1..20: mol_type = other DNA
accataaatccctccagcta

SEQ ID NO: 40368 - DNA, 20 bp, synthetic construct
  misc_feature 1..20: note = Description of Artificial Sequence: Synthetic oligonucleotide
  misc_feature 1..20: note = Target: SCN10A; (+) strand; PAM type: NRG; PAM sequence: TGG
  source 1..20: mol_type = other DNA
gacaaaattgttttcaacat

SEQ ID NO: 40369 - DNA, 20 bp, synthetic construct
  misc_feature 1..20: note = Description of Artificial Sequence: Synthetic oligonucleotide
  misc_feature 1..20: note = Target: SCN10A; (+) strand; PAM type: NRG; PAM sequence: GGG
  source 1..20: mol_type = other DNA
acaaaattgttttcaacatt

SEQ ID NO: 40370 - DNA, 20 bp, synthetic construct
  misc_feature 1..20: note = Description of Artificial Sequence: Synthetic oligonucleotide
  misc_feature 1..20: note = Target: SCN10A; (+) strand; PAM type: NRG; PAM sequence: GGG
  source 1..20: mol_type = other DNA
caaaattgttttcaacattg

SEQ ID NO: 40371 - DNA, 20 bp, synthetic construct
  misc_feature 1..20: note = Description of Artificial Sequence: Synthetic oligonucleotide
  misc_feature 1..20: note = Target: SCN10A; (+) strand; PAM type: NRG; PAM sequence: TGG
  source 1..20: mol_type = other DNA
aattgttttcaacattgggg

SEQ ID NO: 40372 - DNA, 20 bp, synthetic construct
  misc_feature 1..20: note = Description of Artificial Sequence: Synthetic oligonucleotide
  misc_feature 1..20: note = Target: SCN10A; (+) strand; PAM type: NRG; PAM sequence: GGG
  source 1..20: mol_type = other DNA
attgttttcaacattggggt

SEQ ID NO: 40373 - DNA, 20 bp, synthetic construct
  misc_feature 1..20: note = Description of Artificial Sequence: Synthetic oligonucleotide
  misc_feature 1..20: note = Target: SCN10A; (+) strand; PAM type: NRG; PAM sequence: TAG
  source 1..20: mol_type = other DNA
aacattggggtgggaatttg

SEQ ID NO: 40374 - DNA, 20 bp, synthetic construct
  misc_feature 1..20: note = Description of Artificial Sequence: Synthetic oligonucleotide
  misc_feature 1..20: note = Target: SCN10A; (+) strand; PAM type: NRG; PAM sequence: TAG
  source 1..20: mol_type = other DNA
gaatttgtagtgatgtgatg

SEQ ID NO: 40375 - DNA, 20 bp, synthetic construct
  misc_feature 1..20: note = Description of Artificial Sequence: Synthetic oligonucleotide
  misc_feature 1..20: note = Target: SCN10A; (+) strand; PAM type: NRG; PAM sequence: AGG
  source 1..20: mol_type = other DNA
aatttgtagtgatgtgatgt

SEQ ID NO: 40376 - DNA, 20 bp, synthetic construct
  misc_feature 1..20: note = Description of Artificial Sequence: Synthetic oligonucleotide
  misc_feature 1..20: note = Target: SCN10A; (+) strand; PAM type: NRG; PAM sequence: GAG
  source 1..20: mol_type = other DNA
tagtgatgtgatgtaggtat

SEQ ID NO: 40377 - DNA, 20 bp, synthetic construct
  misc_feature 1..20: note = Description of Artificial Sequence: Synthetic oligonucleotide
  misc_feature 1..20: note = Target: SCN10A; (+) strand; PAM type: NRG; PAM sequence: AGG
  source 1..20: mol_type = other DNA
agtgatgtgatgtaggtatg

SEQ ID NO: 40378 - DNA, 20 bp, synthetic construct
  misc_feature 1..20: note = Description of Artificial Sequence: Synthetic oligonucleotide
  misc_feature 1..20: note = Target: SCN10A; (+) strand; PAM type: NRG; PAM sequence: GGG
  source 1..20: mol_type = other DNA
gtgatgtgatgtaggtatga

SEQ ID NO: 40379 - DNA, 20 bp, synthetic construct
  misc_feature 1..20: note = Description of Artificial Sequence: Synthetic oligonucleotide
  misc_feature 1..20: note = Target: SCN10A; (+) strand; PAM type: NRG; PAM sequence: CAG
  source 1..20: mol_type = other DNA
gtgatgtaggtatgagggac

SEQ ID NO: 40380 - DNA, 20 bp, synthetic construct
  misc_feature 1..20: note = Description of Artificial Sequence: Synthetic oligonucleotide
  misc_feature 1..20: note = Target: SCN10A; (+) strand; PAM type: NRG; PAM sequence: AAG
  source 1..20: mol_type = other DNA
gagggaccagtccttctttt

SEQ ID NO: 40381 - DNA, 20 bp, synthetic construct
  misc_feature 1..20: note = Description of Artificial Sequence: Synthetic oligonucleotide
  misc_feature 1..20: note = Target: SCN10A; (+) strand; PAM type: NRG; PAM sequence: CAG
  source 1..20: mol_type = other DNA
ttcttttaagactttcccat

SEQ ID NO: 40382 - DNA, 20 bp, synthetic construct
  misc_feature 1..20: note = Description of Artificial Sequence: Synthetic oligonucleotide
  misc_feature 1..20: note = Target: SCN10A; (+) strand; PAM type: NRG; PAM sequence: AAG
  source 1..20: mol_type = other DNA
ttttaagactttcccatcag

SEQ ID NO: 40383 - DNA, 20 bp, synthetic construct
  misc_feature 1..20: note = Description of Artificial Sequence: Synthetic oligonucleotide
  misc_feature 1..20: note = Target: SCN10A; (+) strand; PAM type: NRG; PAM sequence: TAG
  source 1..20: mol_type = other DNA
gactttcccatcagaagtga

SEQ ID NO: 40384 - DNA, 20 bp, synthetic construct
  misc_feature 1..20: note = Description of Artificial Sequence: Synthetic oligonucleotide
  misc_feature 1..20: note = Target: SCN10A; (+) strand; PAM type: NRG; PAM sequence: TGG
  source 1..20: mol_type = other DNA
cccatcagaagtgatagctc

SEQ ID NO: 40385 - DNA, 20 bp, synthetic construct
  misc_feature 1..20: note = Description of Artificial Sequence: Synthetic oligonucleotide
  misc_feature 1..20: note = Target: SCN10A; (+) strand; PAM type: NRG; PAM sequence: TGG
  source 1..20: mol_type = other DNA
agaagtgatagctctggact

SEQ ID NO: 40386 - DNA, 20 bp, synthetic construct
  misc_feature 1..20: note = Description of Artificial Sequence: Synthetic oligonucleotide
  misc_feature 1..20: note = Target: SCN10A; (+) strand; PAM type: NRG; PAM sequence: GGG
  source 1..20: mol_type = other DNA
gaagtgatagctctggactt

SEQ ID NO: 40387 - DNA, 20 bp, synthetic construct
  misc_feature 1..20: note = Description of Artificial Sequence: Synthetic oligonucleotide
  misc_feature 1..20: note = Target: SCN10A; (+) strand; PAM type: NRG; PAM sequence: AAG
  source 1..20: mol_type = other DNA
gacttgggatcccttgattg

SEQ ID NO: 40388 - DNA, 20 bp, synthetic construct
  misc_feature 1..20: note = Description of Artificial Sequence: Synthetic oligonucleotide
  misc_feature 1..20: note = Target: SCN10A; (+) strand; PAM type: NRG; PAM sequence: TGG
  source 1..20: mol_type = other DNA
ttgggatcccttgattgaag

SEQ ID NO: 40389 - DNA, 20 bp, synthetic construct
  misc_feature 1..20: note = Description of Artificial Sequence: Synthetic oligonucleotide
  misc_feature 1..20: note = Target: SCN10A; (+) strand; PAM type: NRG; PAM sequence: CAG
  source 1..20: mol_type = other DNA
ctatattcccatctattacc

SEQ ID NO: 40390 - DNA, 20 bp, synthetic construct
  misc_feature 1..20: note = Description of Artificial Sequence: Synthetic oligonucleotide
  misc_feature 1..20: note = Target: SCN10A; (+) strand; PAM type: NRG; PAM sequence: GAG
  source 1..20: mol_type = other DNA
gtgtctttacatgacattct

SEQ ID NO: 40391 - DNA, 20 bp, synthetic construct
  misc_feature 1..20: note = Description of Artificial Sequence: Synthetic oligonucleotide
  misc_feature 1..20: note = Target: SCN10A; (+) strand; PAM type: NRG; PAM sequence: TGG
  source 1..20: mol_type = other DNA
tgacattctgagaaaactat

SEQ ID NO: 40392 - DNA, 20 bp, synthetic construct
  misc_feature 1..20: note = Description of Artificial Sequence: Synthetic oligonucleotide
  misc_feature 1..20: note = Target: SCN10A; (+) strand; PAM type: NRG; PAM sequence: GGG
  source 1..20: mol_type = other DNA
gacattctgagaaaactatt

SEQ ID NO: 40393 - DNA, 20 bp, synthetic construct
  misc_feature 1..20: note = Description of Artificial Sequence: Synthetic oligonucleotide
  misc_feature 1..20: note = Target: SCN10A; (+) strand; PAM type: NRG; PAM sequence: GGG
  source 1..20: mol_type = other DNA
acattctgagaaaactattg

SEQ ID NO: 40394 - DNA, 20 bp, synthetic construct
  misc_feature 1..20: note = Description of Artificial Sequence: Synthetic oligonucleotide
  misc_feature 1..20: note = Target: SCN10A; (+) strand; PAM type: NRG; PAM sequence: AAG
  source 1..20: mol_type = other DNA
tgagaaaactattggggtgc

SEQ ID NO: 40395 - DNA, 20 bp, synthetic construct
  misc_feature 1..20: note = Description of Artificial Sequence: Synthetic oligonucleotide
  misc_feature 1..20: note = Target: SCN10A; (+) strand; PAM type: NRG; PAM sequence: TAG
  source 1..20: mol_type = other DNA
gaaaactattggggtgcaag

SEQ ID NO: 40396 - DNA, 20 bp, synthetic construct
  misc_feature 1..20: note = Description of Artificial Sequence: Synthetic oligonucleotide
  misc_feature 1..20: note = Target: SCN10A; (+) strand; PAM type: NRG; PAM sequence: GAG
  source 1..20: mol_type = other DNA
ggggtgcaagtagtttatct

SEQ ID NO: 40397 - DNA, 20 bp, synthetic construct
  misc_feature 1..20: note = Description of Artificial Sequence: Synthetic oligonucleotide
  misc_feature 1..20: note = Target: SCN10A; (+) strand; PAM type: NRG; PAM sequence: GAG
  source 1..20: mol_type = other DNA
ggtgcaagtagtttatctga

SEQ ID NO: 40398 - DNA, 20 bp, synthetic construct
  misc_feature 1..20: note = Description of Artificial Sequence: Synthetic oligonucleotide
  misc_feature 1..20: note = Target: SCN10A; (+) strand; PAM type: NRG; PAM sequence: TAG
  source 1..20: mol_type = other DNA
gtttatctgagagctatttc

SEQ ID NO: 40399 - DNA, 20 bp, synthetic construct
  misc_feature 1..20: note = Description of Artificial Sequence: Synthetic oligonucleotide
  misc_feature 1..20: note = Target: SCN10A; (+) strand; PAM type: NRG; PAM sequence: AGG
  source 1..20: mol_type = other DNA
tttatctgagagctatttct

SEQ ID NO: 40400 - DNA, 20 bp, synthetic construct
  misc_feature 1..20: note = Description of Artificial Sequence: Synthetic oligonucleotide
  misc_feature 1..20: note = Target: SCN10A; (+) strand; PAM type: NRG; PAM sequence: TAG
  source 1..20: mol_type = other DNA
agctatttctaggaatgtca

SEQ ID NO: 40401 - DNA, 20 bp, synthetic construct
  misc_feature 1..20: note = Description of Artificial Sequence: Synthetic oligonucleotide
  misc_feature 1..20: note = Target: SCN10A; (+) strand; PAM type: NRG; PAM sequence: AAG
  source 1..20: mol_type = other DNA
tatttctaggaatgtcatag

SEQ ID NO: 40402 - DNA, 20 bp, synthetic construct
  misc_feature 1..20: note = Description of Artificial Sequence: Synthetic oligonucleotide
  misc_feature 1..20: note = Target: SCN10A; (+) strand; PAM type: NRG; PAM sequence: GAG
  source 1..20: mol_type = other DNA
tttctaggaatgtcatagaa

SEQ ID NO: 40403 - DNA, 20 bp, synthetic construct
  misc_feature 1..20: note = Description of Artificial Sequence: Synthetic oligonucleotide
  misc_feature 1..20: note = Target: SCN10A; (+) strand; PAM type: NRG; PAM sequence: GAG
  source 1..20: mol_type = other DNA
tctaggaatgtcatagaaga

SEQ ID NO: 40404 - DNA, 20 bp, synthetic construct
  misc_feature 1..20: note = Description of Artificial Sequence: Synthetic oligonucleotide
  misc_feature 1..20: note = Target: SCN10A; (+) strand; PAM type: NRG; PAM sequence: AGG
  source 1..20: mol_type = other DNA
ctaggaatgtcatagaagag

SEQ ID NO: 40405 - DNA, 20 bp, synthetic construct
  misc_feature 1..20: note = Description of Artificial Sequence: Synthetic oligonucleotide
  misc_feature 1..20: note = Target: SCN10A; (+) strand; PAM type: NRG; PAM sequence: AAG
  source 1..20: mol_type = other DNA
aatgtcatagaagagaggaa

SEQ ID NO: 40406 - DNA, 20 bp, synthetic construct
  misc_feature 1..20: note = Description of Artificial Sequence: Synthetic oligonucleotide
  misc_feature 1..20: note = Target: SCN10A; (+) strand; PAM type: NRG; PAM sequence: AAG
  source 1..20: mol_type = other DNA
gaagagaggaaaagtaacat

SEQ ID NO: 40407 - DNA, 20 bp, synthetic construct
  misc_feature 1..20: note = Description of Artificial Sequence: Synthetic oligonucleotide
  misc_feature 1..20: note = Target: SCN10A; (+) strand; PAM type: NRG; PAM sequence: AAG
  source 1..20: mol_type = other DNA
gagaggaaaagtaacataag

SEQ ID NO: 40408 - DNA, 20 bp, synthetic construct
  misc_feature 1..20: note = Description of Artificial Sequence: Synthetic oligonucleotide
  misc_feature 1..20: note = Target: SCN10A; (+) strand; PAM type: NRG; PAM sequence: AAG
  source 1..20: mol_type = other DNA
aggaaaagtaacataagaag

SEQ ID NO: 40409 - DNA, 20 bp, synthetic construct
  misc_feature 1..20: note = Description of Artificial Sequence: Synthetic oligonucleotide
  misc_feature 1..20: note = Target: SCN10A; (+) strand; PAM type: NRG; PAM sequence: AAG
  source 1..20: mol_type = other DNA
aaagtaacataagaagaaga

SEQ ID NO: 40410 - DNA, 20 bp, synthetic construct
  misc_feature 1..20: note = Description of Artificial Sequence: Synthetic oligonucleotide
  misc_feature 1..20: note = Target: SCN10A; (+) strand; PAM type: NRG; PAM sequence: CAG
  source 1..20: mol_type = other DNA
gtaacataagaagaagaaag

SEQ ID NO: 40411 - DNA, 20 bp, synthetic construct
  misc_feature 1..20: note = Description of Artificial Sequence: Synthetic oligonucleotide
  misc_feature 1..20: note = Target: SCN10A; (+) strand; PAM type: NRG; PAM sequence: GAG
  source 1..20: mol_type = other DNA
gaagaaagcagtatttttat

SEQ ID NO: 40412 - DNA, 20 bp, synthetic construct
  misc_feature 1..20: note = Description of Artificial Sequence: Synthetic oligonucleotide
  misc_feature 1..20: note = Target: SCN10A; (+) strand; PAM type: NRG; PAM sequence: TGG
  source 1..20: mol_type = other DNA
ttatgagccatttactctta

SEQ ID NO: 40413 - DNA, 20 bp, synthetic construct
  misc_feature 1..20: note = Description of Artificial Sequence: Synthetic oligonucleotide
  misc_feature 1..20: note = Target: SCN10A; (+) strand; PAM type: NRG; PAM sequence: GGG
  source 1..20: mol_type = other DNA
tatgagccatttactcttat

SEQ ID NO: 40414 - DNA, 20 bp, synthetic construct
  misc_feature 1..20: note = Description of Artificial Sequence: Synthetic oligonucleotide
  misc_feature 1..20: note = Target: SCN10A; (+) strand; PAM type: NRG; PAM sequence: TGG
  source 1..20: mol_type = other DNA
atttactcttatgggcaaac

SEQ ID NO: 40415 - DNA, 20 bp, synthetic construct
  misc_feature 1..20: note = Description of Artificial Sequence: Synthetic oligonucleotide
  misc_feature 1..20: note = Target: SCN10A; (+) strand; PAM type: NRG; PAM sequence: GGG
  source 1..20: mol_type = other DNA
tttactcttatgggcaaact

SEQ ID NO: 40416 - DNA, 20 bp, synthetic construct
  misc_feature 1..20: note = Description of Artificial Sequence: Synthetic oligonucleotide
  misc_feature 1..20: note = Target: SCN10A; (+) strand; PAM type: NRG; PAM sequence: CAG
  source 1..20: mol_type = other DNA
tcttatgggcaaactgggct

SEQ ID NO: 40417 - DNA, 20 bp, synthetic construct
  misc_feature 1..20: note = Description of Artificial Sequence: Synthetic oligonucleotide
  misc_feature 1..20: note = Target: SCN10A; (+) strand; PAM type: NRG; PAM sequence: GAG
  source 1..20: mol_type = other DNA
gggctcagaattgtttcact

SEQ ID NO: 40418 - DNA, 20 bp, synthetic construct
  misc_feature 1..20: note = Description of Artificial Sequence: Synthetic oligonucleotide
  misc_feature 1..20: note = Target: SCN10A; (+) strand; PAM type: NRG; PAM sequence: AGG
  source 1..20: mol_type = other DNA
ggctcagaattgtttcactg

SEQ ID NO: 40419 - DNA, 20 bp, synthetic construct
  misc_feature 1..20: note = Description of Artificial Sequence: Synthetic oligonucleotide
  misc_feature 1..20: note = Target: SCN10A; (+) strand; PAM type: NRG; PAM sequence: GGG
  source 1..20: mol_type = other DNA
gctcagaattgtttcactga

SEQ ID NO: 40420 - DNA, 20 bp, synthetic construct
  misc_feature 1..20: note = Description of Artificial Sequence: Synthetic oligonucleotide
  misc_feature 1..20: note = Target: SCN10A; (+) strand; PAM type: NRG; PAM sequence: GGG
  source 1..20: mol_type = other DNA
ctcagaattgtttcactgag

SEQ ID NO: 40421 - DNA, 20 bp, synthetic construct
  misc_feature 1..20: note = Description of Artificial Sequence: Synthetic oligonucleotide
  misc_feature 1..20: note = Target: SCN10A; (+) strand; PAM type: NRG; PAM sequence: AAG
  source 1..20: mol_type = other DNA
gaattgtttcactgaggggt

SEQ ID NO: 40422 - DNA, 20 bp, synthetic construct
  misc_feature 1..20: note = Description of Artificial Sequence: Synthetic oligonucleotide
  misc_feature 1..20: note = Target: SCN10A; (+) strand; PAM type: NRG; PAM sequence: AGG
  source 1..20: mol_type = other DNA
aattgtttcactgaggggta

SEQ ID NO: 40423 - DNA, 20 bp, synthetic construct
  misc_feature 1..20: note = Description of Artificial Sequence: Synthetic oligonucleotide
  misc_feature 1..20: note = Target: SCN10A; (+) strand; PAM type: NRG; PAM sequence: TAG
  source 1..20: mol_type = other DNA
tcactgaggggtaaggatac

SEQ ID NO: 40424 - DNA, 20 bp, synthetic construct
  misc_feature 1..20: note = Description of Artificial Sequence: Synthetic oligonucleotide
  misc_feature 1..20: note = Target: SCN10A; (+) strand; PAM type: NRG; PAM sequence: AGG
  source 1..20: mol_type = other DNA
cactgaggggtaaggatact

SEQ ID NO: 40425 - DNA, 20 bp, synthetic construct
  misc_feature 1..20: note = Description of Artificial Sequence: Synthetic oligonucleotide
  misc_feature 1..20: note = Target: SCN10A; (+) strand; PAM type: NRG; PAM sequence: GGG
  source 1..20: mol_type = other DNA
actgaggggtaaggatacta

SEQ ID NO: 40426 - DNA, 20 bp, synthetic construct
  misc_feature 1..20: note = Description of Artificial Sequence: Synthetic oligonucleotide
  misc_feature 1..20: note = Target: SCN10A; (+) strand; PAM type: NRG; PAM sequence: CAG
  source 1..20: mol_type = other DNA
gatactagggttttatctac

SEQ ID NO: 40427 - DNA, 20 bp, synthetic construct
  misc_feature 1..20: note = Description of Artificial Sequence: Synthetic oligonucleotide
  misc_feature 1..20: note = Target: SCN10A; (+) strand; PAM type: NRG; PAM sequence: TGG
  source 1..20: mol_type = other DNA
ctaccagtcctgtcccttat

SEQ ID NO: 40428 - DNA, 20 bp, synthetic construct
  misc_feature 1..20: note = Description of Artificial Sequence: Synthetic oligonucleotide
  misc_feature 1..20: note = Target: SCN10A; (+) strand; PAM type: NRG; PAM sequence: CGG
  source 1..20: mol_type = other DNA
tcctgtcccttattggttga

SEQ ID NO: 40429 - DNA, 20 bp, synthetic construct
  misc_feature 1..20: note = Description of Artificial Sequence: Synthetic oligonucleotide
  misc_feature 1..20: note = Target: SCN10A; (+) strand; PAM type: NRG; PAM sequence: TGG
  source 1..20: mol_type = other DNA
ttattggttgacggttgtcc

SEQ ID NO: 40430 - DNA, 20 bp, synthetic construct
  misc_feature 1..20: note = Description of Artificial Sequence: Synthetic oligonucleotide
  misc_feature 1..20: note = Target: SCN10A; (+) strand; PAM type: NRG; PAM sequence: GGG
  source 1..20: mol_type = other DNA
tattggttgacggttgtcct

SEQ ID NO: 40431 - DNA, 20 bp, synthetic construct
  misc_feature 1..20: note = Description of Artificial Sequence: Synthetic oligonucleotide
  misc_feature 1..20: note = Target: SCN10A; (+) strand; PAM type: NRG; PAM sequence: CAG
  source 1..20: mol_type = other DNA
gtcctgggattttaactcta

SEQ ID NO: 40432 - DNA, 20 bp, synthetic construct
  misc_feature 1..20: note = Description of Artificial Sequence: Synthetic oligonucleotide
  misc_feature 1..20: note = Target: SCN10A; (+) strand; PAM type: NRG; PAM sequence: CAG
  source 1..20: mol_type = other DNA
taactctacagaacttactt

SEQ ID NO: 40433 - DNA, 20 bp, synthetic construct
  misc_feature 1..20: note = Description of Artificial Sequence: Synthetic oligonucleotide
  misc_feature 1..20: note = Target: SCN10A; (+) strand; PAM type: NRG; PAM sequence: TGG
  source 1..20: mol_type = other DNA
ctctacagaacttacttcag

SEQ ID NO: 40434 - DNA, 20 bp, synthetic construct
  misc_feature 1..20: note = Description of Artificial Sequence: Synthetic oligonucleotide
  misc_feature 1..20: note = Target: SCN10A; (+) strand; PAM type: NRG; PAM sequence: CAG
  source 1..20: mol_type = other DNA
acagaacttacttcagtggc

SEQ ID NO: 40435 - DNA, 20 bp, synthetic construct
  misc_feature 1..20: note = Description of Artificial Sequence: Synthetic oligonucleotide
  misc_feature 1..20: note = Target: SCN10A; (+) strand; PAM type: NRG; PAM sequence: GAG
  source 1..20: mol_type = other DNA
agaacttacttcagtggcca

SEQ ID NO: 40436 - DNA, 20 bp, synthetic construct
  misc_feature 1..20: note = Description of Artificial Sequence: Synthetic oligonucleotide
  misc_feature 1..20: note = Target: SCN10A; (+) strand; PAM type: NRG; PAM sequence: AAG
  source 1..20: mol_type = other DNA
cttacttcagtggccagaga

SEQ ID NO: 40437 - DNA, 20 bp, synthetic construct
  misc_feature 1..20: note = Description of Artificial Sequence: Synthetic oligonucleotide
  misc_feature 1..20: note = Target: SCN10A; (+) strand; PAM type: NRG; PAM sequence: TGG
  source 1..20: mol_type = other DNA
tcagtggccagagaaagccc

SEQ ID NO: 40438 - DNA, 20 bp, synthetic construct
  misc_feature 1..20: note = Description of Artificial Sequence: Synthetic oligonucleotide
  misc_feature 1..20: note = Target: SCN10A; (+) strand; PAM type: NRG; PAM sequence: GGG
  source 1..20: mol_type = other DNA
cagtggccagagaaagccct

SEQ ID NO: 40439 - DNA, 20 bp, synthetic construct
  misc_feature 1..20: note = Description of Artificial Sequence: Synthetic oligonucleotide
  misc_feature 1..20: note = Target: SCN10A; (+) strand; PAM type: NRG; PAM sequence: CAG
  source 1..20: mol_type = other DNA
tggccagagaaagccctggg

SEQ ID NO: 40440 - DNA, 20 bp, synthetic construct
  misc_feature 1..20: note = Description of Artificial Sequence: Synthetic oligonucleotide
  misc_feature 1..20: note = Target: SCN10A; (+) strand; PAM type: NRG; PAM sequence: CAG
  source 1..20: mol_type = other DNA
cagagaaagccctgggcaga

SEQ ID NO: 40441 - DNA, 20 bp, synthetic construct
  misc_feature 1..20: note = Description of Artificial Sequence: Synthetic oligonucleotide
  misc_feature 1..20: note = Target: SCN10A; (+) strand; PAM type: NRG; PAM sequence: GAG
  source 1..20: mol_type = other DNA
gagaaagccctgggcagaca

SEQ ID NO: 40442 - DNA, 20 bp, synthetic construct
  misc_feature 1..20: note = Description of Artificial Sequence: Synthetic oligonucleotide
  misc_feature 1..20: note = Target: SCN10A; (+) strand; PAM type: NRG; PAM sequence: AGG
  source 1..20: mol_type = other DNA
agaaagccctgggcagacag

SEQ ID NO: 40443 - DNA, 20 bp, synthetic construct
  misc_feature 1..20: note = Description of Artificial Sequence: Synthetic oligonucleotide
  misc_feature 1..20: note = Target: SCN10A; (+) strand; PAM type: NRG; PAM sequence: CAG
  source 1..20: mol_type = other DNA
aagccctgggcagacagagg

SEQ ID NO: 40444 - DNA, 20 bp, synthetic construct
  misc_feature 1..20: note = Description of Artificial Sequence: Synthetic oligonucleotide
  misc_feature 1..20: note = Target: SCN10A; (+) strand; PAM type: NRG; PAM sequence: AGG
  source 1..20: mol_type = other DNA
agccctgggcagacagaggc

SEQ ID NO: 40445 - DNA, 20 bp, synthetic construct
  misc_feature 1..20: note = Description of Artificial Sequence: Synthetic oligonucleotide
  misc_feature 1..20: note = Target: SCN10A; (+) strand; PAM type: NRG; PAM sequence: AAG
  source 1..20: mol_type = other DNA
cctgggcagacagaggcagg

SEQ ID NO: 40446 - DNA, 20 bp, synthetic construct
  misc_feature 1..20: note = Description of Artificial Sequence: Synthetic oligonucleotide
  misc_feature 1..20: note = Target: SCN10A; (+) strand; PAM type: NRG; PAM sequence: TAG
  source 1..20: mol_type = other DNA
cagaggcaggaagtcacatg

SEQ ID NO: 40447 - DNA, 20 bp, synthetic construct
  misc_feature 1..20: note = Description of Artificial Sequence: Synthetic oligonucleotide
  misc_feature 1..20: note = Target: SCN10A; (+) strand; PAM type: NRG; PAM sequence: AGG
  source 1..20: mol_type = other DNA
agaggcaggaagtcacatgt

SEQ ID NO: 40448 - DNA, 20 bp, synthetic construct
  misc_feature 1..20: note = Description of Artificial Sequence: Synthetic oligonucleotide
  misc_feature 1..20: note = Target: SCN10A; (+) strand; PAM type: NRG; PAM sequence: AAG
  source 1..20: mol_type = other DNA
ggcaggaagtcacatgtagg

SEQ ID NO: 40449 - DNA, 20 bp, synthetic construct
  misc_feature 1..20: note = Description of Artificial Sequence: Synthetic oligonucleotide
  misc_feature 1..20: note = Target: SCN10A; (+) strand; PAM type: NRG; PAM sequence: TGG
  source 1..20: mol_type = other DNA
cacatgtaggaagtgtctgc

SEQ ID NO: 40450 - DNA, 20 bp, synthetic construct
  misc_feature 1..20: note = Description of Artificial Sequence: Synthetic oligonucleotide
  misc_feature 1..20: note = Target: SCN10A; (+) strand; PAM type: NRG; PAM sequence: TGG
  source 1..20: mol_type = other DNA
aagtgtctgctggtgacctc

SEQ ID NO: 40451 - DNA, 20 bp, synthetic construct
  misc_feature 1..20: note = Description of Artificial Sequence: Synthetic oligonucleotide
  misc_feature 1..20: note = Target: SCN10A; (+) strand; PAM type: NRG; PAM sequence: TAG
  source 1..20: mol_type = other DNA
tctgctggtgacctctggtc

SEQ ID NO: 40452 - DNA, 20 bp, synthetic construct
  misc_feature 1..20: note = Description of Artificial Sequence: Synthetic oligonucleotide
  misc_feature 1..20: note = Target: SCN10A; (+) strand; PAM type: NRG; PAM sequence: TGG
  source 1..20: mol_type = other DNA
tgacctctggtctagatccc

SEQ ID NO: 40453 - DNA, 20 bp, synthetic construct
  misc_feature 1..20: note = Description of Artificial Sequence: Synthetic oligonucleotide
  misc_feature 1..20: note = Target: SCN10A; (+) strand; PAM type: NRG; PAM sequence: GGG
  source 1..20: mol_type = other DNA
gacctctggtctagatccct

SEQ ID NO: 40454 - DNA, 20 bp, synthetic construct
  misc_feature 1..20: note = Description of Artificial Sequence: Synthetic oligonucleotide
  misc_feature 1..20: note = Target: SCN10A; (+) strand; PAM type: NRG; PAM sequence: GAG
  source 1..20: mol_type = other DNA
ggtctagatccctgggaaat

SEQ ID NO: 40455 - DNA, 20 bp, synthetic construct
  misc_feature 1..20: note = Description of Artificial Sequence: Synthetic oligonucleotide
  misc_feature 1..20: note = Target: SCN10A; (+) strand; PAM type: NRG; PAM sequence: AAG
  source 1..20: mol_type = other DNA
tagatccctgggaaatgagc

SEQ ID NO: 40456 - DNA, 20 bp, synthetic construct
  misc_feature 1..20: note = Description of Artificial Sequence: Synthetic oligonucleotide
  misc_feature 1..20: note = Target: SCN10A; (+) strand; PAM type: NRG; PAM sequence: AGG
  source 1..20: mol_type = other DNA
agatccctgggaaatgagca

SEQ ID NO: 40457 - DNA, 20 bp, synthetic construct
  misc_feature 1..20: note = Description of Artificial Sequence: Synthetic oligonucleotide
  misc_feature 1..20: note = Target: SCN10A; (+) strand; PAM type: NRG; PAM sequence: CAG
  source 1..20: mol_type = other DNA
cctgggaaatgagcaaggtg

SEQ ID NO: 40458 - DNA, 20 bp, synthetic construct
  misc_feature 1..20: note = Description of Artificial Sequence: Synthetic oligonucleotide
  misc_feature 1..20: note = Target: SCN10A; (+) strand; PAM type: NRG; PAM sequence: TAG
  source 1..20: mol_type = other DNA
ggaaatgagcaaggtgcaga

SEQ ID NO: 40459 - DNA, 20 bp, synthetic construct
  misc_feature 1..20: note = Description of Artificial Sequence: Synthetic oligonucleotide
  misc_feature 1..20: note = Target: SCN10A; (+) strand; PAM type: NRG; PAM sequence: CGG
  source 1..20: mol_type = other DNA
gagcaaggtgcagatagtga

SEQ ID NO: 40460 - DNA, 20 bp, synthetic construct
  misc_feature 1..20: note = Description of Artificial Sequence: Synthetic oligonucleotide
  misc_feature 1..20: note = Target: SCN10A; (+) strand; PAM type: NRG; PAM sequence: TAG
  source 1..20: mol_type = other DNA
ggtgcagatagtgacggcta

SEQ ID NO: 40461 - DNA, 20 bp, synthetic construct
  misc_feature 1..20: note = Description of Artificial Sequence: Synthetic oligonucleotide
  misc_feature 1..20: note = Target: SCN10A; (+) strand; PAM type: NRG; PAM sequence: TGG
  source 1..20: mol_type = other DNA
atagtccttgcaaccttaat

SEQ ID NO: 40462 - DNA, 20 bp, synthetic construct
  misc_feature 1..20: note = Description of Artificial Sequence: Synthetic oligonucleotide
  misc_feature 1..20: note = Target: SCN10A; (+) strand; PAM type: NRG; PAM sequence: GGG
  source 1..20: mol_type = other DNA
tagtccttgcaaccttaatt

SEQ ID NO: 40463 - DNA, 20 bp, synthetic construct
  misc_feature 1..20: note = Description of Artificial Sequence: Synthetic oligonucleotide
  misc_feature 1..20: note = Target: SCN10A; (+) strand; PAM type: NRG; PAM sequence: TAG
  source 1..20: mol_type = other DNA
ttaattgggaatccctattt

SEQ ID NO: 40464 - DNA, 20 bp, synthetic construct
  misc_feature 1..20: note = Description of Artificial Sequence: Synthetic oligonucleotide
  misc_feature 1..20: note = Target: SCN10A; (+) strand; PAM type: NRG; PAM sequence: GAG
  source 1..20: mol_type = other DNA
aattgggaatccctatttta

SEQ ID NO: 40465 - DNA, 20 bp, synthetic construct
  misc_feature 1..20: note = Description of Artificial Sequence: Synthetic oligonucleotide
  misc_feature 1..20: note = Target: SCN10A; (+) strand; PAM type: NRG; PAM sequence: TAG
  source 1..20: mol_type = other DNA
ggaatccctattttagagtc

SEQ ID NO: 40466 - DNA, 20 bp, synthetic construct
  misc_feature 1..20: note = Description of Artificial Sequence: Synthetic oligonucleotide
  misc_feature 1..20: note = Target: SCN10A; (+) strand; PAM type: NRG; PAM sequence: TAG
  source 1..20: mol_type = other DNA
ttttagagtctagttgaatg

SEQ ID NO: 40467 - DNA, 20 bp, synthetic construct
  misc_feature 1..20: note = Description of Artificial Sequence: Synthetic oligonucleotide
  misc_feature 1..20: note = Target: SCN10A; (+) strand; PAM type: NRG; PAM sequence: TGG
  source 1..20: mol_type = other DNA
tagagtctagttgaatgtag

SEQ ID NO: 40468 - DNA, 20 bp, synthetic construct
  misc_feature 1..20: note = Description of Artificial Sequence: Synthetic oligonucleotide
  misc_feature 1..20: note = Target: SCN10A; (+) strand; PAM type: NRG; PAM sequence: GGG
  source 1..20: mol_type = other DNA
agagtctagttgaatgtagt

SEQ ID NO: 40469 - DNA, 20 bp, synthetic construct
  misc_feature 1..20: note = Description of Artificial Sequence: Synthetic oligonucleotide
  misc_feature 1..20: note = Target: SCN10A; (+) strand; PAM type: NRG; PAM sequence: GGG
  source 1..20: mol_type = other DNA
gagtctagttgaatgtagtg

SEQ ID NO: 40470 - DNA, 20 bp, synthetic construct
  misc_feature 1..20: note = Description of Artificial Sequence: Synthetic oligonucleotide
  misc_feature 1..20: note = Target: SCN10A; (+) strand; PAM type: NRG; PAM sequence: AAG
  source 1..20: mol_type = other DNA
ctagttgaatgtagtgggga

SEQ ID NO: 40471 - DNA, 20 bp, synthetic construct
  misc_feature 1..20: note = Description of Artificial Sequence: Synthetic oligonucleotide
  misc_feature 1..20: note = Target: SCN10A; (+) strand; PAM type: NRG; PAM sequence: GAG
  source 1..20: mol_type = other DNA
ggggaaagcacatcctttgt

SEQ ID NO: 40472 - DNA, 20 bp, synthetic construct
  misc_feature 1..20: note = Description of Artificial Sequence: Synthetic oligonucleotide
  misc_feature 1..20: note = Target: SCN10A; (+) strand; PAM type: NRG; PAM sequence: AGG
  source 1..20: mol_type = other DNA
gggaaagcacatcctttgtg

SEQ ID NO: 40473 - DNA, 20 bp, synthetic construct
  misc_feature 1..20: note = Description of Artificial Sequence: Synthetic oligonucleotide
  misc_feature 1..20: note = Target: SCN10A; (+) strand; PAM type: NRG; PAM sequence: TAG
  source 1..20: mol_type = other DNA
aaagcacatcctttgtgagg

SEQ ID NO: 40474 - DNA, 20 bp, synthetic construct
  misc_feature 1..20: note = Description of Artificial Sequence: Synthetic oligonucleotide
  misc_feature 1..20: note = Target: SCN10A; (+) strand; PAM type: NRG; PAM sequence: TAG
  source 1..20: mol_type = other DNA
catatcaaatgtatgtgtta

SEQ ID NO: 40475 - DNA, 20 bp, synthetic construct
  misc_feature 1..20: note = Description of Artificial Sequence: Synthetic oligonucleotide
  misc_feature 1..20: note = Target: SCN10A; (+) strand; PAM type: NRG; PAM sequence: AGG
  source 1..20: mol_type = other DNA
atatcaaatgtatgtgttat

SEQ ID NO: 40476 - DNA, 20 bp, synthetic construct
  misc_feature 1..20: note = Description of Artificial Sequence: Synthetic oligonucleotide
  misc_feature 1..20: note = Target: SCN10A; (+) strand; PAM type: NRG; PAM sequence: TAG
  source 1..20: mol_type = other DNA
aaatgtatgtgttataggat

SEQ ID NO: 40477 - DNA, 20 bp, synthetic construct
  misc_feature 1..20: note = Description of Artificial Sequence: Synthetic oligonucleotide
  misc_feature 1..20: note = Target: SCN10A; (+) strand; PAM type: NRG; PAM sequence: TGG
  source 1..20: mol_type = other DNA
tatgtgttataggattagtc

SEQ ID NO: 40478 - DNA, 20 bp, synthetic construct
  misc_feature 1..20: note = Description of Artificial Sequence: Synthetic oligonucleotide
  misc_feature 1..20: note = Target: SCN10A; (+) strand; PAM type: NRG; PAM sequence: GGG
  source 1..20: mol_type = other DNA
atgtgttataggattagtct

SEQ ID NO: 40479 - DNA, 20 bp, synthetic construct
  misc_feature 1..20: note = Description of Artificial Sequence: Synthetic oligonucleotide
  misc_feature 1..20: note = Target: SCN10A; (+) strand; PAM type: NRG; PAM sequence: TGG
  source 1..20: mol_type = other DNA
tgggcctgatactcacttct

SEQ ID NO: 40480 - DNA, 20 bp, synthetic construct
  misc_feature 1..20: note = Description of Artificial Sequence: Synthetic oligonucleotide
  misc_feature 1..20: note = Target: SCN10A; (+) strand; PAM type: NRG; PAM sequence: TGG
  source 1..20: mol_type = other DNA
atactcacttcttggattaa

SEQ ID NO: 40481 - DNA, 20 bp, synthetic construct
  misc_feature 1..20: note = Description of Artificial Sequence: Synthetic oligonucleotide
  misc_feature 1..20: note = Target: SCN10A; (+) strand; PAM type: NRG; PAM sequence: GAG
  source 1..20: mol_type = other DNA
cacttcttggattaatggct

SEQ ID NO: 40482 - DNA, 20 bp, synthetic construct
  misc_feature 1..20: note = Description of Artificial Sequence: Synthetic oligonucleotide
  misc_feature 1..20: note = Target: SCN10A; (+) strand; PAM type: NRG; PAM sequence: AGG
  source 1..20: mol_type = other DNA
acttcttggattaatggctg

SEQ ID NO: 40483 - DNA, 20 bp, synthetic construct
  misc_feature 1..20: note = Description of Artificial Sequence: Synthetic oligonucleotide
  misc_feature 1..20: note = Target: SCN10A; (+) strand; PAM type: NRG; PAM sequence: GAG
  source 1..20: mol_type = other DNA
ttcttggattaatggctgag

SEQ ID NO: 40484 - DNA, 20 bp, synthetic construct
  misc_feature 1..20: note = Description of Artificial Sequence: Synthetic oligonucleotide
  misc_feature 1..20: note = Target: SCN10A; (+) strand; PAM type: NRG; PAM sequence: AGG
  source 1..20: mol_type = other DNA
tcttggattaatggctgagg

SEQ ID NO: 40485 - DNA, 20 bp, synthetic construct
  misc_feature 1..20: note = Description of Artificial Sequence: Synthetic oligonucleotide
  misc_feature 1..20: note = Target: SCN10A; (+) strand; PAM type: NRG; PAM sequence: GAG
  source 1..20: mol_type = other DNA
ttggattaatggctgaggag

SEQ ID NO: 40486 - DNA, 20 bp, synthetic construct
  misc_feature 1..20: note = Description of Artificial Sequence: Synthetic oligonucleotide
  misc_feature 1..20: note = Target: SCN10A; (+) strand; PAM type: NRG; PAM sequence: AAG
  source 1..20: mol_type = other DNA
ggctgaggaggagacaatcc

SEQ ID NO: 40487 - DNA, 20 bp, synthetic construct
  misc_feature 1..20: note = Description of Artificial Sequence: Synthetic oligonucleotide
  misc_feature 1..20: note = Target: SCN10A; (+) strand; PAM type: NRG; PAM sequence: TAG
  source 1..20: mol_type = other DNA
aatccaagaaatatctattc

SEQ ID NO: 40488 - DNA, 20 bp, synthetic construct
  misc_feature 1..20: note = Description of Artificial Sequence: Synthetic oligonucleotide
  misc_feature 1..20: note = Target: SCN10A; (+) strand; PAM type: NRG; PAM sequence: TAG
  source 1..20: mol_type = other DNA
aagaaatatctattctagtt

SEQ ID NO: 40489 - DNA, 20 bp, synthetic construct
  misc_feature 1..20: note = Description of Artificial Sequence: Synthetic oligonucleotide
  misc_feature 1..20: note = Target: SCN10A; (+) strand; PAM type: NRG; PAM sequence: AAG
  source 1..20: mol_type = other DNA
atctattctagtttagctcc

SEQ ID NO: 40490 - DNA, 20 bp, synthetic construct
  misc_feature 1..20: note = Description of Artificial Sequence: Synthetic oligonucleotide
  misc_feature 1..20: note = Target: SCN10A; (+) strand; PAM type: NRG; PAM sequence: CGG
  source 1..20: mol_type = other DNA
ttctagtttagctccaagct

SEQ ID NO: 40491 - DNA, 20 bp, synthetic construct
  misc_feature 1..20: note = Description of Artificial Sequence: Synthetic oligonucleotide
  misc_feature 1..20: note = Target: SCN10A; (+) strand; PAM type: NRG; PAM sequence: TGG
  source 1..20: mol_type = other DNA
tttagctccaagctcggccc

SEQ ID NO: 40492 - DNA, 20 bp, synthetic construct
  misc_feature 1..20: note = Description of Artificial Sequence: Synthetic oligonucleotide
  misc_feature 1..20: note = Target: SCN10A; (+) strand; PAM type: NRG; PAM sequence: CAG
  source 1..20: mol_type = other DNA
gctcggccctggctttcaaa

SEQ ID NO: 40493 - DNA, 20 bp, synthetic construct
  misc_feature 1..20: note = Description of Artificial Sequence: Synthetic oligonucleotide
  misc_feature 1..20: note = Target: SCN10A; (+) strand; PAM type: NRG; PAM sequence: GAG
  source 1..20: mol_type = other DNA
ggctttcaaacagtctgcat

SEQ ID NO: 40494 - DNA, 20 bp, synthetic construct
  misc_feature 1..20: note = Description of Artificial Sequence: Synthetic oligonucleotide
  misc_feature 1..20: note = Target: SCN10A; (+) strand; PAM type: NRG; PAM sequence: CAG
  source 1..20: mol_type = other DNA
acagtctgcatgagtttttg

SEQ ID NO: 40495 - DNA, 20 bp, synthetic construct
  misc_feature 1..20: note = Description of Artificial Sequence: Synthetic oligonucleotide
  misc_feature 1..20: note = Target: SCN10A; (+) strand; PAM type: NRG; PAM sequence: AGG
  source 1..20: mol_type = other DNA
cagtctgcatgagtttttgc

SEQ ID NO: 40496 - DNA, 20 bp, synthetic construct
  misc_feature 1..20: note = Description of Artificial Sequence: Synthetic oligonucleotide
  misc_feature 1..20: note = Target: SCN10A; (+) strand; PAM type: NRG; PAM sequence: AAG
  source 1..20: mol_type = other DNA
ttttgcaggtatattccctt

SEQ ID NO: 40497 - DNA, 20 bp, synthetic construct
  misc_feature 1..20: note = Description of Artificial Sequence: Synthetic oligonucleotide
  misc_feature 1..20: note = Target: SCN10A; (+) strand; PAM type: NRG; PAM sequence: TAG
  source 1..20: mol_type = other DNA
gtatattcccttaagtttaa

SEQ ID NO: 40498 - DNA, 20 bp, synthetic construct
  misc_feature 1..20: note = Description of Artificial Sequence: Synthetic oligonucleotide
  misc_feature 1..20: note = Target: SCN10A; (+) strand; PAM type: NRG; PAM sequence: AAG
  source 1..20: mol_type = other DNA
gtttaatagctgttcctgct

SEQ ID NO: 40499 - DNA, 20 bp, synthetic construct
  misc_feature 1..20: note = Description of Artificial Sequence: Synthetic oligonucleotide
  misc_feature 1..20: note = Target: SCN10A; (+) strand; PAM type: NRG; PAM sequence: AAG
  source 1..20: mol_type = other DNA
aatagctgttcctgctaagc

SEQ ID NO: 40500 - DNA, 20 bp, synthetic construct
  misc_feature 1..20: note = Description of Artificial Sequence: Synthetic oligonucleotide
  misc_feature 1..20: note = Target: SCN10A; (+) strand; PAM type: NRG; PAM sequence: CGG
  source 1..20: mol_type = other DNA
gctaagcaagcctttctatt

SEQ ID NO: 40501 - DNA, 20 bp, synthetic construct
  misc_feature 1..20: note = Description of Artificial Sequence: Synthetic oligonucleotide
  misc_feature 1..20: note = Target: SCN10A; (+) strand; PAM type: NRG; PAM sequence: TGG
  source 1..20: mol_type = other DNA
aagcaagcctttctattcgg

SEQ ID NO: 40502 - DNA, 20 bp, synthetic construct
  misc_feature 1..20: note = Description of Artificial Sequence: Synthetic oligonucleotide
  misc_feature 1..20: note = Target: SCN10A; (+) strand; PAM type: NRG; PAM sequence: GGG
  source 1..20: mol_type = other DNA
agcaagcctttctattcggt

SEQ ID NO: 40503 - DNA, 20 bp, synthetic construct
  misc_feature 1..20: note = Description of Artificial Sequence: Synthetic oligonucleotide
  misc_feature 1..20: note = Target: SCN10A; (+) strand; PAM type: NRG; PAM sequence: CAG
  source 1..20: mol_type = other DNA
ctttctattcggtgggcatt

SEQ ID NO: 40504 - DNA, 20 bp, synthetic construct
  misc_feature 1..20: note = Description of Artificial Sequence: Synthetic oligonucleotide
  misc_feature 1..20: note = Target: SCN10A; (+) strand; PAM type: NRG; PAM sequence: AAG
  source 1..20: mol_type = other DNA
ggtgggcattcagccctccc

SEQ ID NO: 40505 - DNA, 20 bp, synthetic construct
  misc_feature 1..20: note = Description of Artificial Sequence: Synthetic oligonucleotide
  misc_feature 1..20: note = Target: SCN10A; (+) strand; PAM type: NRG; PAM sequence: CAG
  source 1..20: mol_type = other DNA
gccctcccaagatgaaccaa

SEQ ID NO: 40506 - DNA, 20 bp, synthetic construct
  misc_feature 1..20: note = Description of Artificial Sequence: Synthetic oligonucleotide
  misc_feature 1..20: note = Target: SCN10A; (+) strand; PAM type: NRG; PAM sequence: TGG
  source 1..20: mol_type = other DNA
gatgaaccaacagcgatatt

SEQ ID NO: 40507 - DNA, 20 bp, synthetic construct
  misc_feature 1..20: note = Description of Artificial Sequence: Synthetic oligonucleotide
  misc_feature 1..20: note = Target: SCN10A; (+) strand; PAM type: NRG; PAM sequence: GAG
  source 1..20: mol_type = other DNA
tttttttttttttttttttt

SEQ ID NO: 40508 - DNA, 20 bp, synthetic construct
  misc_feature 1..20: note = Description of Artificial Sequence: Synthetic oligonucleotide
  misc_feature 1..20: note = Target: SCN10A; (+) strand; PAM type: NRG; PAM sequence: AAG
  source 1..20: mol_type = other DNA
tttttttttttttttgagac

SEQ ID NO: 40509 - DNA, 20 bp, synthetic construct
  misc_feature 1..20: note = Description of Artificial Sequence: Synthetic oligonucleotide
  misc_feature 1..20: note = Target: SCN10A; (+) strand; PAM type: NRG; PAM sequence: CAG
  source 1..20: mol_type = other DNA
caagttctcactctgttgtc

SEQ ID NO: 40510 - DNA, 20 bp, synthetic construct
  misc_feature 1..20: note = Description of Artificial Sequence: Synthetic oligonucleotide
  misc_feature 1..20: note = Target: SCN10A; (+) strand; PAM type: NRG; PAM sequence: AGG
  source 1..20: mol_type = other DNA
aagttctcactctgttgtcc

SEQ ID NO: 40511 - DNA, 20 bp, synthetic construct
  misc_feature 1..20: note = Description of Artificial Sequence: Synthetic oligonucleotide
  misc_feature 1..20: note = Target: SCN10A; (+) strand; PAM type: NRG; PAM sequence: TGG
  source 1..20: mol_type = other DNA
tctcactctgttgtccaggc

SEQ ID NO: 40512 - DNA, 20 bp, synthetic construct
  misc_feature 1..20: note = Description of Artificial Sequence: Synthetic oligonucleotide
  misc_feature 1..20: note = Target: SCN10A; (+) strand; PAM type: NRG; PAM sequence: GAG
  source 1..20: mol_type = other DNA
tcactctgttgtccaggctg

SEQ ID NO: 40513 - DNA, 20 bp, synthetic construct
  misc_feature 1..20: note = Description of Artificial Sequence: Synthetic oligonucleotide
  misc_feature 1..20: note = Target: SCN10A; (+) strand; PAM type: NRG; PAM sequence: CAG
  source 1..20: mol_type = other DNA
ctgttgtccaggctggagtg

SEQ ID NO: 40514 - DNA, 20 bp, synthetic construct
  misc_feature 1..20: note = Description of Artificial Sequence: Synthetic oligonucleotide
  misc_feature 1..20: note = Target: SCN10A; (+) strand; PAM type: NRG; PAM sequence: TGG
  source 1..20: mol_type = other DNA
ttgtccaggctggagtgcag

SEQ ID NO: 40515 - DNA, 20 bp, synthetic construct
  misc_feature 1..20: note = Description of Artificial Sequence: Synthetic oligonucleotide
  misc_feature 1..20: note = Target: SCN10A; (+) strand; PAM type: NRG; PAM sequence: CAG
  source 1..20: mol_type = other DNA
ggagtgcagtggcacaatca

SEQ ID NO: 40516 - DNA, 20 bp, synthetic construct
  misc_feature 1..20: note = Description of Artificial Sequence: Synthetic oligonucleotide
  misc_feature 1..20: note = Target: SCN10A; (+) strand; PAM type: NRG; PAM sequence: CAG
  source 1..20: mol_type = other DNA
ggcacaatcacagctcattg

SEQ ID NO: 40517 - DNA, 20 bp, synthetic construct
  misc_feature 1..20: note = Description of Artificial Sequence: Synthetic oligonucleotide
  misc_feature 1..20: note = Target: SCN10A; (+) strand; PAM type: NRG; PAM sequence: AAG
  source 1..20: mol_type = other DNA
agccttgacctcccatgttc

SEQ ID NO: 40518 - DNA, 20 bp, synthetic construct
  misc_feature 1..20: note = Description of Artificial Sequence: Synthetic oligonucleotide
  misc_feature 1..20: note = Target: SCN10A; (+) strand; PAM type: NRG; PAM sequence: CAG
  source 1..20: mol_type = other DNA
ttcaagtgatcctcccacct

SEQ ID NO: 40519 - DNA, 20 bp, synthetic construct
  misc_feature 1..20: note = Description of Artificial Sequence: Synthetic oligonucleotide
  misc_feature 1..20: note = Target: SCN10A; (+) strand; PAM type: NRG; PAM sequence: AAG
  source 1..20: mol_type = other DNA
tcctcccacctcagcctccc

SEQ ID NO: 40520 - DNA, 20 bp, synthetic construct
  misc_feature 1..20: note = Description of Artificial Sequence: Synthetic oligonucleotide
  misc_feature 1..20: note = Target: SCN10A; (+) strand; PAM type: NRG; PAM sequence: TAG
  source 1..20: mol_type = other DNA
tcccacctcagcctcccaag

SEQ ID NO: 40521 - DNA, 20 bp, synthetic construct
  misc_feature 1..20: note = Description of Artificial Sequence: Synthetic oligonucleotide
  misc_feature 1..20: note = Target: SCN10A; (+) strand; PAM type: NRG; PAM sequence: TGG
  source 1..20: mol_type = other DNA
cacctcagcctcccaagtag

SEQ ID NO: 40522 - DNA, 20 bp, synthetic construct
  misc_feature 1..20: note = Description of Artificial Sequence: Synthetic oligonucleotide
  misc_feature 1..20: note = Target: SCN10A; (+) strand; PAM type: NRG; PAM sequence: CAG
  source 1..20: mol_type = other DNA
cctcccaagtagtggaacta

SEQ ID NO: 40523 - DNA, 20 bp, synthetic construct
  misc_feature 1..20: note = Description of Artificial Sequence: Synthetic oligonucleotide
  misc_feature 1..20: note = Target: SCN10A; (+) strand; PAM type: NRG; PAM sequence: AGG
  source 1..20: mol_type = other DNA
ctcccaagtagtggaactac

SEQ ID NO: 40524 - DNA, 20 bp, synthetic construct
  misc_feature 1..20: note = Description of Artificial Sequence: Synthetic oligonucleotide
  misc_feature 1..20: note = Target: SCN10A; (+) strand; PAM type: NRG; PAM sequence: TGG
  source 1..20: mol_type = other DNA
caggtatgtgccaccacgcc

SEQ ID NO: 40525 - DNA, 20 bp, synthetic construct
  misc_feature 1..20: note = Description of Artificial Sequence: Synthetic oligonucleotide
  misc_feature 1..20: note = Target: SCN10A; (+) strand; PAM type: NRG; PAM sequence: TGG
  source 1..20: mol_type = other DNA
gctaatcttcatatttttga

SEQ ID NO: 40526 - DNA, 20 bp, synthetic construct
  misc_feature 1..20: note = Description of Artificial Sequence: Synthetic oligonucleotide
  misc_feature 1..20: note = Target: SCN10A; (+) strand; PAM type: NRG; PAM sequence: GGG
  source 1..20: mol_type = other DNA
ctaatcttcatatttttgat

SEQ ID NO: 40527 - DNA, 20 bp, synthetic construct
  misc_feature 1..20: note = Description of Artificial Sequence: Synthetic oligonucleotide
  misc_feature 1..20: note = Target: SCN10A; (+) strand; PAM type: NRG; PAM sequence: GGG
  source 1..20: mol_type = other DNA
taatcttcatatttttgatg

SEQ ID NO: 40528 - DNA, 20 bp, synthetic construct
  misc_feature 1..20: note = Description of Artificial Sequence: Synthetic oligonucleotide
  misc_feature 1..20: note = Target: SCN10A; (+) strand; PAM type: NRG; PAM sequence: CAG
  source 1..20: mol_type = other DNA
tggggtttttccatgttccc

SEQ ID NO: 40529 - DNA, 20 bp, synthetic construct
  misc_feature 1..20: note = Description of Artificial Sequence: Synthetic oligonucleotide
  misc_feature 1..20: note = Target: SCN10A; (+) strand; PAM type: NRG; PAM sequence: AGG
  source 1..20: mol_type = other DNA
ggggtttttccatgttcccc

SEQ ID NO: 40530 - DNA, 20 bp, synthetic construct
  misc_feature 1..20: note = Description of Artificial Sequence: Synthetic oligonucleotide
  misc_feature 1..20: note = Target: SCN10A; (+) strand; PAM type: NRG; PAM sequence: TGG
  source 1..20: mol_type = other DNA
tttttccatgttccccaggc

SEQ ID NO: 40531 - DNA, 20 bp, synthetic construct
  misc_feature 1..20: note = Description of Artificial Sequence: Synthetic oligonucleotide
  misc_feature 1..20: note = Target: SCN10A; (-) strand; PAM type: YTN; PAM sequence: CTG
  source 1..20: mol_type = other DNA
gccatagaataaaattcaaa

SEQ ID NO: 40532 - DNA, 20 bp, synthetic construct
  misc_feature 1..20: note = Description of Artificial Sequence: Synthetic oligonucleotide
  misc_feature 1..20: note = Target: SCN10A; (-) strand; PAM type: YTN; PAM sequence: TTA
  source 1..20: mol_type = other DNA
caaaaatagtccgtatgcct

SEQ ID NO: 40533 - DNA, 20 bp, synthetic construct
  misc_feature 1..20: note = Description of Artificial Sequence: Synthetic oligonucleotide
  misc_feature 1..20: note = Target: SCN10A; (-) strand; PAM type: YTN; PAM sequence: TTT
  source 1..20: mol_type = other DNA
acaaaaatagtccgtatgcc

SEQ ID NO: 40534 - DNA, 20 bp, synthetic construct
  misc_feature 1..20: note = Description of Artificial Sequence: Synthetic oligonucleotide
  misc_feature 1..20: note = Target: SCN10A; (-) strand; PAM type: YTN; PAM sequence: TTA
  source 1..20: mol_type = other DNA
ccaaaagggtacaaatacaa

SEQ ID NO: 40535 - DNA, 20 bp, synthetic construct
  misc_feature 1..20: note = Description of Artificial Sequence: Synthetic oligonucleotide
  misc_feature 1..20: note = Target: SCN10A; (-) strand; PAM type: YTN; PAM sequence: CTA
  source 1..20: mol_type = other DNA
aggttaccaaaagggtacaa

SEQ ID NO: 40536 - DNA, 20 bp, synthetic construct
  misc_feature 1..20: note = Description of Artificial Sequence: Synthetic oligonucleotide
  misc_feature 1..20: note = Target: SCN10A; (-) strand; PAM type: YTN; PAM sequence: TTA
  source 1..20: mol_type = other DNA
cagaaagccacacaaaacct

SEQ ID NO: 40537 - DNA, 20 bp, synthetic construct
  misc_feature 1..20: note = Description of Artificial Sequence: Synthetic oligonucleotide
  misc_feature 1..20: note = Target: SCN10A; (-) strand; PAM type: YTN; PAM sequence: TTT
  source 1..20: mol_type = other DNA
acagaaagccacacaaaacc

SEQ ID NO: 40538 - DNA, 20 bp, synthetic construct
  misc_feature 1..20: note = Description of Artificial Sequence: Synthetic oligonucleotide
  misc_feature 1..20: note = Target: SCN10A; (-) strand; PAM type: YTN; PAM sequence: CTG
  source 1..20: mol_type = other DNA
tttacagaaagccacacaaa

SEQ ID NO: 40539 - DNA, 20 bp, synthetic construct
  misc_feature 1..20: note = Description of Artificial Sequence: Synthetic oligonucleotide
  misc_feature 1..20: note = Target: SCN10A; (-) strand; PAM type: YTN; PAM sequence: TTC
  source 1..20: mol_type = other DNA
tgtttacagaaagccacaca

SEQ ID NO: 40540 - DNA, 20 bp, synthetic construct
  misc_feature 1..20: note = Description of Artificial Sequence: Synthetic oligonucleotide
  misc_feature 1..20: note = Target: SCN10A; (-) strand; PAM type: YTN; PAM sequence: TTC
  source 1..20: mol_type = other DNA
aaataaattctgtttacaga

SEQ ID NO: 40541 - DNA, 20 bp, synthetic construct
  misc_feature 1..20: note = Description of Artificial Sequence: Synthetic oligonucleotide
  misc_feature 1..20: note = Target: SCN10A; (-) strand; PAM type: YTN; PAM sequence: TTA
  source 1..20: mol_type = other DNA
aaaattcaaataaattctgt

SEQ ID NO: 40542 - DNA, 20 bp, synthetic construct
  misc_feature 1..20: note = Description of Artificial Sequence: Synthetic oligonucleotide
  misc_feature 1..20: note = Target: SCN10A; (-) strand; PAM type: YTN; PAM sequence: TTT
  source 1..20: mol_type = other DNA
aaaaattcaaataaattctg

SEQ ID NO: 40543 - DNA, 20 bp, synthetic construct
  misc_feature 1..20: note = Description of Artificial Sequence: Synthetic oligonucleotide
  misc_feature 1..20: note = Target: SCN10A; (-) strand; PAM type: YTN; PAM sequence: TTT
  source 1..20: mol_type = other DNA
taaaaattcaaataaattct

SEQ ID NO: 40544 - DNA, 20 bp, synthetic construct
  misc_feature 1..20: note = Description of Artificial Sequence: Synthetic oligonucleotide
  misc_feature 1..20: note = Target: SCN10A; (-) strand; PAM type: YTN; PAM sequence: TTT
  source 1..20: mol_type = other DNA
ttaaaaattcaaataaattc

SEQ ID NO: 40545 - DNA, 20 bp, synthetic construct
  misc_feature 1..20: note = Description of Artificial Sequence: Synthetic oligonucleotide
  misc_feature 1..20: note = Target: SCN10A; (-) strand; PAM type: YTN; PAM sequence: CTG
  source 1..20: mol_type = other DNA
ggaaaaagagtgtcagtcaa

SEQ ID NO: 40546 - DNA, 20 bp, synthetic construct
  misc_feature 1..20: note = Description of Artificial Sequence: Synthetic oligonucleotide
  misc_feature 1..20: note = Target: SCN10A; (-) strand; PAM type: YTN; PAM sequence: CTC
  source 1..20: mol_type = other DNA
tgggaaaaagagtgtcagtc

SEQ ID NO: 40547 - DNA, 20 bp, synthetic construct
  misc_feature 1..20: note = Description of Artificial Sequence: Synthetic oligonucleotide
  misc_feature 1..20: note = Target: SCN10A; (-) strand; PAM type: YTN; PAM sequence: TTA
  source 1..20: mol_type = other DNA
aatggactctgggaaaaaga

SEQ ID NO: 40548 - DNA, 20 bp, synthetic construct
  misc_feature 1..20: note = Description of Artificial Sequence: Synthetic oligonucleotide
  misc_feature 1..20: note = Target: SCN10A; (-) strand; PAM type: YTN; PAM sequence: TTT
  source 1..20: mol_type = other DNA
aaatggactctgggaaaaag

SEQ ID NO: 40549 - DNA, 20 bp, synthetic construct
  misc_feature 1..20: note = Description of Artificial Sequence: Synthetic oligonucleotide
  misc_feature 1..20: note = Target: SCN10A; (-) strand; PAM type: YTN; PAM sequence: TTA
  source 1..20: mol_type = other DNA
aatttaaatggactctggga

SEQ ID NO: 40550 - DNA, 20 bp, synthetic construct
  misc_feature 1..20: note = Description of Artificial Sequence: Synthetic oligonucleotide
  misc_feature 1..20: note = Target: SCN10A; (-) strand; PAM type: YTN; PAM sequence: TTA
  source 1..20: mol_type = other DNA
cattaaatttaaatggactc

SEQ ID NO: 40551 - DNA, 20 bp, synthetic construct
  misc_feature 1..20: note = Description of Artificial Sequence: Synthetic oligonucleotide
  misc_feature 1..20: note = Target: SCN10A; (-) strand; PAM type: YTN; PAM sequence: TTC
  source 1..20: mol_type = other DNA
ataaattacattaaatttaa

SEQ ID NO: 40552 - DNA, 20 bp, synthetic construct
  misc_feature 1..20: note = Description of Artificial Sequence: Synthetic oligonucleotide
  misc_feature 1..20: note = Target: SCN10A; (-) strand; PAM type: YTN; PAM sequence: TTC
  source 1..20: mol_type = other DNA
aaaaacaaaaatattcataa

SEQ ID NO: 40553 - DNA, 20 bp, synthetic construct
  misc_feature 1..20: note = Description of Artificial Sequence: Synthetic oligonucleotide
  misc_feature 1..20: note = Target: SCN10A; (-) strand; PAM type: YTN; PAM sequence: TTA
  source 1..20: mol_type = other DNA
aaaaaacccgggatatagag

SEQ ID NO: 40554 - DNA, 20 bp, synthetic construct
  misc_feature 1..20: note = Description of Artificial Sequence: Synthetic oligonucleotide
  misc_feature 1..20: note = Target: SCN10A; (-) strand; PAM type: YTN; PAM sequence: TTA
  source 1..20: mol_type = other DNA
aagtataataataattaaaa

SEQ ID NO: 40555 - DNA, 20 bp, synthetic construct
  misc_feature 1..20: note = Description of Artificial Sequence: Synthetic oligonucleotide
  misc_feature 1..20: note = Target: SCN10A; (-) strand; PAM type: YTN; PAM sequence: CTT
  source 1..20: mol_type = other DNA
aaagtataataataattaaa

SEQ ID NO: 40556 - DNA, 20 bp, synthetic construct
  misc_feature 1..20: note = Description of Artificial Sequence: Synthetic oligonucleotide
  misc_feature 1..20: note = Target: SCN10A; (-) strand; PAM type: YTN; PAM sequence: CTA
  source 1..20: mol_type = other DNA
aaacttaaagtataataata

SEQ ID NO: 40557 - DNA, 20 bp, synthetic construct
  misc_feature 1..20: note = Description of Artificial Sequence: Synthetic oligonucleotide
  misc_feature 1..20: note = Target: SCN10A; (-) strand; PAM type: YTN; PAM sequence: CTC
  source 1..20: mol_type = other DNA
atgtatcctaaaacttaaag

SEQ ID NO: 40558 - DNA, 20 bp, synthetic construct
  misc_feature 1..20: note = Description of Artificial Sequence: Synthetic oligonucleotide
  misc_feature 1..20: note = Target: SCN10A; (-) strand; PAM type: YTN; PAM sequence: TTG
  source 1..20: mol_type = other DNA
tgctcatgtatcctaaaact

SEQ ID NO: 40559 - DNA, 20 bp, synthetic construct
  misc_feature 1..20: note = Description of Artificial Sequence: Synthetic oligonucleotide
  misc_feature 1..20: note = Target: SCN10A; (-) strand; PAM type: YTN; PAM sequence: CTG
  source 1..20: mol_type = other DNA
cacgttgtgctcatgtatcc

SEQ ID NO: 40560 - DNA, 20 bp, synthetic construct
  misc_feature 1..20: note = Description of Artificial Sequence: Synthetic oligonucleotide
  misc_feature 1..20: note = Target: SCN10A; (-) strand; PAM type: YTN; PAM sequence: TTA
  source 1..20: mol_type = other DNA
atgggtgcagcacaccaaca

SEQ ID NO: 40561 - DNA, 20 bp, synthetic construct
  misc_feature 1..20: note = Description of Artificial Sequence: Synthetic oligonucleotide
  misc_feature 1..20: note = Target: SCN10A; (-) strand; PAM type: YTN; PAM sequence: CTA
  source 1..20: mol_type = other DNA
atgtaaatgacaagttaatg

SEQ ID NO: 40562 - DNA, 20 bp, synthetic construct
  misc_feature 1..20: note = Description of Artificial Sequence: Synthetic oligonucleotide
  misc_feature 1..20: note = Target: SCN10A; (-) strand; PAM type: YTN; PAM sequence: TTA
  source 1..20: mol_type = other DNA
ggagatatacctaatgtaaa

SEQ ID NO: 40563 - DNA, 20 bp, synthetic construct
  misc_feature 1..20: note = Description of Artificial Sequence: Synthetic oligonucleotide
  misc_feature 1..20: note = Target: SCN10A; (-) strand; PAM type: YTN; PAM sequence: TTG
  source 1..20: mol_type = other DNA
tggggtggagggagggggga

SEQ ID NO: 40564 - DNA, 20 bp, synthetic construct
  misc_feature 1..20: note = Description of Artificial Sequence: Synthetic oligonucleotide
  misc_feature 1..20: note = Target: SCN10A; (-) strand; PAM type: YTN; PAM sequence: TTG
  source 1..20: mol_type = other DNA
aacaataagaacacatggac

SEQ ID NO: 40565 - DNA, 20 bp, synthetic construct
  misc_feature 1..20: note = Description of Artificial Sequence: Synthetic oligonucleotide
  misc_feature 1..20: note = Target: SCN10A; (-) strand; PAM type: YTN; PAM sequence: CTC
  source 1..20: mol_type = other DNA
ataggtgggaattgaacaat

SEQ ID NO: 40566 - DNA, 20 bp, synthetic construct
  misc_feature 1..20: note = Description of Artificial Sequence: Synthetic oligonucleotide
  misc_feature 1..20: note = Target: SCN10A; (-) strand; PAM type: YTN; PAM sequence: CTC
  source 1..20: mol_type = other DNA
actcataggtgggaattgaa

SEQ ID NO: 40567 - DNA, 20 bp, synthetic construct
  misc_feature 1..20: note = Description of Artificial Sequence: Synthetic oligonucleotide
  misc_feature 1..20: note = Target: SCN10A; (-) strand; PAM type: YTN; PAM sequence: TTC
  source 1..20: mol_type = other DNA
tcactcataggtgggaattg

SEQ ID NO: 40568 - DNA, 20 bp, synthetic construct
  misc_feature 1..20: note = Description of Artificial Sequence: Synthetic oligonucleotide
  misc_feature 1..20: note = Target: SCN10A; (-) strand; PAM type: YTN; PAM sequence: CTA
  source 1..20: mol_type = other DNA
tcgcaaggacaaaaaaaacc

SEQ ID NO: 40569 - DNA, 20 bp, synthetic construct
  misc_feature 1..20: note = Description of Artificial Sequence: Synthetic oligonucleotide
  misc_feature 1..20: note = Target: SCN10A; (-) strand; PAM type: YTN; PAM sequence: CTC
  source 1..20: mol_type = other DNA
agcaaactatcgcaaggaca

SEQ ID NO: 40570 - DNA, 20 bp, synthetic construct
  misc_feature 1..20: note = Description of Artificial Sequence: Synthetic oligonucleotide
  misc_feature 1..20: note = Target: SCN10A; (-) strand; PAM type: YTN; PAM sequence: TTC
  source 1..20: mol_type = other DNA
tcagcaaactatcgcaagga

SEQ ID NO: 40571 - DNA, 20 bp, synthetic construct
  misc_feature 1..20: note = Description of Artificial Sequence: Synthetic oligonucleotide
  misc_feature 1..20: note = Target: SCN10A; (-) strand; PAM type: YTN; PAM sequence: CTG
  source 1..20: mol_type = other DNA
gaaaccatcattctcagcaa

SEQ ID NO: 40572 - DNA, 20 bp, synthetic construct
  misc_feature 1..20: note = Description of Artificial Sequence: Synthetic oligonucleotide
  misc_feature 1..20: note = Target: SCN10A; (-) strand; PAM type: YTN; PAM sequence: TTG
  source 1..20: mol_type = other DNA
cagggacatggatgaagctg

SEQ ID NO: 40573 - DNA, 20 bp, synthetic construct
  misc_feature 1..20: note = Description of Artificial Sequence: Synthetic oligonucleotide
  misc_feature 1..20: note = Target: SCN10A; (-) strand; PAM type: YTN; PAM sequence: TTT
  source 1..20: mol_type = other DNA
gcagggacatggatgaagct

SEQ ID NO: 40574 - DNA, 20 bp, synthetic construct
  misc_feature 1..20: note = Description of Artificial Sequence: Synthetic oligonucleotide
  misc_feature 1..20: note = Target: SCN10A; (-) strand; PAM type: YTN; PAM sequence: CTT
  source 1..20: mol_type = other DNA
tgcagggacatggatgaagc

SEQ ID NO: 40575 - DNA, 20 bp, synthetic construct
  misc_feature 1..20: note = Description of Artificial Sequence: Synthetic oligonucleotide
  misc_feature 1..20: note = Target: SCN10A; (-) strand; PAM type: YTN; PAM sequence: TTC
  source 1..20: mol_type = other DNA
atgtcctttgcagggacatg

SEQ ID NO: 40576 - DNA, 20 bp, synthetic construct
  misc_feature 1..20: note = Description of Artificial Sequence: Synthetic oligonucleotide
  misc_feature 1..20: note = Target: SCN10A; (-) strand; PAM type: YTN; PAM sequence: CTA
  source 1..20: mol_type = other DNA
tgcagccataaaaaatgatg

SEQ ID NO: 40577 - DNA, 20 bp, synthetic construct
  misc_feature 1..20: note = Description of Artificial Sequence: Synthetic oligonucleotide
  misc_feature 1..20: note = Target: SCN10A; (-) strand; PAM type: YTN; PAM sequence: TTA
  source 1..20: mol_type = other DNA
agaaaatgtggcacatatac

SEQ ID NO: 40578 - DNA, 20 bp, synthetic construct
  misc_feature 1..20: note = Description of Artificial Sequence: Synthetic oligonucleotide
  misc_feature 1..20: note = Target: SCN10A; (-) strand; PAM type: YTN; PAM sequence: CTG
  source 1..20: mol_type = other DNA
gattaagaaaatgtggcaca

SEQ ID NO: 40579 - DNA, 20 bp, synthetic construct
  misc_feature 1..20: note = Description of Artificial Sequence: Synthetic oligonucleotide
  misc_feature 1..20: note = Target: SCN10A; (-) strand; PAM type: YTN; PAM sequence: TTG
  source 1..20: mol_type = other DNA
gaaccaacccaaatgtccaa

SEQ ID NO: 40580 - DNA, 20 bp, synthetic construct
  misc_feature 1..20: note = Description of Artificial Sequence: Synthetic oligonucleotide
  misc_feature 1..20: note = Target: SCN10A; (-) strand; PAM type: YTN; PAM sequence: CTT
  source 1..20: mol_type = other DNA
ggaaccaacccaaatgtcca

SEQ ID NO: 40581 - DNA, 20 bp, synthetic construct
  misc_feature 1..20: note = Description of Artificial Sequence: Synthetic oligonucleotide
  misc_feature 1..20: note = Target: SCN10A; (-) strand; PAM type: YTN; PAM sequence: TTC
  source 1..20: mol_type = other DNA
acaatagcaaagacttggaa

SEQ ID NO: 40582 - DNA, 20 bp, synthetic construct
  misc_feature 1..20: note = Description of Artificial Sequence: Synthetic oligonucleotide
  misc_feature 1..20: note = Target: SCN10A; (-) strand; PAM type: YTN; PAM sequence: CTA
  source 1..20: mol_type = other DNA
ttcacaatagcaaagacttg

SEQ ID NO: 40583 - DNA, 20 bp, synthetic construct
  misc_feature 1..20: note = Description of Artificial Sequence: Synthetic oligonucleotide
  misc_feature 1..20: note = Target: SCN10A; (-) strand; PAM type: YTN; PAM sequence: TTG
  source 1..20: mol_type = other DNA
tggcactattcacaatagca

SEQ ID NO: 40584 - DNA, 20 bp, synthetic construct
  misc_feature 1..20: note = Description of Artificial Sequence: Synthetic oligonucleotide
  misc_feature 1..20: note = Target: SCN10A; (-) strand; PAM type: YTN; PAM sequence: TTA
  source 1..20: mol_type = other DNA
ttgtggcactattcacaata

SEQ ID NO: 40585 - DNA, 20 bp, synthetic construct
  misc_feature 1..20: note = Description of Artificial Sequence: Synthetic oligonucleotide
  misc_feature 1..20: note = Target: SCN10A; (-) strand; PAM type: YTN; PAM sequence: TTT
  source 1..20: mol_type = other DNA
attgtggcactattcacaat

SEQ ID NO: 40586 - DNA, 20 bp, synthetic construct
  misc_feature 1..20: note = Description of Artificial Sequence: Synthetic oligonucleotide
  misc_feature 1..20: note = Target: SCN10A; (-) strand; PAM type: YTN; PAM sequence: CTA
  source 1..20: mol_type = other DNA
taaagacacatgcacacgta

SEQ ID NO: 40587 - DNA, 20 bp, synthetic construct
  misc_feature 1..20: note = Description of Artificial Sequence: Synthetic oligonucleotide
  misc_feature 1..20: note = Target: SCN10A; (-) strand; PAM type: YTN; PAM sequence: CTG
  source 1..20: mol_type = other DNA
ctataaagacacatgcacac

SEQ ID NO: 40588 - DNA, 20 bp, synthetic construct
  misc_feature 1..20: note = Description of Artificial Sequence: Synthetic oligonucleotide
  misc_feature 1..20: note = Target: SCN10A; (-) strand; PAM type: YTN; PAM sequence: TTA
  source 1..20: mol_type = other DNA
taaatcatactgctataaag

SEQ ID NO: 40589 - DNA, 20 bp, synthetic construct
  misc_feature 1..20: note = Description of Artificial Sequence: Synthetic oligonucleotide
  misc_feature 1..20: note = Target: SCN10A; (-) strand; PAM type: YTN; PAM sequence: CTG
  source 1..20: mol_type = other DNA
ggtatatacccaaaggatta

SEQ ID NO: 40590 - DNA, 20 bp, synthetic construct
  misc_feature 1..20: note = Description of Artificial Sequence: Synthetic oligonucleotide
  misc_feature 1..20: note = Target: SCN10A; (-) strand; PAM type: YTN; PAM sequence: TTA
  source 1..20: mol_type = other DNA
ctgggtatatacccaaagga

SEQ ID NO: 40591 - DNA, 20 bp, synthetic construct
  misc_feature 1..20: note = Description of Artificial Sequence: Synthetic oligonucleotide
  misc_feature 1..20: note = Target: SCN10A; (-) strand; PAM type: YTN; PAM sequence: TTG
  source 1..20: mol_type = other DNA
acccagccatcccattactg

SEQ ID NO: 40592 - DNA, 20 bp, synthetic construct
  misc_feature 1..20: note = Description of Artificial Sequence: Synthetic oligonucleotide
  misc_feature 1..20: note = Target: SCN10A; (-) strand; PAM type: YTN; PAM sequence: TTT
  source 1..20: mol_type = other DNA
gacccagccatcccattact

SEQ ID NO: 40593 - DNA, 20 bp, synthetic construct
  misc_feature 1..20: note = Description of Artificial Sequence: Synthetic oligonucleotide
  misc_feature 1..20: note = Target: SCN10A; (-) strand; PAM type: YTN; PAM sequence: CTA
  source 1..20: mol_type = other DNA
gaaccagaaataccatttga

SEQ ID NO: 40594 - DNA, 20 bp, synthetic construct
  misc_feature 1..20: note = Description of Artificial Sequence: Synthetic oligonucleotide
  misc_feature 1..20: note = Target: SCN10A; (-) strand; PAM type: YTN; PAM sequence: CTC
  source 1..20: mol_type = other DNA
agggatctagaaccagaaat

SEQ ID NO: 40595 - DNA, 20 bp, synthetic construct
  misc_feature 1..20: note = Description of Artificial Sequence: Synthetic oligonucleotide
  misc_feature 1..20: note = Target: SCN10A; (-) strand; PAM type: YTN; PAM sequence: TTC
  source 1..20: mol_type = other DNA
ctcagggatctagaaccaga

SEQ ID NO: 40596 - DNA, 20 bp, synthetic construct
  misc_feature 1..20: note = Description of Artificial Sequence: Synthetic oligonucleotide
  misc_feature 1..20: note = Target: SCN10A; (-) strand; PAM type: YTN; PAM sequence: TTG
  source 1..20: mol_type = other DNA
tggaagtcggtgtggcaatt

SEQ ID NO: 40597 - DNA, 20 bp, synthetic construct
  misc_feature 1..20: note = Description of Artificial Sequence: Synthetic oligonucleotide
  misc_feature 1..20: note = Target: SCN10A; (-) strand; PAM type: YTN; PAM sequence: TTC
  source 1..20: mol_type = other DNA
aatcattgtggaagtcggtg

SEQ ID NO: 40598 - DNA, 20 bp, synthetic construct
  misc_feature 1..20: note = Description of Artificial Sequence: Synthetic oligonucleotide
  misc_feature 1..20: note = Target: SCN10A; (-) strand; PAM type: YTN; PAM sequence: CTA
  source 1..20: mol_type = other DNA
gttcaatcattgtggaagtc

SEQ ID NO: 40599 - DNA, 20 bp, synthetic construct
  misc_feature 1..20: note = Description of Artificial Sequence: Synthetic oligonucleotide
  misc_feature 1..20: note = Target: SCN10A; (-) strand; PAM type: YTN; PAM sequence: CTG
  source 1..20: mol_type = other DNA
taaactagttcaatcattgt

SEQ ID NO: 40600 - DNA, 20 bp, synthetic construct
  misc_feature 1..20: note = Description of Artificial Sequence: Synthetic oligonucleotide
  misc_feature 1..20: note = Target: SCN10A; (-) strand; PAM type: YTN; PAM sequence: TTG
  source 1..20: mol_type = other DNA
gtgggtctgtaaactagttc

SEQ ID NO: 40601 - DNA, 20 bp, synthetic construct
  misc_feature 1..20: note = Description of Artificial Sequence: Synthetic oligonucleotide
  misc_feature 1..20: note = Target: SCN10A; (-) strand; PAM type: YTN; PAM sequence: CTG
  source 1..20: mol_type = other DNA
ttggtgggtctgtaaactag

SEQ ID NO: 40602 - DNA, 20 bp, synthetic construct
  misc_feature 1..20: note = Description of Artificial Sequence: Synthetic oligonucleotide
  misc_feature 1..20: note = Target: SCN10A; (-) strand; PAM type: YTN; PAM sequence: TTA
  source 1..20: mol_type = other DNA
cactgttggtgggtctgtaa

SEQ ID NO: 40603 - DNA, 20 bp, synthetic construct
  misc_feature 1..20: note = Description of Artificial Sequence: Synthetic oligonucleotide
  misc_feature 1..20: note = Target: SCN10A; (-) strand; PAM type: YTN; PAM sequence: TTT
  source 1..20: mol_type = other DNA
acactgttggtgggtctgta

SEQ ID NO: 40604 - DNA, 20 bp, synthetic construct
  misc_feature 1..20: note = Description of Artificial Sequence: Synthetic oligonucleotide
  misc_feature 1..20: note = Target: SCN10A; (-) strand; PAM type: YTN; PAM sequence: TTT
  source 1..20: mol_type = other DNA
tacactgttggtgggtctgt

SEQ ID NO: 40605 - DNA, 20 bp, synthetic construct
  misc_feature 1..20: note = Description of Artificial Sequence: Synthetic oligonucleotide
  misc_feature 1..20: note = Target: SCN10A; (-) strand; PAM type: YTN; PAM sequence: CTT
  source 1..20: mol_type = other DNA
ttacactgttggtgggtctg

SEQ ID NO: 40606 - DNA, 20 bp, synthetic construct
  misc_feature 1..20: note = Description of Artificial Sequence: Synthetic oligonucleotide
  misc_feature 1..20: note = Target: SCN10A; (-) strand; PAM type: YTN; PAM sequence: CTG
  source 1..20: mol_type = other DNA
gagaggatgtggagaaatag

SEQ ID NO: 40607 - DNA, 20 bp, synthetic construct
  misc_feature 1..20: note = Description of Artificial Sequence: Synthetic oligonucleotide
  misc_feature 1..20: note = Target: SCN10A; (-) strand; PAM type: YTN; PAM sequence: TTA
  source 1..20: mol_type = other DNA
aaaagtcaggaaacaacagg

SEQ ID NO: 40608 - DNA, 20 bp, synthetic construct
  misc_feature 1..20: note = Description of Artificial Sequence: Synthetic oligonucleotide
  misc_feature 1..20: note = Target: SCN10A; (-) strand; PAM type: YTN; PAM sequence: TTA
  source 1..20: mol_type = other DNA
gaatggcgatcattaaaaag

SEQ ID NO: 40609 - DNA, 20 bp, synthetic construct
  misc_feature 1..20: note = Description of Artificial Sequence: Synthetic oligonucleotide
  misc_feature 1..20: note = Target: SCN10A; (-) strand; PAM type: YTN; PAM sequence: CTC
  source 1..20: mol_type = other DNA
acaccagttagaatggcgat

SEQ ID NO: 40610 - DNA, 20 bp, synthetic construct
  misc_feature 1..20: note = Description of Artificial Sequence: Synthetic oligonucleotide
  misc_feature 1..20: note = Target: SCN10A; (-) strand; PAM type: YTN; PAM sequence: CTG
  source 1..20: mol_type = other DNA
gccatcagagaaatgcaaat

SEQ ID NO: 40611 - DNA, 20 bp, synthetic construct
  misc_feature 1..20: note = Description of Artificial Sequence: Synthetic oligonucleotide
  misc_feature 1..20: note = Target: SCN10A; (-) strand; PAM type: YTN; PAM sequence: CTC
  source 1..20: mol_type = other DNA
atcatcactggccatcagag

SEQ ID NO: 40612 - DNA, 20 bp, synthetic construct
  misc_feature 1..20: note = Description of Artificial Sequence: Synthetic oligonucleotide
  misc_feature 1..20: note = Target: SCN10A; (-) strand; PAM type: YTN; PAM sequence: TTA
  source 1..20: mol_type = other DNA
tgcagccaaaaaacacatga

SEQ ID NO: 40613 - DNA, 20 bp, synthetic construct
  misc_feature 1..20: note = Description of Artificial Sequence: Synthetic oligonucleotide
  misc_feature 1..20: note = Target: SCN10A; (-) strand; PAM type: YTN; PAM sequence: TTT
  source 1..20: mol_type = other DNA
atgcagccaaaaaacacatg

SEQ ID NO: 40614 - DNA, 20 bp, synthetic construct
  misc_feature 1..20: note = Description of Artificial Sequence: Synthetic oligonucleotide
  misc_feature 1..20: note = Target: SCN10A; (-) strand; PAM type: YTN; PAM sequence: CTC
  source 1..20: mol_type = other DNA
aaaagaagacatttatgcag

SEQ ID NO: 40615 - DNA, 20 bp, synthetic construct
  misc_feature 1..20: note = Description of Artificial Sequence: Synthetic oligonucleotide
  misc_feature 1..20: note = Target: SCN10A; (-) strand; PAM type: YTN; PAM sequence: TTC
  source 1..20: mol_type = other DNA
tcaaaagaagacatttatgc

SEQ ID NO: 40616 - DNA, 20 bp, synthetic construct
  misc_feature 1..20: note = Description of Artificial Sequence: Synthetic oligonucleotide
  misc_feature 1..20: note = Target: SCN10A; (-) strand; PAM type: YTN; PAM sequence: CTT
  source 1..20: mol_type = other DNA
ctcaaaagaagacatttatg

SEQ ID NO: 40617 - DNA, 20 bp, synthetic construct
  misc_feature 1..20: note = Description of Artificial Sequence: Synthetic oligonucleotide
  misc_feature 1..20: note = Target: SCN10A; (-) strand; PAM type: YTN; PAM sequence: TTA
  source 1..20: mol_type = other DNA
caaggaaaaaaatcccatca

SEQ ID NO: 40618 - DNA, 20 bp, synthetic construct
  misc_feature 1..20: note = Description of Artificial Sequence: Synthetic oligonucleotide
  misc_feature 1..20: note = Target: SCN10A; (-) strand; PAM type: YTN; PAM sequence: TTT
  source 1..20: mol_type = other DNA
acaaggaaaaaaatcccatc

SEQ ID NO: 40619 - DNA, 20 bp, synthetic construct
  misc_feature 1..20: note = Description of Artificial Sequence: Synthetic oligonucleotide
  misc_feature 1..20: note = Target: SCN10A; (-) strand; PAM type: YTN; PAM sequence: CTC
  source 1..20: mol_type = other DNA
aaacaaatttacaaggaaaa

SEQ ID NO: 40620 - DNA, 20 bp, synthetic construct
  misc_feature 1..20: note = Description of Artificial Sequence: Synthetic oligonucleotide
  misc_feature 1..20: note = Target: SCN10A; (-) strand; PAM type: YTN; PAM sequence: CTA
  source 1..20: mol_type = other DNA
caatgaactcaaacaaattt

SEQ ID NO: 40621 - DNA, 20 bp, synthetic construct
  misc_feature 1..20: note = Description of Artificial Sequence: Synthetic oligonucleotide
  misc_feature 1..20: note = Target: SCN10A; (-) strand; PAM type: YTN; PAM sequence: CTA
  source 1..20: mol_type = other DNA
atatccagaatctacaatga

SEQ ID NO: 40622 - DNA, 20 bp, synthetic construct
  misc_feature 1..20: note = Description of Artificial Sequence: Synthetic oligonucleotide
  misc_feature 1..20: note = Target: SCN10A; (-) strand; PAM type: YTN; PAM sequence: CTG
  source 1..20: mol_type = other DNA
acgaagggctaatatccaga

SEQ ID NO: 40623 - DNA, 20 bp, synthetic construct
  misc_feature 1..20: note = Description of Artificial Sequence: Synthetic oligonucleotide
  misc_feature 1..20: note = Target: SCN10A; (-) strand; PAM type: YTN; PAM sequence: CTC
  source 1..20: mol_type = other DNA
atctgacgaagggctaatat

SEQ ID NO: 40624 - DNA, 20 bp, synthetic construct
  misc_feature 1..20: note = Description of Artificial Sequence: Synthetic oligonucleotide
  misc_feature 1..20: note = Target: SCN10A; (-) strand; PAM type: YTN; PAM sequence: CTA
  source 1..20: mol_type = other DNA
ctcatctgacgaagggctaa

SEQ ID NO: 40625 - DNA, 20 bp, synthetic construct
  misc_feature 1..20: note = Description of Artificial Sequence: Synthetic oligonucleotide
  misc_feature 1..20: note = Target: SCN10A; (-) strand; PAM type: YTN; PAM sequence: TTG
  source 1..20: mol_type = other DNA
caacctactcatctgacgaa

SEQ ID NO: 40626 - DNA, 20 bp, synthetic construct
  misc_feature 1..20: note = Description of Artificial Sequence: Synthetic oligonucleotide
  misc_feature 1..20: note = Target: SCN10A; (-) strand; PAM type: YTN; PAM sequence: TTT
  source 1..20: mol_type = other DNA
gcaacctactcatctgacga

SEQ ID NO: 40627 - DNA, 20 bp, synthetic construct
  misc_feature 1..20: note = Description of Artificial Sequence: Synthetic oligonucleotide
  misc_feature 1..20: note = Target: SCN10A; (-) strand; PAM type: YTN; PAM sequence: TTT
  source 1..20: mol_type = other DNA
tgcaacctactcatctgacg

SEQ ID NO: 40628 - DNA, 20 bp, synthetic construct
  misc_feature 1..20: note = Description of Artificial Sequence: Synthetic oligonucleotide
  misc_feature 1..20: note = Target: SCN10A; (-) strand; PAM type: YTN; PAM sequence: TTT
  source 1..20: mol_type = other DNA
ttgcaacctactcatctgac

SEQ ID NO: 40629 - DNA, 20 bp, synthetic construct
  misc_feature 1..20: note = Description of Artificial Sequence: Synthetic oligonucleotide
  misc_feature 1..20: note = Target: SCN10A; (-) strand; PAM type: YTN; PAM sequence: CTA
  source 1..20: mol_type = other DNA
caggatgggagaaaattttt

SEQ ID NO: 40630 - DNA, 20 bp, synthetic construct
  misc_feature 1..20: note = Description of Artificial Sequence: Synthetic oligonucleotide
  misc_feature 1..20: note = Target: SCN10A; (-) strand; PAM type: YTN; PAM sequence: CTG
  source 1..20: mol_type = other DNA
agcagcaaaagaaaccacca

SEQ ID NO: 40631 - DNA, 20 bp, synthetic construct
  misc_feature 1..20: note = Description of Artificial Sequence: Synthetic oligonucleotide
  misc_feature 1..20: note = Target: SCN10A; (-) strand; PAM type: YTN; PAM sequence: TTC
  source 1..20: mol_type = other DNA
tgagcagcaaaagaaaccac

SEQ ID NO: 40632 - DNA, 20 bp, synthetic construct
  misc_feature 1..20: note = Description of Artificial Sequence: Synthetic oligonucleotide
  misc_feature 1..20: note = Target: SCN10A; (-) strand; PAM type: YTN; PAM sequence: CTT
  source 1..20: mol_type = other DNA
ctgagcagcaaaagaaacca

SEQ ID NO: 40633 - DNA, 20 bp, synthetic construct
  misc_feature 1..20: note = Description of Artificial Sequence: Synthetic oligonucleotide
  misc_feature 1..20: note = Target: SCN10A; (-) strand; PAM type: YTN; PAM sequence: CTA
  source 1..20: mol_type = other DNA
aagagcttctgagcagcaaa

SEQ ID NO: 40634 - DNA, 20 bp, synthetic construct
  misc_feature 1..20: note = Description of Artificial Sequence: Synthetic oligonucleotide
  misc_feature 1..20: note = Target: SCN10A; (-) strand; PAM type: YTN; PAM sequence: TTA
  source 1..20: mol_type = other DNA
aactaaagagcttctgagca

SEQ ID NO: 40635 - DNA, 20 bp, synthetic construct
  misc_feature 1..20: note = Description of Artificial Sequence: Synthetic oligonucleotide
  misc_feature 1..20: note = Target: SCN10A; (-) strand; PAM type: YTN; PAM sequence: CTC
  source 1..20: mol_type = other DNA
attaaactaaagagcttctg

SEQ ID NO: 40636 - DNA, 20 bp, synthetic construct
  misc_feature 1..20: note = Description of Artificial Sequence: Synthetic oligonucleotide
  misc_feature 1..20: note = Target: SCN10A; (-) strand; PAM type: YTN; PAM sequence: TTG
  source 1..20: mol_type = other DNA
acaaatgggatctcattaaa

SEQ ID NO: 40637 - DNA, 20 bp, synthetic construct
  misc_feature 1..20: note = Description of Artificial Sequence: Synthetic oligonucleotide
  misc_feature 1..20: note = Target: SCN10A; (-) strand; PAM type: YTN; PAM sequence: CTA
  source 1..20: mol_type = other DNA
aaacaccaaaagcaatggca

SEQ ID NO: 40638 - DNA, 20 bp, synthetic construct
  misc_feature 1..20: note = Description of Artificial Sequence: Synthetic oligonucleotide
  misc_feature 1..20: note = Target: SCN10A; (-) strand; PAM type: YTN; PAM sequence: TTC
  source 1..20: mol_type = other DNA
atgtctaaaacaccaaaagc

SEQ ID NO: 40639 - DNA, 20 bp, synthetic construct
  misc_feature 1..20: note = Description of Artificial Sequence: Synthetic oligonucleotide
  misc_feature 1..20: note = Target: SCN10A; (-) strand; PAM type: YTN; PAM sequence: CTT
  source 1..20: mol_type = other DNA
catgtctaaaacaccaaaag

SEQ ID NO: 40640 - DNA, 20 bp, synthetic construct
  misc_feature 1..20: note = Description of Artificial Sequence: Synthetic oligonucleotide
  misc_feature 1..20: note = Target: SCN10A; (-) strand; PAM type: YTN; PAM sequence: TTC
  source 1..20: mol_type = other DNA
aggacataggcatgggcaag

SEQ ID NO: 40641 - DNA, 20 bp, synthetic construct
  misc_feature 1..20: note = Description of Artificial Sequence: Synthetic oligonucleotide
  misc_feature 1..20: note = Target: SCN10A; (-) strand; PAM type: YTN; PAM sequence: CTA
  source 1..20: mol_type = other DNA
ggcaataccattcaggacat

SEQ ID NO: 40642 - DNA, 20 bp, synthetic construct
  misc_feature 1..20: note = Description of Artificial Sequence: Synthetic oligonucleotide
  misc_feature 1..20: note = Target: SCN10A; (-) strand; PAM type: YTN; PAM sequence: CTA
  source 1..20: mol_type = other DNA
gaagagaacctaggcaatac

SEQ ID NO: 40643 - DNA, 20 bp, synthetic construct
  misc_feature 1..20: note = Description of Artificial Sequence: Synthetic oligonucleotide
  misc_feature 1..20: note = Target: SCN10A; (-) strand; PAM type: YTN; PAM sequence: CTA
  source 1..20: mol_type = other DNA
aaaccataaaaaccctagaa

SEQ ID NO: 40644 - DNA, 20 bp, synthetic construct
  misc_feature 1..20: note = Description of Artificial Sequence: Synthetic oligonucleotide
  misc_feature 1..20: note = Target: SCN10A; (-) strand; PAM type: YTN; PAM sequence: TTA
  source 1..20: mol_type = other DNA
gacctaaaaccataaaaacc

SEQ ID NO: 40645 - DNA, 20 bp, synthetic construct
  misc_feature 1..20: note = Description of Artificial Sequence: Synthetic oligonucleotide
  misc_feature 1..20: note = Target: SCN10A; (-) strand; PAM type: YTN; PAM sequence: TTA
  source 1..20: mol_type = other DNA
aatgttagacctaaaaccat

SEQ ID NO: 40646 - DNA, 20 bp, synthetic construct
  misc_feature 1..20: note = Description of Artificial Sequence: Synthetic oligonucleotide
  misc_feature 1..20: note = Target: SCN10A; (-) strand; PAM type: YTN; PAM sequence: CTT
  source 1..20: mol_type = other DNA
aaatgttagacctaaaacca

SEQ ID NO: 40647 - DNA, 20 bp, synthetic construct
  misc_feature 1..20: note = Description of Artificial Sequence: Synthetic oligonucleotide
  misc_feature 1..20: note = Target: SCN10A; (-) strand; PAM type: YTN; PAM sequence: TTA
  source 1..20: mol_type = other DNA
aagacttaaatgttagacct

SEQ ID NO: 40648 - DNA, 20 bp, synthetic construct
  misc_feature 1..20: note = Description of Artificial Sequence: Synthetic oligonucleotide
  misc_feature 1..20: note = Target: SCN10A; (-) strand; PAM type: YTN; PAM sequence: TTC
  source 1..20: mol_type = other DNA
aagatggattaaagacttaa

SEQ ID NO: 40649 - DNA, 20 bp, synthetic construct
  misc_feature 1..20: note = Description of Artificial Sequence: Synthetic oligonucleotide
  misc_feature 1..20: note = Target: SCN10A; (-) strand; PAM type: YTN; PAM sequence: TTA
  source 1..20: mol_type = other DNA
attcaagatggattaaagac

SEQ ID NO: 40650 - DNA, 20 bp, synthetic construct
  misc_feature 1..20: note = Description of Artificial Sequence: Synthetic oligonucleotide
  misc_feature 1..20: note = Target: SCN10A; (-) strand; PAM type: YTN; PAM sequence: TTA
  source 1..20: mol_type = other DNA
tacaaaaattaattcaagat

SEQ ID NO: 40651 - DNA, 20 bp, synthetic construct
  misc_feature 1..20: note = Description of Artificial Sequence: Synthetic oligonucleotide
  misc_feature 1..20: note = Target: SCN10A; (-) strand; PAM type: YTN; PAM sequence: CTT
  source 1..20: mol_type = other DNA
atacaaaaattaattcaaga

SEQ ID NO: 40652 - DNA, 20 bp, synthetic construct
  misc_feature 1..20: note = Description of Artificial Sequence: Synthetic oligonucleotide
  misc_feature 1..20: note = Target: SCN10A; (-) strand; PAM type: YTN; PAM sequence: TTA
  source 1..20: mol_type = other DNA
caccttatacaaaaattaat

SEQ ID NO: 40653 - DNA, 20 bp, synthetic construct
  misc_feature 1..20: note = Description of Artificial Sequence: Synthetic oligonucleotide
  misc_feature 1..20: note = Target: SCN10A; (-) strand; PAM type: YTN; PAM sequence: CTT
  source 1..20: mol_type = other DNA
acaccttatacaaaaattaa

SEQ ID NO: 40654 - DNA, 20 bp, synthetic construct
  misc_feature 1..20: note = Description of Artificial Sequence: Synthetic oligonucleotide
  misc_feature 1..20: note = Target: SCN10A; (-) strand; PAM type: YTN; PAM sequence: TTC
  source 1..20: mol_type = other DNA
cttacaccttatacaaaaat

SEQ ID NO: 40655 - DNA, 20 bp, synthetic construct
  misc_feature 1..20: note = Description of Artificial Sequence: Synthetic oligonucleotide
  misc_feature 1..20: note = Target: SCN10A; (-) strand; PAM type: YTN; PAM sequence: CTT
  source 1..20: mol_type = other DNA
ccttacaccttatacaaaaa

SEQ ID NO: 40656 - DNA, 20 bp, synthetic construct
  misc_feature 1..20: note = Description of Artificial Sequence: Synthetic oligonucleotide
  misc_feature 1..20: note = Target: SCN10A; (-) strand; PAM type: YTN; PAM sequence: CTG
  source 1..20: mol_type = other DNA
gatcccttccttacacctta

SEQ ID NO: 40657 - DNA, 20 bp, synthetic construct
  misc_feature 1..20: note = Description of Artificial Sequence: Synthetic oligonucleotide
  misc_feature 1..20: note = Target: SCN10A; (-) strand; PAM type: YTN; PAM sequence: CTG
  source 1..20: mol_type = other DNA
aaactggatcccttccttac

SEQ ID NO: 40658 - DNA, 20 bp, synthetic construct
  misc_feature 1..20: note = Description of Artificial Sequence: Synthetic oligonucleotide
  misc_feature 1..20: note = Target: SCN10A; (-) strand; PAM type: YTN; PAM sequence: CTA
  source 1..20: mol_type = other DNA
gccatatggagaaagctgaa

SEQ ID NO: 40659 - DNA, 20 bp, synthetic construct
  misc_feature 1..20: note = Description of Artificial Sequence: Synthetic oligonucleotide
  misc_feature 1..20: note = Target: SCN10A; (-) strand; PAM type: YTN; PAM sequence: CTG
  source 1..20: mol_type = other DNA
gctagccatatggagaaagc

SEQ ID NO: 40660 - DNA, 20 bp, synthetic construct
  misc_feature 1..20: note = Description of Artificial Sequence: Synthetic oligonucleotide
  misc_feature 1..20: note = Target: SCN10A; (-) strand; PAM type: YTN; PAM sequence: CTG
  source 1..20: mol_type = other DNA
ggaaaactggctagccatat

SEQ ID NO: 40661 - DNA, 20 bp, synthetic construct
  misc_feature 1..20: note = Description of Artificial Sequence: Synthetic oligonucleotide
  misc_feature 1..20: note = Target: SCN10A; (-) strand; PAM type: YTN; PAM sequence: TTA
  source 1..20: mol_type = other DNA
ataaatggtgctgggaaaac

SEQ ID NO: 40662 - DNA, 20 bp, synthetic construct
  misc_feature 1..20: note = Description of Artificial Sequence: Synthetic oligonucleotide
  misc_feature 1..20: note = Target: SCN10A; (-) strand; PAM type: YTN; PAM sequence: TTT
  source 1..20: mol_type = other DNA
aataaatggtgctgggaaaa

SEQ ID NO: 40663 - DNA, 20 bp, synthetic construct
  misc_feature 1..20: note = Description of Artificial Sequence: Synthetic oligonucleotide
  misc_feature 1..20: note = Target: SCN10A; (-) strand; PAM type: YTN; PAM sequence: CTA
  source 1..20: mol_type = other DNA
tttaataaatggtgctggga

SEQ ID NO: 40664 - DNA, 20 bp, synthetic construct
  misc_feature 1..20: note = Description of Artificial Sequence: Synthetic oligonucleotide
  misc_feature 1..20: note = Target: SCN10A; (-) strand; PAM type: YTN; PAM sequence: TTC
  source 1..20: mol_type = other DNA
cctatttaataaatggtgct

SEQ ID NO: 40665 - DNA, 20 bp, synthetic construct
  misc_feature 1..20: note = Description of Artificial Sequence: Synthetic oligonucleotide
  misc_feature 1..20: note = Target: SCN10A; (-) strand; PAM type: YTN; PAM sequence: CTG
  source 1..20: mol_type = other DNA
acaaaaacaagaaatgggga

SEQ ID NO: 40666 - DNA, 20 bp, synthetic construct
  misc_feature 1..20: note = Description of Artificial Sequence: Synthetic oligonucleotide
  misc_feature 1..20: note = Target: SCN10A; (-) strand; PAM type: YTN; PAM sequence: TTG
  source 1..20: mol_type = other DNA
acaaacctgacaaaaacaag

SEQ ID NO: 40667 - DNA, 20 bp, synthetic construct
  misc_feature 1..20: note = Description of Artificial Sequence: Synthetic oligonucleotide
  misc_feature 1..20: note = Target: SCN10A; (-) strand; PAM type: YTN; PAM sequence: TTT
  source 1..20: mol_type = other DNA
gacaaacctgacaaaaacaa

SEQ ID NO: 40668 - DNA, 20 bp, synthetic construct
  misc_feature 1..20: note = Description of Artificial Sequence: Synthetic oligonucleotide
  misc_feature 1..20: note = Target: SCN10A; (-) strand; PAM type: YTN; PAM sequence: CTT
  source 1..20: mol_type = other DNA
tgacaaacctgacaaaaaca

SEQ ID NO: 40669 - DNA, 20 bp, synthetic construct
  misc_feature 1..20: note = Description of Artificial Sequence: Synthetic oligonucleotide
  misc_feature 1..20: note = Target: SCN10A; (-) strand; PAM type: YTN; PAM sequence: CTG
  source 1..20: mol_type = other DNA
atctttgacaaacctgacaa

SEQ ID NO: 40670 - DNA, 20 bp, synthetic construct
  misc_feature 1..20: note = Description of Artificial Sequence: Synthetic oligonucleotide
  misc_feature 1..20: note = Target: SCN10A; (-) strand; PAM type: YTN; PAM sequence: CTA
  source 1..20: mol_type = other DNA
tctgatctttgacaaacctg

SEQ ID NO: 40671 - DNA, 20 bp, synthetic construct
  misc_feature 1..20: note = Description of Artificial Sequence: Synthetic oligonucleotide
  misc_feature 1..20: note = Target: SCN10A; (-) strand; PAM type: YTN; PAM sequence: CTA
  source 1..20: mol_type = other DNA
caactatctgatctttgaca

SEQ ID NO: 40672 - DNA, 20 bp, synthetic construct
  misc_feature 1..20: note = Description of Artificial Sequence: Synthetic oligonucleotide
  misc_feature 1..20: note = Target: SCN10A; (-) strand; PAM type: YTN; PAM sequence: CTC
  source 1..20: mol_type = other DNA
agaaataatgccgcatatct

SEQ ID NO: 40673 - DNA, 20 bp, synthetic construct
  misc_feature 1..20: note = Description of Artificial Sequence: Synthetic oligonucleotide
  misc_feature 1..20: note = Target: SCN10A; (-) strand; PAM type: YTN; PAM sequence: CTG
  source 1..20: mol_type = other DNA
gtaccaaaacagagatatag

SEQ ID NO: 40674 - DNA, 20 bp, synthetic construct
  misc_feature 1..20: note = Description of Artificial Sequence: Synthetic oligonucleotide
  misc_feature 1..20: note = Target: SCN10A; (-) strand; PAM type: YTN; PAM sequence: CTA
  source 1..20: mol_type = other DNA
cagtaaccaaaacagcatgg

SEQ ID NO: 40675 - DNA, 20 bp, synthetic construct
  misc_feature 1..20: note = Description of Artificial Sequence: Synthetic oligonucleotide
  misc_feature 1..20: note = Target: SCN10A; (-) strand; PAM type: YTN; PAM sequence: TTA
  source 1..20: mol_type = other DNA
caaggctacagtaaccaaaa

SEQ ID NO: 40676 - DNA, 20 bp, synthetic construct
  misc_feature 1..20: note = Description of Artificial Sequence: Synthetic oligonucleotide
  misc_feature 1..20: note = Target: SCN10A; (-) strand; PAM type: YTN; PAM sequence: CTA
  source 1..20: mol_type = other DNA
tattacaaggctacagtaac

SEQ ID NO: 40677 - DNA, 20 bp, synthetic construct
  misc_feature 1..20: note = Description of Artificial Sequence: Synthetic oligonucleotide
  misc_feature 1..20: note = Target: SCN10A; (-) strand; PAM type: YTN; PAM sequence: TTC
  source 1..20: mol_type = other DNA
aaactatattacaaggctac

SEQ ID NO: 40678 - DNA, 20 bp, synthetic construct
  misc_feature 1..20: note = Description of Artificial Sequence: Synthetic oligonucleotide
  misc_feature 1..20: note = Target: SCN10A; (-) strand; PAM type: YTN; PAM sequence: CTT
  source 1..20: mol_type = other DNA
caaactatattacaaggcta

SEQ ID NO: 40679 - DNA, 20 bp, synthetic construct
  misc_feature 1..20: note = Description of Artificial Sequence: Synthetic oligonucleotide
  misc_feature 1..20: note = Target: SCN10A; (-) strand; PAM type: YTN; PAM sequence: CTG
  source 1..20: mol_type = other DNA
acttcaaactatattacaag

SEQ ID NO: 40680 - DNA, 20 bp, synthetic construct
  misc_feature 1..20: note = Description of Artificial Sequence: Synthetic oligonucleotide
  misc_feature 1..20: note = Target: SCN10A; (-) strand; PAM type: YTN; PAM sequence: CTA
  source 1..20: mol_type = other DNA
cctgacttcaaactatatta

SEQ ID NO: 40681 - DNA, 20 bp, synthetic construct
  misc_feature 1..20: note = Description of Artificial Sequence: Synthetic oligonucleotide
  misc_feature 1..20: note = Target: SCN10A; (-) strand; PAM type: YTN; PAM sequence: CTG
  source 1..20: mol_type = other DNA
gaggcatcacgctacctgac

SEQ ID NO: 40682 - DNA, 20 bp, synthetic construct
  misc_feature 1..20: note = Description of Artificial Sequence: Synthetic oligonucleotide
  misc_feature 1..20: note = Target: SCN10A; (-) strand; PAM type: YTN; PAM sequence: TTG
  source 1..20: mol_type = other DNA
gtgtataacaaagctggagg

SEQ ID NO: 40683 - DNA, 20 bp, synthetic construct
  misc_feature 1..20: note = Description of Artificial Sequence: Synthetic oligonucleotide
  misc_feature 1..20: note = Target: SCN10A; (-) strand; PAM type: YTN; PAM sequence: TTA
  source 1..20: mol_type = other DNA
ttggtgtataacaaagctgg

SEQ ID NO: 40684 - DNA, 20 bp, synthetic construct
  misc_feature 1..20: note = Description of Artificial Sequence: Synthetic oligonucleotide
  misc_feature 1..20: note = Target: SCN10A; (-) strand; PAM type: YTN; PAM sequence: CTG
  source 1..20: mol_type = other DNA
ttattggtgtataacaaagc

SEQ ID NO: 40685 - DNA, 20 bp, synthetic construct
  misc_feature 1..20: note = Description of Artificial Sequence: Synthetic oligonucleotide
  misc_feature 1..20: note = Target: SCN10A; (-) strand; PAM type: YTN; PAM sequence: TTG
  source 1..20: mol_type = other DNA
tctgttattggtgtataaca

SEQ ID NO: 40686 - DNA, 20 bp, synthetic construct
  misc_feature 1..20: note = Description of Artificial Sequence: Synthetic oligonucleotide
  misc_feature 1..20: note = Target: SCN10A; (-) strand; PAM type: YTN; PAM sequence: TTT
  source 1..20: mol_type = other DNA
gtctgttattggtgtataac

SEQ ID NO: 40687 - DNA, 20 bp, synthetic construct
  misc_feature 1..20: note = Description of Artificial Sequence: Synthetic oligonucleotide
  misc_feature 1..20: note = Target: SCN10A; (-) strand; PAM type: YTN; PAM sequence: CTG
  source 1..20: mol_type = other DNA
tttgtctgttattggtgtat

SEQ ID NO: 40688 - DNA, 20 bp, synthetic construct
  misc_feature 1..20: note = Description of Artificial Sequence: Synthetic oligonucleotide
  misc_feature 1..20: note = Target: SCN10A; (-) strand; PAM type: YTN; PAM sequence: CTC
  source 1..20: mol_type = other DNA
tgtttgtctgttattggtgt

SEQ ID NO: 40689 - DNA, 20 bp, synthetic construct
  misc_feature 1..20: note = Description of Artificial Sequence: Synthetic oligonucleotide
  misc_feature 1..20: note = Target: SCN10A; (-) strand; PAM type: YTN; PAM sequence: CTC
  source 1..20: mol_type = other DNA
tctgtttgtctgttattggt

SEQ ID NO: 40690 - DNA, 20 bp, synthetic construct
  misc_feature 1..20: note = Description of Artificial Sequence: Synthetic oligonucleotide
  misc_feature 1..20: note = Target: SCN10A; (-) strand; PAM type: YTN; PAM sequence: TTG
  source 1..20: mol_type = other DNA
gctctctgtttgtctgttat

SEQ ID NO: 40691 - DNA, 20 bp, synthetic construct
  misc_feature 1..20: note = Description of Artificial Sequence: Synthetic oligonucleotide
  misc_feature 1..20: note = Target: SCN10A; (-) strand; PAM type: YTN; PAM sequence: TTT
  source 1..20: mol_type = other DNA
ggctctctgtttgtctgtta

SEQ ID NO: 40692 - DNA, 20 bp, synthetic construct
  misc_feature 1..20: note = Description of Artificial Sequence: Synthetic oligonucleotide
  misc_feature 1..20: note = Target: SCN10A; (-) strand; PAM type: YTN; PAM sequence: CTC
  source 1..20: mol_type = other DNA
atgatttggctctctgtttg

SEQ ID NO: 40693 - DNA, 20 bp, synthetic construct
  misc_feature 1..20: note = Description of Artificial Sequence: Synthetic oligonucleotide
  misc_feature 1..20: note = Target: SCN10A; (-) strand; PAM type: YTN; PAM sequence: TTC
  source 1..20: mol_type = other DNA
actcatgatttggctctctg

SEQ ID NO: 40694 - DNA, 20 bp, synthetic construct
  misc_feature 1..20: note = Description of Artificial Sequence: Synthetic oligonucleotide
  misc_feature 1..20: note = Target: SCN10A; (-) strand; PAM type: YTN; PAM sequence: TTG
  source 1..20: mol_type = other DNA
tgaatgggagttcactcatg

SEQ ID NO: 40695 - DNA, 20 bp, synthetic construct
  misc_feature 1..20: note = Description of Artificial Sequence: Synthetic oligonucleotide
  misc_feature 1..20: note = Target: SCN10A; (-) strand; PAM type: YTN; PAM sequence: TTG
  source 1..20: mol_type = other DNA
aagcaattgtgaatgggagt

SEQ ID NO: 40696 - DNA, 20 bp, synthetic construct
  misc_feature 1..20: note = Description of Artificial Sequence: Synthetic oligonucleotide
  misc_feature 1..20: note = Target: SCN10A; (-) strand; PAM type: YTN; PAM sequence: TTT
  source 1..20: mol_type = other DNA
gaagcaattgtgaatgggag

SEQ ID NO: 40697 - DNA, 20 bp, synthetic construct
  misc_feature 1..20: note = Description of Artificial Sequence: Synthetic oligonucleotide
  misc_feature 1..20: note = Target: SCN10A; (-) strand; PAM type: YTN; PAM sequence: CTT
  source 1..20: mol_type = other DNA
tgaagcaattgtgaatggga

SEQ ID NO: 40698 - DNA, 20 bp, synthetic construct
  misc_feature 1..20: note = Description of Artificial Sequence: Synthetic oligonucleotide
  misc_feature 1..20: note = Target: SCN10A; (-) strand; PAM type: YTN; PAM sequence: CTC
  source 1..20: mol_type = other DNA
tttgaagcaattgtgaatgg

SEQ ID NO: 40699 - DNA, 20 bp, synthetic construct
  misc_feature 1..20: note = Description of Artificial Sequence: Synthetic oligonucleotide
  misc_feature 1..20: note = Target: SCN10A; (-) strand; PAM type: YTN; PAM sequence: TTC
  source 1..20: mol_type = other DNA
tctttgaagcaattgtgaat

SEQ ID NO: 40700 - DNA, 20 bp, synthetic construct
  misc_feature 1..20: note = Description of Artificial Sequence: Synthetic oligonucleotide
  misc_feature 1..20: note = Target: SCN10A; (-) strand; PAM type: YTN; PAM sequence: TTA
  source 1..20: mol_type = other DNA
ttctctttgaagcaattgtg

SEQ ID NO: 40701 - DNA, 20 bp, synthetic construct
  misc_feature 1..20: note = Description of Artificial Sequence: Synthetic oligonucleotide
  misc_feature 1..20: note = Target: SCN10A; (-) strand; PAM type: YTN; PAM sequence: TTT
  source 1..20: mol_type = other DNA
attctctttgaagcaattgt

SEQ ID NO: 40702 - DNA, 20 bp, synthetic construct
  misc_feature 1..20: note = Description of Artificial Sequence: Synthetic oligonucleotide
  misc_feature 1..20: note = Target: SCN10A; (-) strand; PAM type: YTN; PAM sequence: TTT
  source 1..20: mol_type = other DNA
tattctctttgaagcaattg

SEQ ID NO: 40703 - DNA, 20 bp, synthetic construct
  misc_feature 1..20: note = Description of Artificial Sequence: Synthetic oligonucleotide
  misc_feature 1..20: note = Target: SCN10A; (-) strand; PAM type: YTN; PAM sequence: CTA
  source 1..20: mol_type = other DNA
ggtattttattctctttgaa

SEQ ID NO: 40704 - DNA, 20 bp, synthetic construct
  misc_feature 1..20: note = Description of Artificial Sequence: Synthetic oligonucleotide
  misc_feature 1..20: note = Target: SCN10A; (-) strand; PAM type: YTN; PAM sequence: TTC
  source 1..20: mol_type = other DNA
ctaggtattttattctcttt

SEQ ID NO: 40705 - DNA, 20 bp, synthetic construct
  misc_feature 1..20: note = Description of Artificial Sequence: Synthetic oligonucleotide
  misc_feature 1..20: note = Target: SCN10A; (-) strand; PAM type: YTN; PAM sequence: TTG
  source 1..20: mol_type = other DNA
cattcctaggtattttattc

SEQ ID NO: 40706 - DNA, 20 bp, synthetic construct
  misc_feature 1..20: note = Description of Artificial Sequence: Synthetic oligonucleotide
  misc_feature 1..20: note = Target: SCN10A; (-) strand; PAM type: YTN; PAM sequence: TTG
  source 1..20: mol_type = other DNA
taagttgcattcctaggtat

SEQ ID NO: 40707 - DNA, 20 bp, synthetic construct
  misc_feature 1..20: note = Description of Artificial Sequence: Synthetic oligonucleotide
  misc_feature 1..20: note = Target: SCN10A; (-) strand; PAM type: YTN; PAM sequence: CTT
  source 1..20: mol_type = other DNA
gtaagttgcattcctaggta

SEQ ID NO: 40708 - DNA, 20 bp, synthetic construct
  misc_feature 1..20: note = Description of Artificial Sequence: Synthetic oligonucleotide
  misc_feature 1..20: note = Target: SCN10A; (-) strand; PAM type: YTN; PAM sequence: TTC
  source 1..20: mol_type = other DNA
acatcccttgtaagttgcat

SEQ ID NO: 40709 - DNA, 20 bp, synthetic construct
  misc_feature 1..20: note = Description of Artificial Sequence: Synthetic oligonucleotide
  misc_feature 1..20: note = Target: SCN10A; (-) strand; PAM type: YTN; PAM sequence: CTT
  source 1..20: mol_type = other DNA
cacatcccttgtaagttgca

SEQ ID NO: 40710 - DNA, 20 bp, synthetic construct
  misc_feature 1..20: note = Description of Artificial Sequence: Synthetic oligonucleotide
  misc_feature 1..20: note = Target: SCN10A; (-) strand; PAM type: YTN; PAM sequence: TTG
  source 1..20: mol_type = other DNA
aagaggtccttcacatccct

SEQ ID NO: 40711 - DNA, 20 bp, synthetic construct
  misc_feature 1..20: note = Description of Artificial Sequence: Synthetic oligonucleotide
  misc_feature 1..20: note = Target: SCN10A; (-) strand; PAM type: YTN; PAM sequence: CTT
  source 1..20: mol_type = other DNA
gaagaggtccttcacatccc

SEQ ID NO: 40712 - DNA, 20 bp, synthetic construct
  misc_feature 1..20: note = Description of Artificial Sequence: Synthetic oligonucleotide
  misc_feature 1..20: note = Target: SCN10A; (-) strand; PAM type: YTN; PAM sequence: CTC
  source 1..20: mol_type = other DNA
cttgaagaggtccttcacat

SEQ ID NO: 40713 - DNA, 20 bp, synthetic construct
  misc_feature 1..20: note = Description of Artificial Sequence: Synthetic oligonucleotide
  misc_feature 1..20: note = Target: SCN10A; (-) strand; PAM type: YTN; PAM sequence: TTC
  source 1..20: mol_type = other DNA
tccttgaagaggtccttcac

SEQ ID NO: 40714 - DNA, 20 bp, synthetic construct
  misc_feature 1..20: note = Description of Artificial Sequence: Synthetic oligonucleotide
  misc_feature 1..20: note = Target: SCN10A; (-) strand; PAM type: YTN; PAM sequence: TTG
  source 1..20: mol_type = other DNA
tagttctccttgaagaggtc

SEQ ID NO: 40715 - DNA, 20 bp, synthetic construct
  misc_feature 1..20: note = Description of Artificial Sequence: Synthetic oligonucleotide
  misc_feature 1..20: note = Target: SCN10A; (-) strand; PAM type: YTN; PAM sequence: TTT
  source 1..20: mol_type = other DNA
gtagttctccttgaagaggt

SEQ ID NO: 40716 - DNA, 20 bp, synthetic construct
  misc_feature 1..20: note = Description of Artificial Sequence: Synthetic oligonucleotide
  misc_feature 1..20: note = Target: SCN10A; (-) strand; PAM type: YTN; PAM sequence: CTG
  source 1..20: mol_type = other DNA
agcagtggtttgtagttctc

SEQ ID NO: 40717 - DNA, 20 bp, synthetic construct
  misc_feature 1..20: note = Description of Artificial Sequence: Synthetic oligonucleotide
  misc_feature 1..20: note = Target: SCN10A; (-) strand; PAM type: YTN; PAM sequence: TTC
  source 1..20: mol_type = other DNA
actgagcagtggtttgtagt

SEQ ID NO: 40718 - DNA, 20 bp, synthetic construct
  misc_feature 1..20: note = Description of Artificial Sequence: Synthetic oligonucleotide
  misc_feature 1..20: note = Target: SCN10A; (-) strand; PAM type: YTN; PAM sequence: TTT
  source 1..20: mol_type = other DNA
cactgagcagtggtttgtag

SEQ ID NO: 40719 - DNA, 20 bp, synthetic construct
  misc_feature 1..20: note = Description of Artificial Sequence: Synthetic oligonucleotide
  misc_feature 1..20: note = Target: SCN10A; (-) strand; PAM type: YTN; PAM sequence: TTA
  source 1..20: mol_type = other DNA
tttcactgagcagtggtttg

SEQ ID NO: 40720 - DNA, 20 bp, synthetic construct
  misc_feature 1..20: note = Description of Artificial Sequence: Synthetic oligonucleotide
  misc_feature 1..20: note = Target: SCN10A; (-) strand; PAM type: YTN; PAM sequence: TTT
  source 1..20: mol_type = other DNA
atttcactgagcagtggttt

SEQ ID NO: 40721 - DNA, 20 bp, synthetic construct
  misc_feature 1..20: note = Description of Artificial Sequence: Synthetic oligonucleotide
  misc_feature 1..20: note = Target: SCN10A; (-) strand; PAM type: YTN; PAM sequence: TTT
  source 1..20: mol_type = other DNA
tatttcactgagcagtggtt

SEQ ID NO: 40722 - DNA, 20 bp, synthetic construct
  misc_feature 1..20: note = Description of Artificial Sequence: Synthetic oligonucleotide
  misc_feature 1..20: note = Target: SCN10A; (-) strand; PAM type: YTN; PAM sequence: CTT
  source 1..20: mol_type = other DNA
ttatttcactgagcagtggt

SEQ ID NO: 40723 - DNA, 20 bp, synthetic construct
  misc_feature 1..20: note = Description of Artificial Sequence: Synthetic oligonucleotide
  misc_feature 1..20: note = Target: SCN10A; (-) strand; PAM type: YTN; PAM sequence: CTC
  source 1..20: mol_type = other DNA
ttttatttcactgagcagtg

SEQ ID NO: 40724 - DNA, 20 bp, synthetic construct
  misc_feature 1..20: note = Description of Artificial Sequence: Synthetic oligonucleotide
  misc_feature 1..20: note = Target: SCN10A; (-) strand; PAM type: YTN; PAM sequence: TTG
  source 1..20: mol_type = other DNA
tatcctcttttatttcactg

SEQ ID NO: 40725 - DNA, 20 bp, synthetic construct
  misc_feature 1..20: note = Description of Artificial Sequence: Synthetic oligonucleotide
  misc_feature 1..20: note = Target: SCN10A; (-) strand; PAM type: YTN; PAM sequence: TTT
  source 1..20: mol_type = other DNA
gtatcctcttttatttcact

SEQ ID NO: 40726 - DNA, 20 bp, synthetic construct
  misc_feature 1..20: note = Description of Artificial Sequence: Synthetic oligonucleotide
  misc_feature 1..20: note = Target: SCN10A; (-) strand; PAM type: YTN; PAM sequence: TTG
  source 1..20: mol_type = other DNA
tttgtatcctcttttatttc

SEQ ID NO: 40727 - DNA, 20 bp, synthetic construct
  misc_feature 1..20: note = Description of Artificial Sequence: Synthetic oligonucleotide
  misc_feature 1..20: note = Target: SCN10A; (-) strand; PAM type: YTN; PAM sequence: TTT
  source 1..20: mol_type = other DNA
gtttgtatcctcttttattt

SEQ ID NO: 40728 - DNA, 20 bp, synthetic construct
  misc_feature 1..20: note = Description of Artificial Sequence: Synthetic oligonucleotide
  misc_feature 1..20: note = Target: SCN10A; (-) strand; PAM type: YTN; PAM sequence: TTC
  source 1..20: mol_type = other DNA
catttgtttgtatcctcttt

SEQ ID NO: 40729 - DNA, 20 bp, synthetic construct
  misc_feature 1..20: note = Description of Artificial Sequence: Synthetic oligonucleotide
  misc_feature 1..20: note = Target: SCN10A; (-) strand; PAM type: YTN; PAM sequence: CTT
  source 1..20: mol_type = other DNA
ccatttgtttgtatcctctt

SEQ ID NO: 40730 - DNA, 20 bp, synthetic construct
  misc_feature 1..20: note = Description of Artificial Sequence: Synthetic oligonucleotide
  misc_feature 1..20: note = Target: SCN10A; (-) strand; PAM type: YTN; PAM sequence: TTC
  source 1..20: mol_type = other DNA
ttccatttgtttgtatcctc

SEQ ID NO: 40731 - DNA, 20 bp, synthetic construct
  misc_feature 1..20: note = Description of Artificial Sequence: Synthetic oligonucleotide
  misc_feature 1..20: note = Target: SCN10A; (-) strand; PAM type: YTN; PAM sequence: CTA
  source 1..20: mol_type = other DNA
cccatgagcatggagtattc

SEQ ID NO: 40732 - DNA, 20 bp, synthetic construct
  misc_feature 1..20: note = Description of Artificial Sequence: Synthetic oligonucleotide
  misc_feature 1..20: note = Target: SCN10A; (-) strand; PAM type: YTN; PAM sequence: TTC
  source 1..20: mol_type = other DNA
ctacccatgagcatggagta

SEQ ID NO: 40733 - DNA, 20 bp, synthetic construct
  misc_feature 1..20: note = Description of Artificial Sequence: Synthetic oligonucleotide
  misc_feature 1..20: note = Target: SCN10A; (-) strand; PAM type: YTN; PAM sequence: CTT
  source 1..20: mol_type = other DNA
cctacccatgagcatggagt

SEQ ID NO: 40734 - DNA, 20 bp, synthetic construct
  misc_feature 1..20: note = Description of Artificial Sequence: Synthetic oligonucleotide
  misc_feature 1..20: note = Target: SCN10A; (-) strand; PAM type: YTN; PAM sequence: TTC
  source 1..20: mol_type = other DNA
ttcctacccatgagcatgga

SEQ ID NO: 40735 - DNA, 20 bp, synthetic construct
  misc_feature 1..20: note = Description of Artificial Sequence: Synthetic oligonucleotide
  misc_feature 1..20: note = Target: SCN10A; (-) strand; PAM type: YTN; PAM sequence: TTG
  source 1..20: mol_type = other DNA
attcttcctacccatgagca

SEQ ID NO: 40736 - DNA, 20 bp, synthetic construct
  misc_feature 1..20: note = Description of Artificial Sequence: Synthetic oligonucleotide
  misc_feature 1..20: note = Target: SCN10A; (-) strand; PAM type: YTN; PAM sequence: TTC
  source 1..20: mol_type = other DNA
aagatattgattcttcctac

SEQ ID NO: 40737 - DNA, 20 bp, synthetic construct
  misc_feature 1..20: note = Description of Artificial Sequence: Synthetic oligonucleotide
  misc_feature 1..20: note = Target: SCN10A; (-) strand; PAM type: YTN; PAM sequence: TTT
  source 1..20: mol_type = other DNA
caagatattgattcttccta

SEQ ID NO: 40738 - DNA, 20 bp, synthetic construct
  misc_feature 1..20: note = Description of Artificial Sequence: Synthetic oligonucleotide
  misc_feature 1..20: note = Target: SCN10A; (-) strand; PAM type: YTN; PAM sequence: TTT
  source 1..20: mol_type = other DNA
tcaagatattgattcttcct

SEQ ID NO: 40739 - DNA, 20 bp, synthetic construct
  misc_feature 1..20: note = Description of Artificial Sequence: Synthetic oligonucleotide
  misc_feature 1..20: note = Target: SCN10A; (-) strand; PAM type: YTN; PAM sequence: TTG
  source 1..20: mol_type = other DNA
ggcagtatggccattttcaa

SEQ ID NO: 40740 - DNA, 20 bp, synthetic construct
  misc_feature 1..20: note = Description of Artificial Sequence: Synthetic oligonucleotide
  misc_feature 1..20: note = Target: SCN10A; (-) strand; PAM type: YTN; PAM sequence: CTT
  source 1..20: mol_type = other DNA
gggcagtatggccattttca

SEQ ID NO: 40741 - DNA, 20 bp, synthetic construct
  misc_feature 1..20: note = Description of Artificial Sequence: Synthetic oligonucleotide
  misc_feature 1..20: note = Target: SCN10A; (-) strand; PAM type: YTN; PAM sequence: TTA
  source 1..20: mol_type = other DNA
ccttgggcagtatggccatt

SEQ ID NO: 40742 - DNA, 20 bp, synthetic construct
  misc_feature 1..20: note = Description of Artificial Sequence: Synthetic oligonucleotide
  misc_feature 1..20: note = Target: SCN10A; (-) strand; PAM type: YTN; PAM sequence: CTA
  source 1..20: mol_type = other DNA
taaattaccttgggcagtat

SEQ ID NO: 40743 - DNA, 20 bp, synthetic construct
  misc_feature 1..20: note = Description of Artificial Sequence: Synthetic oligonucleotide
  misc_feature 1..20: note = Target: SCN10A; (-) strand; PAM type: YTN; PAM sequence: TTG
  source 1..20: mol_type = other DNA
aatctataaattaccttggg

SEQ ID NO: 40744 - DNA, 20 bp, synthetic construct
  misc_feature 1..20: note = Description of Artificial Sequence: Synthetic oligonucleotide
  misc_feature 1..20: note = Target: SCN10A; (-) strand; PAM type: YTN; PAM sequence: TTG
  source 1..20: mol_type = other DNA
atggggatggcattgaatct

SEQ ID NO: 40745 - DNA, 20 bp, synthetic construct
  misc_feature 1..20: note = Description of Artificial Sequence: Synthetic oligonucleotide
  misc_feature 1..20: note = Target: SCN10A; (-) strand; PAM type: YTN; PAM sequence: CTT
  source 1..20: mol_type = other DNA
gatggggatggcattgaatc

SEQ ID NO: 40746 - DNA, 20 bp, synthetic construct
  misc_feature 1..20: note = Description of Artificial Sequence: Synthetic oligonucleotide
  misc_feature 1..20: note = Target: SCN10A; (-) strand; PAM type: YTN; PAM sequence: TTG
  source 1..20: mol_type = other DNA
gtagcttgatggggatggca

SEQ ID NO: 40747 - DNA, 20 bp, synthetic construct
  misc_feature 1..20: note = Description of Artificial Sequence: Synthetic oligonucleotide
  misc_feature 1..20: note = Target: SCN10A; (-) strand; PAM type: YTN; PAM sequence: CTG
  source 1..20: mol_type = other DNA
agaagaaagtcattggtagc

SEQ ID NO: 40748 - DNA, 20 bp, synthetic construct
  misc_feature 1..20: note = Description of Artificial Sequence: Synthetic oligonucleotide
  misc_feature 1..20: note = Target: SCN10A; (-) strand; PAM type: YTN; PAM sequence: TTC
  source 1..20: mol_type = other DNA
tgagaagaaagtcattggta

SEQ ID NO: 40749 - DNA, 20 bp, synthetic construct
  misc_feature 1..20: note = Description of Artificial Sequence: Synthetic oligonucleotide
  misc_feature 1..20: note = Target: SCN10A; (-) strand; PAM type: YTN; PAM sequence: TTC
  source 1..20: mol_type = other DNA
caattctgagaagaaagtca

SEQ ID NO: 40750 - DNA, 20 bp, synthetic construct
  misc_feature 1..20: note = Description of Artificial Sequence: Synthetic oligonucleotide
  misc_feature 1..20: note = Target: SCN10A; (-) strand; PAM type: YTN; PAM sequence: TTT
  source 1..20: mol_type = other DNA
ccaattctgagaagaaagtc

SEQ ID NO: 40751 - DNA, 20 bp, synthetic construct
  misc_feature 1..20: note = Description of Artificial Sequence: Synthetic oligonucleotide
  misc_feature 1..20: note = Target: SCN10A; (-) strand; PAM type: YTN; PAM sequence: TTT
  source 1..20: mol_type = other DNA
tccaattctgagaagaaagt

SEQ ID NO: 40752 - DNA, 20 bp, synthetic construct
  misc_feature 1..20: note = Description of Artificial Sequence: Synthetic oligonucleotide
  misc_feature 1..20: note = Target: SCN10A; (-) strand; PAM type: YTN; PAM sequence: TTT
  source 1..20: mol_type = other DNA
ttccaattctgagaagaaag

SEQ ID NO: 40753 - DNA, 20 bp, synthetic construct
  misc_feature 1..20: note = Description of Artificial Sequence: Synthetic oligonucleotide
  misc_feature 1..20: note = Target: SCN10A; (-) strand; PAM type: YTN; PAM sequence: TTT
  source 1..20: mol_type = other DNA
tttccaattctgagaagaaa

SEQ ID NO: 40754 - DNA, 20 bp, synthetic construct
  misc_feature 1..20: note = Description of Artificial Sequence: Synthetic oligonucleotide
  misc_feature 1..20: note = Target: SCN10A; (-) strand; PAM type: YTN; PAM sequence: TTA
  source 1..20: mol_type = other DNA
aagtagttttttccaattct

SEQ ID NO: 40755 - DNA, 20 bp, synthetic construct
  misc_feature 1..20: note = Description of Artificial Sequence: Synthetic oligonucleotide
  misc_feature 1..20: note = Target: SCN10A; (-) strand; PAM type: YTN; PAM sequence: TTT
  source 1..20: mol_type = other DNA
aaagtagttttttccaattc

SEQ ID NO: 40756 - DNA, 20 bp, synthetic construct
  misc_feature 1..20: note = Description of Artificial Sequence: Synthetic oligonucleotide
  misc_feature 1..20: note = Target: SCN10A; (-) strand; PAM type: YTN; PAM sequence: CTT
  source 1..20: mol_type = other DNA
taaagtagttttttccaatt

SEQ ID NO: 40757 - DNA, 20 bp, synthetic construct
  misc_feature 1..20: note = Description of Artificial Sequence: Synthetic oligonucleotide
  misc_feature 1..20: note = Target: SCN10A; (-) strand; PAM type: YTN; PAM sequence: TTC
  source 1..20: mol_type = other DNA
cgtatgaactttaaagtagt

SEQ ID NO: 40758 - DNA, 20 bp, synthetic construct
  misc_feature 1..20: note = Description of Artificial Sequence: Synthetic oligonucleotide
  misc_feature 1..20: note = Target: SCN10A; (-) strand; PAM type: YTN; PAM sequence: TTG
  source 1..20: mol_type = other DNA
gttccgtatgaactttaaag

SEQ ID NO: 40759 - DNA, 20 bp, synthetic construct
  misc_feature 1..20: note = Description of Artificial Sequence: Synthetic oligonucleotide
  misc_feature 1..20: note = Target: SCN10A; (-) strand; PAM type: YTN; PAM sequence: TTT
  source 1..20: mol_type = other DNA
ggttccgtatgaactttaaa

SEQ ID NO: 40760 - DNA, 20 bp, synthetic construct
  misc_feature 1..20: note = Description of Artificial Sequence: Synthetic oligonucleotide
  misc_feature 1..20: note = Target: SCN10A; (-) strand; PAM type: YTN; PAM sequence: TTT
  source 1..20: mol_type = other DNA
tggttccgtatgaactttaa

SEQ ID NO: 40761 - DNA, 20 bp, synthetic construct
  misc_feature 1..20: note = Description of Artificial Sequence: Synthetic oligonucleotide
  misc_feature 1..20: note = Target: SCN10A; (-) strand; PAM type: YTN; PAM sequence: TTT
  source 1..20: mol_type = other DNA
ttggttccgtatgaacttta

SEQ ID NO: 40762 - DNA, 20 bp, synthetic construct
  misc_feature 1..20: note = Description of Artificial Sequence: Synthetic oligonucleotide
  misc_feature 1..20: note = Target: SCN10A; (-) strand; PAM type: YTN; PAM sequence: TTT
  source 1..20: mol_type = other DNA
tttggttccgtatgaacttt

SEQ ID NO: 40763 - DNA, 20 bp, synthetic construct
  misc_feature 1..20: note = Description of Artificial Sequence: Synthetic oligonucleotide
  misc_feature 1..20: note = Target: SCN10A; (-) strand; PAM type: YTN; PAM sequence: CTT
  source 1..20: mol_type = other DNA
ttttggttccgtatgaactt

SEQ ID NO: 40764 - DNA, 20 bp, synthetic construct
  misc_feature 1..20: note = Description of Artificial Sequence: Synthetic oligonucleotide
  misc_feature 1..20: note = Target: SCN10A; (-) strand; PAM type: YTN; PAM sequence: CTC
  source 1..20: mol_type = other DNA
ttttttggttccgtatgaac

SEQ ID NO: 40765 - DNA, 20 bp, synthetic construct
  misc_feature 1..20: note = Description of Artificial Sequence: Synthetic oligonucleotide
  misc_feature 1..20: note = Target: SCN10A; (-) strand; PAM type: YTN; PAM sequence: TTG
  source 1..20: mol_type = other DNA
gcaatgtgggctcttttttg

SEQ ID NO: 40766 - DNA, 20 bp, synthetic construct
  misc_feature 1..20: note = Description of Artificial Sequence: Synthetic oligonucleotide
  misc_feature 1..20: note = Target: SCN10A; (-) strand; PAM type: YTN; PAM sequence: CTT
  source 1..20: mol_type = other DNA
ggcaatgtgggctctttttt

SEQ ID NO: 40767 - DNA, 20 bp, synthetic construct
  misc_feature 1..20: note = Description of Artificial Sequence: Synthetic oligonucleotide
  misc_feature 1..20: note = Target: SCN10A; (-) strand; PAM type: YTN; PAM sequence: TTG
  source 1..20: mol_type = other DNA
acttggcaatgtgggctctt

SEQ ID NO: 40768 - DNA, 20 bp, synthetic construct
  misc_feature 1..20: note = Description of Artificial Sequence: Synthetic oligonucleotide
  misc_feature 1..20: note = Target: SCN10A; (-) strand; PAM type: YTN; PAM sequence: TTA
  source 1..20: mol_type = other DNA
ggattgacttggcaatgtgg

SEQ ID NO: 40769 - DNA, 20 bp, synthetic construct
  misc_feature 1..20: note = Description of Artificial Sequence: Synthetic oligonucleotide
  misc_feature 1..20: note = Target: SCN10A; (-) strand; PAM type: YTN; PAM sequence: TTA
  source 1..20: mol_type = other DNA
aaaaaaaaacaggattagga

SEQ ID NO: 40770 - DNA, 20 bp, synthetic construct
  misc_feature 1..20: note = Description of Artificial Sequence: Synthetic oligonucleotide
  misc_feature 1..20: note = Target: SCN10A; (-) strand; PAM type: YTN; PAM sequence: TTA
  source 1..20: mol_type = other DNA
gccaatcaaaaaagtaaggt

SEQ ID NO: 40771 - DNA, 20 bp, synthetic construct
  misc_feature 1..20: note = Description of Artificial Sequence: Synthetic oligonucleotide
  misc_feature 1..20: note = Target: SCN10A; (-) strand; PAM type: YTN; PAM sequence: CTA
  source 1..20: mol_type = other DNA
agaaacaattagccaatcaa

SEQ ID NO: 40772 - DNA, 20 bp, synthetic construct
  misc_feature 1..20: note = Description of Artificial Sequence: Synthetic oligonucleotide
  misc_feature 1..20: note = Target: SCN10A; (-) strand; PAM type: YTN; PAM sequence: CTA
  source 1..20: mol_type = other DNA
tgctaagaaacaattagcca

SEQ ID NO: 40773 - DNA, 20 bp, synthetic construct
  misc_feature 1..20: note = Description of Artificial Sequence: Synthetic oligonucleotide
  misc_feature 1..20: note = Target: SCN10A; (-) strand; PAM type: YTN; PAM sequence: TTC
  source 1..20: mol_type = other DNA
caaagtaggacaagggggaa

SEQ ID NO: 40774 - DNA, 20 bp, synthetic construct
  misc_feature 1..20: note = Description of Artificial Sequence: Synthetic oligonucleotide
  misc_feature 1..20: note = Target: SCN10A; (-) strand; PAM type: YTN; PAM sequence: TTT
  source 1..20: mol_type = other DNA
ccaaagtaggacaaggggga

SEQ ID NO: 40775 - DNA, 20 bp, synthetic construct
  misc_feature 1..20: note = Description of Artificial Sequence: Synthetic oligonucleotide
  misc_feature 1..20: note = Target: SCN10A; (-) strand; PAM type: YTN; PAM sequence: TTG
  source 1..20: mol_type = other DNA
ccagtaacaaatcagaaata

SEQ ID NO: 40776 - DNA, 20 bp, synthetic construct
  misc_feature 1..20: note = Description of Artificial Sequence: Synthetic oligonucleotide
  misc_feature 1..20: note = Target: SCN10A; (-) strand; PAM type: YTN; PAM sequence: TTA
  source 1..20: mol_type = other DNA
gggttgccagtaacaaatca

SEQ ID NO: 40777 - DNA, 20 bp, synthetic construct
  misc_feature 1..20: note = Description of Artificial Sequence: Synthetic oligonucleotide
  misc_feature 1..20: note = Target: SCN10A; (-) strand; PAM type: YTN; PAM sequence: TTA
  source 1..20: mol_type = other DNA
ttagggttgccagtaacaaa

SEQ ID NO: 40778 - DNA, 20 bp, synthetic construct
  misc_feature 1..20: note = Description of Artificial Sequence: Synthetic oligonucleotide
  misc_feature 1..20: note = Target: SCN10A; (-) strand; PAM type: YTN; PAM sequence: TTA
  source 1..20: mol_type = other DNA
attattagggttgccagtaa

SEQ ID NO: 40779 - DNA, 20 bp, synthetic construct
  misc_feature 1..20: note = Description of Artificial Sequence: Synthetic oligonucleotide
  misc_feature 1..20: note = Target: SCN10A; (-) strand; PAM type: YTN; PAM sequence: CTT
  source 1..20: mol_type = other DNA
aattattagggttgccagta

SEQ ID NO: 40780 - DNA, 20 bp, synthetic construct
  misc_feature 1..20: note = Description of Artificial Sequence: Synthetic oligonucleotide
  misc_feature 1..20: note = Target: SCN10A; (-) strand; PAM type: YTN; PAM sequence: TTA
  source 1..20: mol_type = other DNA
agaatgaatgacttaattat

SEQ ID NO: 40781 - DNA, 20 bp, synthetic construct
  misc_feature 1..20: note = Description of Artificial Sequence: Synthetic oligonucleotide
  misc_feature 1..20: note = Target: SCN10A; (-) strand; PAM type: YTN; PAM sequence: CTT
  source 1..20: mol_type = other DNA
aagaatgaatgacttaatta

SEQ ID NO: 40782 - DNA, 20 bp, synthetic construct
  misc_feature 1..20: note = Description of Artificial Sequence: Synthetic oligonucleotide
  misc_feature 1..20: note = Target: SCN10A; (-) strand; PAM type: YTN; PAM sequence: CTG
  source 1..20: mol_type = other DNA
tgtaacttaagaatgaatga

SEQ ID NO: 40783 - DNA, 20 bp, synthetic construct
  misc_feature 1..20: note = Description of Artificial Sequence: Synthetic oligonucleotide
  misc_feature 1..20: note = Target: SCN10A; (-) strand; PAM type: YTN; PAM sequence: TTA
  source 1..20: mol_type = other DNA
gactgtgtaacttaagaatg

SEQ ID NO: 40784 - DNA, 20 bp, synthetic construct
  misc_feature 1..20: note = Description of Artificial Sequence: Synthetic oligonucleotide
  misc_feature 1..20: note = Target: SCN10A; (-) strand; PAM type: YTN; PAM sequence: TTA
  source 1..20: mol_type = other DNA
tcattagactgtgtaactta

SEQ ID NO: 40785 - DNA, 20 bp, synthetic construct
  misc_feature 1..20: note = Description of Artificial Sequence: Synthetic oligonucleotide
  misc_feature 1..20: note = Target: SCN10A; (-) strand; PAM type: YTN; PAM sequence: TTA
  source 1..20: mol_type = other DNA
ttatcattagactgtgtaac

SEQ ID NO: 40786 - DNA, 20 bp, synthetic construct
  misc_feature 1..20: note = Description of Artificial Sequence: Synthetic oligonucleotide
  misc_feature 1..20: note = Target: SCN10A; (-) strand; PAM type: YTN; PAM sequence: TTT
  source 1..20: mol_type = other DNA
attatcattagactgtgtaa

SEQ ID NO: 40787 - DNA, 20 bp, synthetic construct
  misc_feature 1..20: note = Description of Artificial Sequence: Synthetic oligonucleotide
  misc_feature 1..20: note = Target: SCN10A; (-) strand; PAM type: YTN; PAM sequence: TTT
  source 1..20: mol_type = other DNA
tattatcattagactgtgta

SEQ ID NO: 40788 - DNA, 20 bp, synthetic construct
  misc_feature 1..20: note = Description of Artificial Sequence: Synthetic oligonucleotide
  misc_feature 1..20: note = Target: SCN10A; (-) strand; PAM type: YTN; PAM sequence: TTT
  source 1..20: mol_type = other DNA
ttattatcattagactgtgt

SEQ ID NO: 40789 - DNA, 20 bp, synthetic construct
  misc_feature 1..20: note = Description of Artificial Sequence: Synthetic oligonucleotide
  misc_feature 1..20: note = Target: SCN10A; (-) strand; PAM type: YTN; PAM sequence: CTA
  source 1..20: mol_type = other DNA
aaaagtaaaaaaaagtaaag

SEQ ID NO: 40790 - DNA, 20 bp, synthetic construct
  misc_feature 1..20: note = Description of Artificial Sequence: Synthetic oligonucleotide
  misc_feature 1..20: note = Target: SCN10A; (-) strand; PAM type: YTN; PAM sequence: CTA
  source 1..20: mol_type = other DNA
atgctaaaaagtaaaaaaaa

SEQ ID NO: 40791 - DNA, 20 bp, synthetic construct
  misc_feature 1..20: note = Description of Artificial Sequence: Synthetic oligonucleotide
  misc_feature 1..20: note = Target: SCN10A; (-) strand; PAM type: YTN; PAM sequence: CTC
  source 1..20: mol_type = other DNA
ctaatgctaaaaagtaaaaa

SEQ ID NO: 40792 - DNA, 20 bp, synthetic construct
  misc_feature 1..20: note = Description of Artificial Sequence: Synthetic oligonucleotide
  misc_feature 1..20: note = Target: SCN10A; (-) strand; PAM type: YTN; PAM sequence: TTC
  source 1..20: mol_type = other DNA
tcctaatgctaaaaagtaaa

SEQ ID NO: 40793 - DNA, 20 bp, synthetic construct
  misc_feature 1..20: note = Description of Artificial Sequence: Synthetic oligonucleotide
  misc_feature 1..20: note = Target: SCN10A; (-) strand; PAM type: YTN; PAM sequence: TTT
  source 1..20: mol_type = other DNA
ctcctaatgctaaaaagtaa

SEQ ID NO: 40794 - DNA, 20 bp, synthetic construct
  misc_feature 1..20: note = Description of Artificial Sequence: Synthetic oligonucleotide
  misc_feature 1..20: note = Target: SCN10A; (-) strand; PAM type: YTN; PAM sequence: TTA
  source 1..20: mol_type = other DNA
ggtatttctcctaatgctaa

SEQ ID NO: 40795 - DNA, 20 bp, synthetic construct
  misc_feature 1..20: note = Description of Artificial Sequence: Synthetic oligonucleotide
  misc_feature 1..20: note = Target: SCN10A; (-) strand; PAM type: YTN; PAM sequence: CTA
  source 1..20: mol_type = other DNA
cattaggtatttctcctaat

SEQ ID NO: 40796 - DNA, 20 bp, synthetic construct
  misc_feature 1..20: note = Description of Artificial Sequence: Synthetic oligonucleotide
  misc_feature 1..20: note = Target: SCN10A; (-) strand; PAM type: YTN; PAM sequence: CTG
  source 1..20: mol_type = other DNA
cacccatcaacccgtcatct

SEQ ID NO: 40797 - DNA, 20 bp, synthetic construct
  misc_feature 1..20: note = Description of Artificial Sequence: Synthetic oligonucleotide
  misc_feature 1..20: note = Target: SCN10A; (-) strand; PAM type: YTN; PAM sequence: TTG
  source 1..20: mol_type = other DNA
ctgcacccatcaacccgtca

SEQ ID NO: 40798 - DNA, 20 bp, synthetic construct
  misc_feature 1..20: note = Description of Artificial Sequence: Synthetic oligonucleotide
  misc_feature 1..20: note = Target: SCN10A; (-) strand; PAM type: YTN; PAM sequence: TTT
  source 1..20: mol_type = other DNA
gctgcacccatcaacccgtc

SEQ ID NO: 40799 - DNA, 20 bp, synthetic construct
  misc_feature 1..20: note = Description of Artificial Sequence: Synthetic oligonucleotide
  misc_feature 1..20: note = Target: SCN10A; (-) strand; PAM type: YTN; PAM sequence: TTG
  source 1..20: mol_type = other DNA
gtttgctgcacccatcaacc

SEQ ID NO: 40800 - DNA, 20 bp, synthetic construct
  misc_feature 1..20: note = Description of Artificial Sequence: Synthetic oligonucleotide
  misc_feature 1..20: note = Target: SCN10A; (-) strand; PAM type: YTN; PAM sequence: TTA
  source 1..20: mol_type = other DNA
tataggtatacatgtgccat

SEQ ID NO: 40801 - DNA, 20 bp, synthetic construct
  misc_feature 1..20: note = Description of Artificial Sequence: Synthetic oligonucleotide
  misc_feature 1..20: note = Target: SCN10A; (-) strand; PAM type: YTN; PAM sequence: TTG
  source 1..20: mol_type = other DNA
ttatataggtatacatgtgc

SEQ ID NO: 40802 - DNA, 20 bp, synthetic construct
  misc_feature 1..20: note = Description of Artificial Sequence: Synthetic oligonucleotide
  misc_feature 1..20: note = Target: SCN10A; (-) strand; PAM type: YTN; PAM sequence: TTT
  source 1..20: mol_type = other DNA
gttatataggtatacatgtg

SEQ ID NO: 40803 - DNA, 20 bp, synthetic construct
  misc_feature 1..20: note = Description of Artificial Sequence: Synthetic oligonucleotide
  misc_feature 1..20: note = Target: SCN10A; (-) strand; PAM type: YTN; PAM sequence: CTA
  source 1..20: mol_type = other DNA
gggtacatgtgcacaatgta

SEQ ID NO: 40804 - DNA, 20 bp, synthetic construct
  misc_feature 1..20: note = Description of Artificial Sequence: Synthetic oligonucleotide
  misc_feature 1..20: note = Target: SCN10A; (-) strand; PAM type: YTN; PAM sequence: TTC
  source 1..20: mol_type = other DNA
tagggtacatgtgcacaatg

SEQ ID NO: 40805 - DNA, 20 bp, synthetic construct
  misc_feature 1..20: note = Description of Artificial Sequence: Synthetic oligonucleotide
  misc_feature 1..20: note = Target: SCN10A; (-) strand; PAM type: YTN; PAM sequence: TTA
  source 1..20: mol_type = other DNA
aattctagggtacatgtgca

SEQ ID NO: 40806 - DNA, 20 bp, synthetic construct
  misc_feature 1..20: note = Description of Artificial Sequence: Synthetic oligonucleotide
  misc_feature 1..20: note = Target: SCN10A; (-) strand; PAM type: YTN; PAM sequence: TTT
  source 1..20: mol_type = other DNA
aaattctagggtacatgtgc

SEQ ID NO: 40807 - DNA, 20 bp, synthetic construct
  misc_feature 1..20: note = Description of Artificial Sequence: Synthetic oligonucleotide
  misc_feature 1..20: note = Target: SCN10A; (-) strand; PAM type: YTN; PAM sequence: CTT
  source 1..20: mol_type = other DNA
taaattctagggtacatgtg

SEQ ID NO: 40808 - DNA, 20 bp, synthetic construct
  misc_feature 1..20: note = Description of Artificial Sequence: Synthetic oligonucleotide
  misc_feature 1..20: note = Target: SCN10A; (-) strand; PAM type: YTN; PAM sequence: TTA
  source 1..20: mol_type = other DNA
tactttaaattctagggtac

SEQ ID NO: 40809 - DNA, 20 bp, synthetic construct
  misc_feature 1..20: note = Description of Artificial Sequence: Synthetic oligonucleotide
  misc_feature 1..20: note = Target: SCN10A; (-) strand; PAM type: YTN; PAM sequence: TTA
  source 1..20: mol_type = other DNA
aaattatactttaaattcta

SEQ ID NO: 40810 - DNA, 20 bp, synthetic construct
  misc_feature 1..20: note = Description of Artificial Sequence: Synthetic oligonucleotide
  misc_feature 1..20: note = Target: SCN10A; (-) strand; PAM type: YTN; PAM sequence: TTT
  source 1..20: mol_type = other DNA
aaaattatactttaaattct

SEQ ID NO: 40811 - DNA, 20 bp, synthetic construct
  misc_feature 1..20: note = Description of Artificial Sequence: Synthetic oligonucleotide
  misc_feature 1..20: note = Target: SCN10A; (-) strand; PAM type: YTN; PAM sequence: TTT
  source 1..20: mol_type = other DNA
taaaattatactttaaattc

SEQ ID NO: 40812 - DNA, 20 bp, synthetic construct
  misc_feature 1..20: note = Description of Artificial Sequence: Synthetic oligonucleotide
  misc_feature 1..20: note = Target: SCN10A; (-) strand; PAM type: YTN; PAM sequence: TTT
  source 1..20: mol_type = other DNA
ttaaaattatactttaaatt

SEQ ID NO: 40813 - DNA, 20 bp, synthetic construct
  misc_feature 1..20: note = Description of Artificial Sequence: Synthetic oligonucleotide
  misc_feature 1..20: note = Target: SCN10A; (-) strand; PAM type: YTN; PAM sequence: TTT
  source 1..20: mol_type = other DNA
tttaaaattatactttaaat

SEQ ID NO: 40814 - DNA, 20 bp, synthetic construct
  misc_feature 1..20: note = Description of Artificial Sequence: Synthetic oligonucleotide
  misc_feature 1..20: note = Target: SCN10A; (-) strand; PAM type: YTN; PAM sequence: TTT
  source 1..20: mol_type = other DNA
ttttaaaattatactttaaa

SEQ ID NO: 40815 - DNA, 20 bp, synthetic construct
  misc_feature 1..20: note = Description of Artificial Sequence: Synthetic oligonucleotide
  misc_feature 1..20: note = Target: SCN10A; (-) strand; PAM type: YTN; PAM sequence: CTT
  source 1..20: mol_type = other DNA
tttttaaaattatactttaa

SEQ ID NO: 40816 - DNA, 20 bp, synthetic construct
  misc_feature 1..20: note = Description of Artificial Sequence: Synthetic oligonucleotide
  misc_feature 1..20: note = Target: SCN10A; (-) strand; PAM type: YTN; PAM sequence: TTC
  source 1..20: mol_type = other DNA
tttttttaaaattatacttt

SEQ ID NO: 40817 - DNA, 20 bp, synthetic construct
  misc_feature 1..20: note = Description of Artificial Sequence: Synthetic oligonucleotide
  misc_feature 1..20: note = Target: SCN10A; (-) strand; PAM type: YTN; PAM sequence: TTT
  source 1..20: mol_type = other DNA
ctttttttaaaattatactt

SEQ ID NO: 40818 - DNA, 20 bp, synthetic construct
  misc_feature 1..20: note = Description of Artificial Sequence: Synthetic oligonucleotide
  misc_feature 1..20: note = Target: SCN10A; (-) strand; PAM type: YTN; PAM sequence: TTT
  source 1..20: mol_type = other DNA
tctttttttaaaattatact

SEQ ID NO: 40819 - DNA, 20 bp, synthetic construct
  misc_feature 1..20: note = Description of Artificial Sequence: Synthetic oligonucleotide
  misc_feature 1..20: note = Target: SCN10A; (-) strand; PAM type: YTN; PAM sequence: TTT
  source 1..20: mol_type = other DNA
ttctttttttaaaattatac

SEQ ID NO: 40820 - DNA, 20 bp, synthetic construct
  misc_feature 1..20: note = Description of Artificial Sequence: Synthetic oligonucleotide
  misc_feature 1..20: note = Target: SCN10A; (-) strand; PAM type: YTN; PAM sequence: TTT
  source 1..20: mol_type = other DNA
tttctttttttaaaattata

SEQ ID NO: 40821 - DNA, 20 bp, synthetic construct
  misc_feature 1..20: note = Description of Artificial Sequence: Synthetic oligonucleotide
  misc_feature 1..20: note = Target: SCN10A; (-) strand; PAM type: YTN; PAM sequence: TTT
  source 1..20: mol_type = other DNA
ttttctttttttaaaattat

SEQ ID NO: 40822 - DNA, 20 bp, synthetic construct
  misc_feature 1..20: note = Description of Artificial Sequence: Synthetic oligonucleotide
  misc_feature 1..20: note = Target: SCN10A; (-) strand; PAM type: YTN; PAM sequence: TTT
  source 1..20: mol_type = other DNA
tttttctttttttaaaatta

SEQ ID NO: 40823 - DNA, 20 bp, synthetic construct
  misc_feature 1..20: note = Description of Artificial Sequence: Synthetic oligonucleotide
  misc_feature 1..20: note = Target: SCN10A; (-) strand; PAM type: YTN; PAM sequence: CTT
  source 1..20: mol_type = other DNA
ttttttctttttttaaaatt

SEQ ID NO: 40824 - DNA, 20 bp, synthetic construct
  misc_feature 1..20: note = Description of Artificial Sequence: Synthetic oligonucleotide
  misc_feature 1..20: note = Target: SCN10A; (-) strand; PAM type: YTN; PAM sequence: TTC
  source 1..20: mol_type = other DNA
cttttttttctttttttaaa

SEQ ID NO: 40825 - DNA, 20 bp, synthetic construct
  misc_feature 1..20: note = Description of Artificial Sequence: Synthetic oligonucleotide
  misc_feature 1..20: note = Target: SCN10A; (-) strand; PAM type: YTN; PAM sequence: TTA
  source 1..20: mol_type = other DNA
aaaagacaattccttttttt

SEQ ID NO: 40826 - DNA, 20 bp, synthetic construct
  misc_feature 1..20: note = Description of Artificial Sequence: Synthetic oligonucleotide
  misc_feature 1..20: note = Target: SCN10A; (-) strand; PAM type: YTN; PAM sequence: TTA
  source 1..20: mol_type = other DNA
caaataaattaaaaagacaa

SEQ ID NO: 40827 - DNA, 20 bp, synthetic construct
  misc_feature 1..20: note = Description of Artificial Sequence: Synthetic oligonucleotide
  misc_feature 1..20: note = Target: SCN10A; (-) strand; PAM type: YTN; PAM sequence: TTT
  source 1..20: mol_type = other DNA
acaaataaattaaaaagaca

SEQ ID NO: 40828 - DNA, 20 bp, synthetic construct
  misc_feature 1..20: note = Description of Artificial Sequence: Synthetic oligonucleotide
  misc_feature 1..20: note = Target: SCN10A; (-) strand; PAM type: YTN; PAM sequence: CTG
  source 1..20: mol_type = other DNA
aaggtttacaaataaattaa

SEQ ID NO: 40829 - DNA, 20 bp, synthetic construct
  misc_feature 1..20: note = Description of Artificial Sequence: Synthetic oligonucleotide
  misc_feature 1..20: note = Target: SCN10A; (-) strand; PAM type: YTN; PAM sequence: CTG
  source 1..20: mol_type = other DNA
aacacaggctgaaggtttac

SEQ ID NO: 40830 - DNA, 20 bp, synthetic construct
  misc_feature 1..20: note = Description of Artificial Sequence: Synthetic oligonucleotide
  misc_feature 1..20: note = Target: SCN10A; (-) strand; PAM type: YTN; PAM sequence: CTG
  source 1..20: mol_type = other DNA
gagctgaacacaggctgaag

SEQ ID NO: 40831 - DNA, 20 bp, synthetic construct
  misc_feature 1..20: note = Description of Artificial Sequence: Synthetic oligonucleotide
  misc_feature 1..20: note = Target: SCN10A; (-) strand; PAM type: YTN; PAM sequence: TTC
  source 1..20: mol_type = other DNA
agtctggagctgaacacagg

SEQ ID NO: 40832 - DNA, 20 bp, synthetic construct
  misc_feature 1..20: note = Description of Artificial Sequence: Synthetic oligonucleotide
  misc_feature 1..20: note = Target: SCN10A; (-) strand; PAM type: YTN; PAM sequence: CTT
  source 1..20: mol_type = other DNA
cagtctggagctgaacacag

SEQ ID NO: 40833 - DNA, 20 bp, synthetic construct
  misc_feature 1..20: note = Description of Artificial Sequence: Synthetic oligonucleotide
  misc_feature 1..20: note = Target: SCN10A; (-) strand; PAM type: YTN; PAM sequence: TTA
  source 1..20: mol_type = other DNA
gggatgcaagataagacaga

SEQ ID NO: 40834 - DNA, 20 bp, synthetic construct
  misc_feature 1..20: note = Description of Artificial Sequence: Synthetic oligonucleotide
  misc_feature 1..20: note = Target: SCN10A; (-) strand; PAM type: YTN; PAM sequence: CTA
  source 1..20: mol_type = other DNA
agtgttagggatgcaagata

SEQ ID NO: 40835 - DNA, 20 bp, synthetic construct
  misc_feature 1..20: note = Description of Artificial Sequence: Synthetic oligonucleotide
  misc_feature 1..20: note = Target: SCN10A; (-) strand; PAM type: YTN; PAM sequence: TTC
  source 1..20: mol_type = other DNA
ctaagtgttagggatgcaag

SEQ ID NO: 40836 - DNA, 20 bp, synthetic construct
  misc_feature 1..20: note = Description of Artificial Sequence: Synthetic oligonucleotide
  misc_feature 1..20: note = Target: SCN10A; (-) strand; PAM type: YTN; PAM sequence: TTT
  source 1..20: mol_type = other DNA
cctaagtgttagggatgcaa

SEQ ID NO: 40837 - DNA, 20 bp, synthetic construct
  misc_feature 1..20: note = Description of Artificial Sequence: Synthetic oligonucleotide
  misc_feature 1..20: note = Target: SCN10A; (-) strand; PAM type: YTN; PAM sequence: CTT
  source 1..20: mol_type = other DNA
tcctaagtgttagggatgca

SEQ ID NO: 40838 - DNA, 20 bp, synthetic construct
  misc_feature 1..20: note = Description of Artificial Sequence: Synthetic oligonucleotide
  misc_feature 1..20: note = Target: SCN10A; (-) strand; PAM type: YTN; PAM sequence: TTA
  source 1..20: mol_type = other DNA
agacaaaagtgaagtcactt

SEQ ID NO: 40839 - DNA, 20 bp, synthetic construct
  misc_feature 1..20: note = Description of Artificial Sequence: Synthetic oligonucleotide
  misc_feature 1..20: note = Target: SCN10A; (-) strand; PAM type: YTN; PAM sequence: CTT
  source 1..20: mol_type = other DNA
aagacaaaagtgaagtcact

SEQ ID NO: 40840 - DNA, 20 bp, synthetic construct
  misc_feature 1..20: note = Description of Artificial Sequence: Synthetic oligonucleotide
  misc_feature 1..20: note = Target: SCN10A; (-) strand; PAM type: YTN; PAM sequence: TTG
  source 1..20: mol_type = other DNA
cttaagacaaaagtgaagtc

SEQ ID NO: 40841 - DNA, 20 bp, synthetic construct
  misc_feature 1..20: note = Description of Artificial Sequence: Synthetic oligonucleotide
  misc_feature 1..20: note = Target: SCN10A; (-) strand; PAM type: YTN; PAM sequence: TTT
  source 1..20: mol_type = other DNA
gcttaagacaaaagtgaagt

SEQ ID NO: 40842 - DNA, 20 bp, synthetic construct
  misc_feature 1..20: note = Description of Artificial Sequence: Synthetic oligonucleotide
  misc_feature 1..20: note = Target: SCN10A; (-) strand; PAM type: YTN; PAM sequence: CTG
  source 1..20: mol_type = other DNA
gagcatttgcttaagacaaa

SEQ ID NO: 40843 - DNA, 20 bp, synthetic construct
  misc_feature 1..20: note = Description of Artificial Sequence: Synthetic oligonucleotide
  misc_feature 1..20: note = Target: SCN10A; (-) strand; PAM type: YTN; PAM sequence: CTG
  source 1..20: mol_type = other DNA
gtgtgctggagcatttgctt

SEQ ID NO: 40844 - DNA, 20 bp, synthetic construct
  misc_feature 1..20: note = Description of Artificial Sequence: Synthetic oligonucleotide
  misc_feature 1..20: note = Target: SCN10A; (-) strand; PAM type: YTN; PAM sequence: TTA
  source 1..20: mol_type = other DNA
acacagaatagtaggtatcg

SEQ ID NO: 40845 - DNA, 20 bp, synthetic construct
  misc_feature 1..20: note = Description of Artificial Sequence: Synthetic oligonucleotide
  misc_feature 1..20: note = Target: SCN10A; (-) strand; PAM type: YTN; PAM sequence: CTT
  source 1..20: mol_type = other DNA
aacacagaatagtaggtatc

SEQ ID NO: 40846 - DNA, 20 bp, synthetic construct
  misc_feature 1..20: note = Description of Artificial Sequence: Synthetic oligonucleotide
  misc_feature 1..20: note = Target: SCN10A; (-) strand; PAM type: YTN; PAM sequence: TTC
  source 1..20: mol_type = other DNA
agaacatccacttaacacag

SEQ ID NO: 40847 - DNA, 20 bp, synthetic construct
  misc_feature 1..20: note = Description of Artificial Sequence: Synthetic oligonucleotide
  misc_feature 1..20: note = Target: SCN10A; (-) strand; PAM type: YTN; PAM sequence: CTG
  source 1..20: mol_type = other DNA
cataacacatagacacagat

SEQ ID NO: 40848 - DNA, 20 bp, synthetic construct
  misc_feature 1..20: note = Description of Artificial Sequence: Synthetic oligonucleotide
  misc_feature 1..20: note = Target: SCN10A; (-) strand; PAM type: YTN; PAM sequence: TTA
  source 1..20: mol_type = other DNA
aactgcataacacatagaca

SEQ ID NO: 40849 - DNA, 20 bp, synthetic construct
  misc_feature 1..20: note = Description of Artificial Sequence: Synthetic oligonucleotide
  misc_feature 1..20: note = Target: SCN10A; (-) strand; PAM type: YTN; PAM sequence: TTA
  source 1..20: mol_type = other DNA
taccattaaactgcataaca

SEQ ID NO: 40850 - DNA, 20 bp, synthetic construct
  misc_feature 1..20: note = Description of Artificial Sequence: Synthetic oligonucleotide
  misc_feature 1..20: note = Target: SCN10A; (-) strand; PAM type: YTN; PAM sequence: TTT
  source 1..20: mol_type = other DNA
ataccattaaactgcataac

SEQ ID NO: 40851 - DNA, 20 bp, synthetic construct
  misc_feature 1..20: note = Description of Artificial Sequence: Synthetic oligonucleotide
  misc_feature 1..20: note = Target: SCN10A; (-) strand; PAM type: YTN; PAM sequence: TTT
  source 1..20: mol_type = other DNA
tataccattaaactgcataa

SEQ ID NO: 40852 - DNA, 20 bp, synthetic construct
  misc_feature 1..20: note = Description of Artificial Sequence: Synthetic oligonucleotide
  misc_feature 1..20: note = Target: SCN10A; (-) strand; PAM type: YTN; PAM sequence: TTT
  source 1..20: mol_type = other DNA
ttataccattaaactgcata

SEQ ID NO: 40853 - DNA, 20 bp, synthetic construct
  misc_feature 1..20: note = Description of Artificial Sequence: Synthetic oligonucleotide
  misc_feature 1..20: note = Target: SCN10A; (-) strand; PAM type: YTN; PAM sequence: CTT
  source 1..20: mol_type = other DNA
tttataccattaaactgcat

SEQ ID NO: 40854 - DNA, 20 bp, synthetic construct
  misc_feature 1..20: note = Description of Artificial Sequence: Synthetic oligonucleotide
  misc_feature 1..20: note = Target: SCN10A; (-) strand; PAM type: YTN; PAM sequence: CTA
  source 1..20: mol_type = other DNA
actttttataccattaaact

SEQ ID NO: 40855 - DNA, 20 bp, synthetic construct
  misc_feature 1..20: note = Description of Artificial Sequence: Synthetic oligonucleotide
  misc_feature 1..20: note = Target: SCN10A; (-) strand; PAM type: YTN; PAM sequence: CTC
  source 1..20: mol_type = other DNA
caccataaacaccgccctaa

SEQ ID NO: 40856 - DNA, 20 bp, synthetic construct
  misc_feature 1..20: note = Description of Artificial Sequence: Synthetic oligonucleotide
  misc_feature 1..20: note = Target: SCN10A; (-) strand; PAM type: YTN; PAM sequence: CTC
  source 1..20: mol_type = other DNA
aaaagtatgcctccaccata

SEQ ID NO: 40857 - DNA, 20 bp, synthetic construct
  misc_feature 1..20: note = Description of Artificial Sequence: Synthetic oligonucleotide
  misc_feature 1..20: note = Target: SCN10A; (-) strand; PAM type: YTN; PAM sequence: TTC
  source 1..20: mol_type = other DNA
tcaaaagtatgcctccacca

SEQ ID NO: 40858 - DNA, 20 bp, synthetic construct
  misc_feature 1..20: note = Description of Artificial Sequence: Synthetic oligonucleotide
  misc_feature 1..20: note = Target: SCN10A; (-) strand; PAM type: YTN; PAM sequence: CTG
  source 1..20: mol_type = other DNA
caagttctcaaaagtatgcc

SEQ ID NO: 40859 - DNA, 20 bp, synthetic construct
  misc_feature 1..20: note = Description of Artificial Sequence: Synthetic oligonucleotide
  misc_feature 1..20: note = Target: SCN10A; (-) strand; PAM type: YTN; PAM sequence: CTG
  source 1..20: mol_type = other DNA
gaacctgcaagttctcaaaa

SEQ ID NO: 40860 - DNA, 20 bp, synthetic construct
  misc_feature 1..20: note = Description of Artificial Sequence: Synthetic oligonucleotide
  misc_feature 1..20: note = Target: SCN10A; (-) strand; PAM type: YTN; PAM sequence: CTG
  source 1..20: mol_type = other DNA
tacaaatatctggaacctgc

SEQ ID NO: 40861 - DNA, 20 bp, synthetic construct
  misc_feature 1..20: note = Description of Artificial Sequence: Synthetic oligonucleotide
  misc_feature 1..20: note = Target: SCN10A; (-) strand; PAM type: YTN; PAM sequence: CTG
  source 1..20: mol_type = other DNA
actgtacaaatatctggaac

SEQ ID NO: 40862 - DNA, 20 bp, synthetic construct
  misc_feature 1..20: note = Description of Artificial Sequence: Synthetic oligonucleotide
  misc_feature 1..20: note = Target: SCN10A; (-) strand; PAM type: YTN; PAM sequence: CTG
  source 1..20: mol_type = other DNA
aagggagataagagacagga

SEQ ID NO: 40863 - DNA, 20 bp, synthetic construct
  misc_feature 1..20: note = Description of Artificial Sequence: Synthetic oligonucleotide
  misc_feature 1..20: note = Target: SCN10A; (-) strand; PAM type: YTN; PAM sequence: TTA
  source 1..20: mol_type = other DNA
gcactgaagggagataagag

SEQ ID NO: 40864 - DNA, 20 bp, synthetic construct
  misc_feature 1..20: note = Description of Artificial Sequence: Synthetic oligonucleotide
  misc_feature 1..20: note = Target: SCN10A; (-) strand; PAM type: YTN; PAM sequence: CTT
  source 1..20: mol_type = other DNA
agcactgaagggagataaga

SEQ ID NO: 40865 - DNA, 20 bp, synthetic construct
  misc_feature 1..20: note = Description of Artificial Sequence: Synthetic oligonucleotide
  misc_feature 1..20: note = Target: SCN10A; (-) strand; PAM type: YTN; PAM sequence: CTG
  source 1..20: mol_type = other DNA
gcccagaatgtgaggatacc

SEQ ID NO: 40866 - DNA, 20 bp, synthetic construct
  misc_feature 1..20: note = Description of Artificial Sequence: Synthetic oligonucleotide
  misc_feature 1..20: note = Target: SCN10A; (-) strand; PAM type: YTN; PAM sequence: CTC
  source 1..20: mol_type = other DNA
tggcccagaatgtgaggata

SEQ ID NO: 40867 - DNA, 20 bp, synthetic construct
  misc_feature 1..20: note = Description of Artificial Sequence: Synthetic oligonucleotide
  misc_feature 1..20: note = Target: SCN10A; (-) strand; PAM type: YTN; PAM sequence: CTC
  source 1..20: mol_type = other DNA
tctggcccagaatgtgagga

SEQ ID NO: 40868 - DNA, 20 bp, synthetic construct
  misc_feature 1..20: note = Description of Artificial Sequence: Synthetic oligonucleotide
  misc_feature 1..20: note = Target: SCN10A; (-) strand; PAM type: YTN; PAM sequence: CTA
  source 1..20: mol_type = other DNA
gaatctctctggcccagaat

SEQ ID NO: 40869 - DNA, 20 bp, synthetic construct
  misc_feature 1..20: note = Description of Artificial Sequence: Synthetic oligonucleotide
  misc_feature 1..20: note = Target: SCN10A; (-) strand; PAM type: YTN; PAM sequence: CTC
  source 1..20: mol_type = other DNA
aaccccacccacaagaggta

SEQ ID NO: 40870 - DNA, 20 bp, synthetic construct
  misc_feature 1..20: note = Description of Artificial Sequence: Synthetic oligonucleotide
  misc_feature 1..20: note = Target: SCN10A; (-) strand; PAM type: YTN; PAM sequence: TTC
  source 1..20: mol_type = other DNA
tcaaccccacccacaagagg

SEQ ID NO: 40871 - DNA, 20 bp, synthetic construct
  misc_feature 1..20: note = Description of Artificial Sequence: Synthetic oligonucleotide
  misc_feature 1..20: note = Target: SCN10A; (-) strand; PAM type: YTN; PAM sequence: CTT
  source 1..20: mol_type = other DNA
ctcaaccccacccacaagag

SEQ ID NO: 40872 - DNA, 20 bp, synthetic construct
  misc_feature 1..20: note = Description of Artificial Sequence: Synthetic oligonucleotide
  misc_feature 1..20: note = Target: SCN10A; (-) strand; PAM type: YTN; PAM sequence: CTA
  source 1..20: mol_type = other DNA
ccttctcaaccccacccaca

SEQ ID NO: 40873 - DNA, 20 bp, synthetic construct
  misc_feature 1..20: note = Description of Artificial Sequence: Synthetic oligonucleotide
  misc_feature 1..20: note = Target: SCN10A; (-) strand; PAM type: YTN; PAM sequence: CTG
  source 1..20: mol_type = other DNA
agaaccagagctaccttctc

SEQ ID NO: 40874 - DNA, 20 bp, synthetic construct
  misc_feature 1..20: note = Description of Artificial Sequence: Synthetic oligonucleotide
  misc_feature 1..20: note = Target: SCN10A; (-) strand; PAM type: YTN; PAM sequence: TTC
  source 1..20: mol_type = other DNA
catgggagccaacctgagaa

SEQ ID NO: 40875 - DNA, 20 bp, synthetic construct
  misc_feature 1..20: note = Description of Artificial Sequence: Synthetic oligonucleotide
  misc_feature 1..20: note = Target: SCN10A; (-) strand; PAM type: YTN; PAM sequence: TTT
  source 1..20: mol_type = other DNA
ccatgggagccaacctgaga

SEQ ID NO: 40876 - DNA, 20 bp, synthetic construct
  misc_feature 1..20: note = Description of Artificial Sequence: Synthetic oligonucleotide
  misc_feature 1..20: note = Target: SCN10A; (-) strand; PAM type: YTN; PAM sequence: CTA
  source 1..20: mol_type = other DNA
gatttccatgggagccaacc

SEQ ID NO: 40877 - DNA, 20 bp, synthetic construct
  misc_feature 1..20: note = Description of Artificial Sequence: Synthetic oligonucleotide
  misc_feature 1..20: note = Target: SCN10A; (-) strand; PAM type: YTN; PAM sequence: TTA
  source 1..20: mol_type = other DNA
caaggtagaaactagatttc

SEQ ID NO: 40878 - DNA, 20 bp, synthetic construct
  misc_feature 1..20: note = Description of Artificial Sequence: Synthetic oligonucleotide
  misc_feature 1..20: note = Target: SCN10A; (-) strand; PAM type: YTN; PAM sequence: CTG
  source 1..20: mol_type = other DNA
gtggtacaattacaaggtag

SEQ ID NO: 40879 - DNA, 20 bp, synthetic construct
  misc_feature 1..20: note = Description of Artificial Sequence: Synthetic oligonucleotide
  misc_feature 1..20: note = Target: SCN10A; (-) strand; PAM type: YTN; PAM sequence: TTC
  source 1..20: mol_type = other DNA
acctggtggtacaattacaa

SEQ ID NO: 40880 - DNA, 20 bp, synthetic construct
  misc_feature 1..20: note = Description of Artificial Sequence: Synthetic oligonucleotide
  misc_feature 1..20: note = Target: SCN10A; (-) strand; PAM type: YTN; PAM sequence: TTC
  source 1..20: mol_type = other DNA
caagttcacctggtggtaca

SEQ ID NO: 40881 - DNA, 20 bp, synthetic construct
  misc_feature 1..20: note = Description of Artificial Sequence: Synthetic oligonucleotide
  misc_feature 1..20: note = Target: SCN10A; (-) strand; PAM type: YTN; PAM sequence: TTT
  source 1..20: mol_type = other DNA
ccaagttcacctggtggtac

SEQ ID NO: 40882 - DNA, 20 bp, synthetic construct
  misc_feature 1..20: note = Description of Artificial Sequence: Synthetic oligonucleotide
  misc_feature 1..20: note = Target: SCN10A; (-) strand; PAM type: YTN; PAM sequence: CTA
  source 1..20: mol_type = other DNA
gagccagtttccaagttcac

SEQ ID NO: 40883 - DNA, 20 bp, synthetic construct
  misc_feature 1..20: note = Description of Artificial Sequence: Synthetic oligonucleotide
  misc_feature 1..20: note = Target: SCN10A; (-) strand; PAM type: YTN; PAM sequence: TTC
  source 1..20: mol_type = other DNA
actagagccagtttccaagt

SEQ ID NO: 40884 - DNA, 20 bp, synthetic construct
  misc_feature 1..20: note = Description of Artificial Sequence: Synthetic oligonucleotide
  misc_feature 1..20: note = Target: SCN10A; (-) strand; PAM type: YTN; PAM sequence: TTT
  source 1..20: mol_type = other DNA
cactagagccagtttccaag

SEQ ID NO: 40885 - DNA, 20 bp, synthetic construct
  misc_feature 1..20: note = Description of Artificial Sequence: Synthetic oligonucleotide
  misc_feature 1..20: note = Target: SCN10A; (-) strand; PAM type: YTN; PAM sequence: TTG
  source 1..20: mol_type = other DNA
aaaatttcactagagccagt

SEQ ID NO: 40886 - DNA, 20 bp, synthetic construct
  misc_feature 1..20: note = Description of Artificial Sequence: Synthetic oligonucleotide
  misc_feature 1..20: note = Target: SCN10A; (-) strand; PAM type: YTN; PAM sequence: TTT
  source 1..20: mol_type = other DNA
gaaaatttcactagagccag

SEQ ID NO: 40887 - DNA, 20 bp, synthetic construct
  misc_feature 1..20: note = Description of Artificial Sequence: Synthetic oligonucleotide
  misc_feature 1..20: note = Target: SCN10A; (-) strand; PAM type: YTN; PAM sequence: TTT
  source 1..20: mol_type = other DNA
tgaaaatttcactagagcca

SEQ ID NO: 40888 - DNA, 20 bp, synthetic construct
  misc_feature 1..20: note = Description of Artificial Sequence: Synthetic oligonucleotide
  misc_feature 1..20: note = Target: SCN10A; (-) strand; PAM type: YTN; PAM sequence: CTT
  source 1..20: mol_type = other DNA
ttgaaaatttcactagagcc

SEQ ID NO: 40889 - DNA, 20 bp, synthetic construct
  misc_feature 1..20: note = Description of Artificial Sequence: Synthetic oligonucleotide
  misc_feature 1..20: note = Target: SCN10A; (-) strand; PAM type: YTN; PAM sequence: TTA
  source 1..20: mol_type = other DNA
tcttttgaaaatttcactag

SEQ ID NO: 40890 - DNA, 20 bp, synthetic construct
  misc_feature 1..20: note = Description of Artificial Sequence: Synthetic oligonucleotide
  misc_feature 1..20: note = Target: SCN10A; (-) strand; PAM type: YTN; PAM sequence: TTG
  source 1..20: mol_type = other DNA
gaaatgtatccaaatgcaag

SEQ ID NO: 40891 - DNA, 20 bp, synthetic construct
  misc_feature 1..20: note = Description of Artificial Sequence: Synthetic oligonucleotide
  misc_feature 1..20: note = Target: SCN10A; (-) strand; PAM type: YTN; PAM sequence: TTT
  source 1..20: mol_type = other DNA
ggaaatgtatccaaatgcaa

SEQ ID NO: 40892 - DNA, 20 bp, synthetic construct
  misc_feature 1..20: note = Description of Artificial Sequence: Synthetic oligonucleotide
  misc_feature 1..20: note = Target: SCN10A; (-) strand; PAM type: YTN; PAM sequence: TTT
  source 1..20: mol_type = other DNA
tggaaatgtatccaaatgca

SEQ ID NO: 40893 - DNA, 20 bp, synthetic construct
  misc_feature 1..20: note = Description of Artificial Sequence: Synthetic oligonucleotide
  misc_feature 1..20: note = Target: SCN10A; (-) strand; PAM type: YTN; PAM sequence: TTT
  source 1..20: mol_type = other DNA
ttggaaatgtatccaaatgc

SEQ ID NO: 40894 - DNA, 20 bp, synthetic construct
  misc_feature 1..20: note = Description of Artificial Sequence: Synthetic oligonucleotide
  misc_feature 1..20: note = Target: SCN10A; (-) strand; PAM type: YTN; PAM sequence: TTG
  source 1..20: mol_type = other DNA
catgacacggagtttttgga

SEQ ID NO: 40895 - DNA, 20 bp, synthetic construct
  misc_feature 1..20: note = Description of Artificial Sequence: Synthetic oligonucleotide
  misc_feature 1..20: note = Target: SCN10A; (-) strand; PAM type: YTN; PAM sequence: CTT
  source 1..20: mol_type = other DNA
gcatgacacggagtttttgg

SEQ ID NO: 40896 - DNA, 20 bp, synthetic construct
  misc_feature 1..20: note = Description of Artificial Sequence: Synthetic oligonucleotide
  misc_feature 1..20: note = Target: SCN10A; (-) strand; PAM type: YTN; PAM sequence: TTG
  source 1..20: mol_type = other DNA
gaaaagggatgcaatataca

SEQ ID NO: 40897 - DNA, 20 bp, synthetic construct
  misc_feature 1..20: note = Description of Artificial Sequence: Synthetic oligonucleotide
  misc_feature 1..20: note = Target: SCN10A; (-) strand; PAM type: YTN; PAM sequence: TTG
  source 1..20: mol_type = other DNA
taatgggaaacattggaaaa

SEQ ID NO: 40898 - DNA, 20 bp, synthetic construct
  misc_feature 1..20: note = Description of Artificial Sequence: Synthetic oligonucleotide
  misc_feature 1..20: note = Target: SCN10A; (-) strand; PAM type: YTN; PAM sequence: CTA
  source 1..20: mol_type = other DNA
aattgtaatgggaaacattg

SEQ ID NO: 40899 - DNA, 20 bp, synthetic construct
  misc_feature 1..20: note = Description of Artificial Sequence: Synthetic oligonucleotide
  misc_feature 1..20: note = Target: SCN10A; (-) strand; PAM type: YTN; PAM sequence: TTC
  source 1..20: mol_type = other DNA
ctaaattgtaatgggaaaca

SEQ ID NO: 40900 - DNA, 20 bp, synthetic construct
  misc_feature 1..20: note = Description of Artificial Sequence: Synthetic oligonucleotide
  misc_feature 1..20: note = Target: SCN10A; (-) strand; PAM type: YTN; PAM sequence: TTT
  source 1..20: mol_type = other DNA
cctaaattgtaatgggaaac

SEQ ID NO: 40901 - DNA, 20 bp, synthetic construct
  misc_feature 1..20: note = Description of Artificial Sequence: Synthetic oligonucleotide
  misc_feature 1..20: note = Target: SCN10A; (-) strand; PAM type: YTN; PAM sequence: CTG
  source 1..20: mol_type = other DNA
cacaaatgcatttcctaaat

SEQ ID NO: 40902 - DNA, 20 bp, synthetic construct
  misc_feature 1..20: note = Description of Artificial Sequence: Synthetic oligonucleotide
  misc_feature 1..20: note = Target: SCN10A; (-) strand; PAM type: YTN; PAM sequence: TTC
  source 1..20: mol_type = other DNA
tgcacaaatgcatttcctaa

SEQ ID NO: 40903 - DNA, 20 bp, synthetic construct
  misc_feature 1..20: note = Description of Artificial Sequence: Synthetic oligonucleotide
  misc_feature 1..20: note = Target: SCN10A; (-) strand; PAM type: YTN; PAM sequence: TTT
  source 1..20: mol_type = other DNA
ctgcacaaatgcatttccta

SEQ ID NO: 40904 - DNA, 20 bp, synthetic construct
  misc_feature 1..20: note = Description of Artificial Sequence: Synthetic oligonucleotide
  misc_feature 1..20: note = Target: SCN10A; (-) strand; PAM type: YTN; PAM sequence: TTT
  source 1..20: mol_type = other DNA
tctgcacaaatgcatttcct

SEQ ID NO: 40905 - DNA, 20 bp, synthetic construct
  misc_feature 1..20: note = Description of Artificial Sequence: Synthetic oligonucleotide
  misc_feature 1..20: note = Target: SCN10A; (-) strand; PAM type: YTN; PAM sequence: TTT
  source 1..20: mol_type = other DNA
ttctgcacaaatgcatttcc

SEQ ID NO: 40906 - DNA, 20 bp, synthetic construct
  misc_feature 1..20: note = Description of Artificial Sequence: Synthetic oligonucleotide
  misc_feature 1..20: note = Target: SCN10A; (-) strand; PAM type: YTN; PAM sequence: TTT
  source 1..20: mol_type = other DNA
tttctgcacaaatgcatttc

SEQ ID NO: 40907 - DNA, 20 bp, synthetic construct
  misc_feature 1..20: note = Description of Artificial Sequence: Synthetic oligonucleotide
  misc_feature 1..20: note = Target: SCN10A; (-) strand; PAM type: YTN; PAM sequence: CTC
  source 1..20: mol_type = other DNA
attttttctgcacaaatgca

SEQ ID NO: 40908 - DNA, 20 bp, synthetic construct
  misc_feature 1..20: note = Description of Artificial Sequence: Synthetic oligonucleotide
  misc_feature 1..20: note = Target: SCN10A; (-) strand; PAM type: YTN; PAM sequence: TTC
  source 1..20: mol_type = other DNA
tcattttttctgcacaaatg

SEQ ID NO: 40909 - DNA, 20 bp, synthetic construct
  misc_feature 1..20: note = Description of Artificial Sequence: Synthetic oligonucleotide
  misc_feature 1..20: note = Target: SCN10A; (-) strand; PAM type: YTN; PAM sequence: TTT
  source 1..20: mol_type = other DNA
ctcattttttctgcacaaat

SEQ ID NO: 40910 - DNA, 20 bp, synthetic construct
  misc_feature 1..20: note = Description of Artificial Sequence: Synthetic oligonucleotide
  misc_feature 1..20: note = Target: SCN10A; (-) strand; PAM type: YTN; PAM sequence: CTA
  source 1..20: mol_type = other DNA
atccatttctcattttttct

SEQ ID NO: 40911 - DNA, 20 bp, synthetic construct
  misc_feature 1..20: note = Description of Artificial Sequence: Synthetic oligonucleotide
  misc_feature 1..20: note = Target: SCN10A; (-) strand; PAM type: YTN; PAM sequence: TTA
  source 1..20: mol_type = other DNA
cagcatcccagggaaactaa

SEQ ID NO: 40912 - DNA, 20 bp, synthetic construct
  misc_feature 1..20: note = Description of Artificial Sequence: Synthetic oligonucleotide
  misc_feature 1..20: note = Target: SCN10A; (-) strand; PAM type: YTN; PAM sequence: TTG
  source 1..20: mol_type = other DNA
ttacagcatcccagggaaac

SEQ ID NO: 40913 - DNA, 20 bp, synthetic construct
  misc_feature 1..20: note = Description of Artificial Sequence: Synthetic oligonucleotide
  misc_feature 1..20: note = Target: SCN10A; (-) strand; PAM type: YTN; PAM sequence: TTT
  source 1..20: mol_type = other DNA
gttacagcatcccagggaaa

SEQ ID NO: 40914 - DNA, 20 bp, synthetic construct
  misc_feature 1..20: note = Description of Artificial Sequence: Synthetic oligonucleotide
  misc_feature 1..20: note = Target: SCN10A; (-) strand; PAM type: YTN; PAM sequence: CTG
  source 1..20: mol_type = other DNA
gtaatttgttacagcatccc

SEQ ID NO: 40915 - DNA, 20 bp, synthetic construct
  misc_feature 1..20: note = Description of Artificial Sequence: Synthetic oligonucleotide
  misc_feature 1..20: note = Target: SCN10A; (-) strand; PAM type: YTN; PAM sequence: TTC
  source 1..20: mol_type = other DNA
tggtaatttgttacagcatc

SEQ ID NO: 40916 - DNA, 20 bp, synthetic construct
  misc_feature 1..20: note = Description of Artificial Sequence: Synthetic oligonucleotide
  misc_feature 1..20: note = Target: SCN10A; (-) strand; PAM type: YTN; PAM sequence: TTT
  source 1..20: mol_type = other DNA
ctggtaatttgttacagcat

SEQ ID NO: 40917 - DNA, 20 bp, synthetic construct
  misc_feature 1..20: note = Description of Artificial Sequence: Synthetic oligonucleotide
  misc_feature 1..20: note = Target: SCN10A; (-) strand; PAM type: YTN; PAM sequence: CTA
  source 1..20: mol_type = other DNA
gtttctggtaatttgttaca

SEQ ID NO: 40918 - DNA, 20 bp, synthetic construct
  misc_feature 1..20: note = Description of Artificial Sequence: Synthetic oligonucleotide
  misc_feature 1..20: note = Target: SCN10A; (-) strand; PAM type: YTN; PAM sequence: CTA
  source 1..20: mol_type = other DNA
cctagtttctggtaatttgt

SEQ ID NO: 40919 - DNA, 20 bp, synthetic construct
  misc_feature 1..20: note = Description of Artificial Sequence: Synthetic oligonucleotide
  misc_feature 1..20: note = Target: SCN10A; (-) strand; PAM type: YTN; PAM sequence: TTG
  source 1..20: mol_type = other DNA
tcatctacctagtttctggt

SEQ ID NO: 40920 - DNA, 20 bp, synthetic construct
  misc_feature 1..20: note = Description of Artificial Sequence: Synthetic oligonucleotide
  misc_feature 1..20: note = Target: SCN10A; (-) strand; PAM type: YTN; PAM sequence: TTA
  source 1..20: mol_type = other DNA
ttgtcatctacctagtttct

SEQ ID NO: 40921 - DNA, 20 bp, synthetic construct
  misc_feature 1..20: note = Description of Artificial Sequence: Synthetic oligonucleotide
  misc_feature 1..20: note = Target: SCN10A; (-) strand; PAM type: YTN; PAM sequence: CTA
  source 1..20: mol_type = other DNA
ttattgtcatctacctagtt

SEQ ID NO: 40922 - DNA, 20 bp, synthetic construct
  misc_feature 1..20: note = Description of Artificial Sequence: Synthetic oligonucleotide
  misc_feature 1..20: note = Target: SCN10A; (-) strand; PAM type: YTN; PAM sequence: TTC
  source 1..20: mol_type = other DNA
tattattgtcatctacctag

SEQ ID NO: 40923 - DNA, 20 bp, synthetic construct
  misc_feature 1..20: note = Description of Artificial Sequence: Synthetic oligonucleotide
  misc_feature 1..20: note = Target: SCN10A; (-) strand; PAM type: YTN; PAM sequence: TTT
  source 1..20: mol_type = other DNA
ctattattgtcatctaccta

SEQ ID NO: 40924 - DNA, 20 bp, synthetic construct
  misc_feature 1..20: note = Description of Artificial Sequence: Synthetic oligonucleotide
  misc_feature 1..20: note = Target: SCN10A; (-) strand; PAM type: YTN; PAM sequence: CTC
  source 1..20: mol_type = other DNA
agaagtgtaagagaataaat

SEQ ID NO: 40925 - DNA, 20 bp, synthetic construct
  misc_feature 1..20: note = Description of Artificial Sequence: Synthetic oligonucleotide
  misc_feature 1..20: note = Target: SCN10A; (-) strand; PAM type: YTN; PAM sequence: CTA
  source 1..20: mol_type = other DNA
gcctcagaagtgtaagagaa

SEQ ID NO: 40926 - DNA, 20 bp, synthetic construct
  misc_feature 1..20: note = Description of Artificial Sequence: Synthetic oligonucleotide
  misc_feature 1..20: note = Target: SCN10A; (-) strand; PAM type: YTN; PAM sequence: TTA
  source 1..20: mol_type = other DNA
gacatctagcctcagaagtg

SEQ ID NO: 40927 - DNA, 20 bp, synthetic construct
  misc_feature 1..20: note = Description of Artificial Sequence: Synthetic oligonucleotide
  misc_feature 1..20: note = Target: SCN10A; (-) strand; PAM type: YTN; PAM sequence: TTT
  source 1..20: mol_type = other DNA
agacatctagcctcagaagt

SEQ ID NO: 40928 - DNA, 20 bp, synthetic construct
  misc_feature 1..20: note = Description of Artificial Sequence: Synthetic oligonucleotide
  misc_feature 1..20: note = Target: SCN10A; (-) strand; PAM type: YTN; PAM sequence: TTT
  source 1..20: mol_type = other DNA
tagacatctagcctcagaag

SEQ ID NO: 40929 - DNA, 20 bp, synthetic construct
  misc_feature 1..20: note = Description of Artificial Sequence: Synthetic oligonucleotide
  misc_feature 1..20: note = Target: SCN10A; (-) strand; PAM type: YTN; PAM sequence: TTG
  source 1..20: mol_type = other DNA
attttagacatctagcctca

SEQ ID NO: 40930 - DNA, 20 bp, synthetic construct
  misc_feature 1..20: note = Description of Artificial Sequence: Synthetic oligonucleotide
  misc_feature 1..20: note = Target: SCN10A; (-) strand; PAM type: YTN; PAM sequence: CTT
  source 1..20: mol_type = other DNA
gattttagacatctagcctc

SEQ ID NO: 40931 - DNA, 20 bp, synthetic construct
  misc_feature 1..20: note = Description of Artificial Sequence: Synthetic oligonucleotide
  misc_feature 1..20: note = Target: SCN10A; (-) strand; PAM type: YTN; PAM sequence: CTG
  source 1..20: mol_type = other DNA
ccaataccttgattttagac

SEQ ID NO: 40932 - DNA, 20 bp, synthetic construct
  misc_feature 1..20: note = Description of Artificial Sequence: Synthetic oligonucleotide
  misc_feature 1..20: note = Target: SCN10A; (-) strand; PAM type: YTN; PAM sequence: CTC
  source 1..20: mol_type = other DNA
tgccaataccttgattttag

SEQ ID NO: 40933 - DNA, 20 bp, synthetic construct
  misc_feature 1..20: note = Description of Artificial Sequence: Synthetic oligonucleotide
  misc_feature 1..20: note = Target: SCN10A; (-) strand; PAM type: YTN; PAM sequence: TTC
  source 1..20: mol_type = other DNA
agagggaacatggctctgcc

SEQ ID NO: 40934 - DNA, 20 bp, synthetic construct
  misc_feature 1..20: note = Description of Artificial Sequence: Synthetic oligonucleotide
  misc_feature 1..20: note = Target: SCN10A; (-) strand; PAM type: YTN; PAM sequence: CTT
  source 1..20: mol_type = other DNA
cagagggaacatggctctgc

SEQ ID NO: 40935 - DNA, 20 bp, synthetic construct
  misc_feature 1..20: note = Description of Artificial Sequence: Synthetic oligonucleotide
  misc_feature 1..20: note = Target: SCN10A; (-) strand; PAM type: YTN; PAM sequence: CTG
  source 1..20: mol_type = other DNA
cgggcttcagagggaacatg

SEQ ID NO: 40936 - DNA, 20 bp, synthetic construct
  misc_feature 1..20: note = Description of Artificial Sequence: Synthetic oligonucleotide
  misc_feature 1..20: note = Target: SCN10A; (-) strand; PAM type: YTN; PAM sequence: CTC
  source 1..20: mol_type = other DNA
acctgcgggcttcagaggga

SEQ ID NO: 40937 - DNA, 20 bp, synthetic construct
  misc_feature 1..20: note = Description of Artificial Sequence: Synthetic oligonucleotide
  misc_feature 1..20: note = Target: SCN10A; (-) strand; PAM type: YTN; PAM sequence: TTC
  source 1..20: mol_type = other DNA
tcacctgcgggcttcagagg

SEQ ID NO: 40938 - DNA, 20 bp, synthetic construct
  misc_feature 1..20: note = Description of Artificial Sequence: Synthetic oligonucleotide
  misc_feature 1..20: note = Target: SCN10A; (-) strand; PAM type: YTN; PAM sequence: CTA
  source 1..20: mol_type = other DNA
ggaggagacatggaaggcaa

SEQ ID NO: 40939 - DNA, 20 bp, synthetic construct
  misc_feature 1..20: note = Description of Artificial Sequence: Synthetic oligonucleotide
  misc_feature 1..20: note = Target: SCN10A; (-) strand; PAM type: YTN; PAM sequence: CTG
  source 1..20: mol_type = other DNA
aagctaggaggagacatgga

SEQ ID NO: 40940 - DNA, 20 bp, synthetic construct
  misc_feature 1..20: note = Description of Artificial Sequence: Synthetic oligonucleotide
  misc_feature 1..20: note = Target: SCN10A; (-) strand; PAM type: YTN; PAM sequence: TTG
  source 1..20: mol_type = other DNA
ctgaagctaggaggagacat

SEQ ID NO: 40941 - DNA, 20 bp, synthetic construct
  misc_feature 1..20: note = Description of Artificial Sequence: Synthetic oligonucleotide
  misc_feature 1..20: note = Target: SCN10A; (-) strand; PAM type: YTN; PAM sequence: CTG
  source 1..20: mol_type = other DNA
tatggagacacaggaagaaa

SEQ ID NO: 40942 - DNA, 20 bp, synthetic construct
  misc_feature 1..20: note = Description of Artificial Sequence: Synthetic oligonucleotide
  misc_feature 1..20: note = Target: SCN10A; (-) strand; PAM type: YTN; PAM sequence: TTG
  source 1..20: mol_type = other DNA
aacagagacacacagagagg

SEQ ID NO: 40943 - DNA, 20 bp, synthetic construct
  misc_feature 1..20: note = Description of Artificial Sequence: Synthetic oligonucleotide
  misc_feature 1..20: note = Target: SCN10A; (-) strand; PAM type: YTN; PAM sequence: TTT
  source 1..20: mol_type = other DNA
gaacagagacacacagagag

SEQ ID NO: 40944 - DNA, 20 bp, synthetic construct
  misc_feature 1..20: note = Description of Artificial Sequence: Synthetic oligonucleotide
  misc_feature 1..20: note = Target: SCN10A; (-) strand; PAM type: YTN; PAM sequence: CTA
  source 1..20: mol_type = other DNA
aaatatgaggggaatttgaa

SEQ ID NO: 40945 - DNA, 20 bp, synthetic construct
  misc_feature 1..20: note = Description of Artificial Sequence: Synthetic oligonucleotide
  misc_feature 1..20: note = Target: SCN10A; (-) strand; PAM type: YTN; PAM sequence: TTG
  source 1..20: mol_type = other DNA
ctaaaatatgaggggaattt

SEQ ID NO: 40946 - DNA, 20 bp, synthetic construct
  misc_feature 1..20: note = Description of Artificial Sequence: Synthetic oligonucleotide
  misc_feature 1..20: note = Target: SCN10A; (-) strand; PAM type: YTN; PAM sequence: CTG
  source 1..20: mol_type = other DNA
gtgttgctaaaatatgaggg

SEQ ID NO: 40947 - DNA, 20 bp, synthetic construct
  misc_feature 1..20: note = Description of Artificial Sequence: Synthetic oligonucleotide
  misc_feature 1..20: note = Target: SCN10A; (-) strand; PAM type: YTN; PAM sequence: CTA
  source 1..20: mol_type = other DNA
atccaatgactggtgttgct

SEQ ID NO: 40948 - DNA, 20 bp, synthetic construct
  misc_feature 1..20: note = Description of Artificial Sequence: Synthetic oligonucleotide
  misc_feature 1..20: note = Target: SCN10A; (-) strand; PAM type: YTN; PAM sequence: TTC
  source 1..20: mol_type = other DNA
agatgaaggtgagccctaat

SEQ ID NO: 40949 - DNA, 20 bp, synthetic construct
  misc_feature 1..20: note = Description of Artificial Sequence: Synthetic oligonucleotide
  misc_feature 1..20: note = Target: SCN10A; (-) strand; PAM type: YTN; PAM sequence: TTG
  source 1..20: mol_type = other DNA
cagatgtaaacaaattcaga

SEQ ID NO: 40950 - DNA, 20 bp, synthetic construct
  misc_feature 1..20: note = Description of Artificial Sequence: Synthetic oligonucleotide
  misc_feature 1..20: note = Target: SCN10A; (-) strand; PAM type: YTN; PAM sequence: TTT
  source 1..20: mol_type = other DNA
gcagatgtaaacaaattcag

SEQ ID NO: 40951 - DNA, 20 bp, synthetic construct
  misc_feature 1..20: note = Description of Artificial Sequence: Synthetic oligonucleotide
  misc_feature 1..20: note = Target: SCN10A; (-) strand; PAM type: YTN; PAM sequence: TTT
  source 1..20: mol_type = other DNA
tgcagatgtaaacaaattca

SEQ ID NO: 40952 - DNA, 20 bp, synthetic construct
  misc_feature 1..20: note = Description of Artificial Sequence: Synthetic oligonucleotide
  misc_feature 1..20: note = Target: SCN10A; (-) strand; PAM type: YTN; PAM sequence: TTT
  source 1..20: mol_type = other DNA
ttgcagatgtaaacaaattc

SEQ ID NO: 40953 - DNA, 20 bp, synthetic construct
  misc_feature 1..20: note = Description of Artificial Sequence: Synthetic oligonucleotide
  misc_feature 1..20: note = Target: SCN10A; (-) strand; PAM type: YTN; PAM sequence: TTA
  source 1..20: mol_type = other DNA
aggtttttgcagatgtaaac

SEQ ID NO: 40954 - DNA, 20 bp, synthetic construct
  misc_feature 1..20: note = Description of Artificial Sequence: Synthetic oligonucleotide
  misc_feature 1..20: note = Target: SCN10A; (-) strand; PAM type: YTN; PAM sequence: TTG
  source 1..20: mol_type = other DNA
acattaaggtttttgcagat

SEQ ID NO: 40955 - DNA, 20 bp, synthetic construct
  misc_feature 1..20: note = Description of Artificial Sequence: Synthetic oligonucleotide
  misc_feature 1..20: note = Target: SCN10A; (-) strand; PAM type: YTN; PAM sequence: TTT
  source 1..20: mol_type = other DNA
gacattaaggtttttgcaga

SEQ ID NO: 40956 - DNA, 20 bp, synthetic construct
  misc_feature 1..20: note = Description of Artificial Sequence: Synthetic oligonucleotide
  misc_feature 1..20: note = Target: SCN10A; (-) strand; PAM type: YTN; PAM sequence: TTA
  source 1..20: mol_type = other DNA
tttgacattaaggtttttgc

SEQ ID NO: 40957 - DNA, 20 bp, synthetic construct
  misc_feature 1..20: note = Description of Artificial Sequence: Synthetic oligonucleotide
  misc_feature 1..20: note = Target: SCN10A; (-) strand; PAM type: YTN; PAM sequence: CTT
  source 1..20: mol_type = other DNA
atttgacattaaggtttttg

SEQ ID NO: 40958 - DNA, 20 bp, synthetic construct
  misc_feature 1..20: note = Description of Artificial Sequence: Synthetic oligonucleotide
  misc_feature 1..20: note = Target: SCN10A; (-) strand; PAM type: YTN; PAM sequence: TTG
  source 1..20: mol_type = other DNA
tgaccttatttgacattaag

SEQ ID NO: 40959 - DNA, 20 bp, synthetic construct
  misc_feature 1..20: note = Description of Artificial Sequence: Synthetic oligonucleotide
  misc_feature 1..20: note = Target: SCN10A; (-) strand; PAM type: YTN; PAM sequence: CTG
  source 1..20: mol_type = other DNA
tgattgtgaccttatttgac

SEQ ID NO: 40960 - DNA, 20 bp, synthetic construct
  misc_feature 1..20: note = Description of Artificial Sequence: Synthetic oligonucleotide
  misc_feature 1..20: note = Target: SCN10A; (-) strand; PAM type: YTN; PAM sequence: CTA
  source 1..20: mol_type = other DNA
accaatagtacctgtgattg

SEQ ID NO: 40961 - DNA, 20 bp, synthetic construct
  misc_feature 1..20: note = Description of Artificial Sequence: Synthetic oligonucleotide
  misc_feature 1..20: note = Target: SCN10A; (-) strand; PAM type: YTN; PAM sequence: TTC
  source 1..20: mol_type = other DNA
taaccaatagtacctgtgat

SEQ ID NO: 40962 - DNA, 20 bp, synthetic construct
  misc_feature 1..20: note = Description of Artificial Sequence: Synthetic oligonucleotide
  misc_feature 1..20: note = Target: SCN10A; (-) strand; PAM type: YTN; PAM sequence: TTG
  source 1..20: mol_type = other DNA
aagttctaaccaatagtacc

SEQ ID NO: 40963 - DNA, 20 bp, synthetic construct
  misc_feature 1..20: note = Description of Artificial Sequence: Synthetic oligonucleotide
  misc_feature 1..20: note = Target: SCN10A; (-) strand; PAM type: YTN; PAM sequence: CTA
  source 1..20: mol_type = other DNA
aaagggtatgttgaagttct

SEQ ID NO: 40964 - DNA, 20 bp, synthetic construct
  misc_feature 1..20: note = Description of Artificial Sequence: Synthetic oligonucleotide
  misc_feature 1..20: note = Target: SCN10A; (-) strand; PAM type: YTN; PAM sequence: TTC
  source 1..20: mol_type = other DNA
cctaaaagggtatgttgaag

SEQ ID NO: 40965 - DNA, 20 bp, synthetic construct
  misc_feature 1..20: note = Description of Artificial Sequence: Synthetic oligonucleotide
  misc_feature 1..20: note = Target: SCN10A; (-) strand; PAM type: YTN; PAM sequence: TTG
  source 1..20: mol_type = other DNA
aataatgttccctaaaaggg

SEQ ID NO: 40966 - DNA, 20 bp, synthetic construct
  misc_feature 1..20: note = Description of Artificial Sequence: Synthetic oligonucleotide
  misc_feature 1..20: note = Target: SCN10A; (-) strand; PAM type: YTN; PAM sequence: TTG
  source 1..20: mol_type = other DNA
ggttgaataatgttccctaa

SEQ ID NO: 40967 - DNA, 20 bp, synthetic construct
  misc_feature 1..20: note = Description of Artificial Sequence: Synthetic oligonucleotide
  misc_feature 1..20: note = Target: SCN10A; (-) strand; PAM type: YTN; PAM sequence: TTT
  source 1..20: mol_type = other DNA
gggttgaataatgttcccta

SEQ ID NO: 40968 - DNA, 20 bp, synthetic construct
  misc_feature 1..20: note = Description of Artificial Sequence: Synthetic oligonucleotide
  misc_feature 1..20: note = Target: SCN10A; (-) strand; PAM type: YTN; PAM sequence: CTT
  source 1..20: mol_type = other DNA
tgggttgaataatgttccct

SEQ ID NO: 40969 - DNA, 20 bp, synthetic construct
  misc_feature 1..20: note = Description of Artificial Sequence: Synthetic oligonucleotide
  misc_feature 1..20: note = Target: SCN10A; (-) strand; PAM type: YTN; PAM sequence: TTA
  source 1..20: mol_type = other DNA
tgctttgggttgaataatgt

SEQ ID NO: 40970 - DNA, 20 bp, synthetic construct
  misc_feature 1..20: note = Description of Artificial Sequence: Synthetic oligonucleotide
  misc_feature 1..20: note = Target: SCN10A; (-) strand; PAM type: YTN; PAM sequence: TTG
  source 1..20: mol_type = other DNA
aattatgctttgggttgaat

SEQ ID NO: 40971 - DNA, 20 bp, synthetic construct
  misc_feature 1..20: note = Description of Artificial Sequence: Synthetic oligonucleotide
  misc_feature 1..20: note = Target: SCN10A; (-) strand; PAM type: YTN; PAM sequence: TTA
  source 1..20: mol_type = other DNA
tgttgaattatgctttgggt

SEQ ID NO: 40972 - DNA, 20 bp, synthetic construct
  misc_feature 1..20: note = Description of Artificial Sequence: Synthetic oligonucleotide
  misc_feature 1..20: note = Target: SCN10A; (-) strand; PAM type: YTN; PAM sequence: TTT
  source 1..20: mol_type = other DNA
atgttgaattatgctttggg

SEQ ID NO: 40973 - DNA, 20 bp, synthetic construct
  misc_feature 1..20: note = Description of Artificial Sequence: Synthetic oligonucleotide
  misc_feature 1..20: note = Target: SCN10A; (-) strand; PAM type: YTN; PAM sequence: CTT
  source 1..20: mol_type = other DNA
tatgttgaattatgctttgg

SEQ ID NO: 40974 - DNA, 20 bp, synthetic construct
  misc_feature 1..20: note = Description of Artificial Sequence: Synthetic oligonucleotide
  misc_feature 1..20: note = Target: SCN10A; (-) strand; PAM type: YTN; PAM sequence: TTC
  source 1..20: mol_type = other DNA
aactttatgttgaattatgc

SEQ ID NO: 40975 - DNA, 20 bp, synthetic construct
  misc_feature 1..20: note = Description of Artificial Sequence: Synthetic oligonucleotide
  misc_feature 1..20: note = Target: SCN10A; (-) strand; PAM type: YTN; PAM sequence: CTA
  source 1..20: mol_type = other DNA
aacataggaacataattcaa

SEQ ID NO: 40976 - DNA, 20 bp, synthetic construct
  misc_feature 1..20: note = Description of Artificial Sequence: Synthetic oligonucleotide
  misc_feature 1..20: note = Target: SCN10A; (-) strand; PAM type: YTN; PAM sequence: CTC
  source 1..20: mol_type = other DNA
cctaaacataggaacataat

SEQ ID NO: 40977 - DNA, 20 bp, synthetic construct
  misc_feature 1..20: note = Description of Artificial Sequence: Synthetic oligonucleotide
  misc_feature 1..20: note = Target: SCN10A; (-) strand; PAM type: YTN; PAM sequence: TTA
  source 1..20: mol_type = other DNA
tgctccctaaacataggaac

SEQ ID NO: 40978 - DNA, 20 bp, synthetic construct
  misc_feature 1..20: note = Description of Artificial Sequence: Synthetic oligonucleotide
  misc_feature 1..20: note = Target: SCN10A; (-) strand; PAM type: YTN; PAM sequence: TTG
  source 1..20: mol_type = other DNA
aattatgctccctaaacata

SEQ ID NO: 40979 - DNA, 20 bp, synthetic construct
  misc_feature 1..20: note = Description of Artificial Sequence: Synthetic oligonucleotide
  misc_feature 1..20: note = Target: SCN10A; (-) strand; PAM type: YTN; PAM sequence: TTG
  source 1..20: mol_type = other DNA
agttgaattatgctccctaa

SEQ ID NO: 40980 - DNA, 20 bp, synthetic construct
  misc_feature 1..20: note = Description of Artificial Sequence: Synthetic oligonucleotide
  misc_feature 1..20: note = Target: SCN10A; (-) strand; PAM type: YTN; PAM sequence: TTT
  source 1..20: mol_type = other DNA
gagttgaattatgctcccta

SEQ ID NO: 40981 - DNA, 20 bp, synthetic construct
  misc_feature 1..20: note = Description of Artificial Sequence: Synthetic oligonucleotide
  misc_feature 1..20: note = Target: SCN10A; (-) strand; PAM type: YTN; PAM sequence: CTT
  source 1..20: mol_type = other DNA
tgagttgaattatgctccct

SEQ ID NO: 40982 - DNA, 20 bp, synthetic construct
  misc_feature 1..20: note = Description of Artificial Sequence: Synthetic oligonucleotide
  misc_feature 1..20: note = Target: SCN10A; (-) strand; PAM type: YTN; PAM sequence: TTA
  source 1..20: mol_type = other DNA
ctttgagttgaattatgctc

SEQ ID NO: 40983 - DNA, 20 bp, synthetic construct
  misc_feature 1..20: note = Description of Artificial Sequence: Synthetic oligonucleotide
  misc_feature 1..20: note = Target: SCN10A; (-) strand; PAM type: YTN; PAM sequence: TTT
  source 1..20: mol_type = other DNA
actttgagttgaattatgct

SEQ ID NO: 40984 - DNA, 20 bp, synthetic construct
  misc_feature 1..20: note = Description of Artificial Sequence: Synthetic oligonucleotide
  misc_feature 1..20: note = Target: SCN10A; (-) strand; PAM type: YTN; PAM sequence: TTT
  source 1..20: mol_type = other DNA
tactttgagttgaattatgc

SEQ ID NO: 40985 - DNA, 20 bp, synthetic construct
  misc_feature 1..20: note = Description of Artificial Sequence: Synthetic oligonucleotide
  misc_feature 1..20: note = Target: SCN10A; (-) strand; PAM type: YTN; PAM sequence: TTT
  source 1..20: mol_type = other DNA
ttactttgagttgaattatg

SEQ ID NO: 40986 - DNA, 20 bp, synthetic construct
  misc_feature 1..20: note = Description of Artificial Sequence: Synthetic oligonucleotide
  misc_feature 1..20: note = Target: SCN10A; (-) strand; PAM type: YTN; PAM sequence: CTC
  source 1..20: mol_type = other DNA
aaaagtatttttactttgag

SEQ ID NO: 40987 - DNA, 20 bp, synthetic construct
  misc_feature 1..20: note = Description of Artificial Sequence: Synthetic oligonucleotide
  misc_feature 1..20: note = Target: SCN10A; (-) strand; PAM type: YTN; PAM sequence: TTC
  source 1..20: mol_type = other DNA
tcaaaagtatttttactttg

SEQ ID NO: 40988 - DNA, 20 bp, synthetic construct
  misc_feature 1..20: note = Description of Artificial Sequence: Synthetic oligonucleotide
  misc_feature 1..20: note = Target: SCN10A; (-) strand; PAM type: YTN; PAM sequence: CTA
  source 1..20: mol_type = other DNA
ttctcaaaagtatttttact

SEQ ID NO: 40989 - DNA, 20 bp, synthetic construct
  misc_feature 1..20: note = Description of Artificial Sequence: Synthetic oligonucleotide
  misc_feature 1..20: note = Target: SCN10A; (-) strand; PAM type: YTN; PAM sequence: TTA
  source 1..20: mol_type = other DNA
aagcagatgatactattctc

SEQ ID NO: 40990 - DNA, 20 bp, synthetic construct
  misc_feature 1..20: note = Description of Artificial Sequence: Synthetic oligonucleotide
  misc_feature 1..20: note = Target: SCN10A; (-) strand; PAM type: YTN; PAM sequence: CTA
  source 1..20: mol_type = other DNA
ttaaagcagatgatactatt

SEQ ID NO: 40991 - DNA, 20 bp, synthetic construct
  misc_feature 1..20: note = Description of Artificial Sequence: Synthetic oligonucleotide
  misc_feature 1..20: note = Target: SCN10A; (-) strand; PAM type: YTN; PAM sequence: TTC
  source 1..20: mol_type = other DNA
tattaaagcagatgatacta

SEQ ID NO: 40992 - DNA, 20 bp, synthetic construct
  misc_feature 1..20: note = Description of Artificial Sequence: Synthetic oligonucleotide
  misc_feature 1..20: note = Target: SCN10A; (-) strand; PAM type: YTN; PAM sequence: CTG
  source 1..20: mol_type = other DNA
gttctattaaagcagatgat

SEQ ID NO: 40993 - DNA, 20 bp, synthetic construct
  misc_feature 1..20: note = Description of Artificial Sequence: Synthetic oligonucleotide
  misc_feature 1..20: note = Target: SCN10A; (-) strand; PAM type: YTN; PAM sequence: TTA
  source 1..20: mol_type = other DNA
agtgtgccaaaccatcagac

SEQ ID NO: 40994 - DNA, 20 bp, synthetic construct
  misc_feature 1..20: note = Description of Artificial Sequence: Synthetic oligonucleotide
  misc_feature 1..20: note = Target: SCN10A; (-) strand; PAM type: YTN; PAM sequence: TTA
  source 1..20: mol_type = other DNA
caatgatatgtgaaagaatt

SEQ ID NO: 40995 - DNA, 20 bp, synthetic construct
  misc_feature 1..20: note = Description of Artificial Sequence: Synthetic oligonucleotide
  misc_feature 1..20: note = Target: SCN10A; (-) strand; PAM type: YTN; PAM sequence: TTT
  source 1..20: mol_type = other DNA
acaatgatatgtgaaagaat

SEQ ID NO: 40996 - DNA, 20 bp, synthetic construct
  misc_feature 1..20: note = Description of Artificial Sequence: Synthetic oligonucleotide
  misc_feature 1..20: note = Target: SCN10A; (-) strand; PAM type: YTN; PAM sequence: TTT
  source 1..20: mol_type = other DNA
tacaatgatatgtgaaagaa

SEQ ID NO: 40997 - DNA, 20 bp, synthetic construct
  misc_feature 1..20: note = Description of Artificial Sequence: Synthetic oligonucleotide
  misc_feature 1..20: note = Target: SCN10A; (-) strand; PAM type: YTN; PAM sequence: TTT
  source 1..20: mol_type = other DNA
ttacaatgatatgtgaaaga

SEQ ID NO: 40998 - DNA, 20 bp, synthetic construct
  misc_feature 1..20: note = Description of Artificial Sequence: Synthetic oligonucleotide
  misc_feature 1..20: note = Target: SCN10A; (-) strand; PAM type: YTN; PAM sequence: TTA
  source 1..20: mol_type = other DNA
tttttacaatgatatgtgaa

SEQ ID NO: 40999 - DNA, 20 bp, synthetic construct
  misc_feature 1..20: note = Description of Artificial Sequence: Synthetic oligonucleotide
  misc_feature 1..20: note = Target: SCN10A; (-) strand; PAM type: YTN; PAM sequence: TTT
  source 1..20: mol_type = other DNA
atttttacaatgatatgtga

SEQ ID NO: 41000 - DNA, 20 bp, synthetic construct
  misc_feature 1..20: note = Description of Artificial Sequence: Synthetic oligonucleotide
  misc_feature 1..20: note = Target: SCN10A; (-) strand; PAM type: YTN; PAM sequence: TTG
  source 1..20: mol_type = other DNA
ggcacaggtttatttttaca

SEQ ID NO: 41001 - DNA, 20 bp, synthetic construct
  misc_feature 1..20: note = Description of Artificial Sequence: Synthetic oligonucleotide
  misc_feature 1..20: note = Target: SCN10A; (-) strand; PAM type: YTN; PAM sequence: TTT
  source 1..20: mol_type = other DNA
gggcacaggtttatttttac

SEQ ID NO: 41002 - DNA, 20 bp, synthetic construct
  misc_feature 1..20: note = Description of Artificial Sequence: Synthetic oligonucleotide
  misc_feature 1..20: note = Target: SCN10A; (-) strand; PAM type: YTN; PAM sequence: CTA
  source 1..20: mol_type = other DNA
agtggacagagagtttgggc

SEQ ID NO: 41003 - DNA, 20 bp, synthetic construct
  misc_feature 1..20: note = Description of Artificial Sequence: Synthetic oligonucleotide
  misc_feature 1..20: note = Target: SCN10A; (-) strand; PAM type: YTN; PAM sequence: TTA
  source 1..20: mol_type = other DNA
taagacagctaagtggacag

SEQ ID NO: 41004 - DNA, 20 bp, synthetic construct
  misc_feature 1..20: note = Description of Artificial Sequence: Synthetic oligonucleotide
  misc_feature 1..20: note = Target: SCN10A; (-) strand; PAM type: YTN; PAM sequence: TTT
  source 1..20: mol_type = other DNA
ataagacagctaagtggaca

SEQ ID NO: 41005 - DNA, 20 bp, synthetic construct
  misc_feature 1..20: note = Description of Artificial Sequence: Synthetic oligonucleotide
  misc_feature 1..20: note = Target: SCN10A; (-) strand; PAM type: YTN; PAM sequence: CTA
  source 1..20: mol_type = other DNA
gcccaagtgtttataagaca

SEQ ID NO: 41006 - DNA, 20 bp, synthetic construct
  misc_feature 1..20: note = Description of Artificial Sequence: Synthetic oligonucleotide
  misc_feature 1..20: note = Target: SCN10A; (-) strand; PAM type: YTN; PAM sequence: CTG
  source 1..20: mol_type = other DNA
agatactagcccaagtgttt

SEQ ID NO: 41007 - DNA, 20 bp, synthetic construct
  misc_feature 1..20: note = Description of Artificial Sequence: Synthetic oligonucleotide
  misc_feature 1..20: note = Target: SCN10A; (-) strand; PAM type: YTN; PAM sequence: CTA
  source 1..20: mol_type = other DNA
aatcccatgtggatgatgaa

SEQ ID NO: 41008 - DNA, 20 bp, synthetic construct
  misc_feature 1..20: note = Description of Artificial Sequence: Synthetic oligonucleotide
  misc_feature 1..20: note = Target: SCN10A; (-) strand; PAM type: YTN; PAM sequence: TTC
  source 1..20: mol_type = other DNA
aacgtctaaatcccatgtgg

SEQ ID NO: 41009 - DNA, 20 bp, synthetic construct
  misc_feature 1..20: note = Description of Artificial Sequence: Synthetic oligonucleotide
  misc_feature 1..20: note = Target: SCN10A; (-) strand; PAM type: YTN; PAM sequence: CTT
  source 1..20: mol_type = other DNA
caacgtctaaatcccatgtg

SEQ ID NO: 41010 - DNA, 20 bp, synthetic construct
  misc_feature 1..20: note = Description of Artificial Sequence: Synthetic oligonucleotide
  misc_feature 1..20: note = Target: SCN10A; (-) strand; PAM type: YTN; PAM sequence: TTC
  source 1..20: mol_type = other DNA
ttcaacgtctaaatcccatg

SEQ ID NO: 41011 - DNA, 20 bp, synthetic construct
  misc_feature 1..20: note = Description of Artificial Sequence: Synthetic oligonucleotide
  misc_feature 1..20: note = Target: SCN10A; (-) strand; PAM type: YTN; PAM sequence: CTT
  source 1..20: mol_type = other DNA
cttcaacgtctaaatcccat

SEQ ID NO: 41012 - DNA, 20 bp, synthetic construct
  misc_feature 1..20: note = Description of Artificial Sequence: Synthetic oligonucleotide
  misc_feature 1..20: note = Target: SCN10A; (-) strand; PAM type: YTN; PAM sequence: CTG
  source 1..20: mol_type = other DNA
tgcagcttcttcaacgtcta

SEQ ID NO: 41013 - DNA, 20 bp, synthetic construct
  misc_feature 1..20: note = Description of Artificial Sequence: Synthetic oligonucleotide
  misc_feature 1..20: note = Target: SCN10A; (-) strand; PAM type: YTN; PAM sequence: CTG
  source 1..20: mol_type = other DNA
actgtgcagcttcttcaacg

SEQ ID NO: 41014 - DNA, 20 bp, synthetic construct
  misc_feature 1..20: note = Description of Artificial Sequence: Synthetic oligonucleotide
  misc_feature 1..20: note = Target: SCN10A; (-) strand; PAM type: YTN; PAM sequence: CTG
  source 1..20: mol_type = other DNA
aacccgggagcacagatact

SEQ ID NO: 41015 - DNA, 20 bp, synthetic construct
  misc_feature 1..20: note = Description of Artificial Sequence: Synthetic oligonucleotide
  misc_feature 1..20: note = Target: SCN10A; (-) strand; PAM type: YTN; PAM sequence: CTC
  source 1..20: mol_type = other DNA
gtaccactgaacccgggagc

SEQ ID NO: 41016 - DNA, 20 bp, synthetic construct
  misc_feature 1..20: note = Description of Artificial Sequence: Synthetic oligonucleotide
  misc_feature 1..20: note = Target: SCN10A; (-) strand; PAM type: YTN; PAM sequence: CTC
  source 1..20: mol_type = other DNA
tcgtaccactgaacccggga

SEQ ID NO: 41017 - DNA, 20 bp, synthetic construct
  misc_feature 1..20: note = Description of Artificial Sequence: Synthetic oligonucleotide
  misc_feature 1..20: note = Target: SCN10A; (-) strand; PAM type: YTN; PAM sequence: CTC
  source 1..20: mol_type = other DNA
tctcgtaccactgaacccgg

SEQ ID NO: 41018 - DNA, 20 bp, synthetic construct
  misc_feature 1..20: note = Description of Artificial Sequence: Synthetic oligonucleotide
  misc_feature 1..20: note = Target: SCN10A; (-) strand; PAM type: YTN; PAM sequence: TTC
  source 1..20: mol_type = other DNA
ctctctcgtaccactgaacc

SEQ ID NO: 41019 - DNA, 20 bp, synthetic construct
  misc_feature 1..20: note = Description of Artificial Sequence: Synthetic oligonucleotide
  misc_feature 1..20: note = Target: SCN10A; (-) strand; PAM type: YTN; PAM sequence: CTT
  source 1..20: mol_type = other DNA
cctctctcgtaccactgaac

SEQ ID NO: 41020 - DNA, 20 bp, synthetic construct
  misc_feature 1..20: note = Description of Artificial Sequence: Synthetic oligonucleotide
  misc_feature 1..20: note = Target: SCN10A; (-) strand; PAM type: YTN; PAM sequence: CTC
  source 1..20: mol_type = other DNA
ttcctctctcgtaccactga

SEQ ID NO: 41021 - DNA, 20 bp, synthetic construct
  misc_feature 1..20: note = Description of Artificial Sequence: Synthetic oligonucleotide
  misc_feature 1..20: note = Target: SCN10A; (-) strand; PAM type: YTN; PAM sequence: TTC
  source 1..20: mol_type = other DNA
aaccaaataactcttcctct

SEQ ID NO: 41022 - DNA, 20 bp, synthetic construct
  misc_feature 1..20: note = Description of Artificial Sequence: Synthetic oligonucleotide
  misc_feature 1..20: note = Target: SCN10A; (-) strand; PAM type: YTN; PAM sequence: CTA
  source 1..20: mol_type = other DNA
aaagatgagttcaaccaaat

SEQ ID NO: 41023 - DNA, 20 bp, synthetic construct
  misc_feature 1..20: note = Description of Artificial Sequence: Synthetic oligonucleotide
  misc_feature 1..20: note = Target: SCN10A; (-) strand; PAM type: YTN; PAM sequence: TTC
  source 1..20: mol_type = other DNA
taaaagatgagttcaaccaa

SEQ ID NO: 41024 - DNA, 20 bp, synthetic construct
  misc_feature 1..20: note = Description of Artificial Sequence: Synthetic oligonucleotide
  misc_feature 1..20: note = Target: SCN10A; (-) strand; PAM type: YTN; PAM sequence: TTA
  source 1..20: mol_type = other DNA
ttctaaaagatgagttcaac

SEQ ID NO: 41025 - DNA, 20 bp, synthetic construct
  misc_feature 1..20: note = Description of Artificial Sequence: Synthetic oligonucleotide
  misc_feature 1..20: note = Target: SCN10A; (-) strand; PAM type: YTN; PAM sequence: TTT
  source 1..20: mol_type = other DNA
attctaaaagatgagttcaa

SEQ ID NO: 41026 - DNA, 20 bp, synthetic construct
  misc_feature 1..20: note = Description of Artificial Sequence: Synthetic oligonucleotide
  misc_feature 1..20: note = Target: SCN10A; (-) strand; PAM type: YTN; PAM sequence: CTG
  source 1..20: mol_type = other DNA
atttattctaaaagatgagt

SEQ ID NO: 41027 - DNA, 20 bp, synthetic construct
  misc_feature 1..20: note = Description of Artificial Sequence: Synthetic oligonucleotide
  misc_feature 1..20: note = Target: SCN10A; (-) strand; PAM type: YTN; PAM sequence: CTG
  source 1..20: mol_type = other DNA
aatgcctgatttattctaaa

SEQ ID NO: 41028 - DNA, 20 bp, synthetic construct
  misc_feature 1..20: note = Description of Artificial Sequence: Synthetic oligonucleotide
  misc_feature 1..20: note = Target: SCN10A; (-) strand; PAM type: YTN; PAM sequence: CTC
  source 1..20: mol_type = other DNA
tgaatgcctgatttattcta

SEQ ID NO: 41029 - DNA, 20 bp, synthetic construct
  misc_feature 1..20: note = Description of Artificial Sequence: Synthetic oligonucleotide
  misc_feature 1..20: note = Target: SCN10A; (-) strand; PAM type: YTN; PAM sequence: TTC
  source 1..20: mol_type = other DNA
tctgaatgcctgatttattc

SEQ ID NO: 41030 - DNA, 20 bp, synthetic construct
  misc_feature 1..20: note = Description of Artificial Sequence: Synthetic oligonucleotide
  misc_feature 1..20: note = Target: SCN10A; (-) strand; PAM type: YTN; PAM sequence: CTA
  source 1..20: mol_type = other DNA
ttctctgaatgcctgattta

SEQ ID NO: 41031 - DNA, 20 bp, synthetic construct
  misc_feature 1..20: note = Description of Artificial Sequence: Synthetic oligonucleotide
  misc_feature 1..20: note = Target: SCN10A; (-) strand; PAM type: YTN; PAM sequence: CTC
  source 1..20: mol_type = other DNA
aaatcagctattctctgaat

SEQ ID NO: 41032 - DNA, 20 bp, synthetic construct
  misc_feature 1..20: note = Description of Artificial Sequence: Synthetic oligonucleotide
  misc_feature 1..20: note = Target: SCN10A; (-) strand; PAM type: YTN; PAM sequence: TTA
  source 1..20: mol_type = other DNA
ataagatgatgatgggatag

SEQ ID NO: 41033 - DNA, 20 bp, synthetic construct
  misc_feature 1..20: note = Description of Artificial Sequence: Synthetic oligonucleotide
  misc_feature 1..20: note = Target: SCN10A; (-) strand; PAM type: YTN; PAM sequence: TTG
  source 1..20: mol_type = other DNA
gcagcatccacagatgcagg

SEQ ID NO: 41034 - DNA, 20 bp, synthetic construct
  misc_feature 1..20: note = Description of Artificial Sequence: Synthetic oligonucleotide
  misc_feature 1..20: note = Target: SCN10A; (-) strand; PAM type: YTN; PAM sequence: CTG
  source 1..20: mol_type = other DNA
ggagttggcagcatccacag

SEQ ID NO: 41035 - DNA, 20 bp, synthetic construct
  misc_feature 1..20: note = Description of Artificial Sequence: Synthetic oligonucleotide
  misc_feature 1..20: note = Target: SCN10A; (-) strand; PAM type: YTN; PAM sequence: TTA
  source 1..20: mol_type = other DNA
ctgggagttggcagcatcca

SEQ ID NO: 41036 - DNA, 20 bp, synthetic construct
  misc_feature 1..20: note = Description of Artificial Sequence: Synthetic oligonucleotide
  misc_feature 1..20: note = Target: SCN10A; (-) strand; PAM type: YTN; PAM sequence: CTT
  source 1..20: mol_type = other DNA
actgggagttggcagcatcc

SEQ ID NO: 41037 - DNA, 20 bp, synthetic construct
  misc_feature 1..20: note = Description of Artificial Sequence: Synthetic oligonucleotide
  misc_feature 1..20: note = Target: SCN10A; (-) strand; PAM type: YTN; PAM sequence: CTC
  source 1..20: mol_type = other DNA
aagatgcttactgggagttg

SEQ ID NO: 41038 - DNA, 20 bp, synthetic construct
  misc_feature 1..20: note = Description of Artificial Sequence: Synthetic oligonucleotide
  misc_feature 1..20: note = Target: SCN10A; (-) strand; PAM type: YTN; PAM sequence: CTC
  source 1..20: mol_type = other DNA
tcaagatgcttactgggagt

SEQ ID NO: 41039 - DNA, 20 bp, synthetic construct
  misc_feature 1..20: note = Description of Artificial Sequence: Synthetic oligonucleotide
  misc_feature 1..20: note = Target: SCN10A; (-) strand; PAM type: YTN; PAM sequence: TTA
  source 1..20: mol_type = other DNA
gcccataagaagtcaaagag

SEQ ID NO: 41040 - DNA, 20 bp, synthetic construct
  misc_feature 1..20: note = Description of Artificial Sequence: Synthetic oligonucleotide
  misc_feature 1..20: note = Target: SCN10A; (-) strand; PAM type: YTN; PAM sequence: CTA
  source 1..20: mol_type = other DNA
ttagcccataagaagtcaaa

SEQ ID NO: 41041 - DNA, 20 bp, synthetic construct
  misc_feature 1..20: note = Description of Artificial Sequence: Synthetic oligonucleotide
  misc_feature 1..20: note = Target: SCN10A; (-) strand; PAM type: YTN; PAM sequence: CTG
  source 1..20: mol_type = other DNA
tcactattagcccataagaa

SEQ ID NO: 41042 - DNA, 20 bp, synthetic construct
  misc_feature 1..20: note = Description of Artificial Sequence: Synthetic oligonucleotide
  misc_feature 1..20: note = Target: SCN10A; (-) strand; PAM type: YTN; PAM sequence: TTC
  source 1..20: mol_type = other DNA
tgtcactattagcccataag

SEQ ID NO: 41043 - DNA, 20 bp, synthetic construct
  misc_feature 1..20: note = Description of Artificial Sequence: Synthetic oligonucleotide
  misc_feature 1..20: note = Target: SCN10A; (-) strand; PAM type: YTN; PAM sequence: TTT
  source 1..20: mol_type = other DNA
ctgtcactattagcccataa

SEQ ID NO: 41044 - DNA, 20 bp, synthetic construct
  misc_feature 1..20: note = Description of Artificial Sequence: Synthetic oligonucleotide
  misc_feature 1..20: note = Target: SCN10A; (-) strand; PAM type: YTN; PAM sequence: TTT
  source 1..20: mol_type = other DNA
tctgtcactattagcccata

SEQ ID NO: 41045 - DNA, 20 bp, synthetic construct
  misc_feature 1..20: note = Description of Artificial Sequence: Synthetic oligonucleotide
  misc_feature 1..20: note = Target: SCN10A; (-) strand; PAM type: YTN; PAM sequence: CTT
  source 1..20: mol_type = other DNA
ttctgtcactattagcccat

SEQ ID NO: 41046 - DNA, 20 bp, synthetic construct
  misc_feature 1..20: note = Description of Artificial Sequence: Synthetic oligonucleotide
  misc_feature 1..20: note = Target: SCN10A; (-) strand; PAM type: YTN; PAM sequence: CTC
  source 1..20: mol_type = other DNA
ccttttctgtcactattagc

SEQ ID NO: 41047 - DNA, 20 bp, synthetic construct
  misc_feature 1..20: note = Description of Artificial Sequence: Synthetic oligonucleotide
  misc_feature 1..20: note = Target: SCN10A; (-) strand; PAM type: YTN; PAM sequence: CTC
  source 1..20: mol_type = other DNA
tcccttttctgtcactatta

SEQ ID NO: 41048 - DNA, 20 bp, synthetic construct
  misc_feature 1..20: note = Description of Artificial Sequence: Synthetic oligonucleotide
  misc_feature 1..20: note = Target: SCN10A; (-) strand; PAM type: YTN; PAM sequence: TTG
  source 1..20: mol_type = other DNA
ctctcccttttctgtcacta

SEQ ID NO: 41049 - DNA, 20 bp, synthetic construct
  misc_feature 1..20: note = Description of Artificial Sequence: Synthetic oligonucleotide
  misc_feature 1..20: note = Target: SCN10A; (-) strand; PAM type: YTN; PAM sequence: CTT
  source 1..20: mol_type = other DNA
gctctcccttttctgtcact

SEQ ID NO: 41050 - DNA, 20 bp, synthetic construct
  misc_feature 1..20: note = Description of Artificial Sequence: Synthetic oligonucleotide
  misc_feature 1..20: note = Target: SCN10A; (-) strand; PAM type: YTN; PAM sequence: TTG
  source 1..20: mol_type = other DNA
ccgaggccttgctctccctt

SEQ ID NO: 41051 - DNA, 20 bp, synthetic construct
  misc_feature 1..20: note = Description of Artificial Sequence: Synthetic oligonucleotide
  misc_feature 1..20: note = Target: SCN10A; (-) strand; PAM type: YTN; PAM sequence: TTT
  source 1..20: mol_type = other DNA
gccgaggccttgctctccct

SEQ ID NO: 41052 - DNA, 20 bp, synthetic construct
  misc_feature 1..20: note = Description of Artificial Sequence: Synthetic oligonucleotide
  misc_feature 1..20: note = Target: SCN10A; (-) strand; PAM type: YTN; PAM sequence: CTC
  source 1..20: mol_type = other DNA
aagaatacagatttgccgag

SEQ ID NO: 41053 - DNA, 20 bp, synthetic construct
  misc_feature 1..20: note = Description of Artificial Sequence: Synthetic oligonucleotide
  misc_feature 1..20: note = Target: SCN10A; (-) strand; PAM type: YTN; PAM sequence: CTC
  source 1..20: mol_type = other DNA
acatgcctcaagaatacaga

SEQ ID NO: 41054 - DNA, 20 bp, synthetic construct
  misc_feature 1..20: note = Description of Artificial Sequence: Synthetic oligonucleotide
  misc_feature 1..20: note = Target: SCN10A; (-) strand; PAM type: YTN; PAM sequence: CTG
  source 1..20: mol_type = other DNA
atacatctcacatgcctcaa

SEQ ID NO: 41055 - DNA, 20 bp, synthetic construct
  misc_feature 1..20: note = Description of Artificial Sequence: Synthetic oligonucleotide
  misc_feature 1..20: note = Target: SCN10A; (-) strand; PAM type: YTN; PAM sequence: TTA
  source 1..20: mol_type = other DNA
caaagcacagtggctgatac

SEQ ID NO: 41056 - DNA, 20 bp, synthetic construct
  misc_feature 1..20: note = Description of Artificial Sequence: Synthetic oligonucleotide
  misc_feature 1..20: note = Target: SCN10A; (-) strand; PAM type: YTN; PAM sequence: TTG
  source 1..20: mol_type = other DNA
tataattacaaagcacagtg

SEQ ID NO: 41057 - DNA, 20 bp, synthetic construct
  misc_feature 1..20: note = Description of Artificial Sequence: Synthetic oligonucleotide
  misc_feature 1..20: note = Target: SCN10A; (-) strand; PAM type: YTN; PAM sequence: TTT
  source 1..20: mol_type = other DNA
gtataattacaaagcacagt

SEQ ID NO: 41058 - DNA, 20 bp, synthetic construct
  misc_feature 1..20: note = Description of Artificial Sequence: Synthetic oligonucleotide
  misc_feature 1..20: note = Target: SCN10A; (-) strand; PAM type: YTN; PAM sequence: TTC
  source 1..20: mol_type = other DNA
catttgtataattacaaagc

SEQ ID NO: 41059 - DNA, 20 bp, synthetic construct
  misc_feature 1..20: note = Description of Artificial Sequence: Synthetic oligonucleotide
  misc_feature 1..20: note = Target: SCN10A; (-) strand; PAM type: YTN; PAM sequence: TTT
  source 1..20: mol_type = other DNA
ccatttgtataattacaaag

SEQ ID NO: 41060 - DNA, 20 bp, synthetic construct
  misc_feature 1..20: note = Description of Artificial Sequence: Synthetic oligonucleotide
  misc_feature 1..20: note = Target: SCN10A; (-) strand; PAM type: YTN; PAM sequence: TTT
  source 1..20: mol_type = other DNA
tccatttgtataattacaaa

SEQ ID NO: 41061 - DNA, 20 bp, synthetic construct
  misc_feature 1..20: note = Description of Artificial Sequence: Synthetic oligonucleotide
  misc_feature 1..20: note = Target: SCN10A; (-) strand; PAM type: YTN; PAM sequence: TTC
  source 1..20: mol_type = other DNA
ataagattttccatttgtat

SEQ ID NO: 41062 - DNA, 20 bp, synthetic construct
  misc_feature 1..20: note = Description of Artificial Sequence: Synthetic oligonucleotide
  misc_feature 1..20: note = Target: SCN10A; (-) strand; PAM type: YTN; PAM sequence: TTT
  source 1..20: mol_type = other DNA
cataagattttccatttgta

SEQ ID NO: 41063 - DNA, 20 bp, synthetic construct
  misc_feature 1..20: note = Description of Artificial Sequence: Synthetic oligonucleotide
  misc_feature 1..20: note = Target: SCN10A; (-) strand; PAM type: YTN; PAM sequence: TTG
  source 1..20: mol_type = other DNA
atcatttcataagattttcc

SEQ ID NO: 41064 - DNA, 20 bp, synthetic construct
  misc_feature 1..20: note = Description of Artificial Sequence: Synthetic oligonucleotide
  misc_feature 1..20: note = Target: SCN10A; (-) strand; PAM type: YTN; PAM sequence: TTT
  source 1..20: mol_type = other DNA
gatcatttcataagattttc

SEQ ID NO: 41065 - DNA, 20 bp, synthetic construct
  misc_feature 1..20: note = Description of Artificial Sequence: Synthetic oligonucleotide
  misc_feature 1..20: note = Target: SCN10A; (-) strand; PAM type: YTN; PAM sequence: CTA
  source 1..20: mol_type = other DNA
tatatttgatcatttcataa

SEQ ID NO: 41066 - DNA, 20 bp, synthetic construct
  misc_feature 1..20: note = Description of Artificial Sequence: Synthetic oligonucleotide
  misc_feature 1..20: note = Target: SCN10A; (-) strand; PAM type: YTN; PAM sequence: TTG
  source 1..20: mol_type = other DNA
tctatatatttgatcatttc

SEQ ID NO: 41067 - DNA, 20 bp, synthetic construct
  misc_feature 1..20: note = Description of Artificial Sequence: Synthetic oligonucleotide
  misc_feature 1..20: note = Target: SCN10A; (-) strand; PAM type: YTN; PAM sequence: TTC
  source 1..20: mol_type = other DNA
attgtctatatatttgatca

SEQ ID NO: 41068 - DNA, 20 bp, synthetic construct
  misc_feature 1..20: note = Description of Artificial Sequence: Synthetic oligonucleotide
  misc_feature 1..20: note = Target: SCN10A; (-) strand; PAM type: YTN; PAM sequence: TTC
  source 1..20: mol_type = other DNA
aaatatatagccaattcatt

SEQ ID NO: 41069 - DNA, 20 bp, synthetic construct
  misc_feature 1..20: note = Description of Artificial Sequence: Synthetic oligonucleotide
  misc_feature 1..20: note = Target: SCN10A; (-) strand; PAM type: YTN; PAM sequence: TTC
  source 1..20: mol_type = other DNA
ccagccacaatcacaaagat

SEQ ID NO: 41070 - DNA, 20 bp, synthetic construct
  misc_feature 1..20: note = Description of Artificial Sequence: Synthetic oligonucleotide
  misc_feature 1..20: note = Target: SCN10A; (-) strand; PAM type: YTN; PAM sequence: TTG
  source 1..20: mol_type = other DNA
gcccattcccagccacaatc

SEQ ID NO: 41071 - DNA, 20 bp, synthetic construct
  misc_feature 1..20: note = Description of Artificial Sequence: Synthetic oligonucleotide
  misc_feature 1..20: note = Target: SCN10A; (-) strand; PAM type: YTN; PAM sequence: CTT
  source 1..20: mol_type = other DNA
ggcccattcccagccacaat

SEQ ID NO: 41072 - DNA, 20 bp, synthetic construct
  misc_feature 1..20: note = Description of Artificial Sequence: Synthetic oligonucleotide
  misc_feature 1..20: note = Target: SCN10A; (-) strand; PAM type: YTN; PAM sequence: CTC
  source 1..20: mol_type = other DNA
ttggcccattcccagccaca

SEQ ID NO: 41073 - DNA, 20 bp, synthetic construct
  misc_feature 1..20: note = Description of Artificial Sequence: Synthetic oligonucleotide
  misc_feature 1..20: note = Target: SCN10A; (-) strand; PAM type: YTN; PAM sequence: TTA
  source 1..20: mol_type = other DNA
actcttggcccattcccagc

SEQ ID NO: 41074 - DNA, 20 bp, synthetic construct
  misc_feature 1..20: note = Description of Artificial Sequence: Synthetic oligonucleotide
  misc_feature 1..20: note = Target: SCN10A; (-) strand; PAM type: YTN; PAM sequence: TTC
  source 1..20: mol_type = other DNA
cattaactcttggcccattc

SEQ ID NO: 41075 - DNA, 20 bp, synthetic construct
  misc_feature 1..20: note = Description of Artificial Sequence: Synthetic oligonucleotide
  misc_feature 1..20: note = Target: SCN10A; (-) strand; PAM type: YTN; PAM sequence: CTT
  source 1..20: mol_type = other DNA
ccattaactcttggcccatt

SEQ ID NO: 41076 - DNA, 20 bp, synthetic construct
  misc_feature 1..20: note = Description of Artificial Sequence: Synthetic oligonucleotide
  misc_feature 1..20: note = Target: SCN10A; (-) strand; PAM type: YTN; PAM sequence: TTG
  source 1..20: mol_type = other DNA
taatgacagtcatgatcttc

SEQ ID NO: 41077 - DNA, 20 bp, synthetic construct
  misc_feature 1..20: note = Description of Artificial Sequence: Synthetic oligonucleotide
  misc_feature 1..20: note = Target: SCN10A; (-) strand; PAM type: YTN; PAM sequence: CTA
  source 1..20: mol_type = other DNA
taacaacataggacataggg

SEQ ID NO: 41078 - DNA, 20 bp, synthetic construct
  misc_feature 1..20: note = Description of Artificial Sequence: Synthetic oligonucleotide
  misc_feature 1..20: note = Target: SCN10A; (-) strand; PAM type: YTN; PAM sequence: CTC
  source 1..20: mol_type = other DNA
cctataacaacataggacat

SEQ ID NO: 41079 - DNA, 20 bp, synthetic construct
  misc_feature 1..20: note = Description of Artificial Sequence: Synthetic oligonucleotide
  misc_feature 1..20: note = Target: SCN10A; (-) strand; PAM type: YTN; PAM sequence: TTG
  source 1..20: mol_type = other DNA
agatgaagaaaagcaaagac

SEQ ID NO: 41080 - DNA, 20 bp, synthetic construct
  misc_feature 1..20: note = Description of Artificial Sequence: Synthetic oligonucleotide
  misc_feature 1..20: note = Target: SCN10A; (-) strand; PAM type: YTN; PAM sequence: TTT
  source 1..20: mol_type = other DNA
gagatgaagaaaagcaaaga

SEQ ID NO: 41081 - DNA, 20 bp, synthetic construct
  misc_feature 1..20: note = Description of Artificial Sequence: Synthetic oligonucleotide
  misc_feature 1..20: note = Target: SCN10A; (-) strand; PAM type: YTN; PAM sequence: TTT
  source 1..20: mol_type = other DNA
tgagatgaagaaaagcaaag

SEQ ID NO: 41082 - DNA, 20 bp, synthetic construct
  misc_feature 1..20: note = Description of Artificial Sequence: Synthetic oligonucleotide
  misc_feature 1..20: note = Target: SCN10A; (-) strand; PAM type: YTN; PAM sequence: TTG
  source 1..20: mol_type = other DNA
cagattttgagatgaagaaa

SEQ ID NO: 41083 - DNA, 20 bp, synthetic construct
  misc_feature 1..20: note = Description of Artificial Sequence: Synthetic oligonucleotide
  misc_feature 1..20: note = Target: SCN10A; (-) strand; PAM type: YTN; PAM sequence: TTA
  source 1..20: mol_type = other DNA
ggccaaaggcatgttgcaga

SEQ ID NO: 41084 - DNA, 20 bp, synthetic construct
  misc_feature 1..20: note = Description of Artificial Sequence: Synthetic oligonucleotide
  misc_feature 1..20: note = Target: SCN10A; (-) strand; PAM type: YTN; PAM sequence: TTT
  source 1..20: mol_type = other DNA
aggccaaaggcatgttgcag

SEQ ID NO: 41085 - DNA, 20 bp, synthetic construct
  misc_feature 1..20: note = Description of Artificial Sequence: Synthetic oligonucleotide
  misc_feature 1..20: note = Target: SCN10A; (-) strand; PAM type: YTN; PAM sequence: TTA
  source 1..20: mol_type = other DNA
tttaggccaaaggcatgttg

SEQ ID NO: 41086 - DNA, 20 bp, synthetic construct
  misc_feature 1..20: note = Description of Artificial Sequence: Synthetic oligonucleotide
  misc_feature 1..20: note = Target: SCN10A; (-) strand; PAM type: YTN; PAM sequence: TTT
  source 1..20: mol_type = other DNA
atttaggccaaaggcatgtt

SEQ ID NO: 41087 - DNA, 20 bp, synthetic construct
  misc_feature 1..20: note = Description of Artificial Sequence: Synthetic oligonucleotide
  misc_feature 1..20: note = Target: SCN10A; (-) strand; PAM type: YTN; PAM sequence: TTG
  source 1..20: mol_type = other DNA
tcagaggagtttatttaggc

SEQ ID NO: 41088 - DNA, 20 bp, synthetic construct
  misc_feature 1..20: note = Description of Artificial Sequence: Synthetic oligonucleotide
  misc_feature 1..20: note = Target: SCN10A; (-) strand; PAM type: YTN; PAM sequence: CTG
  source 1..20: mol_type = other DNA
aatggagtaagaattgtcag

SEQ ID NO: 41089 - DNA, 20 bp, synthetic construct
  misc_feature 1..20: note = Description of Artificial Sequence: Synthetic oligonucleotide
  misc_feature 1..20: note = Target: SCN10A; (-) strand; PAM type: YTN; PAM sequence: TTG
  source 1..20: mol_type = other DNA
tatgaactgaatggagtaag

SEQ ID NO: 41090 - DNA, 20 bp, synthetic construct
  misc_feature 1..20: note = Description of Artificial Sequence: Synthetic oligonucleotide
  misc_feature 1..20: note = Target: SCN10A; (-) strand; PAM type: YTN; PAM sequence: TTA
  source 1..20: mol_type = other DNA
attgtatgaactgaatggag

SEQ ID NO: 41091 - DNA, 20 bp, synthetic construct
  misc_feature 1..20: note = Description of Artificial Sequence: Synthetic oligonucleotide
  misc_feature 1..20: note = Target: SCN10A; (-) strand; PAM type: YTN; PAM sequence: TTA
  source 1..20: mol_type = other DNA
agcccccaaaagattaattg

SEQ ID NO: 41092 - DNA, 20 bp, synthetic construct
  misc_feature 1..20: note = Description of Artificial Sequence: Synthetic oligonucleotide
  misc_feature 1..20: note = Target: SCN10A; (-) strand; PAM type: YTN; PAM sequence: CTC
  source 1..20: mol_type = other DNA
caagaacaagagataaaata

SEQ ID NO: 41093 - DNA, 20 bp, synthetic construct
  misc_feature 1..20: note = Description of Artificial Sequence: Synthetic oligonucleotide
  misc_feature 1..20: note = Target: SCN10A; (-) strand; PAM type: YTN; PAM sequence: CTG
  source 1..20: mol_type = other DNA
ctccaagaacaagagataaa

SEQ ID NO: 41094 - DNA, 20 bp, synthetic construct
  misc_feature 1..20: note = Description of Artificial Sequence: Synthetic oligonucleotide
  misc_feature 1..20: note = Target: SCN10A; (-) strand; PAM type: YTN; PAM sequence: CTA
  source 1..20: mol_type = other DNA
tatgatgggcactgctccaa

SEQ ID NO: 41095 - DNA, 20 bp, synthetic construct
  misc_feature 1..20: note = Description of Artificial Sequence: Synthetic oligonucleotide
  misc_feature 1..20: note = Target: SCN10A; (-) strand; PAM type: YTN; PAM sequence: TTA
  source 1..20: mol_type = other DNA
cgtactatatgatgggcact

SEQ ID NO: 41096 - DNA, 20 bp, synthetic construct
  misc_feature 1..20: note = Description of Artificial Sequence: Synthetic oligonucleotide
  misc_feature 1..20: note = Target: SCN10A; (-) strand; PAM type: YTN; PAM sequence: TTA
  source 1..20: mol_type = other DNA
attacgtactatatgatggg

SEQ ID NO: 41097 - DNA, 20 bp, synthetic construct
  misc_feature 1..20: note = Description of Artificial Sequence: Synthetic oligonucleotide
  misc_feature 1..20: note = Target: SCN10A; (-) strand; PAM type: YTN; PAM sequence: TTA
  source 1..20: mol_type = other DNA
ttaattacgtactatatgat

SEQ ID NO: 41098 - DNA, 20 bp, synthetic construct
  misc_feature 1..20: note = Description of Artificial Sequence: Synthetic oligonucleotide
  misc_feature 1..20: note = Target: SCN10A; (-) strand; PAM type: YTN; PAM sequence: CTG
  source 1..20: mol_type = other DNA
caaatgttattaattacgta

SEQ ID NO: 41099 - DNA, 20 bp, synthetic construct
  misc_feature 1..20: note = Description of Artificial Sequence: Synthetic oligonucleotide
  misc_feature 1..20: note = Target: SCN10A; (-) strand; PAM type: YTN; PAM sequence: TTC
  source 1..20: mol_type = other DNA
atcctgcaaatgttattaat

SEQ ID NO: 41100 - DNA, 20 bp, synthetic construct
  misc_feature 1..20: note = Description of Artificial Sequence: Synthetic oligonucleotide
  misc_feature 1..20: note = Target: SCN10A; (-) strand; PAM type: YTN; PAM sequence: TTC
  source 1..20: mol_type = other DNA
attcatcctgcaaatgttat

SEQ ID NO: 41101 - DNA, 20 bp, synthetic construct
  misc_feature 1..20: note = Description of Artificial Sequence: Synthetic oligonucleotide
  misc_feature 1..20: note = Target: SCN10A; (-) strand; PAM type: YTN; PAM sequence: TTT
  source 1..20: mol_type = other DNA
cattcatcctgcaaatgtta

SEQ ID NO: 41102 - DNA, 20 bp, synthetic construct
  misc_feature 1..20: note = Description of Artificial Sequence: Synthetic oligonucleotide
  misc_feature 1..20: note = Target: SCN10A; (-) strand; PAM type: YTN; PAM sequence: CTT
  source 1..20: mol_type = other DNA
tcattcatcctgcaaatgtt

SEQ ID NO: 41103 - DNA, 20 bp, synthetic construct
  misc_feature 1..20: note = Description of Artificial Sequence: Synthetic oligonucleotide
  misc_feature 1..20: note = Target: SCN10A; (-) strand; PAM type: YTN; PAM sequence: TTC
  source 1..20: mol_type = other DNA
tttcattcatcctgcaaatg

SEQ ID NO: 41104 - DNA, 20 bp, synthetic construct
  misc_feature 1..20: note = Description of Artificial Sequence: Synthetic oligonucleotide
  misc_feature 1..20: note = Target: SCN10A; (-) strand; PAM type: YTN; PAM sequence: TTT
  source 1..20: mol_type = other DNA
ctttcattcatcctgcaaat

SEQ ID NO: 41105 - DNA, 20 bp, synthetic construct
  misc_feature 1..20: note = Description of Artificial Sequence: Synthetic oligonucleotide
  misc_feature 1..20: note = Target: SCN10A; (-) strand; PAM type: YTN; PAM sequence: TTA
  source 1..20: mol_type = other DNA
atataatcagaagaaaaagt

SEQ ID NO: 41106 - DNA, 20 bp, synthetic construct
  misc_feature 1..20: note = Description of Artificial Sequence: Synthetic oligonucleotide
  misc_feature 1..20: note = Target: SCN10A; (-) strand; PAM type: YTN; PAM sequence: CTC
  source 1..20: mol_type = other DNA
catagttaatataatcagaa

SEQ ID NO: 41107 - DNA, 20 bp, synthetic construct
  misc_feature 1..20: note = Description of Artificial Sequence: Synthetic oligonucleotide
  misc_feature 1..20: note = Target: SCN10A; (-) strand; PAM type: YTN; PAM sequence: CTG
  source 1..20: mol_type = other DNA
gcgtccagaactccatagtt

SEQ ID NO: 41108 - DNA, 20 bp, synthetic construct
  misc_feature 1..20: note = Description of Artificial Sequence: Synthetic oligonucleotide
  misc_feature 1..20: note = Target: SCN10A; (-) strand; PAM type: YTN; PAM sequence: TTA
  source 1..20: mol_type = other DNA
cctggcgtccagaactccat

SEQ ID NO: 41109 - DNA, 20 bp, synthetic construct
  misc_feature 1..20: note = Description of Artificial Sequence: Synthetic oligonucleotide
  misc_feature 1..20: note = Target: SCN10A; (-) strand; PAM type: YTN; PAM sequence: TTA
  source 1..20: mol_type = other DNA
cattacctggcgtccagaac

SEQ ID NO: 41110 - DNA, 20 bp, synthetic construct
  misc_feature 1..20: note = Description of Artificial Sequence: Synthetic oligonucleotide
  misc_feature 1..20: note = Target: SCN10A; (-) strand; PAM type: YTN; PAM sequence: TTT
  source 1..20: mol_type = other DNA
acattacctggcgtccagaa

SEQ ID NO: 41111 - DNA, 20 bp, synthetic construct
  misc_feature 1..20: note = Description of Artificial Sequence: Synthetic oligonucleotide
  misc_feature 1..20: note = Target: SCN10A; (-) strand; PAM type: YTN; PAM sequence: TTT
  source 1..20: mol_type = other DNA
tacattacctggcgtccaga

SEQ ID NO: 41112 - DNA, 20 bp, synthetic construct
  misc_feature 1..20: note = Description of Artificial Sequence: Synthetic oligonucleotide
  misc_feature 1..20: note = Target: SCN10A; (-) strand; PAM type: YTN; PAM sequence: TTT
  source 1..20: mol_type = other DNA
ttacattacctggcgtccag

SEQ ID NO: 41113 - DNA, 20 bp, synthetic construct
  misc_feature 1..20: note = Description of Artificial Sequence: Synthetic oligonucleotide
  misc_feature 1..20: note = Target: SCN10A; (-) strand; PAM type: YTN; PAM sequence: TTA
  source 1..20: mol_type = other DNA
aggaggagagtttttacatt

SEQ ID NO: 41114 - DNA, 20 bp, synthetic construct
  misc_feature 1..20: note = Description of Artificial Sequence: Synthetic oligonucleotide
  misc_feature 1..20: note = Target: SCN10A; (-) strand; PAM type: YTN; PAM sequence: CTC
  source 1..20: mol_type = other DNA
ataatcagacattaaggagg

SEQ ID NO: 41115 - DNA, 20 bp, synthetic construct
  misc_feature 1..20: note = Description of Artificial Sequence: Synthetic oligonucleotide
  misc_feature 1..20: note = Target: SCN10A; (-) strand; PAM type: YTN; PAM sequence: TTC
  source 1..20: mol_type = other DNA
acatctcataatcagacatt

SEQ ID NO: 41116 - DNA, 20 bp, synthetic construct
  misc_feature 1..20: note = Description of Artificial Sequence: Synthetic oligonucleotide
  misc_feature 1..20: note = Target: SCN10A; (-) strand; PAM type: YTN; PAM sequence: CTG
  source 1..20: mol_type = other DNA
ttcacatctcataatcagac

SEQ ID NO: 41117 - DNA, 20 bp, synthetic construct
  misc_feature 1..20: note = Description of Artificial Sequence: Synthetic oligonucleotide
  misc_feature 1..20: note = Target: SCN10A; (-) strand; PAM type: YTN; PAM sequence: TTC
  source 1..20: mol_type = other DNA
cagagtctgttcacatctca

SEQ ID NO: 41118 - DNA, 20 bp, synthetic construct
  misc_feature 1..20: note = Description of Artificial Sequence: Synthetic oligonucleotide
  misc_feature 1..20: note = Target: SCN10A; (-) strand; PAM type: YTN; PAM sequence: TTG
  source 1..20: mol_type = other DNA
aatacattccagagtctgtt

SEQ ID NO: 41119 - DNA, 20 bp, synthetic construct
  misc_feature 1..20: note = Description of Artificial Sequence: Synthetic oligonucleotide
  misc_feature 1..20: note = Target: SCN10A; (-) strand; PAM type: YTN; PAM sequence: TTT
  source 1..20: mol_type = other DNA
gaatacattccagagtctgt

SEQ ID NO: 41120 - DNA, 20 bp, synthetic construct
  misc_feature 1..20: note = Description of Artificial Sequence: Synthetic oligonucleotide
  misc_feature 1..20: note = Target: SCN10A; (-) strand; PAM type: YTN; PAM sequence: TTT
  source 1..20: mol_type = other DNA
tgaatacattccagagtctg

SEQ ID NO: 41121 - DNA, 20 bp, synthetic construct
  misc_feature 1..20: note = Description of Artificial Sequence: Synthetic oligonucleotide
  misc_feature 1..20: note = Target: SCN10A; (-) strand; PAM type: YTN; PAM sequence: CTT
  source 1..20: mol_type = other DNA
ttgaatacattccagagtct

SEQ ID NO: 41122 - DNA, 20 bp, synthetic construct
  misc_feature 1..20: note = Description of Artificial Sequence: Synthetic oligonucleotide
  misc_feature 1..20: note = Target: SCN10A; (-) strand; PAM type: YTN; PAM sequence: CTA
  source 1..20: mol_type = other DNA
aagaggcagcttttgaatac

SEQ ID NO: 41123 - DNA, 20 bp, synthetic construct
  misc_feature 1..20: note = Description of Artificial Sequence: Synthetic oligonucleotide
  misc_feature 1..20: note = Target: SCN10A; (-) strand; PAM type: YTN; PAM sequence: TTG
  source 1..20: mol_type = other DNA
tgtagctaaagaggcagctt

SEQ ID NO: 41124 - DNA, 20 bp, synthetic construct
  misc_feature 1..20: note = Description of Artificial Sequence: Synthetic oligonucleotide
  misc_feature 1..20: note = Target: SCN10A; (-) strand; PAM type: YTN; PAM sequence: CTG
  source 1..20: mol_type = other DNA
ttgtgtagctaaagaggcag

SEQ ID NO: 41125 - DNA, 20 bp, synthetic construct
  misc_feature 1..20: note = Description of Artificial Sequence: Synthetic oligonucleotide
  misc_feature 1..20: note = Target: SCN10A; (-) strand; PAM type: YTN; PAM sequence: TTC
  source 1..20: mol_type = other DNA
tgttgtgtagctaaagaggc

SEQ ID NO: 41126 - DNA, 20 bp, synthetic construct
  misc_feature 1..20: note = Description of Artificial Sequence: Synthetic oligonucleotide
  misc_feature 1..20: note = Target: SCN10A; (-) strand; PAM type: YTN; PAM sequence: TTT
  source 1..20: mol_type = other DNA
ctgttgtgtagctaaagagg

SEQ ID NO: 41127 - DNA, 20 bp, synthetic construct
  misc_feature 1..20: note = Description of Artificial Sequence: Synthetic oligonucleotide
  misc_feature 1..20: note = Target: SCN10A; (-) strand; PAM type: YTN; PAM sequence: CTT
  source 1..20: mol_type = other DNA
tctgttgtgtagctaaagag

SEQ ID NO: 41128 - DNA, 20 bp, synthetic construct
  misc_feature 1..20: note = Description of Artificial Sequence: Synthetic oligonucleotide
  misc_feature 1..20: note = Target: SCN10A; (-) strand; PAM type: YTN; PAM sequence: CTG
  source 1..20: mol_type = other DNA
gacctttctgttgtgtagct

SEQ ID NO: 41129 - DNA, 20 bp, synthetic construct
  misc_feature 1..20: note = Description of Artificial Sequence: Synthetic oligonucleotide
  misc_feature 1..20: note = Target: SCN10A; (-) strand; PAM type: YTN; PAM sequence: CTG
  source 1..20: mol_type = other DNA
aaatggctggacctttctgt

SEQ ID NO: 41130 - DNA, 20 bp, synthetic construct
  misc_feature 1..20: note = Description of Artificial Sequence: Synthetic oligonucleotide
  misc_feature 1..20: note = Target: SCN10A; (-) strand; PAM type: YTN; PAM sequence: CTG
  source 1..20: mol_type = other DNA
aggctgaaatggctggacct

SEQ ID NO: 41131 - DNA, 20 bp, synthetic construct
  misc_feature 1..20: note = Description of Artificial Sequence: Synthetic oligonucleotide
  misc_feature 1..20: note = Target: SCN10A; (-) strand; PAM type: YTN; PAM sequence: TTC
  source 1..20: mol_type = other DNA
tgaggctgaaatggctggac

SEQ ID NO: 41132 - DNA, 20 bp, synthetic construct
  misc_feature 1..20: note = Description of Artificial Sequence: Synthetic oligonucleotide
  misc_feature 1..20: note = Target: SCN10A; (-) strand; PAM type: YTN; PAM sequence: TTT
  source 1..20: mol_type = other DNA
ctgaggctgaaatggctgga

SEQ ID NO: 41133 - DNA, 20 bp, synthetic construct
  misc_feature 1..20: note = Description of Artificial Sequence: Synthetic oligonucleotide
  misc_feature 1..20: note = Target: SCN10A; (-) strand; PAM type: YTN; PAM sequence: TTT
  source 1..20: mol_type = other DNA
tctgaggctgaaatggctgg

SEQ ID NO: 41134 - DNA, 20 bp, synthetic construct
  misc_feature 1..20: note = Description of Artificial Sequence: Synthetic oligonucleotide
  misc_feature 1..20: note = Target: SCN10A; (-) strand; PAM type: YTN; PAM sequence: CTT
  source 1..20: mol_type = other DNA
ttctgaggctgaaatggctg

SEQ ID NO: 41135 - DNA, 20 bp, synthetic construct
  misc_feature 1..20: note = Description of Artificial Sequence: Synthetic oligonucleotide
  misc_feature 1..20: note = Target: SCN10A; (-) strand; PAM type: YTN; PAM sequence: CTC
  source 1..20: mol_type = other DNA
ttttctgaggctgaaatggc

SEQ ID NO: 41136 - DNA, 20 bp, synthetic construct
  misc_feature 1..20: note = Description of Artificial Sequence: Synthetic oligonucleotide
  misc_feature 1..20: note = Target: SCN10A; (-) strand; PAM type: YTN; PAM sequence: TTA
  source 1..20: mol_type = other DNA
tatgggaaaagcactctttt

SEQ ID NO: 41137 - DNA, 20 bp, synthetic construct
  misc_feature 1..20: note = Description of Artificial Sequence: Synthetic oligonucleotide
  misc_feature 1..20: note = Target: SCN10A; (-) strand; PAM type: YTN; PAM sequence: TTT
  source 1..20: mol_type = other DNA
atatgggaaaagcactcttt

SEQ ID NO: 41138 - DNA, 20 bp, synthetic construct
  misc_feature 1..20: note = Description of Artificial Sequence: Synthetic oligonucleotide
  misc_feature 1..20: note = Target: SCN10A; (-) strand; PAM type: YTN; PAM sequence: CTG
  source 1..20: mol_type = other DNA
ccccatttatatgggaaaag

SEQ ID NO: 41139 - DNA, 20 bp, synthetic construct
  misc_feature 1..20: note = Description of Artificial Sequence: Synthetic oligonucleotide
  misc_feature 1..20: note = Target: SCN10A; (-) strand; PAM type: YTN; PAM sequence: CTC
  source 1..20: mol_type = other DNA
catggtgcctgccccattta

SEQ ID NO: 41140 - DNA, 20 bp, synthetic construct
  misc_feature 1..20: note = Description of Artificial Sequence: Synthetic oligonucleotide
  misc_feature 1..20: note = Target: SCN10A; (-) strand; PAM type: YTN; PAM sequence: CTG
  source 1..20: mol_type = other DNA
tagaactccatggtgcctgc

SEQ ID NO: 41141 - DNA, 20 bp, synthetic construct
  misc_feature 1..20: note = Description of Artificial Sequence: Synthetic oligonucleotide
  misc_feature 1..20: note = Target: SCN10A; (-) strand; PAM type: YTN; PAM sequence: CTC
  source 1..20: mol_type = other DNA
gtgctgtagaactccatggt

SEQ ID NO: 41142 - DNA, 20 bp, synthetic construct
  misc_feature 1..20: note = Description of Artificial Sequence: Synthetic oligonucleotide
  misc_feature 1..20: note = Target: SCN10A; (-) strand; PAM type: YTN; PAM sequence: TTC
  source 1..20: mol_type = other DNA
gcatctcgtgctgtagaact

SEQ ID NO: 41143 - DNA, 20 bp, synthetic construct
  misc_feature 1..20: note = Description of Artificial Sequence: Synthetic oligonucleotide
  misc_feature 1..20: note = Target: SCN10A; (-) strand; PAM type: YTN; PAM sequence: CTT
  source 1..20: mol_type = other DNA
cgcatctcgtgctgtagaac

SEQ ID NO: 41144 - DNA, 20 bp, synthetic construct
  misc_feature 1..20: note = Description of Artificial Sequence: Synthetic oligonucleotide
  misc_feature 1..20: note = Target: SCN10A; (-) strand; PAM type: YTN; PAM sequence: CTA
  source 1..20: mol_type = other DNA
tagacttcgcatctcgtgct

SEQ ID NO: 41145 - DNA, 20 bp, synthetic construct
  misc_feature 1..20: note = Description of Artificial Sequence: Synthetic oligonucleotide
  misc_feature 1..20: note = Target: SCN10A; (-) strand; PAM type: YTN; PAM sequence: TTC
  source 1..20: mol_type = other DNA
tatagacttcgcatctcgtg

SEQ ID NO: 41146 - DNA, 20 bp, synthetic construct
  misc_feature 1..20: note = Description of Artificial Sequence: Synthetic oligonucleotide
  misc_feature 1..20: note = Target: SCN10A; (-) strand; PAM type: YTN; PAM sequence: TTT
  source 1..20: mol_type = other DNA
ctatagacttcgcatctcgt

SEQ ID NO: 41147 - DNA, 20 bp, synthetic construct
  misc_feature 1..20: note = Description of Artificial Sequence: Synthetic oligonucleotide
  misc_feature 1..20: note = Target: SCN10A; (-) strand; PAM type: YTN; PAM sequence: CTT
  source 1..20: mol_type = other DNA
tctatagacttcgcatctcg

SEQ ID NO: 41148 - DNA, 20 bp, synthetic construct
  misc_feature 1..20: note = Description of Artificial Sequence: Synthetic oligonucleotide
  misc_feature 1..20: note = Target: SCN10A; (-) strand; PAM type: YTN; PAM sequence: TTG
  source 1..20: mol_type = other DNA
gtgggaagggaagaaaatga

SEQ ID NO: 41149 - DNA, 20 bp, synthetic construct
  misc_feature 1..20: note = Description of Artificial Sequence: Synthetic oligonucleotide
  misc_feature 1..20: note = Target: SCN10A; (-) strand; PAM type: YTN; PAM sequence: TTG
  source 1..20: mol_type = other DNA
taaaattggtgggaagggaa

SEQ ID NO: 41150 - DNA, 20 bp, synthetic construct
  misc_feature 1..20: note = Description of Artificial Sequence: Synthetic oligonucleotide
  misc_feature 1..20: note = Target: SCN10A; (-) strand; PAM type: YTN; PAM sequence: CTT
  source 1..20: mol_type = other DNA
gtaaaattggtgggaaggga

SEQ ID NO: 41151 - DNA, 20 bp, synthetic construct
  misc_feature 1..20: note = Description of Artificial Sequence: Synthetic oligonucleotide
  misc_feature 1..20: note = Target: SCN10A; (-) strand; PAM type: YTN; PAM sequence: CTC
  source 1..20: mol_type = other DNA
acttgtaaaattggtgggaa

SEQ ID NO: 41152 - DNA, 20 bp, synthetic construct
  misc_feature 1..20: note = Description of Artificial Sequence: Synthetic oligonucleotide
  misc_feature 1..20: note = Target: SCN10A; (-) strand; PAM type: YTN; PAM sequence: TTC
  source 1..20: mol_type = other DNA
ctcacttgtaaaattggtgg

SEQ ID NO: 41153 - DNA, 20 bp, synthetic construct
  misc_feature 1..20: note = Description of Artificial Sequence: Synthetic oligonucleotide
  misc_feature 1..20: note = Target: SCN10A; (-) strand; PAM type: YTN; PAM sequence: TTT
  source 1..20: mol_type = other DNA
cctcacttgtaaaattggtg

SEQ ID NO: 41154 - DNA, 20 bp, synthetic construct
  misc_feature 1..20: note = Description of Artificial Sequence: Synthetic oligonucleotide
  misc_feature 1..20: note = Target: SCN10A; (-) strand; PAM type: YTN; PAM sequence: TTC
  source 1..20: mol_type = other DNA
aatttcctcacttgtaaaat

SEQ ID NO: 41155 - DNA, 20 bp, synthetic construct
  misc_feature 1..20: note = Description of Artificial Sequence: Synthetic oligonucleotide
  misc_feature 1..20: note = Target: SCN10A; (-) strand; PAM type: YTN; PAM sequence: CTT
  source 1..20: mol_type = other DNA
caatttcctcacttgtaaaa

SEQ ID NO: 41156 - DNA, 20 bp, synthetic construct
  misc_feature 1..20: note = Description of Artificial Sequence: Synthetic oligonucleotide
  misc_feature 1..20: note = Target: SCN10A; (-) strand; PAM type: YTN; PAM sequence: TTA
  source 1..20: mol_type = other DNA
acttcaatttcctcacttgt

SEQ ID NO: 41157 - DNA, 20 bp, synthetic construct
  misc_feature 1..20: note = Description of Artificial Sequence: Synthetic oligonucleotide
  misc_feature 1..20: note = Target: SCN10A; (-) strand; PAM type: YTN; PAM sequence: CTT
  source 1..20: mol_type = other DNA
aacttcaatttcctcacttg

SEQ ID NO: 41158 - DNA, 20 bp, synthetic construct
  misc_feature 1..20: note = Description of Artificial Sequence: Synthetic oligonucleotide
  misc_feature 1..20: note = Target: SCN10A; (-) strand; PAM type: YTN; PAM sequence: CTC
  source 1..20: mol_type = other DNA
ttaacttcaatttcctcact

SEQ ID NO: 41159 - DNA, 20 bp, synthetic construct
  misc_feature 1..20: note = Description of Artificial Sequence: Synthetic oligonucleotide
  misc_feature 1..20: note = Target: SCN10A; (-) strand; PAM type: YTN; PAM sequence: TTC
  source 1..20: mol_type = other DNA
ccctcttaacttcaatttcc

SEQ ID NO: 41160 - DNA, 20 bp, synthetic construct
  misc_feature 1..20: note = Description of Artificial Sequence: Synthetic oligonucleotide
  misc_feature 1..20: note = Target: SCN10A; (-) strand; PAM type: YTN; PAM sequence: TTT
  source 1..20: mol_type = other DNA
cccctcttaacttcaatttc

SEQ ID NO: 41161 - DNA, 20 bp, synthetic construct
  misc_feature 1..20: note = Description of Artificial Sequence: Synthetic oligonucleotide
  misc_feature 1..20: note = Target: SCN10A; (-) strand; PAM type: YTN; PAM sequence: CTT
  source 1..20: mol_type = other DNA
tcccctcttaacttcaattt

SEQ ID NO: 41162 - DNA, 20 bp, synthetic construct
  misc_feature 1..20: note = Description of Artificial Sequence: Synthetic oligonucleotide
  misc_feature 1..20: note = Target: SCN10A; (-) strand; PAM type: YTN; PAM sequence: CTA
  source 1..20: mol_type = other DNA
aagtctttcccctcttaact

SEQ ID NO: 41163 - DNA, 20 bp, synthetic construct
  misc_feature 1..20: note = Description of Artificial Sequence: Synthetic oligonucleotide
  misc_feature 1..20: note = Target: SCN10A; (-) strand; PAM type: YTN; PAM sequence: CTG
  source 1..20: mol_type = other DNA
accagggctaaagtctttcc

SEQ ID NO: 41164 - DNA, 20 bp, synthetic construct
  misc_feature 1..20: note = Description of Artificial Sequence: Synthetic oligonucleotide
  misc_feature 1..20: note = Target: SCN10A; (-) strand; PAM type: YTN; PAM sequence: CTG
  source 1..20: mol_type = other DNA
gctgaccagggctaaagtct

SEQ ID NO: 41165 - DNA, 20 bp, synthetic construct
  misc_feature 1..20: note = Description of Artificial Sequence: Synthetic oligonucleotide
  misc_feature 1..20: note = Target: SCN10A; (-) strand; PAM type: YTN; PAM sequence: TTG
  source 1..20: mol_type = other DNA
tctggctgaccagggctaaa

SEQ ID NO: 41166 - DNA, 20 bp, synthetic construct
  misc_feature 1..20: note = Description of Artificial Sequence: Synthetic oligonucleotide
  misc_feature 1..20: note = Target: SCN10A; (-) strand; PAM type: YTN; PAM sequence: TTC
  source 1..20: mol_type = other DNA
caccaattgtctggctgacc

SEQ ID NO: 41167 - DNA, 20 bp, synthetic construct
  misc_feature 1..20: note = Description of Artificial Sequence: Synthetic oligonucleotide
  misc_feature 1..20: note = Target: SCN10A; (-) strand; PAM type: YTN; PAM sequence: TTT
  source 1..20: mol_type = other DNA
ccaccaattgtctggctgac

SEQ ID NO: 41168 - DNA, 20 bp, synthetic construct
  misc_feature 1..20: note = Description of Artificial Sequence: Synthetic oligonucleotide
  misc_feature 1..20: note = Target: SCN10A; (-) strand; PAM type: YTN; PAM sequence: TTT
  source 1..20: mol_type = other DNA
tccaccaattgtctggctga

SEQ ID NO: 41169 - DNA, 20 bp, synthetic construct
  misc_feature 1..20: note = Description of Artificial Sequence: Synthetic oligonucleotide
  misc_feature 1..20: note = Target: SCN10A; (-) strand; PAM type: YTN; PAM sequence: CTT
  source 1..20: mol_type = other DNA
ttccaccaattgtctggctg

SEQ ID NO: 41170 - DNA, 20 bp, synthetic construct
  misc_feature 1..20: note = Description of Artificial Sequence: Synthetic oligonucleotide
  misc_feature 1..20: note = Target: SCN10A; (-) strand; PAM type: YTN; PAM sequence: CTA
  source 1..20: mol_type = other DNA
acttttccaccaattgtctg

SEQ ID NO: 41171 - DNA, 20 bp, synthetic construct
  misc_feature 1..20: note = Description of Artificial Sequence: Synthetic oligonucleotide
  misc_feature 1..20: note = Target: SCN10A; (-) strand; PAM type: YTN; PAM sequence: TTG
  source 1..20: mol_type = other DNA
gaatcctaacttttccacca

SEQ ID NO: 41172 - DNA, 20 bp, synthetic construct
  misc_feature 1..20: note = Description of Artificial Sequence: Synthetic oligonucleotide
  misc_feature 1..20: note = Target: SCN10A; (-) strand; PAM type: YTN; PAM sequence: CTG
  source 1..20: mol_type = other DNA
gaaatgccagttggaatcct

SEQ ID NO: 41173 - DNA, 20 bp, synthetic construct
  misc_feature 1..20: note = Description of Artificial Sequence: Synthetic oligonucleotide
  misc_feature 1..20: note = Target: SCN10A; (-) strand; PAM type: YTN; PAM sequence: CTG
  source 1..20: mol_type = other DNA
ggatctggaaatgccagttg

SEQ ID NO: 41174 - DNA, 20 bp, synthetic construct
  misc_feature 1..20: note = Description of Artificial Sequence: Synthetic oligonucleotide
  misc_feature 1..20: note = Target: SCN10A; (-) strand; PAM type: YTN; PAM sequence: CTG
  source 1..20: mol_type = other DNA
tcctgggatctggaaatgcc

SEQ ID NO: 41175 - DNA, 20 bp, synthetic construct
  misc_feature 1..20: note = Description of Artificial Sequence: Synthetic oligonucleotide
  misc_feature 1..20: note = Target: SCN10A; (-) strand; PAM type: YTN; PAM sequence: CTG
  source 1..20: mol_type = other DNA
ggtggagcaggaaagagcac

SEQ ID NO: 41176 - DNA, 20 bp, synthetic construct
  misc_feature 1..20: note = Description of Artificial Sequence: Synthetic oligonucleotide
  misc_feature 1..20: note = Target: SCN10A; (-) strand; PAM type: YTN; PAM sequence: TTG
  source 1..20: mol_type = other DNA
aggctgggtggagcaggaaa

SEQ ID NO: 41177 - DNA, 20 bp, synthetic construct
  misc_feature 1..20: note = Description of Artificial Sequence: Synthetic oligonucleotide
  misc_feature 1..20: note = Target: SCN10A; (-) strand; PAM type: YTN; PAM sequence: TTG
  source 1..20: mol_type = other DNA
agattgaggctgggtggagc

SEQ ID NO: 41178 - DNA, 20 bp, synthetic construct
  misc_feature 1..20: note = Description of Artificial Sequence: Synthetic oligonucleotide
  misc_feature 1..20: note = Target: SCN10A; (-) strand; PAM type: YTN; PAM sequence: TTT
  source 1..20: mol_type = other DNA
gagattgaggctgggtggag

SEQ ID NO: 41179 - DNA, 20 bp, synthetic construct
  misc_feature 1..20: note = Description of Artificial Sequence: Synthetic oligonucleotide
  misc_feature 1..20: note = Target: SCN10A; (-) strand; PAM type: YTN; PAM sequence: TTC
  source 1..20: mol_type = other DNA
agtttgagattgaggctggg

SEQ ID NO: 41180 - DNA, 20 bp, synthetic construct
  misc_feature 1..20: note = Description of Artificial Sequence: Synthetic oligonucleotide
  misc_feature 1..20: note = Target: SCN10A; (-) strand; PAM type: YTN; PAM sequence: TTT
  source 1..20: mol_type = other DNA
cagtttgagattgaggctgg

SEQ ID NO: 41181 - DNA, 20 bp, synthetic construct
  misc_feature 1..20: note = Description of Artificial Sequence: Synthetic oligonucleotide
  misc_feature 1..20: note = Target: SCN10A; (-) strand; PAM type: YTN; PAM sequence: TTT
  source 1..20: mol_type = other DNA
tcagtttgagattgaggctg

SEQ ID NO: 41182 - DNA, 20 bp, synthetic construct
  misc_feature 1..20: note = Description of Artificial Sequence: Synthetic oligonucleotide
  misc_feature 1..20: note = Target: SCN10A; (-) strand; PAM type: YTN; PAM sequence: TTT
  source 1..20: mol_type = other DNA
ttcagtttgagattgaggct

SEQ ID NO: 41183 - DNA, 20 bp, synthetic construct
  misc_feature 1..20: note = Description of Artificial Sequence: Synthetic oligonucleotide
  misc_feature 1..20: note = Target: SCN10A; (-) strand; PAM type: YTN; PAM sequence: CTG
  source 1..20: mol_type = other DNA
atatttttcagtttgagatt

SEQ ID NO: 41184 - DNA, 20 bp, synthetic construct
  misc_feature 1..20: note = Description of Artificial Sequence: Synthetic oligonucleotide
  misc_feature 1..20: note = Target: SCN10A; (-) strand; PAM type: YTN; PAM sequence: CTG
  source 1..20: mol_type = other DNA
ggatcctgatatttttcagt

SEQ ID NO: 41185 - DNA, 20 bp, synthetic construct
  misc_feature 1..20: note = Description of Artificial Sequence: Synthetic oligonucleotide
  misc_feature 1..20: note = Target: SCN10A; (-) strand; PAM type: YTN; PAM sequence: TTC
  source 1..20: mol_type = other DNA
tgggatcctgatatttttca

SEQ ID NO: 41186 - DNA, 20 bp, synthetic construct
  misc_feature 1..20: note = Description of Artificial Sequence: Synthetic oligonucleotide
  misc_feature 1..20: note = Target: SCN10A; (-) strand; PAM type: YTN; PAM sequence: TTT
  source 1..20: mol_type = other DNA
ctgggatcctgatatttttc

SEQ ID NO: 41187 - DNA, 20 bp, synthetic construct
  misc_feature 1..20: note = Description of Artificial Sequence: Synthetic oligonucleotide
  misc_feature 1..20: note = Target: SCN10A; (-) strand; PAM type: YTN; PAM sequence: CTT
  source 1..20: mol_type = other DNA
tctgggatcctgatattttt

SEQ ID NO: 41188 - DNA, 20 bp, synthetic construct
  misc_feature 1..20: note = Description of Artificial Sequence: Synthetic oligonucleotide
  misc_feature 1..20: note = Target: SCN10A; (-) strand; PAM type: YTN; PAM sequence: CTC
  source 1..20: mol_type = other DNA
actttctgggatcctgatat

SEQ ID NO: 41189 - DNA, 20 bp, synthetic construct
  misc_feature 1..20: note = Description of Artificial Sequence: Synthetic oligonucleotide
  misc_feature 1..20: note = Target: SCN10A; (-) strand; PAM type: YTN; PAM sequence: TTA
  source 1..20: mol_type = other DNA
cccctcactttctgggatcc

SEQ ID NO: 41190 - DNA, 20 bp, synthetic construct
  misc_feature 1..20: note = Description of Artificial Sequence: Synthetic oligonucleotide
  misc_feature 1..20: note = Target: SCN10A; (-) strand; PAM type: YTN; PAM sequence: CTT
  source 1..20: mol_type = other DNA
acccctcactttctgggatc

SEQ ID NO: 41191 - DNA, 20 bp, synthetic construct
  misc_feature 1..20: note = Description of Artificial Sequence: Synthetic oligonucleotide
  misc_feature 1..20: note = Target: SCN10A; (-) strand; PAM type: YTN; PAM sequence: CTG
  source 1..20: mol_type = other DNA
tatcatgagtcacttacccc

SEQ ID NO: 41192 - DNA, 20 bp, synthetic construct
  misc_feature 1..20: note = Description of Artificial Sequence: Synthetic oligonucleotide
  misc_feature 1..20: note = Target: SCN10A; (-) strand; PAM type: YTN; PAM sequence: CTG
  source 1..20: mol_type = other DNA
acctgtatcatgagtcactt

SEQ ID NO: 41193 - DNA, 20 bp, synthetic construct
  misc_feature 1..20: note = Description of Artificial Sequence: Synthetic oligonucleotide
  misc_feature 1..20: note = Target: SCN10A; (-) strand; PAM type: YTN; PAM sequence: CTG
  source 1..20: mol_type = other DNA
tgatgctgacctgtatcatg

SEQ ID NO: 41194 - DNA, 20 bp, synthetic construct
  misc_feature 1..20: note = Description of Artificial Sequence: Synthetic oligonucleotide
  misc_feature 1..20: note = Target: SCN10A; (-) strand; PAM type: YTN; PAM sequence: TTC
  source 1..20: mol_type = other DNA
tgtgatgctgacctgtatca

SEQ ID NO: 41195 - DNA, 20 bp, synthetic construct
  misc_feature 1..20: note = Description of Artificial Sequence: Synthetic oligonucleotide
  misc_feature 1..20: note = Target: SCN10A; (-) strand; PAM type: YTN; PAM sequence: TTT
  source 1..20: mol_type = other DNA
ctgtgatgctgacctgtatc

SEQ ID NO: 41196 - DNA, 20 bp, synthetic construct
  misc_feature 1..20: note = Description of Artificial Sequence: Synthetic oligonucleotide
  misc_feature 1..20: note = Target: SCN10A; (-) strand; PAM type: YTN; PAM sequence: TTA
  source 1..20: mol_type = other DNA
tttctgtgatgctgacctgt

SEQ ID NO: 41197 - DNA, 20 bp, synthetic construct
  misc_feature 1..20: note = Description of Artificial Sequence: Synthetic oligonucleotide
  misc_feature 1..20: note = Target: SCN10A; (-) strand; PAM type: YTN; PAM sequence: CTT
  source 1..20: mol_type = other DNA
atttctgtgatgctgacctg

SEQ ID NO: 41198 - DNA, 20 bp, synthetic construct
  misc_feature 1..20: note = Description of Artificial Sequence: Synthetic oligonucleotide
  misc_feature 1..20: note = Target: SCN10A; (-) strand; PAM type: YTN; PAM sequence: CTC
  source 1..20: mol_type = other DNA
ttatttctgtgatgctgacc

SEQ ID NO: 41199 - DNA, 20 bp, synthetic construct
  misc_feature 1..20: note = Description of Artificial Sequence: Synthetic oligonucleotide
  misc_feature 1..20: note = Target: SCN10A; (-) strand; PAM type: YTN; PAM sequence: TTC
  source 1..20: mol_type = other DNA
tcttatttctgtgatgctga

SEQ ID NO: 41200 - DNA, 20 bp, synthetic construct
  misc_feature 1..20: note = Description of Artificial Sequence: Synthetic oligonucleotide
  misc_feature 1..20: note = Target: SCN10A; (-) strand; PAM type: YTN; PAM sequence: TTT
  source 1..20: mol_type = other DNA
ctcttatttctgtgatgctg

SEQ ID NO: 41201 - DNA, 20 bp, synthetic construct
  misc_feature 1..20: note = Description of Artificial Sequence: Synthetic oligonucleotide
  misc_feature 1..20: note = Target: SCN10A; (-) strand; PAM type: YTN; PAM sequence: TTT
  source 1..20: mol_type = other DNA
tctcttatttctgtgatgct

SEQ ID NO: 41202 - DNA, 20 bp, synthetic construct
  misc_feature 1..20: note = Description of Artificial Sequence: Synthetic oligonucleotide
  misc_feature 1..20: note = Target: SCN10A; (-) strand; PAM type: YTN; PAM sequence: TTT
  source 1..20: mol_type = other DNA
ttctcttatttctgtgatgc

SEQ ID NO: 41203 - DNA, 20 bp, synthetic construct
  misc_feature 1..20: note = Description of Artificial Sequence: Synthetic oligonucleotide
  misc_feature 1..20: note = Target: SCN10A; (-) strand; PAM type: YTN; PAM sequence: TTA
  source 1..20: mol_type = other DNA
tttttctcttatttctgtga

SEQ ID NO: 41204 - DNA, 20 bp, synthetic construct
  misc_feature 1..20: note = Description of Artificial Sequence: Synthetic oligonucleotide
  misc_feature 1..20: note = Target: SCN10A; (-) strand; PAM type: YTN; PAM sequence: TTT
  source 1..20: mol_type = other DNA
atttttctcttatttctgtg

SEQ ID NO: 41205 - DNA, 20 bp, synthetic construct
  misc_feature 1..20: note = Description of Artificial Sequence: Synthetic oligonucleotide
  misc_feature 1..20: note = Target: SCN10A; (-) strand; PAM type: YTN; PAM sequence: TTT
  source 1..20: mol_type = other DNA
tatttttctcttatttctgt

SEQ ID NO: 41206 - DNA, 20 bp, synthetic construct
  misc_feature 1..20: note = Description of Artificial Sequence: Synthetic oligonucleotide
  misc_feature 1..20: note = Target: SCN10A; (-) strand; PAM type: YTN; PAM sequence: TTA
  source 1..20: mol_type = other DNA
tatcataaagcatcatttta

SEQ ID NO: 41207 - DNA, 20 bp, synthetic construct
  misc_feature 1..20: note = Description of Artificial Sequence: Synthetic oligonucleotide
  misc_feature 1..20: note = Target: SCN10A; (-) strand; PAM type: YTN; PAM sequence: TTA
  source 1..20: mol_type = other DNA
aatgtatgtccacaccagcg

SEQ ID NO: 41208 - DNA, 20 bp, synthetic construct
  misc_feature 1..20: note = Description of Artificial Sequence: Synthetic oligonucleotide
  misc_feature 1..20: note = Target: SCN10A; (-) strand; PAM type: YTN; PAM sequence: TTT
  source 1..20: mol_type = other DNA
aaatgtatgtccacaccagc

SEQ ID NO: 41209 - DNA, 20 bp, synthetic construct
  misc_feature 1..20: note = Description of Artificial Sequence: Synthetic oligonucleotide
  misc_feature 1..20: note = Target: SCN10A; (-) strand; PAM type: YTN; PAM sequence: TTT
  source 1..20: mol_type = other DNA
taaatgtatgtccacaccag

SEQ ID NO: 41210 - DNA, 20 bp, synthetic construct
  misc_feature 1..20: note = Description of Artificial Sequence: Synthetic oligonucleotide
  misc_feature 1..20: note = Target: SCN10A; (-) strand; PAM type: YTN; PAM sequence: TTT
  source 1..20: mol_type = other DNA
ttaaatgtatgtccacacca

SEQ ID NO: 41211 - DNA, 20 bp, synthetic construct
  misc_feature 1..20: note = Description of Artificial Sequence: Synthetic oligonucleotide
  misc_feature 1..20: note = Target: SCN10A; (-) strand; PAM type: YTN; PAM sequence: TTA
  source 1..20: mol_type = other DNA
atatttttaaatgtatgtcc

SEQ ID NO: 41212 - DNA, 20 bp, synthetic construct
  misc_feature 1..20: note = Description of Artificial Sequence: Synthetic oligonucleotide
  misc_feature 1..20: note = Target: SCN10A; (-) strand; PAM type: YTN; PAM sequence: TTA
  source 1..20: mol_type = other DNA
aaattaatatttttaaatgt

SEQ ID NO: 41213 - DNA, 20 bp, synthetic construct
  misc_feature 1..20: note = Description of Artificial Sequence: Synthetic oligonucleotide
  misc_feature 1..20: note = Target: SCN10A; (-) strand; PAM type: YTN; PAM sequence: TTG
  source 1..20: mol_type = other DNA
agatatccattaaaattaat

SEQ ID NO: 41214 - DNA, 20 bp, synthetic construct
  misc_feature 1..20: note = Description of Artificial Sequence: Synthetic oligonucleotide
  misc_feature 1..20: note = Target: SCN10A; (-) strand; PAM type: YTN; PAM sequence: TTT
  source 1..20: mol_type = other DNA
gagatatccattaaaattaa

SEQ ID NO: 41215 - DNA, 20 bp, synthetic construct
  misc_feature 1..20: note = Description of Artificial Sequence: Synthetic oligonucleotide
  misc_feature 1..20: note = Target: SCN10A; (-) strand; PAM type: YTN; PAM sequence: CTT
  source 1..20: mol_type = other DNA
tgagatatccattaaaatta

SEQ ID NO: 41216 - DNA, 20 bp, synthetic construct
  misc_feature 1..20: note = Description of Artificial Sequence: Synthetic oligonucleotide
  misc_feature 1..20: note = Target: SCN10A; (-) strand; PAM type: YTN; PAM sequence: CTA
  source 1..20: mol_type = other DNA
tgtcatgaaaagcctttgag

SEQ ID NO: 41217 - DNA, 20 bp, synthetic construct
  misc_feature 1..20: note = Description of Artificial Sequence: Synthetic oligonucleotide
  misc_feature 1..20: note = Target: SCN10A; (-) strand; PAM type: YTN; PAM sequence: CTG
  source 1..20: mol_type = other DNA
tggcctatgtcatgaaaagc

SEQ ID NO: 41218 - DNA, 20 bp, synthetic construct
  misc_feature 1..20: note = Description of Artificial Sequence: Synthetic oligonucleotide
  misc_feature 1..20: note = Target: SCN10A; (-) strand; PAM type: YTN; PAM sequence: CTG
  source 1..20: mol_type = other DNA
acccagggtaacacctgtgg

SEQ ID NO: 41219 - DNA, 20 bp, synthetic construct
  misc_feature 1..20: note = Description of Artificial Sequence: Synthetic oligonucleotide
  misc_feature 1..20: note = Target: SCN10A; (-) strand; PAM type: YTN; PAM sequence: CTC
  source 1..20: mol_type = other DNA
tgacccagggtaacacctgt

SEQ ID NO: 41220 - DNA, 20 bp, synthetic construct
  misc_feature 1..20: note = Description of Artificial Sequence: Synthetic oligonucleotide
  misc_feature 1..20: note = Target: SCN10A; (-) strand; PAM type: YTN; PAM sequence: CTG
  source 1..20: mol_type = other DNA
ctctgacccagggtaacacc

SEQ ID NO: 41221 - DNA, 20 bp, synthetic construct
  misc_feature 1..20: note = Description of Artificial Sequence: Synthetic oligonucleotide
  misc_feature 1..20: note = Target: SCN10A; (-) strand; PAM type: YTN; PAM sequence: CTG
  source 1..20: mol_type = other DNA
tcggacaactgctctgaccc

SEQ ID NO: 41222 - DNA, 20 bp, synthetic construct
  misc_feature 1..20: note = Description of Artificial Sequence: Synthetic oligonucleotide
  misc_feature 1..20: note = Target: SCN10A; (-) strand; PAM type: YTN; PAM sequence: CTG
  source 1..20: mol_type = other DNA
catgtgagagctgtcggaca

SEQ ID NO: 41223 - DNA, 20 bp, synthetic construct
  misc_feature 1..20: note = Description of Artificial Sequence: Synthetic oligonucleotide
  misc_feature 1..20: note = Target: SCN10A; (-) strand; PAM type: YTN; PAM sequence: TTG
  source 1..20: mol_type = other DNA
catgactgcatgtgagagct

SEQ ID NO: 41224 - DNA, 20 bp, synthetic construct
  misc_feature 1..20: note = Description of Artificial Sequence: Synthetic oligonucleotide
  misc_feature 1..20: note = Target: SCN10A; (-) strand; PAM type: YTN; PAM sequence: TTT
  source 1..20: mol_type = other DNA
gcatgactgcatgtgagagc

SEQ ID NO: 41225 - DNA, 20 bp, synthetic construct
  misc_feature 1..20: note = Description of Artificial Sequence: Synthetic oligonucleotide
  misc_feature 1..20: note = Target: SCN10A; (-) strand; PAM type: YTN; PAM sequence: TTT
  source 1..20: mol_type = other DNA
tgcatgactgcatgtgagag

SEQ ID NO: 41226 - DNA, 20 bp, synthetic construct
  misc_feature 1..20: note = Description of Artificial Sequence: Synthetic oligonucleotide
  misc_feature 1..20: note = Target: SCN10A; (-) strand; PAM type: YTN; PAM sequence: TTA
  source 1..20: mol_type = other DNA
ggattttgcatgactgcatg

SEQ ID NO: 41227 - DNA, 20 bp, synthetic construct
  misc_feature 1..20: note = Description of Artificial Sequence: Synthetic oligonucleotide
  misc_feature 1..20: note = Target: SCN10A; (-) strand; PAM type: YTN; PAM sequence: TTT
  source 1..20: mol_type = other DNA
aggattttgcatgactgcat

SEQ ID NO: 41228 - DNA, 20 bp, synthetic construct
  misc_feature 1..20: note = Description of Artificial Sequence: Synthetic oligonucleotide
  misc_feature 1..20: note = Target: SCN10A; (-) strand; PAM type: YTN; PAM sequence: TTA
  source 1..20: mol_type = other DNA
tttaggattttgcatgactg

SEQ ID NO: 41229 - DNA, 20 bp, synthetic construct
  misc_feature 1..20: note = Description of Artificial Sequence: Synthetic oligonucleotide
  misc_feature 1..20: note = Target: SCN10A; (-) strand; PAM type: YTN; PAM sequence: TTG
  source 1..20: mol_type = other DNA
gcaatattatttaggatttt

SEQ ID NO: 41230 - DNA, 20 bp, synthetic construct
  misc_feature 1..20: note = Description of Artificial Sequence: Synthetic oligonucleotide
  misc_feature 1..20: note = Target: SCN10A; (-) strand; PAM type: YTN; PAM sequence: CTG
  source 1..20: mol_type = other DNA
tggagcaccatacagagatt

SEQ ID NO: 41231 - DNA, 20 bp, synthetic construct
  misc_feature 1..20: note = Description of Artificial Sequence: Synthetic oligonucleotide
  misc_feature 1..20: note = Target: SCN10A; (-) strand; PAM type: YTN; PAM sequence: CTC
  source 1..20: mol_type = other DNA
tgtggagcaccatacagaga

SEQ ID NO: 41232 - DNA, 20 bp, synthetic construct
  misc_feature 1..20: note = Description of Artificial Sequence: Synthetic oligonucleotide
  misc_feature 1..20: note = Target: SCN10A; (-) strand; PAM type: YTN; PAM sequence: CTG
  source 1..20: mol_type = other DNA
aaggtccaaggtagtcctct

SEQ ID NO: 41233 - DNA, 20 bp, synthetic construct
  misc_feature 1..20: note = Description of Artificial Sequence: Synthetic oligonucleotide
  misc_feature 1..20: note = Target: SCN10A; (-) strand; PAM type: YTN; PAM sequence: TTA
  source 1..20: mol_type = other DNA
ctgaaggtccaaggtagtcc

SEQ ID NO: 41234 - DNA, 20 bp, synthetic construct
  misc_feature 1..20: note = Description of Artificial Sequence: Synthetic oligonucleotide
  misc_feature 1..20: note = Target: SCN10A; (-) strand; PAM type: YTN; PAM sequence: TTC
  source 1..20: mol_type = other DNA
caaagatatagaacaagaac

SEQ ID NO: 41235 - DNA, 20 bp, synthetic construct
  misc_feature 1..20: note = Description of Artificial Sequence: Synthetic oligonucleotide
  misc_feature 1..20: note = Target: SCN10A; (-) strand; PAM type: YTN; PAM sequence: CTT
  source 1..20: mol_type = other DNA
ccaaagatatagaacaagaa

SEQ ID NO: 41236 - DNA, 20 bp, synthetic construct
  misc_feature 1..20: note = Description of Artificial Sequence: Synthetic oligonucleotide
  misc_feature 1..20: note = Target: SCN10A; (-) strand; PAM type: YTN; PAM sequence: CTC
  source 1..20: mol_type = other DNA
aggaccagaacttccaaaga

SEQ ID NO: 41237 - DNA, 20 bp, synthetic construct
  misc_feature 1..20: note = Description of Artificial Sequence: Synthetic oligonucleotide
  misc_feature 1..20: note = Target: SCN10A; (-) strand; PAM type: YTN; PAM sequence: TTC
  source 1..20: mol_type = other DNA
tcaggaccagaacttccaaa

SEQ ID NO: 41238 - DNA, 20 bp, synthetic construct
  misc_feature 1..20: note = Description of Artificial Sequence: Synthetic oligonucleotide
  misc_feature 1..20: note = Target: SCN10A; (-) strand; PAM type: YTN; PAM sequence: CTT
  source 1..20: mol_type = other DNA
ctcaggaccagaacttccaa

SEQ ID NO: 41239 - DNA, 20 bp, synthetic construct
  misc_feature 1..20: note = Description of Artificial Sequence: Synthetic oligonucleotide
  misc_feature 1..20: note = Target: SCN10A; (-) strand; PAM type: YTN; PAM sequence: CTG
  source 1..20: mol_type = other DNA
agacaaacttctcaggacca

SEQ ID NO: 41240 - DNA, 20 bp, synthetic construct
  misc_feature 1..20: note = Description of Artificial Sequence: Synthetic oligonucleotide
  misc_feature 1..20: note = Target: SCN10A; (-) strand; PAM type: YTN; PAM sequence: TTA
  source 1..20: mol_type = other DNA
ctgagacaaacttctcagga

SEQ ID NO: 41241 - DNA, 20 bp, synthetic construct
  misc_feature 1..20: note = Description of Artificial Sequence: Synthetic oligonucleotide
  misc_feature 1..20: note = Target: SCN10A; (-) strand; PAM type: YTN; PAM sequence: TTT
  source 1..20: mol_type = other DNA
actgagacaaacttctcagg

SEQ ID NO: 41242 - DNA, 20 bp, synthetic construct
  misc_feature 1..20: note = Description of Artificial Sequence: Synthetic oligonucleotide
  misc_feature 1..20: note = Target: SCN10A; (-) strand; PAM type: YTN; PAM sequence: TTA
  source 1..20: mol_type = other DNA
tatttactgagacaaacttc

SEQ ID NO: 41243 - DNA, 20 bp, synthetic construct
  misc_feature 1..20: note = Description of Artificial Sequence: Synthetic oligonucleotide
  misc_feature 1..20: note = Target: SCN10A; (-) strand; PAM type: YTN; PAM sequence: TTG
  source 1..20: mol_type = other DNA
taatcagattatatttactg

SEQ ID NO: 41244 - DNA, 20 bp, synthetic construct
  misc_feature 1..20: note = Description of Artificial Sequence: Synthetic oligonucleotide
  misc_feature 1..20: note = Target: SCN10A; (-) strand; PAM type: YTN; PAM sequence: TTG
  source 1..20: mol_type = other DNA
ttgtaatcagattatattta

SEQ ID NO: 41245 - DNA, 20 bp, synthetic construct
  misc_feature 1..20: note = Description of Artificial Sequence: Synthetic oligonucleotide
  misc_feature 1..20: note = Target: SCN10A; (-) strand; PAM type: YTN; PAM sequence: TTT
  source 1..20: mol_type = other DNA
gttgtaatcagattatattt

SEQ ID NO: 41246 - DNA, 20 bp, synthetic construct
  misc_feature 1..20: note = Description of Artificial Sequence: Synthetic oligonucleotide
  misc_feature 1..20: note = Target: SCN10A; (-) strand; PAM type: YTN; PAM sequence: TTT
  source 1..20: mol_type = other DNA
tgttgtaatcagattatatt

SEQ ID NO: 41247 - DNA, 20 bp, synthetic construct
  misc_feature 1..20: note = Description of Artificial Sequence: Synthetic oligonucleotide
  misc_feature 1..20: note = Target: SCN10A; (-) strand; PAM type: YTN; PAM sequence: TTT
  source 1..20: mol_type = other DNA
ttgttgtaatcagattatat

SEQ ID NO: 41248 - DNA, 20 bp, synthetic construct
  misc_feature 1..20: note = Description of Artificial Sequence: Synthetic oligonucleotide
  misc_feature 1..20: note = Target: SCN10A; (-) strand; PAM type: YTN; PAM sequence: TTA
  source 1..20: mol_type = other DNA
tttttgttgtaatcagatta

SEQ ID NO: 41249 - DNA, 20 bp, synthetic construct
  misc_feature 1..20: note = Description of Artificial Sequence: Synthetic oligonucleotide
  misc_feature 1..20: note = Target: SCN10A; (-) strand; PAM type: YTN; PAM sequence: TTT
  source 1..20: mol_type = other DNA
atttttgttgtaatcagatt

SEQ ID NO: 41250 - DNA, 20 bp, synthetic construct
  misc_feature 1..20: note = Description of Artificial Sequence: Synthetic oligonucleotide
  misc_feature 1..20: note = Target: SCN10A; (-) strand; PAM type: YTN; PAM sequence: TTT
  source 1..20: mol_type = other DNA
tatttttgttgtaatcagat

SEQ ID NO: 41251 - DNA, 20 bp, synthetic construct
  misc_feature 1..20: note = Description of Artificial Sequence: Synthetic oligonucleotide
  misc_feature 1..20: note = Target: SCN10A; (-) strand; PAM type: YTN; PAM sequence: CTT
  source 1..20: mol_type = other DNA
ttatttttgttgtaatcaga

SEQ ID NO: 41252 - DNA, 20 bp, synthetic construct
  misc_feature 1..20: note = Description of Artificial Sequence: Synthetic oligonucleotide
  misc_feature 1..20: note = Target: SCN10A; (-) strand; PAM type: YTN; PAM sequence: TTG
  source 1..20: mol_type = other DNA
tccttttatttttgttgtaa

SEQ ID NO: 41253 - DNA, 20 bp, synthetic construct
  misc_feature 1..20: note = Description of Artificial Sequence: Synthetic oligonucleotide
  misc_feature 1..20: note = Target: SCN10A; (-) strand; PAM type: YTN; PAM sequence: CTT
  source 1..20: mol_type = other DNA
gtccttttatttttgttgta

SEQ ID NO: 41254 - DNA, 20 bp, synthetic construct
  misc_feature 1..20: note = Description of Artificial Sequence: Synthetic oligonucleotide
  misc_feature 1..20: note = Target: SCN10A; (-) strand; PAM type: YTN; PAM sequence: CTC
  source 1..20: mol_type = other DNA
cagaaaatatcccttgtcct

SEQ ID NO: 41255 - DNA, 20 bp, synthetic construct
  misc_feature 1..20: note = Description of Artificial Sequence: Synthetic oligonucleotide
  misc_feature 1..20: note = Target: SCN10A; (-) strand; PAM type: YTN; PAM sequence: CTC
  source 1..20: mol_type = other DNA
tccagaaaatatcccttgtc

SEQ ID NO: 41256 - DNA, 20 bp, synthetic construct
  misc_feature 1..20: note = Description of Artificial Sequence: Synthetic oligonucleotide
  misc_feature 1..20: note = Target: SCN10A; (-) strand; PAM type: YTN; PAM sequence: TTA
  source 1..20: mol_type = other DNA
ctctccagaaaatatccctt

SEQ ID NO: 41257 - DNA, 20 bp, synthetic construct
  misc_feature 1..20: note = Description of Artificial Sequence: Synthetic oligonucleotide
  misc_feature 1..20: note = Target: SCN10A; (-) strand; PAM type: YTN; PAM sequence: CTT
  source 1..20: mol_type = other DNA
actctccagaaaatatccct

SEQ ID NO: 41258 - DNA, 20 bp, synthetic construct
  misc_feature 1..20: note = Description of Artificial Sequence: Synthetic oligonucleotide
  misc_feature 1..20: note = Target: SCN10A; (-) strand; PAM type: YTN; PAM sequence: CTC
  source 1..20: mol_type = other DNA
ttactctccagaaaatatcc

SEQ ID NO: 41259 - DNA, 20 bp, synthetic construct
  misc_feature 1..20: note = Description of Artificial Sequence: Synthetic oligonucleotide
  misc_feature 1..20: note = Target: SCN10A; (-) strand; PAM type: YTN; PAM sequence: TTC
  source 1..20: mol_type = other DNA
tcttactctccagaaaatat

SEQ ID NO: 41260 - DNA, 20 bp, synthetic construct
  misc_feature 1..20: note = Description of Artificial Sequence: Synthetic oligonucleotide
  misc_feature 1..20: note = Target: SCN10A; (-) strand; PAM type: YTN; PAM sequence: TTC
  source 1..20: mol_type = other DNA
aatatcagatcatgggttct

SEQ ID NO: 41261 - DNA, 20 bp, synthetic construct
  misc_feature 1..20: note = Description of Artificial Sequence: Synthetic oligonucleotide
  misc_feature 1..20: note = Target: SCN10A; (-) strand; PAM type: YTN; PAM sequence: TTT
  source 1..20: mol_type = other DNA
caatatcagatcatgggttc

SEQ ID NO: 41262 - DNA, 20 bp, synthetic construct
  misc_feature 1..20: note = Description of Artificial Sequence: Synthetic oligonucleotide
  misc_feature 1..20: note = Target: SCN10A; (-) strand; PAM type: YTN; PAM sequence: CTG
  source 1..20: mol_type = other DNA
aatttcaatatcagatcatg

SEQ ID NO: 41263 - DNA, 20 bp, synthetic construct
  misc_feature 1..20: note = Description of Artificial Sequence: Synthetic oligonucleotide
  misc_feature 1..20: note = Target: SCN10A; (-) strand; PAM type: YTN; PAM sequence: TTC
  source 1..20: mol_type = other DNA
tgaatttcaatatcagatca

SEQ ID NO: 41264 - DNA, 20 bp, synthetic construct
  misc_feature 1..20: note = Description of Artificial Sequence: Synthetic oligonucleotide
  misc_feature 1..20: note = Target: SCN10A; (-) strand; PAM type: YTN; PAM sequence: CTT
  source 1..20: mol_type = other DNA
ctgaatttcaatatcagatc

SEQ ID NO: 41265 - DNA, 20 bp, synthetic construct
  misc_feature 1..20: note = Description of Artificial Sequence: Synthetic oligonucleotide
  misc_feature 1..20: note = Target: SCN10A; (-) strand; PAM type: YTN; PAM sequence: TTC
  source 1..20: mol_type = other DNA
ccttctgaatttcaatatca

SEQ ID NO: 41266 - DNA, 20 bp, synthetic construct
  misc_feature 1..20: note = Description of Artificial Sequence: Synthetic oligonucleotide
  misc_feature 1..20: note = Target: SCN10A; (-) strand; PAM type: YTN; PAM sequence: TTT
  source 1..20: mol_type = other DNA
cccttctgaatttcaatatc

SEQ ID NO: 41267 - DNA, 20 bp, synthetic construct
  misc_feature 1..20: note = Description of Artificial Sequence: Synthetic oligonucleotide
  misc_feature 1..20: note = Target: SCN10A; (-) strand; PAM type: YTN; PAM sequence: CTG
  source 1..20: mol_type = other DNA
tgatttcccttctgaatttc

SEQ ID NO: 41268 - DNA, 20 bp, synthetic construct
  misc_feature 1..20: note = Description of Artificial Sequence: Synthetic oligonucleotide
  misc_feature 1..20: note = Target: SCN10A; (-) strand; PAM type: YTN; PAM sequence: TTC
  source 1..20: mol_type = other DNA
cactgtgatttcccttctga

SEQ ID NO: 41269 - DNA, 20 bp, synthetic construct
  misc_feature 1..20: note = Description of Artificial Sequence: Synthetic oligonucleotide
  misc_feature 1..20: note = Target: SCN10A; (-) strand; PAM type: YTN; PAM sequence: CTT
  source 1..20: mol_type = other DNA
ccactgtgatttcccttctg

SEQ ID NO: 41270 - DNA, 20 bp, synthetic construct
  misc_feature 1..20: note = Description of Artificial Sequence: Synthetic oligonucleotide
  misc_feature 1..20: note = Target: SCN10A; (-) strand; PAM type: YTN; PAM sequence: CTA
  source 1..20: mol_type = other DNA
agagcacttccactgtgatt

SEQ ID NO: 41271 - DNA, 20 bp, synthetic construct
  misc_feature 1..20: note = Description of Artificial Sequence: Synthetic oligonucleotide
  misc_feature 1..20: note = Target: SCN10A; (-) strand; PAM type: YTN; PAM sequence: TTG
  source 1..20: mol_type = other DNA
aaaaaaccatcatacacaaa

SEQ ID NO: 41272 - DNA, 20 bp, synthetic construct
  misc_feature 1..20: note = Description of Artificial Sequence: Synthetic oligonucleotide
  misc_feature 1..20: note = Target: SCN10A; (-) strand; PAM type: YTN; PAM sequence: TTT
  source 1..20: mol_type = other DNA
gaaaaaaccatcatacacaa

SEQ ID NO: 41273 - DNA, 20 bp, synthetic construct
  misc_feature 1..20: note = Description of Artificial Sequence: Synthetic oligonucleotide
  misc_feature 1..20: note = Target: SCN10A; (-) strand; PAM type: YTN; PAM sequence: CTT
  source 1..20: mol_type = other DNA
tgaaaaaaccatcatacaca

SEQ ID NO: 41274 - DNA, 20 bp, synthetic construct
  misc_feature 1..20: note = Description of Artificial Sequence: Synthetic oligonucleotide
  misc_feature 1..20: note = Target: SCN10A; (-) strand; PAM type: YTN; PAM sequence: CTG
  source 1..20: mol_type = other DNA
gtaaccacctttgaaaaaac

SEQ ID NO: 41275 - DNA, 20 bp, synthetic construct
  misc_feature 1..20: note = Description of Artificial Sequence: Synthetic oligonucleotide
  misc_feature 1..20: note = Target: SCN10A; (-) strand; PAM type: YTN; PAM sequence: CTG
  source 1..20: mol_type = other DNA
ggcagggaatgcaactggta

SEQ ID NO: 41276 - DNA, 20 bp, synthetic construct
  misc_feature 1..20: note = Description of Artificial Sequence: Synthetic oligonucleotide
  misc_feature 1..20: note = Target: SCN10A; (-) strand; PAM type: YTN; PAM sequence: CTG
  source 1..20: mol_type = other DNA
gtcacaatgtcagaactggg

SEQ ID NO: 41277 - DNA, 20 bp, synthetic construct
  misc_feature 1..20: note = Description of Artificial Sequence: Synthetic oligonucleotide
  misc_feature 1..20: note = Target: SCN10A; (-) strand; PAM type: YTN; PAM sequence: CTC
  source 1..20: mol_type = other DNA
accaatgcatgccactggtc

SEQ ID NO: 41278 - DNA, 20 bp, synthetic construct
  misc_feature 1..20: note = Description of Artificial Sequence: Synthetic oligonucleotide
  misc_feature 1..20: note = Target: SCN10A; (-) strand; PAM type: YTN; PAM sequence: CTA
  source 1..20: mol_type = other DNA
cagcctcaccaatgcatgcc

SEQ ID NO: 41279 - DNA, 20 bp, synthetic construct
  misc_feature 1..20: note = Description of Artificial Sequence: Synthetic oligonucleotide
  misc_feature 1..20: note = Target: SCN10A; (-) strand; PAM type: YTN; PAM sequence: TTG
  source 1..20: mol_type = other DNA
cagatcacacccagctacag

SEQ ID NO: 41280 - DNA, 20 bp, synthetic construct
  misc_feature 1..20: note = Description of Artificial Sequence: Synthetic oligonucleotide
  misc_feature 1..20: note = Target: SCN10A; (-) strand; PAM type: YTN; PAM sequence: TTC
  source 1..20: mol_type = other DNA
ccattgcagatcacacccag

SEQ ID NO: 41281 - DNA, 20 bp, synthetic construct
  misc_feature 1..20: note = Description of Artificial Sequence: Synthetic oligonucleotide
  misc_feature 1..20: note = Target: SCN10A; (-) strand; PAM type: YTN; PAM sequence: TTT
  source 1..20: mol_type = other DNA
cccattgcagatcacaccca

SEQ ID NO: 41282 - DNA, 20 bp, synthetic construct
  misc_feature 1..20: note = Description of Artificial Sequence: Synthetic oligonucleotide
  misc_feature 1..20: note = Target: SCN10A; (-) strand; PAM type: YTN; PAM sequence: CTT
  source 1..20: mol_type = other DNA
tcccattgcagatcacaccc

SEQ ID NO: 41283 - DNA, 20 bp, synthetic construct
  misc_feature 1..20: note = Description of Artificial Sequence: Synthetic oligonucleotide
  misc_feature 1..20: note = Target: SCN10A; (-) strand; PAM type: YTN; PAM sequence: CTC
  source 1..20: mol_type = other DNA
tttcccattgcagatcacac

SEQ ID NO: 41284 - DNA, 20 bp, synthetic construct
  misc_feature 1..20: note = Description of Artificial Sequence: Synthetic oligonucleotide
  misc_feature 1..20: note = Target: SCN10A; (-) strand; PAM type: YTN; PAM sequence: TTA
  source 1..20: mol_type = other DNA
actctttcccattgcagatc

SEQ ID NO: 41285 - DNA, 20 bp, synthetic construct
  misc_feature 1..20: note = Description of Artificial Sequence: Synthetic oligonucleotide
  misc_feature 1..20: note = Target: SCN10A; (-) strand; PAM type: YTN; PAM sequence: CTG
  source 1..20: mol_type = other DNA
tgttaactctttcccattgc

SEQ ID NO: 41286 - DNA, 20 bp, synthetic construct
  misc_feature 1..20: note = Description of Artificial Sequence: Synthetic oligonucleotide
  misc_feature 1..20: note = Target: SCN10A; (-) strand; PAM type: YTN; PAM sequence: CTC
  source 1..20: mol_type = other DNA
tgtgttaactctttcccatt

SEQ ID NO: 41287 - DNA, 20 bp, synthetic construct
  misc_feature 1..20: note = Description of Artificial Sequence: Synthetic oligonucleotide
  misc_feature 1..20: note = Target: SCN10A; (-) strand; PAM type: YTN; PAM sequence: CTG
  source 1..20: mol_type = other DNA
ctctgtgttaactctttccc

SEQ ID NO: 41288 - DNA, 20 bp, synthetic construct
  misc_feature 1..20: note = Description of Artificial Sequence: Synthetic oligonucleotide
  misc_feature 1..20: note = Target: SCN10A; (-) strand; PAM type: YTN; PAM sequence: TTC
  source 1..20: mol_type = other DNA
tgctctgtgttaactctttc

SEQ ID NO: 41289 - DNA, 20 bp, synthetic construct
  misc_feature 1..20: note = Description of Artificial Sequence: Synthetic oligonucleotide
  misc_feature 1..20: note = Target: SCN10A; (-) strand; PAM type: YTN; PAM sequence: CTT
  source 1..20: mol_type = other DNA
ctgctctgtgttaactcttt

SEQ ID NO: 41290 - DNA, 20 bp, synthetic construct
  misc_feature 1..20: note = Description of Artificial Sequence: Synthetic oligonucleotide
  misc_feature 1..20: note = Target: SCN10A; (-) strand; PAM type: YTN; PAM sequence: TTA
  source 1..20: mol_type = other DNA
tgatgcgtccttctgctctg

SEQ ID NO: 41291 - DNA, 20 bp, synthetic construct
  misc_feature 1..20: note = Description of Artificial Sequence: Synthetic oligonucleotide
  misc_feature 1..20: note = Target: SCN10A; (-) strand; PAM type: YTN; PAM sequence: TTC
  source 1..20: mol_type = other DNA
agttatgatgcgtccttctg

SEQ ID NO: 41292 - DNA, 20 bp, synthetic construct
  misc_feature 1..20: note = Description of Artificial Sequence: Synthetic oligonucleotide
  misc_feature 1..20: note = Target: SCN10A; (-) strand; PAM type: YTN; PAM sequence: CTG
  source 1..20: mol_type = other DNA
gatatgttcagttatgatgc

SEQ ID NO: 41293 - DNA, 20 bp, synthetic construct
  misc_feature 1..20: note = Description of Artificial Sequence: Synthetic oligonucleotide
  misc_feature 1..20: note = Target: SCN10A; (-) strand; PAM type: YTN; PAM sequence: CTC
  source 1..20: mol_type = other DNA
cagcctggatatgttcagtt

SEQ ID NO: 41294 - DNA, 20 bp, synthetic construct
  misc_feature 1..20: note = Description of Artificial Sequence: Synthetic oligonucleotide
  misc_feature 1..20: note = Target: SCN10A; (-) strand; PAM type: YTN; PAM sequence: CTA
  source 1..20: mol_type = other DNA
gtgagaacactccagcctgg

SEQ ID NO: 41295 - DNA, 20 bp, synthetic construct
  misc_feature 1..20: note = Description of Artificial Sequence: Synthetic oligonucleotide
  misc_feature 1..20: note = Target: SCN10A; (-) strand; PAM type: YTN; PAM sequence: CTG
  source 1..20: mol_type = other DNA
ggccctagtgagaacactcc

SEQ ID NO: 41296 - DNA, 20 bp, synthetic construct
  misc_feature 1..20: note = Description of Artificial Sequence: Synthetic oligonucleotide
  misc_feature 1..20: note = Target: SCN10A; (-) strand; PAM type: YTN; PAM sequence: TTG
  source 1..20: mol_type = other DNA
cccctgggccctagtgagaa

SEQ ID NO: 41297 - DNA, 20 bp, synthetic construct
  misc_feature 1..20: note = Description of Artificial Sequence: Synthetic oligonucleotide
  misc_feature 1..20: note = Target: SCN10A; (-) strand; PAM type: YTN; PAM sequence: CTG
  source 1..20: mol_type = other DNA
attgcccctgggccctagtg

SEQ ID NO: 41298 - DNA, 20 bp, synthetic construct
  misc_feature 1..20: note = Description of Artificial Sequence: Synthetic oligonucleotide
  misc_feature 1..20: note = Target: SCN10A; (-) strand; PAM type: YTN; PAM sequence: CTC
  source 1..20: mol_type = other DNA
aatacaaaatgaagatgaag

SEQ ID NO: 41299 - DNA, 20 bp, synthetic construct
  misc_feature 1..20: note = Description of Artificial Sequence: Synthetic oligonucleotide
  misc_feature 1..20: note = Target: SCN10A; (-) strand; PAM type: YTN; PAM sequence: CTA
  source 1..20: mol_type = other DNA
gctcaatacaaaatgaagat

SEQ ID NO: 41300 - DNA, 20 bp, synthetic construct
  misc_feature 1..20: note = Description of Artificial Sequence: Synthetic oligonucleotide
  misc_feature 1..20: note = Target: SCN10A; (-) strand; PAM type: YTN; PAM sequence: TTA
  source 1..20: mol_type = other DNA
gtgatagagtcaacatgagg

SEQ ID NO: 41301 - DNA, 20 bp, synthetic construct
  misc_feature 1..20: note = Description of Artificial Sequence: Synthetic oligonucleotide
  misc_feature 1..20: note = Target: SCN10A; (-) strand; PAM type: YTN; PAM sequence: CTT
  source 1..20: mol_type = other DNA
agtgatagagtcaacatgag

SEQ ID NO: 41302 - DNA, 20 bp, synthetic construct
  misc_feature 1..20: note = Description of Artificial Sequence: Synthetic oligonucleotide
  misc_feature 1..20: note = Target: SCN10A; (-) strand; PAM type: YTN; PAM sequence: CTA
  source 1..20: mol_type = other DNA
gaggccttagtgatagagtc

SEQ ID NO: 41303 - DNA, 20 bp, synthetic construct
  misc_feature 1..20: note = Description of Artificial Sequence: Synthetic oligonucleotide
  misc_feature 1..20: note = Target: SCN10A; (-) strand; PAM type: YTN; PAM sequence: CTA
  source 1..20: mol_type = other DNA
tgagagtgtcactagaggcc

SEQ ID NO: 41304 - DNA, 20 bp, synthetic construct
  misc_feature 1..20: note = Description of Artificial Sequence: Synthetic oligonucleotide
  misc_feature 1..20: note = Target: SCN10A; (-) strand; PAM type: YTN; PAM sequence: TTC
  source 1..20: mol_type = other DNA
ccaccgtcctatgagagtgt

SEQ ID NO: 41305 - DNA, 20 bp, synthetic construct
  misc_feature 1..20: note = Description of Artificial Sequence: Synthetic oligonucleotide
  misc_feature 1..20: note = Target: SCN10A; (-) strand; PAM type: YTN; PAM sequence: CTG
  source 1..20: mol_type = other DNA
ccacatcattcccaccgtcc

SEQ ID NO: 41306 - DNA, 20 bp, synthetic construct
  misc_feature 1..20: note = Description of Artificial Sequence: Synthetic oligonucleotide
  misc_feature 1..20: note = Target: SCN10A; (-) strand; PAM type: YTN; PAM sequence: TTC
  source 1..20: mol_type = other DNA
tgccacatcattcccaccgt

SEQ ID NO: 41307 - DNA, 20 bp, synthetic construct
  misc_feature 1..20: note = Description of Artificial Sequence: Synthetic oligonucleotide
  misc_feature 1..20: note = Target: SCN10A; (-) strand; PAM type: YTN; PAM sequence: CTT
  source 1..20: mol_type = other DNA
ctgccacatcattcccaccg

SEQ ID NO: 41308 - DNA, 20 bp, synthetic construct
  misc_feature 1..20: note = Description of Artificial Sequence: Synthetic oligonucleotide
  misc_feature 1..20: note = Target: SCN10A; (-) strand; PAM type: YTN; PAM sequence: CTG
  source 1..20: mol_type = other DNA
cttctgccacatcattccca

SEQ ID NO: 41309 - DNA, 20 bp, synthetic construct
  misc_feature 1..20: note = Description of Artificial Sequence: Synthetic oligonucleotide
  misc_feature 1..20: note = Target: SCN10A; (-) strand; PAM type: YTN; PAM sequence: CTG
  source 1..20: mol_type = other DNA
aaactgcttctgccacatca

SEQ ID NO: 41310 - DNA, 20 bp, synthetic construct
  misc_feature 1..20: note = Description of Artificial Sequence: Synthetic oligonucleotide
  misc_feature 1..20: note = Target: SCN10A; (-) strand; PAM type: YTN; PAM sequence: CTC
  source 1..20: mol_type = other DNA
ccagacaaatctgaaactgc

SEQ ID NO: 41311 - DNA, 20 bp, synthetic construct
  misc_feature 1..20: note = Description of Artificial Sequence: Synthetic oligonucleotide
  misc_feature 1..20: note = Target: SCN10A; (-) strand; PAM type: YTN; PAM sequence: TTG
  source 1..20: mol_type = other DNA
tgtactcccagacaaatctg

SEQ ID NO: 41312 - DNA, 20 bp, synthetic construct
  misc_feature 1..20: note = Description of Artificial Sequence: Synthetic oligonucleotide
  misc_feature 1..20: note = Target: SCN10A; (-) strand; PAM type: YTN; PAM sequence: TTC
  source 1..20: mol_type = other DNA
acagcaaatgaaaattgtgt

SEQ ID NO: 41313 - DNA, 20 bp, synthetic construct
  misc_feature 1..20: note = Description of Artificial Sequence: Synthetic oligonucleotide
  misc_feature 1..20: note = Target: SCN10A; (-) strand; PAM type: YTN; PAM sequence: TTG
  source 1..20: mol_type = other DNA
cattcacagcaaatgaaaat

SEQ ID NO: 41314 - DNA, 20 bp, synthetic construct
  misc_feature 1..20: note = Description of Artificial Sequence: Synthetic oligonucleotide
  misc_feature 1..20: note = Target: SCN10A; (-) strand; PAM type: YTN; PAM sequence: TTG
  source 1..20: mol_type = other DNA
ttgcattcacagcaaatgaa

SEQ ID NO: 41315 - DNA, 20 bp, synthetic construct
  misc_feature 1..20: note = Description of Artificial Sequence: Synthetic oligonucleotide
  misc_feature 1..20: note = Target: SCN10A; (-) strand; PAM type: YTN; PAM sequence: TTT
  source 1..20: mol_type = other DNA
gttgcattcacagcaaatga

SEQ ID NO: 41316 - DNA, 20 bp, synthetic construct
  misc_feature 1..20: note = Description of Artificial Sequence: Synthetic oligonucleotide
  misc_feature 1..20: note = Target: SCN10A; (-) strand; PAM type: YTN; PAM sequence: TTT
  source 1..20: mol_type = other DNA
tgttgcattcacagcaaatg

SEQ ID NO: 41317 - DNA, 20 bp, synthetic construct
  misc_feature 1..20: note = Description of Artificial Sequence: Synthetic oligonucleotide
  misc_feature 1..20: note = Target: SCN10A; (-) strand; PAM type: YTN; PAM sequence: CTC
  source 1..20: mol_type = other DNA
ccagatgaaggttttgttgc

SEQ ID NO: 41318 - DNA, 20 bp, synthetic construct
  misc_feature 1..20: note = Description of Artificial Sequence: Synthetic oligonucleotide
  misc_feature 1..20: note = Target: SCN10A; (-) strand; PAM type: YTN; PAM sequence: CTG
  source 1..20: mol_type = other DNA
catcactcccagatgaaggt

SEQ ID NO: 41319 - DNA, 20 bp, synthetic construct
  misc_feature 1..20: note = Description of Artificial Sequence: Synthetic oligonucleotide
  misc_feature 1..20: note = Target: SCN10A; (-) strand; PAM type: YTN; PAM sequence: CTG
  source 1..20: mol_type = other DNA
aggaggaggctgcatcactc

SEQ ID NO: 41320 - DNA, 20 bp, synthetic construct
  misc_feature 1..20: note = Description of Artificial Sequence: Synthetic oligonucleotide
  misc_feature 1..20: note = Target: SCN10A; (-) strand; PAM type: YTN; PAM sequence: CTA
  source 1..20: mol_type = other DNA
acaccccatgtgtgcccaga

SEQ ID NO: 41321 - DNA, 20 bp, synthetic construct
  misc_feature 1..20: note = Description of Artificial Sequence: Synthetic oligonucleotide
  misc_feature 1..20: note = Target: SCN10A; (-) strand; PAM type: YTN; PAM sequence: CTC
  source 1..20: mol_type = other DNA
taacaccccatgtgtgccca

SEQ ID NO: 41322 - DNA, 20 bp, synthetic construct
  misc_feature 1..20: note = Description of Artificial Sequence: Synthetic oligonucleotide
  misc_feature 1..20: note = Target: SCN10A; (-) strand; PAM type: YTN; PAM sequence: CTC
  source 1..20: mol_type = other DNA
tctaacaccccatgtgtgcc

SEQ ID NO: 41323 - DNA, 20 bp, synthetic construct
  misc_feature 1..20: note = Description of Artificial Sequence: Synthetic oligonucleotide
  misc_feature 1..20: note = Target: SCN10A; (-) strand; PAM type: YTN; PAM sequence: CTC
  source 1..20: mol_type = other DNA
catggcactctctaacaccc

SEQ ID NO: 41324 - DNA, 20 bp, synthetic construct
  misc_feature 1..20: note = Description of Artificial Sequence: Synthetic oligonucleotide
  misc_feature 1..20: note = Target: SCN10A; (-) strand; PAM type: YTN; PAM sequence: CTG
  source 1..20: mol_type = other DNA
caccgctccatggcactctc

SEQ ID NO: 41325 - DNA, 20 bp, synthetic construct
  misc_feature 1..20: note = Description of Artificial Sequence: Synthetic oligonucleotide
  misc_feature 1..20: note = Target: SCN10A; (-) strand; PAM type: YTN; PAM sequence: CTA
  source 1..20: mol_type = other DNA
tgtgctgcaccgctccatgg

SEQ ID NO: 41326 - DNA, 20 bp, synthetic construct
  misc_feature 1..20: note = Description of Artificial Sequence: Synthetic oligonucleotide
  misc_feature 1..20: note = Target: SCN10A; (-) strand; PAM type: YTN; PAM sequence: CTA
  source 1..20: mol_type = other DNA
tcggagctatgtgctgcacc

SEQ ID NO: 41327 - DNA, 20 bp, synthetic construct
  misc_feature 1..20: note = Description of Artificial Sequence: Synthetic oligonucleotide
  misc_feature 1..20: note = Target: SCN10A; (-) strand; PAM type: YTN; PAM sequence: TTC
  source 1..20: mol_type = other DNA
aaaaggcctatcggagctat

SEQ ID NO: 41328 - DNA, 20 bp, synthetic construct
  misc_feature 1..20: note = Description of Artificial Sequence: Synthetic oligonucleotide
  misc_feature 1..20: note = Target: SCN10A; (-) strand; PAM type: YTN; PAM sequence: CTG
  source 1..20: mol_type = other DNA
tcattcaaaaggcctatcgg

SEQ ID NO: 41329 - DNA, 20 bp, synthetic construct
  misc_feature 1..20: note = Description of Artificial Sequence: Synthetic oligonucleotide
  misc_feature 1..20: note = Target: SCN10A; (-) strand; PAM type: YTN; PAM sequence: TTC
  source 1..20: mol_type = other DNA
agccactgtcattcaaaagg

SEQ ID NO: 41330 - DNA, 20 bp, synthetic construct
  misc_feature 1..20: note = Description of Artificial Sequence: Synthetic oligonucleotide
  misc_feature 1..20: note = Target: SCN10A; (-) strand; PAM type: YTN; PAM sequence: TTT
  source 1..20: mol_type = other DNA
cagccactgtcattcaaaag

SEQ ID NO: 41331 - DNA, 20 bp, synthetic construct
  misc_feature 1..20: note = Description of Artificial Sequence: Synthetic oligonucleotide
  misc_feature 1..20: note = Target: SCN10A; (-) strand; PAM type: YTN; PAM sequence: CTC
  source 1..20: mol_type = other DNA
cgatggaagcaagaagacat

SEQ ID NO: 41332 - DNA, 20 bp, synthetic construct
  misc_feature 1..20: note = Description of Artificial Sequence: Synthetic oligonucleotide
  misc_feature 1..20: note = Target: SCN10A; (-) strand; PAM type: YTN; PAM sequence: CTC
  source 1..20: mol_type = other DNA
tccgatggaagcaagaagac

SEQ ID NO: 41333 - DNA, 20 bp, synthetic construct
  misc_feature 1..20: note = Description of Artificial Sequence: Synthetic oligonucleotide
  misc_feature 1..20: note = Target: SCN10A; (-) strand; PAM type: YTN; PAM sequence: CTA
  source 1..20: mol_type = other DNA
tgaaccaatagcaaccactc

SEQ ID NO: 41334 - DNA, 20 bp, synthetic construct
  misc_feature 1..20: note = Description of Artificial Sequence: Synthetic oligonucleotide
  misc_feature 1..20: note = Target: SCN10A; (-) strand; PAM type: YTN; PAM sequence: TTC
  source 1..20: mol_type = other DNA
aaaatcatcctatgaaccaa

SEQ ID NO: 41335 - DNA, 20 bp, synthetic construct
  misc_feature 1..20: note = Description of Artificial Sequence: Synthetic oligonucleotide
  misc_feature 1..20: note = Target: SCN10A; (-) strand; PAM type: YTN; PAM sequence: TTT
  source 1..20: mol_type = other DNA
caaaatcatcctatgaacca

SEQ ID NO: 41336 - DNA, 20 bp, synthetic construct
  misc_feature 1..20: note = Description of Artificial Sequence: Synthetic oligonucleotide
  misc_feature 1..20: note = Target: SCN10A; (-) strand; PAM type: YTN; PAM sequence: CTT
  source 1..20: mol_type = other DNA
tcaaaatcatcctatgaacc

SEQ ID NO: 41337 - DNA, 20 bp, synthetic construct
  misc_feature 1..20: note = Description of Artificial Sequence: Synthetic oligonucleotide
  misc_feature 1..20: note = Target: SCN10A; (-) strand; PAM type: YTN; PAM sequence: CTA
  source 1..20: mol_type = other DNA
atctttcaaaatcatcctat

SEQ ID NO: 41338 - DNA, 20 bp, synthetic construct
  misc_feature 1..20: note = Description of Artificial Sequence: Synthetic oligonucleotide
  misc_feature 1..20: note = Target: SCN10A; (-) strand; PAM type: YTN; PAM sequence: TTA
  source 1..20: mol_type = other DNA
tggcaactaatctttcaaaa

SEQ ID NO: 41339 - DNA, 20 bp, synthetic construct
  misc_feature 1..20: note = Description of Artificial Sequence: Synthetic oligonucleotide
  misc_feature 1..20: note = Target: SCN10A; (-) strand; PAM type: YTN; PAM sequence: TTT
  source 1..20: mol_type = other DNA
atggcaactaatctttcaaa

SEQ ID NO: 41340 - DNA, 20 bp, synthetic construct
  misc_feature 1..20: note = Description of Artificial Sequence: Synthetic oligonucleotide
  misc_feature 1..20: note = Target: SCN10A; (-) strand; PAM type: YTN; PAM sequence: CTG
  source 1..20: mol_type = other DNA
aaggcaaatatggaggagaa

SEQ ID NO: 41341 - DNA, 20 bp, synthetic construct
  misc_feature 1..20: note = Description of Artificial Sequence: Synthetic oligonucleotide
  misc_feature 1..20: note = Target: SCN10A; (-) strand; PAM type: YTN; PAM sequence: CTC
  source 1..20: mol_type = other DNA
tgaaggcaaatatggaggag

SEQ ID NO: 41342 - DNA, 20 bp, synthetic construct
  misc_feature 1..20: note = Description of Artificial Sequence: Synthetic oligonucleotide
  misc_feature 1..20: note = Target: SCN10A; (-) strand; PAM type: YTN; PAM sequence: TTC
  source 1..20: mol_type = other DNA
tctgaaggcaaatatggagg

SEQ ID NO: 41343 - DNA, 20 bp, synthetic construct
  misc_feature 1..20: note = Description of Artificial Sequence: Synthetic oligonucleotide
  misc_feature 1..20: note = Target: SCN10A; (-) strand; PAM type: YTN; PAM sequence: TTG
  source 1..20: mol_type = other DNA
gattctctgaaggcaaatat

SEQ ID NO: 41344 - DNA, 20 bp, synthetic construct
  misc_feature 1..20: note = Description of Artificial Sequence: Synthetic oligonucleotide
  misc_feature 1..20: note = Target: SCN10A; (-) strand; PAM type: YTN; PAM sequence: CTA
  source 1..20: mol_type = other DNA
ggagaatccggggagttgga

SEQ ID NO: 41345 - DNA, 20 bp, synthetic construct
  misc_feature 1..20: note = Description of Artificial Sequence: Synthetic oligonucleotide
  misc_feature 1..20: note = Target: SCN10A; (-) strand; PAM type: YTN; PAM sequence: TTC
  source 1..20: mol_type = other DNA
accaagaatgtcctaggaga

SEQ ID NO: 41346 - DNA, 20 bp, synthetic construct
  misc_feature 1..20: note = Description of Artificial Sequence: Synthetic oligonucleotide
  misc_feature 1..20: note = Target: SCN10A; (-) strand; PAM type: YTN; PAM sequence: TTT
  source 1..20: mol_type = other DNA
caccaagaatgtcctaggag

SEQ ID NO: 41347 - DNA, 20 bp, synthetic construct
  misc_feature 1..20: note = Description of Artificial Sequence: Synthetic oligonucleotide
  misc_feature 1..20: note = Target: SCN10A; (-) strand; PAM type: YTN; PAM sequence: CTT
  source 1..20: mol_type = other DNA
tcaccaagaatgtcctagga

SEQ ID NO: 41348 - DNA, 20 bp, synthetic construct
  misc_feature 1..20: note = Description of Artificial Sequence: Synthetic oligonucleotide
  misc_feature 1..20: note = Target: SCN10A; (-) strand; PAM type: YTN; PAM sequence: TTG
  source 1..20: mol_type = other DNA
ctttcaccaagaatgtccta

SEQ ID NO: 41349 - DNA, 20 bp, synthetic construct
  misc_feature 1..20: note = Description of Artificial Sequence: Synthetic oligonucleotide
  misc_feature 1..20: note = Target: SCN10A; (-) strand; PAM type: YTN; PAM sequence: TTT
  source 1..20: mol_type = other DNA
gctttcaccaagaatgtcct

SEQ ID NO: 41350 - DNA, 20 bp, synthetic construct
  misc_feature 1..20: note = Description of Artificial Sequence: Synthetic oligonucleotide
  misc_feature 1..20: note = Target: SCN10A; (-) strand; PAM type: YTN; PAM sequence: TTT
  source 1..20: mol_type = other DNA
tgctttcaccaagaatgtcc

SEQ ID NO: 41351 - DNA, 20 bp, synthetic construct
  misc_feature 1..20: note = Description of Artificial Sequence: Synthetic oligonucleotide
  misc_feature 1..20: note = Target: SCN10A; (-) strand; PAM type: YTN; PAM sequence: TTT
  source 1..20: mol_type = other DNA
ttgctttcaccaagaatgtc

SEQ ID NO: 41352 - DNA, 20 bp, synthetic construct
  misc_feature 1..20: note = Description of Artificial Sequence: Synthetic oligonucleotide
  misc_feature 1..20: note = Target: SCN10A; (-) strand; PAM type: YTN; PAM sequence: CTT
  source 1..20: mol_type = other DNA
tttgctttcaccaagaatgt

SEQ ID NO: 41353 - DNA, 20 bp, synthetic construct
  misc_feature 1..20: note = Description of Artificial Sequence: Synthetic oligonucleotide
  misc_feature 1..20: note = Target: SCN10A; (-) strand; PAM type: YTN; PAM sequence: TTG
  source 1..20: mol_type = other DNA
gacatcctttttgctttcac

SEQ ID NO: 41354 - DNA, 20 bp, synthetic construct
  misc_feature 1..20: note = Description of Artificial Sequence: Synthetic oligonucleotide
  misc_feature 1..20: note = Target: SCN10A; (-) strand; PAM type: YTN; PAM sequence: CTT
  source 1..20: mol_type = other DNA
ggacatcctttttgctttca

SEQ ID NO: 41355 - DNA, 20 bp, synthetic construct
  misc_feature 1..20: note = Description of Artificial Sequence: Synthetic oligonucleotide
  misc_feature 1..20: note = Target: SCN10A; (-) strand; PAM type: YTN; PAM sequence: CTG
  source 1..20: mol_type = other DNA
cttggacatcctttttgctt

SEQ ID NO: 41356 - DNA, 20 bp, synthetic construct
  misc_feature 1..20: note = Description of Artificial Sequence: Synthetic oligonucleotide
  misc_feature 1..20: note = Target: SCN10A; (-) strand; PAM type: YTN; PAM sequence: CTG
  source 1..20: mol_type = other DNA
gagataagatccactgcttg

SEQ ID NO: 41357 - DNA, 20 bp, synthetic construct
  misc_feature 1..20: note = Description of Artificial Sequence: Synthetic oligonucleotide
  misc_feature 1..20: note = Target: SCN10A; (-) strand; PAM type: YTN; PAM sequence: TTG
  source 1..20: mol_type = other DNA
gtccctggagataagatcca

SEQ ID NO: 41358 - DNA, 20 bp, synthetic construct
  misc_feature 1..20: note = Description of Artificial Sequence: Synthetic oligonucleotide
  misc_feature 1..20: note = Target: SCN10A; (-) strand; PAM type: YTN; PAM sequence: TTT
  source 1..20: mol_type = other DNA
ggtccctggagataagatcc

SEQ ID NO: 41359 - DNA, 20 bp, synthetic construct
  misc_feature 1..20: note = Description of Artificial Sequence: Synthetic oligonucleotide
  misc_feature 1..20: note = Target: SCN10A; (-) strand; PAM type: YTN; PAM sequence: CTT
  source 1..20: mol_type = other DNA
tggtccctggagataagatc

SEQ ID NO: 41360 - DNA, 20 bp, synthetic construct
  misc_feature 1..20: note = Description of Artificial Sequence: Synthetic oligonucleotide
  misc_feature 1..20: note = Target: SCN10A; (-) strand; PAM type: YTN; PAM sequence: CTG
  source 1..20: mol_type = other DNA
cctttggtccctggagataa

SEQ ID NO: 41361 - DNA, 20 bp, synthetic construct
  misc_feature 1..20: note = Description of Artificial Sequence: Synthetic oligonucleotide
  misc_feature 1..20: note = Target: SCN10A; (-) strand; PAM type: YTN; PAM sequence: CTG
  source 1..20: mol_type = other DNA
atccagatggacctgccttt

SEQ ID NO: 41362 - DNA, 20 bp, synthetic construct
  misc_feature 1..20: note = Description of Artificial Sequence: Synthetic oligonucleotide
  misc_feature 1..20: note = Target: SCN10A; (-) strand; PAM type: YTN; PAM sequence: CTG
  source 1..20: mol_type = other DNA
agaatcccaaaacccaatcg

SEQ ID NO: 41363 - DNA, 20 bp, synthetic construct
  misc_feature 1..20: note = Description of Artificial Sequence: Synthetic oligonucleotide
  misc_feature 1..20: note = Target: SCN10A; (-) strand; PAM type: YTN; PAM sequence: CTG
  source 1..20: mol_type = other DNA
gtcccctgagaatcccaaaa

SEQ ID NO: 41364 - DNA, 20 bp, synthetic construct
  misc_feature 1..20: note = Description of Artificial Sequence: Synthetic oligonucleotide
  misc_feature 1..20: note = Target: SCN10A; (-) strand; PAM type: YTN; PAM sequence: CTC
  source 1..20: mol_type = other DNA
tggtcccctgagaatcccaa

SEQ ID NO: 41365 - DNA, 20 bp, synthetic construct
  misc_feature 1..20: note = Description of Artificial Sequence: Synthetic oligonucleotide
  misc_feature 1..20: note = Target: SCN10A; (-) strand; PAM type: YTN; PAM sequence: CTC
  source 1..20: mol_type = other DNA
tctggtcccctgagaatccc

SEQ ID NO: 41366 - DNA, 20 bp, synthetic construct
  misc_feature 1..20: note = Description of Artificial Sequence: Synthetic oligonucleotide
  misc_feature 1..20: note = Target: SCN10A; (-) strand; PAM type: YTN; PAM sequence: CTC
  source 1..20: mol_type = other DNA
tctctggtcccctgagaatc

SEQ ID NO: 41367 - DNA, 20 bp, synthetic construct
  misc_feature 1..20: note = Description of Artificial Sequence: Synthetic oligonucleotide
  misc_feature 1..20: note = Target: SCN10A; (-) strand; PAM type: YTN; PAM sequence: TTG
  source 1..20: mol_type = other DNA
cagacactctctctggtccc

SEQ ID NO: 41368 - DNA, 20 bp, synthetic construct
  misc_feature 1..20: note = Description of Artificial Sequence: Synthetic oligonucleotide
  misc_feature 1..20: note = Target: SCN10A; (-) strand; PAM type: YTN; PAM sequence: TTT
  source 1..20: mol_type = other DNA
gcagacactctctctggtcc

SEQ ID NO: 41369 - DNA, 20 bp, synthetic construct
  misc_feature 1..20: note = Description of Artificial Sequence: Synthetic oligonucleotide
  misc_feature 1..20: note = Target: SCN10A; (-) strand; PAM type: YTN; PAM sequence: CTT
  source 1..20: mol_type = other DNA
tgcagacactctctctggtc

SEQ ID NO: 41370 - DNA, 20 bp, synthetic construct
  misc_feature 1..20: note = Description of Artificial Sequence: Synthetic oligonucleotide
  misc_feature 1..20: note = Target: SCN10A; (-) strand; PAM type: YTN; PAM sequence: CTC
  source 1..20: mol_type = other DNA
ggactttgcagacactctct

SEQ ID NO: 41371 - DNA, 20 bp, synthetic construct
  misc_feature 1..20: note = Description of Artificial Sequence: Synthetic oligonucleotide
  misc_feature 1..20: note = Target: SCN10A; (-) strand; PAM type: YTN; PAM sequence: CTC
  source 1..20: mol_type = other DNA
tcggactttgcagacactct

SEQ ID NO: 41372 - DNA, 20 bp, synthetic construct
  misc_feature 1..20: note = Description of Artificial Sequence: Synthetic oligonucleotide
  misc_feature 1..20: note = Target: SCN10A; (-) strand; PAM type: YTN; PAM sequence: CTC
  source 1..20: mol_type = other DNA
tctcggactttgcagacact

SEQ ID NO: 41373 - DNA, 20 bp, synthetic construct
  misc_feature 1..20: note = Description of Artificial Sequence: Synthetic oligonucleotide
  misc_feature 1..20: note = Target: SCN10A; (-) strand; PAM type: YTN; PAM sequence: CTG
  source 1..20: mol_type = other DNA
ctctctcggactttgcagac

SEQ ID NO: 41374 - DNA, 20 bp, synthetic construct
  misc_feature 1..20: note = Description of Artificial Sequence: Synthetic oligonucleotide
  misc_feature 1..20: note = Target: SCN10A; (-) strand; PAM type: YTN; PAM sequence: TTC
  source 1..20: mol_type = other DNA
tgctctctcggactttgcag

SEQ ID NO: 41375 - DNA, 20 bp, synthetic construct
  misc_feature 1..20: note = Description of Artificial Sequence: Synthetic oligonucleotide
  misc_feature 1..20: note = Target: SCN10A; (-) strand; PAM type: YTN; PAM sequence: TTT
  source 1..20: mol_type = other DNA
ctgctctctcggactttgca

SEQ ID NO: 41376 - DNA, 20 bp, synthetic construct
  misc_feature 1..20: note = Description of Artificial Sequence: Synthetic oligonucleotide
  misc_feature 1..20: note = Target: SCN10A; (-) strand; PAM type: YTN; PAM sequence: TTT
  source 1..20: mol_type = other DNA
tctgctctctcggactttgc

SEQ ID NO: 41377 - DNA, 20 bp, synthetic construct
  misc_feature 1..20: note = Description of Artificial Sequence: Synthetic oligonucleotide
  misc_feature 1..20: note = Target: SCN10A; (-) strand; PAM type: YTN; PAM sequence: CTT
  source 1..20: mol_type = other DNA
ttctgctctctcggactttg

SEQ ID NO: 41378 - DNA, 20 bp, synthetic construct
  misc_feature 1..20: note = Description of Artificial Sequence: Synthetic oligonucleotide
  misc_feature 1..20: note = Target: SCN10A; (-) strand; PAM type: YTN; PAM sequence: TTA
  source 1..20: mol_type = other DNA
ccttttctgctctctcggac

SEQ ID NO: 41379 - DNA, 20 bp, synthetic construct
  misc_feature 1..20: note = Description of Artificial Sequence: Synthetic oligonucleotide
  misc_feature 1..20: note = Target: SCN10A; (-) strand; PAM type: YTN; PAM sequence: TTA
  source 1..20: mol_type = other DNA
ttaccttttctgctctctcg

SEQ ID NO: 41380 - DNA, 20 bp, synthetic construct
  misc_feature 1..20: note = Description of Artificial Sequence: Synthetic oligonucleotide
  misc_feature 1..20: note = Target: SCN10A; (-) strand; PAM type: YTN; PAM sequence: TTT
  source 1..20: mol_type = other DNA
attaccttttctgctctctc

SEQ ID NO: 41381 - DNA, 20 bp, synthetic construct
  misc_feature 1..20: note = Description of Artificial Sequence: Synthetic oligonucleotide
  misc_feature 1..20: note = Target: SCN10A; (-) strand; PAM type: YTN; PAM sequence: CTC
  source 1..20: mol_type = other DNA
agtttattaccttttctgct

SEQ ID NO: 41382 - DNA, 20 bp, synthetic construct
  misc_feature 1..20: note = Description of Artificial Sequence: Synthetic oligonucleotide
  misc_feature 1..20: note = Target: SCN10A; (-) strand; PAM type: YTN; PAM sequence: TTG
  source 1..20: mol_type = other DNA
acccagaggccactcagttt

SEQ ID NO: 41383 - DNA, 20 bp, synthetic construct
  misc_feature 1..20: note = Description of Artificial Sequence: Synthetic oligonucleotide
  misc_feature 1..20: note = Target: SCN10A; (-) strand; PAM type: YTN; PAM sequence: TTT
  source 1..20: mol_type = other DNA
gacccagaggccactcagtt

SEQ ID NO: 41384 - DNA, 20 bp, synthetic construct
  misc_feature 1..20: note = Description of Artificial Sequence: Synthetic oligonucleotide
  misc_feature 1..20: note = Target: SCN10A; (-) strand; PAM type: YTN; PAM sequence: CTG
  source 1..20: mol_type = other DNA
ggagaagtttgacccagagg

SEQ ID NO: 41385 - DNA, 20 bp, synthetic construct
  misc_feature 1..20: note = Description of Artificial Sequence: Synthetic oligonucleotide
  misc_feature 1..20: note = Target: SCN10A; (-) strand; PAM type: YTN; PAM sequence: CTA
  source 1..20: mol_type = other DNA
tgagacctgggagaagtttg

SEQ ID NO: 41386 - DNA, 20 bp, synthetic construct
  misc_feature 1..20: note = Description of Artificial Sequence: Synthetic oligonucleotide
  misc_feature 1..20: note = Target: SCN10A; (-) strand; PAM type: YTN; PAM sequence: TTC
  source 1..20: mol_type = other DNA
tatgagacctgggagaagtt

SEQ ID NO: 41387 - DNA, 20 bp, synthetic construct
  misc_feature 1..20: note = Description of Artificial Sequence: Synthetic oligonucleotide
  misc_feature 1..20: note = Target: SCN10A; (-) strand; PAM type: YTN; PAM sequence: TTG
  source 1..20: mol_type = other DNA
acatgttctatgagacctgg

SEQ ID NO: 41388 - DNA, 20 bp, synthetic construct
  misc_feature 1..20: note = Description of Artificial Sequence: Synthetic oligonucleotide
  misc_feature 1..20: note = Target: SCN10A; (-) strand; PAM type: YTN; PAM sequence: TTT
  source 1..20: mol_type = other DNA
gacatgttctatgagacctg

SEQ ID NO: 41389 - DNA, 20 bp, synthetic construct
  misc_feature 1..20: note = Description of Artificial Sequence: Synthetic oligonucleotide
  misc_feature 1..20: note = Target: SCN10A; (-) strand; PAM type: YTN; PAM sequence: CTT
  source 1..20: mol_type = other DNA
tgacatgttctatgagacct

SEQ ID NO: 41390 - DNA, 20 bp, synthetic construct
  misc_feature 1..20: note = Description of Artificial Sequence: Synthetic oligonucleotide
  misc_feature 1..20: note = Target: SCN10A; (-) strand; PAM type: YTN; PAM sequence: CTG
  source 1..20: mol_type = other DNA
agtgaggacgactttgacat

SEQ ID NO: 41391 - DNA, 20 bp, synthetic construct
  misc_feature 1..20: note = Description of Artificial Sequence: Synthetic oligonucleotide
  misc_feature 1..20: note = Target: SCN10A; (-) strand; PAM type: YTN; PAM sequence: CTG
  source 1..20: mol_type = other DNA
agcccctgagtgaggacgac

SEQ ID NO: 41392 - DNA, 20 bp, synthetic construct
  misc_feature 1..20: note = Description of Artificial Sequence: Synthetic oligonucleotide
  misc_feature 1..20: note = Target: SCN10A; (-) strand; PAM type: YTN; PAM sequence: TTC
  source 1..20: mol_type = other DNA
aatgtggccacggaggagag

SEQ ID NO: 41393 - DNA, 20 bp, synthetic construct
  misc_feature 1..20: note = Description of Artificial Sequence: Synthetic oligonucleotide
  misc_feature 1..20: note = Target: SCN10A; (-) strand; PAM type: YTN; PAM sequence: CTT
  source 1..20: mol_type = other DNA
caatgtggccacggaggaga

SEQ ID NO: 41394 - DNA, 20 bp, synthetic construct
  misc_feature 1..20: note = Description of Artificial Sequence: Synthetic oligonucleotide
  misc_feature 1..20: note = Target: SCN10A; (-) strand; PAM type: YTN; PAM sequence: CTG
  source 1..20: mol_type = other DNA
gagaacttcaatgtggccac

SEQ ID NO: 41395 - DNA, 20 bp, synthetic construct
  misc_feature 1..20: note = Description of Artificial Sequence: Synthetic oligonucleotide
  misc_feature 1..20: note = Target: SCN10A; (-) strand; PAM type: YTN; PAM sequence: TTC
  source 1..20: mol_type = other DNA
tggagaacttcaatgtggcc

SEQ ID NO: 41396 - DNA, 20 bp, synthetic construct
  misc_feature 1..20: note = Description of Artificial Sequence: Synthetic oligonucleotide
  misc_feature 1..20: note = Target: SCN10A; (-) strand; PAM type: YTN; PAM sequence: TTG
  source 1..20: mol_type = other DNA
cagtgattctggagaacttc

SEQ ID NO: 41397 - DNA, 20 bp, synthetic construct
  misc_feature 1..20: note = Description of Artificial Sequence: Synthetic oligonucleotide
  misc_feature 1..20: note = Target: SCN10A; (-) strand; PAM type: YTN; PAM sequence: CTC
  source 1..20: mol_type = other DNA
atcatggtcaacatgtacat

SEQ ID NO: 41398 - DNA, 20 bp, synthetic construct
  misc_feature 1..20: note = Description of Artificial Sequence: Synthetic oligonucleotide
  misc_feature 1..20: note = Target: SCN10A; (-) strand; PAM type: YTN; PAM sequence: TTC
  source 1..20: mol_type = other DNA
ctcatcatggtcaacatgta

SEQ ID NO: 41399 - DNA, 20 bp, synthetic construct
  misc_feature 1..20: note = Description of Artificial Sequence: Synthetic oligonucleotide
  misc_feature 1..20: note = Target: SCN10A; (-) strand; PAM type: YTN; PAM sequence: CTT
  source 1..20: mol_type = other DNA
cctcatcatggtcaacatgt

SEQ ID NO: 41400 - DNA, 20 bp, synthetic construct
  misc_feature 1..20: note = Description of Artificial Sequence: Synthetic oligonucleotide
  misc_feature 1..20: note = Target: SCN10A; (-) strand; PAM type: YTN; PAM sequence: CTC
  source 1..20: mol_type = other DNA
cttcctcatcatggtcaaca

SEQ ID NO: 41401 - DNA, 20 bp, synthetic construct
  misc_feature 1..20: note = Description of Artificial Sequence: Synthetic oligonucleotide
  misc_feature 1..20: note = Target: SCN10A; (-) strand; PAM type: YTN; PAM sequence: CTA
  source 1..20: mol_type = other DNA
catcatcatctccttcctca

SEQ ID NO: 41402 - DNA, 20 bp, synthetic construct
  misc_feature 1..20: note = Description of Artificial Sequence: Synthetic oligonucleotide
  misc_feature 1..20: note = Target: SCN10A; (-) strand; PAM type: YTN; PAM sequence: TTC
  source 1..20: mol_type = other DNA
accacctacatcatcatctc

SEQ ID NO: 41403 - DNA, 20 bp, synthetic construct
  misc_feature 1..20: note = Description of Artificial Sequence: Synthetic oligonucleotide
  misc_feature 1..20: note = Target: SCN10A; (-) strand; PAM type: YTN; PAM sequence: CTT
  source 1..20: mol_type = other DNA
caccacctacatcatcatct

SEQ ID NO: 41404 - DNA, 20 bp, synthetic construct
  misc_feature 1..20: note = Description of Artificial Sequence: Synthetic oligonucleotide
  misc_feature 1..20: note = Target: SCN10A; (-) strand; PAM type: YTN; PAM sequence: TTC
  source 1..20: mol_type = other DNA
ttcaccacctacatcatcat

SEQ ID NO: 41405 - DNA, 20 bp, synthetic construct
  misc_feature 1..20: note = Description of Artificial Sequence: Synthetic oligonucleotide
  misc_feature 1..20: note = Target: SCN10A; (-) strand; PAM type: YTN; PAM sequence: CTT
  source 1..20: mol_type = other DNA
cttcaccacctacatcatca

SEQ ID NO: 41406 - DNA, 20 bp, synthetic construct
  misc_feature 1..20: note = Description of Artificial Sequence: Synthetic oligonucleotide
  misc_feature 1..20: note = Target: SCN10A; (-) strand; PAM type: YTN; PAM sequence: CTG
  source 1..20: mol_type = other DNA
tgggagcccagccgtaggca

SEQ ID NO: 41407 - DNA, 20 bp, synthetic construct
  misc_feature 1..20: note = Description of Artificial Sequence: Synthetic oligonucleotide
  misc_feature 1..20: note = Target: SCN10A; (-) strand; PAM type: YTN; PAM sequence: CTG
  source 1..20: mol_type = other DNA
cccaacagcaatggcaccag

SEQ ID NO: 41408 - DNA, 20 bp, synthetic construct
  misc_feature 1..20: note = Description of Artificial Sequence: Synthetic oligonucleotide
  misc_feature 1..20: note = Target: SCN10A; (-) strand; PAM type: YTN; PAM sequence: CTG
  source 1..20: mol_type = other DNA
tgaccccaatctgcccaaca

SEQ ID NO: 41409 - DNA, 20 bp, synthetic construct
  misc_feature 1..20: note = Description of Artificial Sequence: Synthetic oligonucleotide
  misc_feature 1..20: note = Target: SCN10A; (-) strand; PAM type: YTN; PAM sequence: CTA
  source 1..20: mol_type = other DNA
ctgtgaccccaatctgccca

SEQ ID NO: 41410 - DNA, 20 bp, synthetic construct
  misc_feature 1..20: note = Description of Artificial Sequence: Synthetic oligonucleotide
  misc_feature 1..20: note = Target: SCN10A; (-) strand; PAM type: YTN; PAM sequence: CTC
  source 1..20: mol_type = other DNA
aacacagggcccccctactg

SEQ ID NO: 41411 - DNA, 20 bp, synthetic construct
  misc_feature 1..20: note = Description of Artificial Sequence: Synthetic oligonucleotide
  misc_feature 1..20: note = Target: SCN10A; (-) strand; PAM type: YTN; PAM sequence: CTC
  source 1..20: mol_type = other DNA
agccccatcctcaacacagg

SEQ ID NO: 41412 - DNA, 20 bp, synthetic construct
  misc_feature 1..20: note = Description of Artificial Sequence: Synthetic oligonucleotide
  misc_feature 1..20: note = Target: SCN10A; (-) strand; PAM type: YTN; PAM sequence: CTC
  source 1..20: mol_type = other DNA
ctcagccccatcctcaacac

SEQ ID NO: 41413 - DNA, 20 bp, synthetic construct
  misc_feature 1..20: note = Description of Artificial Sequence: Synthetic oligonucleotide
  misc_feature 1..20: note = Target: SCN10A; (-) strand; PAM type: YTN; PAM sequence: CTG
  source 1..20: mol_type = other DNA
ggatggcctcctcagcccca

SEQ ID NO: 41414 - DNA, 20 bp, synthetic construct
  misc_feature 1..20: note = Description of Artificial Sequence: Synthetic oligonucleotide
  misc_feature 1..20: note = Target: SCN10A; (-) strand; PAM type: YTN; PAM sequence: TTA
  source 1..20: mol_type = other DNA
ccacgtcggccggctgggat

SEQ ID NO: 41415 - DNA, 20 bp, synthetic construct
  misc_feature 1..20: note = Description of Artificial Sequence: Synthetic oligonucleotide
  misc_feature 1..20: note = Target: SCN10A; (-) strand; PAM type: YTN; PAM sequence: TTC
  source 1..20: mol_type = other DNA
cagattaccacgtcggccgg

SEQ ID NO: 41416 - DNA, 20 bp, synthetic construct
  misc_feature 1..20: note = Description of Artificial Sequence: Synthetic oligonucleotide
  misc_feature 1..20: note = Target: SCN10A; (-) strand; PAM type: YTN; PAM sequence: CTT
  source 1..20: mol_type = other DNA
ccagattaccacgtcggccg

SEQ ID NO: 41417 - DNA, 20 bp, synthetic construct
  misc_feature 1..20: note = Description of Artificial Sequence: Synthetic oligonucleotide
  misc_feature 1..20: note = Target: SCN10A; (-) strand; PAM type: YTN; PAM sequence: CTC
  source 1..20: mol_type = other DNA
ttccagattaccacgtcggc

SEQ ID NO: 41418 - DNA, 20 bp, synthetic construct
  misc_feature 1..20: note = Description of Artificial Sequence: Synthetic oligonucleotide
  misc_feature 1..20: note = Target: SCN10A; (-) strand; PAM type: YTN; PAM sequence: CTG
  source 1..20: mol_type = other DNA
tgcctcttccagattaccac

SEQ ID NO: 41419 - DNA, 20 bp, synthetic construct
  misc_feature 1..20: note = Description of Artificial Sequence: Synthetic oligonucleotide
  misc_feature 1..20: note = Target: SCN10A; (-) strand; PAM type: YTN; PAM sequence: TTC
  source 1..20: mol_type = other DNA
gccaacagcatgctgtgcct

SEQ ID NO: 41420 - DNA, 20 bp, synthetic construct
  misc_feature 1..20: note = Description of Artificial Sequence: Synthetic oligonucleotide
  misc_feature 1..20: note = Target: SCN10A; (-) strand; PAM type: YTN; PAM sequence: CTT
  source 1..20: mol_type = other DNA
cgccaacagcatgctgtgcc

SEQ ID NO: 41421 - DNA, 20 bp, synthetic construct
  misc_feature 1..20: note = Description of Artificial Sequence: Synthetic oligonucleotide
  misc_feature 1..20: note = Target: SCN10A; (-) strand; PAM type: YTN; PAM sequence: TTC
  source 1..20: mol_type = other DNA
cagaccttcgccaacagcat

SEQ ID NO: 41422 - DNA, 20 bp, synthetic construct
  misc_feature 1..20: note = Description of Artificial Sequence: Synthetic oligonucleotide
  misc_feature 1..20: note = Target: SCN10A; (-) strand; PAM type: YTN; PAM sequence: CTT
  source 1..20: mol_type = other DNA
ccagaccttcgccaacagca

SEQ ID NO: 41423 - DNA, 20 bp, synthetic construct
  misc_feature 1..20: note = Description of Artificial Sequence: Synthetic oligonucleotide
  misc_feature 1..20: note = Target: SCN10A; (-) strand; PAM type: YTN; PAM sequence: TTC
  source 1..20: mol_type = other DNA
aacttccagaccttcgccaa

SEQ ID NO: 41424 - DNA, 20 bp, synthetic construct
  misc_feature 1..20: note = Description of Artificial Sequence: Synthetic oligonucleotide
  misc_feature 1..20: note = Target: SCN10A; (-) strand; PAM type: YTN; PAM sequence: CTG
  source 1..20: mol_type = other DNA
gcatcgacgacatgttcaac

SEQ ID NO: 41425 - DNA, 20 bp, synthetic construct
  misc_feature 1..20: note = Description of Artificial Sequence: Synthetic oligonucleotide
  misc_feature 1..20: note = Target: SCN10A; (-) strand; PAM type: YTN; PAM sequence: TTC
  source 1..20: mol_type = other DNA
cccatgtgaggtgggaggct

SEQ ID NO: 41426 - DNA, 20 bp, synthetic construct
  misc_feature 1..20: note = Description of Artificial Sequence: Synthetic oligonucleotide
  misc_feature 1..20: note = Target: SCN10A; (-) strand; PAM type: YTN; PAM sequence: TTT
  source 1..20: mol_type = other DNA
ccccatgtgaggtgggaggc

SEQ ID NO: 41427 - DNA, 20 bp, synthetic construct
  misc_feature 1..20: note = Description of Artificial Sequence: Synthetic oligonucleotide
  misc_feature 1..20: note = Target: SCN10A; (-) strand; PAM type: YTN; PAM sequence: CTT
  source 1..20: mol_type = other DNA
tccccatgtgaggtgggagg

SEQ ID NO: 41428 - DNA, 20 bp, synthetic construct
  misc_feature 1..20: note = Description of Artificial Sequence: Synthetic oligonucleotide
  misc_feature 1..20: note = Target: SCN10A; (-) strand; PAM type: YTN; PAM sequence: TTC
  source 1..20: mol_type = other DNA
ggtatgtccagctttcccca

SEQ ID NO: 41429 - DNA, 20 bp, synthetic construct
  misc_feature 1..20: note = Description of Artificial Sequence: Synthetic oligonucleotide
  misc_feature 1..20: note = Target: SCN10A; (-) strand; PAM type: YTN; PAM sequence: CTT
  source 1..20: mol_type = other DNA
cggtatgtccagctttcccc

SEQ ID NO: 41430 - DNA, 20 bp, synthetic construct
  misc_feature 1..20: note = Description of Artificial Sequence: Synthetic oligonucleotide
  misc_feature 1..20: note = Target: SCN10A; (-) strand; PAM type: YTN; PAM sequence: CTA
  source 1..20: mol_type = other DNA
tcttcggtatgtccagcttt

SEQ ID NO: 41431 - DNA, 20 bp, synthetic construct
  misc_feature 1..20: note = Description of Artificial Sequence: Synthetic oligonucleotide
  misc_feature 1..20: note = Target: SCN10A; (-) strand; PAM type: YTN; PAM sequence: CTC
  source 1..20: mol_type = other DNA
tatcttcggtatgtccagct

SEQ ID NO: 41432 - DNA, 20 bp, synthetic construct
  misc_feature 1..20: note = Description of Artificial Sequence: Synthetic oligonucleotide
  misc_feature 1..20: note = Target: SCN10A; (-) strand; PAM type: YTN; PAM sequence: CTA
  source 1..20: mol_type = other DNA
ctctatcttcggtatgtcca

SEQ ID NO: 41433 - DNA, 20 bp, synthetic construct
  misc_feature 1..20: note = Description of Artificial Sequence: Synthetic oligonucleotide
  misc_feature 1..20: note = Target: SCN10A; (-) strand; PAM type: YTN; PAM sequence: TTC
  source 1..20: mol_type = other DNA
atctactctatcttcggtat

SEQ ID NO: 41434 - DNA, 20 bp, synthetic construct
  misc_feature 1..20: note = Description of Artificial Sequence: Synthetic oligonucleotide
  misc_feature 1..20: note = Target: SCN10A; (-) strand; PAM type: YTN; PAM sequence: TTG
  source 1..20: mol_type = other DNA
tcatgttcatctactctatc

SEQ ID NO: 41435 - DNA, 20 bp, synthetic construct
  misc_feature 1..20: note = Description of Artificial Sequence: Synthetic oligonucleotide
  misc_feature 1..20: note = Target: SCN10A; (-) strand; PAM type: YTN; PAM sequence: CTT
  source 1..20: mol_type = other DNA
gtcatgttcatctactctat

SEQ ID NO: 41436 - DNA, 20 bp, synthetic construct
  misc_feature 1..20: note = Description of Artificial Sequence: Synthetic oligonucleotide
  misc_feature 1..20: note = Target: SCN10A; (-) strand; PAM type: YTN; PAM sequence: TTC
  source 1..20: mol_type = other DNA
cttgtcatgttcatctactc

SEQ ID NO: 41437 - DNA, 20 bp, synthetic construct
  misc_feature 1..20: note = Description of Artificial Sequence: Synthetic oligonucleotide
  misc_feature 1..20: note = Target: SCN10A; (-) strand; PAM type: YTN; PAM sequence: CTA
  source 1..20: mol_type = other DNA
ttccttgtcatgttcatcta

SEQ ID NO: 41438 - DNA, 20 bp, synthetic construct
  misc_feature 1..20: note = Description of Artificial Sequence: Synthetic oligonucleotide
  misc_feature 1..20: note = Target: SCN10A; (-) strand; PAM type: YTN; PAM sequence: TTG
  source 1..20: mol_type = other DNA
ctattccttgtcatgttcat

SEQ ID NO: 41439 - DNA, 20 bp, synthetic construct
  misc_feature 1..20: note = Description of Artificial Sequence: Synthetic oligonucleotide
  misc_feature 1..20: note = Target: SCN10A; (-) strand; PAM type: YTN; PAM sequence: CTG
  source 1..20: mol_type = other DNA
ttgctattccttgtcatgtt

SEQ ID NO: 41440 - DNA, 20 bp, synthetic construct
  misc_feature 1..20: note = Description of Artificial Sequence: Synthetic oligonucleotide
  misc_feature 1..20: note = Target: SCN10A; (-) strand; PAM type: YTN; PAM sequence: TTC
  source 1..20: mol_type = other DNA
aacatcgggctgttgctatt

SEQ ID NO: 41441 - DNA, 20 bp, synthetic construct
  misc_feature 1..20: note = Description of Artificial Sequence: Synthetic oligonucleotide
  misc_feature 1..20: note = Target: SCN10A; (-) strand; PAM type: YTN; PAM sequence: CTT
  source 1..20: mol_type = other DNA
caacatcgggctgttgctat

SEQ ID NO: 41442 - DNA, 20 bp, synthetic construct
  misc_feature 1..20: note = Description of Artificial Sequence: Synthetic oligonucleotide
  misc_feature 1..20: note = Target: SCN10A; (-) strand; PAM type: YTN; PAM sequence: CTC
  source 1..20: mol_type = other DNA
ttcaacatcgggctgttgct

SEQ ID NO: 41443 - DNA, 20 bp, synthetic construct
  misc_feature 1..20: note = Description of Artificial Sequence: Synthetic oligonucleotide
  misc_feature 1..20: note = Target: SCN10A; (-) strand; PAM type: YTN; PAM sequence: CTG
  source 1..20: mol_type = other DNA
ccctcttcaacatcgggctg

SEQ ID NO: 41444 - DNA, 20 bp, synthetic construct
  misc_feature 1..20: note = Description of Artificial Sequence: Synthetic oligonucleotide
  misc_feature 1..20: note = Target: SCN10A; (-) strand; PAM type: YTN; PAM sequence: CTG
  source 1..20: mol_type = other DNA
cctgccctcttcaacatcgg

SEQ ID NO: 41445 - DNA, 20 bp, synthetic construct
  misc_feature 1..20: note = Description of Artificial Sequence: Synthetic oligonucleotide
  misc_feature 1..20: note = Target: SCN10A; (-) strand; PAM type: YTN; PAM sequence: CTC
  source 1..20: mol_type = other DNA
atgatgtccctgcctgccct

SEQ ID NO: 41446 - DNA, 20 bp, synthetic construct
  misc_feature 1..20: note = Description of Artificial Sequence: Synthetic oligonucleotide
  misc_feature 1..20: note = Target: SCN10A; (-) strand; PAM type: YTN; PAM sequence: TTG
  source 1..20: mol_type = other DNA
ccctcatgatgtccctgcct

SEQ ID NO: 41447 - DNA, 20 bp, synthetic construct
  misc_feature 1..20: note = Description of Artificial Sequence: Synthetic oligonucleotide
  misc_feature 1..20: note = Target: SCN10A; (-) strand; PAM type: YTN; PAM sequence: TTT
  source 1..20: mol_type = other DNA
gccctcatgatgtccctgcc

SEQ ID NO: 41448 - DNA, 20 bp, synthetic construct
  misc_feature 1..20: note = Description of Artificial Sequence: Synthetic oligonucleotide
  misc_feature 1..20: note = Target: SCN10A; (-) strand; PAM type: YTN; PAM sequence: CTT
  source 1..20: mol_type = other DNA
tgccctcatgatgtccctgc

SEQ ID NO: 41449 - DNA, 20 bp, synthetic construct
  misc_feature 1..20: note = Description of Artificial Sequence: Synthetic oligonucleotide
  misc_feature 1..20: note = Target: SCN10A; (-) strand; PAM type: YTN; PAM sequence: CTC
  source 1..20: mol_type = other DNA
tttgccctcatgatgtccct

SEQ ID NO: 41450 - DNA, 20 bp, synthetic construct
  misc_feature 1..20: note = Description of Artificial Sequence: Synthetic oligonucleotide
  misc_feature 1..20: note = Target: SCN10A; (-) strand; PAM type: YTN; PAM sequence: CTG
  source 1..20: mol_type = other DNA
ctctttgccctcatgatgtc

SEQ ID NO: 41451 - DNA, 20 bp, synthetic construct
  misc_feature 1..20: note = Description of Artificial Sequence: Synthetic oligonucleotide
  misc_feature 1..20: note = Target: SCN10A; (-) strand; PAM type: YTN; PAM sequence: CTG
  source 1..20: mol_type = other DNA
atccgagcggccaaggggat

SEQ ID NO: 41452 - DNA, 20 bp, synthetic construct
  misc_feature 1..20: note = Description of Artificial Sequence: Synthetic oligonucleotide
  misc_feature 1..20: note = Target: SCN10A; (-) strand; PAM type: YTN; PAM sequence: CTC
  source 1..20: mol_type = other DNA
agactgatccgagcggccaa

SEQ ID NO: 41453 - DNA, 20 bp, synthetic construct
  misc_feature 1..20: note = Description of Artificial Sequence: Synthetic oligonucleotide
  misc_feature 1..20: note = Target: SCN10A; (-) strand; PAM type: YTN; PAM sequence: TTG
  source 1..20: mol_type = other DNA
gccgcatcctcagactgatc

SEQ ID NO: 41454 - DNA, 20 bp, synthetic construct
  misc_feature 1..20: note = Description of Artificial Sequence: Synthetic oligonucleotide
  misc_feature 1..20: note = Target: SCN10A; (-) strand; PAM type: YTN; PAM sequence: CTG
  source 1..20: mol_type = other DNA
gcccgaattggccgcatcct

SEQ ID NO: 41455 - DNA, 20 bp, synthetic construct
  misc_feature 1..20: note = Description of Artificial Sequence: Synthetic oligonucleotide
  misc_feature 1..20: note = Target: SCN10A; (-) strand; PAM type: YTN; PAM sequence: TTC
  source 1..20: mol_type = other DNA
agagtcatccgcctggcccg

SEQ ID NO: 41456 - DNA, 20 bp, synthetic construct
  misc_feature 1..20: note = Description of Artificial Sequence: Synthetic oligonucleotide
  misc_feature 1..20: note = Target: SCN10A; (-) strand; PAM type: YTN; PAM sequence: CTT
  source 1..20: mol_type = other DNA
cagagtcatccgcctggccc

SEQ ID NO: 41457 - DNA, 20 bp, synthetic construct
  misc_feature 1..20: note = Description of Artificial Sequence: Synthetic oligonucleotide
  misc_feature 1..20: note = Target: SCN10A; (-) strand; PAM type: YTN; PAM sequence: CTC
  source 1..20: mol_type = other DNA
ttcagagtcatccgcctggc

SEQ ID NO: 41458 - DNA, 20 bp, synthetic construct
  misc_feature 1..20: note = Description of Artificial Sequence: Synthetic oligonucleotide
  misc_feature 1..20: note = Target: SCN10A; (-) strand; PAM type: YTN; PAM sequence: CTC
  source 1..20: mol_type = other DNA
cccaacgctcttcagagtca

SEQ ID NO: 41459 - DNA, 20 bp, synthetic construct
  misc_feature 1..20: note = Description of Artificial Sequence: Synthetic oligonucleotide
  misc_feature 1..20: note = Target: SCN10A; (-) strand; PAM type: YTN; PAM sequence: TTC
  source 1..20: mol_type = other DNA
tccccaacgctcttcagagt

SEQ ID NO: 41460 - DNA, 20 bp, synthetic construct
  misc_feature 1..20: note = Description of Artificial Sequence: Synthetic oligonucleotide
  misc_feature 1..20: note = Target: SCN10A; (-) strand; PAM type: YTN; PAM sequence: CTT
  source 1..20: mol_type = other DNA
ctccccaacgctcttcagag

SEQ ID NO: 41461 - DNA, 20 bp, synthetic construct
  misc_feature 1..20: note = Description of Artificial Sequence: Synthetic oligonucleotide
  misc_feature 1..20: note = Target: SCN10A; (-) strand; PAM type: YTN; PAM sequence: TTA
  source 1..20: mol_type = other DNA
cttctccccaacgctcttca

SEQ ID NO: 41462 - DNA, 20 bp, synthetic construct
  misc_feature 1..20: note = Description of Artificial Sequence: Synthetic oligonucleotide
  misc_feature 1..20: note = Target: SCN10A; (-) strand; PAM type: YTN; PAM sequence: TTC
  source 1..20: mol_type = other DNA
aaagttacttctccccaacg

SEQ ID NO: 41463 - DNA, 20 bp, synthetic construct
  misc_feature 1..20: note = Description of Artificial Sequence: Synthetic oligonucleotide
  misc_feature 1..20: note = Target: SCN10A; (-) strand; PAM type: YTN; PAM sequence: CTT
  source 1..20: mol_type = other DNA
caaagttacttctccccaac

SEQ ID NO: 41464 - DNA, 20 bp, synthetic construct
  misc_feature 1..20: note = Description of Artificial Sequence: Synthetic oligonucleotide
  misc_feature 1..20: note = Target: SCN10A; (-) strand; PAM type: YTN; PAM sequence: TTA
  source 1..20: mol_type = other DNA
agtcacttcaaagttacttc

SEQ ID NO: 41465 - DNA, 20 bp, synthetic construct
  misc_feature 1..20: note = Description of Artificial Sequence: Synthetic oligonucleotide
  misc_feature 1..20: note = Target: SCN10A; (-) strand; PAM type: YTN; PAM sequence: CTT
  source 1..20: mol_type = other DNA
aagtcacttcaaagttactt

SEQ ID NO: 41466 - DNA, 20 bp, synthetic construct
  misc_feature 1..20: note = Description of Artificial Sequence: Synthetic oligonucleotide
  misc_feature 1..20: note = Target: SCN10A; (-) strand; PAM type: YTN; PAM sequence: TTC
  source 1..20: mol_type = other DNA
ttaagtcacttcaaagttac

SEQ ID NO: 41467 - DNA, 20 bp, synthetic construct
  misc_feature 1..20: note = Description of Artificial Sequence: Synthetic oligonucleotide
  misc_feature 1..20: note = Target: SCN10A; (-) strand; PAM type: YTN; PAM sequence: CTG
  source 1..20: mol_type = other DNA
caattcttaagtcacttcaa

SEQ ID NO: 41468 - DNA, 20 bp, synthetic construct
  misc_feature 1..20: note = Description of Artificial Sequence: Synthetic oligonucleotide
  misc_feature 1..20: note = Target: SCN10A; (-) strand; PAM type: YTN; PAM sequence: TTC
  source 1..20: mol_type = other DNA
tgcaattcttaagtcacttc

SEQ ID NO: 41469 - DNA, 20 bp, synthetic construct
  misc_feature 1..20: note = Description of Artificial Sequence: Synthetic oligonucleotide
  misc_feature 1..20: note = Target: SCN10A; (-) strand; PAM type: YTN; PAM sequence: TTT
  source 1..20: mol_type = other DNA
ctgcaattcttaagtcactt

SEQ ID NO: 41470 - DNA, 20 bp, synthetic construct
  misc_feature 1..20: note = Description of Artificial Sequence: Synthetic oligonucleotide
  misc_feature 1..20: note = Target: SCN10A; (-) strand; PAM type: YTN; PAM sequence: TTT
  source 1..20: mol_type = other DNA
tctgcaattcttaagtcact

SEQ ID NO: 41471 - DNA, 20 bp, synthetic construct
  misc_feature 1..20: note = Description of Artificial Sequence: Synthetic oligonucleotide
  misc_feature 1..20: note = Target: SCN10A; (-) strand; PAM type: YTN; PAM sequence: TTT
  source 1..20: mol_type = other DNA
ttctgcaattcttaagtcac

SEQ ID NO: 41472 - DNA, 20 bp, synthetic construct
  misc_feature 1..20: note = Description of Artificial Sequence: Synthetic oligonucleotide
  misc_feature 1..20: note = Target: SCN10A; (-) strand; PAM type: YTN; PAM sequence: TTT
  source 1..20: mol_type = other DNA
tttctgcaattcttaagtca

SEQ ID NO: 41473 - DNA, 20 bp, synthetic construct
  misc_feature 1..20: note = Description of Artificial Sequence: Synthetic oligonucleotide
  misc_feature 1..20: note = Target: SCN10A; (-) strand; PAM type: YTN; PAM sequence: CTG
  source 1..20: mol_type = other DNA
attttttctgcaattcttaa

SEQ ID NO: 41474 - DNA, 20 bp, synthetic construct
  misc_feature 1..20: note = Description of Artificial Sequence: Synthetic oligonucleotide
  misc_feature 1..20: note = Target: SCN10A; (-) strand; PAM type: YTN; PAM sequence: TTA
  source 1..20: mol_type = other DNA
aaggcctgattttttctgca

SEQ ID NO: 41475 - DNA, 20 bp, synthetic construct
  misc_feature 1..20: note = Description of Artificial Sequence: Synthetic oligonucleotide
  misc_feature 1..20: note = Target: SCN10A; (-) strand; PAM type: YTN; PAM sequence: TTT
  source 1..20: mol_type = other DNA
aaaggcctgattttttctgc

SEQ ID NO: 41476 - DNA, 20 bp, synthetic construct
  misc_feature 1..20: note = Description of Artificial Sequence: Synthetic oligonucleotide
  misc_feature 1..20: note = Target: SCN10A; (-) strand; PAM type: YTN; PAM sequence: TTT
  source 1..20: mol_type = other DNA
taaaggcctgattttttctg

SEQ ID NO: 41477 - DNA, 20 bp, synthetic construct
  misc_feature 1..20: note = Description of Artificial Sequence: Synthetic oligonucleotide
  misc_feature 1..20: note = Target: SCN10A; (-) strand; PAM type: YTN; PAM sequence: CTT
  source 1..20: mol_type = other DNA
ttaaaggcctgattttttct

SEQ ID NO: 41478 - DNA, 20 bp, synthetic construct
  misc_feature 1..20: note = Description of Artificial Sequence: Synthetic oligonucleotide
  misc_feature 1..20: note = Target: SCN10A; (-) strand; PAM type: YTN; PAM sequence: TTC
  source 1..20: mol_type = other DNA
ttttaaaggcctgatttttt

SEQ ID NO: 41479 - DNA, 20 bp, synthetic construct
  misc_feature 1..20: note = Description of Artificial Sequence: Synthetic oligonucleotide
  misc_feature 1..20: note = Target: SCN10A; (-) strand; PAM type: YTN; PAM sequence: CTT
  source 1..20: mol_type = other DNA
cttttaaaggcctgattttt

SEQ ID NO: 41480 - DNA, 20 bp, synthetic construct
  misc_feature 1..20: note = Description of Artificial Sequence: Synthetic oligonucleotide
  misc_feature 1..20: note = Target: SCN10A; (-) strand; PAM type: YTN; PAM sequence: TTC
  source 1..20: mol_type = other DNA
cttcttttaaaggcctgatt

SEQ ID NO: 41481 - DNA, 20 bp, synthetic construct
  misc_feature 1..20: note = Description of Artificial Sequence: Synthetic oligonucleotide
  misc_feature 1..20: note = Target: SCN10A; (-) strand; PAM type: YTN; PAM sequence: CTT
  source 1..20: mol_type = other DNA
ccttcttttaaaggcctgat

SEQ ID NO: 41482 - DNA, 20 bp, synthetic construct
  misc_feature 1..20: note = Description of Artificial Sequence: Synthetic oligonucleotide
  misc_feature 1..20: note = Target: SCN10A; (-) strand; PAM type: YTN; PAM sequence: TTC
  source 1..20: mol_type = other DNA
ttccttcttttaaaggcctg

SEQ ID NO: 41483 - DNA, 20 bp, synthetic construct
  misc_feature 1..20: note = Description of Artificial Sequence: Synthetic oligonucleotide
  misc_feature 1..20: note = Target: SCN10A; (-) strand; PAM type: YTN; PAM sequence: TTT
  source 1..20: mol_type = other DNA
cttccttcttttaaaggcct

SEQ ID NO: 41484 - DNA, 20 bp, synthetic construct
  misc_feature 1..20: note = Description of Artificial Sequence: Synthetic oligonucleotide
  misc_feature 1..20: note = Target: SCN10A; (-) strand; PAM type: YTN; PAM sequence: TTA
  source 1..20: mol_type = other DNA
gataatttcttccttctttt

SEQ ID NO: 41485 - DNA, 20 bp, synthetic construct
  misc_feature 1..20: note = Description of Artificial Sequence: Synthetic oligonucleotide
  misc_feature 1..20: note = Target: SCN10A; (-) strand; PAM type: YTN; PAM sequence: CTA
  source 1..20: mol_type = other DNA
attagataatttcttccttc

SEQ ID NO: 41486 - DNA, 20 bp, synthetic construct
  misc_feature 1..20: note = Description of Artificial Sequence: Synthetic oligonucleotide
  misc_feature 1..20: note = Target: SCN10A; (-) strand; PAM type: YTN; PAM sequence: CTG
  source 1..20: mol_type = other DNA
gagatactaattagataatt

SEQ ID NO: 41487 - DNA, 20 bp, synthetic construct
  misc_feature 1..20: note = Description of Artificial Sequence: Synthetic oligonucleotide
  misc_feature 1..20: note = Target: SCN10A; (-) strand; PAM type: YTN; PAM sequence: CTC
  source 1..20: mol_type = other DNA
atggctggagatactaatta

SEQ ID NO: 41488 - DNA, 20 bp, synthetic construct
  misc_feature 1..20: note = Description of Artificial Sequence: Synthetic oligonucleotide
  misc_feature 1..20: note = Target: SCN10A; (-) strand; PAM type: YTN; PAM sequence: TTG
  source 1..20: mol_type = other DNA
tcacgtctcatggctggaga

SEQ ID NO: 41489 - DNA, 20 bp, synthetic construct
  misc_feature 1..20: note = Description of Artificial Sequence: Synthetic oligonucleotide
  misc_feature 1..20: note = Target: SCN10A; (-) strand; PAM type: YTN; PAM sequence: TTT
  source 1..20: mol_type = other DNA
gtcacgtctcatggctggag

SEQ ID NO: 41490 - DNA, 20 bp, synthetic construct
  misc_feature 1..20: note = Description of Artificial Sequence: Synthetic oligonucleotide
  misc_feature 1..20: note = Target: SCN10A; (-) strand; PAM type: YTN; PAM sequence: CTT
  source 1..20: mol_type = other DNA
tgtcacgtctcatggctgga

SEQ ID NO: 41491 - DNA, 20 bp, synthetic construct
  misc_feature 1..20: note = Description of Artificial Sequence: Synthetic oligonucleotide
  misc_feature 1..20: note = Target: SCN10A; (-) strand; PAM type: YTN; PAM sequence: CTA
  source 1..20: mol_type = other DNA
taccaagcaaagcagagtgt

SEQ ID NO: 41492 - DNA, 20 bp, synthetic construct
  misc_feature 1..20: note = Description of Artificial Sequence: Synthetic oligonucleotide
  misc_feature 1..20: note = Target: SCN10A; (-) strand; PAM type: YTN; PAM sequence: CTC
  source 1..20: mol_type = other DNA
aaatgtggatgcccaagtgg

SEQ ID NO: 41493 - DNA, 20 bp, synthetic construct
  misc_feature 1..20: note = Description of Artificial Sequence: Synthetic oligonucleotide
  misc_feature 1..20: note = Target: SCN10A; (-) strand; PAM type: YTN; PAM sequence: CTG
  source 1..20: mol_type = other DNA
agggcccagagtcctcaaat

SEQ ID NO: 41494 - DNA, 20 bp, synthetic construct
  misc_feature 1..20: note = Description of Artificial Sequence: Synthetic oligonucleotide
  misc_feature 1..20: note = Target: SCN10A; (-) strand; PAM type: YTN; PAM sequence: CTC
  source 1..20: mol_type = other DNA
tgagggcccagagtcctcaa

SEQ ID NO: 41495 - DNA, 20 bp, synthetic construct
  misc_feature 1..20: note = Description of Artificial Sequence: Synthetic oligonucleotide
  misc_feature 1..20: note = Target: SCN10A; (-) strand; PAM type: YTN; PAM sequence: CTA
  source 1..20: mol_type = other DNA
ccatgccaggctctgagggc

SEQ ID NO: 41496 - DNA, 20 bp, synthetic construct
  misc_feature 1..20: note = Description of Artificial Sequence: Synthetic oligonucleotide
  misc_feature 1..20: note = Target: SCN10A; (-) strand; PAM type: YTN; PAM sequence: CTA
  source 1..20: mol_type = other DNA
cctaccatgccaggctctga

SEQ ID NO: 41497 - DNA, 20 bp, synthetic construct
  misc_feature 1..20: note = Description of Artificial Sequence: Synthetic oligonucleotide
  misc_feature 1..20: note = Target: SCN10A; (-) strand; PAM type: YTN; PAM sequence: TTG
  source 1..20: mol_type = other DNA
tgctacctaccatgccaggc

SEQ ID NO: 41498 - DNA, 20 bp, synthetic construct
  misc_feature 1..20: note = Description of Artificial Sequence: Synthetic oligonucleotide
  misc_feature 1..20: note = Target: SCN10A; (-) strand; PAM type: YTN; PAM sequence: TTT
  source 1..20: mol_type = other DNA
gtgctacctaccatgccagg

SEQ ID NO: 41499 - DNA, 20 bp, synthetic construct
  misc_feature 1..20: note = Description of Artificial Sequence: Synthetic oligonucleotide
  misc_feature 1..20: note = Target: SCN10A; (-) strand; PAM type: YTN; PAM sequence: CTT
  source 1..20: mol_type = other DNA
tgtgctacctaccatgccag

SEQ ID NO: 41500 - DNA, 20 bp, synthetic construct
  misc_feature 1..20: note = Description of Artificial Sequence: Synthetic oligonucleotide
  misc_feature 1..20: note = Target: SCN10A; (-) strand; PAM type: YTN; PAM sequence: CTA
  source 1..20: mol_type = other DNA
ctttgtgctacctaccatgc

SEQ ID NO: 41501 - DNA, 20 bp, synthetic construct
  misc_feature 1..20: note = Description of Artificial Sequence: Synthetic oligonucleotide
  misc_feature 1..20: note = Target: SCN10A; (-) strand; PAM type: YTN; PAM sequence: CTG
  source 1..20: mol_type = other DNA
agcccctactttgtgctacc

SEQ ID NO: 41502 - DNA, 20 bp, synthetic construct
  misc_feature 1..20: note = Description of Artificial Sequence: Synthetic oligonucleotide
  misc_feature 1..20: note = Target: SCN10A; (-) strand; PAM type: YTN; PAM sequence: TTA
  source 1..20: mol_type = other DNA
ctgagcccctactttgtgct

SEQ ID NO: 41503 - DNA, 20 bp, synthetic construct
  misc_feature 1..20: note = Description of Artificial Sequence: Synthetic oligonucleotide
  misc_feature 1..20: note = Target: SCN10A; (-) strand; PAM type: YTN; PAM sequence: TTT
  source 1..20: mol_type = other DNA
actgagcccctactttgtgc

SEQ ID NO: 41504 - DNA, 20 bp, synthetic construct
  misc_feature 1..20: note = Description of Artificial Sequence: Synthetic oligonucleotide
  misc_feature 1..20: note = Target: SCN10A; (-) strand; PAM type: YTN; PAM sequence: TTA
  source 1..20: mol_type = other DNA
tgcaatgggcatttactgag

SEQ ID NO: 41505 - DNA, 20 bp, synthetic construct
  misc_feature 1..20: note = Description of Artificial Sequence: Synthetic oligonucleotide
  misc_feature 1..20: note = Target: SCN10A; (-) strand; PAM type: YTN; PAM sequence: CTT
  source 1..20: mol_type = other DNA
atgcaatgggcatttactga

SEQ ID NO: 41506 - DNA, 20 bp, synthetic construct
  misc_feature 1..20: note = Description of Artificial Sequence: Synthetic oligonucleotide
  misc_feature 1..20: note = Target: SCN10A; (-) strand; PAM type: YTN; PAM sequence: CTA
  source 1..20: mol_type = other DNA
ggcggaggcaaagataacat

SEQ ID NO: 41507 - DNA, 20 bp, synthetic construct
  misc_feature 1..20: note = Description of Artificial Sequence: Synthetic oligonucleotide
  misc_feature 1..20: note = Target: SCN10A; (-) strand; PAM type: YTN; PAM sequence: TTC
  source 1..20: mol_type = other DNA
taggcggaggcaaagataac

SEQ ID NO: 41508 - DNA, 20 bp, synthetic construct
  misc_feature 1..20: note = Description of Artificial Sequence: Synthetic oligonucleotide
  misc_feature 1..20: note = Target: SCN10A; (-) strand; PAM type: YTN; PAM sequence: TTG
  source 1..20: mol_type = other DNA
accaagaggatattctaggc

SEQ ID NO: 41509 - DNA, 20 bp, synthetic construct
  misc_feature 1..20: note = Description of Artificial Sequence: Synthetic oligonucleotide
  misc_feature 1..20: note = Target: SCN10A; (-) strand; PAM type: YTN; PAM sequence: CTG
  source 1..20: mol_type = other DNA
tggaggttgaccaagaggat

SEQ ID NO: 41510 - DNA, 20 bp, synthetic construct
  misc_feature 1..20: note = Description of Artificial Sequence: Synthetic oligonucleotide
  misc_feature 1..20: note = Target: SCN10A; (-) strand; PAM type: YTN; PAM sequence: TTG
  source 1..20: mol_type = other DNA
actgtggaggttgaccaaga

SEQ ID NO: 41511 - DNA, 20 bp, synthetic construct
  misc_feature 1..20: note = Description of Artificial Sequence: Synthetic oligonucleotide
  misc_feature 1..20: note = Target: SCN10A; (-) strand; PAM type: YTN; PAM sequence: TTT
  source 1..20: mol_type = other DNA
gactgtggaggttgaccaag

SEQ ID NO: 41512 - DNA, 20 bp, synthetic construct
  misc_feature 1..20: note = Description of Artificial Sequence: Synthetic oligonucleotide
  misc_feature 1..20: note = Target: SCN10A; (-) strand; PAM type: YTN; PAM sequence: TTT
  source 1..20: mol_type = other DNA
tgactgtggaggttgaccaa

SEQ ID NO: 41513 - DNA, 20 bp, synthetic construct
  misc_feature 1..20: note = Description of Artificial Sequence: Synthetic oligonucleotide
  misc_feature 1..20: note = Target: SCN10A; (-) strand; PAM type: YTN; PAM sequence: TTT
  source 1..20: mol_type = other DNA
ttgactgtggaggttgacca

SEQ ID NO: 41514 - DNA, 20 bp, synthetic construct
  misc_feature 1..20: note = Description of Artificial Sequence: Synthetic oligonucleotide
  misc_feature 1..20: note = Target: SCN10A; (-) strand; PAM type: YTN; PAM sequence: CTG
  source 1..20: mol_type = other DNA
cagaagataagtttttgact

SEQ ID NO: 41515 - DNA, 20 bp, synthetic construct
  misc_feature 1..20: note = Description of Artificial Sequence: Synthetic oligonucleotide
  misc_feature 1..20: note = Target: SCN10A; (-) strand; PAM type: YTN; PAM sequence: TTG
  source 1..20: mol_type = other DNA
gctgcagaagataagttttt

SEQ ID NO: 41516 - DNA, 20 bp, synthetic construct
  misc_feature 1..20: note = Description of Artificial Sequence: Synthetic oligonucleotide
  misc_feature 1..20: note = Target: SCN10A; (-) strand; PAM type: YTN; PAM sequence: CTT
  source 1..20: mol_type = other DNA
ggctgcagaagataagtttt

SEQ ID NO: 41517 - DNA, 20 bp, synthetic construct
  misc_feature 1..20: note = Description of Artificial Sequence: Synthetic oligonucleotide
  misc_feature 1..20: note = Target: SCN10A; (-) strand; PAM type: YTN; PAM sequence: CTG
  source 1..20: mol_type = other DNA
aacttggctgcagaagataa

SEQ ID NO: 41518 - DNA, 20 bp, synthetic construct
  misc_feature 1..20: note = Description of Artificial Sequence: Synthetic oligonucleotide
  misc_feature 1..20: note = Target: SCN10A; (-) strand; PAM type: YTN; PAM sequence: TTC
  source 1..20: mol_type = other DNA
cagctgaacttggctgcaga

SEQ ID NO: 41519 - DNA, 20 bp, synthetic construct
  misc_feature 1..20: note = Description of Artificial Sequence: Synthetic oligonucleotide
  misc_feature 1..20: note = Target: SCN10A; (-) strand; PAM type: YTN; PAM sequence: CTT
  source 1..20: mol_type = other DNA
ccagctgaacttggctgcag

SEQ ID NO: 41520 - DNA, 20 bp, synthetic construct
  misc_feature 1..20: note = Description of Artificial Sequence: Synthetic oligonucleotide
  misc_feature 1..20: note = Target: SCN10A; (-) strand; PAM type: YTN; PAM sequence: CTG
  source 1..20: mol_type = other DNA
cagtcacttccagctgaact

SEQ ID NO: 41521 - DNA, 20 bp, synthetic construct
  misc_feature 1..20: note = Description of Artificial Sequence: Synthetic oligonucleotide
  misc_feature 1..20: note = Target: SCN10A; (-) strand; PAM type: YTN; PAM sequence: CTG
  source 1..20: mol_type = other DNA
tggaataaactgcagtcact

SEQ ID NO: 41522 - DNA, 20 bp, synthetic construct
  misc_feature 1..20: note = Description of Artificial Sequence: Synthetic oligonucleotide
  misc_feature 1..20: note = Target: SCN10A; (-) strand; PAM type: YTN; PAM sequence: CTG
  source 1..20: mol_type = other DNA
tgagcctgtggaataaactg

SEQ ID NO: 41523 - DNA, 20 bp, synthetic construct
  misc_feature 1..20: note = Description of Artificial Sequence: Synthetic oligonucleotide
  misc_feature 1..20: note = Target: SCN10A; (-) strand; PAM type: YTN; PAM sequence: CTG
  source 1..20: mol_type = other DNA
tgtcataggaaaaaacaggc

SEQ ID NO: 41524 - DNA, 20 bp, synthetic construct
  misc_feature 1..20: note = Description of Artificial Sequence: Synthetic oligonucleotide
  misc_feature 1..20: note = Target: SCN10A; (-) strand; PAM type: YTN; PAM sequence: CTG
  source 1..20: mol_type = other DNA
cagtatcagggaggagcagg

SEQ ID NO: 41525 - DNA, 20 bp, synthetic construct
  misc_feature 1..20: note = Description of Artificial Sequence: Synthetic oligonucleotide
  misc_feature 1..20: note = Target: SCN10A; (-) strand; PAM type: YTN; PAM sequence: TTC
  source 1..20: mol_type = other DNA
acagagcacaggaccagggt

SEQ ID NO: 41526 - DNA, 20 bp, synthetic construct
  misc_feature 1..20: note = Description of Artificial Sequence: Synthetic oligonucleotide
  misc_feature 1..20: note = Target: SCN10A; (-) strand; PAM type: YTN; PAM sequence: CTT
  source 1..20: mol_type = other DNA
cacagagcacaggaccaggg

SEQ ID NO: 41527 - DNA, 20 bp, synthetic construct
  misc_feature 1..20: note = Description of Artificial Sequence: Synthetic oligonucleotide
  misc_feature 1..20: note = Target: SCN10A; (-) strand; PAM type: YTN; PAM sequence: CTG
  source 1..20: mol_type = other DNA
gccttcacagagcacaggac

SEQ ID NO: 41528 - DNA, 20 bp, synthetic construct
  misc_feature 1..20: note = Description of Artificial Sequence: Synthetic oligonucleotide
  misc_feature 1..20: note = Target: SCN10A; (-) strand; PAM type: YTN; PAM sequence: TTC
  source 1..20: mol_type = other DNA
acagtaggaggtagggagag

SEQ ID NO: 41529 - DNA, 20 bp, synthetic construct
  misc_feature 1..20: note = Description of Artificial Sequence: Synthetic oligonucleotide
  misc_feature 1..20: note = Target: SCN10A; (-) strand; PAM type: YTN; PAM sequence: CTT
  source 1..20: mol_type = other DNA
cacagtaggaggtagggaga

SEQ ID NO: 41530 - DNA, 20 bp, synthetic construct
  misc_feature 1..20: note = Description of Artificial Sequence: Synthetic oligonucleotide
  misc_feature 1..20: note = Target: SCN10A; (-) strand; PAM type: YTN; PAM sequence: TTA
  source 1..20: mol_type = other DNA
gccacaggaccgggtgccag

SEQ ID NO: 41531 - DNA, 20 bp, synthetic construct
  misc_feature 1..20: note = Description of Artificial Sequence: Synthetic oligonucleotide
  misc_feature 1..20: note = Target: SCN10A; (-) strand; PAM type: YTN; PAM sequence: CTC
  source 1..20: mol_type = other DNA
cgtacaattagccacaggac

SEQ ID NO: 41532 - DNA, 20 bp, synthetic construct
  misc_feature 1..20: note = Description of Artificial Sequence: Synthetic oligonucleotide
  misc_feature 1..20: note = Target: SCN10A; (-) strand; PAM type: YTN; PAM sequence: TTA
  source 1..20: mol_type = other DNA
acaccaggctccgtacaatt

SEQ ID NO: 41533 - DNA, 20 bp, synthetic construct
  misc_feature 1..20: note = Description of Artificial Sequence: Synthetic oligonucleotide
  misc_feature 1..20: note = Target: SCN10A; (-) strand; PAM type: YTN; PAM sequence: TTG
  source 1..20: mol_type = other DNA
taattaacaccaggctccgt

SEQ ID NO: 41534 - DNA, 20 bp, synthetic construct
  misc_feature 1..20: note = Description of Artificial Sequence: Synthetic oligonucleotide
  misc_feature 1..20: note = Target: SCN10A; (-) strand; PAM type: YTN; PAM sequence: CTT
  source 1..20: mol_type = other DNA
gtaattaacaccaggctccg

SEQ ID NO: 41535 - DNA, 20 bp, synthetic construct
  misc_feature 1..20: note = Description of Artificial Sequence: Synthetic oligonucleotide
  misc_feature 1..20: note = Target: SCN10A; (-) strand; PAM type: YTN; PAM sequence: CTC
  source 1..20: mol_type = other DNA
aggcccccttgtaattaaca

SEQ ID NO: 41536 - DNA, 20 bp, synthetic construct
  misc_feature 1..20: note = Description of Artificial Sequence: Synthetic oligonucleotide
  misc_feature 1..20: note = Target: SCN10A; (-) strand; PAM type: YTN; PAM sequence: TTG
  source 1..20: mol_type = other DNA
cccgaatcctcaggccccct

SEQ ID NO: 41537 - DNA, 20 bp, synthetic construct
  misc_feature 1..20: note = Description of Artificial Sequence: Synthetic oligonucleotide
  misc_feature 1..20: note = Target: SCN10A; (-) strand; PAM type: YTN; PAM sequence: CTG
  source 1..20: mol_type = other DNA
tcagccagttgcccgaatcc

SEQ ID NO: 41538 - DNA, 20 bp, synthetic construct
  misc_feature 1..20: note = Description of Artificial Sequence: Synthetic oligonucleotide
  misc_feature 1..20: note = Target: SCN10A; (-) strand; PAM type: YTN; PAM sequence: TTA
  source 1..20: mol_type = other DNA
gctgtcagccagttgcccga

SEQ ID NO: 41539 - DNA, 20 bp, synthetic construct
  misc_feature 1..20: note = Description of Artificial Sequence: Synthetic oligonucleotide
  misc_feature 1..20: note = Target: SCN10A; (-) strand; PAM type: YTN; PAM sequence: TTT
  source 1..20: mol_type = other DNA
agctgtcagccagttgcccg

SEQ ID NO: 41540 - DNA, 20 bp, synthetic construct
  misc_feature 1..20: note = Description of Artificial Sequence: Synthetic oligonucleotide
  misc_feature 1..20: note = Target: SCN10A; (-) strand; PAM type: YTN; PAM sequence: CTT
  source 1..20: mol_type = other DNA
tagctgtcagccagttgccc

SEQ ID NO: 41541 - DNA, 20 bp, synthetic construct
  misc_feature 1..20: note = Description of Artificial Sequence: Synthetic oligonucleotide
  misc_feature 1..20: note = Target: SCN10A; (-) strand; PAM type: YTN; PAM sequence: TTA
  source 1..20: mol_type = other DNA
tgctttagctgtcagccagt

SEQ ID NO: 41542 - DNA, 20 bp, synthetic construct
  misc_feature 1..20: note = Description of Artificial Sequence: Synthetic oligonucleotide
  misc_feature 1..20: note = Target: SCN10A; (-) strand; PAM type: YTN; PAM sequence: CTT
  source 1..20: mol_type = other DNA
atgctttagctgtcagccag

SEQ ID NO: 41543 - DNA, 20 bp, synthetic construct
  misc_feature 1..20: note = Description of Artificial Sequence: Synthetic oligonucleotide
  misc_feature 1..20: note = Target: SCN10A; (-) strand; PAM type: YTN; PAM sequence: TTC
  source 1..20: mol_type = other DNA
aaatcccttatgctttagct

SEQ ID NO: 41544 - DNA, 20 bp, synthetic construct
  misc_feature 1..20: note = Description of Artificial Sequence: Synthetic oligonucleotide
  misc_feature 1..20: note = Target: SCN10A; (-) strand; PAM type: YTN; PAM sequence: CTG
  source 1..20: mol_type = other DNA
gtcattcaaatcccttatgc

SEQ ID NO: 41545 - DNA, 20 bp, synthetic construct
  misc_feature 1..20: note = Description of Artificial Sequence: Synthetic oligonucleotide
  misc_feature 1..20: note = Target: SCN10A; (-) strand; PAM type: YTN; PAM sequence: TTG
  source 1..20: mol_type = other DNA
tgcagacagctggtcattca

SEQ ID NO: 41546 - DNA, 20 bp, synthetic construct
  misc_feature 1..20: note = Description of Artificial Sequence: Synthetic oligonucleotide
  misc_feature 1..20: note = Target: SCN10A; (-) strand; PAM type: YTN; PAM sequence: TTA
  source 1..20: mol_type = other DNA
aggcattgtgcagacagctg

SEQ ID NO: 41547 - DNA, 20 bp, synthetic construct
  misc_feature 1..20: note = Description of Artificial Sequence: Synthetic oligonucleotide
  misc_feature 1..20: note = Target: SCN10A; (-) strand; PAM type: YTN; PAM sequence: CTG
  source 1..20: mol_type = other DNA
gaaccgaaaaaaaaaaaaaa

SEQ ID NO: 41548 - DNA, 20 bp, synthetic construct
  misc_feature 1..20: note = Description of Artificial Sequence: Synthetic oligonucleotide
  misc_feature 1..20: note = Target: SCN10A; (-) strand; PAM type: YTN; PAM sequence: TTC
  source 1..20: mol_type = other DNA
aaaaacagctggaaccgaaa

SEQ ID NO: 41549 - DNA, 20 bp, synthetic construct
  misc_feature 1..20: note = Description of Artificial Sequence: Synthetic oligonucleotide
  misc_feature 1..20: note = Target: SCN10A; (-) strand; PAM type: YTN; PAM sequence: CTA
  source 1..20: mol_type = other DNA
acataaagttcaaaaacagc

SEQ ID NO: 41550 - DNA, 20 bp, synthetic construct
  misc_feature 1..20: note = Description of Artificial Sequence: Synthetic oligonucleotide
  misc_feature 1..20: note = Target: SCN10A; (-) strand; PAM type: YTN; PAM sequence: CTC
  source 1..20: mol_type = other DNA
caggccctaacataaagttc

SEQ ID NO: 41551 - DNA, 20 bp, synthetic construct
  misc_feature 1..20: note = Description of Artificial Sequence: Synthetic oligonucleotide
  misc_feature 1..20: note = Target: SCN10A; (-) strand; PAM type: YTN; PAM sequence: CTA
  source 1..20: mol_type = other DNA
tctccaggccctaacataaa

SEQ ID NO: 41552 - DNA, 20 bp, synthetic construct
  misc_feature 1..20: note = Description of Artificial Sequence: Synthetic oligonucleotide
  misc_feature 1..20: note = Target: SCN10A; (-) strand; PAM type: YTN; PAM sequence: CTC
  source 1..20: mol_type = other DNA
ccccaaaaaaacctatctcc

SEQ ID NO: 41553 - DNA, 20 bp, synthetic construct
  misc_feature 1..20: note = Description of Artificial Sequence: Synthetic oligonucleotide
  misc_feature 1..20: note = Target: SCN10A; (-) strand; PAM type: YTN; PAM sequence: CTG
  source 1..20: mol_type = other DNA
actcccccaaaaaaacctat

SEQ ID NO: 41554 - DNA, 20 bp, synthetic construct
  misc_feature 1..20: note = Description of Artificial Sequence: Synthetic oligonucleotide
  misc_feature 1..20: note = Target: SCN10A; (-) strand; PAM type: YTN; PAM sequence: TTG
  source 1..20: mol_type = other DNA
ggggcagtaactgactcccc

SEQ ID NO: 41555 - DNA, 20 bp, synthetic construct
  misc_feature 1..20: note = Description of Artificial Sequence: Synthetic oligonucleotide
  misc_feature 1..20: note = Target: SCN10A; (-) strand; PAM type: YTN; PAM sequence: TTG
  source 1..20: mol_type = other DNA
gagttgggggcagtaactga

SEQ ID NO: 41556 - DNA, 20 bp, synthetic construct
  misc_feature 1..20: note = Description of Artificial Sequence: Synthetic oligonucleotide
  misc_feature 1..20: note = Target: SCN10A; (-) strand; PAM type: YTN; PAM sequence: TTC
  source 1..20: mol_type = other DNA
atagttggagttgggggcag

SEQ ID NO: 41557 - DNA, 20 bp, synthetic construct
  misc_feature 1..20: note = Description of Artificial Sequence: Synthetic oligonucleotide
  misc_feature 1..20: note = Target: SCN10A; (-) strand; PAM type: YTN; PAM sequence: TTG
  source 1..20: mol_type = other DNA
ttcatagttggagttggggg

SEQ ID NO: 41558 - DNA, 20 bp, synthetic construct
  misc_feature 1..20: note = Description of Artificial Sequence: Synthetic oligonucleotide
  misc_feature 1..20: note = Target: SCN10A; (-) strand; PAM type: YTN; PAM sequence: TTT
  source 1..20: mol_type = other DNA
gttcatagttggagttgggg

SEQ ID NO: 41559 - DNA, 20 bp, synthetic construct
  misc_feature 1..20: note = Description of Artificial Sequence: Synthetic oligonucleotide
  misc_feature 1..20: note = Target: SCN10A; (-) strand; PAM type: YTN; PAM sequence: CTT
  source 1..20: mol_type = other DNA
tgttcatagttggagttggg

SEQ ID NO: 41560 - DNA, 20 bp, synthetic construct
  misc_feature 1..20: note = Description of Artificial Sequence: Synthetic oligonucleotide
  misc_feature 1..20: note = Target: SCN10A; (-) strand; PAM type: YTN; PAM sequence: TTC
  source 1..20: mol_type = other DNA
caactttgttcatagttgga

SEQ ID NO: 41561 - DNA, 20 bp, synthetic construct
  misc_feature 1..20: note = Description of Artificial Sequence: Synthetic oligonucleotide
  misc_feature 1..20: note = Target: SCN10A; (-) strand; PAM type: YTN; PAM sequence: TTT
  source 1..20: mol_type = other DNA
ccaactttgttcatagttgg

SEQ ID NO: 41562 - DNA, 20 bp, synthetic construct
  misc_feature 1..20: note = Description of Artificial Sequence: Synthetic oligonucleotide
  misc_feature 1..20: note = Target: SCN10A; (-) strand; PAM type: YTN; PAM sequence: TTA
  source 1..20: mol_type = other DNA
tatttccaactttgttcata

SEQ ID NO: 41563 - DNA, 20 bp, synthetic construct
  misc_feature 1..20: note = Description of Artificial Sequence: Synthetic oligonucleotide
  misc_feature 1..20: note = Target: SCN10A; (-) strand; PAM type: YTN; PAM sequence: TTT
  source 1..20: mol_type = other DNA
atatttccaactttgttcat

SEQ ID NO: 41564 - DNA, 20 bp, synthetic construct
  misc_feature 1..20: note = Description of Artificial Sequence: Synthetic oligonucleotide
  misc_feature 1..20: note = Target: SCN10A; (-) strand; PAM type: YTN; PAM sequence: CTT
  source 1..20: mol_type = other DNA
tatatttccaactttgttca

SEQ ID NO: 41565 - DNA, 20 bp, synthetic construct
  misc_feature 1..20: note = Description of Artificial Sequence: Synthetic oligonucleotide
  misc_feature 1..20: note = Target: SCN10A; (-) strand; PAM type: YTN; PAM sequence: TTC
  source 1..20: mol_type = other DNA
tttatatttccaactttgtt

SEQ ID NO: 41566 - DNA, 20 bp, synthetic construct
  misc_feature 1..20: note = Description of Artificial Sequence: Synthetic oligonucleotide
  misc_feature 1..20: note = Target: SCN10A; (-) strand; PAM type: YTN; PAM sequence: TTA
  source 1..20: mol_type = other DNA
gacatcatatagagggacat

SEQ ID NO: 41567 - DNA, 20 bp, synthetic construct
  misc_feature 1..20: note = Description of Artificial Sequence: Synthetic oligonucleotide
  misc_feature 1..20: note = Target: SCN10A; (-) strand; PAM type: YTN; PAM sequence: TTC
  source 1..20: mol_type = other DNA
aagttagacatcatatagag

SEQ ID NO: 41568 - DNA, 20 bp, synthetic construct
  misc_feature 1..20: note = Description of Artificial Sequence: Synthetic oligonucleotide
  misc_feature 1..20: note = Target: SCN10A; (-) strand; PAM type: YTN; PAM sequence: CTT
  source 1..20: mol_type = other DNA
caagttagacatcatataga

SEQ ID NO: 41569 - DNA, 20 bp, synthetic construct
  misc_feature 1..20: note = Description of Artificial Sequence: Synthetic oligonucleotide
  misc_feature 1..20: note = Target: SCN10A; (-) strand; PAM type: YTN; PAM sequence: CTC
  source 1..20: mol_type = other DNA
cccaggtccccaagaccaaa

SEQ ID NO: 41570 - DNA, 20 bp, synthetic construct
  misc_feature 1..20: note = Description of Artificial Sequence: Synthetic oligonucleotide
  misc_feature 1..20: note = Target: SCN10A; (-) strand; PAM type: YTN; PAM sequence: TTG
  source 1..20: mol_type = other DNA
gtacaaataaggctccccag

SEQ ID NO: 41571 - DNA, 20 bp, synthetic construct
  misc_feature 1..20: note = Description of Artificial Sequence: Synthetic oligonucleotide
  misc_feature 1..20: note = Target: SCN10A; (-) strand; PAM type: YTN; PAM sequence: TTT
  source 1..20: mol_type = other DNA
ggtacaaataaggctcccca

SEQ ID NO: 41572 - DNA, 20 bp, synthetic construct
  misc_feature 1..20: note = Description of Artificial Sequence: Synthetic oligonucleotide
  misc_feature 1..20: note = Target: SCN10A; (-) strand; PAM type: YTN; PAM sequence: CTT
  source 1..20: mol_type = other DNA
tggtacaaataaggctcccc

SEQ ID NO: 41573 - DNA, 20 bp, synthetic construct
  misc_feature 1..20: note = Description of Artificial Sequence: Synthetic oligonucleotide
  misc_feature 1..20: note = Target: SCN10A; (-) strand; PAM type: YTN; PAM sequence: TTG
  source 1..20: mol_type = other DNA
gtggaggcctttggtacaaa

SEQ ID NO: 41574 - DNA, 20 bp, synthetic construct
  misc_feature 1..20: note = Description of Artificial Sequence: Synthetic oligonucleotide
  misc_feature 1..20: note = Target: SCN10A; (-) strand; PAM type: YTN; PAM sequence: TTT
  source 1..20: mol_type = other DNA
ggtggaggcctttggtacaa

SEQ ID NO: 41575 - DNA, 20 bp, synthetic construct
  misc_feature 1..20: note = Description of Artificial Sequence: Synthetic oligonucleotide
  misc_feature 1..20: note = Target: SCN10A; (-) strand; PAM type: YTN; PAM sequence: CTT
  source 1..20: mol_type = other DNA
tggtggaggcctttggtaca

SEQ ID NO: 41576 - DNA, 20 bp, synthetic construct
  misc_feature 1..20: note = Description of Artificial Sequence: Synthetic oligonucleotide
  misc_feature 1..20: note = Target: SCN10A; (-) strand; PAM type: YTN; PAM sequence: CTC
  source 1..20: mol_type = other DNA
atctttggtggaggcctttg

SEQ ID NO: 41577 - DNA, 20 bp, synthetic construct
  misc_feature 1..20: note = Description of Artificial Sequence: Synthetic oligonucleotide
  misc_feature 1..20: note = Target: SCN10A; (-) strand; PAM type: YTN; PAM sequence: TTG
  source 1..20: mol_type = other DNA
cctcatctttggtggaggcc

SEQ ID NO: 41578 - DNA, 20 bp, synthetic construct
  misc_feature 1..20: note = Description of Artificial Sequence: Synthetic oligonucleotide
  misc_feature 1..20: note = Target: SCN10A; (-) strand; PAM type: YTN; PAM sequence: CTT
  source 1..20: mol_type = other DNA
gcctcatctttggtggaggc

SEQ ID NO: 41579 - DNA, 20 bp, synthetic construct
  misc_feature 1..20: note = Description of Artificial Sequence: Synthetic oligonucleotide
  misc_feature 1..20: note = Target: SCN10A; (-) strand; PAM type: YTN; PAM sequence: CTA
  source 1..20: mol_type = other DNA
aaggccttgcctcatctttg

SEQ ID NO: 41580 - DNA, 20 bp, synthetic construct
  misc_feature 1..20: note = Description of Artificial Sequence: Synthetic oligonucleotide
  misc_feature 1..20: note = Target: SCN10A; (-) strand; PAM type: YTN; PAM sequence: TTA
  source 1..20: mol_type = other DNA
cctaaaggccttgcctcatc

SEQ ID NO: 41581 - DNA, 20 bp, synthetic construct
  misc_feature 1..20: note = Description of Artificial Sequence: Synthetic oligonucleotide
  misc_feature 1..20: note = Target: SCN10A; (-) strand; PAM type: YTN; PAM sequence: CTT
  source 1..20: mol_type = other DNA
acctaaaggccttgcctcat

SEQ ID NO: 41582 - DNA, 20 bp, synthetic construct
  misc_feature 1..20: note = Description of Artificial Sequence: Synthetic oligonucleotide
  misc_feature 1..20: note = Target: SCN10A; (-) strand; PAM type: YTN; PAM sequence: CTC
  source 1..20: mol_type = other DNA
ttacctaaaggccttgcctc

SEQ ID NO: 41583 - DNA, 20 bp, synthetic construct
  misc_feature 1..20: note = Description of Artificial Sequence: Synthetic oligonucleotide
  misc_feature 1..20: note = Target: SCN10A; (-) strand; PAM type: YTN; PAM sequence: CTC
  source 1..20: mol_type = other DNA
tcttacctaaaggccttgcc

SEQ ID NO: 41584 - DNA, 20 bp, synthetic construct
  misc_feature 1..20: note = Description of Artificial Sequence: Synthetic oligonucleotide
  misc_feature 1..20: note = Target: SCN10A; (-) strand; PAM type: YTN; PAM sequence: TTG
  source 1..20: mol_type = other DNA
aaccctctcttacctaaagg

SEQ ID NO: 41585 - DNA, 20 bp, synthetic construct
  misc_feature 1..20: note = Description of Artificial Sequence: Synthetic oligonucleotide
  misc_feature 1..20: note = Target: SCN10A; (-) strand; PAM type: YTN; PAM sequence: CTG
  source 1..20: mol_type = other DNA
tgagatgttgaaccctctct

SEQ ID NO: 41586 - DNA, 20 bp, synthetic construct
  misc_feature 1..20: note = Description of Artificial Sequence: Synthetic oligonucleotide
  misc_feature 1..20: note = Target: SCN10A; (-) strand; PAM type: YTN; PAM sequence: TTC
  source 1..20: mol_type = other DNA
ctgtgagatgttgaaccctc

SEQ ID NO: 41587 - DNA, 20 bp, synthetic construct
  misc_feature 1..20: note = Description of Artificial Sequence: Synthetic oligonucleotide
  misc_feature 1..20: note = Target: SCN10A; (-) strand; PAM type: YTN; PAM sequence: TTT
  source 1..20: mol_type = other DNA
cctgtgagatgttgaaccct

SEQ ID NO: 41588 - DNA, 20 bp, synthetic construct
  misc_feature 1..20: note = Description of Artificial Sequence: Synthetic oligonucleotide
  misc_feature 1..20: note = Target: SCN10A; (-) strand; PAM type: YTN; PAM sequence: TTT
  source 1..20: mol_type = other DNA
tcctgtgagatgttgaaccc

SEQ ID NO: 41589 - DNA, 20 bp, synthetic construct
  misc_feature 1..20: note = Description of Artificial Sequence: Synthetic oligonucleotide
  misc_feature 1..20: note = Target: SCN10A; (-) strand; PAM type: YTN; PAM sequence: TTT
  source 1..20: mol_type = other DNA
ttcctgtgagatgttgaacc

SEQ ID NO: 41590 - DNA, 20 bp, synthetic construct
  misc_feature 1..20: note = Description of Artificial Sequence: Synthetic oligonucleotide
  misc_feature 1..20: note = Target: SCN10A; (-) strand; PAM type: YTN; PAM sequence: CTC
  source 1..20: mol_type = other DNA
accatttttcctgtgagatg

SEQ ID NO: 41591 - DNA, 20 bp, synthetic construct
  misc_feature 1..20: note = Description of Artificial Sequence: Synthetic oligonucleotide
  misc_feature 1..20: note = Target: SCN10A; (-) strand; PAM type: YTN; PAM sequence: CTA
  source 1..20: mol_type = other DNA
catccctcaccatttttcct

SEQ ID NO: 41592 - DNA, 20 bp, synthetic construct
  misc_feature 1..20: note = Description of Artificial Sequence: Synthetic oligonucleotide
  misc_feature 1..20: note = Target: SCN10A; (-) strand; PAM type: YTN; PAM sequence: CTG
  source 1..20: mol_type = other DNA
ctacatccctcaccattttt

SEQ ID NO: 41593 - DNA, 20 bp, synthetic construct
  misc_feature 1..20: note = Description of Artificial Sequence: Synthetic oligonucleotide
  misc_feature 1..20: note = Target: SCN10A; (-) strand; PAM type: YTN; PAM sequence: TTG
  source 1..20: mol_type = other DNA
ctgctacatccctcaccatt

SEQ ID NO: 41594 - DNA, 20 bp, synthetic construct
  misc_feature 1..20: note = Description of Artificial Sequence: Synthetic oligonucleotide
  misc_feature 1..20: note = Target: SCN10A; (-) strand; PAM type: YTN; PAM sequence: CTT
  source 1..20: mol_type = other DNA
gctgctacatccctcaccat

SEQ ID NO: 41595 - DNA, 20 bp, synthetic construct
  misc_feature 1..20: note = Description of Artificial Sequence: Synthetic oligonucleotide
  misc_feature 1..20: note = Target: SCN10A; (-) strand; PAM type: YTN; PAM sequence: CTG
  source 1..20: mol_type = other DNA
gcaaggagcgagagcttgct

SEQ ID NO: 41596 - DNA, 20 bp, synthetic construct
  misc_feature 1..20: note = Description of Artificial Sequence: Synthetic oligonucleotide
  misc_feature 1..20: note = Target: SCN10A; (-) strand; PAM type: YTN; PAM sequence: TTG
  source 1..20: mol_type = other DNA
tgacccatgtgcataacaac

SEQ ID NO: 41597 - DNA, 20 bp, synthetic construct
  misc_feature 1..20: note = Description of Artificial Sequence: Synthetic oligonucleotide
  misc_feature 1..20: note = Target: SCN10A; (-) strand; PAM type: YTN; PAM sequence: TTC
  source 1..20: mol_type = other DNA
caacacaatattgtgaccca

SEQ ID NO: 41598 - DNA, 20 bp, synthetic construct
  misc_feature 1..20: note = Description of Artificial Sequence: Synthetic oligonucleotide
  misc_feature 1..20: note = Target: SCN10A; (-) strand; PAM type: YTN; PAM sequence: TTT
  source 1..20: mol_type = other DNA
ccaacacaatattgtgaccc

SEQ ID NO: 41599 - DNA, 20 bp, synthetic construct
  misc_feature 1..20: note = Description of Artificial Sequence: Synthetic oligonucleotide
  misc_feature 1..20: note = Target: SCN10A; (-) strand; PAM type: YTN; PAM sequence: CTT
  source 1..20: mol_type = other DNA
tccaacacaatattgtgacc

SEQ ID NO: 41600 - DNA, 20 bp, synthetic construct
  misc_feature 1..20: note = Description of Artificial Sequence: Synthetic oligonucleotide
  misc_feature 1..20: note = Target: SCN10A; (-) strand; PAM type: YTN; PAM sequence: CTC
  source 1..20: mol_type = other DNA
tttccaacacaatattgtga

SEQ ID NO: 41601 - DNA, 20 bp, synthetic construct
  misc_feature 1..20: note = Description of Artificial Sequence: Synthetic oligonucleotide
  misc_feature 1..20: note = Target: SCN10A; (-) strand; PAM type: YTN; PAM sequence: TTC
  source 1..20: mol_type = other DNA
ctctttccaacacaatattg

SEQ ID NO: 41602 - DNA, 20 bp, synthetic construct
  misc_feature 1..20: note = Description of Artificial Sequence: Synthetic oligonucleotide
  misc_feature 1..20: note = Target: SCN10A; (-) strand; PAM type: YTN; PAM sequence: CTT
  source 1..20: mol_type = other DNA
cctctttccaacacaatatt

SEQ ID NO: 41603 - DNA, 20 bp, synthetic construct
  misc_feature 1..20: note = Description of Artificial Sequence: Synthetic oligonucleotide
  misc_feature 1..20: note = Target: SCN10A; (-) strand; PAM type: YTN; PAM sequence: TTC
  source 1..20: mol_type = other DNA
ttcctctttccaacacaata

SEQ ID NO: 41604 - DNA, 20 bp, synthetic construct
  misc_feature 1..20: note = Description of Artificial Sequence: Synthetic oligonucleotide
  misc_feature 1..20: note = Target: SCN10A; (-) strand; PAM type: YTN; PAM sequence: TTT
  source 1..20: mol_type = other DNA
cttcctctttccaacacaat

SEQ ID NO: 41605 - DNA, 20 bp, synthetic construct
  misc_feature 1..20: note = Description of Artificial Sequence: Synthetic oligonucleotide
  misc_feature 1..20: note = Target: SCN10A; (-) strand; PAM type: YTN; PAM sequence: CTT
  source 1..20: mol_type = other DNA
tcttcctctttccaacacaa

SEQ ID NO: 41606 - DNA, 20 bp, synthetic construct
  misc_feature 1..20: note = Description of Artificial Sequence: Synthetic oligonucleotide
  misc_feature 1..20: note = Target: SCN10A; (-) strand; PAM type: YTN; PAM sequence: CTA
  source 1..20: mol_type = other DNA
ctttcttcctctttccaaca

SEQ ID NO: 41607 - DNA, 20 bp, synthetic construct
  misc_feature 1..20: note = Description of Artificial Sequence: Synthetic oligonucleotide
  misc_feature 1..20: note = Target: SCN10A; (-) strand; PAM type: YTN; PAM sequence: TTC
  source 1..20: mol_type = other DNA
tactttcttcctctttccaa

SEQ ID NO: 41608 - DNA, 20 bp, synthetic construct
  misc_feature 1..20: note = Description of Artificial Sequence: Synthetic oligonucleotide
  misc_feature 1..20: note = Target: SCN10A; (-) strand; PAM type: YTN; PAM sequence: CTT
  source 1..20: mol_type = other DNA
ctactttcttcctctttcca

SEQ ID NO: 41609 - DNA, 20 bp, synthetic construct
  misc_feature 1..20: note = Description of Artificial Sequence: Synthetic oligonucleotide
  misc_feature 1..20: note = Target: SCN10A; (-) strand; PAM type: YTN; PAM sequence: TTC
  source 1..20: mol_type = other DNA
ccaagtccccttctactttc

SEQ ID NO: 41610 - DNA, 20 bp, synthetic construct
  misc_feature 1..20: note = Description of Artificial Sequence: Synthetic oligonucleotide
  misc_feature 1..20: note = Target: SCN10A; (-) strand; PAM type: YTN; PAM sequence: TTT
  source 1..20: mol_type = other DNA
cccaagtccccttctacttt

SEQ ID NO: 41611 - DNA, 20 bp, synthetic construct
  misc_feature 1..20: note = Description of Artificial Sequence: Synthetic oligonucleotide
  misc_feature 1..20: note = Target: SCN10A; (-) strand; PAM type: YTN; PAM sequence: TTA
  source 1..20: mol_type = other DNA
tttcccaagtccccttctac

SEQ ID NO: 41612 - DNA, 20 bp, synthetic construct
  misc_feature 1..20: note = Description of Artificial Sequence: Synthetic oligonucleotide
  misc_feature 1..20: note = Target: SCN10A; (-) strand; PAM type: YTN; PAM sequence: TTA
  source 1..20: mol_type = other DNA
taattatttcccaagtcccc

SEQ ID NO: 41613 - DNA, 20 bp, synthetic construct
  misc_feature 1..20: note = Description of Artificial Sequence: Synthetic oligonucleotide
  misc_feature 1..20: note = Target: SCN10A; (-) strand; PAM type: YTN; PAM sequence: TTA
  source 1..20: mol_type = other DNA
taatccaaaattataattat

SEQ ID NO: 41614 - DNA, 20 bp, synthetic construct
  misc_feature 1..20: note = Description of Artificial Sequence: Synthetic oligonucleotide
  misc_feature 1..20: note = Target: SCN10A; (-) strand; PAM type: YTN; PAM sequence: TTT
  source 1..20: mol_type = other DNA
ataatccaaaattataatta

SEQ ID NO: 41615 - DNA, 20 bp, synthetic construct
  misc_feature 1..20: note = Description of Artificial Sequence: Synthetic oligonucleotide
  misc_feature 1..20: note = Target: SCN10A; (-) strand; PAM type: YTN; PAM sequence: TTT
  source 1..20: mol_type = other DNA
tataatccaaaattataatt

SEQ ID NO: 41616 - DNA, 20 bp, synthetic construct
  misc_feature 1..20: note = Description of Artificial Sequence: Synthetic oligonucleotide
  misc_feature 1..20: note = Target: SCN10A; (-) strand; PAM type: YTN; PAM sequence: TTC
  source 1..20: mol_type = other DNA
cacaaagattttataatcca

SEQ ID NO: 41617 - DNA, 20 bp, synthetic construct
  misc_feature 1..20: note = Description of Artificial Sequence: Synthetic oligonucleotide
  misc_feature 1..20: note = Target: SCN10A; (-) strand; PAM type: YTN; PAM sequence: CTT
  source 1..20: mol_type = other DNA
ccacaaagattttataatcc

SEQ ID NO: 41618 - DNA, 20 bp, synthetic construct
  misc_feature 1..20: note = Description of Artificial Sequence: Synthetic oligonucleotide
  misc_feature 1..20: note = Target: SCN10A; (-) strand; PAM type: YTN; PAM sequence: TTC
  source 1..20: mol_type = other DNA
acagaaggtcttccacaaag

SEQ ID NO: 41619 - DNA, 20 bp, synthetic construct
  misc_feature 1..20: note = Description of Artificial Sequence: Synthetic oligonucleotide
  misc_feature 1..20: note = Target: SCN10A; (-) strand; PAM type: YTN; PAM sequence: CTG
  source 1..20: mol_type = other DNA
gaaattcacagaaggtcttc

SEQ ID NO: 41620 - DNA, 20 bp, synthetic construct
  misc_feature 1..20: note = Description of Artificial Sequence: Synthetic oligonucleotide
  misc_feature 1..20: note = Target: SCN10A; (-) strand; PAM type: YTN; PAM sequence: TTA
  source 1..20: mol_type = other DNA
aactggaaattcacagaagg

SEQ ID NO: 41621 - DNA, 20 bp, synthetic construct
  misc_feature 1..20: note = Description of Artificial Sequence: Synthetic oligonucleotide
  misc_feature 1..20: note = Target: SCN10A; (-) strand; PAM type: YTN; PAM sequence: CTA
  source 1..20: mol_type = other DNA
gttaaactggaaattcacag

SEQ ID NO: 41622 - DNA, 20 bp, synthetic construct
  misc_feature 1..20: note = Description of Artificial Sequence: Synthetic oligonucleotide
  misc_feature 1..20: note = Target: SCN10A; (-) strand; PAM type: YTN; PAM sequence: CTA
  source 1..20: mol_type = other DNA
cacgatgggaacatgtccta

SEQ ID NO: 41623 - DNA, 20 bp, synthetic construct
  misc_feature 1..20: note = Description of Artificial Sequence: Synthetic oligonucleotide
  misc_feature 1..20: note = Target: SCN10A; (-) strand; PAM type: YTN; PAM sequence: TTA
  source 1..20: mol_type = other DNA
ccagagtatgtagacaaata

SEQ ID NO: 41624 - DNA, 20 bp, synthetic construct
  misc_feature 1..20: note = Description of Artificial Sequence: Synthetic oligonucleotide
  misc_feature 1..20: note = Target: SCN10A; (-) strand; PAM type: YTN; PAM sequence: TTT
  source 1..20: mol_type = other DNA
accagagtatgtagacaaat

SEQ ID NO: 41625 - DNA, 20 bp, synthetic construct
  misc_feature 1..20: note = Description of Artificial Sequence: Synthetic oligonucleotide
  misc_feature 1..20: note = Target: SCN10A; (-) strand; PAM type: YTN; PAM sequence: TTT
  source 1..20: mol_type = other DNA
taccagagtatgtagacaaa

SEQ ID NO: 41626 - DNA, 20 bp, synthetic construct
  misc_feature 1..20: note = Description of Artificial Sequence: Synthetic oligonucleotide
  misc_feature 1..20: note = Target: SCN10A; (-) strand; PAM type: YTN; PAM sequence: CTG
  source 1..20: mol_type = other DNA
gcagaaaattttaccagagt

SEQ ID NO: 41627 - DNA, 20 bp, synthetic construct
  misc_feature 1..20: note = Description of Artificial Sequence: Synthetic oligonucleotide
  misc_feature 1..20: note = Target: SCN10A; (-) strand; PAM type: YTN; PAM sequence: TTG
  source 1..20: mol_type = other DNA
tctggcagaaaattttacca

SEQ ID NO: 41628 - DNA, 20 bp, synthetic construct
  misc_feature 1..20: note = Description of Artificial Sequence: Synthetic oligonucleotide
  misc_feature 1..20: note = Target: SCN10A; (-) strand; PAM type: YTN; PAM sequence: CTG
  source 1..20: mol_type = other DNA
tagaccagttgtctggcaga

SEQ ID NO: 41629 - DNA, 20 bp, synthetic construct
  misc_feature 1..20: note = Description of Artificial Sequence: Synthetic oligonucleotide
  misc_feature 1..20: note = Target: SCN10A; (-) strand; PAM type: YTN; PAM sequence: TTA
  source 1..20: mol_type = other DNA
aaatgtgctgtagaccagtt

SEQ ID NO: 41630 - DNA, 20 bp, synthetic construct
  misc_feature 1..20: note = Description of Artificial Sequence: Synthetic oligonucleotide
  misc_feature 1..20: note = Target: SCN10A; (-) strand; PAM type: YTN; PAM sequence: CTG
  source 1..20: mol_type = other DNA
gagcaaattaaaatgtgctg

SEQ ID NO: 41631 - DNA, 20 bp, synthetic construct
  misc_feature 1..20: note = Description of Artificial Sequence: Synthetic oligonucleotide
  misc_feature 1..20: note = Target: SCN10A; (-) strand; PAM type: YTN; PAM sequence: TTA
  source 1..20: mol_type = other DNA
aaataagatcctggagcaaa

SEQ ID NO: 41632 - DNA, 20 bp, synthetic construct
  misc_feature 1..20: note = Description of Artificial Sequence: Synthetic oligonucleotide
  misc_feature 1..20: note = Target: SCN10A; (-) strand; PAM type: YTN; PAM sequence: CTT
  source 1..20: mol_type = other DNA
aaaataagatcctggagcaa

SEQ ID NO: 41633 - DNA, 20 bp, synthetic construct
  misc_feature 1..20: note = Description of Artificial Sequence: Synthetic oligonucleotide
  misc_feature 1..20: note = Target: SCN10A; (-) strand; PAM type: YTN; PAM sequence: CTC
  source 1..20: mol_type = other DNA
ccttaaaataagatcctgga

SEQ ID NO: 41634 - DNA, 20 bp, synthetic construct
  misc_feature 1..20: note = Description of Artificial Sequence: Synthetic oligonucleotide
  misc_feature 1..20: note = Target: SCN10A; (-) strand; PAM type: YTN; PAM sequence: TTC
  source 1..20: mol_type = other DNA
tcccttaaaataagatcctg

SEQ ID NO: 41635 - DNA, 20 bp, synthetic construct
  misc_feature 1..20: note = Description of Artificial Sequence: Synthetic oligonucleotide
  misc_feature 1..20: note = Target: SCN10A; (-) strand; PAM type: YTN; PAM sequence: TTA
  source 1..20: mol_type = other DNA
caagtacgaggaaccattct

SEQ ID NO: 41636 - DNA, 20 bp, synthetic construct
  misc_feature 1..20: note = Description of Artificial Sequence: Synthetic oligonucleotide
  misc_feature 1..20: note = Target: SCN10A; (-) strand; PAM type: YTN; PAM sequence: TTG
  source 1..20: mol_type = other DNA
ttacaagtacgaggaaccat

SEQ ID NO: 41637 - DNA, 20 bp, synthetic construct
  misc_feature 1..20: note = Description of Artificial Sequence: Synthetic oligonucleotide
  misc_feature 1..20: note = Target: SCN10A; (-) strand; PAM type: YTN; PAM sequence: CTA
  source 1..20: mol_type = other DNA
attgttacaagtacgaggaa

SEQ ID NO: 41638 - DNA, 20 bp, synthetic construct
  misc_feature 1..20: note = Description of Artificial Sequence: Synthetic oligonucleotide
  misc_feature 1..20: note = Target: SCN10A; (-) strand; PAM type: YTN; PAM sequence: TTG
  source 1..20: mol_type = other DNA
agtatctaattgttacaagt

SEQ ID NO: 41639 - DNA, 20 bp, synthetic construct
  misc_feature 1..20: note = Description of Artificial Sequence: Synthetic oligonucleotide
  misc_feature 1..20: note = Target: SCN10A; (-) strand; PAM type: YTN; PAM sequence: TTC
  source 1..20: mol_type = other DNA
ccaccaacaagaggtgattg

SEQ ID NO: 41640 - DNA, 20 bp, synthetic construct
  misc_feature 1..20: note = Description of Artificial Sequence: Synthetic oligonucleotide
  misc_feature 1..20: note = Target: SCN10A; (-) strand; PAM type: YTN; PAM sequence: TTT
  source 1..20: mol_type = other DNA
cccaccaacaagaggtgatt

SEQ ID NO: 41641 - DNA, 20 bp, synthetic construct
  misc_feature 1..20: note = Description of Artificial Sequence: Synthetic oligonucleotide
  misc_feature 1..20: note = Target: SCN10A; (-) strand; PAM type: YTN; PAM sequence: CTT
  source 1..20: mol_type = other DNA
tcccaccaacaagaggtgat

SEQ ID NO: 41642 - DNA, 20 bp, synthetic construct
  misc_feature 1..20: note = Description of Artificial Sequence: Synthetic oligonucleotide
  misc_feature 1..20: note = Target: SCN10A; (-) strand; PAM type: YTN; PAM sequence: TTC
  source 1..20: mol_type = other DNA
tttcccaccaacaagaggtg

SEQ ID NO: 41643 - DNA, 20 bp, synthetic construct
  misc_feature 1..20: note = Description of Artificial Sequence: Synthetic oligonucleotide
  misc_feature 1..20: note = Target: SCN10A; (-) strand; PAM type: YTN; PAM sequence: CTT
  source 1..20: mol_type = other DNA
ctttcccaccaacaagaggt

SEQ ID NO: 41644 - DNA, 20 bp, synthetic construct
  misc_feature 1..20: note = Description of Artificial Sequence: Synthetic oligonucleotide
  misc_feature 1..20: note = Target: SCN10A; (-) strand; PAM type: YTN; PAM sequence: TTC
  source 1..20: mol_type = other DNA
ttctttcccaccaacaagag

SEQ ID NO: 41645 - DNA, 20 bp, synthetic construct
  misc_feature 1..20: note = Description of Artificial Sequence: Synthetic oligonucleotide
  misc_feature 1..20: note = Target: SCN10A; (-) strand; PAM type: YTN; PAM sequence: TTT
  source 1..20: mol_type = other DNA
cttctttcccaccaacaaga

SEQ ID NO: 41646 - DNA, 20 bp, synthetic construct
  misc_feature 1..20: note = Description of Artificial Sequence: Synthetic oligonucleotide
  misc_feature 1..20: note = Target: SCN10A; (-) strand; PAM type: YTN; PAM sequence: CTT
  source 1..20: mol_type = other DNA
tcttctttcccaccaacaag

SEQ ID NO: 41647 - DNA, 20 bp, synthetic construct
  misc_feature 1..20: note = Description of Artificial Sequence: Synthetic oligonucleotide
  misc_feature 1..20: note = Target: SCN10A; (-) strand; PAM type: YTN; PAM sequence: CTC
  source 1..20: mol_type = other DNA
cctttcttctttcccaccaa

SEQ ID NO: 41648 - DNA, 20 bp, synthetic construct
  misc_feature 1..20: note = Description of Artificial Sequence: Synthetic oligonucleotide
  misc_feature 1..20: note = Target: SCN10A; (-) strand; PAM type: YTN; PAM sequence: TTA
  source 1..20: mol_type = other DNA
cctccctttcttctttccca

SEQ ID NO: 41649 - DNA, 20 bp, synthetic construct
  misc_feature 1..20: note = Description of Artificial Sequence: Synthetic oligonucleotide
  misc_feature 1..20: note = Target: SCN10A; (-) strand; PAM type: YTN; PAM sequence: CTT
  source 1..20: mol_type = other DNA
acctccctttcttctttccc

SEQ ID NO: 41650 - DNA, 20 bp, synthetic construct
  misc_feature 1..20: note = Description of Artificial Sequence: Synthetic oligonucleotide
  misc_feature 1..20: note = Target: SCN10A; (-) strand; PAM type: YTN; PAM sequence: CTC
  source 1..20: mol_type = other DNA
cttacctccctttcttcttt

SEQ ID NO: 41651 - DNA, 20 bp, synthetic construct
  misc_feature 1..20: note = Description of Artificial Sequence: Synthetic oligonucleotide
  misc_feature 1..20: note = Target: SCN10A; (-) strand; PAM type: YTN; PAM sequence: CTC
  source 1..20: mol_type = other DNA
tccttacctccctttcttct

SEQ ID NO: 41652 - DNA, 20 bp, synthetic construct
  misc_feature 1..20: note = Description of Artificial Sequence: Synthetic oligonucleotide
  misc_feature 1..20: note = Target: SCN10A; (-) strand; PAM type: YTN; PAM sequence: CTC
  source 1..20: mol_type = other DNA
tctccttacctccctttctt

SEQ ID NO: 41653 - DNA, 20 bp, synthetic construct
  misc_feature 1..20: note = Description of Artificial Sequence: Synthetic oligonucleotide
  misc_feature 1..20: note = Target: SCN10A; (-) strand; PAM type: YTN; PAM sequence: CTA
  source 1..20: mol_type = other DNA
ccctctctccttacctccct

SEQ ID NO: 41654 - DNA, 20 bp, synthetic construct
  misc_feature 1..20: note = Description of Artificial Sequence: Synthetic oligonucleotide
  misc_feature 1..20: note = Target: SCN10A; (-) strand; PAM type: YTN; PAM sequence: TTC
  source 1..20: mol_type = other DNA
taccctctctccttacctcc

SEQ ID NO: 41655 - DNA, 20 bp, synthetic construct
  misc_feature 1..20: note = Description of Artificial Sequence: Synthetic oligonucleotide
  misc_feature 1..20: note = Target: SCN10A; (-) strand; PAM type: YTN; PAM sequence: TTT
  source 1..20: mol_type = other DNA
ctaccctctctccttacctc

SEQ ID NO: 41656 - DNA, 20 bp, synthetic construct
  misc_feature 1..20: note = Description of Artificial Sequence: Synthetic oligonucleotide
  misc_feature 1..20: note = Target: SCN10A; (-) strand; PAM type: YTN; PAM sequence: CTT
  source 1..20: mol_type = other DNA
tctaccctctctccttacct

SEQ ID NO: 41657 - DNA, 20 bp, synthetic construct
  misc_feature 1..20: note = Description of Artificial Sequence: Synthetic oligonucleotide
  misc_feature 1..20: note = Target: SCN10A; (-) strand; PAM type: YTN; PAM sequence: CTG
  source 1..20: mol_type = other DNA
gaaaataagcagaaaaaacc

SEQ ID NO: 41658 - DNA, 20 bp, synthetic construct
  misc_feature 1..20: note = Description of Artificial Sequence: Synthetic oligonucleotide
  misc_feature 1..20: note = Target: SCN10A; (-) strand; PAM type: YTN; PAM sequence: TTA
  source 1..20: mol_type = other DNA
tagagctggaaaataagcag

SEQ ID NO: 41659 - DNA, 20 bp, synthetic construct
  misc_feature 1..20: note = Description of Artificial Sequence: Synthetic oligonucleotide
  misc_feature 1..20: note = Target: SCN10A; (-) strand; PAM type: YTN; PAM sequence: CTT
  source 1..20: mol_type = other DNA
atagagctggaaaataagca

SEQ ID NO: 41660 - DNA, 20 bp, synthetic construct
  misc_feature 1..20: note = Description of Artificial Sequence: Synthetic oligonucleotide
  misc_feature 1..20: note = Target: SCN10A; (-) strand; PAM type: YTN; PAM sequence: CTG
  source 1..20: mol_type = other DNA
gggcaggaatcccttataga

SEQ ID NO: 41661 - DNA, 20 bp, synthetic construct
  misc_feature 1..20: note = Description of Artificial Sequence: Synthetic oligonucleotide
  misc_feature 1..20: note = Target: SCN10A; (-) strand; PAM type: YTN; PAM sequence: TTA
  source 1..20: mol_type = other DNA
cagggtagcaccatccgctg

SEQ ID NO: 41662 - DNA, 20 bp, synthetic construct
  misc_feature 1..20: note = Description of Artificial Sequence: Synthetic oligonucleotide
  misc_feature 1..20: note = Target: SCN10A; (-) strand; PAM type: YTN; PAM sequence: CTT
  source 1..20: mol_type = other DNA
acagggtagcaccatccgct

SEQ ID NO: 41663 - DNA, 20 bp, synthetic construct
  misc_feature 1..20: note = Description of Artificial Sequence: Synthetic oligonucleotide
  misc_feature 1..20: note = Target: SCN10A; (-) strand; PAM type: YTN; PAM sequence: CTG
  source 1..20: mol_type = other DNA
tggcttacagggtagcacca

SEQ ID NO: 41664 - DNA, 20 bp, synthetic construct
  misc_feature 1..20: note = Description of Artificial Sequence: Synthetic oligonucleotide
  misc_feature 1..20: note = Target: SCN10A; (-) strand; PAM type: YTN; PAM sequence: TTC
  source 1..20: mol_type = other DNA
ctgtggcttacagggtagca

SEQ ID NO: 41665 - DNA, 20 bp, synthetic construct
  misc_feature 1..20: note = Description of Artificial Sequence: Synthetic oligonucleotide
  misc_feature 1..20: note = Target: SCN10A; (-) strand; PAM type: YTN; PAM sequence: CTA
  source 1..20: mol_type = other DNA
ccagttcctgtggcttacag

SEQ ID NO: 41666 - DNA, 20 bp, synthetic construct
  misc_feature 1..20: note = Description of Artificial Sequence: Synthetic oligonucleotide
  misc_feature 1..20: note = Target: SCN10A; (-) strand; PAM type: YTN; PAM sequence: TTA
  source 1..20: mol_type = other DNA
actaccagttcctgtggctt

SEQ ID NO: 41667 - DNA, 20 bp, synthetic construct
  misc_feature 1..20: note = Description of Artificial Sequence: Synthetic oligonucleotide
  misc_feature 1..20: note = Target: SCN10A; (-) strand; PAM type: YTN; PAM sequence: CTT
  source 1..20: mol_type = other DNA
aactaccagttcctgtggct

SEQ ID NO: 41668 - DNA, 20 bp, synthetic construct
  misc_feature 1..20: note = Description of Artificial Sequence: Synthetic oligonucleotide
  misc_feature 1..20: note = Target: SCN10A; (-) strand; PAM type: YTN; PAM sequence: CTA
  source 1..20: mol_type = other DNA
tgatggggatatcttaacta

SEQ ID NO: 41669 - DNA, 20 bp, synthetic construct
  misc_feature 1..20: note = Description of Artificial Sequence: Synthetic oligonucleotide
  misc_feature 1..20: note = Target: SCN10A; (-) strand; PAM type: YTN; PAM sequence: TTC
  source 1..20: mol_type = other DNA
tatgatggggatatcttaac

SEQ ID NO: 41670 - DNA, 20 bp, synthetic construct
  misc_feature 1..20: note = Description of Artificial Sequence: Synthetic oligonucleotide
  misc_feature 1..20: note = Target: SCN10A; (-) strand; PAM type: YTN; PAM sequence: TTA
  source 1..20: mol_type = other DNA
gttctatgatggggatatct

SEQ ID NO: 41671 - DNA, 20 bp, synthetic construct
  misc_feature 1..20: note = Description of Artificial Sequence: Synthetic oligonucleotide
  misc_feature 1..20: note = Target: SCN10A; (-) strand; PAM type: YTN; PAM sequence: CTT
  source 1..20: mol_type = other DNA
agttctatgatggggatatc

SEQ ID NO: 41672 - DNA, 20 bp, synthetic construct
  misc_feature 1..20: note = Description of Artificial Sequence: Synthetic oligonucleotide
  misc_feature 1..20: note = Target: SCN10A; (-) strand; PAM type: YTN; PAM sequence: TTG
  source 1..20: mol_type = other DNA
tgtatcagtaatatagaaat

SEQ ID NO: 41673 - DNA, 20 bp, synthetic construct
  misc_feature 1..20: note = Description of Artificial Sequence: Synthetic oligonucleotide
  misc_feature 1..20: note = Target: SCN10A; (-) strand; PAM type: YTN; PAM sequence: TTT
  source 1..20: mol_type = other DNA
gtgtatcagtaatatagaaa

SEQ ID NO: 41674 - DNA, 20 bp, synthetic construct
  misc_feature 1..20: note = Description of Artificial Sequence: Synthetic oligonucleotide
  misc_feature 1..20: note = Target: SCN10A; (-) strand; PAM type: YTN; PAM sequence: TTG
  source 1..20: mol_type = other DNA
tttgtgtatcagtaatatag

SEQ ID NO: 41675 - DNA, 20 bp, synthetic construct
  misc_feature 1..20: note = Description of Artificial Sequence: Synthetic oligonucleotide
  misc_feature 1..20: note = Target: SCN10A; (-) strand; PAM type: YTN; PAM sequence: CTT
  source 1..20: mol_type = other DNA
gtttgtgtatcagtaatata

SEQ ID NO: 41676 - DNA, 20 bp, synthetic construct
  misc_feature 1..20: note = Description of Artificial Sequence: Synthetic oligonucleotide
  misc_feature 1..20: note = Target: SCN10A; (-) strand; PAM type: YTN; PAM sequence: TTA
  source 1..20: mol_type = other DNA
aagaagggagcttgtttgtg

SEQ ID NO: 41677 - DNA, 20 bp, synthetic construct
  misc_feature 1..20: note = Description of Artificial Sequence: Synthetic oligonucleotide
  misc_feature 1..20: note = Target: SCN10A; (-) strand; PAM type: YTN; PAM sequence: TTA
  source 1..20: mol_type = other DNA
tattaaagaagggagcttgt

SEQ ID NO: 41678 - DNA, 20 bp, synthetic construct
  misc_feature 1..20: note = Description of Artificial Sequence: Synthetic oligonucleotide
  misc_feature 1..20: note = Target: SCN10A; (-) strand; PAM type: YTN; PAM sequence: TTT
  source 1..20: mol_type = other DNA
atattaaagaagggagcttg

SEQ ID NO: 41679 - DNA, 20 bp, synthetic construct
  misc_feature 1..20: note = Description of Artificial Sequence: Synthetic oligonucleotide
  misc_feature 1..20: note = Target: SCN10A; (-) strand; PAM type: YTN; PAM sequence: TTT
  source 1..20: mol_type = other DNA
tatattaaagaagggagctt

SEQ ID NO: 41680 - DNA, 20 bp, synthetic construct
  misc_feature 1..20: note = Description of Artificial Sequence: Synthetic oligonucleotide
  misc_feature 1..20: note = Target: SCN10A; (-) strand; PAM type: YTN; PAM sequence: TTG
  source 1..20: mol_type = other DNA
attttatattaaagaaggga

SEQ ID NO: 41681 - DNA, 20 bp, synthetic construct
  misc_feature 1..20: note = Description of Artificial Sequence: Synthetic oligonucleotide
  misc_feature 1..20: note = Target: SCN10A; (-) strand; PAM type: YTN; PAM sequence: TTT
  source 1..20: mol_type = other DNA
gattttatattaaagaaggg

SEQ ID NO: 41682 - DNA, 20 bp, synthetic construct
  misc_feature 1..20: note = Description of Artificial Sequence: Synthetic oligonucleotide
  misc_feature 1..20: note = Target: SCN10A; (-) strand; PAM type: YTN; PAM sequence: TTT
  source 1..20: mol_type = other DNA
tgattttatattaaagaagg

SEQ ID NO: 41683 - DNA, 20 bp, synthetic construct
  misc_feature 1..20: note = Description of Artificial Sequence: Synthetic oligonucleotide
  misc_feature 1..20: note = Target: SCN10A; (-) strand; PAM type: YTN; PAM sequence: CTA
  source 1..20: mol_type = other DNA
ttttgattttatattaaaga

SEQ ID NO: 41684 - DNA, 20 bp, synthetic construct
  misc_feature 1..20: note = Description of Artificial Sequence: Synthetic oligonucleotide
  misc_feature 1..20: note = Target: SCN10A; (-) strand; PAM type: YTN; PAM sequence: TTC
  source 1..20: mol_type = other DNA
caaaggctattttgatttta

SEQ ID NO: 41685 - DNA, 20 bp, synthetic construct
  misc_feature 1..20: note = Description of Artificial Sequence: Synthetic oligonucleotide
  misc_feature 1..20: note = Target: SCN10A; (-) strand; PAM type: YTN; PAM sequence: TTC
  source 1..20: mol_type = other DNA
caaaatgaaagattccaaag

SEQ ID NO: 41686 - DNA, 20 bp, synthetic construct
  misc_feature 1..20: note = Description of Artificial Sequence: Synthetic oligonucleotide
  misc_feature 1..20: note = Target: SCN10A; (-) strand; PAM type: YTN; PAM sequence: CTT
  source 1..20: mol_type = other DNA
ccaaaatgaaagattccaaa

SEQ ID NO: 41687 - DNA, 20 bp, synthetic construct
  misc_feature 1..20: note = Description of Artificial Sequence: Synthetic oligonucleotide
  misc_feature 1..20: note = Target: SCN10A; (-) strand; PAM type: YTN; PAM sequence: TTG
  source 1..20: mol_type = other DNA
tcttccaaaatgaaagattc

SEQ ID NO: 41688 - DNA, 20 bp, synthetic construct
  misc_feature 1..20: note = Description of Artificial Sequence: Synthetic oligonucleotide
  misc_feature 1..20: note = Target: SCN10A; (-) strand; PAM type: YTN; PAM sequence: TTT
  source 1..20: mol_type = other DNA
gtcttccaaaatgaaagatt

SEQ ID NO: 41689 - DNA, 20 bp, synthetic construct
  misc_feature 1..20: note = Description of Artificial Sequence: Synthetic oligonucleotide
  misc_feature 1..20: note = Target: SCN10A; (-) strand; PAM type: YTN; PAM sequence: TTG
  source 1..20: mol_type = other DNA
tttgtcttccaaaatgaaag

SEQ ID NO: 41690 - DNA, 20 bp, synthetic construct
  misc_feature 1..20: note = Description of Artificial Sequence: Synthetic oligonucleotide
  misc_feature 1..20: note = Target: SCN10A; (-) strand; PAM type: YTN; PAM sequence: TTT
  source 1..20: mol_type = other DNA
gtttgtcttccaaaatgaaa

SEQ ID NO: 41691 - DNA, 20 bp, synthetic construct
  misc_feature 1..20: note = Description of Artificial Sequence: Synthetic oligonucleotide
  misc_feature 1..20: note = Target: SCN10A; (-) strand; PAM type: YTN; PAM sequence: TTT
  source 1..20: mol_type = other DNA
tgtttgtcttccaaaatgaa

SEQ ID NO: 41692 - DNA, 20 bp, synthetic construct
  misc_feature 1..20: note = Description of Artificial Sequence: Synthetic oligonucleotide
  misc_feature 1..20: note = Target: SCN10A; (-) strand; PAM type: YTN; PAM sequence: TTG
  source 1..20: mol_type = other DNA
ttttgtttgtcttccaaaat

SEQ ID NO: 41693 - DNA, 20 bp, synthetic construct
  misc_feature 1..20: note = Description of Artificial Sequence: Synthetic oligonucleotide
  misc_feature 1..20: note = Target: SCN10A; (-) strand; PAM type: YTN; PAM sequence: TTT
  source 1..20: mol_type = other DNA
gttttgtttgtcttccaaaa

SEQ ID NO: 41694 - DNA, 20 bp, synthetic construct
  misc_feature 1..20: note = Description of Artificial Sequence: Synthetic oligonucleotide
  misc_feature 1..20: note = Target: SCN10A; (-) strand; PAM type: YTN; PAM sequence: TTT
  source 1..20: mol_type = other DNA
tgttttgtttgtcttccaaa

SEQ ID NO: 41695 - DNA, 20 bp, synthetic construct
  misc_feature 1..20: note = Description of Artificial Sequence: Synthetic oligonucleotide
  misc_feature 1..20: note = Target: SCN10A; (-) strand; PAM type: YTN; PAM sequence: TTG
  source 1..20: mol_type = other DNA
ttttgttttgtttgtcttcc

SEQ ID NO: 41696 - DNA, 20 bp, synthetic construct
  misc_feature 1..20: note = Description of Artificial Sequence: Synthetic oligonucleotide
  misc_feature 1..20: note = Target: SCN10A; (-) strand; PAM type: YTN; PAM sequence: TTT
  source 1..20: mol_type = other DNA
gttttgttttgtttgtcttc

SEQ ID NO: 41697 - DNA, 20 bp, synthetic construct
  misc_feature 1..20: note = Description of Artificial Sequence: Synthetic oligonucleotide
  misc_feature 1..20: note = Target: SCN10A; (-) strand; PAM type: YTN; PAM sequence: TTT
  source 1..20: mol_type = other DNA
tgttttgttttgtttgtctt

SEQ ID NO: 41698 - DNA, 20 bp, synthetic construct
  misc_feature 1..20: note = Description of Artificial Sequence: Synthetic oligonucleotide
  misc_feature 1..20: note = Target: SCN10A; (-) strand; PAM type: YTN; PAM sequence: TTT
  source 1..20: mol_type = other DNA
ttgttttgttttgtttgtct

SEQ ID NO: 41699 - DNA, 20 bp, synthetic construct
  misc_feature 1..20: note = Description of Artificial Sequence: Synthetic oligonucleotide
  misc_feature 1..20: note = Target: SCN10A; (-) strand; PAM type: YTN; PAM sequence: TTC
  source 1..20: mol_type = other DNA
atttttgttttgttttgttt

SEQ ID NO: 41700 - DNA, 20 bp, synthetic construct
  misc_feature 1..20: note = Description of Artificial Sequence: Synthetic oligonucleotide
  misc_feature 1..20: note = Target: SCN10A; (-) strand; PAM type: YTN; PAM sequence: TTT
  source 1..20: mol_type = other DNA
catttttgttttgttttgtt

SEQ ID NO: 41701 - DNA, 20 bp, synthetic construct
  misc_feature 1..20: note = Description of Artificial Sequence: Synthetic oligonucleotide
  misc_feature 1..20: note = Target: SCN10A; (-) strand; PAM type: YTN; PAM sequence: TTT
  source 1..20: mol_type = other DNA
tcatttttgttttgttttgt

SEQ ID NO: 41702 - DNA, 20 bp, synthetic construct
  misc_feature 1..20: note = Description of Artificial Sequence: Synthetic oligonucleotide
  misc_feature 1..20: note = Target: SCN10A; (-) strand; PAM type: YTN; PAM sequence: TTG
  source 1..20: mol_type = other DNA
ttttcatttttgttttgttt

SEQ ID NO: 41703 - DNA, 20 bp, synthetic construct
  misc_feature 1..20: note = Description of Artificial Sequence: Synthetic oligonucleotide
  misc_feature 1..20: note = Target: SCN10A; (-) strand; PAM type: YTN; PAM sequence: TTA
  source 1..20: mol_type = other DNA
gttgttttcatttttgtttt

SEQ ID NO: 41704 - DNA, 20 bp, synthetic construct
  misc_feature 1..20: note = Description of Artificial Sequence: Synthetic oligonucleotide
  misc_feature 1..20: note = Target: SCN10A; (-) strand; PAM type: YTN; PAM sequence: TTG
  source 1..20: mol_type = other DNA
gttagttgttttcatttttg

SEQ ID NO: 41705 - DNA, 20 bp, synthetic construct
  misc_feature 1..20: note = Description of Artificial Sequence: Synthetic oligonucleotide
  misc_feature 1..20: note = Target: SCN10A; (-) strand; PAM type: YTN; PAM sequence: TTG
  source 1..20: mol_type = other DNA
gttggttagttgttttcatt

SEQ ID NO: 41706 - DNA, 20 bp, synthetic construct
  misc_feature 1..20: note = Description of Artificial Sequence: Synthetic oligonucleotide
  misc_feature 1..20: note = Target: SCN10A; (-) strand; PAM type: YTN; PAM sequence: TTG
  source 1..20: mol_type = other DNA
gttggttggttagttgtttt

SEQ ID NO: 41707 - DNA, 20 bp, synthetic construct
  misc_feature 1..20: note = Description of Artificial Sequence: Synthetic oligonucleotide
  misc_feature 1..20: note = Target: SCN10A; (-) strand; PAM type: YTN; PAM sequence: TTG
  source 1..20: mol_type = other DNA
ttggttggttggttagttgt

SEQ ID NO: 41708 - DNA, 20 bp, synthetic construct
  misc_feature 1..20: note = Description of Artificial Sequence: Synthetic oligonucleotide
  misc_feature 1..20: note = Target: SCN10A; (-) strand; PAM type: YTN; PAM sequence: TTT
  source 1..20: mol_type = other DNA
gttggttggttggttagttg

SEQ ID NO: 41709 - DNA, 20 bp, synthetic construct
  misc_feature 1..20: note = Description of Artificial Sequence: Synthetic oligonucleotide
  misc_feature 1..20: note = Target: SCN10A; (-) strand; PAM type: YTN; PAM sequence: TTT
  source 1..20: mol_type = other DNA
tgttggttggttggttagtt

SEQ ID NO: 41710 - DNA, 20 bp, synthetic construct
  misc_feature 1..20: note = Description of Artificial Sequence: Synthetic oligonucleotide
  misc_feature 1..20: note = Target: SCN10A; (-) strand; PAM type: YTN; PAM sequence: TTT
  source 1..20: mol_type = other DNA
ttgttggttggttggttagt

SEQ ID NO: 41711 - DNA, 20 bp, synthetic construct
  misc_feature 1..20: note = Description of Artificial Sequence: Synthetic oligonucleotide
  misc_feature 1..20: note = Target: SCN10A; (-) strand; PAM type: YTN; PAM sequence: TTA
  source 1..20: mol_type = other DNA
gcataataggagtttttgtt

SEQ ID NO: 41712 - DNA, 20 bp, synthetic construct
  misc_feature 1..20: note = Description of Artificial Sequence: Synthetic oligonucleotide
  misc_feature 1..20: note = Target: SCN10A; (-) strand; PAM type: YTN; PAM sequence: CTT
  source 1..20: mol_type = other DNA
agcataataggagtttttgt

SEQ ID NO: 41713 - DNA, 20 bp, synthetic construct
  misc_feature 1..20: note = Description of Artificial Sequence: Synthetic oligonucleotide
  misc_feature 1..20: note = Target: SCN10A; (-) strand; PAM type: YTN; PAM sequence: CTC
  source 1..20: mol_type = other DNA
acttagcataataggagttt

SEQ ID NO: 41714 - DNA, 20 bp, synthetic construct
  misc_feature 1..20: note = Description of Artificial Sequence: Synthetic oligonucleotide
  misc_feature 1..20: note = Target: SCN10A; (-) strand; PAM type: YTN; PAM sequence: TTA
  source 1..20: mol_type = other DNA
tctcacttagcataatagga

SEQ ID NO: 41715 - DNA, 20 bp, synthetic construct
  misc_feature 1..20: note = Description of Artificial Sequence: Synthetic oligonucleotide
  misc_feature 1..20: note = Target: SCN10A; (-) strand; PAM type: YTN; PAM sequence: CTT
  source 1..20: mol_type = other DNA
atctcacttagcataatagg

SEQ ID NO: 41716 - DNA, 20 bp, synthetic construct
  misc_feature 1..20: note = Description of Artificial Sequence: Synthetic oligonucleotide
  misc_feature 1..20: note = Target: SCN10A; (-) strand; PAM type: YTN; PAM sequence: CTG
  source 1..20: mol_type = other DNA
gcttatctcacttagcataa

SEQ ID NO: 41717 - DNA, 20 bp, synthetic construct
  misc_feature 1..20: note = Description of Artificial Sequence: Synthetic oligonucleotide
  misc_feature 1..20: note = Target: SCN10A; (-) strand; PAM type: YTN; PAM sequence: CTG
  source 1..20: mol_type = other DNA
tgtctggcttatctcactta

SEQ ID NO: 41718 - DNA, 20 bp, synthetic construct
  misc_feature 1..20: note = Description of Artificial Sequence: Synthetic oligonucleotide
  misc_feature 1..20: note = Target: SCN10A; (-) strand; PAM type: YTN; PAM sequence: TTC
  source 1..20: mol_type = other DNA
tgtgtctggcttatctcact

SEQ ID NO: 41719 - DNA, 20 bp, synthetic construct
  misc_feature 1..20: note = Description of Artificial Sequence: Synthetic oligonucleotide
  misc_feature 1..20: note = Target: SCN10A; (-) strand; PAM type: YTN; PAM sequence: CTT
  source 1..20: mol_type = other DNA
ctgtgtctggcttatctcac

SEQ ID NO: 41720 - DNA, 20 bp, synthetic construct
  misc_feature 1..20: note = Description of Artificial Sequence: Synthetic oligonucleotide
  misc_feature 1..20: note = Target: SCN10A; (-) strand; PAM type: YTN; PAM sequence: TTG
  source 1..20: mol_type = other DNA
tccttctgtgtctggcttat

SEQ ID NO: 41721 - DNA, 20 bp, synthetic construct
  misc_feature 1..20: note = Description of Artificial Sequence: Synthetic oligonucleotide
  misc_feature 1..20: note = Target: SCN10A; (-) strand; PAM type: YTN; PAM sequence: TTT
  source 1..20: mol_type = other DNA
gtccttctgtgtctggctta

SEQ ID NO: 41722 - DNA, 20 bp, synthetic construct
  misc_feature 1..20: note = Description of Artificial Sequence: Synthetic oligonucleotide
  misc_feature 1..20: note = Target: SCN10A; (-) strand; PAM type: YTN; PAM sequence: TTT
  source 1..20: mol_type = other DNA
tgtccttctgtgtctggctt

SEQ ID NO: 41723 - DNA, 20 bp, synthetic construct
  misc_feature 1..20: note = Description of Artificial Sequence: Synthetic oligonucleotide
  misc_feature 1..20: note = Target: SCN10A; (-) strand; PAM type: YTN; PAM sequence: TTT
  source 1..20: mol_type = other DNA
ttgtccttctgtgtctggct

SEQ ID NO: 41724 - DNA, 20 bp, synthetic construct
  misc_feature 1..20: note = Description of Artificial Sequence: Synthetic oligonucleotide
  misc_feature 1..20: note = Target: SCN10A; (-) strand; PAM type: YTN; PAM sequence: TTA
  source 1..20: mol_type = other DNA
tataaatgcaatcatgtcgt

SEQ ID NO: 41725 - DNA, 20 bp, synthetic construct
  misc_feature 1..20: note = Description of Artificial Sequence: Synthetic oligonucleotide
  misc_feature 1..20: note = Target: SCN10A; (-) strand; PAM type: YTN; PAM sequence: CTT
  source 1..20: mol_type = other DNA
atataaatgcaatcatgtcg

SEQ ID NO: 41726 - DNA, 20 bp, synthetic construct
  misc_feature 1..20: note = Description of Artificial Sequence: Synthetic oligonucleotide
  misc_feature 1..20: note = Target: SCN10A; (-) strand; PAM type: YTN; PAM sequence: TTC
  source 1..20: mol_type = other DNA
cttatataaatgcaatcatg

SEQ ID NO: 41727 - DNA, 20 bp, synthetic construct
  misc_feature 1..20: note = Description of Artificial Sequence: Synthetic oligonucleotide
  misc_feature 1..20: note = Target: SCN10A; (-) strand; PAM type: YTN; PAM sequence: TTA
  source 1..20: mol_type = other DNA
gattccttatataaatgcaa

SEQ ID NO: 41728 - DNA, 20 bp, synthetic construct
  misc_feature 1..20: note = Description of Artificial Sequence: Synthetic oligonucleotide
  misc_feature 1..20: note = Target: SCN10A; (-) strand; PAM type: YTN; PAM sequence: TTT
  source 1..20: mol_type = other DNA
agattccttatataaatgca

SEQ ID NO: 41729 - DNA, 20 bp, synthetic construct
  misc_feature 1..20: note = Description of Artificial Sequence: Synthetic oligonucleotide
  misc_feature 1..20: note = Target: SCN10A; (-) strand; PAM type: YTN; PAM sequence: TTT
  source 1..20: mol_type = other DNA
tagattccttatataaatgc

SEQ ID NO: 41730 - DNA, 20 bp, synthetic construct
  misc_feature 1..20: note = Description of Artificial Sequence: Synthetic oligonucleotide
  misc_feature 1..20: note = Target: SCN10A; (-) strand; PAM type: YTN; PAM sequence: CTA
  source 1..20: mol_type = other DNA
ttttagattccttatataaa

SEQ ID NO: 41731 - DNA, 20 bp, synthetic construct
  misc_feature 1..20: note = Description of Artificial Sequence: Synthetic oligonucleotide
  misc_feature 1..20: note = Target: SCN10A; (-) strand; PAM type: YTN; PAM sequence: TTG
  source 1..20: mol_type = other DNA
actattttagattccttata

SEQ ID NO: 41732 - DNA, 20 bp, synthetic construct
  misc_feature 1..20: note = Description of Artificial Sequence: Synthetic oligonucleotide
  misc_feature 1..20: note = Target: SCN10A; (-) strand; PAM type: YTN; PAM sequence: TTT
  source 1..20: mol_type = other DNA
gactattttagattccttat

SEQ ID NO: 41733 - DNA, 20 bp, synthetic construct
  misc_feature 1..20: note = Description of Artificial Sequence: Synthetic oligonucleotide
  misc_feature 1..20: note = Target: SCN10A; (-) strand; PAM type: YTN; PAM sequence: CTC
  source 1..20: mol_type = other DNA
ccatgagtttgactatttta

SEQ ID NO: 41734 - DNA, 20 bp, synthetic construct
  misc_feature 1..20: note = Description of Artificial Sequence: Synthetic oligonucleotide
  misc_feature 1..20: note = Target: SCN10A; (-) strand; PAM type: YTN; PAM sequence: CTG
  source 1..20: mol_type = other DNA
ctcccatgagtttgactatt

SEQ ID NO: 41735 - DNA, 20 bp, synthetic construct
  misc_feature 1..20: note = Description of Artificial Sequence: Synthetic oligonucleotide
  misc_feature 1..20: note = Target: SCN10A; (-) strand; PAM type: YTN; PAM sequence: CTC
  source 1..20: mol_type = other DNA
tgctcccatgagtttgacta

SEQ ID NO: 41736 - DNA, 20 bp, synthetic construct
  misc_feature 1..20: note = Description of Artificial Sequence: Synthetic oligonucleotide
  misc_feature 1..20: note = Target: SCN10A; (-) strand; PAM type: YTN; PAM sequence: TTC
  source 1..20: mol_type = other DNA
tctgctcccatgagtttgac

SEQ ID NO: 41737 - DNA, 20 bp, synthetic construct
  misc_feature 1..20: note = Description of Artificial Sequence: Synthetic oligonucleotide
  misc_feature 1..20: note = Target: SCN10A; (-) strand; PAM type: YTN; PAM sequence: CTA
  source 1..20: mol_type = other DNA
ttctctgctcccatgagttt

SEQ ID NO: 41738 - DNA, 20 bp, synthetic construct
  misc_feature 1..20: note = Description of Artificial Sequence: Synthetic oligonucleotide
  misc_feature 1..20: note = Target: SCN10A; (-) strand; PAM type: YTN; PAM sequence: TTC
  source 1..20: mol_type = other DNA
tattctctgctcccatgagt

SEQ ID NO: 41739 - DNA, 20 bp, synthetic construct
  misc_feature 1..20: note = Description of Artificial Sequence: Synthetic oligonucleotide
  misc_feature 1..20: note = Target: SCN10A; (-) strand; PAM type: YTN; PAM sequence: CTG
  source 1..20: mol_type = other DNA
gaaaccaccattctattctc

SEQ ID NO: 41740 - DNA, 20 bp, synthetic construct
  misc_feature 1..20: note = Description of Artificial Sequence: Synthetic oligonucleotide
  misc_feature 1..20: note = Target: SCN10A; (-) strand; PAM type: YTN; PAM sequence: CTC
  source 1..20: mol_type = other DNA
ctggaaaccaccattctatt

SEQ ID NO: 41741 - DNA, 20 bp, synthetic construct
  misc_feature 1..20: note = Description of Artificial Sequence: Synthetic oligonucleotide
  misc_feature 1..20: note = Target: SCN10A; (-) strand; PAM type: YTN; PAM sequence: CTC
  source 1..20: mol_type = other DNA
ccagctcctggaaaccacca

SEQ ID NO: 41742 - DNA, 20 bp, synthetic construct
  misc_feature 1..20: note = Description of Artificial Sequence: Synthetic oligonucleotide
  misc_feature 1..20: note = Target: SCN10A; (-) strand; PAM type: YTN; PAM sequence: CTC
  source 1..20: mol_type = other DNA
ctcccagctcctggaaacca

SEQ ID NO: 41743 - DNA, 20 bp, synthetic construct
  misc_feature 1..20: note = Description of Artificial Sequence: Synthetic oligonucleotide
  misc_feature 1..20: note = Target: SCN10A; (-) strand; PAM type: YTN; PAM sequence: TTC
  source 1..20: mol_type = other DNA
ccctcctcccagctcctgga

SEQ ID NO: 41744 - DNA, 20 bp, synthetic construct
  misc_feature 1..20: note = Description of Artificial Sequence: Synthetic oligonucleotide
  misc_feature 1..20: note = Target: SCN10A; (-) strand; PAM type: YTN; PAM sequence: TTT
  source 1..20: mol_type = other DNA
cccctcctcccagctcctgg

SEQ ID NO: 41745 - DNA, 20 bp, synthetic construct
  misc_feature 1..20: note = Description of Artificial Sequence: Synthetic oligonucleotide
  misc_feature 1..20: note = Target: SCN10A; (-) strand; PAM type: YTN; PAM sequence: CTC
  source 1..20: mol_type = other DNA
cccaatttcccctcctccca

SEQ ID NO: 41746 - DNA, 20 bp, synthetic construct
  misc_feature 1..20: note = Description of Artificial Sequence: Synthetic oligonucleotide
  misc_feature 1..20: note = Target: SCN10A; (-) strand; PAM type: YTN; PAM sequence: TTG
  source 1..20: mol_type = other DNA
acaagtacctccccaatttc

SEQ ID NO: 41747 - DNA, 20 bp, synthetic construct
  misc_feature 1..20: note = Description of Artificial Sequence: Synthetic oligonucleotide
  misc_feature 1..20: note = Target: SCN10A; (-) strand; PAM type: YTN; PAM sequence: TTT
  source 1..20: mol_type = other DNA
gacaagtacctccccaattt

SEQ ID NO: 41748 - DNA, 20 bp, synthetic construct
  misc_feature 1..20: note = Description of Artificial Sequence: Synthetic oligonucleotide
  misc_feature 1..20: note = Target: SCN10A; (-) strand; PAM type: YTN; PAM sequence: CTT
  source 1..20: mol_type = other DNA
tgacaagtacctccccaatt

SEQ ID NO: 41749 - DNA, 20 bp, synthetic construct
  misc_feature 1..20: note = Description of Artificial Sequence: Synthetic oligonucleotide
  misc_feature 1..20: note = Target: SCN10A; (-) strand; PAM type: YTN; PAM sequence: TTG
  source 1..20: mol_type = other DNA
tacactttgacaagtacctc

SEQ ID NO: 41750 - DNA, 20 bp, synthetic construct
  misc_feature 1..20: note = Description of Artificial Sequence: Synthetic oligonucleotide
  misc_feature 1..20: note = Target: SCN10A; (-) strand; PAM type: YTN; PAM sequence: TTT
  source 1..20: mol_type = other DNA
gtacactttgacaagtacct

SEQ ID NO: 41751 - DNA, 20 bp, synthetic construct
  misc_feature 1..20: note = Description of Artificial Sequence: Synthetic oligonucleotide
  misc_feature 1..20: note = Target: SCN10A; (-) strand; PAM type: YTN; PAM sequence: CTG
  source 1..20: mol_type = other DNA
gaagtttgtacactttgaca

SEQ ID NO: 41752 - DNA, 20 bp, synthetic construct
  misc_feature 1..20: note = Description of Artificial Sequence: Synthetic oligonucleotide
  misc_feature 1..20: note = Target: SCN10A; (-) strand; PAM type: YTN; PAM sequence: TTC
  source 1..20: mol_type = other DNA
atgtcacataactggaagtt

SEQ ID NO: 41753 - DNA, 20 bp, synthetic construct
  misc_feature 1..20: note = Description of Artificial Sequence: Synthetic oligonucleotide
  misc_feature 1..20: note = Target: SCN10A; (-) strand; PAM type: YTN; PAM sequence: TTA
  source 1..20: mol_type = other DNA
ttcatgtcacataactggaa

SEQ ID NO: 41754 - DNA, 20 bp, synthetic construct
  misc_feature 1..20: note = Description of Artificial Sequence: Synthetic oligonucleotide
  misc_feature 1..20: note = Target: SCN10A; (-) strand; PAM type: YTN; PAM sequence: TTT
  source 1..20: mol_type = other DNA
attcatgtcacataactgga

SEQ ID NO: 41755 - DNA, 20 bp, synthetic construct
  misc_feature 1..20: note = Description of Artificial Sequence: Synthetic oligonucleotide
  misc_feature 1..20: note = Target: SCN10A; (-) strand; PAM type: YTN; PAM sequence: CTA
  source 1..20: mol_type = other DNA
ggatttattcatgtcacata

SEQ ID NO: 41756 - DNA, 20 bp, synthetic construct
  misc_feature 1..20: note = Description of Artificial Sequence: Synthetic oligonucleotide
  misc_feature 1..20: note = Target: SCN10A; (-) strand; PAM type: YTN; PAM sequence: CTC
  source 1..20: mol_type = other DNA
taggatttattcatgtcaca

SEQ ID NO: 41757 - DNA, 20 bp, synthetic construct
  misc_feature 1..20: note = Description of Artificial Sequence: Synthetic oligonucleotide
  misc_feature 1..20: note = Target: SCN10A; (-) strand; PAM type: YTN; PAM sequence: CTA
  source 1..20: mol_type = other DNA
taagtagagctctaggattt

SEQ ID NO: 41758 - DNA, 20 bp, synthetic construct
  misc_feature 1..20: note = Description of Artificial Sequence: Synthetic oligonucleotide
  misc_feature 1..20: note = Target: SCN10A; (-) strand; PAM type: YTN; PAM sequence: CTA
  source 1..20: mol_type = other DNA
tgctataagtagagctctag

SEQ ID NO: 41759 - DNA, 20 bp, synthetic construct
  misc_feature 1..20: note = Description of Artificial Sequence: Synthetic oligonucleotide
  misc_feature 1..20: note = Target: SCN10A; (-) strand; PAM type: YTN; PAM sequence: CTA
  source 1..20: mol_type = other DNA
tagggactatgctataagta

SEQ ID NO: 41760 - DNA, 20 bp, synthetic construct
  misc_feature 1..20: note = Description of Artificial Sequence: Synthetic oligonucleotide
  misc_feature 1..20: note = Target: SCN10A; (-) strand; PAM type: YTN; PAM sequence: CTA
  source 1..20: mol_type = other DNA
actatagggactatgctata

SEQ ID NO: 41761 - DNA, 20 bp, synthetic construct
  misc_feature 1..20: note = Description of Artificial Sequence: Synthetic oligonucleotide
  misc_feature 1..20: note = Target: SCN10A; (-) strand; PAM type: YTN; PAM sequence: TTG
  source 1..20: mol_type = other DNA
ctaactatagggactatgct

SEQ ID NO: 41762 - DNA, 20 bp, synthetic construct
  misc_feature 1..20: note = Description of Artificial Sequence: Synthetic oligonucleotide
  misc_feature 1..20: note = Target: SCN10A; (-) strand; PAM type: YTN; PAM sequence: TTA
  source 1..20: mol_type = other DNA
ggtagacaacacggtattgc

SEQ ID NO: 41763 - DNA, 20 bp, synthetic construct
  misc_feature 1..20: note = Description of Artificial Sequence: Synthetic oligonucleotide
  misc_feature 1..20: note = Target: SCN10A; (-) strand; PAM type: YTN; PAM sequence: TTT
  source 1..20: mol_type = other DNA
aggtagacaacacggtattg

SEQ ID NO: 41764 - DNA, 20 bp, synthetic construct
  misc_feature 1..20: note = Description of Artificial Sequence: Synthetic oligonucleotide
  misc_feature 1..20: note = Target: SCN10A; (-) strand; PAM type: YTN; PAM sequence: TTT
  source 1..20: mol_type = other DNA
taggtagacaacacggtatt

SEQ ID NO: 41765 - DNA, 20 bp, synthetic construct
  misc_feature 1..20: note = Description of Artificial Sequence: Synthetic oligonucleotide
  misc_feature 1..20: note = Target: SCN10A; (-) strand; PAM type: YTN; PAM sequence: TTT
  source 1..20: mol_type = other DNA
ttaggtagacaacacggtat

SEQ ID NO: 41766 - DNA, 20 bp, synthetic construct
  misc_feature 1..20: note = Description of Artificial Sequence: Synthetic oligonucleotide
  misc_feature 1..20: note = Target: SCN10A; (-) strand; PAM type: YTN; PAM sequence: TTG
  source 1..20: mol_type = other DNA
gcaaatttttaggtagacaa

SEQ ID NO: 41767 - DNA, 20 bp, synthetic construct
  misc_feature 1..20: note = Description of Artificial Sequence: Synthetic oligonucleotide
  misc_feature 1..20: note = Target: SCN10A; (-) strand; PAM type: YTN; PAM sequence: CTT
  source 1..20: mol_type = other DNA
ggcaaatttttaggtagaca

SEQ ID NO: 41768 - DNA, 20 bp, synthetic construct
  misc_feature 1..20: note = Description of Artificial Sequence: Synthetic oligonucleotide
  misc_feature 1..20: note = Target: SCN10A; (-) strand; PAM type: YTN; PAM sequence: CTC
  source 1..20: mol_type = other DNA
ttggcaaatttttaggtaga

SEQ ID NO: 41769 - DNA, 20 bp, synthetic construct
  misc_feature 1..20: note = Description of Artificial Sequence: Synthetic oligonucleotide
  misc_feature 1..20: note = Target: SCN10A; (-) strand; PAM type: YTN; PAM sequence: TTC
  source 1..20: mol_type = other DNA
tcttggcaaatttttaggta

SEQ ID NO: 41770 - DNA, 20 bp, synthetic construct
  misc_feature 1..20: note = Description of Artificial Sequence: Synthetic oligonucleotide
  misc_feature 1..20: note = Target: SCN10A; (-) strand; PAM type: YTN; PAM sequence: TTA
  source 1..20: mol_type = other DNA
ttctcttggcaaatttttag

SEQ ID NO: 41771 - DNA, 20 bp, synthetic construct
  misc_feature 1..20: note = Description of Artificial Sequence: Synthetic oligonucleotide
  misc_feature 1..20: note = Target: SCN10A; (-) strand; PAM type: YTN; PAM sequence: TTT
  source 1..20: mol_type = other DNA
attctcttggcaaattttta

SEQ ID NO: 41772 - DNA, 20 bp, synthetic construct
  misc_feature 1..20: note = Description of Artificial Sequence: Synthetic oligonucleotide
  misc_feature 1..20: note = Target: SCN10A; (-) strand; PAM type: YTN; PAM sequence: TTA
  source 1..20: mol_type = other DNA
agatttattctcttggcaaa

SEQ ID NO: 41773 - DNA, 20 bp, synthetic construct
  misc_feature 1..20: note = Description of Artificial Sequence: Synthetic oligonucleotide
  misc_feature 1..20: note = Target: SCN10A; (-) strand; PAM type: YTN; PAM sequence: CTT
  source 1..20: mol_type = other DNA
aagatttattctcttggcaa

SEQ ID NO: 41774 - DNA, 20 bp, synthetic construct
  misc_feature 1..20: note = Description of Artificial Sequence: Synthetic oligonucleotide
  misc_feature 1..20: note = Target: SCN10A; (-) strand; PAM type: YTN; PAM sequence: CTA
  source 1..20: mol_type = other DNA
ggaacacttaagatttattc

SEQ ID NO: 41775 - DNA, 20 bp, synthetic construct
  misc_feature 1..20: note = Description of Artificial Sequence: Synthetic oligonucleotide
  misc_feature 1..20: note = Target: SCN10A; (-) strand; PAM type: YTN; PAM sequence: TTG
  source 1..20: mol_type = other DNA
ggtgctaggaacacttaaga

SEQ ID NO: 41776 - DNA, 20 bp, synthetic construct
  misc_feature 1..20: note = Description of Artificial Sequence: Synthetic oligonucleotide
  misc_feature 1..20: note = Target: SCN10A; (-) strand; PAM type: YTN; PAM sequence: TTA
  source 1..20: mol_type = other DNA
ttgggtgctaggaacactta

SEQ ID NO: 41777 - DNA, 20 bp, synthetic construct
  misc_feature 1..20: note = Description of Artificial Sequence: Synthetic oligonucleotide
  misc_feature 1..20: note = Target: SCN10A; (-) strand; PAM type: YTN; PAM sequence: TTT
  source 1..20: mol_type = other DNA
attgggtgctaggaacactt

SEQ ID NO: 41778 - DNA, 20 bp, synthetic construct
  misc_feature 1..20: note = Description of Artificial Sequence: Synthetic oligonucleotide
  misc_feature 1..20: note = Target: SCN10A; (-) strand; PAM type: YTN; PAM sequence: TTA
  source 1..20: mol_type = other DNA
tttattgggtgctaggaaca

SEQ ID NO: 41779 - DNA, 20 bp, synthetic construct
  misc_feature 1..20: note = Description of Artificial Sequence: Synthetic oligonucleotide
  misc_feature 1..20: note = Target: SCN10A; (-) strand; PAM type: YTN; PAM sequence: TTT
  source 1..20: mol_type = other DNA
atttattgggtgctaggaac

SEQ ID NO: 41780 - DNA, 20 bp, synthetic construct
  misc_feature 1..20: note = Description of Artificial Sequence: Synthetic oligonucleotide
  misc_feature 1..20: note = Target: SCN10A; (-) strand; PAM type: YTN; PAM sequence: TTA
  source 1..20: mol_type = other DNA
tttatttattgggtgctagg

SEQ ID NO: 41781 - DNA, 20 bp, synthetic construct
  misc_feature 1..20: note = Description of Artificial Sequence: Synthetic oligonucleotide
  misc_feature 1..20: note = Target: SCN10A; (-) strand; PAM type: YTN; PAM sequence: TTT
  source 1..20: mol_type = other DNA
atttatttattgggtgctag

SEQ ID NO: 41782 - DNA, 20 bp, synthetic construct
  misc_feature 1..20: note = Description of Artificial Sequence: Synthetic oligonucleotide
  misc_feature 1..20: note = Target: SCN10A; (-) strand; PAM type: YTN; PAM sequence: CTA
  source 1..20: mol_type = other DNA
tttatttatttattgggtgc

SEQ ID NO: 41783 - DNA, 20 bp, synthetic construct
  misc_feature 1..20: note = Description of Artificial Sequence: Synthetic oligonucleotide
  misc_feature 1..20: note = Target: SCN10A; (-) strand; PAM type: YTN; PAM sequence: CTG
  source 1..20: mol_type = other DNA
cctatttatttatttattgg

SEQ ID NO: 41784 - DNA, 20 bp, synthetic construct
  misc_feature 1..20: note = Description of Artificial Sequence: Synthetic oligonucleotide
  misc_feature 1..20: note = Target: SCN10A; (-) strand; PAM type: YTN; PAM sequence: CTC
  source 1..20: mol_type = other DNA
ctgcctatttatttatttat

SEQ ID NO: 41785 - DNA, 20 bp, synthetic construct
  misc_feature 1..20: note = Description of Artificial Sequence: Synthetic oligonucleotide
  misc_feature 1..20: note = Target: SCN10A; (-) strand; PAM type: YTN; PAM sequence: TTC
  source 1..20: mol_type = other DNA
ctcctgcctatttatttatt

SEQ ID NO: 41786 - DNA, 20 bp, synthetic construct
  misc_feature 1..20: note = Description of Artificial Sequence: Synthetic oligonucleotide
  misc_feature 1..20: note = Target: SCN10A; (-) strand; PAM type: YTN; PAM sequence: TTT
  source 1..20: mol_type = other DNA
cctcctgcctatttatttat

SEQ ID NO: 41787 - DNA, 20 bp, synthetic construct
  misc_feature 1..20: note = Description of Artificial Sequence: Synthetic oligonucleotide
  misc_feature 1..20: note = Target: SCN10A; (-) strand; PAM type: YTN; PAM sequence: CTC
  source 1..20: mol_type = other DNA
caaatatttcctcctgccta

SEQ ID NO: 41788 - DNA, 20 bp, synthetic construct
  misc_feature 1..20: note = Description of Artificial Sequence: Synthetic oligonucleotide
  misc_feature 1..20: note = Target: SCN10A; (-) strand; PAM type: YTN; PAM sequence: TTG
  source 1..20: mol_type = other DNA
gagataagtatacacccatg

SEQ ID NO: 41789 - DNA, 20 bp, synthetic construct
  misc_feature 1..20: note = Description of Artificial Sequence: Synthetic oligonucleotide
  misc_feature 1..20: note = Target: SCN10A; (-) strand; PAM type: YTN; PAM sequence: TTT
  source 1..20: mol_type = other DNA
ggagataagtatacacccat

SEQ ID NO: 41790 - DNA, 20 bp, synthetic construct
  misc_feature 1..20: note = Description of Artificial Sequence: Synthetic oligonucleotide
  misc_feature 1..20: note = Target: SCN10A; (-) strand; PAM type: YTN; PAM sequence: TTA
  source 1..20: mol_type = other DNA
tgagtttggagataagtata

SEQ ID NO: 41791 - DNA, 20 bp, synthetic construct
  misc_feature 1..20: note = Description of Artificial Sequence: Synthetic oligonucleotide
  misc_feature 1..20: note = Target: SCN10A; (-) strand; PAM type: YTN; PAM sequence: TTT
  source 1..20: mol_type = other DNA
atgagtttggagataagtat

SEQ ID NO: 41792 - DNA, 20 bp, synthetic construct
  misc_feature 1..20: note = Description of Artificial Sequence: Synthetic oligonucleotide
  misc_feature 1..20: note = Target: SCN10A; (-) strand; PAM type: YTN; PAM sequence: CTT
  source 1..20: mol_type = other DNA
tatgagtttggagataagta

SEQ ID NO: 41793 - DNA, 20 bp, synthetic construct
  misc_feature 1..20: note = Description of Artificial Sequence: Synthetic oligonucleotide
  misc_feature 1..20: note = Target: SCN10A; (-) strand; PAM type: YTN; PAM sequence: TTA
  source 1..20: mol_type = other DNA
atgtacacaactttatgagt

SEQ ID NO: 41794 - DNA, 20 bp, synthetic construct
  misc_feature 1..20: note = Description of Artificial Sequence: Synthetic oligonucleotide
  misc_feature 1..20: note = Target: SCN10A; (-) strand; PAM type: YTN; PAM sequence: TTT
  source 1..20: mol_type = other DNA
aatgtacacaactttatgag

SEQ ID NO: 41795 - DNA, 20 bp, synthetic construct
  misc_feature 1..20: note = Description of Artificial Sequence: Synthetic oligonucleotide
  misc_feature 1..20: note = Target: SCN10A; (-) strand; PAM type: YTN; PAM sequence: CTA
  source 1..20: mol_type = other DNA
tacatgtttaatgtacacaa

SEQ ID NO: 41796 - DNA, 20 bp, synthetic construct
  misc_feature 1..20: note = Description of Artificial Sequence: Synthetic oligonucleotide
  misc_feature 1..20: note = Target: SCN10A; (-) strand; PAM type: YTN; PAM sequence: TTG
  source 1..20: mol_type = other DNA
aggtatgatccacatgtaaa

SEQ ID NO: 41797 - DNA, 20 bp, synthetic construct
  misc_feature 1..20: note = Description of Artificial Sequence: Synthetic oligonucleotide
  misc_feature 1..20: note = Target: SCN10A; (-) strand; PAM type: YTN; PAM sequence: TTA
  source 1..20: mol_type = other DNA
ttgaggtatgatccacatgt

SEQ ID NO: 41798 - DNA, 20 bp, synthetic construct
  misc_feature 1..20: note = Description of Artificial Sequence: Synthetic oligonucleotide
  misc_feature 1..20: note = Target: SCN10A; (-) strand; PAM type: YTN; PAM sequence: TTT
  source 1..20: mol_type = other DNA
attgaggtatgatccacatg

SEQ ID NO: 41799 - DNA, 20 bp, synthetic construct
  misc_feature 1..20: note = Description of Artificial Sequence: Synthetic oligonucleotide
  misc_feature 1..20: note = Target: SCN10A; (-) strand; PAM type: YTN; PAM sequence: CTT
  source 1..20: mol_type = other DNA
tattgaggtatgatccacat

SEQ ID NO: 41800 - DNA, 20 bp, synthetic construct
  misc_feature 1..20: note = Description of Artificial Sequence: Synthetic oligonucleotide
  misc_feature 1..20: note = Target: SCN10A; (-) strand; PAM type: YTN; PAM sequence: TTA
  source 1..20: mol_type = other DNA
acactttattgaggtatgat

SEQ ID NO: 41801 - DNA, 20 bp, synthetic construct
  misc_feature 1..20: note = Description of Artificial Sequence: Synthetic oligonucleotide
  misc_feature 1..20: note = Target: SCN10A; (-) strand; PAM type: YTN; PAM sequence: TTT
  source 1..20: mol_type = other DNA
aacactttattgaggtatga

SEQ ID NO: 41802 - DNA, 20 bp, synthetic construct
  misc_feature 1..20: note = Description of Artificial Sequence: Synthetic oligonucleotide
  misc_feature 1..20: note = Target: SCN10A; (-) strand; PAM type: YTN; PAM sequence: TTT
  source 1..20: mol_type = other DNA
taacactttattgaggtatg

SEQ ID NO: 41803 - DNA, 20 bp, synthetic construct
  misc_feature 1..20: note = Description of Artificial Sequence: Synthetic oligonucleotide
  misc_feature 1..20: note = Target: SCN10A; (-) strand; PAM type: YTN; PAM sequence: TTT
  source 1..20: mol_type = other DNA
ttaacactttattgaggtat

SEQ ID NO: 41804 - DNA, 20 bp, synthetic construct
  misc_feature 1..20: note = Description of Artificial Sequence: Synthetic oligonucleotide
  misc_feature 1..20: note = Target: SCN10A; (-) strand; PAM type: YTN; PAM sequence: TTT
  source 1..20: mol_type = other DNA
tttaacactttattgaggta

SEQ ID NO: 41805 - DNA, 20 bp, synthetic construct
  misc_feature 1..20: note = Description of Artificial Sequence: Synthetic oligonucleotide
  misc_feature 1..20: note = Target: SCN10A; (-) strand; PAM type: YTN; PAM sequence: CTG
  source 1..20: mol_type = other DNA
ttttttaacactttattgag

SEQ ID NO: 41806 - DNA, 20 bp, synthetic construct
  misc_feature 1..20: note = Description of Artificial Sequence: Synthetic oligonucleotide
  misc_feature 1..20: note = Target: SCN10A; (-) strand; PAM type: YTN; PAM sequence: CTC
  source 1..20: mol_type = other DNA
tgttttttaacactttattg

SEQ ID NO: 41807 - DNA, 20 bp, synthetic construct
  misc_feature 1..20: note = Description of Artificial Sequence: Synthetic oligonucleotide
  misc_feature 1..20: note = Target: SCN10A; (-) strand; PAM type: YTN; PAM sequence: CTG
  source 1..20: mol_type = other DNA
ctctgttttttaacacttta

SEQ ID NO: 41808 - DNA, 20 bp, synthetic construct
  misc_feature 1..20: note = Description of Artificial Sequence: Synthetic oligonucleotide
  misc_feature 1..20: note = Target: SCN10A; (-) strand; PAM type: YTN; PAM sequence: TTG
  source 1..20: mol_type = other DNA
ctgctctgttttttaacact

SEQ ID NO: 41809 - DNA, 20 bp, synthetic construct
  misc_feature 1..20: note = Description of Artificial Sequence: Synthetic oligonucleotide
  misc_feature 1..20: note = Target: SCN10A; (-) strand; PAM type: YTN; PAM sequence: TTG
  source 1..20: mol_type = other DNA
atattgctgctctgtttttt

SEQ ID NO: 41810 - DNA, 20 bp, synthetic construct
  misc_feature 1..20: note = Description of Artificial Sequence: Synthetic oligonucleotide
  misc_feature 1..20: note = Target: SCN10A; (-) strand; PAM type: YTN; PAM sequence: TTT
  source 1..20: mol_type = other DNA
gatattgctgctctgttttt

SEQ ID NO: 41811 - DNA, 20 bp, synthetic construct
  misc_feature 1..20: note = Description of Artificial Sequence: Synthetic oligonucleotide
  misc_feature 1..20: note = Target: SCN10A; (-) strand; PAM type: YTN; PAM sequence: TTT
  source 1..20: mol_type = other DNA
tgatattgctgctctgtttt

SEQ ID NO: 41812 - DNA, 20 bp, synthetic construct
  misc_feature 1..20: note = Description of Artificial Sequence: Synthetic oligonucleotide
  misc_feature 1..20: note = Target: SCN10A; (-) strand; PAM type: YTN; PAM sequence: TTA
  source 1..20: mol_type = other DNA
ttttgatattgctgctctgt

SEQ ID NO: 41813 - DNA, 20 bp, synthetic construct
  misc_feature 1..20: note = Description of Artificial Sequence: Synthetic oligonucleotide
  misc_feature 1..20: note = Target: SCN10A; (-) strand; PAM type: YTN; PAM sequence: TTT
  source 1..20: mol_type = other DNA
attttgatattgctgctctg

SEQ ID NO: 41814 - DNA, 20 bp, synthetic construct
  misc_feature 1..20: note = Description of Artificial Sequence: Synthetic oligonucleotide
  misc_feature 1..20: note = Target: SCN10A; (-) strand; PAM type: YTN; PAM sequence: TTT
  source 1..20: mol_type = other DNA
tattttgatattgctgctct

SEQ ID NO: 41815 - DNA, 20 bp, synthetic construct
  misc_feature 1..20: note = Description of Artificial Sequence: Synthetic oligonucleotide
  misc_feature 1..20: note = Target: SCN10A; (-) strand; PAM type: YTN; PAM sequence: TTG
  source 1..20: mol_type = other DNA
ttttattttgatattgctgc

SEQ ID NO: 41816 - DNA, 20 bp, synthetic construct
  misc_feature 1..20: note = Description of Artificial Sequence: Synthetic oligonucleotide
  misc_feature 1..20: note = Target: SCN10A; (-) strand; PAM type: YTN; PAM sequence: CTT
  source 1..20: mol_type = other DNA
gttttattttgatattgctg

SEQ ID NO: 41817 - DNA, 20 bp, synthetic construct
  misc_feature 1..20: note = Description of Artificial Sequence: Synthetic oligonucleotide
  misc_feature 1..20: note = Target: SCN10A; (-) strand; PAM type: YTN; PAM sequence: TTC
  source 1..20: mol_type = other DNA
ttgttttattttgatattgc

SEQ ID NO: 41818 - DNA, 20 bp, synthetic construct
  misc_feature 1..20: note = Description of Artificial Sequence: Synthetic oligonucleotide
  misc_feature 1..20: note = Target: SCN10A; (-) strand; PAM type: YTN; PAM sequence: TTG
  source 1..20: mol_type = other DNA
ttcttgttttattttgatat

SEQ ID NO: 41819 - DNA, 20 bp, synthetic construct
  misc_feature 1..20: note = Description of Artificial Sequence: Synthetic oligonucleotide
  misc_feature 1..20: note = Target: SCN10A; (-) strand; PAM type: YTN; PAM sequence: TTT
  source 1..20: mol_type = other DNA
gttcttgttttattttgata

SEQ ID NO: 41820 - DNA, 20 bp, synthetic construct
  misc_feature 1..20: note = Description of Artificial Sequence: Synthetic oligonucleotide
  misc_feature 1..20: note = Target: SCN10A; (-) strand; PAM type: YTN; PAM sequence: TTT
  source 1..20: mol_type = other DNA
tgttcttgttttattttgat

SEQ ID NO: 41821 - DNA, 20 bp, synthetic construct
  misc_feature 1..20: note = Description of Artificial Sequence: Synthetic oligonucleotide
  misc_feature 1..20: note = Target: SCN10A; (-) strand; PAM type: YTN; PAM sequence: TTT
  source 1..20: mol_type = other DNA
ttgttcttgttttattttga

SEQ ID NO: 41822 - DNA, 20 bp, synthetic construct
  misc_feature 1..20: note = Description of Artificial Sequence: Synthetic oligonucleotide
  misc_feature 1..20: note = Target: SCN10A; (-) strand; PAM type: YTN; PAM sequence: TTG
  source 1..20: mol_type = other DNA
tttttgttcttgttttattt

SEQ ID NO: 41823 - DNA, 20 bp, synthetic construct
  misc_feature 1..20: note = Description of Artificial Sequence: Synthetic oligonucleotide
  misc_feature 1..20: note = Target: SCN10A; (-) strand; PAM type: YTN; PAM sequence: TTT
  source 1..20: mol_type = other DNA
gtttttgttcttgttttatt

SEQ ID NO: 41824 - DNA, 20 bp, synthetic construct
  misc_feature 1..20: note = Description of Artificial Sequence: Synthetic oligonucleotide
  misc_feature 1..20: note = Target: SCN10A; (-) strand; PAM type: YTN; PAM sequence: TTC
  source 1..20: mol_type = other DNA
agtttgtttttgttcttgtt

SEQ ID NO: 41825 - DNA, 20 bp, synthetic construct
  misc_feature 1..20: note = Description of Artificial Sequence: Synthetic oligonucleotide
  misc_feature 1..20: note = Target: SCN10A; (-) strand; PAM type: YTN; PAM sequence: TTT
  source 1..20: mol_type = other DNA
cagtttgtttttgttcttgt

SEQ ID NO: 41826 - DNA, 20 bp, synthetic construct
  misc_feature 1..20: note = Description of Artificial Sequence: Synthetic oligonucleotide
  misc_feature 1..20: note = Target: SCN10A; (-) strand; PAM type: YTN; PAM sequence: TTC
  source 1..20: mol_type = other DNA
cggggatttcagtttgtttt

SEQ ID NO: 41827 - DNA, 20 bp, synthetic construct
  misc_feature 1..20: note = Description of Artificial Sequence: Synthetic oligonucleotide
  misc_feature 1..20: note = Target: SCN10A; (-) strand; PAM type: YTN; PAM sequence: TTT
  source 1..20: mol_type = other DNA
ccggggatttcagtttgttt

SEQ ID NO: 41828 - DNA, 20 bp, synthetic construct
  misc_feature 1..20: note = Description of Artificial Sequence: Synthetic oligonucleotide
  misc_feature 1..20: note = Target: SCN10A; (-) strand; PAM type: YTN; PAM sequence: TTG
  source 1..20: mol_type = other DNA
cgtgtatttccggggatttc

SEQ ID NO: 41829 - DNA, 20 bp, synthetic construct
  misc_feature 1..20: note = Description of Artificial Sequence: Synthetic oligonucleotide
  misc_feature 1..20: note = Target: SCN10A; (-) strand; PAM type: YTN; PAM sequence: TTG
  source 1..20: mol_type = other DNA
ggttgcgtgtatttccgggg

SEQ ID NO: 41830 - DNA, 20 bp, synthetic construct
  misc_feature 1..20: note = Description of Artificial Sequence: Synthetic oligonucleotide
  misc_feature 1..20: note = Target: SCN10A; (-) strand; PAM type: YTN; PAM sequence: CTT
  source 1..20: mol_type = other DNA
gggttgcgtgtatttccggg

SEQ ID NO: 41831 - DNA, 20 bp, synthetic construct
  misc_feature 1..20: note = Description of Artificial Sequence: Synthetic oligonucleotide
  misc_feature 1..20: note = Target: SCN10A; (-) strand; PAM type: YTN; PAM sequence: CTG
  source 1..20: mol_type = other DNA
aaacacagccttgggttgcg

SEQ ID NO: 41832 - DNA, 20 bp, synthetic construct
  misc_feature 1..20: note = Description of Artificial Sequence: Synthetic oligonucleotide
  misc_feature 1..20: note = Target: SCN10A; (-) strand; PAM type: YTN; PAM sequence: TTG
  source 1..20: mol_type = other DNA
gtgctgaaacacagccttgg

SEQ ID NO: 41833 - DNA, 20 bp, synthetic construct
  misc_feature 1..20: note = Description of Artificial Sequence: Synthetic oligonucleotide
  misc_feature 1..20: note = Target: SCN10A; (-) strand; PAM type: YTN; PAM sequence: CTT
  source 1..20: mol_type = other DNA
ggtgctgaaacacagccttg

SEQ ID NO: 41834 - DNA, 20 bp, synthetic construct
  misc_feature 1..20: note = Description of Artificial Sequence: Synthetic oligonucleotide
  misc_feature 1..20: note = Target: SCN10A; (-) strand; PAM type: YTN; PAM sequence: CTC
  source 1..20: mol_type = other DNA
cccaccttggtgctgaaaca

SEQ ID NO: 41835 - DNA, 20 bp, synthetic construct
  misc_feature 1..20: note = Description of Artificial Sequence: Synthetic oligonucleotide
  misc_feature 1..20: note = Target: SCN10A; (-) strand; PAM type: YTN; PAM sequence: TTC
  source 1..20: mol_type = other DNA
atcaacctccccaccttggt

SEQ ID NO: 41836 - DNA, 20 bp, synthetic construct
  misc_feature 1..20: note = Description of Artificial Sequence: Synthetic oligonucleotide
  misc_feature 1..20: note = Target: SCN10A; (-) strand; PAM type: YTN; PAM sequence: TTT
  source 1..20: mol_type = other DNA
catcaacctccccaccttgg

SEQ ID NO: 41837 - DNA, 20 bp, synthetic construct
  misc_feature 1..20: note = Description of Artificial Sequence: Synthetic oligonucleotide
  misc_feature 1..20: note = Target: SCN10A; (-) strand; PAM type: YTN; PAM sequence: TTA
  source 1..20: mol_type = other DNA
acagcatttcatcaacctcc

SEQ ID NO: 41838 - DNA, 20 bp, synthetic construct
  misc_feature 1..20: note = Description of Artificial Sequence: Synthetic oligonucleotide
  misc_feature 1..20: note = Target: SCN10A; (-) strand; PAM type: YTN; PAM sequence: CTT
  source 1..20: mol_type = other DNA
aacagcatttcatcaacctc

SEQ ID NO: 41839 - DNA, 20 bp, synthetic construct
  misc_feature 1..20: note = Description of Artificial Sequence: Synthetic oligonucleotide
  misc_feature 1..20: note = Target: SCN10A; (-) strand; PAM type: YTN; PAM sequence: CTA
  source 1..20: mol_type = other DNA
aatacaacttaacagcattt

SEQ ID NO: 41840 - DNA, 20 bp, synthetic construct
  misc_feature 1..20: note = Description of Artificial Sequence: Synthetic oligonucleotide
  misc_feature 1..20: note = Target: SCN10A; (-) strand; PAM type: YTN; PAM sequence: CTG
  source 1..20: mol_type = other DNA
agagtatctaaatacaactt

SEQ ID NO: 41841 - DNA, 20 bp, synthetic construct
  misc_feature 1..20: note = Description of Artificial Sequence: Synthetic oligonucleotide
  misc_feature 1..20: note = Target: SCN10A; (-) strand; PAM type: YTN; PAM sequence: TTA
  source 1..20: mol_type = other DNA
gtaacaagagctgagagtat

SEQ ID NO: 41842 - DNA, 20 bp, synthetic construct
  misc_feature 1..20: note = Description of Artificial Sequence: Synthetic oligonucleotide
  misc_feature 1..20: note = Target: SCN10A; (-) strand; PAM type: YTN; PAM sequence: TTT
  source 1..20: mol_type = other DNA
agtaacaagagctgagagta

SEQ ID NO: 41843 - DNA, 20 bp, synthetic construct
  misc_feature 1..20: note = Description of Artificial Sequence: Synthetic oligonucleotide
  misc_feature 1..20: note = Target: SCN10A; (-) strand; PAM type: YTN; PAM sequence: CTG
  source 1..20: mol_type = other DNA
atttagtaacaagagctgag

SEQ ID NO: 41844 - DNA, 20 bp, synthetic construct
  misc_feature 1..20: note = Description of Artificial Sequence: Synthetic oligonucleotide
  misc_feature 1..20: note = Target: SCN10A; (-) strand; PAM type: YTN; PAM sequence: TTG
  source 1..20: mol_type = other DNA
ccactgatttagtaacaaga

SEQ ID NO: 41845 - DNA, 20 bp, synthetic construct
  misc_feature 1..20: note = Description of Artificial Sequence: Synthetic oligonucleotide
  misc_feature 1..20: note = Target: SCN10A; (-) strand; PAM type: YTN; PAM sequence: TTT
  source 1..20: mol_type = other DNA
gccactgatttagtaacaag

SEQ ID NO: 41846 - DNA, 20 bp, synthetic construct
  misc_feature 1..20: note = Description of Artificial Sequence: Synthetic oligonucleotide
  misc_feature 1..20: note = Target: SCN10A; (-) strand; PAM type: YTN; PAM sequence: TTA
  source 1..20: mol_type = other DNA
atttgccactgatttagtaa

SEQ ID NO: 41847 - DNA, 20 bp, synthetic construct
  misc_feature 1..20: note = Description of Artificial Sequence: Synthetic oligonucleotide
  misc_feature 1..20: note = Target: SCN10A; (-) strand; PAM type: YTN; PAM sequence: TTT
  source 1..20: mol_type = other DNA
aatttgccactgatttagta

SEQ ID NO: 41848 - DNA, 20 bp, synthetic construct
  misc_feature 1..20: note = Description of Artificial Sequence: Synthetic oligonucleotide
  misc_feature 1..20: note = Target: SCN10A; (-) strand; PAM type: YTN; PAM sequence: CTG
  source 1..20: mol_type = other DNA
tagatttaatttgccactga

SEQ ID NO: 41849 - DNA, 20 bp, synthetic construct
  misc_feature 1..20: note = Description of Artificial Sequence: Synthetic oligonucleotide
  misc_feature 1..20: note = Target: SCN10A; (-) strand; PAM type: YTN; PAM sequence: TTC
  source 1..20: mol_type = other DNA
atgtcggggtgtagctgtag

SEQ ID NO: 41850 - DNA, 20 bp, synthetic construct
  misc_feature 1..20: note = Description of Artificial Sequence: Synthetic oligonucleotide
  misc_feature 1..20: note = Target: SCN10A; (-) strand; PAM type: YTN; PAM sequence: TTT
  source 1..20: mol_type = other DNA
catgtcggggtgtagctgta

SEQ ID NO: 41851 - DNA, 20 bp, synthetic construct
  misc_feature 1..20: note = Description of Artificial Sequence: Synthetic oligonucleotide
  misc_feature 1..20: note = Target: SCN10A; (-) strand; PAM type: YTN; PAM sequence: TTT
  source 1..20: mol_type = other DNA
tcatgtcggggtgtagctgt

SEQ ID NO: 41852 - DNA, 20 bp, synthetic construct
  misc_feature 1..20: note = Description of Artificial Sequence: Synthetic oligonucleotide
  misc_feature 1..20: note = Target: SCN10A; (-) strand; PAM type: YTN; PAM sequence: CTT
  source 1..20: mol_type = other DNA
ttcatgtcggggtgtagctg

SEQ ID NO: 41853 - DNA, 20 bp, synthetic construct
  misc_feature 1..20: note = Description of Artificial Sequence: Synthetic oligonucleotide
  misc_feature 1..20: note = Target: SCN10A; (-) strand; PAM type: YTN; PAM sequence: TTA
  source 1..20: mol_type = other DNA
cttttcatgtcggggtgtag

SEQ ID NO: 41854 - DNA, 20 bp, synthetic construct
  misc_feature 1..20: note = Description of Artificial Sequence: Synthetic oligonucleotide
  misc_feature 1..20: note = Target: SCN10A; (-) strand; PAM type: YTN; PAM sequence: CTT
  source 1..20: mol_type = other DNA
acttttcatgtcggggtgta

SEQ ID NO: 41855 - DNA, 20 bp, synthetic construct
  misc_feature 1..20: note = Description of Artificial Sequence: Synthetic oligonucleotide
  misc_feature 1..20: note = Target: SCN10A; (-) strand; PAM type: YTN; PAM sequence: CTG
  source 1..20: mol_type = other DNA
cttacttttcatgtcggggt

SEQ ID NO: 41856 - DNA, 20 bp, synthetic construct
  misc_feature 1..20: note = Description of Artificial Sequence: Synthetic oligonucleotide
  misc_feature 1..20: note = Target: SCN10A; (-) strand; PAM type: YTN; PAM sequence: CTG
  source 1..20: mol_type = other DNA
acctgcttacttttcatgtc

SEQ ID NO: 41857 - DNA, 20 bp, synthetic construct
  misc_feature 1..20: note = Description of Artificial Sequence: Synthetic oligonucleotide
  misc_feature 1..20: note = Target: SCN10A; (-) strand; PAM type: YTN; PAM sequence: TTA
  source 1..20: mol_type = other DNA
tatcctgacctgcttacttt

SEQ ID NO: 41858 - DNA, 20 bp, synthetic construct
  misc_feature 1..20: note = Description of Artificial Sequence: Synthetic oligonucleotide
  misc_feature 1..20: note = Target: SCN10A; (-) strand; PAM type: YTN; PAM sequence: TTG
  source 1..20: mol_type = other DNA
gttatatcctgacctgctta

SEQ ID NO: 41859 - DNA, 20 bp, synthetic construct
  misc_feature 1..20: note = Description of Artificial Sequence: Synthetic oligonucleotide
  misc_feature 1..20: note = Target: SCN10A; (-) strand; PAM type: YTN; PAM sequence: TTG
  source 1..20: mol_type = other DNA
attggttatatcctgacctg

SEQ ID NO: 41860 - DNA, 20 bp, synthetic construct
  misc_feature 1..20: note = Description of Artificial Sequence: Synthetic oligonucleotide
  misc_feature 1..20: note = Target: SCN10A; (-) strand; PAM type: YTN; PAM sequence: CTT
  source 1..20: mol_type = other DNA
gattggttatatcctgacct

SEQ ID NO: 41861 - DNA, 20 bp, synthetic construct
  misc_feature 1..20: note = Description of Artificial Sequence: Synthetic oligonucleotide
  misc_feature 1..20: note = Target: SCN10A; (-) strand; PAM type: YTN; PAM sequence: TTA
  source 1..20: mol_type = other DNA
taaatgtatcttgattggtt

SEQ ID NO: 41862 - DNA, 20 bp, synthetic construct
  misc_feature 1..20: note = Description of Artificial Sequence: Synthetic oligonucleotide
  misc_feature 1..20: note = Target: SCN10A; (-) strand; PAM type: YTN; PAM sequence: CTG
  source 1..20: mol_type = other DNA
gcattataaatgtatcttga

SEQ ID NO: 41863 - DNA, 20 bp, synthetic construct
  misc_feature 1..20: note = Description of Artificial Sequence: Synthetic oligonucleotide
  misc_feature 1..20: note = Target: SCN10A; (-) strand; PAM type: YTN; PAM sequence: TTC
  source 1..20: mol_type = other DNA
acctggcattataaatgtat

SEQ ID NO: 41864 - DNA, 20 bp, synthetic construct
  misc_feature 1..20: note = Description of Artificial Sequence: Synthetic oligonucleotide
  misc_feature 1..20: note = Target: SCN10A; (-) strand; PAM type: YTN; PAM sequence: CTT
  source 1..20: mol_type = other DNA
cacctggcattataaatgta

SEQ ID NO: 41865 - DNA, 20 bp, synthetic construct
  misc_feature 1..20: note = Description of Artificial Sequence: Synthetic oligonucleotide
  misc_feature 1..20: note = Target: SCN10A; (-) strand; PAM type: YTN; PAM sequence: CTC
  source 1..20: mol_type = other DNA
accagcttcacctggcatta

SEQ ID NO: 41866 - DNA, 20 bp, synthetic construct
  misc_feature 1..20: note = Description of Artificial Sequence: Synthetic oligonucleotide
  misc_feature 1..20: note = Target: SCN10A; (-) strand; PAM type: YTN; PAM sequence: CTA
  source 1..20: mol_type = other DNA
taaaggccaaatcatgctca

SEQ ID NO: 41867 - DNA, 20 bp, synthetic construct
  misc_feature 1..20: note = Description of Artificial Sequence: Synthetic oligonucleotide
  misc_feature 1..20: note = Target: SCN10A; (-) strand; PAM type: YTN; PAM sequence: TTG
  source 1..20: mol_type = other DNA
accctataaaggccaaatca

SEQ ID NO: 41868 - DNA, 20 bp, synthetic construct
  misc_feature 1..20: note = Description of Artificial Sequence: Synthetic oligonucleotide
  misc_feature 1..20: note = Target: SCN10A; (-) strand; PAM type: YTN; PAM sequence: TTT
  source 1..20: mol_type = other DNA
gaccctataaaggccaaatc

SEQ ID NO: 41869 - DNA, 20 bp, synthetic construct
  misc_feature 1..20: note = Description of Artificial Sequence: Synthetic oligonucleotide
  misc_feature 1..20: note = Target: SCN10A; (-) strand; PAM type: YTN; PAM sequence: CTG
  source 1..20: mol_type = other DNA
aagtttgaccctataaaggc

SEQ ID NO: 41870 - DNA, 20 bp, synthetic construct
  misc_feature 1..20: note = Description of Artificial Sequence: Synthetic oligonucleotide
  misc_feature 1..20: note = Target: SCN10A; (-) strand; PAM type: YTN; PAM sequence: TTA
  source 1..20: mol_type = other DNA
gctgaagtttgaccctataa

SEQ ID NO: 41871 - DNA, 20 bp, synthetic construct
  misc_feature 1..20: note = Description of Artificial Sequence: Synthetic oligonucleotide
  misc_feature 1..20: note = Target: SCN10A; (-) strand; PAM type: YTN; PAM sequence: TTA
  source 1..20: mol_type = other DNA
tgggttagctgaagtttgac

SEQ ID NO: 41872 - DNA, 20 bp, synthetic construct
  misc_feature 1..20: note = Description of Artificial Sequence: Synthetic oligonucleotide
  misc_feature 1..20: note = Target: SCN10A; (-) strand; PAM type: YTN; PAM sequence: CTT
  source 1..20: mol_type = other DNA
atgggttagctgaagtttga

SEQ ID NO: 41873 - DNA, 20 bp, synthetic construct
  misc_feature 1..20: note = Description of Artificial Sequence: Synthetic oligonucleotide
  misc_feature 1..20: note = Target: SCN10A; (-) strand; PAM type: YTN; PAM sequence: CTG
  source 1..20: mol_type = other DNA
ggcttatgggttagctgaag

SEQ ID NO: 41874 - DNA, 20 bp, synthetic construct
  misc_feature 1..20: note = Description of Artificial Sequence: Synthetic oligonucleotide
  misc_feature 1..20: note = Target: SCN10A; (-) strand; PAM type: YTN; PAM sequence: CTG
  source 1..20: mol_type = other DNA
tccctgggcttatgggttag

SEQ ID NO: 41875 - DNA, 20 bp, synthetic construct
  misc_feature 1..20: note = Description of Artificial Sequence: Synthetic oligonucleotide
  misc_feature 1..20: note = Target: SCN10A; (-) strand; PAM type: YTN; PAM sequence: CTG
  source 1..20: mol_type = other DNA
tcaccaacagccaagagact

SEQ ID NO: 41876 - DNA, 20 bp, synthetic construct
  misc_feature 1..20: note = Description of Artificial Sequence: Synthetic oligonucleotide
  misc_feature 1..20: note = Target: SCN10A; (-) strand; PAM type: YTN; PAM sequence: CTG
  source 1..20: mol_type = other DNA
cctgtcaccaacagccaaga

SEQ ID NO: 41877 - DNA, 20 bp, synthetic construct
  misc_feature 1..20: note = Description of Artificial Sequence: Synthetic oligonucleotide
  misc_feature 1..20: note = Target: SCN10A; (-) strand; PAM type: YTN; PAM sequence: TTG
  source 1..20: mol_type = other DNA
ctgcctgtcaccaacagcca

SEQ ID NO: 41878 - DNA, 20 bp, synthetic construct
  misc_feature 1..20: note = Description of Artificial Sequence: Synthetic oligonucleotide
  misc_feature 1..20: note = Target: SCN10A; (-) strand; PAM type: YTN; PAM sequence: CTT
  source 1..20: mol_type = other DNA
gctgcctgtcaccaacagcc

SEQ ID NO: 41879 - DNA, 20 bp, synthetic construct
  misc_feature 1..20: note = Description of Artificial Sequence: Synthetic oligonucleotide
  misc_feature 1..20: note = Target: SCN10A; (-) strand; PAM type: YTN; PAM sequence: CTA
  source 1..20: mol_type = other DNA
atgaacttgctgcctgtcac

SEQ ID NO: 41880 - DNA, 20 bp, synthetic construct
  misc_feature 1..20: note = Description of Artificial Sequence: Synthetic oligonucleotide
  misc_feature 1..20: note = Target: SCN10A; (-) strand; PAM type: YTN; PAM sequence: TTC
  source 1..20: mol_type = other DNA
taatgaacttgctgcctgtc

SEQ ID NO: 41881 - DNA, 20 bp, synthetic construct
  misc_feature 1..20: note = Description of Artificial Sequence: Synthetic oligonucleotide
  misc_feature 1..20: note = Target: SCN10A; (-) strand; PAM type: YTN; PAM sequence: CTT
  source 1..20: mol_type = other DNA
ctaatgaacttgctgcctgt

SEQ ID NO: 41882 - DNA, 20 bp, synthetic construct
  misc_feature 1..20: note = Description of Artificial Sequence: Synthetic oligonucleotide
  misc_feature 1..20: note = Target: SCN10A; (-) strand; PAM type: YTN; PAM sequence: CTC
  source 1..20: mol_type = other DNA
caatcttctaatgaacttgc

SEQ ID NO: 41883 - DNA, 20 bp, synthetic construct
  misc_feature 1..20: note = Description of Artificial Sequence: Synthetic oligonucleotide
  misc_feature 1..20: note = Target: SCN10A; (-) strand; PAM type: YTN; PAM sequence: TTA
  source 1..20: mol_type = other DNA
gaacaggctccaatcttcta

SEQ ID NO: 41884 - DNA, 20 bp, synthetic construct
  misc_feature 1..20: note = Description of Artificial Sequence: Synthetic oligonucleotide
  misc_feature 1..20: note = Target: SCN10A; (-) strand; PAM type: YTN; PAM sequence: TTT
  source 1..20: mol_type = other DNA
agaacaggctccaatcttct

SEQ ID NO: 41885 - DNA, 20 bp, synthetic construct
  misc_feature 1..20: note = Description of Artificial Sequence: Synthetic oligonucleotide
  misc_feature 1..20: note = Target: SCN10A; (-) strand; PAM type: YTN; PAM sequence: CTG
  source 1..20: mol_type = other DNA
agtttagaacaggctccaat

SEQ ID NO: 41886 - DNA, 20 bp, synthetic construct
  misc_feature 1..20: note = Description of Artificial Sequence: Synthetic oligonucleotide
  misc_feature 1..20: note = Target: SCN10A; (-) strand; PAM type: YTN; PAM sequence: TTG
  source 1..20: mol_type = other DNA
aagctgagtttagaacaggc

SEQ ID NO: 41887 - DNA, 20 bp, synthetic construct
  misc_feature 1..20: note = Description of Artificial Sequence: Synthetic oligonucleotide
  misc_feature 1..20: note = Target: SCN10A; (-) strand; PAM type: YTN; PAM sequence: TTC
  source 1..20: mol_type = other DNA
caagggttgaagctgagttt

SEQ ID NO: 41888 - DNA, 20 bp, synthetic construct
  misc_feature 1..20: note = Description of Artificial Sequence: Synthetic oligonucleotide
  misc_feature 1..20: note = Target: SCN10A; (-) strand; PAM type: YTN; PAM sequence: TTT
  source 1..20: mol_type = other DNA
ccaagggttgaagctgagtt

SEQ ID NO: 41889 - DNA, 20 bp, synthetic construct
  misc_feature 1..20: note = Description of Artificial Sequence: Synthetic oligonucleotide
  misc_feature 1..20: note = Target: SCN10A; (-) strand; PAM type: YTN; PAM sequence: TTA
  source 1..20: mol_type = other DNA
tgcagggtcacagagtttcc

SEQ ID NO: 41890 - DNA, 20 bp, synthetic construct
  misc_feature 1..20: note = Description of Artificial Sequence: Synthetic oligonucleotide
  misc_feature 1..20: note = Target: SCN10A; (-) strand; PAM type: YTN; PAM sequence: CTC
  source 1..20: mol_type = other DNA
agagatcaagaatattatgc

SEQ ID NO: 41891 - DNA, 20 bp, synthetic construct
  misc_feature 1..20: note = Description of Artificial Sequence: Synthetic oligonucleotide
  misc_feature 1..20: note = Target: SCN10A; (-) strand; PAM type: YTN; PAM sequence: TTG
  source 1..20: mol_type = other DNA
agactcagagatcaagaata

SEQ ID NO: 41892 - DNA, 20 bp, synthetic construct
  misc_feature 1..20: note = Description of Artificial Sequence: Synthetic oligonucleotide
  misc_feature 1..20: note = Target: SCN10A; (-) strand; PAM type: YTN; PAM sequence: TTA
  source 1..20: mol_type = other DNA
aaattgagactcagagatca

SEQ ID NO: 41893 - DNA, 20 bp, synthetic construct
  misc_feature 1..20: note = Description of Artificial Sequence: Synthetic oligonucleotide
  misc_feature 1..20: note = Target: SCN10A; (-) strand; PAM type: YTN; PAM sequence: TTT
  source 1..20: mol_type = other DNA
aaaattgagactcagagatc

SEQ ID NO: 41894 - DNA, 20 bp, synthetic construct
  misc_feature 1..20: note = Description of Artificial Sequence: Synthetic oligonucleotide
  misc_feature 1..20: note = Target: SCN10A; (-) strand; PAM type: YTN; PAM sequence: TTA
  source 1..20: mol_type = other DNA
tacatttaaaattgagactc

SEQ ID NO: 41895 - DNA, 20 bp, synthetic construct
  misc_feature 1..20: note = Description of Artificial Sequence: Synthetic oligonucleotide
  misc_feature 1..20: note = Target: SCN10A; (-) strand; PAM type: YTN; PAM sequence: TTT
  source 1..20: mol_type = other DNA
atacatttaaaattgagact

SEQ ID NO: 41896 - DNA, 20 bp, synthetic construct
  misc_feature 1..20: note = Description of Artificial Sequence: Synthetic oligonucleotide
  misc_feature 1..20: note = Target: SCN10A; (-) strand; PAM type: YTN; PAM sequence: TTT
  source 1..20: mol_type = other DNA
tatacatttaaaattgagac

SEQ ID NO: 41897 - DNA, 20 bp, synthetic construct
  misc_feature 1..20: note = Description of Artificial Sequence: Synthetic oligonucleotide
  misc_feature 1..20: note = Target: SCN10A; (-) strand; PAM type: YTN; PAM sequence: TTA
  source 1..20: mol_type = other DNA
ttttatacatttaaaattga

SEQ ID NO: 41898 - DNA, 20 bp, synthetic construct
  misc_feature 1..20: note = Description of Artificial Sequence: Synthetic oligonucleotide
  misc_feature 1..20: note = Target: SCN10A; (-) strand; PAM type: YTN; PAM sequence: CTT
  source 1..20: mol_type = other DNA
attttatacatttaaaattg

SEQ ID NO: 41899 - DNA, 20 bp, synthetic construct
  misc_feature 1..20: note = Description of Artificial Sequence: Synthetic oligonucleotide
  misc_feature 1..20: note = Target: SCN10A; (-) strand; PAM type: YTN; PAM sequence: TTA
  source 1..20: mol_type = other DNA
tccttattttatacatttaa

SEQ ID NO: 41900 - DNA, 20 bp, synthetic construct
  misc_feature 1..20: note = Description of Artificial Sequence: Synthetic oligonucleotide
  misc_feature 1..20: note = Target: SCN10A; (-) strand; PAM type: YTN; PAM sequence: TTA
  source 1..20: mol_type = other DNA
ttatccttattttatacatt

SEQ ID NO: 41901 - DNA, 20 bp, synthetic construct
  misc_feature 1..20: note = Description of Artificial Sequence: Synthetic oligonucleotide
  misc_feature 1..20: note = Target: SCN10A; (-) strand; PAM type: YTN; PAM sequence: CTG
  source 1..20: mol_type = other DNA
tcaagcaggtgttattatcc

SEQ ID NO: 41902 - DNA, 20 bp, synthetic construct
  misc_feature 1..20: note = Description of Artificial Sequence: Synthetic oligonucleotide
  misc_feature 1..20: note = Target: SCN10A; (-) strand; PAM type: YTN; PAM sequence: TTC
  source 1..20: mol_type = other DNA
acagcagccctgtcaagcag

SEQ ID NO: 41903 - DNA, 20 bp, synthetic construct
  misc_feature 1..20: note = Description of Artificial Sequence: Synthetic oligonucleotide
  misc_feature 1..20: note = Target: SCN10A; (-) strand; PAM type: YTN; PAM sequence: CTC
  source 1..20: mol_type = other DNA
catgaatgttcacagcagcc

SEQ ID NO: 41904 - DNA, 20 bp, synthetic construct
  misc_feature 1..20: note = Description of Artificial Sequence: Synthetic oligonucleotide
  misc_feature 1..20: note = Target: SCN10A; (-) strand; PAM type: YTN; PAM sequence: CTG
  source 1..20: mol_type = other DNA
ggctccatgaatgttcacag

SEQ ID NO: 41905 - DNA, 20 bp, synthetic construct
  misc_feature 1..20: note = Description of Artificial Sequence: Synthetic oligonucleotide
  misc_feature 1..20: note = Target: SCN10A; (-) strand; PAM type: YTN; PAM sequence: CTG
  source 1..20: mol_type = other DNA
agctgggctccatgaatgtt

SEQ ID NO: 41906 - DNA, 20 bp, synthetic construct
  misc_feature 1..20: note = Description of Artificial Sequence: Synthetic oligonucleotide
  misc_feature 1..20: note = Target: SCN10A; (-) strand; PAM type: YTN; PAM sequence: CTG
  source 1..20: mol_type = other DNA
agcactgagctgggctccat

SEQ ID NO: 41907 - DNA, 20 bp, synthetic construct
  misc_feature 1..20: note = Description of Artificial Sequence: Synthetic oligonucleotide
  misc_feature 1..20: note = Target: SCN10A; (-) strand; PAM type: YTN; PAM sequence: TTC
  source 1..20: mol_type = other DNA
tgagcactgagctgggctcc

SEQ ID NO: 41908 - DNA, 20 bp, synthetic construct
  misc_feature 1..20: note = Description of Artificial Sequence: Synthetic oligonucleotide
  misc_feature 1..20: note = Target: SCN10A; (-) strand; PAM type: YTN; PAM sequence: CTA
  source 1..20: mol_type = other DNA
agttctgagcactgagctgg

SEQ ID NO: 41909 - DNA, 20 bp, synthetic construct
  misc_feature 1..20: note = Description of Artificial Sequence: Synthetic oligonucleotide
  misc_feature 1..20: note = Target: SCN10A; (-) strand; PAM type: YTN; PAM sequence: TTC
  source 1..20: mol_type = other DNA
ctaagttctgagcactgagc

SEQ ID NO: 41910 - DNA, 20 bp, synthetic construct
  misc_feature 1..20: note = Description of Artificial Sequence: Synthetic oligonucleotide
  misc_feature 1..20: note = Target: SCN10A; (-) strand; PAM type: YTN; PAM sequence: CTT
  source 1..20: mol_type = other DNA
cctaagttctgagcactgag

SEQ ID NO: 41911 - DNA, 20 bp, synthetic construct
  misc_feature 1..20: note = Description of Artificial Sequence: Synthetic oligonucleotide
  misc_feature 1..20: note = Target: SCN10A; (-) strand; PAM type: YTN; PAM sequence: CTG
  source 1..20: mol_type = other DNA
aatacttcctaagttctgag

SEQ ID NO: 41912 - DNA, 20 bp, synthetic construct
  misc_feature 1..20: note = Description of Artificial Sequence: Synthetic oligonucleotide
  misc_feature 1..20: note = Target: SCN10A; (-) strand; PAM type: YTN; PAM sequence: TTG
  source 1..20: mol_type = other DNA
actgaatacttcctaagttc

SEQ ID NO: 41913 - DNA, 20 bp, synthetic construct
  misc_feature 1..20: note = Description of Artificial Sequence: Synthetic oligonucleotide
  misc_feature 1..20: note = Target: SCN10A; (-) strand; PAM type: YTN; PAM sequence: CTT
  source 1..20: mol_type = other DNA
gactgaatacttcctaagtt

SEQ ID NO: 41914 - DNA, 20 bp, synthetic construct
  misc_feature 1..20: note = Description of Artificial Sequence: Synthetic oligonucleotide
  misc_feature 1..20: note = Target: SCN10A; (-) strand; PAM type: YTN; PAM sequence: CTG
  source 1..20: mol_type = other DNA
ccttgactgaatacttccta

SEQ ID NO: 41915 - DNA, 20 bp, synthetic construct
  misc_feature 1..20: note = Description of Artificial Sequence: Synthetic oligonucleotide
  misc_feature 1..20: note = Target: SCN10A; (-) strand; PAM type: YTN; PAM sequence: CTA
  source 1..20: mol_type = other DNA
acatggggaaatggagctgc

SEQ ID NO: 41916 - DNA, 20 bp, synthetic construct
  misc_feature 1..20: note = Description of Artificial Sequence: Synthetic oligonucleotide
  misc_feature 1..20: note = Target: SCN10A; (-) strand; PAM type: YTN; PAM sequence: TTA
  source 1..20: mol_type = other DNA
gaggctaacatggggaaatg

SEQ ID NO: 41917 - DNA, 20 bp, synthetic construct
  misc_feature 1..20: note = Description of Artificial Sequence: Synthetic oligonucleotide
  misc_feature 1..20: note = Target: SCN10A; (-) strand; PAM type: YTN; PAM sequence: CTA
  source 1..20: mol_type = other DNA
gagttagaggctaacatggg

SEQ ID NO: 41918 - DNA, 20 bp, synthetic construct
  misc_feature 1..20: note = Description of Artificial Sequence: Synthetic oligonucleotide
  misc_feature 1..20: note = Target: SCN10A; (-) strand; PAM type: YTN; PAM sequence: TTA
  source 1..20: mol_type = other DNA
ctagagttagaggctaacat

SEQ ID NO: 41919 - DNA, 20 bp, synthetic construct
  misc_feature 1..20: note = Description of Artificial Sequence: Synthetic oligonucleotide
  misc_feature 1..20: note = Target: SCN10A; (-) strand; PAM type: YTN; PAM sequence: TTC
  source 1..20: mol_type = other DNA
agagaaaattactagagtta

SEQ ID NO: 41920 - DNA, 20 bp, synthetic construct
  misc_feature 1..20: note = Description of Artificial Sequence: Synthetic oligonucleotide
  misc_feature 1..20: note = Target: SCN10A; (-) strand; PAM type: YTN; PAM sequence: TTG
  source 1..20: mol_type = other DNA
ggtccagtggtgttcagaga

SEQ ID NO: 41921 - DNA, 20 bp, synthetic construct
  misc_feature 1..20: note = Description of Artificial Sequence: Synthetic oligonucleotide
  misc_feature 1..20: note = Target: SCN10A; (-) strand; PAM type: YTN; PAM sequence: TTT
  source 1..20: mol_type = other DNA
gggtccagtggtgttcagag

SEQ ID NO: 41922 - DNA, 20 bp, synthetic construct
  misc_feature 1..20: note = Description of Artificial Sequence: Synthetic oligonucleotide
  misc_feature 1..20: note = Target: SCN10A; (-) strand; PAM type: YTN; PAM sequence: TTT
  source 1..20: mol_type = other DNA
tgggtccagtggtgttcaga

SEQ ID NO: 41923 - DNA, 20 bp, synthetic construct
  misc_feature 1..20: note = Description of Artificial Sequence: Synthetic oligonucleotide
  misc_feature 1..20: note = Target: SCN10A; (-) strand; PAM type: YTN; PAM sequence: TTG
  source 1..20: mol_type = other DNA
aatgacaggcccagtatttt

SEQ ID NO: 41924 - DNA, 20 bp, synthetic construct
  misc_feature 1..20: note = Description of Artificial Sequence: Synthetic oligonucleotide
  misc_feature 1..20: note = Target: SCN10A; (-) strand; PAM type: YTN; PAM sequence: TTG
  source 1..20: mol_type = other DNA
ttgaatgacaggcccagtat

SEQ ID NO: 41925 - DNA, 20 bp, synthetic construct
  misc_feature 1..20: note = Description of Artificial Sequence: Synthetic oligonucleotide
  misc_feature 1..20: note = Target: SCN10A; (-) strand; PAM type: YTN; PAM sequence: CTG
  source 1..20: mol_type = other DNA
ggtgttgttgaatgacaggc

SEQ ID NO: 41926 - DNA, 20 bp, synthetic construct
  misc_feature 1..20: note = Description of Artificial Sequence: Synthetic oligonucleotide
  misc_feature 1..20: note = Target: SCN10A; (-) strand; PAM type: YTN; PAM sequence: TTA
  source 1..20: mol_type = other DNA
aggcccagtctgggtgttgt

SEQ ID NO: 41927 - DNA, 20 bp, synthetic construct
  misc_feature 1..20: note = Description of Artificial Sequence: Synthetic oligonucleotide
  misc_feature 1..20: note = Target: SCN10A; (-) strand; PAM type: YTN; PAM sequence: CTG
  source 1..20: mol_type = other DNA
ttaaggcccagtctgggtgt

SEQ ID NO: 41928 - DNA, 20 bp, synthetic construct
  misc_feature 1..20: note = Description of Artificial Sequence: Synthetic oligonucleotide
  misc_feature 1..20: note = Target: SCN10A; (-) strand; PAM type: YTN; PAM sequence: TTA
  source 1..20: mol_type = other DNA
atactgttaaggcccagtct

SEQ ID NO: 41929 - DNA, 20 bp, synthetic construct
  misc_feature 1..20: note = Description of Artificial Sequence: Synthetic oligonucleotide
  misc_feature 1..20: note = Target: SCN10A; (-) strand; PAM type: YTN; PAM sequence: TTA
  source 1..20: mol_type = other DNA
gggaacatgagtgatagaaa

SEQ ID NO: 41930 - DNA, 20 bp, synthetic construct
  misc_feature 1..20: note = Description of Artificial Sequence: Synthetic oligonucleotide
  misc_feature 1..20: note = Target: SCN10A; (-) strand; PAM type: YTN; PAM sequence: CTA
  source 1..20: mol_type = other DNA
ttagggaacatgagtgatag

SEQ ID NO: 41931 - DNA, 20 bp, synthetic construct
  misc_feature 1..20: note = Description of Artificial Sequence: Synthetic oligonucleotide
  misc_feature 1..20: note = Target: SCN10A; (-) strand; PAM type: YTN; PAM sequence: TTC
  source 1..20: mol_type = other DNA
tattagggaacatgagtgat

SEQ ID NO: 41932 - DNA, 20 bp, synthetic construct
  misc_feature 1..20: note = Description of Artificial Sequence: Synthetic oligonucleotide
  misc_feature 1..20: note = Target: SCN10A; (-) strand; PAM type: YTN; PAM sequence: CTG
  source 1..20: mol_type = other DNA
ttctattagggaacatgagt

SEQ ID NO: 41933 - DNA, 20 bp, synthetic construct
  misc_feature 1..20: note = Description of Artificial Sequence: Synthetic oligonucleotide
  misc_feature 1..20: note = Target: SCN10A; (-) strand; PAM type: YTN; PAM sequence: CTA
  source 1..20: mol_type = other DNA
cacaactgttctattaggga

SEQ ID NO: 41934 - DNA, 20 bp, synthetic construct
  misc_feature 1..20: note = Description of Artificial Sequence: Synthetic oligonucleotide
  misc_feature 1..20: note = Target: SCN10A; (-) strand; PAM type: YTN; PAM sequence: CTC
  source 1..20: mol_type = other DNA
tacacaactgttctattagg

SEQ ID NO: 41935 - DNA, 20 bp, synthetic construct
  misc_feature 1..20: note = Description of Artificial Sequence: Synthetic oligonucleotide
  misc_feature 1..20: note = Target: SCN10A; (-) strand; PAM type: YTN; PAM sequence: TTA
  source 1..20: mol_type = other DNA
aatctctacacaactgttct

SEQ ID NO: 41936 - DNA, 20 bp, synthetic construct
  misc_feature 1..20: note = Description of Artificial Sequence: Synthetic oligonucleotide
  misc_feature 1..20: note = Target: SCN10A; (-) strand; PAM type: YTN; PAM sequence: CTG
  source 1..20: mol_type = other DNA
gaattaaatctctacacaac

SEQ ID NO: 41937 - DNA, 20 bp, synthetic construct
  misc_feature 1..20: note = Description of Artificial Sequence: Synthetic oligonucleotide
  misc_feature 1..20: note = Target: SCN10A; (-) strand; PAM type: YTN; PAM sequence: CTA
  source 1..20: mol_type = other DNA
gggtctggaattaaatctct

SEQ ID NO: 41938 - DNA, 20 bp, synthetic construct
  misc_feature 1..20: note = Description of Artificial Sequence: Synthetic oligonucleotide
  misc_feature 1..20: note = Target: SCN10A; (-) strand; PAM type: YTN; PAM sequence: CTC
  source 1..20: mol_type = other DNA
aagtctagggtctggaatta

SEQ ID NO: 41939 - DNA, 20 bp, synthetic construct
  misc_feature 1..20: note = Description of Artificial Sequence: Synthetic oligonucleotide
  misc_feature 1..20: note = Target: SCN10A; (-) strand; PAM type: YTN; PAM sequence: TTC
  source 1..20: mol_type = other DNA
tcaagtctagggtctggaat

SEQ ID NO: 41940 - DNA, 20 bp, synthetic construct
  misc_feature 1..20: note = Description of Artificial Sequence: Synthetic oligonucleotide
  misc_feature 1..20: note = Target: SCN10A; (-) strand; PAM type: YTN; PAM sequence: TTC
  source 1..20: mol_type = other DNA
aaaggagattctcaagtcta

SEQ ID NO: 41941 - DNA, 20 bp, synthetic construct
  misc_feature 1..20: note = Description of Artificial Sequence: Synthetic oligonucleotide
  misc_feature 1..20: note = Target: SCN10A; (-) strand; PAM type: YTN; PAM sequence: TTG
  source 1..20: mol_type = other DNA
ttcaaaggagattctcaagt

SEQ ID NO: 41942 - DNA, 20 bp, synthetic construct
  misc_feature 1..20: note = Description of Artificial Sequence: Synthetic oligonucleotide
  misc_feature 1..20: note = Target: SCN10A; (-) strand; PAM type: YTN; PAM sequence: CTG
  source 1..20: mol_type = other DNA
ggaggagattgttcaaagga

SEQ ID NO: 41943 - DNA, 20 bp, synthetic construct
  misc_feature 1..20: note = Description of Artificial Sequence: Synthetic oligonucleotide
  misc_feature 1..20: note = Target: SCN10A; (-) strand; PAM type: YTN; PAM sequence: TTG
  source 1..20: mol_type = other DNA
ccatcaaagtgaggaaagac

SEQ ID NO: 41944 - DNA, 20 bp, synthetic construct
  misc_feature 1..20: note = Description of Artificial Sequence: Synthetic oligonucleotide
  misc_feature 1..20: note = Target: SCN10A; (-) strand; PAM type: YTN; PAM sequence: CTG
  source 1..20: mol_type = other DNA
gaaaaggagatggattgcca

SEQ ID NO: 41945 - DNA, 20 bp, synthetic construct
  misc_feature 1..20: note = Description of Artificial Sequence: Synthetic oligonucleotide
  misc_feature 1..20: note = Target: SCN10A; (-) strand; PAM type: YTN; PAM sequence: TTC
  source 1..20: mol_type = other DNA
tggaaaaggagatggattgc

SEQ ID NO: 41946 - DNA, 20 bp, synthetic construct
  misc_feature 1..20: note = Description of Artificial Sequence: Synthetic oligonucleotide
  misc_feature 1..20: note = Target: SCN10A; (-) strand; PAM type: YTN; PAM sequence: CTG
  source 1..20: mol_type = other DNA
ttctggaaaaggagatggat

SEQ ID NO: 41947 - DNA, 20 bp, synthetic construct
  misc_feature 1..20: note = Description of Artificial Sequence: Synthetic oligonucleotide
  misc_feature 1..20: note = Target: SCN10A; (-) strand; PAM type: YTN; PAM sequence: TTA
  source 1..20: mol_type = other DNA
aaatctgttctggaaaagga

SEQ ID NO: 41948 - DNA, 20 bp, synthetic construct
  misc_feature 1..20: note = Description of Artificial Sequence: Synthetic oligonucleotide
  misc_feature 1..20: note = Target: SCN10A; (-) strand; PAM type: YTN; PAM sequence: CTT
  source 1..20: mol_type = other DNA
aaaatctgttctggaaaagg

SEQ ID NO: 41949 - DNA, 20 bp, synthetic construct
  misc_feature 1..20: note = Description of Artificial Sequence: Synthetic oligonucleotide
  misc_feature 1..20: note = Target: SCN10A; (-) strand; PAM type: YTN; PAM sequence: TTG
  source 1..20: mol_type = other DNA
aaagcagggggcaggtggtg

SEQ ID NO: 41950 - DNA, 20 bp, synthetic construct
  misc_feature 1..20: note = Description of Artificial Sequence: Synthetic oligonucleotide
  misc_feature 1..20: note = Target: SCN10A; (-) strand; PAM type: YTN; PAM sequence: CTT
  source 1..20: mol_type = other DNA
gaaagcagggggcaggtggt

SEQ ID NO: 41951 - DNA, 20 bp, synthetic construct
  misc_feature 1..20: note = Description of Artificial Sequence: Synthetic oligonucleotide
  misc_feature 1..20: note = Target: SCN10A; (-) strand; PAM type: YTN; PAM sequence: TTA
  source 1..20: mol_type = other DNA
tggtcttgaaagcagggggc

SEQ ID NO: 41952 - DNA, 20 bp, synthetic construct
  misc_feature 1..20: note = Description of Artificial Sequence: Synthetic oligonucleotide
  misc_feature 1..20: note = Target: SCN10A; (-) strand; PAM type: YTN; PAM sequence: TTT
  source 1..20: mol_type = other DNA
atggtcttgaaagcaggggg

SEQ ID NO: 41953 - DNA, 20 bp, synthetic construct
  misc_feature 1..20: note = Description of Artificial Sequence: Synthetic oligonucleotide
  misc_feature 1..20: note = Target: SCN10A; (-) strand; PAM type: YTN; PAM sequence: TTT
  source 1..20: mol_type = other DNA
tatggtcttgaaagcagggg

SEQ ID NO: 41954 - DNA, 20 bp, synthetic construct
  misc_feature 1..20: note = Description of Artificial Sequence: Synthetic oligonucleotide
  misc_feature 1..20: note = Target: SCN10A; (-) strand; PAM type: YTN; PAM sequence: CTT
  source 1..20: mol_type = other DNA
ttatggtcttgaaagcaggg

SEQ ID NO: 41955 - DNA, 20 bp, synthetic construct
  misc_feature 1..20: note = Description of Artificial Sequence: Synthetic oligonucleotide
  misc_feature 1..20: note = Target: SCN10A; (-) strand; PAM type: YTN; PAM sequence: TTA
  source 1..20: mol_type = other DNA
cttttatggtcttgaaagca

SEQ ID NO: 41956 - DNA, 20 bp, synthetic construct
  misc_feature 1..20: note = Description of Artificial Sequence: Synthetic oligonucleotide
  misc_feature 1..20: note = Target: SCN10A; (-) strand; PAM type: YTN; PAM sequence: CTT
  source 1..20: mol_type = other DNA
acttttatggtcttgaaagc

SEQ ID NO: 41957 - DNA, 20 bp, synthetic construct
  misc_feature 1..20: note = Description of Artificial Sequence: Synthetic oligonucleotide
  misc_feature 1..20: note = Target: SCN10A; (-) strand; PAM type: YTN; PAM sequence: CTC
  source 1..20: mol_type = other DNA
cagcagaccttacttttatg

SEQ ID NO: 41958 - DNA, 20 bp, synthetic construct
  misc_feature 1..20: note = Description of Artificial Sequence: Synthetic oligonucleotide
  misc_feature 1..20: note = Target: SCN10A; (-) strand; PAM type: YTN; PAM sequence: CTC
  source 1..20: mol_type = other DNA
agaccgtaagatgatggagt

SEQ ID NO: 41959 - DNA, 20 bp, synthetic construct
  misc_feature 1..20: note = Description of Artificial Sequence: Synthetic oligonucleotide
  misc_feature 1..20: note = Target: SCN10A; (-) strand; PAM type: YTN; PAM sequence: CTG
  source 1..20: mol_type = other DNA
agaacctcagaccgtaagat

SEQ ID NO: 41960 - DNA, 20 bp, synthetic construct
  misc_feature 1..20: note = Description of Artificial Sequence: Synthetic oligonucleotide
  misc_feature 1..20: note = Target: SCN10A; (-) strand; PAM type: YTN; PAM sequence: CTC
  source 1..20: mol_type = other DNA
ctgagaacctcagaccgtaa

SEQ ID NO: 41961 - DNA, 20 bp, synthetic construct
  misc_feature 1..20: note = Description of Artificial Sequence: Synthetic oligonucleotide
  misc_feature 1..20: note = Target: SCN10A; (-) strand; PAM type: YTN; PAM sequence: CTC
  source 1..20: mol_type = other DNA
ctcctgagaacctcagaccg

SEQ ID NO: 41962 - DNA, 20 bp, synthetic construct
  misc_feature 1..20: note = Description of Artificial Sequence: Synthetic oligonucleotide
  misc_feature 1..20: note = Target: SCN10A; (-) strand; PAM type: YTN; PAM sequence: CTG
  source 1..20: mol_type = other DNA
acagggaataatcactcctc

SEQ ID NO: 41963 - DNA, 20 bp, synthetic construct
  misc_feature 1..20: note = Description of Artificial Sequence: Synthetic oligonucleotide
  misc_feature 1..20: note = Target: SCN10A; (-) strand; PAM type: YTN; PAM sequence: CTC
  source 1..20: mol_type = other DNA
aggggctgacagggaataat

SEQ ID NO: 41964 - DNA, 20 bp, synthetic construct
  misc_feature 1..20: note = Description of Artificial Sequence: Synthetic oligonucleotide
  misc_feature 1..20: note = Target: SCN10A; (-) strand; PAM type: YTN; PAM sequence: CTA
  source 1..20: mol_type = other DNA
gaacctcaggggctgacagg

SEQ ID NO: 41965 - DNA, 20 bp, synthetic construct
  misc_feature 1..20: note = Description of Artificial Sequence: Synthetic oligonucleotide
  misc_feature 1..20: note = Target: SCN10A; (-) strand; PAM type: YTN; PAM sequence: CTG
  source 1..20: mol_type = other DNA
tgtgcacagcccatggctag

SEQ ID NO: 41966 - DNA, 20 bp, synthetic construct
  misc_feature 1..20: note = Description of Artificial Sequence: Synthetic oligonucleotide
  misc_feature 1..20: note = Target: SCN10A; (-) strand; PAM type: YTN; PAM sequence: CTA
  source 1..20: mol_type = other DNA
ctgtgtgcacagcccatggc

SEQ ID NO: 41967 - DNA, 20 bp, synthetic construct
  misc_feature 1..20: note = Description of Artificial Sequence: Synthetic oligonucleotide
  misc_feature 1..20: note = Target: SCN10A; (-) strand; PAM type: YTN; PAM sequence: TTC
  source 1..20: mol_type = other DNA
aggcacctactgtgtgcaca

SEQ ID NO: 41968 - DNA, 20 bp, synthetic construct
  misc_feature 1..20: note = Description of Artificial Sequence: Synthetic oligonucleotide
  misc_feature 1..20: note = Target: SCN10A; (-) strand; PAM type: YTN; PAM sequence: TTT
  source 1..20: mol_type = other DNA
caggcacctactgtgtgcac

SEQ ID NO: 41969 - DNA, 20 bp, synthetic construct
  misc_feature 1..20: note = Description of Artificial Sequence: Synthetic oligonucleotide
  misc_feature 1..20: note = Target: SCN10A; (-) strand; PAM type: YTN; PAM sequence: TTT
  source 1..20: mol_type = other DNA
tcaggcacctactgtgtgca

SEQ ID NO: 41970 - DNA, 20 bp, synthetic construct
  misc_feature 1..20: note = Description of Artificial Sequence: Synthetic oligonucleotide
  misc_feature 1..20: note = Target: SCN10A; (-) strand; PAM type: YTN; PAM sequence: CTC
  source 1..20: mol_type = other DNA
acacgaagtgttttcaggca

SEQ ID NO: 41971 - DNA, 20 bp, synthetic construct
  misc_feature 1..20: note = Description of Artificial Sequence: Synthetic oligonucleotide
  misc_feature 1..20: note = Target: SCN10A; (-) strand; PAM type: YTN; PAM sequence: CTC
  source 1..20: mol_type = other DNA
catgctcacacgaagtgttt

SEQ ID NO: 41972 - DNA, 20 bp, synthetic construct
  misc_feature 1..20: note = Description of Artificial Sequence: Synthetic oligonucleotide
  misc_feature 1..20: note = Target: SCN10A; (-) strand; PAM type: YTN; PAM sequence: TTC
  source 1..20: mol_type = other DNA
tccatgctcacacgaagtgt

SEQ ID NO: 41973 - DNA, 20 bp, synthetic construct
  misc_feature 1..20: note = Description of Artificial Sequence: Synthetic oligonucleotide
  misc_feature 1..20: note = Target: SCN10A; (-) strand; PAM type: YTN; PAM sequence: CTT
  source 1..20: mol_type = other DNA
ctccatgctcacacgaagtg

SEQ ID NO: 41974 - DNA, 20 bp, synthetic construct
  misc_feature 1..20: note = Description of Artificial Sequence: Synthetic oligonucleotide
  misc_feature 1..20: note = Target: SCN10A; (-) strand; PAM type: YTN; PAM sequence: TTG
  source 1..20: mol_type = other DNA
gccttctccatgctcacacg

SEQ ID NO: 41975 - DNA, 20 bp, synthetic construct
  misc_feature 1..20: note = Description of Artificial Sequence: Synthetic oligonucleotide
  misc_feature 1..20: note = Target: SCN10A; (-) strand; PAM type: YTN; PAM sequence: CTT
  source 1..20: mol_type = other DNA
ggccttctccatgctcacac

SEQ ID NO: 41976 - DNA, 20 bp, synthetic construct
  misc_feature 1..20: note = Description of Artificial Sequence: Synthetic oligonucleotide
  misc_feature 1..20: note = Target: SCN10A; (-) strand; PAM type: YTN; PAM sequence: CTC
  source 1..20: mol_type = other DNA
ttggccttctccatgctcac

SEQ ID NO: 41977 - DNA, 20 bp, synthetic construct
  misc_feature 1..20: note = Description of Artificial Sequence: Synthetic oligonucleotide
  misc_feature 1..20: note = Target: SCN10A; (-) strand; PAM type: YTN; PAM sequence: TTC
  source 1..20: mol_type = other DNA
tcttggccttctccatgctc

SEQ ID NO: 41978 - DNA, 20 bp, synthetic construct
  misc_feature 1..20: note = Description of Artificial Sequence: Synthetic oligonucleotide
  misc_feature 1..20: note = Target: SCN10A; (-) strand; PAM type: YTN; PAM sequence: CTC
  source 1..20: mol_type = other DNA
agtgaaatgaagaggttctc

SEQ ID NO: 41979 - DNA, 20 bp, synthetic construct
  misc_feature 1..20: note = Description of Artificial Sequence: Synthetic oligonucleotide
  misc_feature 1..20: note = Target: SCN10A; (-) strand; PAM type: YTN; PAM sequence: CTC
  source 1..20: mol_type = other DNA
tcagtgaaatgaagaggttc

SEQ ID NO: 41980 - DNA, 20 bp, synthetic construct
  misc_feature 1..20: note = Description of Artificial Sequence: Synthetic oligonucleotide
  misc_feature 1..20: note = Target: SCN10A; (-) strand; PAM type: YTN; PAM sequence: CTC
  source 1..20: mol_type = other DNA
tctcagtgaaatgaagaggt

SEQ ID NO: 41981 - DNA, 20 bp, synthetic construct
  misc_feature 1..20: note = Description of Artificial Sequence: Synthetic oligonucleotide
  misc_feature 1..20: note = Target: SCN10A; (-) strand; PAM type: YTN; PAM sequence: CTG
  source 1..20: mol_type = other DNA
ctctctcagtgaaatgaaga

SEQ ID NO: 41982 - DNA, 20 bp, synthetic construct
  misc_feature 1..20: note = Description of Artificial Sequence: Synthetic oligonucleotide
  misc_feature 1..20: note = Target: SCN10A; (-) strand; PAM type: YTN; PAM sequence: TTG
  source 1..20: mol_type = other DNA
ggctgctctctcagtgaaat

SEQ ID NO: 41983 - DNA, 20 bp, synthetic construct
  misc_feature 1..20: note = Description of Artificial Sequence: Synthetic oligonucleotide
  misc_feature 1..20: note = Target: SCN10A; (-) strand; PAM type: YTN; PAM sequence: CTT
  source 1..20: mol_type = other DNA
gggctgctctctcagtgaaa

SEQ ID NO: 41984 - DNA, 20 bp, synthetic construct
  misc_feature 1..20: note = Description of Artificial Sequence: Synthetic oligonucleotide
  misc_feature 1..20: note = Target: SCN10A; (-) strand; PAM type: YTN; PAM sequence: TTA
  source 1..20: mol_type = other DNA
aatgccttgggctgctctct

SEQ ID NO: 41985 - DNA, 20 bp, synthetic construct
  misc_feature 1..20: note = Description of Artificial Sequence: Synthetic oligonucleotide
  misc_feature 1..20: note = Target: SCN10A; (-) strand; PAM type: YTN; PAM sequence: TTT
  source 1..20: mol_type = other DNA
aaatgccttgggctgctctc

SEQ ID NO: 41986 - DNA, 20 bp, synthetic construct
  misc_feature 1..20: note = Description of Artificial Sequence: Synthetic oligonucleotide
  misc_feature 1..20: note = Target: SCN10A; (-) strand; PAM type: YTN; PAM sequence: TTT
  source 1..20: mol_type = other DNA
taaatgccttgggctgctct

SEQ ID NO: 41987 - DNA, 20 bp, synthetic construct
  misc_feature 1..20: note = Description of Artificial Sequence: Synthetic oligonucleotide
  misc_feature 1..20: note = Target: SCN10A; (-) strand; PAM type: YTN; PAM sequence: TTC
  source 1..20: mol_type = other DNA
caagagtagcaagttttaaa

SEQ ID NO: 41988 - DNA, 20 bp, synthetic construct
  misc_feature 1..20: note = Description of Artificial Sequence: Synthetic oligonucleotide
  misc_feature 1..20: note = Target: SCN10A; (-) strand; PAM type: YTN; PAM sequence: TTT
  source 1..20: mol_type = other DNA
ccaagagtagcaagttttaa

SEQ ID NO: 41989 - DNA, 20 bp, synthetic construct
  misc_feature 1..20: note = Description of Artificial Sequence: Synthetic oligonucleotide
  misc_feature 1..20: note = Target: SCN10A; (-) strand; PAM type: YTN; PAM sequence: CTT
  source 1..20: mol_type = other DNA
tccaagagtagcaagtttta

SEQ ID NO: 41990 - DNA, 20 bp, synthetic construct
  misc_feature 1..20: note = Description of Artificial Sequence: Synthetic oligonucleotide
  misc_feature 1..20: note = Target: SCN10A; (-) strand; PAM type: YTN; PAM sequence: TTG
  source 1..20: mol_type = other DNA
cagctttccaagagtagcaa

SEQ ID NO: 41991 - DNA, 20 bp, synthetic construct
  misc_feature 1..20: note = Description of Artificial Sequence: Synthetic oligonucleotide
  misc_feature 1..20: note = Target: SCN10A; (-) strand; PAM type: YTN; PAM sequence: TTT
  source 1..20: mol_type = other DNA
gcagctttccaagagtagca

SEQ ID NO: 41992 - DNA, 20 bp, synthetic construct
  misc_feature 1..20: note = Description of Artificial Sequence: Synthetic oligonucleotide
  misc_feature 1..20: note = Target: SCN10A; (-) strand; PAM type: YTN; PAM sequence: CTG
  source 1..20: mol_type = other DNA
tatttgcagctttccaagag

SEQ ID NO: 41993 - DNA, 20 bp, synthetic construct
  misc_feature 1..20: note = Description of Artificial Sequence: Synthetic oligonucleotide
  misc_feature 1..20: note = Target: SCN10A; (-) strand; PAM type: YTN; PAM sequence: TTA
  source 1..20: mol_type = other DNA
gaagaaccctgtatttgcag

SEQ ID NO: 41994 - DNA, 20 bp, synthetic construct
  misc_feature 1..20: note = Description of Artificial Sequence: Synthetic oligonucleotide
  misc_feature 1..20: note = Target: SCN10A; (-) strand; PAM type: YTN; PAM sequence: TTA
  source 1..20: mol_type = other DNA
tgttagaagaaccctgtatt

SEQ ID NO: 41995 - DNA, 20 bp, synthetic construct
  misc_feature 1..20: note = Description of Artificial Sequence: Synthetic oligonucleotide
  misc_feature 1..20: note = Target: SCN10A; (-) strand; PAM type: YTN; PAM sequence: TTT
  source 1..20: mol_type = other DNA
atgttagaagaaccctgtat

SEQ ID NO: 41996 - DNA, 20 bp, synthetic construct
  misc_feature 1..20: note = Description of Artificial Sequence: Synthetic oligonucleotide
  misc_feature 1..20: note = Target: SCN10A; (-) strand; PAM type: YTN; PAM sequence: TTG
  source 1..20: mol_type = other DNA
aaatacgtgtttatgttaga

SEQ ID NO: 41997 - DNA, 20 bp, synthetic construct
  misc_feature 1..20: note = Description of Artificial Sequence: Synthetic oligonucleotide
  misc_feature 1..20: note = Target: SCN10A; (-) strand; PAM type: YTN; PAM sequence: TTT
  source 1..20: mol_type = other DNA
gaaatacgtgtttatgttag

SEQ ID NO: 41998 - DNA, 20 bp, synthetic construct
  misc_feature 1..20: note = Description of Artificial Sequence: Synthetic oligonucleotide
  misc_feature 1..20: note = Target: SCN10A; (-) strand; PAM type: YTN; PAM sequence: TTT
  source 1..20: mol_type = other DNA
tgaaatacgtgtttatgtta

SEQ ID NO: 41999 - DNA, 20 bp, synthetic construct
  misc_feature 1..20: note = Description of Artificial Sequence: Synthetic oligonucleotide
  misc_feature 1..20: note = Target: SCN10A; (-) strand; PAM type: YTN; PAM sequence: TTT
  source 1..20: mol_type = other DNA
ttgaaatacgtgtttatgtt

SEQ ID NO: 42000 - DNA, 20 bp, synthetic construct
  misc_feature 1..20: note = Description of Artificial Sequence: Synthetic oligonucleotide
  misc_feature 1..20: note = Target: SCN10A; (-) strand; PAM type: YTN; PAM sequence: CTT
  source 1..20: mol_type = other DNA
tttgaaatacgtgtttatgt

SEQ ID NO: 42001 - DNA, 20 bp, synthetic construct
  misc_feature 1..20: note = Description of Artificial Sequence: Synthetic oligonucleotide
  misc_feature 1..20: note = Target: SCN10A; (-) strand; PAM type: YTN; PAM sequence: CTA
  source 1..20: mol_type = other DNA
aaaccaaggaaataaccaac

SEQ ID NO: 42002 - DNA, 20 bp, synthetic construct
  misc_feature 1..20: note = Description of Artificial Sequence: Synthetic oligonucleotide
  misc_feature 1..20: note = Target: SCN10A; (-) strand; PAM type: YTN; PAM sequence: TTC
  source 1..20: mol_type = other DNA
taaaaccaaggaaataacca

SEQ ID NO: 42003 - DNA, 20 bp, synthetic construct
  misc_feature 1..20: note = Description of Artificial Sequence: Synthetic oligonucleotide
  misc_feature 1..20: note = Target: SCN10A; (-) strand; PAM type: YTN; PAM sequence: CTT
  source 1..20: mol_type = other DNA
ctaaaaccaaggaaataacc

SEQ ID NO: 42004 - DNA, 20 bp, synthetic construct
  misc_feature 1..20: note = Description of Artificial Sequence: Synthetic oligonucleotide
  misc_feature 1..20: note = Target: SCN10A; (-) strand; PAM type: YTN; PAM sequence: CTC
  source 1..20: mol_type = other DNA
ttctaaaaccaaggaaataa

SEQ ID NO: 42005 - DNA, 20 bp, synthetic construct
  misc_feature 1..20: note = Description of Artificial Sequence: Synthetic oligonucleotide
  misc_feature 1..20: note = Target: SCN10A; (-) strand; PAM type: YTN; PAM sequence: TTG
  source 1..20: mol_type = other DNA
ggatgctcttctaaaaccaa

SEQ ID NO: 42006 - DNA, 20 bp, synthetic construct
  misc_feature 1..20: note = Description of Artificial Sequence: Synthetic oligonucleotide
  misc_feature 1..20: note = Target: SCN10A; (-) strand; PAM type: YTN; PAM sequence: TTT
  source 1..20: mol_type = other DNA
gggatgctcttctaaaacca

SEQ ID NO: 42007 - DNA, 20 bp, synthetic construct
  misc_feature 1..20: note = Description of Artificial Sequence: Synthetic oligonucleotide
  misc_feature 1..20: note = Target: SCN10A; (-) strand; PAM type: YTN; PAM sequence: CTT
  source 1..20: mol_type = other DNA
tgggatgctcttctaaaacc

SEQ ID NO: 42008 - DNA, 20 bp, synthetic construct
  misc_feature 1..20: note = Description of Artificial Sequence: Synthetic oligonucleotide
  misc_feature 1..20: note = Target: SCN10A; (-) strand; PAM type: YTN; PAM sequence: TTG
  source 1..20: mol_type = other DNA
ggggtctttgggatgctctt

SEQ ID NO: 42009 - DNA, 20 bp, synthetic construct
  misc_feature 1..20: note = Description of Artificial Sequence: Synthetic oligonucleotide
  misc_feature 1..20: note = Target: SCN10A; (-) strand; PAM type: YTN; PAM sequence: TTT
  source 1..20: mol_type = other DNA
gggggtctttgggatgctct

SEQ ID NO: 42010 - DNA, 20 bp, synthetic construct
  misc_feature 1..20: note = Description of Artificial Sequence: Synthetic oligonucleotide
  misc_feature 1..20: note = Target: SCN10A; (-) strand; PAM type: YTN; PAM sequence: CTG
  source 1..20: mol_type = other DNA
tttgggggtctttgggatgc

SEQ ID NO: 42011 - DNA, 20 bp, synthetic construct
  misc_feature 1..20: note = Description of Artificial Sequence: Synthetic oligonucleotide
  misc_feature 1..20: note = Target: SCN10A; (-) strand; PAM type: YTN; PAM sequence: CTC
  source 1..20: mol_type = other DNA
tgtttgggggtctttgggat

SEQ ID NO: 42012 - DNA, 20 bp, synthetic construct
  misc_feature 1..20: note = Description of Artificial Sequence: Synthetic oligonucleotide
  misc_feature 1..20: note = Target: SCN10A; (-) strand; PAM type: YTN; PAM sequence: TTG
  source 1..20: mol_type = other DNA
cgagtaagtgggcagccacg

SEQ ID NO: 42013 - DNA, 20 bp, synthetic construct
  misc_feature 1..20: note = Description of Artificial Sequence: Synthetic oligonucleotide
  misc_feature 1..20: note = Target: SCN10A; (-) strand; PAM type: YTN; PAM sequence: CTC
  source 1..20: mol_type = other DNA
cattgcgagtaagtgggcag

SEQ ID NO: 42014 - DNA, 20 bp, synthetic construct
  misc_feature 1..20: note = Description of Artificial Sequence: Synthetic oligonucleotide
  misc_feature 1..20: note = Target: SCN10A; (-) strand; PAM type: YTN; PAM sequence: CTC
  source 1..20: mol_type = other DNA
tccattgcgagtaagtgggc

SEQ ID NO: 42015 - DNA, 20 bp, synthetic construct
  misc_feature 1..20: note = Description of Artificial Sequence: Synthetic oligonucleotide
  misc_feature 1..20: note = Target: SCN10A; (-) strand; PAM type: YTN; PAM sequence: TTC
  source 1..20: mol_type = other DNA
tctccattgcgagtaagtgg

SEQ ID NO: 42016 - DNA, 20 bp, synthetic construct
  misc_feature 1..20: note = Description of Artificial Sequence: Synthetic oligonucleotide
  misc_feature 1..20: note = Target: SCN10A; (-) strand; PAM type: YTN; PAM sequence: TTG
  source 1..20: mol_type = other DNA
tggtggttctctccattgcg

SEQ ID NO: 42017 - DNA, 20 bp, synthetic construct
  misc_feature 1..20: note = Description of Artificial Sequence: Synthetic oligonucleotide
  misc_feature 1..20: note = Target: SCN10A; (-) strand; PAM type: YTN; PAM sequence: TTC
  source 1..20: mol_type = other DNA
attgtggtggttctctccat

SEQ ID NO: 42018 - DNA, 20 bp, synthetic construct
  misc_feature 1..20: note = Description of Artificial Sequence: Synthetic oligonucleotide
  misc_feature 1..20: note = Target: SCN10A; (-) strand; PAM type: YTN; PAM sequence: CTT
  source 1..20: mol_type = other DNA
cattgtggtggttctctcca

SEQ ID NO: 42019 - DNA, 20 bp, synthetic construct
  misc_feature 1..20: note = Description of Artificial Sequence: Synthetic oligonucleotide
  misc_feature 1..20: note = Target: SCN10A; (-) strand; PAM type: YTN; PAM sequence: TTG
  source 1..20: mol_type = other DNA
acttcattgtggtggttctc

SEQ ID NO: 42020 - DNA, 20 bp, synthetic construct
  misc_feature 1..20: note = Description of Artificial Sequence: Synthetic oligonucleotide
  misc_feature 1..20: note = Target: SCN10A; (-) strand; PAM type: YTN; PAM sequence: TTT
  source 1..20: mol_type = other DNA
gacttcattgtggtggttct

SEQ ID NO: 42021 - DNA, 20 bp, synthetic construct
  misc_feature 1..20: note = Description of Artificial Sequence: Synthetic oligonucleotide
  misc_feature 1..20: note = Target: SCN10A; (-) strand; PAM type: YTN; PAM sequence: CTG
  source 1..20: mol_type = other DNA
gaatgtgtttgacttcattg

SEQ ID NO: 42022 - DNA, 20 bp, synthetic construct
  misc_feature 1..20: note = Description of Artificial Sequence: Synthetic oligonucleotide
  misc_feature 1..20: note = Target: SCN10A; (-) strand; PAM type: YTN; PAM sequence: TTC
  source 1..20: mol_type = other DNA
acaaatggctggaatgtgtt

SEQ ID NO: 42023 - DNA, 20 bp, synthetic construct
  misc_feature 1..20: note = Description of Artificial Sequence: Synthetic oligonucleotide
  misc_feature 1..20: note = Target: SCN10A; (-) strand; PAM type: YTN; PAM sequence: CTT
  source 1..20: mol_type = other DNA
cacaaatggctggaatgtgt

SEQ ID NO: 42024 - DNA, 20 bp, synthetic construct
  misc_feature 1..20: note = Description of Artificial Sequence: Synthetic oligonucleotide
  misc_feature 1..20: note = Target: SCN10A; (-) strand; PAM type: YTN; PAM sequence: CTA
  source 1..20: mol_type = other DNA
cttcacaaatggctggaatg

SEQ ID NO: 42025 - DNA, 20 bp, synthetic construct
  misc_feature 1..20: note = Description of Artificial Sequence: Synthetic oligonucleotide
  misc_feature 1..20: note = Target: SCN10A; (-) strand; PAM type: YTN; PAM sequence: TTG
  source 1..20: mol_type = other DNA
aggcagtactacttcacaaa

SEQ ID NO: 42026 - DNA, 20 bp, synthetic construct
  misc_feature 1..20: note = Description of Artificial Sequence: Synthetic oligonucleotide
  misc_feature 1..20: note = Target: SCN10A; (-) strand; PAM type: YTN; PAM sequence: TTT
  source 1..20: mol_type = other DNA
gaggcagtactacttcacaa

SEQ ID NO: 42027 - DNA, 20 bp, synthetic construct
  misc_feature 1..20: note = Description of Artificial Sequence: Synthetic oligonucleotide
  misc_feature 1..20: note = Target: SCN10A; (-) strand; PAM type: YTN; PAM sequence: CTT
  source 1..20: mol_type = other DNA
tgaggcagtactacttcaca

SEQ ID NO: 42028 - DNA, 20 bp, synthetic construct
  misc_feature 1..20: note = Description of Artificial Sequence: Synthetic oligonucleotide
  misc_feature 1..20: note = Target: SCN10A; (-) strand; PAM type: YTN; PAM sequence: TTC
  source 1..20: mol_type = other DNA
gctttgaggcagtactactt

SEQ ID NO: 42029 - DNA, 20 bp, synthetic construct
  misc_feature 1..20: note = Description of Artificial Sequence: Synthetic oligonucleotide
  misc_feature 1..20: note = Target: SCN10A; (-) strand; PAM type: YTN; PAM sequence: TTC
  source 1..20: mol_type = other DNA
acaggcgaatgtgtcatgaa

SEQ ID NO: 42030 - DNA, 20 bp, synthetic construct
  misc_feature 1..20: note = Description of Artificial Sequence: Synthetic oligonucleotide
  misc_feature 1..20: note = Target: SCN10A; (-) strand; PAM type: YTN; PAM sequence: CTT
  source 1..20: mol_type = other DNA
cacaggcgaatgtgtcatga

SEQ ID NO: 42031 - DNA, 20 bp, synthetic construct
  misc_feature 1..20: note = Description of Artificial Sequence: Synthetic oligonucleotide
  misc_feature 1..20: note = Target: SCN10A; (-) strand; PAM type: YTN; PAM sequence: TTG
  source 1..20: mol_type = other DNA
tggccgtcttcacaggcgaa

SEQ ID NO: 42032 - DNA, 20 bp, synthetic construct
  misc_feature 1..20: note = Description of Artificial Sequence: Synthetic oligonucleotide
  misc_feature 1..20: note = Target: SCN10A; (-) strand; PAM type: YTN; PAM sequence: TTT
  source 1..20: mol_type = other DNA
gtggccgtcttcacaggcga

SEQ ID NO: 42033 - DNA, 20 bp, synthetic construct
  misc_feature 1..20: note = Description of Artificial Sequence: Synthetic oligonucleotide
  misc_feature 1..20: note = Target: SCN10A; (-) strand; PAM type: YTN; PAM sequence: CTT
  source 1..20: mol_type = other DNA
tgtggccgtcttcacaggcg

SEQ ID NO: 42034 - DNA, 20 bp, synthetic construct
  misc_feature 1..20: note = Description of Artificial Sequence: Synthetic oligonucleotide
  misc_feature 1..20: note = Target: SCN10A; (-) strand; PAM type: YTN; PAM sequence: TTC
  source 1..20: mol_type = other DNA
tttgtggccgtcttcacagg

SEQ ID NO: 42035 - DNA, 20 bp, synthetic construct
  misc_feature 1..20: note = Description of Artificial Sequence: Synthetic oligonucleotide
  misc_feature 1..20: note = Target: SCN10A; (-) strand; PAM type: YTN; PAM sequence: CTG
  source 1..20: mol_type = other DNA
ggcaaaatcaaccagttctt

SEQ ID NO: 42036 - DNA, 20 bp, synthetic construct
  misc_feature 1..20: note = Description of Artificial Sequence: Synthetic oligonucleotide
  misc_feature 1..20: note = Target: SCN10A; (-) strand; PAM type: YTN; PAM sequence: TTC
  source 1..20: mol_type = other DNA
tgggcaaaatcaaccagttc

SEQ ID NO: 42037 - DNA, 20 bp, synthetic construct
  misc_feature 1..20: note = Description of Artificial Sequence: Synthetic oligonucleotide
  misc_feature 1..20: note = Target: SCN10A; (-) strand; PAM type: YTN; PAM sequence: CTG
  source 1..20: mol_type = other DNA
atgaccaaagtgaagaaaag

SEQ ID NO: 42038 - DNA, 20 bp, synthetic construct
  misc_feature 1..20: note = Description of Artificial Sequence: Synthetic oligonucleotide
  misc_feature 1..20: note = Target: SCN10A; (-) strand; PAM type: YTN; PAM sequence: CTC
  source 1..20: mol_type = other DNA
aacatgatcaccatgatggt

SEQ ID NO: 42039 - DNA, 20 bp, synthetic construct
  misc_feature 1..20: note = Description of Artificial Sequence: Synthetic oligonucleotide
  misc_feature 1..20: note = Target: SCN10A; (-) strand; PAM type: YTN; PAM sequence: CTG
  source 1..20: mol_type = other DNA
cctcaacatgatcaccatga

SEQ ID NO: 42040 - DNA, 20 bp, synthetic construct
  misc_feature 1..20: note = Description of Artificial Sequence: Synthetic oligonucleotide
  misc_feature 1..20: note = Target: SCN10A; (-) strand; PAM type: YTN; PAM sequence: CTC
  source 1..20: mol_type = other DNA
atctgcctcaacatgatcac

SEQ ID NO: 42041 - DNA, 20 bp, synthetic construct
  misc_feature 1..20: note = Description of Artificial Sequence: Synthetic oligonucleotide
  misc_feature 1..20: note = Target: SCN10A; (-) strand; PAM type: YTN; PAM sequence: TTG
  source 1..20: mol_type = other DNA
acatcaccatcatggtcctc

SEQ ID NO: 42042 - DNA, 20 bp, synthetic construct
  misc_feature 1..20: note = Description of Artificial Sequence: Synthetic oligonucleotide
  misc_feature 1..20: note = Target: SCN10A; (-) strand; PAM type: YTN; PAM sequence: TTT
  source 1..20: mol_type = other DNA
gacatcaccatcatggtcct

SEQ ID NO: 42043 - DNA, 20 bp, synthetic construct
  misc_feature 1..20: note = Description of Artificial Sequence: Synthetic oligonucleotide
  misc_feature 1..20: note = Target: SCN10A; (-) strand; PAM type: YTN; PAM sequence: TTT
  source 1..20: mol_type = other DNA
tgacatcaccatcatggtcc

SEQ ID NO: 42044 - DNA, 20 bp, synthetic construct
  misc_feature 1..20: note = Description of Artificial Sequence: Synthetic oligonucleotide
  misc_feature 1..20: note = Target: SCN10A; (-) strand; PAM type: YTN; PAM sequence: CTT
  source 1..20: mol_type = other DNA
ttgacatcaccatcatggtc

SEQ ID NO: 42045 - DNA, 20 bp, synthetic construct
  misc_feature 1..20: note = Description of Artificial Sequence: Synthetic oligonucleotide
  misc_feature 1..20: note = Target: SCN10A; (-) strand; PAM type: YTN; PAM sequence: TTG
  source 1..20: mol_type = other DNA
acatcgtgaccagacaagct

SEQ ID NO: 42046 - DNA, 20 bp, synthetic construct
  misc_feature 1..20: note = Description of Artificial Sequence: Synthetic oligonucleotide
  misc_feature 1..20: note = Target: SCN10A; (-) strand; PAM type: YTN; PAM sequence: TTT
  source 1..20: mol_type = other DNA
gacatcgtgaccagacaagc

SEQ ID NO: 42047 - DNA, 20 bp, synthetic construct
  misc_feature 1..20: note = Description of Artificial Sequence: Synthetic oligonucleotide
  misc_feature 1..20: note = Target: SCN10A; (-) strand; PAM type: YTN; PAM sequence: CTT
  source 1..20: mol_type = other DNA
tgacatcgtgaccagacaag

SEQ ID NO: 42048 - DNA, 20 bp, synthetic construct
  misc_feature 1..20: note = Description of Artificial Sequence: Synthetic oligonucleotide
  misc_feature 1..20: note = Target: SCN10A; (-) strand; PAM type: YTN; PAM sequence: TTG
  source 1..20: mol_type = other DNA
tctttgacatcgtgaccaga

SEQ ID NO: 42049 - DNA, 20 bp, synthetic construct
  misc_feature 1..20: note = Description of Artificial Sequence: Synthetic oligonucleotide
  misc_feature 1..20: note = Target: SCN10A; (-) strand; PAM type: YTN; PAM sequence: TTT
  source 1..20: mol_type = other DNA
gtctttgacatcgtgaccag

SEQ ID NO: 42050 - DNA, 20 bp, synthetic construct
  misc_feature 1..20: note = Description of Artificial Sequence: Synthetic oligonucleotide
  misc_feature 1..20: note = Target: SCN10A; (-) strand; PAM type: YTN; PAM sequence: TTT
  source 1..20: mol_type = other DNA
tgtctttgacatcgtgacca

SEQ ID NO: 42051 - DNA, 20 bp, synthetic construct
  misc_feature 1..20: note = Description of Artificial Sequence: Synthetic oligonucleotide
  misc_feature 1..20: note = Target: SCN10A; (-) strand; PAM type: YTN; PAM sequence: TTC
  source 1..20: mol_type = other DNA
cagggttttgtctttgacat

SEQ ID NO: 42052 - DNA, 20 bp, synthetic construct
  misc_feature 1..20: note = Description of Artificial Sequence: Synthetic oligonucleotide
  misc_feature 1..20: note = Target: SCN10A; (-) strand; PAM type: YTN; PAM sequence: CTC
  source 1..20: mol_type = other DNA
agaacaagttccagggtttt

SEQ ID NO: 42053 - DNA, 20 bp, synthetic construct
  misc_feature 1..20: note = Description of Artificial Sequence: Synthetic oligonucleotide
  misc_feature 1..20: note = Target: SCN10A; (-) strand; PAM type: YTN; PAM sequence: TTC
  source 1..20: mol_type = other DNA
tcagaacaagttccagggtt

SEQ ID NO: 42054 - DNA, 20 bp, synthetic construct
  misc_feature 1..20: note = Description of Artificial Sequence: Synthetic oligonucleotide
  misc_feature 1..20: note = Target: SCN10A; (-) strand; PAM type: YTN; PAM sequence: TTT
  source 1..20: mol_type = other DNA
ctcagaacaagttccagggt

SEQ ID NO: 42055 - DNA, 20 bp, synthetic construct
  misc_feature 1..20: note = Description of Artificial Sequence: Synthetic oligonucleotide
  misc_feature 1..20: note = Target: SCN10A; (-) strand; PAM type: YTN; PAM sequence: TTT
  source 1..20: mol_type = other DNA
tctcagaacaagttccaggg

SEQ ID NO: 42056 - DNA, 20 bp, synthetic construct
  misc_feature 1..20: note = Description of Artificial Sequence: Synthetic oligonucleotide
  misc_feature 1..20: note = Target: SCN10A; (-) strand; PAM type: YTN; PAM sequence: TTG
  source 1..20: mol_type = other DNA
ttttctcagaacaagttcca

SEQ ID NO: 42057 - DNA, 20 bp, synthetic construct
  misc_feature 1..20: note = Description of Artificial Sequence: Synthetic oligonucleotide
  misc_feature 1..20: note = Target: SCN10A; (-) strand; PAM type: YTN; PAM sequence: CTT
  source 1..20: mol_type = other DNA
gttttctcagaacaagttcc

SEQ ID NO: 42058 - DNA, 20 bp, synthetic construct
  misc_feature 1..20: note = Description of Artificial Sequence: Synthetic oligonucleotide
  misc_feature 1..20: note = Target: SCN10A; (-) strand; PAM type: YTN; PAM sequence: CTC
  source 1..20: mol_type = other DNA
ttgttttctcagaacaagtt

SEQ ID NO: 42059 - DNA, 20 bp, synthetic construct
  misc_feature 1..20: note = Description of Artificial Sequence: Synthetic oligonucleotide
  misc_feature 1..20: note = Target: SCN10A; (-) strand; PAM type: YTN; PAM sequence: CTA
  source 1..20: mol_type = other DNA
tctcttgttttctcagaaca

SEQ ID NO: 42060 - DNA, 20 bp, synthetic construct
  misc_feature 1..20: note = Description of Artificial Sequence: Synthetic oligonucleotide
  misc_feature 1..20: note = Target: SCN10A; (-) strand; PAM type: YTN; PAM sequence: CTG
  source 1..20: mol_type = other DNA
atgccactatctcttgtttt

SEQ ID NO: 42061 - DNA, 20 bp, synthetic construct
  misc_feature 1..20: note = Description of Artificial Sequence: Synthetic oligonucleotide
  misc_feature 1..20: note = Target: SCN10A; (-) strand; PAM type: YTN; PAM sequence: CTG
  source 1..20: mol_type = other DNA
gcccaaaggccctgatgcca

SEQ ID NO: 42062 - DNA, 20 bp, synthetic construct
  misc_feature 1..20: note = Description of Artificial Sequence: Synthetic oligonucleotide
  misc_feature 1..20: note = Target: SCN10A; (-) strand; PAM type: YTN; PAM sequence: TTG
  source 1..20: mol_type = other DNA
tgctggcccaaaggccctga

SEQ ID NO: 42063 - DNA, 20 bp, synthetic construct
  misc_feature 1..20: note = Description of Artificial Sequence: Synthetic oligonucleotide
  misc_feature 1..20: note = Target: SCN10A; (-) strand; PAM type: YTN; PAM sequence: TTT
  source 1..20: mol_type = other DNA
gtgctggcccaaaggccctg

SEQ ID NO: 42064 - DNA, 20 bp, synthetic construct
  misc_feature 1..20: note = Description of Artificial Sequence: Synthetic oligonucleotide
  misc_feature 1..20: note = Target: SCN10A; (-) strand; PAM type: YTN; PAM sequence: CTG
  source 1..20: mol_type = other DNA
gtttgtgctggcccaaaggc

SEQ ID NO: 42065 - DNA, 20 bp, synthetic construct
  misc_feature 1..20: note = Description of Artificial Sequence: Synthetic oligonucleotide
  misc_feature 1..20: note = Target: SCN10A; (-) strand; PAM type: YTN; PAM sequence: CTA
  source 1..20: mol_type = other DNA
cagataacacagatgcctgg

SEQ ID NO: 42066 - DNA, 20 bp, synthetic construct
  misc_feature 1..20: note = Description of Artificial Sequence: Synthetic oligonucleotide
  misc_feature 1..20: note = Target: SCN10A; (-) strand; PAM type: YTN; PAM sequence: CTC
  source 1..20: mol_type = other DNA
atctacagataacacagatg

SEQ ID NO: 42067 - DNA, 20 bp, synthetic construct
  misc_feature 1..20: note = Description of Artificial Sequence: Synthetic oligonucleotide
  misc_feature 1..20: note = Target: SCN10A; (-) strand; PAM type: YTN; PAM sequence: TTA
  source 1..20: mol_type = other DNA
agatgtggagtgtgatggag

SEQ ID NO: 42068 - DNA, 20 bp, synthetic construct
  misc_feature 1..20: note = Description of Artificial Sequence: Synthetic oligonucleotide
  misc_feature 1..20: note = Target: SCN10A; (-) strand; PAM type: YTN; PAM sequence: CTG
  source 1..20: mol_type = other DNA
ttaagatgtggagtgtgatg

SEQ ID NO: 42069 - DNA, 20 bp, synthetic construct
  misc_feature 1..20: note = Description of Artificial Sequence: Synthetic oligonucleotide
  misc_feature 1..20: note = Target: SCN10A; (-) strand; PAM type: YTN; PAM sequence: TTC
  source 1..20: mol_type = other DNA
tgttaagatgtggagtgtga

SEQ ID NO: 42070 - DNA, 20 bp, synthetic construct
  misc_feature 1..20: note = Description of Artificial Sequence: Synthetic oligonucleotide
  misc_feature 1..20: note = Target: SCN10A; (-) strand; PAM type: YTN; PAM sequence: CTT
  source 1..20: mol_type = other DNA
ctgttaagatgtggagtgtg

SEQ ID NO: 42071 - DNA, 20 bp, synthetic construct
  misc_feature 1..20: note = Description of Artificial Sequence: Synthetic oligonucleotide
  misc_feature 1..20: note = Target: SCN10A; (-) strand; PAM type: YTN; PAM sequence: TTC
  source 1..20: mol_type = other DNA
gcttctgttaagatgtggag

SEQ ID NO: 42072 - DNA, 20 bp, synthetic construct
  misc_feature 1..20: note = Description of Artificial Sequence: Synthetic oligonucleotide
  misc_feature 1..20: note = Target: SCN10A; (-) strand; PAM type: YTN; PAM sequence: TTT
  source 1..20: mol_type = other DNA
cgcttctgttaagatgtgga

SEQ ID NO: 42073 - DNA, 20 bp, synthetic construct
  misc_feature 1..20: note = Description of Artificial Sequence: Synthetic oligonucleotide
  misc_feature 1..20: note = Target: SCN10A; (-) strand; PAM type: YTN; PAM sequence: TTG
  source 1..20: mol_type = other DNA
gaagaggtaaggatagtatt

SEQ ID NO: 42074 - DNA, 20 bp, synthetic construct
  misc_feature 1..20: note = Description of Artificial Sequence: Synthetic oligonucleotide
  misc_feature 1..20: note = Target: SCN10A; (-) strand; PAM type: YTN; PAM sequence: TTT
  source 1..20: mol_type = other DNA
ggaagaggtaaggatagtat

SEQ ID NO: 42075 - DNA, 20 bp, synthetic construct
  misc_feature 1..20: note = Description of Artificial Sequence: Synthetic oligonucleotide
  misc_feature 1..20: note = Target: SCN10A; (-) strand; PAM type: YTN; PAM sequence: TTT
  source 1..20: mol_type = other DNA
tggaagaggtaaggatagta

SEQ ID NO: 42076 - DNA, 20 bp, synthetic construct
  misc_feature 1..20: note = Description of Artificial Sequence: Synthetic oligonucleotide
  misc_feature 1..20: note = Target: SCN10A; (-) strand; PAM type: YTN; PAM sequence: CTA
  source 1..20: mol_type = other DNA
aaagtgaaattttggaagag

SEQ ID NO: 42077 - DNA, 20 bp, synthetic construct
  misc_feature 1..20: note = Description of Artificial Sequence: Synthetic oligonucleotide
  misc_feature 1..20: note = Target: SCN10A; (-) strand; PAM type: YTN; PAM sequence: CTG
  source 1..20: mol_type = other DNA
gggcaatgaggtagagtcaa

SEQ ID NO: 42078 - DNA, 20 bp, synthetic construct
  misc_feature 1..20: note = Description of Artificial Sequence: Synthetic oligonucleotide
  misc_feature 1..20: note = Target: SCN10A; (-) strand; PAM type: YTN; PAM sequence: TTG
  source 1..20: mol_type = other DNA
aactggggcaatgaggtaga

SEQ ID NO: 42079 - DNA, 20 bp, synthetic construct
  misc_feature 1..20: note = Description of Artificial Sequence: Synthetic oligonucleotide
  misc_feature 1..20: note = Target: SCN10A; (-) strand; PAM type: YTN; PAM sequence: CTT
  source 1..20: mol_type = other DNA
gaactggggcaatgaggtag

SEQ ID NO: 42080 - DNA, 20 bp, synthetic construct
  misc_feature 1..20: note = Description of Artificial Sequence: Synthetic oligonucleotide
  misc_feature 1..20: note = Target: SCN10A; (-) strand; PAM type: YTN; PAM sequence: TTA
  source 1..20: mol_type = other DNA
aggacttgaactggggcaat

SEQ ID NO: 42081 - DNA, 20 bp, synthetic construct
  misc_feature 1..20: note = Description of Artificial Sequence: Synthetic oligonucleotide
  misc_feature 1..20: note = Target: SCN10A; (-) strand; PAM type: YTN; PAM sequence: CTG
  source 1..20: mol_type = other DNA
gtggcatcaaagggccagga

SEQ ID NO: 42082 - DNA, 20 bp, synthetic construct
  misc_feature 1..20: note = Description of Artificial Sequence: Synthetic oligonucleotide
  misc_feature 1..20: note = Target: SCN10A; (-) strand; PAM type: YTN; PAM sequence: TTG
  source 1..20: mol_type = other DNA
tgaatagaggcaagggcaca

SEQ ID NO: 42083 - DNA, 20 bp, synthetic construct
  misc_feature 1..20: note = Description of Artificial Sequence: Synthetic oligonucleotide
  misc_feature 1..20: note = Target: SCN10A; (-) strand; PAM type: YTN; PAM sequence: TTA
  source 1..20: mol_type = other DNA
gacagccaagagaggagata

SEQ ID NO: 42084 - DNA, 20 bp, synthetic construct
  misc_feature 1..20: note = Description of Artificial Sequence: Synthetic oligonucleotide
  misc_feature 1..20: note = Target: SCN10A; (-) strand; PAM type: YTN; PAM sequence: TTT
  source 1..20: mol_type = other DNA
agacagccaagagaggagat

SEQ ID NO: 42085 - DNA, 20 bp, synthetic construct
  misc_feature 1..20: note = Description of Artificial Sequence: Synthetic oligonucleotide
  misc_feature 1..20: note = Target: SCN10A; (-) strand; PAM type: YTN; PAM sequence: TTG
  source 1..20: mol_type = other DNA
gaatttagacagccaagaga

SEQ ID NO: 42086 - DNA, 20 bp, synthetic construct
  misc_feature 1..20: note = Description of Artificial Sequence: Synthetic oligonucleotide
  misc_feature 1..20: note = Target: SCN10A; (-) strand; PAM type: YTN; PAM sequence: CTG
  source 1..20: mol_type = other DNA
ttggaatttagacagccaag

SEQ ID NO: 42087 - DNA, 20 bp, synthetic construct
  misc_feature 1..20: note = Description of Artificial Sequence: Synthetic oligonucleotide
  misc_feature 1..20: note = Target: SCN10A; (-) strand; PAM type: YTN; PAM sequence: CTC
  source 1..20: mol_type = other DNA
aagactgttggaatttagac

SEQ ID NO: 42088 - DNA, 20 bp, synthetic construct
  misc_feature 1..20: note = Description of Artificial Sequence: Synthetic oligonucleotide
  misc_feature 1..20: note = Target: SCN10A; (-) strand; PAM type: YTN; PAM sequence: TTA
  source 1..20: mol_type = other DNA
ctcaagactgttggaattta

SEQ ID NO: 42089 - DNA, 20 bp, synthetic construct
  misc_feature 1..20: note = Description of Artificial Sequence: Synthetic oligonucleotide
  misc_feature 1..20: note = Target: SCN10A; (-) strand; PAM type: YTN; PAM sequence: TTA
  source 1..20: mol_type = other DNA
aaagagatggattactcaag

SEQ ID NO: 42090 - DNA, 20 bp, synthetic construct
  misc_feature 1..20: note = Description of Artificial Sequence: Synthetic oligonucleotide
  misc_feature 1..20: note = Target: SCN10A; (-) strand; PAM type: YTN; PAM sequence: CTT
  source 1..20: mol_type = other DNA
aaaagagatggattactcaa

SEQ ID NO: 42091 - DNA, 20 bp, synthetic construct
  misc_feature 1..20: note = Description of Artificial Sequence: Synthetic oligonucleotide
  misc_feature 1..20: note = Target: SCN10A; (-) strand; PAM type: YTN; PAM sequence: CTC
  source 1..20: mol_type = other DNA
catgcagtaagtggagctta

SEQ ID NO: 42092 - DNA, 20 bp, synthetic construct
  misc_feature 1..20: note = Description of Artificial Sequence: Synthetic oligonucleotide
  misc_feature 1..20: note = Target: SCN10A; (-) strand; PAM type: YTN; PAM sequence: CTA
  source 1..20: mol_type = other DNA
agggacactccatgcagtaa

SEQ ID NO: 42093 - DNA, 20 bp, synthetic construct
  misc_feature 1..20: note = Description of Artificial Sequence: Synthetic oligonucleotide
  misc_feature 1..20: note = Target: SCN10A; (-) strand; PAM type: YTN; PAM sequence: TTG
  source 1..20: mol_type = other DNA
tcacgtgactaagggacact

SEQ ID NO: 42094 - DNA, 20 bp, synthetic construct
  misc_feature 1..20: note = Description of Artificial Sequence: Synthetic oligonucleotide
  misc_feature 1..20: note = Target: SCN10A; (-) strand; PAM type: YTN; PAM sequence: CTG
  source 1..20: mol_type = other DNA
aaaagtgggatccccaaagg

SEQ ID NO: 42095 - DNA, 20 bp, synthetic construct
  misc_feature 1..20: note = Description of Artificial Sequence: Synthetic oligonucleotide
  misc_feature 1..20: note = Target: SCN10A; (-) strand; PAM type: YTN; PAM sequence: CTG
  source 1..20: mol_type = other DNA
actgaaaagtgggatcccca

SEQ ID NO: 42096 - DNA, 20 bp, synthetic construct
  misc_feature 1..20: note = Description of Artificial Sequence: Synthetic oligonucleotide
  misc_feature 1..20: note = Target: SCN10A; (-) strand; PAM type: YTN; PAM sequence: CTC
  source 1..20: mol_type = other DNA
gaggctgactgaaaagtggg

SEQ ID NO: 42097 - DNA, 20 bp, synthetic construct
  misc_feature 1..20: note = Description of Artificial Sequence: Synthetic oligonucleotide
  misc_feature 1..20: note = Target: SCN10A; (-) strand; PAM type: YTN; PAM sequence: CTA
  source 1..20: mol_type = other DNA
gaactcgaggctgactgaaa

SEQ ID NO: 42098 - DNA, 20 bp, synthetic construct
  misc_feature 1..20: note = Description of Artificial Sequence: Synthetic oligonucleotide
  misc_feature 1..20: note = Target: SCN10A; (-) strand; PAM type: YTN; PAM sequence: CTA
  source 1..20: mol_type = other DNA
gtagagaagacgcatataca

SEQ ID NO: 42099 - DNA, 20 bp, synthetic construct
  misc_feature 1..20: note = Description of Artificial Sequence: Synthetic oligonucleotide
  misc_feature 1..20: note = Target: SCN10A; (-) strand; PAM type: YTN; PAM sequence: TTG
  source 1..20: mol_type = other DNA
tctagtagagaagacgcata

SEQ ID NO: 42100 - DNA, 20 bp, synthetic construct
  misc_feature 1..20: note = Description of Artificial Sequence: Synthetic oligonucleotide
  misc_feature 1..20: note = Target: SCN10A; (-) strand; PAM type: YTN; PAM sequence: CTC
  source 1..20: mol_type = other DNA
attgtctagtagagaagacg

SEQ ID NO: 42101 - DNA, 20 bp, synthetic construct
  misc_feature 1..20: note = Description of Artificial Sequence: Synthetic oligonucleotide
  misc_feature 1..20: note = Target: SCN10A; (-) strand; PAM type: YTN; PAM sequence: CTC
  source 1..20: mol_type = other DNA
aaacagctcattgtctagta

SEQ ID NO: 42102 - DNA, 20 bp, synthetic construct
  misc_feature 1..20: note = Description of Artificial Sequence: Synthetic oligonucleotide
  misc_feature 1..20: note = Target: SCN10A; (-) strand; PAM type: YTN; PAM sequence: TTG
  source 1..20: mol_type = other DNA
tcctcaaacagctcattgtc

SEQ ID NO: 42103 - DNA, 20 bp, synthetic construct
  misc_feature 1..20: note = Description of Artificial Sequence: Synthetic oligonucleotide
  misc_feature 1..20: note = Target: SCN10A; (-) strand; PAM type: YTN; PAM sequence: CTT
  source 1..20: mol_type = other DNA
gtcctcaaacagctcattgt

SEQ ID NO: 42104 - DNA, 20 bp, synthetic construct
  misc_feature 1..20: note = Description of Artificial Sequence: Synthetic oligonucleotide
  misc_feature 1..20: note = Target: SCN10A; (-) strand; PAM type: YTN; PAM sequence: TTA
  source 1..20: mol_type = other DNA
aggaaggtatagcccttgtc

SEQ ID NO: 42105 - DNA, 20 bp, synthetic construct
  misc_feature 1..20: note = Description of Artificial Sequence: Synthetic oligonucleotide
  misc_feature 1..20: note = Target: SCN10A; (-) strand; PAM type: YTN; PAM sequence: CTG
  source 1..20: mol_type = other DNA
cagggaaacaaagttaagga

SEQ ID NO: 42106 - DNA, 20 bp, synthetic construct
  misc_feature 1..20: note = Description of Artificial Sequence: Synthetic oligonucleotide
  misc_feature 1..20: note = Target: SCN10A; (-) strand; PAM type: YTN; PAM sequence: TTG
  source 1..20: mol_type = other DNA
caatgtgcagggcactgcag

SEQ ID NO: 42107 - DNA, 20 bp, synthetic construct
  misc_feature 1..20: note = Description of Artificial Sequence: Synthetic oligonucleotide
  misc_feature 1..20: note = Target: SCN10A; (-) strand; PAM type: YTN; PAM sequence: CTT
  source 1..20: mol_type = other DNA
gcaatgtgcagggcactgca

SEQ ID NO: 42108 - DNA, 20 bp, synthetic construct
  misc_feature 1..20: note = Description of Artificial Sequence: Synthetic oligonucleotide
  misc_feature 1..20: note = Target: SCN10A; (-) strand; PAM type: YTN; PAM sequence: CTC
  source 1..20: mol_type = other DNA
ttgcaatgtgcagggcactg

SEQ ID NO: 42109 - DNA, 20 bp, synthetic construct
  misc_feature 1..20: note = Description of Artificial Sequence: Synthetic oligonucleotide
  misc_feature 1..20: note = Target: SCN10A; (-) strand; PAM type: YTN; PAM sequence: TTG
  source 1..20: mol_type = other DNA
aactcttgcaatgtgcaggg

SEQ ID NO: 42110 - DNA, 20 bp, synthetic construct
  misc_feature 1..20: note = Description of Artificial Sequence: Synthetic oligonucleotide
  misc_feature 1..20: note = Target: SCN10A; (-) strand; PAM type: YTN; PAM sequence: CTT
  source 1..20: mol_type = other DNA
gaactcttgcaatgtgcagg

SEQ ID NO: 42111 - DNA, 20 bp, synthetic construct
  misc_feature 1..20: note = Description of Artificial Sequence: Synthetic oligonucleotide
  misc_feature 1..20: note = Target: SCN10A; (-) strand; PAM type: YTN; PAM sequence: CTC
  source 1..20: mol_type = other DNA
ttgaactcttgcaatgtgca

SEQ ID NO: 42112 - DNA, 20 bp, synthetic construct
  misc_feature 1..20: note = Description of Artificial Sequence: Synthetic oligonucleotide
  misc_feature 1..20: note = Target: SCN10A; (-) strand; PAM type: YTN; PAM sequence: TTC
  source 1..20: mol_type = other DNA
aagcagctcttgaactcttg

SEQ ID NO: 42113 - DNA, 20 bp, synthetic construct
  misc_feature 1..20: note = Description of Artificial Sequence: Synthetic oligonucleotide
  misc_feature 1..20: note = Target: SCN10A; (-) strand; PAM type: YTN; PAM sequence: TTT
  source 1..20: mol_type = other DNA
caagcagctcttgaactctt

SEQ ID NO: 42114 - DNA, 20 bp, synthetic construct
  misc_feature 1..20: note = Description of Artificial Sequence: Synthetic oligonucleotide
  misc_feature 1..20: note = Target: SCN10A; (-) strand; PAM type: YTN; PAM sequence: TTA
  source 1..20: mol_type = other DNA
atatttcaagcagctcttga

SEQ ID NO: 42115 - DNA, 20 bp, synthetic construct
  misc_feature 1..20: note = Description of Artificial Sequence: Synthetic oligonucleotide
  misc_feature 1..20: note = Target: SCN10A; (-) strand; PAM type: YTN; PAM sequence: CTC
  source 1..20: mol_type = other DNA
aaattaatatttcaagcagc

SEQ ID NO: 42116 - DNA, 20 bp, synthetic construct
  misc_feature 1..20: note = Description of Artificial Sequence: Synthetic oligonucleotide
  misc_feature 1..20: note = Target: SCN10A; (-) strand; PAM type: YTN; PAM sequence: CTC
  source 1..20: mol_type = other DNA
agcaaagtagctcaaattaa

SEQ ID NO: 42117 - DNA, 20 bp, synthetic construct
  misc_feature 1..20: note = Description of Artificial Sequence: Synthetic oligonucleotide
  misc_feature 1..20: note = Target: SCN10A; (-) strand; PAM type: YTN; PAM sequence: CTC
  source 1..20: mol_type = other DNA
tcagcaaagtagctcaaatt

SEQ ID NO: 42118 - DNA, 20 bp, synthetic construct
  misc_feature 1..20: note = Description of Artificial Sequence: Synthetic oligonucleotide
  misc_feature 1..20: note = Target: SCN10A; (-) strand; PAM type: YTN; PAM sequence: TTA
  source 1..20: mol_type = other DNA
ctctcagcaaagtagctcaa

SEQ ID NO: 42119 - DNA, 20 bp, synthetic construct
  misc_feature 1..20: note = Description of Artificial Sequence: Synthetic oligonucleotide
  misc_feature 1..20: note = Target: SCN10A; (-) strand; PAM type: YTN; PAM sequence: TTT
  source 1..20: mol_type = other DNA
actctcagcaaagtagctca

SEQ ID NO: 42120 - DNA, 20 bp, synthetic construct
  misc_feature 1..20: note = Description of Artificial Sequence: Synthetic oligonucleotide
  misc_feature 1..20: note = Target: SCN10A; (-) strand; PAM type: YTN; PAM sequence: CTT
  source 1..20: mol_type = other DNA
tactctcagcaaagtagctc

SEQ ID NO: 42121 - DNA, 20 bp, synthetic construct
  misc_feature 1..20: note = Description of Artificial Sequence: Synthetic oligonucleotide
  misc_feature 1..20: note = Target: SCN10A; (-) strand; PAM type: YTN; PAM sequence: TTG
  source 1..20: mol_type = other DNA
actttactctcagcaaagta

SEQ ID NO: 42122 - DNA, 20 bp, synthetic construct
  misc_feature 1..20: note = Description of Artificial Sequence: Synthetic oligonucleotide
  misc_feature 1..20: note = Target: SCN10A; (-) strand; PAM type: YTN; PAM sequence: CTT
  source 1..20: mol_type = other DNA
gactttactctcagcaaagt

SEQ ID NO: 42123 - DNA, 20 bp, synthetic construct
  misc_feature 1..20: note = Description of Artificial Sequence: Synthetic oligonucleotide
  misc_feature 1..20: note = Target: SCN10A; (-) strand; PAM type: YTN; PAM sequence: TTG
  source 1..20: mol_type = other DNA
cacttgactttactctcagc

SEQ ID NO: 42124 - DNA, 20 bp, synthetic construct
  misc_feature 1..20: note = Description of Artificial Sequence: Synthetic oligonucleotide
  misc_feature 1..20: note = Target: SCN10A; (-) strand; PAM type: YTN; PAM sequence: TTT
  source 1..20: mol_type = other DNA
gcacttgactttactctcag

SEQ ID NO: 42125 - DNA, 20 bp, synthetic construct
  misc_feature 1..20: note = Description of Artificial Sequence: Synthetic oligonucleotide
  misc_feature 1..20: note = Target: SCN10A; (-) strand; PAM type: YTN; PAM sequence: CTT
  source 1..20: mol_type = other DNA
tgcacttgactttactctca

SEQ ID NO: 42126 - DNA, 20 bp, synthetic construct
  misc_feature 1..20: note = Description of Artificial Sequence: Synthetic oligonucleotide
  misc_feature 1..20: note = Target: SCN10A; (-) strand; PAM type: YTN; PAM sequence: TTC
  source 1..20: mol_type = other DNA
ccctttgcacttgactttac

SEQ ID NO: 42127 - DNA, 20 bp, synthetic construct
  misc_feature 1..20: note = Description of Artificial Sequence: Synthetic oligonucleotide
  misc_feature 1..20: note = Target: SCN10A; (-) strand; PAM type: YTN; PAM sequence: TTT
  source 1..20: mol_type = other DNA
cccctttgcacttgacttta

SEQ ID NO: 42128 - DNA, 20 bp, synthetic construct
  misc_feature 1..20: note = Description of Artificial Sequence: Synthetic oligonucleotide
  misc_feature 1..20: note = Target: SCN10A; (-) strand; PAM type: YTN; PAM sequence: TTC
  source 1..20: mol_type = other DNA
caagaataagtttccccttt

SEQ ID NO: 42129 - DNA, 20 bp, synthetic construct
  misc_feature 1..20: note = Description of Artificial Sequence: Synthetic oligonucleotide
  misc_feature 1..20: note = Target: SCN10A; (-) strand; PAM type: YTN; PAM sequence: TTT
  source 1..20: mol_type = other DNA
ccaagaataagtttcccctt

SEQ ID NO: 42130 - DNA, 20 bp, synthetic construct
  misc_feature 1..20: note = Description of Artificial Sequence: Synthetic oligonucleotide
  misc_feature 1..20: note = Target: SCN10A; (-) strand; PAM type: YTN; PAM sequence: TTG
  source 1..20: mol_type = other DNA
cacagcaccaggaacagagg

SEQ ID NO: 42131 - DNA, 20 bp, synthetic construct
  misc_feature 1..20: note = Description of Artificial Sequence: Synthetic oligonucleotide
  misc_feature 1..20: note = Target: SCN10A; (-) strand; PAM type: YTN; PAM sequence: TTT
  source 1..20: mol_type = other DNA
gcacagcaccaggaacagag

SEQ ID NO: 42132 - DNA, 20 bp, synthetic construct
  misc_feature 1..20: note = Description of Artificial Sequence: Synthetic oligonucleotide
  misc_feature 1..20: note = Target: SCN10A; (-) strand; PAM type: YTN; PAM sequence: TTA
  source 1..20: mol_type = other DNA
ggcatttgcacagcaccagg

SEQ ID NO: 42133 - DNA, 20 bp, synthetic construct
  misc_feature 1..20: note = Description of Artificial Sequence: Synthetic oligonucleotide
  misc_feature 1..20: note = Target: SCN10A; (-) strand; PAM type: YTN; PAM sequence: CTT
  source 1..20: mol_type = other DNA
aggcatttgcacagcaccag

SEQ ID NO: 42134 - DNA, 20 bp, synthetic construct
  misc_feature 1..20: note = Description of Artificial Sequence: Synthetic oligonucleotide
  misc_feature 1..20: note = Target: SCN10A; (-) strand; PAM type: YTN; PAM sequence: TTG
  source 1..20: mol_type = other DNA
cttaggcatttgcacagcac

SEQ ID NO: 42135 - DNA, 20 bp, synthetic construct
  misc_feature 1..20: note = Description of Artificial Sequence: Synthetic oligonucleotide
  misc_feature 1..20: note = Target: SCN10A; (-) strand; PAM type: YTN; PAM sequence: TTT
  source 1..20: mol_type = other DNA
gcttaggcatttgcacagca

SEQ ID NO: 42136 - DNA, 20 bp, synthetic construct
  misc_feature 1..20: note = Description of Artificial Sequence: Synthetic oligonucleotide
  misc_feature 1..20: note = Target: SCN10A; (-) strand; PAM type: YTN; PAM sequence: CTG
  source 1..20: mol_type = other DNA
catttgcttaggcatttgca

SEQ ID NO: 42137 - DNA, 20 bp, synthetic construct
  misc_feature 1..20: note = Description of Artificial Sequence: Synthetic oligonucleotide
  misc_feature 1..20: note = Target: SCN10A; (-) strand; PAM type: YTN; PAM sequence: CTA
  source 1..20: mol_type = other DNA
tacctgcatttgcttaggca

SEQ ID NO: 42138 - DNA, 20 bp, synthetic construct
  misc_feature 1..20: note = Description of Artificial Sequence: Synthetic oligonucleotide
  misc_feature 1..20: note = Target: SCN10A; (-) strand; PAM type: YTN; PAM sequence: CTA
  source 1..20: mol_type = other DNA
cgccctatacctgcatttgc

SEQ ID NO: 42139 - DNA, 20 bp, synthetic construct
  misc_feature 1..20: note = Description of Artificial Sequence: Synthetic oligonucleotide
  misc_feature 1..20: note = Target: SCN10A; (-) strand; PAM type: YTN; PAM sequence: TTG
  source 1..20: mol_type = other DNA
accctacgccctatacctgc

SEQ ID NO: 42140 - DNA, 20 bp, synthetic construct
  misc_feature 1..20: note = Description of Artificial Sequence: Synthetic oligonucleotide
  misc_feature 1..20: note = Target: SCN10A; (-) strand; PAM type: YTN; PAM sequence: CTT
  source 1..20: mol_type = other DNA
gaccctacgccctatacctg

SEQ ID NO: 42141 - DNA, 20 bp, synthetic construct
  misc_feature 1..20: note = Description of Artificial Sequence: Synthetic oligonucleotide
  misc_feature 1..20: note = Target: SCN10A; (-) strand; PAM type: YTN; PAM sequence: TTC
  source 1..20: mol_type = other DNA
caagatgcaaacaaccaaga

SEQ ID NO: 42142 - DNA, 20 bp, synthetic construct
  misc_feature 1..20: note = Description of Artificial Sequence: Synthetic oligonucleotide
  misc_feature 1..20: note = Target: SCN10A; (-) strand; PAM type: YTN; PAM sequence: CTT
  source 1..20: mol_type = other DNA
ccaagatgcaaacaaccaag

SEQ ID NO: 42143 - DNA, 20 bp, synthetic construct
  misc_feature 1..20: note = Description of Artificial Sequence: Synthetic oligonucleotide
  misc_feature 1..20: note = Target: SCN10A; (-) strand; PAM type: YTN; PAM sequence: CTC
  source 1..20: mol_type = other DNA
cttccaagatgcaaacaacc

SEQ ID NO: 42144 - DNA, 20 bp, synthetic construct
  misc_feature 1..20: note = Description of Artificial Sequence: Synthetic oligonucleotide
  misc_feature 1..20: note = Target: SCN10A; (-) strand; PAM type: YTN; PAM sequence: CTG
  source 1..20: mol_type = other DNA
cctccttccaagatgcaaac

SEQ ID NO: 42145 - DNA, 20 bp, synthetic construct
  misc_feature 1..20: note = Description of Artificial Sequence: Synthetic oligonucleotide
  misc_feature 1..20: note = Target: SCN10A; (-) strand; PAM type: YTN; PAM sequence: CTC
  source 1..20: mol_type = other DNA
tgcctccttccaagatgcaa

SEQ ID NO: 42146 - DNA, 20 bp, synthetic construct
  misc_feature 1..20: note = Description of Artificial Sequence: Synthetic oligonucleotide
  misc_feature 1..20: note = Target: SCN10A; (-) strand; PAM type: YTN; PAM sequence: TTA
  source 1..20: mol_type = other DNA
tccaggccactctgcctcct

SEQ ID NO: 42147 - DNA, 20 bp, synthetic construct
  misc_feature 1..20: note = Description of Artificial Sequence: Synthetic oligonucleotide
  misc_feature 1..20: note = Target: SCN10A; (-) strand; PAM type: YTN; PAM sequence: TTG
  source 1..20: mol_type = other DNA
gttatccaggccactctgcc

SEQ ID NO: 42148 - DNA, 20 bp, synthetic construct
  misc_feature 1..20: note = Description of Artificial Sequence: Synthetic oligonucleotide
  misc_feature 1..20: note = Target: SCN10A; (-) strand; PAM type: YTN; PAM sequence: CTT
  source 1..20: mol_type = other DNA
ggttatccaggccactctgc

SEQ ID NO: 42149 - DNA, 20 bp, synthetic construct
  misc_feature 1..20: note = Description of Artificial Sequence: Synthetic oligonucleotide
  misc_feature 1..20: note = Target: SCN10A; (-) strand; PAM type: YTN; PAM sequence: CTC
  source 1..20: mol_type = other DNA
ttggttatccaggccactct

SEQ ID NO: 42150 - DNA, 20 bp, synthetic construct
  misc_feature 1..20: note = Description of Artificial Sequence: Synthetic oligonucleotide
  misc_feature 1..20: note = Target: SCN10A; (-) strand; PAM type: YTN; PAM sequence: TTA
  source 1..20: mol_type = other DNA
aagacaccataaaaataacc

SEQ ID NO: 42151 - DNA, 20 bp, synthetic construct
  misc_feature 1..20: note = Description of Artificial Sequence: Synthetic oligonucleotide
  misc_feature 1..20: note = Target: SCN10A; (-) strand; PAM type: YTN; PAM sequence: TTT
  source 1..20: mol_type = other DNA
aaagacaccataaaaataac

SEQ ID NO: 42152 - DNA, 20 bp, synthetic construct
  misc_feature 1..20: note = Description of Artificial Sequence: Synthetic oligonucleotide
  misc_feature 1..20: note = Target: SCN10A; (-) strand; PAM type: YTN; PAM sequence: TTT
  source 1..20: mol_type = other DNA
taaagacaccataaaaataa

SEQ ID NO: 42153 - DNA, 20 bp, synthetic construct
  misc_feature 1..20: note = Description of Artificial Sequence: Synthetic oligonucleotide
  misc_feature 1..20: note = Target: SCN10A; (-) strand; PAM type: YTN; PAM sequence: TTT
  source 1..20: mol_type = other DNA
ttaaagacaccataaaaata

SEQ ID NO: 42154 - DNA, 20 bp, synthetic construct
  misc_feature 1..20: note = Description of Artificial Sequence: Synthetic oligonucleotide
  misc_feature 1..20: note = Target: SCN10A; (-) strand; PAM type: YTN; PAM sequence: CTT
  source 1..20: mol_type = other DNA
tttaaagacaccataaaaat

SEQ ID NO: 42155 - DNA, 20 bp, synthetic construct
  misc_feature 1..20: note = Description of Artificial Sequence: Synthetic oligonucleotide
  misc_feature 1..20: note = Target: SCN10A; (-) strand; PAM type: YTN; PAM sequence: CTA
  source 1..20: mol_type = other DNA
aaagaagagaagatcacagt

SEQ ID NO: 42156 - DNA, 20 bp, synthetic construct
  misc_feature 1..20: note = Description of Artificial Sequence: Synthetic oligonucleotide
  misc_feature 1..20: note = Target: SCN10A; (-) strand; PAM type: YTN; PAM sequence: TTC
  source 1..20: mol_type = other DNA
acagcactaaaagaagagaa

SEQ ID NO: 42157 - DNA, 20 bp, synthetic construct
  misc_feature 1..20: note = Description of Artificial Sequence: Synthetic oligonucleotide
  misc_feature 1..20: note = Target: SCN10A; (-) strand; PAM type: YTN; PAM sequence: CTC
  source 1..20: mol_type = other DNA
acagagcagtaagatgttca

SEQ ID NO: 42158 - DNA, 20 bp, synthetic construct
  misc_feature 1..20: note = Description of Artificial Sequence: Synthetic oligonucleotide
  misc_feature 1..20: note = Target: SCN10A; (-) strand; PAM type: YTN; PAM sequence: TTG
  source 1..20: mol_type = other DNA
ggatcaaggactcacagagc

SEQ ID NO: 42159 - DNA, 20 bp, synthetic construct
  misc_feature 1..20: note = Description of Artificial Sequence: Synthetic oligonucleotide
  misc_feature 1..20: note = Target: SCN10A; (-) strand; PAM type: YTN; PAM sequence: TTG
  source 1..20: mol_type = other DNA
ggagaaggtcaaagcgtggg

SEQ ID NO: 42160 - DNA, 20 bp, synthetic construct
  misc_feature 1..20: note = Description of Artificial Sequence: Synthetic oligonucleotide
  misc_feature 1..20: note = Target: SCN10A; (-) strand; PAM type: YTN; PAM sequence: TTT
  source 1..20: mol_type = other DNA
gggagaaggtcaaagcgtgg

SEQ ID NO: 42161 - DNA, 20 bp, synthetic construct
  misc_feature 1..20: note = Description of Artificial Sequence: Synthetic oligonucleotide
  misc_feature 1..20: note = Target: SCN10A; (-) strand; PAM type: YTN; PAM sequence: TTT
  source 1..20: mol_type = other DNA
tgggagaaggtcaaagcgtg

SEQ ID NO: 42162 - DNA, 20 bp, synthetic construct
  misc_feature 1..20: note = Description of Artificial Sequence: Synthetic oligonucleotide
  misc_feature 1..20: note = Target: SCN10A; (-) strand; PAM type: YTN; PAM sequence: CTC
  source 1..20: mol_type = other DNA
catagaggtcaggagaagtt

SEQ ID NO: 42163 - DNA, 20 bp, synthetic construct
  misc_feature 1..20: note = Description of Artificial Sequence: Synthetic oligonucleotide
  misc_feature 1..20: note = Target: SCN10A; (-) strand; PAM type: YTN; PAM sequence: TTG
  source 1..20: mol_type = other DNA
aatagggggagatatgtgca

SEQ ID NO: 42164 - DNA, 20 bp, synthetic construct
  misc_feature 1..20: note = Description of Artificial Sequence: Synthetic oligonucleotide
  misc_feature 1..20: note = Target: SCN10A; (-) strand; PAM type: YTN; PAM sequence: TTT
  source 1..20: mol_type = other DNA
gaatagggggagatatgtgc

SEQ ID NO: 42165 - DNA, 20 bp, synthetic construct
  misc_feature 1..20: note = Description of Artificial Sequence: Synthetic oligonucleotide
  misc_feature 1..20: note = Target: SCN10A; (-) strand; PAM type: YTN; PAM sequence: CTT
  source 1..20: mol_type = other DNA
tgaatagggggagatatgtg

SEQ ID NO: 42166 - DNA, 20 bp, synthetic construct
  misc_feature 1..20: note = Description of Artificial Sequence: Synthetic oligonucleotide
  misc_feature 1..20: note = Target: SCN10A; (-) strand; PAM type: YTN; PAM sequence: CTG
  source 1..20: mol_type = other DNA
aggtacatggggtaggggag

SEQ ID NO: 42167 - DNA, 20 bp, synthetic construct
  misc_feature 1..20: note = Description of Artificial Sequence: Synthetic oligonucleotide
  misc_feature 1..20: note = Target: SCN10A; (-) strand; PAM type: YTN; PAM sequence: CTA
  source 1..20: mol_type = other DNA
acccctgaggtacatggggt

SEQ ID NO: 42168 - DNA, 20 bp, synthetic construct
  misc_feature 1..20: note = Description of Artificial Sequence: Synthetic oligonucleotide
  misc_feature 1..20: note = Target: SCN10A; (-) strand; PAM type: YTN; PAM sequence: TTA
  source 1..20: mol_type = other DNA
caagacacaggaagagcagt

SEQ ID NO: 42169 - DNA, 20 bp, synthetic construct
  misc_feature 1..20: note = Description of Artificial Sequence: Synthetic oligonucleotide
  misc_feature 1..20: note = Target: SCN10A; (-) strand; PAM type: YTN; PAM sequence: TTT
  source 1..20: mol_type = other DNA
acaagacacaggaagagcag

SEQ ID NO: 42170 - DNA, 20 bp, synthetic construct
  misc_feature 1..20: note = Description of Artificial Sequence: Synthetic oligonucleotide
  misc_feature 1..20: note = Target: SCN10A; (-) strand; PAM type: YTN; PAM sequence: TTT
  source 1..20: mol_type = other DNA
tacaagacacaggaagagca

SEQ ID NO: 42171 - DNA, 20 bp, synthetic construct
  misc_feature 1..20: note = Description of Artificial Sequence: Synthetic oligonucleotide
  misc_feature 1..20: note = Target: SCN10A; (-) strand; PAM type: YTN; PAM sequence: TTC
  source 1..20: mol_type = other DNA
aaagcaagaaggggttttac

SEQ ID NO: 42172 - DNA, 20 bp, synthetic construct
  misc_feature 1..20: note = Description of Artificial Sequence: Synthetic oligonucleotide
  misc_feature 1..20: note = Target: SCN10A; (-) strand; PAM type: YTN; PAM sequence: CTT
  source 1..20: mol_type = other DNA
caaagcaagaaggggtttta

SEQ ID NO: 42173 - DNA, 20 bp, synthetic construct
  misc_feature 1..20: note = Description of Artificial Sequence: Synthetic oligonucleotide
  misc_feature 1..20: note = Target: SCN10A; (-) strand; PAM type: YTN; PAM sequence: CTA
  source 1..20: mol_type = other DNA
ggtggcaaagcttcaaagca

SEQ ID NO: 42174 - DNA, 20 bp, synthetic construct
  misc_feature 1..20: note = Description of Artificial Sequence: Synthetic oligonucleotide
  misc_feature 1..20: note = Target: SCN10A; (-) strand; PAM type: YTN; PAM sequence: TTG
  source 1..20: mol_type = other DNA
gcaagcggcagtaatgaaga

SEQ ID NO: 42175 - DNA, 20 bp, synthetic construct
  misc_feature 1..20: note = Description of Artificial Sequence: Synthetic oligonucleotide
  misc_feature 1..20: note = Target: SCN10A; (-) strand; PAM type: YTN; PAM sequence: TTT
  source 1..20: mol_type = other DNA
ggcaagcggcagtaatgaag

SEQ ID NO: 42176 - DNA, 20 bp, synthetic construct
  misc_feature 1..20: note = Description of Artificial Sequence: Synthetic oligonucleotide
  misc_feature 1..20: note = Target: SCN10A; (-) strand; PAM type: YTN; PAM sequence: CTG
  source 1..20: mol_type = other DNA
aggcagagggaccaagagtt

SEQ ID NO: 42177 - DNA, 20 bp, synthetic construct
  misc_feature 1..20: note = Description of Artificial Sequence: Synthetic oligonucleotide
  misc_feature 1..20: note = Target: SCN10A; (-) strand; PAM type: YTN; PAM sequence: TTA
  source 1..20: mol_type = other DNA
ctgaggcagagggaccaaga

SEQ ID NO: 42178 - DNA, 20 bp, synthetic construct
  misc_feature 1..20: note = Description of Artificial Sequence: Synthetic oligonucleotide
  misc_feature 1..20: note = Target: SCN10A; (-) strand; PAM type: YTN; PAM sequence: CTC
  source 1..20: mol_type = other DNA
acccatcattactgaggcag

SEQ ID NO: 42179 - DNA, 20 bp, synthetic construct
  misc_feature 1..20: note = Description of Artificial Sequence: Synthetic oligonucleotide
  misc_feature 1..20: note = Target: SCN10A; (-) strand; PAM type: YTN; PAM sequence: CTA
  source 1..20: mol_type = other DNA
ggataatagccaagagtggg

SEQ ID NO: 42180 - DNA, 20 bp, synthetic construct
  misc_feature 1..20: note = Description of Artificial Sequence: Synthetic oligonucleotide
  misc_feature 1..20: note = Target: SCN10A; (-) strand; PAM type: YTN; PAM sequence: TTG
  source 1..20: mol_type = other DNA
cctaggataatagccaagag

SEQ ID NO: 42181 - DNA, 20 bp, synthetic construct
  misc_feature 1..20: note = Description of Artificial Sequence: Synthetic oligonucleotide
  misc_feature 1..20: note = Target: SCN10A; (-) strand; PAM type: YTN; PAM sequence: TTA
  source 1..20: mol_type = other DNA
atgttgcctaggataatagc

SEQ ID NO: 42182 - DNA, 20 bp, synthetic construct
  misc_feature 1..20: note = Description of Artificial Sequence: Synthetic oligonucleotide
  misc_feature 1..20: note = Target: SCN10A; (-) strand; PAM type: YTN; PAM sequence: TTG
  source 1..20: mol_type = other DNA
tgcaataaaccaagagacaa

SEQ ID NO: 42183 - DNA, 20 bp, synthetic construct
  misc_feature 1..20: note = Description of Artificial Sequence: Synthetic oligonucleotide
  misc_feature 1..20: note = Target: SCN10A; (-) strand; PAM type: YTN; PAM sequence: TTT
  source 1..20: mol_type = other DNA
gtgcaataaaccaagagaca

SEQ ID NO: 42184 - DNA, 20 bp, synthetic construct
  misc_feature 1..20: note = Description of Artificial Sequence: Synthetic oligonucleotide
  misc_feature 1..20: note = Target: SCN10A; (-) strand; PAM type: YTN; PAM sequence: TTA
  source 1..20: mol_type = other DNA
gagatttgtgcaataaacca

SEQ ID NO: 42185 - DNA, 20 bp, synthetic construct
  misc_feature 1..20: note = Description of Artificial Sequence: Synthetic oligonucleotide
  misc_feature 1..20: note = Target: SCN10A; (-) strand; PAM type: YTN; PAM sequence: CTA
  source 1..20: mol_type = other DNA
ggtcattagagatttgtgca

SEQ ID NO: 42186 - DNA, 20 bp, synthetic construct
  misc_feature 1..20: note = Description of Artificial Sequence: Synthetic oligonucleotide
  misc_feature 1..20: note = Target: SCN10A; (-) strand; PAM type: YTN; PAM sequence: TTA
  source 1..20: mol_type = other DNA
ggagaaactaggtcattaga

SEQ ID NO: 42187 - DNA, 20 bp, synthetic construct
  misc_feature 1..20: note = Description of Artificial Sequence: Synthetic oligonucleotide
  misc_feature 1..20: note = Target: SCN10A; (-) strand; PAM type: YTN; PAM sequence: TTA
  source 1..20: mol_type = other DNA
agttaggagaaactaggtca

SEQ ID NO: 42188 - DNA, 20 bp, synthetic construct
  misc_feature 1..20: note = Description of Artificial Sequence: Synthetic oligonucleotide
  misc_feature 1..20: note = Target: SCN10A; (-) strand; PAM type: YTN; PAM sequence: TTT
  source 1..20: mol_type = other DNA
aagttaggagaaactaggtc

SEQ ID NO: 42189 - DNA, 20 bp, synthetic construct
  misc_feature 1..20: note = Description of Artificial Sequence: Synthetic oligonucleotide
  misc_feature 1..20: note = Target: SCN10A; (-) strand; PAM type: YTN; PAM sequence: CTT
  source 1..20: mol_type = other DNA
taagttaggagaaactaggt

SEQ ID NO: 42190 - DNA, 20 bp, synthetic construct
  misc_feature 1..20: note = Description of Artificial Sequence: Synthetic oligonucleotide
  misc_feature 1..20: note = Target: SCN10A; (-) strand; PAM type: YTN; PAM sequence: CTG
  source 1..20: mol_type = other DNA
ctttaagttaggagaaacta

SEQ ID NO: 42191 - DNA, 20 bp, synthetic construct
  misc_feature 1..20: note = Description of Artificial Sequence: Synthetic oligonucleotide
  misc_feature 1..20: note = Target: SCN10A; (-) strand; PAM type: YTN; PAM sequence: TTC
  source 1..20: mol_type = other DNA
tgctttaagttaggagaaac

SEQ ID NO: 42192 - DNA, 20 bp, synthetic construct
  misc_feature 1..20: note = Description of Artificial Sequence: Synthetic oligonucleotide
  misc_feature 1..20: note = Target: SCN10A; (-) strand; PAM type: YTN; PAM sequence: CTG
  source 1..20: mol_type = other DNA
aaatattctgctttaagtta

SEQ ID NO: 42193 - DNA, 20 bp, synthetic construct
  misc_feature 1..20: note = Description of Artificial Sequence: Synthetic oligonucleotide
  misc_feature 1..20: note = Target: SCN10A; (-) strand; PAM type: YTN; PAM sequence: TTC
  source 1..20: mol_type = other DNA
tgaaatattctgctttaagt

SEQ ID NO: 42194 - DNA, 20 bp, synthetic construct
  misc_feature 1..20: note = Description of Artificial Sequence: Synthetic oligonucleotide
  misc_feature 1..20: note = Target: SCN10A; (-) strand; PAM type: YTN; PAM sequence: TTT
  source 1..20: mol_type = other DNA
ctgaaatattctgctttaag

SEQ ID NO: 42195 - DNA, 20 bp, synthetic construct
  misc_feature 1..20: note = Description of Artificial Sequence: Synthetic oligonucleotide
  misc_feature 1..20: note = Target: SCN10A; (-) strand; PAM type: YTN; PAM sequence: CTG
  source 1..20: mol_type = other DNA
gagggagatgtaagtttctg

SEQ ID NO: 42196 - DNA, 20 bp, synthetic construct
  misc_feature 1..20: note = Description of Artificial Sequence: Synthetic oligonucleotide
  misc_feature 1..20: note = Target: SCN10A; (-) strand; PAM type: YTN; PAM sequence: CTA
  source 1..20: mol_type = other DNA
agatggtagctggagggaga

SEQ ID NO: 42197 - DNA, 20 bp, synthetic construct
  misc_feature 1..20: note = Description of Artificial Sequence: Synthetic oligonucleotide
  misc_feature 1..20: note = Target: SCN10A; (-) strand; PAM type: YTN; PAM sequence: TTG
  source 1..20: mol_type = other DNA
aaggtgggaagagatctaag

SEQ ID NO: 42198 - DNA, 20 bp, synthetic construct
  misc_feature 1..20: note = Description of Artificial Sequence: Synthetic oligonucleotide
  misc_feature 1..20: note = Target: SCN10A; (-) strand; PAM type: YTN; PAM sequence: TTT
  source 1..20: mol_type = other DNA
gaaggtgggaagagatctaa

SEQ ID NO: 42199 - DNA, 20 bp, synthetic construct
  misc_feature 1..20: note = Description of Artificial Sequence: Synthetic oligonucleotide
  misc_feature 1..20: note = Target: SCN10A; (-) strand; PAM type: YTN; PAM sequence: CTT
  source 1..20: mol_type = other DNA
tgaaggtgggaagagatcta

SEQ ID NO: 42200 - DNA, 20 bp, synthetic construct
  misc_feature 1..20: note = Description of Artificial Sequence: Synthetic oligonucleotide
  misc_feature 1..20: note = Target: SCN10A; (-) strand; PAM type: YTN; PAM sequence: TTG
  source 1..20: mol_type = other DNA
ctttgaaggtgggaagagat

SEQ ID NO: 42201 - DNA, 20 bp, synthetic construct
  misc_feature 1..20: note = Description of Artificial Sequence: Synthetic oligonucleotide
  misc_feature 1..20: note = Target: SCN10A; (-) strand; PAM type: YTN; PAM sequence: TTT
  source 1..20: mol_type = other DNA
gctttgaaggtgggaagaga

SEQ ID NO: 42202 - DNA, 20 bp, synthetic construct
  misc_feature 1..20: note = Description of Artificial Sequence: Synthetic oligonucleotide
  misc_feature 1..20: note = Target: SCN10A; (-) strand; PAM type: YTN; PAM sequence: TTT
  source 1..20: mol_type = other DNA
tgctttgaaggtgggaagag

SEQ ID NO: 42203 - DNA, 20 bp, synthetic construct
  misc_feature 1..20: note = Description of Artificial Sequence: Synthetic oligonucleotide
  misc_feature 1..20: note = Target: SCN10A; (-) strand; PAM type: YTN; PAM sequence: TTC
  source 1..20: mol_type = other DNA
aagaaattttgctttgaagg

SEQ ID NO: 42204 - DNA, 20 bp, synthetic construct
  misc_feature 1..20: note = Description of Artificial Sequence: Synthetic oligonucleotide
  misc_feature 1..20: note = Target: SCN10A; (-) strand; PAM type: YTN; PAM sequence: TTT
  source 1..20: mol_type = other DNA
caagaaattttgctttgaag

SEQ ID NO: 42205 - DNA, 20 bp, synthetic construct
  misc_feature 1..20: note = Description of Artificial Sequence: Synthetic oligonucleotide
  misc_feature 1..20: note = Target: SCN10A; (-) strand; PAM type: YTN; PAM sequence: CTT
  source 1..20: mol_type = other DNA
tcaagaaattttgctttgaa

SEQ ID NO: 42206 - DNA, 20 bp, synthetic construct
  misc_feature 1..20: note = Description of Artificial Sequence: Synthetic oligonucleotide
  misc_feature 1..20: note = Target: SCN10A; (-) strand; PAM type: YTN; PAM sequence: CTC
  source 1..20: mol_type = other DNA
tttcaagaaattttgctttg

SEQ ID NO: 42207 - DNA, 20 bp, synthetic construct
  misc_feature 1..20: note = Description of Artificial Sequence: Synthetic oligonucleotide
  misc_feature 1..20: note = Target: SCN10A; (-) strand; PAM type: YTN; PAM sequence: TTG
  source 1..20: mol_type = other DNA
tacacaactctttcaagaaa

SEQ ID NO: 42208 - DNA, 20 bp, synthetic construct
  misc_feature 1..20: note = Description of Artificial Sequence: Synthetic oligonucleotide
  misc_feature 1..20: note = Target: SCN10A; (-) strand; PAM type: YTN; PAM sequence: CTG
  source 1..20: mol_type = other DNA
attgtacacaactctttcaa

SEQ ID NO: 42209 - DNA, 20 bp, synthetic construct
  misc_feature 1..20: note = Description of Artificial Sequence: Synthetic oligonucleotide
  misc_feature 1..20: note = Target: SCN10A; (-) strand; PAM type: YTN; PAM sequence: CTG
  source 1..20: mol_type = other DNA
aggagtgaatgagggacact

SEQ ID NO: 42210 - DNA, 20 bp, synthetic construct
  misc_feature 1..20: note = Description of Artificial Sequence: Synthetic oligonucleotide
  misc_feature 1..20: note = Target: SCN10A; (-) strand; PAM type: YTN; PAM sequence: TTG
  source 1..20: mol_type = other DNA
atgtgggctgaggagtgaat

SEQ ID NO: 42211 - DNA, 20 bp, synthetic construct
  misc_feature 1..20: note = Description of Artificial Sequence: Synthetic oligonucleotide
  misc_feature 1..20: note = Target: SCN10A; (-) strand; PAM type: YTN; PAM sequence: CTG
  source 1..20: mol_type = other DNA
ttgatgtgggctgaggagtg

SEQ ID NO: 42212 - DNA, 20 bp, synthetic construct
  misc_feature 1..20: note = Description of Artificial Sequence: Synthetic oligonucleotide
  misc_feature 1..20: note = Target: SCN10A; (-) strand; PAM type: YTN; PAM sequence: CTC
  source 1..20: mol_type = other DNA
tgttgatgtgggctgaggag

SEQ ID NO: 42213 - DNA, 20 bp, synthetic construct
  misc_feature 1..20: note = Description of Artificial Sequence: Synthetic oligonucleotide
  misc_feature 1..20: note = Target: SCN10A; (-) strand; PAM type: YTN; PAM sequence: CTG
  source 1..20: mol_type = other DNA
tcaggatagaggcaaaagct

SEQ ID NO: 42214 - DNA, 20 bp, synthetic construct
  misc_feature 1..20: note = Description of Artificial Sequence: Synthetic oligonucleotide
  misc_feature 1..20: note = Target: SCN10A; (-) strand; PAM type: YTN; PAM sequence: CTC
  source 1..20: mol_type = other DNA
tgtcaggatagaggcaaaag

SEQ ID NO: 42215 - DNA, 20 bp, synthetic construct
  misc_feature 1..20: note = Description of Artificial Sequence: Synthetic oligonucleotide
  misc_feature 1..20: note = Target: SCN10A; (-) strand; PAM type: YTN; PAM sequence: TTA
  source 1..20: mol_type = other DNA
gtgagaacaatctctgtcag

SEQ ID NO: 42216 - DNA, 20 bp, synthetic construct
  misc_feature 1..20: note = Description of Artificial Sequence: Synthetic oligonucleotide
  misc_feature 1..20: note = Target: SCN10A; (-) strand; PAM type: YTN; PAM sequence: CTT
  source 1..20: mol_type = other DNA
agtgagaacaatctctgtca

SEQ ID NO: 42217 - DNA, 20 bp, synthetic construct
  misc_feature 1..20: note = Description of Artificial Sequence: Synthetic oligonucleotide
  misc_feature 1..20: note = Target: SCN10A; (-) strand; PAM type: YTN; PAM sequence: TTC
  source 1..20: mol_type = other DNA
atgatcttagtgagaacaat

SEQ ID NO: 42218 - DNA, 20 bp, synthetic construct
  misc_feature 1..20: note = Description of Artificial Sequence: Synthetic oligonucleotide
  misc_feature 1..20: note = Target: SCN10A; (-) strand; PAM type: YTN; PAM sequence: TTA
  source 1..20: mol_type = other DNA
tgggaagtcattcatgatct

SEQ ID NO: 42219 - DNA, 20 bp, synthetic construct
  misc_feature 1..20: note = Description of Artificial Sequence: Synthetic oligonucleotide
  misc_feature 1..20: note = Target: SCN10A; (-) strand; PAM type: YTN; PAM sequence: CTA
  source 1..20: mol_type = other DNA
atattatgggaagtcattca

SEQ ID NO: 42220 - DNA, 20 bp, synthetic construct
  misc_feature 1..20: note = Description of Artificial Sequence: Synthetic oligonucleotide
  misc_feature 1..20: note = Target: SCN10A; (-) strand; PAM type: YTN; PAM sequence: TTG
  source 1..20: mol_type = other DNA
gatctaatattatgggaagt

SEQ ID NO: 42221 - DNA, 20 bp, synthetic construct
  misc_feature 1..20: note = Description of Artificial Sequence: Synthetic oligonucleotide
  misc_feature 1..20: note = Target: SCN10A; (-) strand; PAM type: YTN; PAM sequence: CTT
  source 1..20: mol_type = other DNA
ggatctaatattatgggaag

SEQ ID NO: 42222 - DNA, 20 bp, synthetic construct
  misc_feature 1..20: note = Description of Artificial Sequence: Synthetic oligonucleotide
  misc_feature 1..20: note = Target: SCN10A; (-) strand; PAM type: YTN; PAM sequence: CTA
  source 1..20: mol_type = other DNA
ggcaatatcagacaagcgtc

SEQ ID NO: 42223 - DNA, 20 bp, synthetic construct
  misc_feature 1..20: note = Description of Artificial Sequence: Synthetic oligonucleotide
  misc_feature 1..20: note = Target: SCN10A; (-) strand; PAM type: YTN; PAM sequence: TTC
  source 1..20: mol_type = other DNA
aaggtagaagggtactaggc

SEQ ID NO: 42224 - DNA, 20 bp, synthetic construct
  misc_feature 1..20: note = Description of Artificial Sequence: Synthetic oligonucleotide
  misc_feature 1..20: note = Target: SCN10A; (-) strand; PAM type: YTN; PAM sequence: TTT
  source 1..20: mol_type = other DNA
caaggtagaagggtactagg

SEQ ID NO: 42225 - DNA, 20 bp, synthetic construct
  misc_feature 1..20: note = Description of Artificial Sequence: Synthetic oligonucleotide
  misc_feature 1..20: note = Target: SCN10A; (-) strand; PAM type: YTN; PAM sequence: CTA
  source 1..20: mol_type = other DNA
taaaagagcatcacaaatgg

SEQ ID NO: 42226 - DNA, 20 bp, synthetic construct
  misc_feature 1..20: note = Description of Artificial Sequence: Synthetic oligonucleotide
  misc_feature 1..20: note = Target: SCN10A; (-) strand; PAM type: YTN; PAM sequence: TTG
  source 1..20: mol_type = other DNA
ggtaaaggagactataaaag

SEQ ID NO: 42227 - DNA, 20 bp, synthetic construct
  misc_feature 1..20: note = Description of Artificial Sequence: Synthetic oligonucleotide
  misc_feature 1..20: note = Target: SCN10A; (-) strand; PAM type: YTN; PAM sequence: CTA
  source 1..20: mol_type = other DNA
aaagttgggtaaaggagact

SEQ ID NO: 42228 - DNA, 20 bp, synthetic construct
  misc_feature 1..20: note = Description of Artificial Sequence: Synthetic oligonucleotide
  misc_feature 1..20: note = Target: SCN10A; (-) strand; PAM type: YTN; PAM sequence: CTG
  source 1..20: mol_type = other DNA
atgtctaaaagttgggtaaa

SEQ ID NO: 42229 - DNA, 20 bp, synthetic construct
  misc_feature 1..20: note = Description of Artificial Sequence: Synthetic oligonucleotide
  misc_feature 1..20: note = Target: SCN10A; (-) strand; PAM type: YTN; PAM sequence: CTC
  source 1..20: mol_type = other DNA
tgatgtctaaaagttgggta

SEQ ID NO: 42230 - DNA, 20 bp, synthetic construct
  misc_feature 1..20: note = Description of Artificial Sequence: Synthetic oligonucleotide
  misc_feature 1..20: note = Target: SCN10A; (-) strand; PAM type: YTN; PAM sequence: CTC
  source 1..20: mol_type = other DNA
gaagaactctgatgtctaaa

SEQ ID NO: 42231 - DNA, 20 bp, synthetic construct
  misc_feature 1..20: note = Description of Artificial Sequence: Synthetic oligonucleotide
  misc_feature 1..20: note = Target: SCN10A; (-) strand; PAM type: YTN; PAM sequence: CTG
  source 1..20: mol_type = other DNA
agcctcgaagaactctgatg

SEQ ID NO: 42232 - DNA, 20 bp, synthetic construct
  misc_feature 1..20: note = Description of Artificial Sequence: Synthetic oligonucleotide
  misc_feature 1..20: note = Target: SCN10A; (-) strand; PAM type: YTN; PAM sequence: CTC
  source 1..20: mol_type = other DNA
aagactgagcctcgaagaac

SEQ ID NO: 42233 - DNA, 20 bp, synthetic construct
  misc_feature 1..20: note = Description of Artificial Sequence: Synthetic oligonucleotide
  misc_feature 1..20: note = Target: SCN10A; (-) strand; PAM type: YTN; PAM sequence: TTG
  source 1..20: mol_type = other DNA
tcaagggagaaaaaatgggg

SEQ ID NO: 42234 - DNA, 20 bp, synthetic construct
  misc_feature 1..20: note = Description of Artificial Sequence: Synthetic oligonucleotide
  misc_feature 1..20: note = Target: SCN10A; (-) strand; PAM type: YTN; PAM sequence: CTG
  source 1..20: mol_type = other DNA
gataaattgtcaagggagaa

SEQ ID NO: 42235 - DNA, 20 bp, synthetic construct
  misc_feature 1..20: note = Description of Artificial Sequence: Synthetic oligonucleotide
  misc_feature 1..20: note = Target: SCN10A; (-) strand; PAM type: YTN; PAM sequence: CTG
  source 1..20: mol_type = other DNA
gctggataaattgtcaaggg

SEQ ID NO: 42236 - DNA, 20 bp, synthetic construct
  misc_feature 1..20: note = Description of Artificial Sequence: Synthetic oligonucleotide
  misc_feature 1..20: note = Target: SCN10A; (-) strand; PAM type: YTN; PAM sequence: TTC
  source 1..20: mol_type = other DNA
ctggctggataaattgtcaa

SEQ ID NO: 42237 - DNA, 20 bp, synthetic construct
  misc_feature 1..20: note = Description of Artificial Sequence: Synthetic oligonucleotide
  misc_feature 1..20: note = Target: SCN10A; (-) strand; PAM type: YTN; PAM sequence: TTA
  source 1..20: mol_type = other DNA
attcctggctggataaattg

SEQ ID NO: 42238 - DNA, 20 bp, synthetic construct
  misc_feature 1..20: note = Description of Artificial Sequence: Synthetic oligonucleotide
  misc_feature 1..20: note = Target: SCN10A; (-) strand; PAM type: YTN; PAM sequence: TTG
  source 1..20: mol_type = other DNA
cacatatatgttaattcctg

SEQ ID NO: 42239 - DNA, 20 bp, synthetic construct
  misc_feature 1..20: note = Description of Artificial Sequence: Synthetic oligonucleotide
  misc_feature 1..20: note = Target: SCN10A; (-) strand; PAM type: YTN; PAM sequence: TTG
  source 1..20: mol_type = other DNA
gccaaaagttgcacatatat

SEQ ID NO: 42240 - DNA, 20 bp, synthetic construct
  misc_feature 1..20: note = Description of Artificial Sequence: Synthetic oligonucleotide
  misc_feature 1..20: note = Target: SCN10A; (-) strand; PAM type: YTN; PAM sequence: TTA
  source 1..20: mol_type = other DNA
cagtccagtgacagaggcaa

SEQ ID NO: 42241 - DNA, 20 bp, synthetic construct
  misc_feature 1..20: note = Description of Artificial Sequence: Synthetic oligonucleotide
  misc_feature 1..20: note = Target: SCN10A; (-) strand; PAM type: YTN; PAM sequence: TTT
  source 1..20: mol_type = other DNA
acagtccagtgacagaggca

SEQ ID NO: 42242 - DNA, 20 bp, synthetic construct
  misc_feature 1..20: note = Description of Artificial Sequence: Synthetic oligonucleotide
  misc_feature 1..20: note = Target: SCN10A; (-) strand; PAM type: YTN; PAM sequence: TTA
  source 1..20: mol_type = other DNA
cagtttacagtccagtgaca

SEQ ID NO: 42243 - DNA, 20 bp, synthetic construct
  misc_feature 1..20: note = Description of Artificial Sequence: Synthetic oligonucleotide
  misc_feature 1..20: note = Target: SCN10A; (-) strand; PAM type: YTN; PAM sequence: CTT
  source 1..20: mol_type = other DNA
acagtttacagtccagtgac

SEQ ID NO: 42244 - DNA, 20 bp, synthetic construct
  misc_feature 1..20: note = Description of Artificial Sequence: Synthetic oligonucleotide
  misc_feature 1..20: note = Target: SCN10A; (-) strand; PAM type: YTN; PAM sequence: CTC
  source 1..20: mol_type = other DNA
ttacagtttacagtccagtg

SEQ ID NO: 42245 - DNA, 20 bp, synthetic construct
  misc_feature 1..20: note = Description of Artificial Sequence: Synthetic oligonucleotide
  misc_feature 1..20: note = Target: SCN10A; (-) strand; PAM type: YTN; PAM sequence: CTA
  source 1..20: mol_type = other DNA
ctcttacagtttacagtcca

SEQ ID NO: 42246 - DNA, 20 bp, synthetic construct
  misc_feature 1..20: note = Description of Artificial Sequence: Synthetic oligonucleotide
  misc_feature 1..20: note = Target: SCN10A; (-) strand; PAM type: YTN; PAM sequence: TTC
  source 1..20: mol_type = other DNA
ctactcttacagtttacagt

SEQ ID NO: 42247 - DNA, 20 bp, synthetic construct
  misc_feature 1..20: note = Description of Artificial Sequence: Synthetic oligonucleotide
  misc_feature 1..20: note = Target: SCN10A; (-) strand; PAM type: YTN; PAM sequence: TTA
  source 1..20: mol_type = other DNA
gagcagtgagcaagacagac

SEQ ID NO: 42248 - DNA, 20 bp, synthetic construct
  misc_feature 1..20: note = Description of Artificial Sequence: Synthetic oligonucleotide
  misc_feature 1..20: note = Target: SCN10A; (-) strand; PAM type: YTN; PAM sequence: CTA
  source 1..20: mol_type = other DNA
tgcagacaccagggttagag

SEQ ID NO: 42249 - DNA, 20 bp, synthetic construct
  misc_feature 1..20: note = Description of Artificial Sequence: Synthetic oligonucleotide
  misc_feature 1..20: note = Target: SCN10A; (-) strand; PAM type: YTN; PAM sequence: TTG
  source 1..20: mol_type = other DNA
cagccaggcactatgcagac

SEQ ID NO: 42250 - DNA, 20 bp, synthetic construct
  misc_feature 1..20: note = Description of Artificial Sequence: Synthetic oligonucleotide
  misc_feature 1..20: note = Target: SCN10A; (-) strand; PAM type: YTN; PAM sequence: CTG
  source 1..20: mol_type = other DNA
ttgcagccaggcactatgca

SEQ ID NO: 42251 - DNA, 20 bp, synthetic construct
  misc_feature 1..20: note = Description of Artificial Sequence: Synthetic oligonucleotide
  misc_feature 1..20: note = Target: SCN10A; (-) strand; PAM type: YTN; PAM sequence: TTG
  source 1..20: mol_type = other DNA
cagagcatctgttgcagcca

SEQ ID NO: 42252 - DNA, 20 bp, synthetic construct
  misc_feature 1..20: note = Description of Artificial Sequence: Synthetic oligonucleotide
  misc_feature 1..20: note = Target: SCN10A; (-) strand; PAM type: YTN; PAM sequence: TTT
  source 1..20: mol_type = other DNA
gcagagcatctgttgcagcc

SEQ ID NO: 42253 - DNA, 20 bp, synthetic construct
  misc_feature 1..20: note = Description of Artificial Sequence: Synthetic oligonucleotide
  misc_feature 1..20: note = Target: SCN10A; (-) strand; PAM type: YTN; PAM sequence: TTA
  source 1..20: mol_type = other DNA
caaatttgcagagcatctgt

SEQ ID NO: 42254 - DNA, 20 bp, synthetic construct
  misc_feature 1..20: note = Description of Artificial Sequence: Synthetic oligonucleotide
  misc_feature 1..20: note = Target: SCN10A; (-) strand; PAM type: YTN; PAM sequence: TTT
  source 1..20: mol_type = other DNA
acaaatttgcagagcatctg

SEQ ID NO: 42255 - DNA, 20 bp, synthetic construct
  misc_feature 1..20: note = Description of Artificial Sequence: Synthetic oligonucleotide
  misc_feature 1..20: note = Target: SCN10A; (-) strand; PAM type: YTN; PAM sequence: TTC
  source 1..20: mol_type = other DNA
atttacaaatttgcagagca

SEQ ID NO: 42256 - DNA, 20 bp, synthetic construct
  misc_feature 1..20: note = Description of Artificial Sequence: Synthetic oligonucleotide
  misc_feature 1..20: note = Target: SCN10A; (-) strand; PAM type: YTN; PAM sequence: TTC
  source 1..20: mol_type = other DNA
cattcatttacaaatttgca

SEQ ID NO: 42257 - DNA, 20 bp, synthetic construct
  misc_feature 1..20: note = Description of Artificial Sequence: Synthetic oligonucleotide
  misc_feature 1..20: note = Target: SCN10A; (-) strand; PAM type: YTN; PAM sequence: CTT
  source 1..20: mol_type = other DNA
ccattcatttacaaatttgc

SEQ ID NO: 42258 - DNA, 20 bp, synthetic construct
  misc_feature 1..20: note = Description of Artificial Sequence: Synthetic oligonucleotide
  misc_feature 1..20: note = Target: SCN10A; (-) strand; PAM type: YTN; PAM sequence: CTG
  source 1..20: mol_type = other DNA
tcttccattcatttacaaat

SEQ ID NO: 42259 - DNA, 20 bp, synthetic construct
  misc_feature 1..20: note = Description of Artificial Sequence: Synthetic oligonucleotide
  misc_feature 1..20: note = Target: SCN10A; (-) strand; PAM type: YTN; PAM sequence: TTC
  source 1..20: mol_type = other DNA
tgtcttccattcatttacaa

SEQ ID NO: 42260 - DNA, 20 bp, synthetic construct
  misc_feature 1..20: note = Description of Artificial Sequence: Synthetic oligonucleotide
  misc_feature 1..20: note = Target: SCN10A; (-) strand; PAM type: YTN; PAM sequence: CTG
  source 1..20: mol_type = other DNA
cccattctgtcttccattca

SEQ ID NO: 42261 - DNA, 20 bp, synthetic construct
  misc_feature 1..20: note = Description of Artificial Sequence: Synthetic oligonucleotide
  misc_feature 1..20: note = Target: SCN10A; (-) strand; PAM type: YTN; PAM sequence: CTC
  source 1..20: mol_type = other DNA
agagctgcccattctgtctt

SEQ ID NO: 42262 - DNA, 20 bp, synthetic construct
  misc_feature 1..20: note = Description of Artificial Sequence: Synthetic oligonucleotide
  misc_feature 1..20: note = Target: SCN10A; (-) strand; PAM type: YTN; PAM sequence: TTA
  source 1..20: mol_type = other DNA
actcagagctgcccattctg

SEQ ID NO: 42263 - DNA, 20 bp, synthetic construct
  misc_feature 1..20: note = Description of Artificial Sequence: Synthetic oligonucleotide
  misc_feature 1..20: note = Target: SCN10A; (-) strand; PAM type: YTN; PAM sequence: CTA
  source 1..20: mol_type = other DNA
tggttaactcagagctgccc

SEQ ID NO: 42264 - DNA, 20 bp, synthetic construct
  misc_feature 1..20: note = Description of Artificial Sequence: Synthetic oligonucleotide
  misc_feature 1..20: note = Target: SCN10A; (-) strand; PAM type: YTN; PAM sequence: TTG
  source 1..20: mol_type = other DNA
agctatggttaactcagagc

SEQ ID NO: 42265 - DNA, 20 bp, synthetic construct
  misc_feature 1..20: note = Description of Artificial Sequence: Synthetic oligonucleotide
  misc_feature 1..20: note = Target: SCN10A; (-) strand; PAM type: YTN; PAM sequence: TTT
  source 1..20: mol_type = other DNA
gagctatggttaactcagag

SEQ ID NO: 42266 - DNA, 20 bp, synthetic construct
  misc_feature 1..20: note = Description of Artificial Sequence: Synthetic oligonucleotide
  misc_feature 1..20: note = Target: SCN10A; (-) strand; PAM type: YTN; PAM sequence: TTC
  source 1..20: mol_type = other DNA
atttgagctatggttaactc

SEQ ID NO: 42267 - DNA, 20 bp, synthetic construct
  misc_feature 1..20: note = Description of Artificial Sequence: Synthetic oligonucleotide
  misc_feature 1..20: note = Target: SCN10A; (-) strand; PAM type: YTN; PAM sequence: TTT
  source 1..20: mol_type = other DNA
catttgagctatggttaact

SEQ ID NO: 42268 - DNA, 20 bp, synthetic construct
  misc_feature 1..20: note = Description of Artificial Sequence: Synthetic oligonucleotide
  misc_feature 1..20: note = Target: SCN10A; (-) strand; PAM type: YTN; PAM sequence: TTT
  source 1..20: mol_type = other DNA
tcatttgagctatggttaac

SEQ ID NO: 42269 - DNA, 20 bp, synthetic construct
  misc_feature 1..20: note = Description of Artificial Sequence: Synthetic oligonucleotide
  misc_feature 1..20: note = Target: SCN10A; (-) strand; PAM type: YTN; PAM sequence: TTA
  source 1..20: mol_type = other DNA
aattttcatttgagctatgg

SEQ ID NO: 42270 - DNA, 20 bp, synthetic construct
  misc_feature 1..20: note = Description of Artificial Sequence: Synthetic oligonucleotide
  misc_feature 1..20: note = Target: SCN10A; (-) strand; PAM type: YTN; PAM sequence: TTT
  source 1..20: mol_type = other DNA
aaattttcatttgagctatg

SEQ ID NO: 42271 - DNA, 20 bp, synthetic construct
  misc_feature 1..20: note = Description of Artificial Sequence: Synthetic oligonucleotide
  misc_feature 1..20: note = Target: SCN10A; (-) strand; PAM type: YTN; PAM sequence: CTT
  source 1..20: mol_type = other DNA
taaattttcatttgagctat

SEQ ID NO: 42272 - DNA, 20 bp, synthetic construct
  misc_feature 1..20: note = Description of Artificial Sequence: Synthetic oligonucleotide
  misc_feature 1..20: note = Target: SCN10A; (-) strand; PAM type: YTN; PAM sequence: TTA
  source 1..20: mol_type = other DNA
gtcaaataaagggtgacttt

SEQ ID NO: 42273 - DNA, 20 bp, synthetic construct
  misc_feature 1..20: note = Description of Artificial Sequence: Synthetic oligonucleotide
  misc_feature 1..20: note = Target: SCN10A; (-) strand; PAM type: YTN; PAM sequence: TTT
  source 1..20: mol_type = other DNA
agtcaaataaagggtgactt

SEQ ID NO: 42274 - DNA, 20 bp, synthetic construct
  misc_feature 1..20: note = Description of Artificial Sequence: Synthetic oligonucleotide
  misc_feature 1..20: note = Target: SCN10A; (-) strand; PAM type: YTN; PAM sequence: TTG
  source 1..20: mol_type = other DNA
aatttagtcaaataaagggt

SEQ ID NO: 42275 - DNA, 20 bp, synthetic construct
  misc_feature 1..20: note = Description of Artificial Sequence: Synthetic oligonucleotide
  misc_feature 1..20: note = Target: SCN10A; (-) strand; PAM type: YTN; PAM sequence: TTG
  source 1..20: mol_type = other DNA
gtacagaattgaatttagtc

SEQ ID NO: 42276 - DNA, 20 bp, synthetic construct
  misc_feature 1..20: note = Description of Artificial Sequence: Synthetic oligonucleotide
  misc_feature 1..20: note = Target: SCN10A; (-) strand; PAM type: YTN; PAM sequence: CTT
  source 1..20: mol_type = other DNA
ggtacagaattgaatttagt

SEQ ID NO: 42277 - DNA, 20 bp, synthetic construct
  misc_feature 1..20: note = Description of Artificial Sequence: Synthetic oligonucleotide
  misc_feature 1..20: note = Target: SCN10A; (-) strand; PAM type: YTN; PAM sequence: TTC
  source 1..20: mol_type = other DNA
agtatgtacccttggtacag

SEQ ID NO: 42278 - DNA, 20 bp, synthetic construct
  misc_feature 1..20: note = Description of Artificial Sequence: Synthetic oligonucleotide
  misc_feature 1..20: note = Target: SCN10A; (-) strand; PAM type: YTN; PAM sequence: TTG
  source 1..20: mol_type = other DNA
cacatcccatacattcagta

SEQ ID NO: 42279 - DNA, 20 bp, synthetic construct
  misc_feature 1..20: note = Description of Artificial Sequence: Synthetic oligonucleotide
  misc_feature 1..20: note = Target: SCN10A; (-) strand; PAM type: YTN; PAM sequence: CTT
  source 1..20: mol_type = other DNA
gcacatcccatacattcagt

SEQ ID NO: 42280 - DNA, 20 bp, synthetic construct
  misc_feature 1..20: note = Description of Artificial Sequence: Synthetic oligonucleotide
  misc_feature 1..20: note = Target: SCN10A; (-) strand; PAM type: YTN; PAM sequence: CTC
  source 1..20: mol_type = other DNA
atgcagaggcttgcacatcc

SEQ ID NO: 42281 - DNA, 20 bp, synthetic construct
  misc_feature 1..20: note = Description of Artificial Sequence: Synthetic oligonucleotide
  misc_feature 1..20: note = Target: SCN10A; (-) strand; PAM type: YTN; PAM sequence: CTC
  source 1..20: mol_type = other DNA
atagccactcatgcagaggc

SEQ ID NO: 42282 - DNA, 20 bp, synthetic construct
  misc_feature 1..20: note = Description of Artificial Sequence: Synthetic oligonucleotide
  misc_feature 1..20: note = Target: SCN10A; (-) strand; PAM type: YTN; PAM sequence: CTC
  source 1..20: mol_type = other DNA
cctcatagccactcatgcag

SEQ ID NO: 42283 - DNA, 20 bp, synthetic construct
  misc_feature 1..20: note = Description of Artificial Sequence: Synthetic oligonucleotide
  misc_feature 1..20: note = Target: SCN10A; (-) strand; PAM type: YTN; PAM sequence: TTC
  source 1..20: mol_type = other DNA
ctccctcatagccactcatg

SEQ ID NO: 42284 - DNA, 20 bp, synthetic construct
  misc_feature 1..20: note = Description of Artificial Sequence: Synthetic oligonucleotide
  misc_feature 1..20: note = Target: SCN10A; (-) strand; PAM type: YTN; PAM sequence: CTT
  source 1..20: mol_type = other DNA
cctccctcatagccactcat

SEQ ID NO: 42285 - DNA, 20 bp, synthetic construct
  misc_feature 1..20: note = Description of Artificial Sequence: Synthetic oligonucleotide
  misc_feature 1..20: note = Target: SCN10A; (-) strand; PAM type: YTN; PAM sequence: CTC
  source 1..20: mol_type = other DNA
ttcctccctcatagccactc

SEQ ID NO: 42286 - DNA, 20 bp, synthetic construct
  misc_feature 1..20: note = Description of Artificial Sequence: Synthetic oligonucleotide
  misc_feature 1..20: note = Target: SCN10A; (-) strand; PAM type: YTN; PAM sequence: TTC
  source 1..20: mol_type = other DNA
tcttcctccctcatagccac

SEQ ID NO: 42287 - DNA, 20 bp, synthetic construct
  misc_feature 1..20: note = Description of Artificial Sequence: Synthetic oligonucleotide
  misc_feature 1..20: note = Target: SCN10A; (-) strand; PAM type: YTN; PAM sequence: CTT
  source 1..20: mol_type = other DNA
ctcttcctccctcatagcca

SEQ ID NO: 42288 - DNA, 20 bp, synthetic construct
  misc_feature 1..20: note = Description of Artificial Sequence: Synthetic oligonucleotide
  misc_feature 1..20: note = Target: SCN10A; (-) strand; PAM type: YTN; PAM sequence: TTC
  source 1..20: mol_type = other DNA
ttctcttcctccctcatagc

SEQ ID NO: 42289 - DNA, 20 bp, synthetic construct
  misc_feature 1..20: note = Description of Artificial Sequence: Synthetic oligonucleotide
  misc_feature 1..20: note = Target: SCN10A; (-) strand; PAM type: YTN; PAM sequence: CTG
  source 1..20: mol_type = other DNA
gaagggatcagacaggttct

SEQ ID NO: 42290 - DNA, 20 bp, synthetic construct
  misc_feature 1..20: note = Description of Artificial Sequence: Synthetic oligonucleotide
  misc_feature 1..20: note = Target: SCN10A; (-) strand; PAM type: YTN; PAM sequence: CTC
  source 1..20: mol_type = other DNA
cctggaagggatcagacagg

SEQ ID NO: 42291 - DNA, 20 bp, synthetic construct
  misc_feature 1..20: note = Description of Artificial Sequence: Synthetic oligonucleotide
  misc_feature 1..20: note = Target: SCN10A; (-) strand; PAM type: YTN; PAM sequence: CTC
  source 1..20: mol_type = other DNA
ccgtgggctccctggaaggg

SEQ ID NO: 42292 - DNA, 20 bp, synthetic construct
  misc_feature 1..20: note = Description of Artificial Sequence: Synthetic oligonucleotide
  misc_feature 1..20: note = Target: SCN10A; (-) strand; PAM type: YTN; PAM sequence: CTG
  source 1..20: mol_type = other DNA
tgcagctcccgtgggctccc

SEQ ID NO: 42293 - DNA, 20 bp, synthetic construct
  misc_feature 1..20: note = Description of Artificial Sequence: Synthetic oligonucleotide
  misc_feature 1..20: note = Target: SCN10A; (-) strand; PAM type: YTN; PAM sequence: TTG
  source 1..20: mol_type = other DNA
ctgtgcagctcccgtgggct

SEQ ID NO: 42294 - DNA, 20 bp, synthetic construct
  misc_feature 1..20: note = Description of Artificial Sequence: Synthetic oligonucleotide
  misc_feature 1..20: note = Target: SCN10A; (-) strand; PAM type: YTN; PAM sequence: CTT
  source 1..20: mol_type = other DNA
gctgtgcagctcccgtgggc

SEQ ID NO: 42295 - DNA, 20 bp, synthetic construct
  misc_feature 1..20: note = Description of Artificial Sequence: Synthetic oligonucleotide
  misc_feature 1..20: note = Target: SCN10A; (-) strand; PAM type: YTN; PAM sequence: CTG
  source 1..20: mol_type = other DNA
cttgctgtgcagctcccgtg

SEQ ID NO: 42296 - DNA, 20 bp, synthetic construct
  misc_feature 1..20: note = Description of Artificial Sequence: Synthetic oligonucleotide
  misc_feature 1..20: note = Target: SCN10A; (-) strand; PAM type: YTN; PAM sequence: CTC
  source 1..20: mol_type = other DNA
tgcttgctgtgcagctcccg

SEQ ID NO: 42297 - DNA, 20 bp, synthetic construct
  misc_feature 1..20: note = Description of Artificial Sequence: Synthetic oligonucleotide
  misc_feature 1..20: note = Target: SCN10A; (-) strand; PAM type: YTN; PAM sequence: TTC
  source 1..20: mol_type = other DNA
cccctctgcttgctgtgcag

SEQ ID NO: 42298 - DNA, 20 bp, synthetic construct
  misc_feature 1..20: note = Description of Artificial Sequence: Synthetic oligonucleotide
  misc_feature 1..20: note = Target: SCN10A; (-) strand; PAM type: YTN; PAM sequence: CTT
  source 1..20: mol_type = other DNA
ccccctctgcttgctgtgca

SEQ ID NO: 42299 - DNA, 20 bp, synthetic construct
  misc_feature 1..20: note = Description of Artificial Sequence: Synthetic oligonucleotide
  misc_feature 1..20: note = Target: SCN10A; (-) strand; PAM type: YTN; PAM sequence: CTC
  source 1..20: mol_type = other DNA
atcacagcacttccccctct

SEQ ID NO: 42300 - DNA, 20 bp, synthetic construct
  misc_feature 1..20: note = Description of Artificial Sequence: Synthetic oligonucleotide
  misc_feature 1..20: note = Target: SCN10A; (-) strand; PAM type: YTN; PAM sequence: CTA
  source 1..20: mol_type = other DNA
acccaacaggatagcaaccc

SEQ ID NO: 42301 - DNA, 20 bp, synthetic construct
  misc_feature 1..20: note = Description of Artificial Sequence: Synthetic oligonucleotide
  misc_feature 1..20: note = Target: SCN10A; (-) strand; PAM type: YTN; PAM sequence: CTC
  source 1..20: mol_type = other DNA
taacccaacaggatagcaac

SEQ ID NO: 42302 - DNA, 20 bp, synthetic construct
  misc_feature 1..20: note = Description of Artificial Sequence: Synthetic oligonucleotide
  misc_feature 1..20: note = Target: SCN10A; (-) strand; PAM type: YTN; PAM sequence: TTG
  source 1..20: mol_type = other DNA
ctctaacccaacaggatagc

SEQ ID NO: 42303 - DNA, 20 bp, synthetic construct
  misc_feature 1..20: note = Description of Artificial Sequence: Synthetic oligonucleotide
  misc_feature 1..20: note = Target: SCN10A; (-) strand; PAM type: YTN; PAM sequence: TTT
  source 1..20: mol_type = other DNA
gctctaacccaacaggatag

SEQ ID NO: 42304 - DNA, 20 bp, synthetic construct
  misc_feature 1..20: note = Description of Artificial Sequence: Synthetic oligonucleotide
  misc_feature 1..20: note = Target: SCN10A; (-) strand; PAM type: YTN; PAM sequence: CTT
  source 1..20: mol_type = other DNA
tgctctaacccaacaggata

SEQ ID NO: 42305 - DNA, 20 bp, synthetic construct
  misc_feature 1..20: note = Description of Artificial Sequence: Synthetic oligonucleotide
  misc_feature 1..20: note = Target: SCN10A; (-) strand; PAM type: YTN; PAM sequence: TTC
  source 1..20: mol_type = other DNA
tttgctctaacccaacagga

SEQ ID NO: 42306 - DNA, 20 bp, synthetic construct
  misc_feature 1..20: note = Description of Artificial Sequence: Synthetic oligonucleotide
  misc_feature 1..20: note = Target: SCN10A; (-) strand; PAM type: YTN; PAM sequence: CTG
  source 1..20: mol_type = other DNA
attctttgctctaacccaac

SEQ ID NO: 42307 - DNA, 20 bp, synthetic construct
  misc_feature 1..20: note = Description of Artificial Sequence: Synthetic oligonucleotide
  misc_feature 1..20: note = Target: SCN10A; (-) strand; PAM type: YTN; PAM sequence: TTG
  source 1..20: mol_type = other DNA
gtctgattctttgctctaac

SEQ ID NO: 42308 - DNA, 20 bp, synthetic construct
  misc_feature 1..20: note = Description of Artificial Sequence: Synthetic oligonucleotide
  misc_feature 1..20: note = Target: SCN10A; (-) strand; PAM type: YTN; PAM sequence: TTT
  source 1..20: mol_type = other DNA
ggtctgattctttgctctaa

SEQ ID NO: 42309 - DNA, 20 bp, synthetic construct
  misc_feature 1..20: note = Description of Artificial Sequence: Synthetic oligonucleotide
  misc_feature 1..20: note = Target: SCN10A; (-) strand; PAM type: YTN; PAM sequence: CTT
  source 1..20: mol_type = other DNA
tggtctgattctttgctcta

SEQ ID NO: 42310 - DNA, 20 bp, synthetic construct
  misc_feature 1..20: note = Description of Artificial Sequence: Synthetic oligonucleotide
  misc_feature 1..20: note = Target: SCN10A; (-) strand; PAM type: YTN; PAM sequence: CTG
  source 1..20: mol_type = other DNA
ccatgagcaaaggccacttt

SEQ ID NO: 42311 - DNA, 20 bp, synthetic construct
  misc_feature 1..20: note = Description of Artificial Sequence: Synthetic oligonucleotide
  misc_feature 1..20: note = Target: SCN10A; (-) strand; PAM type: YTN; PAM sequence: TTC
  source 1..20: mol_type = other DNA
tgccatgagcaaaggccact

SEQ ID NO: 42312 - DNA, 20 bp, synthetic construct
  misc_feature 1..20: note = Description of Artificial Sequence: Synthetic oligonucleotide
  misc_feature 1..20: note = Target: SCN10A; (-) strand; PAM type: YTN; PAM sequence: CTG
  source 1..20: mol_type = other DNA
ccccaggaaagatgtgagcc

SEQ ID NO: 42313 - DNA, 20 bp, synthetic construct
  misc_feature 1..20: note = Description of Artificial Sequence: Synthetic oligonucleotide
  misc_feature 1..20: note = Target: SCN10A; (-) strand; PAM type: YTN; PAM sequence: CTC
  source 1..20: mol_type = other DNA
ctgccccaggaaagatgtga

SEQ ID NO: 42314 - DNA, 20 bp, synthetic construct
  misc_feature 1..20: note = Description of Artificial Sequence: Synthetic oligonucleotide
  misc_feature 1..20: note = Target: SCN10A; (-) strand; PAM type: YTN; PAM sequence: CTC
  source 1..20: mol_type = other DNA
agcaatccccctcctgcccc

SEQ ID NO: 42315 - DNA, 20 bp, synthetic construct
  misc_feature 1..20: note = Description of Artificial Sequence: Synthetic oligonucleotide
  misc_feature 1..20: note = Target: SCN10A; (-) strand; PAM type: YTN; PAM sequence: TTA
  source 1..20: mol_type = other DNA
gtggctcagcaatccccctc

SEQ ID NO: 42316 - DNA, 20 bp, synthetic construct
  misc_feature 1..20: note = Description of Artificial Sequence: Synthetic oligonucleotide
  misc_feature 1..20: note = Target: SCN10A; (-) strand; PAM type: YTN; PAM sequence: TTC
  source 1..20: mol_type = other DNA
agtgatgaaatggaagggat

SEQ ID NO: 42317 - DNA, 20 bp, synthetic construct
  misc_feature 1..20: note = Description of Artificial Sequence: Synthetic oligonucleotide
  misc_feature 1..20: note = Target: SCN10A; (-) strand; PAM type: YTN; PAM sequence: TTT
  source 1..20: mol_type = other DNA
cagtgatgaaatggaaggga

SEQ ID NO: 42318 - DNA, 20 bp, synthetic construct
  misc_feature 1..20: note = Description of Artificial Sequence: Synthetic oligonucleotide
  misc_feature 1..20: note = Target: SCN10A; (-) strand; PAM type: YTN; PAM sequence: TTT
  source 1..20: mol_type = other DNA
tcagtgatgaaatggaaggg

SEQ ID NO: 42319 - DNA, 20 bp, synthetic construct
  misc_feature 1..20: note = Description of Artificial Sequence: Synthetic oligonucleotide
  misc_feature 1..20: note = Target: SCN10A; (-) strand; PAM type: YTN; PAM sequence: TTC
  source 1..20: mol_type = other DNA
accattttcagtgatgaaat

SEQ ID NO: 42320 - DNA, 20 bp, synthetic construct
  misc_feature 1..20: note = Description of Artificial Sequence: Synthetic oligonucleotide
  misc_feature 1..20: note = Target: SCN10A; (-) strand; PAM type: YTN; PAM sequence: TTT
  source 1..20: mol_type = other DNA
caccattttcagtgatgaaa

SEQ ID NO: 42321 - DNA, 20 bp, synthetic construct
  misc_feature 1..20: note = Description of Artificial Sequence: Synthetic oligonucleotide
  misc_feature 1..20: note = Target: SCN10A; (-) strand; PAM type: YTN; PAM sequence: TTT
  source 1..20: mol_type = other DNA
tcaccattttcagtgatgaa

SEQ ID NO: 42322 - DNA, 20 bp, synthetic construct
  misc_feature 1..20: note = Description of Artificial Sequence: Synthetic oligonucleotide
  misc_feature 1..20: note = Target: SCN10A; (-) strand; PAM type: YTN; PAM sequence: TTT
  source 1..20: mol_type = other DNA
ttcaccattttcagtgatga

SEQ ID NO: 42323 - DNA, 20 bp, synthetic construct
  misc_feature 1..20: note = Description of Artificial Sequence: Synthetic oligonucleotide
  misc_feature 1..20: note = Target: SCN10A; (-) strand; PAM type: YTN; PAM sequence: TTT
  source 1..20: mol_type = other DNA
tttcaccattttcagtgatg

SEQ ID NO: 42324 - DNA, 20 bp, synthetic construct
  misc_feature 1..20: note = Description of Artificial Sequence: Synthetic oligonucleotide
  misc_feature 1..20: note = Target: SCN10A; (-) strand; PAM type: YTN; PAM sequence: CTG
  source 1..20: mol_type = other DNA
tattttttcaccattttcag

SEQ ID NO: 42325 - DNA, 20 bp, synthetic construct
  misc_feature 1..20: note = Description of Artificial Sequence: Synthetic oligonucleotide
  misc_feature 1..20: note = Target: SCN10A; (-) strand; PAM type: YTN; PAM sequence: TTA
  source 1..20: mol_type = other DNA
gaagtcatgtgaccatgaat

SEQ ID NO: 42326 - DNA, 20 bp, synthetic construct
  misc_feature 1..20: note = Description of Artificial Sequence: Synthetic oligonucleotide
  misc_feature 1..20: note = Target: SCN10A; (-) strand; PAM type: YTN; PAM sequence: TTA
  source 1..20: mol_type = other DNA
attagaagtcatgtgaccat

SEQ ID NO: 42327 - DNA, 20 bp, synthetic construct
  misc_feature 1..20: note = Description of Artificial Sequence: Synthetic oligonucleotide
  misc_feature 1..20: note = Target: SCN10A; (-) strand; PAM type: YTN; PAM sequence: TTT
  source 1..20: mol_type = other DNA
aattagaagtcatgtgacca

SEQ ID NO: 42328 - DNA, 20 bp, synthetic construct
  misc_feature 1..20: note = Description of Artificial Sequence: Synthetic oligonucleotide
  misc_feature 1..20: note = Target: SCN10A; (-) strand; PAM type: YTN; PAM sequence: CTG
  source 1..20: mol_type = other DNA
tttaattagaagtcatgtga

SEQ ID NO: 42329 - DNA, 20 bp, synthetic construct
  misc_feature 1..20: note = Description of Artificial Sequence: Synthetic oligonucleotide
  misc_feature 1..20: note = Target: SCN10A; (-) strand; PAM type: YTN; PAM sequence: CTC
  source 1..20: mol_type = other DNA
tgtttaattagaagtcatgt

SEQ ID NO: 42330 - DNA, 20 bp, synthetic construct
  misc_feature 1..20: note = Description of Artificial Sequence: Synthetic oligonucleotide
  misc_feature 1..20: note = Target: SCN10A; (-) strand; PAM type: YTN; PAM sequence: CTG
  source 1..20: mol_type = other DNA
ctctgtttaattagaagtca

SEQ ID NO: 42331 - DNA, 20 bp, synthetic construct
  misc_feature 1..20: note = Description of Artificial Sequence: Synthetic oligonucleotide
  misc_feature 1..20: note = Target: SCN10A; (-) strand; PAM type: YTN; PAM sequence: TTG
  source 1..20: mol_type = other DNA
cctgctctgtttaattagaa

SEQ ID NO: 42332 - DNA, 20 bp, synthetic construct
  misc_feature 1..20: note = Description of Artificial Sequence: Synthetic oligonucleotide
  misc_feature 1..20: note = Target: SCN10A; (-) strand; PAM type: YTN; PAM sequence: TTA
  source 1..20: mol_type = other DNA
acgatgccgttgcctgctct

SEQ ID NO: 42333 - DNA, 20 bp, synthetic construct
  misc_feature 1..20: note = Description of Artificial Sequence: Synthetic oligonucleotide
  misc_feature 1..20: note = Target: SCN10A; (-) strand; PAM type: YTN; PAM sequence: CTT
  source 1..20: mol_type = other DNA
aacgatgccgttgcctgctc

SEQ ID NO: 42334 - DNA, 20 bp, synthetic construct
  misc_feature 1..20: note = Description of Artificial Sequence: Synthetic oligonucleotide
  misc_feature 1..20: note = Target: SCN10A; (-) strand; PAM type: YTN; PAM sequence: TTC
  source 1..20: mol_type = other DNA
acacccagccacttaacgat

SEQ ID NO: 42335 - DNA, 20 bp, synthetic construct
  misc_feature 1..20: note = Description of Artificial Sequence: Synthetic oligonucleotide
  misc_feature 1..20: note = Target: SCN10A; (-) strand; PAM type: YTN; PAM sequence: CTT
  source 1..20: mol_type = other DNA
cacacccagccacttaacga

SEQ ID NO: 42336 - DNA, 20 bp, synthetic construct
  misc_feature 1..20: note = Description of Artificial Sequence: Synthetic oligonucleotide
  misc_feature 1..20: note = Target: SCN10A; (-) strand; PAM type: YTN; PAM sequence: CTA
  source 1..20: mol_type = other DNA
aagtcagaatatccagggca

SEQ ID NO: 42337 - DNA, 20 bp, synthetic construct
  misc_feature 1..20: note = Description of Artificial Sequence: Synthetic oligonucleotide
  misc_feature 1..20: note = Target: SCN10A; (-) strand; PAM type: YTN; PAM sequence: TTC
  source 1..20: mol_type = other DNA
cctaaagtcagaatatccag

SEQ ID NO: 42338 - DNA, 20 bp, synthetic construct
  misc_feature 1..20: note = Description of Artificial Sequence: Synthetic oligonucleotide
  misc_feature 1..20: note = Target: SCN10A; (-) strand; PAM type: YTN; PAM sequence: CTC
  source 1..20: mol_type = other DNA
cattccctaaagtcagaata

SEQ ID NO: 42339 - DNA, 20 bp, synthetic construct
  misc_feature 1..20: note = Description of Artificial Sequence: Synthetic oligonucleotide
  misc_feature 1..20: note = Target: SCN10A; (-) strand; PAM type: YTN; PAM sequence: CTA
  source 1..20: mol_type = other DNA
ctccattccctaaagtcaga

SEQ ID NO: 42340 - DNA, 20 bp, synthetic construct
  misc_feature 1..20: note = Description of Artificial Sequence: Synthetic oligonucleotide
  misc_feature 1..20: note = Target: SCN10A; (-) strand; PAM type: YTN; PAM sequence: CTA
  source 1..20: mol_type = other DNA
gcaagctactccattcccta

SEQ ID NO: 42341 - DNA, 20 bp, synthetic construct
  misc_feature 1..20: note = Description of Artificial Sequence: Synthetic oligonucleotide
  misc_feature 1..20: note = Target: SCN10A; (-) strand; PAM type: YTN; PAM sequence: CTA
  source 1..20: mol_type = other DNA
atccaagagcagctagcaag

SEQ ID NO: 42342 - DNA, 20 bp, synthetic construct
  misc_feature 1..20: note = Description of Artificial Sequence: Synthetic oligonucleotide
  misc_feature 1..20: note = Target: SCN10A; (-) strand; PAM type: YTN; PAM sequence: CTG
  source 1..20: mol_type = other DNA
accgtgggctaatccaagag

SEQ ID NO: 42343 - DNA, 20 bp, synthetic construct
  misc_feature 1..20: note = Description of Artificial Sequence: Synthetic oligonucleotide
  misc_feature 1..20: note = Target: SCN10A; (-) strand; PAM type: YTN; PAM sequence: TTG
  source 1..20: mol_type = other DNA
caaaggtatgatccctgacc

SEQ ID NO: 42344 - DNA, 20 bp, synthetic construct
  misc_feature 1..20: note = Description of Artificial Sequence: Synthetic oligonucleotide
  misc_feature 1..20: note = Target: SCN10A; (-) strand; PAM type: YTN; PAM sequence: CTG
  source 1..20: mol_type = other DNA
agagcaccaagggttgcaaa

SEQ ID NO: 42345 - DNA, 20 bp, synthetic construct
  misc_feature 1..20: note = Description of Artificial Sequence: Synthetic oligonucleotide
  misc_feature 1..20: note = Target: SCN10A; (-) strand; PAM type: YTN; PAM sequence: CTC
  source 1..20: mol_type = other DNA
tgagagcaccaagggttgca

SEQ ID NO: 42346 - DNA, 20 bp, synthetic construct
  misc_feature 1..20: note = Description of Artificial Sequence: Synthetic oligonucleotide
  misc_feature 1..20: note = Target: SCN10A; (-) strand; PAM type: YTN; PAM sequence: TTC
  source 1..20: mol_type = other DNA
atcgtctctgagagcaccaa

SEQ ID NO: 42347 - DNA, 20 bp, synthetic construct
  misc_feature 1..20: note = Description of Artificial Sequence: Synthetic oligonucleotide
  misc_feature 1..20: note = Target: SCN10A; (-) strand; PAM type: YTN; PAM sequence: CTT
  source 1..20: mol_type = other DNA
catcgtctctgagagcacca

SEQ ID NO: 42348 - DNA, 20 bp, synthetic construct
  misc_feature 1..20: note = Description of Artificial Sequence: Synthetic oligonucleotide
  misc_feature 1..20: note = Target: SCN10A; (-) strand; PAM type: YTN; PAM sequence: CTA
  source 1..20: mol_type = other DNA
gagaatatcacataatcaat

SEQ ID NO: 42349 - DNA, 20 bp, synthetic construct
  misc_feature 1..20: note = Description of Artificial Sequence: Synthetic oligonucleotide
  misc_feature 1..20: note = Target: SCN10A; (-) strand; PAM type: YTN; PAM sequence: CTC
  source 1..20: mol_type = other DNA
tagagaatatcacataatca

SEQ ID NO: 42350 - DNA, 20 bp, synthetic construct
  misc_feature 1..20: note = Description of Artificial Sequence: Synthetic oligonucleotide
  misc_feature 1..20: note = Target: SCN10A; (-) strand; PAM type: YTN; PAM sequence: TTA
  source 1..20: mol_type = other DNA
tagaaatataataggctcta

SEQ ID NO: 42351 - DNA, 20 bp, synthetic construct
  misc_feature 1..20: note = Description of Artificial Sequence: Synthetic oligonucleotide
  misc_feature 1..20: note = Target: SCN10A; (-) strand; PAM type: YTN; PAM sequence: TTT
  source 1..20: mol_type = other DNA
atagaaatataataggctct

SEQ ID NO: 42352 - DNA, 20 bp, synthetic construct
  misc_feature 1..20: note = Description of Artificial Sequence: Synthetic oligonucleotide
  misc_feature 1..20: note = Target: SCN10A; (-) strand; PAM type: YTN; PAM sequence: CTT
  source 1..20: mol_type = other DNA
tatagaaatataataggctc

SEQ ID NO: 42353 - DNA, 20 bp, synthetic construct
  misc_feature 1..20: note = Description of Artificial Sequence: Synthetic oligonucleotide
  misc_feature 1..20: note = Target: SCN10A; (-) strand; PAM type: YTN; PAM sequence: CTC
  source 1..20: mol_type = other DNA
cactttatagaaatataata

SEQ ID NO: 42354 - DNA, 20 bp, synthetic construct
  misc_feature 1..20: note = Description of Artificial Sequence: Synthetic oligonucleotide
  misc_feature 1..20: note = Target: SCN10A; (-) strand; PAM type: YTN; PAM sequence: CTC
  source 1..20: mol_type = other DNA
acatactccactttatagaa

SEQ ID NO: 42355 - DNA, 20 bp, synthetic construct
  misc_feature 1..20: note = Description of Artificial Sequence: Synthetic oligonucleotide
  misc_feature 1..20: note = Target: SCN10A; (-) strand; PAM type: YTN; PAM sequence: CTC
  source 1..20: mol_type = other DNA
tcacatactccactttatag

SEQ ID NO: 42356 - DNA, 20 bp, synthetic construct
  misc_feature 1..20: note = Description of Artificial Sequence: Synthetic oligonucleotide
  misc_feature 1..20: note = Target: SCN10A; (-) strand; PAM type: YTN; PAM sequence: CTA
  source 1..20: mol_type = other DNA
cagaaatcaataaaagcagc

SEQ ID NO: 42357 - DNA, 20 bp, synthetic construct
  misc_feature 1..20: note = Description of Artificial Sequence: Synthetic oligonucleotide
  misc_feature 1..20: note = Target: SCN10A; (-) strand; PAM type: YTN; PAM sequence: CTG
  source 1..20: mol_type = other DNA
ctacagaaatcaataaaagc

SEQ ID NO: 42358 - DNA, 20 bp, synthetic construct
  misc_feature 1..20: note = Description of Artificial Sequence: Synthetic oligonucleotide
  misc_feature 1..20: note = Target: SCN10A; (-) strand; PAM type: YTN; PAM sequence: TTC
  source 1..20: mol_type = other DNA
cctgctacagaaatcaataa

SEQ ID NO: 42359 - DNA, 20 bp, synthetic construct
  misc_feature 1..20: note = Description of Artificial Sequence: Synthetic oligonucleotide
  misc_feature 1..20: note = Target: SCN10A; (-) strand; PAM type: YTN; PAM sequence: TTA
  source 1..20: mol_type = other DNA
acattccctgctacagaaat

SEQ ID NO: 42360 - DNA, 20 bp, synthetic construct
  misc_feature 1..20: note = Description of Artificial Sequence: Synthetic oligonucleotide
  misc_feature 1..20: note = Target: SCN10A; (-) strand; PAM type: YTN; PAM sequence: TTT
  source 1..20: mol_type = other DNA
aacattccctgctacagaaa

SEQ ID NO: 42361 - DNA, 20 bp, synthetic construct
  misc_feature 1..20: note = Description of Artificial Sequence: Synthetic oligonucleotide
  misc_feature 1..20: note = Target: SCN10A; (-) strand; PAM type: YTN; PAM sequence: CTT
  source 1..20: mol_type = other DNA
taacattccctgctacagaa

SEQ ID NO: 42362 - DNA, 20 bp, synthetic construct
  misc_feature 1..20: note = Description of Artificial Sequence: Synthetic oligonucleotide
  misc_feature 1..20: note = Target: SCN10A; (-) strand; PAM type: YTN; PAM sequence: TTC
  source 1..20: mol_type = other DNA
tttaacattccctgctacag

SEQ ID NO: 42363 - DNA, 20 bp, synthetic construct
  misc_feature 1..20: note = Description of Artificial Sequence: Synthetic oligonucleotide
  misc_feature 1..20: note = Target: SCN10A; (-) strand; PAM type: YTN; PAM sequence: TTA
  source 1..20: mol_type = other DNA
ttctttaacattccctgcta

SEQ ID NO: 42364 - DNA, 20 bp, synthetic construct
  misc_feature 1..20: note = Description of Artificial Sequence: Synthetic oligonucleotide
  misc_feature 1..20: note = Target: SCN10A; (-) strand; PAM type: YTN; PAM sequence: TTT
  source 1..20: mol_type = other DNA
attctttaacattccctgct

SEQ ID NO: 42365 - DNA, 20 bp, synthetic construct
  misc_feature 1..20: note = Description of Artificial Sequence: Synthetic oligonucleotide
  misc_feature 1..20: note = Target: SCN10A; (-) strand; PAM type: YTN; PAM sequence: TTT
  source 1..20: mol_type = other DNA
tattctttaacattccctgc

SEQ ID NO: 42366 - DNA, 20 bp, synthetic construct
  misc_feature 1..20: note = Description of Artificial Sequence: Synthetic oligonucleotide
  misc_feature 1..20: note = Target: SCN10A; (-) strand; PAM type: YTN; PAM sequence: CTG
  source 1..20: mol_type = other DNA
ggaaattttattctttaaca

SEQ ID NO: 42367 - DNA, 20 bp, synthetic construct
  misc_feature 1..20: note = Description of Artificial Sequence: Synthetic oligonucleotide
  misc_feature 1..20: note = Target: SCN10A; (-) strand; PAM type: YTN; PAM sequence: TTC
  source 1..20: mol_type = other DNA
cacaagactgggaaatttta

SEQ ID NO: 42368 - DNA, 20 bp, synthetic construct
  misc_feature 1..20: note = Description of Artificial Sequence: Synthetic oligonucleotide
  misc_feature 1..20: note = Target: SCN10A; (-) strand; PAM type: YTN; PAM sequence: TTA
  source 1..20: mol_type = other DNA
aggattccacaagactggga

SEQ ID NO: 42369 - DNA, 20 bp, synthetic construct
  misc_feature 1..20: note = Description of Artificial Sequence: Synthetic oligonucleotide
  misc_feature 1..20: note = Target: SCN10A; (-) strand; PAM type: YTN; PAM sequence: TTC
  source 1..20: mol_type = other DNA
cataggaaaagttaaggatt

SEQ ID NO: 42370 - DNA, 20 bp, synthetic construct
  misc_feature 1..20: note = Description of Artificial Sequence: Synthetic oligonucleotide
  misc_feature 1..20: note = Target: SCN10A; (-) strand; PAM type: YTN; PAM sequence: CTT
  source 1..20: mol_type = other DNA
ccataggaaaagttaaggat

SEQ ID NO: 42371 - DNA, 20 bp, synthetic construct
  misc_feature 1..20: note = Description of Artificial Sequence: Synthetic oligonucleotide
  misc_feature 1..20: note = Target: SCN10A; (-) strand; PAM type: YTN; PAM sequence: TTC
  source 1..20: mol_type = other DNA
ttccataggaaaagttaagg

SEQ ID NO: 42372 - DNA, 20 bp, synthetic construct
  misc_feature 1..20: note = Description of Artificial Sequence: Synthetic oligonucleotide
  misc_feature 1..20: note = Target: SCN10A; (-) strand; PAM type: YTN; PAM sequence: TTT
  source 1..20: mol_type = other DNA
cttccataggaaaagttaag

SEQ ID NO: 42373 - DNA, 20 bp, synthetic construct
  misc_feature 1..20: note = Description of Artificial Sequence: Synthetic oligonucleotide
  misc_feature 1..20: note = Target: SCN10A; (-) strand; PAM type: YTN; PAM sequence: TTG
  source 1..20: mol_type = other DNA
tttcttccataggaaaagtt

SEQ ID NO: 42374 - DNA, 20 bp, synthetic construct
  misc_feature 1..20: note = Description of Artificial Sequence: Synthetic oligonucleotide
  misc_feature 1..20: note = Target: SCN10A; (-) strand; PAM type: YTN; PAM sequence: CTT
  source 1..20: mol_type = other DNA
gtttcttccataggaaaagt

SEQ ID NO: 42375 - DNA, 20 bp, synthetic construct
  misc_feature 1..20: note = Description of Artificial Sequence: Synthetic oligonucleotide
  misc_feature 1..20: note = Target: SCN10A; (-) strand; PAM type: YTN; PAM sequence: CTA
  source 1..20: mol_type = other DNA
aatcttgtttcttccatagg

SEQ ID NO: 42376 - DNA, 20 bp, synthetic construct
  misc_feature 1..20: note = Description of Artificial Sequence: Synthetic oligonucleotide
  misc_feature 1..20: note = Target: SCN10A; (-) strand; PAM type: YTN; PAM sequence: CTC
  source 1..20: mol_type = other DNA
taaatcttgtttcttccata

SEQ ID NO: 42377 - DNA, 20 bp, synthetic construct
  misc_feature 1..20: note = Description of Artificial Sequence: Synthetic oligonucleotide
  misc_feature 1..20: note = Target: SCN10A; (-) strand; PAM type: YTN; PAM sequence: CTC
  source 1..20: mol_type = other DNA
aggctctaaatcttgtttct

SEQ ID NO: 42378 - DNA, 20 bp, synthetic construct
  misc_feature 1..20: note = Description of Artificial Sequence: Synthetic oligonucleotide
  misc_feature 1..20: note = Target: SCN10A; (-) strand; PAM type: YTN; PAM sequence: CTG
  source 1..20: mol_type = other DNA
atgatgctcaggctctaaat

SEQ ID NO: 42379 - DNA, 20 bp, synthetic construct
  misc_feature 1..20: note = Description of Artificial Sequence: Synthetic oligonucleotide
  misc_feature 1..20: note = Target: SCN10A; (-) strand; PAM type: YTN; PAM sequence: CTC
  source 1..20: mol_type = other DNA
tgatgatgctcaggctctaa

SEQ ID NO: 42380 - DNA, 20 bp, synthetic construct
  misc_feature 1..20: note = Description of Artificial Sequence: Synthetic oligonucleotide
  misc_feature 1..20: note = Target: SCN10A; (-) strand; PAM type: YTN; PAM sequence: CTC
  source 1..20: mol_type = other DNA
acctctgatgatgctcaggc

SEQ ID NO: 42381 - DNA, 20 bp, synthetic construct
  misc_feature 1..20: note = Description of Artificial Sequence: Synthetic oligonucleotide
  misc_feature 1..20: note = Target: SCN10A; (-) strand; PAM type: YTN; PAM sequence: CTC
  source 1..20: mol_type = other DNA
tcacctctgatgatgctcag

SEQ ID NO: 42382 - DNA, 20 bp, synthetic construct
  misc_feature 1..20: note = Description of Artificial Sequence: Synthetic oligonucleotide
  misc_feature 1..20: note = Target: SCN10A; (-) strand; PAM type: YTN; PAM sequence: CTC
  source 1..20: mol_type = other DNA
ctctcacctctgatgatgct

SEQ ID NO: 42383 - DNA, 20 bp, synthetic construct
  misc_feature 1..20: note = Description of Artificial Sequence: Synthetic oligonucleotide
  misc_feature 1..20: note = Target: SCN10A; (-) strand; PAM type: YTN; PAM sequence: CTC
  source 1..20: mol_type = other DNA
acacacctcctctcacctct

SEQ ID NO: 42384 - DNA, 20 bp, synthetic construct
  misc_feature 1..20: note = Description of Artificial Sequence: Synthetic oligonucleotide
  misc_feature 1..20: note = Target: SCN10A; (-) strand; PAM type: YTN; PAM sequence: CTG
  source 1..20: mol_type = other DNA
ggaccacataggagcctcac

SEQ ID NO: 42385 - DNA, 20 bp, synthetic construct
  misc_feature 1..20: note = Description of Artificial Sequence: Synthetic oligonucleotide
  misc_feature 1..20: note = Target: SCN10A; (-) strand; PAM type: YTN; PAM sequence: TTA
  source 1..20: mol_type = other DNA
cctgggaccacataggagcc

SEQ ID NO: 42386 - DNA, 20 bp, synthetic construct
  misc_feature 1..20: note = Description of Artificial Sequence: Synthetic oligonucleotide
  misc_feature 1..20: note = Target: SCN10A; (-) strand; PAM type: YTN; PAM sequence: CTT
  source 1..20: mol_type = other DNA
acctgggaccacataggagc

SEQ ID NO: 42387 - DNA, 20 bp, synthetic construct
  misc_feature 1..20: note = Description of Artificial Sequence: Synthetic oligonucleotide
  misc_feature 1..20: note = Target: SCN10A; (-) strand; PAM type: YTN; PAM sequence: TTC
  source 1..20: mol_type = other DNA
atgacagagcttacctggga

SEQ ID NO: 42388 - DNA, 20 bp, synthetic construct
  misc_feature 1..20: note = Description of Artificial Sequence: Synthetic oligonucleotide
  misc_feature 1..20: note = Target: SCN10A; (-) strand; PAM type: YTN; PAM sequence: TTT
  source 1..20: mol_type = other DNA
catgacagagcttacctggg

SEQ ID NO: 42389 - DNA, 20 bp, synthetic construct
  misc_feature 1..20: note = Description of Artificial Sequence: Synthetic oligonucleotide
  misc_feature 1..20: note = Target: SCN10A; (-) strand; PAM type: YTN; PAM sequence: CTG
  source 1..20: mol_type = other DNA
ccccatcagtgcatgggtgc

SEQ ID NO: 42390 - DNA, 20 bp, synthetic construct
  misc_feature 1..20: note = Description of Artificial Sequence: Synthetic oligonucleotide
  misc_feature 1..20: note = Target: SCN10A; (-) strand; PAM type: YTN; PAM sequence: TTC
  source 1..20: mol_type = other DNA
tgccccatcagtgcatgggt

SEQ ID NO: 42391 - DNA, 20 bp, synthetic construct
  misc_feature 1..20: note = Description of Artificial Sequence: Synthetic oligonucleotide
  misc_feature 1..20: note = Target: SCN10A; (-) strand; PAM type: YTN; PAM sequence: TTT
  source 1..20: mol_type = other DNA
ctgccccatcagtgcatggg

SEQ ID NO: 42392 - DNA, 20 bp, synthetic construct
  misc_feature 1..20: note = Description of Artificial Sequence: Synthetic oligonucleotide
  misc_feature 1..20: note = Target: SCN10A; (-) strand; PAM type: YTN; PAM sequence: CTG
  source 1..20: mol_type = other DNA
acacaggatttctgccccat

SEQ ID NO: 42393 - DNA, 20 bp, synthetic construct
  misc_feature 1..20: note = Description of Artificial Sequence: Synthetic oligonucleotide
  misc_feature 1..20: note = Target: SCN10A; (-) strand; PAM type: YTN; PAM sequence: CTG
  source 1..20: mol_type = other DNA
gtcataccagcaaagcactg

SEQ ID NO: 42394 - DNA, 20 bp, synthetic construct
  misc_feature 1..20: note = Description of Artificial Sequence: Synthetic oligonucleotide
  misc_feature 1..20: note = Target: SCN10A; (-) strand; PAM type: YTN; PAM sequence: TTA
  source 1..20: mol_type = other DNA
ggagccccaaaggtcaagct

SEQ ID NO: 42395 - DNA, 20 bp, synthetic construct
  misc_feature 1..20: note = Description of Artificial Sequence: Synthetic oligonucleotide
  misc_feature 1..20: note = Target: SCN10A; (-) strand; PAM type: YTN; PAM sequence: CTT
  source 1..20: mol_type = other DNA
aggagccccaaaggtcaagc

SEQ ID NO: 42396 - DNA, 20 bp, synthetic construct
  misc_feature 1..20: note = Description of Artificial Sequence: Synthetic oligonucleotide
  misc_feature 1..20: note = Target: SCN10A; (-) strand; PAM type: YTN; PAM sequence: CTC
  source 1..20: mol_type = other DNA
cccttaggagccccaaaggt

SEQ ID NO: 42397 - DNA, 20 bp, synthetic construct
  misc_feature 1..20: note = Description of Artificial Sequence: Synthetic oligonucleotide
  misc_feature 1..20: note = Target: SCN10A; (-) strand; PAM type: YTN; PAM sequence: TTC
  source 1..20: mol_type = other DNA
tccccttaggagccccaaag

SEQ ID NO: 42398 - DNA, 20 bp, synthetic construct
  misc_feature 1..20: note = Description of Artificial Sequence: Synthetic oligonucleotide
  misc_feature 1..20: note = Target: SCN10A; (-) strand; PAM type: YTN; PAM sequence: CTT
  source 1..20: mol_type = other DNA
ctccccttaggagccccaaa

SEQ ID NO: 42399 - DNA, 20 bp, synthetic construct
  misc_feature 1..20: note = Description of Artificial Sequence: Synthetic oligonucleotide
  misc_feature 1..20: note = Target: SCN10A; (-) strand; PAM type: YTN; PAM sequence: CTG
  source 1..20: mol_type = other DNA
gaatgtccaccttctcccct

SEQ ID NO: 42400 - DNA, 20 bp, synthetic construct
  misc_feature 1..20: note = Description of Artificial Sequence: Synthetic oligonucleotide
  misc_feature 1..20: note = Target: SCN10A; (-) strand; PAM type: YTN; PAM sequence: TTG
  source 1..20: mol_type = other DNA
gccctggaatgtccaccttc

SEQ ID NO: 42401 - DNA, 20 bp, synthetic construct
  misc_feature 1..20: note = Description of Artificial Sequence: Synthetic oligonucleotide
  misc_feature 1..20: note = Target: SCN10A; (-) strand; PAM type: YTN; PAM sequence: TTA
  source 1..20: mol_type = other DNA
ttggccctggaatgtccacc

SEQ ID NO: 42402 - DNA, 20 bp, synthetic construct
  misc_feature 1..20: note = Description of Artificial Sequence: Synthetic oligonucleotide
  misc_feature 1..20: note = Target: SCN10A; (-) strand; PAM type: YTN; PAM sequence: TTG
  source 1..20: mol_type = other DNA
gccagattattggccctgga

SEQ ID NO: 42403 - DNA, 20 bp, synthetic construct
  misc_feature 1..20: note = Description of Artificial Sequence: Synthetic oligonucleotide
  misc_feature 1..20: note = Target: SCN10A; (-) strand; PAM type: YTN; PAM sequence: TTT
  source 1..20: mol_type = other DNA
ggccagattattggccctgg

SEQ ID NO: 42404 - DNA, 20 bp, synthetic construct
  misc_feature 1..20: note = Description of Artificial Sequence: Synthetic oligonucleotide
  misc_feature 1..20: note = Target: SCN10A; (-) strand; PAM type: YTN; PAM sequence: TTT
  source 1..20: mol_type = other DNA
tggccagattattggccctg

SEQ ID NO: 42405 - DNA, 20 bp, synthetic construct
  misc_feature 1..20: note = Description of Artificial Sequence: Synthetic oligonucleotide
  misc_feature 1..20: note = Target: SCN10A; (-) strand; PAM type: YTN; PAM sequence: CTT
  source 1..20: mol_type = other DNA
ttggccagattattggccct

SEQ ID NO: 42406 - DNA, 20 bp, synthetic construct
  misc_feature 1..20: note = Description of Artificial Sequence: Synthetic oligonucleotide
  misc_feature 1..20: note = Target: SCN10A; (-) strand; PAM type: YTN; PAM sequence: TTG
  source 1..20: mol_type = other DNA
cttttggccagattattggc

SEQ ID NO: 42407 - DNA, 20 bp, synthetic construct
  misc_feature 1..20: note = Description of Artificial Sequence: Synthetic oligonucleotide
  misc_feature 1..20: note = Target: SCN10A; (-) strand; PAM type: YTN; PAM sequence: CTT
  source 1..20: mol_type = other DNA
gcttttggccagattattgg

SEQ ID NO: 42408 - DNA, 20 bp, synthetic construct
  misc_feature 1..20: note = Description of Artificial Sequence: Synthetic oligonucleotide
  misc_feature 1..20: note = Target: SCN10A; (-) strand; PAM type: YTN; PAM sequence: TTC
  source 1..20: mol_type = other DNA
ccaggcccagcttgcttttg

SEQ ID NO: 42409 - DNA, 20 bp, synthetic construct
  misc_feature 1..20: note = Description of Artificial Sequence: Synthetic oligonucleotide
  misc_feature 1..20: note = Target: SCN10A; (-) strand; PAM type: YTN; PAM sequence: CTT
  source 1..20: mol_type = other DNA
cccaggcccagcttgctttt

SEQ ID NO: 42410 - DNA, 20 bp, synthetic construct
  misc_feature 1..20: note = Description of Artificial Sequence: Synthetic oligonucleotide
  misc_feature 1..20: note = Target: SCN10A; (-) strand; PAM type: YTN; PAM sequence: TTC
  source 1..20: mol_type = other DNA
ttcccaggcccagcttgctt

SEQ ID NO: 42411 - DNA, 20 bp, synthetic construct
  misc_feature 1..20: note = Description of Artificial Sequence: Synthetic oligonucleotide
  misc_feature 1..20: note = Target: SCN10A; (-) strand; PAM type: YTN; PAM sequence: CTT
  source 1..20: mol_type = other DNA
cttcccaggcccagcttgct

SEQ ID NO: 42412 - DNA, 20 bp, synthetic construct
  misc_feature 1..20: note = Description of Artificial Sequence: Synthetic oligonucleotide
  misc_feature 1..20: note = Target: SCN10A; (-) strand; PAM type: YTN; PAM sequence: CTA
  source 1..20: mol_type = other DNA
agacccttcttcccaggccc

SEQ ID NO: 42413 - DNA, 20 bp, synthetic construct
  misc_feature 1..20: note = Description of Artificial Sequence: Synthetic oligonucleotide
  misc_feature 1..20: note = Target: SCN10A; (-) strand; PAM type: YTN; PAM sequence: CTC
  source 1..20: mol_type = other DNA
ccaactaagacccttcttcc

SEQ ID NO: 42414 - DNA, 20 bp, synthetic construct
  misc_feature 1..20: note = Description of Artificial Sequence: Synthetic oligonucleotide
  misc_feature 1..20: note = Target: SCN10A; (-) strand; PAM type: YTN; PAM sequence: TTC
  source 1..20: mol_type = other DNA
ccactcccaactaagaccct

SEQ ID NO: 42415 - DNA, 20 bp, synthetic construct
  misc_feature 1..20: note = Description of Artificial Sequence: Synthetic oligonucleotide
  misc_feature 1..20: note = Target: SCN10A; (-) strand; PAM type: YTN; PAM sequence: CTA
  source 1..20: mol_type = other DNA
gaaccaagaaagaaatccaa

SEQ ID NO: 42416 - DNA, 20 bp, synthetic construct
  misc_feature 1..20: note = Description of Artificial Sequence: Synthetic oligonucleotide
  misc_feature 1..20: note = Target: SCN10A; (-) strand; PAM type: YTN; PAM sequence: TTC
  source 1..20: mol_type = other DNA
aaagtctagaaccaagaaag

SEQ ID NO: 42417 - DNA, 20 bp, synthetic construct
  misc_feature 1..20: note = Description of Artificial Sequence: Synthetic oligonucleotide
  misc_feature 1..20: note = Target: SCN10A; (-) strand; PAM type: YTN; PAM sequence: CTT
  source 1..20: mol_type = other DNA
caaagtctagaaccaagaaa

SEQ ID NO: 42418 - DNA, 20 bp, synthetic construct
  misc_feature 1..20: note = Description of Artificial Sequence: Synthetic oligonucleotide
  misc_feature 1..20: note = Target: SCN10A; (-) strand; PAM type: YTN; PAM sequence: CTC
  source 1..20: mol_type = other DNA
ttcaaagtctagaaccaaga

SEQ ID NO: 42419 - DNA, 20 bp, synthetic construct
  misc_feature 1..20: note = Description of Artificial Sequence: Synthetic oligonucleotide
  misc_feature 1..20: note = Target: SCN10A; (-) strand; PAM type: YTN; PAM sequence: TTC
  source 1..20: mol_type = other DNA
cctcttcaaagtctagaacc

SEQ ID NO: 42420 - DNA, 20 bp, synthetic construct
  misc_feature 1..20: note = Description of Artificial Sequence: Synthetic oligonucleotide
  misc_feature 1..20: note = Target: SCN10A; (-) strand; PAM type: YTN; PAM sequence: CTT
  source 1..20: mol_type = other DNA
ccctcttcaaagtctagaac

SEQ ID NO: 42421 - DNA, 20 bp, synthetic construct
  misc_feature 1..20: note = Description of Artificial Sequence: Synthetic oligonucleotide
  misc_feature 1..20: note = Target: SCN10A; (-) strand; PAM type: YTN; PAM sequence: TTG
  source 1..20: mol_type = other DNA
acacccacatgcccagtggc

SEQ ID NO: 42422 - DNA, 20 bp, synthetic construct
  misc_feature 1..20: note = Description of Artificial Sequence: Synthetic oligonucleotide
  misc_feature 1..20: note = Target: SCN10A; (-) strand; PAM type: YTN; PAM sequence: TTT
  source 1..20: mol_type = other DNA
gacacccacatgcccagtgg

SEQ ID NO: 42423 - DNA, 20 bp, synthetic construct
  misc_feature 1..20: note = Description of Artificial Sequence: Synthetic oligonucleotide
  misc_feature 1..20: note = Target: SCN10A; (-) strand; PAM type: YTN; PAM sequence: CTT
  source 1..20: mol_type = other DNA
tgacacccacatgcccagtg

SEQ ID NO: 42424 - DNA, 20 bp, synthetic construct
  misc_feature 1..20: note = Description of Artificial Sequence: Synthetic oligonucleotide
  misc_feature 1..20: note = Target: SCN10A; (-) strand; PAM type: YTN; PAM sequence: CTG
  source 1..20: mol_type = other DNA
accagcatccaaatggcagg

SEQ ID NO: 42425 - DNA, 20 bp, synthetic construct
  misc_feature 1..20: note = Description of Artificial Sequence: Synthetic oligonucleotide
  misc_feature 1..20: note = Target: SCN10A; (-) strand; PAM type: YTN; PAM sequence: CTC
  source 1..20: mol_type = other DNA
ctgaccagcatccaaatggc

SEQ ID NO: 42426 - DNA, 20 bp, synthetic construct
  misc_feature 1..20: note = Description of Artificial Sequence: Synthetic oligonucleotide
  misc_feature 1..20: note = Target: SCN10A; (-) strand; PAM type: YTN; PAM sequence: CTA
  source 1..20: mol_type = other DNA
gctcctgaccagcatccaaa

SEQ ID NO: 42427 - DNA, 20 bp, synthetic construct
  misc_feature 1..20: note = Description of Artificial Sequence: Synthetic oligonucleotide
  misc_feature 1..20: note = Target: SCN10A; (-) strand; PAM type: YTN; PAM sequence: TTG
  source 1..20: mol_type = other DNA
gaccatcctagctcctgacc

SEQ ID NO: 42428 - DNA, 20 bp, synthetic construct
  misc_feature 1..20: note = Description of Artificial Sequence: Synthetic oligonucleotide
  misc_feature 1..20: note = Target: SCN10A; (-) strand; PAM type: YTN; PAM sequence: CTT
  source 1..20: mol_type = other DNA
ggaccatcctagctcctgac

SEQ ID NO: 42429 - DNA, 20 bp, synthetic construct
  misc_feature 1..20: note = Description of Artificial Sequence: Synthetic oligonucleotide
  misc_feature 1..20: note = Target: SCN10A; (-) strand; PAM type: YTN; PAM sequence: CTC
  source 1..20: mol_type = other DNA
caggacccataggtcttgga

SEQ ID NO: 42430 - DNA, 20 bp, synthetic construct
  misc_feature 1..20: note = Description of Artificial Sequence: Synthetic oligonucleotide
  misc_feature 1..20: note = Target: SCN10A; (-) strand; PAM type: YTN; PAM sequence: CTG
  source 1..20: mol_type = other DNA
cactccaggacccataggtc

SEQ ID NO: 42431 - DNA, 20 bp, synthetic construct
  misc_feature 1..20: note = Description of Artificial Sequence: Synthetic oligonucleotide
  misc_feature 1..20: note = Target: SCN10A; (-) strand; PAM type: YTN; PAM sequence: CTG
  source 1..20: mol_type = other DNA
cagatggctgcactccagga

SEQ ID NO: 42432 - DNA, 20 bp, synthetic construct
  misc_feature 1..20: note = Description of Artificial Sequence: Synthetic oligonucleotide
  misc_feature 1..20: note = Target: SCN10A; (-) strand; PAM type: YTN; PAM sequence: TTG
  source 1..20: mol_type = other DNA
aagtggcagggatgccaaca

SEQ ID NO: 42433 - DNA, 20 bp, synthetic construct
  misc_feature 1..20: note = Description of Artificial Sequence: Synthetic oligonucleotide
  misc_feature 1..20: note = Target: SCN10A; (-) strand; PAM type: YTN; PAM sequence: TTT
  source 1..20: mol_type = other DNA
gaagtggcagggatgccaac

SEQ ID NO: 42434 - DNA, 20 bp, synthetic construct
  misc_feature 1..20: note = Description of Artificial Sequence: Synthetic oligonucleotide
  misc_feature 1..20: note = Target: SCN10A; (-) strand; PAM type: YTN; PAM sequence: CTT
  source 1..20: mol_type = other DNA
tgaagtggcagggatgccaa

SEQ ID NO: 42435 - DNA, 20 bp, synthetic construct
  misc_feature 1..20: note = Description of Artificial Sequence: Synthetic oligonucleotide
  misc_feature 1..20: note = Target: SCN10A; (-) strand; PAM type: YTN; PAM sequence: TTA
  source 1..20: mol_type = other DNA
aacaaaactttgaagtggca

SEQ ID NO: 42436 - DNA, 20 bp, synthetic construct
  misc_feature 1..20: note = Description of Artificial Sequence: Synthetic oligonucleotide
  misc_feature 1..20: note = Target: SCN10A; (-) strand; PAM type: YTN; PAM sequence: TTT
  source 1..20: mol_type = other DNA
aaacaaaactttgaagtggc

SEQ ID NO: 42437 - DNA, 20 bp, synthetic construct
  misc_feature 1..20: note = Description of Artificial Sequence: Synthetic oligonucleotide
  misc_feature 1..20: note = Target: SCN10A; (-) strand; PAM type: YTN; PAM sequence: CTA
  source 1..20: mol_type = other DNA
gaacatttaaacaaaacttt

SEQ ID NO: 42438 - DNA, 20 bp, synthetic construct
  misc_feature 1..20: note = Description of Artificial Sequence: Synthetic oligonucleotide
  misc_feature 1..20: note = Target: SCN10A; (-) strand; PAM type: YTN; PAM sequence: CTG
  source 1..20: mol_type = other DNA
aggcaaggctagaacattta

SEQ ID NO: 42439 - DNA, 20 bp, synthetic construct
  misc_feature 1..20: note = Description of Artificial Sequence: Synthetic oligonucleotide
  misc_feature 1..20: note = Target: SCN10A; (-) strand; PAM type: YTN; PAM sequence: TTC
  source 1..20: mol_type = other DNA
gcatagctgaggcaaggcta

SEQ ID NO: 42440 - DNA, 20 bp, synthetic construct
  misc_feature 1..20: note = Description of Artificial Sequence: Synthetic oligonucleotide
  misc_feature 1..20: note = Target: SCN10A; (-) strand; PAM type: YTN; PAM sequence: TTT
  source 1..20: mol_type = other DNA
cgcatagctgaggcaaggct

SEQ ID NO: 42441 - DNA, 20 bp, synthetic construct
  misc_feature 1..20: note = Description of Artificial Sequence: Synthetic oligonucleotide
  misc_feature 1..20: note = Target: SCN10A; (-) strand; PAM type: YTN; PAM sequence: CTA
  source 1..20: mol_type = other DNA
atttcgcatagctgaggcaa

SEQ ID NO: 42442 - DNA, 20 bp, synthetic construct
  misc_feature 1..20: note = Description of Artificial Sequence: Synthetic oligonucleotide
  misc_feature 1..20: note = Target: SCN10A; (-) strand; PAM type: YTN; PAM sequence: TTC
  source 1..20: mol_type = other DNA
cctaatttcgcatagctgag

SEQ ID NO: 42443 - DNA, 20 bp, synthetic construct
  misc_feature 1..20: note = Description of Artificial Sequence: Synthetic oligonucleotide
  misc_feature 1..20: note = Target: SCN10A; (-) strand; PAM type: YTN; PAM sequence: TTG
  source 1..20: mol_type = other DNA
ttccctaatttcgcatagct

SEQ ID NO: 42444 - DNA, 20 bp, synthetic construct
  misc_feature 1..20: note = Description of Artificial Sequence: Synthetic oligonucleotide
  misc_feature 1..20: note = Target: SCN10A; (-) strand; PAM type: YTN; PAM sequence: TTT
  source 1..20: mol_type = other DNA
gttccctaatttcgcatagc

SEQ ID NO: 42445 - DNA, 20 bp, synthetic construct
  misc_feature 1..20: note = Description of Artificial Sequence: Synthetic oligonucleotide
  misc_feature 1..20: note = Target: SCN10A; (-) strand; PAM type: YTN; PAM sequence: CTT
  source 1..20: mol_type = other DNA
tgttccctaatttcgcatag

SEQ ID NO: 42446 - DNA, 20 bp, synthetic construct
  misc_feature 1..20: note = Description of Artificial Sequence: Synthetic oligonucleotide
  misc_feature 1..20: note = Target: SCN10A; (-) strand; PAM type: YTN; PAM sequence: TTC
  source 1..20: mol_type = other DNA
ctttgttccctaatttcgca

SEQ ID NO: 42447 - DNA, 20 bp, synthetic construct
  misc_feature 1..20: note = Description of Artificial Sequence: Synthetic oligonucleotide
  misc_feature 1..20: note = Target: SCN10A; (-) strand; PAM type: YTN; PAM sequence: TTT
  source 1..20: mol_type = other DNA
cctttgttccctaatttcgc

SEQ ID NO: 42448 - DNA, 20 bp, synthetic construct
  misc_feature 1..20: note = Description of Artificial Sequence: Synthetic oligonucleotide
  misc_feature 1..20: note = Target: SCN10A; (-) strand; PAM type: YTN; PAM sequence: CTT
  source 1..20: mol_type = other DNA
tcctttgttccctaatttcg

SEQ ID NO: 42449 - DNA, 20 bp, synthetic construct
  misc_feature 1..20: note = Description of Artificial Sequence: Synthetic oligonucleotide
  misc_feature 1..20: note = Target: SCN10A; (-) strand; PAM type: YTN; PAM sequence: CTC
  source 1..20: mol_type = other DNA
tttcctttgttccctaattt

SEQ ID NO: 42450 - DNA, 20 bp, synthetic construct
  misc_feature 1..20: note = Description of Artificial Sequence: Synthetic oligonucleotide
  misc_feature 1..20: note = Target: SCN10A; (-) strand; PAM type: YTN; PAM sequence: CTG
  source 1..20: mol_type = other DNA
gcccaagcaaggtaaacact

SEQ ID NO: 42451 - DNA, 20 bp, synthetic construct
  misc_feature 1..20: note = Description of Artificial Sequence: Synthetic oligonucleotide
  misc_feature 1..20: note = Target: SCN10A; (-) strand; PAM type: YTN; PAM sequence: TTC
  source 1..20: mol_type = other DNA
tggcccaagcaaggtaaaca

SEQ ID NO: 42452 - DNA, 20 bp, synthetic construct
  misc_feature 1..20: note = Description of Artificial Sequence: Synthetic oligonucleotide
  misc_feature 1..20: note = Target: SCN10A; (-) strand; PAM type: YTN; PAM sequence: TTA
  source 1..20: mol_type = other DNA
atattctggcccaagcaagg

SEQ ID NO: 42453 - DNA, 20 bp, synthetic construct
  misc_feature 1..20: note = Description of Artificial Sequence: Synthetic oligonucleotide
  misc_feature 1..20: note = Target: SCN10A; (-) strand; PAM type: YTN; PAM sequence: CTT
  source 1..20: mol_type = other DNA
aatattctggcccaagcaag

SEQ ID NO: 42454 - DNA, 20 bp, synthetic construct
  misc_feature 1..20: note = Description of Artificial Sequence: Synthetic oligonucleotide
  misc_feature 1..20: note = Target: SCN10A; (-) strand; PAM type: YTN; PAM sequence: CTC
  source 1..20: mol_type = other DNA
cccttaatattctggcccaa

SEQ ID NO: 42455 - DNA, 20 bp, synthetic construct
  misc_feature 1..20: note = Description of Artificial Sequence: Synthetic oligonucleotide
  misc_feature 1..20: note = Target: SCN10A; (-) strand; PAM type: YTN; PAM sequence: CTC
  source 1..20: mol_type = other DNA
tccccttaatattctggccc

SEQ ID NO: 42456 - DNA, 20 bp, synthetic construct
  misc_feature 1..20: note = Description of Artificial Sequence: Synthetic oligonucleotide
  misc_feature 1..20: note = Target: SCN10A; (-) strand; PAM type: YTN; PAM sequence: TTA
  source 1..20: mol_type = other DNA
gtggaggaacgtggctctcc

SEQ ID NO: 42457 - DNA, 20 bp, synthetic construct
  misc_feature 1..20: note = Description of Artificial Sequence: Synthetic oligonucleotide
  misc_feature 1..20: note = Target: SCN10A; (-) strand; PAM type: YTN; PAM sequence: CTT
  source 1..20: mol_type = other DNA
agtggaggaacgtggctctc

SEQ ID NO: 42458 - DNA, 20 bp, synthetic construct
  misc_feature 1..20: note = Description of Artificial Sequence: Synthetic oligonucleotide
  misc_feature 1..20: note = Target: SCN10A; (-) strand; PAM type: YTN; PAM sequence: CTA
  source 1..20: mol_type = other DNA
gccttagtggaggaacgtgg

SEQ ID NO: 42459 - DNA, 20 bp, synthetic construct
  misc_feature 1..20: note = Description of Artificial Sequence: Synthetic oligonucleotide
  misc_feature 1..20: note = Target: SCN10A; (-) strand; PAM type: YTN; PAM sequence: TTG
  source 1..20: mol_type = other DNA
ctagccttagtggaggaacg

SEQ ID NO: 42460 - DNA, 20 bp, synthetic construct
  misc_feature 1..20: note = Description of Artificial Sequence: Synthetic oligonucleotide
  misc_feature 1..20: note = Target: SCN10A; (-) strand; PAM type: YTN; PAM sequence: TTT
  source 1..20: mol_type = other DNA
gctagccttagtggaggaac

SEQ ID NO: 42461 - DNA, 20 bp, synthetic construct
  misc_feature 1..20: note = Description of Artificial Sequence: Synthetic oligonucleotide
  misc_feature 1..20: note = Target: SCN10A; (-) strand; PAM type: YTN; PAM sequence: TTT
  source 1..20: mol_type = other DNA
tgctagccttagtggaggaa

SEQ ID NO: 42462 - DNA, 20 bp, synthetic construct
  misc_feature 1..20: note = Description of Artificial Sequence: Synthetic oligonucleotide
  misc_feature 1..20: note = Target: SCN10A; (-) strand; PAM type: YTN; PAM sequence: CTT
  source 1..20: mol_type = other DNA
ttgctagccttagtggagga

SEQ ID NO: 42463 - DNA, 20 bp, synthetic construct
  misc_feature 1..20: note = Description of Artificial Sequence: Synthetic oligonucleotide
  misc_feature 1..20: note = Target: SCN10A; (-) strand; PAM type: YTN; PAM sequence: CTC
  source 1..20: mol_type = other DNA
aaccttttgctagccttagt

SEQ ID NO: 42464 - DNA, 20 bp, synthetic construct
  misc_feature 1..20: note = Description of Artificial Sequence: Synthetic oligonucleotide
  misc_feature 1..20: note = Target: SCN10A; (-) strand; PAM type: YTN; PAM sequence: CTC
  source 1..20: mol_type = other DNA
tcaaccttttgctagcctta

SEQ ID NO: 42465 - DNA, 20 bp, synthetic construct
  misc_feature 1..20: note = Description of Artificial Sequence: Synthetic oligonucleotide
  misc_feature 1..20: note = Target: SCN10A; (-) strand; PAM type: YTN; PAM sequence: TTC
  source 1..20: mol_type = other DNA
actctcaaccttttgctagc

SEQ ID NO: 42466 - DNA, 20 bp, synthetic construct
  misc_feature 1..20: note = Description of Artificial Sequence: Synthetic oligonucleotide
  misc_feature 1..20: note = Target: SCN10A; (-) strand; PAM type: YTN; PAM sequence: TTA
  source 1..20: mol_type = other DNA
gtaattcactctcaaccttt

SEQ ID NO: 42467 - DNA, 20 bp, synthetic construct
  misc_feature 1..20: note = Description of Artificial Sequence: Synthetic oligonucleotide
  misc_feature 1..20: note = Target: SCN10A; (-) strand; PAM type: YTN; PAM sequence: TTG
  source 1..20: mol_type = other DNA
aatggaagaagagtggatta

SEQ ID NO: 42468 - DNA, 20 bp, synthetic construct
  misc_feature 1..20: note = Description of Artificial Sequence: Synthetic oligonucleotide
  misc_feature 1..20: note = Target: SCN10A; (-) strand; PAM type: YTN; PAM sequence: TTT
  source 1..20: mol_type = other DNA
gaatggaagaagagtggatt

SEQ ID NO: 42469 - DNA, 20 bp, synthetic construct
  misc_feature 1..20: note = Description of Artificial Sequence: Synthetic oligonucleotide
  misc_feature 1..20: note = Target: SCN10A; (-) strand; PAM type: YTN; PAM sequence: CTT
  source 1..20: mol_type = other DNA
tgaatggaagaagagtggat

SEQ ID NO: 42470 - DNA, 20 bp, synthetic construct
  misc_feature 1..20: note = Description of Artificial Sequence: Synthetic oligonucleotide
  misc_feature 1..20: note = Target: SCN10A; (-) strand; PAM type: YTN; PAM sequence: CTC
  source 1..20: mol_type = other DNA
catcctttgaatggaagaag

SEQ ID NO: 42471 - DNA, 20 bp, synthetic construct
  misc_feature 1..20: note = Description of Artificial Sequence: Synthetic oligonucleotide
  misc_feature 1..20: note = Target: SCN10A; (-) strand; PAM type: YTN; PAM sequence: TTC
  source 1..20: mol_type = other DNA
tccatcctttgaatggaaga

SEQ ID NO: 42472 - DNA, 20 bp, synthetic construct
  misc_feature 1..20: note = Description of Artificial Sequence: Synthetic oligonucleotide
  misc_feature 1..20: note = Target: SCN10A; (-) strand; PAM type: YTN; PAM sequence: CTG
  source 1..20: mol_type = other DNA
agattctccatcctttgaat

SEQ ID NO: 42473 - DNA, 20 bp, synthetic construct
  misc_feature 1..20: note = Description of Artificial Sequence: Synthetic oligonucleotide
  misc_feature 1..20: note = Target: SCN10A; (-) strand; PAM type: YTN; PAM sequence: TTC
  source 1..20: mol_type = other DNA
ctgagattctccatcctttg

SEQ ID NO: 42474 - DNA, 20 bp, synthetic construct
  misc_feature 1..20: note = Description of Artificial Sequence: Synthetic oligonucleotide
  misc_feature 1..20: note = Target: SCN10A; (-) strand; PAM type: YTN; PAM sequence: CTG
  source 1..20: mol_type = other DNA
ttcctgagattctccatcct

SEQ ID NO: 42475 - DNA, 20 bp, synthetic construct
  misc_feature 1..20: note = Description of Artificial Sequence: Synthetic oligonucleotide
  misc_feature 1..20: note = Target: SCN10A; (-) strand; PAM type: YTN; PAM sequence: TTC
  source 1..20: mol_type = other DNA
tgttcctgagattctccatc

SEQ ID NO: 42476 - DNA, 20 bp, synthetic construct
  misc_feature 1..20: note = Description of Artificial Sequence: Synthetic oligonucleotide
  misc_feature 1..20: note = Target: SCN10A; (-) strand; PAM type: YTN; PAM sequence: CTC
  source 1..20: mol_type = other DNA
ataaccaattctgttcctga

SEQ ID NO: 42477 - DNA, 20 bp, synthetic construct
  misc_feature 1..20: note = Description of Artificial Sequence: Synthetic oligonucleotide
  misc_feature 1..20: note = Target: SCN10A; (-) strand; PAM type: YTN; PAM sequence: CTC
  source 1..20: mol_type = other DNA
cacatgtggaggggaagtga

SEQ ID NO: 42478 - DNA, 20 bp, synthetic construct
  misc_feature 1..20: note = Description of Artificial Sequence: Synthetic oligonucleotide
  misc_feature 1..20: note = Target: SCN10A; (-) strand; PAM type: YTN; PAM sequence: CTC
  source 1..20: mol_type = other DNA
cgaggatggcacagggggag

SEQ ID NO: 42479 - DNA, 20 bp, synthetic construct
  misc_feature 1..20: note = Description of Artificial Sequence: Synthetic oligonucleotide
  misc_feature 1..20: note = Target: SCN10A; (-) strand; PAM type: YTN; PAM sequence: CTA
  source 1..20: mol_type = other DNA
agatcctccgaggatggcac

SEQ ID NO: 42480 - DNA, 20 bp, synthetic construct
  misc_feature 1..20: note = Description of Artificial Sequence: Synthetic oligonucleotide
  misc_feature 1..20: note = Target: SCN10A; (-) strand; PAM type: YTN; PAM sequence: CTG
  source 1..20: mol_type = other DNA
caactaagatcctccgagga

SEQ ID NO: 42481 - DNA, 20 bp, synthetic construct
  misc_feature 1..20: note = Description of Artificial Sequence: Synthetic oligonucleotide
  misc_feature 1..20: note = Target: SCN10A; (-) strand; PAM type: YTN; PAM sequence: TTA
  source 1..20: mol_type = other DNA
agctgcaactaagatcctcc

SEQ ID NO: 42482 - DNA, 20 bp, synthetic construct
  misc_feature 1..20: note = Description of Artificial Sequence: Synthetic oligonucleotide
  misc_feature 1..20: note = Target: SCN10A; (-) strand; PAM type: YTN; PAM sequence: CTA
  source 1..20: mol_type = other DNA
attaagctgcaactaagatc

SEQ ID NO: 42483 - DNA, 20 bp, synthetic construct
  misc_feature 1..20: note = Description of Artificial Sequence: Synthetic oligonucleotide
  misc_feature 1..20: note = Target: SCN10A; (-) strand; PAM type: YTN; PAM sequence: CTC
  source 1..20: mol_type = other DNA
ctaattaagctgcaactaag

SEQ ID NO: 42484 - DNA, 20 bp, synthetic construct
  misc_feature 1..20: note = Description of Artificial Sequence: Synthetic oligonucleotide
  misc_feature 1..20: note = Target: SCN10A; (-) strand; PAM type: YTN; PAM sequence: TTC
  source 1..20: mol_type = other DNA
tcctaattaagctgcaacta

SEQ ID NO: 42485 - DNA, 20 bp, synthetic construct
  misc_feature 1..20: note = Description of Artificial Sequence: Synthetic oligonucleotide
  misc_feature 1..20: note = Target: SCN10A; (-) strand; PAM type: YTN; PAM sequence: TTT
  source 1..20: mol_type = other DNA
ctcctaattaagctgcaact

SEQ ID NO: 42486 - DNA, 20 bp, synthetic construct
  misc_feature 1..20: note = Description of Artificial Sequence: Synthetic oligonucleotide
  misc_feature 1..20: note = Target: SCN10A; (-) strand; PAM type: YTN; PAM sequence: CTG
  source 1..20: mol_type = other DNA
caacaaaatcaccatttctc

SEQ ID NO: 42487 - DNA, 20 bp, synthetic construct
  misc_feature 1..20: note = Description of Artificial Sequence: Synthetic oligonucleotide
  misc_feature 1..20: note = Target: SCN10A; (-) strand; PAM type: YTN; PAM sequence: TTG
  source 1..20: mol_type = other DNA
atggtcaggcaggaagacct

SEQ ID NO: 42488 - DNA, 20 bp, synthetic construct
  misc_feature 1..20: note = Description of Artificial Sequence: Synthetic oligonucleotide
  misc_feature 1..20: note = Target: SCN10A; (-) strand; PAM type: YTN; PAM sequence: TTC
  source 1..20: mol_type = other DNA
caggcagtaaataggagtgg

SEQ ID NO: 42489 - DNA, 20 bp, synthetic construct
  misc_feature 1..20: note = Description of Artificial Sequence: Synthetic oligonucleotide
  misc_feature 1..20: note = Target: SCN10A; (-) strand; PAM type: YTN; PAM sequence: TTG
  source 1..20: mol_type = other DNA
aaattccaggcagtaaatag

SEQ ID NO: 42490 - DNA, 20 bp, synthetic construct
  misc_feature 1..20: note = Description of Artificial Sequence: Synthetic oligonucleotide
  misc_feature 1..20: note = Target: SCN10A; (-) strand; PAM type: YTN; PAM sequence: CTA
  source 1..20: mol_type = other DNA
atgttgaaattccaggcagt

SEQ ID NO: 42491 - DNA, 20 bp, synthetic construct
  misc_feature 1..20: note = Description of Artificial Sequence: Synthetic oligonucleotide
  misc_feature 1..20: note = Target: SCN10A; (-) strand; PAM type: YTN; PAM sequence: CTA
  source 1..20: mol_type = other DNA
caaaggcatgaccctaatgt

SEQ ID NO: 42492 - DNA, 20 bp, synthetic construct
  misc_feature 1..20: note = Description of Artificial Sequence: Synthetic oligonucleotide
  misc_feature 1..20: note = Target: SCN10A; (-) strand; PAM type: YTN; PAM sequence: CTA
  source 1..20: mol_type = other DNA
cctacaaaggcatgacccta

SEQ ID NO: 42493 - DNA, 20 bp, synthetic construct
  misc_feature 1..20: note = Description of Artificial Sequence: Synthetic oligonucleotide
  misc_feature 1..20: note = Target: SCN10A; (-) strand; PAM type: YTN; PAM sequence: CTG
  source 1..20: mol_type = other DNA
gagagggcatctacctacaa

SEQ ID NO: 42494 - DNA, 20 bp, synthetic construct
  misc_feature 1..20: note = Description of Artificial Sequence: Synthetic oligonucleotide
  misc_feature 1..20: note = Target: SCN10A; (-) strand; PAM type: YTN; PAM sequence: TTC
  source 1..20: mol_type = other DNA
aaaaagggaccctggagagg

SEQ ID NO: 42495 - DNA, 20 bp, synthetic construct
  misc_feature 1..20: note = Description of Artificial Sequence: Synthetic oligonucleotide
  misc_feature 1..20: note = Target: SCN10A; (-) strand; PAM type: YTN; PAM sequence: TTT
  source 1..20: mol_type = other DNA
caaaaagggaccctggagag

SEQ ID NO: 42496 - DNA, 20 bp, synthetic construct
  misc_feature 1..20: note = Description of Artificial Sequence: Synthetic oligonucleotide
  misc_feature 1..20: note = Target: SCN10A; (-) strand; PAM type: YTN; PAM sequence: TTA
  source 1..20: mol_type = other DNA
ggacaagataaatcatattt

SEQ ID NO: 42497 - DNA, 20 bp, synthetic construct
  misc_feature 1..20: note = Description of Artificial Sequence: Synthetic oligonucleotide
  misc_feature 1..20: note = Target: SCN10A; (-) strand; PAM type: YTN; PAM sequence: CTT
  source 1..20: mol_type = other DNA
aggacaagataaatcatatt

SEQ ID NO: 42498 - DNA, 20 bp, synthetic construct
  misc_feature 1..20: note = Description of Artificial Sequence: Synthetic oligonucleotide
  misc_feature 1..20: note = Target: SCN10A; (-) strand; PAM type: YTN; PAM sequence: TTC
  source 1..20: mol_type = other DNA
ttaggacaagataaatcata

SEQ ID NO: 42499 - DNA, 20 bp, synthetic construct
  misc_feature 1..20: note = Description of Artificial Sequence: Synthetic oligonucleotide
  misc_feature 1..20: note = Target: SCN10A; (-) strand; PAM type: YTN; PAM sequence: CTC
  source 1..20: mol_type = other DNA
aaggaagacaacattcttag

SEQ ID NO: 42500 - DNA, 20 bp, synthetic construct
  misc_feature 1..20: note = Description of Artificial Sequence: Synthetic oligonucleotide
  misc_feature 1..20: note = Target: SCN10A; (-) strand; PAM type: YTN; PAM sequence: CTC
  source 1..20: mol_type = other DNA
ccctcaaggaagacaacatt

SEQ ID NO: 42501 - DNA, 20 bp, synthetic construct
  misc_feature 1..20: note = Description of Artificial Sequence: Synthetic oligonucleotide
  misc_feature 1..20: note = Target: SCN10A; (-) strand; PAM type: YTN; PAM sequence: TTC
  source 1..20: mol_type = other DNA
ctcccctcaaggaagacaac

SEQ ID NO: 42502 - DNA, 20 bp, synthetic construct
  misc_feature 1..20: note = Description of Artificial Sequence: Synthetic oligonucleotide
  misc_feature 1..20: note = Target: SCN10A; (-) strand; PAM type: YTN; PAM sequence: CTT
  source 1..20: mol_type = other DNA
cctcccctcaaggaagacaa

SEQ ID NO: 42503 - DNA, 20 bp, synthetic construct
  misc_feature 1..20: note = Description of Artificial Sequence: Synthetic oligonucleotide
  misc_feature 1..20: note = Target: SCN10A; (-) strand; PAM type: YTN; PAM sequence: CTG
  source 1..20: mol_type = other DNA
ccaaagaaagcttcctcccc

SEQ ID NO: 42504 - DNA, 20 bp, synthetic construct
  misc_feature 1..20: note = Description of Artificial Sequence: Synthetic oligonucleotide
  misc_feature 1..20: note = Target: SCN10A; (-) strand; PAM type: YTN; PAM sequence: CTG
  source 1..20: mol_type = other DNA
tcatcacccaaccccatagg

SEQ ID NO: 42505 - DNA, 20 bp, synthetic construct
  misc_feature 1..20: note = Description of Artificial Sequence: Synthetic oligonucleotide
  misc_feature 1..20: note = Target: SCN10A; (-) strand; PAM type: YTN; PAM sequence: TTC
  source 1..20: mol_type = other DNA
cctgtcatcacccaacccca

SEQ ID NO: 42506 - DNA, 20 bp, synthetic construct
  misc_feature 1..20: note = Description of Artificial Sequence: Synthetic oligonucleotide
  misc_feature 1..20: note = Target: SCN10A; (-) strand; PAM type: YTN; PAM sequence: CTT
  source 1..20: mol_type = other DNA
ccctgtcatcacccaacccc

SEQ ID NO: 42507 - DNA, 20 bp, synthetic construct
  misc_feature 1..20: note = Description of Artificial Sequence: Synthetic oligonucleotide
  misc_feature 1..20: note = Target: SCN10A; (-) strand; PAM type: YTN; PAM sequence: TTC
  source 1..20: mol_type = other DNA
ttccctgtcatcacccaacc

SEQ ID NO: 42508 - DNA, 20 bp, synthetic construct
  misc_feature 1..20: note = Description of Artificial Sequence: Synthetic oligonucleotide
  misc_feature 1..20: note = Target: SCN10A; (-) strand; PAM type: YTN; PAM sequence: CTT
  source 1..20: mol_type = other DNA
cttccctgtcatcacccaac

SEQ ID NO: 42509 - DNA, 20 bp, synthetic construct
  misc_feature 1..20: note = Description of Artificial Sequence: Synthetic oligonucleotide
  misc_feature 1..20: note = Target: SCN10A; (-) strand; PAM type: YTN; PAM sequence: TTG
  source 1..20: mol_type = other DNA
acatcccagcttcttccctg

SEQ ID NO: 42510 - DNA, 20 bp, synthetic construct
  misc_feature 1..20: note = Description of Artificial Sequence: Synthetic oligonucleotide
  misc_feature 1..20: note = Target: SCN10A; (-) strand; PAM type: YTN; PAM sequence: TTT
  source 1..20: mol_type = other DNA
gacatcccagcttcttccct

SEQ ID NO: 42511 - DNA, 20 bp, synthetic construct
  misc_feature 1..20: note = Description of Artificial Sequence: Synthetic oligonucleotide
  misc_feature 1..20: note = Target: SCN10A; (-) strand; PAM type: YTN; PAM sequence: CTT
  source 1..20: mol_type = other DNA
tgacatcccagcttcttccc

SEQ ID NO: 42512 - DNA, 20 bp, synthetic construct
  misc_feature 1..20: note = Description of Artificial Sequence: Synthetic oligonucleotide
  misc_feature 1..20: note = Target: SCN10A; (-) strand; PAM type: YTN; PAM sequence: CTC
  source 1..20: mol_type = other DNA
tttgacatcccagcttcttc

SEQ ID NO: 42513 - DNA, 20 bp, synthetic construct
  misc_feature 1..20: note = Description of Artificial Sequence: Synthetic oligonucleotide
  misc_feature 1..20: note = Target: SCN10A; (-) strand; PAM type: YTN; PAM sequence: CTC
  source 1..20: mol_type = other DNA
tctttgacatcccagcttct

SEQ ID NO: 42514 - DNA, 20 bp, synthetic construct
  misc_feature 1..20: note = Description of Artificial Sequence: Synthetic oligonucleotide
  misc_feature 1..20: note = Target: SCN10A; (-) strand; PAM type: YTN; PAM sequence: CTC
  source 1..20: mol_type = other DNA
aatctctctttgacatccca

SEQ ID NO: 42515 - DNA, 20 bp, synthetic construct
  misc_feature 1..20: note = Description of Artificial Sequence: Synthetic oligonucleotide
  misc_feature 1..20: note = Target: SCN10A; (-) strand; PAM type: YTN; PAM sequence: CTA
  source 1..20: mol_type = other DNA
ctcaatctctctttgacatc

SEQ ID NO: 42516 - DNA, 20 bp, synthetic construct
  misc_feature 1..20: note = Description of Artificial Sequence: Synthetic oligonucleotide
  misc_feature 1..20: note = Target: SCN10A; (-) strand; PAM type: YTN; PAM sequence: TTC
  source 1..20: mol_type = other DNA
ccccacatactactcaatct

SEQ ID NO: 42517 - DNA, 20 bp, synthetic construct
  misc_feature 1..20: note = Description of Artificial Sequence: Synthetic oligonucleotide
  misc_feature 1..20: note = Target: SCN10A; (-) strand; PAM type: YTN; PAM sequence: CTT
  source 1..20: mol_type = other DNA
cccccacatactactcaatc

SEQ ID NO: 42518 - DNA, 20 bp, synthetic construct
  misc_feature 1..20: note = Description of Artificial Sequence: Synthetic oligonucleotide
  misc_feature 1..20: note = Target: SCN10A; (-) strand; PAM type: YTN; PAM sequence: TTG
  source 1..20: mol_type = other DNA
gcaccttcccccacatacta

SEQ ID NO: 42519 - DNA, 20 bp, synthetic construct
  misc_feature 1..20: note = Description of Artificial Sequence: Synthetic oligonucleotide
  misc_feature 1..20: note = Target: SCN10A; (-) strand; PAM type: YTN; PAM sequence: TTT
  source 1..20: mol_type = other DNA
ggcaccttcccccacatact

SEQ ID NO: 42520 - DNA, 20 bp, synthetic construct
  misc_feature 1..20: note = Description of Artificial Sequence: Synthetic oligonucleotide
  misc_feature 1..20: note = Target: SCN10A; (-) strand; PAM type: YTN; PAM sequence: TTT
  source 1..20: mol_type = other DNA
tggcaccttcccccacatac

SEQ ID NO: 42521 - DNA, 20 bp, synthetic construct
  misc_feature 1..20: note = Description of Artificial Sequence: Synthetic oligonucleotide
  misc_feature 1..20: note = Target: SCN10A; (-) strand; PAM type: YTN; PAM sequence: TTT
  source 1..20: mol_type = other DNA
ttggcaccttcccccacata

SEQ ID NO: 42522 - DNA, 20 bp, synthetic construct
  misc_feature 1..20: note = Description of Artificial Sequence: Synthetic oligonucleotide
  misc_feature 1..20: note = Target: SCN10A; (-) strand; PAM type: YTN; PAM sequence: TTG
  source 1..20: mol_type = other DNA
gcaaaaacatgaaagttttt

SEQ ID NO: 42523 - DNA, 20 bp, synthetic construct
  misc_feature 1..20: note = Description of Artificial Sequence: Synthetic oligonucleotide
  misc_feature 1..20: note = Target: SCN10A; (-) strand; PAM type: YTN; PAM sequence: CTT
  source 1..20: mol_type = other DNA
ggcaaaaacatgaaagtttt

SEQ ID NO: 42524 - DNA, 20 bp, synthetic construct
  misc_feature 1..20: note = Description of Artificial Sequence: Synthetic oligonucleotide
  misc_feature 1..20: note = Target: SCN10A; (-) strand; PAM type: YTN; PAM sequence: CTA
  source 1..20: mol_type = other DNA
gggacaacccttggcaaaaa

SEQ ID NO: 42525 - DNA, 20 bp, synthetic construct
  misc_feature 1..20: note = Description of Artificial Sequence: Synthetic oligonucleotide
  misc_feature 1..20: note = Target: SCN10A; (-) strand; PAM type: YTN; PAM sequence: TTG
  source 1..20: mol_type = other DNA
agccagatgccaaggaggtg

SEQ ID NO: 42526 - DNA, 20 bp, synthetic construct
  misc_feature 1..20: note = Description of Artificial Sequence: Synthetic oligonucleotide
  misc_feature 1..20: note = Target: SCN10A; (-) strand; PAM type: YTN; PAM sequence: TTT
  source 1..20: mol_type = other DNA
gagccagatgccaaggaggt

SEQ ID NO: 42527 - DNA, 20 bp, synthetic construct
  misc_feature 1..20: note = Description of Artificial Sequence: Synthetic oligonucleotide
  misc_feature 1..20: note = Target: SCN10A; (-) strand; PAM type: YTN; PAM sequence: TTG
  source 1..20: mol_type = other DNA
aatccacatttgagccagat

SEQ ID NO: 42528 - DNA, 20 bp, synthetic construct
  misc_feature 1..20: note = Description of Artificial Sequence: Synthetic oligonucleotide
  misc_feature 1..20: note = Target: SCN10A; (-) strand; PAM type: YTN; PAM sequence: CTG
  source 1..20: mol_type = other DNA
gagtaagattgaatccacat

SEQ ID NO: 42529 - DNA, 20 bp, synthetic construct
  misc_feature 1..20: note = Description of Artificial Sequence: Synthetic oligonucleotide
  misc_feature 1..20: note = Target: SCN10A; (-) strand; PAM type: YTN; PAM sequence: TTG
  source 1..20: mol_type = other DNA
tggctggagtaagattgaat

SEQ ID NO: 42530 - DNA, 20 bp, synthetic construct
  misc_feature 1..20: note = Description of Artificial Sequence: Synthetic oligonucleotide
  misc_feature 1..20: note = Target: SCN10A; (-) strand; PAM type: YTN; PAM sequence: CTT
  source 1..20: mol_type = other DNA
gtggctggagtaagattgaa

SEQ ID NO: 42531 - DNA, 20 bp, synthetic construct
  misc_feature 1..20: note = Description of Artificial Sequence: Synthetic oligonucleotide
  misc_feature 1..20: note = Target: SCN10A; (-) strand; PAM type: YTN; PAM sequence: TTA
  source 1..20: mol_type = other DNA
cttgtggctggagtaagatt

SEQ ID NO: 42532 - DNA, 20 bp, synthetic construct
  misc_feature 1..20: note = Description of Artificial Sequence: Synthetic oligonucleotide
  misc_feature 1..20: note = Target: SCN10A; (-) strand; PAM type: YTN; PAM sequence: TTT
  source 1..20: mol_type = other DNA
acttgtggctggagtaagat

SEQ ID NO: 42533 - DNA, 20 bp, synthetic construct
  misc_feature 1..20: note = Description of Artificial Sequence: Synthetic oligonucleotide
  misc_feature 1..20: note = Target: SCN10A; (-) strand; PAM type: YTN; PAM sequence: CTT
  source 1..20: mol_type = other DNA
tacttgtggctggagtaaga

SEQ ID NO: 42534 - DNA, 20 bp, synthetic construct
  misc_feature 1..20: note = Description of Artificial Sequence: Synthetic oligonucleotide
  misc_feature 1..20: note = Target: SCN10A; (-) strand; PAM type: YTN; PAM sequence: CTG
  source 1..20: mol_type = other DNA
gcctttacttgtggctggag

SEQ ID NO: 42535 - DNA, 20 bp, synthetic construct
  misc_feature 1..20: note = Description of Artificial Sequence: Synthetic oligonucleotide
  misc_feature 1..20: note = Target: SCN10A; (-) strand; PAM type: YTN; PAM sequence: CTG
  source 1..20: mol_type = other DNA
agtccacactggcctttact

SEQ ID NO: 42536 - DNA, 20 bp, synthetic construct
  misc_feature 1..20: note = Description of Artificial Sequence: Synthetic oligonucleotide
  misc_feature 1..20: note = Target: SCN10A; (-) strand; PAM type: YTN; PAM sequence: CTG
  source 1..20: mol_type = other DNA
agaagcaagcagctgagtcc

SEQ ID NO: 42537 - DNA, 20 bp, synthetic construct
  misc_feature 1..20: note = Description of Artificial Sequence: Synthetic oligonucleotide
  misc_feature 1..20: note = Target: SCN10A; (-) strand; PAM type: YTN; PAM sequence: TTA
  source 1..20: mol_type = other DNA
ctgagaagcaagcagctgag

SEQ ID NO: 42538 - DNA, 20 bp, synthetic construct
  misc_feature 1..20: note = Description of Artificial Sequence: Synthetic oligonucleotide
  misc_feature 1..20: note = Target: SCN10A; (-) strand; PAM type: YTN; PAM sequence: CTT
  source 1..20: mol_type = other DNA
actgagaagcaagcagctga

SEQ ID NO: 42539 - DNA, 20 bp, synthetic construct
  misc_feature 1..20: note = Description of Artificial Sequence: Synthetic oligonucleotide
  misc_feature 1..20: note = Target: SCN10A; (-) strand; PAM type: YTN; PAM sequence: CTA
  source 1..20: mol_type = other DNA
agacttactgagaagcaagc

SEQ ID NO: 42540 - DNA, 20 bp, synthetic construct
  misc_feature 1..20: note = Description of Artificial Sequence: Synthetic oligonucleotide
  misc_feature 1..20: note = Target: SCN10A; (-) strand; PAM type: YTN; PAM sequence: TTC
  source 1..20: mol_type = other DNA
aagtcatgggtaatgagagg

SEQ ID NO: 42541 - DNA, 20 bp, synthetic construct
  misc_feature 1..20: note = Description of Artificial Sequence: Synthetic oligonucleotide
  misc_feature 1..20: note = Target: SCN10A; (-) strand; PAM type: YTN; PAM sequence: CTG
  source 1..20: mol_type = other DNA
agtcccaaccacattcaagt

SEQ ID NO: 42542 - DNA, 20 bp, synthetic construct
  misc_feature 1..20: note = Description of Artificial Sequence: Synthetic oligonucleotide
  misc_feature 1..20: note = Target: SCN10A; (-) strand; PAM type: YTN; PAM sequence: TTA
  source 1..20: mol_type = other DNA
ggtgaaaggctgagtcccaa

SEQ ID NO: 42543 - DNA, 20 bp, synthetic construct
  misc_feature 1..20: note = Description of Artificial Sequence: Synthetic oligonucleotide
  misc_feature 1..20: note = Target: SCN10A; (-) strand; PAM type: YTN; PAM sequence: TTA
  source 1..20: mol_type = other DNA
aaattaggtgaaaggctgag

SEQ ID NO: 42544 - DNA, 20 bp, synthetic construct
  misc_feature 1..20: note = Description of Artificial Sequence: Synthetic oligonucleotide
  misc_feature 1..20: note = Target: SCN10A; (-) strand; PAM type: YTN; PAM sequence: CTC
  source 1..20: mol_type = other DNA
aaaattaaaattaggtgaaa

SEQ ID NO: 42545 - DNA, 20 bp, synthetic construct
  misc_feature 1..20: note = Description of Artificial Sequence: Synthetic oligonucleotide
  misc_feature 1..20: note = Target: SCN10A; (-) strand; PAM type: YTN; PAM sequence: TTC
  source 1..20: mol_type = other DNA
agtggagaggagcaggctca

SEQ ID NO: 42546 - DNA, 20 bp, synthetic construct
  misc_feature 1..20: note = Description of Artificial Sequence: Synthetic oligonucleotide
  misc_feature 1..20: note = Target: SCN10A; (-) strand; PAM type: YTN; PAM sequence: CTC
  source 1..20: mol_type = other DNA
catcaacaagttcagtggag

SEQ ID NO: 42547 - DNA, 20 bp, synthetic construct
  misc_feature 1..20: note = Description of Artificial Sequence: Synthetic oligonucleotide
  misc_feature 1..20: note = Target: SCN10A; (-) strand; PAM type: YTN; PAM sequence: TTG
  source 1..20: mol_type = other DNA
agtatccctccatcaacaag

SEQ ID NO: 42548 - DNA, 20 bp, synthetic construct
  misc_feature 1..20: note = Description of Artificial Sequence: Synthetic oligonucleotide
  misc_feature 1..20: note = Target: SCN10A; (-) strand; PAM type: YTN; PAM sequence: CTC
  source 1..20: mol_type = other DNA
attgagtatccctccatcaa

SEQ ID NO: 42549 - DNA, 20 bp, synthetic construct
  misc_feature 1..20: note = Description of Artificial Sequence: Synthetic oligonucleotide
  misc_feature 1..20: note = Target: SCN10A; (-) strand; PAM type: YTN; PAM sequence: TTA
  source 1..20: mol_type = other DNA
ggctcattgagtatccctcc

SEQ ID NO: 42550 - DNA, 20 bp, synthetic construct
  misc_feature 1..20: note = Description of Artificial Sequence: Synthetic oligonucleotide
  misc_feature 1..20: note = Target: SCN10A; (-) strand; PAM type: YTN; PAM sequence: CTT
  source 1..20: mol_type = other DNA
aggctcattgagtatccctc

SEQ ID NO: 42551 - DNA, 20 bp, synthetic construct
  misc_feature 1..20: note = Description of Artificial Sequence: Synthetic oligonucleotide
  misc_feature 1..20: note = Target: SCN10A; (-) strand; PAM type: YTN; PAM sequence: CTG
  source 1..20: mol_type = other DNA
agcaaaagtccttaggctca

SEQ ID NO: 42552 - DNA, 20 bp, synthetic construct
  misc_feature 1..20: note = Description of Artificial Sequence: Synthetic oligonucleotide
  misc_feature 1..20: note = Target: SCN10A; (-) strand; PAM type: YTN; PAM sequence: TTG
  source 1..20: mol_type = other DNA
agtgaacctgagcaaaagtc

SEQ ID NO: 42553 - DNA, 20 bp, synthetic construct
  misc_feature 1..20: note = Description of Artificial Sequence: Synthetic oligonucleotide
  misc_feature 1..20: note = Target: SCN10A; (-) strand; PAM type: YTN; PAM sequence: TTT
  source 1..20: mol_type = other DNA
gagtgaacctgagcaaaagt

SEQ ID NO: 42554 - DNA, 20 bp, synthetic construct
  misc_feature 1..20: note = Description of Artificial Sequence: Synthetic oligonucleotide
  misc_feature 1..20: note = Target: SCN10A; (-) strand; PAM type: YTN; PAM sequence: CTG
  source 1..20: mol_type = other DNA
gatttgagtgaacctgagca

SEQ ID NO: 42555 - DNA, 20 bp, synthetic construct
  misc_feature 1..20: note = Description of Artificial Sequence: Synthetic oligonucleotide
  misc_feature 1..20: note = Target: SCN10A; (-) strand; PAM type: YTN; PAM sequence: CTA
  source 1..20: mol_type = other DNA
aatcacccatacaatcaaga

SEQ ID NO: 42556 - DNA, 20 bp, synthetic construct
  misc_feature 1..20: note = Description of Artificial Sequence: Synthetic oligonucleotide
  misc_feature 1..20: note = Target: SCN10A; (-) strand; PAM type: YTN; PAM sequence: TTC
  source 1..20: mol_type = other DNA
ctaaatcacccatacaatca

SEQ ID NO: 42557 - DNA, 20 bp, synthetic construct
  misc_feature 1..20: note = Description of Artificial Sequence: Synthetic oligonucleotide
  misc_feature 1..20: note = Target: SCN10A; (-) strand; PAM type: YTN; PAM sequence: CTT
  source 1..20: mol_type = other DNA
cctaaatcacccatacaatc

SEQ ID NO: 42558 - DNA, 20 bp, synthetic construct
  misc_feature 1..20: note = Description of Artificial Sequence: Synthetic oligonucleotide
  misc_feature 1..20: note = Target: SCN10A; (-) strand; PAM type: YTN; PAM sequence: TTC
  source 1..20: mol_type = other DNA
ttcctaaatcacccatacaa

SEQ ID NO: 42559 - DNA, 20 bp, synthetic construct
  misc_feature 1..20: note = Description of Artificial Sequence: Synthetic oligonucleotide
  misc_feature 1..20: note = Target: SCN10A; (-) strand; PAM type: YTN; PAM sequence: TTT
  source 1..20: mol_type = other DNA
cttcctaaatcacccataca

SEQ ID NO: 42560 - DNA, 20 bp, synthetic construct
  misc_feature 1..20: note = Description of Artificial Sequence: Synthetic oligonucleotide
  misc_feature 1..20: note = Target: SCN10A; (-) strand; PAM type: YTN; PAM sequence: CTT
  source 1..20: mol_type = other DNA
tcttcctaaatcacccatac

SEQ ID NO: 42561 - DNA, 20 bp, synthetic construct
  misc_feature 1..20: note = Description of Artificial Sequence: Synthetic oligonucleotide
  misc_feature 1..20: note = Target: SCN10A; (-) strand; PAM type: YTN; PAM sequence: CTG
  source 1..20: mol_type = other DNA
taggggcacagctttcttcc

SEQ ID NO: 42562 - DNA, 20 bp, synthetic construct
  misc_feature 1..20: note = Description of Artificial Sequence: Synthetic oligonucleotide
  misc_feature 1..20: note = Target: SCN10A; (-) strand; PAM type: YTN; PAM sequence: CTC
  source 1..20: mol_type = other DNA
tgtaggggcacagctttctt

SEQ ID NO: 42563 - DNA, 20 bp, synthetic construct
  misc_feature 1..20: note = Description of Artificial Sequence: Synthetic oligonucleotide
  misc_feature 1..20: note = Target: SCN10A; (-) strand; PAM type: YTN; PAM sequence: TTC
  source 1..20: mol_type = other DNA
agacctctgtaggggcacag

SEQ ID NO: 42564 - DNA, 20 bp, synthetic construct
  misc_feature 1..20: note = Description of Artificial Sequence: Synthetic oligonucleotide
  misc_feature 1..20: note = Target: SCN10A; (-) strand; PAM type: YTN; PAM sequence: TTA
  source 1..20: mol_type = other DNA
caatggggagtggggagtga

SEQ ID NO: 42565 - DNA, 20 bp, synthetic construct
  misc_feature 1..20: note = Description of Artificial Sequence: Synthetic oligonucleotide
  misc_feature 1..20: note = Target: SCN10A; (-) strand; PAM type: YTN; PAM sequence: CTG
  source 1..20: mol_type = other DNA
ataagaagtattacaatggg

SEQ ID NO: 42566 - DNA, 20 bp, synthetic construct
  misc_feature 1..20: note = Description of Artificial Sequence: Synthetic oligonucleotide
  misc_feature 1..20: note = Target: SCN10A; (-) strand; PAM type: YTN; PAM sequence: TTC
  source 1..20: mol_type = other DNA
tgataagaagtattacaatg

SEQ ID NO: 42567 - DNA, 20 bp, synthetic construct
  misc_feature 1..20: note = Description of Artificial Sequence: Synthetic oligonucleotide
  misc_feature 1..20: note = Target: SCN10A; (-) strand; PAM type: YTN; PAM sequence: CTA
  source 1..20: mol_type = other DNA
gattctgataagaagtatta

SEQ ID NO: 42568 - DNA, 20 bp, synthetic construct
  misc_feature 1..20: note = Description of Artificial Sequence: Synthetic oligonucleotide
  misc_feature 1..20: note = Target: SCN10A; (-) strand; PAM type: YTN; PAM sequence: CTA
  source 1..20: mol_type = other DNA
gtctagattctgataagaag

SEQ ID NO: 42569 - DNA, 20 bp, synthetic construct
  misc_feature 1..20: note = Description of Artificial Sequence: Synthetic oligonucleotide
  misc_feature 1..20: note = Target: SCN10A; (-) strand; PAM type: YTN; PAM sequence: TTA
  source 1..20: mol_type = other DNA
ctagtctagattctgataag

SEQ ID NO: 42570 - DNA, 20 bp, synthetic construct
  misc_feature 1..20: note = Description of Artificial Sequence: Synthetic oligonucleotide
  misc_feature 1..20: note = Target: SCN10A; (-) strand; PAM type: YTN; PAM sequence: TTA
  source 1..20: mol_type = other DNA
ttactagtctagattctgat

SEQ ID NO: 42571 - DNA, 20 bp, synthetic construct
  misc_feature 1..20: note = Description of Artificial Sequence: Synthetic oligonucleotide
  misc_feature 1..20: note = Target: SCN10A; (-) strand; PAM type: YTN; PAM sequence: TTT
  source 1..20: mol_type = other DNA
attactagtctagattctga

SEQ ID NO: 42572 - DNA, 20 bp, synthetic construct
  misc_feature 1..20: note = Description of Artificial Sequence: Synthetic oligonucleotide
  misc_feature 1..20: note = Target: SCN10A; (-) strand; PAM type: YTN; PAM sequence: TTG
  source 1..20: mol_type = other DNA
aaatagtggtcatgaattta

SEQ ID NO: 42573 - DNA, 20 bp, synthetic construct
  misc_feature 1..20: note = Description of Artificial Sequence: Synthetic oligonucleotide
  misc_feature 1..20: note = Target: SCN10A; (-) strand; PAM type: YTN; PAM sequence: TTT
  source 1..20: mol_type = other DNA
gaaatagtggtcatgaattt

SEQ ID NO: 42574 - DNA, 20 bp, synthetic construct
  misc_feature 1..20: note = Description of Artificial Sequence: Synthetic oligonucleotide
  misc_feature 1..20: note = Target: SCN10A; (-) strand; PAM type: YTN; PAM sequence: TTT
  source 1..20: mol_type = other DNA
tgaaatagtggtcatgaatt

SEQ ID NO: 42575 - DNA, 20 bp, synthetic construct
  misc_feature 1..20: note = Description of Artificial Sequence: Synthetic oligonucleotide
  misc_feature 1..20: note = Target: SCN10A; (-) strand; PAM type: YTN; PAM sequence: CTG
  source 1..20: mol_type = other DNA
tattttgaaatagtggtcat

SEQ ID NO: 42576 - DNA, 20 bp, synthetic construct
  misc_feature 1..20: note = Description of Artificial Sequence: Synthetic oligonucleotide
  misc_feature 1..20: note = Target: SCN10A; (-) strand; PAM type: YTN; PAM sequence: TTG
  source 1..20: mol_type = other DNA
acactgtattttgaaatagt

SEQ ID NO: 42577 - DNA, 20 bp, synthetic construct
  misc_feature 1..20: note = Description of Artificial Sequence: Synthetic oligonucleotide
  misc_feature 1..20: note = Target: SCN10A; (-) strand; PAM type: YTN; PAM sequence: TTT
  source 1..20: mol_type = other DNA
gacactgtattttgaaatag

SEQ ID NO: 42578 - DNA, 20 bp, synthetic construct
  misc_feature 1..20: note = Description of Artificial Sequence: Synthetic oligonucleotide
  misc_feature 1..20: note = Target: SCN10A; (-) strand; PAM type: YTN; PAM sequence: TTT
  source 1..20: mol_type = other DNA
tgacactgtattttgaaata

SEQ ID NO: 42579 - DNA, 20 bp, synthetic construct
  misc_feature 1..20: note = Description of Artificial Sequence: Synthetic oligonucleotide
  misc_feature 1..20: note = Target: SCN10A; (-) strand; PAM type: YTN; PAM sequence: CTT
  source 1..20: mol_type = other DNA
ttgacactgtattttgaaat

SEQ ID NO: 42580 - DNA, 20 bp, synthetic construct
  misc_feature 1..20: note = Description of Artificial Sequence: Synthetic oligonucleotide
  misc_feature 1..20: note = Target: SCN10A; (-) strand; PAM type: YTN; PAM sequence: TTA
  source 1..20: mol_type = other DNA
caagagaaaaaagtgatgac

SEQ ID NO: 42581 - DNA, 20 bp, synthetic construct
  misc_feature 1..20: note = Description of Artificial Sequence: Synthetic oligonucleotide
  misc_feature 1..20: note = Target: SCN10A; (-) strand; PAM type: YTN; PAM sequence: TTT
  source 1..20: mol_type = other DNA
acaagagaaaaaagtgatga

SEQ ID NO: 42582 - DNA, 20 bp, synthetic construct
  misc_feature 1..20: note = Description of Artificial Sequence: Synthetic oligonucleotide
  misc_feature 1..20: note = Target: SCN10A; (-) strand; PAM type: YTN; PAM sequence: TTG
  source 1..20: mol_type = other DNA
tcagaacaaagtgaaaaaca

SEQ ID NO: 42583 - DNA, 20 bp, synthetic construct
  misc_feature 1..20: note = Description of Artificial Sequence: Synthetic oligonucleotide
  misc_feature 1..20: note = Target: SCN10A; (-) strand; PAM type: YTN; PAM sequence: TTT
  source 1..20: mol_type = other DNA
gtcagaacaaagtgaaaaac

SEQ ID NO: 42584 - DNA, 20 bp, synthetic construct
  misc_feature 1..20: note = Description of Artificial Sequence: Synthetic oligonucleotide
  misc_feature 1..20: note = Target: SCN10A; (-) strand; PAM type: YTN; PAM sequence: CTT
  source 1..20: mol_type = other DNA
tgtcagaacaaagtgaaaaa

SEQ ID NO: 42585 - DNA, 20 bp, synthetic construct
  misc_feature 1..20: note = Description of Artificial Sequence: Synthetic oligonucleotide
  misc_feature 1..20: note = Target: SCN10A; (-) strand; PAM type: YTN; PAM sequence: TTC
  source 1..20: mol_type = other DNA
aaactttgtcagaacaaagt

SEQ ID NO: 42586 - DNA, 20 bp, synthetic construct
  misc_feature 1..20: note = Description of Artificial Sequence: Synthetic oligonucleotide
  misc_feature 1..20: note = Target: SCN10A; (-) strand; PAM type: YTN; PAM sequence: CTT
  source 1..20: mol_type = other DNA
caaactttgtcagaacaaag

SEQ ID NO: 42587 - DNA, 20 bp, synthetic construct
  misc_feature 1..20: note = Description of Artificial Sequence: Synthetic oligonucleotide
  misc_feature 1..20: note = Target: SCN10A; (-) strand; PAM type: YTN; PAM sequence: TTA
  source 1..20: mol_type = other DNA
cttcaaactttgtcagaaca

SEQ ID NO: 42588 - DNA, 20 bp, synthetic construct
  misc_feature 1..20: note = Description of Artificial Sequence: Synthetic oligonucleotide
  misc_feature 1..20: note = Target: SCN10A; (-) strand; PAM type: YTN; PAM sequence: TTT
  source 1..20: mol_type = other DNA
acttcaaactttgtcagaac

SEQ ID NO: 42589 - DNA, 20 bp, synthetic construct
  misc_feature 1..20: note = Description of Artificial Sequence: Synthetic oligonucleotide
  misc_feature 1..20: note = Target: SCN10A; (-) strand; PAM type: YTN; PAM sequence: TTG
  source 1..20: mol_type = other DNA
cataatttacttcaaacttt

SEQ ID NO: 42590 - DNA, 20 bp, synthetic construct
  misc_feature 1..20: note = Description of Artificial Sequence: Synthetic oligonucleotide
  misc_feature 1..20: note = Target: SCN10A; (-) strand; PAM type: YTN; PAM sequence: TTT
  source 1..20: mol_type = other DNA
gcataatttacttcaaactt

SEQ ID NO: 42591 - DNA, 20 bp, synthetic construct
  misc_feature 1..20: note = Description of Artificial Sequence: Synthetic oligonucleotide
  misc_feature 1..20: note = Target: SCN10A; (-) strand; PAM type: YTN; PAM sequence: TTA
  source 1..20: mol_type = other DNA
aatcaaggtataggatttgc

SEQ ID NO: 42592 - DNA, 20 bp, synthetic construct
  misc_feature 1..20: note = Description of Artificial Sequence: Synthetic oligonucleotide
  misc_feature 1..20: note = Target: SCN10A; (-) strand; PAM type: YTN; PAM sequence: TTT
  source 1..20: mol_type = other DNA
aaatcaaggtataggatttg

SEQ ID NO: 42593 - DNA, 20 bp, synthetic construct
  misc_feature 1..20: note = Description of Artificial Sequence: Synthetic oligonucleotide
  misc_feature 1..20: note = Target: SCN10A; (-) strand; PAM type: YTN; PAM sequence: TTT
  source 1..20: mol_type = other DNA
taaatcaaggtataggattt

SEQ ID NO: 42594 - DNA, 20 bp, synthetic construct
  misc_feature 1..20: note = Description of Artificial Sequence: Synthetic oligonucleotide
  misc_feature 1..20: note = Target: SCN10A; (-) strand; PAM type: YTN; PAM sequence: TTT
  source 1..20: mol_type = other DNA
ttaaatcaaggtataggatt

SEQ ID NO: 42595 - DNA, 20 bp, synthetic construct
  misc_feature 1..20: note = Description of Artificial Sequence: Synthetic oligonucleotide
  misc_feature 1..20: note = Target: SCN10A; (-) strand; PAM type: YTN; PAM sequence: TTT
  source 1..20: mol_type = other DNA
tttaaatcaaggtataggat

SEQ ID NO: 42596 - DNA, 20 bp, synthetic construct
  misc_feature 1..20: note = Description of Artificial Sequence: Synthetic oligonucleotide
  misc_feature 1..20: note = Target: SCN10A; (-) strand; PAM type: YTN; PAM sequence: TTT
  source 1..20: mol_type = other DNA
ttttaaatcaaggtatagga

SEQ ID NO: 42597 - DNA, 20 bp, synthetic construct
  misc_feature 1..20: note = Description of Artificial Sequence: Synthetic oligonucleotide
  misc_feature 1..20: note = Target: SCN10A; (-) strand; PAM type: YTN; PAM sequence: TTA
  source 1..20: mol_type = other DNA
gatttttttaaatcaaggta

SEQ ID NO: 42598 - DNA, 20 bp, synthetic construct
  misc_feature 1..20: note = Description of Artificial Sequence: Synthetic oligonucleotide
  misc_feature 1..20: note = Target: SCN10A; (-) strand; PAM type: YTN; PAM sequence: CTA
  source 1..20: mol_type = other DNA
ttagatttttttaaatcaag

SEQ ID NO: 42599 - DNA, 20 bp, synthetic construct
  misc_feature 1..20: note = Description of Artificial Sequence: Synthetic oligonucleotide
  misc_feature 1..20: note = Target: SCN10A; (-) strand; PAM type: YTN; PAM sequence: TTA
  source 1..20: mol_type = other DNA
gccaagctattagatttttt

SEQ ID NO: 42600 - DNA, 20 bp, synthetic construct
  misc_feature 1..20: note = Description of Artificial Sequence: Synthetic oligonucleotide
  misc_feature 1..20: note = Target: SCN10A; (-) strand; PAM type: YTN; PAM sequence: CTG
  source 1..20: mol_type = other DNA
ttagccaagctattagattt

SEQ ID NO: 42601 - DNA, 20 bp, synthetic construct
  misc_feature 1..20: note = Description of Artificial Sequence: Synthetic oligonucleotide
  misc_feature 1..20: note = Target: SCN10A; (-) strand; PAM type: YTN; PAM sequence: TTC
  source 1..20: mol_type = other DNA
tgttagccaagctattagat

SEQ ID NO: 42602 - DNA, 20 bp, synthetic construct
  misc_feature 1..20: note = Description of Artificial Sequence: Synthetic oligonucleotide
  misc_feature 1..20: note = Target: SCN10A; (-) strand; PAM type: YTN; PAM sequence: TTA
  source 1..20: mol_type = other DNA
tggagacatgcattctgtta

SEQ ID NO: 42603 - DNA, 20 bp, synthetic construct
  misc_feature 1..20: note = Description of Artificial Sequence: Synthetic oligonucleotide
  misc_feature 1..20: note = Target: SCN10A; (-) strand; PAM type: YTN; PAM sequence: CTA
  source 1..20: mol_type = other DNA
aatgaattatggagacatgc

SEQ ID NO: 42604 - DNA, 20 bp, synthetic construct
  misc_feature 1..20: note = Description of Artificial Sequence: Synthetic oligonucleotide
  misc_feature 1..20: note = Target: SCN10A; (-) strand; PAM type: YTN; PAM sequence: TTC
  source 1..20: mol_type = other DNA
cctaaatgaattatggagac

SEQ ID NO: 42605 - DNA, 20 bp, synthetic construct
  misc_feature 1..20: note = Description of Artificial Sequence: Synthetic oligonucleotide
  misc_feature 1..20: note = Target: SCN10A; (-) strand; PAM type: YTN; PAM sequence: TTT
  source 1..20: mol_type = other DNA
ccctaaatgaattatggaga

SEQ ID NO: 42606 - DNA, 20 bp, synthetic construct
  misc_feature 1..20: note = Description of Artificial Sequence: Synthetic oligonucleotide
  misc_feature 1..20: note = Target: SCN10A; (-) strand; PAM type: YTN; PAM sequence: CTT
  source 1..20: mol_type = other DNA
tccctaaatgaattatggag

SEQ ID NO: 42607 - DNA, 20 bp, synthetic construct
  misc_feature 1..20: note = Description of Artificial Sequence: Synthetic oligonucleotide
  misc_feature 1..20: note = Target: SCN10A; (-) strand; PAM type: YTN; PAM sequence: TTA
  source 1..20: mol_type = other DNA
acaaaggaacaagcctttcc

SEQ ID NO: 42608 - DNA, 20 bp, synthetic construct
  misc_feature 1..20: note = Description of Artificial Sequence: Synthetic oligonucleotide
  misc_feature 1..20: note = Target: SCN10A; (-) strand; PAM type: YTN; PAM sequence: TTT
  source 1..20: mol_type = other DNA
aacaaaggaacaagcctttc

SEQ ID NO: 42609 - DNA, 20 bp, synthetic construct
  misc_feature 1..20: note = Description of Artificial Sequence: Synthetic oligonucleotide
  misc_feature 1..20: note = Target: SCN10A; (-) strand; PAM type: YTN; PAM sequence: TTC
  source 1..20: mol_type = other DNA
cccacacaagggaaaagtcc

SEQ ID NO: 42610 - DNA, 20 bp, synthetic construct
  misc_feature 1..20: note = Description of Artificial Sequence: Synthetic oligonucleotide
  misc_feature 1..20: note = Target: SCN10A; (-) strand; PAM type: YTN; PAM sequence: CTT
  source 1..20: mol_type = other DNA
ccccacacaagggaaaagtc

SEQ ID NO: 42611 - DNA, 20 bp, synthetic construct
  misc_feature 1..20: note = Description of Artificial Sequence: Synthetic oligonucleotide
  misc_feature 1..20: note = Target: SCN10A; (-) strand; PAM type: YTN; PAM sequence: TTA
  source 1..20: mol_type = other DNA
gcccttccccacacaaggga

SEQ ID NO: 42612 - DNA, 20 bp, synthetic construct
  misc_feature 1..20: note = Description of Artificial Sequence: Synthetic oligonucleotide
  misc_feature 1..20: note = Target: SCN10A; (-) strand; PAM type: YTN; PAM sequence: TTC
  source 1..20: mol_type = other DNA
attagcccttccccacacaa

SEQ ID NO: 42613 - DNA, 20 bp, synthetic construct
  misc_feature 1..20: note = Description of Artificial Sequence: Synthetic oligonucleotide
  misc_feature 1..20: note = Target: SCN10A; (-) strand; PAM type: YTN; PAM sequence: TTT
  source 1..20: mol_type = other DNA
cattagcccttccccacaca

SEQ ID NO: 42614 - DNA, 20 bp, synthetic construct
  misc_feature 1..20: note = Description of Artificial Sequence: Synthetic oligonucleotide
  misc_feature 1..20: note = Target: SCN10A; (-) strand; PAM type: YTN; PAM sequence: CTG
  source 1..20: mol_type = other DNA
atgacacaatttcattagcc

SEQ ID NO: 42615 - DNA, 20 bp, synthetic construct
  misc_feature 1..20: note = Description of Artificial Sequence: Synthetic oligonucleotide
  misc_feature 1..20: note = Target: SCN10A; (-) strand; PAM type: YTN; PAM sequence: TTG
  source 1..20: mol_type = other DNA
ctgatgacacaatttcatta

SEQ ID NO: 42616 - DNA, 20 bp, synthetic construct
  misc_feature 1..20: note = Description of Artificial Sequence: Synthetic oligonucleotide
  misc_feature 1..20: note = Target: SCN10A; (-) strand; PAM type: YTN; PAM sequence: TTA
  source 1..20: mol_type = other DNA
gtgaagaaaatcacaggtat

SEQ ID NO: 42617 - DNA, 20 bp, synthetic construct
  misc_feature 1..20: note = Description of Artificial Sequence: Synthetic oligonucleotide
  misc_feature 1..20: note = Target: SCN10A; (-) strand; PAM type: YTN; PAM sequence: CTA
  source 1..20: mol_type = other DNA
agatgcagcattagtgaaga

SEQ ID NO: 42618 - DNA, 20 bp, synthetic construct
  misc_feature 1..20: note = Description of Artificial Sequence: Synthetic oligonucleotide
  misc_feature 1..20: note = Target: SCN10A; (-) strand; PAM type: YTN; PAM sequence: CTG
  source 1..20: mol_type = other DNA
tggctaagatgcagcattag

SEQ ID NO: 42619 - DNA, 20 bp, synthetic construct
  misc_feature 1..20: note = Description of Artificial Sequence: Synthetic oligonucleotide
  misc_feature 1..20: note = Target: SCN10A; (-) strand; PAM type: YTN; PAM sequence: TTC
  source 1..20: mol_type = other DNA
tgtggctaagatgcagcatt

SEQ ID NO: 42620 - DNA, 20 bp, synthetic construct
  misc_feature 1..20: note = Description of Artificial Sequence: Synthetic oligonucleotide
  misc_feature 1..20: note = Target: SCN10A; (-) strand; PAM type: YTN; PAM sequence: TTT
  source 1..20: mol_type = other DNA
ctgtggctaagatgcagcat

SEQ ID NO: 42621 - DNA, 20 bp, synthetic construct
  misc_feature 1..20: note = Description of Artificial Sequence: Synthetic oligonucleotide
  misc_feature 1..20: note = Target: SCN10A; (-) strand; PAM type: YTN; PAM sequence: CTT
  source 1..20: mol_type = other DNA
tctgtggctaagatgcagca

SEQ ID NO: 42622 - DNA, 20 bp, synthetic construct
  misc_feature 1..20: note = Description of Artificial Sequence: Synthetic oligonucleotide
  misc_feature 1..20: note = Target: SCN10A; (-) strand; PAM type: YTN; PAM sequence: CTA
  source 1..20: mol_type = other DNA
cataaactttctgtggctaa

SEQ ID NO: 42623 - DNA, 20 bp, synthetic construct
  misc_feature 1..20: note = Description of Artificial Sequence: Synthetic oligonucleotide
  misc_feature 1..20: note = Target: SCN10A; (-) strand; PAM type: YTN; PAM sequence: TTC
  source 1..20: mol_type = other DNA
tacataaactttctgtggct

SEQ ID NO: 42624 - DNA, 20 bp, synthetic construct
  misc_feature 1..20: note = Description of Artificial Sequence: Synthetic oligonucleotide
  misc_feature 1..20: note = Target: SCN10A; (-) strand; PAM type: YTN; PAM sequence: CTT
  source 1..20: mol_type = other DNA
ctacataaactttctgtggc

SEQ ID NO: 42625 - DNA, 20 bp, synthetic construct
  misc_feature 1..20: note = Description of Artificial Sequence: Synthetic oligonucleotide
  misc_feature 1..20: note = Target: SCN10A; (-) strand; PAM type: YTN; PAM sequence: CTG
  source 1..20: mol_type = other DNA
tgtccttctacataaacttt

SEQ ID NO: 42626 - DNA, 20 bp, synthetic construct
  misc_feature 1..20: note = Description of Artificial Sequence: Synthetic oligonucleotide
  misc_feature 1..20: note = Target: SCN10A; (-) strand; PAM type: YTN; PAM sequence: TTG
  source 1..20: mol_type = other DNA
gccctgtgtccttctacata

SEQ ID NO: 42627 - DNA, 20 bp, synthetic construct
  misc_feature 1..20: note = Description of Artificial Sequence: Synthetic oligonucleotide
  misc_feature 1..20: note = Target: SCN10A; (-) strand; PAM type: YTN; PAM sequence: CTC
  source 1..20: mol_type = other DNA
cagtgaatggaattggccct

SEQ ID NO: 42628 - DNA, 20 bp, synthetic construct
  misc_feature 1..20: note = Description of Artificial Sequence: Synthetic oligonucleotide
  misc_feature 1..20: note = Target: SCN10A; (-) strand; PAM type: YTN; PAM sequence: CTG
  source 1..20: mol_type = other DNA
agccatccactccagtgaat

SEQ ID NO: 42629 - DNA, 20 bp, synthetic construct
  misc_feature 1..20: note = Description of Artificial Sequence: Synthetic oligonucleotide
  misc_feature 1..20: note = Target: SCN10A; (-) strand; PAM type: YTN; PAM sequence: TTC
  source 1..20: mol_type = other DNA
tgagccatccactccagtga

SEQ ID NO: 42630 - DNA, 20 bp, synthetic construct
  misc_feature 1..20: note = Description of Artificial Sequence: Synthetic oligonucleotide
  misc_feature 1..20: note = Target: SCN10A; (-) strand; PAM type: YTN; PAM sequence: TTT
  source 1..20: mol_type = other DNA
ctgagccatccactccagtg

SEQ ID NO: 42631 - DNA, 20 bp, synthetic construct
  misc_feature 1..20: note = Description of Artificial Sequence: Synthetic oligonucleotide
  misc_feature 1..20: note = Target: SCN10A; (-) strand; PAM type: YTN; PAM sequence: TTC
  source 1..20: mol_type = other DNA
aaagaatttctgagccatcc

SEQ ID NO: 42632 - DNA, 20 bp, synthetic construct
  misc_feature 1..20: note = Description of Artificial Sequence: Synthetic oligonucleotide
  misc_feature 1..20: note = Target: SCN10A; (-) strand; PAM type: YTN; PAM sequence: CTT
  source 1..20: mol_type = other DNA
caaagaatttctgagccatc

SEQ ID NO: 42633 - DNA, 20 bp, synthetic construct
  misc_feature 1..20: note = Description of Artificial Sequence: Synthetic oligonucleotide
  misc_feature 1..20: note = Target: SCN10A; (-) strand; PAM type: YTN; PAM sequence: TTG
  source 1..20: mol_type = other DNA
atcgtcttcaaagaatttct

SEQ ID NO: 42634 - DNA, 20 bp, synthetic construct
  misc_feature 1..20: note = Description of Artificial Sequence: Synthetic oligonucleotide
  misc_feature 1..20: note = Target: SCN10A; (-) strand; PAM type: YTN; PAM sequence: TTG
  source 1..20: mol_type = other DNA
ttgatcgtcttcaaagaatt

SEQ ID NO: 42635 - DNA, 20 bp, synthetic construct
  misc_feature 1..20: note = Description of Artificial Sequence: Synthetic oligonucleotide
  misc_feature 1..20: note = Target: SCN10A; (-) strand; PAM type: YTN; PAM sequence: TTA
  source 1..20: mol_type = other DNA
ttgttgatcgtcttcaaaga

SEQ ID NO: 42636 - DNA, 20 bp, synthetic construct
  misc_feature 1..20: note = Description of Artificial Sequence: Synthetic oligonucleotide
  misc_feature 1..20: note = Target: SCN10A; (-) strand; PAM type: YTN; PAM sequence: TTG
  source 1..20: mol_type = other DNA
atgtgtcagaaattattgtt

SEQ ID NO: 42637 - DNA, 20 bp, synthetic construct
  misc_feature 1..20: note = Description of Artificial Sequence: Synthetic oligonucleotide
  misc_feature 1..20: note = Target: SCN10A; (-) strand; PAM type: YTN; PAM sequence: TTG
  source 1..20: mol_type = other DNA
ggggtgaagatgttgatgtg

SEQ ID NO: 42638 - DNA, 20 bp, synthetic construct
  misc_feature 1..20: note = Description of Artificial Sequence: Synthetic oligonucleotide
  misc_feature 1..20: note = Target: SCN10A; (-) strand; PAM type: YTN; PAM sequence: TTT
  source 1..20: mol_type = other DNA
gggggtgaagatgttgatgt

SEQ ID NO: 42639 - DNA, 20 bp, synthetic construct
  misc_feature 1..20: note = Description of Artificial Sequence: Synthetic oligonucleotide
  misc_feature 1..20: note = Target: SCN10A; (-) strand; PAM type: YTN; PAM sequence: TTG
  source 1..20: mol_type = other DNA
ggaatggatgaacaggtttg

SEQ ID NO: 42640 - DNA, 20 bp, synthetic construct
  misc_feature 1..20: note = Description of Artificial Sequence: Synthetic oligonucleotide
  misc_feature 1..20: note = Target: SCN10A; (-) strand; PAM type: YTN; PAM sequence: TTT
  source 1..20: mol_type = other DNA
gggaatggatgaacaggttt

SEQ ID NO: 42641 - DNA, 20 bp, synthetic construct
  misc_feature 1..20: note = Description of Artificial Sequence: Synthetic oligonucleotide
  misc_feature 1..20: note = Target: SCN10A; (-) strand; PAM type: YTN; PAM sequence: TTT
  source 1..20: mol_type = other DNA
tgggaatggatgaacaggtt

SEQ ID NO: 42642 - DNA, 20 bp, synthetic construct
  misc_feature 1..20: note = Description of Artificial Sequence: Synthetic oligonucleotide
  misc_feature 1..20: note = Target: SCN10A; (-) strand; PAM type: YTN; PAM sequence: TTT
  source 1..20: mol_type = other DNA
ttgggaatggatgaacaggt

SEQ ID NO: 42643 - DNA, 20 bp, synthetic construct
  misc_feature 1..20: note = Description of Artificial Sequence: Synthetic oligonucleotide
  misc_feature 1..20: note = Target: SCN10A; (-) strand; PAM type: YTN; PAM sequence: TTT
  source 1..20: mol_type = other DNA
tttgggaatggatgaacagg

SEQ ID NO: 42644 - DNA, 20 bp, synthetic construct
  misc_feature 1..20: note = Description of Artificial Sequence: Synthetic oligonucleotide
  misc_feature 1..20: note = Target: SCN10A; (-) strand; PAM type: YTN; PAM sequence: CTT
  source 1..20: mol_type = other DNA
ttttgggaatggatgaacag

SEQ ID NO: 42645 - DNA, 20 bp, synthetic construct
  misc_feature 1..20: note = Description of Artificial Sequence: Synthetic oligonucleotide
  misc_feature 1..20: note = Target: SCN10A; (-) strand; PAM type: YTN; PAM sequence: CTA
  source 1..20: mol_type = other DNA
agatagcacttttttgggaa

SEQ ID NO: 42646 - DNA, 20 bp, synthetic construct
  misc_feature 1..20: note = Description of Artificial Sequence: Synthetic oligonucleotide
  misc_feature 1..20: note = Target: SCN10A; (-) strand; PAM type: YTN; PAM sequence: CTG
  source 1..20: mol_type = other DNA
agaggccctaagatagcact

SEQ ID NO: 42647 - DNA, 20 bp, synthetic construct
  misc_feature 1..20: note = Description of Artificial Sequence: Synthetic oligonucleotide
  misc_feature 1..20: note = Target: SCN10A; (-) strand; PAM type: YTN; PAM sequence: CTC
  source 1..20: mol_type = other DNA
tgagaggccctaagatagca

SEQ ID NO: 42648 - DNA, 20 bp, synthetic construct
  misc_feature 1..20: note = Description of Artificial Sequence: Synthetic oligonucleotide
  misc_feature 1..20: note = Target: SCN10A; (-) strand; PAM type: YTN; PAM sequence: CTG
  source 1..20: mol_type = other DNA
ccagaagatagaaaacatca

SEQ ID NO: 42649 - DNA, 20 bp, synthetic construct
  misc_feature 1..20: note = Description of Artificial Sequence: Synthetic oligonucleotide
  misc_feature 1..20: note = Target: SCN10A; (-) strand; PAM type: YTN; PAM sequence: TTC
  source 1..20: mol_type = other DNA
tgccagaagatagaaaacat

SEQ ID NO: 42650 - DNA, 20 bp, synthetic construct
  misc_feature 1..20: note = Description of Artificial Sequence: Synthetic oligonucleotide
  misc_feature 1..20: note = Target: SCN10A; (-) strand; PAM type: YTN; PAM sequence: CTT
  source 1..20: mol_type = other DNA
ctgccagaagatagaaaaca

SEQ ID NO: 42651 - DNA, 20 bp, synthetic construct
  misc_feature 1..20: note = Description of Artificial Sequence: Synthetic oligonucleotide
  misc_feature 1..20: note = Target: SCN10A; (-) strand; PAM type: YTN; PAM sequence: CTC
  source 1..20: mol_type = other DNA
agtcttctgccagaagatag

SEQ ID NO: 42652 - DNA, 20 bp, synthetic construct
  misc_feature 1..20: note = Description of Artificial Sequence: Synthetic oligonucleotide
  misc_feature 1..20: note = Target: SCN10A; (-) strand; PAM type: YTN; PAM sequence: TTC
  source 1..20: mol_type = other DNA
tcagtcttctgccagaagat

SEQ ID NO: 42653 - DNA, 20 bp, synthetic construct
  misc_feature 1..20: note = Description of Artificial Sequence: Synthetic oligonucleotide
  misc_feature 1..20: note = Target: SCN10A; (-) strand; PAM type: YTN; PAM sequence: CTT
  source 1..20: mol_type = other DNA
ctcagtcttctgccagaaga

SEQ ID NO: 42654 - DNA, 20 bp, synthetic construct
  misc_feature 1..20: note = Description of Artificial Sequence: Synthetic oligonucleotide
  misc_feature 1..20: note = Target: SCN10A; (-) strand; PAM type: YTN; PAM sequence: TTC
  source 1..20: mol_type = other DNA
ttctcagtcttctgccagaa

SEQ ID NO: 42655 - DNA, 20 bp, synthetic construct
  misc_feature 1..20: note = Description of Artificial Sequence: Synthetic oligonucleotide
  misc_feature 1..20: note = Target: SCN10A; (-) strand; PAM type: YTN; PAM sequence: CTA
  source 1..20: mol_type = other DNA
agttcttctcagtcttctgc

SEQ ID NO: 42656 - DNA, 20 bp, synthetic construct
  misc_feature 1..20: note = Description of Artificial Sequence: Synthetic oligonucleotide
  misc_feature 1..20: note = Target: SCN10A; (-) strand; PAM type: YTN; PAM sequence: CTA
  source 1..20: mol_type = other DNA
cccataccacacatgatatc

SEQ ID NO: 42657 - DNA, 20 bp, synthetic construct
  misc_feature 1..20: note = Description of Artificial Sequence: Synthetic oligonucleotide
  misc_feature 1..20: note = Target: SCN10A; (-) strand; PAM type: YTN; PAM sequence: TTA
  source 1..20: mol_type = other DNA
aatgtactacccataccaca

SEQ ID NO: 42658 - DNA, 20 bp, synthetic construct
  misc_feature 1..20: note = Description of Artificial Sequence: Synthetic oligonucleotide
  misc_feature 1..20: note = Target: SCN10A; (-) strand; PAM type: YTN; PAM sequence: CTC
  source 1..20: mol_type = other DNA
cattaaatgtactacccata

SEQ ID NO: 42659 - DNA, 20 bp, synthetic construct
  misc_feature 1..20: note = Description of Artificial Sequence: Synthetic oligonucleotide
  misc_feature 1..20: note = Target: SCN10A; (-) strand; PAM type: YTN; PAM sequence: TTC
  source 1..20: mol_type = other DNA
ctccattaaatgtactaccc

SEQ ID NO: 42660 - DNA, 20 bp, synthetic construct
  misc_feature 1..20: note = Description of Artificial Sequence: Synthetic oligonucleotide
  misc_feature 1..20: note = Target: SCN10A; (-) strand; PAM type: YTN; PAM sequence: TTG
  source 1..20: mol_type = other DNA
cgttcctccattaaatgtac

SEQ ID NO: 42661 - DNA, 20 bp, synthetic construct
  misc_feature 1..20: note = Description of Artificial Sequence: Synthetic oligonucleotide
  misc_feature 1..20: note = Target: SCN10A; (-) strand; PAM type: YTN; PAM sequence: TTT
  source 1..20: mol_type = other DNA
gcgttcctccattaaatgta

SEQ ID NO: 42662 - DNA, 20 bp, synthetic construct
  misc_feature 1..20: note = Description of Artificial Sequence: Synthetic oligonucleotide
  misc_feature 1..20: note = Target: SCN10A; (-) strand; PAM type: YTN; PAM sequence: CTT
  source 1..20: mol_type = other DNA
tgcgttcctccattaaatgt

SEQ ID NO: 42663 - DNA, 20 bp, synthetic construct
  misc_feature 1..20: note = Description of Artificial Sequence: Synthetic oligonucleotide
  misc_feature 1..20: note = Target: SCN10A; (-) strand; PAM type: YTN; PAM sequence: CTC
  source 1..20: mol_type = other DNA
aagagacatggctttgcgtt

SEQ ID NO: 42664 - DNA, 20 bp, synthetic construct
  misc_feature 1..20: note = Description of Artificial Sequence: Synthetic oligonucleotide
  misc_feature 1..20: note = Target: SCN10A; (-) strand; PAM type: YTN; PAM sequence: TTC
  source 1..20: mol_type = other DNA
ataaagatctcaagagacat

SEQ ID NO: 42665 - DNA, 20 bp, synthetic construct
  misc_feature 1..20: note = Description of Artificial Sequence: Synthetic oligonucleotide
  misc_feature 1..20: note = Target: SCN10A; (-) strand; PAM type: YTN; PAM sequence: TTT
  source 1..20: mol_type = other DNA
cataaagatctcaagagaca

SEQ ID NO: 42666 - DNA, 20 bp, synthetic construct
  misc_feature 1..20: note = Description of Artificial Sequence: Synthetic oligonucleotide
  misc_feature 1..20: note = Target: SCN10A; (-) strand; PAM type: YTN; PAM sequence: TTT
  source 1..20: mol_type = other DNA
tcataaagatctcaagagac

SEQ ID NO: 42667 - DNA, 20 bp, synthetic construct
  misc_feature 1..20: note = Description of Artificial Sequence: Synthetic oligonucleotide
  misc_feature 1..20: note = Target: SCN10A; (-) strand; PAM type: YTN; PAM sequence: TTT
  source 1..20: mol_type = other DNA
ttcataaagatctcaagaga

SEQ ID NO: 42668 - DNA, 20 bp, synthetic construct
  misc_feature 1..20: note = Description of Artificial Sequence: Synthetic oligonucleotide
  misc_feature 1..20: note = Target: SCN10A; (-) strand; PAM type: YTN; PAM sequence: TTT
  source 1..20: mol_type = other DNA
tttcataaagatctcaagag

SEQ ID NO: 42669 - DNA, 20 bp, synthetic construct
  misc_feature 1..20: note = Description of Artificial Sequence: Synthetic oligonucleotide
  misc_feature 1..20: note = Target: SCN10A; (-) strand; PAM type: YTN; PAM sequence: CTT
  source 1..20: mol_type = other DNA
ttttcataaagatctcaaga

SEQ ID NO: 42670 - DNA, 20 bp, synthetic construct
  misc_feature 1..20: note = Description of Artificial Sequence: Synthetic oligonucleotide
  misc_feature 1..20: note = Target: SCN10A; (-) strand; PAM type: YTN; PAM sequence: CTC
  source 1..20: mol_type = other DNA
cttttttcataaagatctca

SEQ ID NO: 42671 - DNA, 20 bp, synthetic construct
  misc_feature 1..20: note = Description of Artificial Sequence: Synthetic oligonucleotide
  misc_feature 1..20: note = Target: SCN10A; (-) strand; PAM type: YTN; PAM sequence: TTC
  source 1..20: mol_type = other DNA
actccttttttcataaagat

SEQ ID NO: 42672 - DNA, 20 bp, synthetic construct
  misc_feature 1..20: note = Description of Artificial Sequence: Synthetic oligonucleotide
  misc_feature 1..20: note = Target: SCN10A; (-) strand; PAM type: YTN; PAM sequence: TTT
  source 1..20: mol_type = other DNA
cactccttttttcataaaga

SEQ ID NO: 42673 - DNA, 20 bp, synthetic construct
  misc_feature 1..20: note = Description of Artificial Sequence: Synthetic oligonucleotide
  misc_feature 1..20: note = Target: SCN10A; (-) strand; PAM type: YTN; PAM sequence: CTA
  source 1..20: mol_type = other DNA
gtttcactccttttttcata

SEQ ID NO: 42674 - DNA, 20 bp, synthetic construct
  misc_feature 1..20: note = Description of Artificial Sequence: Synthetic oligonucleotide
  misc_feature 1..20: note = Target: SCN10A; (-) strand; PAM type: YTN; PAM sequence: CTC
  source 1..20: mol_type = other DNA
tagtttcactccttttttca

SEQ ID NO: 42675 - DNA, 20 bp, synthetic construct
  misc_feature 1..20: note = Description of Artificial Sequence: Synthetic oligonucleotide
  misc_feature 1..20: note = Target: SCN10A; (-) strand; PAM type: YTN; PAM sequence: TTA
  source 1..20: mol_type = other DNA
gggccagactctagtttcac

SEQ ID NO: 42676 - DNA, 20 bp, synthetic construct
  misc_feature 1..20: note = Description of Artificial Sequence: Synthetic oligonucleotide
  misc_feature 1..20: note = Target: SCN10A; (-) strand; PAM type: YTN; PAM sequence: TTG
  source 1..20: mol_type = other DNA
ggcaaaaattagggccagac

SEQ ID NO: 42677 - DNA, 20 bp, synthetic construct
  misc_feature 1..20: note = Description of Artificial Sequence: Synthetic oligonucleotide
  misc_feature 1..20: note = Target: SCN10A; (-) strand; PAM type: YTN; PAM sequence: TTA
  source 1..20: mol_type = other DNA
aagattgggcaaaaattagg

SEQ ID NO: 42678 - DNA, 20 bp, synthetic construct
  misc_feature 1..20: note = Description of Artificial Sequence: Synthetic oligonucleotide
  misc_feature 1..20: note = Target: SCN10A; (-) strand; PAM type: YTN; PAM sequence: TTT
  source 1..20: mol_type = other DNA
aaagattgggcaaaaattag

SEQ ID NO: 42679 - DNA, 20 bp, synthetic construct
  misc_feature 1..20: note = Description of Artificial Sequence: Synthetic oligonucleotide
  misc_feature 1..20: note = Target: SCN10A; (-) strand; PAM type: YTN; PAM sequence: CTC
  source 1..20: mol_type = other DNA
gagtttaaagattgggcaaa

SEQ ID NO: 42680 - DNA, 20 bp, synthetic construct
  misc_feature 1..20: note = Description of Artificial Sequence: Synthetic oligonucleotide
  misc_feature 1..20: note = Target: SCN10A; (-) strand; PAM type: YTN; PAM sequence: TTA
  source 1..20: mol_type = other DNA
tcccactcgagtttaaagat

SEQ ID NO: 42681 - DNA, 20 bp, synthetic construct
  misc_feature 1..20: note = Description of Artificial Sequence: Synthetic oligonucleotide
  misc_feature 1..20: note = Target: SCN10A; (-) strand; PAM type: YTN; PAM sequence: CTG
  source 1..20: mol_type = other DNA
tcaggatccaagatgcagtc

SEQ ID NO: 42682 - DNA, 20 bp, synthetic construct
  misc_feature 1..20: note = Description of Artificial Sequence: Synthetic oligonucleotide
  misc_feature 1..20: note = Target: SCN10A; (-) strand; PAM type: YTN; PAM sequence: CTC
  source 1..20: mol_type = other DNA
ccctgtcaggatccaagatg

SEQ ID NO: 42683 - DNA, 20 bp, synthetic construct
  misc_feature 1..20: note = Description of Artificial Sequence: Synthetic oligonucleotide
  misc_feature 1..20: note = Target: SCN10A; (-) strand; PAM type: YTN; PAM sequence: CTA
  source 1..20: mol_type = other DNA
caggtatagagaggaaatga

SEQ ID NO: 42684 - DNA, 20 bp, synthetic construct
  misc_feature 1..20: note = Description of Artificial Sequence: Synthetic oligonucleotide
  misc_feature 1..20: note = Target: SCN10A; (-) strand; PAM type: YTN; PAM sequence: CTA
  source 1..20: mol_type = other DNA
ccccacgcctacaggtatag

SEQ ID NO: 42685 - DNA, 20 bp, synthetic construct
  misc_feature 1..20: note = Description of Artificial Sequence: Synthetic oligonucleotide
  misc_feature 1..20: note = Target: SCN10A; (-) strand; PAM type: YTN; PAM sequence: TTC
  source 1..20: mol_type = other DNA
taccccacgcctacaggtat

SEQ ID NO: 42686 - DNA, 20 bp, synthetic construct
  misc_feature 1..20: note = Description of Artificial Sequence: Synthetic oligonucleotide
  misc_feature 1..20: note = Target: SCN10A; (-) strand; PAM type: YTN; PAM sequence: CTA
  source 1..20: mol_type = other DNA
tattctaccccacgcctaca

SEQ ID NO: 42687 - DNA, 20 bp, synthetic construct
  misc_feature 1..20: note = Description of Artificial Sequence: Synthetic oligonucleotide
  misc_feature 1..20: note = Target: SCN10A; (-) strand; PAM type: YTN; PAM sequence: CTC
  source 1..20: mol_type = other DNA
cagtatcaccctatattcta

SEQ ID NO: 42688 - DNA, 20 bp, synthetic construct
  misc_feature 1..20: note = Description of Artificial Sequence: Synthetic oligonucleotide
  misc_feature 1..20: note = Target: SCN10A; (-) strand; PAM type: YTN; PAM sequence: CTA
  source 1..20: mol_type = other DNA
ggtcgcagtagatctccagt

SEQ ID NO: 42689 - DNA, 20 bp, synthetic construct
  misc_feature 1..20: note = Description of Artificial Sequence: Synthetic oligonucleotide
  misc_feature 1..20: note = Target: SCN10A; (-) strand; PAM type: YTN; PAM sequence: TTA
  source 1..20: mol_type = other DNA
tgtatcatggtctaggtcgc

SEQ ID NO: 42690 - DNA, 20 bp, synthetic construct
  misc_feature 1..20: note = Description of Artificial Sequence: Synthetic oligonucleotide
  misc_feature 1..20: note = Target: SCN10A; (-) strand; PAM type: YTN; PAM sequence: TTG
  source 1..20: mol_type = other DNA
tgtggttatgtatcatggtc

SEQ ID NO: 42691 - DNA, 20 bp, synthetic construct
  misc_feature 1..20: note = Description of Artificial Sequence: Synthetic oligonucleotide
  misc_feature 1..20: note = Target: SCN10A; (-) strand; PAM type: YTN; PAM sequence: CTT
  source 1..20: mol_type = other DNA
gtgtggttatgtatcatggt

SEQ ID NO: 42692 - DNA, 20 bp, synthetic construct
  misc_feature 1..20: note = Description of Artificial Sequence: Synthetic oligonucleotide
  misc_feature 1..20: note = Target: SCN10A; (-) strand; PAM type: YTN; PAM sequence: TTA
  source 1..20: mol_type = other DNA
aacttgtgtggttatgtatc

SEQ ID NO: 42693 - DNA, 20 bp, synthetic construct
  misc_feature 1..20: note = Description of Artificial Sequence: Synthetic oligonucleotide
  misc_feature 1..20: note = Target: SCN10A; (-) strand; PAM type: YTN; PAM sequence: TTA
  source 1..20: mol_type = other DNA
gaacccagggattaaacttg

SEQ ID NO: 42694 - DNA, 20 bp, synthetic construct
  misc_feature 1..20: note = Description of Artificial Sequence: Synthetic oligonucleotide
  misc_feature 1..20: note = Target: SCN10A; (-) strand; PAM type: YTN; PAM sequence: CTA
  source 1..20: mol_type = other DNA
agtgacagtaagggtagtta

SEQ ID NO: 42695 - DNA, 20 bp, synthetic construct
  misc_feature 1..20: note = Description of Artificial Sequence: Synthetic oligonucleotide
  misc_feature 1..20: note = Target: SCN10A; (-) strand; PAM type: YTN; PAM sequence: TTA
  source 1..20: mol_type = other DNA
agctaagtgacagtaagggt

SEQ ID NO: 42696 - DNA, 20 bp, synthetic construct
  misc_feature 1..20: note = Description of Artificial Sequence: Synthetic oligonucleotide
  misc_feature 1..20: note = Target: SCN10A; (-) strand; PAM type: YTN; PAM sequence: TTG
  source 1..20: mol_type = other DNA
gaggcaggttaagctaagtg

SEQ ID NO: 42697 - DNA, 20 bp, synthetic construct
  misc_feature 1..20: note = Description of Artificial Sequence: Synthetic oligonucleotide
  misc_feature 1..20: note = Target: SCN10A; (-) strand; PAM type: YTN; PAM sequence: TTC
  source 1..20: mol_type = other DNA
aagtacaggattggaggcag

SEQ ID NO: 42698 - DNA, 20 bp, synthetic construct
  misc_feature 1..20: note = Description of Artificial Sequence: Synthetic oligonucleotide
  misc_feature 1..20: note = Target: SCN10A; (-) strand; PAM type: YTN; PAM sequence: TTA
  source 1..20: mol_type = other DNA
gagttcaagtacaggattgg

SEQ ID NO: 42699 - DNA, 20 bp, synthetic construct
  misc_feature 1..20: note = Description of Artificial Sequence: Synthetic oligonucleotide
  misc_feature 1..20: note = Target: SCN10A; (-) strand; PAM type: YTN; PAM sequence: TTT
  source 1..20: mol_type = other DNA
agagttcaagtacaggattg

SEQ ID NO: 42700 - DNA, 20 bp, synthetic construct
  misc_feature 1..20: note = Description of Artificial Sequence: Synthetic oligonucleotide
  misc_feature 1..20: note = Target: SCN10A; (-) strand; PAM type: YTN; PAM sequence: TTT
  source 1..20: mol_type = other DNA
tagagttcaagtacaggatt

SEQ ID NO: 42701 - DNA, 20 bp, synthetic construct
  misc_feature 1..20: note = Description of Artificial Sequence: Synthetic oligonucleotide
  misc_feature 1..20: note = Target: SCN10A; (-) strand; PAM type: YTN; PAM sequence: CTC
  source 1..20: mol_type = other DNA
caacagttttagagttcaag

SEQ ID NO: 42702 - DNA, 20 bp, synthetic construct
  misc_feature 1..20: note = Description of Artificial Sequence: Synthetic oligonucleotide
  misc_feature 1..20: note = Target: SCN10A; (-) strand; PAM type: YTN; PAM sequence: TTC
  source 1..20: mol_type = other DNA
tccaacagttttagagttca

SEQ ID NO: 42703 - DNA, 20 bp, synthetic construct
  misc_feature 1..20: note = Description of Artificial Sequence: Synthetic oligonucleotide
  misc_feature 1..20: note = Target: SCN10A; (-) strand; PAM type: YTN; PAM sequence: TTT
  source 1..20: mol_type = other DNA
ctccaacagttttagagttc

SEQ ID NO: 42704 - DNA, 20 bp, synthetic construct
  misc_feature 1..20: note = Description of Artificial Sequence: Synthetic oligonucleotide
  misc_feature 1..20: note = Target: SCN10A; (-) strand; PAM type: YTN; PAM sequence: CTG
  source 1..20: mol_type = other DNA
agtttctccaacagttttag

SEQ ID NO: 42705 - DNA, 20 bp, synthetic construct
  misc_feature 1..20: note = Description of Artificial Sequence: Synthetic oligonucleotide
  misc_feature 1..20: note = Target: SCN10A; (-) strand; PAM type: YTN; PAM sequence: TTG
  source 1..20: mol_type = other DNA
ggggaagcactgagtttctc

SEQ ID NO: 42706 - DNA, 20 bp, synthetic construct
  misc_feature 1..20: note = Description of Artificial Sequence: Synthetic oligonucleotide
  misc_feature 1..20: note = Target: SCN10A; (-) strand; PAM type: YTN; PAM sequence: CTG
  source 1..20: mol_type = other DNA
ttgggggaagcactgagttt

SEQ ID NO: 42707 - DNA, 20 bp, synthetic construct
  misc_feature 1..20: note = Description of Artificial Sequence: Synthetic oligonucleotide
  misc_feature 1..20: note = Target: SCN10A; (-) strand; PAM type: YTN; PAM sequence: TTG
  source 1..20: mol_type = other DNA
aaatgaatctgttgggggaa

SEQ ID NO: 42708 - DNA, 20 bp, synthetic construct
  misc_feature 1..20: note = Description of Artificial Sequence: Synthetic oligonucleotide
  misc_feature 1..20: note = Target: SCN10A; (-) strand; PAM type: YTN; PAM sequence: TTT
  source 1..20: mol_type = other DNA
gaaatgaatctgttggggga

SEQ ID NO: 42709 - DNA, 20 bp, synthetic construct
  misc_feature 1..20: note = Description of Artificial Sequence: Synthetic oligonucleotide
  misc_feature 1..20: note = Target: SCN10A; (-) strand; PAM type: YTN; PAM sequence: CTA
  source 1..20: mol_type = other DNA
tttgaaatgaatctgttggg

SEQ ID NO: 42710 - DNA, 20 bp, synthetic construct
  misc_feature 1..20: note = Description of Artificial Sequence: Synthetic oligonucleotide
  misc_feature 1..20: note = Target: SCN10A; (-) strand; PAM type: YTN; PAM sequence: TTA
  source 1..20: mol_type = other DNA
cagctatttgaaatgaatct

SEQ ID NO: 42711 - DNA, 20 bp, synthetic construct
  misc_feature 1..20: note = Description of Artificial Sequence: Synthetic oligonucleotide
  misc_feature 1..20: note = Target: SCN10A; (-) strand; PAM type: YTN; PAM sequence: TTT
  source 1..20: mol_type = other DNA
acagctatttgaaatgaatc

SEQ ID NO: 42712 - DNA, 20 bp, synthetic construct
  misc_feature 1..20: note = Description of Artificial Sequence: Synthetic oligonucleotide
  misc_feature 1..20: note = Target: SCN10A; (-) strand; PAM type: YTN; PAM sequence: TTT
  source 1..20: mol_type = other DNA
tacagctatttgaaatgaat

SEQ ID NO: 42713 - DNA, 20 bp, synthetic construct
  misc_feature 1..20: note = Description of Artificial Sequence: Synthetic oligonucleotide
  misc_feature 1..20: note = Target: SCN10A; (-) strand; PAM type: YTN; PAM sequence: CTT
  source 1..20: mol_type = other DNA
ttacagctatttgaaatgaa

SEQ ID NO: 42714 - DNA, 20 bp, synthetic construct
  misc_feature 1..20: note = Description of Artificial Sequence: Synthetic oligonucleotide
  misc_feature 1..20: note = Target: SCN10A; (-) strand; PAM type: YTN; PAM sequence: CTG
  source 1..20: mol_type = other DNA
gagtaaacataccttttaca

SEQ ID NO: 42715 - DNA, 20 bp, synthetic construct
  misc_feature 1..20: note = Description of Artificial Sequence: Synthetic oligonucleotide
  misc_feature 1..20: note = Target: SCN10A; (-) strand; PAM type: YTN; PAM sequence: TTC
  source 1..20: mol_type = other DNA
tggagtaaacatacctttta

SEQ ID NO: 42716 - DNA, 20 bp, synthetic construct
  misc_feature 1..20: note = Description of Artificial Sequence: Synthetic oligonucleotide
  misc_feature 1..20: note = Target: SCN10A; (-) strand; PAM type: YTN; PAM sequence: CTT
  source 1..20: mol_type = other DNA
ctggagtaaacatacctttt

SEQ ID NO: 42717 - DNA, 20 bp, synthetic construct
  misc_feature 1..20: note = Description of Artificial Sequence: Synthetic oligonucleotide
  misc_feature 1..20: note = Target: SCN10A; (-) strand; PAM type: YTN; PAM sequence: CTG
  source 1..20: mol_type = other DNA
gtcttctggagtaaacatac

SEQ ID NO: 42718 - DNA, 20 bp, synthetic construct
  misc_feature 1..20: note = Description of Artificial Sequence: Synthetic oligonucleotide
  misc_feature 1..20: note = Target: SCN10A; (-) strand; PAM type: YTN; PAM sequence: CTC
  source 1..20: mol_type = other DNA
tggtcttctggagtaaacat

SEQ ID NO: 42719 - DNA, 20 bp, synthetic construct
  misc_feature 1..20: note = Description of Artificial Sequence: Synthetic oligonucleotide
  misc_feature 1..20: note = Target: SCN10A; (-) strand; PAM type: YTN; PAM sequence: TTC
  source 1..20: mol_type = other DNA
aaaagaagcaactctggtct

SEQ ID NO: 42720 - DNA, 20 bp, synthetic construct
  misc_feature 1..20: note = Description of Artificial Sequence: Synthetic oligonucleotide
  misc_feature 1..20: note = Target: SCN10A; (-) strand; PAM type: YTN; PAM sequence: CTA
  source 1..20: mol_type = other DNA
ggcccaaggaatgagaagtt

SEQ ID NO: 42721 - DNA, 20 bp, synthetic construct
  misc_feature 1..20: note = Description of Artificial Sequence: Synthetic oligonucleotide
  misc_feature 1..20: note = Target: SCN10A; (-) strand; PAM type: YTN; PAM sequence: TTC
  source 1..20: mol_type = other DNA
ctaggcccaaggaatgagaa

SEQ ID NO: 42722 - DNA, 20 bp, synthetic construct
  misc_feature 1..20: note = Description of Artificial Sequence: Synthetic oligonucleotide
  misc_feature 1..20: note = Target: SCN10A; (-) strand; PAM type: YTN; PAM sequence: TTG
  source 1..20: mol_type = other DNA
ggatgagggtgatgagggtt

SEQ ID NO: 42723 - DNA, 20 bp, synthetic construct
  misc_feature 1..20: note = Description of Artificial Sequence: Synthetic oligonucleotide
  misc_feature 1..20: note = Target: SCN10A; (-) strand; PAM type: YTN; PAM sequence: TTG
  source 1..20: mol_type = other DNA
acgttgggatgagggtgatg

SEQ ID NO: 42724 - DNA, 20 bp, synthetic construct
  misc_feature 1..20: note = Description of Artificial Sequence: Synthetic oligonucleotide
  misc_feature 1..20: note = Target: SCN10A; (-) strand; PAM type: YTN; PAM sequence: CTG
  source 1..20: mol_type = other DNA
ggttgacgttgggatgaggg

SEQ ID NO: 42725 - DNA, 20 bp, synthetic construct
  misc_feature 1..20: note = Description of Artificial Sequence: Synthetic oligonucleotide
  misc_feature 1..20: note = Target: SCN10A; (-) strand; PAM type: YTN; PAM sequence: TTA
  source 1..20: mol_type = other DNA
tggaagagaagatctgggtt

SEQ ID NO: 42726 - DNA, 20 bp, synthetic construct
  misc_feature 1..20: note = Description of Artificial Sequence: Synthetic oligonucleotide
  misc_feature 1..20: note = Target: SCN10A; (-) strand; PAM type: YTN; PAM sequence: TTT
  source 1..20: mol_type = other DNA
atggaagagaagatctgggt

SEQ ID NO: 42727 - DNA, 20 bp, synthetic construct
  misc_feature 1..20: note = Description of Artificial Sequence: Synthetic oligonucleotide
  misc_feature 1..20: note = Target: SCN10A; (-) strand; PAM type: YTN; PAM sequence: CTG
  source 1..20: mol_type = other DNA
tttatggaagagaagatctg

SEQ ID NO: 42728 - DNA, 20 bp, synthetic construct
  misc_feature 1..20: note = Description of Artificial Sequence: Synthetic oligonucleotide
  misc_feature 1..20: note = Target: SCN10A; (-) strand; PAM type: YTN; PAM sequence: CTG
  source 1..20: mol_type = other DNA
agggagtgctgtttatggaa

SEQ ID NO: 42729 - DNA, 20 bp, synthetic construct
  misc_feature 1..20: note = Description of Artificial Sequence: Synthetic oligonucleotide
  misc_feature 1..20: note = Target: SCN10A; (-) strand; PAM type: YTN; PAM sequence: CTG
  source 1..20: mol_type = other DNA
tgtcaggcaggggcctgagg

SEQ ID NO: 42730 - DNA, 20 bp, synthetic construct
  misc_feature 1..20: note = Description of Artificial Sequence: Synthetic oligonucleotide
  misc_feature 1..20: note = Target: SCN10A; (-) strand; PAM type: YTN; PAM sequence: CTA
  source 1..20: mol_type = other DNA
tgcctgtgtcaggcaggggc

SEQ ID NO: 42731 - DNA, 20 bp, synthetic construct
  misc_feature 1..20: note = Description of Artificial Sequence: Synthetic oligonucleotide
  misc_feature 1..20: note = Target: SCN10A; (-) strand; PAM type: YTN; PAM sequence: CTG
  source 1..20: mol_type = other DNA
tgaatccaacatgacagtct

SEQ ID NO: 42732 - DNA, 20 bp, synthetic construct
  misc_feature 1..20: note = Description of Artificial Sequence: Synthetic oligonucleotide
  misc_feature 1..20: note = Target: SCN10A; (-) strand; PAM type: YTN; PAM sequence: CTG
  source 1..20: mol_type = other DNA
tctgtgaatccaacatgaca

SEQ ID NO: 42733 - DNA, 20 bp, synthetic construct
  misc_feature 1..20: note = Description of Artificial Sequence: Synthetic oligonucleotide
  misc_feature 1..20: note = Target: SCN10A; (-) strand; PAM type: YTN; PAM sequence: CTA
  source 1..20: mol_type = other DNA
gcacagcctgtctgtgaatc

SEQ ID NO: 42734 - DNA, 20 bp, synthetic construct
  misc_feature 1..20: note = Description of Artificial Sequence: Synthetic oligonucleotide
  misc_feature 1..20: note = Target: SCN10A; (-) strand; PAM type: YTN; PAM sequence: CTC
  source 1..20: mol_type = other DNA
tagcacagcctgtctgtgaa

SEQ ID NO: 42735 - DNA, 20 bp, synthetic construct
  misc_feature 1..20: note = Description of Artificial Sequence: Synthetic oligonucleotide
  misc_feature 1..20: note = Target: SCN10A; (-) strand; PAM type: YTN; PAM sequence: TTC
  source 1..20: mol_type = other DNA
ctctagcacagcctgtctgt

SEQ ID NO: 42736 - DNA, 20 bp, synthetic construct
  misc_feature 1..20: note = Description of Artificial Sequence: Synthetic oligonucleotide
  misc_feature 1..20: note = Target: SCN10A; (-) strand; PAM type: YTN; PAM sequence: TTT
  source 1..20: mol_type = other DNA
cctctagcacagcctgtctg

SEQ ID NO: 42737 - DNA, 20 bp, synthetic construct
  misc_feature 1..20: note = Description of Artificial Sequence: Synthetic oligonucleotide
  misc_feature 1..20: note = Target: SCN10A; (-) strand; PAM type: YTN; PAM sequence: CTG
  source 1..20: mol_type = other DNA
gtgagccccagaggtttcct

SEQ ID NO: 42738 - DNA, 20 bp, synthetic construct
  misc_feature 1..20: note = Description of Artificial Sequence: Synthetic oligonucleotide
  misc_feature 1..20: note = Target: SCN10A; (-) strand; PAM type: YTN; PAM sequence: CTC
  source 1..20: mol_type = other DNA
caagaagccccagaagccca

SEQ ID NO: 42739 - DNA, 20 bp, synthetic construct
  misc_feature 1..20: note = Description of Artificial Sequence: Synthetic oligonucleotide
  misc_feature 1..20: note = Target: SCN10A; (-) strand; PAM type: YTN; PAM sequence: TTG
  source 1..20: mol_type = other DNA
ggctccaagaagccccagaa

SEQ ID NO: 42740 - DNA, 20 bp, synthetic construct
  misc_feature 1..20: note = Description of Artificial Sequence: Synthetic oligonucleotide
  misc_feature 1..20: note = Target: SCN10A; (-) strand; PAM type: YTN; PAM sequence: CTA
  source 1..20: mol_type = other DNA
caatgccatgaagaagttgg

SEQ ID NO: 42741 - DNA, 20 bp, synthetic construct
  misc_feature 1..20: note = Description of Artificial Sequence: Synthetic oligonucleotide
  misc_feature 1..20: note = Target: SCN10A; (-) strand; PAM type: YTN; PAM sequence: TTC
  source 1..20: mol_type = other DNA
atgacagaggagcagaagaa

SEQ ID NO: 42742 - DNA, 20 bp, synthetic construct
  misc_feature 1..20: note = Description of Artificial Sequence: Synthetic oligonucleotide
  misc_feature 1..20: note = Target: SCN10A; (-) strand; PAM type: YTN; PAM sequence: CTT
  source 1..20: mol_type = other DNA
catgacagaggagcagaaga

SEQ ID NO: 42743 - DNA, 20 bp, synthetic construct
  misc_feature 1..20: note = Description of Artificial Sequence: Synthetic oligonucleotide
  misc_feature 1..20: note = Target: SCN10A; (-) strand; PAM type: YTN; PAM sequence: TTA
  source 1..20: mol_type = other DNA
gggggccaggacatcttcat

SEQ ID NO: 42744 - DNA, 20 bp, synthetic construct
  misc_feature 1..20: note = Description of Artificial Sequence: Synthetic oligonucleotide
  misc_feature 1..20: note = Target: SCN10A; (-) strand; PAM type: YTN; PAM sequence: CTT
  source 1..20: mol_type = other DNA
agggggccaggacatcttca

SEQ ID NO: 42745 - DNA, 20 bp, synthetic construct
  misc_feature 1..20: note = Description of Artificial Sequence: Synthetic oligonucleotide
  misc_feature 1..20: note = Target: SCN10A; (-) strand; PAM type: YTN; PAM sequence: CTG
  source 1..20: mol_type = other DNA
cacttagggggccaggacat

SEQ ID NO: 42746 - DNA, 20 bp, synthetic construct
  misc_feature 1..20: note = Description of Artificial Sequence: Synthetic oligonucleotide
  misc_feature 1..20: note = Target: SCN10A; (-) strand; PAM type: YTN; PAM sequence: CTC
  source 1..20: mol_type = other DNA
tgcacttagggggccaggac

SEQ ID NO: 42747 - DNA, 20 bp, synthetic construct
  misc_feature 1..20: note = Description of Artificial Sequence: Synthetic oligonucleotide
  misc_feature 1..20: note = Target: SCN10A; (-) strand; PAM type: YTN; PAM sequence: CTC
  source 1..20: mol_type = other DNA
tctgcacttagggggccagg

SEQ ID NO: 42748 - DNA, 20 bp, synthetic construct
  misc_feature 1..20: note = Description of Artificial Sequence: Synthetic oligonucleotide
  misc_feature 1..20: note = Target: SCN10A; (-) strand; PAM type: YTN; PAM sequence: TTA
  source 1..20: mol_type = other DNA
gtaacagtgtggccctctct

SEQ ID NO: 42749 - DNA, 20 bp, synthetic construct
  misc_feature 1..20: note = Description of Artificial Sequence: Synthetic oligonucleotide
  misc_feature 1..20: note = Target: SCN10A; (-) strand; PAM type: YTN; PAM sequence: TTT
  source 1..20: mol_type = other DNA
agtaacagtgtggccctctc

SEQ ID NO: 42750 - DNA, 20 bp, synthetic construct
  misc_feature 1..20: note = Description of Artificial Sequence: Synthetic oligonucleotide
  misc_feature 1..20: note = Target: SCN10A; (-) strand; PAM type: YTN; PAM sequence: CTT
  source 1..20: mol_type = other DNA
tagtaacagtgtggccctct

SEQ ID NO: 42751 - DNA, 20 bp, synthetic construct
  misc_feature 1..20: note = Description of Artificial Sequence: Synthetic oligonucleotide
  misc_feature 1..20: note = Target: SCN10A; (-) strand; PAM type: YTN; PAM sequence: TTG
  source 1..20: mol_type = other DNA
ctttagtaacagtgtggccc

SEQ ID NO: 42752 - DNA, 20 bp, synthetic construct
  misc_feature 1..20: note = Description of Artificial Sequence: Synthetic oligonucleotide
  misc_feature 1..20: note = Target: SCN10A; (-) strand; PAM type: YTN; PAM sequence: CTT
  source 1..20: mol_type = other DNA
gctttagtaacagtgtggcc

SEQ ID NO: 42753 - DNA, 20 bp, synthetic construct
  misc_feature 1..20: note = Description of Artificial Sequence: Synthetic oligonucleotide
  misc_feature 1..20: note = Target: SCN10A; (-) strand; PAM type: YTN; PAM sequence: CTC
  source 1..20: mol_type = other DNA
ttgctttagtaacagtgtgg

SEQ ID NO: 42754 - DNA, 20 bp, synthetic construct
  misc_feature 1..20: note = Description of Artificial Sequence: Synthetic oligonucleotide
  misc_feature 1..20: note = Target: SCN10A; (-) strand; PAM type: YTN; PAM sequence: TTC
  source 1..20: mol_type = other DNA
ctcttgctttagtaacagtg

SEQ ID NO: 42755 - DNA, 20 bp, synthetic construct
  misc_feature 1..20: note = Description of Artificial Sequence: Synthetic oligonucleotide
  misc_feature 1..20: note = Target: SCN10A; (-) strand; PAM type: YTN; PAM sequence: TTG
  source 1..20: mol_type = other DNA
gtatccgtagggggttcctc

SEQ ID NO: 42756 - DNA, 20 bp, synthetic construct
  misc_feature 1..20: note = Description of Artificial Sequence: Synthetic oligonucleotide
  misc_feature 1..20: note = Target: SCN10A; (-) strand; PAM type: YTN; PAM sequence: TTT
  source 1..20: mol_type = other DNA
ggtatccgtagggggttcct

SEQ ID NO: 42757 - DNA, 20 bp, synthetic construct
  misc_feature 1..20: note = Description of Artificial Sequence: Synthetic oligonucleotide
  misc_feature 1..20: note = Target: SCN10A; (-) strand; PAM type: YTN; PAM sequence: TTT
  source 1..20: mol_type = other DNA
tggtatccgtagggggttcc

SEQ ID NO: 42758 - DNA, 20 bp, synthetic construct
  misc_feature 1..20: note = Description of Artificial Sequence: Synthetic oligonucleotide
  misc_feature 1..20: note = Target: SCN10A; (-) strand; PAM type: YTN; PAM sequence: CTG
  source 1..20: mol_type = other DNA
attttggtatccgtaggggg

SEQ ID NO: 42759 - DNA, 20 bp, synthetic construct
  misc_feature 1..20: note = Description of Artificial Sequence: Synthetic oligonucleotide
  misc_feature 1..20: note = Target: SCN10A; (-) strand; PAM type: YTN; PAM sequence: TTC
  source 1..20: mol_type = other DNA
tgattttggtatccgtaggg

SEQ ID NO: 42760 - DNA, 20 bp, synthetic construct
  misc_feature 1..20: note = Description of Artificial Sequence: Synthetic oligonucleotide
  misc_feature 1..20: note = Target: SCN10A; (-) strand; PAM type: YTN; PAM sequence: CTG
  source 1..20: mol_type = other DNA
ttctgattttggtatccgta

SEQ ID NO: 42761 - DNA, 20 bp, synthetic construct
  misc_feature 1..20: note = Description of Artificial Sequence: Synthetic oligonucleotide
  misc_feature 1..20: note = Target: SCN10A; (-) strand; PAM type: YTN; PAM sequence: CTG
  source 1..20: mol_type = other DNA
cctgttctgattttggtatc

SEQ ID NO: 42762 - DNA, 20 bp, synthetic construct
  misc_feature 1..20: note = Description of Artificial Sequence: Synthetic oligonucleotide
  misc_feature 1..20: note = Target: SCN10A; (-) strand; PAM type: YTN; PAM sequence: CTC
  source 1..20: mol_type = other DNA
ctgcctgttctgattttggt

SEQ ID NO: 42763 - DNA, 20 bp, synthetic construct
  misc_feature 1..20: note = Description of Artificial Sequence: Synthetic oligonucleotide
  misc_feature 1..20: note = Target: SCN10A; (-) strand; PAM type: YTN; PAM sequence: CTC
  source 1..20: mol_type = other DNA
tcctgcctgttctgattttg

SEQ ID NO: 42764 - DNA, 20 bp, synthetic construct
  misc_feature 1..20: note = Description of Artificial Sequence: Synthetic oligonucleotide
  misc_feature 1..20: note = Target: SCN10A; (-) strand; PAM type: YTN; PAM sequence: TTC
  source 1..20: mol_type = other DNA
tctcctgcctgttctgattt

SEQ ID NO: 42765 - DNA, 20 bp, synthetic construct
  misc_feature 1..20: note = Description of Artificial Sequence: Synthetic oligonucleotide
  misc_feature 1..20: note = Target: SCN10A; (-) strand; PAM type: YTN; PAM sequence: TTT
  source 1..20: mol_type = other DNA
ctctcctgcctgttctgatt

SEQ ID NO: 42766 - DNA, 20 bp, synthetic construct
  misc_feature 1..20: note = Description of Artificial Sequence: Synthetic oligonucleotide
  misc_feature 1..20: note = Target: SCN10A; (-) strand; PAM type: YTN; PAM sequence: CTT
  source 1..20: mol_type = other DNA
tctctcctgcctgttctgat

SEQ ID NO: 42767 - DNA, 20 bp, synthetic construct
  misc_feature 1..20: note = Description of Artificial Sequence: Synthetic oligonucleotide
  misc_feature 1..20: note = Target: SCN10A; (-) strand; PAM type: YTN; PAM sequence: TTG
  source 1..20: mol_type = other DNA
atatgatcctttctctcctg

SEQ ID NO: 42768 - DNA, 20 bp, synthetic construct
  misc_feature 1..20: note = Description of Artificial Sequence: Synthetic oligonucleotide
  misc_feature 1..20: note = Target: SCN10A; (-) strand; PAM type: YTN; PAM sequence: CTG
  source 1..20: mol_type = other DNA
cagaggaggggagaaggttg

SEQ ID NO: 42769 - DNA, 20 bp, synthetic construct
  misc_feature 1..20: note = Description of Artificial Sequence: Synthetic oligonucleotide
  misc_feature 1..20: note = Target: SCN10A; (-) strand; PAM type: YTN; PAM sequence: CTA
  source 1..20: mol_type = other DNA
tctgcagaggaggggagaag

SEQ ID NO: 42770 - DNA, 20 bp, synthetic construct
  misc_feature 1..20: note = Description of Artificial Sequence: Synthetic oligonucleotide
  misc_feature 1..20: note = Target: SCN10A; (-) strand; PAM type: YTN; PAM sequence: TTG
  source 1..20: mol_type = other DNA
tctatctgcagaggagggga

SEQ ID NO: 42771 - DNA, 20 bp, synthetic construct
  misc_feature 1..20: note = Description of Artificial Sequence: Synthetic oligonucleotide
  misc_feature 1..20: note = Target: SCN10A; (-) strand; PAM type: YTN; PAM sequence: TTT
  source 1..20: mol_type = other DNA
gtctatctgcagaggagggg

SEQ ID NO: 42772 - DNA, 20 bp, synthetic construct
  misc_feature 1..20: note = Description of Artificial Sequence: Synthetic oligonucleotide
  misc_feature 1..20: note = Target: SCN10A; (-) strand; PAM type: YTN; PAM sequence: TTG
  source 1..20: mol_type = other DNA
gtttgtctatctgcagagga

SEQ ID NO: 42773 - DNA, 20 bp, synthetic construct
  misc_feature 1..20: note = Description of Artificial Sequence: Synthetic oligonucleotide
  misc_feature 1..20: note = Target: SCN10A; (-) strand; PAM type: YTN; PAM sequence: CTT
  source 1..20: mol_type = other DNA
ggtttgtctatctgcagagg

SEQ ID NO: 42774 - DNA, 20 bp, synthetic construct
  misc_feature 1..20: note = Description of Artificial Sequence: Synthetic oligonucleotide
  misc_feature 1..20: note = Target: SCN10A; (-) strand; PAM type: YTN; PAM sequence: CTG
  source 1..20: mol_type = other DNA
ggcttggtttgtctatctgc

SEQ ID NO: 42775 - DNA, 20 bp, synthetic construct
  misc_feature 1..20: note = Description of Artificial Sequence: Synthetic oligonucleotide
  misc_feature 1..20: note = Target: SCN10A; (-) strand; PAM type: YTN; PAM sequence: TTG
  source 1..20: mol_type = other DNA
atgctgggcttggtttgtct

SEQ ID NO: 42776 - DNA, 20 bp, synthetic construct
  misc_feature 1..20: note = Description of Artificial Sequence: Synthetic oligonucleotide
  misc_feature 1..20: note = Target: SCN10A; (-) strand; PAM type: YTN; PAM sequence: CTT
  source 1..20: mol_type = other DNA
gatgctgggcttggtttgtc

SEQ ID NO: 42777 - DNA, 20 bp, synthetic construct
  misc_feature 1..20: note = Description of Artificial Sequence: Synthetic oligonucleotide
  misc_feature 1..20: note = Target: SCN10A; (-) strand; PAM type: YTN; PAM sequence: CTC
  source 1..20: mol_type = other DNA
cttgatgctgggcttggttt

SEQ ID NO: 42778 - DNA, 20 bp, synthetic construct
  misc_feature 1..20: note = Description of Artificial Sequence: Synthetic oligonucleotide
  misc_feature 1..20: note = Target: SCN10A; (-) strand; PAM type: YTN; PAM sequence: CTG
  source 1..20: mol_type = other DNA
gatgtggcaagacactcctt

SEQ ID NO: 42779 - DNA, 20 bp, synthetic construct
  misc_feature 1..20: note = Description of Artificial Sequence: Synthetic oligonucleotide
  misc_feature 1..20: note = Target: SCN10A; (-) strand; PAM type: YTN; PAM sequence: TTC
  source 1..20: mol_type = other DNA
cgacactggatgtggcaaga

SEQ ID NO: 42780 - DNA, 20 bp, synthetic construct
  misc_feature 1..20: note = Description of Artificial Sequence: Synthetic oligonucleotide
  misc_feature 1..20: note = Target: SCN10A; (-) strand; PAM type: YTN; PAM sequence: CTC
  source 1..20: mol_type = other DNA
agtcccaccgttccgacact

SEQ ID NO: 42781 - DNA, 20 bp, synthetic construct
  misc_feature 1..20: note = Description of Artificial Sequence: Synthetic oligonucleotide
  misc_feature 1..20: note = Target: SCN10A; (-) strand; PAM type: YTN; PAM sequence: TTA
  source 1..20: mol_type = other DNA
gagacccaggcagggagtca

SEQ ID NO: 42782 - DNA, 20 bp, synthetic construct
  misc_feature 1..20: note = Description of Artificial Sequence: Synthetic oligonucleotide
  misc_feature 1..20: note = Target: SCN10A; (-) strand; PAM type: YTN; PAM sequence: TTT
  source 1..20: mol_type = other DNA
agagacccaggcagggagtc

SEQ ID NO: 42783 - DNA, 20 bp, synthetic construct
  misc_feature 1..20: note = Description of Artificial Sequence: Synthetic oligonucleotide
  misc_feature 1..20: note = Target: SCN10A; (-) strand; PAM type: YTN; PAM sequence: CTT
  source 1..20: mol_type = other DNA
tagagacccaggcagggagt

SEQ ID NO: 42784 - DNA, 20 bp, synthetic construct
  misc_feature 1..20: note = Description of Artificial Sequence: Synthetic oligonucleotide
  misc_feature 1..20: note = Target: SCN10A; (-) strand; PAM type: YTN; PAM sequence: TTG
  source 1..20: mol_type = other DNA
ctttagagacccaggcaggg

SEQ ID NO: 42785 - DNA, 20 bp, synthetic construct
  misc_feature 1..20: note = Description of Artificial Sequence: Synthetic oligonucleotide
  misc_feature 1..20: note = Target: SCN10A; (-) strand; PAM type: YTN; PAM sequence: TTT
  source 1..20: mol_type = other DNA
gctttagagacccaggcagg

SEQ ID NO: 42786 - DNA, 20 bp, synthetic construct
  misc_feature 1..20: note = Description of Artificial Sequence: Synthetic oligonucleotide
  misc_feature 1..20: note = Target: SCN10A; (-) strand; PAM type: YTN; PAM sequence: CTT
  source 1..20: mol_type = other DNA
tgctttagagacccaggcag

SEQ ID NO: 42787 - DNA, 20 bp, synthetic construct
  misc_feature 1..20: note = Description of Artificial Sequence: Synthetic oligonucleotide
  misc_feature 1..20: note = Target: SCN10A; (-) strand; PAM type: YTN; PAM sequence: CTG
  source 1..20: mol_type = other DNA
gctttgctttagagacccag

SEQ ID NO: 42788 - DNA, 20 bp, synthetic construct
  misc_feature 1..20: note = Description of Artificial Sequence: Synthetic oligonucleotide
  misc_feature 1..20: note = Target: SCN10A; (-) strand; PAM type: YTN; PAM sequence: CTG
  source 1..20: mol_type = other DNA
gagaacagaaactggctttg

SEQ ID NO: 42789 - DNA, 20 bp, synthetic construct
  misc_feature 1..20: note = Description of Artificial Sequence: Synthetic oligonucleotide
  misc_feature 1..20: note = Target: SCN10A; (-) strand; PAM type: YTN; PAM sequence: CTG
  source 1..20: mol_type = other DNA
gatccctggagaacagaaac

SEQ ID NO: 42790 - DNA, 20 bp, synthetic construct
  misc_feature 1..20: note = Description of Artificial Sequence: Synthetic oligonucleotide
  misc_feature 1..20: note = Target: SCN10A; (-) strand; PAM type: YTN; PAM sequence: CTC
  source 1..20: mol_type = other DNA
tggatccctggagaacagaa

SEQ ID NO: 42791 - DNA, 20 bp, synthetic construct
  misc_feature 1..20: note = Description of Artificial Sequence: Synthetic oligonucleotide
  misc_feature 1..20: note = Target: SCN10A; (-) strand; PAM type: YTN; PAM sequence: TTA
  source 1..20: mol_type = other DNA
tccagcatctctggatccct

SEQ ID NO: 42792 - DNA, 20 bp, synthetic construct
  misc_feature 1..20: note = Description of Artificial Sequence: Synthetic oligonucleotide
  misc_feature 1..20: note = Target: SCN10A; (-) strand; PAM type: YTN; PAM sequence: TTT
  source 1..20: mol_type = other DNA
atccagcatctctggatccc

SEQ ID NO: 42793 - DNA, 20 bp, synthetic construct
  misc_feature 1..20: note = Description of Artificial Sequence: Synthetic oligonucleotide
  misc_feature 1..20: note = Target: SCN10A; (-) strand; PAM type: YTN; PAM sequence: CTT
  source 1..20: mol_type = other DNA
tatccagcatctctggatcc

SEQ ID NO: 42794 - DNA, 20 bp, synthetic construct
  misc_feature 1..20: note = Description of Artificial Sequence: Synthetic oligonucleotide
  misc_feature 1..20: note = Target: SCN10A; (-) strand; PAM type: YTN; PAM sequence: CTC
  source 1..20: mol_type = other DNA
cccaccctttatccagcatc

SEQ ID NO: 42795 - DNA, 20 bp, synthetic construct
  misc_feature 1..20: note = Description of Artificial Sequence: Synthetic oligonucleotide
  misc_feature 1..20: note = Target: SCN10A; (-) strand; PAM type: YTN; PAM sequence: TTA
  source 1..20: mol_type = other DNA
ccaaccctccccacccttta

SEQ ID NO: 42796 - DNA, 20 bp, synthetic construct
  misc_feature 1..20: note = Description of Artificial Sequence: Synthetic oligonucleotide
  misc_feature 1..20: note = Target: SCN10A; (-) strand; PAM type: YTN; PAM sequence: TTT
  source 1..20: mol_type = other DNA
accaaccctccccacccttt

SEQ ID NO: 42797 - DNA, 20 bp, synthetic construct
  misc_feature 1..20: note = Description of Artificial Sequence: Synthetic oligonucleotide
  misc_feature 1..20: note = Target: SCN10A; (-) strand; PAM type: YTN; PAM sequence: CTG
  source 1..20: mol_type = other DNA
tttaccaaccctccccaccc

SEQ ID NO: 42798 - DNA, 20 bp, synthetic construct
  misc_feature 1..20: note = Description of Artificial Sequence: Synthetic oligonucleotide
  misc_feature 1..20: note = Target: SCN10A; (-) strand; PAM type: YTN; PAM sequence: TTG
  source 1..20: mol_type = other DNA
agtcctgtttaccaaccctc

SEQ ID NO: 42799 - DNA, 20 bp, synthetic construct
  misc_feature 1..20: note = Description of Artificial Sequence: Synthetic oligonucleotide
  misc_feature 1..20: note = Target: SCN10A; (-) strand; PAM type: YTN; PAM sequence: CTT
  source 1..20: mol_type = other DNA
gagtcctgtttaccaaccct

SEQ ID NO: 42800 - DNA, 20 bp, synthetic construct
  misc_feature 1..20: note = Description of Artificial Sequence: Synthetic oligonucleotide
  misc_feature 1..20: note = Target: SCN10A; (-) strand; PAM type: YTN; PAM sequence: CTC
  source 1..20: mol_type = other DNA
cttgagtcctgtttaccaac

SEQ ID NO: 42801 - DNA, 20 bp, synthetic construct
  misc_feature 1..20: note = Description of Artificial Sequence: Synthetic oligonucleotide
  misc_feature 1..20: note = Target: SCN10A; (-) strand; PAM type: YTN; PAM sequence: TTC
  source 1..20: mol_type = other DNA
tccttgagtcctgtttacca

SEQ ID NO: 42802 - DNA, 20 bp, synthetic construct
  misc_feature 1..20: note = Description of Artificial Sequence: Synthetic oligonucleotide
  misc_feature 1..20: note = Target: SCN10A; (-) strand; PAM type: YTN; PAM sequence: CTT
  source 1..20: mol_type = other DNA
ctccttgagtcctgtttacc

SEQ ID NO: 42803 - DNA, 20 bp, synthetic construct
  misc_feature 1..20: note = Description of Artificial Sequence: Synthetic oligonucleotide
  misc_feature 1..20: note = Target: SCN10A; (-) strand; PAM type: YTN; PAM sequence: TTG
  source 1..20: mol_type = other DNA
aaccaacatgtaccttctcc

SEQ ID NO: 42804 - DNA, 20 bp, synthetic construct
  misc_feature 1..20: note = Description of Artificial Sequence: Synthetic oligonucleotide
  misc_feature 1..20: note = Target: SCN10A; (-) strand; PAM type: YTN; PAM sequence: TTT
  source 1..20: mol_type = other DNA
gaaccaacatgtaccttctc

SEQ ID NO: 42805 - DNA, 20 bp, synthetic construct
  misc_feature 1..20: note = Description of Artificial Sequence: Synthetic oligonucleotide
  misc_feature 1..20: note = Target: SCN10A; (-) strand; PAM type: YTN; PAM sequence: CTC
  source 1..20: mol_type = other DNA
agatttgaaccaacatgtac

SEQ ID NO: 42806 - DNA, 20 bp, synthetic construct
  misc_feature 1..20: note = Description of Artificial Sequence: Synthetic oligonucleotide
  misc_feature 1..20: note = Target: SCN10A; (-) strand; PAM type: YTN; PAM sequence: CTA
  source 1..20: mol_type = other DNA
gatccaaggctcagatttga

SEQ ID NO: 42807 - DNA, 20 bp, synthetic construct
  misc_feature 1..20: note = Description of Artificial Sequence: Synthetic oligonucleotide
  misc_feature 1..20: note = Target: SCN10A; (-) strand; PAM type: YTN; PAM sequence: CTG
  source 1..20: mol_type = other DNA
gaatgaacaggctagatcca

SEQ ID NO: 42808 - DNA, 20 bp, synthetic construct
  misc_feature 1..20: note = Description of Artificial Sequence: Synthetic oligonucleotide
  misc_feature 1..20: note = Target: SCN10A; (-) strand; PAM type: YTN; PAM sequence: TTA
  source 1..20: mol_type = other DNA
ctggaatgaacaggctagat

SEQ ID NO: 42809 - DNA, 20 bp, synthetic construct
  misc_feature 1..20: note = Description of Artificial Sequence: Synthetic oligonucleotide
  misc_feature 1..20: note = Target: SCN10A; (-) strand; PAM type: YTN; PAM sequence: TTT
  source 1..20: mol_type = other DNA
actggaatgaacaggctaga

SEQ ID NO: 42810 - DNA, 20 bp, synthetic construct
  misc_feature 1..20: note = Description of Artificial Sequence: Synthetic oligonucleotide
  misc_feature 1..20: note = Target: SCN10A; (-) strand; PAM type: YTN; PAM sequence: TTT
  source 1..20: mol_type = other DNA
tactggaatgaacaggctag

SEQ ID NO: 42811 - DNA, 20 bp, synthetic construct
  misc_feature 1..20: note = Description of Artificial Sequence: Synthetic oligonucleotide
  misc_feature 1..20: note = Target: SCN10A; (-) strand; PAM type: YTN; PAM sequence: CTA
  source 1..20: mol_type = other DNA
gaagcccaaagaattttact

SEQ ID NO: 42812 - DNA, 20 bp, synthetic construct
  misc_feature 1..20: note = Description of Artificial Sequence: Synthetic oligonucleotide
  misc_feature 1..20: note = Target: SCN10A; (-) strand; PAM type: YTN; PAM sequence: CTC
  source 1..20: mol_type = other DNA
tagaagcccaaagaatttta

SEQ ID NO: 42813 - DNA, 20 bp, synthetic construct
  misc_feature 1..20: note = Description of Artificial Sequence: Synthetic oligonucleotide
  misc_feature 1..20: note = Target: SCN10A; (-) strand; PAM type: YTN; PAM sequence: CTG
  source 1..20: mol_type = other DNA
tgactctagaagcccaaaga

SEQ ID NO: 42814 - DNA, 20 bp, synthetic construct
  misc_feature 1..20: note = Description of Artificial Sequence: Synthetic oligonucleotide
  misc_feature 1..20: note = Target: SCN10A; (-) strand; PAM type: YTN; PAM sequence: CTG
  source 1..20: mol_type = other DNA
ggagggactgtgactctaga

SEQ ID NO: 42815 - DNA, 20 bp, synthetic construct
  misc_feature 1..20: note = Description of Artificial Sequence: Synthetic oligonucleotide
  misc_feature 1..20: note = Target: SCN10A; (-) strand; PAM type: YTN; PAM sequence: TTG
  source 1..20: mol_type = other DNA
ccccctgggagggactgtga

SEQ ID NO: 42816 - DNA, 20 bp, synthetic construct
  misc_feature 1..20: note = Description of Artificial Sequence: Synthetic oligonucleotide
  misc_feature 1..20: note = Target: SCN10A; (-) strand; PAM type: YTN; PAM sequence: CTT
  source 1..20: mol_type = other DNA
gccccctgggagggactgtg

SEQ ID NO: 42817 - DNA, 20 bp, synthetic construct
  misc_feature 1..20: note = Description of Artificial Sequence: Synthetic oligonucleotide
  misc_feature 1..20: note = Target: SCN10A; (-) strand; PAM type: YTN; PAM sequence: CTC
  source 1..20: mol_type = other DNA
ttgccccctgggagggactg

SEQ ID NO: 42818 - DNA, 20 bp, synthetic construct
  misc_feature 1..20: note = Description of Artificial Sequence: Synthetic oligonucleotide
  misc_feature 1..20: note = Target: SCN10A; (-) strand; PAM type: YTN; PAM sequence: CTC
  source 1..20: mol_type = other DNA
aggaaatctcttgccccctg

SEQ ID NO: 42819 - DNA, 20 bp, synthetic construct
  misc_feature 1..20: note = Description of Artificial Sequence: Synthetic oligonucleotide
  misc_feature 1..20: note = Target: SCN10A; (-) strand; PAM type: YTN; PAM sequence: TTC
  source 1..20: mol_type = other DNA
aaggtcctcaggaaatctct

SEQ ID NO: 42820 - DNA, 20 bp, synthetic construct
  misc_feature 1..20: note = Description of Artificial Sequence: Synthetic oligonucleotide
  misc_feature 1..20: note = Target: SCN10A; (-) strand; PAM type: YTN; PAM sequence: CTT
  source 1..20: mol_type = other DNA
caaggtcctcaggaaatctc

SEQ ID NO: 42821 - DNA, 20 bp, synthetic construct
  misc_feature 1..20: note = Description of Artificial Sequence: Synthetic oligonucleotide
  misc_feature 1..20: note = Target: SCN10A; (-) strand; PAM type: YTN; PAM sequence: TTG
  source 1..20: mol_type = other DNA
cttcaaggtcctcaggaaat

SEQ ID NO: 42822 - DNA, 20 bp, synthetic construct
  misc_feature 1..20: note = Description of Artificial Sequence: Synthetic oligonucleotide
  misc_feature 1..20: note = Target: SCN10A; (-) strand; PAM type: YTN; PAM sequence: TTT
  source 1..20: mol_type = other DNA
gcttcaaggtcctcaggaaa

SEQ ID NO: 42823 - DNA, 20 bp, synthetic construct
  misc_feature 1..20: note = Description of Artificial Sequence: Synthetic oligonucleotide
  misc_feature 1..20: note = Target: SCN10A; (-) strand; PAM type: YTN; PAM sequence: CTT
  source 1..20: mol_type = other DNA
tgcttcaaggtcctcaggaa

SEQ ID NO: 42824 - DNA, 20 bp, synthetic construct
  misc_feature 1..20: note = Description of Artificial Sequence: Synthetic oligonucleotide
  misc_feature 1..20: note = Target: SCN10A; (-) strand; PAM type: YTN; PAM sequence: CTC
  source 1..20: mol_type = other DNA
ccagagtctttgcttcaagg

SEQ ID NO: 42825 - DNA, 20 bp, synthetic construct
  misc_feature 1..20: note = Description of Artificial Sequence: Synthetic oligonucleotide
  misc_feature 1..20: note = Target: SCN10A; (-) strand; PAM type: YTN; PAM sequence: CTG
  source 1..20: mol_type = other DNA
tccctcccagagtctttgct

SEQ ID NO: 42826 - DNA, 20 bp, synthetic construct
  misc_feature 1..20: note = Description of Artificial Sequence: Synthetic oligonucleotide
  misc_feature 1..20: note = Target: SCN10A; (-) strand; PAM type: YTN; PAM sequence: TTC
  source 1..20: mol_type = other DNA
tgtccctcccagagtctttg

SEQ ID NO: 42827 - DNA, 20 bp, synthetic construct
  misc_feature 1..20: note = Description of Artificial Sequence: Synthetic oligonucleotide
  misc_feature 1..20: note = Target: SCN10A; (-) strand; PAM type: YTN; PAM sequence: CTT
  source 1..20: mol_type = other DNA
ctgtccctcccagagtcttt

SEQ ID NO: 42828 - DNA, 20 bp, synthetic construct
  misc_feature 1..20: note = Description of Artificial Sequence: Synthetic oligonucleotide
  misc_feature 1..20: note = Target: SCN10A; (-) strand; PAM type: YTN; PAM sequence: TTG
  source 1..20: mol_type = other DNA
agggcttctgtccctcccag

SEQ ID NO: 42829 - DNA, 20 bp, synthetic construct
  misc_feature 1..20: note = Description of Artificial Sequence: Synthetic oligonucleotide
  misc_feature 1..20: note = Target: SCN10A; (-) strand; PAM type: YTN; PAM sequence: TTT
  source 1..20: mol_type = other DNA
gagggcttctgtccctccca

SEQ ID NO: 42830 - DNA, 20 bp, synthetic construct
  misc_feature 1..20: note = Description of Artificial Sequence: Synthetic oligonucleotide
  misc_feature 1..20: note = Target: SCN10A; (-) strand; PAM type: YTN; PAM sequence: CTC
  source 1..20: mol_type = other DNA
cagaaaagatttgagggctt

SEQ ID NO: 42831 - DNA, 20 bp, synthetic construct
  misc_feature 1..20: note = Description of Artificial Sequence: Synthetic oligonucleotide
  misc_feature 1..20: note = Target: SCN10A; (-) strand; PAM type: YTN; PAM sequence: CTC
  source 1..20: mol_type = other DNA
tccagaaaagatttgagggc

SEQ ID NO: 42832 - DNA, 20 bp, synthetic construct
  misc_feature 1..20: note = Description of Artificial Sequence: Synthetic oligonucleotide
  misc_feature 1..20: note = Target: SCN10A; (-) strand; PAM type: YTN; PAM sequence: CTC
  source 1..20: mol_type = other DNA
ctctccagaaaagatttgag

SEQ ID NO: 42833 - DNA, 20 bp, synthetic construct
  misc_feature 1..20: note = Description of Artificial Sequence: Synthetic oligonucleotide
  misc_feature 1..20: note = Target: SCN10A; (-) strand; PAM type: YTN; PAM sequence: CTC
  source 1..20: mol_type = other DNA
ctcctctccagaaaagattt

SEQ ID NO: 42834 - DNA, 20 bp, synthetic construct
  misc_feature 1..20: note = Description of Artificial Sequence: Synthetic oligonucleotide
  misc_feature 1..20: note = Target: SCN10A; (-) strand; PAM type: YTN; PAM sequence: CTC
  source 1..20: mol_type = other DNA
atctcctcctctccagaaaa

SEQ ID NO: 42835 - DNA, 20 bp, synthetic construct
  misc_feature 1..20: note = Description of Artificial Sequence: Synthetic oligonucleotide
  misc_feature 1..20: note = Target: SCN10A; (-) strand; PAM type: YTN; PAM sequence: TTG
  source 1..20: mol_type = other DNA
tcctcatctcctcctctcca

SEQ ID NO: 42836 - DNA, 20 bp, synthetic construct
  misc_feature 1..20: note = Description of Artificial Sequence: Synthetic oligonucleotide
  misc_feature 1..20: note = Target: SCN10A; (-) strand; PAM type: YTN; PAM sequence: CTG
  source 1..20: mol_type = other DNA
agaccaaggacccaaggata

SEQ ID NO: 42837 - DNA, 20 bp, synthetic construct
  misc_feature 1..20: note = Description of Artificial Sequence: Synthetic oligonucleotide
  misc_feature 1..20: note = Target: SCN10A; (-) strand; PAM type: YTN; PAM sequence: CTC
  source 1..20: mol_type = other DNA
tgagaccaaggacccaagga

SEQ ID NO: 42838 - DNA, 20 bp, synthetic construct
  misc_feature 1..20: note = Description of Artificial Sequence: Synthetic oligonucleotide
  misc_feature 1..20: note = Target: SCN10A; (-) strand; PAM type: YTN; PAM sequence: CTC
  source 1..20: mol_type = other DNA
aagagaaccagaggtccctc

SEQ ID NO: 42839 - DNA, 20 bp, synthetic construct
  misc_feature 1..20: note = Description of Artificial Sequence: Synthetic oligonucleotide
  misc_feature 1..20: note = Target: SCN10A; (-) strand; PAM type: YTN; PAM sequence: CTG
  source 1..20: mol_type = other DNA
gcagggcctcaagagaacca

SEQ ID NO: 42840 - DNA, 20 bp, synthetic construct
  misc_feature 1..20: note = Description of Artificial Sequence: Synthetic oligonucleotide
  misc_feature 1..20: note = Target: SCN10A; (-) strand; PAM type: YTN; PAM sequence: CTG
  source 1..20: mol_type = other DNA
taacagcagagggcagtgtg

SEQ ID NO: 42841 - DNA, 20 bp, synthetic construct
  misc_feature 1..20: note = Description of Artificial Sequence: Synthetic oligonucleotide
  misc_feature 1..20: note = Target: SCN10A; (-) strand; PAM type: YTN; PAM sequence: CTG
  source 1..20: mol_type = other DNA
gcactgtaacagcagagggc

SEQ ID NO: 42842 - DNA, 20 bp, synthetic construct
  misc_feature 1..20: note = Description of Artificial Sequence: Synthetic oligonucleotide
  misc_feature 1..20: note = Target: SCN10A; (-) strand; PAM type: YTN; PAM sequence: TTC
  source 1..20: mol_type = other DNA
tggcactgtaacagcagagg

SEQ ID NO: 42843 - DNA, 20 bp, synthetic construct
  misc_feature 1..20: note = Description of Artificial Sequence: Synthetic oligonucleotide
  misc_feature 1..20: note = Target: SCN10A; (-) strand; PAM type: YTN; PAM sequence: TTT
  source 1..20: mol_type = other DNA
ctggcactgtaacagcagag

SEQ ID NO: 42844 - DNA, 20 bp, synthetic construct
  misc_feature 1..20: note = Description of Artificial Sequence: Synthetic oligonucleotide
  misc_feature 1..20: note = Target: SCN10A; (-) strand; PAM type: YTN; PAM sequence: TTG
  source 1..20: mol_type = other DNA
gtgcagtttctggcactgta

SEQ ID NO: 42845 - DNA, 20 bp, synthetic construct
  misc_feature 1..20: note = Description of Artificial Sequence: Synthetic oligonucleotide
  misc_feature 1..20: note = Target: SCN10A; (-) strand; PAM type: YTN; PAM sequence: TTC
  source 1..20: mol_type = other DNA
gttggtgcagtttctggcac

SEQ ID NO: 42846 - DNA, 20 bp, synthetic construct
  misc_feature 1..20: note = Description of Artificial Sequence: Synthetic oligonucleotide
  misc_feature 1..20: note = Target: SCN10A; (-) strand; PAM type: YTN; PAM sequence: CTT
  source 1..20: mol_type = other DNA
cgttggtgcagtttctggca

SEQ ID NO: 42847 - DNA, 20 bp, synthetic construct
  misc_feature 1..20: note = Description of Artificial Sequence: Synthetic oligonucleotide
  misc_feature 1..20: note = Target: SCN10A; (-) strand; PAM type: YTN; PAM sequence: CTA
  source 1..20: mol_type = other DNA
agggaggaaaacatcttcgt

SEQ ID NO: 42848 - DNA, 20 bp, synthetic construct
  misc_feature 1..20: note = Description of Artificial Sequence: Synthetic oligonucleotide
  misc_feature 1..20: note = Target: SCN10A; (-) strand; PAM type: YTN; PAM sequence: CTA
  source 1..20: mol_type = other DNA
atacccaatcctaagggagg

SEQ ID NO: 42849 - DNA, 20 bp, synthetic construct
  misc_feature 1..20: note = Description of Artificial Sequence: Synthetic oligonucleotide
  misc_feature 1..20: note = Target: SCN10A; (-) strand; PAM type: YTN; PAM sequence: CTA
  source 1..20: mol_type = other DNA
aagaaaaactaatacccaat

SEQ ID NO: 42850 - DNA, 20 bp, synthetic construct
  misc_feature 1..20: note = Description of Artificial Sequence: Synthetic oligonucleotide
  misc_feature 1..20: note = Target: SCN10A; (-) strand; PAM type: YTN; PAM sequence: TTG
  source 1..20: mol_type = other DNA
aatgaagaaaatccaaaggg

SEQ ID NO: 42851 - DNA, 20 bp, synthetic construct
  misc_feature 1..20: note = Description of Artificial Sequence: Synthetic oligonucleotide
  misc_feature 1..20: note = Target: SCN10A; (-) strand; PAM type: YTN; PAM sequence: TTT
  source 1..20: mol_type = other DNA
gaatgaagaaaatccaaagg

SEQ ID NO: 42852 - DNA, 20 bp, synthetic construct
  misc_feature 1..20: note = Description of Artificial Sequence: Synthetic oligonucleotide
  misc_feature 1..20: note = Target: SCN10A; (-) strand; PAM type: YTN; PAM sequence: CTA
  source 1..20: mol_type = other DNA
aaggtgagagtttgaatgaa

SEQ ID NO: 42853 - DNA, 20 bp, synthetic construct
  misc_feature 1..20: note = Description of Artificial Sequence: Synthetic oligonucleotide
  misc_feature 1..20: note = Target: SCN10A; (-) strand; PAM type: YTN; PAM sequence: TTA
  source 1..20: mol_type = other DNA
tgtcaggaagctaaaggtga

SEQ ID NO: 42854 - DNA, 20 bp, synthetic construct
  misc_feature 1..20: note = Description of Artificial Sequence: Synthetic oligonucleotide
  misc_feature 1..20: note = Target: SCN10A; (-) strand; PAM type: YTN; PAM sequence: TTC
  source 1..20: mol_type = other DNA
aaattatgtcaggaagctaa

SEQ ID NO: 42855 - DNA, 20 bp, synthetic construct
  misc_feature 1..20: note = Description of Artificial Sequence: Synthetic oligonucleotide
  misc_feature 1..20: note = Target: SCN10A; (-) strand; PAM type: YTN; PAM sequence: TTT
  source 1..20: mol_type = other DNA
caaattatgtcaggaagcta

SEQ ID NO: 42856 - DNA, 20 bp, synthetic construct
  misc_feature 1..20: note = Description of Artificial Sequence: Synthetic oligonucleotide
  misc_feature 1..20: note = Target: SCN10A; (-) strand; PAM type: YTN; PAM sequence: CTT
  source 1..20: mol_type = other DNA
tcaaattatgtcaggaagct

SEQ ID NO: 42857 - DNA, 20 bp, synthetic construct
  misc_feature 1..20: note = Description of Artificial Sequence: Synthetic oligonucleotide
  misc_feature 1..20: note = Target: SCN10A; (-) strand; PAM type: YTN; PAM sequence: TTA
  source 1..20: mol_type = other DNA
aaataggtggctttcaaatt

SEQ ID NO: 42858 - DNA, 20 bp, synthetic construct
  misc_feature 1..20: note = Description of Artificial Sequence: Synthetic oligonucleotide
  misc_feature 1..20: note = Target: SCN10A; (-) strand; PAM type: YTN; PAM sequence: TTA
  source 1..20: mol_type = other DNA
ttaaaataggtggctttcaa

SEQ ID NO: 42859 - DNA, 20 bp, synthetic construct
  misc_feature 1..20: note = Description of Artificial Sequence: Synthetic oligonucleotide
  misc_feature 1..20: note = Target: SCN10A; (-) strand; PAM type: YTN; PAM sequence: TTA
  source 1..20: mol_type = other DNA
cataaacatgttattaaaat

SEQ ID NO: 42860 - DNA, 20 bp, synthetic construct
  misc_feature 1..20: note = Description of Artificial Sequence: Synthetic oligonucleotide
  misc_feature 1..20: note = Target: SCN10A; (-) strand; PAM type: YTN; PAM sequence: CTT
  source 1..20: mol_type = other DNA
acataaacatgttattaaaa

SEQ ID NO: 42861 - DNA, 20 bp, synthetic construct
  misc_feature 1..20: note = Description of Artificial Sequence: Synthetic oligonucleotide
  misc_feature 1..20: note = Target: SCN10A; (-) strand; PAM type: YTN; PAM sequence: CTA
  source 1..20: mol_type = other DNA
acttacataaacatgttatt

SEQ ID NO: 42862 - DNA, 20 bp, synthetic construct
  misc_feature 1..20: note = Description of Artificial Sequence: Synthetic oligonucleotide
  misc_feature 1..20: note = Target: SCN10A; (-) strand; PAM type: YTN; PAM sequence: TTG
  source 1..20: mol_type = other DNA
cagggactaacttacataaa

SEQ ID NO: 42863 - DNA, 20 bp, synthetic construct
  misc_feature 1..20: note = Description of Artificial Sequence: Synthetic oligonucleotide
  misc_feature 1..20: note = Target: SCN10A; (-) strand; PAM type: YTN; PAM sequence: TTT
  source 1..20: mol_type = other DNA
gcagggactaacttacataa

SEQ ID NO: 42864 - DNA, 20 bp, synthetic construct
  misc_feature 1..20: note = Description of Artificial Sequence: Synthetic oligonucleotide
  misc_feature 1..20: note = Target: SCN10A; (-) strand; PAM type: YTN; PAM sequence: TTC
  source 1..20: mol_type = other DNA
ccagcatttgcagggactaa

SEQ ID NO: 42865 - DNA, 20 bp, synthetic construct
  misc_feature 1..20: note = Description of Artificial Sequence: Synthetic oligonucleotide
  misc_feature 1..20: note = Target: SCN10A; (-) strand; PAM type: YTN; PAM sequence: TTT
  source 1..20: mol_type = other DNA
cccagcatttgcagggacta

SEQ ID NO: 42866 - DNA, 20 bp, synthetic construct
  misc_feature 1..20: note = Description of Artificial Sequence: Synthetic oligonucleotide
  misc_feature 1..20: note = Target: SCN10A; (-) strand; PAM type: YTN; PAM sequence: CTC
  source 1..20: mol_type = other DNA
agcccagtttcccagcattt

SEQ ID NO: 42867 - DNA, 20 bp, synthetic construct
  misc_feature 1..20: note = Description of Artificial Sequence: Synthetic oligonucleotide
  misc_feature 1..20: note = Target: SCN10A; (-) strand; PAM type: YTN; PAM sequence: TTC
  source 1..20: mol_type = other DNA
cacagatctcagcccagttt

SEQ ID NO: 42868 - DNA, 20 bp, synthetic construct
  misc_feature 1..20: note = Description of Artificial Sequence: Synthetic oligonucleotide
  misc_feature 1..20: note = Target: SCN10A; (-) strand; PAM type: YTN; PAM sequence: TTC
  source 1..20: mol_type = other DNA
aaattccacagatctcagcc

SEQ ID NO: 42869 - DNA, 20 bp, synthetic construct
  misc_feature 1..20: note = Description of Artificial Sequence: Synthetic oligonucleotide
  misc_feature 1..20: note = Target: SCN10A; (-) strand; PAM type: YTN; PAM sequence: TTT
  source 1..20: mol_type = other DNA
caaattccacagatctcagc

SEQ ID NO: 42870 - DNA, 20 bp, synthetic construct
  misc_feature 1..20: note = Description of Artificial Sequence: Synthetic oligonucleotide
  misc_feature 1..20: note = Target: SCN10A; (-) strand; PAM type: YTN; PAM sequence: CTT
  source 1..20: mol_type = other DNA
tcaaattccacagatctcag

SEQ ID NO: 42871 - DNA, 20 bp, synthetic construct
  misc_feature 1..20: note = Description of Artificial Sequence: Synthetic oligonucleotide
  misc_feature 1..20: note = Target: SCN10A; (-) strand; PAM type: YTN; PAM sequence: CTC
  source 1..20: mol_type = other DNA
ctttcaaattccacagatct

SEQ ID NO: 42872 - DNA, 20 bp, synthetic construct
  misc_feature 1..20: note = Description of Artificial Sequence: Synthetic oligonucleotide
  misc_feature 1..20: note = Target: SCN10A; (-) strand; PAM type: YTN; PAM sequence: CTC
  source 1..20: mol_type = other DNA
agatctcctttcaaattcca

SEQ ID NO: 42873 - DNA, 20 bp, synthetic construct
  misc_feature 1..20: note = Description of Artificial Sequence: Synthetic oligonucleotide
  misc_feature 1..20: note = Target: SCN10A; (-) strand; PAM type: YTN; PAM sequence: TTC
  source 1..20: mol_type = other DNA
tcagatctcctttcaaattc

SEQ ID NO: 42874 - DNA, 20 bp, synthetic construct
  misc_feature 1..20: note = Description of Artificial Sequence: Synthetic oligonucleotide
  misc_feature 1..20: note = Target: SCN10A; (-) strand; PAM type: YTN; PAM sequence: CTT
  source 1..20: mol_type = other DNA
ctcagatctcctttcaaatt

SEQ ID NO: 42875 - DNA, 20 bp, synthetic construct
  misc_feature 1..20: note = Description of Artificial Sequence: Synthetic oligonucleotide
  misc_feature 1..20: note = Target: SCN10A; (-) strand; PAM type: YTN; PAM sequence: TTG
  source 1..20: mol_type = other DNA
tgtccacagatcttctcaga

SEQ ID NO: 42876 - DNA, 20 bp, synthetic construct
  misc_feature 1..20: note = Description of Artificial Sequence: Synthetic oligonucleotide
  misc_feature 1..20: note = Target: SCN10A; (-) strand; PAM type: YTN; PAM sequence: TTT
  source 1..20: mol_type = other DNA
gtgtccacagatcttctcag

SEQ ID NO: 42877 - DNA, 20 bp, synthetic construct
  misc_feature 1..20: note = Description of Artificial Sequence: Synthetic oligonucleotide
  misc_feature 1..20: note = Target: SCN10A; (-) strand; PAM type: YTN; PAM sequence: CTT
  source 1..20: mol_type = other DNA
tgtgtccacagatcttctca

SEQ ID NO: 42878 - DNA, 20 bp, synthetic construct
  misc_feature 1..20: note = Description of Artificial Sequence: Synthetic oligonucleotide
  misc_feature 1..20: note = Target: SCN10A; (-) strand; PAM type: YTN; PAM sequence: CTC
  source 1..20: mol_type = other DNA
ccaggaagccctttgtgtcc

SEQ ID NO: 42879 - DNA, 20 bp, synthetic construct
  misc_feature 1..20: note = Description of Artificial Sequence: Synthetic oligonucleotide
  misc_feature 1..20: note = Target: SCN10A; (-) strand; PAM type: YTN; PAM sequence: CTC
  source 1..20: mol_type = other DNA
cccccataaagatggtcctc

SEQ ID NO: 42880 - DNA, 20 bp, synthetic construct
  misc_feature 1..20: note = Description of Artificial Sequence: Synthetic oligonucleotide
  misc_feature 1..20: note = Target: SCN10A; (-) strand; PAM type: YTN; PAM sequence: CTC
  source 1..20: mol_type = other DNA
tccccccataaagatggtcc

SEQ ID NO: 42881 - DNA, 20 bp, synthetic construct
  misc_feature 1..20: note = Description of Artificial Sequence: Synthetic oligonucleotide
  misc_feature 1..20: note = Target: SCN10A; (-) strand; PAM type: YTN; PAM sequence: TTC
  source 1..20: mol_type = other DNA
tctccccccataaagatggt

SEQ ID NO: 42882 - DNA, 20 bp, synthetic construct
  misc_feature 1..20: note = Description of Artificial Sequence: Synthetic oligonucleotide
  misc_feature 1..20: note = Target: SCN10A; (-) strand; PAM type: YTN; PAM sequence: CTT
  source 1..20: mol_type = other DNA
ctctccccccataaagatgg

SEQ ID NO: 42883 - DNA, 20 bp, synthetic construct
  misc_feature 1..20: note = Description of Artificial Sequence: Synthetic oligonucleotide
  misc_feature 1..20: note = Target: SCN10A; (-) strand; PAM type: YTN; PAM sequence: TTC
  source 1..20: mol_type = other DNA
cttctctccccccataaaga

SEQ ID NO: 42884 - DNA, 20 bp, synthetic construct
  misc_feature 1..20: note = Description of Artificial Sequence: Synthetic oligonucleotide
  misc_feature 1..20: note = Target: SCN10A; (-) strand; PAM type: YTN; PAM sequence: TTT
  source 1..20: mol_type = other DNA
ccttctctccccccataaag

SEQ ID NO: 42885 - DNA, 20 bp, synthetic construct
  misc_feature 1..20: note = Description of Artificial Sequence: Synthetic oligonucleotide
  misc_feature 1..20: note = Target: SCN10A; (-) strand; PAM type: YTN; PAM sequence: CTT
  source 1..20: mol_type = other DNA
tccttctctccccccataaa

SEQ ID NO: 42886 - DNA, 20 bp, synthetic construct
  misc_feature 1..20: note = Description of Artificial Sequence: Synthetic oligonucleotide
  misc_feature 1..20: note = Target: SCN10A; (-) strand; PAM type: YTN; PAM sequence: TTG
  source 1..20: mol_type = other DNA
ccctttccttctctcccccc

SEQ ID NO: 42887 - DNA, 20 bp, synthetic construct
  misc_feature 1..20: note = Description of Artificial Sequence: Synthetic oligonucleotide
  misc_feature 1..20: note = Target: SCN10A; (-) strand; PAM type: YTN; PAM sequence: CTT
  source 1..20: mol_type = other DNA
gccctttccttctctccccc

SEQ ID NO: 42888 - DNA, 20 bp, synthetic construct
  misc_feature 1..20: note = Description of Artificial Sequence: Synthetic oligonucleotide
  misc_feature 1..20: note = Target: SCN10A; (-) strand; PAM type: YTN; PAM sequence: CTG
  source 1..20: mol_type = other DNA
cccttgccctttccttctct

SEQ ID NO: 42889 - DNA, 20 bp, synthetic construct
  misc_feature 1..20: note = Description of Artificial Sequence: Synthetic oligonucleotide
  misc_feature 1..20: note = Target: SCN10A; (-) strand; PAM type: YTN; PAM sequence: CTA
  source 1..20: mol_type = other DNA
cccactgcccttgccctttc

SEQ ID NO: 42890 - DNA, 20 bp, synthetic construct
  misc_feature 1..20: note = Description of Artificial Sequence: Synthetic oligonucleotide
  misc_feature 1..20: note = Target: SCN10A; (-) strand; PAM type: YTN; PAM sequence: CTC
  source 1..20: mol_type = other DNA
acctacccactgcccttgcc

SEQ ID NO: 42891 - DNA, 20 bp, synthetic construct
  misc_feature 1..20: note = Description of Artificial Sequence: Synthetic oligonucleotide
  misc_feature 1..20: note = Target: SCN10A; (-) strand; PAM type: YTN; PAM sequence: CTG
  source 1..20: mol_type = other DNA
gagctcacctacccactgcc

SEQ ID NO: 42892 - DNA, 20 bp, synthetic construct
  misc_feature 1..20: note = Description of Artificial Sequence: Synthetic oligonucleotide
  misc_feature 1..20: note = Target: SCN10A; (-) strand; PAM type: YTN; PAM sequence: CTC
  source 1..20: mol_type = other DNA
acctggagctcacctaccca

SEQ ID NO: 42893 - DNA, 20 bp, synthetic construct
  misc_feature 1..20: note = Description of Artificial Sequence: Synthetic oligonucleotide
  misc_feature 1..20: note = Target: SCN10A; (-) strand; PAM type: YTN; PAM sequence: CTC
  source 1..20: mol_type = other DNA
agcatgacctcacctggagc

SEQ ID NO: 42894 - DNA, 20 bp, synthetic construct
  misc_feature 1..20: note = Description of Artificial Sequence: Synthetic oligonucleotide
  misc_feature 1..20: note = Target: SCN10A; (-) strand; PAM type: YTN; PAM sequence: TTC
  source 1..20: mol_type = other DNA
tcagcatgacctcacctgga

SEQ ID NO: 42895 - DNA, 20 bp, synthetic construct
  misc_feature 1..20: note = Description of Artificial Sequence: Synthetic oligonucleotide
  misc_feature 1..20: note = Target: SCN10A; (-) strand; PAM type: YTN; PAM sequence: TTG
  source 1..20: mol_type = other DNA
gtcagagttctcagcatgac

SEQ ID NO: 42896 - DNA, 20 bp, synthetic construct
  misc_feature 1..20: note = Description of Artificial Sequence: Synthetic oligonucleotide
  misc_feature 1..20: note = Target: SCN10A; (-) strand; PAM type: YTN; PAM sequence: CTT
  source 1..20: mol_type = other DNA
ggtcagagttctcagcatga

SEQ ID NO: 42897 - DNA, 20 bp, synthetic construct
  misc_feature 1..20: note = Description of Artificial Sequence: Synthetic oligonucleotide
  misc_feature 1..20: note = Target: SCN10A; (-) strand; PAM type: YTN; PAM sequence: CTG
  source 1..20: mol_type = other DNA
aatccttggtcagagttctc

SEQ ID NO: 42898 - DNA, 20 bp, synthetic construct
  misc_feature 1..20: note = Description of Artificial Sequence: Synthetic oligonucleotide
  misc_feature 1..20: note = Target: SCN10A; (-) strand; PAM type: YTN; PAM sequence: CTA
  source 1..20: mol_type = other DNA
ctgaatccttggtcagagtt

SEQ ID NO: 42899 - DNA, 20 bp, synthetic construct
  misc_feature 1..20: note = Description of Artificial Sequence: Synthetic oligonucleotide
  misc_feature 1..20: note = Target: SCN10A; (-) strand; PAM type: YTN; PAM sequence: CTG
  source 1..20: mol_type = other DNA
catctactgaatccttggtc

SEQ ID NO: 42900 - DNA, 20 bp, synthetic construct
  misc_feature 1..20: note = Description of Artificial Sequence: Synthetic oligonucleotide
  misc_feature 1..20: note = Target: SCN10A; (-) strand; PAM type: YTN; PAM sequence: CTG
  source 1..20: mol_type = other DNA
agaaactgcatctactgaat

SEQ ID NO: 42901 - DNA, 20 bp, synthetic construct
  misc_feature 1..20: note = Description of Artificial Sequence: Synthetic oligonucleotide
  misc_feature 1..20: note = Target: SCN10A; (-) strand; PAM type: YTN; PAM sequence: CTG
  source 1..20: mol_type = other DNA
gggtcactgagaaactgcat

SEQ ID NO: 42902 - DNA, 20 bp, synthetic construct
  misc_feature 1..20: note = Description of Artificial Sequence: Synthetic oligonucleotide
  misc_feature 1..20: note = Target: SCN10A; (-) strand; PAM type: YTN; PAM sequence: CTA
  source 1..20: mol_type = other DNA
gtgaccaggctggggtcact

SEQ ID NO: 42903 - DNA, 20 bp, synthetic construct
  misc_feature 1..20: note = Description of Artificial Sequence: Synthetic oligonucleotide
  misc_feature 1..20: note = Target: SCN10A; (-) strand; PAM type: YTN; PAM sequence: TTA
  source 1..20: mol_type = other DNA
ggtaacggaaggagatgagc

SEQ ID NO: 42904 - DNA, 20 bp, synthetic construct
  misc_feature 1..20: note = Description of Artificial Sequence: Synthetic oligonucleotide
  misc_feature 1..20: note = Target: SCN10A; (-) strand; PAM type: YTN; PAM sequence: TTA
  source 1..20: mol_type = other DNA
cagagggagatattaggtaa

SEQ ID NO: 42905 - DNA, 20 bp, synthetic construct
  misc_feature 1..20: note = Description of Artificial Sequence: Synthetic oligonucleotide
  misc_feature 1..20: note = Target: SCN10A; (-) strand; PAM type: YTN; PAM sequence: CTG
  source 1..20: mol_type = other DNA
aggtcaagaaacagattaca

SEQ ID NO: 42906 - DNA, 20 bp, synthetic construct
  misc_feature 1..20: note = Description of Artificial Sequence: Synthetic oligonucleotide
  misc_feature 1..20: note = Target: SCN10A; (-) strand; PAM type: YTN; PAM sequence: TTA
  source 1..20: mol_type = other DNA
cagatgagaaaactgaggtc

SEQ ID NO: 42907 - DNA, 20 bp, synthetic construct
  misc_feature 1..20: note = Description of Artificial Sequence: Synthetic oligonucleotide
  misc_feature 1..20: note = Target: SCN10A; (-) strand; PAM type: YTN; PAM sequence: TTT
  source 1..20: mol_type = other DNA
acagatgagaaaactgaggt

SEQ ID NO: 42908 - DNA, 20 bp, synthetic construct
  misc_feature 1..20: note = Description of Artificial Sequence: Synthetic oligonucleotide
  misc_feature 1..20: note = Target: SCN10A; (-) strand; PAM type: YTN; PAM sequence: TTT
  source 1..20: mol_type = other DNA
tacagatgagaaaactgagg

SEQ ID NO: 42909 - DNA, 20 bp, synthetic construct
  misc_feature 1..20: note = Description of Artificial Sequence: Synthetic oligonucleotide
  misc_feature 1..20: note = Target: SCN10A; (-) strand; PAM type: YTN; PAM sequence: CTC
  source 1..20: mol_type = other DNA
attttacagatgagaaaact

SEQ ID NO: 42910 - DNA, 20 bp, synthetic construct
  misc_feature 1..20: note = Description of Artificial Sequence: Synthetic oligonucleotide
  misc_feature 1..20: note = Target: SCN10A; (-) strand; PAM type: YTN; PAM sequence: CTC
  source 1..20: mol_type = other DNA
tcattttacagatgagaaaa

SEQ ID NO: 42911 - DNA, 20 bp, synthetic construct
  misc_feature 1..20: note = Description of Artificial Sequence: Synthetic oligonucleotide
  misc_feature 1..20: note = Target: SCN10A; (-) strand; PAM type: YTN; PAM sequence: TTC
  source 1..20: mol_type = other DNA
tctcattttacagatgagaa

SEQ ID NO: 42912 - DNA, 20 bp, synthetic construct
  misc_feature 1..20: note = Description of Artificial Sequence: Synthetic oligonucleotide
  misc_feature 1..20: note = Target: SCN10A; (-) strand; PAM type: YTN; PAM sequence: TTT
  source 1..20: mol_type = other DNA
ctctcattttacagatgaga

SEQ ID NO: 42913 - DNA, 20 bp, synthetic construct
  misc_feature 1..20: note = Description of Artificial Sequence: Synthetic oligonucleotide
  misc_feature 1..20: note = Target: SCN10A; (-) strand; PAM type: YTN; PAM sequence: TTG
  source 1..20: mol_type = other DNA
aagcaatcatttctctcatt

SEQ ID NO: 42914 - DNA, 20 bp, synthetic construct
  misc_feature 1..20: note = Description of Artificial Sequence: Synthetic oligonucleotide
  misc_feature 1..20: note = Target: SCN10A; (-) strand; PAM type: YTN; PAM sequence: TTA
  source 1..20: mol_type = other DNA
ttgaagcaatcatttctctc

SEQ ID NO: 42915 - DNA, 20 bp, synthetic construct
  misc_feature 1..20: note = Description of Artificial Sequence: Synthetic oligonucleotide
  misc_feature 1..20: note = Target: SCN10A; (-) strand; PAM type: YTN; PAM sequence: TTG
  source 1..20: mol_type = other DNA
agattattgaagcaatcatt

SEQ ID NO: 42916 - DNA, 20 bp, synthetic construct
  misc_feature 1..20: note = Description of Artificial Sequence: Synthetic oligonucleotide
  misc_feature 1..20: note = Target: SCN10A; (-) strand; PAM type: YTN; PAM sequence: TTT
  source 1..20: mol_type = other DNA
gagattattgaagcaatcat

SEQ ID NO: 42917 - DNA, 20 bp, synthetic construct
  misc_feature 1..20: note = Description of Artificial Sequence: Synthetic oligonucleotide
  misc_feature 1..20: note = Target: SCN10A; (-) strand; PAM type: YTN; PAM sequence: CTG
  source 1..20: mol_type = other DNA
gggaggtttgagattattga

SEQ ID NO: 42918 - DNA, 20 bp, synthetic construct
  misc_feature 1..20: note = Description of Artificial Sequence: Synthetic oligonucleotide
  misc_feature 1..20: note = Target: SCN10A; (-) strand; PAM type: YTN; PAM sequence: TTA
  source 1..20: mol_type = other DNA
gtaccctggggaggtttgag

SEQ ID NO: 42919 - DNA, 20 bp, synthetic construct
  misc_feature 1..20: note = Description of Artificial Sequence: Synthetic oligonucleotide
  misc_feature 1..20: note = Target: SCN10A; (-) strand; PAM type: YTN; PAM sequence: TTT
  source 1..20: mol_type = other DNA
agtaccctggggaggtttga

SEQ ID NO: 42920 - DNA, 20 bp, synthetic construct
  misc_feature 1..20: note = Description of Artificial Sequence: Synthetic oligonucleotide
  misc_feature 1..20: note = Target: SCN10A; (-) strand; PAM type: YTN; PAM sequence: CTA
  source 1..20: mol_type = other DNA
tttagtaccctggggaggtt

SEQ ID NO: 42921 - DNA, 20 bp, synthetic construct
  misc_feature 1..20: note = Description of Artificial Sequence: Synthetic oligonucleotide
  misc_feature 1..20: note = Target: SCN10A; (-) strand; PAM type: YTN; PAM sequence: CTG
  source 1..20: mol_type = other DNA
ggacaagacagtgctattta

SEQ ID NO: 42922 - DNA, 20 bp, synthetic construct
  misc_feature 1..20: note = Description of Artificial Sequence: Synthetic oligonucleotide
  misc_feature 1..20: note = Target: SCN10A; (-) strand; PAM type: YTN; PAM sequence: CTG
  source 1..20: mol_type = other DNA
agcataagaagaggacagga

SEQ ID NO: 42923 - DNA, 20 bp, synthetic construct
  misc_feature 1..20: note = Description of Artificial Sequence: Synthetic oligonucleotide
  misc_feature 1..20: note = Target: SCN10A; (-) strand; PAM type: YTN; PAM sequence: TTC
  source 1..20: mol_type = other DNA
tgagcataagaagaggacag

SEQ ID NO: 42924 - DNA, 20 bp, synthetic construct
  misc_feature 1..20: note = Description of Artificial Sequence: Synthetic oligonucleotide
  misc_feature 1..20: note = Target: SCN10A; (-) strand; PAM type: YTN; PAM sequence: TTG
  source 1..20: mol_type = other DNA
cccagggttctgagcataag

SEQ ID NO: 42925 - DNA, 20 bp, synthetic construct
  misc_feature 1..20: note = Description of Artificial Sequence: Synthetic oligonucleotide
  misc_feature 1..20: note = Target: SCN10A; (-) strand; PAM type: YTN; PAM sequence: CTT
  source 1..20: mol_type = other DNA
gcccagggttctgagcataa

SEQ ID NO: 42926 - DNA, 20 bp, synthetic construct
  misc_feature 1..20: note = Description of Artificial Sequence: Synthetic oligonucleotide
  misc_feature 1..20: note = Target: SCN10A; (-) strand; PAM type: YTN; PAM sequence: TTA
  source 1..20: mol_type = other DNA
caggaaatccttgcccaggg

SEQ ID NO: 42927 - DNA, 20 bp, synthetic construct
  misc_feature 1..20: note = Description of Artificial Sequence: Synthetic oligonucleotide
  misc_feature 1..20: note = Target: SCN10A; (-) strand; PAM type: YTN; PAM sequence: CTT
  source 1..20: mol_type = other DNA
acaggaaatccttgcccagg

SEQ ID NO: 42928 - DNA, 20 bp, synthetic construct
  misc_feature 1..20: note = Description of Artificial Sequence: Synthetic oligonucleotide
  misc_feature 1..20: note = Target: SCN10A; (-) strand; PAM type: YTN; PAM sequence: TTC
  source 1..20: mol_type = other DNA
cacttacaggaaatccttgc

SEQ ID NO: 42929 - DNA, 20 bp, synthetic construct
  misc_feature 1..20: note = Description of Artificial Sequence: Synthetic oligonucleotide
  misc_feature 1..20: note = Target: SCN10A; (-) strand; PAM type: YTN; PAM sequence: CTA
  source 1..20: mol_type = other DNA
gggcaggcattccacttaca

SEQ ID NO: 42930 - DNA, 20 bp, synthetic construct
  misc_feature 1..20: note = Description of Artificial Sequence: Synthetic oligonucleotide
  misc_feature 1..20: note = Target: SCN10A; (-) strand; PAM type: YTN; PAM sequence: CTA
  source 1..20: mol_type = other DNA
ctagggcaggcattccactt

SEQ ID NO: 42931 - DNA, 20 bp, synthetic construct
  misc_feature 1..20: note = Description of Artificial Sequence: Synthetic oligonucleotide
  misc_feature 1..20: note = Target: SCN10A; (-) strand; PAM type: YTN; PAM sequence: TTA
  source 1..20: mol_type = other DNA
aaatatatacctactagggc

SEQ ID NO: 42932 - DNA, 20 bp, synthetic construct
  misc_feature 1..20: note = Description of Artificial Sequence: Synthetic oligonucleotide
  misc_feature 1..20: note = Target: SCN10A; (-) strand; PAM type: YTN; PAM sequence: TTT
  source 1..20: mol_type = other DNA
aaaatatatacctactaggg

SEQ ID NO: 42933 - DNA, 20 bp, synthetic construct
  misc_feature 1..20: note = Description of Artificial Sequence: Synthetic oligonucleotide
  misc_feature 1..20: note = Target: SCN10A; (-) strand; PAM type: YTN; PAM sequence: TTA
  source 1..20: mol_type = other DNA
acaatttaaaatatatacct

SEQ ID NO: 42934 - DNA, 20 bp, synthetic construct
  misc_feature 1..20: note = Description of Artificial Sequence: Synthetic oligonucleotide
  misc_feature 1..20: note = Target: SCN10A; (-) strand; PAM type: YTN; PAM sequence: CTA
  source 1..20: mol_type = other DNA
ttaacaatttaaaatatata

SEQ ID NO: 42935 - DNA, 20 bp, synthetic construct
  misc_feature 1..20: note = Description of Artificial Sequence: Synthetic oligonucleotide
  misc_feature 1..20: note = Target: SCN10A; (-) strand; PAM type: YTN; PAM sequence: TTG
  source 1..20: mol_type = other DNA
ctattaacaatttaaaatat

SEQ ID NO: 42936 - DNA, 20 bp, synthetic construct
  misc_feature 1..20: note = Description of Artificial Sequence: Synthetic oligonucleotide
  misc_feature 1..20: note = Target: SCN10A; (-) strand; PAM type: YTN; PAM sequence: CTG
  source 1..20: mol_type = other DNA
ttgctattaacaatttaaaa

SEQ ID NO: 42937 - DNA, 20 bp, synthetic construct
  misc_feature 1..20: note = Description of Artificial Sequence: Synthetic oligonucleotide
  misc_feature 1..20: note = Target: SCN10A; (-) strand; PAM type: YTN; PAM sequence: CTC
  source 1..20: mol_type = other DNA
aagagcaccagatgctgttg

SEQ ID NO: 42938 - DNA, 20 bp, synthetic construct
  misc_feature 1..20: note = Description of Artificial Sequence: Synthetic oligonucleotide
  misc_feature 1..20: note = Target: SCN10A; (-) strand; PAM type: YTN; PAM sequence: CTG
  source 1..20: mol_type = other DNA
gcagcgcctcaagagcacca

SEQ ID NO: 42939 - DNA, 20 bp, synthetic construct
  misc_feature 1..20: note = Description of Artificial Sequence: Synthetic oligonucleotide
  misc_feature 1..20: note = Target: SCN10A; (-) strand; PAM type: YTN; PAM sequence: CTG
  source 1..20: mol_type = other DNA
taacagcagaggggagtgtg

SEQ ID NO: 42940 - DNA, 20 bp, synthetic construct
  misc_feature 1..20: note = Description of Artificial Sequence: Synthetic oligonucleotide
  misc_feature 1..20: note = Target: SCN10A; (-) strand; PAM type: YTN; PAM sequence: CTG
  source 1..20: mol_type = other DNA
gcactgtaacagcagagggg

SEQ ID NO: 42941 - DNA, 20 bp, synthetic construct
  misc_feature 1..20: note = Description of Artificial Sequence: Synthetic oligonucleotide
  misc_feature 1..20: note = Target: SCN10A; (-) strand; PAM type: YTN; PAM sequence: TTC
  source 1..20: mol_type = other DNA
tggcactgtaacagcagagg

SEQ ID NO: 42942 - DNA, 20 bp, synthetic construct
  misc_feature 1..20: note = Description of Artificial Sequence: Synthetic oligonucleotide
  misc_feature 1..20: note = Target: SCN10A; (-) strand; PAM type: YTN; PAM sequence: TTT
  source 1..20: mol_type = other DNA
ctggcactgtaacagcagag

SEQ ID NO: 42943 - DNA, 20 bp, synthetic construct
  misc_feature 1..20: note = Description of Artificial Sequence: Synthetic oligonucleotide
  misc_feature 1..20: note = Target: SCN10A; (-) strand; PAM type: YTN; PAM sequence: TTG
  source 1..20: mol_type = other DNA
gtggtgcagtttctggcact

SEQ ID NO: 42944 - DNA, 20 bp, synthetic construct
  misc_feature 1..20: note = Description of Artificial Sequence: Synthetic oligonucleotide
  misc_feature 1..20: note = Target: SCN10A; (-) strand; PAM type: YTN; PAM sequence: TTT
  source 1..20: mol_type = other DNA
ggtggtgcagtttctggcac

SEQ ID NO: 42945 - DNA, 20 bp, synthetic construct
  misc_feature 1..20: note = Description of Artificial Sequence: Synthetic oligonucleotide
  misc_feature 1..20: note = Target: SCN10A; (-) strand; PAM type: YTN; PAM sequence: CTT
  source 1..20: mol_type = other DNA
tggtggtgcagtttctggca

SEQ ID NO: 42946 - DNA, 20 bp, synthetic construct
  misc_feature 1..20: note = Description of Artificial Sequence: Synthetic oligonucleotide
  misc_feature 1..20: note = Target: SCN10A; (-) strand; PAM type: YTN; PAM sequence: CTG
  source 1..20: mol_type = other DNA
agcataagacaactttggtg

SEQ ID NO: 42947 - DNA, 20 bp, synthetic construct
  misc_feature 1..20: note = Description of Artificial Sequence: Synthetic oligonucleotide
  misc_feature 1..20: note = Target: SCN10A; (-) strand; PAM type: YTN; PAM sequence: CTG
  source 1..20: mol_type = other DNA
aacaaagatcactgagcata

SEQ ID NO: 42948 - DNA, 20 bp, synthetic construct
  misc_feature 1..20: note = Description of Artificial Sequence: Synthetic oligonucleotide
  misc_feature 1..20: note = Target: SCN10A; (-) strand; PAM type: YTN; PAM sequence: TTG
  source 1..20: mol_type = other DNA
tggtgaggggtaaacaaaat

SEQ ID NO: 42949 - DNA, 20 bp, synthetic construct
  misc_feature 1..20: note = Description of Artificial Sequence: Synthetic oligonucleotide
  misc_feature 1..20: note = Target: SCN10A; (-) strand; PAM type: YTN; PAM sequence: CTG
  source 1..20: mol_type = other DNA
gattgtggtgaggggtaaac

SEQ ID NO: 42950 - DNA, 20 bp, synthetic construct
  misc_feature 1..20: note = Description of Artificial Sequence: Synthetic oligonucleotide
  misc_feature 1..20: note = Target: SCN10A; (-) strand; PAM type: YTN; PAM sequence: CTC
  source 1..20: mol_type = other DNA
tggattgtggtgaggggtaa

SEQ ID NO: 42951 - DNA, 20 bp, synthetic construct
  misc_feature 1..20: note = Description of Artificial Sequence: Synthetic oligonucleotide
  misc_feature 1..20: note = Target: SCN10A; (-) strand; PAM type: YTN; PAM sequence: CTC
  source 1..20: mol_type = other DNA
tctggattgtggtgaggggt

SEQ ID NO: 42952 - DNA, 20 bp, synthetic construct
  misc_feature 1..20: note = Description of Artificial Sequence: Synthetic oligonucleotide
  misc_feature 1..20: note = Target: SCN10A; (-) strand; PAM type: YTN; PAM sequence: CTA
  source 1..20: mol_type = other DNA
ctctctggattgtggtgagg

SEQ ID NO: 42953 - DNA, 20 bp, synthetic construct
  misc_feature 1..20: note = Description of Artificial Sequence: Synthetic oligonucleotide
  misc_feature 1..20: note = Target: SCN10A; (-) strand; PAM type: YTN; PAM sequence: CTA
  source 1..20: mol_type = other DNA
ataatacctactctctggat

SEQ ID NO: 42954 - DNA, 20 bp, synthetic construct
  misc_feature 1..20: note = Description of Artificial Sequence: Synthetic oligonucleotide
  misc_feature 1..20: note = Target: SCN10A; (-) strand; PAM type: YTN; PAM sequence: TTC
  source 1..20: mol_type = other DNA
aatggggctaataataccta

SEQ ID NO: 42955 - DNA, 20 bp, synthetic construct
  misc_feature 1..20: note = Description of Artificial Sequence: Synthetic oligonucleotide
  misc_feature 1..20: note = Target: SCN10A; (-) strand; PAM type: YTN; PAM sequence: TTC
  source 1..20: mol_type = other DNA
attcaatggggctaataata

SEQ ID NO: 42956 - DNA, 20 bp, synthetic construct
  misc_feature 1..20: note = Description of Artificial Sequence: Synthetic oligonucleotide
  misc_feature 1..20: note = Target: SCN10A; (-) strand; PAM type: YTN; PAM sequence: CTC
  source 1..20: mol_type = other DNA
attcattcaatggggctaat

SEQ ID NO: 42957 - DNA, 20 bp, synthetic construct
  misc_feature 1..20: note = Description of Artificial Sequence: Synthetic oligonucleotide
  misc_feature 1..20: note = Target: SCN10A; (-) strand; PAM type: YTN; PAM sequence: TTC
  source 1..20: mol_type = other DNA
tcattcattcaatggggcta

SEQ ID NO: 42958 - DNA, 20 bp, synthetic construct
  misc_feature 1..20: note = Description of Artificial Sequence: Synthetic oligonucleotide
  misc_feature 1..20: note = Target: SCN10A; (-) strand; PAM type: YTN; PAM sequence: TTT
  source 1..20: mol_type = other DNA
ctcattcattcaatggggct

SEQ ID NO: 42959 - DNA, 20 bp, synthetic construct
  misc_feature 1..20: note = Description of Artificial Sequence: Synthetic oligonucleotide
  misc_feature 1..20: note = Target: SCN10A; (-) strand; PAM type: YTN; PAM sequence: TTT
  source 1..20: mol_type = other DNA
tctcattcattcaatggggc

SEQ ID NO: 42960 - DNA, 20 bp, synthetic construct
  misc_feature 1..20: note = Description of Artificial Sequence: Synthetic oligonucleotide
  misc_feature 1..20: note = Target: SCN10A; (-) strand; PAM type: YTN; PAM sequence: CTC
  source 1..20: mol_type = other DNA
agttttctcattcattcaat

SEQ ID NO: 42961 - DNA, 20 bp, synthetic construct
  misc_feature 1..20: note = Description of Artificial Sequence: Synthetic oligonucleotide
  misc_feature 1..20: note = Target: SCN10A; (-) strand; PAM type: YTN; PAM sequence: CTG
  source 1..20: mol_type = other DNA
agtctcagttttctcattca

SEQ ID NO: 42962 - DNA, 20 bp, synthetic construct
  misc_feature 1..20: note = Description of Artificial Sequence: Synthetic oligonucleotide
  misc_feature 1..20: note = Target: SCN10A; (-) strand; PAM type: YTN; PAM sequence: CTC
  source 1..20: mol_type = other DNA
tgagtctcagttttctcatt

SEQ ID NO: 42963 - DNA, 20 bp, synthetic construct
  misc_feature 1..20: note = Description of Artificial Sequence: Synthetic oligonucleotide
  misc_feature 1..20: note = Target: SCN10A; (-) strand; PAM type: YTN; PAM sequence: TTA
  source 1..20: mol_type = other DNA
aacccctctgagtctcagtt

SEQ ID NO: 42964 - DNA, 20 bp, synthetic construct
  misc_feature 1..20: note = Description of Artificial Sequence: Synthetic oligonucleotide
  misc_feature 1..20: note = Target: SCN10A; (-) strand; PAM type: YTN; PAM sequence: TTT
  source 1..20: mol_type = other DNA
aaacccctctgagtctcagt

SEQ ID NO: 42965 - DNA, 20 bp, synthetic construct
  misc_feature 1..20: note = Description of Artificial Sequence: Synthetic oligonucleotide
  misc_feature 1..20: note = Target: SCN10A; (-) strand; PAM type: YTN; PAM sequence: TTT
  source 1..20: mol_type = other DNA
taaacccctctgagtctcag

SEQ ID NO: 42966 - DNA, 20 bp, synthetic construct
  misc_feature 1..20: note = Description of Artificial Sequence: Synthetic oligonucleotide
  misc_feature 1..20: note = Target: SCN10A; (-) strand; PAM type: YTN; PAM sequence: CTG
  source 1..20: mol_type = other DNA
gcaatattttaaacccctct

SEQ ID NO: 42967 - DNA, 20 bp, synthetic construct
  misc_feature 1..20: note = Description of Artificial Sequence: Synthetic oligonucleotide
  misc_feature 1..20: note = Target: SCN10A; (-) strand; PAM type: YTN; PAM sequence: CTC
  source 1..20: mol_type = other DNA
atgctggcaatattttaaac

SEQ ID NO: 42968 - DNA, 20 bp, synthetic construct
  misc_feature 1..20: note = Description of Artificial Sequence: Synthetic oligonucleotide
  misc_feature 1..20: note = Target: SCN10A; (-) strand; PAM type: YTN; PAM sequence: TTG
  source 1..20: mol_type = other DNA
tggatggctcatgctggcaa

SEQ ID NO: 42969 - DNA, 20 bp, synthetic construct
  misc_feature 1..20: note = Description of Artificial Sequence: Synthetic oligonucleotide
  misc_feature 1..20: note = Target: SCN10A; (-) strand; PAM type: YTN; PAM sequence: CTT
  source 1..20: mol_type = other DNA
gtggatggctcatgctggca

SEQ ID NO: 42970 - DNA, 20 bp, synthetic construct
  misc_feature 1..20: note = Description of Artificial Sequence: Synthetic oligonucleotide
  misc_feature 1..20: note = Target: SCN10A; (-) strand; PAM type: YTN; PAM sequence: CTA
  source 1..20: mol_type = other DNA
cttgtggatggctcatgctg

SEQ ID NO: 42971 - DNA, 20 bp, synthetic construct
  misc_feature 1..20: note = Description of Artificial Sequence: Synthetic oligonucleotide
  misc_feature 1..20: note = Target: SCN10A; (-) strand; PAM type: YTN; PAM sequence: CTC
  source 1..20: mol_type = other DNA
aactacttgtggatggctca

SEQ ID NO: 42972 - DNA, 20 bp, synthetic construct
  misc_feature 1..20: note = Description of Artificial Sequence: Synthetic oligonucleotide
  misc_feature 1..20: note = Target: SCN10A; (-) strand; PAM type: YTN; PAM sequence: CTG
  source 1..20: mol_type = other DNA
actcaactacttgtggatgg

SEQ ID NO: 42973 - DNA, 20 bp, synthetic construct
  misc_feature 1..20: note = Description of Artificial Sequence: Synthetic oligonucleotide
  misc_feature 1..20: note = Target: SCN10A; (-) strand; PAM type: YTN; PAM sequence: TTC
  source 1..20: mol_type = other DNA
ctgactcaactacttgtgga

SEQ ID NO: 42974 - DNA, 20 bp, synthetic construct
  misc_feature 1..20: note = Description of Artificial Sequence: Synthetic oligonucleotide
  misc_feature 1..20: note = Target: SCN10A; (-) strand; PAM type: YTN; PAM sequence: TTG
  source 1..20: mol_type = other DNA
cattcctgactcaactactt

SEQ ID NO: 42975 - DNA, 20 bp, synthetic construct
  misc_feature 1..20: note = Description of Artificial Sequence: Synthetic oligonucleotide
  misc_feature 1..20: note = Target: SCN10A; (-) strand; PAM type: YTN; PAM sequence: TTT
  source 1..20: mol_type = other DNA
gcattcctgactcaactact

SEQ ID NO: 42976 - DNA, 20 bp, synthetic construct
  misc_feature 1..20: note = Description of Artificial Sequence: Synthetic oligonucleotide
  misc_feature 1..20: note = Target: SCN10A; (-) strand; PAM type: YTN; PAM sequence: CTG
  source 1..20: mol_type = other DNA
ggtttgcattcctgactcaa

SEQ ID NO: 42977 - DNA, 20 bp, synthetic construct
  misc_feature 1..20: note = Description of Artificial Sequence: Synthetic oligonucleotide
  misc_feature 1..20: note = Target: SCN10A; (-) strand; PAM type: YTN; PAM sequence: CTA
  source 1..20: mol_type = other DNA
catggataagtcacagagta

SEQ ID NO: 42978 - DNA, 20 bp, synthetic construct
  misc_feature 1..20: note = Description of Artificial Sequence: Synthetic oligonucleotide
  misc_feature 1..20: note = Target: SCN10A; (-) strand; PAM type: YTN; PAM sequence: CTG
  source 1..20: mol_type = other DNA
agatcccgagagaaaagggg

SEQ ID NO: 42979 - DNA, 20 bp, synthetic construct
  misc_feature 1..20: note = Description of Artificial Sequence: Synthetic oligonucleotide
  misc_feature 1..20: note = Target: SCN10A; (-) strand; PAM type: YTN; PAM sequence: TTG
  source 1..20: mol_type = other DNA
cgtaactgagatcccgagag

SEQ ID NO: 42980 - DNA, 20 bp, synthetic construct
  misc_feature 1..20: note = Description of Artificial Sequence: Synthetic oligonucleotide
  misc_feature 1..20: note = Target: SCN10A; (-) strand; PAM type: YTN; PAM sequence: TTT
  source 1..20: mol_type = other DNA
gcgtaactgagatcccgaga

SEQ ID NO: 42981 - DNA, 20 bp, synthetic construct
  misc_feature 1..20: note = Description of Artificial Sequence: Synthetic oligonucleotide
  misc_feature 1..20: note = Target: SCN10A; (-) strand; PAM type: YTN; PAM sequence: CTA
  source 1..20: mol_type = other DNA
gatttgcgtaactgagatcc

SEQ ID NO: 42982 - DNA, 20 bp, synthetic construct
  misc_feature 1..20: note = Description of Artificial Sequence: Synthetic oligonucleotide
  misc_feature 1..20: note = Target: SCN10A; (-) strand; PAM type: YTN; PAM sequence: TTC
  source 1..20: mol_type = other DNA
tagatttgcgtaactgagat

SEQ ID NO: 42983 - DNA, 20 bp, synthetic construct
  misc_feature 1..20: note = Description of Artificial Sequence: Synthetic oligonucleotide
  misc_feature 1..20: note = Target: SCN10A; (-) strand; PAM type: YTN; PAM sequence: CTG
  source 1..20: mol_type = other DNA
ttctagatttgcgtaactga

SEQ ID NO: 42984 - DNA, 20 bp, synthetic construct
  misc_feature 1..20: note = Description of Artificial Sequence: Synthetic oligonucleotide
  misc_feature 1..20: note = Target: SCN10A; (-) strand; PAM type: YTN; PAM sequence: CTG
  source 1..20: mol_type = other DNA
aggtagataggcgctgttct

SEQ ID NO: 42985 - DNA, 20 bp, synthetic construct
  misc_feature 1..20: note = Description of Artificial Sequence: Synthetic oligonucleotide
  misc_feature 1..20: note = Target: SCN10A; (-) strand; PAM type: YTN; PAM sequence: TTC
  source 1..20: mol_type = other DNA
catacccctgaggtagatag

SEQ ID NO: 42986 - DNA, 20 bp, synthetic construct
  misc_feature 1..20: note = Description of Artificial Sequence: Synthetic oligonucleotide
  misc_feature 1..20: note = Target: SCN10A; (-) strand; PAM type: YTN; PAM sequence: CTT
  source 1..20: mol_type = other DNA
ccatacccctgaggtagata

SEQ ID NO: 42987 - DNA, 20 bp, synthetic construct
  misc_feature 1..20: note = Description of Artificial Sequence: Synthetic oligonucleotide
  misc_feature 1..20: note = Target: SCN10A; (-) strand; PAM type: YTN; PAM sequence: TTA
  source 1..20: mol_type = other DNA
atgccttccatacccctgag

SEQ ID NO: 42988 - DNA, 20 bp, synthetic construct
  misc_feature 1..20: note = Description of Artificial Sequence: Synthetic oligonucleotide
  misc_feature 1..20: note = Target: SCN10A; (-) strand; PAM type: YTN; PAM sequence: TTT
  source 1..20: mol_type = other DNA
aatgccttccatacccctga

SEQ ID NO: 42989 - DNA, 20 bp, synthetic construct
  misc_feature 1..20: note = Description of Artificial Sequence: Synthetic oligonucleotide
  misc_feature 1..20: note = Target: SCN10A; (-) strand; PAM type: YTN; PAM sequence: TTC
  source 1..20: mol_type = other DNA
atttaatgccttccataccc

SEQ ID NO: 42990 - DNA, 20 bp, synthetic construct
  misc_feature 1..20: note = Description of Artificial Sequence: Synthetic oligonucleotide
  misc_feature 1..20: note = Target: SCN10A; (-) strand; PAM type: YTN; PAM sequence: TTT
  source 1..20: mol_type = other DNA
catttaatgccttccatacc

SEQ ID NO: 42991 - DNA, 20 bp, synthetic construct
  misc_feature 1..20: note = Description of Artificial Sequence: Synthetic oligonucleotide
  misc_feature 1..20: note = Target: SCN10A; (-) strand; PAM type: YTN; PAM sequence: CTT
  source 1..20: mol_type = other DNA
tcatttaatgccttccatac

SEQ ID NO: 42992 - DNA, 20 bp, synthetic construct
  misc_feature 1..20: note = Description of Artificial Sequence: Synthetic oligonucleotide
  misc_feature 1..20: note = Target: SCN10A; (-) strand; PAM type: YTN; PAM sequence: TTA
  source 1..20: mol_type = other DNA
tcctttcatttaatgccttc

SEQ ID NO: 42993 - DNA, 20 bp, synthetic construct
  misc_feature 1..20: note = Description of Artificial Sequence: Synthetic oligonucleotide
  misc_feature 1..20: note = Target: SCN10A; (-) strand; PAM type: YTN; PAM sequence: CTA
  source 1..20: mol_type = other DNA
ttatcctttcatttaatgcc

SEQ ID NO: 42994 - DNA, 20 bp, synthetic construct
  misc_feature 1..20: note = Description of Artificial Sequence: Synthetic oligonucleotide
  misc_feature 1..20: note = Target: SCN10A; (-) strand; PAM type: YTN; PAM sequence: TTC
  source 1..20: mol_type = other DNA
ctattatcctttcatttaat

SEQ ID NO: 42995 - DNA, 20 bp, synthetic construct
  misc_feature 1..20: note = Description of Artificial Sequence: Synthetic oligonucleotide
  misc_feature 1..20: note = Target: SCN10A; (-) strand; PAM type: YTN; PAM sequence: TTT
  source 1..20: mol_type = other DNA
cctattatcctttcatttaa

SEQ ID NO: 42996 - DNA, 20 bp, synthetic construct
  misc_feature 1..20: note = Description of Artificial Sequence: Synthetic oligonucleotide
  misc_feature 1..20: note = Target: SCN10A; (-) strand; PAM type: YTN; PAM sequence: TTT
  source 1..20: mol_type = other DNA
tcctattatcctttcattta

SEQ ID NO: 42997 - DNA, 20 bp, synthetic construct
  misc_feature 1..20: note = Description of Artificial Sequence: Synthetic oligonucleotide
  misc_feature 1..20: note = Target: SCN10A; (-) strand; PAM type: YTN; PAM sequence: TTA
  source 1..20: mol_type = other DNA
taagaaaatgtcagggcaat

SEQ ID NO: 42998 - DNA, 20 bp, synthetic construct
  misc_feature 1..20: note = Description of Artificial Sequence: Synthetic oligonucleotide
  misc_feature 1..20: note = Target: SCN10A; (-) strand; PAM type: YTN; PAM sequence: TTT
  source 1..20: mol_type = other DNA
ataagaaaatgtcagggcaa

SEQ ID NO: 42999 - DNA, 20 bp, synthetic construct
  misc_feature 1..20: note = Description of Artificial Sequence: Synthetic oligonucleotide
  misc_feature 1..20: note = Target: SCN10A; (-) strand; PAM type: YTN; PAM sequence: CTC
  source 1..20: mol_type = other DNA
atgtttataagaaaatgtca

SEQ ID NO: 43000 - DNA, 20 bp, synthetic construct
  misc_feature 1..20: note = Description of Artificial Sequence: Synthetic oligonucleotide
  misc_feature 1..20: note = Target: SCN10A; (-) strand; PAM type: YTN; PAM sequence: CTC
  source 1..20: mol_type = other DNA
tcatgtttataagaaaatgt

SEQ ID NO: 43001 - DNA, 20 bp, synthetic construct
  misc_feature 1..20: note = Description of Artificial Sequence: Synthetic oligonucleotide
  misc_feature 1..20: note = Target: SCN10A; (-) strand; PAM type: YTN; PAM sequence: TTA
  source 1..20: mol_type = other DNA
ataggaatcgaatcccagat

SEQ ID NO: 43002 - DNA, 20 bp, synthetic construct
  misc_feature 1..20: note = Description of Artificial Sequence: Synthetic oligonucleotide
  misc_feature 1..20: note = Target: SCN10A; (-) strand; PAM type: YTN; PAM sequence: CTG
  source 1..20: mol_type = other DNA
attaataggaatcgaatccc

SEQ ID NO: 43003 - DNA, 20 bp, synthetic construct
  misc_feature 1..20: note = Description of Artificial Sequence: Synthetic oligonucleotide
  misc_feature 1..20: note = Target: SCN10A; (-) strand; PAM type: YTN; PAM sequence: CTC
  source 1..20: mol_type = other DNA
tgattaataggaatcgaatc

SEQ ID NO: 43004 - DNA, 20 bp, synthetic construct
  misc_feature 1..20: note = Description of Artificial Sequence: Synthetic oligonucleotide
  misc_feature 1..20: note = Target: SCN10A; (-) strand; PAM type: YTN; PAM sequence: CTC
  source 1..20: mol_type = other DNA
caagggtgccgactctgatt

SEQ ID NO: 43005 - DNA, 20 bp, synthetic construct
  misc_feature 1..20: note = Description of Artificial Sequence: Synthetic oligonucleotide
  misc_feature 1..20: note = Target: SCN10A; (-) strand; PAM type: YTN; PAM sequence: TTG
  source 1..20: mol_type = other DNA
tgcctccaagggtgccgact

SEQ ID NO: 43006 - DNA, 20 bp, synthetic construct
  misc_feature 1..20: note = Description of Artificial Sequence: Synthetic oligonucleotide
  misc_feature 1..20: note = Target: SCN10A; (-) strand; PAM type: YTN; PAM sequence: CTT
  source 1..20: mol_type = other DNA
gtgcctccaagggtgccgac

SEQ ID NO: 43007 - DNA, 20 bp, synthetic construct
  misc_feature 1..20: note = Description of Artificial Sequence: Synthetic oligonucleotide
  misc_feature 1..20: note = Target: SCN10A; (-) strand; PAM type: YTN; PAM sequence: TTG
  source 1..20: mol_type = other DNA
ggatggggaggaaggcttgt

SEQ ID NO: 43008 - DNA, 20 bp, synthetic construct
  misc_feature 1..20: note = Description of Artificial Sequence: Synthetic oligonucleotide
  misc_feature 1..20: note = Target: SCN10A; (-) strand; PAM type: YTN; PAM sequence: CTT
  source 1..20: mol_type = other DNA
gggatggggaggaaggcttg

SEQ ID NO: 43009 - DNA, 20 bp, synthetic construct
  misc_feature 1..20: note = Description of Artificial Sequence: Synthetic oligonucleotide
  misc_feature 1..20: note = Target: SCN10A; (-) strand; PAM type: YTN; PAM sequence: CTC
  source 1..20: mol_type = other DNA
cttgggatggggaggaaggc

SEQ ID NO: 43010 - DNA, 20 bp, synthetic construct
  misc_feature 1..20: note = Description of Artificial Sequence: Synthetic oligonucleotide
  misc_feature 1..20: note = Target: SCN10A; (-) strand; PAM type: YTN; PAM sequence: CTG
  source 1..20: mol_type = other DNA
gcagaatcccaaccctcctt

SEQ ID NO: 43011 - DNA, 20 bp, synthetic construct
  misc_feature 1..20: note = Description of Artificial Sequence: Synthetic oligonucleotide
  misc_feature 1..20: note = Target: SCN10A; (-) strand; PAM type: YTN; PAM sequence: CTC
  source 1..20: mol_type = other DNA
aggaaaggccatggcccagc

SEQ ID NO: 43012 - DNA, 20 bp, synthetic construct
  misc_feature 1..20: note = Description of Artificial Sequence: Synthetic oligonucleotide
  misc_feature 1..20: note = Target: SCN10A; (-) strand; PAM type: YTN; PAM sequence: CTG
  source 1..20: mol_type = other DNA
agtcagggcacctcaggaaa

SEQ ID NO: 43013 - DNA, 20 bp, synthetic construct
  misc_feature 1..20: note = Description of Artificial Sequence: Synthetic oligonucleotide
  misc_feature 1..20: note = Target: SCN10A; (-) strand; PAM type: YTN; PAM sequence: TTG
  source 1..20: mol_type = other DNA
ggggatatgatccccacaaa

SEQ ID NO: 43014 - DNA, 20 bp, synthetic construct
  misc_feature 1..20: note = Description of Artificial Sequence: Synthetic oligonucleotide
  misc_feature 1..20: note = Target: SCN10A; (-) strand; PAM type: YTN; PAM sequence: CTG
  source 1..20: mol_type = other DNA
ttgggggatatgatccccac

SEQ ID NO: 43015 - DNA, 20 bp, synthetic construct
  misc_feature 1..20: note = Description of Artificial Sequence: Synthetic oligonucleotide
  misc_feature 1..20: note = Target: SCN10A; (-) strand; PAM type: YTN; PAM sequence: CTG
  source 1..20: mol_type = other DNA
acctgttgggggatatgatc

SEQ ID NO: 43016 - DNA, 20 bp, synthetic construct
  misc_feature 1..20: note = Description of Artificial Sequence: Synthetic oligonucleotide
  misc_feature 1..20: note = Target: SCN10A; (-) strand; PAM type: YTN; PAM sequence: TTG
  source 1..20: mol_type = other DNA
ctgacctgttgggggatatg

SEQ ID NO: 43017 - DNA, 20 bp, synthetic construct
  misc_feature 1..20: note = Description of Artificial Sequence: Synthetic oligonucleotide
  misc_feature 1..20: note = Target: SCN10A; (-) strand; PAM type: YTN; PAM sequence: CTT
  source 1..20: mol_type = other DNA
gctgacctgttgggggatat

SEQ ID NO: 43018 - DNA, 20 bp, synthetic construct
  misc_feature 1..20: note = Description of Artificial Sequence: Synthetic oligonucleotide
  misc_feature 1..20: note = Target: SCN10A; (-) strand; PAM type: YTN; PAM sequence: CTA
  source 1..20: mol_type = other DNA
gaacttgctgacctgttggg

SEQ ID NO: 43019 - DNA, 20 bp, synthetic construct
  misc_feature 1..20: note = Description of Artificial Sequence: Synthetic oligonucleotide
  misc_feature 1..20: note = Target: SCN10A; (-) strand; PAM type: YTN; PAM sequence: CTG
  source 1..20: mol_type = other DNA
ggagaatacaagcagggaaa

SEQ ID NO: 43020 - DNA, 20 bp, synthetic construct
  misc_feature 1..20: note = Description of Artificial Sequence: Synthetic oligonucleotide
  misc_feature 1..20: note = Target: SCN10A; (-) strand; PAM type: YTN; PAM sequence: TTC
  source 1..20: mol_type = other DNA
caagtgagccctgggagaat

SEQ ID NO: 43021 - DNA, 20 bp, synthetic construct
  misc_feature 1..20: note = Description of Artificial Sequence: Synthetic oligonucleotide
  misc_feature 1..20: note = Target: SCN10A; (-) strand; PAM type: YTN; PAM sequence: TTA
  source 1..20: mol_type = other DNA
gatgtgttccaagtgagccc

SEQ ID NO: 43022 - DNA, 20 bp, synthetic construct
  misc_feature 1..20: note = Description of Artificial Sequence: Synthetic oligonucleotide
  misc_feature 1..20: note = Target: SCN10A; (-) strand; PAM type: YTN; PAM sequence: CTG
  source 1..20: mol_type = other DNA
gaaccaggtgtgttagatgt

SEQ ID NO: 43023 - DNA, 20 bp, synthetic construct
  misc_feature 1..20: note = Description of Artificial Sequence: Synthetic oligonucleotide
  misc_feature 1..20: note = Target: SCN10A; (-) strand; PAM type: YTN; PAM sequence: TTC
  source 1..20: mol_type = other DNA
ccaactggaaccaggtgtgt

SEQ ID NO: 43024 - DNA, 20 bp, synthetic construct
  misc_feature 1..20: note = Description of Artificial Sequence: Synthetic oligonucleotide
  misc_feature 1..20: note = Target: SCN10A; (-) strand; PAM type: YTN; PAM sequence: CTT
  source 1..20: mol_type = other DNA
cccaactggaaccaggtgtg

SEQ ID NO: 43025 - DNA, 20 bp, synthetic construct
  misc_feature 1..20: note = Description of Artificial Sequence: Synthetic oligonucleotide
  misc_feature 1..20: note = Target: SCN10A; (-) strand; PAM type: YTN; PAM sequence: TTG
  source 1..20: mol_type = other DNA
gtcttcccaactggaaccag

SEQ ID NO: 43026 - DNA, 20 bp, synthetic construct
  misc_feature 1..20: note = Description of Artificial Sequence: Synthetic oligonucleotide
  misc_feature 1..20: note = Target: SCN10A; (-) strand; PAM type: YTN; PAM sequence: CTT
  source 1..20: mol_type = other DNA
ggtcttcccaactggaacca

SEQ ID NO: 43027 - DNA, 20 bp, synthetic construct
  misc_feature 1..20: note = Description of Artificial Sequence: Synthetic oligonucleotide
  misc_feature 1..20: note = Target: SCN10A; (-) strand; PAM type: YTN; PAM sequence: CTC
  source 1..20: mol_type = other DNA
aaagggatcttggtcttccc

SEQ ID NO: 43028 - DNA, 20 bp, synthetic construct
  misc_feature 1..20: note = Description of Artificial Sequence: Synthetic oligonucleotide
  misc_feature 1..20: note = Target: SCN10A; (-) strand; PAM type: YTN; PAM sequence: TTC
  source 1..20: mol_type = other DNA
acatctcaaagggatcttgg

SEQ ID NO: 43029 - DNA, 20 bp, synthetic construct
  misc_feature 1..20: note = Description of Artificial Sequence: Synthetic oligonucleotide
  misc_feature 1..20: note = Target: SCN10A; (-) strand; PAM type: YTN; PAM sequence: CTC
  source 1..20: mol_type = other DNA
aggattcacatctcaaaggg

SEQ ID NO: 43030 - DNA, 20 bp, synthetic construct
  misc_feature 1..20: note = Description of Artificial Sequence: Synthetic oligonucleotide
  misc_feature 1..20: note = Target: SCN10A; (-) strand; PAM type: YTN; PAM sequence: CTC
  source 1..20: mol_type = other DNA
actcaggattcacatctcaa

SEQ ID NO: 43031 - DNA, 20 bp, synthetic construct
  misc_feature 1..20: note = Description of Artificial Sequence: Synthetic oligonucleotide
  misc_feature 1..20: note = Target: SCN10A; (-) strand; PAM type: YTN; PAM sequence: CTA
  source 1..20: mol_type = other DNA
acatcctcactcaggattca

SEQ ID NO: 43032 - DNA, 20 bp, synthetic construct
  misc_feature 1..20: note = Description of Artificial Sequence: Synthetic oligonucleotide
  misc_feature 1..20: note = Target: SCN10A; (-) strand; PAM type: YTN; PAM sequence: CTG
  source 1..20: mol_type = other DNA
tcagcaatgccccactaaca

SEQ ID NO: 43033 - DNA, 20 bp, synthetic construct
  misc_feature 1..20: note = Description of Artificial Sequence: Synthetic oligonucleotide
  misc_feature 1..20: note = Target: SCN10A; (-) strand; PAM type: YTN; PAM sequence: CTC
  source 1..20: mol_type = other DNA
tgtcagcaatgccccactaa

SEQ ID NO: 43034 - DNA, 20 bp, synthetic construct
  misc_feature 1..20: note = Description of Artificial Sequence: Synthetic oligonucleotide
  misc_feature 1..20: note = Target: SCN10A; (-) strand; PAM type: YTN; PAM sequence: CTC
  source 1..20: mol_type = other DNA
tctgtcagcaatgccccact

SEQ ID NO: 43035 - DNA, 20 bp, synthetic construct
  misc_feature 1..20: note = Description of Artificial Sequence: Synthetic oligonucleotide
  misc_feature 1..20: note = Target: SCN10A; (-) strand; PAM type: YTN; PAM sequence: TTC
  source 1..20: mol_type = other DNA
tctctgtcagcaatgcccca

SEQ ID NO: 43036 - DNA, 20 bp, synthetic construct
  misc_feature 1..20: note = Description of Artificial Sequence: Synthetic oligonucleotide
  misc_feature 1..20: note = Target: SCN10A; (-) strand; PAM type: YTN; PAM sequence: TTT
  source 1..20: mol_type = other DNA
ctctctgtcagcaatgcccc

SEQ ID NO: 43037 - DNA, 20 bp, synthetic construct
  misc_feature 1..20: note = Description of Artificial Sequence: Synthetic oligonucleotide
  misc_feature 1..20: note = Target: SCN10A; (-) strand; PAM type: YTN; PAM sequence: TTG
  source 1..20: mol_type = other DNA
catttctctctgtcagcaat

SEQ ID NO: 43038 - DNA, 20 bp, synthetic construct
  misc_feature 1..20: note = Description of Artificial Sequence: Synthetic oligonucleotide
  misc_feature 1..20: note = Target: SCN10A; (-) strand; PAM type: YTN; PAM sequence: TTG
  source 1..20: mol_type = other DNA
caggaagagttgcatttctc

SEQ ID NO: 43039 - DNA, 20 bp, synthetic construct
  misc_feature 1..20: note = Description of Artificial Sequence: Synthetic oligonucleotide
  misc_feature 1..20: note = Target: SCN10A; (-) strand; PAM type: YTN; PAM sequence: CTG
  source 1..20: mol_type = other DNA
ttgcaggaagagttgcattt

SEQ ID NO: 43040 - DNA, 20 bp, synthetic construct
  misc_feature 1..20: note = Description of Artificial Sequence: Synthetic oligonucleotide
  misc_feature 1..20: note = Target: SCN10A; (-) strand; PAM type: YTN; PAM sequence: TTG
  source 1..20: mol_type = other DNA
ctgttgcaggaagagttgca

SEQ ID NO: 43041 - DNA, 20 bp, synthetic construct
  misc_feature 1..20: note = Description of Artificial Sequence: Synthetic oligonucleotide
  misc_feature 1..20: note = Target: SCN10A; (-) strand; PAM type: YTN; PAM sequence: CTG
  source 1..20: mol_type = other DNA
tgattgctgttgcaggaaga

SEQ ID NO: 43042 - DNA, 20 bp, synthetic construct
  misc_feature 1..20: note = Description of Artificial Sequence: Synthetic oligonucleotide
  misc_feature 1..20: note = Target: SCN10A; (-) strand; PAM type: YTN; PAM sequence: TTG
  source 1..20: mol_type = other DNA
ccctgtgattgctgttgcag

SEQ ID NO: 43043 - DNA, 20 bp, synthetic construct
  misc_feature 1..20: note = Description of Artificial Sequence: Synthetic oligonucleotide
  misc_feature 1..20: note = Target: SCN10A; (-) strand; PAM type: YTN; PAM sequence: CTT
  source 1..20: mol_type = other DNA
gccctgtgattgctgttgca

SEQ ID NO: 43044 - DNA, 20 bp, synthetic construct
  misc_feature 1..20: note = Description of Artificial Sequence: Synthetic oligonucleotide
  misc_feature 1..20: note = Target: SCN10A; (-) strand; PAM type: YTN; PAM sequence: CTA
  source 1..20: mol_type = other DNA
acccttgccctgtgattgct

SEQ ID NO: 43045 - DNA, 20 bp, synthetic construct
  misc_feature 1..20: note = Description of Artificial Sequence: Synthetic oligonucleotide
  misc_feature 1..20: note = Target: SCN10A; (-) strand; PAM type: YTN; PAM sequence: TTA
  source 1..20: mol_type = other DNA
atatcagtgctaacccttgc

SEQ ID NO: 43046 - DNA, 20 bp, synthetic construct
  misc_feature 1..20: note = Description of Artificial Sequence: Synthetic oligonucleotide
  misc_feature 1..20: note = Target: SCN10A; (-) strand; PAM type: YTN; PAM sequence: TTT
  source 1..20: mol_type = other DNA
aatatcagtgctaacccttg

SEQ ID NO: 43047 - DNA, 20 bp, synthetic construct
  misc_feature 1..20: note = Description of Artificial Sequence: Synthetic oligonucleotide
  misc_feature 1..20: note = Target: SCN10A; (-) strand; PAM type: YTN; PAM sequence: CTT
  source 1..20: mol_type = other DNA
taatatcagtgctaaccctt

SEQ ID NO: 43048 - DNA, 20 bp, synthetic construct
  misc_feature 1..20: note = Description of Artificial Sequence: Synthetic oligonucleotide
  misc_feature 1..20: note = Target: SCN10A; (-) strand; PAM type: YTN; PAM sequence: CTC
  source 1..20: mol_type = other DNA
acagcccatcactttaatat

SEQ ID NO: 43049 - DNA, 20 bp, synthetic construct
  misc_feature 1..20: note = Description of Artificial Sequence: Synthetic oligonucleotide
  misc_feature 1..20: note = Target: SCN10A; (-) strand; PAM type: YTN; PAM sequence: CTA
  source 1..20: mol_type = other DNA
ctcacagcccatcactttaa

SEQ ID NO: 43050 - DNA, 20 bp, synthetic construct
  misc_feature 1..20: note = Description of Artificial Sequence: Synthetic oligonucleotide
  misc_feature 1..20: note = Target: SCN10A; (-) strand; PAM type: YTN; PAM sequence: CTG
  source 1..20: mol_type = other DNA
acaaaagccaacactactca

SEQ ID NO: 43051 - DNA, 20 bp, synthetic construct
  misc_feature 1..20: note = Description of Artificial Sequence: Synthetic oligonucleotide
  misc_feature 1..20: note = Target: SCN10A; (-) strand; PAM type: YTN; PAM sequence: CTC
  source 1..20: mol_type = other DNA
ctgacaaaagccaacactac

SEQ ID NO: 43052 - DNA, 20 bp, synthetic construct
  misc_feature 1..20: note = Description of Artificial Sequence: Synthetic oligonucleotide
  misc_feature 1..20: note = Target: SCN10A; (-) strand; PAM type: YTN; PAM sequence: CTG
  source 1..20: mol_type = other DNA
gcctcctgacaaaagccaac

SEQ ID NO: 43053 - DNA, 20 bp, synthetic construct
  misc_feature 1..20: note = Description of Artificial Sequence: Synthetic oligonucleotide
  misc_feature 1..20: note = Target: SCN10A; (-) strand; PAM type: YTN; PAM sequence: CTC
  source 1..20: mol_type = other DNA
tggcctcctgacaaaagcca

SEQ ID NO: 43054 - DNA, 20 bp, synthetic construct
  misc_feature 1..20: note = Description of Artificial Sequence: Synthetic oligonucleotide
  misc_feature 1..20: note = Target: SCN10A; (-) strand; PAM type: YTN; PAM sequence: CTG
  source 1..20: mol_type = other DNA
cccagctctggcctcctgac

SEQ ID NO: 43055 - DNA, 20 bp, synthetic construct
  misc_feature 1..20: note = Description of Artificial Sequence: Synthetic oligonucleotide
  misc_feature 1..20: note = Target: SCN10A; (-) strand; PAM type: YTN; PAM sequence: TTC
  source 1..20: mol_type = other DNA
cctgcccagctctggcctcc

SEQ ID NO: 43056 - DNA, 20 bp, synthetic construct
  misc_feature 1..20: note = Description of Artificial Sequence: Synthetic oligonucleotide
  misc_feature 1..20: note = Target: SCN10A; (-) strand; PAM type: YTN; PAM sequence: CTG
  source 1..20: mol_type = other DNA
ttccctgcccagctctggcc

SEQ ID NO: 43057 - DNA, 20 bp, synthetic construct
  misc_feature 1..20: note = Description of Artificial Sequence: Synthetic oligonucleotide
  misc_feature 1..20: note = Target: SCN10A; (-) strand; PAM type: YTN; PAM sequence: TTC
  source 1..20: mol_type = other DNA
ctgttccctgcccagctctg

SEQ ID NO: 43058 - DNA, 20 bp, synthetic construct
  misc_feature 1..20: note = Description of Artificial Sequence: Synthetic oligonucleotide
  misc_feature 1..20: note = Target: SCN10A; (-) strand; PAM type: YTN; PAM sequence: TTT
  source 1..20: mol_type = other DNA
cctgttccctgcccagctct

SEQ ID NO: 43059 - DNA, 20 bp, synthetic construct
  misc_feature 1..20: note = Description of Artificial Sequence: Synthetic oligonucleotide
  misc_feature 1..20: note = Target: SCN10A; (-) strand; PAM type: YTN; PAM sequence: TTA
  source 1..20: mol_type = other DNA
tatttcctgttccctgccca

SEQ ID NO: 43060 - DNA, 20 bp, synthetic construct
  misc_feature 1..20: note = Description of Artificial Sequence: Synthetic oligonucleotide
  misc_feature 1..20: note = Target: SCN10A; (-) strand; PAM type: YTN; PAM sequence: CTT
  source 1..20: mol_type = other DNA
atatttcctgttccctgccc

SEQ ID NO: 43061 - DNA, 20 bp, synthetic construct
  misc_feature 1..20: note = Description of Artificial Sequence: Synthetic oligonucleotide
  misc_feature 1..20: note = Target: SCN10A; (-) strand; PAM type: YTN; PAM sequence: CTG
  source 1..20: mol_type = other DNA
tagtggtaagccttatattt

SEQ ID NO: 43062 - DNA, 20 bp, synthetic construct
  misc_feature 1..20: note = Description of Artificial Sequence: Synthetic oligonucleotide
  misc_feature 1..20: note = Target: SCN10A; (-) strand; PAM type: YTN; PAM sequence: CTG
  source 1..20: mol_type = other DNA
ctgtagtggtaagccttata

SEQ ID NO: 43063 - DNA, 20 bp, synthetic construct
  misc_feature 1..20: note = Description of Artificial Sequence: Synthetic oligonucleotide
  misc_feature 1..20: note = Target: SCN10A; (-) strand; PAM type: YTN; PAM sequence: TTC
  source 1..20: mol_type = other DNA
tgctgtagtggtaagcctta

SEQ ID NO: 43064 - DNA, 20 bp, synthetic construct
  misc_feature 1..20: note = Description of Artificial Sequence: Synthetic oligonucleotide
  misc_feature 1..20: note = Target: SCN10A; (-) strand; PAM type: YTN; PAM sequence: TTT
  source 1..20: mol_type = other DNA
ctgctgtagtggtaagcctt

SEQ ID NO: 43065 - DNA, 20 bp, synthetic construct
  misc_feature 1..20: note = Description of Artificial Sequence: Synthetic oligonucleotide
  misc_feature 1..20: note = Target: SCN10A; (-) strand; PAM type: YTN; PAM sequence: CTG
  source 1..20: mol_type = other DNA
gtttctgctgtagtggtaag

SEQ ID NO: 43066 - DNA, 20 bp, synthetic construct
  misc_feature 1..20: note = Description of Artificial Sequence: Synthetic oligonucleotide
  misc_feature 1..20: note = Target: SCN10A; (-) strand; PAM type: YTN; PAM sequence: TTC
  source 1..20: mol_type = other DNA
tggtttctgctgtagtggta

SEQ ID NO: 43067 - DNA, 20 bp, synthetic construct
  misc_feature 1..20: note = Description of Artificial Sequence: Synthetic oligonucleotide
  misc_feature 1..20: note = Target: SCN10A; (-) strand; PAM type: YTN; PAM sequence: TTT
  source 1..20: mol_type = other DNA
ctggtttctgctgtagtggt

SEQ ID NO: 43068 - DNA, 20 bp, synthetic construct
  misc_feature 1..20: note = Description of Artificial Sequence: Synthetic oligonucleotide
  misc_feature 1..20: note = Target: SCN10A; (-) strand; PAM type: YTN; PAM sequence: CTC
  source 1..20: mol_type = other DNA
aggagtttctggtttctgct

SEQ ID NO: 43069 - DNA, 20 bp, synthetic construct
  misc_feature 1..20: note = Description of Artificial Sequence: Synthetic oligonucleotide
  misc_feature 1..20: note = Target: SCN10A; (-) strand; PAM type: YTN; PAM sequence: TTC
  source 1..20: mol_type = other DNA
aatcaacagaaaaaaaagat

SEQ ID NO: 43070 - DNA, 20 bp, synthetic construct
  misc_feature 1..20: note = Description of Artificial Sequence: Synthetic oligonucleotide
  misc_feature 1..20: note = Target: SCN10A; (-) strand; PAM type: YTN; PAM sequence: CTT
  source 1..20: mol_type = other DNA
caatcaacagaaaaaaaaga

SEQ ID NO: 43071 - DNA, 20 bp, synthetic construct
  misc_feature 1..20: note = Description of Artificial Sequence: Synthetic oligonucleotide
  misc_feature 1..20: note = Target: SCN10A; (-) strand; PAM type: YTN; PAM sequence: TTG
  source 1..20: mol_type = other DNA
acaacttcaatcaacagaaa

SEQ ID NO: 43072 - DNA, 20 bp, synthetic construct
  misc_feature 1..20: note = Description of Artificial Sequence: Synthetic oligonucleotide
  misc_feature 1..20: note = Target: SCN10A; (-) strand; PAM type: YTN; PAM sequence: TTG
  source 1..20: mol_type = other DNA
gggtcataattgacaacttc

SEQ ID NO: 43073 - DNA, 20 bp, synthetic construct
  misc_feature 1..20: note = Description of Artificial Sequence: Synthetic oligonucleotide
  misc_feature 1..20: note = Target: SCN10A; (-) strand; PAM type: YTN; PAM sequence: TTG
  source 1..20: mol_type = other DNA
ttggggtcataattgacaac

SEQ ID NO: 43074 - DNA, 20 bp, synthetic construct
  misc_feature 1..20: note = Description of Artificial Sequence: Synthetic oligonucleotide
  misc_feature 1..20: note = Target: SCN10A; (-) strand; PAM type: YTN; PAM sequence: TTT
  source 1..20: mol_type = other DNA
gttggggtcataattgacaa

SEQ ID NO: 43075 - DNA, 20 bp, synthetic construct
  misc_feature 1..20: note = Description of Artificial Sequence: Synthetic oligonucleotide
  misc_feature 1..20: note = Target: SCN10A; (-) strand; PAM type: YTN; PAM sequence: CTT
  source 1..20: mol_type = other DNA
tgttggggtcataattgaca

SEQ ID NO: 43076 - DNA, 20 bp, synthetic construct
  misc_feature 1..20: note = Description of Artificial Sequence: Synthetic oligonucleotide
  misc_feature 1..20: note = Target: SCN10A; (-) strand; PAM type: YTN; PAM sequence: CTC
  source 1..20: mol_type = other DNA
tttgttggggtcataattga

SEQ ID NO: 43077 - DNA, 20 bp, synthetic construct
  misc_feature 1..20: note = Description of Artificial Sequence: Synthetic oligonucleotide
  misc_feature 1..20: note = Target: SCN10A; (-) strand; PAM type: YTN; PAM sequence: CTG
  source 1..20: mol_type = other DNA
aatctctttgttggggtcat

SEQ ID NO: 43078 - DNA, 20 bp, synthetic construct
  misc_feature 1..20: note = Description of Artificial Sequence: Synthetic oligonucleotide
  misc_feature 1..20: note = Target: SCN10A; (-) strand; PAM type: YTN; PAM sequence: TTC
  source 1..20: mol_type = other DNA
acactgaatctctttgttgg

SEQ ID NO: 43079 - DNA, 20 bp, synthetic construct
  misc_feature 1..20: note = Description of Artificial Sequence: Synthetic oligonucleotide
  misc_feature 1..20: note = Target: SCN10A; (-) strand; PAM type: YTN; PAM sequence: CTT
  source 1..20: mol_type = other DNA
cacactgaatctctttgttg

SEQ ID NO: 43080 - DNA, 20 bp, synthetic construct
  misc_feature 1..20: note = Description of Artificial Sequence: Synthetic oligonucleotide
  misc_feature 1..20: note = Target: SCN10A; (-) strand; PAM type: YTN; PAM sequence: TTC
  source 1..20: mol_type = other DNA
ttcacactgaatctctttgt

SEQ ID NO: 43081 - DNA, 20 bp, synthetic construct
  misc_feature 1..20: note = Description of Artificial Sequence: Synthetic oligonucleotide
  misc_feature 1..20: note = Target: SCN10A; (-) strand; PAM type: YTN; PAM sequence: CTT
  source 1..20: mol_type = other DNA
cttcacactgaatctctttg

SEQ ID NO: 43082 - DNA, 20 bp, synthetic construct
  misc_feature 1..20: note = Description of Artificial Sequence: Synthetic oligonucleotide
  misc_feature 1..20: note = Target: SCN10A; (-) strand; PAM type: YTN; PAM sequence: TTG
  source 1..20: mol_type = other DNA
gaggcttcttcacactgaat

SEQ ID NO: 43083 - DNA, 20 bp, synthetic construct
  misc_feature 1..20: note = Description of Artificial Sequence: Synthetic oligonucleotide
  misc_feature 1..20: note = Target: SCN10A; (-) strand; PAM type: YTN; PAM sequence: TTT
  source 1..20: mol_type = other DNA
ggaggcttcttcacactgaa

SEQ ID NO: 43084 - DNA, 20 bp, synthetic construct
  misc_feature 1..20: note = Description of Artificial Sequence: Synthetic oligonucleotide
  misc_feature 1..20: note = Target: SCN10A; (-) strand; PAM type: YTN; PAM sequence: TTT
  source 1..20: mol_type = other DNA
tggaggcttcttcacactga

SEQ ID NO: 43085 - DNA, 20 bp, synthetic construct
  misc_feature 1..20: note = Description of Artificial Sequence: Synthetic oligonucleotide
  misc_feature 1..20: note = Target: SCN10A; (-) strand; PAM type: YTN; PAM sequence: TTT
  source 1..20: mol_type = other DNA
ttggaggcttcttcacactg

SEQ ID NO: 43086 - DNA, 20 bp, synthetic construct
  misc_feature 1..20: note = Description of Artificial Sequence: Synthetic oligonucleotide
  misc_feature 1..20: note = Target: SCN10A; (-) strand; PAM type: YTN; PAM sequence: TTC
  source 1..20: mol_type = other DNA
atcatttttggaggcttctt

SEQ ID NO: 43087 - DNA, 20 bp, synthetic construct
  misc_feature 1..20: note = Description of Artificial Sequence: Synthetic oligonucleotide
  misc_feature 1..20: note = Target: SCN10A; (-) strand; PAM type: YTN; PAM sequence: CTT
  source 1..20: mol_type = other DNA
catcatttttggaggcttct

SEQ ID NO: 43088 - DNA, 20 bp, synthetic construct
  misc_feature 1..20: note = Description of Artificial Sequence: Synthetic oligonucleotide
  misc_feature 1..20: note = Target: SCN10A; (-) strand; PAM type: YTN; PAM sequence: TTG
  source 1..20: mol_type = other DNA
tcatcttcatcatttttgga

SEQ ID NO: 43089 - DNA, 20 bp, synthetic construct
  misc_feature 1..20: note = Description of Artificial Sequence: Synthetic oligonucleotide
  misc_feature 1..20: note = Target: SCN10A; (-) strand; PAM type: YTN; PAM sequence: TTT
  source 1..20: mol_type = other DNA
gtcatcttcatcatttttgg

SEQ ID NO: 43090 - DNA, 20 bp, synthetic construct
  misc_feature 1..20: note = Description of Artificial Sequence: Synthetic oligonucleotide
  misc_feature 1..20: note = Target: SCN10A; (-) strand; PAM type: YTN; PAM sequence: CTT
  source 1..20: mol_type = other DNA
tgtcatcttcatcatttttg

SEQ ID NO: 43091 - DNA, 20 bp, synthetic construct
  misc_feature 1..20: note = Description of Artificial Sequence: Synthetic oligonucleotide
  misc_feature 1..20: note = Target: SCN10A; (-) strand; PAM type: YTN; PAM sequence: TTG
  source 1..20: mol_type = other DNA
tactttgtcatcttcatcat

SEQ ID NO: 43092 - DNA, 20 bp, synthetic construct
  misc_feature 1..20: note = Description of Artificial Sequence: Synthetic oligonucleotide
  misc_feature 1..20: note = Target: SCN10A; (-) strand; PAM type: YTN; PAM sequence: TTT
  source 1..20: mol_type = other DNA
gtactttgtcatcttcatca

SEQ ID NO: 43093 - DNA, 20 bp, synthetic construct
  misc_feature 1..20: note = Description of Artificial Sequence: Synthetic oligonucleotide
  misc_feature 1..20: note = Target: SCN10A; (-) strand; PAM type: YTN; PAM sequence: CTG
  source 1..20: mol_type = other DNA
gtcacaggtcaacatgcaac

SEQ ID NO: 43094 - DNA, 20 bp, synthetic construct
  misc_feature 1..20: note = Description of Artificial Sequence: Synthetic oligonucleotide
  misc_feature 1..20: note = Target: SCN10A; (-) strand; PAM type: YTN; PAM sequence: TTG
  source 1..20: mol_type = other DNA
tctggtcacaggtcaacatg

SEQ ID NO: 43095 - DNA, 20 bp, synthetic construct
  misc_feature 1..20: note = Description of Artificial Sequence: Synthetic oligonucleotide
  misc_feature 1..20: note = Target: SCN10A; (-) strand; PAM type: YTN; PAM sequence: CTT
  source 1..20: mol_type = other DNA
gtctggtcacaggtcaacat

SEQ ID NO: 43096 - DNA, 20 bp, synthetic construct
  misc_feature 1..20: note = Description of Artificial Sequence: Synthetic oligonucleotide
  misc_feature 1..20: note = Target: SCN10A; (-) strand; PAM type: YTN; PAM sequence: CTC
  source 1..20: mol_type = other DNA
ccttgtctggtcacaggtca

SEQ ID NO: 43097 - DNA, 20 bp, synthetic construct
  misc_feature 1..20: note = Description of Artificial Sequence: Synthetic oligonucleotide
  misc_feature 1..20: note = Target: SCN10A; (-) strand; PAM type: YTN; PAM sequence: CTC
  source 1..20: mol_type = other DNA
tcccttgtctggtcacaggt

SEQ ID NO: 43098 - DNA, 20 bp, synthetic construct
  misc_feature 1..20: note = Description of Artificial Sequence: Synthetic oligonucleotide
  misc_feature 1..20: note = Target: SCN10A; (-) strand; PAM type: YTN; PAM sequence: TTC
  source 1..20: mol_type = other DNA
ccactctcccttgtctggtc

SEQ ID NO: 43099 - DNA, 20 bp, synthetic construct
  misc_feature 1..20: note = Description of Artificial Sequence: Synthetic oligonucleotide
  misc_feature 1..20: note = Target: SCN10A; (-) strand; PAM type: YTN; PAM sequence: CTT
  source 1..20: mol_type = other DNA
cccactctcccttgtctggt

SEQ ID NO: 43100 - DNA, 20 bp, synthetic construct
  misc_feature 1..20: note = Description of Artificial Sequence: Synthetic oligonucleotide
  misc_feature 1..20: note = Target: SCN10A; (-) strand; PAM type: YTN; PAM sequence: CTC
  source 1..20: mol_type = other DNA
cttcccactctcccttgtct

SEQ ID NO: 43101 - DNA, 20 bp, synthetic construct
  misc_feature 1..20: note = Description of Artificial Sequence: Synthetic oligonucleotide
  misc_feature 1..20: note = Target: SCN10A; (-) strand; PAM type: YTN; PAM sequence: CTA
  source 1..20: mol_type = other DNA
agacacccaccctccttccc

SEQ ID NO: 43102 - DNA, 20 bp, synthetic construct
  misc_feature 1..20: note = Description of Artificial Sequence: Synthetic oligonucleotide
  misc_feature 1..20: note = Target: SCN10A; (-) strand; PAM type: YTN; PAM sequence: CTG
  source 1..20: mol_type = other DNA
aactaagacacccaccctcc

SEQ ID NO: 43103 - DNA, 20 bp, synthetic construct
  misc_feature 1..20: note = Description of Artificial Sequence: Synthetic oligonucleotide
  misc_feature 1..20: note = Target: SCN10A; (-) strand; PAM type: YTN; PAM sequence: TTC
  source 1..20: mol_type = other DNA
agagtgaacctgaactaaga

SEQ ID NO: 43104 - DNA, 20 bp, synthetic construct
  misc_feature 1..20: note = Description of Artificial Sequence: Synthetic oligonucleotide
  misc_feature 1..20: note = Target: SCN10A; (-) strand; PAM type: YTN; PAM sequence: TTT
  source 1..20: mol_type = other DNA
cagagtgaacctgaactaag

SEQ ID NO: 43105 - DNA, 20 bp, synthetic construct
  misc_feature 1..20: note = Description of Artificial Sequence: Synthetic oligonucleotide
  misc_feature 1..20: note = Target: SCN10A; (-) strand; PAM type: YTN; PAM sequence: CTT
  source 1..20: mol_type = other DNA
tcagagtgaacctgaactaa

SEQ ID NO: 43106 - DNA, 20 bp, synthetic construct
  misc_feature 1..20: note = Description of Artificial Sequence: Synthetic oligonucleotide
  misc_feature 1..20: note = Target: SCN10A; (-) strand; PAM type: YTN; PAM sequence: TTG
  source 1..20: mol_type = other DNA
gctttcagagtgaacctgaa

SEQ ID NO: 43107 - DNA, 20 bp, synthetic construct
  misc_feature 1..20: note = Description of Artificial Sequence: Synthetic oligonucleotide
  misc_feature 1..20: note = Target: SCN10A; (-) strand; PAM type: YTN; PAM sequence: CTT
  source 1..20: mol_type = other DNA
ggctttcagagtgaacctga

SEQ ID NO: 43108 - DNA, 20 bp, synthetic construct
  misc_feature 1..20: note = Description of Artificial Sequence: Synthetic oligonucleotide
  misc_feature 1..20: note = Target: SCN10A; (-) strand; PAM type: YTN; PAM sequence: TTA
  source 1..20: mol_type = other DNA
ggcttggctttcagagtgaa

SEQ ID NO: 43109 - DNA, 20 bp, synthetic construct
  misc_feature 1..20: note = Description of Artificial Sequence: Synthetic oligonucleotide
  misc_feature 1..20: note = Target: SCN10A; (-) strand; PAM type: YTN; PAM sequence: CTT
  source 1..20: mol_type = other DNA
aggcttggctttcagagtga

SEQ ID NO: 43110 - DNA, 20 bp, synthetic construct
  misc_feature 1..20: note = Description of Artificial Sequence: Synthetic oligonucleotide
  misc_feature 1..20: note = Target: SCN10A; (-) strand; PAM type: YTN; PAM sequence: CTG
  source 1..20: mol_type = other DNA
cacccaggtccatgtcttag

SEQ ID NO: 43111 - DNA, 20 bp, synthetic construct
  misc_feature 1..20: note = Description of Artificial Sequence: Synthetic oligonucleotide
  misc_feature 1..20: note = Target: SCN10A; (-) strand; PAM type: YTN; PAM sequence: CTC
  source 1..20: mol_type = other DNA
ccagataaatcacctgcacc

SEQ ID NO: 43112 - DNA, 20 bp, synthetic construct
  misc_feature 1..20: note = Description of Artificial Sequence: Synthetic oligonucleotide
  misc_feature 1..20: note = Target: SCN10A; (-) strand; PAM type: YTN; PAM sequence: TTG
  source 1..20: mol_type = other DNA
gatcacctcccagataaatc

SEQ ID NO: 43113 - DNA, 20 bp, synthetic construct
  misc_feature 1..20: note = Description of Artificial Sequence: Synthetic oligonucleotide
  misc_feature 1..20: note = Target: SCN10A; (-) strand; PAM type: YTN; PAM sequence: CTT
  source 1..20: mol_type = other DNA
ggatcacctcccagataaat

SEQ ID NO: 43114 - DNA, 20 bp, synthetic construct
  misc_feature 1..20: note = Description of Artificial Sequence: Synthetic oligonucleotide
  misc_feature 1..20: note = Target: SCN10A; (-) strand; PAM type: YTN; PAM sequence: TTC
  source 1..20: mol_type = other DNA
cttggatcacctcccagata

SEQ ID NO: 43115 - DNA, 20 bp, synthetic construct
  misc_feature 1..20: note = Description of Artificial Sequence: Synthetic oligonucleotide
  misc_feature 1..20: note = Target: SCN10A; (-) strand; PAM type: YTN; PAM sequence: CTT
  source 1..20: mol_type = other DNA
ccttggatcacctcccagat

SEQ ID NO: 43116 - DNA, 20 bp, synthetic construct
  misc_feature 1..20: note = Description of Artificial Sequence: Synthetic oligonucleotide
  misc_feature 1..20: note = Target: SCN10A; (-) strand; PAM type: YTN; PAM sequence: CTG
  source 1..20: mol_type = other DNA
cttccttggatcacctccca

SEQ ID NO: 43117 - DNA, 20 bp, synthetic construct
  misc_feature 1..20: note = Description of Artificial Sequence: Synthetic oligonucleotide
  misc_feature 1..20: note = Target: SCN10A; (-) strand; PAM type: YTN; PAM sequence: TTC
  source 1..20: mol_type = other DNA
ctgcttccttggatcacctc

SEQ ID NO: 43118 - DNA, 20 bp, synthetic construct
  misc_feature 1..20: note = Description of Artificial Sequence: Synthetic oligonucleotide
  misc_feature 1..20: note = Target: SCN10A; (-) strand; PAM type: YTN; PAM sequence: CTC
  source 1..20: mol_type = other DNA
attcctgcttccttggatca

SEQ ID NO: 43119 - DNA, 20 bp, synthetic construct
  misc_feature 1..20: note = Description of Artificial Sequence: Synthetic oligonucleotide
  misc_feature 1..20: note = Target: SCN10A; (-) strand; PAM type: YTN; PAM sequence: CTC
  source 1..20: mol_type = other DNA
cctcattcctgcttccttgg

SEQ ID NO: 43120 - DNA, 20 bp, synthetic construct
  misc_feature 1..20: note = Description of Artificial Sequence: Synthetic oligonucleotide
  misc_feature 1..20: note = Target: SCN10A; (-) strand; PAM type: YTN; PAM sequence: TTC
  source 1..20: mol_type = other DNA
cccactccctcattcctgct

SEQ ID NO: 43121 - DNA, 20 bp, synthetic construct
  misc_feature 1..20: note = Description of Artificial Sequence: Synthetic oligonucleotide
  misc_feature 1..20: note = Target: SCN10A; (-) strand; PAM type: YTN; PAM sequence: CTT
  source 1..20: mol_type = other DNA
ccccactccctcattcctgc

SEQ ID NO: 43122 - DNA, 20 bp, synthetic construct
  misc_feature 1..20: note = Description of Artificial Sequence: Synthetic oligonucleotide
  misc_feature 1..20: note = Target: SCN10A; (-) strand; PAM type: YTN; PAM sequence: TTC
  source 1..20: mol_type = other DNA
ttccccactccctcattcct

SEQ ID NO: 43123 - DNA, 20 bp, synthetic construct
  misc_feature 1..20: note = Description of Artificial Sequence: Synthetic oligonucleotide
  misc_feature 1..20: note = Target: SCN10A; (-) strand; PAM type: YTN; PAM sequence: TTA
  source 1..20: mol_type = other DNA
ttcttccccactccctcatt

SEQ ID NO: 43124 - DNA, 20 bp, synthetic construct
  misc_feature 1..20: note = Description of Artificial Sequence: Synthetic oligonucleotide
  misc_feature 1..20: note = Target: SCN10A; (-) strand; PAM type: YTN; PAM sequence: CTT
  source 1..20: mol_type = other DNA
attcttccccactccctcat

SEQ ID NO: 43125 - DNA, 20 bp, synthetic construct
  misc_feature 1..20: note = Description of Artificial Sequence: Synthetic oligonucleotide
  misc_feature 1..20: note = Target: SCN10A; (-) strand; PAM type: YTN; PAM sequence: TTC
  source 1..20: mol_type = other DNA
ccgcttattcttccccactc

SEQ ID NO: 43126 - DNA, 20 bp, synthetic construct
  misc_feature 1..20: note = Description of Artificial Sequence: Synthetic oligonucleotide
  misc_feature 1..20: note = Target: SCN10A; (-) strand; PAM type: YTN; PAM sequence: CTC
  source 1..20: mol_type = other DNA
ccattcccgcttattcttcc

SEQ ID NO: 43127 - DNA, 20 bp, synthetic construct
  misc_feature 1..20: note = Description of Artificial Sequence: Synthetic oligonucleotide
  misc_feature 1..20: note = Target: SCN10A; (-) strand; PAM type: YTN; PAM sequence: TTC
  source 1..20: mol_type = other DNA
tcccattcccgcttattctt

SEQ ID NO: 43128 - DNA, 20 bp, synthetic construct
  misc_feature 1..20: note = Description of Artificial Sequence: Synthetic oligonucleotide
  misc_feature 1..20: note = Target: SCN10A; (-) strand; PAM type: YTN; PAM sequence: CTT
  source 1..20: mol_type = other DNA
ctcccattcccgcttattct

SEQ ID NO: 43129 - DNA, 20 bp, synthetic construct
  misc_feature 1..20: note = Description of Artificial Sequence: Synthetic oligonucleotide
  misc_feature 1..20: note = Target: SCN10A; (-) strand; PAM type: YTN; PAM sequence: CTC
  source 1..20: mol_type = other DNA
ttctcccattcccgcttatt

SEQ ID NO: 43130 - DNA, 20 bp, synthetic construct
  misc_feature 1..20: note = Description of Artificial Sequence: Synthetic oligonucleotide
  misc_feature 1..20: note = Target: SCN10A; (-) strand; PAM type: YTN; PAM sequence: TTC
  source 1..20: mol_type = other DNA
acaggctcttctcccattcc

SEQ ID NO: 43131 - DNA, 20 bp, synthetic construct
  misc_feature 1..20: note = Description of Artificial Sequence: Synthetic oligonucleotide
  misc_feature 1..20: note = Target: SCN10A; (-) strand; PAM type: YTN; PAM sequence: CTT
  source 1..20: mol_type = other DNA
cacaggctcttctcccattc

SEQ ID NO: 43132 - DNA, 20 bp, synthetic construct
  misc_feature 1..20: note = Description of Artificial Sequence: Synthetic oligonucleotide
  misc_feature 1..20: note = Target: SCN10A; (-) strand; PAM type: YTN; PAM sequence: CTC
  source 1..20: mol_type = other DNA
ttcacaggctcttctcccat

SEQ ID NO: 43133 - DNA, 20 bp, synthetic construct
  misc_feature 1..20: note = Description of Artificial Sequence: Synthetic oligonucleotide
  misc_feature 1..20: note = Target: SCN10A; (-) strand; PAM type: YTN; PAM sequence: TTA
  source 1..20: mol_type = other DNA
acaacatcctcttcacaggc

SEQ ID NO: 43134 - DNA, 20 bp, synthetic construct
  misc_feature 1..20: note = Description of Artificial Sequence: Synthetic oligonucleotide
  misc_feature 1..20: note = Target: SCN10A; (-) strand; PAM type: YTN; PAM sequence: CTT
  source 1..20: mol_type = other DNA
aacaacatcctcttcacagg

SEQ ID NO: 43135 - DNA, 20 bp, synthetic construct
  misc_feature 1..20: note = Description of Artificial Sequence: Synthetic oligonucleotide
  misc_feature 1..20: note = Target: SCN10A; (-) strand; PAM type: YTN; PAM sequence: CTG
  source 1..20: mol_type = other DNA
cttaacaacatcctcttcac

SEQ ID NO: 43136 - DNA, 20 bp, synthetic construct
  misc_feature 1..20: note = Description of Artificial Sequence: Synthetic oligonucleotide
  misc_feature 1..20: note = Target: SCN10A; (-) strand; PAM type: YTN; PAM sequence: TTG
  source 1..20: mol_type = other DNA
cccacaatgatgccctgctt

SEQ ID NO: 43137 - DNA, 20 bp, synthetic construct
  misc_feature 1..20: note = Description of Artificial Sequence: Synthetic oligonucleotide
  misc_feature 1..20: note = Target: SCN10A; (-) strand; PAM type: YTN; PAM sequence: TTC
  source 1..20: mol_type = other DNA
agttgcccacaatgatgccc

SEQ ID NO: 43138 - DNA, 20 bp, synthetic construct
  misc_feature 1..20: note = Description of Artificial Sequence: Synthetic oligonucleotide
  misc_feature 1..20: note = Target: SCN10A; (-) strand; PAM type: YTN; PAM sequence: CTT
  source 1..20: mol_type = other DNA
cagttgcccacaatgatgcc

SEQ ID NO: 43139 - DNA, 20 bp, synthetic construct
  misc_feature 1..20: note = Description of Artificial Sequence: Synthetic oligonucleotide
  misc_feature 1..20: note = Target: SCN10A; (-) strand; PAM type: YTN; PAM sequence: TTG
  source 1..20: mol_type = other DNA
cgcttcagttgcccacaatg

SEQ ID NO: 43140 - DNA, 20 bp, synthetic construct
  misc_feature 1..20: note = Description of Artificial Sequence: Synthetic oligonucleotide
  misc_feature 1..20: note = Target: SCN10A; (-) strand; PAM type: YTN; PAM sequence: CTC
  source 1..20: mol_type = other DNA
agaggaccccagtaggattg

SEQ ID NO: 43141 - DNA, 20 bp, synthetic construct
  misc_feature 1..20: note = Description of Artificial Sequence: Synthetic oligonucleotide
  misc_feature 1..20: note = Target: SCN10A; (-) strand; PAM type: YTN; PAM sequence: TTA
  source 1..20: mol_type = other DNA
ctcagaggaccccagtagga

SEQ ID NO: 43142 - DNA, 20 bp, synthetic construct
  misc_feature 1..20: note = Description of Artificial Sequence: Synthetic oligonucleotide
  misc_feature 1..20: note = Target: SCN10A; (-) strand; PAM type: YTN; PAM sequence: CTA
  source 1..20: mol_type = other DNA
cacagttactcagaggaccc

SEQ ID NO: 43143 - DNA, 20 bp, synthetic construct
  misc_feature 1..20: note = Description of Artificial Sequence: Synthetic oligonucleotide
  misc_feature 1..20: note = Target: SCN10A; (-) strand; PAM type: YTN; PAM sequence: CTC
  source 1..20: mol_type = other DNA
tacacagttactcagaggac

SEQ ID NO: 43144 - DNA, 20 bp, synthetic construct
  misc_feature 1..20: note = Description of Artificial Sequence: Synthetic oligonucleotide
  misc_feature 1..20: note = Target: SCN10A; (-) strand; PAM type: YTN; PAM sequence: CTG
  source 1..20: mol_type = other DNA
catgtgctctacacagttac

SEQ ID NO: 43145 - DNA, 20 bp, synthetic construct
  misc_feature 1..20: note = Description of Artificial Sequence: Synthetic oligonucleotide
  misc_feature 1..20: note = Target: SCN10A; (-) strand; PAM type: YTN; PAM sequence: TTG
  source 1..20: mol_type = other DNA
gtgatataatcctgcatgtg

SEQ ID NO: 43146 - DNA, 20 bp, synthetic construct
  misc_feature 1..20: note = Description of Artificial Sequence: Synthetic oligonucleotide
  misc_feature 1..20: note = Target: SCN10A; (-) strand; PAM type: YTN; PAM sequence: CTT
  source 1..20: mol_type = other DNA
ggtgatataatcctgcatgt

SEQ ID NO: 43147 - DNA, 20 bp, synthetic construct
  misc_feature 1..20: note = Description of Artificial Sequence: Synthetic oligonucleotide
  misc_feature 1..20: note = Target: SCN10A; (-) strand; PAM type: YTN; PAM sequence: CTG
  source 1..20: mol_type = other DNA
tcccttggtgatataatcct

SEQ ID NO: 43148 - DNA, 20 bp, synthetic construct
  misc_feature 1..20: note = Description of Artificial Sequence: Synthetic oligonucleotide
  misc_feature 1..20: note = Target: SCN10A; (-) strand; PAM type: YTN; PAM sequence: TTC
  source 1..20: mol_type = other DNA
cctgtcccttggtgatataa

SEQ ID NO: 43149 - DNA, 20 bp, synthetic construct
  misc_feature 1..20: note = Description of Artificial Sequence: Synthetic oligonucleotide
  misc_feature 1..20: note = Target: SCN10A; (-) strand; PAM type: YTN; PAM sequence: TTT
  source 1..20: mol_type = other DNA
ccctgtcccttggtgatata

SEQ ID NO: 43150 - DNA, 20 bp, synthetic construct
  misc_feature 1..20: note = Description of Artificial Sequence: Synthetic oligonucleotide
  misc_feature 1..20: note = Target: SCN10A; (-) strand; PAM type: YTN; PAM sequence: CTC
  source 1..20: mol_type = other DNA
cagtttccctgtcccttggt

SEQ ID NO: 43151 - DNA, 20 bp, synthetic construct
  misc_feature 1..20: note = Description of Artificial Sequence: Synthetic oligonucleotide
  misc_feature 1..20: note = Target: SCN10A; (-) strand; PAM type: YTN; PAM sequence: CTG
  source 1..20: mol_type = other DNA
aggataaatactccagtttc

SEQ ID NO: 43152 - DNA, 20 bp, synthetic construct
  misc_feature 1..20: note = Description of Artificial Sequence: Synthetic oligonucleotide
  misc_feature 1..20: note = Target: SCN10A; (-) strand; PAM type: YTN; PAM sequence: TTG
  source 1..20: mol_type = other DNA
ggagtctgaggataaatact

SEQ ID NO: 43153 - DNA, 20 bp, synthetic construct
  misc_feature 1..20: note = Description of Artificial Sequence: Synthetic oligonucleotide
  misc_feature 1..20: note = Target: SCN10A; (-) strand; PAM type: YTN; PAM sequence: TTT
  source 1..20: mol_type = other DNA
gggagtctgaggataaatac

SEQ ID NO: 43154 - DNA, 20 bp, synthetic construct
  misc_feature 1..20: note = Description of Artificial Sequence: Synthetic oligonucleotide
  misc_feature 1..20: note = Target: SCN10A; (-) strand; PAM type: YTN; PAM sequence: TTT
  source 1..20: mol_type = other DNA
tgggagtctgaggataaata

SEQ ID NO: 43155 - DNA, 20 bp, synthetic construct
  misc_feature 1..20: note = Description of Artificial Sequence: Synthetic oligonucleotide
  misc_feature 1..20: note = Target: SCN10A; (-) strand; PAM type: YTN; PAM sequence: TTA
  source 1..20: mol_type = other DNA
ccaataagttttgggagtct

SEQ ID NO: 43156 - DNA, 20 bp, synthetic construct
  misc_feature 1..20: note = Description of Artificial Sequence: Synthetic oligonucleotide
  misc_feature 1..20: note = Target: SCN10A; (-) strand; PAM type: YTN; PAM sequence: CTT
  source 1..20: mol_type = other DNA
accaataagttttgggagtc

SEQ ID NO: 43157 - DNA, 20 bp, synthetic construct
  misc_feature 1..20: note = Description of Artificial Sequence: Synthetic oligonucleotide
  misc_feature 1..20: note = Target: SCN10A; (-) strand; PAM type: YTN; PAM sequence: CTA
  source 1..20: mol_type = other DNA
ggggcaacccttaccaataa

SEQ ID NO: 43158 - DNA, 20 bp, synthetic construct
  misc_feature 1..20: note = Description of Artificial Sequence: Synthetic oligonucleotide
  misc_feature 1..20: note = Target: SCN10A; (-) strand; PAM type: YTN; PAM sequence: TTA
  source 1..20: mol_type = other DNA
atgtccctaggggcaaccct

SEQ ID NO: 43159 - DNA, 20 bp, synthetic construct
  misc_feature 1..20: note = Description of Artificial Sequence: Synthetic oligonucleotide
  misc_feature 1..20: note = Target: SCN10A; (-) strand; PAM type: YTN; PAM sequence: TTT
  source 1..20: mol_type = other DNA
aatgtccctaggggcaaccc

SEQ ID NO: 43160 - DNA, 20 bp, synthetic construct
  misc_feature 1..20: note = Description of Artificial Sequence: Synthetic oligonucleotide
  misc_feature 1..20: note = Target: SCN10A; (-) strand; PAM type: YTN; PAM sequence: CTC
  source 1..20: mol_type = other DNA
ccccaagtaccagggattta

SEQ ID NO: 43161 - DNA, 20 bp, synthetic construct
  misc_feature 1..20: note = Description of Artificial Sequence: Synthetic oligonucleotide
  misc_feature 1..20: note = Target: SCN10A; (-) strand; PAM type: YTN; PAM sequence: TTC
  source 1..20: mol_type = other DNA
tcccccaagtaccagggatt

SEQ ID NO: 43162 - DNA, 20 bp, synthetic construct
  misc_feature 1..20: note = Description of Artificial Sequence: Synthetic oligonucleotide
  misc_feature 1..20: note = Target: SCN10A; (-) strand; PAM type: YTN; PAM sequence: CTT
  source 1..20: mol_type = other DNA
ctcccccaagtaccagggat

SEQ ID NO: 43163 - DNA, 20 bp, synthetic construct
  misc_feature 1..20: note = Description of Artificial Sequence: Synthetic oligonucleotide
  misc_feature 1..20: note = Target: SCN10A; (-) strand; PAM type: YTN; PAM sequence: TTG
  source 1..20: mol_type = other DNA
tgcagcaacttctcccccaa

SEQ ID NO: 43164 - DNA, 20 bp, synthetic construct
  misc_feature 1..20: note = Description of Artificial Sequence: Synthetic oligonucleotide
  misc_feature 1..20: note = Target: SCN10A; (-) strand; PAM type: YTN; PAM sequence: CTT
  source 1..20: mol_type = other DNA
gtgcagcaacttctccccca

SEQ ID NO: 43165 - DNA, 20 bp, synthetic construct
  misc_feature 1..20: note = Description of Artificial Sequence: Synthetic oligonucleotide
  misc_feature 1..20: note = Target: SCN10A; (-) strand; PAM type: YTN; PAM sequence: TTA
  source 1..20: mol_type = other DNA
ggagcttgtgcagcaacttc

SEQ ID NO: 43166 - DNA, 20 bp, synthetic construct
  misc_feature 1..20: note = Description of Artificial Sequence: Synthetic oligonucleotide
  misc_feature 1..20: note = Target: SCN10A; (-) strand; PAM type: YTN; PAM sequence: CTT
  source 1..20: mol_type = other DNA
aggagcttgtgcagcaactt

SEQ ID NO: 43167 - DNA, 20 bp, synthetic construct
  misc_feature 1..20: note = Description of Artificial Sequence: Synthetic oligonucleotide
  misc_feature 1..20: note = Target: SCN10A; (-) strand; PAM type: YTN; PAM sequence: CTC
  source 1..20: mol_type = other DNA
cagggcttaggagcttgtgc

SEQ ID NO: 43168 - DNA, 20 bp, synthetic construct
  misc_feature 1..20: note = Description of Artificial Sequence: Synthetic oligonucleotide
  misc_feature 1..20: note = Target: SCN10A; (-) strand; PAM type: YTN; PAM sequence: CTG
  source 1..20: mol_type = other DNA
tataaagactccagggctta

SEQ ID NO: 43169 - DNA, 20 bp, synthetic construct
  misc_feature 1..20: note = Description of Artificial Sequence: Synthetic oligonucleotide
  misc_feature 1..20: note = Target: SCN10A; (-) strand; PAM type: YTN; PAM sequence: CTC
  source 1..20: mol_type = other DNA
tgtataaagactccagggct

SEQ ID NO: 43170 - DNA, 20 bp, synthetic construct
  misc_feature 1..20: note = Description of Artificial Sequence: Synthetic oligonucleotide
  misc_feature 1..20: note = Target: SCN10A; (-) strand; PAM type: YTN; PAM sequence: TTC
  source 1..20: mol_type = other DNA
tctgtataaagactccaggg

SEQ ID NO: 43171 - DNA, 20 bp, synthetic construct
  misc_feature 1..20: note = Description of Artificial Sequence: Synthetic oligonucleotide
  misc_feature 1..20: note = Target: SCN10A; (-) strand; PAM type: YTN; PAM sequence: CTG
  source 1..20: mol_type = other DNA
attctctgtataaagactcc

SEQ ID NO: 43172 - DNA, 20 bp, synthetic construct
  misc_feature 1..20: note = Description of Artificial Sequence: Synthetic oligonucleotide
  misc_feature 1..20: note = Target: SCN10A; (-) strand; PAM type: YTN; PAM sequence: TTC
  source 1..20: mol_type = other DNA
tgattctctgtataaagact

SEQ ID NO: 43173 - DNA, 20 bp, synthetic construct
  misc_feature 1..20: note = Description of Artificial Sequence: Synthetic oligonucleotide
  misc_feature 1..20: note = Target: SCN10A; (-) strand; PAM type: YTN; PAM sequence: CTT
  source 1..20: mol_type = other DNA
ctgattctctgtataaagac

SEQ ID NO: 43174 - DNA, 20 bp, synthetic construct
  misc_feature 1..20: note = Description of Artificial Sequence: Synthetic oligonucleotide
  misc_feature 1..20: note = Target: SCN10A; (-) strand; PAM type: YTN; PAM sequence: CTG
  source 1..20: mol_type = other DNA
cacttctgattctctgtata

SEQ ID NO: 43175 - DNA, 20 bp, synthetic construct
  misc_feature 1..20: note = Description of Artificial Sequence: Synthetic oligonucleotide
  misc_feature 1..20: note = Target: SCN10A; (-) strand; PAM type: YTN; PAM sequence: CTG
  source 1..20: mol_type = other DNA
caggctgcacttctgattct

SEQ ID NO: 43176 - DNA, 20 bp, synthetic construct
  misc_feature 1..20: note = Description of Artificial Sequence: Synthetic oligonucleotide
  misc_feature 1..20: note = Target: SCN10A; (-) strand; PAM type: YTN; PAM sequence: TTC
  source 1..20: mol_type = other DNA
acctgcaggctgcacttctg

SEQ ID NO: 43177 - DNA, 20 bp, synthetic construct
  misc_feature 1..20: note = Description of Artificial Sequence: Synthetic oligonucleotide
  misc_feature 1..20: note = Target: SCN10A; (-) strand; PAM type: YTN; PAM sequence: TTT
  source 1..20: mol_type = other DNA
cacctgcaggctgcacttct

SEQ ID NO: 43178 - DNA, 20 bp, synthetic construct
  misc_feature 1..20: note = Description of Artificial Sequence: Synthetic oligonucleotide
  misc_feature 1..20: note = Target: SCN10A; (-) strand; PAM type: YTN; PAM sequence: CTG
  source 1..20: mol_type = other DNA
atttcacctgcaggctgcac

SEQ ID NO: 43179 - DNA, 20 bp, synthetic construct
  misc_feature 1..20: note = Description of Artificial Sequence: Synthetic oligonucleotide
  misc_feature 1..20: note = Target: SCN10A; (-) strand; PAM type: YTN; PAM sequence: TTC
  source 1..20: mol_type = other DNA
tgatttcacctgcaggctgc

SEQ ID NO: 43180 - DNA, 20 bp, synthetic construct
  misc_feature 1..20: note = Description of Artificial Sequence: Synthetic oligonucleotide
  misc_feature 1..20: note = Target: SCN10A; (-) strand; PAM type: YTN; PAM sequence: CTT
  source 1..20: mol_type = other DNA
ctgatttcacctgcaggctg

SEQ ID NO: 43181 - DNA, 20 bp, synthetic construct
  misc_feature 1..20: note = Description of Artificial Sequence: Synthetic oligonucleotide
  misc_feature 1..20: note = Target: SCN10A; (-) strand; PAM type: YTN; PAM sequence: TTA
  source 1..20: mol_type = other DNA
gcccacttctgatttcacct

SEQ ID NO: 43182 - DNA, 20 bp, synthetic construct
  misc_feature 1..20: note = Description of Artificial Sequence: Synthetic oligonucleotide
  misc_feature 1..20: note = Target: SCN10A; (-) strand; PAM type: YTN; PAM sequence: CTT
  source 1..20: mol_type = other DNA
agcccacttctgatttcacc

SEQ ID NO: 43183 - DNA, 20 bp, synthetic construct
  misc_feature 1..20: note = Description of Artificial Sequence: Synthetic oligonucleotide
  misc_feature 1..20: note = Target: SCN10A; (-) strand; PAM type: YTN; PAM sequence: TTC
  source 1..20: mol_type = other DNA
ccttagcccacttctgattt

SEQ ID NO: 43184 - DNA, 20 bp, synthetic construct
  misc_feature 1..20: note = Description of Artificial Sequence: Synthetic oligonucleotide
  misc_feature 1..20: note = Target: SCN10A; (-) strand; PAM type: YTN; PAM sequence: CTT
  source 1..20: mol_type = other DNA
cccttagcccacttctgatt

SEQ ID NO: 43185 - DNA, 20 bp, synthetic construct
  misc_feature 1..20: note = Description of Artificial Sequence: Synthetic oligonucleotide
  misc_feature 1..20: note = Target: SCN10A; (-) strand; PAM type: YTN; PAM sequence: CTC
  source 1..20: mol_type = other DNA
ttcccttagcccacttctga

SEQ ID NO: 43186 - DNA, 20 bp, synthetic construct
  misc_feature 1..20: note = Description of Artificial Sequence: Synthetic oligonucleotide
  misc_feature 1..20: note = Target: SCN10A; (-) strand; PAM type: YTN; PAM sequence: CTG
  source 1..20: mol_type = other DNA
ccacctcttcccttagccca

SEQ ID NO: 43187 - DNA, 20 bp, synthetic construct
  misc_feature 1..20: note = Description of Artificial Sequence: Synthetic oligonucleotide
  misc_feature 1..20: note = Target: SCN10A; (-) strand; PAM type: YTN; PAM sequence: TTC
  source 1..20: mol_type = other DNA
cctgccacctcttcccttag

SEQ ID NO: 43188 - DNA, 20 bp, synthetic construct
  misc_feature 1..20: note = Description of Artificial Sequence: Synthetic oligonucleotide
  misc_feature 1..20: note = Target: SCN10A; (-) strand; PAM type: YTN; PAM sequence: CTG
  source 1..20: mol_type = other DNA
tcaattccctgccacctctt

SEQ ID NO: 43189 - DNA, 20 bp, synthetic construct
  misc_feature 1..20: note = Description of Artificial Sequence: Synthetic oligonucleotide
  misc_feature 1..20: note = Target: SCN10A; (-) strand; PAM type: YTN; PAM sequence: CTG
  source 1..20: mol_type = other DNA
tggcaggcactgtcaattcc

SEQ ID NO: 43190 - DNA, 20 bp, synthetic construct
  misc_feature 1..20: note = Description of Artificial Sequence: Synthetic oligonucleotide
  misc_feature 1..20: note = Target: SCN10A; (-) strand; PAM type: YTN; PAM sequence: CTG
  source 1..20: mol_type = other DNA
ctgtggcaggcactgtcaat

SEQ ID NO: 43191 - DNA, 20 bp, synthetic construct
  misc_feature 1..20: note = Description of Artificial Sequence: Synthetic oligonucleotide
  misc_feature 1..20: note = Target: SCN10A; (-) strand; PAM type: YTN; PAM sequence: TTC
  source 1..20: mol_type = other DNA
ctgctgtggcaggcactgtc

SEQ ID NO: 43192 - DNA, 20 bp, synthetic construct
  misc_feature 1..20: note = Description of Artificial Sequence: Synthetic oligonucleotide
  misc_feature 1..20: note = Target: SCN10A; (-) strand; PAM type: YTN; PAM sequence: CTT
  source 1..20: mol_type = other DNA
cctgctgtggcaggcactgt

SEQ ID NO: 43193 - DNA, 20 bp, synthetic construct
  misc_feature 1..20: note = Description of Artificial Sequence: Synthetic oligonucleotide
  misc_feature 1..20: note = Target: SCN10A; (-) strand; PAM type: YTN; PAM sequence: TTG
  source 1..20: mol_type = other DNA
gggaatgaccacttcctgct

SEQ ID NO: 43194 - DNA, 20 bp, synthetic construct
  misc_feature 1..20: note = Description of Artificial Sequence: Synthetic oligonucleotide
  misc_feature 1..20: note = Target: SCN10A; (-) strand; PAM type: YTN; PAM sequence: CTA
  source 1..20: mol_type = other DNA
ttggggaatgaccacttcct

SEQ ID NO: 43195 - DNA, 20 bp, synthetic construct
  misc_feature 1..20: note = Description of Artificial Sequence: Synthetic oligonucleotide
  misc_feature 1..20: note = Target: SCN10A; (-) strand; PAM type: YTN; PAM sequence: CTG
  source 1..20: mol_type = other DNA
gggagacactattggggaat

SEQ ID NO: 43196 - DNA, 20 bp, synthetic construct
  misc_feature 1..20: note = Description of Artificial Sequence: Synthetic oligonucleotide
  misc_feature 1..20: note = Target: SCN10A; (-) strand; PAM type: YTN; PAM sequence: CTC
  source 1..20: mol_type = other DNA
aaaaaaaaagaaaagaaaag

SEQ ID NO: 43197 - DNA, 20 bp, synthetic construct
  misc_feature 1..20: note = Description of Artificial Sequence: Synthetic oligonucleotide
  misc_feature 1..20: note = Target: SCN10A; (-) strand; PAM type: YTN; PAM sequence: CTC
  source 1..20: mol_type = other DNA
aatctcaaaaaaaaagaaaa

SEQ ID NO: 43198 - DNA, 20 bp, synthetic construct
  misc_feature 1..20: note = Description of Artificial Sequence: Synthetic oligonucleotide
  misc_feature 1..20: note = Target: SCN10A; (-) strand; PAM type: YTN; PAM sequence: TTG
  source 1..20: mol_type = other DNA
ggcgagacagcgagactcaa

SEQ ID NO: 43199 - DNA, 20 bp, synthetic construct
  misc_feature 1..20: note = Description of Artificial Sequence: Synthetic oligonucleotide
  misc_feature 1..20: note = Target: SCN10A; (-) strand; PAM type: YTN; PAM sequence: CTT
  source 1..20: mol_type = other DNA
gggcgagacagcgagactca

SEQ ID NO: 43200 - DNA, 20 bp, synthetic construct
  misc_feature 1..20: note = Description of Artificial Sequence: Synthetic oligonucleotide
  misc_feature 1..20: note = Target: SCN10A; (-) strand; PAM type: YTN; PAM sequence: CTC
  source 1..20: mol_type = other DNA
cagcttgggcgagacagcga

SEQ ID NO: 43201 - DNA, 20 bp, synthetic construct
  misc_feature 1..20: note = Description of Artificial Sequence: Synthetic oligonucleotide
  misc_feature 1..20: note = Target: SCN10A; (-) strand; PAM type: YTN; PAM sequence: CTG
  source 1..20: mol_type = other DNA
cactccagcttgggcgagac

SEQ ID NO: 43202 - DNA, 20 bp, synthetic construct
  misc_feature 1..20: note = Description of Artificial Sequence: Synthetic oligonucleotide
  misc_feature 1..20: note = Target: SCN10A; (-) strand; PAM type: YTN; PAM sequence: TTG
  source 1..20: mol_type = other DNA
cgtcactgcactccagcttg

SEQ ID NO: 43203 - DNA, 20 bp, synthetic construct
  misc_feature 1..20: note = Description of Artificial Sequence: Synthetic oligonucleotide
  misc_feature 1..20: note = Target: SCN10A; (-) strand; PAM type: YTN; PAM sequence: CTG
  source 1..20: mol_type = other DNA
agattgcgtcactgcactcc

SEQ ID NO: 43204 - DNA, 20 bp, synthetic construct
  misc_feature 1..20: note = Description of Artificial Sequence: Synthetic oligonucleotide
  misc_feature 1..20: note = Target: SCN10A; (-) strand; PAM type: YTN; PAM sequence: TTG
  source 1..20: mol_type = other DNA
cagtgagctgagattgcgtc

SEQ ID NO: 43205 - DNA, 20 bp, synthetic construct
  misc_feature 1..20: note = Description of Artificial Sequence: Synthetic oligonucleotide
  misc_feature 1..20: note = Target: SCN10A; (-) strand; PAM type: YTN; PAM sequence: TTG
  source 1..20: mol_type = other DNA
aacccgggaggcagaagttg

SEQ ID NO: 43206 - DNA, 20 bp, synthetic construct
  misc_feature 1..20: note = Description of Artificial Sequence: Synthetic oligonucleotide
  misc_feature 1..20: note = Target: SCN10A; (-) strand; PAM type: YTN; PAM sequence: CTT
  source 1..20: mol_type = other DNA
gaacccgggaggcagaagtt

SEQ ID NO: 43207 - DNA, 20 bp, synthetic construct
  misc_feature 1..20: note = Description of Artificial Sequence: Synthetic oligonucleotide
  misc_feature 1..20: note = Target: SCN10A; (-) strand; PAM type: YTN; PAM sequence: CTC
  source 1..20: mol_type = other DNA
ttgaacccgggaggcagaag

SEQ ID NO: 43208 - DNA, 20 bp, synthetic construct
  misc_feature 1..20: note = Description of Artificial Sequence: Synthetic oligonucleotide
  misc_feature 1..20: note = Target: SCN10A; (-) strand; PAM type: YTN; PAM sequence: CTG
  source 1..20: mol_type = other DNA
agacaggagaatctcttgaa

SEQ ID NO: 43209 - DNA, 20 bp, synthetic construct
  misc_feature 1..20: note = Description of Artificial Sequence: Synthetic oligonucleotide
  misc_feature 1..20: note = Target: SCN10A; (-) strand; PAM type: YTN; PAM sequence: CTC
  source 1..20: mol_type = other DNA
gggagactgagacaggagaa

SEQ ID NO: 43210 - DNA, 20 bp, synthetic construct
  misc_feature 1..20: note = Description of Artificial Sequence: Synthetic oligonucleotide
  misc_feature 1..20: note = Target: SCN10A; (-) strand; PAM type: YTN; PAM sequence: CTG
  source 1..20: mol_type = other DNA
ctcgggagactgagacagga

SEQ ID NO: 43211 - DNA, 20 bp, synthetic construct
  misc_feature 1..20: note = Description of Artificial Sequence: Synthetic oligonucleotide
  misc_feature 1..20: note = Target: SCN10A; (-) strand; PAM type: YTN; PAM sequence: CTG
  source 1..20: mol_type = other DNA
tagtcccagctgctcgggag

SEQ ID NO: 43212 - DNA, 20 bp, synthetic construct
  misc_feature 1..20: note = Description of Artificial Sequence: Synthetic oligonucleotide
  misc_feature 1..20: note = Target: SCN10A; (-) strand; PAM type: YTN; PAM sequence: TTG
  source 1..20: mol_type = other DNA
tgcctgtagtcccagctgct

SEQ ID NO: 43213 - DNA, 20 bp, synthetic construct
  misc_feature 1..20: note = Description of Artificial Sequence: Synthetic oligonucleotide
  misc_feature 1..20: note = Target: SCN10A; (-) strand; PAM type: YTN; PAM sequence: CTT
  source 1..20: mol_type = other DNA
gtgcctgtagtcccagctgc

SEQ ID NO: 43214 - DNA, 20 bp, synthetic construct
  misc_feature 1..20: note = Description of Artificial Sequence: Synthetic oligonucleotide
  misc_feature 1..20: note = Target: SCN10A; (-) strand; PAM type: YTN; PAM sequence: TTA
  source 1..20: mol_type = other DNA
gcagggcatggcggcttgtg

SEQ ID NO: 43215 - DNA, 20 bp, synthetic construct
  misc_feature 1..20: note = Description of Artificial Sequence: Synthetic oligonucleotide
  misc_feature 1..20: note = Target: SCN10A; (-) strand; PAM type: YTN; PAM sequence: CTA
  source 1..20: mol_type = other DNA
aaatatgaaagaaattagca

SEQ ID NO: 43216 - DNA, 20 bp, synthetic construct
  misc_feature 1..20: note = Description of Artificial Sequence: Synthetic oligonucleotide
  misc_feature 1..20: note = Target: SCN10A; (-) strand; PAM type: YTN; PAM sequence: CTA
  source 1..20: mol_type = other DNA
ctaaaatatgaaagaaatta

SEQ ID NO: 43217 - DNA, 20 bp, synthetic construct
  misc_feature 1..20: note = Description of Artificial Sequence: Synthetic oligonucleotide
  misc_feature 1..20: note = Target: SCN10A; (-) strand; PAM type: YTN; PAM sequence: CTC
  source 1..20: mol_type = other DNA
tactaaaatatgaaagaaat

SEQ ID NO: 43218 - DNA, 20 bp, synthetic construct
  misc_feature 1..20: note = Description of Artificial Sequence: Synthetic oligonucleotide
  misc_feature 1..20: note = Target: SCN10A; (-) strand; PAM type: YTN; PAM sequence: CTG
  source 1..20: mol_type = other DNA
ggcaatacggtgaaacccca

SEQ ID NO: 43219 - DNA, 20 bp, synthetic construct
  misc_feature 1..20: note = Description of Artificial Sequence: Synthetic oligonucleotide
  misc_feature 1..20: note = Target: SCN10A; (-) strand; PAM type: YTN; PAM sequence: CTC
  source 1..20: mol_type = other DNA
aggagaccagcctgggcaat

SEQ ID NO: 43220 - DNA, 20 bp, synthetic construct
  misc_feature 1..20: note = Description of Artificial Sequence: Synthetic oligonucleotide
  misc_feature 1..20: note = Target: SCN10A; (-) strand; PAM type: YTN; PAM sequence: CTG
  source 1..20: mol_type = other DNA
agctcaggagaccagcctgg

SEQ ID NO: 43221 - DNA, 20 bp, synthetic construct
  misc_feature 1..20: note = Description of Artificial Sequence: Synthetic oligonucleotide
  misc_feature 1..20: note = Target: SCN10A; (-) strand; PAM type: YTN; PAM sequence: TTG
  source 1..20: mol_type = other DNA
cctgagctcaggagaccagc

SEQ ID NO: 43222 - DNA, 20 bp, synthetic construct
  misc_feature 1..20: note = Description of Artificial Sequence: Synthetic oligonucleotide
  misc_feature 1..20: note = Target: SCN10A; (-) strand; PAM type: YTN; PAM sequence: TTG
  source 1..20: mol_type = other DNA
ggaggccgaggtgggcagat

SEQ ID NO: 43223 - DNA, 20 bp, synthetic construct
  misc_feature 1..20: note = Description of Artificial Sequence: Synthetic oligonucleotide
  misc_feature 1..20: note = Target: SCN10A; (-) strand; PAM type: YTN; PAM sequence: TTT
  source 1..20: mol_type = other DNA
gggaggccgaggtgggcaga

SEQ ID NO: 43224 - DNA, 20 bp, synthetic construct
  misc_feature 1..20: note = Description of Artificial Sequence: Synthetic oligonucleotide
  misc_feature 1..20: note = Target: SCN10A; (-) strand; PAM type: YTN; PAM sequence: CTT
  source 1..20: mol_type = other DNA
tgggaggccgaggtgggcag

SEQ ID NO: 43225 - DNA, 20 bp, synthetic construct
  misc_feature 1..20: note = Description of Artificial Sequence: Synthetic oligonucleotide
  misc_feature 1..20: note = Target: SCN10A; (-) strand; PAM type: YTN; PAM sequence: CTA
  source 1..20: mol_type = other DNA
gcactttgggaggccgaggt

SEQ ID NO: 43226 - DNA, 20 bp, synthetic construct
  misc_feature 1..20: note = Description of Artificial Sequence: Synthetic oligonucleotide
  misc_feature 1..20: note = Target: SCN10A; (-) strand; PAM type: YTN; PAM sequence: CTG
  source 1..20: mol_type = other DNA
taatcctagcactttgggag

SEQ ID NO: 43227 - DNA, 20 bp, synthetic construct
  misc_feature 1..20: note = Description of Artificial Sequence: Synthetic oligonucleotide
  misc_feature 1..20: note = Target: SCN10A; (-) strand; PAM type: YTN; PAM sequence: TTC
  source 1..20: mol_type = other DNA
atgcctgtaatcctagcact

SEQ ID NO: 43228 - DNA, 20 bp, synthetic construct
  misc_feature 1..20: note = Description of Artificial Sequence: Synthetic oligonucleotide
  misc_feature 1..20: note = Target: SCN10A; (-) strand; PAM type: YTN; PAM sequence: CTA
  source 1..20: mol_type = other DNA
tcataaaacccaggatgggc

SEQ ID NO: 43229 - DNA, 20 bp, synthetic construct
  misc_feature 1..20: note = Description of Artificial Sequence: Synthetic oligonucleotide
  misc_feature 1..20: note = Target: SCN10A; (-) strand; PAM type: YTN; PAM sequence: CTC
  source 1..20: mol_type = other DNA
aggaactatcataaaaccca

SEQ ID NO: 43230 - DNA, 20 bp, synthetic construct
  misc_feature 1..20: note = Description of Artificial Sequence: Synthetic oligonucleotide
  misc_feature 1..20: note = Target: SCN10A; (-) strand; PAM type: YTN; PAM sequence: CTA
  source 1..20: mol_type = other DNA
aatcaaggtgcatagggagg

SEQ ID NO: 43231 - DNA, 20 bp, synthetic construct
  misc_feature 1..20: note = Description of Artificial Sequence: Synthetic oligonucleotide
  misc_feature 1..20: note = Target: SCN10A; (-) strand; PAM type: YTN; PAM sequence: CTG
  source 1..20: mol_type = other DNA
gacaagggtgggagcaaagc

SEQ ID NO: 43232 - DNA, 20 bp, synthetic construct
  misc_feature 1..20: note = Description of Artificial Sequence: Synthetic oligonucleotide
  misc_feature 1..20: note = Target: SCN10A; (-) strand; PAM type: YTN; PAM sequence: CTC
  source 1..20: mol_type = other DNA
cctggacaagggtgggagca

SEQ ID NO: 43233 - DNA, 20 bp, synthetic construct
  misc_feature 1..20: note = Description of Artificial Sequence: Synthetic oligonucleotide
  misc_feature 1..20: note = Target: SCN10A; (-) strand; PAM type: YTN; PAM sequence: TTC
  source 1..20: mol_type = other DNA
atgtgagccactccctggac

SEQ ID NO: 43234 - DNA, 20 bp, synthetic construct
  misc_feature 1..20: note = Description of Artificial Sequence: Synthetic oligonucleotide
  misc_feature 1..20: note = Target: SCN10A; (-) strand; PAM type: YTN; PAM sequence: CTA
  source 1..20: mol_type = other DNA
agagacagttcatgtgagcc

SEQ ID NO: 43235 - DNA, 20 bp, synthetic construct
  misc_feature 1..20: note = Description of Artificial Sequence: Synthetic oligonucleotide
  misc_feature 1..20: note = Target: SCN10A; (-) strand; PAM type: YTN; PAM sequence: CTC
  source 1..20: mol_type = other DNA
taagagacagttcatgtgag

SEQ ID NO: 43236 - DNA, 20 bp, synthetic construct
  misc_feature 1..20: note = Description of Artificial Sequence: Synthetic oligonucleotide
  misc_feature 1..20: note = Target: SCN10A; (-) strand; PAM type: YTN; PAM sequence: TTG
  source 1..20: mol_type = other DNA
aggaaagcatcagataacct

SEQ ID NO: 43237 - DNA, 20 bp, synthetic construct
  misc_feature 1..20: note = Description of Artificial Sequence: Synthetic oligonucleotide
  misc_feature 1..20: note = Target: SCN10A; (-) strand; PAM type: YTN; PAM sequence: CTG
  source 1..20: mol_type = other DNA
ttgaggaaagcatcagataa

SEQ ID NO: 43238 - DNA, 20 bp, synthetic construct
  misc_feature 1..20: note = Description of Artificial Sequence: Synthetic oligonucleotide
  misc_feature 1..20: note = Target: SCN10A; (-) strand; PAM type: YTN; PAM sequence: TTC
  source 1..20: mol_type = other DNA
actgttgaggaaagcatcag

SEQ ID NO: 43239 - DNA, 20 bp, synthetic construct
  misc_feature 1..20: note = Description of Artificial Sequence: Synthetic oligonucleotide
  misc_feature 1..20: note = Target: SCN10A; (-) strand; PAM type: YTN; PAM sequence: CTG
  source 1..20: mol_type = other DNA
ttcactgttgaggaaagcat

SEQ ID NO: 43240 - DNA, 20 bp, synthetic construct
  misc_feature 1..20: note = Description of Artificial Sequence: Synthetic oligonucleotide
  misc_feature 1..20: note = Target: SCN10A; (-) strand; PAM type: YTN; PAM sequence: CTC
  source 1..20: mol_type = other DNA
tgttcactgttgaggaaagc

SEQ ID NO: 43241 - DNA, 20 bp, synthetic construct
  misc_feature 1..20: note = Description of Artificial Sequence: Synthetic oligonucleotide
  misc_feature 1..20: note = Target: SCN10A; (-) strand; PAM type: YTN; PAM sequence: TTC
  source 1..20: mol_type = other DNA
ctctgttcactgttgaggaa

SEQ ID NO: 43242 - DNA, 20 bp, synthetic construct
  misc_feature 1..20: note = Description of Artificial Sequence: Synthetic oligonucleotide
  misc_feature 1..20: note = Target: SCN10A; (-) strand; PAM type: YTN; PAM sequence: TTT
  source 1..20: mol_type = other DNA
cctctgttcactgttgagga

SEQ ID NO: 43243 - DNA, 20 bp, synthetic construct
  misc_feature 1..20: note = Description of Artificial Sequence: Synthetic oligonucleotide
  misc_feature 1..20: note = Target: SCN10A; (-) strand; PAM type: YTN; PAM sequence: TTT
  source 1..20: mol_type = other DNA
tcctctgttcactgttgagg

SEQ ID NO: 43244 - DNA, 20 bp, synthetic construct
  misc_feature 1..20: note = Description of Artificial Sequence: Synthetic oligonucleotide
  misc_feature 1..20: note = Target: SCN10A; (-) strand; PAM type: YTN; PAM sequence: CTC
  source 1..20: mol_type = other DNA
gaggttttcctctgttcact

SEQ ID NO: 43245 - DNA, 20 bp, synthetic construct
  misc_feature 1..20: note = Description of Artificial Sequence: Synthetic oligonucleotide
  misc_feature 1..20: note = Target: SCN10A; (-) strand; PAM type: YTN; PAM sequence: TTC
  source 1..20: mol_type = other DNA
tcgaggttttcctctgttca

SEQ ID NO: 43246 - DNA, 20 bp, synthetic construct
  misc_feature 1..20: note = Description of Artificial Sequence: Synthetic oligonucleotide
  misc_feature 1..20: note = Target: SCN10A; (-) strand; PAM type: YTN; PAM sequence: CTT
  source 1..20: mol_type = other DNA
ctcgaggttttcctctgttc

SEQ ID NO: 43247 - DNA, 20 bp, synthetic construct
  misc_feature 1..20: note = Description of Artificial Sequence: Synthetic oligonucleotide
  misc_feature 1..20: note = Target: SCN10A; (-) strand; PAM type: YTN; PAM sequence: CTC
  source 1..20: mol_type = other DNA
cccaggcttctcgaggtttt

SEQ ID NO: 43248 - DNA, 20 bp, synthetic construct
  misc_feature 1..20: note = Description of Artificial Sequence: Synthetic oligonucleotide
  misc_feature 1..20: note = Target: SCN10A; (-) strand; PAM type: YTN; PAM sequence: CTA
  source 1..20: mol_type = other DNA
cactccccaggcttctcgag

SEQ ID NO: 43249 - DNA, 20 bp, synthetic construct
  misc_feature 1..20: note = Description of Artificial Sequence: Synthetic oligonucleotide
  misc_feature 1..20: note = Target: SCN10A; (-) strand; PAM type: YTN; PAM sequence: TTC
  source 1..20: mol_type = other DNA
atctacactccccaggcttc

SEQ ID NO: 43250 - DNA, 20 bp, synthetic construct
  misc_feature 1..20: note = Description of Artificial Sequence: Synthetic oligonucleotide
  misc_feature 1..20: note = Target: SCN10A; (-) strand; PAM type: YTN; PAM sequence: TTT
  source 1..20: mol_type = other DNA
catctacactccccaggctt

SEQ ID NO: 43251 - DNA, 20 bp, synthetic construct
  misc_feature 1..20: note = Description of Artificial Sequence: Synthetic oligonucleotide
  misc_feature 1..20: note = Target: SCN10A; (-) strand; PAM type: YTN; PAM sequence: CTT
  source 1..20: mol_type = other DNA
tcatctacactccccaggct

SEQ ID NO: 43252 - DNA, 20 bp, synthetic construct
  misc_feature 1..20: note = Description of Artificial Sequence: Synthetic oligonucleotide
  misc_feature 1..20: note = Target: SCN10A; (-) strand; PAM type: YTN; PAM sequence: TTC
  source 1..20: mol_type = other DNA
cccctttcatctacactccc

SEQ ID NO: 43253 - DNA, 20 bp, synthetic construct
  misc_feature 1..20: note = Description of Artificial Sequence: Synthetic oligonucleotide
  misc_feature 1..20: note = Target: SCN10A; (-) strand; PAM type: YTN; PAM sequence: TTT
  source 1..20: mol_type = other DNA
ccccctttcatctacactcc

SEQ ID NO: 43254 - DNA, 20 bp, synthetic construct
  misc_feature 1..20: note = Description of Artificial Sequence: Synthetic oligonucleotide
  misc_feature 1..20: note = Target: SCN10A; (-) strand; PAM type: YTN; PAM sequence: CTT
  source 1..20: mol_type = other DNA
tccccctttcatctacactc

SEQ ID NO: 43255 - DNA, 20 bp, synthetic construct
  misc_feature 1..20: note = Description of Artificial Sequence: Synthetic oligonucleotide
  misc_feature 1..20: note = Target: SCN10A; (-) strand; PAM type: YTN; PAM sequence: TTC
  source 1..20: mol_type = other DNA
agccaccgaggctttccccc

SEQ ID NO: 43256 - DNA, 20 bp, synthetic construct
  misc_feature 1..20: note = Description of Artificial Sequence: Synthetic oligonucleotide
  misc_feature 1..20: note = Target: SCN10A; (-) strand; PAM type: YTN; PAM sequence: TTT
  source 1..20: mol_type = other DNA
cagccaccgaggctttcccc

SEQ ID NO: 43257 - DNA, 20 bp, synthetic construct
  misc_feature 1..20: note = Description of Artificial Sequence: Synthetic oligonucleotide
  misc_feature 1..20: note = Target: SCN10A; (-) strand; PAM type: YTN; PAM sequence: TTG
  source 1..20: mol_type = other DNA
agtgtttcagccaccgaggc

SEQ ID NO: 43258 - DNA, 20 bp, synthetic construct
  misc_feature 1..20: note = Description of Artificial Sequence: Synthetic oligonucleotide
  misc_feature 1..20: note = Target: SCN10A; (-) strand; PAM type: YTN; PAM sequence: CTG
  source 1..20: mol_type = other DNA
ttgagtgtttcagccaccga

SEQ ID NO: 43259 - DNA, 20 bp, synthetic construct
  misc_feature 1..20: note = Description of Artificial Sequence: Synthetic oligonucleotide
  misc_feature 1..20: note = Target: SCN10A; (-) strand; PAM type: YTN; PAM sequence: CTC
  source 1..20: mol_type = other DNA
tgttgagtgtttcagccacc

SEQ ID NO: 43260 - DNA, 20 bp, synthetic construct
  misc_feature 1..20: note = Description of Artificial Sequence: Synthetic oligonucleotide
  misc_feature 1..20: note = Target: SCN10A; (-) strand; PAM type: YTN; PAM sequence: CTC
  source 1..20: mol_type = other DNA
tctgttgagtgtttcagcca

SEQ ID NO: 43261 - DNA, 20 bp, synthetic construct
  misc_feature 1..20: note = Description of Artificial Sequence: Synthetic oligonucleotide
  misc_feature 1..20: note = Target: SCN10A; (-) strand; PAM type: YTN; PAM sequence: CTG
  source 1..20: mol_type = other DNA
gctctctgttgagtgtttca

SEQ ID NO: 43262 - DNA, 20 bp, synthetic construct
  misc_feature 1..20: note = Description of Artificial Sequence: Synthetic oligonucleotide
  misc_feature 1..20: note = Target: SCN10A; (-) strand; PAM type: YTN; PAM sequence: TTG
  source 1..20: mol_type = other DNA
cagcagtgtccagctggctc

SEQ ID NO: 43263 - DNA, 20 bp, synthetic construct
  misc_feature 1..20: note = Description of Artificial Sequence: Synthetic oligonucleotide
  misc_feature 1..20: note = Target: SCN10A; (-) strand; PAM type: YTN; PAM sequence: CTT
  source 1..20: mol_type = other DNA
gcagcagtgtccagctggct

SEQ ID NO: 43264 - DNA, 20 bp, synthetic construct
  misc_feature 1..20: note = Description of Artificial Sequence: Synthetic oligonucleotide
  misc_feature 1..20: note = Target: SCN10A; (-) strand; PAM type: YTN; PAM sequence: CTC
  source 1..20: mol_type = other DNA
cttgcagcagtgtccagctg

SEQ ID NO: 43265 - DNA, 20 bp, synthetic construct
  misc_feature 1..20: note = Description of Artificial Sequence: Synthetic oligonucleotide
  misc_feature 1..20: note = Target: SCN10A; (-) strand; PAM type: YTN; PAM sequence: CTG
  source 1..20: mol_type = other DNA
tccctccttgcagcagtgtc

SEQ ID NO: 43266 - DNA, 20 bp, synthetic construct
  misc_feature 1..20: note = Description of Artificial Sequence: Synthetic oligonucleotide
  misc_feature 1..20: note = Target: SCN10A; (-) strand; PAM type: YTN; PAM sequence: CTC
  source 1..20: mol_type = other DNA
acactgtccctccttgcagc

SEQ ID NO: 43267 - DNA, 20 bp, synthetic construct
  misc_feature 1..20: note = Description of Artificial Sequence: Synthetic oligonucleotide
  misc_feature 1..20: note = Target: SCN10A; (-) strand; PAM type: YTN; PAM sequence: CTG
  source 1..20: mol_type = other DNA
gaagaggcgatcacccagca

SEQ ID NO: 43268 - DNA, 20 bp, synthetic construct
  misc_feature 1..20: note = Description of Artificial Sequence: Synthetic oligonucleotide
  misc_feature 1..20: note = Target: SCN10A; (-) strand; PAM type: YTN; PAM sequence: CTG
  source 1..20: mol_type = other DNA
gtactggaagaggcgatcac

SEQ ID NO: 43269 - DNA, 20 bp, synthetic construct
  misc_feature 1..20: note = Description of Artificial Sequence: Synthetic oligonucleotide
  misc_feature 1..20: note = Target: SCN10A; (-) strand; PAM type: YTN; PAM sequence: TTG
  source 1..20: mol_type = other DNA
aaatgaagtgacgatgaccc

SEQ ID NO: 43270 - DNA, 20 bp, synthetic construct
  misc_feature 1..20: note = Description of Artificial Sequence: Synthetic oligonucleotide
  misc_feature 1..20: note = Target: SCN10A; (-) strand; PAM type: YTN; PAM sequence: TTT
  source 1..20: mol_type = other DNA
gaaatgaagtgacgatgacc

SEQ ID NO: 43271 - DNA, 20 bp, synthetic construct
  misc_feature 1..20: note = Description of Artificial Sequence: Synthetic oligonucleotide
  misc_feature 1..20: note = Target: SCN10A; (-) strand; PAM type: YTN; PAM sequence: CTG
  source 1..20: mol_type = other DNA
catttgaaatgaagtgacga

SEQ ID NO: 43272 - DNA, 20 bp, synthetic construct
  misc_feature 1..20: note = Description of Artificial Sequence: Synthetic oligonucleotide
  misc_feature 1..20: note = Target: SCN10A; (-) strand; PAM type: YTN; PAM sequence: CTA
  source 1..20: mol_type = other DNA
cccatatcagtctgcatttg

SEQ ID NO: 43273 - DNA, 20 bp, synthetic construct
  misc_feature 1..20: note = Description of Artificial Sequence: Synthetic oligonucleotide
  misc_feature 1..20: note = Target: SCN10A; (-) strand; PAM type: YTN; PAM sequence: TTC
  source 1..20: mol_type = other DNA
tacccatatcagtctgcatt

SEQ ID NO: 43274 - DNA, 20 bp, synthetic construct
  misc_feature 1..20: note = Description of Artificial Sequence: Synthetic oligonucleotide
  misc_feature 1..20: note = Target: SCN10A; (-) strand; PAM type: YTN; PAM sequence: CTG
  source 1..20: mol_type = other DNA
tgcattctacccatatcagt

SEQ ID NO: 43275 - DNA, 20 bp, synthetic construct
  misc_feature 1..20: note = Description of Artificial Sequence: Synthetic oligonucleotide
  misc_feature 1..20: note = Target: SCN10A; (-) strand; PAM type: YTN; PAM sequence: CTC
  source 1..20: mol_type = other DNA
tgtgcattctacccatatca

SEQ ID NO: 43276 - DNA, 20 bp, synthetic construct
  misc_feature 1..20: note = Description of Artificial Sequence: Synthetic oligonucleotide
  misc_feature 1..20: note = Target: SCN10A; (-) strand; PAM type: YTN; PAM sequence: TTC
  source 1..20: mol_type = other DNA
ccctctgtgcattctaccca

SEQ ID NO: 43277 - DNA, 20 bp, synthetic construct
  misc_feature 1..20: note = Description of Artificial Sequence: Synthetic oligonucleotide
  misc_feature 1..20: note = Target: SCN10A; (-) strand; PAM type: YTN; PAM sequence: CTT
  source 1..20: mol_type = other DNA
cccctctgtgcattctaccc

SEQ ID NO: 43278 - DNA, 20 bp, synthetic construct
  misc_feature 1..20: note = Description of Artificial Sequence: Synthetic oligonucleotide
  misc_feature 1..20: note = Target: SCN10A; (-) strand; PAM type: YTN; PAM sequence: CTA
  source 1..20: mol_type = other DNA
cagccttcccctctgtgcat

SEQ ID NO: 43279 - DNA, 20 bp, synthetic construct
  misc_feature 1..20: note = Description of Artificial Sequence: Synthetic oligonucleotide
  misc_feature 1..20: note = Target: SCN10A; (-) strand; PAM type: YTN; PAM sequence: CTG
  source 1..20: mol_type = other DNA
tccctacagccttcccctct

SEQ ID NO: 43280 - DNA, 20 bp, synthetic construct
  misc_feature 1..20: note = Description of Artificial Sequence: Synthetic oligonucleotide
  misc_feature 1..20: note = Target: SCN10A; (-) strand; PAM type: YTN; PAM sequence: CTC
  source 1..20: mol_type = other DNA
agcccactgtccctacagcc

SEQ ID NO: 43281 - DNA, 20 bp, synthetic construct
  misc_feature 1..20: note = Description of Artificial Sequence: Synthetic oligonucleotide
  misc_feature 1..20: note = Target: SCN10A; (-) strand; PAM type: YTN; PAM sequence: TTC
  source 1..20: mol_type = other DNA
ccgggaggtgagtctcagcc

SEQ ID NO: 43282 - DNA, 20 bp, synthetic construct
  misc_feature 1..20: note = Description of Artificial Sequence: Synthetic oligonucleotide
  misc_feature 1..20: note = Target: SCN10A; (-) strand; PAM type: YTN; PAM sequence: TTG
  source 1..20: mol_type = other DNA
attcccgggaggtgagtctc

SEQ ID NO: 43283 - DNA, 20 bp, synthetic construct
  misc_feature 1..20: note = Description of Artificial Sequence: Synthetic oligonucleotide
  misc_feature 1..20: note = Target: SCN10A; (-) strand; PAM type: YTN; PAM sequence: CTG
  source 1..20: mol_type = other DNA
ttgattcccgggaggtgagt

SEQ ID NO: 43284 - DNA, 20 bp, synthetic construct
  misc_feature 1..20: note = Description of Artificial Sequence: Synthetic oligonucleotide
  misc_feature 1..20: note = Target: SCN10A; (-) strand; PAM type: YTN; PAM sequence: TTA
  source 1..20: mol_type = other DNA
tgtatgcagctgttgattcc

SEQ ID NO: 43285 - DNA, 20 bp, synthetic construct
  misc_feature 1..20: note = Description of Artificial Sequence: Synthetic oligonucleotide
  misc_feature 1..20: note = Target: SCN10A; (-) strand; PAM type: YTN; PAM sequence: CTG
  source 1..20: mol_type = other DNA
gatggacattatgtatgcag

SEQ ID NO: 43286 - DNA, 20 bp, synthetic construct
  misc_feature 1..20: note = Description of Artificial Sequence: Synthetic oligonucleotide
  misc_feature 1..20: note = Target: SCN10A; (-) strand; PAM type: YTN; PAM sequence: TTA
  source 1..20: mol_type = other DNA
aaggctggatggacattatg

SEQ ID NO: 43287 - DNA, 20 bp, synthetic construct
  misc_feature 1..20: note = Description of Artificial Sequence: Synthetic oligonucleotide
  misc_feature 1..20: note = Target: SCN10A; (-) strand; PAM type: YTN; PAM sequence: TTT
  source 1..20: mol_type = other DNA
aaaggctggatggacattat

SEQ ID NO: 43288 - DNA, 20 bp, synthetic construct
  misc_feature 1..20: note = Description of Artificial Sequence: Synthetic oligonucleotide
  misc_feature 1..20: note = Target: SCN10A; (-) strand; PAM type: YTN; PAM sequence: CTT
  source 1..20: mol_type = other DNA
taaaggctggatggacatta

SEQ ID NO: 43289 - DNA, 20 bp, synthetic construct
  misc_feature 1..20: note = Description of Artificial Sequence: Synthetic oligonucleotide
  misc_feature 1..20: note = Target: SCN10A; (-) strand; PAM type: YTN; PAM sequence: CTC
  source 1..20: mol_type = other DNA
caggcaacctttaaaggctg

SEQ ID NO: 43290 - DNA, 20 bp, synthetic construct
  misc_feature 1..20: note = Description of Artificial Sequence: Synthetic oligonucleotide
  misc_feature 1..20: note = Target: SCN10A; (-) strand; PAM type: YTN; PAM sequence: TTG
  source 1..20: mol_type = other DNA
tctccaggcaacctttaaag

SEQ ID NO: 43291 - DNA, 20 bp, synthetic construct
  misc_feature 1..20: note = Description of Artificial Sequence: Synthetic oligonucleotide
  misc_feature 1..20: note = Target: SCN10A; (-) strand; PAM type: YTN; PAM sequence: CTT
  source 1..20: mol_type = other DNA
gtctccaggcaacctttaaa

SEQ ID NO: 43292 - DNA, 20 bp, synthetic construct
  misc_feature 1..20: note = Description of Artificial Sequence: Synthetic oligonucleotide
  misc_feature 1..20: note = Target: SCN10A; (-) strand; PAM type: YTN; PAM sequence: CTC
  source 1..20: mol_type = other DNA
cttgtctccaggcaaccttt

SEQ ID NO: 43293 - DNA, 20 bp, synthetic construct
  misc_feature 1..20: note = Description of Artificial Sequence: Synthetic oligonucleotide
  misc_feature 1..20: note = Target: SCN10A; (-) strand; PAM type: YTN; PAM sequence: CTG
  source 1..20: mol_type = other DNA
ctccttgtctccaggcaacc

SEQ ID NO: 43294 - DNA, 20 bp, synthetic construct
  misc_feature 1..20: note = Description of Artificial Sequence: Synthetic oligonucleotide
  misc_feature 1..20: note = Target: SCN10A; (-) strand; PAM type: YTN; PAM sequence: CTC
  source 1..20: mol_type = other DNA
tgctccttgtctccaggcaa

SEQ ID NO: 43295 - DNA, 20 bp, synthetic construct
  misc_feature 1..20: note = Description of Artificial Sequence: Synthetic oligonucleotide
  misc_feature 1..20: note = Target: SCN10A; (-) strand; PAM type: YTN; PAM sequence: CTG
  source 1..20: mol_type = other DNA
agtggcctctgctccttgtc

SEQ ID NO: 43296 - DNA, 20 bp, synthetic construct
  misc_feature 1..20: note = Description of Artificial Sequence: Synthetic oligonucleotide
  misc_feature 1..20: note = Target: SCN10A; (-) strand; PAM type: YTN; PAM sequence: TTG
  source 1..20: mol_type = other DNA
ggaagggtccagtatagatg

SEQ ID NO: 43297 - DNA, 20 bp, synthetic construct
  misc_feature 1..20: note = Description of Artificial Sequence: Synthetic oligonucleotide
  misc_feature 1..20: note = Target: SCN10A; (-) strand; PAM type: YTN; PAM sequence: CTT
  source 1..20: mol_type = other DNA
gggaagggtccagtatagat

SEQ ID NO: 43298 - DNA, 20 bp, synthetic construct
  misc_feature 1..20: note = Description of Artificial Sequence: Synthetic oligonucleotide
  misc_feature 1..20: note = Target: SCN10A; (-) strand; PAM type: YTN; PAM sequence: CTG
  source 1..20: mol_type = other DNA
ggccaccatggcttgggaag

SEQ ID NO: 43299 - DNA, 20 bp, synthetic construct
  misc_feature 1..20: note = Description of Artificial Sequence: Synthetic oligonucleotide
  misc_feature 1..20: note = Target: SCN10A; (-) strand; PAM type: YTN; PAM sequence: CTC
  source 1..20: mol_type = other DNA
actgggccaccatggcttgg

SEQ ID NO: 43300 - DNA, 20 bp, synthetic construct
  misc_feature 1..20: note = Description of Artificial Sequence: Synthetic oligonucleotide
  misc_feature 1..20: note = Target: SCN10A; (-) strand; PAM type: YTN; PAM sequence: CTC
  source 1..20: mol_type = other DNA
tcactgggccaccatggctt

SEQ ID NO: 43301 - DNA, 20 bp, synthetic construct
  misc_feature 1..20: note = Description of Artificial Sequence: Synthetic oligonucleotide
  misc_feature 1..20: note = Target: SCN10A; (-) strand; PAM type: YTN; PAM sequence: CTC
  source 1..20: mol_type = other DNA
tctcactgggccaccatggc

SEQ ID NO: 43302 - DNA, 20 bp, synthetic construct
  misc_feature 1..20: note = Description of Artificial Sequence: Synthetic oligonucleotide
  misc_feature 1..20: note = Target: SCN10A; (-) strand; PAM type: YTN; PAM sequence: CTC
  source 1..20: mol_type = other DNA
ctctctcactgggccaccat

SEQ ID NO: 43303 - DNA, 20 bp, synthetic construct
  misc_feature 1..20: note = Description of Artificial Sequence: Synthetic oligonucleotide
  misc_feature 1..20: note = Target: SCN10A; (-) strand; PAM type: YTN; PAM sequence: CTC
  source 1..20: mol_type = other DNA
tcctctctcactgggccacc

SEQ ID NO: 43304 - DNA, 20 bp, synthetic construct
  misc_feature 1..20: note = Description of Artificial Sequence: Synthetic oligonucleotide
  misc_feature 1..20: note = Target: SCN10A; (-) strand; PAM type: YTN; PAM sequence: CTC
  source 1..20: mol_type = other DNA
tctcctctctcactgggcca

SEQ ID NO: 43305 - DNA, 20 bp, synthetic construct
  misc_feature 1..20: note = Description of Artificial Sequence: Synthetic oligonucleotide
  misc_feature 1..20: note = Target: SCN10A; (-) strand; PAM type: YTN; PAM sequence: TTC
  source 1..20: mol_type = other DNA
caacacaggactctctcctc

SEQ ID NO: 43306 - DNA, 20 bp, synthetic construct
  misc_feature 1..20: note = Description of Artificial Sequence: Synthetic oligonucleotide
  misc_feature 1..20: note = Target: SCN10A; (-) strand; PAM type: YTN; PAM sequence: TTT
  source 1..20: mol_type = other DNA
ccaacacaggactctctcct

SEQ ID NO: 43307 - DNA, 20 bp, synthetic construct
  misc_feature 1..20: note = Description of Artificial Sequence: Synthetic oligonucleotide
  misc_feature 1..20: note = Target: SCN10A; (-) strand; PAM type: YTN; PAM sequence: CTT
  source 1..20: mol_type = other DNA
tccaacacaggactctctcc

SEQ ID NO: 43308 - DNA, 20 bp, synthetic construct
  misc_feature 1..20: note = Description of Artificial Sequence: Synthetic oligonucleotide
  misc_feature 1..20: note = Target: SCN10A; (-) strand; PAM type: YTN; PAM sequence: CTG
  source 1..20: mol_type = other DNA
cacaagccctttccaacaca

SEQ ID NO: 43309 - DNA, 20 bp, synthetic construct
  misc_feature 1..20: note = Description of Artificial Sequence: Synthetic oligonucleotide
  misc_feature 1..20: note = Target: SCN10A; (-) strand; PAM type: YTN; PAM sequence: TTC
  source 1..20: mol_type = other DNA
tgcacaagccctttccaaca

SEQ ID NO: 43310 - DNA, 20 bp, synthetic construct
  misc_feature 1..20: note = Description of Artificial Sequence: Synthetic oligonucleotide
  misc_feature 1..20: note = Target: SCN10A; (-) strand; PAM type: YTN; PAM sequence: TTT
  source 1..20: mol_type = other DNA
ctgcacaagccctttccaac

SEQ ID NO: 43311 - DNA, 20 bp, synthetic construct
  misc_feature 1..20: note = Description of Artificial Sequence: Synthetic oligonucleotide
  misc_feature 1..20: note = Target: SCN10A; (-) strand; PAM type: YTN; PAM sequence: CTT
  source 1..20: mol_type = other DNA
tctgcacaagccctttccaa

SEQ ID NO: 43312 - DNA, 20 bp, synthetic construct
  misc_feature 1..20: note = Description of Artificial Sequence: Synthetic oligonucleotide
  misc_feature 1..20: note = Target: SCN10A; (-) strand; PAM type: YTN; PAM sequence: TTC
  source 1..20: mol_type = other DNA
tttctgcacaagccctttcc

SEQ ID NO: 43313 - DNA, 20 bp, synthetic construct
  misc_feature 1..20: note = Description of Artificial Sequence: Synthetic oligonucleotide
  misc_feature 1..20: note = Target: SCN10A; (-) strand; PAM type: YTN; PAM sequence: TTC
  source 1..20: mol_type = other DNA
attctttctgcacaagccct

SEQ ID NO: 43314 - DNA, 20 bp, synthetic construct
  misc_feature 1..20: note = Description of Artificial Sequence: Synthetic oligonucleotide
  misc_feature 1..20: note = Target: SCN10A; (-) strand; PAM type: YTN; PAM sequence: TTT
  source 1..20: mol_type = other DNA
cattctttctgcacaagccc

SEQ ID NO: 43315 - DNA, 20 bp, synthetic construct
  misc_feature 1..20: note = Description of Artificial Sequence: Synthetic oligonucleotide
  misc_feature 1..20: note = Target: SCN10A; (-) strand; PAM type: YTN; PAM sequence: CTT
  source 1..20: mol_type = other DNA
tcattctttctgcacaagcc

SEQ ID NO: 43316 - DNA, 20 bp, synthetic construct
  misc_feature 1..20: note = Description of Artificial Sequence: Synthetic oligonucleotide
  misc_feature 1..20: note = Target: SCN10A; (-) strand; PAM type: YTN; PAM sequence: TTC
  source 1..20: mol_type = other DNA
ctttcattctttctgcacaa

SEQ ID NO: 43317 - DNA, 20 bp, synthetic construct
  misc_feature 1..20: note = Description of Artificial Sequence: Synthetic oligonucleotide
  misc_feature 1..20: note = Target: SCN10A; (-) strand; PAM type: YTN; PAM sequence: TTT
  source 1..20: mol_type = other DNA
cctttcattctttctgcaca

SEQ ID NO: 43318 - DNA, 20 bp, synthetic construct
  misc_feature 1..20: note = Description of Artificial Sequence: Synthetic oligonucleotide
  misc_feature 1..20: note = Target: SCN10A; (-) strand; PAM type: YTN; PAM sequence: TTT
  source 1..20: mol_type = other DNA
tcctttcattctttctgcac

SEQ ID NO: 43319 - DNA, 20 bp, synthetic construct
  misc_feature 1..20: note = Description of Artificial Sequence: Synthetic oligonucleotide
  misc_feature 1..20: note = Target: SCN10A; (-) strand; PAM type: YTN; PAM sequence: CTT
  source 1..20: mol_type = other DNA
ttcctttcattctttctgca

SEQ ID NO: 43320 - DNA, 20 bp, synthetic construct
  misc_feature 1..20: note = Description of Artificial Sequence: Synthetic oligonucleotide
  misc_feature 1..20: note = Target: SCN10A; (-) strand; PAM type: YTN; PAM sequence: TTA
  source 1..20: mol_type = other DNA
gtcaagtaacccaagggaac

SEQ ID NO: 43321 - DNA, 20 bp, synthetic construct
  misc_feature 1..20: note = Description of Artificial Sequence: Synthetic oligonucleotide
  misc_feature 1..20: note = Target: SCN10A; (-) strand; PAM type: YTN; PAM sequence: TTA
  source 1..20: mol_type = other DNA
aatcatcatatgagattagt

SEQ ID NO: 43322 - DNA, 20 bp, synthetic construct
  misc_feature 1..20: note = Description of Artificial Sequence: Synthetic oligonucleotide
  misc_feature 1..20: note = Target: SCN10A; (-) strand; PAM type: YTN; PAM sequence: TTT
  source 1..20: mol_type = other DNA
aaatcatcatatgagattag

SEQ ID NO: 43323 - DNA, 20 bp, synthetic construct
  misc_feature 1..20: note = Description of Artificial Sequence: Synthetic oligonucleotide
  misc_feature 1..20: note = Target: SCN10A; (-) strand; PAM type: YTN; PAM sequence: CTT
  source 1..20: mol_type = other DNA
taaatcatcatatgagatta

SEQ ID NO: 43324 - DNA, 20 bp, synthetic construct
  misc_feature 1..20: note = Description of Artificial Sequence: Synthetic oligonucleotide
  misc_feature 1..20: note = Target: SCN10A; (-) strand; PAM type: YTN; PAM sequence: TTA
  source 1..20: mol_type = other DNA
ctttaaatcatcatatgaga

SEQ ID NO: 43325 - DNA, 20 bp, synthetic construct
  misc_feature 1..20: note = Description of Artificial Sequence: Synthetic oligonucleotide
  misc_feature 1..20: note = Target: SCN10A; (-) strand; PAM type: YTN; PAM sequence: TTA
  source 1..20: mol_type = other DNA
aacagccacatgtgggatta

SEQ ID NO: 43326 - DNA, 20 bp, synthetic construct
  misc_feature 1..20: note = Description of Artificial Sequence: Synthetic oligonucleotide
  misc_feature 1..20: note = Target: SCN10A; (-) strand; PAM type: YTN; PAM sequence: CTT
  source 1..20: mol_type = other DNA
aaacagccacatgtgggatt

SEQ ID NO: 43327 - DNA, 20 bp, synthetic construct
  misc_feature 1..20: note = Description of Artificial Sequence: Synthetic oligonucleotide
  misc_feature 1..20: note = Target: SCN10A; (-) strand; PAM type: YTN; PAM sequence: TTC
  source 1..20: mol_type = other DNA
ttaaacagccacatgtggga

SEQ ID NO: 43328 - DNA, 20 bp, synthetic construct
  misc_feature 1..20: note = Description of Artificial Sequence: Synthetic oligonucleotide
  misc_feature 1..20: note = Target: SCN10A; (-) strand; PAM type: YTN; PAM sequence: CTA
  source 1..20: mol_type = other DNA
ttcttaaacagccacatgtg

SEQ ID NO: 43329 - DNA, 20 bp, synthetic construct
  misc_feature 1..20: note = Description of Artificial Sequence: Synthetic oligonucleotide
  misc_feature 1..20: note = Target: SCN10A; (-) strand; PAM type: YTN; PAM sequence: CTC
  source 1..20: mol_type = other DNA
tattcttaaacagccacatg

SEQ ID NO: 43330 - DNA, 20 bp, synthetic construct
  misc_feature 1..20: note = Description of Artificial Sequence: Synthetic oligonucleotide
  misc_feature 1..20: note = Target: SCN10A; (-) strand; PAM type: YTN; PAM sequence: CTA
  source 1..20: mol_type = other DNA
ctctattcttaaacagccac

SEQ ID NO: 43331 - DNA, 20 bp, synthetic construct
  misc_feature 1..20: note = Description of Artificial Sequence: Synthetic oligonucleotide
  misc_feature 1..20: note = Target: SCN10A; (-) strand; PAM type: YTN; PAM sequence: TTA
  source 1..20: mol_type = other DNA
atgctactctattcttaaac

SEQ ID NO: 43332 - DNA, 20 bp, synthetic construct
  misc_feature 1..20: note = Description of Artificial Sequence: Synthetic oligonucleotide
  misc_feature 1..20: note = Target: SCN10A; (-) strand; PAM type: YTN; PAM sequence: TTT
  source 1..20: mol_type = other DNA
aatgctactctattcttaaa

SEQ ID NO: 43333 - DNA, 20 bp, synthetic construct
  misc_feature 1..20: note = Description of Artificial Sequence: Synthetic oligonucleotide
  misc_feature 1..20: note = Target: SCN10A; (-) strand; PAM type: YTN; PAM sequence: CTT
  source 1..20: mol_type = other DNA
taatgctactctattcttaa

SEQ ID NO: 43334 - DNA, 20 bp, synthetic construct
  misc_feature 1..20: note = Description of Artificial Sequence: Synthetic oligonucleotide
  misc_feature 1..20: note = Target: SCN10A; (-) strand; PAM type: YTN; PAM sequence: CTG
  source 1..20: mol_type = other DNA
tgtctttaatgctactctat

SEQ ID NO: 43335 - DNA, 20 bp, synthetic construct
  misc_feature 1..20: note = Description of Artificial Sequence: Synthetic oligonucleotide
  misc_feature 1..20: note = Target: SCN10A; (-) strand; PAM type: YTN; PAM sequence: CTC
  source 1..20: mol_type = other DNA
tgtgtctttaatgctactct

SEQ ID NO: 43336 - DNA, 20 bp, synthetic construct
  misc_feature 1..20: note = Description of Artificial Sequence: Synthetic oligonucleotide
  misc_feature 1..20: note = Target: SCN10A; (-) strand; PAM type: YTN; PAM sequence: CTG
  source 1..20: mol_type = other DNA
aaaggctctgtgtctttaat

SEQ ID NO: 43337 - DNA, 20 bp, synthetic construct
  misc_feature 1..20: note = Description of Artificial Sequence: Synthetic oligonucleotide
  misc_feature 1..20: note = Target: SCN10A; (-) strand; PAM type: YTN; PAM sequence: TTC
  source 1..20: mol_type = other DNA
tgaaaggctctgtgtcttta

SEQ ID NO: 43338 - DNA, 20 bp, synthetic construct
  misc_feature 1..20: note = Description of Artificial Sequence: Synthetic oligonucleotide
  misc_feature 1..20: note = Target: SCN10A; (-) strand; PAM type: YTN; PAM sequence: CTA
  source 1..20: mol_type = other DNA
cattctgaaaggctctgtgt

SEQ ID NO: 43339 - DNA, 20 bp, synthetic construct
  misc_feature 1..20: note = Description of Artificial Sequence: Synthetic oligonucleotide
  misc_feature 1..20: note = Target: SCN10A; (-) strand; PAM type: YTN; PAM sequence: CTC
  source 1..20: mol_type = other DNA
agtccatactacattctgaa

SEQ ID NO: 43340 - DNA, 20 bp, synthetic construct
  misc_feature 1..20: note = Description of Artificial Sequence: Synthetic oligonucleotide
  misc_feature 1..20: note = Target: SCN10A; (-) strand; PAM type: YTN; PAM sequence: CTC
  source 1..20: mol_type = other DNA
agtcctcagtccatactaca

SEQ ID NO: 43341 - DNA, 20 bp, synthetic construct
  misc_feature 1..20: note = Description of Artificial Sequence: Synthetic oligonucleotide
  misc_feature 1..20: note = Target: SCN10A; (-) strand; PAM type: YTN; PAM sequence: CTA
  source 1..20: mol_type = other DNA
gacactcagtcctcagtcca

SEQ ID NO: 43342 - DNA, 20 bp, synthetic construct
  misc_feature 1..20: note = Description of Artificial Sequence: Synthetic oligonucleotide
  misc_feature 1..20: note = Target: SCN10A; (-) strand; PAM type: YTN; PAM sequence: CTA
  source 1..20: mol_type = other DNA
gaaccagacacctagacact

SEQ ID NO: 43343 - DNA, 20 bp, synthetic construct
  misc_feature 1..20: note = Description of Artificial Sequence: Synthetic oligonucleotide
  misc_feature 1..20: note = Target: SCN10A; (-) strand; PAM type: YTN; PAM sequence: TTG
  source 1..20: mol_type = other DNA
gcactagaaccagacaccta

SEQ ID NO: 43344 - DNA, 20 bp, synthetic construct
  misc_feature 1..20: note = Description of Artificial Sequence: Synthetic oligonucleotide
  misc_feature 1..20: note = Target: SCN10A; (-) strand; PAM type: YTN; PAM sequence: TTG
  source 1..20: mol_type = other DNA
tagcaattggcactagaacc

SEQ ID NO: 43345 - DNA, 20 bp, synthetic construct
  misc_feature 1..20: note = Description of Artificial Sequence: Synthetic oligonucleotide
  misc_feature 1..20: note = Target: SCN10A; (-) strand; PAM type: YTN; PAM sequence: CTT
  source 1..20: mol_type = other DNA
gtagcaattggcactagaac

SEQ ID NO: 43346 - DNA, 20 bp, synthetic construct
  misc_feature 1..20: note = Description of Artificial Sequence: Synthetic oligonucleotide
  misc_feature 1..20: note = Target: SCN10A; (-) strand; PAM type: YTN; PAM sequence: TTA
  source 1..20: mol_type = other DNA
ggcaagtgcacagagcagac

SEQ ID NO: 43347 - DNA, 20 bp, synthetic construct
  misc_feature 1..20: note = Description of Artificial Sequence: Synthetic oligonucleotide
  misc_feature 1..20: note = Target: SCN10A; (-) strand; PAM type: YTN; PAM sequence: CTT
  source 1..20: mol_type = other DNA
aggcaagtgcacagagcaga

SEQ ID NO: 43348 - DNA, 20 bp, synthetic construct
  misc_feature 1..20: note = Description of Artificial Sequence: Synthetic oligonucleotide
  misc_feature 1..20: note = Target: SCN10A; (-) strand; PAM type: YTN; PAM sequence: CTG
  source 1..20: mol_type = other DNA
agaggggaaaccttaggcaa

SEQ ID NO: 43349 - DNA, 20 bp, synthetic construct
  misc_feature 1..20: note = Description of Artificial Sequence: Synthetic oligonucleotide
  misc_feature 1..20: note = Target: SCN10A; (-) strand; PAM type: YTN; PAM sequence: CTG
  source 1..20: mol_type = other DNA
agaaaatggcagccctgaga

SEQ ID NO: 43350 - DNA, 20 bp, synthetic construct
  misc_feature 1..20: note = Description of Artificial Sequence: Synthetic oligonucleotide
  misc_feature 1..20: note = Target: SCN10A; (-) strand; PAM type: YTN; PAM sequence: TTA
  source 1..20: mol_type = other DNA
catcatgtgcataaggtggg

SEQ ID NO: 43351 - DNA, 20 bp, synthetic construct
  misc_feature 1..20: note = Description of Artificial Sequence: Synthetic oligonucleotide
  misc_feature 1..20: note = Target: SCN10A; (-) strand; PAM type: YTN; PAM sequence: CTT
  source 1..20: mol_type = other DNA
acatcatgtgcataaggtgg

SEQ ID NO: 43352 - DNA, 20 bp, synthetic construct
  misc_feature 1..20: note = Description of Artificial Sequence: Synthetic oligonucleotide
  misc_feature 1..20: note = Target: SCN10A; (-) strand; PAM type: YTN; PAM sequence: TTC
  source 1..20: mol_type = other DNA
ttacatcatgtgcataaggt

SEQ ID NO: 43353 - DNA, 20 bp, synthetic construct
  misc_feature 1..20: note = Description of Artificial Sequence: Synthetic oligonucleotide
  misc_feature 1..20: note = Target: SCN10A; (-) strand; PAM type: YTN; PAM sequence: CTG
  source 1..20: mol_type = other DNA
gaagatataccattcttaca

SEQ ID NO: 43354 - DNA, 20 bp, synthetic construct
  misc_feature 1..20: note = Description of Artificial Sequence: Synthetic oligonucleotide
  misc_feature 1..20: note = Target: SCN10A; (-) strand; PAM type: YTN; PAM sequence: CTC
  source 1..20: mol_type = other DNA
catctggaagatataccatt

SEQ ID NO: 43355 - DNA, 20 bp, synthetic construct
  misc_feature 1..20: note = Description of Artificial Sequence: Synthetic oligonucleotide
  misc_feature 1..20: note = Target: SCN10A; (-) strand; PAM type: YTN; PAM sequence: TTC
  source 1..20: mol_type = other DNA
tccatctggaagatatacca

SEQ ID NO: 43356 - DNA, 20 bp, synthetic construct
  misc_feature 1..20: note = Description of Artificial Sequence: Synthetic oligonucleotide
  misc_feature 1..20: note = Target: SCN10A; (-) strand; PAM type: YTN; PAM sequence: CTT
  source 1..20: mol_type = other DNA
ctccatctggaagatatacc

SEQ ID NO: 43357 - DNA, 20 bp, synthetic construct
  misc_feature 1..20: note = Description of Artificial Sequence: Synthetic oligonucleotide
  misc_feature 1..20: note = Target: SCN10A; (-) strand; PAM type: YTN; PAM sequence: CTC
  source 1..20: mol_type = other DNA
aacttctccatctggaagat

SEQ ID NO: 43358 - DNA, 20 bp, synthetic construct
  misc_feature 1..20: note = Description of Artificial Sequence: Synthetic oligonucleotide
  misc_feature 1..20: note = Target: SCN10A; (-) strand; PAM type: YTN; PAM sequence: TTC
  source 1..20: mol_type = other DNA
tcaacttctccatctggaag

SEQ ID NO: 43359 - DNA, 20 bp, synthetic construct
  misc_feature 1..20: note = Description of Artificial Sequence: Synthetic oligonucleotide
  misc_feature 1..20: note = Target: SCN10A; (-) strand; PAM type: YTN; PAM sequence: CTA
  source 1..20: mol_type = other DNA
ttctcaacttctccatctgg

SEQ ID NO: 43360 - DNA, 20 bp, synthetic construct
  misc_feature 1..20: note = Description of Artificial Sequence: Synthetic oligonucleotide
  misc_feature 1..20: note = Target: SCN10A; (-) strand; PAM type: YTN; PAM sequence: TTC
  source 1..20: mol_type = other DNA
tattctcaacttctccatct

SEQ ID NO: 43361 - DNA, 20 bp, synthetic construct
  misc_feature 1..20: note = Description of Artificial Sequence: Synthetic oligonucleotide
  misc_feature 1..20: note = Target: SCN10A; (-) strand; PAM type: YTN; PAM sequence: CTT
  source 1..20: mol_type = other DNA
ctattctcaacttctccatc

SEQ ID NO: 43362 - DNA, 20 bp, synthetic construct
  misc_feature 1..20: note = Description of Artificial Sequence: Synthetic oligonucleotide
  misc_feature 1..20: note = Target: SCN10A; (-) strand; PAM type: YTN; PAM sequence: CTG
  source 1..20: mol_type = other DNA
aaggcaggaacatggaggtc

SEQ ID NO: 43363 - DNA, 20 bp, synthetic construct
  misc_feature 1..20: note = Description of Artificial Sequence: Synthetic oligonucleotide
  misc_feature 1..20: note = Target: SCN10A; (-) strand; PAM type: YTN; PAM sequence: CTA
  source 1..20: mol_type = other DNA
aagctgaaggcaggaacatg

SEQ ID NO: 43364 - DNA, 20 bp, synthetic construct
  misc_feature 1..20: note = Description of Artificial Sequence: Synthetic oligonucleotide
  misc_feature 1..20: note = Target: SCN10A; (-) strand; PAM type: YTN; PAM sequence: CTC
  source 1..20: mol_type = other DNA
aagaatgctaaagctgaagg

SEQ ID NO: 43365 - DNA, 20 bp, synthetic construct
  misc_feature 1..20: note = Description of Artificial Sequence: Synthetic oligonucleotide
  misc_feature 1..20: note = Target: SCN10A; (-) strand; PAM type: YTN; PAM sequence: CTA
  source 1..20: mol_type = other DNA
gacctcaagaatgctaaagc

SEQ ID NO: 43366 - DNA, 20 bp, synthetic construct
  misc_feature 1..20: note = Description of Artificial Sequence: Synthetic oligonucleotide
  misc_feature 1..20: note = Target: SCN10A; (-) strand; PAM type: YTN; PAM sequence: TTC
  source 1..20: mol_type = other DNA
tagacctcaagaatgctaaa

SEQ ID NO: 43367 - DNA, 20 bp, synthetic construct
  misc_feature 1..20: note = Description of Artificial Sequence: Synthetic oligonucleotide
  misc_feature 1..20: note = Target: SCN10A; (-) strand; PAM type: YTN; PAM sequence: TTT
  source 1..20: mol_type = other DNA
ctagacctcaagaatgctaa

SEQ ID NO: 43368 - DNA, 20 bp, synthetic construct
  misc_feature 1..20: note = Description of Artificial Sequence: Synthetic oligonucleotide
  misc_feature 1..20: note = Target: SCN10A; (-) strand; PAM type: YTN; PAM sequence: CTG
  source 1..20: mol_type = other DNA
gaaggcacacccagtttcta

SEQ ID NO: 43369 - DNA, 20 bp, synthetic construct
  misc_feature 1..20: note = Description of Artificial Sequence: Synthetic oligonucleotide
  misc_feature 1..20: note = Target: SCN10A; (-) strand; PAM type: YTN; PAM sequence: CTG
  source 1..20: mol_type = other DNA
aacatgctggaaggcacacc

SEQ ID NO: 43370 - DNA, 20 bp, synthetic construct
  misc_feature 1..20: note = Description of Artificial Sequence: Synthetic oligonucleotide
  misc_feature 1..20: note = Target: SCN10A; (-) strand; PAM type: YTN; PAM sequence: CTC
  source 1..20: mol_type = other DNA
tgaacatgctggaaggcaca

SEQ ID NO: 43371 - DNA, 20 bp, synthetic construct
  misc_feature 1..20: note = Description of Artificial Sequence: Synthetic oligonucleotide
  misc_feature 1..20: note = Target: SCN10A; (-) strand; PAM type: YTN; PAM sequence: TTG
  source 1..20: mol_type = other DNA
catgctctgaacatgctgga

SEQ ID NO: 43372 - DNA, 20 bp, synthetic construct
  misc_feature 1..20: note = Description of Artificial Sequence: Synthetic oligonucleotide
  misc_feature 1..20: note = Target: SCN10A; (-) strand; PAM type: YTN; PAM sequence: CTT
  source 1..20: mol_type = other DNA
gcatgctctgaacatgctgg

SEQ ID NO: 43373 - DNA, 20 bp, synthetic construct
  misc_feature 1..20: note = Description of Artificial Sequence: Synthetic oligonucleotide
  misc_feature 1..20: note = Target: SCN10A; (-) strand; PAM type: YTN; PAM sequence: CTA
  source 1..20: mol_type = other DNA
agatgtcttgcatgctctga

SEQ ID NO: 43374 - DNA, 20 bp, synthetic construct
  misc_feature 1..20: note = Description of Artificial Sequence: Synthetic oligonucleotide
  misc_feature 1..20: note = Target: SCN10A; (-) strand; PAM type: YTN; PAM sequence: CTA
  source 1..20: mol_type = other DNA
ggagtgtaagaactaagatg

SEQ ID NO: 43375 - DNA, 20 bp, synthetic construct
  misc_feature 1..20: note = Description of Artificial Sequence: Synthetic oligonucleotide
  misc_feature 1..20: note = Target: SCN10A; (-) strand; PAM type: YTN; PAM sequence: CTG
  source 1..20: mol_type = other DNA
taacaggcctaggagtgtaa

SEQ ID NO: 43376 - DNA, 20 bp, synthetic construct
  misc_feature 1..20: note = Description of Artificial Sequence: Synthetic oligonucleotide
  misc_feature 1..20: note = Target: SCN10A; (-) strand; PAM type: YTN; PAM sequence: TTA
  source 1..20: mol_type = other DNA
agtgctgtaacaggcctagg

SEQ ID NO: 43377 - DNA, 20 bp, synthetic construct
  misc_feature 1..20: note = Description of Artificial Sequence: Synthetic oligonucleotide
  misc_feature 1..20: note = Target: SCN10A; (-) strand; PAM type: YTN; PAM sequence: CTC
  source 1..20: mol_type = other DNA
attaagtgctgtaacaggcc

SEQ ID NO: 43378 - DNA, 20 bp, synthetic construct
  misc_feature 1..20: note = Description of Artificial Sequence: Synthetic oligonucleotide
  misc_feature 1..20: note = Target: SCN10A; (-) strand; PAM type: YTN; PAM sequence: TTA
  source 1..20: mol_type = other DNA
aaacagctcattaagtgctg

SEQ ID NO: 43379 - DNA, 20 bp, synthetic construct
  misc_feature 1..20: note = Description of Artificial Sequence: Synthetic oligonucleotide
  misc_feature 1..20: note = Target: SCN10A; (-) strand; PAM type: YTN; PAM sequence: CTA
  source 1..20: mol_type = other DNA
ataggtgaattaaaacagct

SEQ ID NO: 43380 - DNA, 20 bp, synthetic construct
  misc_feature 1..20: note = Description of Artificial Sequence: Synthetic oligonucleotide
  misc_feature 1..20: note = Target: SCN10A; (-) strand; PAM type: YTN; PAM sequence: CTG
  source 1..20: mol_type = other DNA
tatgagaaacagactaatag

SEQ ID NO: 43381 - DNA, 20 bp, synthetic construct
  misc_feature 1..20: note = Description of Artificial Sequence: Synthetic oligonucleotide
  misc_feature 1..20: note = Target: SCN10A; (-) strand; PAM type: YTN; PAM sequence: CTG
  source 1..20: mol_type = other DNA
atgctgtatgagaaacagac

SEQ ID NO: 43382 - DNA, 20 bp, synthetic construct
  misc_feature 1..20: note = Description of Artificial Sequence: Synthetic oligonucleotide
  misc_feature 1..20: note = Target: SCN10A; (-) strand; PAM type: YTN; PAM sequence: TTG
  source 1..20: mol_type = other DNA
gacactgatgctgtatgaga

SEQ ID NO: 43383 - DNA, 20 bp, synthetic construct
  misc_feature 1..20: note = Description of Artificial Sequence: Synthetic oligonucleotide
  misc_feature 1..20: note = Target: SCN10A; (-) strand; PAM type: YTN; PAM sequence: CTT
  source 1..20: mol_type = other DNA
ggacactgatgctgtatgag

SEQ ID NO: 43384 - DNA, 20 bp, synthetic construct
  misc_feature 1..20: note = Description of Artificial Sequence: Synthetic oligonucleotide
  misc_feature 1..20: note = Target: SCN10A; (-) strand; PAM type: YTN; PAM sequence: CTG
  source 1..20: mol_type = other DNA
ggcttggacactgatgctgt

SEQ ID NO: 43385 - DNA, 20 bp, synthetic construct
  misc_feature 1..20: note = Description of Artificial Sequence: Synthetic oligonucleotide
  misc_feature 1..20: note = Target: SCN10A; (-) strand; PAM type: YTN; PAM sequence: CTG
  source 1..20: mol_type = other DNA
ggagatacagtcagaactgg

SEQ ID NO: 43386 - DNA, 20 bp, synthetic construct
  misc_feature 1..20: note = Description of Artificial Sequence: Synthetic oligonucleotide
  misc_feature 1..20: note = Target: SCN10A; (-) strand; PAM type: YTN; PAM sequence: CTC
  source 1..20: mol_type = other DNA
agccctgggagatacagtca

SEQ ID NO: 43387 - DNA, 20 bp, synthetic construct
  misc_feature 1..20: note = Description of Artificial Sequence: Synthetic oligonucleotide
  misc_feature 1..20: note = Target: SCN10A; (-) strand; PAM type: YTN; PAM sequence: CTA
  source 1..20: mol_type = other DNA
ctcagccctgggagatacag

SEQ ID NO: 43388 - DNA, 20 bp, synthetic construct
  misc_feature 1..20: note = Description of Artificial Sequence: Synthetic oligonucleotide
  misc_feature 1..20: note = Target: SCN10A; (-) strand; PAM type: YTN; PAM sequence: CTG
  source 1..20: mol_type = other DNA
gtatgccaggcatggtacta

SEQ ID NO: 43389 - DNA, 20 bp, synthetic construct
  misc_feature 1..20: note = Description of Artificial Sequence: Synthetic oligonucleotide
  misc_feature 1..20: note = Target: SCN10A; (-) strand; PAM type: YTN; PAM sequence: CTC
  source 1..20: mol_type = other DNA
tggtatgccaggcatggtac

SEQ ID NO: 43390 - DNA, 20 bp, synthetic construct
  misc_feature 1..20: note = Description of Artificial Sequence: Synthetic oligonucleotide
  misc_feature 1..20: note = Target: SCN10A; (-) strand; PAM type: YTN; PAM sequence: CTG
  source 1..20: mol_type = other DNA
agtagctctggtatgccagg

SEQ ID NO: 43391 - DNA, 20 bp, synthetic construct
  misc_feature 1..20: note = Description of Artificial Sequence: Synthetic oligonucleotide
  misc_feature 1..20: note = Target: SCN10A; (-) strand; PAM type: YTN; PAM sequence: CTC
  source 1..20: mol_type = other DNA
tgagtagctctggtatgcca

SEQ ID NO: 43392 - DNA, 20 bp, synthetic construct
  misc_feature 1..20: note = Description of Artificial Sequence: Synthetic oligonucleotide
  misc_feature 1..20: note = Target: SCN10A; (-) strand; PAM type: YTN; PAM sequence: TTC
  source 1..20: mol_type = other DNA
aacaaataatctctgagtag

SEQ ID NO: 43393 - DNA, 20 bp, synthetic construct
  misc_feature 1..20: note = Description of Artificial Sequence: Synthetic oligonucleotide
  misc_feature 1..20: note = Target: SCN10A; (-) strand; PAM type: YTN; PAM sequence: TTA
  source 1..20: mol_type = other DNA
ttcaacaaataatctctgag

SEQ ID NO: 43394 - DNA, 20 bp, synthetic construct
  misc_feature 1..20: note = Description of Artificial Sequence: Synthetic oligonucleotide
  misc_feature 1..20: note = Target: SCN10A; (-) strand; PAM type: YTN; PAM sequence: TTT
  source 1..20: mol_type = other DNA
attcaacaaataatctctga

SEQ ID NO: 43395 - DNA, 20 bp, synthetic construct
  misc_feature 1..20: note = Description of Artificial Sequence: Synthetic oligonucleotide
  misc_feature 1..20: note = Target: SCN10A; (-) strand; PAM type: YTN; PAM sequence: TTG
  source 1..20: mol_type = other DNA
catttattcaacaaataatc

SEQ ID NO: 43396 - DNA, 20 bp, synthetic construct
  misc_feature 1..20: note = Description of Artificial Sequence: Synthetic oligonucleotide
  misc_feature 1..20: note = Target: SCN10A; (-) strand; PAM type: YTN; PAM sequence: CTT
  source 1..20: mol_type = other DNA
gcatttattcaacaaataat

SEQ ID NO: 43397 - DNA, 20 bp, synthetic construct
  misc_feature 1..20: note = Description of Artificial Sequence: Synthetic oligonucleotide
  misc_feature 1..20: note = Target: SCN10A; (-) strand; PAM type: YTN; PAM sequence: TTC
  source 1..20: mol_type = other DNA
ttgcatttattcaacaaata

SEQ ID NO: 43398 - DNA, 20 bp, synthetic construct
  misc_feature 1..20: note = Description of Artificial Sequence: Synthetic oligonucleotide
  misc_feature 1..20: note = Target: SCN10A; (-) strand; PAM type: YTN; PAM sequence: TTG
  source 1..20: mol_type = other DNA
gttcttgcatttattcaaca

SEQ ID NO: 43399 - DNA, 20 bp, synthetic construct
  misc_feature 1..20: note = Description of Artificial Sequence: Synthetic oligonucleotide
  misc_feature 1..20: note = Target: SCN10A; (-) strand; PAM type: YTN; PAM sequence: TTC
  source 1..20: mol_type = other DNA
caccattggttcttgcattt

SEQ ID NO: 43400 - DNA, 20 bp, synthetic construct
  misc_feature 1..20: note = Description of Artificial Sequence: Synthetic oligonucleotide
  misc_feature 1..20: note = Target: SCN10A; (-) strand; PAM type: YTN; PAM sequence: CTA
  source 1..20: mol_type = other DNA
cattccaccattggttcttg

SEQ ID NO: 43401 - DNA, 20 bp, synthetic construct
  misc_feature 1..20: note = Description of Artificial Sequence: Synthetic oligonucleotide
  misc_feature 1..20: note = Target: SCN10A; (-) strand; PAM type: YTN; PAM sequence: TTG
  source 1..20: mol_type = other DNA
agtgtctacattccaccatt

SEQ ID NO: 43402 - DNA, 20 bp, synthetic construct
  misc_feature 1..20: note = Description of Artificial Sequence: Synthetic oligonucleotide
  misc_feature 1..20: note = Target: SCN10A; (-) strand; PAM type: YTN; PAM sequence: CTT
  source 1..20: mol_type = other DNA
gagtgtctacattccaccat

SEQ ID NO: 43403 - DNA, 20 bp, synthetic construct
  misc_feature 1..20: note = Description of Artificial Sequence: Synthetic oligonucleotide
  misc_feature 1..20: note = Target: SCN10A; (-) strand; PAM type: YTN; PAM sequence: CTC
  source 1..20: mol_type = other DNA
ttgagtgtctacattccacc

SEQ ID NO: 43404 - DNA, 20 bp, synthetic construct
  misc_feature 1..20: note = Description of Artificial Sequence: Synthetic oligonucleotide
  misc_feature 1..20: note = Target: SCN10A; (-) strand; PAM type: YTN; PAM sequence: TTA
  source 1..20: mol_type = other DNA
ctcttgagtgtctacattcc

SEQ ID NO: 43405 - DNA, 20 bp, synthetic construct
  misc_feature 1..20: note = Description of Artificial Sequence: Synthetic oligonucleotide
  misc_feature 1..20: note = Target: SCN10A; (-) strand; PAM type: YTN; PAM sequence: TTG
  source 1..20: mol_type = other DNA
tcatgcagttactcttgagt

SEQ ID NO: 43406 - DNA, 20 bp, synthetic construct
  misc_feature 1..20: note = Description of Artificial Sequence: Synthetic oligonucleotide
  misc_feature 1..20: note = Target: SCN10A; (-) strand; PAM type: YTN; PAM sequence: TTT
  source 1..20: mol_type = other DNA
gtcatgcagttactcttgag

SEQ ID NO: 43407 - DNA, 20 bp, synthetic construct
  misc_feature 1..20: note = Description of Artificial Sequence: Synthetic oligonucleotide
  misc_feature 1..20: note = Target: SCN10A; (-) strand; PAM type: YTN; PAM sequence: TTA
  source 1..20: mol_type = other DNA
tacatttgtcatgcagttac

SEQ ID NO: 43408 - DNA, 20 bp, synthetic construct
  misc_feature 1..20: note = Description of Artificial Sequence: Synthetic oligonucleotide
  misc_feature 1..20: note = Target: SCN10A; (-) strand; PAM type: YTN; PAM sequence: CTT
  source 1..20: mol_type = other DNA
atacatttgtcatgcagtta

SEQ ID NO: 43409 - DNA, 20 bp, synthetic construct
  misc_feature 1..20: note = Description of Artificial Sequence: Synthetic oligonucleotide
  misc_feature 1..20: note = Target: SCN10A; (-) strand; PAM type: YTN; PAM sequence: TTA
  source 1..20: mol_type = other DNA
cttatacatttgtcatgcag

SEQ ID NO: 43410 - DNA, 20 bp, synthetic construct
  misc_feature 1..20: note = Description of Artificial Sequence: Synthetic oligonucleotide
  misc_feature 1..20: note = Target: SCN10A; (-) strand; PAM type: YTN; PAM sequence: TTA
  source 1..20: mol_type = other DNA
atacaattacttatacattt

SEQ ID NO: 43411 - DNA, 20 bp, synthetic construct
  misc_feature 1..20: note = Description of Artificial Sequence: Synthetic oligonucleotide
  misc_feature 1..20: note = Target: SCN10A; (-) strand; PAM type: YTN; PAM sequence: TTC
  source 1..20: mol_type = other DNA
aagtgttaatacaattactt

SEQ ID NO: 43412 - DNA, 20 bp, synthetic construct
  misc_feature 1..20: note = Description of Artificial Sequence: Synthetic oligonucleotide
  misc_feature 1..20: note = Target: SCN10A; (-) strand; PAM type: YTN; PAM sequence: TTC
  source 1..20: mol_type = other DNA
attcaagtgttaatacaatt

SEQ ID NO: 43413 - DNA, 20 bp, synthetic construct
  misc_feature 1..20: note = Description of Artificial Sequence: Synthetic oligonucleotide
  misc_feature 1..20: note = Target: SCN10A; (-) strand; PAM type: YTN; PAM sequence: CTG
  source 1..20: mol_type = other DNA
ttcattcaagtgttaataca

SEQ ID NO: 43414 - DNA, 20 bp, synthetic construct
  misc_feature 1..20: note = Description of Artificial Sequence: Synthetic oligonucleotide
  misc_feature 1..20: note = Target: SCN10A; (-) strand; PAM type: YTN; PAM sequence: CTC
  source 1..20: mol_type = other DNA
tgttcattcaagtgttaata

SEQ ID NO: 43415 - DNA, 20 bp, synthetic construct
  misc_feature 1..20: note = Description of Artificial Sequence: Synthetic oligonucleotide
  misc_feature 1..20: note = Target: SCN10A; (-) strand; PAM type: YTN; PAM sequence: TTC
  source 1..20: mol_type = other DNA
agtcctctgttcattcaagt

SEQ ID NO: 43416 - DNA, 20 bp, synthetic construct
  misc_feature 1..20: note = Description of Artificial Sequence: Synthetic oligonucleotide
  misc_feature 1..20: note = Target: SCN10A; (-) strand; PAM type: YTN; PAM sequence: TTC
  source 1..20: mol_type = other DNA
attcagtcctctgttcattc

SEQ ID NO: 43417 - DNA, 20 bp, synthetic construct
  misc_feature 1..20: note = Description of Artificial Sequence: Synthetic oligonucleotide
  misc_feature 1..20: note = Target: SCN10A; (-) strand; PAM type: YTN; PAM sequence: CTG
  source 1..20: mol_type = other DNA
ttcattcagtcctctgttca

SEQ ID NO: 43418 - DNA, 20 bp, synthetic construct
  misc_feature 1..20: note = Description of Artificial Sequence: Synthetic oligonucleotide
  misc_feature 1..20: note = Target: SCN10A; (-) strand; PAM type: YTN; PAM sequence: CTA
  source 1..20: mol_type = other DNA
cctgttcattcagtcctctg

SEQ ID NO: 43419 - DNA, 20 bp, synthetic construct
  misc_feature 1..20: note = Description of Artificial Sequence: Synthetic oligonucleotide
  misc_feature 1..20: note = Target: SCN10A; (-) strand; PAM type: YTN; PAM sequence: TTC
  source 1..20: mol_type = other DNA
atctacctgttcattcagtc

SEQ ID NO: 43420 - DNA, 20 bp, synthetic construct
  misc_feature 1..20: note = Description of Artificial Sequence: Synthetic oligonucleotide
  misc_feature 1..20: note = Target: SCN10A; (-) strand; PAM type: YTN; PAM sequence: CTT
  source 1..20: mol_type = other DNA
catctacctgttcattcagt

SEQ ID NO: 43421 - DNA, 20 bp, synthetic construct
  misc_feature 1..20: note = Description of Artificial Sequence: Synthetic oligonucleotide
  misc_feature 1..20: note = Target: SCN10A; (-) strand; PAM type: YTN; PAM sequence: TTG
  source 1..20: mol_type = other DNA
ccttcatctacctgttcatt

SEQ ID NO: 43422 - DNA, 20 bp, synthetic construct
  misc_feature 1..20: note = Description of Artificial Sequence: Synthetic oligonucleotide
  misc_feature 1..20: note = Target: SCN10A; (-) strand; PAM type: YTN; PAM sequence: CTT
  source 1..20: mol_type = other DNA
gccttcatctacctgttcat

SEQ ID NO: 43423 - DNA, 20 bp, synthetic construct
  misc_feature 1..20: note = Description of Artificial Sequence: Synthetic oligonucleotide
  misc_feature 1..20: note = Target: SCN10A; (-) strand; PAM type: YTN; PAM sequence: TTC
  source 1..20: mol_type = other DNA
ttgccttcatctacctgttc

SEQ ID NO: 43424 - DNA, 20 bp, synthetic construct
  misc_feature 1..20: note = Description of Artificial Sequence: Synthetic oligonucleotide
  misc_feature 1..20: note = Target: SCN10A; (-) strand; PAM type: YTN; PAM sequence: TTT
  source 1..20: mol_type = other DNA
cttgccttcatctacctgtt

SEQ ID NO: 43425 - DNA, 20 bp, synthetic construct
  misc_feature 1..20: note = Description of Artificial Sequence: Synthetic oligonucleotide
  misc_feature 1..20: note = Target: SCN10A; (-) strand; PAM type: YTN; PAM sequence: CTC
  source 1..20: mol_type = other DNA
atttcttgccttcatctacc

SEQ ID NO: 43426 - DNA, 20 bp, synthetic construct
  misc_feature 1..20: note = Description of Artificial Sequence: Synthetic oligonucleotide
  misc_feature 1..20: note = Target: SCN10A; (-) strand; PAM type: YTN; PAM sequence: TTC
  source 1..20: mol_type = other DNA
atcatccagtcaatcactca

SEQ ID NO: 43427 - DNA, 20 bp, synthetic construct
  misc_feature 1..20: note = Description of Artificial Sequence: Synthetic oligonucleotide
  misc_feature 1..20: note = Target: SCN10A; (-) strand; PAM type: YTN; PAM sequence: TTT
  source 1..20: mol_type = other DNA
catcatccagtcaatcactc

SEQ ID NO: 43428 - DNA, 20 bp, synthetic construct
  misc_feature 1..20: note = Description of Artificial Sequence: Synthetic oligonucleotide
  misc_feature 1..20: note = Target: SCN10A; (-) strand; PAM type: YTN; PAM sequence: CTT
  source 1..20: mol_type = other DNA
tcatcatccagtcaatcact

SEQ ID NO: 43429 - DNA, 20 bp, synthetic construct
  misc_feature 1..20: note = Description of Artificial Sequence: Synthetic oligonucleotide
  misc_feature 1..20: note = Target: SCN10A; (-) strand; PAM type: YTN; PAM sequence: TTC
  source 1..20: mol_type = other DNA
tttcatcatccagtcaatca

SEQ ID NO: 43430 - DNA, 20 bp, synthetic construct
  misc_feature 1..20: note = Description of Artificial Sequence: Synthetic oligonucleotide
  misc_feature 1..20: note = Target: SCN10A; (-) strand; PAM type: YTN; PAM sequence: TTT
  source 1..20: mol_type = other DNA
ctttcatcatccagtcaatc

SEQ ID NO: 43431 - DNA, 20 bp, synthetic construct
  misc_feature 1..20: note = Description of Artificial Sequence: Synthetic oligonucleotide
  misc_feature 1..20: note = Target: SCN10A; (-) strand; PAM type: YTN; PAM sequence: CTT
  source 1..20: mol_type = other DNA
tctttcatcatccagtcaat

SEQ ID NO: 43432 - DNA, 20 bp, synthetic construct
  misc_feature 1..20: note = Description of Artificial Sequence: Synthetic oligonucleotide
  misc_feature 1..20: note = Target: SCN10A; (-) strand; PAM type: YTN; PAM sequence: TTC
  source 1..20: mol_type = other DNA
tttctttcatcatccagtca

SEQ ID NO: 43433 - DNA, 20 bp, synthetic construct
  misc_feature 1..20: note = Description of Artificial Sequence: Synthetic oligonucleotide
  misc_feature 1..20: note = Target: SCN10A; (-) strand; PAM type: YTN; PAM sequence: TTT
  source 1..20: mol_type = other DNA
ctttctttcatcatccagtc

SEQ ID NO: 43434 - DNA, 20 bp, synthetic construct
  misc_feature 1..20: note = Description of Artificial Sequence: Synthetic oligonucleotide
  misc_feature 1..20: note = Target: SCN10A; (-) strand; PAM type: YTN; PAM sequence: CTT
  source 1..20: mol_type = other DNA
tctttctttcatcatccagt

SEQ ID NO: 43435 - DNA, 20 bp, synthetic construct
  misc_feature 1..20: note = Description of Artificial Sequence: Synthetic oligonucleotide
  misc_feature 1..20: note = Target: SCN10A; (-) strand; PAM type: YTN; PAM sequence: CTG
  source 1..20: mol_type = other DNA
tctttctttctttcatcatc

SEQ ID NO: 43436 - DNA, 20 bp, synthetic construct
  misc_feature 1..20: note = Description of Artificial Sequence: Synthetic oligonucleotide
  misc_feature 1..20: note = Target: SCN10A; (-) strand; PAM type: YTN; PAM sequence: TTC
  source 1..20: mol_type = other DNA
atcctgtctttctttctttc

SEQ ID NO: 43437 - DNA, 20 bp, synthetic construct
  misc_feature 1..20: note = Description of Artificial Sequence: Synthetic oligonucleotide
  misc_feature 1..20: note = Target: SCN10A; (-) strand; PAM type: YTN; PAM sequence: TTG
  source 1..20: mol_type = other DNA
gtgataatgacagtcaaaca

SEQ ID NO: 43438 - DNA, 20 bp, synthetic construct
  misc_feature 1..20: note = Description of Artificial Sequence: Synthetic oligonucleotide
  misc_feature 1..20: note = Target: SCN10A; (-) strand; PAM type: YTN; PAM sequence: TTG
  source 1..20: mol_type = other DNA
taatgatatataatgttggt

SEQ ID NO: 43439 - DNA, 20 bp, synthetic construct
  misc_feature 1..20: note = Description of Artificial Sequence: Synthetic oligonucleotide
  misc_feature 1..20: note = Target: SCN10A; (-) strand; PAM type: YTN; PAM sequence: CTA
  source 1..20: mol_type = other DNA
ttgtaatgatatataatgtt

SEQ ID NO: 43440 - DNA, 20 bp, synthetic construct
  misc_feature 1..20: note = Description of Artificial Sequence: Synthetic oligonucleotide
  misc_feature 1..20: note = Target: SCN10A; (-) strand; PAM type: YTN; PAM sequence: TTA
  source 1..20: mol_type = other DNA
ggtctattgtaatgatatat

SEQ ID NO: 43441 - DNA, 20 bp, synthetic construct
  misc_feature 1..20: note = Description of Artificial Sequence: Synthetic oligonucleotide
  misc_feature 1..20: note = Target: SCN10A; (-) strand; PAM type: YTN; PAM sequence: CTC
  source 1..20: mol_type = other DNA
attaggtctattgtaatgat

SEQ ID NO: 43442 - DNA, 20 bp, synthetic construct
  misc_feature 1..20: note = Description of Artificial Sequence: Synthetic oligonucleotide
  misc_feature 1..20: note = Target: SCN10A; (-) strand; PAM type: YTN; PAM sequence: TTA
  source 1..20: mol_type = other DNA
tgtctcattaggtctattgt

SEQ ID NO: 43443 - DNA, 20 bp, synthetic construct
  misc_feature 1..20: note = Description of Artificial Sequence: Synthetic oligonucleotide
  misc_feature 1..20: note = Target: SCN10A; (-) strand; PAM type: YTN; PAM sequence: CTA
  source 1..20: mol_type = other DNA
aatggtaataaattatgtct

SEQ ID NO: 43444 - DNA, 20 bp, synthetic construct
  misc_feature 1..20: note = Description of Artificial Sequence: Synthetic oligonucleotide
  misc_feature 1..20: note = Target: SCN10A; (-) strand; PAM type: YTN; PAM sequence: TTC
  source 1..20: mol_type = other DNA
ctaaatggtaataaattatg

SEQ ID NO: 43445 - DNA, 20 bp, synthetic construct
  misc_feature 1..20: note = Description of Artificial Sequence: Synthetic oligonucleotide
  misc_feature 1..20: note = Target: SCN10A; (-) strand; PAM type: YTN; PAM sequence: TTT
  source 1..20: mol_type = other DNA
cctaaatggtaataaattat

SEQ ID NO: 43446 - DNA, 20 bp, synthetic construct
  misc_feature 1..20: note = Description of Artificial Sequence: Synthetic oligonucleotide
  misc_feature 1..20: note = Target: SCN10A; (-) strand; PAM type: YTN; PAM sequence: TTC
  source 1..20: mol_type = other DNA
acatcatttcctaaatggta

SEQ ID NO: 43447 - DNA, 20 bp, synthetic construct
  misc_feature 1..20: note = Description of Artificial Sequence: Synthetic oligonucleotide
  misc_feature 1..20: note = Target: SCN10A; (-) strand; PAM type: YTN; PAM sequence: CTT
  source 1..20: mol_type = other DNA
cacatcatttcctaaatggt

SEQ ID NO: 43448 - DNA, 20 bp, synthetic construct
  misc_feature 1..20: note = Description of Artificial Sequence: Synthetic oligonucleotide
  misc_feature 1..20: note = Target: SCN10A; (-) strand; PAM type: YTN; PAM sequence: TTC
  source 1..20: mol_type = other DNA
aacttcacatcatttcctaa

SEQ ID NO: 43449 - DNA, 20 bp, synthetic construct
  misc_feature 1..20: note = Description of Artificial Sequence: Synthetic oligonucleotide
  misc_feature 1..20: note = Target: SCN10A; (-) strand; PAM type: YTN; PAM sequence: CTT
  source 1..20: mol_type = other DNA
caacttcacatcatttccta

SEQ ID NO: 43450 - DNA, 20 bp, synthetic construct
  misc_feature 1..20: note = Description of Artificial Sequence: Synthetic oligonucleotide
  misc_feature 1..20: note = Target: SCN10A; (-) strand; PAM type: YTN; PAM sequence: TTC
  source 1..20: mol_type = other DNA
agtcttcaacttcacatcat

SEQ ID NO: 43451 - DNA, 20 bp, synthetic construct
  misc_feature 1..20: note = Description of Artificial Sequence: Synthetic oligonucleotide
  misc_feature 1..20: note = Target: SCN10A; (-) strand; PAM type: YTN; PAM sequence: CTG
  source 1..20: mol_type = other DNA
tacaaaatagacacggcata

SEQ ID NO: 43452 - DNA, 20 bp, synthetic construct
  misc_feature 1..20: note = Description of Artificial Sequence: Synthetic oligonucleotide
  misc_feature 1..20: note = Target: SCN10A; (-) strand; PAM type: YTN; PAM sequence: TTA
  source 1..20: mol_type = other DNA
aaacacagaacctgtacaaa

SEQ ID NO: 43453 - DNA, 20 bp, synthetic construct
  misc_feature 1..20: note = Description of Artificial Sequence: Synthetic oligonucleotide
  misc_feature 1..20: note = Target: SCN10A; (-) strand; PAM type: YTN; PAM sequence: TTA
  source 1..20: mol_type = other DNA
tcaggtggtgagttaaaaca

SEQ ID NO: 43454 - DNA, 20 bp, synthetic construct
  misc_feature 1..20: note = Description of Artificial Sequence: Synthetic oligonucleotide
  misc_feature 1..20: note = Target: SCN10A; (-) strand; PAM type: YTN; PAM sequence: CTG
  source 1..20: mol_type = other DNA
ccatgggattatcaggtggt

SEQ ID NO: 43455 - DNA, 20 bp, synthetic construct
  misc_feature 1..20: note = Description of Artificial Sequence: Synthetic oligonucleotide
  misc_feature 1..20: note = Target: SCN10A; (-) strand; PAM type: YTN; PAM sequence: CTA
  source 1..20: mol_type = other DNA
gtagaatagcataaagggat

SEQ ID NO: 43456 - DNA, 20 bp, synthetic construct
  misc_feature 1..20: note = Description of Artificial Sequence: Synthetic oligonucleotide
  misc_feature 1..20: note = Target: SCN10A; (-) strand; PAM type: YTN; PAM sequence: TTA
  source 1..20: mol_type = other DNA
cacaagtgtgggctagtaga

SEQ ID NO: 43457 - DNA, 20 bp, synthetic construct
  misc_feature 1..20: note = Description of Artificial Sequence: Synthetic oligonucleotide
  misc_feature 1..20: note = Target: SCN10A; (-) strand; PAM type: YTN; PAM sequence: CTA
  source 1..20: mol_type = other DNA
gtgaatatgatatcacagtg

SEQ ID NO: 43458 - DNA, 20 bp, synthetic construct
  misc_feature 1..20: note = Description of Artificial Sequence: Synthetic oligonucleotide
  misc_feature 1..20: note = Target: SCN10A; (-) strand; PAM type: YTN; PAM sequence: TTC
  source 1..20: mol_type = other DNA
ctagtgaatatgatatcaca

SEQ ID NO: 43459 - DNA, 20 bp, synthetic construct
  misc_feature 1..20: note = Description of Artificial Sequence: Synthetic oligonucleotide
  misc_feature 1..20: note = Target: SCN10A; (-) strand; PAM type: YTN; PAM sequence: CTT
  source 1..20: mol_type = other DNA
cctagtgaatatgatatcac

SEQ ID NO: 43460 - DNA, 20 bp, synthetic construct
  misc_feature 1..20: note = Description of Artificial Sequence: Synthetic oligonucleotide
  misc_feature 1..20: note = Target: SCN10A; (-) strand; PAM type: YTN; PAM sequence: CTA
  source 1..20: mol_type = other DNA
gagggccttcctagtgaata

SEQ ID NO: 43461 - DNA, 20 bp, synthetic construct
  misc_feature 1..20: note = Description of Artificial Sequence: Synthetic oligonucleotide
  misc_feature 1..20: note = Target: SCN10A; (-) strand; PAM type: YTN; PAM sequence: CTA
  source 1..20: mol_type = other DNA
caccatgaggctagagggcc

SEQ ID NO: 43462 - DNA, 20 bp, synthetic construct
  misc_feature 1..20: note = Description of Artificial Sequence: Synthetic oligonucleotide
  misc_feature 1..20: note = Target: SCN10A; (-) strand; PAM type: YTN; PAM sequence: CTA
  source 1..20: mol_type = other DNA
cagactacaccatgaggcta

SEQ ID NO: 43463 - DNA, 20 bp, synthetic construct
  misc_feature 1..20: note = Description of Artificial Sequence: Synthetic oligonucleotide
  misc_feature 1..20: note = Target: SCN10A; (-) strand; PAM type: YTN; PAM sequence: TTC
  source 1..20: mol_type = other DNA
ctacagactacaccatgagg

SEQ ID NO: 43464 - DNA, 20 bp, synthetic construct
  misc_feature 1..20: note = Description of Artificial Sequence: Synthetic oligonucleotide
  misc_feature 1..20: note = Target: SCN10A; (-) strand; PAM type: YTN; PAM sequence: CTA
  source 1..20: mol_type = other DNA
ttcctacagactacaccatg

SEQ ID NO: 43465 - DNA, 20 bp, synthetic construct
  misc_feature 1..20: note = Description of Artificial Sequence: Synthetic oligonucleotide
  misc_feature 1..20: note = Target: SCN10A; (-) strand; PAM type: YTN; PAM sequence: CTC
  source 1..20: mol_type = other DNA
tattcctacagactacacca

SEQ ID NO: 43466 - DNA, 20 bp, synthetic construct
  misc_feature 1..20: note = Description of Artificial Sequence: Synthetic oligonucleotide
  misc_feature 1..20: note = Target: SCN10A; (-) strand; PAM type: YTN; PAM sequence: TTC
  source 1..20: mol_type = other DNA
tctattcctacagactacac

SEQ ID NO: 43467 - DNA, 20 bp, synthetic construct
  misc_feature 1..20: note = Description of Artificial Sequence: Synthetic oligonucleotide
  misc_feature 1..20: note = Target: SCN10A; (-) strand; PAM type: YTN; PAM sequence: CTG
  source 1..20: mol_type = other DNA
aggtcattctctattcctac

SEQ ID NO: 43468 - DNA, 20 bp, synthetic construct
  misc_feature 1..20: note = Description of Artificial Sequence: Synthetic oligonucleotide
  misc_feature 1..20: note = Target: SCN10A; (-) strand; PAM type: YTN; PAM sequence: CTC
  source 1..20: mol_type = other DNA
agtgtgaactgaggtcattc

SEQ ID NO: 43469 - DNA, 20 bp, synthetic construct
  misc_feature 1..20: note = Description of Artificial Sequence: Synthetic oligonucleotide
  misc_feature 1..20: note = Target: SCN10A; (-) strand; PAM type: YTN; PAM sequence: TTG
  source 1..20: mol_type = other DNA
caaggagtagcactcagtgt

SEQ ID NO: 43470 - DNA, 20 bp, synthetic construct
  misc_feature 1..20: note = Description of Artificial Sequence: Synthetic oligonucleotide
  misc_feature 1..20: note = Target: SCN10A; (-) strand; PAM type: YTN; PAM sequence: TTT
  source 1..20: mol_type = other DNA
gcaaggagtagcactcagtg

SEQ ID NO: 43471 - DNA, 20 bp, synthetic construct
  misc_feature 1..20: note = Description of Artificial Sequence: Synthetic oligonucleotide
  misc_feature 1..20: note = Target: SCN10A; (-) strand; PAM type: YTN; PAM sequence: CTT
  source 1..20: mol_type = other DNA
tgcaaggagtagcactcagt

SEQ ID NO: 43472 - DNA, 20 bp, synthetic construct
  misc_feature 1..20: note = Description of Artificial Sequence: Synthetic oligonucleotide
  misc_feature 1..20: note = Target: SCN10A; (-) strand; PAM type: YTN; PAM sequence: CTA
  source 1..20: mol_type = other DNA
tgtggggactttgcaaggag

SEQ ID NO: 43473 - DNA, 20 bp, synthetic construct
  misc_feature 1..20: note = Description of Artificial Sequence: Synthetic oligonucleotide
  misc_feature 1..20: note = Target: SCN10A; (-) strand; PAM type: YTN; PAM sequence: TTC
  source 1..20: mol_type = other DNA
ccagaagatgctatgtgggg

SEQ ID NO: 43474 - DNA, 20 bp, synthetic construct
  misc_feature 1..20: note = Description of Artificial Sequence: Synthetic oligonucleotide
  misc_feature 1..20: note = Target: SCN10A; (-) strand; PAM type: YTN; PAM sequence: CTA
  source 1..20: mol_type = other DNA
ggttcccagaagatgctatg

SEQ ID NO: 43475 - DNA, 20 bp, synthetic construct
  misc_feature 1..20: note = Description of Artificial Sequence: Synthetic oligonucleotide
  misc_feature 1..20: note = Target: SCN10A; (-) strand; PAM type: YTN; PAM sequence: CTC
  source 1..20: mol_type = other DNA
aataaaatggagagtctagg

SEQ ID NO: 43476 - DNA, 20 bp, synthetic construct
  misc_feature 1..20: note = Description of Artificial Sequence: Synthetic oligonucleotide
  misc_feature 1..20: note = Target: SCN10A; (-) strand; PAM type: YTN; PAM sequence: TTG
  source 1..20: mol_type = other DNA
gccgctcaataaaatggaga

SEQ ID NO: 43477 - DNA, 20 bp, synthetic construct
  misc_feature 1..20: note = Description of Artificial Sequence: Synthetic oligonucleotide
  misc_feature 1..20: note = Target: SCN10A; (-) strand; PAM type: YTN; PAM sequence: TTT
  source 1..20: mol_type = other DNA
ggccgctcaataaaatggag

SEQ ID NO: 43478 - DNA, 20 bp, synthetic construct
  misc_feature 1..20: note = Description of Artificial Sequence: Synthetic oligonucleotide
  misc_feature 1..20: note = Target: SCN10A; (-) strand; PAM type: YTN; PAM sequence: CTT
  source 1..20: mol_type = other DNA
tggccgctcaataaaatgga

SEQ ID NO: 43479 - DNA, 20 bp, synthetic construct
  misc_feature 1..20: note = Description of Artificial Sequence: Synthetic oligonucleotide
  misc_feature 1..20: note = Target: SCN10A; (-) strand; PAM type: YTN; PAM sequence: TTG
  source 1..20: mol_type = other DNA
ctttggccgctcaataaaat

SEQ ID NO: 43480 - DNA, 20 bp, synthetic construct
  misc_feature 1..20: note = Description of Artificial Sequence: Synthetic oligonucleotide
  misc_feature 1..20: note = Target: SCN10A; (-) strand; PAM type: YTN; PAM sequence: CTT
  source 1..20: mol_type = other DNA
gctttggccgctcaataaaa

SEQ ID NO: 43481 - DNA, 20 bp, synthetic construct
  misc_feature 1..20: note = Description of Artificial Sequence: Synthetic oligonucleotide
  misc_feature 1..20: note = Target: SCN10A; (-) strand; PAM type: YTN; PAM sequence: CTC
  source 1..20: mol_type = other DNA
ttgctttggccgctcaataa

SEQ ID NO: 43482 - DNA, 20 bp, synthetic construct
  misc_feature 1..20: note = Description of Artificial Sequence: Synthetic oligonucleotide
  misc_feature 1..20: note = Target: SCN10A; (-) strand; PAM type: YTN; PAM sequence: CTG
  source 1..20: mol_type = other DNA
caggtggtgagtcaaccatg

SEQ ID NO: 43483 - DNA, 20 bp, synthetic construct
  misc_feature 1..20: note = Description of Artificial Sequence: Synthetic oligonucleotide
  misc_feature 1..20: note = Target: SCN10A; (-) strand; PAM type: YTN; PAM sequence: TTC
  source 1..20: mol_type = other DNA
tgcaggtggtgagtcaacca

SEQ ID NO: 43484 - DNA, 20 bp, synthetic construct
  misc_feature 1..20: note = Description of Artificial Sequence: Synthetic oligonucleotide
  misc_feature 1..20: note = Target: SCN10A; (-) strand; PAM type: YTN; PAM sequence: CTT
  source 1..20: mol_type = other DNA
ctgcaggtggtgagtcaacc

SEQ ID NO: 43485 - DNA, 20 bp, synthetic construct
  misc_feature 1..20: note = Description of Artificial Sequence: Synthetic oligonucleotide
  misc_feature 1..20: note = Target: SCN10A; (-) strand; PAM type: YTN; PAM sequence: TTG
  source 1..20: mol_type = other DNA
cacttctgcaggtggtgagt

SEQ ID NO: 43486 - DNA, 20 bp, synthetic construct
  misc_feature 1..20: note = Description of Artificial Sequence: Synthetic oligonucleotide
  misc_feature 1..20: note = Target: SCN10A; (-) strand; PAM type: YTN; PAM sequence: CTT
  source 1..20: mol_type = other DNA
gcacttctgcaggtggtgag

SEQ ID NO: 43487 - DNA, 20 bp, synthetic construct
  misc_feature 1..20: note = Description of Artificial Sequence: Synthetic oligonucleotide
  misc_feature 1..20: note = Target: SCN10A; (-) strand; PAM type: YTN; PAM sequence: TTA
  source 1..20: mol_type = other DNA
ccttgcacttctgcaggtgg

SEQ ID NO: 43488 - DNA, 20 bp, synthetic construct
  misc_feature 1..20: note = Description of Artificial Sequence: Synthetic oligonucleotide
  misc_feature 1..20: note = Target: SCN10A; (-) strand; PAM type: YTN; PAM sequence: TTG
  source 1..20: mol_type = other DNA
caatgggttaccttgcactt

SEQ ID NO: 43489 - DNA, 20 bp, synthetic construct
  misc_feature 1..20: note = Description of Artificial Sequence: Synthetic oligonucleotide
  misc_feature 1..20: note = Target: SCN10A; (-) strand; PAM type: YTN; PAM sequence: TTG
  source 1..20: mol_type = other DNA
ataatgttgcaatgggttac

SEQ ID NO: 43490 - DNA, 20 bp, synthetic construct
  misc_feature 1..20: note = Description of Artificial Sequence: Synthetic oligonucleotide
  misc_feature 1..20: note = Target: SCN10A; (-) strand; PAM type: YTN; PAM sequence: TTT
  source 1..20: mol_type = other DNA
gataatgttgcaatgggtta

SEQ ID NO: 43491 - DNA, 20 bp, synthetic construct
  misc_feature 1..20: note = Description of Artificial Sequence: Synthetic oligonucleotide
  misc_feature 1..20: note = Target: SCN10A; (-) strand; PAM type: YTN; PAM sequence: CTT
  source 1..20: mol_type = other DNA
tgataatgttgcaatgggtt

SEQ ID NO: 43492 - DNA, 20 bp, synthetic construct
  misc_feature 1..20: note = Description of Artificial Sequence: Synthetic oligonucleotide
  misc_feature 1..20: note = Target: SCN10A; (-) strand; PAM type: YTN; PAM sequence: CTG
  source 1..20: mol_type = other DNA
ggtcaatgtgaaagtcaact

SEQ ID NO: 43493 - DNA, 20 bp, synthetic construct
  misc_feature 1..20: note = Description of Artificial Sequence: Synthetic oligonucleotide
  misc_feature 1..20: note = Target: SCN10A; (-) strand; PAM type: YTN; PAM sequence: TTC
  source 1..20: mol_type = other DNA
tgggtcaatgtgaaagtcaa

SEQ ID NO: 43494 - DNA, 20 bp, synthetic construct
  misc_feature 1..20: note = Description of Artificial Sequence: Synthetic oligonucleotide
  misc_feature 1..20: note = Target: SCN10A; (-) strand; PAM type: YTN; PAM sequence: CTT
  source 1..20: mol_type = other DNA
ctgggtcaatgtgaaagtca

SEQ ID NO: 43495 - DNA, 20 bp, synthetic construct
  misc_feature 1..20: note = Description of Artificial Sequence: Synthetic oligonucleotide
  misc_feature 1..20: note = Target: SCN10A; (-) strand; PAM type: YTN; PAM sequence: TTC
  source 1..20: mol_type = other DNA
ttctgggtcaatgtgaaagt

SEQ ID NO: 43496 - DNA, 20 bp, synthetic construct
  misc_feature 1..20: note = Description of Artificial Sequence: Synthetic oligonucleotide
  misc_feature 1..20: note = Target: SCN10A; (-) strand; PAM type: YTN; PAM sequence: CTT
  source 1..20: mol_type = other DNA
cttctgggtcaatgtgaaag

SEQ ID NO: 43497 - DNA, 20 bp, synthetic construct
  misc_feature 1..20: note = Description of Artificial Sequence: Synthetic oligonucleotide
  misc_feature 1..20: note = Target: SCN10A; (-) strand; PAM type: YTN; PAM sequence: CTG
  source 1..20: mol_type = other DNA
gcagcttcttctgggtcaat

SEQ ID NO: 43498 - DNA, 20 bp, synthetic construct
  misc_feature 1..20: note = Description of Artificial Sequence: Synthetic oligonucleotide
  misc_feature 1..20: note = Target: SCN10A; (-) strand; PAM type: YTN; PAM sequence: CTC
  source 1..20: mol_type = other DNA
cactggcagcttcttctggg

SEQ ID NO: 43499 - DNA, 20 bp, synthetic construct
  misc_feature 1..20: note = Description of Artificial Sequence: Synthetic oligonucleotide
  misc_feature 1..20: note = Target: SCN10A; (-) strand; PAM type: YTN; PAM sequence: TTC
  source 1..20: mol_type = other DNA
aaaactccactggcagcttc

SEQ ID NO: 43500 - DNA, 20 bp, synthetic construct
  misc_feature 1..20: note = Description of Artificial Sequence: Synthetic oligonucleotide
  misc_feature 1..20: note = Target: SCN10A; (-) strand; PAM type: YTN; PAM sequence: CTG
  source 1..20: mol_type = other DNA
caagattcaaaactccactg

SEQ ID NO: 43501 - DNA, 20 bp, synthetic construct
  misc_feature 1..20: note = Description of Artificial Sequence: Synthetic oligonucleotide
  misc_feature 1..20: note = Target: SCN10A; (-) strand; PAM type: YTN; PAM sequence: CTG
  source 1..20: mol_type = other DNA
actgcaagattcaaaactcc

SEQ ID NO: 43502 - DNA, 20 bp, synthetic construct
  misc_feature 1..20: note = Description of Artificial Sequence: Synthetic oligonucleotide
  misc_feature 1..20: note = Target: SCN10A; (-) strand; PAM type: YTN; PAM sequence: TTG
  source 1..20: mol_type = other DNA
tgaataacaagtctgactgc

SEQ ID NO: 43503 - DNA, 20 bp, synthetic construct
  misc_feature 1..20: note = Description of Artificial Sequence: Synthetic oligonucleotide
  misc_feature 1..20: note = Target: SCN10A; (-) strand; PAM type: YTN; PAM sequence: TTG
  source 1..20: mol_type = other DNA
tcgattgtgaataacaagtc

SEQ ID NO: 43504 - DNA, 20 bp, synthetic construct
  misc_feature 1..20: note = Description of Artificial Sequence: Synthetic oligonucleotide
  misc_feature 1..20: note = Target: SCN10A; (-) strand; PAM type: YTN; PAM sequence: TTT
  source 1..20: mol_type = other DNA
gtcgattgtgaataacaagt

SEQ ID NO: 43505 - DNA, 20 bp, synthetic construct
  misc_feature 1..20: note = Description of Artificial Sequence: Synthetic oligonucleotide
  misc_feature 1..20: note = Target: SCN10A; (-) strand; PAM type: YTN; PAM sequence: CTT
  source 1..20: mol_type = other DNA
tgtcgattgtgaataacaag

SEQ ID NO: 43506 - DNA, 20 bp, synthetic construct
  misc_feature 1..20: note = Description of Artificial Sequence: Synthetic oligonucleotide
  misc_feature 1..20: note = Target: SCN10A; (-) strand; PAM type: YTN; PAM sequence: TTG
  source 1..20: mol_type = other DNA
tacctttgtcgattgtgaat

SEQ ID NO: 43507 - DNA, 20 bp, synthetic construct
  misc_feature 1..20: note = Description of Artificial Sequence: Synthetic oligonucleotide
  misc_feature 1..20: note = Target: SCN10A; (-) strand; PAM type: YTN; PAM sequence: CTT
  source 1..20: mol_type = other DNA
gtacctttgtcgattgtgaa

SEQ ID NO: 43508 - DNA, 20 bp, synthetic construct
  misc_feature 1..20: note = Description of Artificial Sequence: Synthetic oligonucleotide
  misc_feature 1..20: note = Target: SCN10A; (-) strand; PAM type: YTN; PAM sequence: TTC
  source 1..20: mol_type = other DNA
ccttgtacctttgtcgattg

SEQ ID NO: 43509 - DNA, 20 bp, synthetic construct
  misc_feature 1..20: note = Description of Artificial Sequence: Synthetic oligonucleotide
  misc_feature 1..20: note = Target: SCN10A; (-) strand; PAM type: YTN; PAM sequence: TTT
  source 1..20: mol_type = other DNA
cccttgtacctttgtcgatt

SEQ ID NO: 43510 - DNA, 20 bp, synthetic construct
  misc_feature 1..20: note = Description of Artificial Sequence: Synthetic oligonucleotide
  misc_feature 1..20: note = Target: SCN10A; (-) strand; PAM type: YTN; PAM sequence: TTT
  source 1..20: mol_type = other DNA
tcccttgtacctttgtcgat

SEQ ID NO: 43511 - DNA, 20 bp, synthetic construct
  misc_feature 1..20: note = Description of Artificial Sequence: Synthetic oligonucleotide
  misc_feature 1..20: note = Target: SCN10A; (-) strand; PAM type: YTN; PAM sequence: CTA
  source 1..20: mol_type = other DNA
taccgatggagagttttccc

SEQ ID NO: 43512 - DNA, 20 bp, synthetic construct
  misc_feature 1..20: note = Description of Artificial Sequence: Synthetic oligonucleotide
  misc_feature 1..20: note = Target: SCN10A; (-) strand; PAM type: YTN; PAM sequence: TTG
  source 1..20: mol_type = other DNA
gaggtgcatcaactataccg

SEQ ID NO: 43513 - DNA, 20 bp, synthetic construct
  misc_feature 1..20: note = Description of Artificial Sequence: Synthetic oligonucleotide
  misc_feature 1..20: note = Target: SCN10A; (-) strand; PAM type: YTN; PAM sequence: TTT
  source 1..20: mol_type = other DNA
ggaggtgcatcaactatacc

SEQ ID NO: 43514 - DNA, 20 bp, synthetic construct
  misc_feature 1..20: note = Description of Artificial Sequence: Synthetic oligonucleotide
  misc_feature 1..20: note = Target: SCN10A; (-) strand; PAM type: YTN; PAM sequence: TTT
  source 1..20: mol_type = other DNA
tggaggtgcatcaactatac

SEQ ID NO: 43515 - DNA, 20 bp, synthetic construct
  misc_feature 1..20: note = Description of Artificial Sequence: Synthetic oligonucleotide
  misc_feature 1..20: note = Target: SCN10A; (-) strand; PAM type: YTN; PAM sequence: TTC
  source 1..20: mol_type = other DNA
gcagggaagttttggaggtg

SEQ ID NO: 43516 - DNA, 20 bp, synthetic construct
  misc_feature 1..20: note = Description of Artificial Sequence: Synthetic oligonucleotide
  misc_feature 1..20: note = Target: SCN10A; (-) strand; PAM type: YTN; PAM sequence: CTT
  source 1..20: mol_type = other DNA
cgcagggaagttttggaggt

SEQ ID NO: 43517 - DNA, 20 bp, synthetic construct
  misc_feature 1..20: note = Description of Artificial Sequence: Synthetic oligonucleotide
  misc_feature 1..20: note = Target: SCN10A; (-) strand; PAM type: YTN; PAM sequence: CTC
  source 1..20: mol_type = other DNA
ttcgcagggaagttttggag

SEQ ID NO: 43518 - DNA, 20 bp, synthetic construct
  misc_feature 1..20: note = Description of Artificial Sequence: Synthetic oligonucleotide
  misc_feature 1..20: note = Target: SCN10A; (-) strand; PAM type: YTN; PAM sequence: TTC
  source 1..20: mol_type = other DNA
agcatcatgggtgtgaacct

SEQ ID NO: 43519 - DNA, 20 bp, synthetic construct
  misc_feature 1..20: note = Description of Artificial Sequence: Synthetic oligonucleotide
  misc_feature 1..20: note = Target: SCN10A; (-) strand; PAM type: YTN; PAM sequence: CTT
  source 1..20: mol_type = other DNA
cagcatcatgggtgtgaacc

SEQ ID NO: 43520 - DNA, 20 bp, synthetic construct
  misc_feature 1..20: note = Description of Artificial Sequence: Synthetic oligonucleotide
  misc_feature 1..20: note = Target: SCN10A; (-) strand; PAM type: YTN; PAM sequence: CTC
  source 1..20: mol_type = other DNA
atcttcagcatcatgggtgt

SEQ ID NO: 43521 - DNA, 20 bp, synthetic construct
  misc_feature 1..20: note = Description of Artificial Sequence: Synthetic oligonucleotide
  misc_feature 1..20: note = Target: SCN10A; (-) strand; PAM type: YTN; PAM sequence: CTG
  source 1..20: mol_type = other DNA
gctcatcttcagcatcatgg

SEQ ID NO: 43522 - DNA, 20 bp, synthetic construct
  misc_feature 1..20: note = Description of Artificial Sequence: Synthetic oligonucleotide
  misc_feature 1..20: note = Target: SCN10A; (-) strand; PAM type: YTN; PAM sequence: TTC
  source 1..20: mol_type = other DNA
tggctcatcttcagcatcat

SEQ ID NO: 43523 - DNA, 20 bp, synthetic construct
  misc_feature 1..20: note = Description of Artificial Sequence: Synthetic oligonucleotide
  misc_feature 1..20: note = Target: SCN10A; (-) strand; PAM type: YTN; PAM sequence: CTT
  source 1..20: mol_type = other DNA
ctggctcatcttcagcatca

SEQ ID NO: 43524 - DNA, 20 bp, synthetic construct
  misc_feature 1..20: note = Description of Artificial Sequence: Synthetic oligonucleotide
  misc_feature 1..20: note = Target: SCN10A; (-) strand; PAM type: YTN; PAM sequence: CTC
  source 1..20: mol_type = other DNA
atcttctggctcatcttcag

SEQ ID NO: 43525 - DNA, 20 bp, synthetic construct
  misc_feature 1..20: note = Description of Artificial Sequence: Synthetic oligonucleotide
  misc_feature 1..20: note = Target: SCN10A; (-) strand; PAM type: YTN; PAM sequence: CTG
  source 1..20: mol_type = other DNA
cctcatcttctggctcatct

SEQ ID NO: 43526 - DNA, 20 bp, synthetic construct
  misc_feature 1..20: note = Description of Artificial Sequence: Synthetic oligonucleotide
  misc_feature 1..20: note = Target: SCN10A; (-) strand; PAM type: YTN; PAM sequence: CTC
  source 1..20: mol_type = other DNA
gtctgcctcatcttctggct

SEQ ID NO: 43527 - DNA, 20 bp, synthetic construct
  misc_feature 1..20: note = Description of Artificial Sequence: Synthetic oligonucleotide
  misc_feature 1..20: note = Target: SCN10A; (-) strand; PAM type: YTN; PAM sequence: CTC
  source 1..20: mol_type = other DNA
ctcgtctgcctcatcttctg

SEQ ID NO: 43528 - DNA, 20 bp, synthetic construct
  misc_feature 1..20: note = Description of Artificial Sequence: Synthetic oligonucleotide
  misc_feature 1..20: note = Target: SCN10A; (-) strand; PAM type: YTN; PAM sequence: CTG
  source 1..20: mol_type = other DNA
gtgggcgccatcccatccat

SEQ ID NO: 43529 - DNA, 20 bp, synthetic construct
  misc_feature 1..20: note = Description of Artificial Sequence: Synthetic oligonucleotide
  misc_feature 1..20: note = Target: SCN10A; (-) strand; PAM type: YTN; PAM sequence: CTC
  source 1..20: mol_type = other DNA
ccaccaggtggtggtggatg

SEQ ID NO: 43530 - DNA, 20 bp, synthetic construct
  misc_feature 1..20: note = Description of Artificial Sequence: Synthetic oligonucleotide
  misc_feature 1..20: note = Target: SCN10A; (-) strand; PAM type: YTN; PAM sequence: CTA
  source 1..20: mol_type = other DNA
tctcccaccaggtggtggtg

SEQ ID NO: 43531 - DNA, 20 bp, synthetic construct
  misc_feature 1..20: note = Description of Artificial Sequence: Synthetic oligonucleotide
  misc_feature 1..20: note = Target: SCN10A; (-) strand; PAM type: YTN; PAM sequence: CTC
  source 1..20: mol_type = other DNA
tatctcccaccaggtggtgg

SEQ ID NO: 43532 - DNA, 20 bp, synthetic construct
  misc_feature 1..20: note = Description of Artificial Sequence: Synthetic oligonucleotide
  misc_feature 1..20: note = Target: SCN10A; (-) strand; PAM type: YTN; PAM sequence: TTC
  source 1..20: mol_type = other DNA
tctatctcccaccaggtggt

SEQ ID NO: 43533 - DNA, 20 bp, synthetic construct
  misc_feature 1..20: note = Description of Artificial Sequence: Synthetic oligonucleotide
  misc_feature 1..20: note = Target: SCN10A; (-) strand; PAM type: YTN; PAM sequence: TTT
  source 1..20: mol_type = other DNA
ctctatctcccaccaggtgg

SEQ ID NO: 43534 - DNA, 20 bp, synthetic construct
  misc_feature 1..20: note = Description of Artificial Sequence: Synthetic oligonucleotide
  misc_feature 1..20: note = Target: SCN10A; (-) strand; PAM type: YTN; PAM sequence: CTT
  source 1..20: mol_type = other DNA
tctctatctcccaccaggtg

SEQ ID NO: 43535 - DNA, 20 bp, synthetic construct
  misc_feature 1..20: note = Description of Artificial Sequence: Synthetic oligonucleotide
  misc_feature 1..20: note = Target: SCN10A; (-) strand; PAM type: YTN; PAM sequence: TTC
  source 1..20: mol_type = other DNA
caggtctttctctatctccc

SEQ ID NO: 43536 - DNA, 20 bp, synthetic construct
  misc_feature 1..20: note = Description of Artificial Sequence: Synthetic oligonucleotide
  misc_feature 1..20: note = Target: SCN10A; (-) strand; PAM type: YTN; PAM sequence: TTG
  source 1..20: mol_type = other DNA
ggaggttccaggtctttctc

SEQ ID NO: 43537 - DNA, 20 bp, synthetic construct
  misc_feature 1..20: note = Description of Artificial Sequence: Synthetic oligonucleotide
  misc_feature 1..20: note = Target: SCN10A; (-) strand; PAM type: YTN; PAM sequence: CTG
  source 1..20: mol_type = other DNA
aatgagtatagaaagagata

SEQ ID NO: 43538 - DNA, 20 bp, synthetic construct
  misc_feature 1..20: note = Description of Artificial Sequence: Synthetic oligonucleotide
  misc_feature 1..20: note = Target: SCN10A; (-) strand; PAM type: YTN; PAM sequence: CTC
  source 1..20: mol_type = other DNA
atgaagcagcctgaatgagt

SEQ ID NO: 43539 - DNA, 20 bp, synthetic construct
  misc_feature 1..20: note = Description of Artificial Sequence: Synthetic oligonucleotide
  misc_feature 1..20: note = Target: SCN10A; (-) strand; PAM type: YTN; PAM sequence: CTG
  source 1..20: mol_type = other DNA
gctcatgaagcagcctgaat

SEQ ID NO: 43540 - DNA, 20 bp, synthetic construct
  misc_feature 1..20: note = Description of Artificial Sequence: Synthetic oligonucleotide
  misc_feature 1..20: note = Target: SCN10A; (-) strand; PAM type: YTN; PAM sequence: TTC
  source 1..20: mol_type = other DNA
caaaggccactggctcatga

SEQ ID NO: 43541 - DNA, 20 bp, synthetic construct
  misc_feature 1..20: note = Description of Artificial Sequence: Synthetic oligonucleotide
  misc_feature 1..20: note = Target: SCN10A; (-) strand; PAM type: YTN; PAM sequence: CTT
  source 1..20: mol_type = other DNA
ccaaaggccactggctcatg

SEQ ID NO: 43542 - DNA, 20 bp, synthetic construct
  misc_feature 1..20: note = Description of Artificial Sequence: Synthetic oligonucleotide
  misc_feature 1..20: note = Target: SCN10A; (-) strand; PAM type: YTN; PAM sequence: TTC
  source 1..20: mol_type = other DNA
ttccaaaggccactggctca

SEQ ID NO: 43543 - DNA, 20 bp, synthetic construct
  misc_feature 1..20: note = Description of Artificial Sequence: Synthetic oligonucleotide
  misc_feature 1..20: note = Target: SCN10A; (-) strand; PAM type: YTN; PAM sequence: CTT
  source 1..20: mol_type = other DNA
cttccaaaggccactggctc

SEQ ID NO: 43544 - DNA, 20 bp, synthetic construct
  misc_feature 1..20: note = Description of Artificial Sequence: Synthetic oligonucleotide
  misc_feature 1..20: note = Target: SCN10A; (-) strand; PAM type: YTN; PAM sequence: TTG
  source 1..20: mol_type = other DNA
cttcttccaaaggccactgg

SEQ ID NO: 43545 - DNA, 20 bp, synthetic construct
  misc_feature 1..20: note = Description of Artificial Sequence: Synthetic oligonucleotide
  misc_feature 1..20: note = Target: SCN10A; (-) strand; PAM type: YTN; PAM sequence: CTT
  source 1..20: mol_type = other DNA
gcttcttccaaaggccactg

SEQ ID NO: 43546 - DNA, 20 bp, synthetic construct
  misc_feature 1..20: note = Description of Artificial Sequence: Synthetic oligonucleotide
  misc_feature 1..20: note = Target: SCN10A; (-) strand; PAM type: YTN; PAM sequence: CTC
  source 1..20: mol_type = other DNA
ttgcttcttccaaaggccac

SEQ ID NO: 43547 - DNA, 20 bp, synthetic construct
  misc_feature 1..20: note = Description of Artificial Sequence: Synthetic oligonucleotide
  misc_feature 1..20: note = Target: SCN10A; (-) strand; PAM type: YTN; PAM sequence: TTC
  source 1..20: mol_type = other DNA
tcttgcttcttccaaaggcc

SEQ ID NO: 43548 - DNA, 20 bp, synthetic construct
  misc_feature 1..20: note = Description of Artificial Sequence: Synthetic oligonucleotide
  misc_feature 1..20: note = Target: SCN10A; (-) strand; PAM type: YTN; PAM sequence: CTT
  source 1..20: mol_type = other DNA
ctcttgcttcttccaaaggc

SEQ ID NO: 43549 - DNA, 20 bp, synthetic construct
  misc_feature 1..20: note = Description of Artificial Sequence: Synthetic oligonucleotide
  misc_feature 1..20: note = Target: SCN10A; (-) strand; PAM type: YTN; PAM sequence: TTA
  source 1..20: mol_type = other DNA
acccacttctcttgcttctt

SEQ ID NO: 43550 - DNA, 20 bp, synthetic construct
  misc_feature 1..20: note = Description of Artificial Sequence: Synthetic oligonucleotide
  misc_feature 1..20: note = Target: SCN10A; (-) strand; PAM type: YTN; PAM sequence: CTA
  source 1..20: mol_type = other DNA
attaacccacttctcttgct

SEQ ID NO: 43551 - DNA, 20 bp, synthetic construct
  misc_feature 1..20: note = Description of Artificial Sequence: Synthetic oligonucleotide
  misc_feature 1..20: note = Target: SCN10A; (-) strand; PAM type: YTN; PAM sequence: TTG
  source 1..20: mol_type = other DNA
cactaattaacccacttctc

SEQ ID NO: 43552 - DNA, 20 bp, synthetic construct
  misc_feature 1..20: note = Description of Artificial Sequence: Synthetic oligonucleotide
  misc_feature 1..20: note = Target: SCN10A; (-) strand; PAM type: YTN; PAM sequence: TTA
  source 1..20: mol_type = other DNA
ttgcactaattaacccactt

SEQ ID NO: 43553 - DNA, 20 bp, synthetic construct
  misc_feature 1..20: note = Description of Artificial Sequence: Synthetic oligonucleotide
  misc_feature 1..20: note = Target: SCN10A; (-) strand; PAM type: YTN; PAM sequence: CTG
  source 1..20: mol_type = other DNA
aattattgcactaattaacc

SEQ ID NO: 43554 - DNA, 20 bp, synthetic construct
  misc_feature 1..20: note = Description of Artificial Sequence: Synthetic oligonucleotide
  misc_feature 1..20: note = Target: SCN10A; (-) strand; PAM type: YTN; PAM sequence: CTG
  source 1..20: mol_type = other DNA
agtctgaattattgcactaa

SEQ ID NO: 43555 - DNA, 20 bp, synthetic construct
  misc_feature 1..20: note = Description of Artificial Sequence: Synthetic oligonucleotide
  misc_feature 1..20: note = Target: SCN10A; (-) strand; PAM type: YTN; PAM sequence: TTC
  source 1..20: mol_type = other DNA
tgagtctgaattattgcact

SEQ ID NO: 43556 - DNA, 20 bp, synthetic construct
  misc_feature 1..20: note = Description of Artificial Sequence: Synthetic oligonucleotide
  misc_feature 1..20: note = Target: SCN10A; (-) strand; PAM type: YTN; PAM sequence: CTT
  source 1..20: mol_type = other DNA
ctgagtctgaattattgcac

SEQ ID NO: 43557 - DNA, 20 bp, synthetic construct
  misc_feature 1..20: note = Description of Artificial Sequence: Synthetic oligonucleotide
  misc_feature 1..20: note = Target: SCN10A; (-) strand; PAM type: YTN; PAM sequence: CTC
  source 1..20: mol_type = other DNA
agtcttctgagtctgaatta

SEQ ID NO: 43558 - DNA, 20 bp, synthetic construct
  misc_feature 1..20: note = Description of Artificial Sequence: Synthetic oligonucleotide
  misc_feature 1..20: note = Target: SCN10A; (-) strand; PAM type: YTN; PAM sequence: CTC
  source 1..20: mol_type = other DNA
tcagtcttctgagtctgaat

SEQ ID NO: 43559 - DNA, 20 bp, synthetic construct
  misc_feature 1..20: note = Description of Artificial Sequence: Synthetic oligonucleotide
  misc_feature 1..20: note = Target: SCN10A; (-) strand; PAM type: YTN; PAM sequence: CTG
  source 1..20: mol_type = other DNA
cccaatgtctctcagtcttc

SEQ ID NO: 43560 - DNA, 20 bp, synthetic construct
  misc_feature 1..20: note = Description of Artificial Sequence: Synthetic oligonucleotide
  misc_feature 1..20: note = Target: SCN10A; (-) strand; PAM type: YTN; PAM sequence: TTC
  source 1..20: mol_type = other DNA
agctgcccaatgtctctcag

SEQ ID NO: 43561 - DNA, 20 bp, synthetic construct
  misc_feature 1..20: note = Description of Artificial Sequence: Synthetic oligonucleotide
  misc_feature 1..20: note = Target: SCN10A; (-) strand; PAM type: YTN; PAM sequence: CTT
  source 1..20: mol_type = other DNA
cagctgcccaatgtctctca

SEQ ID NO: 43562 - DNA, 20 bp, synthetic construct
  misc_feature 1..20: note = Description of Artificial Sequence: Synthetic oligonucleotide
  misc_feature 1..20: note = Target: SCN10A; (-) strand; PAM type: YTN; PAM sequence: CTA
  source 1..20: mol_type = other DNA
aatccatcttcagctgccca

SEQ ID NO: 43563 - DNA, 20 bp, synthetic construct
  misc_feature 1..20: note = Description of Artificial Sequence: Synthetic oligonucleotide
  misc_feature 1..20: note = Target: SCN10A; (-) strand; PAM type: YTN; PAM sequence: TTA
  source 1..20: mol_type = other DNA
agggaagaaggtctaaatcc

SEQ ID NO: 43564 - DNA, 20 bp, synthetic construct
  misc_feature 1..20: note = Description of Artificial Sequence: Synthetic oligonucleotide
  misc_feature 1..20: note = Target: SCN10A; (-) strand; PAM type: YTN; PAM sequence: CTG
  source 1..20: mol_type = other DNA
aatgaggttaagggaagaag

SEQ ID NO: 43565 - DNA, 20 bp, synthetic construct
  misc_feature 1..20: note = Description of Artificial Sequence: Synthetic oligonucleotide
  misc_feature 1..20: note = Target: SCN10A; (-) strand; PAM type: YTN; PAM sequence: CTG
  source 1..20: mol_type = other DNA
caacccaccctgaatgaggt

SEQ ID NO: 43566 - DNA, 20 bp, synthetic construct
  misc_feature 1..20: note = Description of Artificial Sequence: Synthetic oligonucleotide
  misc_feature 1..20: note = Target: SCN10A; (-) strand; PAM type: YTN; PAM sequence: CTC
  source 1..20: mol_type = other DNA
actgcaacccaccctgaatg

SEQ ID NO: 43567 - DNA, 20 bp, synthetic construct
  misc_feature 1..20: note = Description of Artificial Sequence: Synthetic oligonucleotide
  misc_feature 1..20: note = Target: SCN10A; (-) strand; PAM type: YTN; PAM sequence: TTC
  source 1..20: mol_type = other DNA
tcactgcaacccaccctgaa

SEQ ID NO: 43568 - DNA, 20 bp, synthetic construct
  misc_feature 1..20: note = Description of Artificial Sequence: Synthetic oligonucleotide
  misc_feature 1..20: note = Target: SCN10A; (-) strand; PAM type: YTN; PAM sequence: CTT
  source 1..20: mol_type = other DNA
ctcactgcaacccaccctga

SEQ ID NO: 43569 - DNA, 20 bp, synthetic construct
  misc_feature 1..20: note = Description of Artificial Sequence: Synthetic oligonucleotide
  misc_feature 1..20: note = Target: SCN10A; (-) strand; PAM type: YTN; PAM sequence: CTC
  source 1..20: mol_type = other DNA
atccatcttctcactgcaac

SEQ ID NO: 43570 - DNA, 20 bp, synthetic construct
  misc_feature 1..20: note = Description of Artificial Sequence: Synthetic oligonucleotide
  misc_feature 1..20: note = Target: SCN10A; (-) strand; PAM type: YTN; PAM sequence: TTG
  source 1..20: mol_type = other DNA
taaactcatccatcttctca

SEQ ID NO: 43571 - DNA, 20 bp, synthetic construct
  misc_feature 1..20: note = Description of Artificial Sequence: Synthetic oligonucleotide
  misc_feature 1..20: note = Target: SCN10A; (-) strand; PAM type: YTN; PAM sequence: CTT
  source 1..20: mol_type = other DNA
gtaaactcatccatcttctc

SEQ ID NO: 43572 - DNA, 20 bp, synthetic construct
  misc_feature 1..20: note = Description of Artificial Sequence: Synthetic oligonucleotide
  misc_feature 1..20: note = Target: SCN10A; (-) strand; PAM type: YTN; PAM sequence: CTA
  source 1..20: mol_type = other DNA
aatgagtgcagtatgcttgt

SEQ ID NO: 43573 - DNA, 20 bp, synthetic construct
  misc_feature 1..20: note = Description of Artificial Sequence: Synthetic oligonucleotide
  misc_feature 1..20: note = Target: SCN10A; (-) strand; PAM type: YTN; PAM sequence: TTC
  source 1..20: mol_type = other DNA
taaatgagtgcagtatgctt

SEQ ID NO: 43574 - DNA, 20 bp, synthetic construct
  misc_feature 1..20: note = Description of Artificial Sequence: Synthetic oligonucleotide
  misc_feature 1..20: note = Target: SCN10A; (-) strand; PAM type: YTN; PAM sequence: CTT
  source 1..20: mol_type = other DNA
ctaaatgagtgcagtatgct

SEQ ID NO: 43575 - DNA, 20 bp, synthetic construct
  misc_feature 1..20: note = Description of Artificial Sequence: Synthetic oligonucleotide
  misc_feature 1..20: note = Target: SCN10A; (-) strand; PAM type: YTN; PAM sequence: CTC
  source 1..20: mol_type = other DNA
acacttctaaatgagtgcag

SEQ ID NO: 43576 - DNA, 20 bp, synthetic construct
  misc_feature 1..20: note = Description of Artificial Sequence: Synthetic oligonucleotide
  misc_feature 1..20: note = Target: SCN10A; (-) strand; PAM type: YTN; PAM sequence: CTG
  source 1..20: mol_type = other DNA
tatgtgcaagtataatacac

SEQ ID NO: 43577 - DNA, 20 bp, synthetic construct
  misc_feature 1..20: note = Description of Artificial Sequence: Synthetic oligonucleotide
  misc_feature 1..20: note = Target: SCN10A; (-) strand; PAM type: YTN; PAM sequence: CTA
  source 1..20: mol_type = other DNA
gaagtctgtatgtgcaagta

SEQ ID NO: 43578 - DNA, 20 bp, synthetic construct
  misc_feature 1..20: note = Description of Artificial Sequence: Synthetic oligonucleotide
  misc_feature 1..20: note = Target: SCN10A; (-) strand; PAM type: YTN; PAM sequence: TTC
  source 1..20: mol_type = other DNA
tagaagtctgtatgtgcaag

SEQ ID NO: 43579 - DNA, 20 bp, synthetic construct
  misc_feature 1..20: note = Description of Artificial Sequence: Synthetic oligonucleotide
  misc_feature 1..20: note = Target: SCN10A; (-) strand; PAM type: YTN; PAM sequence: TTA
  source 1..20: mol_type = other DNA
aggagaataagtcaaggttc

SEQ ID NO: 43580 - DNA, 20 bp, synthetic construct
  misc_feature 1..20: note = Description of Artificial Sequence: Synthetic oligonucleotide
  misc_feature 1..20: note = Target: SCN10A; (-) strand; PAM type: YTN; PAM sequence: TTT
  source 1..20: mol_type = other DNA
aaggagaataagtcaaggtt

SEQ ID NO: 43581 - DNA, 20 bp, synthetic construct
  misc_feature 1..20: note = Description of Artificial Sequence: Synthetic oligonucleotide
  misc_feature 1..20: note = Target: SCN10A; (-) strand; PAM type: YTN; PAM sequence: TTA
  source 1..20: mol_type = other DNA
tgtatggtatttaaggagaa

SEQ ID NO: 43582 - DNA, 20 bp, synthetic construct
  misc_feature 1..20: note = Description of Artificial Sequence: Synthetic oligonucleotide
  misc_feature 1..20: note = Target: SCN10A; (-) strand; PAM type: YTN; PAM sequence: TTT
  source 1..20: mol_type = other DNA
atgtatggtatttaaggaga

SEQ ID NO: 43583 - DNA, 20 bp, synthetic construct
  misc_feature 1..20: note = Description of Artificial Sequence: Synthetic oligonucleotide
  misc_feature 1..20: note = Target: SCN10A; (-) strand; PAM type: YTN; PAM sequence: TTT
  source 1..20: mol_type = other DNA
tatgtatggtatttaaggag

SEQ ID NO: 43584 - DNA, 20 bp, synthetic construct
  misc_feature 1..20: note = Description of Artificial Sequence: Synthetic oligonucleotide
  misc_feature 1..20: note = Target: SCN10A; (-) strand; PAM type: YTN; PAM sequence: TTG
  source 1..20: mol_type = other DNA
tgttttatgtatggtattta

SEQ ID NO: 43585 - DNA, 20 bp, synthetic construct
  misc_feature 1..20: note = Description of Artificial Sequence: Synthetic oligonucleotide
  misc_feature 1..20: note = Target: SCN10A; (-) strand; PAM type: YTN; PAM sequence: TTT
  source 1..20: mol_type = other DNA
gtgttttatgtatggtattt

SEQ ID NO: 43586 - DNA, 20 bp, synthetic construct
  misc_feature 1..20: note = Description of Artificial Sequence: Synthetic oligonucleotide
  misc_feature 1..20: note = Target: SCN10A; (-) strand; PAM type: YTN; PAM sequence: TTG
  source 1..20: mol_type = other DNA
tgtttgtgttttatgtatgg

SEQ ID NO: 43587 - DNA, 20 bp, synthetic construct
  misc_feature 1..20: note = Description of Artificial Sequence: Synthetic oligonucleotide
  misc_feature 1..20: note = Target: SCN10A; (-) strand; PAM type: YTN; PAM sequence: TTA
  source 1..20: mol_type = other DNA
aattgtgtttgtgttttatg

SEQ ID NO: 43588 - DNA, 20 bp, synthetic construct
  misc_feature 1..20: note = Description of Artificial Sequence: Synthetic oligonucleotide
  misc_feature 1..20: note = Target: SCN10A; (-) strand; PAM type: YTN; PAM sequence: TTT
  source 1..20: mol_type = other DNA
aaattgtgtttgtgttttat

SEQ ID NO: 43589 - DNA, 20 bp, synthetic construct
  misc_feature 1..20: note = Description of Artificial Sequence: Synthetic oligonucleotide
  misc_feature 1..20: note = Target: SCN10A; (-) strand; PAM type: YTN; PAM sequence: TTG
  source 1..20: mol_type = other DNA
tatttaaattgtgtttgtgt

SEQ ID NO: 43590 - DNA, 20 bp, synthetic construct
  misc_feature 1..20: note = Description of Artificial Sequence: Synthetic oligonucleotide
  misc_feature 1..20: note = Target: SCN10A; (-) strand; PAM type: YTN; PAM sequence: TTA
  source 1..20: mol_type = other DNA
aattgtatttaaattgtgtt

SEQ ID NO: 43591 - DNA, 20 bp, synthetic construct
  misc_feature 1..20: note = Description of Artificial Sequence: Synthetic oligonucleotide
  misc_feature 1..20: note = Target: SCN10A; (-) strand; PAM type: YTN; PAM sequence: TTT
  source 1..20: mol_type = other DNA
aaattgtatttaaattgtgt

SEQ ID NO: 43592 - DNA, 20 bp, synthetic construct
  misc_feature 1..20: note = Description of Artificial Sequence: Synthetic oligonucleotide
  misc_feature 1..20: note = Target: SCN10A; (-) strand; PAM type: YTN; PAM sequence: CTT
  source 1..20: mol_type = other DNA
taaattgtatttaaattgtg

SEQ ID NO: 43593 - DNA, 20 bp, synthetic construct
  misc_feature 1..20: note = Description of Artificial Sequence: Synthetic oligonucleotide
  misc_feature 1..20: note = Target: SCN10A; (-) strand; PAM type: YTN; PAM sequence: TTG
  source 1..20: mol_type = other DNA
accacggcatactttaaatt

SEQ ID NO: 43594 - DNA, 20 bp, synthetic construct
  misc_feature 1..20: note = Description of Artificial Sequence: Synthetic oligonucleotide
  misc_feature 1..20: note = Target: SCN10A; (-) strand; PAM type: YTN; PAM sequence: CTT
  source 1..20: mol_type = other DNA
gaccacggcatactttaaat

SEQ ID NO: 43595 - DNA, 20 bp, synthetic construct
  misc_feature 1..20: note = Description of Artificial Sequence: Synthetic oligonucleotide
  misc_feature 1..20: note = Target: SCN10A; (-) strand; PAM type: YTN; PAM sequence: TTC
  source 1..20: mol_type = other DNA
ttgaccacggcatactttaa

SEQ ID NO: 43596 - DNA, 20 bp, synthetic construct
  misc_feature 1..20: note = Description of Artificial Sequence: Synthetic oligonucleotide
  misc_feature 1..20: note = Target: SCN10A; (-) strand; PAM type: YTN; PAM sequence: CTG
  source 1..20: mol_type = other DNA
gttcttgaccacggcatact

SEQ ID NO: 43597 - DNA, 20 bp, synthetic construct
  misc_feature 1..20: note = Description of Artificial Sequence: Synthetic oligonucleotide
  misc_feature 1..20: note = Target: SCN10A; (-) strand; PAM type: YTN; PAM sequence: TTC
  source 1..20: mol_type = other DNA
actggttcttgaccacggca

SEQ ID NO: 43598 - DNA, 20 bp, synthetic construct
  misc_feature 1..20: note = Description of Artificial Sequence: Synthetic oligonucleotide
  misc_feature 1..20: note = Target: SCN10A; (-) strand; PAM type: YTN; PAM sequence: TTT
  source 1..20: mol_type = other DNA
cactggttcttgaccacggc

SEQ ID NO: 43599 - DNA, 20 bp, synthetic construct
  misc_feature 1..20: note = Description of Artificial Sequence: Synthetic oligonucleotide
  misc_feature 1..20: note = Target: SCN10A; (-) strand; PAM type: YTN; PAM sequence: TTT
  source 1..20: mol_type = other DNA
tcactggttcttgaccacgg

SEQ ID NO: 43600 - DNA, 20 bp, synthetic construct
  misc_feature 1..20: note = Description of Artificial Sequence: Synthetic oligonucleotide
  misc_feature 1..20: note = Target: SCN10A; (-) strand; PAM type: YTN; PAM sequence: TTA
  source 1..20: mol_type = other DNA
ggttttcactggttcttgac

SEQ ID NO: 43601 - DNA, 20 bp, synthetic construct
  misc_feature 1..20: note = Description of Artificial Sequence: Synthetic oligonucleotide
  misc_feature 1..20: note = Target: SCN10A; (-) strand; PAM type: YTN; PAM sequence: TTT
  source 1..20: mol_type = other DNA
aggttttcactggttcttga

SEQ ID NO: 43602 - DNA, 20 bp, synthetic construct
  misc_feature 1..20: note = Description of Artificial Sequence: Synthetic oligonucleotide
  misc_feature 1..20: note = Target: SCN10A; (-) strand; PAM type: YTN; PAM sequence: TTG
  source 1..20: mol_type = other DNA
tgaatatggatttaggtttt

SEQ ID NO: 43603 - DNA, 20 bp, synthetic construct
  misc_feature 1..20: note = Description of Artificial Sequence: Synthetic oligonucleotide
  misc_feature 1..20: note = Target: SCN10A; (-) strand; PAM type: YTN; PAM sequence: TTT
  source 1..20: mol_type = other DNA
gtgaatatggatttaggttt

SEQ ID NO: 43604 - DNA, 20 bp, synthetic construct
  misc_feature 1..20: note = Description of Artificial Sequence: Synthetic oligonucleotide
  misc_feature 1..20: note = Target: SCN10A; (-) strand; PAM type: YTN; PAM sequence: TTT
  source 1..20: mol_type = other DNA
tgtgaatatggatttaggtt

SEQ ID NO: 43605 - DNA, 20 bp, synthetic construct
  misc_feature 1..20: note = Description of Artificial Sequence: Synthetic oligonucleotide
  misc_feature 1..20: note = Target: SCN10A; (-) strand; PAM type: YTN; PAM sequence: CTA
  source 1..20: mol_type = other DNA
ttttgtgaatatggatttag

SEQ ID NO: 43606 - DNA, 20 bp, synthetic construct
  misc_feature 1..20: note = Description of Artificial Sequence: Synthetic oligonucleotide
  misc_feature 1..20: note = Target: SCN10A; (-) strand; PAM type: YTN; PAM sequence: TTA
  source 1..20: mol_type = other DNA
caaataagctattttgtgaa

SEQ ID NO: 43607 - DNA, 20 bp, synthetic construct
  misc_feature 1..20: note = Description of Artificial Sequence: Synthetic oligonucleotide
  misc_feature 1..20: note = Target: SCN10A; (-) strand; PAM type: YTN; PAM sequence: TTT
  source 1..20: mol_type = other DNA
acaaataagctattttgtga

SEQ ID NO: 43608 - DNA, 20 bp, synthetic construct
  misc_feature 1..20: note = Description of Artificial Sequence: Synthetic oligonucleotide
  misc_feature 1..20: note = Target: SCN10A; (-) strand; PAM type: YTN; PAM sequence: TTA
  source 1..20: mol_type = other DNA
tttacaaataagctattttg

SEQ ID NO: 43609 - DNA, 20 bp, synthetic construct
  misc_feature 1..20: note = Description of Artificial Sequence: Synthetic oligonucleotide
  misc_feature 1..20: note = Target: SCN10A; (-) strand; PAM type: YTN; PAM sequence: CTT
  source 1..20: mol_type = other DNA
atttacaaataagctatttt

SEQ ID NO: 43610 - DNA, 20 bp, synthetic construct
  misc_feature 1..20: note = Description of Artificial Sequence: Synthetic oligonucleotide
  misc_feature 1..20: note = Target: SCN10A; (-) strand; PAM type: YTN; PAM sequence: TTG
  source 1..20: mol_type = other DNA
cttatttacaaataagctat

SEQ ID NO: 43611 - DNA, 20 bp, synthetic construct
  misc_feature 1..20: note = Description of Artificial Sequence: Synthetic oligonucleotide
  misc_feature 1..20: note = Target: SCN10A; (-) strand; PAM type: YTN; PAM sequence: TTT
  source 1..20: mol_type = other DNA
gcttatttacaaataagcta

SEQ ID NO: 43612 - DNA, 20 bp, synthetic construct
  misc_feature 1..20: note = Description of Artificial Sequence: Synthetic oligonucleotide
  misc_feature 1..20: note = Target: SCN10A; (-) strand; PAM type: YTN; PAM sequence: CTC
  source 1..20: mol_type = other DNA
atttgcttatttacaaataa

SEQ ID NO: 43613 - DNA, 20 bp, synthetic construct
  misc_feature 1..20: note = Description of Artificial Sequence: Synthetic oligonucleotide
  misc_feature 1..20: note = Target: SCN10A; (-) strand; PAM type: YTN; PAM sequence: TTC
  source 1..20: mol_type = other DNA
tcatttgcttatttacaaat

SEQ ID NO: 43614 - DNA, 20 bp, synthetic construct
  misc_feature 1..20: note = Description of Artificial Sequence: Synthetic oligonucleotide
  misc_feature 1..20: note = Target: SCN10A; (-) strand; PAM type: YTN; PAM sequence: CTA
  source 1..20: mol_type = other DNA
atagattctcatttgcttat

SEQ ID NO: 43615 - DNA, 20 bp, synthetic construct
  misc_feature 1..20: note = Description of Artificial Sequence: Synthetic oligonucleotide
  misc_feature 1..20: note = Target: SCN10A; (-) strand; PAM type: YTN; PAM sequence: TTG
  source 1..20: mol_type = other DNA
tatctaatagattctcattt

SEQ ID NO: 43616 - DNA, 20 bp, synthetic construct
  misc_feature 1..20: note = Description of Artificial Sequence: Synthetic oligonucleotide
  misc_feature 1..20: note = Target: SCN10A; (-) strand; PAM type: YTN; PAM sequence: TTT
  source 1..20: mol_type = other DNA
gtatctaatagattctcatt

SEQ ID NO: 43617 - DNA, 20 bp, synthetic construct
  misc_feature 1..20: note = Description of Artificial Sequence: Synthetic oligonucleotide
  misc_feature 1..20: note = Target: SCN10A; (-) strand; PAM type: YTN; PAM sequence: TTT
  source 1..20: mol_type = other DNA
tgtatctaatagattctcat

SEQ ID NO: 43618 - DNA, 20 bp, synthetic construct
  misc_feature 1..20: note = Description of Artificial Sequence: Synthetic oligonucleotide
  misc_feature 1..20: note = Target: SCN10A; (-) strand; PAM type: YTN; PAM sequence: CTA
  source 1..20: mol_type = other DNA
ttttgtatctaatagattct

SEQ ID NO: 43619 - DNA, 20 bp, synthetic construct
  misc_feature 1..20: note = Description of Artificial Sequence: Synthetic oligonucleotide
  misc_feature 1..20: note = Target: SCN10A; (-) strand; PAM type: YTN; PAM sequence: TTC
  source 1..20: mol_type = other DNA
tattttgtatctaatagatt

SEQ ID NO: 43620 - DNA, 20 bp, synthetic construct
  misc_feature 1..20: note = Description of Artificial Sequence: Synthetic oligonucleotide
  misc_feature 1..20: note = Target: SCN10A; (-) strand; PAM type: YTN; PAM sequence: TTA
  source 1..20: mol_type = other DNA
ttctattttgtatctaatag

SEQ ID NO: 43621 - DNA, 20 bp, synthetic construct
  misc_feature 1..20: note = Description of Artificial Sequence: Synthetic oligonucleotide
  misc_feature 1..20: note = Target: SCN10A; (-) strand; PAM type: YTN; PAM sequence: TTT
  source 1..20: mol_type = other DNA
attctattttgtatctaata

SEQ ID NO: 43622 - DNA, 20 bp, synthetic construct
  misc_feature 1..20: note = Description of Artificial Sequence: Synthetic oligonucleotide
  misc_feature 1..20: note = Target: SCN10A; (-) strand; PAM type: YTN; PAM sequence: TTG
  source 1..20: mol_type = other DNA
aaatttattctattttgtat

SEQ ID NO: 43623 - DNA, 20 bp, synthetic construct
  misc_feature 1..20: note = Description of Artificial Sequence: Synthetic oligonucleotide
  misc_feature 1..20: note = Target: SCN10A; (-) strand; PAM type: YTN; PAM sequence: TTT
  source 1..20: mol_type = other DNA
gaaatttattctattttgta

SEQ ID NO: 43624 - DNA, 20 bp, synthetic construct
  misc_feature 1..20: note = Description of Artificial Sequence: Synthetic oligonucleotide
  misc_feature 1..20: note = Target: SCN10A; (-) strand; PAM type: YTN; PAM sequence: TTG
  source 1..20: mol_type = other DNA
aaatagtttgaaatttattc

SEQ ID NO: 43625 - DNA, 20 bp, synthetic construct
  misc_feature 1..20: note = Description of Artificial Sequence: Synthetic oligonucleotide
  misc_feature 1..20: note = Target: SCN10A; (-) strand; PAM type: YTN; PAM sequence: CTA
  source 1..20: mol_type = other DNA
ggacccgaagattgaaatag

SEQ ID NO: 43626 - DNA, 20 bp, synthetic construct
  misc_feature 1..20: note = Description of Artificial Sequence: Synthetic oligonucleotide
  misc_feature 1..20: note = Target: SCN10A; (-) strand; PAM type: YTN; PAM sequence: TTA
  source 1..20: mol_type = other DNA
caaacactaggacccgaaga

SEQ ID NO: 43627 - DNA, 20 bp, synthetic construct
  misc_feature 1..20: note = Description of Artificial Sequence: Synthetic oligonucleotide
  misc_feature 1..20: note = Target: SCN10A; (-) strand; PAM type: YTN; PAM sequence: TTT
  source 1..20: mol_type = other DNA
acaaacactaggacccgaag

SEQ ID NO: 43628 - DNA, 20 bp, synthetic construct
  misc_feature 1..20: note = Description of Artificial Sequence: Synthetic oligonucleotide
  misc_feature 1..20: note = Target: SCN10A; (-) strand; PAM type: YTN; PAM sequence: CTT
  source 1..20: mol_type = other DNA
tacaaacactaggacccgaa

SEQ ID NO: 43629 - DNA, 20 bp, synthetic construct
  misc_feature 1..20: note = Description of Artificial Sequence: Synthetic oligonucleotide
  misc_feature 1..20: note = Target: SCN10A; (-) strand; PAM type: YTN; PAM sequence: TTG
  source 1..20: mol_type = other DNA
tacctttacaaacactagga

SEQ ID NO: 43630 - DNA, 20 bp, synthetic construct
  misc_feature 1..20: note = Description of Artificial Sequence: Synthetic oligonucleotide
  misc_feature 1..20: note = Target: SCN10A; (-) strand; PAM type: YTN; PAM sequence: CTT
  source 1..20: mol_type = other DNA
gtacctttacaaacactagg

SEQ ID NO: 43631 - DNA, 20 bp, synthetic construct
  misc_feature 1..20: note = Description of Artificial Sequence: Synthetic oligonucleotide
  misc_feature 1..20: note = Target: SCN10A; (-) strand; PAM type: YTN; PAM sequence: TTA
  source 1..20: mol_type = other DNA
acttgtacctttacaaacac

SEQ ID NO: 43632 - DNA, 20 bp, synthetic construct
  misc_feature 1..20: note = Description of Artificial Sequence: Synthetic oligonucleotide
  misc_feature 1..20: note = Target: SCN10A; (-) strand; PAM type: YTN; PAM sequence: TTG
  source 1..20: mol_type = other DNA
aaattaacttgtacctttac

SEQ ID NO: 43633 - DNA, 20 bp, synthetic construct
  misc_feature 1..20: note = Description of Artificial Sequence: Synthetic oligonucleotide
  misc_feature 1..20: note = Target: SCN10A; (-) strand; PAM type: YTN; PAM sequence: TTT
  source 1..20: mol_type = other DNA
gaaattaacttgtaccttta

SEQ ID NO: 43634 - DNA, 20 bp, synthetic construct
  misc_feature 1..20: note = Description of Artificial Sequence: Synthetic oligonucleotide
  misc_feature 1..20: note = Target: SCN10A; (-) strand; PAM type: YTN; PAM sequence: TTT
  source 1..20: mol_type = other DNA
tgaaattaacttgtaccttt

SEQ ID NO: 43635 - DNA, 20 bp, synthetic construct
  misc_feature 1..20: note = Description of Artificial Sequence: Synthetic oligonucleotide
  misc_feature 1..20: note = Target: SCN10A; (-) strand; PAM type: YTN; PAM sequence: CTT
  source 1..20: mol_type = other DNA
ttgaaattaacttgtacctt

SEQ ID NO: 43636 - DNA, 20 bp, synthetic construct
  misc_feature 1..20: note = Description of Artificial Sequence: Synthetic oligonucleotide
  misc_feature 1..20: note = Target: SCN10A; (-) strand; PAM type: YTN; PAM sequence: TTC
  source 1..20: mol_type = other DNA
aaaaacaaaagtgggctttt

SEQ ID NO: 43637 - DNA, 20 bp, synthetic construct
  misc_feature 1..20: note = Description of Artificial Sequence: Synthetic oligonucleotide
  misc_feature 1..20: note = Target: SCN10A; (-) strand; PAM type: YTN; PAM sequence: CTT
  source 1..20: mol_type = other DNA
caaaaacaaaagtgggcttt

SEQ ID NO: 43638 - DNA, 20 bp, synthetic construct
  misc_feature 1..20: note = Description of Artificial Sequence: Synthetic oligonucleotide
  misc_feature 1..20: note = Target: SCN10A; (-) strand; PAM type: YTN; PAM sequence: CTG
  source 1..20: mol_type = other DNA
gaagtagtcatcatagcttc

SEQ ID NO: 43639 - DNA, 20 bp, synthetic construct
  misc_feature 1..20: note = Description of Artificial Sequence: Synthetic oligonucleotide
  misc_feature 1..20: note = Target: SCN10A; (-) strand; PAM type: YTN; PAM sequence: TTG
  source 1..20: mol_type = other DNA
gctggaagtagtcatcatag

SEQ ID NO: 43640 - DNA, 20 bp, synthetic construct
  misc_feature 1..20: note = Description of Artificial Sequence: Synthetic oligonucleotide
  misc_feature 1..20: note = Target: SCN10A; (-) strand; PAM type: YTN; PAM sequence: CTA
  source 1..20: mol_type = other DNA
tcattggctggaagtagtca

SEQ ID NO: 43641 - DNA, 20 bp, synthetic construct
  misc_feature 1..20: note = Description of Artificial Sequence: Synthetic oligonucleotide
  misc_feature 1..20: note = Target: SCN10A; (-) strand; PAM type: YTN; PAM sequence: CTC
  source 1..20: mol_type = other DNA
cactatcattggctggaagt

SEQ ID NO: 43642 - DNA, 20 bp, synthetic construct
  misc_feature 1..20: note = Description of Artificial Sequence: Synthetic oligonucleotide
  misc_feature 1..20: note = Target: SCN10A; (-) strand; PAM type: YTN; PAM sequence: TTG
  source 1..20: mol_type = other DNA
ctccactatcattggctgga

SEQ ID NO: 43643 - DNA, 20 bp, synthetic construct
  misc_feature 1..20: note = Description of Artificial Sequence: Synthetic oligonucleotide
  misc_feature 1..20: note = Target: SCN10A; (-) strand; PAM type: YTN; PAM sequence: TTT
  source 1..20: mol_type = other DNA
gctccactatcattggctgg

SEQ ID NO: 43644 - DNA, 20 bp, synthetic construct
  misc_feature 1..20: note = Description of Artificial Sequence: Synthetic oligonucleotide
  misc_feature 1..20: note = Target: SCN10A; (-) strand; PAM type: YTN; PAM sequence: CTT
  source 1..20: mol_type = other DNA
tgctccactatcattggctg

SEQ ID NO: 43645 - DNA, 20 bp, synthetic construct
  misc_feature 1..20: note = Description of Artificial Sequence: Synthetic oligonucleotide
  misc_feature 1..20: note = Target: SCN10A; (-) strand; PAM type: YTN; PAM sequence: TTG
  source 1..20: mol_type = other DNA
ctttgctccactatcattgg

SEQ ID NO: 43646 - DNA, 20 bp, synthetic construct
  misc_feature 1..20: note = Description of Artificial Sequence: Synthetic oligonucleotide
  misc_feature 1..20: note = Target: SCN10A; (-) strand; PAM type: YTN; PAM sequence: TTT
  source 1..20: mol_type = other DNA
gctttgctccactatcattg

SEQ ID NO: 43647 - DNA, 20 bp, synthetic construct
  misc_feature 1..20: note = Description of Artificial Sequence: Synthetic oligonucleotide
  misc_feature 1..20: note = Target: SCN10A; (-) strand; PAM type: YTN; PAM sequence: TTT
  source 1..20: mol_type = other DNA
tgctttgctccactatcatt

SEQ ID NO: 43648 - DNA, 20 bp, synthetic construct
  misc_feature 1..20: note = Description of Artificial Sequence: Synthetic oligonucleotide
  misc_feature 1..20: note = Target: SCN10A; (-) strand; PAM type: YTN; PAM sequence: CTC
  source 1..20: mol_type = other DNA
cccagcagaaagtaaggttt

SEQ ID NO: 43649 - DNA, 20 bp, synthetic construct
  misc_feature 1..20: note = Description of Artificial Sequence: Synthetic oligonucleotide
  misc_feature 1..20: note = Target: SCN10A; (-) strand; PAM type: YTN; PAM sequence: TTA
  source 1..20: mol_type = other DNA
caaatggctccccagcagaa

SEQ ID NO: 43650 - DNA, 20 bp, synthetic construct
  misc_feature 1..20: note = Description of Artificial Sequence: Synthetic oligonucleotide
  misc_feature 1..20: note = Target: SCN10A; (-) strand; PAM type: YTN; PAM sequence: CTC
  source 1..20: mol_type = other DNA
ataattacaaatggctcccc

SEQ ID NO: 43651 - DNA, 20 bp, synthetic construct
  misc_feature 1..20: note = Description of Artificial Sequence: Synthetic oligonucleotide
  misc_feature 1..20: note = Target: SCN10A; (-) strand; PAM type: YTN; PAM sequence: TTC
  source 1..20: mol_type = other DNA
ctcataattacaaatggctc

SEQ ID NO: 43652 - DNA, 20 bp, synthetic construct
  misc_feature 1..20: note = Description of Artificial Sequence: Synthetic oligonucleotide
  misc_feature 1..20: note = Target: SCN10A; (-) strand; PAM type: YTN; PAM sequence: CTT
  source 1..20: mol_type = other DNA
cctcataattacaaatggct

SEQ ID NO: 43653 - DNA, 20 bp, synthetic construct
  misc_feature 1..20: note = Description of Artificial Sequence: Synthetic oligonucleotide
  misc_feature 1..20: note = Target: SCN10A; (-) strand; PAM type: YTN; PAM sequence: CTC
  source 1..20: mol_type = other DNA
ttcctcataattacaaatgg

SEQ ID NO: 43654 - DNA, 20 bp, synthetic construct
  misc_feature 1..20: note = Description of Artificial Sequence: Synthetic oligonucleotide
  misc_feature 1..20: note = Target: SCN10A; (-) strand; PAM type: YTN; PAM sequence: TTG
  source 1..20: mol_type = other DNA
acacccacctcttcctcata

SEQ ID NO: 43655 - DNA, 20 bp, synthetic construct
  misc_feature 1..20: note = Description of Artificial Sequence: Synthetic oligonucleotide
  misc_feature 1..20: note = Target: SCN10A; (-) strand; PAM type: YTN; PAM sequence: CTG
  source 1..20: mol_type = other DNA
attgacacccacctcttcct

SEQ ID NO: 43656 - DNA, 20 bp, synthetic construct
  misc_feature 1..20: note = Description of Artificial Sequence: Synthetic oligonucleotide
  misc_feature 1..20: note = Target: SCN10A; (-) strand; PAM type: YTN; PAM sequence: TTG
  source 1..20: mol_type = other DNA
ctgattgacacccacctctt

SEQ ID NO: 43657 - DNA, 20 bp, synthetic construct
  misc_feature 1..20: note = Description of Artificial Sequence: Synthetic oligonucleotide
  misc_feature 1..20: note = Target: SCN10A; (-) strand; PAM type: YTN; PAM sequence: TTA
  source 1..20: mol_type = other DNA
gagattgctgattgacaccc

SEQ ID NO: 43658 - DNA, 20 bp, synthetic construct
  misc_feature 1..20: note = Description of Artificial Sequence: Synthetic oligonucleotide
  misc_feature 1..20: note = Target: SCN10A; (-) strand; PAM type: YTN; PAM sequence: CTT
  source 1..20: mol_type = other DNA
agagattgctgattgacacc

SEQ ID NO: 43659 - DNA, 20 bp, synthetic construct
  misc_feature 1..20: note = Description of Artificial Sequence: Synthetic oligonucleotide
  misc_feature 1..20: note = Target: SCN10A; (-) strand; PAM type: YTN; PAM sequence: TTG
  source 1..20: mol_type = other DNA
tcttagagattgctgattga

SEQ ID NO: 43660 - DNA, 20 bp, synthetic construct
  misc_feature 1..20: note = Description of Artificial Sequence: Synthetic oligonucleotide
  misc_feature 1..20: note = Target: SCN10A; (-) strand; PAM type: YTN; PAM sequence: CTT
  source 1..20: mol_type = other DNA
gtcttagagattgctgattg

SEQ ID NO: 43661 - DNA, 20 bp, synthetic construct
  misc_feature 1..20: note = Description of Artificial Sequence: Synthetic oligonucleotide
  misc_feature 1..20: note = Target: SCN10A; (-) strand; PAM type: YTN; PAM sequence: CTC
  source 1..20: mol_type = other DNA
acagccagagccttgtctta

SEQ ID NO: 43662 - DNA, 20 bp, synthetic construct
  misc_feature 1..20: note = Description of Artificial Sequence: Synthetic oligonucleotide
  misc_feature 1..20: note = Target: SCN10A; (-) strand; PAM type: YTN; PAM sequence: CTC
  source 1..20: mol_type = other DNA
cgtcaggacagaatgctcac

SEQ ID NO: 43663 - DNA, 20 bp, synthetic construct
  misc_feature 1..20: note = Description of Artificial Sequence: Synthetic oligonucleotide
  misc_feature 1..20: note = Target: SCN10A; (-) strand; PAM type: YTN; PAM sequence: CTG
  source 1..20: mol_type = other DNA
cctccgtcaggacagaatgc

SEQ ID NO: 43664 - DNA, 20 bp, synthetic construct
  misc_feature 1..20: note = Description of Artificial Sequence: Synthetic oligonucleotide
  misc_feature 1..20: note = Target: SCN10A; (-) strand; PAM type: YTN; PAM sequence: CTA
  source 1..20: mol_type = other DNA
actgcctccgtcaggacaga

SEQ ID NO: 43665 - DNA, 20 bp, synthetic construct
  misc_feature 1..20: note = Description of Artificial Sequence: Synthetic oligonucleotide
  misc_feature 1..20: note = Target: SCN10A; (-) strand; PAM type: YTN; PAM sequence: TTG
  source 1..20: mol_type = other DNA
ccctaactgcctccgtcagg

SEQ ID NO: 43666 - DNA, 20 bp, synthetic construct
  misc_feature 1..20: note = Description of Artificial Sequence: Synthetic oligonucleotide
  misc_feature 1..20: note = Target: SCN10A; (-) strand; PAM type: YTN; PAM sequence: CTT
  source 1..20: mol_type = other DNA
gccctaactgcctccgtcag

SEQ ID NO: 43667 - DNA, 20 bp, synthetic construct
  misc_feature 1..20: note = Description of Artificial Sequence: Synthetic oligonucleotide
  misc_feature 1..20: note = Target: SCN10A; (-) strand; PAM type: YTN; PAM sequence: CTC
  source 1..20: mol_type = other DNA
caccttgccctaactgcctc

SEQ ID NO: 43668 - DNA, 20 bp, synthetic construct
  misc_feature 1..20: note = Description of Artificial Sequence: Synthetic oligonucleotide
  misc_feature 1..20: note = Target: SCN10A; (-) strand; PAM type: YTN; PAM sequence: CTG
  source 1..20: mol_type = other DNA
tcagcctccaccttgcccta

SEQ ID NO: 43669 - DNA, 20 bp, synthetic construct
  misc_feature 1..20: note = Description of Artificial Sequence: Synthetic oligonucleotide
  misc_feature 1..20: note = Target: SCN10A; (-) strand; PAM type: YTN; PAM sequence: TTA
  source 1..20: mol_type = other DNA
tccaccactgtcagcctcca

SEQ ID NO: 43670 - DNA, 20 bp, synthetic construct
  misc_feature 1..20: note = Description of Artificial Sequence: Synthetic oligonucleotide
  misc_feature 1..20: note = Target: SCN10A; (-) strand; PAM type: YTN; PAM sequence: CTT
  source 1..20: mol_type = other DNA
atccaccactgtcagcctcc

SEQ ID NO: 43671 - DNA, 20 bp, synthetic construct
  misc_feature 1..20: note = Description of Artificial Sequence: Synthetic oligonucleotide
  misc_feature 1..20: note = Target: SCN10A; (-) strand; PAM type: YTN; PAM sequence: TTC
  source 1..20: mol_type = other DNA
cttatccaccactgtcagcc

SEQ ID NO: 43672 - DNA, 20 bp, synthetic construct
  misc_feature 1..20: note = Description of Artificial Sequence: Synthetic oligonucleotide
  misc_feature 1..20: note = Target: SCN10A; (-) strand; PAM type: YTN; PAM sequence: TTT
  source 1..20: mol_type = other DNA
ccttatccaccactgtcagc

SEQ ID NO: 43673 - DNA, 20 bp, synthetic construct
  misc_feature 1..20: note = Description of Artificial Sequence: Synthetic oligonucleotide
  misc_feature 1..20: note = Target: SCN10A; (-) strand; PAM type: YTN; PAM sequence: CTT
  source 1..20: mol_type = other DNA
tccttatccaccactgtcag

SEQ ID NO: 43674 - DNA, 20 bp, synthetic construct
  misc_feature 1..20: note = Description of Artificial Sequence: Synthetic oligonucleotide
  misc_feature 1..20: note = Target: SCN10A; (-) strand; PAM type: YTN; PAM sequence: TTC
  source 1..20: mol_type = other DNA
catccacccctttccttatc

SEQ ID NO: 43675 - DNA, 20 bp, synthetic construct
  misc_feature 1..20: note = Description of Artificial Sequence: Synthetic oligonucleotide
  misc_feature 1..20: note = Target: SCN10A; (-) strand; PAM type: YTN; PAM sequence: CTT
  source 1..20: mol_type = other DNA
ccatccacccctttccttat

SEQ ID NO: 43676 - DNA, 20 bp, synthetic construct
  misc_feature 1..20: note = Description of Artificial Sequence: Synthetic oligonucleotide
  misc_feature 1..20: note = Target: SCN10A; (-) strand; PAM type: YTN; PAM sequence: TTC
  source 1..20: mol_type = other DNA
ccttccatccacccctttcc

SEQ ID NO: 43677 - DNA, 20 bp, synthetic construct
  misc_feature 1..20: note = Description of Artificial Sequence: Synthetic oligonucleotide
  misc_feature 1..20: note = Target: SCN10A; (-) strand; PAM type: YTN; PAM sequence: TTT
  source 1..20: mol_type = other DNA
cccttccatccacccctttc

SEQ ID NO: 43678 - DNA, 20 bp, synthetic construct
  misc_feature 1..20: note = Description of Artificial Sequence: Synthetic oligonucleotide
  misc_feature 1..20: note = Target: SCN10A; (-) strand; PAM type: YTN; PAM sequence: TTT
  source 1..20: mol_type = other DNA
tcccttccatccaccccttt

SEQ ID NO: 43679 - DNA, 20 bp, synthetic construct
  misc_feature 1..20: note = Description of Artificial Sequence: Synthetic oligonucleotide
  misc_feature 1..20: note = Target: SCN10A; (-) strand; PAM type: YTN; PAM sequence: TTT
  source 1..20: mol_type = other DNA
ttcccttccatccacccctt

SEQ ID NO: 43680 - DNA, 20 bp, synthetic construct
  misc_feature 1..20: note = Description of Artificial Sequence: Synthetic oligonucleotide
  misc_feature 1..20: note = Target: SCN10A; (-) strand; PAM type: YTN; PAM sequence: CTG
  source 1..20: mol_type = other DNA
taaatttttcccttccatcc

SEQ ID NO: 43681 - DNA, 20 bp, synthetic construct
  misc_feature 1..20: note = Description of Artificial Sequence: Synthetic oligonucleotide
  misc_feature 1..20: note = Target: SCN10A; (-) strand; PAM type: YTN; PAM sequence: TTA
  source 1..20: mol_type = other DNA
atgcaatcatcaggtcctgt

SEQ ID NO: 43682 - DNA, 20 bp, synthetic construct
  misc_feature 1..20: note = Description of Artificial Sequence: Synthetic oligonucleotide
  misc_feature 1..20: note = Target: SCN10A; (-) strand; PAM type: YTN; PAM sequence: CTT
  source 1..20: mol_type = other DNA
aatgcaatcatcaggtcctg

SEQ ID NO: 43683 - DNA, 20 bp, synthetic construct
  misc_feature 1..20: note = Description of Artificial Sequence: Synthetic oligonucleotide
  misc_feature 1..20: note = Target: SCN10A; (-) strand; PAM type: YTN; PAM sequence: CTA
  source 1..20: mol_type = other DNA
cttaatgcaatcatcaggtc

SEQ ID NO: 43684 - DNA, 20 bp, synthetic construct
  misc_feature 1..20: note = Description of Artificial Sequence: Synthetic oligonucleotide
  misc_feature 1..20: note = Target: SCN10A; (-) strand; PAM type: YTN; PAM sequence: CTC
  source 1..20: mol_type = other DNA
ctacttaatgcaatcatcag

SEQ ID NO: 43685 - DNA, 20 bp, synthetic construct
  misc_feature 1..20: note = Description of Artificial Sequence: Synthetic oligonucleotide
  misc_feature 1..20: note = Target: SCN10A; (-) strand; PAM type: YTN; PAM sequence: CTC
  source 1..20: mol_type = other DNA
tcctacttaatgcaatcatc

SEQ ID NO: 43686 - DNA, 20 bp, synthetic construct
  misc_feature 1..20: note = Description of Artificial Sequence: Synthetic oligonucleotide
  misc_feature 1..20: note = Target: SCN10A; (-) strand; PAM type: YTN; PAM sequence: TTC
  source 1..20: mol_type = other DNA
tctcctacttaatgcaatca

SEQ ID NO: 43687 - DNA, 20 bp, synthetic construct
  misc_feature 1..20: note = Description of Artificial Sequence: Synthetic oligonucleotide
  misc_feature 1..20: note = Target: SCN10A; (-) strand; PAM type: YTN; PAM sequence: CTT
  source 1..20: mol_type = other DNA
ctctcctacttaatgcaatc

SEQ ID NO: 43688 - DNA, 20 bp, synthetic construct
  misc_feature 1..20: note = Description of Artificial Sequence: Synthetic oligonucleotide
  misc_feature 1..20: note = Target: SCN10A; (-) strand; PAM type: YTN; PAM sequence: TTC
  source 1..20: mol_type = other DNA
ttctctcctacttaatgcaa

SEQ ID NO: 43689 - DNA, 20 bp, synthetic construct
  misc_feature 1..20: note = Description of Artificial Sequence: Synthetic oligonucleotide
  misc_feature 1..20: note = Target: SCN10A; (-) strand; PAM type: YTN; PAM sequence: CTT
  source 1..20: mol_type = other DNA
cttctctcctacttaatgca

SEQ ID NO: 43690 - DNA, 20 bp, synthetic construct
  misc_feature 1..20: note = Description of Artificial Sequence: Synthetic oligonucleotide
  misc_feature 1..20: note = Target: SCN10A; (-) strand; PAM type: YTN; PAM sequence: CTG
  source 1..20: mol_type = other DNA
gaatgcttcttctctcctac

SEQ ID NO: 43691 - DNA, 20 bp, synthetic construct
  misc_feature 1..20: note = Description of Artificial Sequence: Synthetic oligonucleotide
  misc_feature 1..20: note = Target: SCN10A; (-) strand; PAM type: YTN; PAM sequence: CTG
  source 1..20: mol_type = other DNA
ccacccactggaatgcttct

SEQ ID NO: 43692 - DNA, 20 bp, synthetic construct
  misc_feature 1..20: note = Description of Artificial Sequence: Synthetic oligonucleotide
  misc_feature 1..20: note = Target: SCN10A; (-) strand; PAM type: YTN; PAM sequence: CTC
  source 1..20: mol_type = other DNA
agctgccacccactggaatg

SEQ ID NO: 43693 - DNA, 20 bp, synthetic construct
  misc_feature 1..20: note = Description of Artificial Sequence: Synthetic oligonucleotide
  misc_feature 1..20: note = Target: SCN10A; (-) strand; PAM type: YTN; PAM sequence: TTA
  source 1..20: mol_type = other DNA
cctcagctgccacccactgg

SEQ ID NO: 43694 - DNA, 20 bp, synthetic construct
  misc_feature 1..20: note = Description of Artificial Sequence: Synthetic oligonucleotide
  misc_feature 1..20: note = Target: SCN10A; (-) strand; PAM type: YTN; PAM sequence: CTC
  source 1..20: mol_type = other DNA
attacctcagctgccaccca

SEQ ID NO: 43695 - DNA, 20 bp, synthetic construct
  misc_feature 1..20: note = Description of Artificial Sequence: Synthetic oligonucleotide
  misc_feature 1..20: note = Target: SCN10A; (-) strand; PAM type: YTN; PAM sequence: CTC
  source 1..20: mol_type = other DNA
catgagtgacatcatcagct

SEQ ID NO: 43696 - DNA, 20 bp, synthetic construct
  misc_feature 1..20: note = Description of Artificial Sequence: Synthetic oligonucleotide
  misc_feature 1..20: note = Target: SCN10A; (-) strand; PAM type: YTN; PAM sequence: CTA
  source 1..20: mol_type = other DNA
atactccatgagtgacatca

SEQ ID NO: 43697 - DNA, 20 bp, synthetic construct
  misc_feature 1..20: note = Description of Artificial Sequence: Synthetic oligonucleotide
  misc_feature 1..20: note = Target: SCN10A; (-) strand; PAM type: YTN; PAM sequence: CTC
  source 1..20: mol_type = other DNA
taatactccatgagtgacat

SEQ ID NO: 43698 - DNA, 20 bp, synthetic construct
  misc_feature 1..20: note = Description of Artificial Sequence: Synthetic oligonucleotide
  misc_feature 1..20: note = Target: SCN10A; (-) strand; PAM type: YTN; PAM sequence: TTC
  source 1..20: mol_type = other DNA
ctctaatactccatgagtga

SEQ ID NO: 43699 - DNA, 20 bp, synthetic construct
  misc_feature 1..20: note = Description of Artificial Sequence: Synthetic oligonucleotide
  misc_feature 1..20: note = Target: SCN10A; (-) strand; PAM type: YTN; PAM sequence: TTT
  source 1..20: mol_type = other DNA
cctctaatactccatgagtg

SEQ ID NO: 43700 - DNA, 20 bp, synthetic construct
  misc_feature 1..20: note = Description of Artificial Sequence: Synthetic oligonucleotide
  misc_feature 1..20: note = Target: SCN10A; (-) strand; PAM type: YTN; PAM sequence: CTT
  source 1..20: mol_type = other DNA
tcctctaatactccatgagt

SEQ ID NO: 43701 - DNA, 20 bp, synthetic construct
  misc_feature 1..20: note = Description of Artificial Sequence: Synthetic oligonucleotide
  misc_feature 1..20: note = Target: SCN10A; (-) strand; PAM type: YTN; PAM sequence: TTC
  source 1..20: mol_type = other DNA
catgacaaatgagtctttcc

SEQ ID NO: 43702 - DNA, 20 bp, synthetic construct
  misc_feature 1..20: note = Description of Artificial Sequence: Synthetic oligonucleotide
  misc_feature 1..20: note = Target: SCN10A; (-) strand; PAM type: YTN; PAM sequence: TTT
  source 1..20: mol_type = other DNA
ccatgacaaatgagtctttc

SEQ ID NO: 43703 - DNA, 20 bp, synthetic construct
  misc_feature 1..20: note = Description of Artificial Sequence: Synthetic oligonucleotide
  misc_feature 1..20: note = Target: SCN10A; (-) strand; PAM type: YTN; PAM sequence: CTT
  source 1..20: mol_type = other DNA
tccatgacaaatgagtcttt

SEQ ID NO: 43704 - DNA, 20 bp, synthetic construct
  misc_feature 1..20: note = Description of Artificial Sequence: Synthetic oligonucleotide
  misc_feature 1..20: note = Target: SCN10A; (-) strand; PAM type: YTN; PAM sequence: CTG
  source 1..20: mol_type = other DNA
tctttccatgacaaatgagt

SEQ ID NO: 43705 - DNA, 20 bp, synthetic construct
  misc_feature 1..20: note = Description of Artificial Sequence: Synthetic oligonucleotide
  misc_feature 1..20: note = Target: SCN10A; (-) strand; PAM type: YTN; PAM sequence: CTC
  source 1..20: mol_type = other DNA
tgtctttccatgacaaatga

SEQ ID NO: 43706 - DNA, 20 bp, synthetic construct
  misc_feature 1..20: note = Description of Artificial Sequence: Synthetic oligonucleotide
  misc_feature 1..20: note = Target: SCN10A; (-) strand; PAM type: YTN; PAM sequence: TTC
  source 1..20: mol_type = other DNA
tctgtctttccatgacaaat

SEQ ID NO: 43707 - DNA, 20 bp, synthetic construct
  misc_feature 1..20: note = Description of Artificial Sequence: Synthetic oligonucleotide
  misc_feature 1..20: note = Target: SCN10A; (-) strand; PAM type: YTN; PAM sequence: CTC
  source 1..20: mol_type = other DNA
cagaacatcccaagttctct

SEQ ID NO: 43708 - DNA, 20 bp, synthetic construct
  misc_feature 1..20: note = Description of Artificial Sequence: Synthetic oligonucleotide
  misc_feature 1..20: note = Target: SCN10A; (-) strand; PAM type: YTN; PAM sequence: TTG
  source 1..20: mol_type = other DNA
ccaacatctccagaacatcc

SEQ ID NO: 43709 - DNA, 20 bp, synthetic construct
  misc_feature 1..20: note = Description of Artificial Sequence: Synthetic oligonucleotide
  misc_feature 1..20: note = Target: SCN10A; (-) strand; PAM type: YTN; PAM sequence: TTA
  source 1..20: mol_type = other DNA
ttgccaacatctccagaaca

SEQ ID NO: 43710 - DNA, 20 bp, synthetic construct
  misc_feature 1..20: note = Description of Artificial Sequence: Synthetic oligonucleotide
  misc_feature 1..20: note = Target: SCN10A; (-) strand; PAM type: YTN; PAM sequence: CTT
  source 1..20: mol_type = other DNA
attgccaacatctccagaac

SEQ ID NO: 43711 - DNA, 20 bp, synthetic construct
  misc_feature 1..20: note = Description of Artificial Sequence: Synthetic oligonucleotide
  misc_feature 1..20: note = Target: SCN10A; (-) strand; PAM type: YTN; PAM sequence: CTC
  source 1..20: mol_type = other DNA
ttattgccaacatctccaga

SEQ ID NO: 43712 - DNA, 20 bp, synthetic construct
  misc_feature 1..20: note = Description of Artificial Sequence: Synthetic oligonucleotide
  misc_feature 1..20: note = Target: SCN10A; (-) strand; PAM type: YTN; PAM sequence: CTG
  source 1..20: mol_type = other DNA
cctcttattgccaacatctc

SEQ ID NO: 43713 - DNA, 20 bp, synthetic construct
  misc_feature 1..20: note = Description of Artificial Sequence: Synthetic oligonucleotide
  misc_feature 1..20: note = Target: SCN10A; (-) strand; PAM type: YTN; PAM sequence: CTC
  source 1..20: mol_type = other DNA
tgcctcttattgccaacatc

SEQ ID NO: 43714 - DNA, 20 bp, synthetic construct
  misc_feature 1..20: note = Description of Artificial Sequence: Synthetic oligonucleotide
  misc_feature 1..20: note = Target: SCN10A; (-) strand; PAM type: YTN; PAM sequence: CTC
  source 1..20: mol_type = other DNA
aatcacccaactctgcctct

SEQ ID NO: 43715 - DNA, 20 bp, synthetic construct
  misc_feature 1..20: note = Description of Artificial Sequence: Synthetic oligonucleotide
  misc_feature 1..20: note = Target: SCN10A; (-) strand; PAM type: YTN; PAM sequence: TTA
  source 1..20: mol_type = other DNA
tctcaatcacccaactctgc

SEQ ID NO: 43716 - DNA, 20 bp, synthetic construct
  misc_feature 1..20: note = Description of Artificial Sequence: Synthetic oligonucleotide
  misc_feature 1..20: note = Target: SCN10A; (-) strand; PAM type: YTN; PAM sequence: CTA
  source 1..20: mol_type = other DNA
ttatctcaatcacccaactc

SEQ ID NO: 43717 - DNA, 20 bp, synthetic construct
  misc_feature 1..20: note = Description of Artificial Sequence: Synthetic oligonucleotide
  misc_feature 1..20: note = Target: SCN10A; (-) strand; PAM type: YTN; PAM sequence: CTC
  source 1..20: mol_type = other DNA
cacaagcatctattatctca

SEQ ID NO: 43718 - DNA, 20 bp, synthetic construct
  misc_feature 1..20: note = Description of Artificial Sequence: Synthetic oligonucleotide
  misc_feature 1..20: note = Target: SCN10A; (-) strand; PAM type: YTN; PAM sequence: CTG
  source 1..20: mol_type = other DNA
aatcatcgctccacaagcat

SEQ ID NO: 43719 - DNA, 20 bp, synthetic construct
  misc_feature 1..20: note = Description of Artificial Sequence: Synthetic oligonucleotide
  misc_feature 1..20: note = Target: SCN10A; (-) strand; PAM type: YTN; PAM sequence: TTA
  source 1..20: mol_type = other DNA
gtgaagtaatcctgaatcat

SEQ ID NO: 43720 - DNA, 20 bp, synthetic construct
  misc_feature 1..20: note = Description of Artificial Sequence: Synthetic oligonucleotide
  misc_feature 1..20: note = Target: SCN10A; (-) strand; PAM type: YTN; PAM sequence: CTT
  source 1..20: mol_type = other DNA
agtgaagtaatcctgaatca

SEQ ID NO: 43721 - DNA, 20 bp, synthetic construct
  misc_feature 1..20: note = Description of Artificial Sequence: Synthetic oligonucleotide
  misc_feature 1..20: note = Target: SCN10A; (-) strand; PAM type: YTN; PAM sequence: CTC
  source 1..20: mol_type = other DNA
ttagtgaagtaatcctgaat

SEQ ID NO: 43722 - DNA, 20 bp, synthetic construct
  misc_feature 1..20: note = Description of Artificial Sequence: Synthetic oligonucleotide
  misc_feature 1..20: note = Target: SCN10A; (-) strand; PAM type: YTN; PAM sequence: TTG
  source 1..20: mol_type = other DNA
ctcttagtgaagtaatcctg

SEQ ID NO: 43723 - DNA, 20 bp, synthetic construct
  misc_feature 1..20: note = Description of Artificial Sequence: Synthetic oligonucleotide
  misc_feature 1..20: note = Target: SCN10A; (-) strand; PAM type: YTN; PAM sequence: TTT
  source 1..20: mol_type = other DNA
gctcttagtgaagtaatcct

SEQ ID NO: 43724 - DNA, 20 bp, synthetic construct
  misc_feature 1..20: note = Description of Artificial Sequence: Synthetic oligonucleotide
  misc_feature 1..20: note = Target: SCN10A; (-) strand; PAM type: YTN; PAM sequence: CTT
  source 1..20: mol_type = other DNA
tgctcttagtgaagtaatcc

SEQ ID NO: 43725 - DNA, 20 bp, synthetic construct
  misc_feature 1..20: note = Description of Artificial Sequence: Synthetic oligonucleotide
  misc_feature 1..20: note = Target: SCN10A; (-) strand; PAM type: YTN; PAM sequence: CTC
  source 1..20: mol_type = other DNA
accccctttgctcttagtga

SEQ ID NO: 43726 - DNA, 20 bp, synthetic construct
  misc_feature 1..20: note = Description of Artificial Sequence: Synthetic oligonucleotide
  misc_feature 1..20: note = Target: SCN10A; (-) strand; PAM type: YTN; PAM sequence: TTA
  source 1..20: mol_type = other DNA
cagccaccaggacccagacc

SEQ ID NO: 43727 - DNA, 20 bp, synthetic construct
  misc_feature 1..20: note = Description of Artificial Sequence: Synthetic oligonucleotide
  misc_feature 1..20: note = Target: SCN10A; (-) strand; PAM type: YTN; PAM sequence: TTG
  source 1..20: mol_type = other DNA
tcacccataaatattacagc

SEQ ID NO: 43728 - DNA, 20 bp, synthetic construct
  misc_feature 1..20: note = Description of Artificial Sequence: Synthetic oligonucleotide
  misc_feature 1..20: note = Target: SCN10A; (-) strand; PAM type: YTN; PAM sequence: CTT
  source 1..20: mol_type = other DNA
gtcacccataaatattacag

SEQ ID NO: 43729 - DNA, 20 bp, synthetic construct
  misc_feature 1..20: note = Description of Artificial Sequence: Synthetic oligonucleotide
  misc_feature 1..20: note = Target: SCN10A; (-) strand; PAM type: YTN; PAM sequence: TTC
  source 1..20: mol_type = other DNA
ccttgtcacccataaatatt

SEQ ID NO: 43730 - DNA, 20 bp, synthetic construct
  misc_feature 1..20: note = Description of Artificial Sequence: Synthetic oligonucleotide
  misc_feature 1..20: note = Target: SCN10A; (-) strand; PAM type: YTN; PAM sequence: CTT
  source 1..20: mol_type = other DNA
cccttgtcacccataaatat

SEQ ID NO: 43731 - DNA, 20 bp, synthetic construct
  misc_feature 1..20: note = Description of Artificial Sequence: Synthetic oligonucleotide
  misc_feature 1..20: note = Target: SCN10A; (-) strand; PAM type: YTN; PAM sequence: TTG
  source 1..20: mol_type = other DNA
tgggcccatcttcccttgtc

SEQ ID NO: 43732 - DNA, 20 bp, synthetic construct
  misc_feature 1..20: note = Description of Artificial Sequence: Synthetic oligonucleotide
  misc_feature 1..20: note = Target: SCN10A; (-) strand; PAM type: YTN; PAM sequence: TTT
  source 1..20: mol_type = other DNA
gtgggcccatcttcccttgt

SEQ ID NO: 43733 - DNA, 20 bp, synthetic construct
  misc_feature 1..20: note = Description of Artificial Sequence: Synthetic oligonucleotide
  misc_feature 1..20: note = Target: SCN10A; (-) strand; PAM type: YTN; PAM sequence: TTT
  source 1..20: mol_type = other DNA
tgtgggcccatcttcccttg

SEQ ID NO: 43734 - DNA, 20 bp, synthetic construct
  misc_feature 1..20: note = Description of Artificial Sequence: Synthetic oligonucleotide
  misc_feature 1..20: note = Target: SCN10A; (-) strand; PAM type: YTN; PAM sequence: TTT
  source 1..20: mol_type = other DNA
ttgtgggcccatcttccctt

SEQ ID NO: 43735 - DNA, 20 bp, synthetic construct
  misc_feature 1..20: note = Description of Artificial Sequence: Synthetic oligonucleotide
  misc_feature 1..20: note = Target: SCN10A; (-) strand; PAM type: YTN; PAM sequence: CTT
  source 1..20: mol_type = other DNA
tttgtgggcccatcttccct

SEQ ID NO: 43736 - DNA, 20 bp, synthetic construct
  misc_feature 1..20: note = Description of Artificial Sequence: Synthetic oligonucleotide
  misc_feature 1..20: note = Target: SCN10A; (-) strand; PAM type: YTN; PAM sequence: TTC
  source 1..20: mol_type = other DNA
aagtctttttgtgggcccat

SEQ ID NO: 43737 - DNA, 20 bp, synthetic construct
  misc_feature 1..20: note = Description of Artificial Sequence: Synthetic oligonucleotide
  misc_feature 1..20: note = Target: SCN10A; (-) strand; PAM type: YTN; PAM sequence: TTT
  source 1..20: mol_type = other DNA
caagtctttttgtgggccca

SEQ ID NO: 43738 - DNA, 20 bp, synthetic construct
  misc_feature 1..20: note = Description of Artificial Sequence: Synthetic oligonucleotide
  misc_feature 1..20: note = Target: SCN10A; (-) strand; PAM type: YTN; PAM sequence: CTT
  source 1..20: mol_type = other DNA
tcaagtctttttgtgggccc

SEQ ID NO: 43739 - DNA, 20 bp, synthetic construct
  misc_feature 1..20: note = Description of Artificial Sequence: Synthetic oligonucleotide
  misc_feature 1..20: note = Target: SCN10A; (-) strand; PAM type: YTN; PAM sequence: CTC
  source 1..20: mol_type = other DNA
tttcaagtctttttgtgggc

SEQ ID NO: 43740 - DNA, 20 bp, synthetic construct
  misc_feature 1..20: note = Description of Artificial Sequence: Synthetic oligonucleotide
  misc_feature 1..20: note = Target: SCN10A; (-) strand; PAM type: YTN; PAM sequence: TTC
  source 1..20: mol_type = other DNA
tctttcaagtctttttgtgg

SEQ ID NO: 43741 - DNA, 20 bp, synthetic construct
  misc_feature 1..20: note = Description of Artificial Sequence: Synthetic oligonucleotide
  misc_feature 1..20: note = Target: SCN10A; (-) strand; PAM type: YTN; PAM sequence: TTA
  source 1..20: mol_type = other DNA
gttctctttcaagtcttttt

SEQ ID NO: 43742 - DNA, 20 bp, synthetic construct
  misc_feature 1..20: note = Description of Artificial Sequence: Synthetic oligonucleotide
  misc_feature 1..20: note = Target: SCN10A; (-) strand; PAM type: YTN; PAM sequence: CTT
  source 1..20: mol_type = other DNA
agttctctttcaagtctttt

SEQ ID NO: 43743 - DNA, 20 bp, synthetic construct
  misc_feature 1..20: note = Description of Artificial Sequence: Synthetic oligonucleotide
  misc_feature 1..20: note = Target: SCN10A; (-) strand; PAM type: YTN; PAM sequence: CTC
  source 1..20: mol_type = other DNA
ttagttctctttcaagtctt

SEQ ID NO: 43744 - DNA, 20 bp, synthetic construct
  misc_feature 1..20: note = Description of Artificial Sequence: Synthetic oligonucleotide
  misc_feature 1..20: note = Target: SCN10A; (-) strand; PAM type: YTN; PAM sequence: CTC
  source 1..20: mol_type = other DNA
tcttagttctctttcaagtc

SEQ ID NO: 43745 - DNA, 20 bp, synthetic construct
  misc_feature 1..20: note = Description of Artificial Sequence: Synthetic oligonucleotide
  misc_feature 1..20: note = Target: SCN10A; (-) strand; PAM type: YTN; PAM sequence: CTA
  source 1..20: mol_type = other DNA
actctcttagttctctttca

SEQ ID NO: 43746 - DNA, 20 bp, synthetic construct
  misc_feature 1..20: note = Description of Artificial Sequence: Synthetic oligonucleotide
  misc_feature 1..20: note = Target: SCN10A; (-) strand; PAM type: YTN; PAM sequence: CTG
  source 1..20: mol_type = other DNA
catgtcctaactctcttagt

SEQ ID NO: 43747 - DNA, 20 bp, synthetic construct
  misc_feature 1..20: note = Description of Artificial Sequence: Synthetic oligonucleotide
  misc_feature 1..20: note = Target: SCN10A; (-) strand; PAM type: YTN; PAM sequence: TTG
  source 1..20: mol_type = other DNA
gtggtgctgcatgtcctaac

SEQ ID NO: 43748 - DNA, 20 bp, synthetic construct
  misc_feature 1..20: note = Description of Artificial Sequence: Synthetic oligonucleotide
  misc_feature 1..20: note = Target: SCN10A; (-) strand; PAM type: YTN; PAM sequence: TTT
  source 1..20: mol_type = other DNA
ggtggtgctgcatgtcctaa

SEQ ID NO: 43749 - DNA, 20 bp, synthetic construct
  misc_feature 1..20: note = Description of Artificial Sequence: Synthetic oligonucleotide
  misc_feature 1..20: note = Target: SCN10A; (-) strand; PAM type: YTN; PAM sequence: CTT
  source 1..20: mol_type = other DNA
tggtggtgctgcatgtccta

SEQ ID NO: 43750 - DNA, 20 bp, synthetic construct
  misc_feature 1..20: note = Description of Artificial Sequence: Synthetic oligonucleotide
  misc_feature 1..20: note = Target: SCN10A; (-) strand; PAM type: YTN; PAM sequence: CTG
  source 1..20: mol_type = other DNA
actttggtggtgctgcatgt

SEQ ID NO: 43751 - DNA, 20 bp, synthetic construct
  misc_feature 1..20: note = Description of Artificial Sequence: Synthetic oligonucleotide
  misc_feature 1..20: note = Target: SCN10A; (-) strand; PAM type: YTN; PAM sequence: CTC
  source 1..20: mol_type = other DNA
tgactttggtggtgctgcat

SEQ ID NO: 43752 - DNA, 20 bp, synthetic construct
  misc_feature 1..20: note = Description of Artificial Sequence: Synthetic oligonucleotide
  misc_feature 1..20: note = Target: SCN10A; (-) strand; PAM type: YTN; PAM sequence: CTG
  source 1..20: mol_type = other DNA
ctctgactttggtggtgctg

SEQ ID NO: 43753 - DNA, 20 bp, synthetic construct
  misc_feature 1..20: note = Description of Artificial Sequence: Synthetic oligonucleotide
  misc_feature 1..20: note = Target: SCN10A; (-) strand; PAM type: YTN; PAM sequence: TTC
  source 1..20: mol_type = other DNA
ctgctctgactttggtggtg

SEQ ID NO: 43754 - DNA, 20 bp, synthetic construct
  misc_feature 1..20: note = Description of Artificial Sequence: Synthetic oligonucleotide
  misc_feature 1..20: note = Target: SCN10A; (-) strand; PAM type: YTN; PAM sequence: CTT
  source 1..20: mol_type = other DNA
cctgctctgactttggtggt

SEQ ID NO: 43755 - DNA, 20 bp, synthetic construct
  misc_feature 1..20: note = Description of Artificial Sequence: Synthetic oligonucleotide
  misc_feature 1..20: note = Target: SCN10A; (-) strand; PAM type: YTN; PAM sequence: TTC
  source 1..20: mol_type = other DNA
acttcctgctctgactttgg

SEQ ID NO: 43756 - DNA, 20 bp, synthetic construct
  misc_feature 1..20: note = Description of Artificial Sequence: Synthetic oligonucleotide
  misc_feature 1..20: note = Target: SCN10A; (-) strand; PAM type: YTN; PAM sequence: CTT
  source 1..20: mol_type = other DNA
cacttcctgctctgactttg

SEQ ID NO: 43757 - DNA, 20 bp, synthetic construct
  misc_feature 1..20: note = Description of Artificial Sequence: Synthetic oligonucleotide
  misc_feature 1..20: note = Target: SCN10A; (-) strand; PAM type: YTN; PAM sequence: CTG
  source 1..20: mol_type = other DNA
agtcttcacttcctgctctg

SEQ ID NO: 43758 - DNA, 20 bp, synthetic construct
  misc_feature 1..20: note = Description of Artificial Sequence: Synthetic oligonucleotide
  misc_feature 1..20: note = Target: SCN10A; (-) strand; PAM type: YTN; PAM sequence: CTC
  source 1..20: mol_type = other DNA
tgagtcttcacttcctgctc

SEQ ID NO: 43759 - DNA, 20 bp, synthetic construct
  misc_feature 1..20: note = Description of Artificial Sequence: Synthetic oligonucleotide
  misc_feature 1..20: note = Target: SCN10A; (-) strand; PAM type: YTN; PAM sequence: CTC
  source 1..20: mol_type = other DNA
caaaggtaggctctgagtct

SEQ ID NO: 43760 - DNA, 20 bp, synthetic construct
  misc_feature 1..20: note = Description of Artificial Sequence: Synthetic oligonucleotide
  misc_feature 1..20: note = Target: SCN10A; (-) strand; PAM type: YTN; PAM sequence: CTC
  source 1..20: mol_type = other DNA
cggggccccacctccaaagg

SEQ ID NO: 43761 - DNA, 20 bp, synthetic construct
  misc_feature 1..20: note = Description of Artificial Sequence: Synthetic oligonucleotide
  misc_feature 1..20: note = Target: SCN10A; (-) strand; PAM type: YTN; PAM sequence: CTG
  source 1..20: mol_type = other DNA
agctccggggccccacctcc

SEQ ID NO: 43762 - DNA, 20 bp, synthetic construct
  misc_feature 1..20: note = Description of Artificial Sequence: Synthetic oligonucleotide
  misc_feature 1..20: note = Target: SCN10A; (-) strand; PAM type: YTN; PAM sequence: CTC
  source 1..20: mol_type = other DNA
catcccaccaaccctgagct

SEQ ID NO: 43763 - DNA, 20 bp, synthetic construct
  misc_feature 1..20: note = Description of Artificial Sequence: Synthetic oligonucleotide
  misc_feature 1..20: note = Target: SCN10A; (-) strand; PAM type: YTN; PAM sequence: TTA
  source 1..20: mol_type = other DNA
tgccctccatcccaccaacc

SEQ ID NO: 43764 - DNA, 20 bp, synthetic construct
  misc_feature 1..20: note = Description of Artificial Sequence: Synthetic oligonucleotide
  misc_feature 1..20: note = Target: SCN10A; (-) strand; PAM type: YTN; PAM sequence: TTT
  source 1..20: mol_type = other DNA
atgccctccatcccaccaac

SEQ ID NO: 43765 - DNA, 20 bp, synthetic construct
  misc_feature 1..20: note = Description of Artificial Sequence: Synthetic oligonucleotide
  misc_feature 1..20: note = Target: SCN10A; (-) strand; PAM type: YTN; PAM sequence: CTT
  source 1..20: mol_type = other DNA
tatgccctccatcccaccaa

SEQ ID NO: 43766 - DNA, 20 bp, synthetic construct
  misc_feature 1..20: note = Description of Artificial Sequence: Synthetic oligonucleotide
  misc_feature 1..20: note = Target: SCN10A; (-) strand; PAM type: YTN; PAM sequence: TTC
  source 1..20: mol_type = other DNA
cccctttatgccctccatcc

SEQ ID NO: 43767 - DNA, 20 bp, synthetic construct
  misc_feature 1..20: note = Description of Artificial Sequence: Synthetic oligonucleotide
  misc_feature 1..20: note = Target: SCN10A; (-) strand; PAM type: YTN; PAM sequence: CTT
  source 1..20: mol_type = other DNA
ccccctttatgccctccatc

SEQ ID NO: 43768 - DNA, 20 bp, synthetic construct
  misc_feature 1..20: note = Description of Artificial Sequence: Synthetic oligonucleotide
  misc_feature 1..20: note = Target: SCN10A; (-) strand; PAM type: YTN; PAM sequence: TTG
  source 1..20: mol_type = other DNA
gtaacccttccccctttatg

SEQ ID NO: 43769 - DNA, 20 bp, synthetic construct
  misc_feature 1..20: note = Description of Artificial Sequence: Synthetic oligonucleotide
  misc_feature 1..20: note = Target: SCN10A; (-) strand; PAM type: YTN; PAM sequence: TTT
  source 1..20: mol_type = other DNA
ggtaacccttccccctttat

SEQ ID NO: 43770 - DNA, 20 bp, synthetic construct
  misc_feature 1..20: note = Description of Artificial Sequence: Synthetic oligonucleotide
  misc_feature 1..20: note = Target: SCN10A; (-) strand; PAM type: YTN; PAM sequence: TTT
  source 1..20: mol_type = other DNA
tggtaacccttcccccttta

SEQ ID NO: 43771 - DNA, 20 bp, synthetic construct
  misc_feature 1..20: note = Description of Artificial Sequence: Synthetic oligonucleotide
  misc_feature 1..20: note = Target: SCN10A; (-) strand; PAM type: YTN; PAM sequence: CTG
  source 1..20: mol_type = other DNA
caggttttggtaacccttcc

SEQ ID NO: 43772 - DNA, 20 bp, synthetic construct
  misc_feature 1..20: note = Description of Artificial Sequence: Synthetic oligonucleotide
  misc_feature 1..20: note = Target: SCN10A; (-) strand; PAM type: YTN; PAM sequence: CTG
  source 1..20: mol_type = other DNA
gtctgcaggttttggtaacc

SEQ ID NO: 43773 - DNA, 20 bp, synthetic construct
  misc_feature 1..20: note = Description of Artificial Sequence: Synthetic oligonucleotide
  misc_feature 1..20: note = Target: SCN10A; (-) strand; PAM type: YTN; PAM sequence: CTC
  source 1..20: mol_type = other DNA
tggtctgcaggttttggtaa

SEQ ID NO: 43774 - DNA, 20 bp, synthetic construct
  misc_feature 1..20: note = Description of Artificial Sequence: Synthetic oligonucleotide
  misc_feature 1..20: note = Target: SCN10A; (-) strand; PAM type: YTN; PAM sequence: TTC
  source 1..20: mol_type = other DNA
tctggtctgcaggttttggt

SEQ ID NO: 43775 - DNA, 20 bp, synthetic construct
  misc_feature 1..20: note = Description of Artificial Sequence: Synthetic oligonucleotide
  misc_feature 1..20: note = Target: SCN10A; (-) strand; PAM type: YTN; PAM sequence: CTT
  source 1..20: mol_type = other DNA
ctctggtctgcaggttttgg

SEQ ID NO: 43776 - DNA, 20 bp, synthetic construct
  misc_feature 1..20: note = Description of Artificial Sequence: Synthetic oligonucleotide
  misc_feature 1..20: note = Target: SCN10A; (-) strand; PAM type: YTN; PAM sequence: CTC
  source 1..20: mol_type = other DNA
aaaaaacaaacaaaaaactt

SEQ ID NO: 43777 - DNA, 20 bp, synthetic construct
  misc_feature 1..20: note = Description of Artificial Sequence: Synthetic oligonucleotide
  misc_feature 1..20: note = Target: SCN10A; (-) strand; PAM type: YTN; PAM sequence: CTC
  source 1..20: mol_type = other DNA
cgcctcaaaaaacaaacaaa

SEQ ID NO: 43778 - DNA, 20 bp, synthetic construct
  misc_feature 1..20: note = Description of Artificial Sequence: Synthetic oligonucleotide
  misc_feature 1..20: note = Target: SCN10A; (-) strand; PAM type: YTN; PAM sequence: CTG
  source 1..20: mol_type = other DNA
ggtgacagagcgagactccg

SEQ ID NO: 43779 - DNA, 20 bp, synthetic construct
  misc_feature 1..20: note = Description of Artificial Sequence: Synthetic oligonucleotide
  misc_feature 1..20: note = Target: SCN10A; (-) strand; PAM type: YTN; PAM sequence: CTC
  source 1..20: mol_type = other DNA
cagcctgggtgacagagcga

SEQ ID NO: 43780 - DNA, 20 bp, synthetic construct
  misc_feature 1..20: note = Description of Artificial Sequence: Synthetic oligonucleotide
  misc_feature 1..20: note = Target: SCN10A; (-) strand; PAM type: YTN; PAM sequence: TTA
  source 1..20: mol_type = other DNA
tactccagcctgggtgacag

SEQ ID NO: 43781 - DNA, 20 bp, synthetic construct
  misc_feature 1..20: note = Description of Artificial Sequence: Synthetic oligonucleotide
  misc_feature 1..20: note = Target: SCN10A; (-) strand; PAM type: YTN; PAM sequence: TTG
  source 1..20: mol_type = other DNA
tgccattatactccagcctg

SEQ ID NO: 43782 - DNA, 20 bp, synthetic construct
  misc_feature 1..20: note = Description of Artificial Sequence: Synthetic oligonucleotide
  misc_feature 1..20: note = Target: SCN10A; (-) strand; PAM type: YTN; PAM sequence: CTA
  source 1..20: mol_type = other DNA
ccaccacgaggtgtggtggt

SEQ ID NO: 43783 - DNA, 20 bp, synthetic construct
  misc_feature 1..20: note = Description of Artificial Sequence: Synthetic oligonucleotide
  misc_feature 1..20: note = Target: SCN10A; (-) strand; PAM type: YTN; PAM sequence: CTA
  source 1..20: mol_type = other DNA
aaagtacaaaaatcactacc

SEQ ID NO: 43784 - DNA, 20 bp, synthetic construct
  misc_feature 1..20: note = Description of Artificial Sequence: Synthetic oligonucleotide
  misc_feature 1..20: note = Target: SCN10A; (-) strand; PAM type: YTN; PAM sequence: CTG
  source 1..20: mol_type = other DNA
ctaaaagtacaaaaatcact

SEQ ID NO: 43785 - DNA, 20 bp, synthetic construct
  misc_feature 1..20: note = Description of Artificial Sequence: Synthetic oligonucleotide
  misc_feature 1..20: note = Target: SCN10A; (-) strand; PAM type: YTN; PAM sequence: CTC
  source 1..20: mol_type = other DNA
tgctaaaagtacaaaaatca

SEQ ID NO: 43786 - DNA, 20 bp, synthetic construct
  misc_feature 1..20: note = Description of Artificial Sequence: Synthetic oligonucleotide
  misc_feature 1..20: note = Target: SCN10A; (-) strand; PAM type: YTN; PAM sequence: CTG
  source 1..20: mol_type = other DNA
tctctgctaaaagtacaaaa

SEQ ID NO: 43787 - DNA, 20 bp, synthetic construct
  misc_feature 1..20: note = Description of Artificial Sequence: Synthetic oligonucleotide
  misc_feature 1..20: note = Target: SCN10A; (-) strand; PAM type: YTN; PAM sequence: CTG
  source 1..20: mol_type = other DNA
gccaacatgccgaaaccctg

SEQ ID NO: 43788 - DNA, 20 bp, synthetic construct
  misc_feature 1..20: note = Description of Artificial Sequence: Synthetic oligonucleotide
  misc_feature 1..20: note = Target: SCN10A; (-) strand; PAM type: YTN; PAM sequence: TTC
  source 1..20: mol_type = other DNA
aaaaccaccctggccaacat

SEQ ID NO: 43789 - DNA, 20 bp, synthetic construct
  misc_feature 1..20: note = Description of Artificial Sequence: Synthetic oligonucleotide
  misc_feature 1..20: note = Target: SCN10A; (-) strand; PAM type: YTN; PAM sequence: TTA
  source 1..20: mol_type = other DNA
ggagttcaaaaccaccctgg

SEQ ID NO: 43790 - DNA, 20 bp, synthetic construct
  misc_feature 1..20: note = Description of Artificial Sequence: Synthetic oligonucleotide
  misc_feature 1..20: note = Target: SCN10A; (-) strand; PAM type: YTN; PAM sequence: CTG
  source 1..20: mol_type = other DNA
aggttaggagttcaaaacca

SEQ ID NO: 43791 - DNA, 20 bp, synthetic construct
  misc_feature 1..20: note = Description of Artificial Sequence: Synthetic oligonucleotide
  misc_feature 1..20: note = Target: SCN10A; (-) strand; PAM type: YTN; PAM sequence: CTG
  source 1..20: mol_type = other DNA
aggcgggcggatcacctgag

SEQ ID NO: 43792 - DNA, 20 bp, synthetic construct
  misc_feature 1..20: note = Description of Artificial Sequence: Synthetic oligonucleotide
  misc_feature 1..20: note = Target: SCN10A; (-) strand; PAM type: YTN; PAM sequence: TTG
  source 1..20: mol_type = other DNA
ggaggctgaggcgggcggat

SEQ ID NO: 43793 - DNA, 20 bp, synthetic construct
  misc_feature 1..20: note = Description of Artificial Sequence: Synthetic oligonucleotide
  misc_feature 1..20: note = Target: SCN10A; (-) strand; PAM type: YTN; PAM sequence: TTT
  source 1..20: mol_type = other DNA
gggaggctgaggcgggcgga

SEQ ID NO: 43794 - DNA, 20 bp, synthetic construct
  misc_feature 1..20: note = Description of Artificial Sequence: Synthetic oligonucleotide
  misc_feature 1..20: note = Target: SCN10A; (-) strand; PAM type: YTN; PAM sequence: CTT
  source 1..20: mol_type = other DNA
tgggaggctgaggcgggcgg

SEQ ID NO: 43795 - DNA, 20 bp, synthetic construct
  misc_feature 1..20: note = Description of Artificial Sequence: Synthetic oligonucleotide
  misc_feature 1..20: note = Target: SCN10A; (-) strand; PAM type: YTN; PAM sequence: CTG
  source 1..20: mol_type = other DNA
taatcccagcactttgggag

SEQ ID NO: 43796 - DNA, 20 bp, synthetic construct
  misc_feature 1..20: note = Description of Artificial Sequence: Synthetic oligonucleotide
  misc_feature 1..20: note = Target: SCN10A; (-) strand; PAM type: YTN; PAM sequence: TTC
  source 1..20: mol_type = other DNA
atgcctgtaatcccagcact

SEQ ID NO: 43797 - DNA, 20 bp, synthetic construct
  misc_feature 1..20: note = Description of Artificial Sequence: Synthetic oligonucleotide
  misc_feature 1..20: note = Target: SCN10A; (-) strand; PAM type: YTN; PAM sequence: CTG
  source 1..20: mol_type = other DNA
gccaggcacggtggttcatg

SEQ ID NO: 43798 - DNA, 20 bp, synthetic construct
  misc_feature 1..20: note = Description of Artificial Sequence: Synthetic oligonucleotide
  misc_feature 1..20: note = Target: SCN10A; (-) strand; PAM type: YTN; PAM sequence: CTC
  source 1..20: mol_type = other DNA
atctggccaggcacggtggt

SEQ ID NO: 43799 - DNA, 20 bp, synthetic construct
  misc_feature 1..20: note = Description of Artificial Sequence: Synthetic oligonucleotide
  misc_feature 1..20: note = Target: SCN10A; (-) strand; PAM type: YTN; PAM sequence: CTC
  source 1..20: mol_type = other DNA
tcatctggccaggcacggtg

SEQ ID NO: 43800 - DNA, 20 bp, synthetic construct
  misc_feature 1..20: note = Description of Artificial Sequence: Synthetic oligonucleotide
  misc_feature 1..20: note = Target: SCN10A; (-) strand; PAM type: YTN; PAM sequence: TTC
  source 1..20: mol_type = other DNA
tctcatctggccaggcacgg

SEQ ID NO: 43801 - DNA, 20 bp, synthetic construct
  misc_feature 1..20: note = Description of Artificial Sequence: Synthetic oligonucleotide
  misc_feature 1..20: note = Target: SCN10A; (-) strand; PAM type: YTN; PAM sequence: CTT
  source 1..20: mol_type = other DNA
ctctcatctggccaggcacg

SEQ ID NO: 43802 - DNA, 20 bp, synthetic construct
  misc_feature 1..20: note = Description of Artificial Sequence: Synthetic oligonucleotide
  misc_feature 1..20: note = Target: SCN10A; (-) strand; PAM type: YTN; PAM sequence: CTC
  source 1..20: mol_type = other DNA
aaaacttctctcatctggcc

SEQ ID NO: 43803 - DNA, 20 bp, synthetic construct
  misc_feature 1..20: note = Description of Artificial Sequence: Synthetic oligonucleotide
  misc_feature 1..20: note = Target: SCN10A; (-) strand; PAM type: YTN; PAM sequence: CTG
  source 1..20: mol_type = other DNA
atctcaaaacttctctcatc

SEQ ID NO: 43804 - DNA, 20 bp, synthetic construct
  misc_feature 1..20: note = Description of Artificial Sequence: Synthetic oligonucleotide
  misc_feature 1..20: note = Target: SCN10A; (-) strand; PAM type: YTN; PAM sequence: TTG
  source 1..20: mol_type = other DNA
aaggcatgcgggtaagtctg

SEQ ID NO: 43805 - DNA, 20 bp, synthetic construct
  misc_feature 1..20: note = Description of Artificial Sequence: Synthetic oligonucleotide
  misc_feature 1..20: note = Target: SCN10A; (-) strand; PAM type: YTN; PAM sequence: TTT
  source 1..20: mol_type = other DNA
gaaggcatgcgggtaagtct

SEQ ID NO: 43806 - DNA, 20 bp, synthetic construct
  misc_feature 1..20: note = Description of Artificial Sequence: Synthetic oligonucleotide
  misc_feature 1..20: note = Target: SCN10A; (-) strand; PAM type: YTN; PAM sequence: CTC
  source 1..20: mol_type = other DNA
gatttgaaggcatgcgggta

SEQ ID NO: 43807 - DNA, 20 bp, synthetic construct
  misc_feature 1..20: note = Description of Artificial Sequence: Synthetic oligonucleotide
  misc_feature 1..20: note = Target: SCN10A; (-) strand; PAM type: YTN; PAM sequence: TTC
  source 1..20: mol_type = other DNA
tcgatttgaaggcatgcggg

SEQ ID NO: 43808 - DNA, 20 bp, synthetic construct
  misc_feature 1..20: note = Description of Artificial Sequence: Synthetic oligonucleotide
  misc_feature 1..20: note = Target: SCN10A; (-) strand; PAM type: YTN; PAM sequence: TTT
  source 1..20: mol_type = other DNA
ctcgatttgaaggcatgcgg

SEQ ID NO: 43809 - DNA, 20 bp, synthetic construct
  misc_feature 1..20: note = Description of Artificial Sequence: Synthetic oligonucleotide
  misc_feature 1..20: note = Target: SCN10A; (-) strand; PAM type: YTN; PAM sequence: CTT
  source 1..20: mol_type = other DNA
tctcgatttgaaggcatgcg

SEQ ID NO: 43810 - DNA, 20 bp, synthetic construct
  misc_feature 1..20: note = Description of Artificial Sequence: Synthetic oligonucleotide
  misc_feature 1..20: note = Target: SCN10A; (-) strand; PAM type: YTN; PAM sequence: CTC
  source 1..20: mol_type = other DNA
tttctcgatttgaaggcatg

SEQ ID NO: 43811 - DNA, 20 bp, synthetic construct
  misc_feature 1..20: note = Description of Artificial Sequence: Synthetic oligonucleotide
  misc_feature 1..20: note = Target: SCN10A; (-) strand; PAM type: YTN; PAM sequence: CTG
  source 1..20: mol_type = other DNA
cgggctctttctcgatttga

SEQ ID NO: 43812 - DNA, 20 bp, synthetic construct
  misc_feature 1..20: note = Description of Artificial Sequence: Synthetic oligonucleotide
  misc_feature 1..20: note = Target: SCN10A; (-) strand; PAM type: YTN; PAM sequence: CTG
  source 1..20: mol_type = other DNA
cggccactgcgggctctttc

SEQ ID NO: 43813 - DNA, 20 bp, synthetic construct
  misc_feature 1..20: note = Description of Artificial Sequence: Synthetic oligonucleotide
  misc_feature 1..20: note = Target: SCN10A; (-) strand; PAM type: YTN; PAM sequence: CTC
  source 1..20: mol_type = other DNA
tgcggccactgcgggctctt

SEQ ID NO: 43814 - DNA, 20 bp, synthetic construct
  misc_feature 1..20: note = Description of Artificial Sequence: Synthetic oligonucleotide
  misc_feature 1..20: note = Target: SCN10A; (-) strand; PAM type: YTN; PAM sequence: TTC
  source 1..20: mol_type = other DNA
gcgctctgcggccactgcgg

SEQ ID NO: 43815 - DNA, 20 bp, synthetic construct
  misc_feature 1..20: note = Description of Artificial Sequence: Synthetic oligonucleotide
  misc_feature 1..20: note = Target: SCN10A; (-) strand; PAM type: YTN; PAM sequence: CTT
  source 1..20: mol_type = other DNA
cgcgctctgcggccactgcg

SEQ ID NO: 43816 - DNA, 20 bp, synthetic construct
  misc_feature 1..20: note = Description of Artificial Sequence: Synthetic oligonucleotide
  misc_feature 1..20: note = Target: SCN10A; (-) strand; PAM type: YTN; PAM sequence: TTC
  source 1..20: mol_type = other DNA
gaacccttcgcgctctgcgg

SEQ ID NO: 43817 - DNA, 20 bp, synthetic construct
  misc_feature 1..20: note = Description of Artificial Sequence: Synthetic oligonucleotide
  misc_feature 1..20: note = Target: SCN10A; (-) strand; PAM type: YTN; PAM sequence: CTT
  source 1..20: mol_type = other DNA
cgaacccttcgcgctctgcg

SEQ ID NO: 43818 - DNA, 20 bp, synthetic construct
  misc_feature 1..20: note = Description of Artificial Sequence: Synthetic oligonucleotide
  misc_feature 1..20: note = Target: SCN10A; (-) strand; PAM type: YTN; PAM sequence: CTC
  source 1..20: mol_type = other DNA
ccatcaaagcccttcgaacc

SEQ ID NO: 43819 - DNA, 20 bp, synthetic construct
  misc_feature 1..20: note = Description of Artificial Sequence: Synthetic oligonucleotide
  misc_feature 1..20: note = Target: SCN10A; (-) strand; PAM type: YTN; PAM sequence: CTG
  source 1..20: mol_type = other DNA
aagtggctcccatcaaagcc

SEQ ID NO: 43820 - DNA, 20 bp, synthetic construct
  misc_feature 1..20: note = Description of Artificial Sequence: Synthetic oligonucleotide
  misc_feature 1..20: note = Target: SCN10A; (-) strand; PAM type: YTN; PAM sequence: TTC
  source 1..20: mol_type = other DNA
tgaagtggctcccatcaaag

SEQ ID NO: 43821 - DNA, 20 bp, synthetic construct
  misc_feature 1..20: note = Description of Artificial Sequence: Synthetic oligonucleotide
  misc_feature 1..20: note = Target: SCN10A; (-) strand; PAM type: YTN; PAM sequence: CTG
  source 1..20: mol_type = other DNA
gaatattctgaagtggctcc

SEQ ID NO: 43822 - DNA, 20 bp, synthetic construct
  misc_feature 1..20: note = Description of Artificial Sequence: Synthetic oligonucleotide
  misc_feature 1..20: note = Target: SCN10A; (-) strand; PAM type: YTN; PAM sequence: TTC
  source 1..20: mol_type = other DNA
tggaatattctgaagtggct

SEQ ID NO: 43823 - DNA, 20 bp, synthetic construct
  misc_feature 1..20: note = Description of Artificial Sequence: Synthetic oligonucleotide
  misc_feature 1..20: note = Target: SCN10A; (-) strand; PAM type: YTN; PAM sequence: CTC
  source 1..20: mol_type = other DNA
acagcgaagattctggaata

SEQ ID NO: 43824 - DNA, 20 bp, synthetic construct
  misc_feature 1..20: note = Description of Artificial Sequence: Synthetic oligonucleotide
  misc_feature 1..20: note = Target: SCN10A; (-) strand; PAM type: YTN; PAM sequence: CTG
  source 1..20: mol_type = other DNA
ataagtctcacagcgaagat

SEQ ID NO: 43825 - DNA, 20 bp, synthetic construct
  misc_feature 1..20: note = Description of Artificial Sequence: Synthetic oligonucleotide
  misc_feature 1..20: note = Target: SCN10A; (-) strand; PAM type: YTN; PAM sequence: CTC
  source 1..20: mol_type = other DNA
actgataagtctcacagcga

SEQ ID NO: 43826 - DNA, 20 bp, synthetic construct
  misc_feature 1..20: note = Description of Artificial Sequence: Synthetic oligonucleotide
  misc_feature 1..20: note = Target: SCN10A; (-) strand; PAM type: YTN; PAM sequence: CTC
  source 1..20: mol_type = other DNA
agatctcactgataagtctc

SEQ ID NO: 43827 - DNA, 20 bp, synthetic construct
  misc_feature 1..20: note = Description of Artificial Sequence: Synthetic oligonucleotide
  misc_feature 1..20: note = Target: SCN10A; (-) strand; PAM type: YTN; PAM sequence: CTG
  source 1..20: mol_type = other DNA
cactcagatctcactgataa

SEQ ID NO: 43828 - DNA, 20 bp, synthetic construct
  misc_feature 1..20: note = Description of Artificial Sequence: Synthetic oligonucleotide
  misc_feature 1..20: note = Target: SCN10A; (-) strand; PAM type: YTN; PAM sequence: CTC
  source 1..20: mol_type = other DNA
ctgcactcagatctcactga

SEQ ID NO: 43829 - DNA, 20 bp, synthetic construct
  misc_feature 1..20: note = Description of Artificial Sequence: Synthetic oligonucleotide
  misc_feature 1..20: note = Target: SCN10A; (-) strand; PAM type: YTN; PAM sequence: CTC
  source 1..20: mol_type = other DNA
tcctgcactcagatctcact

SEQ ID NO: 43830 - DNA, 20 bp, synthetic construct
  misc_feature 1..20: note = Description of Artificial Sequence: Synthetic oligonucleotide
  misc_feature 1..20: note = Target: SCN10A; (-) strand; PAM type: YTN; PAM sequence: CTG
  source 1..20: mol_type = other DNA
ccctctcctgcactcagatc

SEQ ID NO: 43831 - DNA, 20 bp, synthetic construct
  misc_feature 1..20: note = Description of Artificial Sequence: Synthetic oligonucleotide
  misc_feature 1..20: note = Target: SCN10A; (-) strand; PAM type: YTN; PAM sequence: TTC
  source 1..20: mol_type = other DNA
tgccctctcctgcactcaga

SEQ ID NO: 43832 - DNA, 20 bp, synthetic construct
  misc_feature 1..20: note = Description of Artificial Sequence: Synthetic oligonucleotide
  misc_feature 1..20: note = Target: SCN10A; (-) strand; PAM type: YTN; PAM sequence: TTT
  source 1..20: mol_type = other DNA
ctgccctctcctgcactcag

SEQ ID NO: 43833 - DNA, 20 bp, synthetic construct
  misc_feature 1..20: note = Description of Artificial Sequence: Synthetic oligonucleotide
  misc_feature 1..20: note = Target: SCN10A; (-) strand; PAM type: YTN; PAM sequence: CTA
  source 1..20: mol_type = other DNA
gagtgatgtttctgccctct

SEQ ID NO: 43834 - DNA, 20 bp, synthetic construct
  misc_feature 1..20: note = Description of Artificial Sequence: Synthetic oligonucleotide
  misc_feature 1..20: note = Target: SCN10A; (-) strand; PAM type: YTN; PAM sequence: CTG
  source 1..20: mol_type = other DNA
gaaacctagagtgatgtttc

SEQ ID NO: 43835 - DNA, 20 bp, synthetic construct
  misc_feature 1..20: note = Description of Artificial Sequence: Synthetic oligonucleotide
  misc_feature 1..20: note = Target: SCN10A; (-) strand; PAM type: YTN; PAM sequence: TTC
  source 1..20: mol_type = other DNA
tggaaacctagagtgatgtt

SEQ ID NO: 43836 - DNA, 20 bp, synthetic construct
  misc_feature 1..20: note = Description of Artificial Sequence: Synthetic oligonucleotide
  misc_feature 1..20: note = Target: SCN10A; (-) strand; PAM type: YTN; PAM sequence: TTT
  source 1..20: mol_type = other DNA
ctggaaacctagagtgatgt

SEQ ID NO: 43837 - DNA, 20 bp, synthetic construct
  misc_feature 1..20: note = Description of Artificial Sequence: Synthetic oligonucleotide
  misc_feature 1..20: note = Target: SCN10A; (-) strand; PAM type: YTN; PAM sequence: CTT
  source 1..20: mol_type = other DNA
tctggaaacctagagtgatg

SEQ ID NO: 43838 - DNA, 20 bp, synthetic construct
  misc_feature 1..20: note = Description of Artificial Sequence: Synthetic oligonucleotide
  misc_feature 1..20: note = Target: SCN10A; (-) strand; PAM type: YTN; PAM sequence: CTG
  source 1..20: mol_type = other DNA
cctttctggaaacctagagt

SEQ ID NO: 43839 - DNA, 20 bp, synthetic construct
  misc_feature 1..20: note = Description of Artificial Sequence: Synthetic oligonucleotide
  misc_feature 1..20: note = Target: SCN10A; (-) strand; PAM type: YTN; PAM sequence: TTC
  source 1..20: mol_type = other DNA
cacgaggactgcctttctgg

SEQ ID NO: 43840 - DNA, 20 bp, synthetic construct
  misc_feature 1..20: note = Description of Artificial Sequence: Synthetic oligonucleotide
  misc_feature 1..20: note = Target: SCN10A; (-) strand; PAM type: YTN; PAM sequence: CTT
  source 1..20: mol_type = other DNA
ccacgaggactgcctttctg

SEQ ID NO: 43841 - DNA, 20 bp, synthetic construct
  misc_feature 1..20: note = Description of Artificial Sequence: Synthetic oligonucleotide
  misc_feature 1..20: note = Target: SCN10A; (-) strand; PAM type: YTN; PAM sequence: CTC
  source 1..20: mol_type = other DNA
cttccacgaggactgccttt

SEQ ID NO: 43842 - DNA, 20 bp, synthetic construct
  misc_feature 1..20: note = Description of Artificial Sequence: Synthetic oligonucleotide
  misc_feature 1..20: note = Target: SCN10A; (-) strand; PAM type: YTN; PAM sequence: CTG
  source 1..20: mol_type = other DNA
tctccttccacgaggactgc

SEQ ID NO: 43843 - DNA, 20 bp, synthetic construct
  misc_feature 1..20: note = Description of Artificial Sequence: Synthetic oligonucleotide
  misc_feature 1..20: note = Target: SCN10A; (-) strand; PAM type: YTN; PAM sequence: TTC
  source 1..20: mol_type = other DNA
ctgtctccttccacgaggac

SEQ ID NO: 43844 - DNA, 20 bp, synthetic construct
  misc_feature 1..20: note = Description of Artificial Sequence: Synthetic oligonucleotide
  misc_feature 1..20: note = Target: SCN10A; (-) strand; PAM type: YTN; PAM sequence: CTG
  source 1..20: mol_type = other DNA
ggcagggagttcctgtctcc

SEQ ID NO: 43845 - DNA, 20 bp, synthetic construct
  misc_feature 1..20: note = Description of Artificial Sequence: Synthetic oligonucleotide
  misc_feature 1..20: note = Target: SCN10A; (-) strand; PAM type: YTN; PAM sequence: TTA
  source 1..20: mol_type = other DNA
gacgtgtaggaatgggaggc

SEQ ID NO: 43846 - DNA, 20 bp, synthetic construct
  misc_feature 1..20: note = Description of Artificial Sequence: Synthetic oligonucleotide
  misc_feature 1..20: note = Target: SCN10A; (-) strand; PAM type: YTN; PAM sequence: CTT
  source 1..20: mol_type = other DNA
agacgtgtaggaatgggagg

SEQ ID NO: 43847 - DNA, 20 bp, synthetic construct
  misc_feature 1..20: note = Description of Artificial Sequence: Synthetic oligonucleotide
  misc_feature 1..20: note = Target: SCN10A; (-) strand; PAM type: YTN; PAM sequence: CTA
  source 1..20: mol_type = other DNA
ggatgatggcttagacgtgt

SEQ ID NO: 43848 - DNA, 20 bp, synthetic construct
  misc_feature 1..20: note = Description of Artificial Sequence: Synthetic oligonucleotide
  misc_feature 1..20: note = Target: SCN10A; (-) strand; PAM type: YTN; PAM sequence: TTC
  source 1..20: mol_type = other DNA
cgaataaggtgggagctagg

SEQ ID NO: 43849 - DNA, 20 bp, synthetic construct
  misc_feature 1..20: note = Description of Artificial Sequence: Synthetic oligonucleotide
  misc_feature 1..20: note = Target: SCN10A; (-) strand; PAM type: YTN; PAM sequence: TTG
  source 1..20: mol_type = other DNA
gagttccgaataaggtggga

SEQ ID NO: 43850 - DNA, 20 bp, synthetic construct
  misc_feature 1..20: note = Description of Artificial Sequence: Synthetic oligonucleotide
  misc_feature 1..20: note = Target: SCN10A; (-) strand; PAM type: YTN; PAM sequence: CTC
  source 1..20: mol_type = other DNA
attggagttccgaataaggt

SEQ ID NO: 43851 - DNA, 20 bp, synthetic construct
  misc_feature 1..20: note = Description of Artificial Sequence: Synthetic oligonucleotide
  misc_feature 1..20: note = Target: SCN10A; (-) strand; PAM type: YTN; PAM sequence: CTC
  source 1..20: mol_type = other DNA
tcattggagttccgaataag

SEQ ID NO: 43852 - DNA, 20 bp, synthetic construct
  misc_feature 1..20: note = Description of Artificial Sequence: Synthetic oligonucleotide
  misc_feature 1..20: note = Target: SCN10A; (-) strand; PAM type: YTN; PAM sequence: CTA
  source 1..20: mol_type = other DNA
gacctctcattggagttccg

SEQ ID NO: 43853 - DNA, 20 bp, synthetic construct
  misc_feature 1..20: note = Description of Artificial Sequence: Synthetic oligonucleotide
  misc_feature 1..20: note = Target: SCN10A; (-) strand; PAM type: YTN; PAM sequence: TTC
  source 1..20: mol_type = other DNA
tagacctctcattggagttc

SEQ ID NO: 43854 - DNA, 20 bp, synthetic construct
  misc_feature 1..20: note = Description of Artificial Sequence: Synthetic oligonucleotide
  misc_feature 1..20: note = Target: SCN10A; (-) strand; PAM type: YTN; PAM sequence: TTT
  source 1..20: mol_type = other DNA
ctagacctctcattggagtt

SEQ ID NO: 43855 - DNA, 20 bp, synthetic construct
  misc_feature 1..20: note = Description of Artificial Sequence: Synthetic oligonucleotide
  misc_feature 1..20: note = Target: SCN10A; (-) strand; PAM type: YTN; PAM sequence: CTT
  source 1..20: mol_type = other DNA
tctagacctctcattggagt

SEQ ID NO: 43856 - DNA, 20 bp, synthetic construct
  misc_feature 1..20: note = Description of Artificial Sequence: Synthetic oligonucleotide
  misc_feature 1..20: note = Target: SCN10A; (-) strand; PAM type: YTN; PAM sequence: CTC
  source 1..20: mol_type = other DNA
tttctagacctctcattgga

SEQ ID NO: 43857 - DNA, 20 bp, synthetic construct
  misc_feature 1..20: note = Description of Artificial Sequence: Synthetic oligonucleotide
  misc_feature 1..20: note = Target: SCN10A; (-) strand; PAM type: YTN; PAM sequence: TTA
  source 1..20: mol_type = other DNA
ataaaagggaagagacaaaa

SEQ ID NO: 43858 - DNA, 20 bp, synthetic construct
  misc_feature 1..20: note = Description of Artificial Sequence: Synthetic oligonucleotide
  misc_feature 1..20: note = Target: SCN10A; (-) strand; PAM type: YTN; PAM sequence: TTT
  source 1..20: mol_type = other DNA
aataaaagggaagagacaaa

SEQ ID NO: 43859 - DNA, 20 bp, synthetic construct
  misc_feature 1..20: note = Description of Artificial Sequence: Synthetic oligonucleotide
  misc_feature 1..20: note = Target: SCN10A; (-) strand; PAM type: YTN; PAM sequence: TTT
  source 1..20: mol_type = other DNA
taataaaagggaagagacaa

SEQ ID NO: 43860 - DNA, 20 bp, synthetic construct
  misc_feature 1..20: note = Description of Artificial Sequence: Synthetic oligonucleotide
  misc_feature 1..20: note = Target: SCN10A; (-) strand; PAM type: YTN; PAM sequence: TTT
  source 1..20: mol_type = other DNA
ttaataaaagggaagagaca

SEQ ID NO: 43861 - DNA, 20 bp, synthetic construct
  misc_feature 1..20: note = Description of Artificial Sequence: Synthetic oligonucleotide
  misc_feature 1..20: note = Target: SCN10A; (-) strand; PAM type: YTN; PAM sequence: TTA
  source 1..20: mol_type = other DNA
agagagtggtgaataaaatt

SEQ ID NO: 43862 - DNA, 20 bp, synthetic construct
  misc_feature 1..20: note = Description of Artificial Sequence: Synthetic oligonucleotide
  misc_feature 1..20: note = Target: SCN10A; (-) strand; PAM type: YTN; PAM sequence: TTT
  source 1..20: mol_type = other DNA
aagagagtggtgaataaaat

SEQ ID NO: 43863 - DNA, 20 bp, synthetic construct
  misc_feature 1..20: note = Description of Artificial Sequence: Synthetic oligonucleotide
  misc_feature 1..20: note = Target: SCN10A; (-) strand; PAM type: YTN; PAM sequence: TTG
  source 1..20: mol_type = other DNA
tttaagagagtggtgaataa

SEQ ID NO: 43864 - DNA, 20 bp, synthetic construct
  misc_feature 1..20: note = Description of Artificial Sequence: Synthetic oligonucleotide
  misc_feature 1..20: note = Target: SCN10A; (-) strand; PAM type: YTN; PAM sequence: TTG
  source 1..20: mol_type = other DNA
cccagattgtttaagagagt

SEQ ID NO: 43865 - DNA, 20 bp, synthetic construct
  misc_feature 1..20: note = Description of Artificial Sequence: Synthetic oligonucleotide
  misc_feature 1..20: note = Target: SCN10A; (-) strand; PAM type: YTN; PAM sequence: CTT
  source 1..20: mol_type = other DNA
gcccagattgtttaagagag

SEQ ID NO: 43866 - DNA, 20 bp, synthetic construct
  misc_feature 1..20: note = Description of Artificial Sequence: Synthetic oligonucleotide
  misc_feature 1..20: note = Target: SCN10A; (-) strand; PAM type: YTN; PAM sequence: TTC
  source 1..20: mol_type = other DNA
ttgcccagattgtttaagag

SEQ ID NO: 43867 - DNA, 20 bp, synthetic construct
  misc_feature 1..20: note = Description of Artificial Sequence: Synthetic oligonucleotide
  misc_feature 1..20: note = Target: SCN10A; (-) strand; PAM type: YTN; PAM sequence: TTT
  source 1..20: mol_type = other DNA
cttgcccagattgtttaaga

SEQ ID NO: 43868 - DNA, 20 bp, synthetic construct
  misc_feature 1..20: note = Description of Artificial Sequence: Synthetic oligonucleotide
  misc_feature 1..20: note = Target: SCN10A; (-) strand; PAM type: YTN; PAM sequence: TTT
  source 1..20: mol_type = other DNA
tcttgcccagattgtttaag

SEQ ID NO: 43869 - DNA, 20 bp, synthetic construct
  misc_feature 1..20: note = Description of Artificial Sequence: Synthetic oligonucleotide
  misc_feature 1..20: note = Target: SCN10A; (-) strand; PAM type: YTN; PAM sequence: TTT
  source 1..20: mol_type = other DNA
ttcttgcccagattgtttaa

SEQ ID NO: 43870 - DNA, 20 bp, synthetic construct
  misc_feature 1..20: note = Description of Artificial Sequence: Synthetic oligonucleotide
  misc_feature 1..20: note = Target: SCN10A; (-) strand; PAM type: YTN; PAM sequence: CTG
  source 1..20: mol_type = other DNA
agtttttcttgcccagattg

SEQ ID NO: 43871 - DNA, 20 bp, synthetic construct
  misc_feature 1..20: note = Description of Artificial Sequence: Synthetic oligonucleotide
  misc_feature 1..20: note = Target: SCN10A; (-) strand; PAM type: YTN; PAM sequence: TTA
  source 1..20: mol_type = other DNA
gagactgagtttttcttgcc

SEQ ID NO: 43872 - DNA, 20 bp, synthetic construct
  misc_feature 1..20: note = Description of Artificial Sequence: Synthetic oligonucleotide
  misc_feature 1..20: note = Target: SCN10A; (-) strand; PAM type: YTN; PAM sequence: TTG
  source 1..20: mol_type = other DNA
gtgatgttagagactgagtt

SEQ ID NO: 43873 - DNA, 20 bp, synthetic construct
  misc_feature 1..20: note = Description of Artificial Sequence: Synthetic oligonucleotide
  misc_feature 1..20: note = Target: SCN10A; (-) strand; PAM type: YTN; PAM sequence: CTA
  source 1..20: mol_type = other DNA
cgtaccagaggttggtgatg

SEQ ID NO: 43874 - DNA, 20 bp, synthetic construct
  misc_feature 1..20: note = Description of Artificial Sequence: Synthetic oligonucleotide
  misc_feature 1..20: note = Target: SCN10A; (-) strand; PAM type: YTN; PAM sequence: TTG
  source 1..20: mol_type = other DNA
gccacctacgtaccagaggt

SEQ ID NO: 43875 - DNA, 20 bp, synthetic construct
  misc_feature 1..20: note = Description of Artificial Sequence: Synthetic oligonucleotide
  misc_feature 1..20: note = Target: SCN10A; (-) strand; PAM type: YTN; PAM sequence: CTT
  source 1..20: mol_type = other DNA
ggccacctacgtaccagagg

SEQ ID NO: 43876 - DNA, 20 bp, synthetic construct
  misc_feature 1..20: note = Description of Artificial Sequence: Synthetic oligonucleotide
  misc_feature 1..20: note = Target: SCN10A; (-) strand; PAM type: YTN; PAM sequence: CTG
  source 1..20: mol_type = other DNA
gaagcttggccacctacgta

SEQ ID NO: 43877 - DNA, 20 bp, synthetic construct
  misc_feature 1..20: note = Description of Artificial Sequence: Synthetic oligonucleotide
  misc_feature 1..20: note = Target: SCN10A; (-) strand; PAM type: YTN; PAM sequence: TTA
  source 1..20: mol_type = other DNA
atacactggaagcttggcca

SEQ ID NO: 43878 - DNA, 20 bp, synthetic construct
  misc_feature 1..20: note = Description of Artificial Sequence: Synthetic oligonucleotide
  misc_feature 1..20: note = Target: SCN10A; (-) strand; PAM type: YTN; PAM sequence: TTT
  source 1..20: mol_type = other DNA
aatacactggaagcttggcc

SEQ ID NO: 43879 - DNA, 20 bp, synthetic construct
  misc_feature 1..20: note = Description of Artificial Sequence: Synthetic oligonucleotide
  misc_feature 1..20: note = Target: SCN10A; (-) strand; PAM type: YTN; PAM sequence: TTG
  source 1..20: mol_type = other DNA
atttaatacactggaagctt

SEQ ID NO: 43880 - DNA, 20 bp, synthetic construct
  misc_feature 1..20: note = Description of Artificial Sequence: Synthetic oligonucleotide
  misc_feature 1..20: note = Target: SCN10A; (-) strand; PAM type: YTN; PAM sequence: CTA
  source 1..20: mol_type = other DNA
gaaggaaaaggaagagttga

SEQ ID NO: 43881 - DNA, 20 bp, synthetic construct
  misc_feature 1..20: note = Description of Artificial Sequence: Synthetic oligonucleotide
  misc_feature 1..20: note = Target: SCN10A; (-) strand; PAM type: YTN; PAM sequence: CTG
  source 1..20: mol_type = other DNA
cccctagaaggaaaaggaag

SEQ ID NO: 43882 - DNA, 20 bp, synthetic construct
  misc_feature 1..20: note = Description of Artificial Sequence: Synthetic oligonucleotide
  misc_feature 1..20: note = Target: SCN10A; (-) strand; PAM type: YTN; PAM sequence: CTG
  source 1..20: mol_type = other DNA
ctgcccctagaaggaaaagg

SEQ ID NO: 43883 - DNA, 20 bp, synthetic construct
  misc_feature 1..20: note = Description of Artificial Sequence: Synthetic oligonucleotide
  misc_feature 1..20: note = Target: SCN10A; (-) strand; PAM type: YTN; PAM sequence: CTG
  source 1..20: mol_type = other DNA
actgctgcccctagaaggaa

SEQ ID NO: 43884 - DNA, 20 bp, synthetic construct
  misc_feature 1..20: note = Description of Artificial Sequence: Synthetic oligonucleotide
  misc_feature 1..20: note = Target: SCN10A; (-) strand; PAM type: YTN; PAM sequence: TTG
  source 1..20: mol_type = other DNA
aggcctgactgctgccccta

SEQ ID NO: 43885 - DNA, 20 bp, synthetic construct
  misc_feature 1..20: note = Description of Artificial Sequence: Synthetic oligonucleotide
  misc_feature 1..20: note = Target: SCN10A; (-) strand; PAM type: YTN; PAM sequence: TTG
  source 1..20: mol_type = other DNA
ttgaggcctgactgctgccc

SEQ ID NO: 43886 - DNA, 20 bp, synthetic construct
  misc_feature 1..20: note = Description of Artificial Sequence: Synthetic oligonucleotide
  misc_feature 1..20: note = Target: SCN10A; (-) strand; PAM type: YTN; PAM sequence: TTC
  source 1..20: mol_type = other DNA
aaggttgttgaggcctgact

SEQ ID NO: 43887 - DNA, 20 bp, synthetic construct
  misc_feature 1..20: note = Description of Artificial Sequence: Synthetic oligonucleotide
  misc_feature 1..20: note = Target: SCN10A; (-) strand; PAM type: YTN; PAM sequence: TTT
  source 1..20: mol_type = other DNA
caaggttgttgaggcctgac

SEQ ID NO: 43888 - DNA, 20 bp, synthetic construct
  misc_feature 1..20: note = Description of Artificial Sequence: Synthetic oligonucleotide
  misc_feature 1..20: note = Target: SCN10A; (-) strand; PAM type: YTN; PAM sequence: CTG
  source 1..20: mol_type = other DNA
aaaatcagtttcaaggttgt

SEQ ID NO: 43889 - DNA, 20 bp, synthetic construct
  misc_feature 1..20: note = Description of Artificial Sequence: Synthetic oligonucleotide
  misc_feature 1..20: note = Target: SCN10A; (-) strand; PAM type: YTN; PAM sequence: CTC
  source 1..20: mol_type = other DNA
tgaaaatcagtttcaaggtt

SEQ ID NO: 43890 - DNA, 20 bp, synthetic construct
  misc_feature 1..20: note = Description of Artificial Sequence: Synthetic oligonucleotide
  misc_feature 1..20: note = Target: SCN10A; (-) strand; PAM type: YTN; PAM sequence: CTC
  source 1..20: mol_type = other DNA
caagtctctgaaaatcagtt

SEQ ID NO: 43891 - DNA, 20 bp, synthetic construct
  misc_feature 1..20: note = Description of Artificial Sequence: Synthetic oligonucleotide
  misc_feature 1..20: note = Target: SCN10A; (-) strand; PAM type: YTN; PAM sequence: CTA
  source 1..20: mol_type = other DNA
ggagggaacatcatgtctcc

SEQ ID NO: 43892 - DNA, 20 bp, synthetic construct
  misc_feature 1..20: note = Description of Artificial Sequence: Synthetic oligonucleotide
  misc_feature 1..20: note = Target: SCN10A; (-) strand; PAM type: YTN; PAM sequence: CTC
  source 1..20: mol_type = other DNA
agcatagcccctaggaggga

SEQ ID NO: 43893 - DNA, 20 bp, synthetic construct
  misc_feature 1..20: note = Description of Artificial Sequence: Synthetic oligonucleotide
  misc_feature 1..20: note = Target: SCN10A; (-) strand; PAM type: YTN; PAM sequence: CTC
  source 1..20: mol_type = other DNA
tcagcatagcccctaggagg

SEQ ID NO: 43894 - DNA, 20 bp, synthetic construct
  misc_feature 1..20: note = Description of Artificial Sequence: Synthetic oligonucleotide
  misc_feature 1..20: note = Target: SCN10A; (-) strand; PAM type: YTN; PAM sequence: CTC
  source 1..20: mol_type = other DNA
agaatagactctcagcatag

SEQ ID NO: 43895 - DNA, 20 bp, synthetic construct
  misc_feature 1..20: note = Description of Artificial Sequence: Synthetic oligonucleotide
  misc_feature 1..20: note = Target: SCN10A; (-) strand; PAM type: YTN; PAM sequence: TTC
  source 1..20: mol_type = other DNA
ctcagaatagactctcagca

SEQ ID NO: 43896 - DNA, 20 bp, synthetic construct
  misc_feature 1..20: note = Description of Artificial Sequence: Synthetic oligonucleotide
  misc_feature 1..20: note = Target: SCN10A; (-) strand; PAM type: YTN; PAM sequence: CTA
  source 1..20: mol_type = other DNA
tattcctcagaatagactct

SEQ ID NO: 43897 - DNA, 20 bp, synthetic construct
  misc_feature 1..20: note = Description of Artificial Sequence: Synthetic oligonucleotide
  misc_feature 1..20: note = Target: SCN10A; (-) strand; PAM type: YTN; PAM sequence: TTA
  source 1..20: mol_type = other DNA
ctatattcctcagaatagac

SEQ ID NO: 43898 - DNA, 20 bp, synthetic construct
  misc_feature 1..20: note = Description of Artificial Sequence: Synthetic oligonucleotide
  misc_feature 1..20: note = Target: SCN10A; (-) strand; PAM type: YTN; PAM sequence: TTC
  source 1..20: mol_type = other DNA
agattactatattcctcaga

SEQ ID NO: 43899 - DNA, 20 bp, synthetic construct
  misc_feature 1..20: note = Description of Artificial Sequence: Synthetic oligonucleotide
  misc_feature 1..20: note = Target: SCN10A; (-) strand; PAM type: YTN; PAM sequence: CTG
  source 1..20: mol_type = other DNA
agcaaatataattcagatta

SEQ ID NO: 43900 - DNA, 20 bp, synthetic construct
  misc_feature 1..20: note = Description of Artificial Sequence: Synthetic oligonucleotide
  misc_feature 1..20: note = Target: SCN10A; (-) strand; PAM type: YTN; PAM sequence: CTC
  source 1..20: mol_type = other DNA
tgagcaaatataattcagat

SEQ ID NO: 43901 - DNA, 20 bp, synthetic construct
  misc_feature 1..20: note = Description of Artificial Sequence: Synthetic oligonucleotide
  misc_feature 1..20: note = Target: SCN10A; (-) strand; PAM type: YTN; PAM sequence: TTC
  source 1..20: mol_type = other DNA
tctgagcaaatataattcag

SEQ ID NO: 43902 - DNA, 20 bp, synthetic construct
  misc_feature 1..20: note = Description of Artificial Sequence: Synthetic oligonucleotide
  misc_feature 1..20: note = Target: SCN10A; (-) strand; PAM type: YTN; PAM sequence: CTT
  source 1..20: mol_type = other DNA
ctctgagcaaatataattca

SEQ ID NO: 43903 - DNA, 20 bp, synthetic construct
  misc_feature 1..20: note = Description of Artificial Sequence: Synthetic oligonucleotide
  misc_feature 1..20: note = Target: SCN10A; (-) strand; PAM type: YTN; PAM sequence: TTC
  source 1..20: mol_type = other DNA
caccccacttctctgagcaa

SEQ ID NO: 43904 - DNA, 20 bp, synthetic construct
  misc_feature 1..20: note = Description of Artificial Sequence: Synthetic oligonucleotide
  misc_feature 1..20: note = Target: SCN10A; (-) strand; PAM type: YTN; PAM sequence: TTT
  source 1..20: mol_type = other DNA
ccaccccacttctctgagca

SEQ ID NO: 43905 - DNA, 20 bp, synthetic construct
  misc_feature 1..20: note = Description of Artificial Sequence: Synthetic oligonucleotide
  misc_feature 1..20: note = Target: SCN10A; (-) strand; PAM type: YTN; PAM sequence: CTT
  source 1..20: mol_type = other DNA
tccaccccacttctctgagc

SEQ ID NO: 43906 - DNA, 20 bp, synthetic construct
  misc_feature 1..20: note = Description of Artificial Sequence: Synthetic oligonucleotide
  misc_feature 1..20: note = Target: SCN10A; (-) strand; PAM type: YTN; PAM sequence: TTC
  source 1..20: mol_type = other DNA
tttccaccccacttctctga

SEQ ID NO: 43907 - DNA, 20 bp, synthetic construct
  misc_feature 1..20: note = Description of Artificial Sequence: Synthetic oligonucleotide
  misc_feature 1..20: note = Target: SCN10A; (-) strand; PAM type: YTN; PAM sequence: CTA
  source 1..20: mol_type = other DNA
ttctttccaccccacttctc

SEQ ID NO: 43908 - DNA, 20 bp, synthetic construct
  misc_feature 1..20: note = Description of Artificial Sequence: Synthetic oligonucleotide
  misc_feature 1..20: note = Target: SCN10A; (-) strand; PAM type: YTN; PAM sequence: TTA
  source 1..20: mol_type = other DNA
gaccccacccaaaccactat

SEQ ID NO: 43909 - DNA, 20 bp, synthetic construct
  misc_feature 1..20: note = Description of Artificial Sequence: Synthetic oligonucleotide
  misc_feature 1..20: note = Target: SCN10A; (-) strand; PAM type: YTN; PAM sequence: TTC
  source 1..20: mol_type = other DNA
aaatgggaattagaccccac

SEQ ID NO: 43910 - DNA, 20 bp, synthetic construct
  misc_feature 1..20: note = Description of Artificial Sequence: Synthetic oligonucleotide
  misc_feature 1..20: note = Target: SCN10A; (-) strand; PAM type: YTN; PAM sequence: CTC
  source 1..20: mol_type = other DNA
acaaaaaatcagggttcaaa

SEQ ID NO: 43911 - DNA, 20 bp, synthetic construct
  misc_feature 1..20: note = Description of Artificial Sequence: Synthetic oligonucleotide
  misc_feature 1..20: note = Target: SCN10A; (-) strand; PAM type: YTN; PAM sequence: CTA
  source 1..20: mol_type = other DNA
acccaagctcacaaaaaatc

SEQ ID NO: 43912 - DNA, 20 bp, synthetic construct
  misc_feature 1..20: note = Description of Artificial Sequence: Synthetic oligonucleotide
  misc_feature 1..20: note = Target: SCN10A; (-) strand; PAM type: YTN; PAM sequence: CTA
  source 1..20: mol_type = other DNA
gccaggcactaacccaagct

SEQ ID NO: 43913 - DNA, 20 bp, synthetic construct
  misc_feature 1..20: note = Description of Artificial Sequence: Synthetic oligonucleotide
  misc_feature 1..20: note = Target: SCN10A; (-) strand; PAM type: YTN; PAM sequence: CTG
  source 1..20: mol_type = other DNA
gactagccaggcactaaccc

SEQ ID NO: 43914 - DNA, 20 bp, synthetic construct
  misc_feature 1..20: note = Description of Artificial Sequence: Synthetic oligonucleotide
  misc_feature 1..20: note = Target: SCN10A; (-) strand; PAM type: YTN; PAM sequence: TTA
  source 1..20: mol_type = other DNA
caaagggtgaaagtaccctg

SEQ ID NO: 43915 - DNA, 20 bp, synthetic construct
  misc_feature 1..20: note = Description of Artificial Sequence: Synthetic oligonucleotide
  misc_feature 1..20: note = Target: SCN10A; (-) strand; PAM type: YTN; PAM sequence: TTT
  source 1..20: mol_type = other DNA
acaaagggtgaaagtaccct

SEQ ID NO: 43916 - DNA, 20 bp, synthetic construct
  misc_feature 1..20: note = Description of Artificial Sequence: Synthetic oligonucleotide
  misc_feature 1..20: note = Target: SCN10A; (-) strand; PAM type: YTN; PAM sequence: TTT
  source 1..20: mol_type = other DNA
tacaaagggtgaaagtaccc

SEQ ID NO: 43917 - DNA, 20 bp, synthetic construct
  misc_feature 1..20: note = Description of Artificial Sequence: Synthetic oligonucleotide
  misc_feature 1..20: note = Target: SCN10A; (-) strand; PAM type: YTN; PAM sequence: TTC
  source 1..20: mol_type = other DNA
attttacaaagggtgaaagt

SEQ ID NO: 43918 - DNA, 20 bp, synthetic construct
  misc_feature 1..20: note = Description of Artificial Sequence: Synthetic oligonucleotide
  misc_feature 1..20: note = Target: SCN10A; (-) strand; PAM type: YTN; PAM sequence: TTT
  source 1..20: mol_type = other DNA
cattttacaaagggtgaaag

SEQ ID NO: 43919 - DNA, 20 bp, synthetic construct
  misc_feature 1..20: note = Description of Artificial Sequence: Synthetic oligonucleotide
  misc_feature 1..20: note = Target: SCN10A; (-) strand; PAM type: YTN; PAM sequence: TTT
  source 1..20: mol_type = other DNA
tcattttacaaagggtgaaa

SEQ ID NO: 43920 - DNA, 20 bp, synthetic construct
  misc_feature 1..20: note = Description of Artificial Sequence: Synthetic oligonucleotide
  misc_feature 1..20: note = Target: SCN10A; (-) strand; PAM type: YTN; PAM sequence: TTT
  source 1..20: mol_type = other DNA
ttcattttacaaagggtgaa

SEQ ID NO: 43921 - DNA, 20 bp, synthetic construct
  misc_feature 1..20: note = Description of Artificial Sequence: Synthetic oligonucleotide
  misc_feature 1..20: note = Target: SCN10A; (-) strand; PAM type: YTN; PAM sequence: CTT
  source 1..20: mol_type = other DNA
tttcattttacaaagggtga

SEQ ID NO: 43922 - DNA, 20 bp, synthetic construct
  misc_feature 1..20: note = Description of Artificial Sequence: Synthetic oligonucleotide
  misc_feature 1..20: note = Target: SCN10A; (-) strand; PAM type: YTN; PAM sequence: CTG
  source 1..20: mol_type = other DNA
actttttcattttacaaagg

SEQ ID NO: 43923 - DNA, 20 bp, synthetic construct
  misc_feature 1..20: note = Description of Artificial Sequence: Synthetic oligonucleotide
  misc_feature 1..20: note = Target: SCN10A; (-) strand; PAM type: YTN; PAM sequence: TTA
  source 1..20: mol_type = other DNA
gtctgactttttcattttac

SEQ ID NO: 43924 - DNA, 20 bp, synthetic construct
  misc_feature 1..20: note = Description of Artificial Sequence: Synthetic oligonucleotide
  misc_feature 1..20: note = Target: SCN10A; (-) strand; PAM type: YTN; PAM sequence: CTT
  source 1..20: mol_type = other DNA
agtctgactttttcatttta

SEQ ID NO: 43925 - DNA, 20 bp, synthetic construct
  misc_feature 1..20: note = Description of Artificial Sequence: Synthetic oligonucleotide
  misc_feature 1..20: note = Target: SCN10A; (-) strand; PAM type: YTN; PAM sequence: CTC
  source 1..20: mol_type = other DNA
ttagtctgactttttcattt

SEQ ID NO: 43926 - DNA, 20 bp, synthetic construct
  misc_feature 1..20: note = Description of Artificial Sequence: Synthetic oligonucleotide
  misc_feature 1..20: note = Target: SCN10A; (-) strand; PAM type: YTN; PAM sequence: TTC
  source 1..20: mol_type = other DNA
tcttagtctgactttttcat

SEQ ID NO: 43927 - DNA, 20 bp, synthetic construct
  misc_feature 1..20: note = Description of Artificial Sequence: Synthetic oligonucleotide
  misc_feature 1..20: note = Target: SCN10A; (-) strand; PAM type: YTN; PAM sequence: TTG
  source 1..20: mol_type = other DNA
gaattctcttagtctgactt

SEQ ID NO: 43928 - DNA, 20 bp, synthetic construct
  misc_feature 1..20: note = Description of Artificial Sequence: Synthetic oligonucleotide
  misc_feature 1..20: note = Target: SCN10A; (-) strand; PAM type: YTN; PAM sequence: TTT
  source 1..20: mol_type = other DNA
ggaattctcttagtctgact

SEQ ID NO: 43929 - DNA, 20 bp, synthetic construct
  misc_feature 1..20: note = Description of Artificial Sequence: Synthetic oligonucleotide
  misc_feature 1..20: note = Target: SCN10A; (-) strand; PAM type: YTN; PAM sequence: CTT
  source 1..20: mol_type = other DNA
tggaattctcttagtctgac

SEQ ID NO: 43930 - DNA, 20 bp, synthetic construct
  misc_feature 1..20: note = Description of Artificial Sequence: Synthetic oligonucleotide
  misc_feature 1..20: note = Target: SCN10A; (-) strand; PAM type: YTN; PAM sequence: CTA
  source 1..20: mol_type = other DNA
tcagaactttggaattctct

SEQ ID NO: 43931 - DNA, 20 bp, synthetic construct
  misc_feature 1..20: note = Description of Artificial Sequence: Synthetic oligonucleotide
  misc_feature 1..20: note = Target: SCN10A; (-) strand; PAM type: YTN; PAM sequence: CTG
  source 1..20: mol_type = other DNA
cagagctatcagaactttgg

SEQ ID NO: 43932 - DNA, 20 bp, synthetic construct
  misc_feature 1..20: note = Description of Artificial Sequence: Synthetic oligonucleotide
  misc_feature 1..20: note = Target: SCN10A; (-) strand; PAM type: YTN; PAM sequence: TTG
  source 1..20: mol_type = other DNA
aagaactgcagagctatcag

SEQ ID NO: 43933 - DNA, 20 bp, synthetic construct
  misc_feature 1..20: note = Description of Artificial Sequence: Synthetic oligonucleotide
  misc_feature 1..20: note = Target: SCN10A; (-) strand; PAM type: YTN; PAM sequence: TTT
  source 1..20: mol_type = other DNA
gaagaactgcagagctatca

SEQ ID NO: 43934 - DNA, 20 bp, synthetic construct
  misc_feature 1..20: note = Description of Artificial Sequence: Synthetic oligonucleotide
  misc_feature 1..20: note = Target: SCN10A; (-) strand; PAM type: YTN; PAM sequence: TTT
  source 1..20: mol_type = other DNA
tgaagaactgcagagctatc

SEQ ID NO: 43935 - DNA, 20 bp, synthetic construct
  misc_feature 1..20: note = Description of Artificial Sequence: Synthetic oligonucleotide
  misc_feature 1..20: note = Target: SCN10A; (-) strand; PAM type: YTN; PAM sequence: TTT
  source 1..20: mol_type = other DNA
ttgaagaactgcagagctat

SEQ ID NO: 43936 - DNA, 20 bp, synthetic construct
  misc_feature 1..20: note = Description of Artificial Sequence: Synthetic oligonucleotide
  misc_feature 1..20: note = Target: SCN10A; (-) strand; PAM type: YTN; PAM sequence: CTT
  source 1..20: mol_type = other DNA
tttgaagaactgcagagcta

SEQ ID NO: 43937 - DNA, 20 bp, synthetic construct
  misc_feature 1..20: note = Description of Artificial Sequence: Synthetic oligonucleotide
  misc_feature 1..20: note = Target: SCN10A; (-) strand; PAM type: YTN; PAM sequence: CTC
  source 1..20: mol_type = other DNA
atggacccataccagaaact

SEQ ID NO: 43938 - DNA, 20 bp, synthetic construct
  misc_feature 1..20: note = Description of Artificial Sequence: Synthetic oligonucleotide
  misc_feature 1..20: note = Target: SCN10A; (-) strand; PAM type: YTN; PAM sequence: CTA
  source 1..20: mol_type = other DNA
gatctcatggacccatacca

SEQ ID NO: 43939 - DNA, 20 bp, synthetic construct
  misc_feature 1..20: note = Description of Artificial Sequence: Synthetic oligonucleotide
  misc_feature 1..20: note = Target: SCN10A; (-) strand; PAM type: YTN; PAM sequence: TTG
  source 1..20: mol_type = other DNA
aagctagatctcatggaccc

SEQ ID NO: 43940 - DNA, 20 bp, synthetic construct
  misc_feature 1..20: note = Description of Artificial Sequence: Synthetic oligonucleotide
  misc_feature 1..20: note = Target: SCN10A; (-) strand; PAM type: YTN; PAM sequence: CTA
  source 1..20: mol_type = other DNA
ttgaagctagatctcatgga

SEQ ID NO: 43941 - DNA, 20 bp, synthetic construct
  misc_feature 1..20: note = Description of Artificial Sequence: Synthetic oligonucleotide
  misc_feature 1..20: note = Target: SCN10A; (-) strand; PAM type: YTN; PAM sequence: CTC
  source 1..20: mol_type = other DNA
agatatctattgaagctaga

SEQ ID NO: 43942 - DNA, 20 bp, synthetic construct
  misc_feature 1..20: note = Description of Artificial Sequence: Synthetic oligonucleotide
  misc_feature 1..20: note = Target: SCN10A; (-) strand; PAM type: YTN; PAM sequence: TTA
  source 1..20: mol_type = other DNA
tatctcagatatctattgaa

SEQ ID NO: 43943 - DNA, 20 bp, synthetic construct
  misc_feature 1..20: note = Description of Artificial Sequence: Synthetic oligonucleotide
  misc_feature 1..20: note = Target: SCN10A; (-) strand; PAM type: YTN; PAM sequence: CTC
  source 1..20: mol_type = other DNA
acaagtcagtcattatatct

SEQ ID NO: 43944 - DNA, 20 bp, synthetic construct
  misc_feature 1..20: note = Description of Artificial Sequence: Synthetic oligonucleotide
  misc_feature 1..20: note = Target: SCN10A; (-) strand; PAM type: YTN; PAM sequence: CTG
  source 1..20: mol_type = other DNA
acagaccaaaaggggctcac

SEQ ID NO: 43945 - DNA, 20 bp, synthetic construct
  misc_feature 1..20: note = Description of Artificial Sequence: Synthetic oligonucleotide
  misc_feature 1..20: note = Target: SCN10A; (-) strand; PAM type: YTN; PAM sequence: TTA
  source 1..20: mol_type = other DNA
aagaaaactgacagaccaaa

SEQ ID NO: 43946 - DNA, 20 bp, synthetic construct
  misc_feature 1..20: note = Description of Artificial Sequence: Synthetic oligonucleotide
  misc_feature 1..20: note = Target: SCN10A; (-) strand; PAM type: YTN; PAM sequence: CTT
  source 1..20: mol_type = other DNA
aaagaaaactgacagaccaa

SEQ ID NO: 43947 - DNA, 20 bp, synthetic construct
  misc_feature 1..20: note = Description of Artificial Sequence: Synthetic oligonucleotide
  misc_feature 1..20: note = Target: SCN10A; (-) strand; PAM type: YTN; PAM sequence: TTG
  source 1..20: mol_type = other DNA
gaccaccacttaaagaaaac

SEQ ID NO: 43948 - DNA, 20 bp, synthetic construct
  misc_feature 1..20: note = Description of Artificial Sequence: Synthetic oligonucleotide
  misc_feature 1..20: note = Target: SCN10A; (-) strand; PAM type: YTN; PAM sequence: TTT
  source 1..20: mol_type = other DNA
ggaccaccacttaaagaaaa

SEQ ID NO: 43949 - DNA, 20 bp, synthetic construct
  misc_feature 1..20: note = Description of Artificial Sequence: Synthetic oligonucleotide
  misc_feature 1..20: note = Target: SCN10A; (-) strand; PAM type: YTN; PAM sequence: CTT
  source 1..20: mol_type = other DNA
tggaccaccacttaaagaaa

SEQ ID NO: 43950 - DNA, 20 bp, synthetic construct
  misc_feature 1..20: note = Description of Artificial Sequence: Synthetic oligonucleotide
  misc_feature 1..20: note = Target: SCN10A; (-) strand; PAM type: YTN; PAM sequence: TTG
  source 1..20: mol_type = other DNA
cagtctttggaccaccactt

SEQ ID NO: 43951 - DNA, 20 bp, synthetic construct
  misc_feature 1..20: note = Description of Artificial Sequence: Synthetic oligonucleotide
  misc_feature 1..20: note = Target: SCN10A; (-) strand; PAM type: YTN; PAM sequence: TTT
  source 1..20: mol_type = other DNA
gcagtctttggaccaccact

SEQ ID NO: 43952 - DNA, 20 bp, synthetic construct
  misc_feature 1..20: note = Description of Artificial Sequence: Synthetic oligonucleotide
  misc_feature 1..20: note = Target: SCN10A; (-) strand; PAM type: YTN; PAM sequence: CTT
  source 1..20: mol_type = other DNA
tgcagtctttggaccaccac

SEQ ID NO: 43953 - DNA, 20 bp, synthetic construct
  misc_feature 1..20: note = Description of Artificial Sequence: Synthetic oligonucleotide
  misc_feature 1..20: note = Target: SCN10A; (-) strand; PAM type: YTN; PAM sequence: CTG
  source 1..20: mol_type = other DNA
tcctttgcagtctttggacc

SEQ ID NO: 43954 - DNA, 20 bp, synthetic construct
  misc_feature 1..20: note = Description of Artificial Sequence: Synthetic oligonucleotide
  misc_feature 1..20: note = Target: SCN10A; (-) strand; PAM type: YTN; PAM sequence: TTC
  source 1..20: mol_type = other DNA
tgtcctttgcagtctttgga

SEQ ID NO: 43955 - DNA, 20 bp, synthetic construct
  misc_feature 1..20: note = Description of Artificial Sequence: Synthetic oligonucleotide
  misc_feature 1..20: note = Target: SCN10A; (-) strand; PAM type: YTN; PAM sequence: TTT
  source 1..20: mol_type = other DNA
ctgtcctttgcagtctttgg

SEQ ID NO: 43956 - DNA, 20 bp, synthetic construct
  misc_feature 1..20: note = Description of Artificial Sequence: Synthetic oligonucleotide
  misc_feature 1..20: note = Target: SCN10A; (-) strand; PAM type: YTN; PAM sequence: TTC
  source 1..20: mol_type = other DNA
atgtaagtttctgtcctttg

SEQ ID NO: 43957 - DNA, 20 bp, synthetic construct
  misc_feature 1..20: note = Description of Artificial Sequence: Synthetic oligonucleotide
  misc_feature 1..20: note = Target: SCN10A; (-) strand; PAM type: YTN; PAM sequence: TTT
  source 1..20: mol_type = other DNA
catgtaagtttctgtccttt

SEQ ID NO: 43958 - DNA, 20 bp, synthetic construct
  misc_feature 1..20: note = Description of Artificial Sequence: Synthetic oligonucleotide
  misc_feature 1..20: note = Target: SCN10A; (-) strand; PAM type: YTN; PAM sequence: TTT
  source 1..20: mol_type = other DNA
tcatgtaagtttctgtcctt

SEQ ID NO: 43959 - DNA, 20 bp, synthetic construct
  misc_feature 1..20: note = Description of Artificial Sequence: Synthetic oligonucleotide
  misc_feature 1..20: note = Target: SCN10A; (-) strand; PAM type: YTN; PAM sequence: TTT
  source 1..20: mol_type = other DNA
ttcatgtaagtttctgtcct

SEQ ID NO: 43960 - DNA, 20 bp, synthetic construct
  misc_feature 1..20: note = Description of Artificial Sequence: Synthetic oligonucleotide
  misc_feature 1..20: note = Target: SCN10A; (-) strand; PAM type: YTN; PAM sequence: TTT
  source 1..20: mol_type = other DNA
tttcatgtaagtttctgtcc

SEQ ID NO: 43961 - DNA, 20 bp, synthetic construct
  misc_feature 1..20: note = Description of Artificial Sequence: Synthetic oligonucleotide
  misc_feature 1..20: note = Target: SCN10A; (-) strand; PAM type: YTN; PAM sequence: CTT
  source 1..20: mol_type = other DNA
ttttcatgtaagtttctgtc

SEQ ID NO: 43962 - DNA, 20 bp, synthetic construct
  misc_feature 1..20: note = Description of Artificial Sequence: Synthetic oligonucleotide
  misc_feature 1..20: note = Target: SCN10A; (-) strand; PAM type: YTN; PAM sequence: CTA
  source 1..20: mol_type = other DNA
gcaggggaacttttttcatg

SEQ ID NO: 43963 - DNA, 20 bp, synthetic construct
  misc_feature 1..20: note = Description of Artificial Sequence: Synthetic oligonucleotide
  misc_feature 1..20: note = Target: SCN10A; (-) strand; PAM type: YTN; PAM sequence: TTC
  source 1..20: mol_type = other DNA
ctagcaggggaacttttttc

SEQ ID NO: 43964 - DNA, 20 bp, synthetic construct
  misc_feature 1..20: note = Description of Artificial Sequence: Synthetic oligonucleotide
  misc_feature 1..20: note = Target: SCN10A; (-) strand; PAM type: YTN; PAM sequence: TTC
  source 1..20: mol_type = other DNA
aaagttcctagcaggggaac

SEQ ID NO: 43965 - DNA, 20 bp, synthetic construct
  misc_feature 1..20: note = Description of Artificial Sequence: Synthetic oligonucleotide
  misc_feature 1..20: note = Target: SCN10A; (-) strand; PAM type: YTN; PAM sequence: CTT
  source 1..20: mol_type = other DNA
caaagttcctagcaggggaa

SEQ ID NO: 43966 - DNA, 20 bp, synthetic construct
  misc_feature 1..20: note = Description of Artificial Sequence: Synthetic oligonucleotide
  misc_feature 1..20: note = Target: SCN10A; (-) strand; PAM type: YTN; PAM sequence: CTG
  source 1..20: mol_type = other DNA
gcaccttcaaagttcctagc

SEQ ID NO: 43967 - DNA, 20 bp, synthetic construct
  misc_feature 1..20: note = Description of Artificial Sequence: Synthetic oligonucleotide
  misc_feature 1..20: note = Target: SCN10A; (-) strand; PAM type: YTN; PAM sequence: CTC
  source 1..20: mol_type = other DNA
cctggcaccttcaaagttcc

SEQ ID NO: 43968 - DNA, 20 bp, synthetic construct
  misc_feature 1..20: note = Description of Artificial Sequence: Synthetic oligonucleotide
  misc_feature 1..20: note = Target: SCN10A; (-) strand; PAM type: YTN; PAM sequence: CTA
  source 1..20: mol_type = other DNA
tgacatctccctggcacctt

SEQ ID NO: 43969 - DNA, 20 bp, synthetic construct
  misc_feature 1..20: note = Description of Artificial Sequence: Synthetic oligonucleotide
  misc_feature 1..20: note = Target: SCN10A; (-) strand; PAM type: YTN; PAM sequence: CTC
  source 1..20: mol_type = other DNA
acaggacagggtcatagccc

SEQ ID NO: 43970 - DNA, 20 bp, synthetic construct
  misc_feature 1..20: note = Description of Artificial Sequence: Synthetic oligonucleotide
  misc_feature 1..20: note = Target: SCN10A; (-) strand; PAM type: YTN; PAM sequence: CTA
  source 1..20: mol_type = other DNA
agatctcacaggacagggtc

SEQ ID NO: 43971 - DNA, 20 bp, synthetic construct
  misc_feature 1..20: note = Description of Artificial Sequence: Synthetic oligonucleotide
  misc_feature 1..20: note = Target: SCN10A; (-) strand; PAM type: YTN; PAM sequence: CTG
  source 1..20: mol_type = other DNA
tggtgtggctaagatctcac

SEQ ID NO: 43972 - DNA, 20 bp, synthetic construct
  misc_feature 1..20: note = Description of Artificial Sequence: Synthetic oligonucleotide
  misc_feature 1..20: note = Target: SCN10A; (-) strand; PAM type: YTN; PAM sequence: TTC
  source 1..20: mol_type = other DNA
agcccaccatctgtggtgtg

SEQ ID NO: 43973 - DNA, 20 bp, synthetic construct
  misc_feature 1..20: note = Description of Artificial Sequence: Synthetic oligonucleotide
  misc_feature 1..20: note = Target: SCN10A; (-) strand; PAM type: YTN; PAM sequence: CTG
  source 1..20: mol_type = other DNA
aattcagcccaccatctgtg

SEQ ID NO: 43974 - DNA, 20 bp, synthetic construct
  misc_feature 1..20: note = Description of Artificial Sequence: Synthetic oligonucleotide
  misc_feature 1..20: note = Target: SCN10A; (-) strand; PAM type: YTN; PAM sequence: CTG
  source 1..20: mol_type = other DNA
agcctgaattcagcccacca

SEQ ID NO: 43975 - DNA, 20 bp, synthetic construct
  misc_feature 1..20: note = Description of Artificial Sequence: Synthetic oligonucleotide
  misc_feature 1..20: note = Target: SCN10A; (-) strand; PAM type: YTN; PAM sequence: CTG
  source 1..20: mol_type = other DNA
ccaggataagctgagcctga

SEQ ID NO: 43976 - DNA, 20 bp, synthetic construct
  misc_feature 1..20: note = Description of Artificial Sequence: Synthetic oligonucleotide
  misc_feature 1..20: note = Target: SCN10A; (-) strand; PAM type: YTN; PAM sequence: CTA
  source 1..20: mol_type = other DNA
actgccaggataagctgagc

SEQ ID NO: 43977 - DNA, 20 bp, synthetic construct
  misc_feature 1..20: note = Description of Artificial Sequence: Synthetic oligonucleotide
  misc_feature 1..20: note = Target: SCN10A; (-) strand; PAM type: YTN; PAM sequence: CTG
  source 1..20: mol_type = other DNA
tgtgcatcccacctaactgc

SEQ ID NO: 43978 - DNA, 20 bp, synthetic construct
  misc_feature 1..20: note = Description of Artificial Sequence: Synthetic oligonucleotide
  misc_feature 1..20: note = Target: SCN10A; (-) strand; PAM type: YTN; PAM sequence: CTC
  source 1..20: mol_type = other DNA
ctgtgtgcatcccacctaac

SEQ ID NO: 43979 - DNA, 20 bp, synthetic construct
  misc_feature 1..20: note = Description of Artificial Sequence: Synthetic oligonucleotide
  misc_feature 1..20: note = Target: SCN10A; (-) strand; PAM type: YTN; PAM sequence: CTG
  source 1..20: mol_type = other DNA
aagctcctgtgtgcatccca

SEQ ID NO: 43980 - DNA, 20 bp, synthetic construct
  misc_feature 1..20: note = Description of Artificial Sequence: Synthetic oligonucleotide
  misc_feature 1..20: note = Target: SCN10A; (-) strand; PAM type: YTN; PAM sequence: TTC
  source 1..20: mol_type = other DNA
tgaagctcctgtgtgcatcc

SEQ ID NO: 43981 - DNA, 20 bp, synthetic construct
  misc_feature 1..20: note = Description of Artificial Sequence: Synthetic oligonucleotide
  misc_feature 1..20: note = Target: SCN10A; (-) strand; PAM type: YTN; PAM sequence: TTT
  source 1..20: mol_type = other DNA
ctgaagctcctgtgtgcatc

SEQ ID NO: 43982 - DNA, 20 bp, synthetic construct
  misc_feature 1..20: note = Description of Artificial Sequence: Synthetic oligonucleotide
  misc_feature 1..20: note = Target: SCN10A; (-) strand; PAM type: YTN; PAM sequence: TTT
  source 1..20: mol_type = other DNA
tctgaagctcctgtgtgcat

SEQ ID NO: 43983 - DNA, 20 bp, synthetic construct
  misc_feature 1..20: note = Description of Artificial Sequence: Synthetic oligonucleotide
  misc_feature 1..20: note = Target: SCN10A; (-) strand; PAM type: YTN; PAM sequence: CTT
  source 1..20: mol_type = other DNA
ttctgaagctcctgtgtgca

SEQ ID NO: 43984 - DNA, 20 bp, synthetic construct
  misc_feature 1..20: note = Description of Artificial Sequence: Synthetic oligonucleotide
  misc_feature 1..20: note = Target: SCN10A; (-) strand; PAM type: YTN; PAM sequence: TTC
  source 1..20: mol_type = other DNA
ttttctgaagctcctgtgtg

SEQ ID NO: 43985 - DNA, 20 bp, synthetic construct
  misc_feature 1..20: note = Description of Artificial Sequence: Synthetic oligonucleotide
  misc_feature 1..20: note = Target: SCN10A; (-) strand; PAM type: YTN; PAM sequence: CTT
  source 1..20: mol_type = other DNA
cttttctgaagctcctgtgt

SEQ ID NO: 43986 - DNA, 20 bp, synthetic construct
  misc_feature 1..20: note = Description of Artificial Sequence: Synthetic oligonucleotide
  misc_feature 1..20: note = Target: SCN10A; (-) strand; PAM type: YTN; PAM sequence: CTC
  source 1..20: mol_type = other DNA
aagtataaagcccttctttt

SEQ ID NO: 43987 - DNA, 20 bp, synthetic construct
  misc_feature 1..20: note = Description of Artificial Sequence: Synthetic oligonucleotide
  misc_feature 1..20: note = Target: SCN10A; (-) strand; PAM type: YTN; PAM sequence: CTG
  source 1..20: mol_type = other DNA
ccactcaagtataaagccct

SEQ ID NO: 43988 - DNA, 20 bp, synthetic construct
  misc_feature 1..20: note = Description of Artificial Sequence: Synthetic oligonucleotide
  misc_feature 1..20: note = Target: SCN10A; (-) strand; PAM type: YTN; PAM sequence: CTC
  source 1..20: mol_type = other DNA
tgccactcaagtataaagcc

SEQ ID NO: 43989 - DNA, 20 bp, synthetic construct
  misc_feature 1..20: note = Description of Artificial Sequence: Synthetic oligonucleotide
  misc_feature 1..20: note = Target: SCN10A; (-) strand; PAM type: YTN; PAM sequence: TTG
  source 1..20: mol_type = other DNA
gggctctgccactcaagtat

SEQ ID NO: 43990 - DNA, 20 bp, synthetic construct
  misc_feature 1..20: note = Description of Artificial Sequence: Synthetic oligonucleotide
  misc_feature 1..20: note = Target: SCN10A; (-) strand; PAM type: YTN; PAM sequence: CTT
  source 1..20: mol_type = other DNA
ggggctctgccactcaagta

SEQ ID NO: 43991 - DNA, 20 bp, synthetic construct
  misc_feature 1..20: note = Description of Artificial Sequence: Synthetic oligonucleotide
  misc_feature 1..20: note = Target: SCN10A; (-) strand; PAM type: YTN; PAM sequence: TTG
  source 1..20: mol_type = other DNA
cttggggctctgccactcaa

SEQ ID NO: 43992 - DNA, 20 bp, synthetic construct
  misc_feature 1..20: note = Description of Artificial Sequence: Synthetic oligonucleotide
  misc_feature 1..20: note = Target: SCN10A; (-) strand; PAM type: YTN; PAM sequence: CTC
  source 1..20: mol_type = other DNA
atccaaagaatggacattgc

SEQ ID NO: 43993 - DNA, 20 bp, synthetic construct
  misc_feature 1..20: note = Description of Artificial Sequence: Synthetic oligonucleotide
  misc_feature 1..20: note = Target: SCN10A; (-) strand; PAM type: YTN; PAM sequence: CTG
  source 1..20: mol_type = other DNA
gtgcaataagccactcatcc

SEQ ID NO: 43994 - DNA, 20 bp, synthetic construct
  misc_feature 1..20: note = Description of Artificial Sequence: Synthetic oligonucleotide
  misc_feature 1..20: note = Target: SCN10A; (-) strand; PAM type: YTN; PAM sequence: TTG
  source 1..20: mol_type = other DNA
tcctggtgcaataagccact

SEQ ID NO: 43995 - DNA, 20 bp, synthetic construct
  misc_feature 1..20: note = Description of Artificial Sequence: Synthetic oligonucleotide
  misc_feature 1..20: note = Target: SCN10A; (-) strand; PAM type: YTN; PAM sequence: TTT
  source 1..20: mol_type = other DNA
gtcctggtgcaataagccac

SEQ ID NO: 43996 - DNA, 20 bp, synthetic construct
  misc_feature 1..20: note = Description of Artificial Sequence: Synthetic oligonucleotide
  misc_feature 1..20: note = Target: SCN10A; (-) strand; PAM type: YTN; PAM sequence: CTT
  source 1..20: mol_type = other DNA
tgtcctggtgcaataagcca

SEQ ID NO: 43997 - DNA, 20 bp, synthetic construct
  misc_feature 1..20: note = Description of Artificial Sequence: Synthetic oligonucleotide
  misc_feature 1..20: note = Target: SCN10A; (-) strand; PAM type: YTN; PAM sequence: TTC
  source 1..20: mol_type = other DNA
tttgtcctggtgcaataagc

SEQ ID NO: 43998 - DNA, 20 bp, synthetic construct
  misc_feature 1..20: note = Description of Artificial Sequence: Synthetic oligonucleotide
  misc_feature 1..20: note = Target: SCN10A; (-) strand; PAM type: YTN; PAM sequence: TTC
  source 1..20: mol_type = other DNA
cggttctttgtcctggtgca

SEQ ID NO: 43999 - DNA, 20 bp, synthetic construct
  misc_feature 1..20: note = Description of Artificial Sequence: Synthetic oligonucleotide
  misc_feature 1..20: note = Target: SCN10A; (-) strand; PAM type: YTN; PAM sequence: TTC
  source 1..20: mol_type = other DNA
cattccggttctttgtcctg

SEQ ID NO: 44000 - DNA, 20 bp, synthetic construct
  misc_feature 1..20: note = Description of Artificial Sequence: Synthetic oligonucleotide
  misc_feature 1..20: note = Target: SCN10A; (-) strand; PAM type: YTN; PAM sequence: CTT
  source 1..20: mol_type = other DNA
ccattccggttctttgtcct

SEQ ID NO: 44001 - DNA, 20 bp, synthetic construct
  misc_feature 1..20: note = Description of Artificial Sequence: Synthetic oligonucleotide
  misc_feature 1..20: note = Target: SCN10A; (-) strand; PAM type: YTN; PAM sequence: TTG
  source 1..20: mol_type = other DNA
catgaatgaaggaagagggt

SEQ ID NO: 44002 - DNA, 20 bp, synthetic construct
  misc_feature 1..20: note = Description of Artificial Sequence: Synthetic oligonucleotide
  misc_feature 1..20: note = Target: SCN10A; (-) strand; PAM type: YTN; PAM sequence: CTT
  source 1..20: mol_type = other DNA
gcatgaatgaaggaagaggg

SEQ ID NO: 44003 - DNA, 20 bp, synthetic construct
  misc_feature 1..20: note = Description of Artificial Sequence: Synthetic oligonucleotide
  misc_feature 1..20: note = Target: SCN10A; (-) strand; PAM type: YTN; PAM sequence: CTG
  source 1..20: mol_type = other DNA
gagccttgcatgaatgaagg

SEQ ID NO: 44004 - DNA, 20 bp, synthetic construct
  misc_feature 1..20: note = Description of Artificial Sequence: Synthetic oligonucleotide
  misc_feature 1..20: note = Target: SCN10A; (-) strand; PAM type: YTN; PAM sequence: CTG
  source 1..20: mol_type = other DNA
atgtctggagccttgcatga

SEQ ID NO: 44005 - DNA, 20 bp, synthetic construct
  misc_feature 1..20: note = Description of Artificial Sequence: Synthetic oligonucleotide
  misc_feature 1..20: note = Target: SCN10A; (-) strand; PAM type: YTN; PAM sequence: CTG
  source 1..20: mol_type = other DNA
ctgatgtctggagccttgca

SEQ ID NO: 44006 - DNA, 20 bp, synthetic construct
  misc_feature 1..20: note = Description of Artificial Sequence: Synthetic oligonucleotide
  misc_feature 1..20: note = Target: SCN10A; (-) strand; PAM type: YTN; PAM sequence: CTC
  source 1..20: mol_type = other DNA
acctgctgatgtctggagcc

SEQ ID NO: 44007 - DNA, 20 bp, synthetic construct
  misc_feature 1..20: note = Description of Artificial Sequence: Synthetic oligonucleotide
  misc_feature 1..20: note = Target: SCN10A; (-) strand; PAM type: YTN; PAM sequence: CTG
  source 1..20: mol_type = other DNA
ggtctcacctgctgatgtct

SEQ ID NO: 44008 - DNA, 20 bp, synthetic construct
  misc_feature 1..20: note = Description of Artificial Sequence: Synthetic oligonucleotide
  misc_feature 1..20: note = Target: SCN10A; (-) strand; PAM type: YTN; PAM sequence: CTC
  source 1..20: mol_type = other DNA
atgcacccaggcagctgggt

SEQ ID NO: 44009 - DNA, 20 bp, synthetic construct
  misc_feature 1..20: note = Description of Artificial Sequence: Synthetic oligonucleotide
  misc_feature 1..20: note = Target: SCN10A; (-) strand; PAM type: YTN; PAM sequence: CTA
  source 1..20: mol_type = other DNA
ccctcatgcacccaggcagc

SEQ ID NO: 44010 - DNA, 20 bp, synthetic construct
  misc_feature 1..20: note = Description of Artificial Sequence: Synthetic oligonucleotide
  misc_feature 1..20: note = Target: SCN10A; (-) strand; PAM type: YTN; PAM sequence: CTC
  source 1..20: mol_type = other DNA
cctaccctcatgcacccagg

SEQ ID NO: 44011 - DNA, 20 bp, synthetic construct
  misc_feature 1..20: note = Description of Artificial Sequence: Synthetic oligonucleotide
  misc_feature 1..20: note = Target: SCN10A; (-) strand; PAM type: YTN; PAM sequence: CTG
  source 1..20: mol_type = other DNA
gccccaaacctccctaccct

SEQ ID NO: 44012 - DNA, 20 bp, synthetic construct
  misc_feature 1..20: note = Description of Artificial Sequence: Synthetic oligonucleotide
  misc_feature 1..20: note = Target: SCN10A; (-) strand; PAM type: YTN; PAM sequence: TTC
  source 1..20: mol_type = other DNA
agcatggaactggccccaaa

SEQ ID NO: 44013 - DNA, 20 bp, synthetic construct
  misc_feature 1..20: note = Description of Artificial Sequence: Synthetic oligonucleotide
  misc_feature 1..20: note = Target: SCN10A; (-) strand; PAM type: YTN; PAM sequence: CTG
  source 1..20: mol_type = other DNA
aatagggttcagcatggaac

SEQ ID NO: 44014 - DNA, 20 bp, synthetic construct
  misc_feature 1..20: note = Description of Artificial Sequence: Synthetic oligonucleotide
  misc_feature 1..20: note = Target: SCN10A; (-) strand; PAM type: YTN; PAM sequence: CTG
  source 1..20: mol_type = other DNA
agcaaaagactgaatagggt

SEQ ID NO: 44015 - DNA, 20 bp, synthetic construct
  misc_feature 1..20: note = Description of Artificial Sequence: Synthetic oligonucleotide
  misc_feature 1..20: note = Target: SCN10A; (-) strand; PAM type: YTN; PAM sequence: TTC
  source 1..20: mol_type = other DNA
ccagggggctgagcaaaaga

SEQ ID NO: 44016 - DNA, 20 bp, synthetic construct
  misc_feature 1..20: note = Description of Artificial Sequence: Synthetic oligonucleotide
  misc_feature 1..20: note = Target: SCN10A; (-) strand; PAM type: YTN; PAM sequence: CTT
  source 1..20: mol_type = other DNA
cccagggggctgagcaaaag

SEQ ID NO: 44017 - DNA, 20 bp, synthetic construct
  misc_feature 1..20: note = Description of Artificial Sequence: Synthetic oligonucleotide
  misc_feature 1..20: note = Target: SCN10A; (-) strand; PAM type: YTN; PAM sequence: TTA
  source 1..20: mol_type = other DNA
tccatgtgaggcagacttcc

SEQ ID NO: 44018 - DNA, 20 bp, synthetic construct
  misc_feature 1..20: note = Description of Artificial Sequence: Synthetic oligonucleotide
  misc_feature 1..20: note = Target: SCN10A; (-) strand; PAM type: YTN; PAM sequence: CTG
  source 1..20: mol_type = other DNA
cagattatccatgtgaggca

SEQ ID NO: 44019 - DNA, 20 bp, synthetic construct
  misc_feature 1..20: note = Description of Artificial Sequence: Synthetic oligonucleotide
  misc_feature 1..20: note = Target: SCN10A; (-) strand; PAM type: YTN; PAM sequence: CTG
  source 1..20: mol_type = other DNA
ccccagctgcagattatcca

SEQ ID NO: 44020 - DNA, 20 bp, synthetic construct
  misc_feature 1..20: note = Description of Artificial Sequence: Synthetic oligonucleotide
  misc_feature 1..20: note = Target: SCN10A; (-) strand; PAM type: YTN; PAM sequence: CTG
  source 1..20: mol_type = other DNA
tctgccccagctgcagatta

SEQ ID NO: 44021 - DNA, 20 bp, synthetic construct
  misc_feature 1..20: note = Description of Artificial Sequence: Synthetic oligonucleotide
  misc_feature 1..20: note = Target: SCN10A; (-) strand; PAM type: YTN; PAM sequence: CTG
  source 1..20: mol_type = other DNA
gagaggcacagcacctgtct

SEQ ID NO: 44022 - DNA, 20 bp, synthetic construct
  misc_feature 1..20: note = Description of Artificial Sequence: Synthetic oligonucleotide
  misc_feature 1..20: note = Target: SCN10A; (-) strand; PAM type: YTN; PAM sequence: TTG
  source 1..20: mol_type = other DNA
ctggagaggcacagcacctg

SEQ ID NO: 44023 - DNA, 20 bp, synthetic construct
  misc_feature 1..20: note = Description of Artificial Sequence: Synthetic oligonucleotide
  misc_feature 1..20: note = Target: SCN10A; (-) strand; PAM type: YTN; PAM sequence: TTT
  source 1..20: mol_type = other DNA
gctggagaggcacagcacct

SEQ ID NO: 44024 - DNA, 20 bp, synthetic construct
  misc_feature 1..20: note = Description of Artificial Sequence: Synthetic oligonucleotide
  misc_feature 1..20: note = Target: SCN10A; (-) strand; PAM type: YTN; PAM sequence: CTT
  source 1..20: mol_type = other DNA
tgctggagaggcacagcacc

SEQ ID NO: 44025 - DNA, 20 bp, synthetic construct
  misc_feature 1..20: note = Description of Artificial Sequence: Synthetic oligonucleotide
  misc_feature 1..20: note = Target: SCN10A; (-) strand; PAM type: YTN; PAM sequence: TTG
  source 1..20: mol_type = other DNA
ggtggacagactttgctgga

SEQ ID NO: 44026 - DNA, 20 bp, synthetic construct
  misc_feature 1..20: note = Description of Artificial Sequence: Synthetic oligonucleotide
  misc_feature 1..20: note = Target: SCN10A; (-) strand; PAM type: YTN; PAM sequence: CTT
  source 1..20: mol_type = other DNA
gggtggacagactttgctgg

SEQ ID NO: 44027 - DNA, 20 bp, synthetic construct
  misc_feature 1..20: note = Description of Artificial Sequence: Synthetic oligonucleotide
  misc_feature 1..20: note = Target: SCN10A; (-) strand; PAM type: YTN; PAM sequence: CTG
  source 1..20: mol_type = other DNA
agcagtgggaatggaggtgg

SEQ ID NO: 44028 - DNA, 20 bp, synthetic construct
  misc_feature 1..20: note = Description of Artificial Sequence: Synthetic oligonucleotide
  misc_feature 1..20: note = Target: SCN10A; (-) strand; PAM type: YTN; PAM sequence: CTA
  source 1..20: mol_type = other DNA
gtgggctgagcagtgggaat

SEQ ID NO: 44029 - DNA, 20 bp, synthetic construct
  misc_feature 1..20: note = Description of Artificial Sequence: Synthetic oligonucleotide
  misc_feature 1..20: note = Target: SCN10A; (-) strand; PAM type: YTN; PAM sequence: TTG
  source 1..20: mol_type = other DNA
ggaggctagtgggctgagca

SEQ ID NO: 44030 - DNA, 20 bp, synthetic construct
  misc_feature 1..20: note = Description of Artificial Sequence: Synthetic oligonucleotide
  misc_feature 1..20: note = Target: SCN10A; (-) strand; PAM type: YTN; PAM sequence: CTT
  source 1..20: mol_type = other DNA
gggaggctagtgggctgagc

SEQ ID NO: 44031 - DNA, 20 bp, synthetic construct
  misc_feature 1..20: note = Description of Artificial Sequence: Synthetic oligonucleotide
  misc_feature 1..20: note = Target: SCN10A; (-) strand; PAM type: YTN; PAM sequence: CTA
  source 1..20: mol_type = other DNA
cttgggaggctagtgggctg

SEQ ID NO: 44032 - DNA, 20 bp, synthetic construct
  misc_feature 1..20: note = Description of Artificial Sequence: Synthetic oligonucleotide
  misc_feature 1..20: note = Target: SCN10A; (-) strand; PAM type: YTN; PAM sequence: CTG
  source 1..20: mol_type = other DNA
gagactacttgggaggctag

SEQ ID NO: 44033 - DNA, 20 bp, synthetic construct
  misc_feature 1..20: note = Description of Artificial Sequence: Synthetic oligonucleotide
  misc_feature 1..20: note = Target: SCN10A; (-) strand; PAM type: YTN; PAM sequence: CTA
  source 1..20: mol_type = other DNA
gggcctggagactacttggg

SEQ ID NO: 44034 - DNA, 20 bp, synthetic construct
  misc_feature 1..20: note = Description of Artificial Sequence: Synthetic oligonucleotide
  misc_feature 1..20: note = Target: SCN10A; (-) strand; PAM type: YTN; PAM sequence: TTG
  source 1..20: mol_type = other DNA
cagtggagaatagatgcatg

SEQ ID NO: 44035 - DNA, 20 bp, synthetic construct
  misc_feature 1..20: note = Description of Artificial Sequence: Synthetic oligonucleotide
  misc_feature 1..20: note = Target: SCN10A; (-) strand; PAM type: YTN; PAM sequence: TTT
  source 1..20: mol_type = other DNA
gcagtggagaatagatgcat

SEQ ID NO: 44036 - DNA, 20 bp, synthetic construct
  misc_feature 1..20: note = Description of Artificial Sequence: Synthetic oligonucleotide
  misc_feature 1..20: note = Target: SCN10A; (-) strand; PAM type: YTN; PAM sequence: TTG
  source 1..20: mol_type = other DNA
ggagtaagagaaagacatga

SEQ ID NO: 44037 - DNA, 20 bp, synthetic construct
  misc_feature 1..20: note = Description of Artificial Sequence: Synthetic oligonucleotide
  misc_feature 1..20: note = Target: SCN10A; (-) strand; PAM type: YTN; PAM sequence: TTT
  source 1..20: mol_type = other DNA
gggagtaagagaaagacatg

SEQ ID NO: 44038 - DNA, 20 bp, synthetic construct
  misc_feature 1..20: note = Description of Artificial Sequence: Synthetic oligonucleotide
  misc_feature 1..20: note = Target: SCN10A; (-) strand; PAM type: YTN; PAM sequence: CTG
  source 1..20: mol_type = other DNA
agggtgataaagtaccagtg

SEQ ID NO: 44039 - DNA, 20 bp, synthetic construct
  misc_feature 1..20: note = Description of Artificial Sequence: Synthetic oligonucleotide
  misc_feature 1..20: note = Target: SCN10A; (-) strand; PAM type: YTN; PAM sequence: TTA
  source 1..20: mol_type = other DNA
tcctgagggtgataaagtac

SEQ ID NO: 44040 - DNA, 20 bp, synthetic construct
  misc_feature 1..20: note = Description of Artificial Sequence: Synthetic oligonucleotide
  misc_feature 1..20: note = Target: SCN10A; (-) strand; PAM type: YTN; PAM sequence: TTT
  source 1..20: mol_type = other DNA
atcctgagggtgataaagta

SEQ ID NO: 44041 - DNA, 20 bp, synthetic construct
  misc_feature 1..20: note = Description of Artificial Sequence: Synthetic oligonucleotide
  misc_feature 1..20: note = Target: SCN10A; (-) strand; PAM type: YTN; PAM sequence: CTA
  source 1..20: mol_type = other DNA
cagagtatggagtttatcct

SEQ ID NO: 44042 - DNA, 20 bp, synthetic construct
  misc_feature 1..20: note = Description of Artificial Sequence: Synthetic oligonucleotide
  misc_feature 1..20: note = Target: SCN10A; (-) strand; PAM type: YTN; PAM sequence: TTG
  source 1..20: mol_type = other DNA
tgaccatatgacacaggcta

SEQ ID NO: 44043 - DNA, 20 bp, synthetic construct
  misc_feature 1..20: note = Description of Artificial Sequence: Synthetic oligonucleotide
  misc_feature 1..20: note = Target: SCN10A; (-) strand; PAM type: YTN; PAM sequence: CTG
  source 1..20: mol_type = other DNA
gaaaagtaggttgtgaccat

SEQ ID NO: 44044 - DNA, 20 bp, synthetic construct
  misc_feature 1..20: note = Description of Artificial Sequence: Synthetic oligonucleotide
  misc_feature 1..20: note = Target: SCN10A; (-) strand; PAM type: YTN; PAM sequence: TTG
  source 1..20: mol_type = other DNA
ggtagaatgtgtgggtgaaa

SEQ ID NO: 44045 - DNA, 20 bp, synthetic construct
  misc_feature 1..20: note = Description of Artificial Sequence: Synthetic oligonucleotide
  misc_feature 1..20: note = Target: SCN10A; (-) strand; PAM type: YTN; PAM sequence: TTT
  source 1..20: mol_type = other DNA
gggtagaatgtgtgggtgaa

SEQ ID NO: 44046 - DNA, 20 bp, synthetic construct
  misc_feature 1..20: note = Description of Artificial Sequence: Synthetic oligonucleotide
  misc_feature 1..20: note = Target: SCN10A; (-) strand; PAM type: YTN; PAM sequence: TTG
  source 1..20: mol_type = other DNA
atttgggtagaatgtgtggg

SEQ ID NO: 44047 - DNA, 20 bp, synthetic construct
  misc_feature 1..20: note = Description of Artificial Sequence: Synthetic oligonucleotide
  misc_feature 1..20: note = Target: SCN10A; (-) strand; PAM type: YTN; PAM sequence: TTT
  source 1..20: mol_type = other DNA
gatttgggtagaatgtgtgg

SEQ ID NO: 44048 - DNA, 20 bp, synthetic construct
  misc_feature 1..20: note = Description of Artificial Sequence: Synthetic oligonucleotide
  misc_feature 1..20: note = Target: SCN10A; (-) strand; PAM type: YTN; PAM sequence: CTC
  source 1..20: mol_type = other DNA
agggaacaatttgatttggg

SEQ ID NO: 44049 - DNA, 20 bp, synthetic construct
  misc_feature 1..20: note = Description of Artificial Sequence: Synthetic oligonucleotide
  misc_feature 1..20: note = Target: SCN10A; (-) strand; PAM type: YTN; PAM sequence: TTG
  source 1..20: mol_type = other DNA
aacaaaggcacagacacaag

SEQ ID NO: 44050 - DNA, 20 bp, synthetic construct
  misc_feature 1..20: note = Description of Artificial Sequence: Synthetic oligonucleotide
  misc_feature 1..20: note = Target: SCN10A; (-) strand; PAM type: YTN; PAM sequence: CTT
  source 1..20: mol_type = other DNA
gaacaaaggcacagacacaa

SEQ ID NO: 44051 - DNA, 20 bp, synthetic construct
  misc_feature 1..20: note = Description of Artificial Sequence: Synthetic oligonucleotide
  misc_feature 1..20: note = Target: SCN10A; (-) strand; PAM type: YTN; PAM sequence: CTG
  source 1..20: mol_type = other DNA
accttgaacaaaggcacaga

SEQ ID NO: 44052 - DNA, 20 bp, synthetic construct
  misc_feature 1..20: note = Description of Artificial Sequence: Synthetic oligonucleotide
  misc_feature 1..20: note = Target: SCN10A; (-) strand; PAM type: YTN; PAM sequence: CTA
  source 1..20: mol_type = other DNA
aaggctgaccttgaacaaag

SEQ ID NO: 44053 - DNA, 20 bp, synthetic construct
  misc_feature 1..20: note = Description of Artificial Sequence: Synthetic oligonucleotide
  misc_feature 1..20: note = Target: SCN10A; (-) strand; PAM type: YTN; PAM sequence: TTA
  source 1..20: mol_type = other DNA
gctaaaggctgaccttgaac

SEQ ID NO: 44054 - DNA, 20 bp, synthetic construct
  misc_feature 1..20: note = Description of Artificial Sequence: Synthetic oligonucleotide
  misc_feature 1..20: note = Target: SCN10A; (-) strand; PAM type: YTN; PAM sequence: CTT
  source 1..20: mol_type = other DNA
agctaaaggctgaccttgaa

SEQ ID NO: 44055 - DNA, 20 bp, synthetic construct
  misc_feature 1..20: note = Description of Artificial Sequence: Synthetic oligonucleotide
  misc_feature 1..20: note = Target: SCN10A; (-) strand; PAM type: YTN; PAM sequence: CTG
  source 1..20: mol_type = other DNA
gggaaggcccgtcttagcta

SEQ ID NO: 44056 - DNA, 20 bp, synthetic construct
  misc_feature 1..20: note = Description of Artificial Sequence: Synthetic oligonucleotide
  misc_feature 1..20: note = Target: SCN10A; (-) strand; PAM type: YTN; PAM sequence: CTG
  source 1..20: mol_type = other DNA
cgagaggactggggaaggcc

SEQ ID NO: 44057 - DNA, 20 bp, synthetic construct
  misc_feature 1..20: note = Description of Artificial Sequence: Synthetic oligonucleotide
  misc_feature 1..20: note = Target: SCN10A; (-) strand; PAM type: YTN; PAM sequence: TTA
  source 1..20: mol_type = other DNA
gatgtggggcatagaaatga

SEQ ID NO: 44058 - DNA, 20 bp, synthetic construct
  misc_feature 1..20: note = Description of Artificial Sequence: Synthetic oligonucleotide
  misc_feature 1..20: note = Target: SCN10A; (-) strand; PAM type: YTN; PAM sequence: CTA
  source 1..20: mol_type = other DNA
tgggaggtggcattagatgt

SEQ ID NO: 44059 - DNA, 20 bp, synthetic construct
  misc_feature 1..20: note = Description of Artificial Sequence: Synthetic oligonucleotide
  misc_feature 1..20: note = Target: SCN10A; (-) strand; PAM type: YTN; PAM sequence: TTC
  source 1..20: mol_type = other DNA
ctatgggaggtggcattaga

SEQ ID NO: 44060 - DNA, 20 bp, synthetic construct
  misc_feature 1..20: note = Description of Artificial Sequence: Synthetic oligonucleotide
  misc_feature 1..20: note = Target: SCN10A; (-) strand; PAM type: YTN; PAM sequence: CTT
  source 1..20: mol_type = other DNA
cctatgggaggtggcattag

SEQ ID NO: 44061 - DNA, 20 bp, synthetic construct
  misc_feature 1..20: note = Description of Artificial Sequence: Synthetic oligonucleotide
  misc_feature 1..20: note = Target: SCN10A; (-) strand; PAM type: YTN; PAM sequence: TTC
  source 1..20: mol_type = other DNA
ttcctatgggaggtggcatt

SEQ ID NO: 44062 - DNA, 20 bp, synthetic construct
  misc_feature 1..20: note = Description of Artificial Sequence: Synthetic oligonucleotide
  misc_feature 1..20: note = Target: SCN10A; (-) strand; PAM type: YTN; PAM sequence: TTG
  source 1..20: mol_type = other DNA
agaattcttcctatgggagg

SEQ ID NO: 44063 - DNA, 20 bp, synthetic construct
  misc_feature 1..20: note = Description of Artificial Sequence: Synthetic oligonucleotide
  misc_feature 1..20: note = Target: SCN10A; (-) strand; PAM type: YTN; PAM sequence: TTG
  source 1..20: mol_type = other DNA
gggtggggtggttgagaatt

SEQ ID NO: 44064 - DNA, 20 bp, synthetic construct
  misc_feature 1..20: note = Description of Artificial Sequence: Synthetic oligonucleotide
  misc_feature 1..20: note = Target: SCN10A; (-) strand; PAM type: YTN; PAM sequence: CTT
  source 1..20: mol_type = other DNA
ggggtggggtggttgagaat

SEQ ID NO: 44065 - DNA, 20 bp, synthetic construct
  misc_feature 1..20: note = Description of Artificial Sequence: Synthetic oligonucleotide
  misc_feature 1..20: note = Target: SCN10A; (-) strand; PAM type: YTN; PAM sequence: CTC
  source 1..20: mol_type = other DNA
ttggggtggggtggttgaga

SEQ ID NO: 44066 - DNA, 20 bp, synthetic construct
  misc_feature 1..20: note = Description of Artificial Sequence: Synthetic oligonucleotide
  misc_feature 1..20: note = Target: SCN10A; (-) strand; PAM type: YTN; PAM sequence: TTC
  source 1..20: mol_type = other DNA
cactcttggggtggggtggt

SEQ ID NO: 44067 - DNA, 20 bp, synthetic construct
  misc_feature 1..20: note = Description of Artificial Sequence: Synthetic oligonucleotide
  misc_feature 1..20: note = Target: SCN10A; (-) strand; PAM type: YTN; PAM sequence: CTT
  source 1..20: mol_type = other DNA
ccactcttggggtggggtgg

SEQ ID NO: 44068 - DNA, 20 bp, synthetic construct
  misc_feature 1..20: note = Description of Artificial Sequence: Synthetic oligonucleotide
  misc_feature 1..20: note = Target: SCN10A; (-) strand; PAM type: YTN; PAM sequence: TTC
  source 1..20: mol_type = other DNA
ttccactcttggggtggggt

SEQ ID NO: 44069 - DNA, 20 bp, synthetic construct
  misc_feature 1..20: note = Description of Artificial Sequence: Synthetic oligonucleotide
  misc_feature 1..20: note = Target: SCN10A; (-) strand; PAM type: YTN; PAM sequence: CTT
  source 1..20: mol_type = other DNA
cttccactcttggggtgggg

SEQ ID NO: 44070 - DNA, 20 bp, synthetic construct
  misc_feature 1..20: note = Description of Artificial Sequence: Synthetic oligonucleotide
  misc_feature 1..20: note = Target: SCN10A; (-) strand; PAM type: YTN; PAM sequence: TTG
  source 1..20: mol_type = other DNA
gagacacagagacatgagcc

SEQ ID NO: 44071 - DNA, 20 bp, synthetic construct
  misc_feature 1..20: note = Description of Artificial Sequence: Synthetic oligonucleotide
  misc_feature 1..20: note = Target: SCN10A; (-) strand; PAM type: YTN; PAM sequence: CTT
  source 1..20: mol_type = other DNA
ggagacacagagacatgagc

SEQ ID NO: 44072 - DNA, 20 bp, synthetic construct
  misc_feature 1..20: note = Description of Artificial Sequence: Synthetic oligonucleotide
  misc_feature 1..20: note = Target: SCN10A; (-) strand; PAM type: YTN; PAM sequence: TTA
  source 1..20: mol_type = other DNA
gtatcttggagacacagaga

SEQ ID NO: 44073 - DNA, 20 bp, synthetic construct
  misc_feature 1..20: note = Description of Artificial Sequence: Synthetic oligonucleotide
  misc_feature 1..20: note = Target: SCN10A; (-) strand; PAM type: YTN; PAM sequence: CTG
  source 1..20: mol_type = other DNA
ggggcaattagtatcttgga

SEQ ID NO: 44074 - DNA, 20 bp, synthetic construct
  misc_feature 1..20: note = Description of Artificial Sequence: Synthetic oligonucleotide
  misc_feature 1..20: note = Target: SCN10A; (-) strand; PAM type: YTN; PAM sequence: CTG
  source 1..20: mol_type = other DNA
ctgggggcaattagtatctt

SEQ ID NO: 44075 - DNA, 20 bp, synthetic construct
  misc_feature 1..20: note = Description of Artificial Sequence: Synthetic oligonucleotide
  misc_feature 1..20: note = Target: SCN10A; (-) strand; PAM type: YTN; PAM sequence: TTG
  source 1..20: mol_type = other DNA
agcactgctgggggcaatta

SEQ ID NO: 44076 - DNA, 20 bp, synthetic construct
  misc_feature 1..20: note = Description of Artificial Sequence: Synthetic oligonucleotide
  misc_feature 1..20: note = Target: SCN10A; (-) strand; PAM type: YTN; PAM sequence: TTA
  source 1..20: mol_type = other DNA
taagggtgaatgtgttgagc

SEQ ID NO: 44077 - DNA, 20 bp, synthetic construct
  misc_feature 1..20: note = Description of Artificial Sequence: Synthetic oligonucleotide
  misc_feature 1..20: note = Target: SCN10A; (-) strand; PAM type: YTN; PAM sequence: TTC
  source 1..20: mol_type = other DNA
agcagacaagacacacatgg

SEQ ID NO: 44078 - DNA, 20 bp, synthetic construct
  misc_feature 1..20: note = Description of Artificial Sequence: Synthetic oligonucleotide
  misc_feature 1..20: note = Target: SCN10A; (-) strand; PAM type: YTN; PAM sequence: TTT
  source 1..20: mol_type = other DNA
cagcagacaagacacacatg

SEQ ID NO: 44079 - DNA, 20 bp, synthetic construct
  misc_feature 1..20: note = Description of Artificial Sequence: Synthetic oligonucleotide
  misc_feature 1..20: note = Target: SCN10A; (-) strand; PAM type: YTN; PAM sequence: CTT
  source 1..20: mol_type = other DNA
tcagcagacaagacacacat

SEQ ID NO: 44080 - DNA, 20 bp, synthetic construct
  misc_feature 1..20: note = Description of Artificial Sequence: Synthetic oligonucleotide
  misc_feature 1..20: note = Target: SCN10A; (-) strand; PAM type: YTN; PAM sequence: TTA
  source 1..20: mol_type = other DNA
gtctttcagcagacaagaca

SEQ ID NO: 44081 - DNA, 20 bp, synthetic construct
  misc_feature 1..20: note = Description of Artificial Sequence: Synthetic oligonucleotide
  misc_feature 1..20: note = Target: SCN10A; (-) strand; PAM type: YTN; PAM sequence: TTT
  source 1..20: mol_type = other DNA
agtctttcagcagacaagac

SEQ ID NO: 44082 - DNA, 20 bp, synthetic construct
  misc_feature 1..20: note = Description of Artificial Sequence: Synthetic oligonucleotide
  misc_feature 1..20: note = Target: SCN10A; (-) strand; PAM type: YTN; PAM sequence: CTT
  source 1..20: mol_type = other DNA
tagtctttcagcagacaaga

SEQ ID NO: 44083 - DNA, 20 bp, synthetic construct
  misc_feature 1..20: note = Description of Artificial Sequence: Synthetic oligonucleotide
  misc_feature 1..20: note = Target: SCN10A; (-) strand; PAM type: YTN; PAM sequence: TTA
  source 1..20: mol_type = other DNA
cactttagtctttcagcaga

SEQ ID NO: 44084 - DNA, 20 bp, synthetic construct
  misc_feature 1..20: note = Description of Artificial Sequence: Synthetic oligonucleotide
  misc_feature 1..20: note = Target: SCN10A; (-) strand; PAM type: YTN; PAM sequence: CTT
  source 1..20: mol_type = other DNA
acactttagtctttcagcag

SEQ ID NO: 44085 - DNA, 20 bp, synthetic construct
  misc_feature 1..20: note = Description of Artificial Sequence: Synthetic oligonucleotide
  misc_feature 1..20: note = Target: SCN10A; (-) strand; PAM type: YTN; PAM sequence: CTC
  source 1..20: mol_type = other DNA
caggatcttacactttagtc

SEQ ID NO: 44086 - DNA, 20 bp, synthetic construct
  misc_feature 1..20: note = Description of Artificial Sequence: Synthetic oligonucleotide
  misc_feature 1..20: note = Target: SCN10A; (-) strand; PAM type: YTN; PAM sequence: CTA
  source 1..20: mol_type = other DNA
tctccaggatcttacacttt

SEQ ID NO: 44087 - DNA, 20 bp, synthetic construct
  misc_feature 1..20: note = Description of Artificial Sequence: Synthetic oligonucleotide
  misc_feature 1..20: note = Target: SCN10A; (-) strand; PAM type: YTN; PAM sequence: CTC
  source 1..20: mol_type = other DNA
actatctccaggatcttaca

SEQ ID NO: 44088 - DNA, 20 bp, synthetic construct
  misc_feature 1..20: note = Description of Artificial Sequence: Synthetic oligonucleotide
  misc_feature 1..20: note = Target: SCN10A; (-) strand; PAM type: YTN; PAM sequence: TTG
  source 1..20: mol_type = other DNA
taagaaacagaagcacagaa

SEQ ID NO: 44089 - DNA, 20 bp, synthetic construct
  misc_feature 1..20: note = Description of Artificial Sequence: Synthetic oligonucleotide
  misc_feature 1..20: note = Target: SCN10A; (-) strand; PAM type: YTN; PAM sequence: TTT
  source 1..20: mol_type = other DNA
gtaagaaacagaagcacaga

SEQ ID NO: 44090 - DNA, 20 bp, synthetic construct
  misc_feature 1..20: note = Description of Artificial Sequence: Synthetic oligonucleotide
  misc_feature 1..20: note = Target: SCN10A; (-) strand; PAM type: YTN; PAM sequence: CTT
  source 1..20: mol_type = other DNA
tgtaagaaacagaagcacag

SEQ ID NO: 44091 - DNA, 20 bp, synthetic construct
  misc_feature 1..20: note = Description of Artificial Sequence: Synthetic oligonucleotide
  misc_feature 1..20: note = Target: SCN10A; (-) strand; PAM type: YTN; PAM sequence: TTA
  source 1..20: mol_type = other DNA
tgaagtgctttgtaagaaac

SEQ ID NO: 44092 - DNA, 20 bp, synthetic construct
  misc_feature 1..20: note = Description of Artificial Sequence: Synthetic oligonucleotide
  misc_feature 1..20: note = Target: SCN10A; (-) strand; PAM type: YTN; PAM sequence: CTT
  source 1..20: mol_type = other DNA
atgaagtgctttgtaagaaa

SEQ ID NO: 44093 - DNA, 20 bp, synthetic construct
  misc_feature 1..20: note = Description of Artificial Sequence: Synthetic oligonucleotide
  misc_feature 1..20: note = Target: SCN10A; (-) strand; PAM type: YTN; PAM sequence: TTG
  source 1..20: mol_type = other DNA
tcttatgaagtgctttgtaa

SEQ ID NO: 44094 - DNA, 20 bp, synthetic construct
  misc_feature 1..20: note = Description of Artificial Sequence: Synthetic oligonucleotide
  misc_feature 1..20: note = Target: SCN10A; (-) strand; PAM type: YTN; PAM sequence: TTG
  source 1..20: mol_type = other DNA
aatacaggattgtcttatga

SEQ ID NO: 44095 - DNA, 20 bp, synthetic construct
  misc_feature 1..20: note = Description of Artificial Sequence: Synthetic oligonucleotide
  misc_feature 1..20: note = Target: SCN10A; (-) strand; PAM type: YTN; PAM sequence: CTA
  source 1..20: mol_type = other DNA
ttgaatacaggattgtctta

SEQ ID NO: 44096 - DNA, 20 bp, synthetic construct
  misc_feature 1..20: note = Description of Artificial Sequence: Synthetic oligonucleotide
  misc_feature 1..20: note = Target: SCN10A; (-) strand; PAM type: YTN; PAM sequence: CTA
  source 1..20: mol_type = other DNA
actattgaatacaggattgt

SEQ ID NO: 44097 - DNA, 20 bp, synthetic construct
  misc_feature 1..20: note = Description of Artificial Sequence: Synthetic oligonucleotide
  misc_feature 1..20: note = Target: SCN10A; (-) strand; PAM type: YTN; PAM sequence: CTA
  source 1..20: mol_type = other DNA
tacatctaactattgaatac

SEQ ID NO: 44098 - DNA, 20 bp, synthetic construct
  misc_feature 1..20: note = Description of Artificial Sequence: Synthetic oligonucleotide
  misc_feature 1..20: note = Target: SCN10A; (-) strand; PAM type: YTN; PAM sequence: TTG
  source 1..20: mol_type = other DNA
ctatacatctaactattgaa

SEQ ID NO: 44099 - DNA, 20 bp, synthetic construct
  misc_feature 1..20: note = Description of Artificial Sequence: Synthetic oligonucleotide
  misc_feature 1..20: note = Target: SCN10A; (-) strand; PAM type: YTN; PAM sequence: TTT
  source 1..20: mol_type = other DNA
gctatacatctaactattga

SEQ ID NO: 44100 - DNA, 20 bp, synthetic construct
  misc_feature 1..20: note = Description of Artificial Sequence: Synthetic oligonucleotide
  misc_feature 1..20: note = Target: SCN10A; (-) strand; PAM type: YTN; PAM sequence: TTC
  source 1..20: mol_type = other DNA
catttgctatacatctaact

SEQ ID NO: 44101 - DNA, 20 bp, synthetic construct
  misc_feature 1..20: note = Description of Artificial Sequence: Synthetic oligonucleotide
  misc_feature 1..20: note = Target: SCN10A; (-) strand; PAM type: YTN; PAM sequence: CTT
  source 1..20: mol_type = other DNA
ccatttgctatacatctaac

SEQ ID NO: 44102 - DNA, 20 bp, synthetic construct
  misc_feature 1..20: note = Description of Artificial Sequence: Synthetic oligonucleotide
  misc_feature 1..20: note = Target: SCN10A; (-) strand; PAM type: YTN; PAM sequence: TTC
  source 1..20: mol_type = other DNA
ttccatttgctatacatcta

SEQ ID NO: 44103 - DNA, 20 bp, synthetic construct
  misc_feature 1..20: note = Description of Artificial Sequence: Synthetic oligonucleotide
  misc_feature 1..20: note = Target: SCN10A; (-) strand; PAM type: YTN; PAM sequence: TTT
  source 1..20: mol_type = other DNA
cttccatttgctatacatct

SEQ ID NO: 44104 - DNA, 20 bp, synthetic construct
  misc_feature 1..20: note = Description of Artificial Sequence: Synthetic oligonucleotide
  misc_feature 1..20: note = Target: SCN10A; (-) strand; PAM type: YTN; PAM sequence: TTT
  source 1..20: mol_type = other DNA
tcttccatttgctatacatc

SEQ ID NO: 44105 - DNA, 20 bp, synthetic construct
  misc_feature 1..20: note = Description of Artificial Sequence: Synthetic oligonucleotide
  misc_feature 1..20: note = Target: SCN10A; (-) strand; PAM type: YTN; PAM sequence: TTT
  source 1..20: mol_type = other DNA
ttcttccatttgctatacat

SEQ ID NO: 44106 - DNA, 20 bp, synthetic construct
  misc_feature 1..20: note = Description of Artificial Sequence: Synthetic oligonucleotide
  misc_feature 1..20: note = Target: SCN10A; (-) strand; PAM type: YTN; PAM sequence: CTA
  source 1..20: mol_type = other DNA
tttttcttccatttgctata

SEQ ID NO: 44107 - DNA, 20 bp, synthetic construct
  misc_feature 1..20: note = Description of Artificial Sequence: Synthetic oligonucleotide
  misc_feature 1..20: note = Target: SCN10A; (-) strand; PAM type: YTN; PAM sequence: CTA
  source 1..20: mol_type = other DNA
gccatcccaatgatcctatt

SEQ ID NO: 44108 - DNA, 20 bp, synthetic construct
  misc_feature 1..20: note = Description of Artificial Sequence: Synthetic oligonucleotide
  misc_feature 1..20: note = Target: SCN10A; (-) strand; PAM type: YTN; PAM sequence: TTC
  source 1..20: mol_type = other DNA
tagccatcccaatgatccta

SEQ ID NO: 44109 - DNA, 20 bp, synthetic construct
  misc_feature 1..20: note = Description of Artificial Sequence: Synthetic oligonucleotide
  misc_feature 1..20: note = Target: SCN10A; (-) strand; PAM type: YTN; PAM sequence: CTT
  source 1..20: mol_type = other DNA
ctagccatcccaatgatcct

SEQ ID NO: 44110 - DNA, 20 bp, synthetic construct
  misc_feature 1..20: note = Description of Artificial Sequence: Synthetic oligonucleotide
  misc_feature 1..20: note = Target: SCN10A; (-) strand; PAM type: YTN; PAM sequence: TTC
  source 1..20: mol_type = other DNA
cttctagccatcccaatgat

SEQ ID NO: 44111 - DNA, 20 bp, synthetic construct
  misc_feature 1..20: note = Description of Artificial Sequence: Synthetic oligonucleotide
  misc_feature 1..20: note = Target: SCN10A; (-) strand; PAM type: YTN; PAM sequence: TTT
  source 1..20: mol_type = other DNA
ccttctagccatcccaatga

SEQ ID NO: 44112 - DNA, 20 bp, synthetic construct
  misc_feature 1..20: note = Description of Artificial Sequence: Synthetic oligonucleotide
  misc_feature 1..20: note = Target: SCN10A; (-) strand; PAM type: YTN; PAM sequence: CTT
  source 1..20: mol_type = other DNA
tccttctagccatcccaatg

SEQ ID NO: 44113 - DNA, 20 bp, synthetic construct
  misc_feature 1..20: note = Description of Artificial Sequence: Synthetic oligonucleotide
  misc_feature 1..20: note = Target: SCN10A; (-) strand; PAM type: YTN; PAM sequence: TTC
  source 1..20: mol_type = other DNA
tttccttctagccatcccaa

SEQ ID NO: 44114 - DNA, 20 bp, synthetic construct
  misc_feature 1..20: note = Description of Artificial Sequence: Synthetic oligonucleotide
  misc_feature 1..20: note = Target: SCN10A; (-) strand; PAM type: YTN; PAM sequence: TTT
  source 1..20: mol_type = other DNA
ctttccttctagccatccca

SEQ ID NO: 44115 - DNA, 20 bp, synthetic construct
  misc_feature 1..20: note = Description of Artificial Sequence: Synthetic oligonucleotide
  misc_feature 1..20: note = Target: SCN10A; (-) strand; PAM type: YTN; PAM sequence: CTT
  source 1..20: mol_type = other DNA
tctttccttctagccatccc

SEQ ID NO: 44116 - DNA, 20 bp, synthetic construct
  misc_feature 1..20: note = Description of Artificial Sequence: Synthetic oligonucleotide
  misc_feature 1..20: note = Target: SCN10A; (-) strand; PAM type: YTN; PAM sequence: TTC
  source 1..20: mol_type = other DNA
tttctttccttctagccatc

SEQ ID NO: 44117 - DNA, 20 bp, synthetic construct
  misc_feature 1..20: note = Description of Artificial Sequence: Synthetic oligonucleotide
  misc_feature 1..20: note = Target: SCN10A; (-) strand; PAM type: YTN; PAM sequence: TTT
  source 1..20: mol_type = other DNA
ctttctttccttctagccat

SEQ ID NO: 44118 - DNA, 20 bp, synthetic construct
  misc_feature 1..20: note = Description of Artificial Sequence: Synthetic oligonucleotide
  misc_feature 1..20: note = Target: SCN10A; (-) strand; PAM type: YTN; PAM sequence: CTT
  source 1..20: mol_type = other DNA
tctttctttccttctagcca

SEQ ID NO: 44119 - DNA, 20 bp, synthetic construct
  misc_feature 1..20: note = Description of Artificial Sequence: Synthetic oligonucleotide
  misc_feature 1..20: note = Target: SCN10A; (-) strand; PAM type: YTN; PAM sequence: TTC
  source 1..20: mol_type = other DNA
tttctttctttccttctagc

SEQ ID NO: 44120 - DNA, 20 bp, synthetic construct
  misc_feature 1..20: note = Description of Artificial Sequence: Synthetic oligonucleotide
  misc_feature 1..20: note = Target: SCN10A; (-) strand; PAM type: YTN; PAM sequence: CTT
  source 1..20: mol_type = other DNA
ctttctttctttccttctag

SEQ ID NO: 44121 - DNA, 20 bp, synthetic construct
  misc_feature 1..20: note = Description of Artificial Sequence: Synthetic oligonucleotide
  misc_feature 1..20: note = Target: SCN10A; (-) strand; PAM type: YTN; PAM sequence: CTG
  source 1..20: mol_type = other DNA
tacttctttctttctttcct

SEQ ID NO: 44122 - DNA, 20 bp, synthetic construct
  misc_feature 1..20: note = Description of Artificial Sequence: Synthetic oligonucleotide
  misc_feature 1..20: note = Target: SCN10A; (-) strand; PAM type: YTN; PAM sequence: TTC
  source 1..20: mol_type = other DNA
atccagctgtacttctttct

SEQ ID NO: 44123 - DNA, 20 bp, synthetic construct
  misc_feature 1..20: note = Description of Artificial Sequence: Synthetic oligonucleotide
  misc_feature 1..20: note = Target: SCN10A; (-) strand; PAM type: YTN; PAM sequence: TTT
  source 1..20: mol_type = other DNA
catccagctgtacttctttc

SEQ ID NO: 44124 - DNA, 20 bp, synthetic construct
  misc_feature 1..20: note = Description of Artificial Sequence: Synthetic oligonucleotide
  misc_feature 1..20: note = Target: SCN10A; (-) strand; PAM type: YTN; PAM sequence: TTT
  source 1..20: mol_type = other DNA
tcatccagctgtacttcttt

SEQ ID NO: 44125 - DNA, 20 bp, synthetic construct
  misc_feature 1..20: note = Description of Artificial Sequence: Synthetic oligonucleotide
  misc_feature 1..20: note = Target: SCN10A; (-) strand; PAM type: YTN; PAM sequence: CTT
  source 1..20: mol_type = other DNA
ttcatccagctgtacttctt

SEQ ID NO: 44126 - DNA, 20 bp, synthetic construct
  misc_feature 1..20: note = Description of Artificial Sequence: Synthetic oligonucleotide
  misc_feature 1..20: note = Target: SCN10A; (-) strand; PAM type: YTN; PAM sequence: TTC
  source 1..20: mol_type = other DNA
aacttttcatccagctgtac

SEQ ID NO: 44127 - DNA, 20 bp, synthetic construct
  misc_feature 1..20: note = Description of Artificial Sequence: Synthetic oligonucleotide
  misc_feature 1..20: note = Target: SCN10A; (-) strand; PAM type: YTN; PAM sequence: CTT
  source 1..20: mol_type = other DNA
caacttttcatccagctgta

SEQ ID NO: 44128 - DNA, 20 bp, synthetic construct
  misc_feature 1..20: note = Description of Artificial Sequence: Synthetic oligonucleotide
  misc_feature 1..20: note = Target: SCN10A; (-) strand; PAM type: YTN; PAM sequence: CTA
  source 1..20: mol_type = other DNA
tgcaatcacccttcaacttt

SEQ ID NO: 44129 - DNA, 20 bp, synthetic construct
  misc_feature 1..20: note = Description of Artificial Sequence: Synthetic oligonucleotide
  misc_feature 1..20: note = Target: SCN10A; (-) strand; PAM type: YTN; PAM sequence: CTC
  source 1..20: mol_type = other DNA
tatgcaatcacccttcaact

SEQ ID NO: 44130 - DNA, 20 bp, synthetic construct
  misc_feature 1..20: note = Description of Artificial Sequence: Synthetic oligonucleotide
  misc_feature 1..20: note = Target: SCN10A; (-) strand; PAM type: YTN; PAM sequence: TTC
  source 1..20: mol_type = other DNA
atccctctatgcaatcaccc

SEQ ID NO: 44131 - DNA, 20 bp, synthetic construct
  misc_feature 1..20: note = Description of Artificial Sequence: Synthetic oligonucleotide
  misc_feature 1..20: note = Target: SCN10A; (-) strand; PAM type: YTN; PAM sequence: TTA
  source 1..20: mol_type = other DNA
attcatccctctatgcaatc

SEQ ID NO: 44132 - DNA, 20 bp, synthetic construct
  misc_feature 1..20: note = Description of Artificial Sequence: Synthetic oligonucleotide
  misc_feature 1..20: note = Target: SCN10A; (-) strand; PAM type: YTN; PAM sequence: TTT
  source 1..20: mol_type = other DNA
aattcatccctctatgcaat

SEQ ID NO: 44133 - DNA, 20 bp, synthetic construct
  misc_feature 1..20: note = Description of Artificial Sequence: Synthetic oligonucleotide
  misc_feature 1..20: note = Target: SCN10A; (-) strand; PAM type: YTN; PAM sequence: CTT
  source 1..20: mol_type = other DNA
taattcatccctctatgcaa

SEQ ID NO: 44134 - DNA, 20 bp, synthetic construct
  misc_feature 1..20: note = Description of Artificial Sequence: Synthetic oligonucleotide
  misc_feature 1..20: note = Target: SCN10A; (-) strand; PAM type: YTN; PAM sequence: TTG
  source 1..20: mol_type = other DNA
tatcctttaattcatccctc

SEQ ID NO: 44135 - DNA, 20 bp, synthetic construct
  misc_feature 1..20: note = Description of Artificial Sequence: Synthetic oligonucleotide
  misc_feature 1..20: note = Target: SCN10A; (-) strand; PAM type: YTN; PAM sequence: TTA
  source 1..20: mol_type = other DNA
tcattgtatcctttaattca

SEQ ID NO: 44136 - DNA, 20 bp, synthetic construct
  misc_feature 1..20: note = Description of Artificial Sequence: Synthetic oligonucleotide
  misc_feature 1..20: note = Target: SCN10A; (-) strand; PAM type: YTN; PAM sequence: TTT
  source 1..20: mol_type = other DNA
atcattgtatcctttaattc

SEQ ID NO: 44137 - DNA, 20 bp, synthetic construct
  misc_feature 1..20: note = Description of Artificial Sequence: Synthetic oligonucleotide
  misc_feature 1..20: note = Target: SCN10A; (-) strand; PAM type: YTN; PAM sequence: CTA
  source 1..20: mol_type = other DNA
tttatcattgtatcctttaa

SEQ ID NO: 44138 - DNA, 20 bp, synthetic construct
  misc_feature 1..20: note = Description of Artificial Sequence: Synthetic oligonucleotide
  misc_feature 1..20: note = Target: SCN10A; (-) strand; PAM type: YTN; PAM sequence: CTA
  source 1..20: mol_type = other DNA
tcctatttatcattgtatcc

SEQ ID NO: 44139 - DNA, 20 bp, synthetic construct
  misc_feature 1..20: note = Description of Artificial Sequence: Synthetic oligonucleotide
  misc_feature 1..20: note = Target: SCN10A; (-) strand; PAM type: YTN; PAM sequence: TTA
  source 1..20: mol_type = other DNA
aatctatcctatttatcatt

SEQ ID NO: 44140 - DNA, 20 bp, synthetic construct
  misc_feature 1..20: note = Description of Artificial Sequence: Synthetic oligonucleotide
  misc_feature 1..20: note = Target: SCN10A; (-) strand; PAM type: YTN; PAM sequence: TTA
  source 1..20: mol_type = other DNA
tacattaaatctatcctatt

SEQ ID NO: 44141 - DNA, 20 bp, synthetic construct
  misc_feature 1..20: note = Description of Artificial Sequence: Synthetic oligonucleotide
  misc_feature 1..20: note = Target: SCN10A; (-) strand; PAM type: YTN; PAM sequence: TTC
  source 1..20: mol_type = other DNA
atgttatacattaaatctat

SEQ ID NO: 44142 - DNA, 20 bp, synthetic construct
  misc_feature 1..20: note = Description of Artificial Sequence: Synthetic oligonucleotide
  misc_feature 1..20: note = Target: SCN10A; (-) strand; PAM type: YTN; PAM sequence: CTA
  source 1..20: mol_type = other DNA
tagtattcatgttatacatt

SEQ ID NO: 44143 - DNA, 20 bp, synthetic construct
  misc_feature 1..20: note = Description of Artificial Sequence: Synthetic oligonucleotide
  misc_feature 1..20: note = Target: SCN10A; (-) strand; PAM type: YTN; PAM sequence: TTA
  source 1..20: mol_type = other DNA
actatagtattcatgttata

SEQ ID NO: 44144 - DNA, 20 bp, synthetic construct
  misc_feature 1..20: note = Description of Artificial Sequence: Synthetic oligonucleotide
  misc_feature 1..20: note = Target: SCN10A; (-) strand; PAM type: YTN; PAM sequence: TTA
  source 1..20: mol_type = other DNA
ttaactatagtattcatgtt

SEQ ID NO: 44145 - DNA, 20 bp, synthetic construct
  misc_feature 1..20: note = Description of Artificial Sequence: Synthetic oligonucleotide
  misc_feature 1..20: note = Target: SCN10A; (-) strand; PAM type: YTN; PAM sequence: CTA
  source 1..20: mol_type = other DNA
ttattaactatagtattcat

SEQ ID NO: 44146 - DNA, 20 bp, synthetic construct
  misc_feature 1..20: note = Description of Artificial Sequence: Synthetic oligonucleotide
  misc_feature 1..20: note = Target: SCN10A; (-) strand; PAM type: YTN; PAM sequence: CTG
  source 1..20: mol_type = other DNA
aaaacaatatgctattatta

SEQ ID NO: 44147 - DNA, 20 bp, synthetic construct
  misc_feature 1..20: note = Description of Artificial Sequence: Synthetic oligonucleotide
  misc_feature 1..20: note = Target: SCN10A; (-) strand; PAM type: YTN; PAM sequence: CTC
  source 1..20: mol_type = other DNA
agcgagcaaaaatactgaaa

SEQ ID NO: 44148 - DNA, 20 bp, synthetic construct
  misc_feature 1..20: note = Description of Artificial Sequence: Synthetic oligonucleotide
  misc_feature 1..20: note = Target: SCN10A; (-) strand; PAM type: YTN; PAM sequence: TTA
  source 1..20: mol_type = other DNA
ctcagcgagcaaaaatactg

SEQ ID NO: 44149 - DNA, 20 bp, synthetic construct
  misc_feature 1..20: note = Description of Artificial Sequence: Synthetic oligonucleotide
  misc_feature 1..20: note = Target: SCN10A; (-) strand; PAM type: YTN; PAM sequence: CTA
  source 1..20: mol_type = other DNA
taattactcagcgagcaaaa

SEQ ID NO: 44150 - DNA, 20 bp, synthetic construct
  misc_feature 1..20: note = Description of Artificial Sequence: Synthetic oligonucleotide
  misc_feature 1..20: note = Target: SCN10A; (-) strand; PAM type: YTN; PAM sequence: CTG
  source 1..20: mol_type = other DNA
tggcaagagcagctataatt

SEQ ID NO: 44151 - DNA, 20 bp, synthetic construct
  misc_feature 1..20: note = Description of Artificial Sequence: Synthetic oligonucleotide
  misc_feature 1..20: note = Target: SCN10A; (-) strand; PAM type: YTN; PAM sequence: CTC
  source 1..20: mol_type = other DNA
cccctgtggcaagagcagct

SEQ ID NO: 44152 - DNA, 20 bp, synthetic construct
  misc_feature 1..20: note = Description of Artificial Sequence: Synthetic oligonucleotide
  misc_feature 1..20: note = Target: SCN10A; (-) strand; PAM type: YTN; PAM sequence: TTC
  source 1..20: mol_type = other DNA
tccccctgtggcaagagcag

SEQ ID NO: 44153 - DNA, 20 bp, synthetic construct
  misc_feature 1..20: note = Description of Artificial Sequence: Synthetic oligonucleotide
  misc_feature 1..20: note = Target: SCN10A; (-) strand; PAM type: YTN; PAM sequence: TTT
  source 1..20: mol_type = other DNA
ctccccctgtggcaagagca

SEQ ID NO: 44154 - DNA, 20 bp, synthetic construct
  misc_feature 1..20: note = Description of Artificial Sequence: Synthetic oligonucleotide
  misc_feature 1..20: note = Target: SCN10A; (-) strand; PAM type: YTN; PAM sequence: TTA
  source 1..20: mol_type = other DNA
cccatttctccccctgtggc

SEQ ID NO: 44155 - DNA, 20 bp, synthetic construct
  misc_feature 1..20: note = Description of Artificial Sequence: Synthetic oligonucleotide
  misc_feature 1..20: note = Target: SCN10A; (-) strand; PAM type: YTN; PAM sequence: CTC
  source 1..20: mol_type = other DNA
acatagttacccatttctcc

SEQ ID NO: 44156 - DNA, 20 bp, synthetic construct
  misc_feature 1..20: note = Description of Artificial Sequence: Synthetic oligonucleotide
  misc_feature 1..20: note = Target: SCN10A; (-) strand; PAM type: YTN; PAM sequence: TTA
  source 1..20: mol_type = other DNA
acatatccatcatctcacat

SEQ ID NO: 44157 - DNA, 20 bp, synthetic construct
  misc_feature 1..20: note = Description of Artificial Sequence: Synthetic oligonucleotide
  misc_feature 1..20: note = Target: SCN10A; (-) strand; PAM type: YTN; PAM sequence: CTA
  source 1..20: mol_type = other DNA
tagtggaacatattaacata

SEQ ID NO: 44158 - DNA, 20 bp, synthetic construct
  misc_feature 1..20: note = Description of Artificial Sequence: Synthetic oligonucleotide
  misc_feature 1..20: note = Target: SCN10A; (-) strand; PAM type: YTN; PAM sequence: TTA
  source 1..20: mol_type = other DNA
ctatagtggaacatattaac

SEQ ID NO: 44159 - DNA, 20 bp, synthetic construct
  misc_feature 1..20: note = Description of Artificial Sequence: Synthetic oligonucleotide
  misc_feature 1..20: note = Target: SCN10A; (-) strand; PAM type: YTN; PAM sequence: TTA
  source 1..20: mol_type = other DNA
taagatatatatatatataa

SEQ ID NO: 44160 - DNA, 20 bp, synthetic construct
  misc_feature 1..20: note = Description of Artificial Sequence: Synthetic oligonucleotide
  misc_feature 1..20: note = Target: SCN10A; (-) strand; PAM type: YTN; PAM sequence: TTA
  source 1..20: mol_type = other DNA
agggatacaaaatgatgtta

SEQ ID NO: 44161 - DNA, 20 bp, synthetic construct
  misc_feature 1..20: note = Description of Artificial Sequence: Synthetic oligonucleotide
  misc_feature 1..20: note = Target: SCN10A; (-) strand; PAM type: YTN; PAM sequence: TTT
  source 1..20: mol_type = other DNA
aagggatacaaaatgatgtt

SEQ ID NO: 44162 - DNA, 20 bp, synthetic construct
  misc_feature 1..20: note = Description of Artificial Sequence: Synthetic oligonucleotide
  misc_feature 1..20: note = Target: SCN10A; (-) strand; PAM type: YTN; PAM sequence: TTT
  source 1..20: mol_type = other DNA
taagggatacaaaatgatgt

SEQ ID NO: 44163 - DNA, 20 bp, synthetic construct
  misc_feature 1..20: note = Description of Artificial Sequence: Synthetic oligonucleotide
  misc_feature 1..20: note = Target: SCN10A; (-) strand; PAM type: YTN; PAM sequence: TTT
  source 1..20: mol_type = other DNA
ttaagggatacaaaatgatg

SEQ ID NO: 44164 - DNA, 20 bp, synthetic construct
  misc_feature 1..20: note = Description of Artificial Sequence: Synthetic oligonucleotide
  misc_feature 1..20: note = Target: SCN10A; (-) strand; PAM type: YTN; PAM sequence: TTG
  source 1..20: mol_type = other DNA
ggtggggacacagccaaacc

SEQ ID NO: 44165 - DNA, 20 bp, synthetic construct
  misc_feature 1..20: note = Description of Artificial Sequence: Synthetic oligonucleotide
  misc_feature 1..20: note = Target: SCN10A; (-) strand; PAM type: YTN; PAM sequence: TTT
  source 1..20: mol_type = other DNA
gggtggggacacagccaaac

SEQ ID NO: 44166 - DNA, 20 bp, synthetic construct
  misc_feature 1..20: note = Description of Artificial Sequence: Synthetic oligonucleotide
  misc_feature 1..20: note = Target: SCN10A; (-) strand; PAM type: YTN; PAM sequence: TTC
  source 1..20: mol_type = other DNA
aagataagatttgggtgggg

SEQ ID NO: 44167 - DNA, 20 bp, synthetic construct
  misc_feature 1..20: note = Description of Artificial Sequence: Synthetic oligonucleotide
  misc_feature 1..20: note = Target: SCN10A; (-) strand; PAM type: YTN; PAM sequence: CTC
  source 1..20: mol_type = other DNA
ccacaacacatgggaattca

SEQ ID NO: 44168 - DNA, 20 bp, synthetic construct
  misc_feature 1..20: note = Description of Artificial Sequence: Synthetic oligonucleotide
  misc_feature 1..20: note = Target: SCN10A; (-) strand; PAM type: YTN; PAM sequence: CTC
  source 1..20: mol_type = other DNA
ccctcccacaacacatggga

SEQ ID NO: 44169 - DNA, 20 bp, synthetic construct
  misc_feature 1..20: note = Description of Artificial Sequence: Synthetic oligonucleotide
  misc_feature 1..20: note = Target: SCN10A; (-) strand; PAM type: YTN; PAM sequence: CTC
  source 1..20: mol_type = other DNA
ccacagggtccctcccctcc

SEQ ID NO: 44170 - DNA, 20 bp, synthetic construct
  misc_feature 1..20: note = Description of Artificial Sequence: Synthetic oligonucleotide
  misc_feature 1..20: note = Target: SCN10A; (-) strand; PAM type: YTN; PAM sequence: TTA
  source 1..20: mol_type = other DNA
cctcccacagggtccctccc

SEQ ID NO: 44171 - DNA, 20 bp, synthetic construct
  misc_feature 1..20: note = Description of Artificial Sequence: Synthetic oligonucleotide
  misc_feature 1..20: note = Target: SCN10A; (-) strand; PAM type: YTN; PAM sequence: CTT
  source 1..20: mol_type = other DNA
acctcccacagggtccctcc

SEQ ID NO: 44172 - DNA, 20 bp, synthetic construct
  misc_feature 1..20: note = Description of Artificial Sequence: Synthetic oligonucleotide
  misc_feature 1..20: note = Target: SCN10A; (-) strand; PAM type: YTN; PAM sequence: TTC
  source 1..20: mol_type = other DNA
acttacctcccacagggtcc

SEQ ID NO: 44173 - DNA, 20 bp, synthetic construct
  misc_feature 1..20: note = Description of Artificial Sequence: Synthetic oligonucleotide
  misc_feature 1..20: note = Target: SCN10A; (-) strand; PAM type: YTN; PAM sequence: CTC
  source 1..20: mol_type = other DNA
ccatgattcacttacctccc

SEQ ID NO: 44174 - DNA, 20 bp, synthetic construct
  misc_feature 1..20: note = Description of Artificial Sequence: Synthetic oligonucleotide
  misc_feature 1..20: note = Target: SCN10A; (-) strand; PAM type: YTN; PAM sequence: CTG
  source 1..20: mol_type = other DNA
ctcccatgattcacttacct

SEQ ID NO: 44175 - DNA, 20 bp, synthetic construct
  misc_feature 1..20: note = Description of Artificial Sequence: Synthetic oligonucleotide
  misc_feature 1..20: note = Target: SCN10A; (-) strand; PAM type: YTN; PAM sequence: CTA
  source 1..20: mol_type = other DNA
tcatgagaacagcatgggaa

SEQ ID NO: 44176 - DNA, 20 bp, synthetic construct
  misc_feature 1..20: note = Description of Artificial Sequence: Synthetic oligonucleotide
  misc_feature 1..20: note = Target: SCN10A; (-) strand; PAM type: YTN; PAM sequence: TTC
  source 1..20: mol_type = other DNA
actatcatgagaacagcatg

SEQ ID NO: 44177 - DNA, 20 bp, synthetic construct
  misc_feature 1..20: note = Description of Artificial Sequence: Synthetic oligonucleotide
  misc_feature 1..20: note = Target: SCN10A; (-) strand; PAM type: YTN; PAM sequence: TTA
  source 1..20: mol_type = other DNA
ttcactatcatgagaacagc

SEQ ID NO: 44178 - DNA, 20 bp, synthetic construct
  misc_feature 1..20: note = Description of Artificial Sequence: Synthetic oligonucleotide
  misc_feature 1..20: note = Target: SCN10A; (-) strand; PAM type: YTN; PAM sequence: CTT
  source 1..20: mol_type = other DNA
attcactatcatgagaacag

SEQ ID NO: 44179 - DNA, 20 bp, synthetic construct
  misc_feature 1..20: note = Description of Artificial Sequence: Synthetic oligonucleotide
  misc_feature 1..20: note = Target: SCN10A; (-) strand; PAM type: YTN; PAM sequence: CTC
  source 1..20: mol_type = other DNA
atgaaacttattcactatca

SEQ ID NO: 44180 - DNA, 20 bp, synthetic construct
  misc_feature 1..20: note = Description of Artificial Sequence: Synthetic oligonucleotide
  misc_feature 1..20: note = Target: SCN10A; (-) strand; PAM type: YTN; PAM sequence: TTA
  source 1..20: mol_type = other DNA
taataccgtcacatctcatg

SEQ ID NO: 44181 - DNA, 20 bp, synthetic construct
  misc_feature 1..20: note = Description of Artificial Sequence: Synthetic oligonucleotide
  misc_feature 1..20: note = Target: SCN10A; (-) strand; PAM type: YTN; PAM sequence: CTT
  source 1..20: mol_type = other DNA
ataataccgtcacatctcat

SEQ ID NO: 44182 - DNA, 20 bp, synthetic construct
  misc_feature 1..20: note = Description of Artificial Sequence: Synthetic oligonucleotide
  misc_feature 1..20: note = Target: SCN10A; (-) strand; PAM type: YTN; PAM sequence: CTC
  source 1..20: mol_type = other DNA
ccccttataataccgtcaca

SEQ ID NO: 44183 - DNA, 20 bp, synthetic construct
  misc_feature 1..20: note = Description of Artificial Sequence: Synthetic oligonucleotide
  misc_feature 1..20: note = Target: SCN10A; (-) strand; PAM type: YTN; PAM sequence: TTG
  source 1..20: mol_type = other DNA
ggcagggaaactccccctta

SEQ ID NO: 44184 - DNA, 20 bp, synthetic construct
  misc_feature 1..20: note = Description of Artificial Sequence: Synthetic oligonucleotide
  misc_feature 1..20: note = Target: SCN10A; (-) strand; PAM type: YTN; PAM sequence: TTA
  source 1..20: mol_type = other DNA
tgtggatggcagcaggcaaa

SEQ ID NO: 44185 - DNA, 20 bp, synthetic construct
  misc_feature 1..20: note = Description of Artificial Sequence: Synthetic oligonucleotide
  misc_feature 1..20: note = Target: SCN10A; (-) strand; PAM type: YTN; PAM sequence: CTT
  source 1..20: mol_type = other DNA
atgtggatggcagcaggcaa

SEQ ID NO: 44186 - DNA, 20 bp, synthetic construct
  misc_feature 1..20: note = Description of Artificial Sequence: Synthetic oligonucleotide
  misc_feature 1..20: note = Target: SCN10A; (-) strand; PAM type: YTN; PAM sequence: TTA
  source 1..20: mol_type = other DNA
caatcatggcaaaaggaaag

SEQ ID NO: 44187 - DNA, 20 bp, synthetic construct
  misc_feature 1..20: note = Description of Artificial Sequence: Synthetic oligonucleotide
  misc_feature 1..20: note = Target: SCN10A; (-) strand; PAM type: YTN; PAM sequence: CTT
  source 1..20: mol_type = other DNA
acaatcatggcaaaaggaaa

SEQ ID NO: 44188 - DNA, 20 bp, synthetic construct
  misc_feature 1..20: note = Description of Artificial Sequence: Synthetic oligonucleotide
  misc_feature 1..20: note = Target: SCN10A; (-) strand; PAM type: YTN; PAM sequence: CTG
  source 1..20: mol_type = other DNA
gggaagccttacaatcatgg

SEQ ID NO: 44189 - DNA, 20 bp, synthetic construct
  misc_feature 1..20: note = Description of Artificial Sequence: Synthetic oligonucleotide
  misc_feature 1..20: note = Target: SCN10A; (-) strand; PAM type: YTN; PAM sequence: TTC
  source 1..20: mol_type = other DNA
acatggctggggaagcctta

SEQ ID NO: 44190 - DNA, 20 bp, synthetic construct
  misc_feature 1..20: note = Description of Artificial Sequence: Synthetic oligonucleotide
  misc_feature 1..20: note = Target: SCN10A; (-) strand; PAM type: YTN; PAM sequence: CTT
  source 1..20: mol_type = other DNA
cacatggctggggaagcctt

SEQ ID NO: 44191 - DNA, 20 bp, synthetic construct
  misc_feature 1..20: note = Description of Artificial Sequence: Synthetic oligonucleotide
  misc_feature 1..20: note = Target: SCN10A; (-) strand; PAM type: YTN; PAM sequence: TTA
  source 1..20: mol_type = other DNA
cagcttcacatggctgggga

SEQ ID NO: 44192 - DNA, 20 bp, synthetic construct
  misc_feature 1..20: note = Description of Artificial Sequence: Synthetic oligonucleotide
  misc_feature 1..20: note = Target: SCN10A; (-) strand; PAM type: YTN; PAM sequence: CTT
  source 1..20: mol_type = other DNA
acagcttcacatggctgggg

SEQ ID NO: 44193 - DNA, 20 bp, synthetic construct
  misc_feature 1..20: note = Description of Artificial Sequence: Synthetic oligonucleotide
  misc_feature 1..20: note = Target: SCN10A; (-) strand; PAM type: YTN; PAM sequence: TTG
  source 1..20: mol_type = other DNA
gacttacagcttcacatggc

SEQ ID NO: 44194 - DNA, 20 bp, synthetic construct
  misc_feature 1..20: note = Description of Artificial Sequence: Synthetic oligonucleotide
  misc_feature 1..20: note = Target: SCN10A; (-) strand; PAM type: YTN; PAM sequence: TTA
  source 1..20: mol_type = other DNA
attggacttacagcttcaca

SEQ ID NO: 44195 - DNA, 20 bp, synthetic construct
  misc_feature 1..20: note = Description of Artificial Sequence: Synthetic oligonucleotide
  misc_feature 1..20: note = Target: SCN10A; (-) strand; PAM type: YTN; PAM sequence: TTT
  source 1..20: mol_type = other DNA
aattggacttacagcttcac

SEQ ID NO: 44196 - DNA, 20 bp, synthetic construct
  misc_feature 1..20: note = Description of Artificial Sequence: Synthetic oligonucleotide
  misc_feature 1..20: note = Target: SCN10A; (-) strand; PAM type: YTN; PAM sequence: TTA
  source 1..20: mol_type = other DNA
taaaagaaagaggtttaatt

SEQ ID NO: 44197 - DNA, 20 bp, synthetic construct
  misc_feature 1..20: note = Description of Artificial Sequence: Synthetic oligonucleotide
  misc_feature 1..20: note = Target: SCN10A; (-) strand; PAM type: YTN; PAM sequence: TTT
  source 1..20: mol_type = other DNA
ataaaagaaagaggtttaat

SEQ ID NO: 44198 - DNA, 20 bp, synthetic construct
  misc_feature 1..20: note = Description of Artificial Sequence: Synthetic oligonucleotide
  misc_feature 1..20: note = Target: SCN10A; (-) strand; PAM type: YTN; PAM sequence: CTG
  source 1..20: mol_type = other DNA
ggcaatttataaaagaaaga

SEQ ID NO: 44199 - DNA, 20 bp, synthetic construct
  misc_feature 1..20: note = Description of Artificial Sequence: Synthetic oligonucleotide
  misc_feature 1..20: note = Target: SCN10A; (-) strand; PAM type: YTN; PAM sequence: CTA
  source 1..20: mol_type = other DNA
agactgggcaatttataaaa

SEQ ID NO: 44200 - DNA, 20 bp, synthetic construct
  misc_feature 1..20: note = Description of Artificial Sequence: Synthetic oligonucleotide
  misc_feature 1..20: note = Target: SCN10A; (-) strand; PAM type: YTN; PAM sequence: CTG
  source 1..20: mol_type = other DNA
ataaagacatacctaagact

SEQ ID NO: 44201 - DNA, 20 bp, synthetic construct
  misc_feature 1..20: note = Description of Artificial Sequence: Synthetic oligonucleotide
  misc_feature 1..20: note = Target: SCN10A; (-) strand; PAM type: YTN; PAM sequence: CTG
  source 1..20: mol_type = other DNA
ctgataaagacatacctaag

SEQ ID NO: 44202 - DNA, 20 bp, synthetic construct
  misc_feature 1..20: note = Description of Artificial Sequence: Synthetic oligonucleotide
  misc_feature 1..20: note = Target: SCN10A; (-) strand; PAM type: YTN; PAM sequence: TTC
  source 1..20: mol_type = other DNA
atgctgctgataaagacata

SEQ ID NO: 44203 - DNA, 20 bp, synthetic construct
  misc_feature 1..20: note = Description of Artificial Sequence: Synthetic oligonucleotide
  misc_feature 1..20: note = Target: SCN10A; (-) strand; PAM type: YTN; PAM sequence: TTT
  source 1..20: mol_type = other DNA
catgctgctgataaagacat

SEQ ID NO: 44204 - DNA, 20 bp, synthetic construct
  misc_feature 1..20: note = Description of Artificial Sequence: Synthetic oligonucleotide
  misc_feature 1..20: note = Target: SCN10A; (-) strand; PAM type: YTN; PAM sequence: TTT
  source 1..20: mol_type = other DNA
tcatgctgctgataaagaca

SEQ ID NO: 44205 - DNA, 20 bp, synthetic construct
  misc_feature 1..20: note = Description of Artificial Sequence: Synthetic oligonucleotide
  misc_feature 1..20: note = Target: SCN10A; (-) strand; PAM type: YTN; PAM sequence: CTA
  source 1..20: mol_type = other DNA
ttttcatgctgctgataaag

SEQ ID NO: 44206 - DNA, 20 bp, synthetic construct
  misc_feature 1..20: note = Description of Artificial Sequence: Synthetic oligonucleotide
  misc_feature 1..20: note = Target: SCN10A; (-) strand; PAM type: YTN; PAM sequence: TTA
  source 1..20: mol_type = other DNA
gtctattttcatgctgctga

SEQ ID NO: 44207 - DNA, 20 bp, synthetic construct
  misc_feature 1..20: note = Description of Artificial Sequence: Synthetic oligonucleotide
  misc_feature 1..20: note = Target: SCN10A; (-) strand; PAM type: YTN; PAM sequence: TTG
  source 1..20: mol_type = other DNA
tattagtctattttcatgct

SEQ ID NO: 44208 - DNA, 20 bp, synthetic construct
  misc_feature 1..20: note = Description of Artificial Sequence: Synthetic oligonucleotide
  misc_feature 1..20: note = Target: SCN10A; (-) strand; PAM type: YTN; PAM sequence: TTT
  source 1..20: mol_type = other DNA
gtattagtctattttcatgc

SEQ ID NO: 44209 - DNA, 20 bp, synthetic construct
  misc_feature 1..20: note = Description of Artificial Sequence: Synthetic oligonucleotide
  misc_feature 1..20: note = Target: SCN10A; (-) strand; PAM type: YTN; PAM sequence: TTG
  source 1..20: mol_type = other DNA
tatatatttgtattagtcta

SEQ ID NO: 44210 - DNA, 20 bp, synthetic construct
  misc_feature 1..20: note = Description of Artificial Sequence: Synthetic oligonucleotide
  misc_feature 1..20: note = Target: SCN10A; (-) strand; PAM type: YTN; PAM sequence: TTA
  source 1..20: mol_type = other DNA
ttgtatatatttgtattagt

SEQ ID NO: 44211 - DNA, 20 bp, synthetic construct
  misc_feature 1..20: note = Description of Artificial Sequence: Synthetic oligonucleotide
  misc_feature 1..20: note = Target: SCN10A; (-) strand; PAM type: YTN; PAM sequence: TTT
  source 1..20: mol_type = other DNA
attgtatatatttgtattag

SEQ ID NO: 44212 - DNA, 20 bp, synthetic construct
  misc_feature 1..20: note = Description of Artificial Sequence: Synthetic oligonucleotide
  misc_feature 1..20: note = Target: SCN10A; (-) strand; PAM type: YTN; PAM sequence: TTT
  source 1..20: mol_type = other DNA
tattgtatatatttgtatta

SEQ ID NO: 44213 - DNA, 20 bp, synthetic construct
  misc_feature 1..20: note = Description of Artificial Sequence: Synthetic oligonucleotide
  misc_feature 1..20: note = Target: SCN10A; (-) strand; PAM type: YTN; PAM sequence: TTA
  source 1..20: mol_type = other DNA
aaaaatatattttattgtat

SEQ ID NO: 44214 - DNA, 20 bp, synthetic construct
  misc_feature 1..20: note = Description of Artificial Sequence: Synthetic oligonucleotide
  misc_feature 1..20: note = Target: SCN10A; (-) strand; PAM type: YTN; PAM sequence: TTT
  source 1..20: mol_type = other DNA
aaaaaatatattttattgta

SEQ ID NO: 44215 - DNA, 20 bp, synthetic construct
  misc_feature 1..20: note = Description of Artificial Sequence: Synthetic oligonucleotide
  misc_feature 1..20: note = Target: SCN10A; (-) strand; PAM type: YTN; PAM sequence: TTT
  source 1..20: mol_type = other DNA
taaaaaatatattttattgt

SEQ ID NO: 44216 - DNA, 20 bp, synthetic construct
  misc_feature 1..20: note = Description of Artificial Sequence: Synthetic oligonucleotide
  misc_feature 1..20: note = Target: SCN10A; (-) strand; PAM type: YTN; PAM sequence: TTA
  source 1..20: mol_type = other DNA
aaattttaaaaaatatattt

SEQ ID NO: 44217 - DNA, 20 bp, synthetic construct
  misc_feature 1..20: note = Description of Artificial Sequence: Synthetic oligonucleotide
  misc_feature 1..20: note = Target: SCN10A; (-) strand; PAM type: YTN; PAM sequence: TTT
  source 1..20: mol_type = other DNA
aaaattttaaaaaatatatt

SEQ ID NO: 44218 - DNA, 20 bp, synthetic construct
  misc_feature 1..20: note = Description of Artificial Sequence: Synthetic oligonucleotide
  misc_feature 1..20: note = Target: SCN10A; (-) strand; PAM type: YTN; PAM sequence: TTT
  source 1..20: mol_type = other DNA
taaaattttaaaaaatatat

SEQ ID NO: 44219 - DNA, 20 bp, synthetic construct
  misc_feature 1..20: note = Description of Artificial Sequence: Synthetic oligonucleotide
  misc_feature 1..20: note = Target: SCN10A; (-) strand; PAM type: YTN; PAM sequence: CTT
  source 1..20: mol_type = other DNA
ttaaaattttaaaaaatata

SEQ ID NO: 44220 - DNA, 20 bp, synthetic construct
  misc_feature 1..20: note = Description of Artificial Sequence: Synthetic oligonucleotide
  misc_feature 1..20: note = Target: SCN10A; (-) strand; PAM type: YTN; PAM sequence: TTA
  source 1..20: mol_type = other DNA
tcttttaaaattttaaaaaa

SEQ ID NO: 44221 - DNA, 20 bp, synthetic construct
  misc_feature 1..20: note = Description of Artificial Sequence: Synthetic oligonucleotide
  misc_feature 1..20: note = Target: SCN10A; (-) strand; PAM type: YTN; PAM sequence: CTG
  source 1..20: mol_type = other DNA
ttatcttttaaaattttaaa

SEQ ID NO: 44222 - DNA, 20 bp, synthetic construct
  misc_feature 1..20: note = Description of Artificial Sequence: Synthetic oligonucleotide
  misc_feature 1..20: note = Target: SCN10A; (-) strand; PAM type: YTN; PAM sequence: TTG
  source 1..20: mol_type = other DNA
tgtctgttatcttttaaaat

SEQ ID NO: 44223 - DNA, 20 bp, synthetic construct
  misc_feature 1..20: note = Description of Artificial Sequence: Synthetic oligonucleotide
  misc_feature 1..20: note = Target: SCN10A; (-) strand; PAM type: YTN; PAM sequence: TTT
  source 1..20: mol_type = other DNA
gtgtctgttatcttttaaaa

SEQ ID NO: 44224 - DNA, 20 bp, synthetic construct
  misc_feature 1..20: note = Description of Artificial Sequence: Synthetic oligonucleotide
  misc_feature 1..20: note = Target: SCN10A; (-) strand; PAM type: YTN; PAM sequence: TTT
  source 1..20: mol_type = other DNA
tgtgtctgttatcttttaaa

SEQ ID NO: 44225 - DNA, 20 bp, synthetic construct
  misc_feature 1..20: note = Description of Artificial Sequence: Synthetic oligonucleotide
  misc_feature 1..20: note = Target: SCN10A; (-) strand; PAM type: YTN; PAM sequence: TTT
  source 1..20: mol_type = other DNA
ttgtgtctgttatcttttaa

SEQ ID NO: 44226 - DNA, 20 bp, synthetic construct
  misc_feature 1..20: note = Description of Artificial Sequence: Synthetic oligonucleotide
  misc_feature 1..20: note = Target: SCN10A; (-) strand; PAM type: YTN; PAM sequence: CTT
  source 1..20: mol_type = other DNA
tttgtgtctgttatctttta

SEQ ID NO: 44227 - DNA, 20 bp, synthetic construct
  misc_feature 1..20: note = Description of Artificial Sequence: Synthetic oligonucleotide
  misc_feature 1..20: note = Target: SCN10A; (-) strand; PAM type: YTN; PAM sequence: CTA
  source 1..20: mol_type = other DNA
tccatctttttgtgtctgtt

SEQ ID NO: 44228 - DNA, 20 bp, synthetic construct
  misc_feature 1..20: note = Description of Artificial Sequence: Synthetic oligonucleotide
  misc_feature 1..20: note = Target: SCN10A; (-) strand; PAM type: YTN; PAM sequence: CTA
  source 1..20: mol_type = other DNA
tcctatccatctttttgtgt

SEQ ID NO: 44229 - DNA, 20 bp, synthetic construct
  misc_feature 1..20: note = Description of Artificial Sequence: Synthetic oligonucleotide
  misc_feature 1..20: note = Target: SCN10A; (-) strand; PAM type: YTN; PAM sequence: CTA
  source 1..20: mol_type = other DNA
tctatcctatccatcttttt

SEQ ID NO: 44230 - DNA, 20 bp, synthetic construct
  misc_feature 1..20: note = Description of Artificial Sequence: Synthetic oligonucleotide
  misc_feature 1..20: note = Target: SCN10A; (-) strand; PAM type: YTN; PAM sequence: TTC
  source 1..20: mol_type = other DNA
aactatctatcctatccatc

SEQ ID NO: 44231 - DNA, 20 bp, synthetic construct
  misc_feature 1..20: note = Description of Artificial Sequence: Synthetic oligonucleotide
  misc_feature 1..20: note = Target: SCN10A; (-) strand; PAM type: YTN; PAM sequence: TTC
  source 1..20: mol_type = other DNA
cattcaactatctatcctat

SEQ ID NO: 44232 - DNA, 20 bp, synthetic construct
  misc_feature 1..20: note = Description of Artificial Sequence: Synthetic oligonucleotide
  misc_feature 1..20: note = Target: SCN10A; (-) strand; PAM type: YTN; PAM sequence: CTT
  source 1..20: mol_type = other DNA
ccattcaactatctatccta

SEQ ID NO: 44233 - DNA, 20 bp, synthetic construct
  misc_feature 1..20: note = Description of Artificial Sequence: Synthetic oligonucleotide
  misc_feature 1..20: note = Target: SCN10A; (-) strand; PAM type: YTN; PAM sequence: CTC
  source 1..20: mol_type = other DNA
ccatccttccattcaactat

SEQ ID NO: 44234 - DNA, 20 bp, synthetic construct
  misc_feature 1..20: note = Description of Artificial Sequence: Synthetic oligonucleotide
  misc_feature 1..20: note = Target: SCN10A; (-) strand; PAM type: YTN; PAM sequence: TTC
  source 1..20: mol_type = other DNA
tcccatccttccattcaact

SEQ ID NO: 44235 - DNA, 20 bp, synthetic construct
  misc_feature 1..20: note = Description of Artificial Sequence: Synthetic oligonucleotide
  misc_feature 1..20: note = Target: SCN10A; (-) strand; PAM type: YTN; PAM sequence: TTT
  source 1..20: mol_type = other DNA
ctcccatccttccattcaac

SEQ ID NO: 44236 - DNA, 20 bp, synthetic construct
  misc_feature 1..20: note = Description of Artificial Sequence: Synthetic oligonucleotide
  misc_feature 1..20: note = Target: SCN10A; (-) strand; PAM type: YTN; PAM sequence: TTG
  source 1..20: mol_type = other DNA
tttctcccatccttccattc

SEQ ID NO: 44237 - DNA, 20 bp, synthetic construct
  misc_feature 1..20: note = Description of Artificial Sequence: Synthetic oligonucleotide
  misc_feature 1..20: note = Target: SCN10A; (-) strand; PAM type: YTN; PAM sequence: TTT
  source 1..20: mol_type = other DNA
gtttctcccatccttccatt

SEQ ID NO: 44238 - DNA, 20 bp, synthetic construct
  misc_feature 1..20: note = Description of Artificial Sequence: Synthetic oligonucleotide
  misc_feature 1..20: note = Target: SCN10A; (-) strand; PAM type: YTN; PAM sequence: TTG
  source 1..20: mol_type = other DNA
tttgtttctcccatccttcc

SEQ ID NO: 44239 - DNA, 20 bp, synthetic construct
  misc_feature 1..20: note = Description of Artificial Sequence: Synthetic oligonucleotide
  misc_feature 1..20: note = Target: SCN10A; (-) strand; PAM type: YTN; PAM sequence: CTT
  source 1..20: mol_type = other DNA
gtttgtttctcccatccttc

SEQ ID NO: 44240 - DNA, 20 bp, synthetic construct
  misc_feature 1..20: note = Description of Artificial Sequence: Synthetic oligonucleotide
  misc_feature 1..20: note = Target: SCN10A; (-) strand; PAM type: YTN; PAM sequence: TTC
  source 1..20: mol_type = other DNA
ttgtttgtttctcccatcct

SEQ ID NO: 44241 - DNA, 20 bp, synthetic construct
  misc_feature 1..20: note = Description of Artificial Sequence: Synthetic oligonucleotide
  misc_feature 1..20: note = Target: SCN10A; (-) strand; PAM type: YTN; PAM sequence: TTT
  source 1..20: mol_type = other DNA
cttgtttgtttctcccatcc

SEQ ID NO: 44242 - DNA, 20 bp, synthetic construct
  misc_feature 1..20: note = Description of Artificial Sequence: Synthetic oligonucleotide
  misc_feature 1..20: note = Target: SCN10A; (-) strand; PAM type: YTN; PAM sequence: CTT
  source 1..20: mol_type = other DNA
tcttgtttgtttctcccatc

SEQ ID NO: 44243 - DNA, 20 bp, synthetic construct
  misc_feature 1..20: note = Description of Artificial Sequence: Synthetic oligonucleotide
  misc_feature 1..20: note = Target: SCN10A; (-) strand; PAM type: YTN; PAM sequence: TTC
  source 1..20: mol_type = other DNA
ctttcttgtttgtttctccc

SEQ ID NO: 44244 - DNA, 20 bp, synthetic construct
  misc_feature 1..20: note = Description of Artificial Sequence: Synthetic oligonucleotide
  misc_feature 1..20: note = Target: SCN10A; (-) strand; PAM type: YTN; PAM sequence: TTT
  source 1..20: mol_type = other DNA
cctttcttgtttgtttctcc

SEQ ID NO: 44245 - DNA, 20 bp, synthetic construct
  misc_feature 1..20: note = Description of Artificial Sequence: Synthetic oligonucleotide
  misc_feature 1..20: note = Target: SCN10A; (-) strand; PAM type: YTN; PAM sequence: TTT
  source 1..20: mol_type = other DNA
tcctttcttgtttgtttctc

SEQ ID NO: 44246 - DNA, 20 bp, synthetic construct
  misc_feature 1..20: note = Description of Artificial Sequence: Synthetic oligonucleotide
  misc_feature 1..20: note = Target: SCN10A; (-) strand; PAM type: YTN; PAM sequence: CTT
  source 1..20: mol_type = other DNA
ttcctttcttgtttgtttct

SEQ ID NO: 44247 - DNA, 20 bp, synthetic construct
  misc_feature 1..20: note = Description of Artificial Sequence: Synthetic oligonucleotide
  misc_feature 1..20: note = Target: SCN10A; (-) strand; PAM type: YTN; PAM sequence: TTC
  source 1..20: mol_type = other DNA
atacttttcctttcttgttt

SEQ ID NO: 44248 - DNA, 20 bp, synthetic construct
  misc_feature 1..20: note = Description of Artificial Sequence: Synthetic oligonucleotide
  misc_feature 1..20: note = Target: SCN10A; (-) strand; PAM type: YTN; PAM sequence: TTT
  source 1..20: mol_type = other DNA
catacttttcctttcttgtt

SEQ ID NO: 44249 - DNA, 20 bp, synthetic construct
  misc_feature 1..20: note = Description of Artificial Sequence: Synthetic oligonucleotide
  misc_feature 1..20: note = Target: SCN10A; (-) strand; PAM type: YTN; PAM sequence: CTT
  source 1..20: mol_type = other DNA
tcatacttttcctttcttgt

SEQ ID NO: 44250 - DNA, 20 bp, synthetic construct
  misc_feature 1..20: note = Description of Artificial Sequence: Synthetic oligonucleotide
  misc_feature 1..20: note = Target: SCN10A; (-) strand; PAM type: YTN; PAM sequence: CTG
  source 1..20: mol_type = other DNA
ctttcatacttttcctttct

SEQ ID NO: 44251 - DNA, 20 bp, synthetic construct
  misc_feature 1..20: note = Description of Artificial Sequence: Synthetic oligonucleotide
  misc_feature 1..20: note = Target: SCN10A; (-) strand; PAM type: YTN; PAM sequence: TTC
  source 1..20: mol_type = other DNA
cctgctttcatacttttcct

SEQ ID NO: 44252 - DNA, 20 bp, synthetic construct
  misc_feature 1..20: note = Description of Artificial Sequence: Synthetic oligonucleotide
  misc_feature 1..20: note = Target: SCN10A; (-) strand; PAM type: YTN; PAM sequence: CTA
  source 1..20: mol_type = other DNA
ttccctgctttcatactttt

SEQ ID NO: 44253 - DNA, 20 bp, synthetic construct
  misc_feature 1..20: note = Description of Artificial Sequence: Synthetic oligonucleotide
  misc_feature 1..20: note = Target: SCN10A; (-) strand; PAM type: YTN; PAM sequence: TTC
  source 1..20: mol_type = other DNA
actattccctgctttcatac

SEQ ID NO: 44254 - DNA, 20 bp, synthetic construct
  misc_feature 1..20: note = Description of Artificial Sequence: Synthetic oligonucleotide
  misc_feature 1..20: note = Target: SCN10A; (-) strand; PAM type: YTN; PAM sequence: CTA
  source 1..20: mol_type = other DNA
tccattcactattccctgct

SEQ ID NO: 44255 - DNA, 20 bp, synthetic construct
  misc_feature 1..20: note = Description of Artificial Sequence: Synthetic oligonucleotide
  misc_feature 1..20: note = Target: SCN10A; (-) strand; PAM type: YTN; PAM sequence: CTC
  source 1..20: mol_type = other DNA
atctatccattcactattcc

SEQ ID NO: 44256 - DNA, 20 bp, synthetic construct
  misc_feature 1..20: note = Description of Artificial Sequence: Synthetic oligonucleotide
  misc_feature 1..20: note = Target: SCN10A; (-) strand; PAM type: YTN; PAM sequence: CTA
  source 1..20: mol_type = other DNA
tctcatctatccattcacta

SEQ ID NO: 44257 - DNA, 20 bp, synthetic construct
  misc_feature 1..20: note = Description of Artificial Sequence: Synthetic oligonucleotide
  misc_feature 1..20: note = Target: SCN10A; (-) strand; PAM type: YTN; PAM sequence: TTA
  source 1..20: mol_type = other DNA
tccacctatctcatctatcc

SEQ ID NO: 44258 - DNA, 20 bp, synthetic construct
  misc_feature 1..20: note = Description of Artificial Sequence: Synthetic oligonucleotide
  misc_feature 1..20: note = Target: SCN10A; (-) strand; PAM type: YTN; PAM sequence: CTT
  source 1..20: mol_type = other DNA
atccacctatctcatctatc

SEQ ID NO: 44259 - DNA, 20 bp, synthetic construct
  misc_feature 1..20: note = Description of Artificial Sequence: Synthetic oligonucleotide
  misc_feature 1..20: note = Target: SCN10A; (-) strand; PAM type: YTN; PAM sequence: CTC
  source 1..20: mol_type = other DNA
ttatccacctatctcatcta

SEQ ID NO: 44260 - DNA, 20 bp, synthetic construct
  misc_feature 1..20: note = Description of Artificial Sequence: Synthetic oligonucleotide
  misc_feature 1..20: note = Target: SCN10A; (-) strand; PAM type: YTN; PAM sequence: TTC
  source 1..20: mol_type = other DNA
tcttatccacctatctcatc

SEQ ID NO: 44261 - DNA, 20 bp, synthetic construct
  misc_feature 1..20: note = Description of Artificial Sequence: Synthetic oligonucleotide
  misc_feature 1..20: note = Target: SCN10A; (-) strand; PAM type: YTN; PAM sequence: CTT
  source 1..20: mol_type = other DNA
ctcttatccacctatctcat

SEQ ID NO: 44262 - DNA, 20 bp, synthetic construct
  misc_feature 1..20: note = Description of Artificial Sequence: Synthetic oligonucleotide
  misc_feature 1..20: note = Target: SCN10A; (-) strand; PAM type: YTN; PAM sequence: TTA
  source 1..20: mol_type = other DNA
cccagccatccatccttctc

SEQ ID NO: 44263 - DNA, 20 bp, synthetic construct
  misc_feature 1..20: note = Description of Artificial Sequence: Synthetic oligonucleotide
  misc_feature 1..20: note = Target: SCN10A; (-) strand; PAM type: YTN; PAM sequence: TTT
  source 1..20: mol_type = other DNA
acccagccatccatccttct

SEQ ID NO: 44264 - DNA, 20 bp, synthetic construct
  misc_feature 1..20: note = Description of Artificial Sequence: Synthetic oligonucleotide
  misc_feature 1..20: note = Target: SCN10A; (-) strand; PAM type: YTN; PAM sequence: TTT
  source 1..20: mol_type = other DNA
tacccagccatccatccttc

SEQ ID NO: 44265 - DNA, 20 bp, synthetic construct
  misc_feature 1..20: note = Description of Artificial Sequence: Synthetic oligonucleotide
  misc_feature 1..20: note = Target: SCN10A; (-) strand; PAM type: YTN; PAM sequence: TTA
  source 1..20: mol_type = other DNA
gtcattttacccagccatcc

SEQ ID NO: 44266 - DNA, 20 bp, synthetic construct
  misc_feature 1..20: note = Description of Artificial Sequence: Synthetic oligonucleotide
  misc_feature 1..20: note = Target: SCN10A; (-) strand; PAM type: YTN; PAM sequence: TTC
  source 1..20: mol_type = other DNA
atgcattagtcattttaccc

SEQ ID NO: 44267 - DNA, 20 bp, synthetic construct
  misc_feature 1..20: note = Description of Artificial Sequence: Synthetic oligonucleotide
  misc_feature 1..20: note = Target: SCN10A; (-) strand; PAM type: YTN; PAM sequence: TTC
  source 1..20: mol_type = other DNA
cattcatgcattagtcattt

SEQ ID NO: 44268 - DNA, 20 bp, synthetic construct
  misc_feature 1..20: note = Description of Artificial Sequence: Synthetic oligonucleotide
  misc_feature 1..20: note = Target: SCN10A; (-) strand; PAM type: YTN; PAM sequence: TTT
  source 1..20: mol_type = other DNA
ccattcatgcattagtcatt

SEQ ID NO: 44269 - DNA, 20 bp, synthetic construct
  misc_feature 1..20: note = Description of Artificial Sequence: Synthetic oligonucleotide
  misc_feature 1..20: note = Target: SCN10A; (-) strand; PAM type: YTN; PAM sequence: CTT
  source 1..20: mol_type = other DNA
tccattcatgcattagtcat

SEQ ID NO: 44270 - DNA, 20 bp, synthetic construct
  misc_feature 1..20: note = Description of Artificial Sequence: Synthetic oligonucleotide
  misc_feature 1..20: note = Target: SCN10A; (-) strand; PAM type: YTN; PAM sequence: CTC
  source 1..20: mol_type = other DNA
cccatctttccattcatgca

SEQ ID NO: 44271 - DNA, 20 bp, synthetic construct
  misc_feature 1..20: note = Description of Artificial Sequence: Synthetic oligonucleotide
  misc_feature 1..20: note = Target: SCN10A; (-) strand; PAM type: YTN; PAM sequence: CTG
  source 1..20: mol_type = other DNA
tccagctccccatctttcca

SEQ ID NO: 44272 - DNA, 20 bp, synthetic construct
  misc_feature 1..20: note = Description of Artificial Sequence: Synthetic oligonucleotide
  misc_feature 1..20: note = Target: SCN10A; (-) strand; PAM type: YTN; PAM sequence: TTC
  source 1..20: mol_type = other DNA
tgtccagctccccatctttc

SEQ ID NO: 44273 - DNA, 20 bp, synthetic construct
  misc_feature 1..20: note = Description of Artificial Sequence: Synthetic oligonucleotide
  misc_feature 1..20: note = Target: SCN10A; (-) strand; PAM type: YTN; PAM sequence: CTA
  source 1..20: mol_type = other DNA
ttctgtccagctccccatct

SEQ ID NO: 44274 - DNA, 20 bp, synthetic construct
  misc_feature 1..20: note = Description of Artificial Sequence: Synthetic oligonucleotide
  misc_feature 1..20: note = Target: SCN10A; (-) strand; PAM type: YTN; PAM sequence: TTC
  source 1..20: mol_type = other DNA
atctattctgtccagctccc

SEQ ID NO: 44275 - DNA, 20 bp, synthetic construct
  misc_feature 1..20: note = Description of Artificial Sequence: Synthetic oligonucleotide
  misc_feature 1..20: note = Target: SCN10A; (-) strand; PAM type: YTN; PAM sequence: TTC
  source 1..20: mol_type = other DNA
cattcatctattctgtccag

SEQ ID NO: 44276 - DNA, 20 bp, synthetic construct
  misc_feature 1..20: note = Description of Artificial Sequence: Synthetic oligonucleotide
  misc_feature 1..20: note = Target: SCN10A; (-) strand; PAM type: YTN; PAM sequence: TTA
  source 1..20: mol_type = other DNA
ttccattcatctattctgtc

SEQ ID NO: 44277 - DNA, 20 bp, synthetic construct
  misc_feature 1..20: note = Description of Artificial Sequence: Synthetic oligonucleotide
  misc_feature 1..20: note = Target: SCN10A; (-) strand; PAM type: YTN; PAM sequence: TTT
  source 1..20: mol_type = other DNA
attccattcatctattctgt

SEQ ID NO: 44278 - DNA, 20 bp, synthetic construct
  misc_feature 1..20: note = Description of Artificial Sequence: Synthetic oligonucleotide
  misc_feature 1..20: note = Target: SCN10A; (-) strand; PAM type: YTN; PAM sequence: CTA
  source 1..20: mol_type = other DNA
atttattccattcatctatt

SEQ ID NO: 44279 - DNA, 20 bp, synthetic construct
  misc_feature 1..20: note = Description of Artificial Sequence: Synthetic oligonucleotide
  misc_feature 1..20: note = Target: SCN10A; (-) strand; PAM type: YTN; PAM sequence: TTC
  source 1..20: mol_type = other DNA
actaatttattccattcatc

SEQ ID NO: 44280 - DNA, 20 bp, synthetic construct
  misc_feature 1..20: note = Description of Artificial Sequence: Synthetic oligonucleotide
  misc_feature 1..20: note = Target: SCN10A; (-) strand; PAM type: YTN; PAM sequence: TTC
  source 1..20: mol_type = other DNA
cagtcattcactaatttatt

SEQ ID NO: 44281 - DNA, 20 bp, synthetic construct
  misc_feature 1..20: note = Description of Artificial Sequence: Synthetic oligonucleotide
  misc_feature 1..20: note = Target: SCN10A; (-) strand; PAM type: YTN; PAM sequence: CTT
  source 1..20: mol_type = other DNA
ccagtcattcactaatttat

SEQ ID NO: 44282 - DNA, 20 bp, synthetic construct
  misc_feature 1..20: note = Description of Artificial Sequence: Synthetic oligonucleotide
  misc_feature 1..20: note = Target: SCN10A; (-) strand; PAM type: YTN; PAM sequence: CTA
  source 1..20: mol_type = other DNA
tcaaccttccagtcattcac

SEQ ID NO: 44283 - DNA, 20 bp, synthetic construct
  misc_feature 1..20: note = Description of Artificial Sequence: Synthetic oligonucleotide
  misc_feature 1..20: note = Target: SCN10A; (-) strand; PAM type: YTN; PAM sequence: TTC
  source 1..20: mol_type = other DNA
atccatcctatcaaccttcc

SEQ ID NO: 44284 - DNA, 20 bp, synthetic construct
  misc_feature 1..20: note = Description of Artificial Sequence: Synthetic oligonucleotide
  misc_feature 1..20: note = Target: SCN10A; (-) strand; PAM type: YTN; PAM sequence: TTC
  source 1..20: mol_type = other DNA
atcatccattcatccatcct

SEQ ID NO: 44285 - DNA, 20 bp, synthetic construct
  misc_feature 1..20: note = Description of Artificial Sequence: Synthetic oligonucleotide
  misc_feature 1..20: note = Target: SCN10A; (-) strand; PAM type: YTN; PAM sequence: TTC
  source 1..20: mol_type = other DNA
cattcatcatccattcatcc

SEQ ID NO: 44286 - DNA, 20 bp, synthetic construct
  misc_feature 1..20: note = Description of Artificial Sequence: Synthetic oligonucleotide
  misc_feature 1..20: note = Target: SCN10A; (-) strand; PAM type: YTN; PAM sequence: CTT
  source 1..20: mol_type = other DNA
ccattcatcatccattcatc

SEQ ID NO: 44287 - DNA, 20 bp, synthetic construct
  misc_feature 1..20: note = Description of Artificial Sequence: Synthetic oligonucleotide
  misc_feature 1..20: note = Target: SCN10A; (-) strand; PAM type: YTN; PAM sequence: TTC
  source 1..20: mol_type = other DNA
ccttccattcatcatccatt

SEQ ID NO: 44288 - DNA, 20 bp, synthetic construct
  misc_feature 1..20: note = Description of Artificial Sequence: Synthetic oligonucleotide
  misc_feature 1..20: note = Target: SCN10A; (-) strand; PAM type: YTN; PAM sequence: TTT
  source 1..20: mol_type = other DNA
cccttccattcatcatccat

SEQ ID NO: 44289 - DNA, 20 bp, synthetic construct
  misc_feature 1..20: note = Description of Artificial Sequence: Synthetic oligonucleotide
  misc_feature 1..20: note = Target: SCN10A; (-) strand; PAM type: YTN; PAM sequence: CTT
  source 1..20: mol_type = other DNA
tcccttccattcatcatcca

SEQ ID NO: 44290 - DNA, 20 bp, synthetic construct
  misc_feature 1..20: note = Description of Artificial Sequence: Synthetic oligonucleotide
  misc_feature 1..20: note = Target: SCN10A; (-) strand; PAM type: YTN; PAM sequence: TTC
  source 1..20: mol_type = other DNA
atccctttcccttccattca

SEQ ID NO: 44291 - DNA, 20 bp, synthetic construct
  misc_feature 1..20: note = Description of Artificial Sequence: Synthetic oligonucleotide
  misc_feature 1..20: note = Target: SCN10A; (-) strand; PAM type: YTN; PAM sequence: TTC
  source 1..20: mol_type = other DNA
attcatccctttcccttcca

SEQ ID NO: 44292 - DNA, 20 bp, synthetic construct
  misc_feature 1..20: note = Description of Artificial Sequence: Synthetic oligonucleotide
  misc_feature 1..20: note = Target: SCN10A; (-) strand; PAM type: YTN; PAM sequence: CTG
  source 1..20: mol_type = other DNA
ttcattcatccctttccctt

SEQ ID NO: 44293 - DNA, 20 bp, synthetic construct
  misc_feature 1..20: note = Description of Artificial Sequence: Synthetic oligonucleotide
  misc_feature 1..20: note = Target: SCN10A; (-) strand; PAM type: YTN; PAM sequence: TTA
  source 1..20: mol_type = other DNA
tctgttcattcatccctttc

SEQ ID NO: 44294 - DNA, 20 bp, synthetic construct
  misc_feature 1..20: note = Description of Artificial Sequence: Synthetic oligonucleotide
  misc_feature 1..20: note = Target: SCN10A; (-) strand; PAM type: YTN; PAM sequence: CTT
  source 1..20: mol_type = other DNA
atctgttcattcatcccttt

SEQ ID NO: 44295 - DNA, 20 bp, synthetic construct
  misc_feature 1..20: note = Description of Artificial Sequence: Synthetic oligonucleotide
  misc_feature 1..20: note = Target: SCN10A; (-) strand; PAM type: YTN; PAM sequence: TTC
  source 1..20: mol_type = other DNA
cacttatctgttcattcatc

SEQ ID NO: 44296 - DNA, 20 bp, synthetic construct
  misc_feature 1..20: note = Description of Artificial Sequence: Synthetic oligonucleotide
  misc_feature 1..20: note = Target: SCN10A; (-) strand; PAM type: YTN; PAM sequence: CTT
  source 1..20: mol_type = other DNA
ccacttatctgttcattcat

SEQ ID NO: 44297 - DNA, 20 bp, synthetic construct
  misc_feature 1..20: note = Description of Artificial Sequence: Synthetic oligonucleotide
  misc_feature 1..20: note = Target: SCN10A; (-) strand; PAM type: YTN; PAM sequence: TTC
  source 1..20: mol_type = other DNA
ttccacttatctgttcattc

SEQ ID NO: 44298 - DNA, 20 bp, synthetic construct
  misc_feature 1..20: note = Description of Artificial Sequence: Synthetic oligonucleotide
  misc_feature 1..20: note = Target: SCN10A; (-) strand; PAM type: YTN; PAM sequence: TTT
  source 1..20: mol_type = other DNA
cttccacttatctgttcatt

SEQ ID NO: 44299 - DNA, 20 bp, synthetic construct
  misc_feature 1..20: note = Description of Artificial Sequence: Synthetic oligonucleotide
  misc_feature 1..20: note = Target: SCN10A; (-) strand; PAM type: YTN; PAM sequence: CTT
  source 1..20: mol_type = other DNA
tcttccacttatctgttcat

SEQ ID NO: 44300 - DNA, 20 bp, synthetic construct
  misc_feature 1..20: note = Description of Artificial Sequence: Synthetic oligonucleotide
  misc_feature 1..20: note = Target: SCN10A; (-) strand; PAM type: YTN; PAM sequence: TTC
  source 1..20: mol_type = other DNA
ctttcttccacttatctgtt

SEQ ID NO: 44301 - DNA, 20 bp, synthetic construct
  misc_feature 1..20: note = Description of Artificial Sequence: Synthetic oligonucleotide
  misc_feature 1..20: note = Target: SCN10A; (-) strand; PAM type: YTN; PAM sequence: CTT
  source 1..20: mol_type = other DNA
cctttcttccacttatctgt

SEQ ID NO: 44302 - DNA, 20 bp, synthetic construct
  misc_feature 1..20: note = Description of Artificial Sequence: Synthetic oligonucleotide
  misc_feature 1..20: note = Target: SCN10A; (-) strand; PAM type: YTN; PAM sequence: TTC
  source 1..20: mol_type = other DNA
ttcctttcttccacttatct

SEQ ID NO: 44303 - DNA, 20 bp, synthetic construct
  misc_feature 1..20: note = Description of Artificial Sequence: Synthetic oligonucleotide
  misc_feature 1..20: note = Target: SCN10A; (-) strand; PAM type: YTN; PAM sequence: CTA
  source 1..20: mol_type = other DNA
ttcttcctttcttccactta

SEQ ID NO: 44304 - DNA, 20 bp, synthetic construct
  misc_feature 1..20: note = Description of Artificial Sequence: Synthetic oligonucleotide
  misc_feature 1..20: note = Target: SCN10A; (-) strand; PAM type: YTN; PAM sequence: CTA
  source 1..20: mol_type = other DNA
tccatctattcttcctttct

SEQ ID NO: 44305 - DNA, 20 bp, synthetic construct
  misc_feature 1..20: note = Description of Artificial Sequence: Synthetic oligonucleotide
  misc_feature 1..20: note = Target: SCN10A; (-) strand; PAM type: YTN; PAM sequence: TTC
  source 1..20: mol_type = other DNA
aacctatccatctattcttc

SEQ ID NO: 44306 - DNA, 20 bp, synthetic construct
  misc_feature 1..20: note = Description of Artificial Sequence: Synthetic oligonucleotide
  misc_feature 1..20: note = Target: SCN10A; (-) strand; PAM type: YTN; PAM sequence: TTT
  source 1..20: mol_type = other DNA
caacctatccatctattctt

SEQ ID NO: 44307 - DNA, 20 bp, synthetic construct
  misc_feature 1..20: note = Description of Artificial Sequence: Synthetic oligonucleotide
  misc_feature 1..20: note = Target: SCN10A; (-) strand; PAM type: YTN; PAM sequence: TTG
  source 1..20: mol_type = other DNA
tttcaacctatccatctatt

SEQ ID NO: 44308 - DNA, 20 bp, synthetic construct
  misc_feature 1..20: note = Description of Artificial Sequence: Synthetic oligonucleotide
  misc_feature 1..20: note = Target: SCN10A; (-) strand; PAM type: YTN; PAM sequence: CTT
  source 1..20: mol_type = other DNA
gtttcaacctatccatctat

SEQ ID NO: 44309 - DNA, 20 bp, synthetic construct
  misc_feature 1..20: note = Description of Artificial Sequence: Synthetic oligonucleotide
  misc_feature 1..20: note = Target: SCN10A; (-) strand; PAM type: YTN; PAM sequence: TTC
  source 1..20: mol_type = other DNA
ttgtttcaacctatccatct

SEQ ID NO: 44310 - DNA, 20 bp, synthetic construct
  misc_feature 1..20: note = Description of Artificial Sequence: Synthetic oligonucleotide
  misc_feature 1..20: note = Target: SCN10A; (-) strand; PAM type: YTN; PAM sequence: TTC
  source 1..20: mol_type = other DNA
cattcttgtttcaacctatc

SEQ ID NO: 44311 - DNA, 20 bp, synthetic construct
  misc_feature 1..20: note = Description of Artificial Sequence: Synthetic oligonucleotide
  misc_feature 1..20: note = Target: SCN10A; (-) strand; PAM type: YTN; PAM sequence: TTT
  source 1..20: mol_type = other DNA
ccattcttgtttcaacctat

SEQ ID NO: 44312 - DNA, 20 bp, synthetic construct
  misc_feature 1..20: note = Description of Artificial Sequence: Synthetic oligonucleotide
  misc_feature 1..20: note = Target: SCN10A; (-) strand; PAM type: YTN; PAM sequence: CTT
  source 1..20: mol_type = other DNA
tccattcttgtttcaaccta

SEQ ID NO: 44313 - DNA, 20 bp, synthetic construct
  misc_feature 1..20: note = Description of Artificial Sequence: Synthetic oligonucleotide
  misc_feature 1..20: note = Target: SCN10A; (-) strand; PAM type: YTN; PAM sequence: CTA
  source 1..20: mol_type = other DNA
tctttccattcttgtttcaa

SEQ ID NO: 44314 - DNA, 20 bp, synthetic construct
  misc_feature 1..20: note = Description of Artificial Sequence: Synthetic oligonucleotide
  misc_feature 1..20: note = Target: SCN10A; (-) strand; PAM type: YTN; PAM sequence: TTC
  source 1..20: mol_type = other DNA
tatctttccattcttgtttc

SEQ ID NO: 44315 - DNA, 20 bp, synthetic construct
  misc_feature 1..20: note = Description of Artificial Sequence: Synthetic oligonucleotide
  misc_feature 1..20: note = Target: SCN10A; (-) strand; PAM type: YTN; PAM sequence: CTT
  source 1..20: mol_type = other DNA
ctatctttccattcttgttt

SEQ ID NO: 44316 - DNA, 20 bp, synthetic construct
  misc_feature 1..20: note = Description of Artificial Sequence: Synthetic oligonucleotide
  misc_feature 1..20: note = Target: SCN10A; (-) strand; PAM type: YTN; PAM sequence: TTC
  source 1..20: mol_type = other DNA
ttctatctttccattcttgt

SEQ ID NO: 44317 - DNA, 20 bp, synthetic construct
  misc_feature 1..20: note = Description of Artificial Sequence: Synthetic oligonucleotide
  misc_feature 1..20: note = Target: SCN10A; (-) strand; PAM type: YTN; PAM sequence: CTC
  source 1..20: mol_type = other DNA
attcttctatctttccattc

SEQ ID NO: 44318 - DNA, 20 bp, synthetic construct
  misc_feature 1..20: note = Description of Artificial Sequence: Synthetic oligonucleotide
  misc_feature 1..20: note = Target: SCN10A; (-) strand; PAM type: YTN; PAM sequence: CTA
  source 1..20: mol_type = other DNA
tccactcattcttctatctt

SEQ ID NO: 44319 - DNA, 20 bp, synthetic construct
  misc_feature 1..20: note = Description of Artificial Sequence: Synthetic oligonucleotide
  misc_feature 1..20: note = Target: SCN10A; (-) strand; PAM type: YTN; PAM sequence: TTC
  source 1..20: mol_type = other DNA
tatccactcattcttctatc

SEQ ID NO: 44320 - DNA, 20 bp, synthetic construct
  misc_feature 1..20: note = Description of Artificial Sequence: Synthetic oligonucleotide
  misc_feature 1..20: note = Target: SCN10A; (-) strand; PAM type: YTN; PAM sequence: CTT
  source 1..20: mol_type = other DNA
ctatccactcattcttctat

SEQ ID NO: 44321 - DNA, 20 bp, synthetic construct
  misc_feature 1..20: note = Description of Artificial Sequence: Synthetic oligonucleotide
  misc_feature 1..20: note = Target: SCN10A; (-) strand; PAM type: YTN; PAM sequence: CTC
  source 1..20: mol_type = other DNA
atccttctatccactcattc

SEQ ID NO: 44322 - DNA, 20 bp, synthetic construct
  misc_feature 1..20: note = Description of Artificial Sequence: Synthetic oligonucleotide
  misc_feature 1..20: note = Target: SCN10A; (-) strand; PAM type: YTN; PAM sequence: CTC
  source 1..20: mol_type = other DNA
actcatccttctatccactc

SEQ ID NO: 44323 - DNA, 20 bp, synthetic construct
  misc_feature 1..20: note = Description of Artificial Sequence: Synthetic oligonucleotide
  misc_feature 1..20: note = Target: SCN10A; (-) strand; PAM type: YTN; PAM sequence: CTA
  source 1..20: mol_type = other DNA
ctcactcatccttctatcca

SEQ ID NO: 44324 - DNA, 20 bp, synthetic construct
  misc_feature 1..20: note = Description of Artificial Sequence: Synthetic oligonucleotide
  misc_feature 1..20: note = Target: SCN10A; (-) strand; PAM type: YTN; PAM sequence: TTC
  source 1..20: mol_type = other DNA
tactcactcatccttctatc

SEQ ID NO: 44325 - DNA, 20 bp, synthetic construct
  misc_feature 1..20: note = Description of Artificial Sequence: Synthetic oligonucleotide
  misc_feature 1..20: note = Target: SCN10A; (-) strand; PAM type: YTN; PAM sequence: CTT
  source 1..20: mol_type = other DNA
ctactcactcatccttctat

SEQ ID NO: 44326 - DNA, 20 bp, synthetic construct
  misc_feature 1..20: note = Description of Artificial Sequence: Synthetic oligonucleotide
  misc_feature 1..20: note = Target: SCN10A; (-) strand; PAM type: YTN; PAM sequence: TTC
  source 1..20: mol_type = other DNA
catccaagcatgcttctact

SEQ ID NO: 44327 - DNA, 20 bp, synthetic construct
  misc_feature 1..20: note = Description of Artificial Sequence: Synthetic oligonucleotide
  misc_feature 1..20: note = Target: SCN10A; (-) strand; PAM type: YTN; PAM sequence: CTT
  source 1..20: mol_type = other DNA
ccatccaagcatgcttctac

SEQ ID NO: 44328 - DNA, 20 bp, synthetic construct
  misc_feature 1..20: note = Description of Artificial Sequence: Synthetic oligonucleotide
  misc_feature 1..20: note = Target: SCN10A; (-) strand; PAM type: YTN; PAM sequence: TTC
  source 1..20: mol_type = other DNA
acgcatcttccatccaagca

SEQ ID NO: 44329 - DNA, 20 bp, synthetic construct
  misc_feature 1..20: note = Description of Artificial Sequence: Synthetic oligonucleotide
  misc_feature 1..20: note = Target: SCN10A; (-) strand; PAM type: YTN; PAM sequence: CTC
  source 1..20: mol_type = other DNA
attcacgcatcttccatcca

SEQ ID NO: 44330 - DNA, 20 bp, synthetic construct
  misc_feature 1..20: note = Description of Artificial Sequence: Synthetic oligonucleotide
  misc_feature 1..20: note = Target: SCN10A; (-) strand; PAM type: YTN; PAM sequence: TTC
  source 1..20: mol_type = other DNA
actcattcacgcatcttcca

SEQ ID NO: 44331 - DNA, 20 bp, synthetic construct
  misc_feature 1..20: note = Description of Artificial Sequence: Synthetic oligonucleotide
  misc_feature 1..20: note = Target: SCN10A; (-) strand; PAM type: YTN; PAM sequence: CTG
  source 1..20: mol_type = other DNA
ttcactcattcacgcatctt

SEQ ID NO: 44332 - DNA, 20 bp, synthetic construct
  misc_feature 1..20: note = Description of Artificial Sequence: Synthetic oligonucleotide
  misc_feature 1..20: note = Target: SCN10A; (-) strand; PAM type: YTN; PAM sequence: TTC
  source 1..20: mol_type = other DNA
tgttcactcattcacgcatc

SEQ ID NO: 44333 - DNA, 20 bp, synthetic construct
  misc_feature 1..20: note = Description of Artificial Sequence: Synthetic oligonucleotide
  misc_feature 1..20: note = Target: SCN10A; (-) strand; PAM type: YTN; PAM sequence: CTA
  source 1..20: mol_type = other DNA
acattctgttcactcattca

SEQ ID NO: 44334 - DNA, 20 bp, synthetic construct
  misc_feature 1..20: note = Description of Artificial Sequence: Synthetic oligonucleotide
  misc_feature 1..20: note = Target: SCN10A; (-) strand; PAM type: YTN; PAM sequence: CTG
  source 1..20: mol_type = other DNA
tccaatcatctaacattctg

SEQ ID NO: 44335 - DNA, 20 bp, synthetic construct
  misc_feature 1..20: note = Description of Artificial Sequence: Synthetic oligonucleotide
  misc_feature 1..20: note = Target: SCN10A; (-) strand; PAM type: YTN; PAM sequence: CTA
  source 1..20: mol_type = other DNA
tccaactgtccaatcatcta

SEQ ID NO: 44336 - DNA, 20 bp, synthetic construct
  misc_feature 1..20: note = Description of Artificial Sequence: Synthetic oligonucleotide
  misc_feature 1..20: note = Target: SCN10A; (-) strand; PAM type: YTN; PAM sequence: TTC
  source 1..20: mol_type = other DNA
tatccaactgtccaatcatc

SEQ ID NO: 44337 - DNA, 20 bp, synthetic construct
  misc_feature 1..20: note = Description of Artificial Sequence: Synthetic oligonucleotide
  misc_feature 1..20: note = Target: SCN10A; (-) strand; PAM type: YTN; PAM sequence: CTT
  source 1..20: mol_type = other DNA
ctatccaactgtccaatcat

SEQ ID NO: 44338 - DNA, 20 bp, synthetic construct
  misc_feature 1..20: note = Description of Artificial Sequence: Synthetic oligonucleotide
  misc_feature 1..20: note = Target: SCN10A; (-) strand; PAM type: YTN; PAM sequence: TTC
  source 1..20: mol_type = other DNA
ttctatccaactgtccaatc

SEQ ID NO: 44339 - DNA, 20 bp, synthetic construct
  misc_feature 1..20: note = Description of Artificial Sequence: Synthetic oligonucleotide
  misc_feature 1..20: note = Target: SCN10A; (-) strand; PAM type: YTN; PAM sequence: TTC
  source 1..20: mol_type = other DNA
attcttctatccaactgtcc

SEQ ID NO: 44340 - DNA, 20 bp, synthetic construct
  misc_feature 1..20: note = Description of Artificial Sequence: Synthetic oligonucleotide
  misc_feature 1..20: note = Target: SCN10A; (-) strand; PAM type: YTN; PAM sequence: TTG
  source 1..20: mol_type = other DNA
attcattcttctatccaact
